United States Patent Application Publication US 2006/0257851 A1 - sequence listing, part 5

SEQ ID NO: 138657 - RNA, 32 nt, Homo Sapiens
gcgaugagagggggcgcagccgcagccccgcg

SEQ ID NO: 138658 - RNA, 32 nt, Homo Sapiens
guggcuuccgcggaaagauuuggaggcggugg

SEQ ID NO: 138659 - RNA, 32 nt, Homo Sapiens
uucaucacagaaaagauaugauuucagauauu

SEQ ID NO: 138660 - RNA, 32 nt, Homo Sapiens
gaggagcucuccugggcggcugaagaaggagc

SEQ ID NO: 138661 - RNA, 27 nt, Homo Sapiens
cucaguuccugccccagcccccuuguu

SEQ ID NO: 138662 - RNA, 32 nt, Homo Sapiens
uagucgggcaacaugaaguaggacaguucugu

SEQ ID NO: 138663 - RNA, 32 nt, Homo Sapiens
agaugagaccaagagggaggaggggaaggacu

SEQ ID NO: 138664 - RNA, 32 nt, Homo Sapiens
caggagagaaagacauagcagagauggauguu

SEQ ID NO: 138665 - RNA, 27 nt, Homo Sapiens
cucagguccuucuccagcucuccuucu

SEQ ID NO: 138666 - RNA, 32 nt, Homo Sapiens
ugaauuugcauuuaaaaucuuaaugaauguuu

SEQ ID NO: 138667 - RNA, 32 nt, Homo Sapiens
acgggagcuguggacagagcucccucacuuca

SEQ ID NO: 138668 - RNA, 32 nt, Homo Sapiens
ucacccucuccagcaagagaaccccguggggu

SEQ ID NO: 138669 - RNA, 32 nt, Homo Sapiens
caguagguggggccuuuggaccuaccagcagu

SEQ ID NO: 138670 - RNA, 32 nt, Homo Sapiens
gagaaaguaacuauguugcugcuggagaucaa

SEQ ID NO: 138671 - RNA, 32 nt, Homo Sapiens
gcccaguggguucccgcccacucacccaggag

SEQ ID NO: 138672 - RNA, 32 nt, Homo Sapiens
gggucauucucacagucccucccuuucgguca

SEQ ID NO: 138673 - RNA, 32 nt, Homo Sapiens
ccaccgcgccuggccccgggccuuuauuuuua

SEQ ID NO: 138674 - RNA, 32 nt, Homo Sapiens
ugcccccgccgcggcggcgcuagccgccacug

SEQ ID NO: 138675 - RNA, 32 nt, Homo Sapiens
auaaguucauggaaugaaauggcuuucugccu

SEQ ID NO: 138676 - RNA, 32 nt, Homo Sapiens
aggcaaagaaugcacucugcaggccuggcaga

SEQ ID NO: 138677 - RNA, 32 nt, Homo Sapiens
ugcagaaggcuuuggguaggacuucggguguu

SEQ ID NO: 138678 - RNA, 32 nt, Homo Sapiens
cucuugauuauauacauguauguuguucuuau

SEQ ID NO: 138679 - RNA, 32 nt, Homo Sapiens
cacggggcgcugagacccccgcgucgcugccc

SEQ ID NO: 138680 - RNA, 32 nt, Homo Sapiens
uuacuuggggacccgggggagcugagauacag

SEQ ID NO: 138681 - RNA, 32 nt, Homo Sapiens
uuauaaucuuuuucucuuuaucuuucauaguu

SEQ ID NO: 138682 - RNA, 32 nt, Homo Sapiens
uaacuuaauaauggccccuaaacacaagagua

SEQ ID NO: 138683 - RNA, 32 nt, Homo Sapiens
uucuaaaacuaaaugggcacaagagaauuuuc

SEQ ID NO: 138684 - RNA, 32 nt, Homo Sapiens
ucuuacagauaaaacaacugaggcucagggag

SEQ ID NO: 138685 - RNA, 32 nt, Homo Sapiens
uguauauauguauuucuauauagacuuggaga

SEQ ID NO: 138686 - RNA, 32 nt, Homo Sapiens
uuuucaauucuauacuccauuuuauagaauug

SEQ ID NO: 138687 - RNA, 32 nt, Homo Sapiens
ccuuuggcuuugcauccuggacggggaguguc

SEQ ID NO: 138688 - RNA, 29 nt, Homo Sapiens
gcccaugacaaacaccgucuccagcgggc

SEQ ID NO: 138689 - RNA, 32 nt, Homo Sapiens
ccugguucgccaacgcgcgccggcgccucaag

SEQ ID NO: 138690 - RNA, 32 nt, Homo Sapiens
ccgcugcccaaccgccagccccagccccgcgc

SEQ ID NO: 138691 - RNA, 32 nt, Homo Sapiens
gacuacagugauuuagaguuguuuugauuggg

SEQ ID NO: 138692 - RNA, 32 nt, Homo Sapiens
agaacuaaauaauugaaaaauaugggcuauag

SEQ ID NO: 138693 - RNA, 32 nt, Homo Sapiens
aaaagaauaaaauuauuuaauguuuuaaaaaa

SEQ ID NO: 138694 - RNA, 32 nt, Homo Sapiens
auaaaauucuaaaaauaucugguucucuauua

SEQ ID NO: 138695 - RNA, 32 nt, Homo Sapiens
aaauucuucuauauuggcugguaaauugccau

SEQ ID NO: 138696 - RNA, 32 nt, Homo Sapiens
ggcggccacaccuggugcacagguggagcccg

SEQ ID NO: 138697 - RNA, 32 nt, Homo Sapiens
ucgggcacugaccccugccccugccugggccc

SEQ ID NO: 138698 - RNA, 32 nt, Homo Sapiens
gggcuccgccccagcccucagccccaggcccc

SEQ ID NO: 138699 - RNA, 32 nt, Homo Sapiens
acucucccccuccaacccccagccguccagag

SEQ ID NO: 138700 - RNA, 32 nt, Homo Sapiens
acagggucuaacaugagaguuggagucaaagc

SEQ ID NO: 138701 - RNA, 32 nt, Homo Sapiens
ccaagugcuaccacuucccaauaaaggaaugg

SEQ ID NO: 138702 - RNA, 32 nt, Homo Sapiens
gcugccccaucccgacccuccagcucauggug

SEQ ID NO: 138703 - RNA, 32 nt, Homo Sapiens
ugcacguuccaaauccugugucuccacgugug

SEQ ID NO: 138704 - RNA, 32 nt, Homo Sapiens
caauguacaagaaggcagcauuguaggauuaa

SEQ ID NO: 138705 - RNA, 32 nt, Homo Sapiens
cccaagcaaccucagccagugaguccaacguc

SEQ ID NO: 138706 - RNA, 32 nt, Homo Sapiens
gaccaccguuucuccuggcccuggggucaccu

SEQ ID NO: 138707 - RNA, 32 nt, Homo Sapiens
auaagccaggagaggaaggagcggcgggcagg

SEQ ID NO: 138708 - RNA, 32 nt, Homo Sapiens
ggaguugugaauguaacugguuaaugauacac

SEQ ID NO: 138709 - RNA, 32 nt, Homo Sapiens
cuuuaagaauaaauauuuuaacacaagugaaa

SEQ ID NO: 138710 - RNA, 32 nt, Homo Sapiens
acaaccccgggggcaggcgagggcgcccaguc

SEQ ID NO: 138711 - RNA, 32 nt, Homo Sapiens
aggcucaaggagaaacaaaauaaaaauuagcu

SEQ ID NO: 138712 - RNA, 32 nt, Homo Sapiens
aggaggaaagacuugguguuauuauagcagcc

SEQ ID NO: 138713 - RNA, 32 nt, Homo Sapiens
guacagaaccugguccugggggccccccgcua

SEQ ID NO: 138714 - RNA, 32 nt, Homo Sapiens
uuuucugagguaagugaaaagauggaacuggu

SEQ ID NO: 138715 - RNA, 32 nt, Homo Sapiens
agacaucuguugguaaaaucuacugggcauuu

SEQ ID NO: 138716 - RNA, 32 nt, Homo Sapiens
agucuagcaggcuaaagguuaauuguagugau

SEQ ID NO: 138717 - RNA, 32 nt, Homo Sapiens
ugagaacaaccugggcaacauggcgaaacccu

SEQ ID NO: 138718 - RNA, 32 nt, Homo Sapiens
ggucccccgccagcccgcggccgcgccaucaa

SEQ ID NO: 138719 - RNA, 32 nt, Homo Sapiens
aaacauuuccauaagcacuuucuagaagagug

SEQ ID NO: 138720 - RNA, 32 nt, Homo Sapiens
accacaguugccauuguggaagaaauuauuug

SEQ ID NO: 138721 - RNA, 32 nt, Homo Sapiens
ggccugcucugcaaccucccugcuauuccaug

SEQ ID NO: 138722 - RNA, 32 nt, Homo Sapiens
uuuguagaucccuuguaaaauaauaauaauaa

SEQ ID NO: 138723 - RNA, 32 nt, Homo Sapiens
aggagugaaggaggcaggugggaaaugguauu

SEQ ID NO: 138724 - RNA, 32 nt, Homo Sapiens
guggcggaguggggcgggaggcauggucucca

SEQ ID NO: 138725 - RNA, 32 nt, Homo Sapiens
uggcuagucacccccggggucccggccuucuc

SEQ ID NO: 138726 - RNA, 32 nt, Homo Sapiens
acgccaaguggaagaagagggagauagaagca

SEQ ID NO: 138727 - RNA, 32 nt, Homo Sapiens
accgggccuggagaacuagagaaggacccgga

SEQ ID NO: 138728 - RNA, 32 nt, Homo Sapiens
uaugccgugcuauguaaauauuuuauggauau

SEQ ID NO: 138729 - RNA, 32 nt, Homo Sapiens
agaaaaggauccugggguccuccagccaguuc

SEQ ID NO: 138730 - RNA, 32 nt, Homo Sapiens
aucugcauuuuaauucauguuggucaaagucg

SEQ ID NO: 138731 - RNA, 32 nt, Homo Sapiens
cgacauuccagaaguuaaucauuugaauucug

SEQ ID NO: 138732 - RNA, 32 nt, Homo Sapiens
cuuggagggggaggagcgccgaggcagugacu

SEQ ID NO: 138733 - RNA, 32 nt, Homo Sapiens
ucacaaacagccuacagccagaacuucugagc

SEQ ID NO: 138734 - RNA, 32 nt, Homo Sapiens
acucccugugguggcgaccaguaucuucaaac

SEQ ID NO: 138735 - RNA, 32 nt, Homo Sapiens
augauuuguaaauguuuguagcauuguuacuu

SEQ ID NO: 138736 - RNA, 32 nt, Homo Sapiens
ucuguggugaaugggggcucuauggugaaaag

SEQ ID NO: 138737 - RNA, 32 nt, Homo Sapiens
ccucacguguucgguacugagcagccacuacc

SEQ ID NO: 138738 - RNA, 32 nt, Homo Sapiens
uuguagauagagucuuuaacgagguaauuaag

SEQ ID NO: 138739 - RNA, 32 nt, Homo Sapiens
auguaucugaagauuccugagugggaauguug

SEQ ID NO: 138740 - RNA, 32 nt, Homo Sapiens
ugcagacaucucuggagccagagagaacaaca

SEQ ID NO: 138741 - RNA, 32 nt, Homo Sapiens
uuucaauguuggcuuccaaguuuuuuaauaag

SEQ ID NO: 138742 - RNA, 32 nt, Homo Sapiens
gcgcagacugauggcgcaaagguacgaugagc

SEQ ID NO: 138743 - RNA, 32 nt, Homo Sapiens
gcccaccucgggccuaccucagcccucacccc

SEQ ID NO: 138744 - RNA, 30 nt, Homo Sapiens
gcauggggagguggcaaucugguggcugcu

SEQ ID NO: 138745 - RNA, 32 nt, Homo Sapiens
gccaagaucgcaccacugcacuacagccuggg

SEQ ID NO: 138746 - RNA, 32 nt, Homo Sapiens
ugugauuuaguaugcuguaucgugggcugguu

SEQ ID NO: 138747 - RNA, 32 nt, Homo Sapiens
gacggggucugggugggcugggugcugggaau

SEQ ID NO: 138748 - RNA, 32 nt, Homo Sapiens
aauuggcccuguacaguuugcuuauuuauaaa

SEQ ID NO: 138749 - RNA, 32 nt, Homo Sapiens
ugcuccaguuugaucucccuucugccaccccu

SEQ ID NO: 138750 - RNA, 32 nt, Homo Sapiens
gccgccgccuccccgcaggugaucauccuccu

SEQ ID NO: 138751 - RNA, 32 nt, Homo Sapiens
uguggacacugacuuuggcucagaacuccgau

SEQ ID NO: 138752 - RNA, 32 nt, Homo Sapiens
gcugcguaauaaauuaccacagacuuaguagc

SEQ ID NO: 138753 - RNA, 26 nt, Homo Sapiens
cauguccugugcuaaauaugaauuca

SEQ ID NO: 138754 - RNA, 32 nt, Homo Sapiens
ugcugucucccucucugaccuaugccuaccuu

SEQ ID NO: 138755 - RNA, 32 nt, Homo Sapiens
uaucacaaaaauuccucccagaggcacucuau

SEQ ID NO: 138756 - RNA, 32 nt, Homo Sapiens
ucccuccauuuucucaacuguugccacuagaa

SEQ ID NO: 138757 - RNA, 32 nt, Homo Sapiens
ucacaugcuucuucuguguguauuucuuuuug

SEQ ID NO: 138758 - RNA, 32 nt, Homo Sapiens
aaugacaaaaguguaaucuguuagaaauaguu

SEQ ID NO: 138759 - RNA, 32 nt, Homo Sapiens
ggggauggugccuacuggggaccuugcuuucu

SEQ ID NO: 138760 - RNA, 32 nt, Homo Sapiens
acuuccuugcuucuccucccccaggaccaagu

SEQ ID NO: 138761 - RNA, 32 nt, Homo Sapiens
uacuauguucaagguuuguaagguuguuaaug

SEQ ID NO: 138762 - RNA, 32 nt, Homo Sapiens
cuccuagauguaacauuccugaucaagguaca

SEQ ID NO: 138763 - RNA, 32 nt, Homo Sapiens
ugagcccaggaggcagaauuugcagugagcug

SEQ ID NO: 138764 - RNA, 32 nt, Homo Sapiens
caugcuuuugggugggucccaggcccauagcu

SEQ ID NO: 138765 - RNA, 32 nt, Homo Sapiens
gcagauaggaggaggaagccaugucccagcag

SEQ ID NO: 138766 - RNA, 32 nt, Homo Sapiens
gccccuugaggcugcgggucuuucuuaagucc

SEQ ID NO: 138767 - RNA, 32 nt, Homo Sapiens
gggcaggcuggcuggcccgucauguuccucaa

SEQ ID NO: 138768 - RNA, 32 nt, Homo Sapiens
agguuuccgcugcccccuccacagcuguguga

SEQ ID NO: 138769 - RNA, 32 nt, Homo Sapiens
agggucuccugcagcccucugcuccucccggc

SEQ ID NO: 138770 - RNA, 32 nt, Homo Sapiens
uacaguuguuugcaugauuagucuuguguauc

SEQ ID NO: 138771 - RNA, 32 nt, Homo Sapiens
ggaaagggcuuugaaggaacuacuucagugca

SEQ ID NO: 138772 - RNA, 32 nt, Homo Sapiens
aaagucuuaacaacagcuucuugcuuguaaaa

SEQ ID NO: 138773 - RNA, 32 nt, Homo Sapiens
uguggauggaggaagcugucccugcccagugc

SEQ ID NO: 138774 - RNA, 32 nt, Homo Sapiens
uuggaucaguuuuugagaagugaaugugugug

SEQ ID NO: 138775 - RNA, 32 nt, Homo Sapiens
cggucgcacgccugggucccagcggaggccca

SEQ ID NO: 138776 - RNA, 32 nt, Homo Sapiens
aagggagaaggggacucccaccccugcccugc

SEQ ID NO: 138777 - RNA, 32 nt, Homo Sapiens
agcugguagagcuguacuuuuucuucacagcu

SEQ ID NO: 138778 - RNA, 32 nt, Homo Sapiens
uuaacaccaaaauguuuuauuuguuguggagu

SEQ ID NO: 138779 - RNA, 32 nt, Homo Sapiens
accgcgccugcccgggcuccgcgccaggagga

SEQ ID NO: 138780 - RNA, 32 nt, Homo Sapiens
cuugcuguuagcuggcagcugacgcugcuagg

SEQ ID NO: 138781 - RNA, 32 nt, Homo Sapiens
ucagcucccgcccgacggcagcgccgccgccg

SEQ ID NO: 138782 - RNA, 32 nt, Homo Sapiens
cgcgggcagcggugccgcgguccuucucagcg

SEQ ID NO: 138783 - RNA, 32 nt, Homo Sapiens
ccgugggcugguuuccuucagccccugaugcc

SEQ ID NO: 138784 - RNA, 32 nt, Homo Sapiens
gagggccacggcgcaccacgaguaucgguccc

SEQ ID NO: 138785 - RNA, 32 nt, Homo Sapiens
cuccccuuccccguccccuccucccgaagacg

SEQ ID NO: 138786 - RNA, 32 nt, Homo Sapiens
gcaaauuugcaaacaauugagagucguacagu

SEQ ID NO: 138787 - RNA, 32 nt, Homo Sapiens
ucuuucuacaggaaacaagggcucaggauucu

SEQ ID NO: 138788 - RNA, 30 nt, Homo Sapiens
gugugugucuguguuuaagcaagcguucgg

SEQ ID NO: 138789 - RNA, 32 nt, Homo Sapiens
cuguuucaguuauacuugugaauugugaucua

SEQ ID NO: 138790 - RNA, 32 nt, Homo Sapiens
gggaccccccucuuccucuccuggguuggggg

SEQ ID NO: 138791 - RNA, 32 nt, Homo Sapiens
cugugacgcucuggccuucucugcaccucaga

SEQ ID NO: 138792 - RNA, 32 nt, Homo Sapiens
cuuggacgcggcagaaugguucccgcaaagaa

SEQ ID NO: 138793 - RNA, 32 nt, Homo Sapiens
uccuugucacgaucacaggccuugcuuuugua

SEQ ID NO: 138794 - RNA, 32 nt, Homo Sapiens
agaaaggggaggaggagcuuaaugccgugcag

SEQ ID NO: 138795 - RNA, 32 nt, Homo Sapiens
acauguuuuugucuuacugaccucugauaacu

SEQ ID NO: 138796 - RNA, 32 nt, Homo Sapiens
ucagguagcgugaugccuccaguuuuguucuu

SEQ ID NO: 138797 - RNA, 32 nt, Homo Sapiens
acgccuuccaacucaaaauuagcaaucuaaag

SEQ ID NO: 138798 - RNA, 32 nt, Homo Sapiens
gcagggccugcgcgucuccggcuuccacccag

SEQ ID NO: 138799 - RNA, 32 nt, Homo Sapiens
ugucauuucuauuuuagcauuuuaucaaauua

SEQ ID NO: 138800 - RNA, 29 nt, Homo Sapiens
aagugaaagaguuucagaaggcaggagau

SEQ ID NO: 138801 - RNA, 32 nt, Homo Sapiens
caucaaaauccuggggaagagaauaacucauu

SEQ ID NO: 138802 - RNA, 32 nt, Homo Sapiens
cgccgcagccgccggcgcuguggagauauucu

SEQ ID NO: 138803 - RNA, 32 nt, Homo Sapiens
uauuaaaguucuuuuuauugcaguuuggaaag

SEQ ID NO: 138804 - RNA, 32 nt, Homo Sapiens
ugggaaugccagcgcgugccaagccuggggcu

SEQ ID NO: 138805 - RNA, 32 nt, Homo Sapiens
uccgagcucugguggcagcugagcccgcgggg

SEQ ID NO: 138806 - RNA, 32 nt, Homo Sapiens
gccguuccugcgacauggaccgcggccagccc

SEQ ID NO: 138807 - RNA, 32 nt, Homo Sapiens
ugccucugggaagaggggugggaaugacuuuu

SEQ ID NO: 138808 - RNA, 32 nt, Homo Sapiens
aucaaaugcuuguccuggcccgaugcaguggc

SEQ ID NO: 138809 - RNA, 32 nt, Homo Sapiens
guugaaaaaggguaaaaguuuucaggaauauu

SEQ ID NO: 138810 - RNA, 32 nt, Homo Sapiens
gauauuacuugaauaucauucuagcuguuuua

SEQ ID NO: 138811 - RNA, 32 nt, Homo Sapiens
caacugcuaugguggaaaaugcagcuuccagg

SEQ ID NO: 138812 - RNA, 32 nt, Homo Sapiens
ucaggucggggcugagugugggcgcgcgguuc

SEQ ID NO: 138813 - RNA, 32 nt, Homo Sapiens
ugacguguguaaacugcuagcacagugggacc

SEQ ID NO: 138814 - RNA, 32 nt, Homo Sapiens
aacuacugggagagaagaagauaagcuggaag

SEQ ID NO: 138815 - RNA, 32 nt, Homo Sapiens
gcugucgcaccgugagcguccuuccuccuucc

SEQ ID NO: 138816 - RNA, 32 nt, Homo Sapiens
ccuuagauuaggaugcucugguauuccugggg

SEQ ID NO: 138817 - RNA, 32 nt, Homo Sapiens
ccucuguccuugcuccuucucccugcagccua

SEQ ID NO: 138818 - RNA, 32 nt, Homo Sapiens
agggagugaacggaagggucagggcccuccuu

SEQ ID NO: 138819 - RNA, 32 nt, Homo Sapiens
ccgcacgccccugggguccgggugcugaggcg

SEQ ID NO: 138820 - RNA, 32 nt, Homo Sapiens
gcgccgcgcucguccgcagaggaggcggcccg

SEQ ID NO: 138821 - RNA, 32 nt, Homo Sapiens
cuguucccgcggccccaaggugccuguuguuc

SEQ ID NO: 138822 - RNA, 32 nt, Homo Sapiens
cuuucuaaauaccagcagaagaggcucccgcc

SEQ ID NO: 138823 - RNA, 32 nt, Homo Sapiens
cugccgccuucgcugugccgccggcggagggg

SEQ ID NO: 138824 - RNA, 32 nt, Homo Sapiens
acagcucccccggccuucagggcuccccagcc

SEQ ID NO: 138825 - RNA, 32 nt, Homo Sapiens
cugacugcaaacgaugagagugcacauggaga

SEQ ID NO: 138826 - RNA, 32 nt, Homo Sapiens
gaggacucauauauuuaagccuuuuguguaau

SEQ ID NO: 138827 - RNA, 32 nt, Homo Sapiens
ggcggggcacagugacucaugccuguaguaau

SEQ ID NO: 138828 - RNA, 32 nt, Homo Sapiens
uaggaggucagucccaucuuccaauuaaagau

SEQ ID NO: 138829 - RNA, 32 nt, Homo Sapiens
ugugcuagaacaaaaaugcaaugaaagaaaca

SEQ ID NO: 138830 - RNA, 32 nt, Homo Sapiens
ccuaaaaauuuucaggucuauuugaacagagu

SEQ ID NO: 138831 - RNA, 32 nt, Homo Sapiens
auuaguguuuacacauuuucucaguuauuuaa

SEQ ID NO: 138832 - RNA, 32 nt, Homo Sapiens
uucucuccugggcucaggcgcuucucccaccu

SEQ ID NO: 138833 - RNA, 32 nt, Homo Sapiens
ucaaacagcucccagaucugccugcagagcua

SEQ ID NO: 138834 - RNA, 32 nt, Homo Sapiens
gggggcaguggcggccguugucuagggcccgg

SEQ ID NO: 138835 - RNA, 32 nt, Homo Sapiens
cggacagcggugccgcccacgggcauggacgg

SEQ ID NO: 138836 - RNA, 32 nt, Homo Sapiens
gaaguucugggaaguaacuaagaucauacagc

SEQ ID NO: 138837 - RNA, 32 nt, Homo Sapiens
gauacaaggagauaaauguuguuuucaugcuu

SEQ ID NO: 138838 - RNA, 32 nt, Homo Sapiens
aaagagcaaaaauaauaucugcaguauuguuu

SEQ ID NO: 138839 - RNA, 32 nt, Homo Sapiens
augugagacuaugggaggaaagcuccggaaga

SEQ ID NO: 138840 - RNA, 32 nt, Homo Sapiens
augggggcgggggcgggggcggccgcuuccuc

SEQ ID NO: 138841 - RNA, 32 nt, Homo Sapiens
uguuucugacaucaaaggugaccgcugggcuu

SEQ ID NO: 138842 - RNA, 32 nt, Homo Sapiens
cuuuucaguguuaaguuuuuguuuacuuguuc

SEQ ID NO: 138843 - RNA, 32 nt, Homo Sapiens
ccgaggggcagagguggcucucggcccugcgc

SEQ ID NO: 138844 - RNA, 32 nt, Homo Sapiens
cacuuugggucuuuuuacauuaaauuucuuuu

SEQ ID NO: 138845 - RNA, 32 nt, Homo Sapiens
uucuucucucugccacccacauucccacaucc

SEQ ID NO: 138846 - RNA, 32 nt, Homo Sapiens
cgggcgaugcaggcuccgcgagcggcaccugc

SEQ ID NO: 138847 - RNA, 32 nt, Homo Sapiens
uguaguuccuucccuuguggcaugucauaaga

SEQ ID NO: 138848 - RNA, 32 nt, Homo Sapiens
cuaaaaugcuucacaugguuaaaaacaagcac

SEQ ID NO: 138849 - RNA, 31 nt, Homo Sapiens
uauaagaaugggaugcauguauaucagcaaa

SEQ ID NO: 138850 - RNA, 32 nt, Homo Sapiens
acaggauacaguuuuucuuuuucuuuccuuga

SEQ ID NO: 138851 - RNA, 31 nt, Homo Sapiens
gacagugcaaggugggagagaccaggggccc

SEQ ID NO: 138852 - RNA, 32 nt, Homo Sapiens
uauuguagcucaauacaaugugaauuuguuuu

SEQ ID NO: 138853 - RNA, 32 nt, Homo Sapiens
cagccuucugaccugcaaucaaggcuggggag

SEQ ID NO: 138854 - RNA, 32 nt, Homo Sapiens
gcgcugccugcagccugcagccugcagccucc

SEQ ID NO: 138855 - RNA, 32 nt, Homo Sapiens
gguccuguugaugucaccgaugaugcugagcg

SEQ ID NO: 138856 - RNA, 32 nt, Homo Sapiens
aacaaaaaacaauggaaaagaugaagcuggag

SEQ ID NO: 138857 - RNA, 32 nt, Homo Sapiens
gaggggcuggcggccgccuggaccugagcugc

SEQ ID NO: 138858 - RNA, 32 nt, Homo Sapiens
uacauuguuuacuacuuuacuaaugucuguga

SEQ ID NO: 138859 - RNA, 32 nt, Homo Sapiens
gaaaguuuuuauuuuccgucugggcucucgga

SEQ ID NO: 138860 - RNA, 32 nt, Homo Sapiens
acugaaacucuguggaauauaaacuuuuuaaa

SEQ ID NO: 138861 - RNA, 32 nt, Homo Sapiens
aaaaaguaaaaagcagaaaccuaaauuuuucu

SEQ ID NO: 138862 - RNA, 32 nt, Homo Sapiens
ugguucuccagaucuuuguggucauuucuuag

SEQ ID NO: 138863 - RNA, 32 nt, Homo Sapiens
guggcaggcuggugggcugggcgugggguuuu

SEQ ID NO: 138864 - RNA, 32 nt, Homo Sapiens
acaggaugauaaaauggagucaccuuauuuga

SEQ ID NO: 138865 - RNA, 32 nt, Homo Sapiens
ucuucaaacaacaaccaggaggaaaguaacua

SEQ ID NO: 138866 - RNA, 32 nt, Homo Sapiens
ggguagaaacuuagccacauccugguuugugu

SEQ ID NO: 138867 - RNA, 32 nt, Homo Sapiens
ggaagaaugacaauuuccuaccauugguguaa

SEQ ID NO: 138868 - RNA, 32 nt, Homo Sapiens
auuucuggccuuagcuucuccauccuccaccu

SEQ ID NO: 138869 - RNA, 32 nt, Homo Sapiens
ggaagaggaaaugugaaaucucuuaggccaag

SEQ ID NO: 138870 - RNA, 32 nt, Homo Sapiens
auauuuuucguuuugaauuaaaagcacuggcu

SEQ ID NO: 138871 - RNA, 31 nt, Homo Sapiens
aacgugcaggagguuuuucuaggcacugcgu

SEQ ID NO: 138872 - RNA, 32 nt, Homo Sapiens
ccugcccagcccagcccugcccccgggcacug

SEQ ID NO: 138873 - RNA, 32 nt, Homo Sapiens
aguauguucuaguaguuucuguaaaaauggca

SEQ ID NO: 138874 - RNA, 32 nt, Homo Sapiens
uuaauaauagggaugcuuuucaucucuaagga

SEQ ID NO: 138875 - RNA, 32 nt, Homo Sapiens
aggaccaggggagcaucuggggccugggaugg

SEQ ID NO: 138876 - RNA, 32 nt, Homo Sapiens
uuuucuuccuggaugauucuacuuacuggaua

SEQ ID NO: 138877 - RNA, 32 nt, Homo Sapiens
uguccacgaaaacugacuugccugcuuccucc

SEQ ID NO: 138878 - RNA, 32 nt, Homo Sapiens
cuuaaacuuauuuuuauuaugauuguauugau

SEQ ID NO: 138879 - RNA, 32 nt, Homo Sapiens
cauuccuucuauugcugagugguguuccaucu

SEQ ID NO: 138880 - RNA, 32 nt, Homo Sapiens
cccaaggaggagcagcagcaggcccuggagca

SEQ ID NO: 138881 - RNA, 32 nt, Homo Sapiens
auuucucaauaccugcuucacuugauaaucau

SEQ ID NO: 138882 - RNA, 32 nt, Homo Sapiens
gaggggcggaagggucccggcgcggggugagg

SEQ ID NO: 138883 - RNA, 32 nt, Homo Sapiens
gauucaacuguguugaaaucaaaccugccgca

SEQ ID NO: 138884 - RNA, 30 nt, Homo Sapiens
ggcggggaggaucccgcgggucccacugac

SEQ ID NO: 138885 - RNA, 32 nt, Homo Sapiens
aguaaaauugcgucccagauguuguggaacug

SEQ ID NO: 138886 - RNA, 32 nt, Homo Sapiens
gacccacacccuguagcaauaccaagugcuau

SEQ ID NO: 138887 - RNA, 32 nt, Homo Sapiens
cgccgcgcagccccggccgccaggccuuagcc

SEQ ID NO: 138888 - RNA, 32 nt, Homo Sapiens
uugcaccccuggacugugcauugucucagcug

SEQ ID NO: 138889 - RNA, 32 nt, Homo Sapiens
auagcaugaagaucgugggucuguguguccgu

SEQ ID NO: 138890 - RNA, 32 nt, Homo Sapiens
cauucuuuuugggcucccgagaacagggagau

SEQ ID NO: 138891 - RNA, 32 nt, Homo Sapiens
agauauauaucauauugguauucacuaaucug

SEQ ID NO: 138892 - RNA, 32 nt, Homo Sapiens
gugagaacucgugguacuucagugucccuccc

SEQ ID NO: 138893 - RNA, 32 nt, Homo Sapiens
aggccgcccggguggggcgcgggggucgcgaa

SEQ ID NO: 138894 - RNA, 32 nt, Homo Sapiens
aaucaacugggaaaaugaagaccugcuggaaa

SEQ ID NO: 138895 - RNA, 32 nt, Homo Sapiens
ggcgacugcgggccagcucuuccccuacuccc

SEQ ID NO: 138896 - RNA, 32 nt, Homo Sapiens
ccuggaccagcucgugccccaaaugaaugcca

SEQ ID NO: 138897 - RNA, 32 nt, Homo Sapiens
ugccaaagggaugcuuuauacacauaauacug

SEQ ID NO: 138898 - RNA, 32 nt, Homo Sapiens
gucggcguuuacccaggggccgggccagagac

SEQ ID NO: 138899 - RNA, 32 nt, Homo Sapiens
uaucucuuccucccuuucuacucucucuagug

SEQ ID NO: 138900 - RNA, 32 nt, Homo Sapiens
uacagauuuuuggagaaaggauuucugaggag

SEQ ID NO: 138901 - RNA, 32 nt, Homo Sapiens
gagcugaacagauaucaggaugaccugccugc

SEQ ID NO: 138902 - RNA, 32 nt, Homo Sapiens
accacggaaaggaaacaaggagucuggcuaau

SEQ ID NO: 138903 - RNA, 32 nt, Homo Sapiens
caauuucagguggucauagauucacucuguag

SEQ ID NO: 138904 - RNA, 32 nt, Homo Sapiens
aguagaauauaaaguaucaacaaguguaguua

SEQ ID NO: 138905 - RNA, 32 nt, Homo Sapiens
uggcuucugaagaaucccugaugucuuauugg

SEQ ID NO: 138906 - RNA, 31 nt, Homo Sapiens
ucggagagggcggcugggcggcggcggggcu

SEQ ID NO: 138907 - RNA, 32 nt, Homo Sapiens
gaauguaagcacuugguaaaaccuuaaguaau

SEQ ID NO: 138908 - RNA, 32 nt, Homo Sapiens
uugauuuggggauuuagaggcguuuuugaaaa

SEQ ID NO: 138909 - RNA, 32 nt, Homo Sapiens
cccuagacgccucgucuccucccgugucccuc

SEQ ID NO: 138910 - RNA, 32 nt, Homo Sapiens
ucuuuuuucuuucuuuuugucugacuggauua

SEQ ID NO: 138911 - RNA, 32 nt, Homo Sapiens
cgugcccuaccuuucuguucucuuccuugguu

SEQ ID NO: 138912 - RNA, 32 nt, Homo Sapiens
augaaguucuaaugucuguguuccaaaacaca

SEQ ID NO: 138913 - RNA, 32 nt, Homo Sapiens
cuucccaggccagcugcucaggcucggcaggu

SEQ ID NO: 138914 - RNA, 32 nt, Homo Sapiens
cugucagugucaccuugguuugcaaaacccau

SEQ ID NO: 138915 - RNA, 32 nt, Homo Sapiens
ucaaaaaggaagcucucaaagauaagaucauu

SEQ ID NO: 138916 - RNA, 32 nt, Homo Sapiens
caaacaccuccccagcccccagcccuccccgc

SEQ ID NO: 138917 - RNA, 28 nt, Homo Sapiens
ugccgcuggcggccguugccaggguagg

SEQ ID NO: 138918 - RNA, 32 nt, Homo Sapiens
acuguggaagcugccccuccccgaggacccgc

SEQ ID NO: 138919 - RNA, 32 nt, Homo Sapiens
guuuuguguugguuggugguuuucauaaucuu

SEQ ID NO: 138920 - RNA, 32 nt, Homo Sapiens
ccagcgacccucacagaaacacaaaagggagg

SEQ ID NO: 138921 - RNA, 32 nt, Homo Sapiens
uuuaaauuaagaaauaauaacaauuaaagggc

SEQ ID NO: 138922 - RNA, 32 nt, Homo Sapiens
ugcgcuacacgcuguccccgcugcuggagcug

SEQ ID NO: 138923 - RNA, 32 nt, Homo Sapiens
guuuuagaaaccgguugccuuagagguuagac

SEQ ID NO: 138924 - RNA, 32 nt, Homo Sapiens
aagcaccgagucaggugccugauacgcaguag

SEQ ID NO: 138925 - RNA, 32 nt, Homo Sapiens
ugauguuccguuuacagugacuugcuuugggg

SEQ ID NO: 138926 - RNA, 32 nt, Homo Sapiens
agggugaauaaagcagggaauauuuuagaacc

SEQ ID NO: 138927 - RNA, 32 nt, Homo Sapiens
auuucuggaaaaccgaguuccuucuggcuuau

SEQ ID NO: 138928 - RNA, 32 nt, Homo Sapiens
ggccuggaccccagccccuugcaccuccaugc

SEQ ID NO: 138929 - RNA, 32 nt, Homo Sapiens
cgaggaaggggagaaagccacaaccuucacca

SEQ ID NO: 138930 - RNA, 32 nt, Homo Sapiens
ccuccuguucaugcugaugacauuggauggcc

SEQ ID NO: 138931 - RNA, 32 nt, Homo Sapiens
ugaggagcccuacaauagcagcacauucagga

SEQ ID NO: 138932 - RNA, 32 nt, Homo Sapiens
agggauggcccacaacuggguccacauguaau

SEQ ID NO: 138933 - RNA, 32 nt, Homo Sapiens
aagaguuuaaacaggggcuacuggcagaaaaa

SEQ ID NO: 138934 - RNA, 27 nt, Homo Sapiens
gcauggcuccccugugccccagccccu

SEQ ID NO: 138935 - RNA, 32 nt, Homo Sapiens
ucaaugugaagcuguguguggugucaaaguuu

SEQ ID NO: 138936 - RNA, 31 nt, Homo Sapiens
uuccuggagccccagaaccccaacucccagc

SEQ ID NO: 138937 - RNA, 32 nt, Homo Sapiens
ggcugguuuagaacuccugaccucaggugauc

SEQ ID NO: 138938 - RNA, 32 nt, Homo Sapiens
agugccccaggaagaggaaguggcagggucug

SEQ ID NO: 138939 - RNA, 32 nt, Homo Sapiens
aauugucaguggucuuuuuuuauuuucugauu

SEQ ID NO: 138940 - RNA, 32 nt, Homo Sapiens
cuguguauaaauuuauucuaacauuuaauaaa

SEQ ID NO: 138941 - RNA, 32 nt, Homo Sapiens
gcaauccccccgcagcguccccgcgggcucug

SEQ ID NO: 138942 - RNA, 32 nt, Homo Sapiens
ccgcagggaaagguggagcgugagauugcccu

SEQ ID NO: 138943 - RNA, 32 nt, Homo Sapiens
uaguaucuccuccuuucuugcaugggauacag

SEQ ID NO: 138944 - RNA, 32 nt, Homo Sapiens
cuccucuucugccugccuuuggggauagguuu

SEQ ID NO: 138945 - RNA, 32 nt, Homo Sapiens
gcaccuuguuuccucagcacuuuaucucuaua

SEQ ID NO: 138946 - RNA, 32 nt, Homo Sapiens
ugaagaauacaaaggauggucugugggaaaau

SEQ ID NO: 138947 - RNA, 32 nt, Homo Sapiens
gaacacuggacccugcuuugccuguccguccu

SEQ ID NO: 138948 - RNA, 32 nt, Homo Sapiens
uggauggacaagggcuuuuggccacaggugug

SEQ ID NO: 138949 - RNA, 32 nt, Homo Sapiens
acggacguggcgcgugcugugggcgucgggcc

SEQ ID NO: 138950 - RNA, 32 nt, Homo Sapiens
guuguggagugggauuagaagacaggaggcgc

SEQ ID NO: 138951 - RNA, 32 nt, Homo Sapiens
ccuggauuuugaugaauacauuguacauuucu

SEQ ID NO: 138952 - RNA, 32 nt, Homo Sapiens
gaagaagaccucuaggaggagcuaguaggaau

SEQ ID NO: 138953 - RNA, 32 nt, Homo Sapiens
cauccuauucagcauccuggaacuuauguggg

SEQ ID NO: 138954 - RNA, 32 nt, Homo Sapiens
gcgggucggugguucauccauguauuucaacg

SEQ ID NO: 138955 - RNA, 32 nt, Homo Sapiens
cagcuuuggcuuugggaagccagacuccaggg

SEQ ID NO: 138956 - RNA, 32 nt, Homo Sapiens
uuccuggccucccagccacuuccucaccccca

SEQ ID NO: 138957 - RNA, 32 nt, Homo Sapiens
aagggcaauauuuuuugaucuccucuucucgu

SEQ ID NO: 138958 - RNA, 32 nt, Homo Sapiens
agucauguugcaaaucuuucugugaaacagau

SEQ ID NO: 138959 - RNA, 32 nt, Homo Sapiens
uagcagccaugccccugggagucaacuucaag

SEQ ID NO: 138960 - RNA, 32 nt, Homo Sapiens
gcacaucgcgcccucgggcccugccauguccc

SEQ ID NO: 138961 - RNA, 32 nt, Homo Sapiens
acacccgaggccuggugguggcggcggaucga

SEQ ID NO: 138962 - RNA, 32 nt, Homo Sapiens
agugaauaggaccaccucugccugcagauuuu

SEQ ID NO: 138963 - RNA, 32 nt, Homo Sapiens
ucugguuccugugucucccaauaaacucucug

SEQ ID NO: 138964 - RNA, 32 nt, Homo Sapiens
gaaaagcuaacaccgacugcccgccccucccc

SEQ ID NO: 138965 - RNA, 31 nt, Homo Sapiens
uccuuggaauacuaacagguauuucaucagu

SEQ ID NO: 138966 - RNA, 32 nt, Homo Sapiens
gaauugcaugaaaucagauugacuggaaugcu

SEQ ID NO: 138967 - RNA, 32 nt, Homo Sapiens
cuuugaccauaaaauaaugacaauaagcuguu

SEQ ID NO: 138968 - RNA, 32 nt, Homo Sapiens
guggugaguguuacaguucuuaaagguggugu

SEQ ID NO: 138969 - RNA, 32 nt, Homo Sapiens
cccacaggccccaggccaguguacgucagcca

SEQ ID NO: 138970 - RNA, 32 nt, Homo Sapiens
uuugcugucauguggaagaaaagagccuugga

SEQ ID NO: 138971 - RNA, 32 nt, Homo Sapiens
gggcggagcugcugcgcgccgagcgucgcauc

SEQ ID NO: 138972 - RNA, 32 nt, Homo Sapiens
ugggagcggagcagagcccggccggugcuccc

SEQ ID NO: 138973 - RNA, 32 nt, Homo Sapiens
gucucagaagagugcggagagaaggggcagga

SEQ ID NO: 138974 - RNA, 32 nt, Homo Sapiens
ugcagaaagagauugaagauauuuacauuuau

SEQ ID NO: 138975 - RNA, 32 nt, Homo Sapiens
uucacagcacaccauccuuagcacucugggug

SEQ ID NO: 138976 - RNA, 32 nt, Homo Sapiens
aaacauccauucaucaccauuuucucagcacc

SEQ ID NO: 138977 - RNA, 32 nt, Homo Sapiens
agcggaggcgauacggccuccucgccaacacu

SEQ ID NO: 138978 - RNA, 30 nt, Homo Sapiens
agcgcugccugggcuccgccggcucacuaa

SEQ ID NO: 138979 - RNA, 32 nt, Homo Sapiens
gaaaauaaaaauuggcuagaaucucaaguuau

SEQ ID NO: 138980 - RNA, 32 nt, Homo Sapiens
gcuauguaaauauauacauauauacauuuaau

SEQ ID NO: 138981 - RNA, 32 nt, Homo Sapiens
gguguguguaaaugagcagcucgucaggaguc

SEQ ID NO: 138982 - RNA, 32 nt, Homo Sapiens
ugcgcccugccagucugaccagcacaguccug

SEQ ID NO: 138983 - RNA, 32 nt, Homo Sapiens
aucggccaccgccaucccauccagcgagcauc

SEQ ID NO: 138984 - RNA, 32 nt, Homo Sapiens
ggcucuccaccgaaggcuggcucuagacuggu

SEQ ID NO: 138985 - RNA, 32 nt, Homo Sapiens
cuugacccagccguccucacagaugccgggug

SEQ ID NO: 138986 - RNA, 32 nt, Homo Sapiens
cccggcgagcgguugauggcgagggggcgcgg

SEQ ID NO: 138987 - RNA, 32 nt, Homo Sapiens
auuagcaggcaaaacuaugaugguuugugaua

SEQ ID NO: 138988 - RNA, 32 nt, Homo Sapiens
uggagauccgcggaggccgacaggauucguug

SEQ ID NO: 138989 - RNA, 32 nt, Homo Sapiens
caugcaucuauuuauaauucuaauuauuuugu

SEQ ID NO: 138990 - RNA, 32 nt, Homo Sapiens
aaccaccgagcuucaaugaggaccccagcccc

SEQ ID NO: 138991 - RNA, 32 nt, Homo Sapiens
uucagggauuuuauuuuuaauuuuaugagaca

SEQ ID NO: 138992 - RNA, 32 nt, Homo Sapiens
aaaaacguggcaaugccuuuaacugguccuca

SEQ ID NO: 138993 - RNA, 32 nt, Homo Sapiens
uuauggaucugugccacaggggauuuaugcug

SEQ ID NO: 138994 - RNA, 32 nt, Homo Sapiens
ugcaaguguacuuuuaaggccaucguuuguac

SEQ ID NO: 138995 - RNA, 32 nt, Homo Sapiens
cugguccuaccuugcacuuggugcugggggcu

SEQ ID NO: 138996 - RNA, 32 nt, Homo Sapiens
accuuucugaacauguacaccacccaaugcua

SEQ ID NO: 138997 - RNA, 32 nt, Homo Sapiens
auauuuaaauauauuucacuuucucuuugacu

SEQ ID NO: 138998 - RNA, 32 nt, Homo Sapiens
cggcggcggcugggcgggagccccagagggca

SEQ ID NO: 138999 - RNA, 32 nt, Homo Sapiens
aguuccuccauagcagccuucccuuuagucuc

SEQ ID NO: 139000 - RNA, 32 nt, Homo Sapiens
gcaggguccccauugccugcugcgcacccgga

SEQ ID NO: 139001 - RNA, 32 nt, Homo Sapiens
agcaucggaaagggcggcuggaggcucccgga

SEQ ID NO: 139002 - RNA, 32 nt, Homo Sapiens
ucauagcaaaaugagacaguguugaaaagaca

SEQ ID NO: 139003 - RNA, 32 nt, Homo Sapiens
uuuagccagccugcggacccagcccucugugc

SEQ ID NO: 139004 - RNA, 31 nt, Homo Sapiens
aucccucauuugauacuccaaaaccaucacc

SEQ ID NO: 139005 - RNA, 32 nt, Homo Sapiens
gggagugcuccauuuuccccaacagcgaauuu

SEQ ID NO: 139006 - RNA, 32 nt, Homo Sapiens
cugaccuuuuucugcgaaguucacguuaauac

SEQ ID NO: 139007 - RNA, 32 nt, Homo Sapiens
uccccugcuggcuggugacugucagagacccc

SEQ ID NO: 139008 - RNA, 32 nt, Homo Sapiens
ggggauucuacugucuugacauguaaauguca

SEQ ID NO: 139009 - RNA, 32 nt, Homo Sapiens
gauauucaguuuucuuuuuuucauuuaaacaa

SEQ ID NO: 139010 - RNA, 32 nt, Homo Sapiens
uuuuccuguagacccggcacccgacugcgcgg

SEQ ID NO: 139011 - RNA, 32 nt, Homo Sapiens
gaacacucagagaaaggggagaucugggccug

SEQ ID NO: 139012 - RNA, 30 nt, Homo Sapiens
ggucgaggcaggcgcccagcuggacgucca

SEQ ID NO: 139013 - RNA, 32 nt, Homo Sapiens
ugcccugucagccaauggcagcucuucucgga

SEQ ID NO: 139014 - RNA, 32 nt, Homo Sapiens
ggcggaggggucuuuuccuucuucuuuccuac

SEQ ID NO: 139015 - RNA, 32 nt, Homo Sapiens
cuggccuccugccugcaucccccuggggaaga

SEQ ID NO: 139016 - RNA, 32 nt, Homo Sapiens
aaaauauuugucauucaagucccuuuacauaa

SEQ ID NO: 139017 - RNA, 32 nt, Homo Sapiens
cccaagugagcucagcagcaugugcuaauagg

SEQ ID NO: 139018 - RNA, 32 nt, Homo Sapiens
uauuaacauuuacuucugguauggaacaacua

SEQ ID NO: 139019 - RNA, 32 nt, Homo Sapiens
ugggggucuauccuuucaugguauugcuacaa

SEQ ID NO: 139020 - RNA, 32 nt, Homo Sapiens
uguuuauuuuucccugcugugcccagaacauu

SEQ ID NO: 139021 - RNA, 32 nt, Homo Sapiens
gaagaacagaaguuuaaguuauuguuuaaugu

SEQ ID NO: 139022 - RNA, 31 nt, Homo Sapiens
aagagagagcgaccgccgccccgcgcucagg

SEQ ID NO: 139023 - RNA, 32 nt, Homo Sapiens
guguugggagaaugguucauuuuuguugaaau

SEQ ID NO: 139024 - RNA, 32 nt, Homo Sapiens
cugugugugucugaguacaugugcacacacgu

SEQ ID NO: 139025 - RNA, 32 nt, Homo Sapiens
aaggagcagaucuggugggcaggggccaucuc

SEQ ID NO: 139026 - RNA, 32 nt, Homo Sapiens
uccaucauccuccauguagcgccuguugugug

SEQ ID NO: 139027 - RNA, 32 nt, Homo Sapiens
auauugcuguuagaaaaagugaaauaaaaaua

SEQ ID NO: 139028 - RNA, 32 nt, Homo Sapiens
aauacccaauuauugcauaauuuaauaaccaa

SEQ ID NO: 139029 - RNA, 32 nt, Homo Sapiens
cuacauccuucuccgucccccaucccugggga

SEQ ID NO: 139030 - RNA, 32 nt, Homo Sapiens
cugcguguaguauguauccuuucuaggcuugg

SEQ ID NO: 139031 - RNA, 32 nt, Homo Sapiens
ugaaaaagaaaagagagaacagcccauaaugc

SEQ ID NO: 139032 - RNA, 32 nt, Homo Sapiens
cguuucauacccaaagcggaggccgucagcac

SEQ ID NO: 139033 - RNA, 32 nt, Homo Sapiens
ccauggauuuucuacuuauuucguuuuuggaa

SEQ ID NO: 139034 - RNA, 32 nt, Homo Sapiens
ccccaccgcccuccccacucucgggggugggc

SEQ ID NO: 139035 - RNA, 32 nt, Homo Sapiens
uccccucugaccagggacauccugaguuuggu

SEQ ID NO: 139036 - RNA, 32 nt, Homo Sapiens
guuugcgcgucucucugucccccuccccuccc

SEQ ID NO: 139037 - RNA, 32 nt, Homo Sapiens
uuuauuuuggugcacaaauacaaaguggaaac

SEQ ID NO: 139038 - RNA, 32 nt, Homo Sapiens
cagaagagggccucagaacucacaugucucuc

SEQ ID NO: 139039 - RNA, 32 nt, Homo Sapiens
acugggggaaaaggaugauggaaaaaucaccc

SEQ ID NO: 139040 - RNA, 32 nt, Homo Sapiens
gauugugaugguguaagagcuaauccucaucu

SEQ ID NO: 139041 - RNA, 29 nt, Homo Sapiens
aguuucaucuggggaugaaagcuauggaa

SEQ ID NO: 139042 - RNA, 32 nt, Homo Sapiens
cggcucgccucccagcagugcuauuuuuugcc

SEQ ID NO: 139043 - RNA, 32 nt, Homo Sapiens
guggagccgccagcugacaggacaucuuacaa

SEQ ID NO: 139044 - RNA, 32 nt, Homo Sapiens
ucucuguagcuuccucuucacugccccaguau

SEQ ID NO: 139045 - RNA, 32 nt, Homo Sapiens
cacuggcuaccuuguuuuugguuggcuuuugu

SEQ ID NO: 139046 - RNA, 32 nt, Homo Sapiens
acccuggaacuaaaaauggaaaaucagagcau

SEQ ID NO: 139047 - RNA, 32 nt, Homo Sapiens
uccuuauccgaaccccagucagaccgaucugc

SEQ ID NO: 139048 - RNA, 32 nt, Homo Sapiens
gaaauauagugauuuucaccugugcuuccauu

SEQ ID NO: 139049 - RNA, 32 nt, Homo Sapiens
uccggccguggccgagcgcgcggccguaagac

SEQ ID NO: 139050 - RNA, 32 nt, Homo Sapiens
ggugaggaggccagaccugcccugccccauug

SEQ ID NO: 139051 - RNA, 32 nt, Homo Sapiens
aggggggugaaguauuaaaaauaacuuuuuug

SEQ ID NO: 139052 - RNA, 32 nt, Homo Sapiens
caggccacccccucagccuccacagccugccc

SEQ ID NO: 139053 - RNA, 32 nt, Homo Sapiens
cugggucucacgggaccagcuagggguccagg

SEQ ID NO: 139054 - RNA, 32 nt, Homo Sapiens
ucuuuuaaugaaauauguggacugcucuagca

SEQ ID NO: 139055 - RNA, 32 nt, Homo Sapiens
caugccuuacgaaccaugccuuccucaguauc

SEQ ID NO: 139056 - RNA, 32 nt, Homo Sapiens
gggagcuggugugggugagcuuguuugcuuua

SEQ ID NO: 139057 - RNA, 32 nt, Homo Sapiens
cucccccuuggacuagagcggcugggcagagc

SEQ ID NO: 139058 - RNA, 32 nt, Homo Sapiens
agggagcuccagcucugugcuccucauucagu

SEQ ID NO: 139059 - RNA, 32 nt, Homo Sapiens
caguauuaucuaaaugaaugagccaaaaugac

SEQ ID NO: 139060 - RNA, 32 nt, Homo Sapiens
aagcugguaaauggaaugggacaguaauugau

SEQ ID NO: 139061 - RNA, 32 nt, Homo Sapiens
cagagagauaaaauuuuugcucaaaaccagaa

SEQ ID NO: 139062 - RNA, 32 nt, Homo Sapiens
agugauuacacuuuucucaaauugaaguuuaa

SEQ ID NO: 139063 - RNA, 32 nt, Homo Sapiens
guauuuuuggcagggagaaggugcgcaggccu

SEQ ID NO: 139064 - RNA, 32 nt, Homo Sapiens
gaccuguuuguccugagaaaacuguccgcucu

SEQ ID NO: 139065 - RNA, 32 nt, Homo Sapiens
gcugcgcucaaggccgccagccgcccgccgcc

SEQ ID NO: 139066 - RNA, 32 nt, Homo Sapiens
gggcucaggcugcgcuaagagccccgggugag

SEQ ID NO: 139067 - RNA, 32 nt, Homo Sapiens
gacuuagccgugcauugcaggcauggaggauu

SEQ ID NO: 139068 - RNA, 32 nt, Homo Sapiens
aaaauuauauucagaauaauagcaaucaggcc

SEQ ID NO: 139069 - RNA, 32 nt, Homo Sapiens
ugcccuagcccucagugccuccccucaacuuu

SEQ ID NO: 139070 - RNA, 32 nt, Homo Sapiens
cgggagcgcgugcgcccgaggacccggccgga

SEQ ID NO: 139071 - RNA, 32 nt, Homo Sapiens
ugccccuuagcagggccuggccaggcagagug

SEQ ID NO: 139072 - RNA, 32 nt, Homo Sapiens
gugcaggggauggcccugcugcugcuuccggg

SEQ ID NO: 139073 - RNA, 32 nt, Homo Sapiens
auuagcugggcaugguggcgcgugccuauagu

SEQ ID NO: 139074 - RNA, 32 nt, Homo Sapiens
uuguuuuuguuuguauuuuuuauuauuaauga

SEQ ID NO: 139075 - RNA, 32 nt, Homo Sapiens
guaggggcgccacgucgccgccugggcagcgu

SEQ ID NO: 139076 - RNA, 32 nt, Homo Sapiens
gccuggcccucccuaagcccuauaugccucac

SEQ ID NO: 139077 - RNA, 32 nt, Homo Sapiens
cucguccaggcugccccgcagcuccucacguu

SEQ ID NO: 139078 - RNA, 32 nt, Homo Sapiens
uggaccugguuccaccuuuccauuccaaacca

SEQ ID NO: 139079 - RNA, 32 nt, Homo Sapiens
caguuuauuuacuaugcaauagacauucauug

SEQ ID NO: 139080 - RNA, 32 nt, Homo Sapiens
aacgccauguucuugcagaaaacgcuuagccu

SEQ ID NO: 139081 - RNA, 32 nt, Homo Sapiens
uuaggcggcuccccggcggcuccuccgcggcg

SEQ ID NO: 139082 - RNA, 32 nt, Homo Sapiens
cucaggauaugcugaggccugggcguucccug

SEQ ID NO: 139083 - RNA, 32 nt, Homo Sapiens
ccugcagggccuuguuuuuguauuuggagaac

SEQ ID NO: 139084 - RNA, 32 nt, Homo Sapiens
uauuucuauugcaucaucaggaugcacauuuu

SEQ ID NO: 139085 - RNA, 30 nt, Homo Sapiens
uggggaauauaaaauuuugugaagacuugg

SEQ ID NO: 139086 - RNA, 32 nt, Homo Sapiens
ccccacccaagccucaccuccccaccccuuga

SEQ ID NO: 139087 - RNA, 31 nt, Homo Sapiens
ccugccccgggccccucagccuuaaaccccg

SEQ ID NO: 139088 - RNA, 32 nt, Homo Sapiens
gcuucugggaggggcgggcagacaugguggcg

SEQ ID NO: 139089 - RNA, 32 nt, Homo Sapiens
accuagaaaaagaagaaauugcuaaaugcaca

SEQ ID NO: 139090 - RNA, 32 nt, Homo Sapiens
acccagcuggaugaaaucaugguucugaaauc

SEQ ID NO: 139091 - RNA, 32 nt, Homo Sapiens
cugaggucggagaggaggggagccucacuucc

SEQ ID NO: 139092 - RNA, 32 nt, Homo Sapiens
ccaaagcgcgccccgagucggcgcccuucucc

SEQ ID NO: 139093 - RNA, 32 nt, Homo Sapiens
uguuugucucuuaaagcauuggugaaaucaca

SEQ ID NO: 139094 - RNA, 32 nt, Homo Sapiens
gguuucaccauguuggccaggcuggucuggaa

SEQ ID NO: 139095 - RNA, 32 nt, Homo Sapiens
uuggggccagcuggccugcugcucuccaguca

SEQ ID NO: 139096 - RNA, 32 nt, Homo Sapiens
gauacauaaccaguuuuaucucucucaagcuc

SEQ ID NO: 139097 - RNA, 32 nt, Homo Sapiens
ugugacagagggaagcauggcuggggggaggg

SEQ ID NO: 139098 - RNA, 32 nt, Homo Sapiens
aauaaauucucuccuaaugaugacuugagccc

SEQ ID NO: 139099 - RNA, 32 nt, Homo Sapiens
uaucuagaaauuaagauugaagcuaaaacacu

SEQ ID NO: 139100 - RNA, 32 nt, Homo Sapiens
cggggcugugagcggcucggggccgggggugg

SEQ ID NO: 139101 - RNA, 32 nt, Homo Sapiens
auuuuuguauaaaaauguaacuucuacguguc

SEQ ID NO: 139102 - RNA, 32 nt, Homo Sapiens
guucuuugauucagcccuuucaaacaugcuua

SEQ ID NO: 139103 - RNA, 32 nt, Homo Sapiens
ccacuaaguagauuuucuuagucugcuguauc

SEQ ID NO: 139104 - RNA, 32 nt, Homo Sapiens
gucuacccuccuucggaccccuaggaagcuuc

SEQ ID NO: 139105 - RNA, 32 nt, Homo Sapiens
ccucuaguucccuguauucaaaucccaguguc

SEQ ID NO: 139106 - RNA, 32 nt, Homo Sapiens
cacuuuccugaccaugcccauccacucagaga

SEQ ID NO: 139107 - RNA, 32 nt, Homo Sapiens
ugucucuuuguaucuucaguaauuuacuuggu

SEQ ID NO: 139108 - RNA, 32 nt, Homo Sapiens
aggccgcggugcugcgggccgcugugcuggcc

SEQ ID NO: 139109 - RNA, 32 nt, Homo Sapiens
aggagaaaucaucaugcuaugauaaaacacag

SEQ ID NO: 139110 - RNA, 32 nt, Homo Sapiens
uuauucuuguuuauucaaaugacugcaauaac

SEQ ID NO: 139111 - RNA, 32 nt, Homo Sapiens
cucuucagaaaaguuauggaguaguacuuugu

SEQ ID NO: 139112 - RNA, 32 nt, Homo Sapiens
guggaugucacguauuuugaaaugauagaacu

SEQ ID NO: 139113 - RNA, 32 nt, Homo Sapiens
uuguagacaaugauggcauuuuaugauuuuua

SEQ ID NO: 139114 - RNA, 32 nt, Homo Sapiens
uguuuagacaaguucaagacaagcgugucuuu

SEQ ID NO: 139115 - RNA, 32 nt, Homo Sapiens
uguggacuggcaccugggcugcuggagaaguc

SEQ ID NO: 139116 - RNA, 32 nt, Homo Sapiens
cuucuuaaaaauuuauaugauucaaaaccauu

SEQ ID NO: 139117 - RNA, 32 nt, Homo Sapiens
acauaaagaaaguuuuauuuguauuuuacuac

SEQ ID NO: 139118 - RNA, 30 nt, Homo Sapiens
aaaaccacuagaacucuccaucuuauuuuc

SEQ ID NO: 139119 - RNA, 32 nt, Homo Sapiens
gaccaauggaauuuuucuuaauaucauuauug

SEQ ID NO: 139120 - RNA, 32 nt, Homo Sapiens
ugaaagagccccacagagagugggucucgaug

SEQ ID NO: 139121 - RNA, 32 nt, Homo Sapiens
agcccucccacgggaaugacaauggauaaaag

SEQ ID NO: 139122 - RNA, 32 nt, Homo Sapiens
cuucugccaguggccuggggguguccaggcuc

SEQ ID NO: 139123 - RNA, 32 nt, Homo Sapiens
gccuaauuuacaagcuuggccuugaauuaaaa

SEQ ID NO: 139124 - RNA, 32 nt, Homo Sapiens
ugcuugggaaugccucuccuguugcauugguc

SEQ ID NO: 139125 - RNA, 32 nt, Homo Sapiens
uccagcguuuauucuuuuuuccuuuuuucaga

SEQ ID NO: 139126 - RNA, 28 nt, Homo Sapiens
caaguauaguggcccaggauguagugaa

SEQ ID NO: 139127 - RNA, 32 nt, Homo Sapiens
ucacucauuuccuucccaggaucuaggaccca

SEQ ID NO: 139128 - RNA, 32 nt, Homo Sapiens
gcggcuccccgacggccgcgggaccuaccagu

SEQ ID NO: 139129 - RNA, 32 nt, Homo Sapiens
cgcuagcgggagagggagcgggaucaccggcc

SEQ ID NO: 139130 - RNA, 32 nt, Homo Sapiens
ugaacuuauuuuuucuuaauucaaguugaacu

SEQ ID NO: 139131 - RNA, 32 nt, Homo Sapiens
acccccagcuccgacaugucgcccucuggucg

SEQ ID NO: 139132 - RNA, 32 nt, Homo Sapiens
ugaacccccuuuccccacaccucccccugcug

SEQ ID NO: 139133 - RNA, 32 nt, Homo Sapiens
uguaauacugucacuguucugccaaguuccaa

SEQ ID NO: 139134 - RNA, 32 nt, Homo Sapiens
cauaugucuguaccugggaaaccaucacuaca

SEQ ID NO: 139135 - RNA, 32 nt, Homo Sapiens
gagaggacuuugcuggguuucuuucugugaau

SEQ ID NO: 139136 - RNA, 32 nt, Homo Sapiens
ugccuuaguguguguuauugccauuucaaugu

SEQ ID NO: 139137 - RNA, 32 nt, Homo Sapiens
gccuggcgggcucuggucaccaugugucuauc

SEQ ID NO: 139138 - RNA, 32 nt, Homo Sapiens
auuucugcaauaaaacaagaagcuaagcggug

SEQ ID NO: 139139 - RNA, 32 nt, Homo Sapiens
uuggugggaaugguucuaauucuuauguuccu

SEQ ID NO: 139140 - RNA, 29 nt, Homo Sapiens
auacuggcuccaauacuacagaaugauag

SEQ ID NO: 139141 - RNA, 32 nt, Homo Sapiens
agaaaaggaaugaaaacugaugauauaagcgc

SEQ ID NO: 139142 - RNA, 32 nt, Homo Sapiens
guggcccuaaaauggugaaucagagcauaucu

SEQ ID NO: 139143 - RNA, 32 nt, Homo Sapiens
accgucuggggcucuucugggagcacggagca

SEQ ID NO: 139144 - RNA, 32 nt, Homo Sapiens
aauuguagaacaaaaugucaaaauaauguuuu

SEQ ID NO: 139145 - RNA, 32 nt, Homo Sapiens
cacugcgcuaaagcggggauguuccauugaau

SEQ ID NO: 139146 - RNA, 32 nt, Homo Sapiens
ggcaaguugaaauuauuaaaaauugauuugug

SEQ ID NO: 139147 - RNA, 32 nt, Homo Sapiens
ugaggucccauccacagcuggugcucagcugc

SEQ ID NO: 139148 - RNA, 32 nt, Homo Sapiens
guuuuggucaagggcguccugcauaaguaccu

SEQ ID NO: 139149 - RNA, 32 nt, Homo Sapiens
cccaagugcuuaaccauuucugauucaacguu

SEQ ID NO: 139150 - RNA, 32 nt, Homo Sapiens
gcugcucccguggccuggacacgcuggggagc

SEQ ID NO: 139151 - RNA, 32 nt, Homo Sapiens
uaagccuuuguggggagggaggccugcaaggu

SEQ ID NO: 139152 - RNA, 32 nt, Homo Sapiens
cuuggccaggagaggaggcaacaucauccugg

SEQ ID NO: 139153 - RNA, 32 nt, Homo Sapiens
uugggccucugacaaugcuucagaaguuguag

SEQ ID NO: 139154 - RNA, 32 nt, Homo Sapiens
acugcagaggagccaccugggcugggagaagg

SEQ ID NO: 139155 - RNA, 32 nt, Homo Sapiens
ucaggaauauaaauauuugguaauucugugua

SEQ ID NO: 139156 - RNA, 32 nt, Homo Sapiens
gggaggacgugguggcugaacucuaguggggc

SEQ ID NO: 139157 - RNA, 32 nt, Homo Sapiens
gcacagaguuaagcaggaaacaacaacaacau

SEQ ID NO: 139158 - RNA, 32 nt, Homo Sapiens
aaaggagcuugcccucccugggccccccaccu

SEQ ID NO: 139159 - RNA, 32 nt, Homo Sapiens
ggccuaagugaaaucuugauaacacugaacaa

SEQ ID NO: 139160 - RNA, 32 nt, Homo Sapiens
aacuuggaacuuuggguugacucgguuugagu

SEQ ID NO: 139161 - RNA, 32 nt, Homo Sapiens
auuuaacuaaaauuauauuagaaaccagauug

SEQ ID NO: 139162 - RNA, 32 nt, Homo Sapiens
ccccacccugaacaucccgcagggggaggggg

SEQ ID NO: 139163 - RNA, 32 nt, Homo Sapiens
uuugggaggagcucggaggccgcucgggcacc

SEQ ID NO: 139164 - RNA, 32 nt, Homo Sapiens
augagguaagaaauauauugacuuuauuucuu

SEQ ID NO: 139165 - RNA, 32 nt, Homo Sapiens
ccuuuuaaucaacuguagguuauuuaaaauaa

SEQ ID NO: 139166 - RNA, 32 nt, Homo Sapiens
cagucgcacgucugcuucccugaugaaggcuc

SEQ ID NO: 139167 - RNA, 32 nt, Homo Sapiens
uaaucucuaaaccauguuagguuaaaacaaaa

SEQ ID NO: 139168 - RNA, 32 nt, Homo Sapiens
gaaauuuguagguacuaucugucuuauuuugu

SEQ ID NO: 139169 - RNA, 32 nt, Homo Sapiens
ggcacagaccucuggcauggagacagaauggg

SEQ ID NO: 139170 - RNA, 32 nt, Homo Sapiens
ucauuuaguuuagguaucuucauacuguauuu

SEQ ID NO: 139171 - RNA, 32 nt, Homo Sapiens
aaauaugccuacuucaaaauauuugcauuuau

SEQ ID NO: 139172 - RNA, 32 nt, Homo Sapiens
ccggaccggccgcggccccuucccgaacgccg

SEQ ID NO: 139173 - RNA, 32 nt, Homo Sapiens
acaauagacuauuaaaaaaucaccuuuuaaac

SEQ ID NO: 139174 - RNA, 32 nt, Homo Sapiens
cccacgaugauaucuauauauguaucuacaau

SEQ ID NO: 139175 - RNA, 32 nt, Homo Sapiens
auuucgaucuuucaauaaagauacgcauucac

SEQ ID NO: 139176 - RNA, 32 nt, Homo Sapiens
cugaggucaggaguucgagaccacccugauca

SEQ ID NO: 139177 - RNA, 30 nt, Homo Sapiens
acacgucuuguucccacccaucgguuaugg

SEQ ID NO: 139178 - RNA, 32 nt, Homo Sapiens
cagaaugugucugaaaaaacauuguccucaaa

SEQ ID NO: 139179 - RNA, 32 nt, Homo Sapiens
agaaggagcgcggggccgucgcugucugcagu

SEQ ID NO: 139180 - RNA, 32 nt, Homo Sapiens
uguuuaugcuugaagugaaauguuuuacuuuu

SEQ ID NO: 139181 - RNA, 32 nt, Homo Sapiens
acuuuccagaaagugagauuuguuauguucug

SEQ ID NO: 139182 - RNA, 32 nt, Homo Sapiens
cagaugcuaugcaggcacugcagaccauaaag

SEQ ID NO: 139183 - RNA, 32 nt, Homo Sapiens
caguaguuucauuuccuuguccugcuuauucu

SEQ ID NO: 139184 - RNA, 32 nt, Homo Sapiens
cuccuuggauacuucagacucugguuacagau

SEQ ID NO: 139185 - RNA, 32 nt, Homo Sapiens
ugagcccccacgccuggccaacuugauuauau

SEQ ID NO: 139186 - RNA, 32 nt, Homo Sapiens
cucucccgggucaagggucuccaggucccgcu

SEQ ID NO: 139187 - RNA, 32 nt, Homo Sapiens
gcggcaacagaaaaagaaaagaugauaucaau

SEQ ID NO: 139188 - RNA, 32 nt, Homo Sapiens
cuggagcuggaaccuggcggccucgggugucc

SEQ ID NO: 139189 - RNA, 32 nt, Homo Sapiens
uugaauaagcuacuaggugaaaugcaaaacaa

SEQ ID NO: 139190 - RNA, 32 nt, Homo Sapiens
uuguaugcuuuccauccacucaccuuacccca

SEQ ID NO: 139191 - RNA, 32 nt, Homo Sapiens
guuuaaauaaaacuucauggacauuucauguc

SEQ ID NO: 139192 - RNA, 32 nt, Homo Sapiens
ucccaagaugagaggcuggaugugcuguuaac

SEQ ID NO: 139193 - RNA, 32 nt, Homo Sapiens
gcugacuguguauauaggauaauuaugaaaag

SEQ ID NO: 139194 - RNA, 32 nt, Homo Sapiens
gaggugcgccgccgucagugccugcagcuuuc

SEQ ID NO: 139195 - RNA, 32 nt, Homo Sapiens
cuguguucugggccugcugaggauggcagagc

SEQ ID NO: 139196 - RNA, 32 nt, Homo Sapiens
caacuaucaaggagcagagcugagguuugaug

SEQ ID NO: 139197 - RNA, 32 nt, Homo Sapiens
gguagauguaauaauaaagugaaaauauuaac

SEQ ID NO: 139198 - RNA, 32 nt, Homo Sapiens
gugaccaaaacacuuugaucauggcucagcca

SEQ ID NO: 139199 - RNA, 32 nt, Homo Sapiens
auccuagaagacaguaugauauuuucucuggc

SEQ ID NO: 139200 - RNA, 32 nt, Homo Sapiens
uuuuuugccggagucgagcgggugcugcuagc

SEQ ID NO: 139201 - RNA, 32 nt, Homo Sapiens
ucgucaguuuggugcauuugcugcugcuguug

SEQ ID NO: 139202 - RNA, 32 nt, Homo Sapiens
gagaaggguuuguaaaacuuuauugugaguga

SEQ ID NO: 139203 - RNA, 32 nt, Homo Sapiens
gagcuucguugauggucuuuucuguacuggag

SEQ ID NO: 139204 - RNA, 32 nt, Homo Sapiens
gacgaguugccggcggccgccccggccgacag

SEQ ID NO: 139205 - RNA, 31 nt, Homo Sapiens
cgagagugaaacaguuugaagcagagccaaa

SEQ ID NO: 139206 - RNA, 32 nt, Homo Sapiens
gcccccuguggcggccuuccgggucucgcagc

SEQ ID NO: 139207 - RNA, 32 nt, Homo Sapiens
uuucaauguacaauuauuuuuuacuacagauc

SEQ ID NO: 139208 - RNA, 32 nt, Homo Sapiens
cucgggccagcuuucugccugucugccugccg

SEQ ID NO: 139209 - RNA, 32 nt, Homo Sapiens
cacaacuauaggaaaugcuuagcugaugucau

SEQ ID NO: 139210 - RNA, 32 nt, Homo Sapiens
uccaguugcucuguguugcauacucucccccg

SEQ ID NO: 139211 - RNA, 32 nt, Homo Sapiens
ccacccugaggcucccacuccuccuucucugg

SEQ ID NO: 139212 - RNA, 32 nt, Homo Sapiens
aauguuugccuguugaacuucuuucuguuaug

SEQ ID NO: 139213 - RNA, 32 nt, Homo Sapiens
uagggagucgguuucucucuuaaagacacuca

SEQ ID NO: 139214 - RNA, 32 nt, Homo Sapiens
uccaucuuuaugucucuguguacccauuguuu

SEQ ID NO: 139215 - RNA, 32 nt, Homo Sapiens
ccgcagcccucgccgcccagugcccuucggcc

SEQ ID NO: 139216 - RNA, 32 nt, Homo Sapiens
uuaaaacuacaguagucacuucugcuagagug

SEQ ID NO: 139217 - RNA, 32 nt, Homo Sapiens
uggauaaaguuugguuguuugcucuuaaaaaa

SEQ ID NO: 139218 - RNA, 32 nt, Homo Sapiens
cccuccagccuggccuaacacuuggggagccc

SEQ ID NO: 139219 - RNA, 32 nt, Homo Sapiens
accuuacaugacagaagugauucagggauucc

SEQ ID NO: 139220 - RNA, 32 nt, Homo Sapiens
uauauguauaucuauuuaaaacuaauauauua

SEQ ID NO: 139221 - RNA, 32 nt, Homo Sapiens
ucccugcugccuccccggugacauggcugugc

SEQ ID NO: 139222 - RNA, 32 nt, Homo Sapiens
gugauggguguacguucuauuuccugugggag

SEQ ID NO: 139223 - RNA, 32 nt, Homo Sapiens
cucccucaggucggccacgggaccugacgcaa

SEQ ID NO: 139224 - RNA, 32 nt, Homo Sapiens
gauugaugugaacacuuuuuuuuggaugcacu

SEQ ID NO: 139225 - RNA, 32 nt, Homo Sapiens
gcauuccguaguauuauuuaauuaauuugggg

SEQ ID NO: 139226 - RNA, 32 nt, Homo Sapiens
ccucaagucaugcuuuugcuaucaccaaucau

SEQ ID NO: 139227 - RNA, 32 nt, Homo Sapiens
ugggaggacuuuacugugguucugccuucaca

SEQ ID NO: 139228 - RNA, 32 nt, Homo Sapiens
gagguagaucaugauuugggcggcaauguuug

SEQ ID NO: 139229 - RNA, 32 nt, Homo Sapiens
cauaucaaauacuuguugaauaaauacaugaa

SEQ ID NO: 139230 - RNA, 32 nt, Homo Sapiens
agacagaggggaggaggugggcauuuccuaca

SEQ ID NO: 139231 - RNA, 32 nt, Homo Sapiens
cuccuugccuggcuucuuccuccagcuauccu

SEQ ID NO: 139232 - RNA, 32 nt, Homo Sapiens
cuuccgcuccgccuaggguucccggccaggcc

SEQ ID NO: 139233 - RNA, 32 nt, Homo Sapiens
ccuucugcugcagcuuccugagucggcggagg

SEQ ID NO: 139234 - RNA, 32 nt, Homo Sapiens
aaucuaaaucauauaaucagaauucuauagug

SEQ ID NO: 139235 - RNA, 32 nt, Homo Sapiens
gggaagaaagagaauuauuuuuaacugaacgu

SEQ ID NO: 139236 - RNA, 32 nt, Homo Sapiens
guuugccagaguuugucuaccucuggguaucc

SEQ ID NO: 139237 - RNA, 32 nt, Homo Sapiens
ugcuagagggucaccugcaggaggccuggggc

SEQ ID NO: 139238 - RNA, 32 nt, Homo Sapiens
aucgggcccaggucucugggguugucuuaccg

SEQ ID NO: 139239 - RNA, 32 nt, Homo Sapiens
cauuaaaaauuuggaaauguaugccagcaaaa

SEQ ID NO: 139240 - RNA, 32 nt, Homo Sapiens
cuuuuuuauauuaaaaggauucaauauuuuuc

SEQ ID NO: 139241 - RNA, 32 nt, Homo Sapiens
ccagagaucccauuggggcugcagcugcacac

SEQ ID NO: 139242 - RNA, 32 nt, Homo Sapiens
guuggcuucaucaagcuccuugcgggguuggg

SEQ ID NO: 139243 - RNA, 32 nt, Homo Sapiens
gucuuauauauucuggauauauucuggauaca

SEQ ID NO: 139244 - RNA, 32 nt, Homo Sapiens
ucuccuuggugaagaacaucccaagccagaaa

SEQ ID NO: 139245 - RNA, 32 nt, Homo Sapiens
ccagcuuccccucccugucugguugggauuug

SEQ ID NO: 139246 - RNA, 32 nt, Homo Sapiens
acauuugaccuggucagccuuuuccaggugaa

SEQ ID NO: 139247 - RNA, 32 nt, Homo Sapiens
augagcagucacacuguuacuccacagcggag

SEQ ID NO: 139248 - RNA, 31 nt, Homo Sapiens
aagagauugagaaaauugguauaucaugcag

SEQ ID NO: 139249 - RNA, 32 nt, Homo Sapiens
uguucaggugaauaauaaaaucaaaaacuuuu

SEQ ID NO: 139250 - RNA, 32 nt, Homo Sapiens
acugcagccucugucucccgggcucaagcgau

SEQ ID NO: 139251 - RNA, 32 nt, Homo Sapiens
guggcuauuucuguggcuuacaacaauuuaac

SEQ ID NO: 139252 - RNA, 32 nt, Homo Sapiens
ucccaggaccagcagccacaagggcagggcug

SEQ ID NO: 139253 - RNA, 31 nt, Homo Sapiens
aacaggcugccgggccccgcuggccacgccg

SEQ ID NO: 139254 - RNA, 32 nt, Homo Sapiens
uuuuaaaaaaauuuauuuuuaugucaguaguu

SEQ ID NO: 139255 - RNA, 32 nt, Homo Sapiens
aucagugagaguacaugaugcugcuggugaaa

SEQ ID NO: 139256 - RNA, 32 nt, Homo Sapiens
uuguuccuuuauucugucucuuccuuugcuca

SEQ ID NO: 139257 - RNA, 32 nt, Homo Sapiens
ccgggagggcccggcggggaacggccgcgauc

SEQ ID NO: 139258 - RNA, 32 nt, Homo Sapiens
guagauaaaaauuuuuucguguuguagaaaag

SEQ ID NO: 139259 - RNA, 32 nt, Homo Sapiens
ucaguuccaaaaacucaaaaguugcagguucu

SEQ ID NO: 139260 - RNA, 28 nt, Homo Sapiens
uaagccauugugauuaggaugacuguua

SEQ ID NO: 139261 - RNA, 32 nt, Homo Sapiens
gagacgagacgacggcgcugcugcuggugaag

SEQ ID NO: 139262 - RNA, 32 nt, Homo Sapiens
agaguauuccacuuucuguguacucgaauugc

SEQ ID NO: 139263 - RNA, 32 nt, Homo Sapiens
gucagccgcgaucccacccccacaagcgucug

SEQ ID NO: 139264 - RNA, 32 nt, Homo Sapiens
uucuuaagcccuuugcucuggaggaaguucuc

SEQ ID NO: 139265 - RNA, 32 nt, Homo Sapiens
cuguacccaagcuucccucccccucuccuggg

SEQ ID NO: 139266 - RNA, 32 nt, Homo Sapiens
gugggggccccggcuuugagggaugccaccgg

SEQ ID NO: 139267 - RNA, 30 nt, Homo Sapiens
gagaguggaugauagaugcaaaauaauacc

SEQ ID NO: 139268 - RNA, 32 nt, Homo Sapiens
acaauaaagaugaaacaaaauuuaugaaacug

SEQ ID NO: 139269 - RNA, 32 nt, Homo Sapiens
agugaaugauuguggaugcauaaagaauaaau

SEQ ID NO: 139270 - RNA, 32 nt, Homo Sapiens
aacaugucagucugauggcuuuucuuguguag

SEQ ID NO: 139271 - RNA, 32 nt, Homo Sapiens
ugugucuggggguggggugugagugcguauga

SEQ ID NO: 139272 - RNA, 32 nt, Homo Sapiens
gaaaaauuacauagaugucauuauauuuauca

SEQ ID NO: 139273 - RNA, 32 nt, Homo Sapiens
auuguuaauuuucugacacgucuagaugugaa

SEQ ID NO: 139274 - RNA, 32 nt, Homo Sapiens
uuugaagaacaaagacaaaaauaggaaguugu

SEQ ID NO: 139275 - RNA, 32 nt, Homo Sapiens
augccccgcgcccccugagcugcagggcugug

SEQ ID NO: 139276 - RNA, 32 nt, Homo Sapiens
uuacuccauuagcuuggagccuggcuagcaac

SEQ ID NO: 139277 - RNA, 32 nt, Homo Sapiens
aagaggcuauaaauuauucacagcaguuggca

SEQ ID NO: 139278 - RNA, 32 nt, Homo Sapiens
ucucacugcucuuuucauucauguguugucau

SEQ ID NO: 139279 - RNA, 32 nt, Homo Sapiens
uuuuugaguuguuuuucuuauguuguugggug

SEQ ID NO: 139280 - RNA, 32 nt, Homo Sapiens
aauaaacagcuauuaaucacaguguauuagua

SEQ ID NO: 139281 - RNA, 32 nt, Homo Sapiens
cccaggaggcggagguuguauaggcugagauc

SEQ ID NO: 139282 - RNA, 32 nt, Homo Sapiens
aauuauaaauguuuuucacaucaggcuguucu

SEQ ID NO: 139283 - RNA, 32 nt, Homo Sapiens
gaagaaggcaucuggaggauaagcaaagccac

SEQ ID NO: 139284 - RNA, 32 nt, Homo Sapiens
ugacuucacagcagccacuugacuaauaccuu

SEQ ID NO: 139285 - RNA, 32 nt, Homo Sapiens
uuuuucucaggacaucucuggcaggugcauuu

SEQ ID NO: 139286 - RNA, 32 nt, Homo Sapiens
uaauagauagguaugguuuaaucuuuccauug

SEQ ID NO: 139287 - RNA, 32 nt, Homo Sapiens
ugguuugacaaggggaacuugauccuucaggg

SEQ ID NO: 139288 - RNA, 32 nt, Homo Sapiens
cuuccagaacgcugcgcucgggagagccucgg

SEQ ID NO: 139289 - RNA, 32 nt, Homo Sapiens
cucuugauuucugcugcaaaagacauauacac

SEQ ID NO: 139290 - RNA, 32 nt, Homo Sapiens
aauaucaccgacccuccuuuaugugagagaga

SEQ ID NO: 139291 - RNA, 32 nt, Homo Sapiens
aguccuaccccugcucggggccccacggaugc

SEQ ID NO: 139292 - RNA, 31 nt, Homo Sapiens
ccuugcuguugagucaguccaagggguuuua

SEQ ID NO: 139293 - RNA, 32 nt, Homo Sapiens
gcgagacggcccggcugcagcgagcgcuggac

SEQ ID NO: 139294 - RNA, 32 nt, Homo Sapiens
gucccugugucucuggugcccagcgagcugag

SEQ ID NO: 139295 - RNA, 32 nt, Homo Sapiens
gcgccgcccaaccgcgccccucgcgccuuuug

SEQ ID NO: 139296 - RNA, 32 nt, Homo Sapiens
aucagcagaaucacuuaauauuucauagaaca

SEQ ID NO: 139297 - RNA, 32 nt, Homo Sapiens
acacaaaagggaggggcgccgaccucaacaau

SEQ ID NO: 139298 - RNA, 32 nt, Homo Sapiens
cgcugcccucuggcagucaugcaccgcugucu

SEQ ID NO: 139299 - RNA, 32 nt, Homo Sapiens
ugaguuuuuuugcgguauaauaaauguaaauu

SEQ ID NO: 139300 - RNA, 32 nt, Homo Sapiens
acagagcacagaccaccuuuaguuagaugugg

SEQ ID NO: 139301 - RNA, 32 nt, Homo Sapiens
caggauuuacacaauuauaaucaccagcagug

SEQ ID NO: 139302 - RNA, 32 nt, Homo Sapiens
ggacauguuauaguuucuuucuuucuuucuuu

SEQ ID NO: 139303 - RNA, 32 nt, Homo Sapiens
ucacucucuuucugccagcauugaaggagcgu

SEQ ID NO: 139304 - RNA, 32 nt, Homo Sapiens
uuuacaccauuuauuucuuuuaucucuuccuu

SEQ ID NO: 139305 - RNA, 32 nt, Homo Sapiens
uaagagcuguaacacucauggcgaaggucugc

SEQ ID NO: 139306 - RNA, 32 nt, Homo Sapiens
gcccuuugacuucuaggaagaaaggucaaaaa

SEQ ID NO: 139307 - RNA, 32 nt, Homo Sapiens
agcuguaguccugaccuuccucuucuuuaacc

SEQ ID NO: 139308 - RNA, 32 nt, Homo Sapiens
aacccugccagccccaggacaggccacagcug

SEQ ID NO: 139309 - RNA, 32 nt, Homo Sapiens
aggguggugucugcauggguuacgugccaagu

SEQ ID NO: 139310 - RNA, 32 nt, Homo Sapiens
ccagaaauuauugauuuucaaguuuuaaaaaa

SEQ ID NO: 139311 - RNA, 32 nt, Homo Sapiens
acuguugagguucugucuuuuuucuucuuuuc

SEQ ID NO: 139312 - RNA, 32 nt, Homo Sapiens
uaguuuugccagcacccaagugcccuccccuc

SEQ ID NO: 139313 - RNA, 32 nt, Homo Sapiens
ccuugugucaucagcuaauagaucugaaagug

SEQ ID NO: 139314 - RNA, 32 nt, Homo Sapiens
uucuugguauacaugagagaggcuggcugcug

SEQ ID NO: 139315 - RNA, 32 nt, Homo Sapiens
gacuuccggggcgacgggcggcggcggagagg

SEQ ID NO: 139316 - RNA, 32 nt, Homo Sapiens
cggacgccugugcacccccagcccugccccuu

SEQ ID NO: 139317 - RNA, 32 nt, Homo Sapiens
ucuggacccccaggaggcuggugccagggaga

SEQ ID NO: 139318 - RNA, 31 nt, Homo Sapiens
ccgcaccugcauggacugccccgguucugug

SEQ ID NO: 139319 - RNA, 32 nt, Homo Sapiens
ccaggagccagaccuggcccggggacacaucu

SEQ ID NO: 139320 - RNA, 32 nt, Homo Sapiens
aucagccccgguuucucguuuuagagugaguu

SEQ ID NO: 139321 - RNA, 32 nt, Homo Sapiens
guucucuucaggagguccauguagaaggcagg

SEQ ID NO: 139322 - RNA, 32 nt, Homo Sapiens
acgacagccgcggaugucaaaucaucaaaaca

SEQ ID NO: 139323 - RNA, 32 nt, Homo Sapiens
cuggagcucggcggagcgcggcagccagggcc

SEQ ID NO: 139324 - RNA, 27 nt, Homo Sapiens
caauggggccgcggcggcugcugcugg

SEQ ID NO: 139325 - RNA, 32 nt, Homo Sapiens
gggcugcgcuggcagcggccgcugaggugcug

SEQ ID NO: 139326 - RNA, 32 nt, Homo Sapiens
guaucaaggaacuuaaaguggaagcaaaaaga

SEQ ID NO: 139327 - RNA, 32 nt, Homo Sapiens
auuuaugaagaauaaacuacuauagaaaguac

SEQ ID NO: 139328 - RNA, 29 nt, Homo Sapiens
agucauggaaucaagugcuaagaucaaac

SEQ ID NO: 139329 - RNA, 32 nt, Homo Sapiens
cuuuucacccucauucagaugaagggacucag

SEQ ID NO: 139330 - RNA, 32 nt, Homo Sapiens
uuauuuacagcuuuucuuuuccuggacucuac

SEQ ID NO: 139331 - RNA, 31 nt, Homo Sapiens
gcaucagagaucaugagagccuguaccacca

SEQ ID NO: 139332 - RNA, 32 nt, Homo Sapiens
cuucaccucccucuuugauuuuagaagcuaua

SEQ ID NO: 139333 - RNA, 32 nt, Homo Sapiens
gagaugcuucuagccucccaguaggaggcccc

SEQ ID NO: 139334 - RNA, 32 nt, Homo Sapiens
ggaccauguccagcugcagaaaaucccagugu

SEQ ID NO: 139335 - RNA, 32 nt, Homo Sapiens
ccggcgggcuccuggagccuggaggaggccga

SEQ ID NO: 139336 - RNA, 32 nt, Homo Sapiens
acggagcgcgcggcgcugcucggcugccagga

SEQ ID NO: 139337 - RNA, 32 nt, Homo Sapiens
gucacaguguuccguggccuagcuguaaccac

SEQ ID NO: 139338 - RNA, 32 nt, Homo Sapiens
ugagaaaacuagaggacugaaaaaacaaauuu

SEQ ID NO: 139339 - RNA, 32 nt, Homo Sapiens
acauaccuccauuacuaacaaugaaauaugaa

SEQ ID NO: 139340 - RNA, 32 nt, Homo Sapiens
auggugucagacuaaaggcaaacaaggacucu

SEQ ID NO: 139341 - RNA, 32 nt, Homo Sapiens
agcaacuacaauauuuagauaauuauaaaaac

SEQ ID NO: 139342 - RNA, 32 nt, Homo Sapiens
agcagucuuagaacaaaguuaaaauuaaaaag

SEQ ID NO: 139343 - RNA, 32 nt, Homo Sapiens
ugaaggucaggagcuauaguggagugaaugag

SEQ ID NO: 139344 - RNA, 32 nt, Homo Sapiens
uggacuggggaccagacgcagaugcccuggcu

SEQ ID NO: 139345 - RNA, 32 nt, Homo Sapiens
ccaaugggggaaguauucccuucuuuccuacu

SEQ ID NO: 139346 - RNA, 32 nt, Homo Sapiens
cuacgacuagauuugcaucuuuacguccugcg

SEQ ID NO: 139347 - RNA, 32 nt, Homo Sapiens
ccccacuccaugaaaugcagguucacuaaaug

SEQ ID NO: 139348 - RNA, 32 nt, Homo Sapiens
gguacccagaagugucccagcccaccacaccg

SEQ ID NO: 139349 - RNA, 32 nt, Homo Sapiens
ucaccuacuccagcucccaacuuuuguggacu

SEQ ID NO: 139350 - RNA, 32 nt, Homo Sapiens
ggauuuugccagcauagugcuccuggaccagc

SEQ ID NO: 139351 - RNA, 32 nt, Homo Sapiens
gcucaagaugucuugugucuguguggcuagau

SEQ ID NO: 139352 - RNA, 32 nt, Homo Sapiens
uaaaaguggcuucagaggaaaagcaagaaacg

SEQ ID NO: 139353 - RNA, 32 nt, Homo Sapiens
aacucagaauacuaaccuagacuaaucccagg

SEQ ID NO: 139354 - RNA, 32 nt, Homo Sapiens
gaugcugcauaauccaccuggguacuucagcc

SEQ ID NO: 139355 - RNA, 32 nt, Homo Sapiens
agcaggggacauuugggaugcccaggccgcag

SEQ ID NO: 139356 - RNA, 32 nt, Homo Sapiens
aaaauaaagcuacugaauuuauugccgcaaaa

SEQ ID NO: 139357 - RNA, 32 nt, Homo Sapiens
gccagugaguuguagauuuaugcuggaagaau

SEQ ID NO: 139358 - RNA, 32 nt, Homo Sapiens
gugaccauguuacucccuuccauuucacacaa

SEQ ID NO: 139359 - RNA, 32 nt, Homo Sapiens
gggcaccgugugcgacgauggcugggaccugg

SEQ ID NO: 139360 - RNA, 32 nt, Homo Sapiens
caggaugguaaacauggaauggcugcccuaug

SEQ ID NO: 139361 - RNA, 32 nt, Homo Sapiens
ugggaggcugugugcgcacgccugcggggcga

SEQ ID NO: 139362 - RNA, 29 nt, Homo Sapiens
uuaacauaaaguuguuuuuauaaggcuua

SEQ ID NO: 139363 - RNA, 32 nt, Homo Sapiens
gagacugugucugcuuucugccuccucuucca

SEQ ID NO: 139364 - RNA, 32 nt, Homo Sapiens
cuuggguuuggucaauggaaugcccuggcaca

SEQ ID NO: 139365 - RNA, 30 nt, Homo Sapiens
gcgauuggaugcggcggcggcggcggaucc

SEQ ID NO: 139366 - RNA, 32 nt, Homo Sapiens
gagcaccaaauauauauagggcauuguucugg

SEQ ID NO: 139367 - RNA, 32 nt, Homo Sapiens
cucagaaaacaaguauugucagguauucucuc

SEQ ID NO: 139368 - RNA, 32 nt, Homo Sapiens
cgggcgcacccucggcguuagccuucuuugug

SEQ ID NO: 139369 - RNA, 32 nt, Homo Sapiens
gagcucgggcccagccccaggcugcagcccau

SEQ ID NO: 139370 - RNA, 30 nt, Homo Sapiens
aggacucuggacuggguugccggaugguuc

SEQ ID NO: 139371 - RNA, 32 nt, Homo Sapiens
cucugcccaucccagcugcacccuagcucccu

SEQ ID NO: 139372 - RNA, 32 nt, Homo Sapiens
aguucaugagcuuaauacauagcuuucuuuua

SEQ ID NO: 139373 - RNA, 32 nt, Homo Sapiens
uggaugucaacagacaccaucuacuuauagga

SEQ ID NO: 139374 - RNA, 32 nt, Homo Sapiens
aauaugacagaaaacaacuauaaauaauagag

SEQ ID NO: 139375 - RNA, 32 nt, Homo Sapiens
gagucgggcguggggcgggcagggaguggagu

SEQ ID NO: 139376 - RNA, 32 nt, Homo Sapiens
uagaucuggaagggacccccguggugaguccu

SEQ ID NO: 139377 - RNA, 32 nt, Homo Sapiens
ccuuuugggggcggggggaggggaaaauuauu

SEQ ID NO: 139378 - RNA, 32 nt, Homo Sapiens
auuucugaagauuuuuucucaguaaaguagau

SEQ ID NO: 139379 - RNA, 32 nt, Homo Sapiens
aagaggcugacuuuuccaaauaaacauuuuuu

SEQ ID NO: 139380 - RNA, 32 nt, Homo Sapiens
gccgucgggauaggauccaggcauuucuuuua

SEQ ID NO: 139381 - RNA, 32 nt, Homo Sapiens
gagaacgcgagucccaggauccccggcaccca

SEQ ID NO: 139382 - RNA, 32 nt, Homo Sapiens
cuggcccccagcugaagggcccagcugcagcc

SEQ ID NO: 139383 - RNA, 32 nt, Homo Sapiens
agagagaaaaagauuguauuacuuuaaugauu

SEQ ID NO: 139384 - RNA, 30 nt, Homo Sapiens
gcccgucccugcucgggggcgcgcugagac

SEQ ID NO: 139385 - RNA, 30 nt, Homo Sapiens
cguagggccaggcgcgguggcucacuccug

SEQ ID NO: 139386 - RNA, 32 nt, Homo Sapiens
ugaggaaugugcaaaauccuuuuguucaaguu

SEQ ID NO: 139387 - RNA, 32 nt, Homo Sapiens
acacaaaugcaaagucaaguggagggcauuug

SEQ ID NO: 139388 - RNA, 32 nt, Homo Sapiens
gggccucaggaaugcuccugcugcugugaaga

SEQ ID NO: 139389 - RNA, 32 nt, Homo Sapiens
caggccgguggccgcugcgacacucuagguac

SEQ ID NO: 139390 - RNA, 32 nt, Homo Sapiens
uuugauuguaaauuuaaaucgccacacauggc

SEQ ID NO: 139391 - RNA, 32 nt, Homo Sapiens
auaggaaacaaaugccuuacagaugugccuag

SEQ ID NO: 139392 - RNA, 32 nt, Homo Sapiens
agggcagaagcauuuuaguuaauuguagauaa

SEQ ID NO: 139393 - RNA, 32 nt, Homo Sapiens
ggcacagcaccucguggccuggagccuggcug

SEQ ID NO: 139394 - RNA, 32 nt, Homo Sapiens
aagguuccacccaagagcucuucuacaagaaa

SEQ ID NO: 139395 - RNA, 32 nt, Homo Sapiens
ggauguguucuuuggcagcuugugagauuacu

SEQ ID NO: 139396 - RNA, 32 nt, Homo Sapiens
accacugcacuccagccugggcgacaaaguga

SEQ ID NO: 139397 - RNA, 32 nt, Homo Sapiens
cggugcccaagccaggggccuucgaccuggag

SEQ ID NO: 139398 - RNA, 32 nt, Homo Sapiens
cagggaaggccgggggcgcccgccggcccuag

SEQ ID NO: 139399 - RNA, 32 nt, Homo Sapiens
auguguuaugaguuugugaugucuggcugggg

SEQ ID NO: 139400 - RNA, 32 nt, Homo Sapiens
ccauccacacgcugcgcuuugcugcggucaca

SEQ ID NO: 139401 - RNA, 29 nt, Homo Sapiens
uaaaaguaaaauuuauauuuuccaagagu

SEQ ID NO: 139402 - RNA, 32 nt, Homo Sapiens
gcuggcuggcagaggagaaggcagucguuucc

SEQ ID NO: 139403 - RNA, 32 nt, Homo Sapiens
caguacgugggaaagguggaaugugcaauagg

SEQ ID NO: 139404 - RNA, 32 nt, Homo Sapiens
gauuuucucagugaaguucaaguucuggacuu

SEQ ID NO: 139405 - RNA, 32 nt, Homo Sapiens
gcccuaugagaggacggcugccccaccccguu

SEQ ID NO: 139406 - RNA, 32 nt, Homo Sapiens
uguucauggaagcuaaaaaauuuaccuccuuu

SEQ ID NO: 139407 - RNA, 32 nt, Homo Sapiens
ugcugcaggcugcggccgucagcccucgcucg

SEQ ID NO: 139408 - RNA, 32 nt, Homo Sapiens
ucccuuuaacugugccucaguguggguuaggg

SEQ ID NO: 139409 - RNA, 32 nt, Homo Sapiens
gccuggugcagggcucccgugagcagacggcc

SEQ ID NO: 139410 - RNA, 32 nt, Homo Sapiens
cacugcacuccagcccaggugacagugugaga

SEQ ID NO: 139411 - RNA, 32 nt, Homo Sapiens
uuuggaucauguuuguuaaaucuuuuaaccag

SEQ ID NO: 139412 - RNA, 32 nt, Homo Sapiens
uauuuuauuugcuuauuuuuuauaauuaaaga

SEQ ID NO: 139413 - RNA, 32 nt, Homo Sapiens
ucaaccagcucuuuuacaucuugcucuuccca

SEQ ID NO: 139414 - RNA, 32 nt, Homo Sapiens
gauuuuuaauuuuuuuuuuuuauuaaaagaua

SEQ ID NO: 139415 - RNA, 32 nt, Homo Sapiens
gcaccugcggagaggggcugugagcucuggcg

SEQ ID NO: 139416 - RNA, 32 nt, Homo Sapiens
uccggcggccccagcuccagcccagccagcac

SEQ ID NO: 139417 - RNA, 32 nt, Homo Sapiens
gcccagagggugggagccuaaggaagcguggg

SEQ ID NO: 139418 - RNA, 32 nt, Homo Sapiens
cuauuuuacuguucuucagauuuaguacuugu

SEQ ID NO: 139419 - RNA, 32 nt, Homo Sapiens
auuacauuugucguauuucgcuccaauguaaa

SEQ ID NO: 139420 - RNA, 32 nt, Homo Sapiens
ccggcaaagguuuuucccuccucccccggccg

SEQ ID NO: 139421 - RNA, 32 nt, Homo Sapiens
agcagacacuucuccuaauccuccucaauucc

SEQ ID NO: 139422 - RNA, 32 nt, Homo Sapiens
ugacagucuucuagaagagagaaggaggaaaa

SEQ ID NO: 139423 - RNA, 32 nt, Homo Sapiens
uuguuaauauugcaucucagauguguucuugu

SEQ ID NO: 139424 - RNA, 32 nt, Homo Sapiens
acgugucggggaggagccgggcgcggagguac

SEQ ID NO: 139425 - RNA, 32 nt, Homo Sapiens
aucccaccaugauugaugugggguaaauauua

SEQ ID NO: 139426 - RNA, 32 nt, Homo Sapiens
guucauaaaacauggacugaugggucugcucc

SEQ ID NO: 139427 - RNA, 32 nt, Homo Sapiens
caaccuggccccagauucugccucugcacuuu

SEQ ID NO: 139428 - RNA, 32 nt, Homo Sapiens
gccuuuuuucuuuuucucuugcuucuaagggg

SEQ ID NO: 139429 - RNA, 32 nt, Homo Sapiens
cagcggucccgcccaacgcccgacucugugac

SEQ ID NO: 139430 - RNA, 32 nt, Homo Sapiens
cugaccaccaaaagcagucacugcaaaucuuu

SEQ ID NO: 139431 - RNA, 32 nt, Homo Sapiens
ugacuuguuaaaauuagaauaugucuugcagu

SEQ ID NO: 139432 - RNA, 32 nt, Homo Sapiens
ggcacccaggacuuugcucugccugguggagg

SEQ ID NO: 139433 - RNA, 32 nt, Homo Sapiens
cuacccaaacucccgagucuccgagcucaaua

SEQ ID NO: 139434 - RNA, 32 nt, Homo Sapiens
ggaggaggggcucaaggaagggggguuccaug

SEQ ID NO: 139435 - RNA, 32 nt, Homo Sapiens
uccaaggcccaaacgauuaccaaacauuccuc

SEQ ID NO: 139436 - RNA, 32 nt, Homo Sapiens
auuuucauuguuaaaacuccuuucagacauau

SEQ ID NO: 139437 - RNA, 32 nt, Homo Sapiens
aagucaucccuauuuccuuguuuuacugcacu

SEQ ID NO: 139438 - RNA, 32 nt, Homo Sapiens
ccacccaacuccuucccaacccuccccuccag

SEQ ID NO: 139439 - RNA, 32 nt, Homo Sapiens
guccccacccucugccccccagcccucuggcg

SEQ ID NO: 139440 - RNA, 32 nt, Homo Sapiens
uagcgugcaccuguaauccuagcuacccggaa

SEQ ID NO: 139441 - RNA, 32 nt, Homo Sapiens
acugccgcccagggcuggccucuuggugcugg

SEQ ID NO: 139442 - RNA, 32 nt, Homo Sapiens
aagacaugggugaugccuggcacauguugucu

SEQ ID NO: 139443 - RNA, 32 nt, Homo Sapiens
cuagcuacuuggaguugucuguaauaaucuug

SEQ ID NO: 139444 - RNA, 32 nt, Homo Sapiens
aaucugaauguaacccaguuuacuuuauaagg

SEQ ID NO: 139445 - RNA, 32 nt, Homo Sapiens
cccacuggagugaaaugugucacuggauaucu

SEQ ID NO: 139446 - RNA, 32 nt, Homo Sapiens
uaucuuuugaauucuugauaaaugacuguuuu

SEQ ID NO: 139447 - RNA, 32 nt, Homo Sapiens
auggaggaggcacaauucucuaaugcuggacg

SEQ ID NO: 139448 - RNA, 32 nt, Homo Sapiens
ggaucuacuugcugguuuuucuuuuugaucca

SEQ ID NO: 139449 - RNA, 32 nt, Homo Sapiens
gcugcagacagaggaagaaaguuuauggauuu

SEQ ID NO: 139450 - RNA, 32 nt, Homo Sapiens
augcaagugagagcuuccugagcuuucuccug

SEQ ID NO: 139451 - RNA, 32 nt, Homo Sapiens
uuuccaaaaugaaaguuacuugaggcagcucu

SEQ ID NO: 139452 - RNA, 32 nt, Homo Sapiens
gacaauaguuuuuaaaagaauuucauagauau

SEQ ID NO: 139453 - RNA, 27 nt, Homo Sapiens
ggaccagccuucuuccucccaccaugg

SEQ ID NO: 139454 - RNA, 32 nt, Homo Sapiens
aauaggcucaucuaccucuaccucugggggcc

SEQ ID NO: 139455 - RNA, 27 nt, Homo Sapiens
ugcggcuccggcggcggcggagacuag

SEQ ID NO: 139456 - RNA, 32 nt, Homo Sapiens
cauccaccuggcucugggccaagccaccaauc

SEQ ID NO: 139457 - RNA, 32 nt, Homo Sapiens
cugggccugaccggccccccagccccuacacc

SEQ ID NO: 139458 - RNA, 32 nt, Homo Sapiens
cuggaccggcccgcccgcccagccccucgacc

SEQ ID NO: 139459 - RNA, 32 nt, Homo Sapiens
gguaacccgggcugggcgggggagaggaaggg

SEQ ID NO: 139460 - RNA, 32 nt, Homo Sapiens
uuucauuggugcccucugaacucuguggguug

SEQ ID NO: 139461 - RNA, 30 nt, Homo Sapiens
uggccuuuguaagugcaggaaaccgaguag

SEQ ID NO: 139462 - RNA, 32 nt, Homo Sapiens
ucucaacuaauaggugcaauuugggaaaauca

SEQ ID NO: 139463 - RNA, 28 nt, Homo Sapiens
caucagcuauuucucaggaugacccugc

SEQ ID NO: 139464 - RNA, 32 nt, Homo Sapiens
aggguggcauugcuuuuauagauucuugauuu

SEQ ID NO: 139465 - RNA, 32 nt, Homo Sapiens
gaggguugggcccggcucccagccccucgccg

SEQ ID NO: 139466 - RNA, 32 nt, Homo Sapiens
uaauuuuaagcuuuauacuuuggucuaugacc

SEQ ID NO: 139467 - RNA, 32 nt, Homo Sapiens
ugcucuagacauuacaguuauuugaguguuac

SEQ ID NO: 139468 - RNA, 32 nt, Homo Sapiens
ccagcugcaggcacuaagaagcuccuccccug

SEQ ID NO: 139469 - RNA, 32 nt, Homo Sapiens
gauaaugcaagugucaucuacaucuggcaaaa

SEQ ID NO: 139470 - RNA, 32 nt, Homo Sapiens
uggccuuagcaaacagaugaguccguugacuu

SEQ ID NO: 139471 - RNA, 32 nt, Homo Sapiens
cuccugcggcucugcgggcaggacgggcagga

SEQ ID NO: 139472 - RNA, 32 nt, Homo Sapiens
gccgggggugggaugccaggacacccccuccc

SEQ ID NO: 139473 - RNA, 32 nt, Homo Sapiens
gguugacagaggaaagcagaggcgcgcaggag

SEQ ID NO: 139474 - RNA, 27 nt, Homo Sapiens
agauggaggaggaggguggcagcagcg

SEQ ID NO: 139475 - RNA, 32 nt, Homo Sapiens
aaaagugggaaacguuauuacuuaaugguuac

SEQ ID NO: 139476 - RNA, 32 nt, Homo Sapiens
ucauaauaaaauuuagucagccaagaaauuaa

SEQ ID NO: 139477 - RNA, 32 nt, Homo Sapiens
aaggcgcuggcggccggcggcugccccaguuc

SEQ ID NO: 139478 - RNA, 32 nt, Homo Sapiens
ucaggucaccgaaguaggacagcaaauuaaaa

SEQ ID NO: 139479 - RNA, 32 nt, Homo Sapiens
uugcagagugggauugugggagggauuggcag

SEQ ID NO: 139480 - RNA, 32 nt, Homo Sapiens
gguuuccauggcaacugcuugcuccuuugaau

SEQ ID NO: 139481 - RNA, 32 nt, Homo Sapiens
ucuguguaaauauuuuuucuacuuuuaagguu

SEQ ID NO: 139482 - RNA, 32 nt, Homo Sapiens
ccagcuggagggcaagugggccgugcugggaa

SEQ ID NO: 139483 - RNA, 32 nt, Homo Sapiens
ugagcccugcccacaagggggccucaugacau

SEQ ID NO: 139484 - RNA, 32 nt, Homo Sapiens
ccgagcugguaggcauuccagcuccuccgugc

SEQ ID NO: 139485 - RNA, 32 nt, Homo Sapiens
cccugggaguuugaucucuuaagggaacuugc

SEQ ID NO: 139486 - RNA, 32 nt, Homo Sapiens
ugucaaucuauuauauauuuguacaaucuggu

SEQ ID NO: 139487 - RNA, 32 nt, Homo Sapiens
uuuuuaaaaacuauucuuucugaacuuaucua

SEQ ID NO: 139488 - RNA, 32 nt, Homo Sapiens
ucuggggaccugcagcagcaugucuggcaaac

SEQ ID NO: 139489 - RNA, 32 nt, Homo Sapiens
augaaucaagcaauccagccucaugggaaguc

SEQ ID NO: 139490 - RNA, 32 nt, Homo Sapiens
ugggccucagcgcucugcugcaguggauccca

SEQ ID NO: 139491 - RNA, 32 nt, Homo Sapiens
augcuauuucuagaaaaagucuagugccaaau

SEQ ID NO: 139492 - RNA, 32 nt, Homo Sapiens
agggaaacuugacuaauguaaugauugucaca

SEQ ID NO: 139493 - RNA, 32 nt, Homo Sapiens
gauggaggcagacaagaugcucagagcgacua

SEQ ID NO: 139494 - RNA, 32 nt, Homo Sapiens
ugaagucucaggagucucugguagccugcaga

SEQ ID NO: 139495 - RNA, 32 nt, Homo Sapiens
aucucuagaacguccccgcagaugaaugaggg

SEQ ID NO: 139496 - RNA, 32 nt, Homo Sapiens
cuuuagaaaaaggcccacccccugcacaagca

SEQ ID NO: 139497 - RNA, 32 nt, Homo Sapiens
ggaagcccaucccugggaccugcccucccuug

SEQ ID NO: 139498 - RNA, 32 nt, Homo Sapiens
caaagugcugggauucugggugugagccacug

SEQ ID NO: 139499 - RNA, 32 nt, Homo Sapiens
ccacuuaguauugcagccaaagaauauuuaaa

SEQ ID NO: 139500 - RNA, 32 nt, Homo Sapiens
gggcugagaaaggaaaucauguucacugguag

SEQ ID NO: 139501 - RNA, 32 nt, Homo Sapiens
uccgucuccccgucccccggcggccggcccau

SEQ ID NO: 139502 - RNA, 32 nt, Homo Sapiens
gguagcuccugaagaucugugcuuuccaacaa

SEQ ID NO: 139503 - RNA, 32 nt, Homo Sapiens
gcagagaccaugggaccccccucagccccucc

SEQ ID NO: 139504 - RNA, 32 nt, Homo Sapiens
agaagguucgggccagccuggaggcggcucug

SEQ ID NO: 139505 - RNA, 32 nt, Homo Sapiens
aggagcccggcggguccgggacucccguccgu

SEQ ID NO: 139506 - RNA, 31 nt, Homo Sapiens
auccugcuccacugccuuccucuagugcagc

SEQ ID NO: 139507 - RNA, 32 nt, Homo Sapiens
cugcaaggcggccuguugcucacgucucuccg

SEQ ID NO: 139508 - RNA, 32 nt, Homo Sapiens
aguacagcccuacugcaucaucugcgucagcc

SEQ ID NO: 139509 - RNA, 32 nt, Homo Sapiens
cgacgguuuccacagcgagcgccagcuccggc

SEQ ID NO: 139510 - RNA, 32 nt, Homo Sapiens
ccgcacccugcacugcguacacuuccucccca

SEQ ID NO: 139511 - RNA, 32 nt, Homo Sapiens
auuguuuggcugaguucugggucuggccccac

SEQ ID NO: 139512 - RNA, 32 nt, Homo Sapiens
cuauuuaaauauuuauacaaaaggguuuuugu

SEQ ID NO: 139513 - RNA, 29 nt, Homo Sapiens
ucgcuuguauguuaucguacagcugacau

SEQ ID NO: 139514 - RNA, 32 nt, Homo Sapiens
cugccccugugcuguuucugucaagccaggug

SEQ ID NO: 139515 - RNA, 32 nt, Homo Sapiens
ccgcagccgcugggagcccccggcagagcugg

SEQ ID NO: 139516 - RNA, 32 nt, Homo Sapiens
agaguuaaaaaagccgaggcugaaaugaugca

SEQ ID NO: 139517 - RNA, 32 nt, Homo Sapiens
acccaggcugcagggugaggccaggcaggccu

SEQ ID NO: 139518 - RNA, 32 nt, Homo Sapiens
aguagcugggauuacaggcacccacgaccacg

SEQ ID NO: 139519 - RNA, 32 nt, Homo Sapiens
uccucuguaauguggugcuuucaacuguacug

SEQ ID NO: 139520 - RNA, 32 nt, Homo Sapiens
ggauguuacccaugcucacuuggugaauaaau

SEQ ID NO: 139521 - RNA, 32 nt, Homo Sapiens
gaggcugcgcgcgggcgggcgggcuauggcgc

SEQ ID NO: 139522 - RNA, 32 nt, Homo Sapiens
gagucaguucuuugucccacuguaguuugcau

SEQ ID NO: 139523 - RNA, 32 nt, Homo Sapiens
uugacaaguauauguauuaagaguccuugcau

SEQ ID NO: 139524 - RNA, 32 nt, Homo Sapiens
agcgcaucagccggcgucugcgagccguccuc

SEQ ID NO: 139525 - RNA, 32 nt, Homo Sapiens
ugccuucuccuccuucucuccccagagccccc

SEQ ID NO: 139526 - RNA, 32 nt, Homo Sapiens
uggaagggggcuucugggccugcuggcucccu

SEQ ID NO: 139527 - RNA, 32 nt, Homo Sapiens
ggaauguggcugucucacccuugcuugcaaaa

SEQ ID NO: 139528 - RNA, 32 nt, Homo Sapiens
agguguuaggcaugucccacccacccgccgcc

SEQ ID NO: 139529 - RNA, 32 nt, Homo Sapiens
gaggacugccuugccacaggcccacucccuac

SEQ ID NO: 139530 - RNA, 32 nt, Homo Sapiens
gaagucaaccccuccugugcugccggucacug

SEQ ID NO: 139531 - RNA, 32 nt, Homo Sapiens
acgcuuuaaaacagucugaaacucuucuaaaa

SEQ ID NO: 139532 - RNA, 32 nt, Homo Sapiens
caacucaaugaaagcaaagccagaauggaaca

SEQ ID NO: 139533 - RNA, 32 nt, Homo Sapiens
caagcauuucuguguucuuuuacuuuuccucu

SEQ ID NO: 139534 - RNA, 32 nt, Homo Sapiens
aucauaauauuuuuauuagaauguucugauga

SEQ ID NO: 139535 - RNA, 32 nt, Homo Sapiens
gugacugugggaaaggaagagaaggagcaagu

SEQ ID NO: 139536 - RNA, 32 nt, Homo Sapiens
cuuaggaaagacuacucaaguuaagguacuuc

SEQ ID NO: 139537 - RNA, 32 nt, Homo Sapiens
gaaacgugaagccgugauacaaauuggugaac

SEQ ID NO: 139538 - RNA, 32 nt, Homo Sapiens
gcaggcuugaugggagcgcccagcacaucugc

SEQ ID NO: 139539 - RNA, 32 nt, Homo Sapiens
gccagccucuggcgcgcccccggcggcaugag

SEQ ID NO: 139540 - RNA, 32 nt, Homo Sapiens
gguagcuguuggcagcaguuucccuuggucag

SEQ ID NO: 139541 - RNA, 32 nt, Homo Sapiens
gcgugagcaccaagccagagcccgaggacgau

SEQ ID NO: 139542 - RNA, 31 nt, Homo Sapiens
gacuauauaaauuguaacaguggauuguuuu

SEQ ID NO: 139543 - RNA, 32 nt, Homo Sapiens
acacuggauuguagguaagguaauucauucug

SEQ ID NO: 139544 - RNA, 32 nt, Homo Sapiens
uacccuuacuaaaaaugagcuugggcuccacc

SEQ ID NO: 139545 - RNA, 32 nt, Homo Sapiens
ccuggcugcauaaaggacucugaugucaaaau

SEQ ID NO: 139546 - RNA, 32 nt, Homo Sapiens
cguccugucccccacacccgugucaugugucu

SEQ ID NO: 139547 - RNA, 32 nt, Homo Sapiens
auguauuuucuuuguagaaauuuaaaagccug

SEQ ID NO: 139548 - RNA, 32 nt, Homo Sapiens
ggcggaggguggcaggggguacuucuugccgu

SEQ ID NO: 139549 - RNA, 32 nt, Homo Sapiens
caggucccgccgcgccaguucgccuccgcaaa

SEQ ID NO: 139550 - RNA, 32 nt, Homo Sapiens
uaggggcugggggcggccacagacggccucga

SEQ ID NO: 139551 - RNA, 32 nt, Homo Sapiens
aucugaaguugugacuucaucaucuugucaua

SEQ ID NO: 139552 - RNA, 32 nt, Homo Sapiens
aggcagccccagcagcagcaucuccucuuugu

SEQ ID NO: 139553 - RNA, 32 nt, Homo Sapiens
aagcucucucuccccgcuccccggcccggccc

SEQ ID NO: 139554 - RNA, 32 nt, Homo Sapiens
uugcaccugcugaccuagagauuccggccugu

SEQ ID NO: 139555 - RNA, 29 nt, Homo Sapiens
agcugugugacuuugccugccugagccuc

SEQ ID NO: 139556 - RNA, 32 nt, Homo Sapiens
uuagcugcaagcuuuaccaaguaauuggcaug

SEQ ID NO: 139557 - RNA, 32 nt, Homo Sapiens
gggcuugggggcuccacuggcuccccccagcc

SEQ ID NO: 139558 - RNA, 32 nt, Homo Sapiens
ucuuuuaaaaaauaaacuugagucuugaaugu

SEQ ID NO: 139559 - RNA, 32 nt, Homo Sapiens
cucugaauaugugaaauguacucugugucuuu

SEQ ID NO: 139560 - RNA, 32 nt, Homo Sapiens
gcugcuccuccugcugugggaccgcugaccgc

SEQ ID NO: 139561 - RNA, 32 nt, Homo Sapiens
guuccugccgcagcucucuccccuucuuaccu

SEQ ID NO: 139562 - RNA, 32 nt, Homo Sapiens
uggcaaauauuuuaauauuucuguuuucauuu

SEQ ID NO: 139563 - RNA, 32 nt, Homo Sapiens
auagcauauguuguauaggauagugcauuggg

SEQ ID NO: 139564 - RNA, 32 nt, Homo Sapiens
ccccccgcaagccccgggcucuaucccuccgc

SEQ ID NO: 139565 - RNA, 32 nt, Homo Sapiens
ggcaucagcuccggcgcuggucucuggcuucg

SEQ ID NO: 139566 - RNA, 32 nt, Homo Sapiens
cuucacuugcagaaaacuugagucagaaaauu

SEQ ID NO: 139567 - RNA, 32 nt, Homo Sapiens
cauuuguagaaaaaauuugauuuggguuaaau

SEQ ID NO: 139568 - RNA, 32 nt, Homo Sapiens
cccuaaagaaaaaaaaucauugcuuugaagca

SEQ ID NO: 139569 - RNA, 32 nt, Homo Sapiens
cugugcagccucagcccuacaccaugaccucc

SEQ ID NO: 139570 - RNA, 32 nt, Homo Sapiens
cggugccagaguggugggcagaucugaccauc

SEQ ID NO: 139571 - RNA, 32 nt, Homo Sapiens
agcgcggcgcagagaggaggggcuugcgcccc

SEQ ID NO: 139572 - RNA, 32 nt, Homo Sapiens
ggcuugagguuccacaucugugaaugggaauu

SEQ ID NO: 139573 - RNA, 32 nt, Homo Sapiens
ucugcagcacugccucccagcgccagggucgc

SEQ ID NO: 139574 - RNA, 32 nt, Homo Sapiens
uuuuguuguuuuguuuuguuucguuuuaaaaa

SEQ ID NO: 139575 - RNA, 32 nt, Homo Sapiens
agccucguccaggcugccccgcagcuccucac

SEQ ID NO: 139576 - RNA, 32 nt, Homo Sapiens
cccagggcuccagcccagcccgguggauccuc

SEQ ID NO: 139577 - RNA, 32 nt, Homo Sapiens
cagagaucacacauuaugugggacagggccug

SEQ ID NO: 139578 - RNA, 32 nt, Homo Sapiens
cucucaucgagauaaagcuguacaccaagcau

SEQ ID NO: 139579 - RNA, 32 nt, Homo Sapiens
auuguuuugucaaucaacacagccugcacuga

SEQ ID NO: 139580 - RNA, 32 nt, Homo Sapiens
gauucucagaaaaaaguuuugcuggauccuaa

SEQ ID NO: 139581 - RNA, 32 nt, Homo Sapiens
aucuuccaacuuuucaacccaacgugaugaau

SEQ ID NO: 139582 - RNA, 32 nt, Homo Sapiens
uuaggugggcagcucggaaggcagaugcacuu

SEQ ID NO: 139583 - RNA, 32 nt, Homo Sapiens
uauugaaauuuauuauucuaauccaaaaguua

SEQ ID NO: 139584 - RNA, 32 nt, Homo Sapiens
cagcccuuucccuuuuucccacuaaauuuuuu

SEQ ID NO: 139585 - RNA, 32 nt, Homo Sapiens
uaaggucagggcacgugggugcucucucgggg

SEQ ID NO: 139586 - RNA, 32 nt, Homo Sapiens
gccaucacagcucaucugcccgcggcugcgug

SEQ ID NO: 139587 - RNA, 32 nt, Homo Sapiens
uccaggugacgugcugucccgcaguagcugcu

SEQ ID NO: 139588 - RNA, 32 nt, Homo Sapiens
agcuggucaggagagacagaagugcuggcuag

SEQ ID NO: 139589 - RNA, 32 nt, Homo Sapiens
uuucguccccagcaugguuucuuaauggggua

SEQ ID NO: 139590 - RNA, 32 nt, Homo Sapiens
ugagggugcacucaggguguuguuagagcguc

SEQ ID NO: 139591 - RNA, 32 nt, Homo Sapiens
ccccugccuuccuggcuugauugaaggaaagc

SEQ ID NO: 139592 - RNA, 32 nt, Homo Sapiens
aaauguaagaaacgaugauaauggugaaauaa

SEQ ID NO: 139593 - RNA, 32 nt, Homo Sapiens
ggccaggaguuugccgacugcagacguccugc

SEQ ID NO: 139594 - RNA, 32 nt, Homo Sapiens
ggcccuuccuaaacacuaagugccaggaagau

SEQ ID NO: 139595 - RNA, 32 nt, Homo Sapiens
uuuuccuccuccucguucuccucccaucagca

SEQ ID NO: 139596 - RNA, 32 nt, Homo Sapiens
accagcuaaaauuuucgacuugacuuuuuaac

SEQ ID NO: 139597 - RNA, 32 nt, Homo Sapiens
gucucuugaaacuggcugcuggccaagcuuua

SEQ ID NO: 139598 - RNA, 32 nt, Homo Sapiens
aaccuguggauuuuauuuuuuauuugcuuuuu

SEQ ID NO: 139599 - RNA, 32 nt, Homo Sapiens
uaagagauucuuugguguuuggcacuuuaagg

SEQ ID NO: 139600 - RNA, 32 nt, Homo Sapiens
gguagagagcgcuugcgggcgccgggcggagc

SEQ ID NO: 139601 - RNA, 32 nt, Homo Sapiens
cgccgcggagguggagcgccgccuggcgcgca

SEQ ID NO: 139602 - RNA, 32 nt, Homo Sapiens
guuucccggggaagaggcgcggccugagcccg

SEQ ID NO: 139603 - RNA, 32 nt, Homo Sapiens
auugcauaagauacagauguaaauugcaugga

SEQ ID NO: 139604 - RNA, 32 nt, Homo Sapiens
ccuucugacgguagcuuuuggaggaagauucc

SEQ ID NO: 139605 - RNA, 32 nt, Homo Sapiens
accacuagauuggggaggaaagguagggguug

SEQ ID NO: 139606 - RNA, 32 nt, Homo Sapiens
uucuggguguuugcgagccugauugcuaucau

SEQ ID NO: 139607 - RNA, 32 nt, Homo Sapiens
gaagaagcggaaaggccguuaucacuuuuaug

SEQ ID NO: 139608 - RNA, 27 nt, Homo Sapiens
aguauaacuucuuucagcccucagauu

SEQ ID NO: 139609 - RNA, 32 nt, Homo Sapiens
auaaaaaagauauuuuuguuacaaaaaguuug

SEQ ID NO: 139610 - RNA, 32 nt, Homo Sapiens
gucccugccgcugaagaauggggcugcucuga

SEQ ID NO: 139611 - RNA, 32 nt, Homo Sapiens
ccagccuccagccucucauuucuggggcuccc

SEQ ID NO: 139612 - RNA, 32 nt, Homo Sapiens
auugaggauuuauguauuaggccacuuacuug

SEQ ID NO: 139613 - RNA, 32 nt, Homo Sapiens
acauauauguauauuuccuuuuuuaauacagg

SEQ ID NO: 139614 - RNA, 32 nt, Homo Sapiens
ccagugagaguuuccugagguaccucacccuc

SEQ ID NO: 139615 - RNA, 32 nt, Homo Sapiens
agagacugggcggcccggcgggggcucccugg

SEQ ID NO: 139616 - RNA, 32 nt, Homo Sapiens
cccgcccguccgggcucugauccuccgucucc

SEQ ID NO: 139617 - RNA, 32 nt, Homo Sapiens
acaagggaaaauuuaguauuuuaacuuuuugc

SEQ ID NO: 139618 - RNA, 32 nt, Homo Sapiens
aaaaauaaauguucugaaauugauuauguuga

SEQ ID NO: 139619 - RNA, 32 nt, Homo Sapiens
ggaguccauuauuuccucuggcuuccucaaau

SEQ ID NO: 139620 - RNA, 32 nt, Homo Sapiens
cuucaggacuucugggcccagcccucuugcca

SEQ ID NO: 139621 - RNA, 32 nt, Homo Sapiens
aaguguucucauuguucaguucccacuuauga

SEQ ID NO: 139622 - RNA, 32 nt, Homo Sapiens
uaucuucugaauucuauccgugaaucccuuag

SEQ ID NO: 139623 - RNA, 32 nt, Homo Sapiens
uuuuuaggcugagacugggcgguccgggguuc

SEQ ID NO: 139624 - RNA, 32 nt, Homo Sapiens
guguuggaggcuuucgguccagugucuugcag

SEQ ID NO: 139625 - RNA, 32 nt, Homo Sapiens
cauaucuugcaccagcagcaugaauggucccu

SEQ ID NO: 139626 - RNA, 32 nt, Homo Sapiens
guacaaugaucaaaaucauguuuuuucuuaaa

SEQ ID NO: 139627 - RNA, 32 nt, Homo Sapiens
caauguaaaaauacacuaaugaguauuuggua

SEQ ID NO: 139628 - RNA, 32 nt, Homo Sapiens
ugucucuucgaucgcuucuuuggacuuggcga

SEQ ID NO: 139629 - RNA, 32 nt, Homo Sapiens
cugcccuucucuucuuuauuccucucuccucu

SEQ ID NO: 139630 - RNA, 32 nt, Homo Sapiens
auuuacaaauuaaauaaucaucugaaacugaa

SEQ ID NO: 139631 - RNA, 32 nt, Homo Sapiens
uuggguuuuacuagauuaaaucaauaaaacau

SEQ ID NO: 139632 - RNA, 32 nt, Homo Sapiens
uggauugaaaagacaucaaggaucaaggauaa

SEQ ID NO: 139633 - RNA, 32 nt, Homo Sapiens
ggcgcggcgggacuccuagacccggcgcugcg

SEQ ID NO: 139634 - RNA, 32 nt, Homo Sapiens
uuuaucauauauauacauacaugcauacacuc

SEQ ID NO: 139635 - RNA, 32 nt, Homo Sapiens
auuucaucugcucuccuuccuggagcccagag

SEQ ID NO: 139636 - RNA, 32 nt, Homo Sapiens
cucugagguucaguaucauuuuucaaauaaag

SEQ ID NO: 139637 - RNA, 32 nt, Homo Sapiens
ucaaggcgggagauauuuuaaacacccaaaau

SEQ ID NO: 139638 - RNA, 32 nt, Homo Sapiens
cuuacauaacugugaaauauuuauucucuguu

SEQ ID NO: 139639 - RNA, 32 nt, Homo Sapiens
uauaauugaaacaaaauaguguaaucauuuua

SEQ ID NO: 139640 - RNA, 32 nt, Homo Sapiens
uuuugggcgagggugcguggggccugccccuu

SEQ ID NO: 139641 - RNA, 32 nt, Homo Sapiens
gcauugggggagagggggaccugggaccugcg

SEQ ID NO: 139642 - RNA, 32 nt, Homo Sapiens
guuagguaagacacuuuuuuacugcuuuuaug

SEQ ID NO: 139643 - RNA, 32 nt, Homo Sapiens
aaagggggacgcccggccucugggccgcugcc

SEQ ID NO: 139644 - RNA, 32 nt, Homo Sapiens
uugauuacaaauguucuuaacuaucgucucug

SEQ ID NO: 139645 - RNA, 32 nt, Homo Sapiens
acaguucucccucuauugcccaggcuggagug

SEQ ID NO: 139646 - RNA, 32 nt, Homo Sapiens
cuccuuugaugcugaggccugacgucacuccc

SEQ ID NO: 139647 - RNA, 32 nt, Homo Sapiens
agcuggccuuguuccuucaucaucccccuucc

SEQ ID NO: 139648 - RNA, 32 nt, Homo Sapiens
cgcggcugggcuccgagagacgagugggagag

SEQ ID NO: 139649 - RNA, 32 nt, Homo Sapiens
guggcuccccauggcuucucccggggcuggca

SEQ ID NO: 139650 - RNA, 32 nt, Homo Sapiens
acaggcuugauugguguaaaucuuuuuauaaa

SEQ ID NO: 139651 - RNA, 32 nt, Homo Sapiens
cgggcggccuggcgcggcgcuccgcuguguca

SEQ ID NO: 139652 - RNA, 32 nt, Homo Sapiens
gucauugguuugugaggccuaaggugaagcac

SEQ ID NO: 139653 - RNA, 32 nt, Homo Sapiens
agccugcgcaaccgcgccgaggagugggccag

SEQ ID NO: 139654 - RNA, 32 nt, Homo Sapiens
uccuccccuggccuccagucuccccugcccuc

SEQ ID NO: 139655 - RNA, 32 nt, Homo Sapiens
cuggcccugcggcgggccccagagcccagugc

SEQ ID NO: 139656 - RNA, 32 nt, Homo Sapiens
cacaaggaagcagagcucuggcaacauugagu

SEQ ID NO: 139657 - RNA, 32 nt, Homo Sapiens
uacuugaagauugguauaauuuucauaaaaug

SEQ ID NO: 139658 - RNA, 32 nt, Homo Sapiens
gaaaaguacacagaggaagauauuuuacaaac

SEQ ID NO: 139659 - RNA, 32 nt, Homo Sapiens
gcaugguggcgggcgcugguaaucccagcuac

SEQ ID NO: 139660 - RNA, 32 nt, Homo Sapiens
gcagcugcuuugcaaccugaucaccuugaguu

SEQ ID NO: 139661 - RNA, 32 nt, Homo Sapiens
caaaagcuguguaucugagaccauuugucccu

SEQ ID NO: 139662 - RNA, 32 nt, Homo Sapiens
agguuccuguacuacugccuuguacuuuucau

SEQ ID NO: 139663 - RNA, 32 nt, Homo Sapiens
aaaccuagaacaaaaguggaauaaauaaaaac

SEQ ID NO: 139664 - RNA, 32 nt, Homo Sapiens
aaggcucugaccaugcuuaguacuggaauaga

SEQ ID NO: 139665 - RNA, 32 nt, Homo Sapiens
gacuggugugagaugguaucucauugugguuu

SEQ ID NO: 139666 - RNA, 32 nt, Homo Sapiens
ggggagacagaaaagaggugcggcaggacucu

SEQ ID NO: 139667 - RNA, 32 nt, Homo Sapiens
gugugcagcuggagagcgagcggccaccggga

SEQ ID NO: 139668 - RNA, 32 nt, Homo Sapiens
uuuaaugcuucugcuguaaaugucauacugug

SEQ ID NO: 139669 - RNA, 30 nt, Homo Sapiens
cuggcacccaacugugcccaucuuaguuuu

SEQ ID NO: 139670 - RNA, 32 nt, Homo Sapiens
uucaaugcauauaaaacuaucagaaguuagua

SEQ ID NO: 139671 - RNA, 32 nt, Homo Sapiens
aggaugccgcguggaagccgaagccgcaccuc

SEQ ID NO: 139672 - RNA, 32 nt, Homo Sapiens
ggcccacgcucgcucccgcugucggacucugg

SEQ ID NO: 139673 - RNA, 32 nt, Homo Sapiens
uaguugauuuauaaauauaugagguaucugca

SEQ ID NO: 139674 - RNA, 32 nt, Homo Sapiens
cuuuucaaagugccacuguuccagacccauuc

SEQ ID NO: 139675 - RNA, 32 nt, Homo Sapiens
gacuccugcucuugcuucuggaucugcagggc

SEQ ID NO: 139676 - RNA, 32 nt, Homo Sapiens
gcagaagaguagcuaggcagaugcagagaugg

SEQ ID NO: 139677 - RNA, 32 nt, Homo Sapiens
ugauucuaauugauuucuuucaacagaauuug

SEQ ID NO: 139678 - RNA, 32 nt, Homo Sapiens
caacguaaugaaauuuuuaacuauuuguaugu

SEQ ID NO: 139679 - RNA, 32 nt, Homo Sapiens
gguugccaccugucucuuaacaucucacugaa

SEQ ID NO: 139680 - RNA, 27 nt, Homo Sapiens
agauccucccacuucagccucccaagc

SEQ ID NO: 139681 - RNA, 32 nt, Homo Sapiens
ggguaccacaauaucauuuauaauugauguca

SEQ ID NO: 139682 - RNA, 32 nt, Homo Sapiens
ugccggcuccagcccguccgugucucaccguc

SEQ ID NO: 139683 - RNA, 32 nt, Homo Sapiens
gcugauugggguauugucaaugggugauugga

SEQ ID NO: 139684 - RNA, 32 nt, Homo Sapiens
aacccggcuuuccccgccuccucccggcuucg

SEQ ID NO: 139685 - RNA, 32 nt, Homo Sapiens
aagagauccccuccccugccccuggguuccug

SEQ ID NO: 139686 - RNA, 32 nt, Homo Sapiens
uacuguaucucacuuuaaacucuuuggggaaa

SEQ ID NO: 139687 - RNA, 32 nt, Homo Sapiens
cgcgccccagccagcccugcggcaggaaagca

SEQ ID NO: 139688 - RNA, 32 nt, Homo Sapiens
agucagcugucauucugcugguggcuuccugc

SEQ ID NO: 139689 - RNA, 32 nt, Homo Sapiens
guuaacuacauuuuuuaaaugucgaguaaaac

SEQ ID NO: 139690 - RNA, 32 nt, Homo Sapiens
cugauuagacuaguuaaugucuaugugauggg

SEQ ID NO: 139691 - RNA, 32 nt, Homo Sapiens
cucucuuccucccacuauuuucucuucgcagg

SEQ ID NO: 139692 - RNA, 32 nt, Homo Sapiens
gugcggcuguguggguucgggagcggaguugc

SEQ ID NO: 139693 - RNA, 32 nt, Homo Sapiens
ugcaguuugagaucugaugcuuccugagggcc

SEQ ID NO: 139694 - RNA, 32 nt, Homo Sapiens
acaagcuacaguuguccagaucacugaauugg

SEQ ID NO: 139695 - RNA, 32 nt, Homo Sapiens
ugucauucccuccuccacuccucccuuggucu

SEQ ID NO: 139696 - RNA, 32 nt, Homo Sapiens
uguuuucaguuauauuacuuuugaggcuggug

SEQ ID NO: 139697 - RNA, 32 nt, Homo Sapiens
aaguguggcaugggggcgggggcgggggcggc

SEQ ID NO: 139698 - RNA, 32 nt, Homo Sapiens
ucugccugccuuggcccucccaaaguguuggg

SEQ ID NO: 139699 - RNA, 32 nt, Homo Sapiens
guuauuuggaagacagaaaaacaucuugucua

SEQ ID NO: 139700 - RNA, 32 nt, Homo Sapiens
cagauuuuccuccguauucuucuaaaaauuau

SEQ ID NO: 139701 - RNA, 32 nt, Homo Sapiens
ccuccaccucucccugcccccagcgccaggcg

SEQ ID NO: 139702 - RNA, 32 nt, Homo Sapiens
uaguuuguaaguaucauuaugaacuaaugaau

SEQ ID NO: 139703 - RNA, 32 nt, Homo Sapiens
aggcagacagagcucauggucuguggcugcuc

SEQ ID NO: 139704 - RNA, 32 nt, Homo Sapiens
uaggguuucuaaaauaagguuuuuuauuguaa

SEQ ID NO: 139705 - RNA, 32 nt, Homo Sapiens
uuaaugucugaaaugaauaaaaagaggaaauu

SEQ ID NO: 139706 - RNA, 32 nt, Homo Sapiens
ggaccgaggggcuggaggagaggcggagcugu

SEQ ID NO: 139707 - RNA, 32 nt, Homo Sapiens
cagaggguuuucucuaaucauuuuuucuauuu

SEQ ID NO: 139708 - RNA, 32 nt, Homo Sapiens
cucgugccccgccggagcgacccggcucgugc

SEQ ID NO: 139709 - RNA, 32 nt, Homo Sapiens
ugucauuccgccugguuguuucccuuuggaca

SEQ ID NO: 139710 - RNA, 32 nt, Homo Sapiens
ccuaaaugugguugguaaaucuuacucucaua

SEQ ID NO: 139711 - RNA, 32 nt, Homo Sapiens
auggacucuuagaauggaauuuuugaagaaaa

SEQ ID NO: 139712 - RNA, 30 nt, Homo Sapiens
ugccuccuggacugaauucuggggaugagg

SEQ ID NO: 139713 - RNA, 32 nt, Homo Sapiens
cuucgccgcucucaacaucugcucuuuggccu

SEQ ID NO: 139714 - RNA, 32 nt, Homo Sapiens
agauagcccucccugggcagcagccccccagc

SEQ ID NO: 139715 - RNA, 32 nt, Homo Sapiens
uguggucguuacaguuguagugaauguucccu

SEQ ID NO: 139716 - RNA, 32 nt, Homo Sapiens
agccuggccaacacggcaaaaccccguuucua

SEQ ID NO: 139717 - RNA, 30 nt, Homo Sapiens
ugauuccagucaaugggggaccgcccgugu

SEQ ID NO: 139718 - RNA, 29 nt, Homo Sapiens
ggauugacaagaguuuauuuucuauugug

SEQ ID NO: 139719 - RNA, 32 nt, Homo Sapiens
auuuugggcucuucuauauauuuuguaaagua

SEQ ID NO: 139720 - RNA, 32 nt, Homo Sapiens
aacuaaagaggcuggcaugcaguggcaugauc

SEQ ID NO: 139721 - RNA, 32 nt, Homo Sapiens
gggccaagaaagagucaggccuuaauuuucag

SEQ ID NO: 139722 - RNA, 32 nt, Homo Sapiens
acauucaggacacacacacacacacacacaca

SEQ ID NO: 139723 - RNA, 31 nt, Homo Sapiens
gaggagagggcggcggcggcggugggaggag

SEQ ID NO: 139724 - RNA, 32 nt, Homo Sapiens
acagucuacaguguuaggguauauuucauuaa

SEQ ID NO: 139725 - RNA, 32 nt, Homo Sapiens
ucucaguuugaucaaaaagaaggcuuagaauu

SEQ ID NO: 139726 - RNA, 29 nt, Homo Sapiens
ccguuuacuuguuucagaguuuguauugu

SEQ ID NO: 139727 - RNA, 32 nt, Homo Sapiens
ucucuggguccuuuuccgguguccuuaagguu

SEQ ID NO: 139728 - RNA, 32 nt, Homo Sapiens
cauagagauacagagcauaugaagauauggga

SEQ ID NO: 139729 - RNA, 32 nt, Homo Sapiens
ugacgcaggacuggcugcauccccucauggac

SEQ ID NO: 139730 - RNA, 32 nt, Homo Sapiens
aaguaccagacauuucuaucagagcaagacuu

SEQ ID NO: 139731 - RNA, 32 nt, Homo Sapiens
caugcaucucaaaauuuaauguacauacaaau

SEQ ID NO: 139732 - RNA, 32 nt, Homo Sapiens
ucacuguuauuaacuauagucaccauguugua

SEQ ID NO: 139733 - RNA, 32 nt, Homo Sapiens
guacacccuggcaaggcuucucuucagacuga

SEQ ID NO: 139734 - RNA, 32 nt, Homo Sapiens
acugauuacacuuuacagguaccuguuauccc

SEQ ID NO: 139735 - RNA, 32 nt, Homo Sapiens
uuuaaaacauggcuuuugauaaugugaggguu

SEQ ID NO: 139736 - RNA, 32 nt, Homo Sapiens
gcggguccuuccccggccccgagggccaaggg

SEQ ID NO: 139737 - RNA, 32 nt, Homo Sapiens
ugaaaacaauagggcaauuggccaccaauuaa

SEQ ID NO: 139738 - RNA, 29 nt, Homo Sapiens
uuucaauccucccaauaccacaagacaga

SEQ ID NO: 139739 - RNA, 32 nt, Homo Sapiens
gccaaggaucugcugcgccuuuccagucaggu

SEQ ID NO: 139740 - RNA, 32 nt, Homo Sapiens
guuuauaaaauauaaacaaagauucaugauuu

SEQ ID NO: 139741 - RNA, 32 nt, Homo Sapiens
ugcuggaagccaucgugagcugcugcgugggg

SEQ ID NO: 139742 - RNA, 32 nt, Homo Sapiens
agggagaaggauuccauuuuucuucucagcug

SEQ ID NO: 139743 - RNA, 32 nt, Homo Sapiens
auauugcacuaauuauuuuagguauuuucauu

SEQ ID NO: 139744 - RNA, 32 nt, Homo Sapiens
cagcugcacuuacaggaugccucauagacgau

SEQ ID NO: 139745 - RNA, 32 nt, Homo Sapiens
aaauaugcaaaaauaagucagauuuuaaggca

SEQ ID NO: 139746 - RNA, 32 nt, Homo Sapiens
cgcucccggccgccgcgcuccgguacacacag

SEQ ID NO: 139747 - RNA, 32 nt, Homo Sapiens
ccuuaccaaaaauuagcuuuucuaauuuuagu

SEQ ID NO: 139748 - RNA, 32 nt, Homo Sapiens
gcaggacaucaagcuucccagaaaguuugacc

SEQ ID NO: 139749 - RNA, 32 nt, Homo Sapiens
cgcugcacccucagaagagggguugagaaugg

SEQ ID NO: 139750 - RNA, 32 nt, Homo Sapiens
gccugguacaaccugccacgggccccggccag

SEQ ID NO: 139751 - RNA, 32 nt, Homo Sapiens
cacuagcaaaagacacauuccagaagcucacc

SEQ ID NO: 139752 - RNA, 32 nt, Homo Sapiens
auaggccgagucuggagaagggaggcgccugg

SEQ ID NO: 139753 - RNA, 32 nt, Homo Sapiens
cuggauucuggugcuauagcuccuggugccaa

SEQ ID NO: 139754 - RNA, 32 nt, Homo Sapiens
uuauuaaaggauuuaaauuugaaccuggcuuu

SEQ ID NO: 139755 - RNA, 32 nt, Homo Sapiens
ugcccagccuuguucuuaauuuuguaucaucc

SEQ ID NO: 139756 - RNA, 32 nt, Homo Sapiens
caagggaugacaguguauuuuauauuauacau

SEQ ID NO: 139757 - RNA, 32 nt, Homo Sapiens
gcgaguccugaacacagguucugauguggagg

SEQ ID NO: 139758 - RNA, 32 nt, Homo Sapiens
uuuaauccaaauaauaaauggcuguuucuaaa

SEQ ID NO: 139759 - RNA, 32 nt, Homo Sapiens
aaaauuguauaaagaauauggaaaagccauuu

SEQ ID NO: 139760 - RNA, 32 nt, Homo Sapiens
auugauucucagcacuuacuaauuguguggac

SEQ ID NO: 139761 - RNA, 32 nt, Homo Sapiens
ggaccccgccaccauguucccggagcccccaa

SEQ ID NO: 139762 - RNA, 32 nt, Homo Sapiens
cugucaggcauuucguuguuguuuuuaaacuu

SEQ ID NO: 139763 - RNA, 32 nt, Homo Sapiens
cccccaccagccucacuccccaucccaaccag

SEQ ID NO: 139764 - RNA, 32 nt, Homo Sapiens
gagccccacaacuauacccccauccucuccaa

SEQ ID NO: 139765 - RNA, 32 nt, Homo Sapiens
gcggcaugcucccgcggaggcugcuggccgcc

SEQ ID NO: 139766 - RNA, 28 nt, Homo Sapiens
aaaaugaagggauuucauuugaaauuac

SEQ ID NO: 139767 - RNA, 32 nt, Homo Sapiens
agcucuguucaggagagcugcaaacacagagc

SEQ ID NO: 139768 - RNA, 32 nt, Homo Sapiens
agccgccaccggcgcgcacaggucuuuccgug

SEQ ID NO: 139769 - RNA, 32 nt, Homo Sapiens
ucuuguuugucaaauaguaaaugauauuugcc

SEQ ID NO: 139770 - RNA, 32 nt, Homo Sapiens
cggagcugccagcggggaggcugcagccgcgg

SEQ ID NO: 139771 - RNA, 32 nt, Homo Sapiens
guggauuuuuaaagugccuuucaauugucugu

SEQ ID NO: 139772 - RNA, 32 nt, Homo Sapiens
uucagucgcucuucccccaaucuguuuagaaa

SEQ ID NO: 139773 - RNA, 32 nt, Homo Sapiens
agguaacgcgccgcgcccggggcugcgcgguu

SEQ ID NO: 139774 - RNA, 32 nt, Homo Sapiens
uauuaugcauugcauaccuguaucaaaguauc

SEQ ID NO: 139775 - RNA, 32 nt, Homo Sapiens
cgucucuguacauguguguacauauuagaaag

SEQ ID NO: 139776 - RNA, 32 nt, Homo Sapiens
ccucccgaguagcugggauuccaggugcccgc

SEQ ID NO: 139777 - RNA, 32 nt, Homo Sapiens
uccagcgagucccaggagagugacucugguca

SEQ ID NO: 139778 - RNA, 32 nt, Homo Sapiens
uuuacaaacuaaauuauauaaagacagaaguc

SEQ ID NO: 139779 - RNA, 32 nt, Homo Sapiens
agagucaggccacaauaccuccccugggagga

SEQ ID NO: 139780 - RNA, 32 nt, Homo Sapiens
aaagcaaaauugauaagauguuagaaauuugg

SEQ ID NO: 139781 - RNA, 32 nt, Homo Sapiens
uuagcagaucgacagccccuuccuccuccucc

SEQ ID NO: 139782 - RNA, 32 nt, Homo Sapiens
uaggagaaaaagacaugauaauacaggcaaga

SEQ ID NO: 139783 - RNA, 32 nt, Homo Sapiens
cugcccacuccacuccucccauccccucccag

SEQ ID NO: 139784 - RNA, 32 nt, Homo Sapiens
cucaguugagccugagcccccggcgcgggggc

SEQ ID NO: 139785 - RNA, 32 nt, Homo Sapiens
auacacuccuucccuuccaucgcugcagaccu

SEQ ID NO: 139786 - RNA, 28 nt, Homo Sapiens
guuugggggcggccggcagcaggagccu

SEQ ID NO: 139787 - RNA, 32 nt, Homo Sapiens
gggcaacggccgcgcgccggcuccgagacgag

SEQ ID NO: 139788 - RNA, 32 nt, Homo Sapiens
uaauuuuuguaucuuuuaguagaggugggguu

SEQ ID NO: 139789 - RNA, 27 nt, Homo Sapiens
gcauguauguguauguacguauauacu

SEQ ID NO: 139790 - RNA, 32 nt, Homo Sapiens
cucuccuaucccaaaaauaaugugggauccuu

SEQ ID NO: 139791 - RNA, 32 nt, Homo Sapiens
ccaugugauguuugcuugguugccuguucccu

SEQ ID NO: 139792 - RNA, 32 nt, Homo Sapiens
aaguagagauaaaaauauauacauuucucuaa

SEQ ID NO: 139793 - RNA, 32 nt, Homo Sapiens
cggcgggacccgccagcuucagcgaccaccag

SEQ ID NO: 139794 - RNA, 32 nt, Homo Sapiens
caaagugagugagauguaaauccugugauuuu

SEQ ID NO: 139795 - RNA, 32 nt, Homo Sapiens
gcuggaucaauguuucgaucugauacgccagc

SEQ ID NO: 139796 - RNA, 32 nt, Homo Sapiens
acagugaauaauuuuaaaaccacaaacauagc

SEQ ID NO: 139797 - RNA, 32 nt, Homo Sapiens
uacuuacaaaaaucuagaaauggagagggaac

SEQ ID NO: 139798 - RNA, 32 nt, Homo Sapiens
uugaggucaggaguucgagaccagccuggcca

SEQ ID NO: 139799 - RNA, 32 nt, Homo Sapiens
uugagguuaggaguuugagaccagccuggcca

SEQ ID NO: 139800 - RNA, 32 nt, Homo Sapiens
ccgccucugcccggacgcagcccgacacuugg

SEQ ID NO: 139801 - RNA, 32 nt, Homo Sapiens
uugauaaucauuucuaugaaauguauuuuauu

SEQ ID NO: 139802 - RNA, 32 nt, Homo Sapiens
ugugcaaaauuugaacaaagaggaaaucaucu

SEQ ID NO: 139803 - RNA, 32 nt, Homo Sapiens
ccuggcugugguugugcgcccggggcuuggga

SEQ ID NO: 139804 - RNA, 32 nt, Homo Sapiens
acugaucccagcugaguuucuccuguugauuu

SEQ ID NO: 139805 - RNA, 32 nt, Homo Sapiens
ccuuaaaggaggcugccguggagcacggauac

SEQ ID NO: 139806 - RNA, 32 nt, Homo Sapiens
uccauuuuuuauauuucaaguacacugaauuu

SEQ ID NO: 139807 - RNA, 32 nt, Homo Sapiens
uacaggugcuacgccaccuggcgcuucggcuc

SEQ ID NO: 139808 - RNA, 32 nt, Homo Sapiens
gagacaauauuuuuucaaacuuuuuggggagu

SEQ ID NO: 139809 - RNA, 32 nt, Homo Sapiens
cugauuuuuggaaauauguauuugggagacag

SEQ ID NO: 139810 - RNA, 29 nt, Homo Sapiens
caagauggagccccagcuggggccugagg

SEQ ID NO: 139811 - RNA, 32 nt, Homo Sapiens
cccuggugguggcucgggaggcgaagcguugu

SEQ ID NO: 139812 - RNA, 32 nt, Homo Sapiens
ucacuuaauaaucaaccugggguucgaaauca

SEQ ID NO: 139813 - RNA, 32 nt, Homo Sapiens
auugggucccugucucuggugcccacagugag

SEQ ID NO: 139814 - RNA, 32 nt, Homo Sapiens
cuucaaguuguauuaucagaucaaauaaaagc

SEQ ID NO: 139815 - RNA, 32 nt, Homo Sapiens
ucauaaaaaaauuuuaagcugcagugaaaagu

SEQ ID NO: 139816 - RNA, 32 nt, Homo Sapiens
uaaccaugaagauucagauguaccucagcaau

SEQ ID NO: 139817 - RNA, 31 nt, Homo Sapiens
ccggccaugcgcccggccuuggcggugggcc

SEQ ID NO: 139818 - RNA, 32 nt, Homo Sapiens
aggguuuccuucggggaccagcccacagcaca

SEQ ID NO: 139819 - RNA, 32 nt, Homo Sapiens
uccuccgcccccggcccuccccucucaggcgg

SEQ ID NO: 139820 - RNA, 26 nt, Homo Sapiens
caugcgccucuccuccuccccaccuc

SEQ ID NO: 139821 - RNA, 32 nt, Homo Sapiens
ccccacuggcucuucuuaauuagaagugacca

SEQ ID NO: 139822 - RNA, 30 nt, Homo Sapiens
gaguccccuacugguggggaaacaggguga

SEQ ID NO: 139823 - RNA, 32 nt, Homo Sapiens
ucuugcuuuuguguucccgucuuuuugaaaua

SEQ ID NO: 139824 - RNA, 30 nt, Homo Sapiens
aagaggcucuggacagcagaagccuccaag

SEQ ID NO: 139825 - RNA, 32 nt, Homo Sapiens
cagauacggcauugauggaggcugguguguaa

SEQ ID NO: 139826 - RNA, 32 nt, Homo Sapiens
augggugcccugaauggaacuacuuuaacuaa

SEQ ID NO: 139827 - RNA, 32 nt, Homo Sapiens
ccuguugcacugaucacuauaccuguuucuau

SEQ ID NO: 139828 - RNA, 32 nt, Homo Sapiens
gcaaaucuggguuuuucuuccuuuccagaacu

SEQ ID NO: 139829 - RNA, 32 nt, Homo Sapiens
gccaagcuugacaagacuagaagcugugaggu

SEQ ID NO: 139830 - RNA, 32 nt, Homo Sapiens
ccaccggccucuguccucuccacuagcgccag

SEQ ID NO: 139831 - RNA, 32 nt, Homo Sapiens
agagacccucucccugcccccagccagccccu

SEQ ID NO: 139832 - RNA, 32 nt, Homo Sapiens
cauggcuccacggucccggcgacgaaggcaca

SEQ ID NO: 139833 - RNA, 32 nt, Homo Sapiens
cgcgcgcacacacacgcagacacacacacaca

SEQ ID NO: 139834 - RNA, 32 nt, Homo Sapiens
gccgagugaaugggggcugaaugugcgagucc

SEQ ID NO: 139835 - RNA, 32 nt, Homo Sapiens
uagcugggacuacaggcacgcgccaccaugcc

SEQ ID NO: 139836 - RNA, 31 nt, Homo Sapiens
ggccccggagcgagccugccccgccgggacu

SEQ ID NO: 139837 - RNA, 32 nt, Homo Sapiens
cugccucugccucccaaaguucugggaguaca

SEQ ID NO: 139838 - RNA, 32 nt, Homo Sapiens
auucuuuuagaaugcacacauuuuuaguuuac

SEQ ID NO: 139839 - RNA, 32 nt, Homo Sapiens
guggcgcuauggaggcggcgcugcuggggcug

SEQ ID NO: 139840 - RNA, 32 nt, Homo Sapiens
aaucuugugcuucauuuccuucugggcauuuu

SEQ ID NO: 139841 - RNA, 32 nt, Homo Sapiens
ugccuuucgcaauaauguauccauuccccuga

SEQ ID NO: 139842 - RNA, 32 nt, Homo Sapiens
aguugcuucaauuugcagaugcuuauguguua

SEQ ID NO: 139843 - RNA, 31 nt, Homo Sapiens
aaauugaaauaaauaugaaaauaucaaguuc

SEQ ID NO: 139844 - RNA, 32 nt, Homo Sapiens
uugucuuacugacuuuuucagggccauguugg

SEQ ID NO: 139845 - RNA, 32 nt, Homo Sapiens
acaacagauaccaaaagaaaacaaaggaaaaa

SEQ ID NO: 139846 - RNA, 32 nt, Homo Sapiens
agacacugagagauuaaucagggaaugaaauc

SEQ ID NO: 139847 - RNA, 32 nt, Homo Sapiens
uaugaagacuggcuucgacauaaagcagacaa

SEQ ID NO: 139848 - RNA, 32 nt, Homo Sapiens
aaggcaaaaggaccagcaaaagggcagcacau

SEQ ID NO: 139849 - RNA, 32 nt, Homo Sapiens
uauauguaaugaaagcacuuauaaagaaacag

SEQ ID NO: 139850 - RNA, 32 nt, Homo Sapiens
gccgagcggcgggacuccaugcccuagagugc

SEQ ID NO: 139851 - RNA, 32 nt, Homo Sapiens
ccugugcaugcaaugcuccgacucugcagagg

SEQ ID NO: 139852 - RNA, 32 nt, Homo Sapiens
cugcucccugugguagagacaccugagagaaa

SEQ ID NO: 139853 - RNA, 32 nt, Homo Sapiens
gaagacacugucaggucacucuguggaaguuu

SEQ ID NO: 139854 - RNA, 32 nt, Homo Sapiens
cugagauguggggcaggcgccacucacggaaa

SEQ ID NO: 139855 - RNA, 32 nt, Homo Sapiens
ggaugagggagaaaaauccguuuuauccauca

SEQ ID NO: 139856 - RNA, 32 nt, Homo Sapiens
uggggcagaaggcguugucagugggguuaaga

SEQ ID NO: 139857 - RNA, 32 nt, Homo Sapiens
ggcuaguuugaaaaccgugaauuaagauauuc

SEQ ID NO: 139858 - RNA, 32 nt, Homo Sapiens
cuagccaagccaggcuggccccaggccuaugc

SEQ ID NO: 139859 - RNA, 32 nt, Homo Sapiens
guccuguuaacccuccaccuccucucuuggac

SEQ ID NO: 139860 - RNA, 32 nt, Homo Sapiens
ugugagcucaggugaccuccuccgcagaagag

SEQ ID NO: 139861 - RNA, 32 nt, Homo Sapiens
ccucccuuguuccgaccugucaauucugcugc

SEQ ID NO: 139862 - RNA, 32 nt, Homo Sapiens
cagccucuggcauuagaauuauuuaaacaaaa

SEQ ID NO: 139863 - RNA, 32 nt, Homo Sapiens
gcuuugggcacauugcuccauccugagcaucc

SEQ ID NO: 139864 - RNA, 32 nt, Homo Sapiens
ccccgggccgcgggcucggccugccccuuacg

SEQ ID NO: 139865 - RNA, 32 nt, Homo Sapiens
ccaggucggcccgcuccggagccgggagagua

SEQ ID NO: 139866 - RNA, 32 nt, Homo Sapiens
gcgcaccggccgcugcugcgagaccccggccc

SEQ ID NO: 139867 - RNA, 32 nt, Homo Sapiens
cacuacccccaccccugcuccuccuuugucag

SEQ ID NO: 139868 - RNA, 32 nt, Homo Sapiens
ggacuaaauauuaaaugauauuuacauauauu

SEQ ID NO: 139869 - RNA, 32 nt, Homo Sapiens
gccaaagguuauaaacuugccuuaaaacuaua

SEQ ID NO: 139870 - RNA, 32 nt, Homo Sapiens
ggccugcuggccuggggcgugcggacacugcu

SEQ ID NO: 139871 - RNA, 32 nt, Homo Sapiens
uuccagggccgcguccagcagcuuccccugcc

SEQ ID NO: 139872 - RNA, 32 nt, Homo Sapiens
ugucauuauauaacauuccuuaaaagaauugu

SEQ ID NO: 139873 - RNA, 32 nt, Homo Sapiens
gaaacacaggagcaagcaaaacaaauuccaua

SEQ ID NO: 139874 - RNA, 27 nt, Homo Sapiens
uagggccauuaauucugaccacgugcc

SEQ ID NO: 139875 - RNA, 32 nt, Homo Sapiens
acaaaaguacaauuuaccagccuccguauuuc

SEQ ID NO: 139876 - RNA, 32 nt, Homo Sapiens
gaagagugaugaagauaggcaugaagccuucg

SEQ ID NO: 139877 - RNA, 32 nt, Homo Sapiens
uuacaccacaaccagcuucuccaggucauaug

SEQ ID NO: 139878 - RNA, 32 nt, Homo Sapiens
agcagcccgggaagagugccguggcacaggcg

SEQ ID NO: 139879 - RNA, 32 nt, Homo Sapiens
acaaaaaggaagaaagugacguaucacgugcu

SEQ ID NO: 139880 - RNA, 32 nt, Homo Sapiens
uucaguauuaaaggggggagggggaggggguu

SEQ ID NO: 139881 - RNA, 32 nt, Homo Sapiens
ucaugaucuacaaaacaaaaucauagugacua

SEQ ID NO: 139882 - RNA, 32 nt, Homo Sapiens
uucaaaauggugguuuuccacacucuaccuuu

SEQ ID NO: 139883 - RNA, 32 nt, Homo Sapiens
ugagaaggagaugaaggaguguguguagcaug

SEQ ID NO: 139884 - RNA, 32 nt, Homo Sapiens
acacacacagaaauacauacacagaaaaauaa

SEQ ID NO: 139885 - RNA, 32 nt, Homo Sapiens
acauuuagcauuagcucugugugagcuccugc

SEQ ID NO: 139886 - RNA, 32 nt, Homo Sapiens
accuaaugaugaugaaaauaagacuauuaaug

SEQ ID NO: 139887 - RNA, 32 nt, Homo Sapiens
gauggggcuggguaagcgggugcgccuccugu

SEQ ID NO: 139888 - RNA, 32 nt, Homo Sapiens
ucguacaaaaauuuuaaaaaguuaccaaaggu

SEQ ID NO: 139889 - RNA, 32 nt, Homo Sapiens
cgauggagaaacaaagccauuuuuccauaaaa

SEQ ID NO: 139890 - RNA, 32 nt, Homo Sapiens
aaagggcuuuugagcgcuauagagugucuuua

SEQ ID NO: 139891 - RNA, 32 nt, Homo Sapiens
agcugggacgugaccccgccucuugggggugg

SEQ ID NO: 139892 - RNA, 32 nt, Homo Sapiens
aggcgcagccgcucagcugcggaccgggggcg

SEQ ID NO: 139893 - RNA, 32 nt, Homo Sapiens
aaauauaaauuuugcccuuccauuucuacugu

SEQ ID NO: 139894 - RNA, 32 nt, Homo Sapiens
uuucaacaauacugaaggaauaccuaauugag

SEQ ID NO: 139895 - RNA, 32 nt, Homo Sapiens
auuauguucauuuaauaaauuauuuuuucacu

SEQ ID NO: 139896 - RNA, 32 nt, Homo Sapiens
cuucuuuaacucccaggaaggguagaauuuug

SEQ ID NO: 139897 - RNA, 32 nt, Homo Sapiens
aaguguggccacuuccucuugccuguccugac

SEQ ID NO: 139898 - RNA, 32 nt, Homo Sapiens
gguggcgggacgcggggccgcgcacgcgggaa

SEQ ID NO: 139899 - RNA, 32 nt, Homo Sapiens
uuuugcaacaggcagagcugugucgcacagca

SEQ ID NO: 139900 - RNA, 32 nt, Homo Sapiens
gguggucaaguaugcacagacaucaguaguga

SEQ ID NO: 139901 - RNA, 32 nt, Homo Sapiens
gcugcuggguggggcucugguccuccagggac

SEQ ID NO: 139902 - RNA, 32 nt, Homo Sapiens
cuccaaaucccaccccagugcaagucugggga

SEQ ID NO: 139903 - RNA, 32 nt, Homo Sapiens
cuacagaaucaucaaaggugucaacaaaucca

SEQ ID NO: 139904 - RNA, 32 nt, Homo Sapiens
aggggacaguggagcaggccuggggcuguucc

SEQ ID NO: 139905 - RNA, 32 nt, Homo Sapiens
cacugucuacuaagagacaucauuccauuucc

SEQ ID NO: 139906 - RNA, 31 nt, Homo Sapiens
cagcugguagccagccugccccucgccucga

SEQ ID NO: 139907 - RNA, 32 nt, Homo Sapiens
aguagacuauacaguuguaugaauuuguaaaa

SEQ ID NO: 139908 - RNA, 32 nt, Homo Sapiens
gcauucuuuucuccugugggaguuugccagcc

SEQ ID NO: 139909 - RNA, 32 nt, Homo Sapiens
gcagcccccgguucuuccuuucuucucugcaa

SEQ ID NO: 139910 - RNA, 32 nt, Homo Sapiens
aauuuaaagcuaccauaaugcuuuuaauuagu

SEQ ID NO: 139911 - RNA, 32 nt, Homo Sapiens
ugguauuucuuacuuuuuucuugccucagaaa

SEQ ID NO: 139912 - RNA, 32 nt, Homo Sapiens
ugccugguguuuugcuuuuuuaucuuuucuug

SEQ ID NO: 139913 - RNA, 32 nt, Homo Sapiens
auaagcuuuguaauucagaaauccuuguauuu

SEQ ID NO: 139914 - RNA, 32 nt, Homo Sapiens
aguccuaguccagccucuggcuccccgaauuu

SEQ ID NO: 139915 - RNA, 32 nt, Homo Sapiens
aucgauaggagucaguuuugucuuaaaugcug

SEQ ID NO: 139916 - RNA, 32 nt, Homo Sapiens
guugcugccgggggucuccuucuguguggcca

SEQ ID NO: 139917 - RNA, 32 nt, Homo Sapiens
gcguccucagucggguggucccggggccuuug

SEQ ID NO: 139918 - RNA, 32 nt, Homo Sapiens
aaugucugcggugugaaggcagguucauugug

SEQ ID NO: 139919 - RNA, 31 nt, Homo Sapiens
cgggcggcggggcuggccgugagagagacag

SEQ ID NO: 139920 - RNA, 32 nt, Homo Sapiens
aaagaugaaaagacaacaaaaauaucuucaua

SEQ ID NO: 139921 - RNA, 32 nt, Homo Sapiens
uccuggaggagaaaacacaugagggugugguc

SEQ ID NO: 139922 - RNA, 32 nt, Homo Sapiens
acaugaacaauuuuaauugaaaacaccaguca

SEQ ID NO: 139923 - RNA, 32 nt, Homo Sapiens
gguguagagauuauggaaaaauucaauacaau

SEQ ID NO: 139924 - RNA, 31 nt, Homo Sapiens
acgaggagggcggacuccaggccccggccca

SEQ ID NO: 139925 - RNA, 32 nt, Homo Sapiens
uccaucaucucuuuucccacucccuuugcguc

SEQ ID NO: 139926 - RNA, 32 nt, Homo Sapiens
gccaggcucaacuuauagaauguuuuggaaac

SEQ ID NO: 139927 - RNA, 32 nt, Homo Sapiens
caaugcauaaguuguauaggcuaaauguugcu

SEQ ID NO: 139928 - RNA, 32 nt, Homo Sapiens
aguaccacaaagcuugguguuaccacaucacc

SEQ ID NO: 139929 - RNA, 32 nt, Homo Sapiens
ucggugcacgccccgcgaggccagcggcugcu

SEQ ID NO: 139930 - RNA, 32 nt, Homo Sapiens
ccuuuguuuucuugaucuguuacuuuuaauac

SEQ ID NO: 139931 - RNA, 32 nt, Homo Sapiens
uaagcaggggagaagcgggcuggggguagccu

SEQ ID NO: 139932 - RNA, 32 nt, Homo Sapiens
uggccaagacuaccuuggugcuggugauuacc

SEQ ID NO: 139933 - RNA, 32 nt, Homo Sapiens
aucugggagcagccacccgcuccgcgcuugcu

SEQ ID NO: 139934 - RNA, 30 nt, Homo Sapiens
ucagaugucugugaaugcagaccccgccuc

SEQ ID NO: 139935 - RNA, 31 nt, Homo Sapiens
cugcaucaagccacaucauguuaaacaaccu

SEQ ID NO: 139936 - RNA, 32 nt, Homo Sapiens
uucuaaauaaacuuauggccauacaugagaaa

SEQ ID NO: 139937 - RNA, 32 nt, Homo Sapiens
gacgucgcuucucccgggcucccggugucggc

SEQ ID NO: 139938 - RNA, 32 nt, Homo Sapiens
guagauaaauguucauuuuacugaugcacuuu

SEQ ID NO: 139939 - RNA, 32 nt, Homo Sapiens
gacgcgguggcagagcccgcgcggcgcuggaa

SEQ ID NO: 139940 - RNA, 32 nt, Homo Sapiens
cuccucccgacugagcagagccagacagacau

SEQ ID NO: 139941 - RNA, 32 nt, Homo Sapiens
aacgaggcauggagaccccagcucaacacgcc

SEQ ID NO: 139942 - RNA, 32 nt, Homo Sapiens
uucugcugccgcuccggguccgggccauuuuc

SEQ ID NO: 139943 - RNA, 32 nt, Homo Sapiens
ccacgcgccgggcgcggcccccucccaaacug

SEQ ID NO: 139944 - RNA, 25 nt, Homo Sapiens
uaauaaaaauccuuuuuguaaguuc

SEQ ID NO: 139945 - RNA, 32 nt, Homo Sapiens
cuggguguccccagcccuccagccccagacaa

SEQ ID NO: 139946 - RNA, 32 nt, Homo Sapiens
uaaaaauagacaugaggccuggcaugguggcu

SEQ ID NO: 139947 - RNA, 32 nt, Homo Sapiens
cacaaaaguuaguuaugauuuuuaaaagcauu

SEQ ID NO: 139948 - RNA, 32 nt, Homo Sapiens
aauugaaccaaguguuuuuacaugacaaguuc

SEQ ID NO: 139949 - RNA, 32 nt, Homo Sapiens
agcggcggcggcgggcggcgccuggcguuucg

SEQ ID NO: 139950 - RNA, 32 nt, Homo Sapiens
aggagagagggucaggagccagaguugaugag

SEQ ID NO: 139951 - RNA, 32 nt, Homo Sapiens
agcagaagcuggaacuuuuuauacuuauaaaa

SEQ ID NO: 139952 - RNA, 32 nt, Homo Sapiens
uauuaccucugugcucagugccaggcaaaaca

SEQ ID NO: 139953 - RNA, 32 nt, Homo Sapiens
gacaccuccuucagucccacucagcugggcgg

SEQ ID NO: 139954 - RNA, 32 nt, Homo Sapiens
auggcguucaagauuuuggagaugaacuugau

SEQ ID NO: 139955 - RNA, 32 nt, Homo Sapiens
uagccggaauggggaggagaacaucaucgaua

SEQ ID NO: 139956 - RNA, 32 nt, Homo Sapiens
auggaaaauaucuaucuauuuucaaauccugu

SEQ ID NO: 139957 - RNA, 32 nt, Homo Sapiens
cuaaaccauauuacauuuuaugcugaucuuca

SEQ ID NO: 139958 - RNA, 32 nt, Homo Sapiens
uggugcagcgccuggugaucuugcugugugcc

SEQ ID NO: 139959 - RNA, 32 nt, Homo Sapiens
uuccucaaaaggaaauuaugcuggucaucaca

SEQ ID NO: 139960 - RNA, 32 nt, Homo Sapiens
cggccccuggguucgaacacggcacccgcacu

SEQ ID NO: 139961 - RNA, 32 nt, Homo Sapiens
ccucucccuucccuccucccaugucacugcag

SEQ ID NO: 139962 - RNA, 32 nt, Homo Sapiens
ggcuuucuguucacaacccauccagagcuaca

SEQ ID NO: 139963 - RNA, 32 nt, Homo Sapiens
uaagugugaagaauguggcaaaacuuuuaacc

SEQ ID NO: 139964 - RNA, 32 nt, Homo Sapiens
gaaacuuguuugccaaccaauaaacaacugau

SEQ ID NO: 139965 - RNA, 32 nt, Homo Sapiens
agcgauaagaaacuguuauuuuaugaucuuuu

SEQ ID NO: 139966 - RNA, 32 nt, Homo Sapiens
acaccuuucugcaccugauguaaaaugacauu

SEQ ID NO: 139967 - RNA, 32 nt, Homo Sapiens
uuuccauuugcccucccuggccaugccuucuu

SEQ ID NO: 139968 - RNA, 32 nt, Homo Sapiens
uaggauauggggugggcugcucccagaaucug

SEQ ID NO: 139969 - RNA, 32 nt, Homo Sapiens
uuucauaucuacauuuaugaauguagaggcau

SEQ ID NO: 139970 - RNA, 32 nt, Homo Sapiens
ugguuccaaugaagauucugcugguguucuaa

SEQ ID NO: 139971 - RNA, 32 nt, Homo Sapiens
ucccagucaggaggcacaggggucagggacca

SEQ ID NO: 139972 - RNA, 32 nt, Homo Sapiens
cagcccuggcccucugccugcuccucacuccu

SEQ ID NO: 139973 - RNA, 32 nt, Homo Sapiens
cccuuuuugucaauaacucuguccuuaaggaa

SEQ ID NO: 139974 - RNA, 32 nt, Homo Sapiens
accagccaucgaaucugcuggugcauugauug

SEQ ID NO: 139975 - RNA, 32 nt, Homo Sapiens
aauuauaaaagcugcuuuuuugcagaacauuc

SEQ ID NO: 139976 - RNA, 32 nt, Homo Sapiens
gucccccacucagguagugcuuccucaccugc

SEQ ID NO: 139977 - RNA, 32 nt, Homo Sapiens
gaugaagcaaacugaggcccagagaagggaaa

SEQ ID NO: 139978 - RNA, 30 nt, Homo Sapiens
ccuggcaggcggcgcgcgguccaagguagc

SEQ ID NO: 139979 - RNA, 32 nt, Homo Sapiens
ucaaagacaguguccccuccacagcugggugc

SEQ ID NO: 139980 - RNA, 32 nt, Homo Sapiens
uugggcaugugguaaucaauaaucuuuauuag

SEQ ID NO: 139981 - RNA, 32 nt, Homo Sapiens
ggcacacagaccccaaccacgacacccaucac

SEQ ID NO: 139982 - RNA, 32 nt, Homo Sapiens
caucuaaauggugucaggacauuucaguacuu

SEQ ID NO: 139983 - RNA, 32 nt, Homo Sapiens
ccccuccgcgcgcggccccgaugcuggacaug

SEQ ID NO: 139984 - RNA, 32 nt, Homo Sapiens
aaaauuucaucccacccuccuugcuuaucguc

SEQ ID NO: 139985 - RNA, 32 nt, Homo Sapiens
uugguuguauguugaaauaacucucaagcaaa

SEQ ID NO: 139986 - RNA, 32 nt, Homo Sapiens
ggggccuguucccagcacauuuuccuguaagc

SEQ ID NO: 139987 - RNA, 32 nt, Homo Sapiens
agucucgcccuggcuaugcuggcgauuuuuca

SEQ ID NO: 139988 - RNA, 32 nt, Homo Sapiens
uacgaauucauaauauuugauucagaacagau

SEQ ID NO: 139989 - RNA, 32 nt, Homo Sapiens
auauucuuucccugucuuguuccauuuucuuu

SEQ ID NO: 139990 - RNA, 32 nt, Homo Sapiens
gggugagugcgagcuggcggggcgcgcggaga

SEQ ID NO: 139991 - RNA, 32 nt, Homo Sapiens
ugugaaggggcaaaaacucuaggagucacaac

SEQ ID NO: 139992 - RNA, 32 nt, Homo Sapiens
agucugcuacccucauuucucaucuuuuuacu

SEQ ID NO: 139993 - RNA, 32 nt, Homo Sapiens
gugguggugguggaaggggggaggugcuagca

SEQ ID NO: 139994 - RNA, 32 nt, Homo Sapiens
gagcaaaaggcaaauacacaaaauauuauuua

SEQ ID NO: 139995 - RNA, 30 nt, Homo Sapiens
aagcguggcaggcgccuggccuugggucca

SEQ ID NO: 139996 - RNA, 32 nt, Homo Sapiens
agaacuccucuuaccccccaaaacagauaaac

SEQ ID NO: 139997 - RNA, 32 nt, Homo Sapiens
uucuguguaagauuauaaucccaaauaccacu

SEQ ID NO: 139998 - RNA, 32 nt, Homo Sapiens
ugaauuccugccuguuccauggagggguucaa

SEQ ID NO: 139999 - RNA, 32 nt, Homo Sapiens
gcucgaccagccgagcgagcggcggccccggc

SEQ ID NO: 140000 - RNA, 32 nt, Homo Sapiens
guuguggucuuuugaguugaucuuggcagagu

SEQ ID NO: 140001 - RNA, 32 nt, Homo Sapiens
aaaccggaacaucagccggcuccaggcugaga

SEQ ID NO: 140002 - RNA, 32 nt, Homo Sapiens
uccugggccuucugcuggaugggcaccugggg

SEQ ID NO: 140003 - RNA, 32 nt, Homo Sapiens
gcaugagggaggauauuuuaaagggaaguaua

SEQ ID NO: 140004 - RNA, 32 nt, Homo Sapiens
cgucacuggcgggcucgcguguguacauagag

SEQ ID NO: 140005 - RNA, 32 nt, Homo Sapiens
acagauuauuuguuaugacaauaaaacacuca

SEQ ID NO: 140006 - RNA, 32 nt, Homo Sapiens
guccugccagcacagagcugccugcguccagc

SEQ ID NO: 140007 - RNA, 32 nt, Homo Sapiens
cuuuguccccaaaggcaaaccuuuaaaauaaa

SEQ ID NO: 140008 - RNA, 32 nt, Homo Sapiens
uccaggcuucuggccugaggcuacgcuuccua

SEQ ID NO: 140009 - RNA, 32 nt, Homo Sapiens
agccaggcgagugccgcggcggcagcggcggg

SEQ ID NO: 140010 - RNA, 32 nt, Homo Sapiens
cacuaagggaaaaccaaggugcgcauuccuuc

SEQ ID NO: 140011 - RNA, 32 nt, Homo Sapiens
gugccaggggcuguuauauacauauauacaca

SEQ ID NO: 140012 - RNA, 32 nt, Homo Sapiens
gcauucgcggagaaagagcguaauguaaaguc

SEQ ID NO: 140013 - RNA, 32 nt, Homo Sapiens
uggaggcagagaaccuuccuauagaaagucuu

SEQ ID NO: 140014 - RNA, 32 nt, Homo Sapiens
aagauaaacgagccagcuagccuguggaacau

SEQ ID NO: 140015 - RNA, 32 nt, Homo Sapiens
auucauaauuuucauuuuguauucuaacugga

SEQ ID NO: 140016 - RNA, 32 nt, Homo Sapiens
guaucuauuuuugugugugauuauaguaacua

SEQ ID NO: 140017 - RNA, 32 nt, Homo Sapiens
uuauuguccauaucauuaucagcauuuugguc

SEQ ID NO: 140018 - RNA, 32 nt, Homo Sapiens
uggggaguggguaucugcggagccggccugaa

SEQ ID NO: 140019 - RNA, 32 nt, Homo Sapiens
aagccaaaaugggaaaagaaaagacucauauc

SEQ ID NO: 140020 - RNA, 32 nt, Homo Sapiens
uucauugcugucuacagguuucuuucagauua

SEQ ID NO: 140021 - RNA, 32 nt, Homo Sapiens
acagugaaggauuagcugaaaauauaugagca

SEQ ID NO: 140022 - RNA, 32 nt, Homo Sapiens
agcaggaagagauguguuccucacgcuagaag

SEQ ID NO: 140023 - RNA, 32 nt, Homo Sapiens
uuuuuaauauaaauaugucagugcuugcuuga

SEQ ID NO: 140024 - RNA, 32 nt, Homo Sapiens
ggguggagaagaagaaagccgaaguccuugaa

SEQ ID NO: 140025 - RNA, 32 nt, Homo Sapiens
ggacuguuaugaacagaaaaugaugcaaugua

SEQ ID NO: 140026 - RNA, 32 nt, Homo Sapiens
uuuuuaaagagaauucuagaauucuauuuugu

SEQ ID NO: 140027 - RNA, 32 nt, Homo Sapiens
uuuaaucuuacacacacgucucuucuugucug

SEQ ID NO: 140028 - RNA, 32 nt, Homo Sapiens
cuuaacccaggaucuucaguaaauguugaauu

SEQ ID NO: 140029 - RNA, 32 nt, Homo Sapiens
cucccugcacuccgcaucuccuccccagcagc

SEQ ID NO: 140030 - RNA, 32 nt, Homo Sapiens
gaucacccauggcuagacgcugaaacccaccu

SEQ ID NO: 140031 - RNA, 32 nt, Homo Sapiens
agccuuuuccauuaaccuucccuucuuacgca

SEQ ID NO: 140032 - RNA, 32 nt, Homo Sapiens
ccagaacucugcaaagugaguccagcgcugag

SEQ ID NO: 140033 - RNA, 32 nt, Homo Sapiens
cauaucuguacuuuuuaaagauucuuaaguga

SEQ ID NO: 140034 - RNA, 32 nt, Homo Sapiens
gcucuaggacugccucccacugcggccccuca

SEQ ID NO: 140035 - RNA, 32 nt, Homo Sapiens
agaauauaacuguguuuggcaccugcauagca

SEQ ID NO: 140036 - RNA, 32 nt, Homo Sapiens
acacauccccgcgccccagagccccggccugc

SEQ ID NO: 140037 - RNA, 32 nt, Homo Sapiens
uuucuugcaguuaauguaagaauacuuuaaau

SEQ ID NO: 140038 - RNA, 29 nt, Homo Sapiens
auucggagcgagcgcgggacgccgaugag

SEQ ID NO: 140039 - RNA, 32 nt, Homo Sapiens
ccauguuucuucaugguuuaaccuccauuucu

SEQ ID NO: 140040 - RNA, 32 nt, Homo Sapiens
ucuaggugacagagcaagacuccaucucaaca

SEQ ID NO: 140041 - RNA, 32 nt, Homo Sapiens
cggauuaaaagaaauaauauauguaaagcacu

SEQ ID NO: 140042 - RNA, 32 nt, Homo Sapiens
auucuugugagaaauguuuugaaugugugaca

SEQ ID NO: 140043 - RNA, 32 nt, Homo Sapiens
ggugcagcaaaccaccauggcacauguauacc

SEQ ID NO: 140044 - RNA, 32 nt, Homo Sapiens
agcaguaauguuuacauuauuugauuauauuu

SEQ ID NO: 140045 - RNA, 32 nt, Homo Sapiens
guaucuaggcgcggccagggccccacaacagc

SEQ ID NO: 140046 - RNA, 32 nt, Homo Sapiens
acgcuggaugccagcucccagccccagugccg

SEQ ID NO: 140047 - RNA, 32 nt, Homo Sapiens
uggguccccuccccucucagcauuuccuuguc

SEQ ID NO: 140048 - RNA, 32 nt, Homo Sapiens
acaacauggagcaaaagagacagggagaggug

SEQ ID NO: 140049 - RNA, 32 nt, Homo Sapiens
cacuuccugcagagcggcccaagccccaaccc

SEQ ID NO: 140050 - RNA, 32 nt, Homo Sapiens
ucauccauucuauuguuaauaggcacuuaagu

SEQ ID NO: 140051 - RNA, 32 nt, Homo Sapiens
cuuucagucuacuuuucuuaaaucucuguuca

SEQ ID NO: 140052 - RNA, 32 nt, Homo Sapiens
aaauuuuuaggaaacucaccuuccucaucuaa

SEQ ID NO: 140053 - RNA, 32 nt, Homo Sapiens
auuuucaauucaaggaaucuaucuaagacaaa

SEQ ID NO: 140054 - RNA, 32 nt, Homo Sapiens
ccuccagcugaauaaaccauggagaggaaaaa

SEQ ID NO: 140055 - RNA, 32 nt, Homo Sapiens
uuuagguucuuugcugcauucugccucucuag

SEQ ID NO: 140056 - RNA, 32 nt, Homo Sapiens
gcgacgacacacucauuggaaggggacgagga

SEQ ID NO: 140057 - RNA, 32 nt, Homo Sapiens
guuguuaauaauauauuugacccuguuaauug

SEQ ID NO: 140058 - RNA, 32 nt, Homo Sapiens
caaggaauuguuaagacugguuuucccucaac

SEQ ID NO: 140059 - RNA, 32 nt, Homo Sapiens
auugguuuuuauuugcaguuuuuaguugcugu

SEQ ID NO: 140060 - RNA, 32 nt, Homo Sapiens
ucucucuguauauuuuguuauuuuauauaaaa

SEQ ID NO: 140061 - RNA, 32 nt, Homo Sapiens
guuccucccggggcuucaaggggugacugcug

SEQ ID NO: 140062 - RNA, 32 nt, Homo Sapiens
agaacaaaacaaaacaauacagaaucucuccc

SEQ ID NO: 140063 - RNA, 32 nt, Homo Sapiens
ucucccuuucccuugcaggccucuggagccuc

SEQ ID NO: 140064 - RNA, 32 nt, Homo Sapiens
caaagcuaccuggccugguuuggaaugcuuuu

SEQ ID NO: 140065 - RNA, 32 nt, Homo Sapiens
aaaauuaaucccuuuugucauauuucuaguca

SEQ ID NO: 140066 - RNA, 32 nt, Homo Sapiens
aaccauuuauguagugaugugggauaaccuuc

SEQ ID NO: 140067 - RNA, 29 nt, Homo Sapiens
ggcaaguggggacagggcggguggcgcau

SEQ ID NO: 140068 - RNA, 32 nt, Homo Sapiens
uguggaaccaaaccugcgcgcguggccgggcc

SEQ ID NO: 140069 - RNA, 30 nt, Homo Sapiens
cacucuugugaauagggggaaacauuggcc

SEQ ID NO: 140070 - RNA, 32 nt, Homo Sapiens
caaaugcuuucuuuuuauuuuucccuugguuu

SEQ ID NO: 140071 - RNA, 32 nt, Homo Sapiens
uauauuauuauuaauuacaauguaauagaagc

SEQ ID NO: 140072 - RNA, 32 nt, Homo Sapiens
uucauauggaauauuucuuauaaucccaaguu

SEQ ID NO: 140073 - RNA, 32 nt, Homo Sapiens
uuuuuuuuuuuuuuuuuuuuuaacauccucuu

SEQ ID NO: 140074 - RNA, 32 nt, Homo Sapiens
cgucuguguucuacggcaguuacacacacgca

SEQ ID NO: 140075 - RNA, 32 nt, Homo Sapiens
agaaggagaaugauccuuuggauacuuucaag

SEQ ID NO: 140076 - RNA, 32 nt, Homo Sapiens
gucuggggcuccuaggccugaugggaggagag

SEQ ID NO: 140077 - RNA, 32 nt, Homo Sapiens
uuauuuuauuuuauuuuauuuuuuugguauuu

SEQ ID NO: 140078 - RNA, 32 nt, Homo Sapiens
aaggagguagagaggggacugggggacuggga

SEQ ID NO: 140079 - RNA, 32 nt, Homo Sapiens
aauguuguucuucaaccagcaacagcaacagc

SEQ ID NO: 140080 - RNA, 32 nt, Homo Sapiens
ucagcugugucugacauguuugugcucuguuc

SEQ ID NO: 140081 - RNA, 32 nt, Homo Sapiens
gccuccugacuguaauaauauuaaacuuuuuu

SEQ ID NO: 140082 - RNA, 32 nt, Homo Sapiens
cugucuggggcagggagggcacaggccugcac

SEQ ID NO: 140083 - RNA, 32 nt, Homo Sapiens
gccaaggacaucgcaucagggauggccuaccu

SEQ ID NO: 140084 - RNA, 32 nt, Homo Sapiens
ugggccugccuugcagcuggccccuucccugc

SEQ ID NO: 140085 - RNA, 32 nt, Homo Sapiens
ucaguuuugugauuaaguucauuucucuuuua

SEQ ID NO: 140086 - RNA, 32 nt, Homo Sapiens
cucagguagggacugaauaaacacguguaagg

SEQ ID NO: 140087 - RNA, 32 nt, Homo Sapiens
uggcauuuucuuucuuuuuuuucuuuuugaga

SEQ ID NO: 140088 - RNA, 32 nt, Homo Sapiens
cucccccugggcucugccccagcucuggcuuc

SEQ ID NO: 140089 - RNA, 32 nt, Homo Sapiens
aauuccacuuaauuucacuauuacaaugcuca

SEQ ID NO: 140090 - RNA, 32 nt, Homo Sapiens
aguuucgcucuuguugcugaggcuggagugca

SEQ ID NO: 140091 - RNA, 32 nt, Homo Sapiens
guggguggauggguggggggcauuccagagcc

SEQ ID NO: 140092 - RNA, 32 nt, Homo Sapiens
ugucccgagggcgugggguggggggugcuucu

SEQ ID NO: 140093 - RNA, 27 nt, Homo Sapiens
ucccgcaccuucuucucccccgcaguu

SEQ ID NO: 140094 - RNA, 32 nt, Homo Sapiens
gcuuucauuuuucacuuggagugacaauggga

SEQ ID NO: 140095 - RNA, 32 nt, Homo Sapiens
gaagccuaaaaaugcaguuugcuggaaaccaa

SEQ ID NO: 140096 - RNA, 32 nt, Homo Sapiens
ugggagguggagguugcagugagccgagaaug

SEQ ID NO: 140097 - RNA, 32 nt, Homo Sapiens
aucucuaauuaucuguguaauuuuauaacaua

SEQ ID NO: 140098 - RNA, 32 nt, Homo Sapiens
guauuaauauuuuuuacuuugcccuuuuaaaa

SEQ ID NO: 140099 - RNA, 32 nt, Homo Sapiens
ggagguauaacccugcuccucucucccagucu

SEQ ID NO: 140100 - RNA, 32 nt, Homo Sapiens
caacuucuaucacccaacagugccaauggccc

SEQ ID NO: 140101 - RNA, 32 nt, Homo Sapiens
auuacaggcaccugccauuaugcccggcuaag

SEQ ID NO: 140102 - RNA, 32 nt, Homo Sapiens
ucgguaugagacuagaaagagauacacuguaa

SEQ ID NO: 140103 - RNA, 32 nt, Homo Sapiens
ugacuacuagaaaacuaaaagccucaaaaaug

SEQ ID NO: 140104 - RNA, 32 nt, Homo Sapiens
ucaagcggggagagggaguggagggucaggug

SEQ ID NO: 140105 - RNA, 32 nt, Homo Sapiens
ccaaggagaaaacaaccaagaacucuuuccug

SEQ ID NO: 140106 - RNA, 32 nt, Homo Sapiens
aauccacagauacguggaccugcgcaguucaa

SEQ ID NO: 140107 - RNA, 32 nt, Homo Sapiens
caggagcugaaguucugaaaucaucuaucacu

SEQ ID NO: 140108 - RNA, 32 nt, Homo Sapiens
ccggcccggcuggccugagccgccggaggagc

SEQ ID NO: 140109 - RNA, 32 nt, Homo Sapiens
uucuaagaccccucaccauccuggacacacuc

SEQ ID NO: 140110 - RNA, 32 nt, Homo Sapiens
uucgcaugacaaauucaguaacucgucuauuu

SEQ ID NO: 140111 - RNA, 32 nt, Homo Sapiens
gacgacgcuggcggcccagccugggcagguuu

SEQ ID NO: 140112 - RNA, 32 nt, Homo Sapiens
uucuuaauuguuagcuauuuauagaaagcuuc

SEQ ID NO: 140113 - RNA, 28 nt, Homo Sapiens
cucugaggggcuaccaggaaagcgccuc

SEQ ID NO: 140114 - RNA, 32 nt, Homo Sapiens
aaguuguuuaaauggaaaauaaagugcuuucu

SEQ ID NO: 140115 - RNA, 32 nt, Homo Sapiens
aguuugaccugcccagcgugugggcuggcuca

SEQ ID NO: 140116 - RNA, 32 nt, Homo Sapiens
gcaacacuggagugcacacgccgccacgguug

SEQ ID NO: 140117 - RNA, 32 nt, Homo Sapiens
ucuugugcauuccuccucucccuccuucguua

SEQ ID NO: 140118 - RNA, 32 nt, Homo Sapiens
uggaugcugugcuacgugugaaaucugucuuu

SEQ ID NO: 140119 - RNA, 32 nt, Homo Sapiens
cagcggccugacgcccuccccacccuggcaug

SEQ ID NO: 140120 - RNA, 32 nt, Homo Sapiens
accccaucucccccuagcuccuccugggcagc

SEQ ID NO: 140121 - RNA, 32 nt, Homo Sapiens
cugcugguggugcugcugcugcuucugaggca

SEQ ID NO: 140122 - RNA, 32 nt, Homo Sapiens
uucucgauugaaauauccauuguucguuaaua

SEQ ID NO: 140123 - RNA, 32 nt, Homo Sapiens
uccugagauauugaaauagugaaaucaccaaa

SEQ ID NO: 140124 - RNA, 32 nt, Homo Sapiens
gcccagagccccagccucuccccacagucuca

SEQ ID NO: 140125 - RNA, 32 nt, Homo Sapiens
ggcgccgagcgcggggucuugguccaccuucc

SEQ ID NO: 140126 - RNA, 32 nt, Homo Sapiens
agagugcugcuccgugggaaggcgcugggacc

SEQ ID NO: 140127 - RNA, 32 nt, Homo Sapiens
uggcgcuagguccagccccugcgugccgggaa

SEQ ID NO: 140128 - RNA, 32 nt, Homo Sapiens
ccaggaagagggaaaaacuuuuacuuuucuga

SEQ ID NO: 140129 - RNA, 32 nt, Homo Sapiens
cccacggcccggccuccugcuccuaugcccgc

SEQ ID NO: 140130 - RNA, 32 nt, Homo Sapiens
cauugaggucucacuauguugcacaggcuggu

SEQ ID NO: 140131 - RNA, 32 nt, Homo Sapiens
cagguuggaugaugagggagaucuuuauccau

SEQ ID NO: 140132 - RNA, 32 nt, Homo Sapiens
aggccaggcgugguggcucaccccccuguauu

SEQ ID NO: 140133 - RNA, 32 nt, Homo Sapiens
ucccuugagcccaggagugcaaggcugcaaug

SEQ ID NO: 140134 - RNA, 32 nt, Homo Sapiens
aauaaugauccauacauacuauaaggcacuuu

SEQ ID NO: 140135 - RNA, 32 nt, Homo Sapiens
uccggaagccucaggacaagaagaggcaagca

SEQ ID NO: 140136 - RNA, 32 nt, Homo Sapiens
gagacagggucucacugcauugcccuugcuga

SEQ ID NO: 140137 - RNA, 32 nt, Homo Sapiens
cugguccauucacuccacgcuuucugcagccg

SEQ ID NO: 140138 - RNA, 32 nt, Homo Sapiens
ucaacaaacaucaagucagcaagcauuugcca

SEQ ID NO: 140139 - RNA, 32 nt, Homo Sapiens
gguggcuggugcccacucucaaaggcugcugc

SEQ ID NO: 140140 - RNA, 32 nt, Homo Sapiens
gaaaaggggcuuugccuuuguaacuuuugaug

SEQ ID NO: 140141 - RNA, 32 nt, Homo Sapiens
ugagucuuagcuuuugcugggcaguuguucug

SEQ ID NO: 140142 - RNA, 32 nt, Homo Sapiens
gagaaguugacugucuugauaauuagccugac

SEQ ID NO: 140143 - RNA, 32 nt, Homo Sapiens
caaccacugacccuuccacaucuaccuuccaa

SEQ ID NO: 140144 - RNA, 32 nt, Homo Sapiens
ugacgggcuuuuugucuuggguuccagccccc

SEQ ID NO: 140145 - RNA, 32 nt, Homo Sapiens
gguaauaguuaaccucuucugugagaagucag

SEQ ID NO: 140146 - RNA, 32 nt, Homo Sapiens
cggcagccccacuucacccccaacuucaccac

SEQ ID NO: 140147 - RNA, 32 nt, Homo Sapiens
gauucuuuuucuucucuuuugagcacuuuuau

SEQ ID NO: 140148 - RNA, 32 nt, Homo Sapiens
caagagugccacuaggucuucuuccagcuggc

SEQ ID NO: 140149 - RNA, 32 nt, Homo Sapiens
cauucagcucuuuggcuuugccugagagacac

SEQ ID NO: 140150 - RNA, 32 nt, Homo Sapiens
uauuuauuuccuccacuuuuuaucuuaaaagu

SEQ ID NO: 140151 - RNA, 32 nt, Homo Sapiens
ucaauuugucuacuguaugaauuaaacacacc

SEQ ID NO: 140152 - RNA, 32 nt, Homo Sapiens
aaguuugugggaauagaggugaagcaccaggg

SEQ ID NO: 140153 - RNA, 32 nt, Homo Sapiens
ugugacccugagggcuccuccauggugcugca

SEQ ID NO: 140154 - RNA, 32 nt, Homo Sapiens
gcacuuuguucugagucuuuuaucuccaaaua

SEQ ID NO: 140155 - RNA, 32 nt, Homo Sapiens
ccugaggaagacuagcugcugcugcugcugcu

SEQ ID NO: 140156 - RNA, 32 nt, Homo Sapiens
gcacccacccucaucaaauguacgcacccucc

SEQ ID NO: 140157 - RNA, 29 nt, Homo Sapiens
caccaguccuguuucagaugugcagggaa

SEQ ID NO: 140158 - RNA, 32 nt, Homo Sapiens
agugcauugugggaaacucccgagcucuccuc

SEQ ID NO: 140159 - RNA, 32 nt, Homo Sapiens
cagcagcagacacuccaccccaaagccugcag

SEQ ID NO: 140160 - RNA, 31 nt, Homo Sapiens
uucacaggaggcaaauccagagccuggcugu

SEQ ID NO: 140161 - RNA, 32 nt, Homo Sapiens
gcccccucccacaucagucuccagacccuugg

SEQ ID NO: 140162 - RNA, 32 nt, Homo Sapiens
cucccucccuccugccgaggucuccggccccu

SEQ ID NO: 140163 - RNA, 32 nt, Homo Sapiens
aggccaggcuacugccuccugauaauggcuuc

SEQ ID NO: 140164 - RNA, 32 nt, Homo Sapiens
uucccuccuuccagcccucccucuaggacccu

SEQ ID NO: 140165 - RNA, 32 nt, Homo Sapiens
ucuagaaaguaaaauaaagaggaauguuacca

SEQ ID NO: 140166 - RNA, 31 nt, Homo Sapiens
gguggaugaaacaccaaagucuguuuccccg

SEQ ID NO: 140167 - RNA, 32 nt, Homo Sapiens
gcaguucccucauugcucuuuggacuaggcug

SEQ ID NO: 140168 - RNA, 32 nt, Homo Sapiens
uccuagaguacuccgcgccgccgggacgccgc

SEQ ID NO: 140169 - RNA, 32 nt, Homo Sapiens
auaagaaacuaaaugaagacaucgaggaacag

SEQ ID NO: 140170 - RNA, 32 nt, Homo Sapiens
aaaaaaguuuaaaaggaaauaucuguucugaa

SEQ ID NO: 140171 - RNA, 32 nt, Homo Sapiens
uuucaccauuuucucugguuugacuugcugaa

SEQ ID NO: 140172 - RNA, 32 nt, Homo Sapiens
cggacuuccgguucaagccggaaguugugguu

SEQ ID NO: 140173 - RNA, 32 nt, Homo Sapiens
aaagaaaaaaaauuaugaagaaaaauaaacag

SEQ ID NO: 140174 - RNA, 32 nt, Homo Sapiens
uucagcagggaugacgucaucaucacauucag

SEQ ID NO: 140175 - RNA, 32 nt, Homo Sapiens
cccggaagcaugccgaggaagaguccauucau

SEQ ID NO: 140176 - RNA, 32 nt, Homo Sapiens
auagcgcgccccagcagggcccgcgccaggcc

SEQ ID NO: 140177 - RNA, 32 nt, Homo Sapiens
aggguuguugguaauaaauguaugauguacac

SEQ ID NO: 140178 - RNA, 32 nt, Homo Sapiens
gaagugcugccaagauaugaccuccaggaagg

SEQ ID NO: 140179 - RNA, 32 nt, Homo Sapiens
cugccgucgcgugcagugcgggcugcccgccc

SEQ ID NO: 140180 - RNA, 32 nt, Homo Sapiens
aucacuugucauccaaagaauuauauuaaaga

SEQ ID NO: 140181 - RNA, 32 nt, Homo Sapiens
caguagaaaaauuagaagaaauccauuuacag

SEQ ID NO: 140182 - RNA, 32 nt, Homo Sapiens
agacagcaacucaggacucuaggauggaagaa

SEQ ID NO: 140183 - RNA, 32 nt, Homo Sapiens
ugaaauggaacauagucucagauucuucuaau

SEQ ID NO: 140184 - RNA, 32 nt, Homo Sapiens
aaaugucucuacaguacuugaaccuuuguuau

SEQ ID NO: 140185 - RNA, 32 nt, Homo Sapiens
ggaacgggaugagcuccugagauggaagaucu

SEQ ID NO: 140186 - RNA, 32 nt, Homo Sapiens
acucuccccacacuaaccuggguucccuuucc

SEQ ID NO: 140187 - RNA, 32 nt, Homo Sapiens
ugcuagcccugccuugagacaccccgagagcu

SEQ ID NO: 140188 - RNA, 32 nt, Homo Sapiens
uuggccugccuugccccuuaccugccgauugc

SEQ ID NO: 140189 - RNA, 32 nt, Homo Sapiens
cccuccugccugggcuauggcuccuuccuggu

SEQ ID NO: 140190 - RNA, 32 nt, Homo Sapiens
aacccugccucccacaguuccuccccuaaucu

SEQ ID NO: 140191 - RNA, 32 nt, Homo Sapiens
auggcuauaauaaaaagucaaaaaauaacaug

SEQ ID NO: 140192 - RNA, 32 nt, Homo Sapiens
caaggggagcaucuugcugugaugagugugac

SEQ ID NO: 140193 - RNA, 32 nt, Homo Sapiens
ucagacuuugcgccugggauucugagcaccug

SEQ ID NO: 140194 - RNA, 32 nt, Homo Sapiens
ucagagacaccggugugucaagcauggauauu

SEQ ID NO: 140195 - RNA, 32 nt, Homo Sapiens
cuagguaauuuauauuaaaaaguuuauuuagc

SEQ ID NO: 140196 - RNA, 32 nt, Homo Sapiens
cuacauggacauuugagucuucgucuucugcu

SEQ ID NO: 140197 - RNA, 32 nt, Homo Sapiens
gugcccacaguggcugcagaucugcccgugga

SEQ ID NO: 140198 - RNA, 32 nt, Homo Sapiens
augcauacauucaaagcacuguuuucaaaguu

SEQ ID NO: 140199 - RNA, 32 nt, Homo Sapiens
caaacaaaacaaaaaagcaaaccacauuuguu

SEQ ID NO: 140200 - RNA, 32 nt, Homo Sapiens
uaaacacaccaaucagugcucugugucuagcu

SEQ ID NO: 140201 - RNA, 32 nt, Homo Sapiens
ucagaauucuuaggcaaccuucauaccuuuau

SEQ ID NO: 140202 - RNA, 32 nt, Homo Sapiens
gggccagcgccgggcugagguguccagaggcg

SEQ ID NO: 140203 - RNA, 32 nt, Homo Sapiens
uuccccaauucaucugcuuauuuuggaccaug

SEQ ID NO: 140204 - RNA, 29 nt, Homo Sapiens
ggagaauguuuacucaguuuagugucuug

SEQ ID NO: 140205 - RNA, 32 nt, Homo Sapiens
cgacagccgcacugacaucuuucaggaccaca

SEQ ID NO: 140206 - RNA, 32 nt, Homo Sapiens
ccucucgcugcacccuuagaaacuucaccguc

SEQ ID NO: 140207 - RNA, 32 nt, Homo Sapiens
gaauauucaaaaacagcacuuuuccaggaagu

SEQ ID NO: 140208 - RNA, 32 nt, Homo Sapiens
acucaccccccacaccuuccccggccugagcu

SEQ ID NO: 140209 - RNA, 32 nt, Homo Sapiens
aaguccacuucaguuaagaaccacugacaaug

SEQ ID NO: 140210 - RNA, 32 nt, Homo Sapiens
ugaaacuugugucauugauguauuuuaaaacu

SEQ ID NO: 140211 - RNA, 32 nt, Homo Sapiens
auuuuucuuuuauuuuuuuuuauuugaccaaa

SEQ ID NO: 140212 - RNA, 32 nt, Homo Sapiens
aagggcgaggacccgagcgagcuuaaggagug

SEQ ID NO: 140213 - RNA, 32 nt, Homo Sapiens
cucuguuggaauguggcugagucaaagccucc

SEQ ID NO: 140214 - RNA, 32 nt, Homo Sapiens
gcccuucggucagcuucucucccuuucacccg

SEQ ID NO: 140215 - RNA, 32 nt, Homo Sapiens
gggcugugcucgucgccgcgcuccuggaccgg

SEQ ID NO: 140216 - RNA, 32 nt, Homo Sapiens
gcgucgcgguacgcucccgggcggcggcgcag

SEQ ID NO: 140217 - RNA, 32 nt, Homo Sapiens
gucgggccgcgacgagggaagcucgccugggc

SEQ ID NO: 140218 - RNA, 32 nt, Homo Sapiens
ugccugcgucccgcuccacggagucuuccaga

SEQ ID NO: 140219 - RNA, 32 nt, Homo Sapiens
accacaguauauuaugugcuuuauaaaaaaca

SEQ ID NO: 140220 - RNA, 32 nt, Homo Sapiens
uagaacccacugauaacagacuuauuccugga

SEQ ID NO: 140221 - RNA, 32 nt, Homo Sapiens
uauucaguagccacaugugacaguuaaaauua

SEQ ID NO: 140222 - RNA, 32 nt, Homo Sapiens
gacuguugauucagcacauuagcaucugacac

SEQ ID NO: 140223 - RNA, 32 nt, Homo Sapiens
aaggaaacucuuaaauuauaaugugaaaccug

SEQ ID NO: 140224 - RNA, 32 nt, Homo Sapiens
uccugcggcgcuuuccucuguuaccucguuuc

SEQ ID NO: 140225 - RNA, 32 nt, Homo Sapiens
aauucuugcuaacauagcaguacuuugcugug

SEQ ID NO: 140226 - RNA, 32 nt, Homo Sapiens
gagguccguccucacucacuguguuugaggaa

SEQ ID NO: 140227 - RNA, 32 nt, Homo Sapiens
guuuuuaaaacauggauguuaaggcuguuuug

SEQ ID NO: 140228 - RNA, 32 nt, Homo Sapiens
ugugaucuguuguaauaucaguuacaguggca

SEQ ID NO: 140229 - RNA, 32 nt, Homo Sapiens
gucccucccccgcuuccucccucugcggggag

SEQ ID NO: 140230 - RNA, 32 nt, Homo Sapiens
ugagcugcaggugcagugacuccagcuuaagc

SEQ ID NO: 140231 - RNA, 32 nt, Homo Sapiens
gggcgaggccggugaggacgcggcgggcgagc

SEQ ID NO: 140232 - RNA, 32 nt, Homo Sapiens
auggcugguguuaaauaucagcuccuaauaag

SEQ ID NO: 140233 - RNA, 32 nt, Homo Sapiens
ucuccucauugccugccuuccauucauauuac

SEQ ID NO: 140234 - RNA, 32 nt, Homo Sapiens
ccccaccccacuuaguccauagugaugcccac

SEQ ID NO: 140235 - RNA, 30 nt, Homo Sapiens
uuuaaaugugggucugcagaaggcuuuagg

SEQ ID NO: 140236 - RNA, 32 nt, Homo Sapiens
gccuacauuugcuuuugaucuaucuaguauaa

SEQ ID NO: 140237 - RNA, 32 nt, Homo Sapiens
cauagccauacaccucagccugugaaaugaac

SEQ ID NO: 140238 - RNA, 32 nt, Homo Sapiens
ccuccguggcugccuccaugggacaaggaccg

SEQ ID NO: 140239 - RNA, 32 nt, Homo Sapiens
uccaggcuugcaaagaaagugaggccucuugg

SEQ ID NO: 140240 - RNA, 32 nt, Homo Sapiens
gguuucacuauguuggccaggcuggucucaaa

SEQ ID NO: 140241 - RNA, 32 nt, Homo Sapiens
gguuucaccauguuggucaggcuggucucaaa

SEQ ID NO: 140242 - RNA, 32 nt, Homo Sapiens
cacugaggaccgaggacuaugcuaugaugagg

SEQ ID NO: 140243 - RNA, 32 nt, Homo Sapiens
agggcccgggcgcguccgcgcucugcagcggg

SEQ ID NO: 140244 - RNA, 32 nt, Homo Sapiens
aaggagaaggucggauuguagaagcuggggug

SEQ ID NO: 140245 - RNA, 32 nt, Homo Sapiens
cagcucguguuguuuuuauuaaguggauugua

SEQ ID NO: 140246 - RNA, 32 nt, Homo Sapiens
guucuaggacuuccgugugcguugccaccaga

SEQ ID NO: 140247 - RNA, 32 nt, Homo Sapiens
uccagggccacgugccaggcccggggcuggcg

SEQ ID NO: 140248 - RNA, 32 nt, Homo Sapiens
cucacacuuuuguagucucucuuuacauauua

SEQ ID NO: 140249 - RNA, 32 nt, Homo Sapiens
ccaauguccagcuacucuuuuguuuuugacac

SEQ ID NO: 140250 - RNA, 32 nt, Homo Sapiens
uuccgggcggucggagccgccgggagcuguag

SEQ ID NO: 140251 - RNA, 32 nt, Homo Sapiens
uccaggagggaucccaggaacugugggcaccc

SEQ ID NO: 140252 - RNA, 32 nt, Homo Sapiens
ggccccugcccggcucccaggucccugcgcga

SEQ ID NO: 140253 - RNA, 32 nt, Homo Sapiens
uuacacuaaucagugaaauaaauauuuucauu

SEQ ID NO: 140254 - RNA, 32 nt, Homo Sapiens
cauaagucauauuaacauucucuccgugaaau

SEQ ID NO: 140255 - RNA, 32 nt, Homo Sapiens
gucuucccauccccagcgauucccucucccag

SEQ ID NO: 140256 - RNA, 32 nt, Homo Sapiens
ccccaucggccacacuugcccugcucuccagu

SEQ ID NO: 140257 - RNA, 32 nt, Homo Sapiens
aggagguuaaggaaacgauccaugcaagagag

SEQ ID NO: 140258 - RNA, 32 nt, Homo Sapiens
cagaaagggagaacgccagagcccuggcuggu

SEQ ID NO: 140259 - RNA, 32 nt, Homo Sapiens
cccagcaaccugagcaagucccggcccugccc

SEQ ID NO: 140260 - RNA, 32 nt, Homo Sapiens
gucaggaauaccauguaacauguugaaguaga

SEQ ID NO: 140261 - RNA, 32 nt, Homo Sapiens
agaugguaaccaaaggaagcagcugggacagg

SEQ ID NO: 140262 - RNA, 32 nt, Homo Sapiens
aggcagcagggccacacuaugccugcgcccug

SEQ ID NO: 140263 - RNA, 32 nt, Homo Sapiens
gucggcgcccacugcccggcggcagcggcgga

SEQ ID NO: 140264 - RNA, 32 nt, Homo Sapiens
acauccuuuccaccaugcucuccccuucauca

SEQ ID NO: 140265 - RNA, 32 nt, Homo Sapiens
acuucagacucaucagagacucuaaaauauag

SEQ ID NO: 140266 - RNA, 32 nt, Homo Sapiens
gagggggcagagggcugccccugauggggccu

SEQ ID NO: 140267 - RNA, 32 nt, Homo Sapiens
ggaaaauacagucaaggcauuuacucuaaaug

SEQ ID NO: 140268 - RNA, 32 nt, Homo Sapiens
ggauuccgcgcgccccuucacgcgcccugcuc

SEQ ID NO: 140269 - RNA, 32 nt, Homo Sapiens
uuaugugucuuugguuaucagaucaauuacag

SEQ ID NO: 140270 - RNA, 32 nt, Homo Sapiens
agcacuuugggaggccgagauggguggaucau

SEQ ID NO: 140271 - RNA, 32 nt, Homo Sapiens
guuagaauggaaacagaaaaacauuaaaaagu

SEQ ID NO: 140272 - RNA, 32 nt, Homo Sapiens
agacuagagaauaauuuuuguggcauguugua

SEQ ID NO: 140273 - RNA, 32 nt, Homo Sapiens
gaauaguuugacuuguguuuuaucuuaaccac

SEQ ID NO: 140274 - RNA, 32 nt, Homo Sapiens
uucuggaggagaaaacacaugagugugugguc

SEQ ID NO: 140275 - RNA, 32 nt, Homo Sapiens
acugccuccugaugaagucccuacuguucacc

SEQ ID NO: 140276 - RNA, 32 nt, Homo Sapiens
cuuuagaugacgaauuaacccuugcuucuucg

SEQ ID NO: 140277 - RNA, 32 nt, Homo Sapiens
aaauuuuuauaucugcaucccuuuaaauuaua

SEQ ID NO: 140278 - RNA, 32 nt, Homo Sapiens
accucugccuccuggauucaaguguuaguagc

SEQ ID NO: 140279 - RNA, 27 nt, Homo Sapiens
uucugagaguucuucagcugcccuggu

SEQ ID NO: 140280 - RNA, 32 nt, Homo Sapiens
ugaagaaaaaucaucagucuuggaauacagaa

SEQ ID NO: 140281 - RNA, 32 nt, Homo Sapiens
ugagacacuagcagccugguccagucacccuu

SEQ ID NO: 140282 - RNA, 32 nt, Homo Sapiens
ucuuccacucccucacaugccccuugccuagc

SEQ ID NO: 140283 - RNA, 32 nt, Homo Sapiens
auauaaauauuuuaaauaucuuucauguucca

SEQ ID NO: 140284 - RNA, 32 nt, Homo Sapiens
guuuuagcaaaauggaaacaaacaguugugcc

SEQ ID NO: 140285 - RNA, 32 nt, Homo Sapiens
gcacccuguccccuccuccccaggccugugac

SEQ ID NO: 140286 - RNA, 32 nt, Homo Sapiens
guugugucugucaucuccuacugggaccagag

SEQ ID NO: 140287 - RNA, 32 nt, Homo Sapiens
aagacacaucagagaaaacuacaggccaauau

SEQ ID NO: 140288 - RNA, 32 nt, Homo Sapiens
ugcuaggaacacuccuucacagaugggugcuu

SEQ ID NO: 140289 - RNA, 32 nt, Homo Sapiens
cuuccccaccucuucccgaucccggacuagcg

SEQ ID NO: 140290 - RNA, 32 nt, Homo Sapiens
gggugcagagucugguugcaccuaccacgccc

SEQ ID NO: 140291 - RNA, 32 nt, Homo Sapiens
accauggcguucgccgggcuggagcgaguaca

SEQ ID NO: 140292 - RNA, 32 nt, Homo Sapiens
auauaugacagucaaaaccuguguacauauuu

SEQ ID NO: 140293 - RNA, 32 nt, Homo Sapiens
gggugcuugucauguucguuuauuuuucaaag

SEQ ID NO: 140294 - RNA, 32 nt, Homo Sapiens
agcuuguauuuugugaagacugggaagugacu

SEQ ID NO: 140295 - RNA, 32 nt, Homo Sapiens
cggccucuuugcggagaaucgugaccaagaug

SEQ ID NO: 140296 - RNA, 32 nt, Homo Sapiens
gaacugaccuugaaucuuuuuaucccauuuag

SEQ ID NO: 140297 - RNA, 32 nt, Homo Sapiens
cuuuaaauccagcccuucacccgcccccuaga

SEQ ID NO: 140298 - RNA, 32 nt, Homo Sapiens
caugccuccccuccccaggccgcggcccagcu

SEQ ID NO: 140299 - RNA, 32 nt, Homo Sapiens
cgcgugggcugcugggcccgguggccgcaaaa

SEQ ID NO: 140300 - RNA, 32 nt, Homo Sapiens
uacauucuaggagaaaaauauucaucuuagag

SEQ ID NO: 140301 - RNA, 32 nt, Homo Sapiens
agccgucugaccaguuggcuggcggugguucu

SEQ ID NO: 140302 - RNA, 32 nt, Homo Sapiens
cuugguuucaacaucuaauucaauuuguucug

SEQ ID NO: 140303 - RNA, 32 nt, Homo Sapiens
auaaaugaugugcagaaauuguacuuaaggac

SEQ ID NO: 140304 - RNA, 32 nt, Homo Sapiens
ggccgcgguucgacucccgucccugcuuccag

SEQ ID NO: 140305 - RNA, 32 nt, Homo Sapiens
cgccgagccccuggccucgcggugccaugcug

SEQ ID NO: 140306 - RNA, 32 nt, Homo Sapiens
uguucuuaucuaaaacgucaauuagaaaauua

SEQ ID NO: 140307 - RNA, 32 nt, Homo Sapiens
accauuaaacugaaucagaaauccauuuucug

SEQ ID NO: 140308 - RNA, 32 nt, Homo Sapiens
cuuuuuaucuucugucuugcuaucauuguucc

SEQ ID NO: 140309 - RNA, 32 nt, Homo Sapiens
gucaccgcccucgcagacgagucagcuuaagg

SEQ ID NO: 140310 - RNA, 32 nt, Homo Sapiens
gcaccugccaaggcugcccuggcgcugagucc

SEQ ID NO: 140311 - RNA, 32 nt, Homo Sapiens
acaccuaggcaccgugaagaccuauacaguca

SEQ ID NO: 140312 - RNA, 30 nt, Homo Sapiens
ggaagguguuuauggggggaaagggacuuc

SEQ ID NO: 140313 - RNA, 32 nt, Homo Sapiens
ggucgccccuccccggauucccccacccuccg

SEQ ID NO: 140314 - RNA, 32 nt, Homo Sapiens
gagagcuucaaagccccaaauuccugggcugg

SEQ ID NO: 140315 - RNA, 32 nt, Homo Sapiens
ugccucccugucacaacgcugcccccaauacc

SEQ ID NO: 140316 - RNA, 31 nt, Homo Sapiens
uuugguuucucugcccugccccaagcgugcu

SEQ ID NO: 140317 - RNA, 32 nt, Homo Sapiens
agcugcaugcuucacuggaguugagggccucu

SEQ ID NO: 140318 - RNA, 32 nt, Homo Sapiens
cuuaaaaaauaacaacgcuucuucggugaagu

SEQ ID NO: 140319 - RNA, 32 nt, Homo Sapiens
ggaagcuaaaagaauuacagggauguuuuuaa

SEQ ID NO: 140320 - RNA, 32 nt, Homo Sapiens
gcuuauuucuaaaaagucaagucuauuggcuu

SEQ ID NO: 140321 - RNA, 32 nt, Homo Sapiens
agaugcucacaguggggugcugcuccaguauu

SEQ ID NO: 140322 - RNA, 32 nt, Homo Sapiens
uacaaaaaaaggggaaaacacacacacggaaa

SEQ ID NO: 140323 - RNA, 32 nt, Homo Sapiens
gugcuaaauuuguaaauaauugaaaugaguca

SEQ ID NO: 140324 - RNA, 32 nt, Homo Sapiens
ccggccaaggacccaggcgcugcauacagggg

SEQ ID NO: 140325 - RNA, 32 nt, Homo Sapiens
cucugcugccagcaucggucccgauccagccc

SEQ ID NO: 140326 - RNA, 32 nt, Homo Sapiens
uuguauccuucugcccucgagaccuggcacag

SEQ ID NO: 140327 - RNA, 32 nt, Homo Sapiens
ugguuuaacucaguuaaguugaggagccucau

SEQ ID NO: 140328 - RNA, 32 nt, Homo Sapiens
gcugcgacaccccaaccccagcccucuaauca

SEQ ID NO: 140329 - RNA, 32 nt, Homo Sapiens
cuggcuaauuuuuguuuuuuuacuagaggugg

SEQ ID NO: 140330 - RNA, 32 nt, Homo Sapiens
ugccuuuuccccccuuucacagauggcacccc

SEQ ID NO: 140331 - RNA, 32 nt, Homo Sapiens
gaugcggcggggcggcagccugagcgccccgg

SEQ ID NO: 140332 - RNA, 32 nt, Homo Sapiens
aggaucaaaguuaaacagcauucuucacugca

SEQ ID NO: 140333 - RNA, 32 nt, Homo Sapiens
gcgcucggaccccggccgcugccgccaucacu

SEQ ID NO: 140334 - RNA, 31 nt, Homo Sapiens
accuaaucacucccaaaguccaccuccuaac

SEQ ID NO: 140335 - RNA, 32 nt, Homo Sapiens
ggcagaucuugguagcacuuuauauguuuacc

SEQ ID NO: 140336 - RNA, 32 nt, Homo Sapiens
aguuuccugugagggagggcacccacccauca

SEQ ID NO: 140337 - RNA, 32 nt, Homo Sapiens
uuuuucucccucuggaucaaaguaggcaggac

SEQ ID NO: 140338 - RNA, 32 nt, Homo Sapiens
ugguaguaauuuccuuuauuauucuguauccu

SEQ ID NO: 140339 - RNA, 32 nt, Homo Sapiens
cuuuuauuaauucggggagccuggucaccaac

SEQ ID NO: 140340 - RNA, 32 nt, Homo Sapiens
guaucuguaauguaugaaauagagucuggaau

SEQ ID NO: 140341 - RNA, 32 nt, Homo Sapiens
guuggaagggaagaggcauuuguggaauuaug

SEQ ID NO: 140342 - RNA, 32 nt, Homo Sapiens
gccgccgacgcggugcugcugccgccgcuucg

SEQ ID NO: 140343 - RNA, 32 nt, Homo Sapiens
gacaugugaggccauuuaaauauuuuuaagau

SEQ ID NO: 140344 - RNA, 32 nt, Homo Sapiens
gagccgggcuccugcggaugggggcugccccc

SEQ ID NO: 140345 - RNA, 30 nt, Homo Sapiens
cacccugagacgggcggcggcgggauggca

SEQ ID NO: 140346 - RNA, 32 nt, Homo Sapiens
gcucaaagaugaugaaaggcauagauauccug

SEQ ID NO: 140347 - RNA, 32 nt, Homo Sapiens
gcgggccgccguacgcccggggcugcggcucu

SEQ ID NO: 140348 - RNA, 29 nt, Homo Sapiens
uggggguggggacagggagucaccggucg

SEQ ID NO: 140349 - RNA, 32 nt, Homo Sapiens
augucaaggcucuggagacaggaagggccuuu

SEQ ID NO: 140350 - RNA, 32 nt, Homo Sapiens
uaaagccuguuaaauuugugauuagcagugag

SEQ ID NO: 140351 - RNA, 32 nt, Homo Sapiens
cuuuacuaccugcagaacugcacuauaagaaa

SEQ ID NO: 140352 - RNA, 32 nt, Homo Sapiens
uucugagacaucaggcggggccugggacccgc

SEQ ID NO: 140353 - RNA, 32 nt, Homo Sapiens
cugaggcucccucuccugcagagaucucagac

SEQ ID NO: 140354 - RNA, 32 nt, Homo Sapiens
cuggagcuggagaagaagcggcuggaggagcg

SEQ ID NO: 140355 - RNA, 32 nt, Homo Sapiens
ggauugcgguucgcggcgcgcgccaccgggga

SEQ ID NO: 140356 - RNA, 32 nt, Homo Sapiens
cuccgaggaggggagagaagacuuuguuuccg

SEQ ID NO: 140357 - RNA, 32 nt, Homo Sapiens
gcauucagcucuuuggaggaguccaucugucc

SEQ ID NO: 140358 - RNA, 32 nt, Homo Sapiens
ucuacaaaaaauacaaaaacuagccaggcagg

SEQ ID NO: 140359 - RNA, 32 nt, Homo Sapiens
uaagccaggagcuggguuaugcaccgccaugg

SEQ ID NO: 140360 - RNA, 29 nt, Homo Sapiens
agccaugcaguacccgcaccccgggccgg

SEQ ID NO: 140361 - RNA, 32 nt, Homo Sapiens
auuuuagaccucuuugagcaucugaaaaaagg

SEQ ID NO: 140362 - RNA, 32 nt, Homo Sapiens
cuggucuucuauuuuugguguuguucaaguga

SEQ ID NO: 140363 - RNA, 29 nt, Homo Sapiens
aaagaauaaaguuuuauuuauggcuaccu

SEQ ID NO: 140364 - RNA, 32 nt, Homo Sapiens
uugcccaagggccagcucaguuuauccuucgg

SEQ ID NO: 140365 - RNA, 32 nt, Homo Sapiens
uucaauucacaagagcauuuucccucccaugc

SEQ ID NO: 140366 - RNA, 32 nt, Homo Sapiens
agaaagaaaucaaagccucuucauauaccagc

SEQ ID NO: 140367 - RNA, 32 nt, Homo Sapiens
aguacagagaugaacagaaaacuuuuucuuua

SEQ ID NO: 140368 - RNA, 32 nt, Homo Sapiens
uaggaauguacauuuuagguauuaucuugauc

SEQ ID NO: 140369 - RNA, 32 nt, Homo Sapiens
gcagagugcuuuauaaauaucaccuuauuuua

SEQ ID NO: 140370 - RNA, 32 nt, Homo Sapiens
ggacgcggguccggcgcgcgggaggcgaugac

SEQ ID NO: 140371 - RNA, 32 nt, Homo Sapiens
cuuggaucugcaaagaaagcuuuucuuccguc

SEQ ID NO: 140372 - RNA, 32 nt, Homo Sapiens
uccccuucuacaagaucaauauguaaaggaga

SEQ ID NO: 140373 - RNA, 32 nt, Homo Sapiens
aagacagcacaccuaccuuuucaggauuuaga

SEQ ID NO: 140374 - RNA, 32 nt, Homo Sapiens
uauuuuugcaaauaguuuuucuuuaauaugau

SEQ ID NO: 140375 - RNA, 32 nt, Homo Sapiens
uguguauguauuauuuggacuauggauucagg

SEQ ID NO: 140376 - RNA, 32 nt, Homo Sapiens
gcccaggcagaaguuugcugcaggagcagggc

SEQ ID NO: 140377 - RNA, 32 nt, Homo Sapiens
cugcgcugccagcucaggugagcccucgccaa

SEQ ID NO: 140378 - RNA, 32 nt, Homo Sapiens
agacguggccaggggaacacggcuggcugucc

SEQ ID NO: 140379 - RNA, 32 nt, Homo Sapiens
acaaguuaugaguagcugcuacccuggaacgg

SEQ ID NO: 140380 - RNA, 32 nt, Homo Sapiens
acuacggaugggaacuauuacaguuuauaaug

SEQ ID NO: 140381 - RNA, 32 nt, Homo Sapiens
caugaauguuuaaaguggcauuacucauaaua

SEQ ID NO: 140382 - RNA, 32 nt, Homo Sapiens
ucuuugcucuguacaaucggccucuuuacaau

SEQ ID NO: 140383 - RNA, 32 nt, Homo Sapiens
ccgccuggugguggagaaggcggccuggcugc

SEQ ID NO: 140384 - RNA, 32 nt, Homo Sapiens
cuuucuuccuuccuuccuugauggagucucac

SEQ ID NO: 140385 - RNA, 32 nt, Homo Sapiens
cccaagggaaaggggacugugcccuggaggcu

SEQ ID NO: 140386 - RNA, 32 nt, Homo Sapiens
uacaaaaggggagguuuuagacaggcucccug

SEQ ID NO: 140387 - RNA, 29 nt, Homo Sapiens
aaaugaagaucuuuauauuucaauaaaug

SEQ ID NO: 140388 - RNA, 32 nt, Homo Sapiens
ugcgcugguuugcggcuuugggaaauaaaaua

SEQ ID NO: 140389 - RNA, 32 nt, Homo Sapiens
gcgguggcugugggcguccggccccgaaccug

SEQ ID NO: 140390 - RNA, 32 nt, Homo Sapiens
acugaaaagagccaugcugucuagucuugaag

SEQ ID NO: 140391 - RNA, 32 nt, Homo Sapiens
ucuucaugugggguauuaauucucaaauaaua

SEQ ID NO: 140392 - RNA, 32 nt, Homo Sapiens
cgagauagguacuguuaccauccucucugcag

SEQ ID NO: 140393 - RNA, 32 nt, Homo Sapiens
agcuggagccaucccaagcaucagugucucag

SEQ ID NO: 140394 - RNA, 32 nt, Homo Sapiens
ucagaaaaacagccuucggcucuggagcccac

SEQ ID NO: 140395 - RNA, 32 nt, Homo Sapiens
cugucagacaccaaauaauugcucuuaggugg

SEQ ID NO: 140396 - RNA, 32 nt, Homo Sapiens
gcgcuuuuggaaguuauaucaaguucuagugu

SEQ ID NO: 140397 - RNA, 32 nt, Homo Sapiens
gaagugacgagcgagacccgcguacgacugug

SEQ ID NO: 140398 - RNA, 32 nt, Homo Sapiens
gagaaaggagaggaagcagaucuaagcacaca

SEQ ID NO: 140399 - RNA, 32 nt, Homo Sapiens
aucucacccaugaugcguggggccuaggagga

SEQ ID NO: 140400 - RNA, 32 nt, Homo Sapiens
gaaauaaaaugaaggcuucacuggauuuguga

SEQ ID NO: 140401 - RNA, 32 nt, Homo Sapiens
ccuauggggaugaaccugcucuucagugugaa

SEQ ID NO: 140402 - RNA, 32 nt, Homo Sapiens
ucccgacgccggcuguaccgggaccuccuggu

SEQ ID NO: 140403 - RNA, 32 nt, Homo Sapiens
cagguccggacaggccgagaugacgccgagcc

SEQ ID NO: 140404 - RNA, 32 nt, Homo Sapiens
augucaaguuccuaagaaaauccuguuggaaa

SEQ ID NO: 140405 - RNA, 29 nt, Homo Sapiens
guaacugugacuuuucucucugucugccc

SEQ ID NO: 140406 - RNA, 32 nt, Homo Sapiens
uauggagaaaucaccauacuguuuuccauagg

SEQ ID NO: 140407 - RNA, 31 nt, Homo Sapiens
caggcugggcgacagagugagagucugucuc

SEQ ID NO: 140408 - RNA, 32 nt, Homo Sapiens
ucaucccuaccuuggaagagggccugcaguuu

SEQ ID NO: 140409 - RNA, 32 nt, Homo Sapiens
auucuuugaggggauccuggauguguguguuc

SEQ ID NO: 140410 - RNA, 32 nt, Homo Sapiens
gcgaccgcgggaagggccggcccccauccgca

SEQ ID NO: 140411 - RNA, 32 nt, Homo Sapiens
ugcagugagccgugauuucaccaccacuccag

SEQ ID NO: 140412 - RNA, 32 nt, Homo Sapiens
ucccaaucuggugagcgcuacacaccuucauc

SEQ ID NO: 140413 - RNA, 32 nt, Homo Sapiens
uauauaugaaaauuauuaugacacgcacuuuu

SEQ ID NO: 140414 - RNA, 31 nt, Homo Sapiens
gggagcucaggggccgcaggagccgggccgg

SEQ ID NO: 140415 - RNA, 32 nt, Homo Sapiens
cuugggaggggaggugccaggucagaggcagc

SEQ ID NO: 140416 - RNA, 32 nt, Homo Sapiens
guucuggaaaaguuugaaauaaugacauaaaa

SEQ ID NO: 140417 - RNA, 32 nt, Homo Sapiens
agcucuucaauccuaagauuuucaugaaaagc

SEQ ID NO: 140418 - RNA, 32 nt, Homo Sapiens
accauagucuucugcucugguccuccacgggu

SEQ ID NO: 140419 - RNA, 32 nt, Homo Sapiens
uuuuuuuuuuuuucuuuuuuuugauaaguccc

SEQ ID NO: 140420 - RNA, 32 nt, Homo Sapiens
ugagcugagccuggccacagggcccgccugca

SEQ ID NO: 140421 - RNA, 32 nt, Homo Sapiens
ccucuggguaugcacagcuaaggggccucauu

SEQ ID NO: 140422 - RNA, 32 nt, Homo Sapiens
ucggaugcaggggucaugcacacagcaaagcu

SEQ ID NO: 140423 - RNA, 28 nt, Homo Sapiens
gucaugccugcuugggugauagauaaau

SEQ ID NO: 140424 - RNA, 32 nt, Homo Sapiens
uuuuucuuuuuuucuuuuugagauggagucac

SEQ ID NO: 140425 - RNA, 32 nt, Homo Sapiens
gaccacgucuggcaggccccaaggcccaggca

SEQ ID NO: 140426 - RNA, 32 nt, Homo Sapiens
gaccugugagagauugaaccauggagaaauau

SEQ ID NO: 140427 - RNA, 32 nt, Homo Sapiens
ucaaaagauccaacuuuuucucuaugccuuug

SEQ ID NO: 140428 - RNA, 32 nt, Homo Sapiens
gcuggagacugugucugcuuucugccuccucu

SEQ ID NO: 140429 - RNA, 32 nt, Homo Sapiens
agaagaacuaugacaucuuuuagaaaagggaa

SEQ ID NO: 140430 - RNA, 28 nt, Homo Sapiens
ggaaaggggcggccgugggcgcagcuuc

SEQ ID NO: 140431 - RNA, 32 nt, Homo Sapiens
ccaucccagguucuuuguuuucuguuuuaaua

SEQ ID NO: 140432 - RNA, 32 nt, Homo Sapiens
gaagggaaaaauaccuaaaaauguacaaaggu

SEQ ID NO: 140433 - RNA, 30 nt, Homo Sapiens
aaugagccgggagagccgggucccgagccu

SEQ ID NO: 140434 - RNA, 32 nt, Homo Sapiens
uuagcugugugcccuugggcaagccccugaau

SEQ ID NO: 140435 - RNA, 32 nt, Homo Sapiens
uccacucugaagacuuuaaggucauuucuaau

SEQ ID NO: 140436 - RNA, 32 nt, Homo Sapiens
ucuccuguucuuccacuuuccugccuggcuuu

SEQ ID NO: 140437 - RNA, 32 nt, Homo Sapiens
gaauauacaugaagaauagaaacaagccugcc

SEQ ID NO: 140438 - RNA, 32 nt, Homo Sapiens
uccgcaaauauguuuugggcaguuacauaccg

SEQ ID NO: 140439 - RNA, 32 nt, Homo Sapiens
cuguccuacuuacagcacuuuggaucaucaaa

SEQ ID NO: 140440 - RNA, 32 nt, Homo Sapiens
agccgggccggggggcagcugcacagucuccg

SEQ ID NO: 140441 - RNA, 32 nt, Homo Sapiens
uauguuccaaggucaucauauguuuuaaacau

SEQ ID NO: 140442 - RNA, 32 nt, Homo Sapiens
cuggggccuccagccugggacugcugugaugg

SEQ ID NO: 140443 - RNA, 32 nt, Homo Sapiens
cauccaaauaaaauaaaauaaaauaaaaaggu

SEQ ID NO: 140444 - RNA, 32 nt, Homo Sapiens
uucccaaucccuuccgcccaaggcuuuccugg

SEQ ID NO: 140445 - RNA, 32 nt, Homo Sapiens
agggcccggcacaggcccacccugguccaaac

SEQ ID NO: 140446 - RNA, 32 nt, Homo Sapiens
cuuugucccaucccucuuuuucugggacuuug

SEQ ID NO: 140447 - RNA, 32 nt, Homo Sapiens
uguuagaggaggagaugggagcggugacuaca

SEQ ID NO: 140448 - RNA, 32 nt, Homo Sapiens
auaaugauacuguaguuauuccaguuacuagu

SEQ ID NO: 140449 - RNA, 32 nt, Homo Sapiens
auagugauauaaaauccuagauguguucaauu

SEQ ID NO: 140450 - RNA, 32 nt, Homo Sapiens
aaaggaaaugcucuugaugagaggcucgcuuu

SEQ ID NO: 140451 - RNA, 32 nt, Homo Sapiens
ugagugguuuguagaauuuguguucauaaguu

SEQ ID NO: 140452 - RNA, 32 nt, Homo Sapiens
aauuaaaucuaguucaccuugcucacccugcg

SEQ ID NO: 140453 - RNA, 32 nt, Homo Sapiens
uauguaauucauauaaaucaacuguuuauauc

SEQ ID NO: 140454 - RNA, 32 nt, Homo Sapiens
gaugggggcauggagauaguuuuuacguacug

SEQ ID NO: 140455 - RNA, 32 nt, Homo Sapiens
cagggcccaucccuucucugcagcucugaccc

SEQ ID NO: 140456 - RNA, 32 nt, Homo Sapiens
uaauuguugcuguuguuguugcuguuaauauu

SEQ ID NO: 140457 - RNA, 31 nt, Homo Sapiens
gcuggaagcaagccauuuaauccgguucuug

SEQ ID NO: 140458 - RNA, 32 nt, Homo Sapiens
ggacuacuguugaagaaauucccaguaaggcu

SEQ ID NO: 140459 - RNA, 32 nt, Homo Sapiens
ggacugaccugcccugagcggggaugcagugu

SEQ ID NO: 140460 - RNA, 32 nt, Homo Sapiens
uccccaacacagugacucugaccuggaaccac

SEQ ID NO: 140461 - RNA, 32 nt, Homo Sapiens
aaaugcauuagacucucuuccauccaucaaau

SEQ ID NO: 140462 - RNA, 31 nt, Homo Sapiens
acauaaagagagcuucucagagccugacuga

SEQ ID NO: 140463 - RNA, 32 nt, Homo Sapiens
uuacaggcgugagccaccacgcccgaccugau

SEQ ID NO: 140464 - RNA, 32 nt, Homo Sapiens
cccgggacaguaggucugggcggcaccacugg

SEQ ID NO: 140465 - RNA, 32 nt, Homo Sapiens
aguaaaaugaauuuccuuccaaguagccuauu

SEQ ID NO: 140466 - RNA, 32 nt, Homo Sapiens
gccagauguucccuucuuugugggugaggacu

SEQ ID NO: 140467 - RNA, 32 nt, Homo Sapiens
uuucuguucuauuuuuuuuuuaaccccaauua

SEQ ID NO: 140468 - RNA, 29 nt, Homo Sapiens
ucuguaccauaugagaaaguugccuucag

SEQ ID NO: 140469 - RNA, 32 nt, Homo Sapiens
ggcacuuggggcaccuugcuccuccuucugcu

SEQ ID NO: 140470 - RNA, 32 nt, Homo Sapiens
acuagcacaccacugcaugucucuagaaugcu

SEQ ID NO: 140471 - RNA, 31 nt, Homo Sapiens
uuuaugugaaacauccggaguaugcaaaucu

SEQ ID NO: 140472 - RNA, 32 nt, Homo Sapiens
cgucuggagaagcggcuuccgggguguggcug

SEQ ID NO: 140473 - RNA, 32 nt, Homo Sapiens
gacuaucaaacacaguguugccuacaauagca

SEQ ID NO: 140474 - RNA, 32 nt, Homo Sapiens
auaccuguguacugaggguuaugauuuguguc

SEQ ID NO: 140475 - RNA, 32 nt, Homo Sapiens
acuuuaaugaauuaggauaacaagaagagaaa

SEQ ID NO: 140476 - RNA, 32 nt, Homo Sapiens
uauggauacagcaaauccagaugucucugaac

SEQ ID NO: 140477 - RNA, 32 nt, Homo Sapiens
cuucgcggcacucggccuccucugcgucuccg

SEQ ID NO: 140478 - RNA, 32 nt, Homo Sapiens
aggguccugguccuaaagaguuauucaaauga

SEQ ID NO: 140479 - RNA, 32 nt, Homo Sapiens
uauauuuuuuaaaguuacuguaauuccuuuuu

SEQ ID NO: 140480 - RNA, 30 nt, Homo Sapiens
uggguugucugugugcauauguccugcccg

SEQ ID NO: 140481 - RNA, 32 nt, Homo Sapiens
ucuucccaucccuucccccacccaaagcaggc

SEQ ID NO: 140482 - RNA, 32 nt, Homo Sapiens
ucgggguccaugugcccgccucaggcacaggc

SEQ ID NO: 140483 - RNA, 30 nt, Homo Sapiens
aggcuccgaggcggcggcggcgacucccuc

SEQ ID NO: 140484 - RNA, 32 nt, Homo Sapiens
ugagccuccugugccuggccccagucugggcc

SEQ ID NO: 140485 - RNA, 32 nt, Homo Sapiens
ucacuucagugcccgggugcuccagcucugcc

SEQ ID NO: 140486 - RNA, 32 nt, Homo Sapiens
ucggccuggaggggcgaauggggacaaagccc

SEQ ID NO: 140487 - RNA, 32 nt, Homo Sapiens
uuugccuuuuucuuagcaguuuugcuuauuag

SEQ ID NO: 140488 - RNA, 32 nt, Homo Sapiens
uuuagcggagacggagucccaccuuggcugca

SEQ ID NO: 140489 - RNA, 32 nt, Homo Sapiens
ccuuuuuggggaugcuuggugagacagauuug

SEQ ID NO: 140490 - RNA, 32 nt, Homo Sapiens
cauuuuaaaaauuggauaguauaauaacaaua

SEQ ID NO: 140491 - RNA, 32 nt, Homo Sapiens
aauuaugggggaagaacuaggaaaacgaagcu

SEQ ID NO: 140492 - RNA, 32 nt, Homo Sapiens
acaaauguagagaucaucccaggggaaagugc

SEQ ID NO: 140493 - RNA, 32 nt, Homo Sapiens
acauuauuauauuuuaaaaucacgcuauggaa

SEQ ID NO: 140494 - RNA, 32 nt, Homo Sapiens
ccuucaagggacaacuuuuuuaacuuuggaga

SEQ ID NO: 140495 - RNA, 32 nt, Homo Sapiens
ccgcggugcccaaggcugcgccggcgagggga

SEQ ID NO: 140496 - RNA, 32 nt, Homo Sapiens
gaucuuguuucgcucucccauuggcccccaac

SEQ ID NO: 140497 - RNA, 32 nt, Homo Sapiens
gauggucuucagccucuuucugucccuucugu

SEQ ID NO: 140498 - RNA, 32 nt, Homo Sapiens
cgagggggcuucuggagggaggcggcagcgac

SEQ ID NO: 140499 - RNA, 32 nt, Homo Sapiens
guagcgggagacggagcgaguccagcggccgc

SEQ ID NO: 140500 - RNA, 32 nt, Homo Sapiens
aauaggaaguggcaauccagaacuugcuuuug

SEQ ID NO: 140501 - RNA, 32 nt, Homo Sapiens
gugugugagcaacaguaccccauuccagucgu

SEQ ID NO: 140502 - RNA, 32 nt, Homo Sapiens
uauagcucuaauaaguuuguguuagaaaaguu

SEQ ID NO: 140503 - RNA, 32 nt, Homo Sapiens
aaaucuauuaugaaagucaauaaaauagauaa

SEQ ID NO: 140504 - RNA, 32 nt, Homo Sapiens
uaguuagcccucagcccauagguguuuuuugu

SEQ ID NO: 140505 - RNA, 32 nt, Homo Sapiens
ugcuuugugauauaaauguacuuuuucaaugu

SEQ ID NO: 140506 - RNA, 32 nt, Homo Sapiens
gcggccugugcuccucaccacccuggucaggg

SEQ ID NO: 140507 - RNA, 32 nt, Homo Sapiens
agaaaggguaauauuuugaaauacuacaaggu

SEQ ID NO: 140508 - RNA, 32 nt, Homo Sapiens
ugcauuuucugggucuuaagacauggaaaucu

SEQ ID NO: 140509 - RNA, 32 nt, Homo Sapiens
ccccaaggcuccugaggucaagcuuccaaaag

SEQ ID NO: 140510 - RNA, 32 nt, Homo Sapiens
caucauucaucccuuaacaggcacauuagauc

SEQ ID NO: 140511 - RNA, 32 nt, Homo Sapiens
ccguaaaaaugaauuaaggugaauuugauuaa

SEQ ID NO: 140512 - RNA, 32 nt, Homo Sapiens
auugggacauaguuacagcaguggaauaagua

SEQ ID NO: 140513 - RNA, 32 nt, Homo Sapiens
gagacucaguucaaacaaucugcauaaaaaca

SEQ ID NO: 140514 - RNA, 32 nt, Homo Sapiens
guugccaaccuccccucccaauaaaaauucac

SEQ ID NO: 140515 - RNA, 32 nt, Homo Sapiens
uagcgcucagggcgugacccacugcucuuccu

SEQ ID NO: 140516 - RNA, 32 nt, Homo Sapiens
aacuauguugaaaaauuuuaagaagggauuua

SEQ ID NO: 140517 - RNA, 32 nt, Homo Sapiens
gggcggggaaaggcgcggcguggcuuggcuca

SEQ ID NO: 140518 - RNA, 32 nt, Homo Sapiens
gagcaggccccggcagcccaguuccucauucu

SEQ ID NO: 140519 - RNA, 32 nt, Homo Sapiens
aaaaaugaauaaauuucuuuuagagugucuuu

SEQ ID NO: 140520 - RNA, 32 nt, Homo Sapiens
ccucuccugccagguguguggcugcacaggag

SEQ ID NO: 140521 - RNA, 32 nt, Homo Sapiens
uuauaggugaggaaacugaaguucagagcagu

SEQ ID NO: 140522 - RNA, 32 nt, Homo Sapiens
ugcucccugguugugaagugccaggcacuaga

SEQ ID NO: 140523 - RNA, 27 nt, Homo Sapiens
cuugcuuccuucuuaaccucuaccacu

SEQ ID NO: 140524 - RNA, 32 nt, Homo Sapiens
acaacccucaucuugauccccaucccuucuga

SEQ ID NO: 140525 - RNA, 32 nt, Homo Sapiens
ggcccugguucccccaggacccugaggguuuc

SEQ ID NO: 140526 - RNA, 32 nt, Homo Sapiens
gccccagcccucgcuagcggcaugcugugggu

SEQ ID NO: 140527 - RNA, 32 nt, Homo Sapiens
uucguguguucccuucugugcuuguguggcau

SEQ ID NO: 140528 - RNA, 32 nt, Homo Sapiens
cugccugccugccugccugcuguccugggcau

SEQ ID NO: 140529 - RNA, 32 nt, Homo Sapiens
aaaaggcaaagcuuuaaaagcagagcuagucu

SEQ ID NO: 140530 - RNA, 32 nt, Homo Sapiens
gccaccggugucuccuucuacauccgccucug

SEQ ID NO: 140531 - RNA, 32 nt, Homo Sapiens
agagggcucgucugcugaauaaccgucacuca

SEQ ID NO: 140532 - RNA, 32 nt, Homo Sapiens
agcagcaggaggaggagccgugacccugugga

SEQ ID NO: 140533 - RNA, 30 nt, Homo Sapiens
augggguuucaccguguuagccaggcuggu

SEQ ID NO: 140534 - RNA, 32 nt, Homo Sapiens
gucuggcaagauguugaagagguaaaggaggc

SEQ ID NO: 140535 - RNA, 32 nt, Homo Sapiens
aaauacucagaaguugcauuugccauggccac

SEQ ID NO: 140536 - RNA, 32 nt, Homo Sapiens
ucucagaacauuuuaaugauuucuaacauuuc

SEQ ID NO: 140537 - RNA, 30 nt, Homo Sapiens
gugguaauuuauccuuccuaacucuuuaau

SEQ ID NO: 140538 - RNA, 30 nt, Homo Sapiens
gagugagagagcugcuggauaugcggaggg

SEQ ID NO: 140539 - RNA, 32 nt, Homo Sapiens
uuuugauggaauuaaaugugggagguaaggaa

SEQ ID NO: 140540 - RNA, 32 nt, Homo Sapiens
gacuuguguguguuucugaaguguucgagggu

SEQ ID NO: 140541 - RNA, 32 nt, Homo Sapiens
augugccuuguacuguuuuaagcaguuuacau

SEQ ID NO: 140542 - RNA, 32 nt, Homo Sapiens
ucgguacuuuuauuuauuaaauuacugaugaa

SEQ ID NO: 140543 - RNA, 32 nt, Homo Sapiens
gcaguguucuacugccugaugugaaagagagc

SEQ ID NO: 140544 - RNA, 32 nt, Homo Sapiens
gguggggcuuuugguaagugauaggucaggag

SEQ ID NO: 140545 - RNA, 30 nt, Homo Sapiens
cguccggccguuccgcauuagguccgggau

SEQ ID NO: 140546 - RNA, 32 nt, Homo Sapiens
ugggugugagagguccuggggaggugggcguu

SEQ ID NO: 140547 - RNA, 32 nt, Homo Sapiens
cccuaauuguacacaguuuagugauaucuagg

SEQ ID NO: 140548 - RNA, 32 nt, Homo Sapiens
cccgagccccacuggaugauagaggugggcau

SEQ ID NO: 140549 - RNA, 32 nt, Homo Sapiens
ccuggcacucugcgggccugcacaggaaaaac

SEQ ID NO: 140550 - RNA, 32 nt, Homo Sapiens
acuuggcuccgaaagccuuugcuguguucccu

SEQ ID NO: 140551 - RNA, 32 nt, Homo Sapiens
cuacucagagccuaaauugaccccuaaggggg

SEQ ID NO: 140552 - RNA, 32 nt, Homo Sapiens
caauggagacaccaccuggcugcccauccugc

SEQ ID NO: 140553 - RNA, 32 nt, Homo Sapiens
cccuuccggccgcgagcugucccgcgugcggg

SEQ ID NO: 140554 - RNA, 32 nt, Homo Sapiens
gggacgcggggcgggggccugcuggcgcuucu

SEQ ID NO: 140555 - RNA, 32 nt, Homo Sapiens
uucuaauggaaauuagaauucuaauugaauau

SEQ ID NO: 140556 - RNA, 32 nt, Homo Sapiens
ugcauuaaguaauuuucuuuuugacuuaguau

SEQ ID NO: 140557 - RNA, 32 nt, Homo Sapiens
auuacaagauacagcugagcaaugcacacauu

SEQ ID NO: 140558 - RNA, 32 nt, Homo Sapiens
ccugcggcagaguuguucagguugccugggca

SEQ ID NO: 140559 - RNA, 32 nt, Homo Sapiens
gcggcguggggaagaccuaggggggugggugg

SEQ ID NO: 140560 - RNA, 32 nt, Homo Sapiens
ggcagugucugcuuuucucugugaaggcaaag

SEQ ID NO: 140561 - RNA, 32 nt, Homo Sapiens
cccacccuuucugcccuauagcuguaguuaga

SEQ ID NO: 140562 - RNA, 32 nt, Homo Sapiens
ccucucccuaaaaugacugagcccuggguuca

SEQ ID NO: 140563 - RNA, 32 nt, Homo Sapiens
cuuaauuuuguaaauuuggauuuuuauauauc

SEQ ID NO: 140564 - RNA, 32 nt, Homo Sapiens
uaauuagauagcaaaaucacugcgguuuguuu

SEQ ID NO: 140565 - RNA, 32 nt, Homo Sapiens
uagacuucaacaaucuugagugccaagaauaa

SEQ ID NO: 140566 - RNA, 32 nt, Homo Sapiens
gcuuucucuauuuucuuuuuuauuuaaccuau

SEQ ID NO: 140567 - RNA, 32 nt, Homo Sapiens
cuucuuccugccucuuugcauacucagcauaa

SEQ ID NO: 140568 - RNA, 32 nt, Homo Sapiens
acauuugugcccggcguuugggagcccuuugu

SEQ ID NO: 140569 - RNA, 32 nt, Homo Sapiens
uguagggugggaggccuggcccgggccucccc

SEQ ID NO: 140570 - RNA, 32 nt, Homo Sapiens
ggauggggcgggcagccgcgggcgccuaagau

SEQ ID NO: 140571 - RNA, 32 nt, Homo Sapiens
agugguaugaaacaagcauauuugggauauaa

SEQ ID NO: 140572 - RNA, 32 nt, Homo Sapiens
uuuaagaagaggaaaagauaagcuacagauug

SEQ ID NO: 140573 - RNA, 32 nt, Homo Sapiens
ccaaucagcgcucugugucuagcugaucuguu

SEQ ID NO: 140574 - RNA, 32 nt, Homo Sapiens
auaaaguacuuugauauauucucauuaaaucu

SEQ ID NO: 140575 - RNA, 32 nt, Homo Sapiens
ugggagagggcugaacucuacgccguguuuac

SEQ ID NO: 140576 - RNA, 32 nt, Homo Sapiens
uccuaacgucuuccuuucccugcacuaacgcc

SEQ ID NO: 140577 - RNA, 32 nt, Homo Sapiens
aaauaggcauuugguacaauggugaucuugua

SEQ ID NO: 140578 - RNA, 32 nt, Homo Sapiens
caggcuggagugcaguggugugaucuuggguc

SEQ ID NO: 140579 - RNA, 31 nt, Homo Sapiens
acuucagguaccggcgugccccgcguccuac

SEQ ID NO: 140580 - RNA, 32 nt, Homo Sapiens
gauccucuauuaccauucuaagcacauucacu

SEQ ID NO: 140581 - RNA, 30 nt, Homo Sapiens
gugauugucugugugaccugcugggguuug

SEQ ID NO: 140582 - RNA, 32 nt, Homo Sapiens
agguuuucaacuauuucuucacaauuugaaca

SEQ ID NO: 140583 - RNA, 30 nt, Homo Sapiens
aaauagcugcuaaucugucaaccugucuug

SEQ ID NO: 140584 - RNA, 32 nt, Homo Sapiens
ccaggccgccggccuucuccccggaagccugc

SEQ ID NO: 140585 - RNA, 32 nt, Homo Sapiens
gauauacuuaugucuucuuucauuuuuuaaau

SEQ ID NO: 140586 - RNA, 32 nt, Homo Sapiens
ggaaucccugucaugcgcuggucccaccgggc

SEQ ID NO: 140587 - RNA, 32 nt, Homo Sapiens
cacggagagaggcagcagcaggaggaacagaa

SEQ ID NO: 140588 - RNA, 32 nt, Homo Sapiens
gccccgcccuuuggguucugcauguguuccug

SEQ ID NO: 140589 - RNA, 31 nt, Homo Sapiens
caggcacguguaauaaagaacccgagcagau

SEQ ID NO: 140590 - RNA, 32 nt, Homo Sapiens
gcuggcccuacaguuuguggacagguggcccc

SEQ ID NO: 140591 - RNA, 32 nt, Homo Sapiens
cgccguagcgagggggcggggcccggaagagc

SEQ ID NO: 140592 - RNA, 32 nt, Homo Sapiens
caagaggaggggcucuguguuggcuguggggu

SEQ ID NO: 140593 - RNA, 32 nt, Homo Sapiens
cuggccuccagucuccccugcugucccaggua

SEQ ID NO: 140594 - RNA, 32 nt, Homo Sapiens
cuguggccuuaguggauggucuggguggaugg

SEQ ID NO: 140595 - RNA, 32 nt, Homo Sapiens
cccaaugaccucugcaggcacagacuccauac

SEQ ID NO: 140596 - RNA, 32 nt, Homo Sapiens
uuuccuacaucaucugcagcaggcucuuggag

SEQ ID NO: 140597 - RNA, 32 nt, Homo Sapiens
augacuagauccuggguuuccauccuugagau

SEQ ID NO: 140598 - RNA, 32 nt, Homo Sapiens
gcucaacuucgggcccuucgaaacagugcauc

SEQ ID NO: 140599 - RNA, 32 nt, Homo Sapiens
auaauacuuguaaauguuuucuuaaccauuua

SEQ ID NO: 140600 - RNA, 32 nt, Homo Sapiens
acagcauaauuucugaucuacauuuaaauacu

SEQ ID NO: 140601 - RNA, 32 nt, Homo Sapiens
ggaugucagaggagggugcgugugauggcguc

SEQ ID NO: 140602 - RNA, 32 nt, Homo Sapiens
aaggaaaaugucaguguuuacaugggaccuau

SEQ ID NO: 140603 - RNA, 31 nt, Homo Sapiens
auuccuccuccccagaauaagacaagagaaa

SEQ ID NO: 140604 - RNA, 32 nt, Homo Sapiens
agaugcugccagcagugaaggcugcacuaguu

SEQ ID NO: 140605 - RNA, 32 nt, Homo Sapiens
acuaucugaaaugugauuuguuaagauucuua

SEQ ID NO: 140606 - RNA, 32 nt, Homo Sapiens
aagcuucucccaccagcuuccaugugucccca

SEQ ID NO: 140607 - RNA, 32 nt, Homo Sapiens
uaagccauaggggcugguuuuccguacuccaa

SEQ ID NO: 140608 - RNA, 32 nt, Homo Sapiens
ugccuggaaucccagcacuuugagaggccaag

SEQ ID NO: 140609 - RNA, 32 nt, Homo Sapiens
ugccuguaaucccagcacuuugggaggccaug

SEQ ID NO: 140610 - RNA, 32 nt, Homo Sapiens
aguuucugguaguucuuuauagcagugugaga

SEQ ID NO: 140611 - RNA, 32 nt, Homo Sapiens
ucccauuaauauauuucuuugaagcuauuugu

SEQ ID NO: 140612 - RNA, 32 nt, Homo Sapiens
ggaccagacaaauagaugauggcugcccccac

SEQ ID NO: 140613 - RNA, 32 nt, Homo Sapiens
cacaauuugucuccucuuucaaaccugacauc

SEQ ID NO: 140614 - RNA, 32 nt, Homo Sapiens
cggcccccagacgcgccgccgcugccauggcc

SEQ ID NO: 140615 - RNA, 32 nt, Homo Sapiens
aggaaggugucugcaugugggacucuguacag

SEQ ID NO: 140616 - RNA, 32 nt, Homo Sapiens
uucauuagauugcuuguuaagcccuuauugaa

SEQ ID NO: 140617 - RNA, 32 nt, Homo Sapiens
guucaucugaagaccuugauuuacaaaauaga

SEQ ID NO: 140618 - RNA, 32 nt, Homo Sapiens
aagggcuuauugacucuuucuauuguuaaaca

SEQ ID NO: 140619 - RNA, 32 nt, Homo Sapiens
aggcauuuagaguauggacuuuucuuuucuuu

SEQ ID NO: 140620 - RNA, 32 nt, Homo Sapiens
uuuaccccugucaguagcccuccuccuaccac

SEQ ID NO: 140621 - RNA, 32 nt, Homo Sapiens
cuucagccaccaguguuggccuugaagcagag

SEQ ID NO: 140622 - RNA, 32 nt, Homo Sapiens
agugcuguuucaucucuaugacccuucuguua

SEQ ID NO: 140623 - RNA, 32 nt, Homo Sapiens
accugagacugaguaauuuauaaagaaaagag

SEQ ID NO: 140624 - RNA, 31 nt, Homo Sapiens
guccccucacggagccacgacugccccuugc

SEQ ID NO: 140625 - RNA, 32 nt, Homo Sapiens
ucagaucuuuuguacauaguggcaguauugua

SEQ ID NO: 140626 - RNA, 32 nt, Homo Sapiens
aguguuugugucccuggguacuugagauuggg

SEQ ID NO: 140627 - RNA, 32 nt, Homo Sapiens
aaaacaggagccuagagcccccugcccaaaca

SEQ ID NO: 140628 - RNA, 32 nt, Homo Sapiens
uguuucaucauguuucccaggcuggucucaaa

SEQ ID NO: 140629 - RNA, 32 nt, Homo Sapiens
gguauuuccagaagagauugauauaugacuga

SEQ ID NO: 140630 - RNA, 32 nt, Homo Sapiens
ugaagccauagccuccacggagagcccugugg

SEQ ID NO: 140631 - RNA, 32 nt, Homo Sapiens
cuugggcuccaguccgugugccccacaucccu

SEQ ID NO: 140632 - RNA, 30 nt, Homo Sapiens
cagcuacugcccgugcccccggccaccucg

SEQ ID NO: 140633 - RNA, 32 nt, Homo Sapiens
aaucccaucacuguucuuuaaagcaugcauca

SEQ ID NO: 140634 - RNA, 32 nt, Homo Sapiens
uuaucuuuaaaaugggaguaauaguagguccu

SEQ ID NO: 140635 - RNA, 32 nt, Homo Sapiens
uguaauuuagccagcagugcccugcccugccc

SEQ ID NO: 140636 - RNA, 29 nt, Homo Sapiens
cgccggcgguagacgaggacgccaacagc

SEQ ID NO: 140637 - RNA, 32 nt, Homo Sapiens
guaguauucauuggaaagagacuccaagaaaa

SEQ ID NO: 140638 - RNA, 32 nt, Homo Sapiens
aaugcacagaaauaauguuaaauagaauaacu

SEQ ID NO: 140639 - RNA, 32 nt, Homo Sapiens
cacuggucugucugcugcaguguggcugaucu

SEQ ID NO: 140640 - RNA, 32 nt, Homo Sapiens
aaguuuugugcacuuuuuguguguguaaugca

SEQ ID NO: 140641 - RNA, 32 nt, Homo Sapiens
auucagugggucuguguagagccugagacugc

SEQ ID NO: 140642 - RNA, 32 nt, Homo Sapiens
aaacaccuuagggucuuagacucugcugauac

SEQ ID NO: 140643 - RNA, 32 nt, Homo Sapiens
ggauuacaacugaguucugucuggcccagaac

SEQ ID NO: 140644 - RNA, 32 nt, Homo Sapiens
cugguacugaagauuccugcugauuuugagaa

SEQ ID NO: 140645 - RNA, 32 nt, Homo Sapiens
ucuguacaucgucuucgucuuccuccugggcg

SEQ ID NO: 140646 - RNA, 32 nt, Homo Sapiens
gcggcccucacuuuucuccuguguaaagccau

SEQ ID NO: 140647 - RNA, 32 nt, Homo Sapiens
aauguggucagcauauuggccuugguauuuga

SEQ ID NO: 140648 - RNA, 30 nt, Homo Sapiens
auucuuaaguucaugggggaaaucucauuu

SEQ ID NO: 140649 - RNA, 32 nt, Homo Sapiens
aacccguacaagcagcuucccaucuacacaga

SEQ ID NO: 140650 - RNA, 32 nt, Homo Sapiens
agcgcgagauuagagcuccugcuaguccccag

SEQ ID NO: 140651 - RNA, 32 nt, Homo Sapiens
ucagauuuuuaaaauuucuugaugugguuugu

SEQ ID NO: 140652 - RNA, 32 nt, Homo Sapiens
uuugggaguuuguaaaaugaggugauacaguu

SEQ ID NO: 140653 - RNA, 32 nt, Homo Sapiens
uuugcugcuuccaucuuccccaguacugugcc

SEQ ID NO: 140654 - RNA, 32 nt, Homo Sapiens
cuguaaauauuaucuguaauuguuauuauugu

SEQ ID NO: 140655 - RNA, 31 nt, Homo Sapiens
uccuccagccccagcagguccacuccugguu

SEQ ID NO: 140656 - RNA, 32 nt, Homo Sapiens
cuguuuguuuuaauaagagugcaucgauuuua

SEQ ID NO: 140657 - RNA, 32 nt, Homo Sapiens
uugaauguugcagucaggaaccccaacucacu

SEQ ID NO: 140658 - RNA, 32 nt, Homo Sapiens
ucacuguauauaugccuuauuuccugggucca

SEQ ID NO: 140659 - RNA, 32 nt, Homo Sapiens
auugagggacuucaggcauuuuccugccucca

SEQ ID NO: 140660 - RNA, 32 nt, Homo Sapiens
cauacaacaaacaugagcuuauuuucacugaa

SEQ ID NO: 140661 - RNA, 32 nt, Homo Sapiens
ccgcguccucaucgucgccccgggcacggugc

SEQ ID NO: 140662 - RNA, 32 nt, Homo Sapiens
ggggagcauucugcggacccggucacgggcuu

SEQ ID NO: 140663 - RNA, 32 nt, Homo Sapiens
accguggggaagaucaacuguggugauguuuu

SEQ ID NO: 140664 - RNA, 32 nt, Homo Sapiens
ggcaggggcagacacugugaguauaagcuacu

SEQ ID NO: 140665 - RNA, 32 nt, Homo Sapiens
uuaugauuguggcauugcacuccagccugggu

SEQ ID NO: 140666 - RNA, 32 nt, Homo Sapiens
ggcgccugccagccucaccugccgcucaggcc

SEQ ID NO: 140667 - RNA, 32 nt, Homo Sapiens
ugugggauaaccuucaguuuauguuauuaggu

SEQ ID NO: 140668 - RNA, 31 nt, Homo Sapiens
uucgaaauggauaacguccucccgguggacu

SEQ ID NO: 140669 - RNA, 32 nt, Homo Sapiens
gagagagccccggcccccagcacauaaagaac

SEQ ID NO: 140670 - RNA, 32 nt, Homo Sapiens
cccugaaggcaauggccucuccccucaaaugg

SEQ ID NO: 140671 - RNA, 32 nt, Homo Sapiens
gguguuucuaugcgagcacccauucucaauuu

SEQ ID NO: 140672 - RNA, 32 nt, Homo Sapiens
gagccggugaauggguuuguggugacccccgc

SEQ ID NO: 140673 - RNA, 32 nt, Homo Sapiens
ucuuccuaguuuucuccucccaggaacugggc

SEQ ID NO: 140674 - RNA, 32 nt, Homo Sapiens
aacaaagcaagaucucaucuguacuaaaaauu

SEQ ID NO: 140675 - RNA, 32 nt, Homo Sapiens
gugucucaaagaaggguggaaguucuaauguc

SEQ ID NO: 140676 - RNA, 32 nt, Homo Sapiens
agcacacccagcucccauggcgucacucccua

SEQ ID NO: 140677 - RNA, 32 nt, Homo Sapiens
uuuuccccuuagaugccuggaagugguauuuu

SEQ ID NO: 140678 - RNA, 32 nt, Homo Sapiens
gucagcacuccagucccaucaccugaaccuuc

SEQ ID NO: 140679 - RNA, 32 nt, Homo Sapiens
caugcuugagagaaacaaaaacacugagagug

SEQ ID NO: 140680 - RNA, 32 nt, Homo Sapiens
cccugaguccagcaauuguaucagcgccauuu

SEQ ID NO: 140681 - RNA, 32 nt, Homo Sapiens
agggcuugucgggucuagcugggaguggaggu

SEQ ID NO: 140682 - RNA, 32 nt, Homo Sapiens
agcaccuuaauaacccuagaagaugcaugccu

SEQ ID NO: 140683 - RNA, 32 nt, Homo Sapiens
cugucauccgagugguggaaaccuggcugccu

SEQ ID NO: 140684 - RNA, 32 nt, Homo Sapiens
gcucacuuuuguuaagaugacuguaauucucc

SEQ ID NO: 140685 - RNA, 32 nt, Homo Sapiens
cgacuugcucagacugucccggcggccggagu

SEQ ID NO: 140686 - RNA, 32 nt, Homo Sapiens
cugugucaguuauuauauuuauguuugcacaa

SEQ ID NO: 140687 - RNA, 32 nt, Homo Sapiens
gagugccaucgaagguaauuauagagacagua

SEQ ID NO: 140688 - RNA, 32 nt, Homo Sapiens
uuaaagcaugaaugguauggaacucucuccac

SEQ ID NO: 140689 - RNA, 32 nt, Homo Sapiens
ggaggagcgauggggacucugugcaggaucug

SEQ ID NO: 140690 - RNA, 32 nt, Homo Sapiens
uuuugguguuuguacauguuaagaauugacca

SEQ ID NO: 140691 - RNA, 32 nt, Homo Sapiens
ucaucagccaucuuguccugugcauccuaaca

SEQ ID NO: 140692 - RNA, 32 nt, Homo Sapiens
accgcgcccagucucuccccacguucuugaac

SEQ ID NO: 140693 - RNA, 32 nt, Homo Sapiens
caugaaaauguguagccagacacacacagaca

SEQ ID NO: 140694 - RNA, 32 nt, Homo Sapiens
aagaaauaaaugguauguugcugcugacagua

SEQ ID NO: 140695 - RNA, 29 nt, Homo Sapiens
uaauuuuuaugugagugaaucuaaacugc

SEQ ID NO: 140696 - RNA, 32 nt, Homo Sapiens
uguguuuuuaucuguuaaaauuuuucaguguu

SEQ ID NO: 140697 - RNA, 32 nt, Homo Sapiens
uugacucuauaacugcagaaauuagauaaugu

SEQ ID NO: 140698 - RNA, 32 nt, Homo Sapiens
gacuccacccucaucacccacacucccuauuu

SEQ ID NO: 140699 - RNA, 32 nt, Homo Sapiens
aucaauauauauaaauauuagagauuauguac

SEQ ID NO: 140700 - RNA, 32 nt, Homo Sapiens
acuggugccucgccgccuccucucggugcggg

SEQ ID NO: 140701 - RNA, 32 nt, Homo Sapiens
agggugaggcugggucugugcugcuggccgac

SEQ ID NO: 140702 - RNA, 32 nt, Homo Sapiens
gcaaagguuccuggugacccaggcucucauga

SEQ ID NO: 140703 - RNA, 32 nt, Homo Sapiens
ccucugcccucccucgcaucuacuccuuacgu

SEQ ID NO: 140704 - RNA, 32 nt, Homo Sapiens
cugcccccucugcgggaagcgggcggccccgg

SEQ ID NO: 140705 - RNA, 32 nt, Homo Sapiens
ccaaucaugaauuggaacuccauaaggagggg

SEQ ID NO: 140706 - RNA, 32 nt, Homo Sapiens
gauaaguagaaaguuggagucaaacacuggau

SEQ ID NO: 140707 - RNA, 32 nt, Homo Sapiens
uggcgaaaggauuguaagcagaaugcuugacu

SEQ ID NO: 140708 - RNA, 32 nt, Homo Sapiens
cgagcugggagcgcgacggcggcggccagaug

SEQ ID NO: 140709 - RNA, 32 nt, Homo Sapiens
guccacacauucauaaauaaaaauuuuaccua

SEQ ID NO: 140710 - RNA, 32 nt, Homo Sapiens
gcaauguguaaguagcauguguuuacauauau

SEQ ID NO: 140711 - RNA, 32 nt, Homo Sapiens
gacuccacagggaagaggcacuguagcagcug

SEQ ID NO: 140712 - RNA, 32 nt, Homo Sapiens
gaagccgggaagugagagaaaaggggaugagu

SEQ ID NO: 140713 - RNA, 32 nt, Homo Sapiens
gacugagauugccucugacuuccuccuccccu

SEQ ID NO: 140714 - RNA, 32 nt, Homo Sapiens
ucgucggccccgguggcggcggcgcgugcgac

SEQ ID NO: 140715 - RNA, 32 nt, Homo Sapiens
cuaaaccacagccccagauugcugguucgcgc

SEQ ID NO: 140716 - RNA, 32 nt, Homo Sapiens
gacagguacaugguccaguaggaagagaagca

SEQ ID NO: 140717 - RNA, 32 nt, Homo Sapiens
ucgggcccagcuguggcugcugccggggagcc

SEQ ID NO: 140718 - RNA, 32 nt, Homo Sapiens
gaaaaauguauuacuugaaaacaugacauaga

SEQ ID NO: 140719 - RNA, 32 nt, Homo Sapiens
gauaacccccgucauggccccgggugccaagg

SEQ ID NO: 140720 - RNA, 32 nt, Homo Sapiens
uaaaucagugagagugccuagagucuuucuga

SEQ ID NO: 140721 - RNA, 32 nt, Homo Sapiens
gaugggcccggauggggcugcagaggacgcgc

SEQ ID NO: 140722 - RNA, 32 nt, Homo Sapiens
uagaugucauaaaccauuuguauuuguugucu

SEQ ID NO: 140723 - RNA, 32 nt, Homo Sapiens
uauuuuauuuuaaagcacuggugaggggaccu

SEQ ID NO: 140724 - RNA, 32 nt, Homo Sapiens
uggcugugcaaggaagacccggcuuugcccuc

SEQ ID NO: 140725 - RNA, 32 nt, Homo Sapiens
cugacaagccccaggugagaagaccugaguuc

SEQ ID NO: 140726 - RNA, 32 nt, Homo Sapiens
gccccucggcacagcccuccugugucuccggg

SEQ ID NO: 140727 - RNA, 32 nt, Homo Sapiens
ugcuuguucuucauguuuccuucuuguuauuu

SEQ ID NO: 140728 - RNA, 32 nt, Homo Sapiens
ccccuuccgggcggggccuacuagugggcggg

SEQ ID NO: 140729 - RNA, 32 nt, Homo Sapiens
cacacuaguauauaccauuuaauacauuuaca

SEQ ID NO: 140730 - RNA, 32 nt, Homo Sapiens
uuucauuugugauauaaauccuaaacuugguu

SEQ ID NO: 140731 - RNA, 29 nt, Homo Sapiens
gugauuuguucucuccaccacaaaugaau

SEQ ID NO: 140732 - RNA, 32 nt, Homo Sapiens
acacuggagccggaaggcaaggacgggggacu

SEQ ID NO: 140733 - RNA, 32 nt, Homo Sapiens
cagcccugugagugcaauaaaugccaccaaau

SEQ ID NO: 140734 - RNA, 32 nt, Homo Sapiens
caaguugagauuuuaauucugugacauuuuua

SEQ ID NO: 140735 - RNA, 32 nt, Homo Sapiens
gcguccgcuguucgccucuccucccgggaguc

SEQ ID NO: 140736 - RNA, 32 nt, Homo Sapiens
uuauuuuaaaaugugaauuuaugaaguuuacu

SEQ ID NO: 140737 - RNA, 32 nt, Homo Sapiens
agaugauggaaauagcacagcugcuugagaga

SEQ ID NO: 140738 - RNA, 32 nt, Homo Sapiens
uugaaaucugaucacaccccccagccauugcc

SEQ ID NO: 140739 - RNA, 32 nt, Homo Sapiens
uuccuccuggggaacugguuuauucuguacuc

SEQ ID NO: 140740 - RNA, 32 nt, Homo Sapiens
gguuuuccaggaacagcgaucccggaguggac

SEQ ID NO: 140741 - RNA, 30 nt, Homo Sapiens
uucuccucagcgcgcccgggucccgcuccc

SEQ ID NO: 140742 - RNA, 32 nt, Homo Sapiens
uuuccuuuaugaagaaaaaauaaaauagucac

SEQ ID NO: 140743 - RNA, 32 nt, Homo Sapiens
ggcugaaugcaaaagcagauacaagauuccag

SEQ ID NO: 140744 - RNA, 32 nt, Homo Sapiens
cagcuguuugguuuuucguuuuucauuguuau

SEQ ID NO: 140745 - RNA, 31 nt, Homo Sapiens
auccccgggacccgccugccccucggcgccc

SEQ ID NO: 140746 - RNA, 32 nt, Homo Sapiens
caaaagggccccacagcagugggugcuggggu

SEQ ID NO: 140747 - RNA, 32 nt, Homo Sapiens
accugauucagauuugguuuuguuguuucaac

SEQ ID NO: 140748 - RNA, 32 nt, Homo Sapiens
augcauucugaaucaagugcugcuaguaccaa

SEQ ID NO: 140749 - RNA, 32 nt, Homo Sapiens
uggaguccuggucccccuccucccuggcccuc

SEQ ID NO: 140750 - RNA, 32 nt, Homo Sapiens
gaaaacaaccccuccucuaaaaacagacucug

SEQ ID NO: 140751 - RNA, 32 nt, Homo Sapiens
agaucuucugccaacuauucuccauucaugua

SEQ ID NO: 140752 - RNA, 32 nt, Homo Sapiens
ccugggcagaucagcagauacaugucagugca

SEQ ID NO: 140753 - RNA, 32 nt, Homo Sapiens
uuccagggacgaagaagagccacagugaggga

SEQ ID NO: 140754 - RNA, 32 nt, Homo Sapiens
auccuaacuuucuccuuauuucuuggcacuug

SEQ ID NO: 140755 - RNA, 32 nt, Homo Sapiens
agaucagaggacgucccagaucaucuuuucuu

SEQ ID NO: 140756 - RNA, 32 nt, Homo Sapiens
cauagccuaacagaacacuuugaaagcucuuu

SEQ ID NO: 140757 - RNA, 32 nt, Homo Sapiens
gcugaaaauuacuauuugaagcuuggccgaug

SEQ ID NO: 140758 - RNA, 31 nt, Homo Sapiens
aggaaugcaaggucaggguggccagagcucg

SEQ ID NO: 140759 - RNA, 32 nt, Homo Sapiens
gagcuaaguccuccaguucucgauucacugac

SEQ ID NO: 140760 - RNA, 32 nt, Homo Sapiens
aguugcuaacugugcguuucucccuucuuaga

SEQ ID NO: 140761 - RNA, 32 nt, Homo Sapiens
cuacuagagucugaacagcuguaaucuaugaa

SEQ ID NO: 140762 - RNA, 32 nt, Homo Sapiens
agccagagguguuccuggggagauggcggaac

SEQ ID NO: 140763 - RNA, 32 nt, Homo Sapiens
gcauauauugguagcugaaaaucuucaaggcu

SEQ ID NO: 140764 - RNA, 32 nt, Homo Sapiens
uaaauugucuuuucuuuuuuuaucuugaauua

SEQ ID NO: 140765 - RNA, 32 nt, Homo Sapiens
uaccaccaacuggaaagacugggaaugccuaa

SEQ ID NO: 140766 - RNA, 32 nt, Homo Sapiens
cagccucgggccucggccacccggcccugagu

SEQ ID NO: 140767 - RNA, 32 nt, Homo Sapiens
cgccgcagucgcugcgccccgagccccucucc

SEQ ID NO: 140768 - RNA, 32 nt, Homo Sapiens
ccagcaccgggaugcgcagagcacuggaaggg

SEQ ID NO: 140769 - RNA, 32 nt, Homo Sapiens
gcggcacaguggccucaccucccgucgggcac

SEQ ID NO: 140770 - RNA, 32 nt, Homo Sapiens
auccccuagaaguacacccccgucuuauuaag

SEQ ID NO: 140771 - RNA, 32 nt, Homo Sapiens
cugaaugaaaagcagcccucaaaaacguuaaa

SEQ ID NO: 140772 - RNA, 32 nt, Homo Sapiens
acuggcagaucccaggugcugaagaugugugu

SEQ ID NO: 140773 - RNA, 32 nt, Homo Sapiens
gcuucuguggccugggcguguuguggacucag

SEQ ID NO: 140774 - RNA, 32 nt, Homo Sapiens
agucuacccaaguaccuauguaugagcaggca

SEQ ID NO: 140775 - RNA, 29 nt, Homo Sapiens
uaagauggcggaccggcggcggcagcgcg

SEQ ID NO: 140776 - RNA, 32 nt, Homo Sapiens
ccuucuguacggauuugcucuccggaaggaau

SEQ ID NO: 140777 - RNA, 32 nt, Homo Sapiens
auggagcagagcaagucugcaggugcaccacu

SEQ ID NO: 140778 - RNA, 32 nt, Homo Sapiens
agggagagcugcugagcugacugcaugagcug

SEQ ID NO: 140779 - RNA, 32 nt, Homo Sapiens
cucugacuugacccagcuccuguucaggguga

SEQ ID NO: 140780 - RNA, 32 nt, Homo Sapiens
caguuuacugaaugauuaccaccuguaauucc

SEQ ID NO: 140781 - RNA, 32 nt, Homo Sapiens
cagcuagagcuuccacugucagcccucacugu

SEQ ID NO: 140782 - RNA, 32 nt, Homo Sapiens
aguugguguugggacaggguggcagagaauau

SEQ ID NO: 140783 - RNA, 32 nt, Homo Sapiens
ugcuucaagaggggguuuuacacucugauucc

SEQ ID NO: 140784 - RNA, 32 nt, Homo Sapiens
acuuaacaaacccucguuucugauuaaugcua

SEQ ID NO: 140785 - RNA, 32 nt, Homo Sapiens
uuucuuguaaauuuauuuaaguucauuauaga

SEQ ID NO: 140786 - RNA, 32 nt, Homo Sapiens
gcagggaggggaggaaugacacaaauggcagg

SEQ ID NO: 140787 - RNA, 32 nt, Homo Sapiens
gaggacguaccuugugagaugcgagccggcca

SEQ ID NO: 140788 - RNA, 32 nt, Homo Sapiens
cuggaucuguguuccuccuuaacaucaucuga

SEQ ID NO: 140789 - RNA, 32 nt, Homo Sapiens
uuaaacaauuggccauaagggauugaacucaa

SEQ ID NO: 140790 - RNA, 32 nt, Homo Sapiens
uccugacugucccagguccccacucuccaggg

SEQ ID NO: 140791 - RNA, 29 nt, Homo Sapiens
ggacauauagugaugaacauguaaaguuu

SEQ ID NO: 140792 - RNA, 32 nt, Homo Sapiens
gggucguggguggggaauuuaucaccaacauc

SEQ ID NO: 140793 - RNA, 32 nt, Homo Sapiens
uguucacuuuuguugaaagugaccaugucuca

SEQ ID NO: 140794 - RNA, 32 nt, Homo Sapiens
ccaucacgaugagcaacaaauuccugggcacc

SEQ ID NO: 140795 - RNA, 32 nt, Homo Sapiens
cuuuugcggggagggaaggcggacgugaggac

SEQ ID NO: 140796 - RNA, 31 nt, Homo Sapiens
augaaaguggaguuuaagguauaucaaaucg

SEQ ID NO: 140797 - RNA, 32 nt, Homo Sapiens
cauuucccuucuucuuuuaauaaaacuuggac

SEQ ID NO: 140798 - RNA, 32 nt, Homo Sapiens
caauguguuacgcaagcagucuccaugugugu

SEQ ID NO: 140799 - RNA, 32 nt, Homo Sapiens
cccaguuaccaucacucucuuccuccucuaga

SEQ ID NO: 140800 - RNA, 32 nt, Homo Sapiens
caaguuacuggggaagacagacauguaaauau

SEQ ID NO: 140801 - RNA, 32 nt, Homo Sapiens
agcagaaaaugaacaaguuccagggacccgug

SEQ ID NO: 140802 - RNA, 32 nt, Homo Sapiens
aagcaaugacuucccaaaugaccuccacugca

SEQ ID NO: 140803 - RNA, 32 nt, Homo Sapiens
agaagaagccccacacaggcacuuacggggcu

SEQ ID NO: 140804 - RNA, 32 nt, Homo Sapiens
agcuaacuuuuguauuuuuaguagagacgggg

SEQ ID NO: 140805 - RNA, 32 nt, Homo Sapiens
cauauugguauaauuugaguaaacuaagguua

SEQ ID NO: 140806 - RNA, 32 nt, Homo Sapiens
cuucuuuaugagguuguaugacugcucaguga

SEQ ID NO: 140807 - RNA, 32 nt, Homo Sapiens
cgagugcagugagagccuccccugccccugcc

SEQ ID NO: 140808 - RNA, 32 nt, Homo Sapiens
gugccccugcaggcggguucugccgccaggac

SEQ ID NO: 140809 - RNA, 32 nt, Homo Sapiens
uuaccugcuuuuauauauuuccugcuuauuuu

SEQ ID NO: 140810 - RNA, 32 nt, Homo Sapiens
augcaaucucuuaaguuuuuuguucagcuacu

SEQ ID NO: 140811 - RNA, 32 nt, Homo Sapiens
uuauugugaaaguugugcuguuuucuaaguaa

SEQ ID NO: 140812 - RNA, 32 nt, Homo Sapiens
ccuuuccuuguacagguucuauguagucguca

SEQ ID NO: 140813 - RNA, 32 nt, Homo Sapiens
guugccccggccugggaggcucuuggacauuu

SEQ ID NO: 140814 - RNA, 32 nt, Homo Sapiens
cugugguccagugaagcuccggaccccaggcu

SEQ ID NO: 140815 - RNA, 32 nt, Homo Sapiens
aguaaaggagacugaggaugauuuacuuuuug

SEQ ID NO: 140816 - RNA, 32 nt, Homo Sapiens
ucggcgcgcucgcccaccugagccgcgccggg

SEQ ID NO: 140817 - RNA, 32 nt, Homo Sapiens
ccacgaacugcccacguccucuccaggaaggg

SEQ ID NO: 140818 - RNA, 32 nt, Homo Sapiens
ugaugcaauuuaaugauuagugaguaagauac

SEQ ID NO: 140819 - RNA, 32 nt, Homo Sapiens
cggagaucugggacguccacgagugggggcug

SEQ ID NO: 140820 - RNA, 32 nt, Homo Sapiens
ggaagacaucuuccuucucugccucggcuucc

SEQ ID NO: 140821 - RNA, 32 nt, Homo Sapiens
gcccgcccgcggcagccaggaccaugugggug

SEQ ID NO: 140822 - RNA, 32 nt, Homo Sapiens
cuggccucacccggucccggcgccgccuuccg

SEQ ID NO: 140823 - RNA, 32 nt, Homo Sapiens
ggaacuggaaaacucaggcuagcccaucugag

SEQ ID NO: 140824 - RNA, 32 nt, Homo Sapiens
cugcucuuucaagacagccucccuuuauugaa

SEQ ID NO: 140825 - RNA, 32 nt, Homo Sapiens
aagaggaagacuggacaaaacaacacaaaggc

SEQ ID NO: 140826 - RNA, 32 nt, Homo Sapiens
ucuuagggcaccuaucgcaggggggugaggca

SEQ ID NO: 140827 - RNA, 32 nt, Homo Sapiens
ggccugaaggcacuccucagcucgaacagccu

SEQ ID NO: 140828 - RNA, 32 nt, Homo Sapiens
cccgcuccccuucucucucuuacucgguuaag

SEQ ID NO: 140829 - RNA, 32 nt, Homo Sapiens
cccaucaucuggguuguauucuauucagaaag

SEQ ID NO: 140830 - RNA, 32 nt, Homo Sapiens
gaagagcaugcggaguccccagugucugaauc

SEQ ID NO: 140831 - RNA, 32 nt, Homo Sapiens
uuaaauguacagacauauuuaacuggugcacu

SEQ ID NO: 140832 - RNA, 29 nt, Homo Sapiens
agagcugugacuuuuuugguucugaaguc

SEQ ID NO: 140833 - RNA, 30 nt, Homo Sapiens
agggagagucgaugaaggauaugcaaauua

SEQ ID NO: 140834 - RNA, 32 nt, Homo Sapiens
ucuuacuucacccggcugggcuccucauuuuu

SEQ ID NO: 140835 - RNA, 32 nt, Homo Sapiens
ugucccugggagagggcagccgccggccuguc

SEQ ID NO: 140836 - RNA, 32 nt, Homo Sapiens
cugggagaggggcaugcuccccagcugugugu

SEQ ID NO: 140837 - RNA, 32 nt, Homo Sapiens
uauagcacuggaggaggaaaacaaauucuugu

SEQ ID NO: 140838 - RNA, 32 nt, Homo Sapiens
aguuaagcguuugagacuucguggugauuggu

SEQ ID NO: 140839 - RNA, 32 nt, Homo Sapiens
cugguucgaccuuugcagauacccauaaccua

SEQ ID NO: 140840 - RNA, 32 nt, Homo Sapiens
agaaggacacugcaucccagaucgaggccgaa

SEQ ID NO: 140841 - RNA, 32 nt, Homo Sapiens
agcgcccagcccugcucuccgcgcucggccag

SEQ ID NO: 140842 - RNA, 30 nt, Homo Sapiens
cacuuugggaggccgaggccggcgcaucau

SEQ ID NO: 140843 - RNA, 28 nt, Homo Sapiens
aagcuggaagauuaacucuagaguuuug

SEQ ID NO: 140844 - RNA, 29 nt, Homo Sapiens
aaacauggcagcgccaccuucuccaggaa

SEQ ID NO: 140845 - RNA, 32 nt, Homo Sapiens
accucccccaagcagagcuuccucagagaaag

SEQ ID NO: 140846 - RNA, 32 nt, Homo Sapiens
acaaaucuugucaaccuggaucuuacacuuca

SEQ ID NO: 140847 - RNA, 32 nt, Homo Sapiens
uuuggaaugaagaucucccggacuucaaggag

SEQ ID NO: 140848 - RNA, 32 nt, Homo Sapiens
ucaguaagaugauguuaagaggaaaccugaag

SEQ ID NO: 140849 - RNA, 32 nt, Homo Sapiens
uagagaaaaagccuuuuuauccugcuuucuuu

SEQ ID NO: 140850 - RNA, 29 nt, Homo Sapiens
ucugggucauauggugcagacugugacca

SEQ ID NO: 140851 - RNA, 32 nt, Homo Sapiens
ucaucccuggggugaagguggcugggaauuag

SEQ ID NO: 140852 - RNA, 32 nt, Homo Sapiens
acacaaaagggcggcuuuccucauggaaggag

SEQ ID NO: 140853 - RNA, 32 nt, Homo Sapiens
cccacgcgcgccgggcgggcgccauggaggag

SEQ ID NO: 140854 - RNA, 32 nt, Homo Sapiens
ccacagcguccuccuccucccuggagaagauc

SEQ ID NO: 140855 - RNA, 32 nt, Homo Sapiens
cucagcguccacuuuuagacccggcaucagcu

SEQ ID NO: 140856 - RNA, 32 nt, Homo Sapiens
ccugugggggaagagcaaacaggaaggagagc

SEQ ID NO: 140857 - RNA, 32 nt, Homo Sapiens
gagccaccaugcccagccuaauaaaaauuuuu

SEQ ID NO: 140858 - RNA, 32 nt, Homo Sapiens
cccccauggagaagaggagagaagggucuaca

SEQ ID NO: 140859 - RNA, 31 nt, Homo Sapiens
gugcuugcaagguccagggacugcguggucu

SEQ ID NO: 140860 - RNA, 31 nt, Homo Sapiens
auagccucacggaugagcccuuucuacggga

SEQ ID NO: 140861 - RNA, 32 nt, Homo Sapiens
gcagaagguuugggguggaaagggccugaggg

SEQ ID NO: 140862 - RNA, 30 nt, Homo Sapiens
accuuagucgccccuuucgcgcugcgcugu

SEQ ID NO: 140863 - RNA, 32 nt, Homo Sapiens
ggacagcgccugaggcugggaauaccugucuc

SEQ ID NO: 140864 - RNA, 32 nt, Homo Sapiens
cuauaugaguugucuuuuuuuacgcugcuuuu

SEQ ID NO: 140865 - RNA, 32 nt, Homo Sapiens
ccugcgauggucagcccugcuccugauggcca

SEQ ID NO: 140866 - RNA, 32 nt, Homo Sapiens
acuugaccuuggcgggguccugggcuucuaga

SEQ ID NO: 140867 - RNA, 32 nt, Homo Sapiens
aagugaaaauacaauuaaucagagcuuuauuu

SEQ ID NO: 140868 - RNA, 32 nt, Homo Sapiens
ccucccccaucugggggcccugggcucccauc

SEQ ID NO: 140869 - RNA, 32 nt, Homo Sapiens
ccucaagucugccucuacugugucucacauca

SEQ ID NO: 140870 - RNA, 32 nt, Homo Sapiens
cucagccggcgccgggcacccuggacagugcg

SEQ ID NO: 140871 - RNA, 32 nt, Homo Sapiens
agggauacagggggcgccuccgcccggcuaaa

SEQ ID NO: 140872 - RNA, 32 nt, Homo Sapiens
cuucgugcacauacaacauauuugagagaaua

SEQ ID NO: 140873 - RNA, 32 nt, Homo Sapiens
gguuucugcugggcugcccucucaugggaagc

SEQ ID NO: 140874 - RNA, 32 nt, Homo Sapiens
aaaagggaguauaauuacauuuuacagugacu

SEQ ID NO: 140875 - RNA, 32 nt, Homo Sapiens
gaggccuccgccucccggguuccagugauucu

SEQ ID NO: 140876 - RNA, 32 nt, Homo Sapiens
cgacacggcuccaccauggaggaggcggaccg

SEQ ID NO: 140877 - RNA, 32 nt, Homo Sapiens
caugaugacagaauuauaucagaguugaaaca

SEQ ID NO: 140878 - RNA, 32 nt, Homo Sapiens
cgggcgugguggcucaugucuguaaugccagc

SEQ ID NO: 140879 - RNA, 32 nt, Homo Sapiens
cggaugcugaugcacgggaaggaagugggcag

SEQ ID NO: 140880 - RNA, 32 nt, Homo Sapiens
gcucaggacuagaggagaaggucagagcaaag

SEQ ID NO: 140881 - RNA, 31 nt, Homo Sapiens
uauccuauuaaaccuccucugcuauguucac

SEQ ID NO: 140882 - RNA, 32 nt, Homo Sapiens
augccgacgucagugaggaagagagaagccgc

SEQ ID NO: 140883 - RNA, 32 nt, Homo Sapiens
ucccuauuauauuuuugguucuauuaggauuu

SEQ ID NO: 140884 - RNA, 32 nt, Homo Sapiens
ggugugcucguugcauauacaguguccagggu

SEQ ID NO: 140885 - RNA, 32 nt, Homo Sapiens
uggucucaucucaacguucaaccggggauggg

SEQ ID NO: 140886 - RNA, 32 nt, Homo Sapiens
gcagauccgugggcugcagacccccgccccag

SEQ ID NO: 140887 - RNA, 32 nt, Homo Sapiens
agucuuuuuuaaaaaauuuuacaguagucauu

SEQ ID NO: 140888 - RNA, 32 nt, Homo Sapiens
uggaaggagcagggcucuggagggauucgcau

SEQ ID NO: 140889 - RNA, 32 nt, Homo Sapiens
uuagggacaugguguuuuuauaaagaauucug

SEQ ID NO: 140890 - RNA, 32 nt, Homo Sapiens
gaacggaaauaguaauugugucugccauucag

SEQ ID NO: 140891 - RNA, 32 nt, Homo Sapiens
cgaccccuguuuggaggcacuccagguuuccg

SEQ ID NO: 140892 - RNA, 30 nt, Homo Sapiens
ccccccugcagaccugcagaagcuuggaca

SEQ ID NO: 140893 - RNA, 32 nt, Homo Sapiens
agagagggguugaucaaaaaauacaaaguuuc

SEQ ID NO: 140894 - RNA, 32 nt, Homo Sapiens
cgcaucuggaagcucagcaagugcacaagccu

SEQ ID NO: 140895 - RNA, 32 nt, Homo Sapiens
ggagagaugacgaccaagaccuaugauucugu

SEQ ID NO: 140896 - RNA, 32 nt, Homo Sapiens
uucucaucaaagcagaaugcuaucuugcgugu

SEQ ID NO: 140897 - RNA, 32 nt, Homo Sapiens
augaauaaaaauuuccaaugucgaaaaaaaaa

SEQ ID NO: 140898 - RNA, 32 nt, Homo Sapiens
ggcugcuaccccgaccccggcuccggucccgu

SEQ ID NO: 140899 - RNA, 32 nt, Homo Sapiens
cugauuuuguauuuuugguagagacgagguuu

SEQ ID NO: 140900 - RNA, 32 nt, Homo Sapiens
agaccuagggaaggugaggcgagguggggagu

SEQ ID NO: 140901 - RNA, 31 nt, Homo Sapiens
acucaaaaauaaaauaaaugugucaaauuuc

SEQ ID NO: 140902 - RNA, 32 nt, Homo Sapiens
auccagaugucccuaguaaaucuugcuuccuu

SEQ ID NO: 140903 - RNA, 32 nt, Homo Sapiens
uauaaucagccuauuugagcugcugggucucu

SEQ ID NO: 140904 - RNA, 32 nt, Homo Sapiens
ccacucaggucucugggguuucccucucuaau

SEQ ID NO: 140905 - RNA, 32 nt, Homo Sapiens
cagaacugagcagaagugacuuuacuuucuca

SEQ ID NO: 140906 - RNA, 32 nt, Homo Sapiens
cguggauguuccucuacuuuggcaauugugga

SEQ ID NO: 140907 - RNA, 32 nt, Homo Sapiens
cucagccccacccugggggcccgggggcgagg

SEQ ID NO: 140908 - RNA, 32 nt, Homo Sapiens
uuccugcaaagggcugacgucgcugaacucuc

SEQ ID NO: 140909 - RNA, 32 nt, Homo Sapiens
ucugugggcagcacagggcacccggcgggucc

SEQ ID NO: 140910 - RNA, 32 nt, Homo Sapiens
cauugauuugaaagaaguuaaugaauucgagg

SEQ ID NO: 140911 - RNA, 32 nt, Homo Sapiens
auugcagggaacggggcggggaggcgacaguc

SEQ ID NO: 140912 - RNA, 32 nt, Homo Sapiens
cacagaaggccucccccucucaccagggcccu

SEQ ID NO: 140913 - RNA, 31 nt, Homo Sapiens
guuguuugaauuuuccugagagccuggcuua

SEQ ID NO: 140914 - RNA, 32 nt, Homo Sapiens
ccugcacugggaaggggagauggagacgcccc

SEQ ID NO: 140915 - RNA, 32 nt, Homo Sapiens
guguuuucugguuuuucauuuauuuggccaaa

SEQ ID NO: 140916 - RNA, 32 nt, Homo Sapiens
aauagaugaggauaagaaaaaauccacaaaag

SEQ ID NO: 140917 - RNA, 32 nt, Homo Sapiens
agcauguauguggguagagcuuucaugcaucu

SEQ ID NO: 140918 - RNA, 32 nt, Homo Sapiens
uucgcgcuggcugcagcugacccggcgaaggg

SEQ ID NO: 140919 - RNA, 32 nt, Homo Sapiens
ccaccgcccagcugcccacacccggugcaggc

SEQ ID NO: 140920 - RNA, 32 nt, Homo Sapiens
uuuccuacaucauuuagaauuuuauuucccug

SEQ ID NO: 140921 - RNA, 27 nt, Homo Sapiens
uuuaaaauaaaaaugaauauggucuuc

SEQ ID NO: 140922 - RNA, 32 nt, Homo Sapiens
ugaaggacuccauccagacaagcaucauaaac

SEQ ID NO: 140923 - RNA, 32 nt, Homo Sapiens
accaauuuucuuuuauuacaaacucgcauaau

SEQ ID NO: 140924 - RNA, 32 nt, Homo Sapiens
uguagggaaugggauauugacagaaucugaaa

SEQ ID NO: 140925 - RNA, 32 nt, Homo Sapiens
uuagcugggcaugguggcacccgccuguaguc

SEQ ID NO: 140926 - RNA, 32 nt, Homo Sapiens
uggccuagggucucuccucccugcugaagucc

SEQ ID NO: 140927 - RNA, 32 nt, Homo Sapiens
uuaaugugacaugaggcccauucuucucucuu

SEQ ID NO: 140928 - RNA, 32 nt, Homo Sapiens
cugugccccccgcccaucgccccccacccauc

SEQ ID NO: 140929 - RNA, 32 nt, Homo Sapiens
uaacuugagagacauuuugaaaaggagucugc

SEQ ID NO: 140930 - RNA, 32 nt, Homo Sapiens
cgggaaggggcucccccucuacacccaccccc

SEQ ID NO: 140931 - RNA, 32 nt, Homo Sapiens
uuuuauaaacacauacaugauaccauccaaau

SEQ ID NO: 140932 - RNA, 32 nt, Homo Sapiens
agcaauuaugaagauuguuuuaugacauucuu

SEQ ID NO: 140933 - RNA, 31 nt, Homo Sapiens
aauuuaauuuuguaaaugccaaaugaaaaac

SEQ ID NO: 140934 - RNA, 32 nt, Homo Sapiens
cccgccgggcucugcuggccaccggccaccug

SEQ ID NO: 140935 - RNA, 32 nt, Homo Sapiens
cccaaccccccgcgcccgcccucggacagucc

SEQ ID NO: 140936 - RNA, 32 nt, Homo Sapiens
gagguaaagggagguagacaaggggcggcagc

SEQ ID NO: 140937 - RNA, 32 nt, Homo Sapiens
ucccaccaguggcuccuccccaccuuucaucc

SEQ ID NO: 140938 - RNA, 32 nt, Homo Sapiens
ugcuccgggccucacaucugcugcuggccucg

SEQ ID NO: 140939 - RNA, 32 nt, Homo Sapiens
cuguguagcacaaagaaaguuucucugaauau

SEQ ID NO: 140940 - RNA, 32 nt, Homo Sapiens
gcccuccccucccccacucuauacuagggacu

SEQ ID NO: 140941 - RNA, 32 nt, Homo Sapiens
gauucauaaaaugaguuuuauaauagaauucu

SEQ ID NO: 140942 - RNA, 32 nt, Homo Sapiens
cccacccgcucccacaccccugugcccccgga

SEQ ID NO: 140943 - RNA, 32 nt, Homo Sapiens
augugucucgcacuauuggacacuuuuugggg

SEQ ID NO: 140944 - RNA, 32 nt, Homo Sapiens
uuccuucccucauugagcacuccagugccauu

SEQ ID NO: 140945 - RNA, 32 nt, Homo Sapiens
ggugugcucccuccccaggcccuaggcaggcg

SEQ ID NO: 140946 - RNA, 32 nt, Homo Sapiens
acagagccucugccaacgucccgcuggugccu

SEQ ID NO: 140947 - RNA, 32 nt, Homo Sapiens
aguucugcauguuccgagguagccagucaaca

SEQ ID NO: 140948 - RNA, 32 nt, Homo Sapiens
ugucgucuccacccagaggaaguucuccagag

SEQ ID NO: 140949 - RNA, 32 nt, Homo Sapiens
aauauaguucacaaauaaugcuuaaaagacau

SEQ ID NO: 140950 - RNA, 32 nt, Homo Sapiens
uuuucuucauuuugaggaacccuaaacaccua

SEQ ID NO: 140951 - RNA, 32 nt, Homo Sapiens
auggagccgcacgugcucggcgcgguccugua

SEQ ID NO: 140952 - RNA, 30 nt, Homo Sapiens
gguggcaacuacggcggcggcgccggggcg

SEQ ID NO: 140953 - RNA, 32 nt, Homo Sapiens
aguauguguuacaaggcagcggaggcugggag

SEQ ID NO: 140954 - RNA, 32 nt, Homo Sapiens
ggggaucaaauuauuuuaagagguauuucagu

SEQ ID NO: 140955 - RNA, 32 nt, Homo Sapiens
gggucucgccggcucgccgcgcuccccaccuu

SEQ ID NO: 140956 - RNA, 32 nt, Homo Sapiens
cuuaacaaacuuagaaugacuuuuuccuuuua

SEQ ID NO: 140957 - RNA, 32 nt, Homo Sapiens
uacucaccagcuggguggcaccaccggcuuua

SEQ ID NO: 140958 - RNA, 32 nt, Homo Sapiens
cagcggccgcgcgcgccuccccucccaaugag

SEQ ID NO: 140959 - RNA, 32 nt, Homo Sapiens
aggcugaugauuaaaauucuuucucucuaaaa

SEQ ID NO: 140960 - RNA, 32 nt, Homo Sapiens
agcuuucucguguaugucuucuccaugccacu

SEQ ID NO: 140961 - RNA, 32 nt, Homo Sapiens
cuucacgcuggcuuccagcgggcccucugccg

SEQ ID NO: 140962 - RNA, 32 nt, Homo Sapiens
aauuaauguuauggcuucuuuauuuuuguaua

SEQ ID NO: 140963 - RNA, 32 nt, Homo Sapiens
cuugacaugcuucuucgaggguuggcagcaca

SEQ ID NO: 140964 - RNA, 32 nt, Homo Sapiens
ucagggcgcuccccccucccccaccguuuuag

SEQ ID NO: 140965 - RNA, 32 nt, Homo Sapiens
uuugcaugcauggguuugaauucuuugagguc

SEQ ID NO: 140966 - RNA, 32 nt, Homo Sapiens
ccucccuguagccguggaccgaauacgcacuc

SEQ ID NO: 140967 - RNA, 32 nt, Homo Sapiens
uuacuugcauaugagagaaauaaaacauuugg

SEQ ID NO: 140968 - RNA, 32 nt, Homo Sapiens
ucuucgggacgcccagggcccgggugauuuug

SEQ ID NO: 140969 - RNA, 32 nt, Homo Sapiens
uuacugugaccuugggaagcagcaggacaggg

SEQ ID NO: 140970 - RNA, 32 nt, Homo Sapiens
cacuggguguaaacacaucuaguaguuguucu

SEQ ID NO: 140971 - RNA, 32 nt, Homo Sapiens
caaacucagaucucaucaggguagcagcagag

SEQ ID NO: 140972 - RNA, 32 nt, Homo Sapiens
cccagugcccacuacaggccccgccccuccug

SEQ ID NO: 140973 - RNA, 32 nt, Homo Sapiens
agcgagcaguuucuucuguugccgggcaacac

SEQ ID NO: 140974 - RNA, 32 nt, Homo Sapiens
aaacuauauucauaucuguuucauuuggagga

SEQ ID NO: 140975 - RNA, 32 nt, Homo Sapiens
gugcugagcaaggugggcuucuccgggaucuu

SEQ ID NO: 140976 - RNA, 27 nt, Homo Sapiens
acagcuaacuucuucagucucaucuau

SEQ ID NO: 140977 - RNA, 32 nt, Homo Sapiens
ucauuaaaauacaggcccuuaggcucuauuuu

SEQ ID NO: 140978 - RNA, 32 nt, Homo Sapiens
cgguggccugcgccagcugcugggugagcucg

SEQ ID NO: 140979 - RNA, 32 nt, Homo Sapiens
uaagcaaaaugugaaaaguaaggaaaucagcc

SEQ ID NO: 140980 - RNA, 32 nt, Homo Sapiens
gcgcucggccgucucgggcgugcucagcauag

SEQ ID NO: 140981 - RNA, 32 nt, Homo Sapiens
gccuugagaagcugagcggagaccggcuagac

SEQ ID NO: 140982 - RNA, 32 nt, Homo Sapiens
uucugcugcggcgcccucuucaucucuagccg

SEQ ID NO: 140983 - RNA, 32 nt, Homo Sapiens
ucuauugcuguuucuauucucucuuauaguga

SEQ ID NO: 140984 - RNA, 32 nt, Homo Sapiens
cagucucuccgcucgucucccggagcuuucuc

SEQ ID NO: 140985 - RNA, 32 nt, Homo Sapiens
aauggacaaauugacugcaauguaauacuagc

SEQ ID NO: 140986 - RNA, 32 nt, Homo Sapiens
uaaaggacugguuuuuaagugcacugcacuuc

SEQ ID NO: 140987 - RNA, 32 nt, Homo Sapiens
gggacuuuaggugucacuuaaucucuucacac

SEQ ID NO: 140988 - RNA, 32 nt, Homo Sapiens
acuaugugugauguaauuuaucacgauuuggu

SEQ ID NO: 140989 - RNA, 32 nt, Homo Sapiens
gguaccaaggccuggggccgccagcgggugcu

SEQ ID NO: 140990 - RNA, 32 nt, Homo Sapiens
ggcccuggacauggcccggccccacugcugag

SEQ ID NO: 140991 - RNA, 32 nt, Homo Sapiens
uaaugcucugcccucccucccccgaaguucuc

SEQ ID NO: 140992 - RNA, 32 nt, Homo Sapiens
cuaccgggcggaggugagcgcggcgccggcuc

SEQ ID NO: 140993 - RNA, 32 nt, Homo Sapiens
ccuucaggcccugcgccgccuccggaguccau

SEQ ID NO: 140994 - RNA, 32 nt, Homo Sapiens
ggcgaggagaggcagcacugcugcucuugacu

SEQ ID NO: 140995 - RNA, 32 nt, Homo Sapiens
ugcagcuguccgagucuccauccaccuuuaga

SEQ ID NO: 140996 - RNA, 32 nt, Homo Sapiens
cccucaucgcucgccuccgcgcccgccuggcc

SEQ ID NO: 140997 - RNA, 32 nt, Homo Sapiens
gguuucaacauguuggccaggcuggucaugaa

SEQ ID NO: 140998 - RNA, 32 nt, Homo Sapiens
uguuggaaaaagacaaaaagaaccugguccuu

SEQ ID NO: 140999 - RNA, 32 nt, Homo Sapiens
ggcccucggcgacaaugccgggcguucccgga

SEQ ID NO: 141000 - RNA, 32 nt, Homo Sapiens
caggcggugggaugcuuguagcuccucacagc

SEQ ID NO: 141001 - RNA, 32 nt, Homo Sapiens
aaugccggcaggggugggcagcagccagaccu

SEQ ID NO: 141002 - RNA, 32 nt, Homo Sapiens
augaugaaaauauuauaaaauuagauugucau

SEQ ID NO: 141003 - RNA, 32 nt, Homo Sapiens
gugacuuuaauaagcuggaacaguccacugaa

SEQ ID NO: 141004 - RNA, 32 nt, Homo Sapiens
uguugcauguuguguuucaaguaaaugguuca

SEQ ID NO: 141005 - RNA, 32 nt, Homo Sapiens
cagccaaggaggaggaugauuacgacgugaug

SEQ ID NO: 141006 - RNA, 32 nt, Homo Sapiens
cccggggucguggaccccggccaggucuuagc

SEQ ID NO: 141007 - RNA, 32 nt, Homo Sapiens
gggcuagcacaccaacaccauccccccagaug

SEQ ID NO: 141008 - RNA, 32 nt, Homo Sapiens
uggagaguagggucuauggcgagggaaaaggg

SEQ ID NO: 141009 - RNA, 32 nt, Homo Sapiens
gugggugcacuucuacguggauuuucuuccuc

SEQ ID NO: 141010 - RNA, 32 nt, Homo Sapiens
gcagucggaaguuuccuuuuccgugggaggga

SEQ ID NO: 141011 - RNA, 32 nt, Homo Sapiens
auucuuaaagaugcauauaacuucuauaauuc

SEQ ID NO: 141012 - RNA, 32 nt, Homo Sapiens
auauggccaaaauaaaacuaucugucuugaau

SEQ ID NO: 141013 - RNA, 32 nt, Homo Sapiens
ccuuucuuuucuuuuuuuuuuagauggagucu

SEQ ID NO: 141014 - RNA, 32 nt, Homo Sapiens
gucccaaggcgcaugcacacacagacggacag

SEQ ID NO: 141015 - RNA, 32 nt, Homo Sapiens
uaaccuaccuccacccucccccuagccagcca

SEQ ID NO: 141016 - RNA, 32 nt, Homo Sapiens
gagaucuugugucuccucuccaucucugccuu

SEQ ID NO: 141017 - RNA, 32 nt, Homo Sapiens
ggccuggggucucaccccuaguguggggcccc

SEQ ID NO: 141018 - RNA, 32 nt, Homo Sapiens
gcagugggcuugugugugaugugcagucccga

SEQ ID NO: 141019 - RNA, 32 nt, Homo Sapiens
ggcccgcggggacgucgcuguccguccugcuc

SEQ ID NO: 141020 - RNA, 32 nt, Homo Sapiens
ccgucauagguguggucaucauccucuccugc

SEQ ID NO: 141021 - RNA, 32 nt, Homo Sapiens
cugacauuuuaaaaaguaauuguuauaaaagu

SEQ ID NO: 141022 - RNA, 32 nt, Homo Sapiens
ccaaaggugguuugcuuuugcugggguaaaaa

SEQ ID NO: 141023 - RNA, 32 nt, Homo Sapiens
ugggcugcuccucaugguggguucaggggacu

SEQ ID NO: 141024 - RNA, 32 nt, Homo Sapiens
ucacuccuuucugaccaagcaacgcuaacuuu

SEQ ID NO: 141025 - RNA, 32 nt, Homo Sapiens
gcaaaguuauuuaaaugaguuaguugaguugg

SEQ ID NO: 141026 - RNA, 32 nt, Homo Sapiens
ggcacccaacuuuuaaaaaauccaaaaugugu

SEQ ID NO: 141027 - RNA, 32 nt, Homo Sapiens
auuagucaggugguuacuccuugcuucaaggu

SEQ ID NO: 141028 - RNA, 32 nt, Homo Sapiens
gccacguugaaguaaaaacaaacagguacagu

SEQ ID NO: 141029 - RNA, 32 nt, Homo Sapiens
gaauuagaacgcaaugaacguuagacaaaaca

SEQ ID NO: 141030 - RNA, 32 nt, Homo Sapiens
gggugucagauucuuaucaguuucacaccagg

SEQ ID NO: 141031 - RNA, 30 nt, Homo Sapiens
ucacaccagccuuccacccauuucacagau

SEQ ID NO: 141032 - RNA, 32 nt, Homo Sapiens
auucccggagacggcgccucugcucugcgggu

SEQ ID NO: 141033 - RNA, 32 nt, Homo Sapiens
gacuggcggcggcggcagcugcgcaaagugcg

SEQ ID NO: 141034 - RNA, 32 nt, Homo Sapiens
guggaugaaacaccaaagucuguuuccccguc

SEQ ID NO: 141035 - RNA, 32 nt, Homo Sapiens
ugcacagaaauuuuuggcauaaguuuauuuuc

SEQ ID NO: 141036 - RNA, 32 nt, Homo Sapiens
gggugagagggaggagaugcaggaugcccacg

SEQ ID NO: 141037 - RNA, 32 nt, Homo Sapiens
gagggagucuugcuuggcgaccaucuggacaa

SEQ ID NO: 141038 - RNA, 32 nt, Homo Sapiens
uaaaacaaaaacaaaaaacuaugugaugccuc

SEQ ID NO: 141039 - RNA, 31 nt, Homo Sapiens
ccagugaaauaaacauguauuagacaccuaa

SEQ ID NO: 141040 - RNA, 32 nt, Homo Sapiens
gucuguuucauaguuaccacuuacgcgaguag

SEQ ID NO: 141041 - RNA, 32 nt, Homo Sapiens
cuggacugaccuauuuucagaaccuacuuuca

SEQ ID NO: 141042 - RNA, 32 nt, Homo Sapiens
ucaggcuggacaccccuccaccuggcggucca

SEQ ID NO: 141043 - RNA, 32 nt, Homo Sapiens
cggggggcggcacagggcuccugcacuccugg

SEQ ID NO: 141044 - RNA, 32 nt, Homo Sapiens
uaagugacuguucagcugggauccauuggauu

SEQ ID NO: 141045 - RNA, 32 nt, Homo Sapiens
cuuuuuaaauaaauuaaagcuuauuuuacuug

SEQ ID NO: 141046 - RNA, 32 nt, Homo Sapiens
acuuuccuccuggcagaaugcuagcucugagc

SEQ ID NO: 141047 - RNA, 30 nt, Homo Sapiens
ggcagacagcugcugggggaaauccugggg

SEQ ID NO: 141048 - RNA, 32 nt, Homo Sapiens
gcguaaugagacucaccuuuucucgcugaaag

SEQ ID NO: 141049 - RNA, 32 nt, Homo Sapiens
gcuuaggagagauaacacuuuuugucccugua

SEQ ID NO: 141050 - RNA, 32 nt, Homo Sapiens
ugaacgcacugcauaaauuugccugguucagu

SEQ ID NO: 141051 - RNA, 32 nt, Homo Sapiens
ugugagggcaguaguaggcaucuggaaugcuc

SEQ ID NO: 141052 - RNA, 32 nt, Homo Sapiens
gaaguuuauuuucucacaguuccggaugcuaa

SEQ ID NO: 141053 - RNA, 32 nt, Homo Sapiens
ucuuaaauuauguaucaauucaugcugguuua

SEQ ID NO: 141054 - RNA, 32 nt, Homo Sapiens
auucagcagacaccucuucagcuugaguucuu

SEQ ID NO: 141055 - RNA, 32 nt, Homo Sapiens
uaagcaucagaauuuaugaacaaagaauaugu

SEQ ID NO: 141056 - RNA, 32 nt, Homo Sapiens
ugcaauauuguaguucauauauuaccguuaug

SEQ ID NO: 141057 - RNA, 32 nt, Homo Sapiens
aagugaaauauguugcgguagagauggaaugu

SEQ ID NO: 141058 - RNA, 32 nt, Homo Sapiens
gggaggcccugccugacccaucccuuuuccuu

SEQ ID NO: 141059 - RNA, 32 nt, Homo Sapiens
ugucgcacugggcagcaguucugggugucugg

SEQ ID NO: 141060 - RNA, 32 nt, Homo Sapiens
gccgaggucucguaucucggggcaguguguga

SEQ ID NO: 141061 - RNA, 32 nt, Homo Sapiens
gagggggccgugccgagaaggggagggggcgc

SEQ ID NO: 141062 - RNA, 32 nt, Homo Sapiens
gcuuuuucuuagauagcgucuuccucagcgcc

SEQ ID NO: 141063 - RNA, 32 nt, Homo Sapiens
acaggaaaaaauagaagucuacugaauuaauu

SEQ ID NO: 141064 - RNA, 31 nt, Homo Sapiens
acauguguaaugaucaaaucaguguaauuaa

SEQ ID NO: 141065 - RNA, 32 nt, Homo Sapiens
cccgcuucccugcacugcugcuccauccucag

SEQ ID NO: 141066 - RNA, 32 nt, Homo Sapiens
cgucacucagcuuuuucucgauaggcuucauc

SEQ ID NO: 141067 - RNA, 32 nt, Homo Sapiens
ugaccaugaggaguacagcagaaggugcuccu

SEQ ID NO: 141068 - RNA, 32 nt, Homo Sapiens
caagucuacuuuucuuuuuuucucuuguuuug

SEQ ID NO: 141069 - RNA, 32 nt, Homo Sapiens
gccagcccgugcgcccucggcgcguacccgcc

SEQ ID NO: 141070 - RNA, 32 nt, Homo Sapiens
cucgacccacgcguccgcgcgccccaggagcc

SEQ ID NO: 141071 - RNA, 32 nt, Homo Sapiens
accucucugcagcuccuucuccaaucucaugg

SEQ ID NO: 141072 - RNA, 32 nt, Homo Sapiens
cuuuguugauucaauuccugugauuuuuguuc

SEQ ID NO: 141073 - RNA, 32 nt, Homo Sapiens
aaaaggagcucuucuugugaaaugucuguucc

SEQ ID NO: 141074 - RNA, 32 nt, Homo Sapiens
ugcugacagccuuuuuaaccaauacauuuaaa

SEQ ID NO: 141075 - RNA, 32 nt, Homo Sapiens
cggccgccuccagcucccggcgcggcccggcc

SEQ ID NO: 141076 - RNA, 32 nt, Homo Sapiens
cagcaucccccgcuggcccccaggccccucau

SEQ ID NO: 141077 - RNA, 30 nt, Homo Sapiens
gcccuuccgcugugccccgcccugagagca

SEQ ID NO: 141078 - RNA, 32 nt, Homo Sapiens
uucuguauuaaacaucuuguugcacgcauuug

SEQ ID NO: 141079 - RNA, 32 nt, Homo Sapiens
acuucagcgcuugauauuggucuaggaggggu

SEQ ID NO: 141080 - RNA, 32 nt, Homo Sapiens
agagaugaaugaauuaaggacaaagcuccaga

SEQ ID NO: 141081 - RNA, 32 nt, Homo Sapiens
agacaccccgucccgaggauggugcucugugc

SEQ ID NO: 141082 - RNA, 32 nt, Homo Sapiens
auccguugcccauuuuacuuacacuuuggcuc

SEQ ID NO: 141083 - RNA, 32 nt, Homo Sapiens
auagauguugaucgcauuuacaaaacaucuuc

SEQ ID NO: 141084 - RNA, 32 nt, Homo Sapiens
uguguacugccuuuucucugguaauuguaaau

SEQ ID NO: 141085 - RNA, 32 nt, Homo Sapiens
ucugcagauaguugcuucucuugcuuguuucu

SEQ ID NO: 141086 - RNA, 32 nt, Homo Sapiens
uugcggcaccgcccacccacaccccgucugcc

SEQ ID NO: 141087 - RNA, 32 nt, Homo Sapiens
ugugguuuauacugugccuuaauaguaaugcu

SEQ ID NO: 141088 - RNA, 32 nt, Homo Sapiens
ggcaacugacuucuuuagaauuuugcaguuaa

SEQ ID NO: 141089 - RNA, 32 nt, Homo Sapiens
uuuuaaugaccucagccccgccugcaguggcu

SEQ ID NO: 141090 - RNA, 32 nt, Homo Sapiens
ggcucuuucuagcugggagacuugagcaaauu

SEQ ID NO: 141091 - RNA, 32 nt, Homo Sapiens
cccuccuuuccaccccuccgcgcccugccacu

SEQ ID NO: 141092 - RNA, 32 nt, Homo Sapiens
ggcugaucuuuaacgggaaggcugcuuucucc

SEQ ID NO: 141093 - RNA, 32 nt, Homo Sapiens
gaagcaaaauaaauuuauauaauggaauuugg

SEQ ID NO: 141094 - RNA, 32 nt, Homo Sapiens
ggugugauuacuuuuuugcucguagauauugu

SEQ ID NO: 141095 - RNA, 32 nt, Homo Sapiens
uuaucguguugcaaacugguugguggaacgcu

SEQ ID NO: 141096 - RNA, 30 nt, Homo Sapiens
cuaacuaugccaugcuauucuuaucccaaa

SEQ ID NO: 141097 - RNA, 32 nt, Homo Sapiens
acccuguugccaccuuguuucauuuguaaaag

SEQ ID NO: 141098 - RNA, 28 nt, Homo Sapiens
uauguuguagcuaauauguuuuaugcau

SEQ ID NO: 141099 - RNA, 32 nt, Homo Sapiens
uuuccuuccugcacagcuaacuucuacaucac

SEQ ID NO: 141100 - RNA, 32 nt, Homo Sapiens
cuauuaaucuucauuuguucauucaucuauug

SEQ ID NO: 141101 - RNA, 32 nt, Homo Sapiens
acauuaacaaaaaaaaucauguuaaggcuuug

SEQ ID NO: 141102 - RNA, 32 nt, Homo Sapiens
cccagagcccuggcaccagagacgccaagagc

SEQ ID NO: 141103 - RNA, 32 nt, Homo Sapiens
cgugagcagucauggcguacuccacagugcag

SEQ ID NO: 141104 - RNA, 32 nt, Homo Sapiens
gaagauggcggcggggggcggcagaggcggcg

SEQ ID NO: 141105 - RNA, 31 nt, Homo Sapiens
gcuuccugauaagaaaagguauaugcaaugc

SEQ ID NO: 141106 - RNA, 32 nt, Homo Sapiens
uaauaguuuaggcagaugaacaugacauuaau

SEQ ID NO: 141107 - RNA, 32 nt, Homo Sapiens
gagcacgugucccagccacagaggccccugug

SEQ ID NO: 141108 - RNA, 30 nt, Homo Sapiens
gagguccaagcucaggucgcccugcccccu

SEQ ID NO: 141109 - RNA, 32 nt, Homo Sapiens
aggcggggaaggagucacggggcgcgcacgcc

SEQ ID NO: 141110 - RNA, 32 nt, Homo Sapiens
uggagaauccugaaaaagacggugcuucaacc

SEQ ID NO: 141111 - RNA, 32 nt, Homo Sapiens
ucagguucugccucugggaggcugugugcacc

SEQ ID NO: 141112 - RNA, 32 nt, Homo Sapiens
acccccgccucccgcaccgcgccccucuccgg

SEQ ID NO: 141113 - RNA, 32 nt, Homo Sapiens
gcaguccgcaggcccaaacgcgcacgcgaccc

SEQ ID NO: 141114 - RNA, 32 nt, Homo Sapiens
cucacugucagggucccuggggucgcuugugc

SEQ ID NO: 141115 - RNA, 32 nt, Homo Sapiens
cagauggugccucugccugcucuucuucgccu

SEQ ID NO: 141116 - RNA, 32 nt, Homo Sapiens
ugcuauuaaucucauugcuauagaccauuaac

SEQ ID NO: 141117 - RNA, 32 nt, Homo Sapiens
gcgcgccuucucuccuucccgcccucaggguc

SEQ ID NO: 141118 - RNA, 32 nt, Homo Sapiens
acuugcacaaaacugaucaguuuugagagauc

SEQ ID NO: 141119 - RNA, 32 nt, Homo Sapiens
ucaagcaagcuauagucagacagaugaugaaa

SEQ ID NO: 141120 - RNA, 32 nt, Homo Sapiens
aggacgcacgcgaggcccgccagcacgcccug

SEQ ID NO: 141121 - RNA, 32 nt, Homo Sapiens
aaagcccgcgcgccgcugcaucccgcguccag

SEQ ID NO: 141122 - RNA, 32 nt, Homo Sapiens
ugccaagaucacaccacagugggagugguggc

SEQ ID NO: 141123 - RNA, 32 nt, Homo Sapiens
cuaccgucgcuuucuauuucucuuucuuugug

SEQ ID NO: 141124 - RNA, 32 nt, Homo Sapiens
ggaccuuuugucuuugcuuuggcauuuuggcc

SEQ ID NO: 141125 - RNA, 32 nt, Homo Sapiens
gccagcgggggccccaggagaccugggcuccc

SEQ ID NO: 141126 - RNA, 32 nt, Homo Sapiens
uucucaaaaauuaauuugauaauuucauguau

SEQ ID NO: 141127 - RNA, 32 nt, Homo Sapiens
cccugcagauggggcgggcagggaacgggcgc

SEQ ID NO: 141128 - RNA, 32 nt, Homo Sapiens
gcuuucacguagagucucggccugggcaguca

SEQ ID NO: 141129 - RNA, 29 nt, Homo Sapiens
ccuuguuuuauacauuuccagaccauuca

SEQ ID NO: 141130 - RNA, 32 nt, Homo Sapiens
cccgacgcuccacagcucgccgcggccggggg

SEQ ID NO: 141131 - RNA, 32 nt, Homo Sapiens
ccugccugcccccgggcgccaccucuguacac

SEQ ID NO: 141132 - RNA, 32 nt, Homo Sapiens
acagauuuccucuggaaugucuucccuaccuc

SEQ ID NO: 141133 - RNA, 32 nt, Homo Sapiens
ccguccuguauccaugagagugcaugucgguu

SEQ ID NO: 141134 - RNA, 32 nt, Homo Sapiens
guagucacagaaauuccuaaagaagagaagga

SEQ ID NO: 141135 - RNA, 32 nt, Homo Sapiens
acuuagcuuuuguacuuauauuuuucagagga

SEQ ID NO: 141136 - RNA, 32 nt, Homo Sapiens
cauuuaacugaauaaaucaaccaauaauguca

SEQ ID NO: 141137 - RNA, 32 nt, Homo Sapiens
gaccuaaggccucucugccgcgcgcgcagagc

SEQ ID NO: 141138 - RNA, 32 nt, Homo Sapiens
accaauugauaaaaugaauauaaaguauuuca

SEQ ID NO: 141139 - RNA, 32 nt, Homo Sapiens
aucccagaggaugucacaaagaucaugaaagu

SEQ ID NO: 141140 - RNA, 32 nt, Homo Sapiens
gcaauuugcaauguugcaauuguguuggagaa

SEQ ID NO: 141141 - RNA, 32 nt, Homo Sapiens
gugaaggugucaguggcggcggcagcgauggc

SEQ ID NO: 141142 - RNA, 32 nt, Homo Sapiens
gccaggcgcugcggccgucccgggccgugacu

SEQ ID NO: 141143 - RNA, 32 nt, Homo Sapiens
ccgcggcucggaggcucccgcgcacucggguc

SEQ ID NO: 141144 - RNA, 32 nt, Homo Sapiens
ggccgcggcuggcacugcugcugcuucugcuc

SEQ ID NO: 141145 - RNA, 29 nt, Homo Sapiens
aaugggauuugacucaguuugauuggugu

SEQ ID NO: 141146 - RNA, 32 nt, Homo Sapiens
cacagagugguggccaguggcuacacaauagc

SEQ ID NO: 141147 - RNA, 32 nt, Homo Sapiens
gaaggaugcugaacagaagauugaagaacaga

SEQ ID NO: 141148 - RNA, 32 nt, Homo Sapiens
ccugccuggaagagccgagcaccugugcccau

SEQ ID NO: 141149 - RNA, 29 nt, Homo Sapiens
gaauuuauagauaaauucuuguaacauua

SEQ ID NO: 141150 - RNA, 32 nt, Homo Sapiens
auccaguuggacaauuuucauuuucaucauau

SEQ ID NO: 141151 - RNA, 32 nt, Homo Sapiens
ugugaguugauuuugguagcuauuugcugcuc

SEQ ID NO: 141152 - RNA, 32 nt, Homo Sapiens
auaaugguugaauuuuauugcaaccauauugg

SEQ ID NO: 141153 - RNA, 32 nt, Homo Sapiens
auaaccgggcgguggcagcuggccgcacucac

SEQ ID NO: 141154 - RNA, 32 nt, Homo Sapiens
agugacccggcgggcgagcuccgugcugcaug

SEQ ID NO: 141155 - RNA, 32 nt, Homo Sapiens
ccagaaaaaaaaaaacaaaacuaauaaaaaau

SEQ ID NO: 141156 - RNA, 32 nt, Homo Sapiens
aaugccauguucuugcagaaaacgcuuagccu

SEQ ID NO: 141157 - RNA, 32 nt, Homo Sapiens
uugggguugcugacucguuuccuccccgaguu

SEQ ID NO: 141158 - RNA, 32 nt, Homo Sapiens
aaauuuuugcugucacauuuagguaaaagaga

SEQ ID NO: 141159 - RNA, 32 nt, Homo Sapiens
ggccaccagcuccgugacccaggcuggaaugc

SEQ ID NO: 141160 - RNA, 32 nt, Homo Sapiens
uauaguaaaaacauaguccuggaaauaaaaaa

SEQ ID NO: 141161 - RNA, 32 nt, Homo Sapiens
ggauuucagucuccacauaguuuuggagccgg

SEQ ID NO: 141162 - RNA, 32 nt, Homo Sapiens
auguggacacuggcucagagaagugguggggg

SEQ ID NO: 141163 - RNA, 32 nt, Homo Sapiens
ugacccacagaaaaggagcccauggaacacaa

SEQ ID NO: 141164 - RNA, 32 nt, Homo Sapiens
ggcagcgaggagcggcuggcgcucgaggcggc

SEQ ID NO: 141165 - RNA, 32 nt, Homo Sapiens
ugccugucuuuguacaccaaucaaagguguau

SEQ ID NO: 141166 - RNA, 32 nt, Homo Sapiens
uauuucccaagcccuccucuuuuagccaaggc

SEQ ID NO: 141167 - RNA, 32 nt, Homo Sapiens
acguuagaaagcaacacuguuuuuauguaguu

SEQ ID NO: 141168 - RNA, 32 nt, Homo Sapiens
cgggguucucccugccacagggacccagaaga

SEQ ID NO: 141169 - RNA, 32 nt, Homo Sapiens
gcugcuaugugaacagcuuuuacagucauuaa

SEQ ID NO: 141170 - RNA, 32 nt, Homo Sapiens
cccggagguagcauuucccaggaggcacgguc

SEQ ID NO: 141171 - RNA, 32 nt, Homo Sapiens
uguauauguauuauauugaagaauaaacaugg

SEQ ID NO: 141172 - RNA, 32 nt, Homo Sapiens
accacagggcccaggaggcauuccacacaggc

SEQ ID NO: 141173 - RNA, 32 nt, Homo Sapiens
aauccacuccagauuugauuuacaauuguccc

SEQ ID NO: 141174 - RNA, 32 nt, Homo Sapiens
ggcacuucagauauuauauccuuuagcuauag

SEQ ID NO: 141175 - RNA, 32 nt, Homo Sapiens
cgggcaggacgcccugccccgcaccagcagcc

SEQ ID NO: 141176 - RNA, 32 nt, Homo Sapiens
cuccaacgccgggcgccgcgggcagcacccac

SEQ ID NO: 141177 - RNA, 32 nt, Homo Sapiens
cagcaccggcccacccaaagauucuggcccaa

SEQ ID NO: 141178 - RNA, 32 nt, Homo Sapiens
auuaggccaaaauaaacuugaguaauuuguac

SEQ ID NO: 141179 - RNA, 32 nt, Homo Sapiens
gcccccucuauucuccucucucccccagggga

SEQ ID NO: 141180 - RNA, 32 nt, Homo Sapiens
cauucacauuggaaaaacugaugguuuuaaau

SEQ ID NO: 141181 - RNA, 28 nt, Homo Sapiens
auagucaagaauggacauuugaaccaga

SEQ ID NO: 141182 - RNA, 32 nt, Homo Sapiens
ggccccuuacacaaaaacaaagucagguccug

SEQ ID NO: 141183 - RNA, 32 nt, Homo Sapiens
cuuuuggacuaucaaaaacaguaaggcuuuug

SEQ ID NO: 141184 - RNA, 32 nt, Homo Sapiens
auuguucuuuuaguuuguauucuuauaaaaaa

SEQ ID NO: 141185 - RNA, 32 nt, Homo Sapiens
aaaggccucugggauuauacucugaagaaccc

SEQ ID NO: 141186 - RNA, 32 nt, Homo Sapiens
guggagaugggcccgccaugugccugcaggga

SEQ ID NO: 141187 - RNA, 32 nt, Homo Sapiens
uucuugccgcggcuugccugggcagguaaagc

SEQ ID NO: 141188 - RNA, 32 nt, Homo Sapiens
gaagguuuugugcccugcuguaucauaaagca

SEQ ID NO: 141189 - RNA, 32 nt, Homo Sapiens
acgugaauaaaugcaacuuauguuuucuuguu

SEQ ID NO: 141190 - RNA, 32 nt, Homo Sapiens
cgugucccgaugcccagcgccacgcagcgcaa

SEQ ID NO: 141191 - RNA, 32 nt, Homo Sapiens
uuuuagcauaauuuagaaaaacaaaacaaagg

SEQ ID NO: 141192 - RNA, 32 nt, Homo Sapiens
uauucugccgucucacacuucuccaugccaug

SEQ ID NO: 141193 - RNA, 32 nt, Homo Sapiens
aauauuaaagagaaacaaaacuguacauuucc

SEQ ID NO: 141194 - RNA, 32 nt, Homo Sapiens
cccauagcugucuucaucuguguauuuuaaua

SEQ ID NO: 141195 - RNA, 32 nt, Homo Sapiens
uuugcagggcuuuggcuguuaccuuucccugc

SEQ ID NO: 141196 - RNA, 32 nt, Homo Sapiens
agugaaaaguuugaauauaguuucauaauguu

SEQ ID NO: 141197 - RNA, 31 nt, Homo Sapiens
ggcccagcccgccccauucaccuguggauuu

SEQ ID NO: 141198 - RNA, 32 nt, Homo Sapiens
aagaaguuucauccccaguuaagcagagucca

SEQ ID NO: 141199 - RNA, 32 nt, Homo Sapiens
uuuuugggguguuuuuuuuuuaacugccuggu

SEQ ID NO: 141200 - RNA, 32 nt, Homo Sapiens
ugacgggaagcaggacgaaauaucggcgugug

SEQ ID NO: 141201 - RNA, 32 nt, Homo Sapiens
ugcuggaagcccugacuuccccggggccccag

SEQ ID NO: 141202 - RNA, 32 nt, Homo Sapiens
ccgagucucgaggcugccaggugcuggcagcu

SEQ ID NO: 141203 - RNA, 32 nt, Homo Sapiens
cugcuuuugcaaacagaacacuguaauagggu

SEQ ID NO: 141204 - RNA, 32 nt, Homo Sapiens
aacuuuuuauuggcagcagauauccuaggagg

SEQ ID NO: 141205 - RNA, 32 nt, Homo Sapiens
ugaccgaccucuggaaaucaacuuugacccca

SEQ ID NO: 141206 - RNA, 32 nt, Homo Sapiens
ggcguuuuuuaucaguaugucaucucuucacc

SEQ ID NO: 141207 - RNA, 32 nt, Homo Sapiens
auuaaaaaauuuagcaauagaauguaaauugu

SEQ ID NO: 141208 - RNA, 32 nt, Homo Sapiens
cuggcgccaguggucagcacgucuacagcucu

SEQ ID NO: 141209 - RNA, 32 nt, Homo Sapiens
gcagcagaauauugaucauuuuucucaguuua

SEQ ID NO: 141210 - RNA, 32 nt, Homo Sapiens
ugggaagcccucuggagugggaagacagugcc

SEQ ID NO: 141211 - RNA, 32 nt, Homo Sapiens
gauuuuagguagugcuuuuuauuuuaaaaaua

SEQ ID NO: 141212 - RNA, 32 nt, Homo Sapiens
cuggccuccagccccagcaguguggcccagag

SEQ ID NO: 141213 - RNA, 32 nt, Homo Sapiens
uguuacauuauagcuacauauuugugguuaag

SEQ ID NO: 141214 - RNA, 32 nt, Homo Sapiens
cuccuccccucccuccuucuuuaguuuaacca

SEQ ID NO: 141215 - RNA, 32 nt, Homo Sapiens
uaaaaggcagagcuauguguaaauauuuuaag

SEQ ID NO: 141216 - RNA, 32 nt, Homo Sapiens
uggacucggcacucacagcugcugugcaaacu

SEQ ID NO: 141217 - RNA, 32 nt, Homo Sapiens
ggagcccaaacacaggcauugaucccgccucc

SEQ ID NO: 141218 - RNA, 32 nt, Homo Sapiens
agaguuugagaccagcuugaccaacauggaga

SEQ ID NO: 141219 - RNA, 31 nt, Homo Sapiens
gauggacagagaugccugcccccgugaagcu

SEQ ID NO: 141220 - RNA, 32 nt, Homo Sapiens
uguugagagaaaauguggcagugccuucaccc

SEQ ID NO: 141221 - RNA, 32 nt, Homo Sapiens
gaaacuguauugcaugaagauggcuggcagcu

SEQ ID NO: 141222 - RNA, 32 nt, Homo Sapiens
gacggaacccaccgugcaccaccugccgcuua

SEQ ID NO: 141223 - RNA, 32 nt, Homo Sapiens
aagaaaaaggauuuuguuuaaaauacuuuaaa

SEQ ID NO: 141224 - RNA, 32 nt, Homo Sapiens
ggagguggugcuggugcucucuccaggcccac

SEQ ID NO: 141225 - RNA, 32 nt, Homo Sapiens
gccaaagaugcggcgaggcuggaagauggcuc

SEQ ID NO: 141226 - RNA, 32 nt, Homo Sapiens
aacacgcugauucuccuccugccucucccgug

SEQ ID NO: 141227 - RNA, 32 nt, Homo Sapiens
ggcagccgggagcgggggcgcagguguuacug

SEQ ID NO: 141228 - RNA, 32 nt, Homo Sapiens
uuuauaagggacuuuuccccucuuugcugccg

SEQ ID NO: 141229 - RNA, 32 nt, Homo Sapiens
ggacgcggagccagggauccccggcuuugccc

SEQ ID NO: 141230 - RNA, 32 nt, Homo Sapiens
aggcagccccagcguucauguucugugauaga

SEQ ID NO: 141231 - RNA, 32 nt, Homo Sapiens
aauacgugcaacaucuuaauuuuuguuuuuca

SEQ ID NO: 141232 - RNA, 32 nt, Homo Sapiens
cugaggaaggcgugcgaaggcuccacagcugg

SEQ ID NO: 141233 - RNA, 32 nt, Homo Sapiens
gacaucuagcggggaggugggcggcgaggguc

SEQ ID NO: 141234 - RNA, 32 nt, Homo Sapiens
agcuacucauuucuuacccuuggaggcugugu

SEQ ID NO: 141235 - RNA, 32 nt, Homo Sapiens
auugugaaacacuacuguccaaugcaaaugau

SEQ ID NO: 141236 - RNA, 32 nt, Homo Sapiens
uauuaaguauaaauauuuauuagaugccuuuu

SEQ ID NO: 141237 - RNA, 32 nt, Homo Sapiens
uccuaaacgcucucgucuuuuugugugucuug

SEQ ID NO: 141238 - RNA, 32 nt, Homo Sapiens
gacuccaccguguucgggucuuucuaggaacc

SEQ ID NO: 141239 - RNA, 32 nt, Homo Sapiens
cauauauaaaaauuauuaugugcuacacuaga

SEQ ID NO: 141240 - RNA, 32 nt, Homo Sapiens
cucuaugaaaucuaacccuuccccucaugaga

SEQ ID NO: 141241 - RNA, 32 nt, Homo Sapiens
uccccgcugggaagagaagagggcccagccca

SEQ ID NO: 141242 - RNA, 32 nt, Homo Sapiens
guuuucgucggacaugugggcagacgcuggug

SEQ ID NO: 141243 - RNA, 32 nt, Homo Sapiens
uucucuucguuauuuaucugacccucuaacuc

SEQ ID NO: 141244 - RNA, 32 nt, Homo Sapiens
ugguguccccucugccuccccucccccgaccc

SEQ ID NO: 141245 - RNA, 32 nt, Homo Sapiens
gaggagagugaacagggagcggggcuuuuguc

SEQ ID NO: 141246 - RNA, 32 nt, Homo Sapiens
aagcuggccuacugccuccaacacacuacguc

SEQ ID NO: 141247 - RNA, 32 nt, Homo Sapiens
caggacggagagcucucccuugguucggaguc

SEQ ID NO: 141248 - RNA, 32 nt, Homo Sapiens
gacauggaggagguaaagugggauaaagacuu

SEQ ID NO: 141249 - RNA, 32 nt, Homo Sapiens
cuucuguccaccuuucuuuccauccuucugga

SEQ ID NO: 141250 - RNA, 32 nt, Homo Sapiens
cucuccuucucccgccgcccaggccccugcgu

SEQ ID NO: 141251 - RNA, 32 nt, Homo Sapiens
aagcacagucuauggaacgcuaauggagucag

SEQ ID NO: 141252 - RNA, 32 nt, Homo Sapiens
gcagagccgccaagcuuuggggugcugaggaa

SEQ ID NO: 141253 - RNA, 32 nt, Homo Sapiens
cgagccggccucgcccagccagcccucuccag

SEQ ID NO: 141254 - RNA, 32 nt, Homo Sapiens
uguacccugugcuuaauucuauaacaguaaac

SEQ ID NO: 141255 - RNA, 32 nt, Homo Sapiens
aaucacagcccugguccgcagacccucagaag

SEQ ID NO: 141256 - RNA, 27 nt, Homo Sapiens
auuugcccacucaucugguauaacugg

SEQ ID NO: 141257 - RNA, 32 nt, Homo Sapiens
ggggugguggggaggagaagguuguaggcaug

SEQ ID NO: 141258 - RNA, 32 nt, Homo Sapiens
cuccaggguucaaucgauucuccugccucacc

SEQ ID NO: 141259 - RNA, 32 nt, Homo Sapiens
ucaguuuuacacaauuaaaguauacacacaga

SEQ ID NO: 141260 - RNA, 32 nt, Homo Sapiens
uccauuacgauagaaacacuaggcacccccca

SEQ ID NO: 141261 - RNA, 32 nt, Homo Sapiens
cugaccucgcugggcccuggggugugguugcu

SEQ ID NO: 141262 - RNA, 32 nt, Homo Sapiens
ucccagaggaagaccaggcaugguggcucacg

SEQ ID NO: 141263 - RNA, 32 nt, Homo Sapiens
acugcugcccgucauuguucucgcaguuagau

SEQ ID NO: 141264 - RNA, 32 nt, Homo Sapiens
ugaguuuugguuuuuucuuuuucuuuuuuuuu

SEQ ID NO: 141265 - RNA, 32 nt, Homo Sapiens
uccccuucuaguucccaaaggcgauguccaga

SEQ ID NO: 141266 - RNA, 32 nt, Homo Sapiens
auuguuaauauuguaauuuaauguagacuuac

SEQ ID NO: 141267 - RNA, 32 nt, Homo Sapiens
ggaauuguaaauuuccucucucccccuucuua

SEQ ID NO: 141268 - RNA, 32 nt, Homo Sapiens
cuaacuggaacuuccucucuccuuccacuuau

SEQ ID NO: 141269 - RNA, 30 nt, Homo Sapiens
cugccgcgcgcgcagagccaaggcacugau

SEQ ID NO: 141270 - RNA, 32 nt, Homo Sapiens
gaaacuaagagaaugauaggcuuuuguucuua

SEQ ID NO: 141271 - RNA, 32 nt, Homo Sapiens
cacauagcccucuggagaccgccuagaucaga

SEQ ID NO: 141272 - RNA, 32 nt, Homo Sapiens
agaaaaaaucauccgugcugaaaaucagggcc

SEQ ID NO: 141273 - RNA, 32 nt, Homo Sapiens
caaauggauuuccaccugacaaaucuucggga

SEQ ID NO: 141274 - RNA, 32 nt, Homo Sapiens
aaugaaaaugucaagaugagugguuuucuuuu

SEQ ID NO: 141275 - RNA, 32 nt, Homo Sapiens
accgcccuucccuccccgcgcggguuccgggc

SEQ ID NO: 141276 - RNA, 32 nt, Homo Sapiens
ugguuauuuaauguaauuauuacuucaaaucc

SEQ ID NO: 141277 - RNA, 32 nt, Homo Sapiens
uacuccgcggauugugcacaguucuugaagga

SEQ ID NO: 141278 - RNA, 32 nt, Homo Sapiens
cacugcacccucacuagccagaguguugacau

SEQ ID NO: 141279 - RNA, 32 nt, Homo Sapiens
aaguagcucuugaagacaaaaguuaaaacaga

SEQ ID NO: 141280 - RNA, 32 nt, Homo Sapiens
cuuucaauuuuuccugauuagaacuacagcug

SEQ ID NO: 141281 - RNA, 32 nt, Homo Sapiens
aguaacgaauccagaaaacucuggagagcccu

SEQ ID NO: 141282 - RNA, 32 nt, Homo Sapiens
ugugguugccgcuguccgcgguucaacacgga

SEQ ID NO: 141283 - RNA, 32 nt, Homo Sapiens
uaauguggaguguucuacugggaaauggaguu

SEQ ID NO: 141284 - RNA, 32 nt, Homo Sapiens
uuuauucaaaauuuagagaaaaagaaagauac

SEQ ID NO: 141285 - RNA, 32 nt, Homo Sapiens
guccuuuaaaaugucuguguauuaaaaauuua

SEQ ID NO: 141286 - RNA, 32 nt, Homo Sapiens
acacaggggcagucuccaggaccuccacacca

SEQ ID NO: 141287 - RNA, 32 nt, Homo Sapiens
uagcccaggagcaaaaauuuuugggaguaguu

SEQ ID NO: 141288 - RNA, 32 nt, Homo Sapiens
augugcuccaccucgugcuggaccuuaagaga

SEQ ID NO: 141289 - RNA, 32 nt, Homo Sapiens
uuuacacaucauagguguucuaauggaagcaa

SEQ ID NO: 141290 - RNA, 32 nt, Homo Sapiens
uugcaggcaggggaaggagaagagacugaggg

SEQ ID NO: 141291 - RNA, 30 nt, Homo Sapiens
cgccgguggggcggcggcgccagagcugcu

SEQ ID NO: 141292 - RNA, 32 nt, Homo Sapiens
gccccgccgccgcggccccccggaugagggua

SEQ ID NO: 141293 - RNA, 32 nt, Homo Sapiens
gcuucggcagguccagcuccugccugccagug

SEQ ID NO: 141294 - RNA, 32 nt, Homo Sapiens
uccaugagaaagucaagaucagcucaaauuau

SEQ ID NO: 141295 - RNA, 32 nt, Homo Sapiens
ucccaaagggcaguuccuucuaucuuuuguga

SEQ ID NO: 141296 - RNA, 32 nt, Homo Sapiens
aguauacugcuagaaaaaucuaccagugggau

SEQ ID NO: 141297 - RNA, 32 nt, Homo Sapiens
accuuuucuuguuuaauccuuaccacaauucc

SEQ ID NO: 141298 - RNA, 32 nt, Homo Sapiens
gcagucuccccucuccaggccgaggcccuccg

SEQ ID NO: 141299 - RNA, 32 nt, Homo Sapiens
aaugucacuuaggucagcacucccagacguag

SEQ ID NO: 141300 - RNA, 32 nt, Homo Sapiens
gaaagcccaacgccucccggaccggaccgccg

SEQ ID NO: 141301 - RNA, 32 nt, Homo Sapiens
acaccccggccgcgggugaucgucgggucucc

SEQ ID NO: 141302 - RNA, 32 nt, Homo Sapiens
uggcucugguuuucuaugcagaugauucauug

SEQ ID NO: 141303 - RNA, 32 nt, Homo Sapiens
ggcaccuguuuuuggcugggccaaggagcugc

SEQ ID NO: 141304 - RNA, 32 nt, Homo Sapiens
agcuaggcaaugccuuuuuuuuuuuuuuugaa

SEQ ID NO: 141305 - RNA, 32 nt, Homo Sapiens
aggccgagggcuuugccuagggguggguugcc

SEQ ID NO: 141306 - RNA, 32 nt, Homo Sapiens
accguuaccaacugaagcugggggccuggguc

SEQ ID NO: 141307 - RNA, 32 nt, Homo Sapiens
ccagggaaguccgugguggggguggagcaggg

SEQ ID NO: 141308 - RNA, 32 nt, Homo Sapiens
uuaucuuauuugucccccuccuccuuucacgc

SEQ ID NO: 141309 - RNA, 32 nt, Homo Sapiens
gggaaguugcuggcugacugggcuugcgagga

SEQ ID NO: 141310 - RNA, 32 nt, Homo Sapiens
ccuguggcugcauuuuaacaguaaaggaggcc

SEQ ID NO: 141311 - RNA, 32 nt, Homo Sapiens
caguucuaguuuguauuuuucucucagauauu

SEQ ID NO: 141312 - RNA, 32 nt, Homo Sapiens
uugaccggaaguaugugggaagaauacuggcu

SEQ ID NO: 141313 - RNA, 32 nt, Homo Sapiens
gcccacgggaggguggggcggcugggaagcug

SEQ ID NO: 141314 - RNA, 32 nt, Homo Sapiens
auguugaucugugcuuccuggauuugacuuuu

SEQ ID NO: 141315 - RNA, 32 nt, Homo Sapiens
agugagccaggcagcucuggccaucuuuuccc

SEQ ID NO: 141316 - RNA, 32 nt, Homo Sapiens
cgcucggcguccccggccagccaugggcccuu

SEQ ID NO: 141317 - RNA, 32 nt, Homo Sapiens
uugugguuauauuuuuaguucauuguucucau

SEQ ID NO: 141318 - RNA, 32 nt, Homo Sapiens
gggacccugugccagagcugcgccccaacccc

SEQ ID NO: 141319 - RNA, 32 nt, Homo Sapiens
agccucacccagaugacccccaucccucauac

SEQ ID NO: 141320 - RNA, 32 nt, Homo Sapiens
cacauucucauaacagaagaaaaugcauuugu

SEQ ID NO: 141321 - RNA, 32 nt, Homo Sapiens
auguuaucuuauacuguacaauaaaaacauug

SEQ ID NO: 141322 - RNA, 32 nt, Homo Sapiens
agccugcccucgggcucugcucaccucuggug

SEQ ID NO: 141323 - RNA, 32 nt, Homo Sapiens
cugggaagcucucaauccccagcccucaucca

SEQ ID NO: 141324 - RNA, 32 nt, Homo Sapiens
cuacuauggcugaguucuggucaaagaaagaa

SEQ ID NO: 141325 - RNA, 32 nt, Homo Sapiens
uagucagaaugaauuaugguuggaaaacugag

SEQ ID NO: 141326 - RNA, 32 nt, Homo Sapiens
agcgggcucuaucgcucagggcgacaggcccg

SEQ ID NO: 141327 - RNA, 32 nt, Homo Sapiens
uuggaaaguaugauguugauaauuaacuuacc

SEQ ID NO: 141328 - RNA, 32 nt, Homo Sapiens
gggcugcugugggggccuggcuccugagccac

SEQ ID NO: 141329 - RNA, 28 nt, Homo Sapiens
ugugccaaacuguguggccucugccagg

SEQ ID NO: 141330 - RNA, 32 nt, Homo Sapiens
acagaaaacaaauugcguuggcauguacgugg

SEQ ID NO: 141331 - RNA, 30 nt, Homo Sapiens
ccaugggcgcccgggcucggucccagcguc

SEQ ID NO: 141332 - RNA, 32 nt, Homo Sapiens
agcaguaggcgcuggggccgcggcggacccuc

SEQ ID NO: 141333 - RNA, 32 nt, Homo Sapiens
ccuuuccugcccuuucugcucaucucaaccuc

SEQ ID NO: 141334 - RNA, 32 nt, Homo Sapiens
cgggcccacugcaggcagcuggcacagcgugg

SEQ ID NO: 141335 - RNA, 32 nt, Homo Sapiens
acuugaccgcuuucuuuuuuuaugaaacaguc

SEQ ID NO: 141336 - RNA, 32 nt, Homo Sapiens
ucugugcccagcucugcaggccaggcacaccc

SEQ ID NO: 141337 - RNA, 31 nt, Homo Sapiens
aagcccugagaugaacagguauuuacugagc

SEQ ID NO: 141338 - RNA, 32 nt, Homo Sapiens
ccugggcccgucugcgccggaggcugcggcgg

SEQ ID NO: 141339 - RNA, 32 nt, Homo Sapiens
gucugagugggguuggagcaaaacugagguag

SEQ ID NO: 141340 - RNA, 32 nt, Homo Sapiens
cacacacacacacacacacacacacacaaagc

SEQ ID NO: 141341 - RNA, 32 nt, Homo Sapiens
cauccaaaaaauaaauaaaaacuauauaggug

SEQ ID NO: 141342 - RNA, 32 nt, Homo Sapiens
uucuaaaaugacuagcaaugguuuaaaaagga

SEQ ID NO: 141343 - RNA, 32 nt, Homo Sapiens
gaggccaaguacauuuaguauggcaucgaguu

SEQ ID NO: 141344 - RNA, 32 nt, Homo Sapiens
aaaggaauuucaaaugcaacaaacacuggugg

SEQ ID NO: 141345 - RNA, 32 nt, Homo Sapiens
ucacccacgcccacccaguaguccugccuguc

SEQ ID NO: 141346 - RNA, 32 nt, Homo Sapiens
uggauuccggcggggguauggaccuuaggaac

SEQ ID NO: 141347 - RNA, 32 nt, Homo Sapiens
uccccccacauguuggccaggcuggucucgaa

SEQ ID NO: 141348 - RNA, 32 nt, Homo Sapiens
auacaucaaaaauccaguggaaagaauuguga

SEQ ID NO: 141349 - RNA, 32 nt, Homo Sapiens
uaauuuuguuuuuauugcaccugacaaaauac

SEQ ID NO: 141350 - RNA, 32 nt, Homo Sapiens
cuaaggaaucccaagaagacuggggaauggag

SEQ ID NO: 141351 - RNA, 32 nt, Homo Sapiens
ugaauuaaaauauuuguuaaccaacuuuaaag

SEQ ID NO: 141352 - RNA, 32 nt, Homo Sapiens
auguagauguauauacaaaaaauaaacgagau

SEQ ID NO: 141353 - RNA, 32 nt, Homo Sapiens
cuacuggaaaacaagcacuuuggaagauuugu

SEQ ID NO: 141354 - RNA, 32 nt, Homo Sapiens
cauccuauuuccccucaucuaguccauuuacg

SEQ ID NO: 141355 - RNA, 32 nt, Homo Sapiens
ccagaagugaaugggaaagggugaggacuuca

SEQ ID NO: 141356 - RNA, 32 nt, Homo Sapiens
ccauucuuuauuaaguuuucauagaaaauaau

SEQ ID NO: 141357 - RNA, 32 nt, Homo Sapiens
gauaauaauuauguccuauuuauuugagauuu

SEQ ID NO: 141358 - RNA, 32 nt, Homo Sapiens
cagaacuggacagcugcagagaccugugccca

SEQ ID NO: 141359 - RNA, 32 nt, Homo Sapiens
uccaagcuccuguaucagcagugcuugcaccu

SEQ ID NO: 141360 - RNA, 32 nt, Homo Sapiens
uuuaucacauaaaaaacauucaguaaaauagu

SEQ ID NO: 141361 - RNA, 32 nt, Homo Sapiens
guuuuuauuuuugcugaugaagagauauguuu

SEQ ID NO: 141362 - RNA, 32 nt, Homo Sapiens
uagacugggaaguauuaaacuaaccaguacuc

SEQ ID NO: 141363 - RNA, 32 nt, Homo Sapiens
aagugcaaggacccacaguugggcggagcuug

SEQ ID NO: 141364 - RNA, 32 nt, Homo Sapiens
gacaggcagggccgggagccugcccuccucag

SEQ ID NO: 141365 - RNA, 31 nt, Homo Sapiens
cagagcaggggccccaagucaggaguaggga

SEQ ID NO: 141366 - RNA, 32 nt, Homo Sapiens
auaccuugacaaauuaugacaauauaauaggu

SEQ ID NO: 141367 - RNA, 32 nt, Homo Sapiens
agaggcaauauacaacucuggguucacacaca

SEQ ID NO: 141368 - RNA, 32 nt, Homo Sapiens
ugaaaaaucuguugauaaauccaucacuauaa

SEQ ID NO: 141369 - RNA, 32 nt, Homo Sapiens
gaaaacagcaaauauccccagcccuugaaguc

SEQ ID NO: 141370 - RNA, 32 nt, Homo Sapiens
cuuuccugcagccccacaguccugcuggcuga

SEQ ID NO: 141371 - RNA, 31 nt, Homo Sapiens
cccacccuggugaccaauucaguguaaccuu

SEQ ID NO: 141372 - RNA, 32 nt, Homo Sapiens
ggacaggaccuccauugggcgcagcagcaggu

SEQ ID NO: 141373 - RNA, 32 nt, Homo Sapiens
aauaaacacuguuuuauagaaaaccugacuuc

SEQ ID NO: 141374 - RNA, 32 nt, Homo Sapiens
cugagucaacccccuucaaccuccucaccucu

SEQ ID NO: 141375 - RNA, 32 nt, Homo Sapiens
caggggcaggaggcagcuccccugccuccagg

SEQ ID NO: 141376 - RNA, 32 nt, Homo Sapiens
ugagucugcugacaaccugacugcacaaggac

SEQ ID NO: 141377 - RNA, 32 nt, Homo Sapiens
gagauacuuugcgcgcacacacauacauacgc

SEQ ID NO: 141378 - RNA, 32 nt, Homo Sapiens
cacaaaaauuccucccagaggcacucuauauc

SEQ ID NO: 141379 - RNA, 32 nt, Homo Sapiens
aguaauaacuaagaguaacguuaugccaugug

SEQ ID NO: 141380 - RNA, 31 nt, Homo Sapiens
aaaggcuaucugaucauucaaggagaagaua

SEQ ID NO: 141381 - RNA, 32 nt, Homo Sapiens
uccgccuggagcuggggagaccagagaggccc

SEQ ID NO: 141382 - RNA, 32 nt, Homo Sapiens
agccaccguggcucagccagagaggagcugag

SEQ ID NO: 141383 - RNA, 30 nt, Homo Sapiens
cuaagggucggcggcggcgggguugacggc

SEQ ID NO: 141384 - RNA, 32 nt, Homo Sapiens
gugauuugaacucauucauguugagagggugu

SEQ ID NO: 141385 - RNA, 32 nt, Homo Sapiens
gcagaggucccucagcugcgaggcuaauuggg

SEQ ID NO: 141386 - RNA, 27 nt, Homo Sapiens
uacgccaucacugucugguauuuugau

SEQ ID NO: 141387 - RNA, 32 nt, Homo Sapiens
aaguugaguucccacuccaugcuggaggcgcc

SEQ ID NO: 141388 - RNA, 32 nt, Homo Sapiens
ucuucuauaucgagacauugccuuuaauuuua

SEQ ID NO: 141389 - RNA, 32 nt, Homo Sapiens
cacgugcagggcccgcgcggcccccgacacgc

SEQ ID NO: 141390 - RNA, 32 nt, Homo Sapiens
gguacuuuacaugauuacuuuuccuguugauu

SEQ ID NO: 141391 - RNA, 32 nt, Homo Sapiens
agcgcccaccccagccuucugcccgccccauc

SEQ ID NO: 141392 - RNA, 32 nt, Homo Sapiens
aggcaccagaugggaugggcuuucucaguguc

SEQ ID NO: 141393 - RNA, 29 nt, Homo Sapiens
aggagaccauaugggugaaagcaaccagc

SEQ ID NO: 141394 - RNA, 32 nt, Homo Sapiens
agauuuugcaguaauugagugauucaaugccg

SEQ ID NO: 141395 - RNA, 32 nt, Homo Sapiens
uuauuuagagacggagucuugcucugucuccc

SEQ ID NO: 141396 - RNA, 32 nt, Homo Sapiens
ggcccugagccccagcccccagccuccucccu

SEQ ID NO: 141397 - RNA, 32 nt, Homo Sapiens
gcucacgaagggcauccgcaauguugguuuca

SEQ ID NO: 141398 - RNA, 30 nt, Homo Sapiens
gcgucaacacaagucagaacuccacuuuag

SEQ ID NO: 141399 - RNA, 32 nt, Homo Sapiens
ucuaaugcccccagcccaccccugcccccauu

SEQ ID NO: 141400 - RNA, 32 nt, Homo Sapiens
uggucgauaaggugggggcgucgagggucuuu

SEQ ID NO: 141401 - RNA, 32 nt, Homo Sapiens
ccuaggguagcgcugggaguguagaaguggcc

SEQ ID NO: 141402 - RNA, 32 nt, Homo Sapiens
accacagcagugccaucgcucccaggcugaga

SEQ ID NO: 141403 - RNA, 32 nt, Homo Sapiens
acgucagcggacaggcgcugcccgggcuccag

SEQ ID NO: 141404 - RNA, 32 nt, Homo Sapiens
cuggccccggugccggccccguugcccaggga

SEQ ID NO: 141405 - RNA, 32 nt, Homo Sapiens
cacccaagcucuucuguaccuauuuaaagucc

SEQ ID NO: 141406 - RNA, 32 nt, Homo Sapiens
acauacacaauuagucuaauucuugauaauuc

SEQ ID NO: 141407 - RNA, 32 nt, Homo Sapiens
cauguuguauaaauacaccagguguuuuuaau

SEQ ID NO: 141408 - RNA, 32 nt, Homo Sapiens
uaccgacccauucuccuucugcuucucuugcc

SEQ ID NO: 141409 - RNA, 32 nt, Homo Sapiens
ggucagaguucgcgggggcagaggcauucuug

SEQ ID NO: 141410 - RNA, 32 nt, Homo Sapiens
agggagaggaagugagcgccacugcuugugac

SEQ ID NO: 141411 - RNA, 27 nt, Homo Sapiens
caaugggaauccaaggagggucugucc

SEQ ID NO: 141412 - RNA, 31 nt, Homo Sapiens
gugaauuucuguaugugugugcuguuaccuc

SEQ ID NO: 141413 - RNA, 32 nt, Homo Sapiens
uccuacaauuuaauagcaaaacaugcauaauc

SEQ ID NO: 141414 - RNA, 32 nt, Homo Sapiens
uguuggcuaggauggucuugaucucuugaccu

SEQ ID NO: 141415 - RNA, 32 nt, Homo Sapiens
ggaucguccgccggucagggcccuugcccucc

SEQ ID NO: 141416 - RNA, 32 nt, Homo Sapiens
ggauccgcgguggggagcugcccccacacaaa

SEQ ID NO: 141417 - RNA, 32 nt, Homo Sapiens
aacacuagcuaaggaagggaaagggaagugau

SEQ ID NO: 141418 - RNA, 32 nt, Homo Sapiens
acucuagccccgcucucuuccccucuuucugu

SEQ ID NO: 141419 - RNA, 32 nt, Homo Sapiens
cucucuguaaauguuuuaaauacuguuguuuu

SEQ ID NO: 141420 - RNA, 32 nt, Homo Sapiens
aucucuugauaaaggagagguuaaagcaaacc

SEQ ID NO: 141421 - RNA, 32 nt, Homo Sapiens
cugugggcacaccaccugggcauuaggacuga

SEQ ID NO: 141422 - RNA, 32 nt, Homo Sapiens
uguucacaccacgcuuugauaacuaaacugga

SEQ ID NO: 141423 - RNA, 32 nt, Homo Sapiens
cagccaggcuguggagcagcugaggcaggcca

SEQ ID NO: 141424 - RNA, 32 nt, Homo Sapiens
aaguuuguaccaaaacgcucuccuauuuggau

SEQ ID NO: 141425 - RNA, 32 nt, Homo Sapiens
cgccgaggacucggcccggcucguggagcccu

SEQ ID NO: 141426 - RNA, 32 nt, Homo Sapiens
uacgguuguauauagaggucugaaggauuuuu

SEQ ID NO: 141427 - RNA, 32 nt, Homo Sapiens
gcuaccagcuggacuucuguguggcugugagg

SEQ ID NO: 141428 - RNA, 32 nt, Homo Sapiens
acccuagauaaaaauucagucugauaaccuca

SEQ ID NO: 141429 - RNA, 32 nt, Homo Sapiens
caggacagugcagcugcauuuaucagagcacu

SEQ ID NO: 141430 - RNA, 31 nt, Homo Sapiens
aaaccuggaaacaccaccugaguugguuuca

SEQ ID NO: 141431 - RNA, 32 nt, Homo Sapiens
aagaaagauaaagcuucugaaauacuacugca

SEQ ID NO: 141432 - RNA, 31 nt, Homo Sapiens
uuuacuuaucugacuuugauauuagauggcu

SEQ ID NO: 141433 - RNA, 32 nt, Homo Sapiens
ccuggcugggaguauuaggagaugggaguaga

SEQ ID NO: 141434 - RNA, 32 nt, Homo Sapiens
cuguuuuuuuucuguuguuuuuuuuuggcugg

SEQ ID NO: 141435 - RNA, 32 nt, Homo Sapiens
uggauucuucuuccucaaauauuuggggcuaa

SEQ ID NO: 141436 - RNA, 32 nt, Homo Sapiens
aaaggccuguguuauuucuuguucuugaaaaa

SEQ ID NO: 141437 - RNA, 32 nt, Homo Sapiens
ucccggaggcugagcagugcagacgggccugg

SEQ ID NO: 141438 - RNA, 32 nt, Homo Sapiens
cccuacucggugccgggugccccccgcccucu

SEQ ID NO: 141439 - RNA, 27 nt, Homo Sapiens
ucuuuuccuuucuucagacuccgucca

SEQ ID NO: 141440 - RNA, 30 nt, Homo Sapiens
cuuucagagaaaccagcugagucugucacu

SEQ ID NO: 141441 - RNA, 32 nt, Homo Sapiens
cgguuaucuuuucucccgucaccacccaguaa

SEQ ID NO: 141442 - RNA, 32 nt, Homo Sapiens
uuuucaaacaauuugcauguuuuucagaugcu

SEQ ID NO: 141443 - RNA, 32 nt, Homo Sapiens
uuaauagcacuaaccaaugccuuuuuagaugu

SEQ ID NO: 141444 - RNA, 32 nt, Homo Sapiens
gacuacauuuccccaaaugcccgcaaagccuu

SEQ ID NO: 141445 - RNA, 32 nt, Homo Sapiens
aggacuucuggcaaaaugauugaguccuucaa

SEQ ID NO: 141446 - RNA, 32 nt, Homo Sapiens
gaggggauaauuauggggugugaggugcauug

SEQ ID NO: 141447 - RNA, 28 nt, Homo Sapiens
ugguaggugucuaauuacuguuuacuuc

SEQ ID NO: 141448 - RNA, 32 nt, Homo Sapiens
uggaggugaaguaccagaggcugcgugagaag

SEQ ID NO: 141449 - RNA, 32 nt, Homo Sapiens
aucagauuauguaaaauuaaauuugugaagga

SEQ ID NO: 141450 - RNA, 32 nt, Homo Sapiens
augugauauguaaacauaauucuuguauauua

SEQ ID NO: 141451 - RNA, 32 nt, Homo Sapiens
agaaugggccccaagaugcaugauuaagugag

SEQ ID NO: 141452 - RNA, 32 nt, Homo Sapiens
aauuuguacagcagaggaauguuauuguagua

SEQ ID NO: 141453 - RNA, 32 nt, Homo Sapiens
guuggucuagagaggaggagggcggggcugga

SEQ ID NO: 141454 - RNA, 32 nt, Homo Sapiens
auucacuucuucuuucaaguccuucccuuucu

SEQ ID NO: 141455 - RNA, 29 nt, Homo Sapiens
guugguuuuuauugagauaucucuuuuuu

SEQ ID NO: 141456 - RNA, 32 nt, Homo Sapiens
gagugaggaccgcgcuccugcugaagaguuua

SEQ ID NO: 141457 - RNA, 32 nt, Homo Sapiens
ugucuaccuggggaccccugucugcacaccag

SEQ ID NO: 141458 - RNA, 32 nt, Homo Sapiens
cuagugggguccugaggccaagaaagaaacca

SEQ ID NO: 141459 - RNA, 30 nt, Homo Sapiens
cagaagcuggacugcaguccacggcaccac

SEQ ID NO: 141460 - RNA, 32 nt, Homo Sapiens
agcggggcggggcgccagcgcugccuuuucuc

SEQ ID NO: 141461 - RNA, 32 nt, Homo Sapiens
agaaaaaggaacuucccccacccccucgggug

SEQ ID NO: 141462 - RNA, 32 nt, Homo Sapiens
agcuguaaacauuccuuaaaucuucuccucuc

SEQ ID NO: 141463 - RNA, 32 nt, Homo Sapiens
uugaguguuucauaaugcauuuuccaacuuga

SEQ ID NO: 141464 - RNA, 32 nt, Homo Sapiens
gcugagagaccugagucugcaugugcacggug

SEQ ID NO: 141465 - RNA, 32 nt, Homo Sapiens
agccuggggaggaggagcugcgagcgcgggag

SEQ ID NO: 141466 - RNA, 32 nt, Homo Sapiens
aauucuaugcugacauaacagaaaauguagau

SEQ ID NO: 141467 - RNA, 32 nt, Homo Sapiens
gggcuccuggucccggcuccccgguuaccggg

SEQ ID NO: 141468 - RNA, 31 nt, Homo Sapiens
ccaucagcggguugccugccacugccgugcc

SEQ ID NO: 141469 - RNA, 32 nt, Homo Sapiens
uuugagcugcuugcgcucaucaucucuauuaa

SEQ ID NO: 141470 - RNA, 32 nt, Homo Sapiens
ugaaauuuguuuuuucucucuuucuuucucuu

SEQ ID NO: 141471 - RNA, 32 nt, Homo Sapiens
cacaggucaccgcgcagggccacgcgacacgu

SEQ ID NO: 141472 - RNA, 29 nt, Homo Sapiens
guuucuccggguccuuggacgccggcugc

SEQ ID NO: 141473 - RNA, 32 nt, Homo Sapiens
aaagcccguugacacagcugcuagagaaagag

SEQ ID NO: 141474 - RNA, 32 nt, Homo Sapiens
uccaucaaaauguuuuuuuucuuaugcggguc

SEQ ID NO: 141475 - RNA, 32 nt, Homo Sapiens
gugaagccucgcuucccucccgcggcgaccag

SEQ ID NO: 141476 - RNA, 32 nt, Homo Sapiens
uuacuggaccuaugugguguauuguuaaacca

SEQ ID NO: 141477 - RNA, 32 nt, Homo Sapiens
ugcggcagucgcgucccgggagcgucgcugcc

SEQ ID NO: 141478 - RNA, 32 nt, Homo Sapiens
acaacauuucucaguguagaaaucaugucuuc

SEQ ID NO: 141479 - RNA, 32 nt, Homo Sapiens
uggauuagauucuuccucacagcccucagaag

SEQ ID NO: 141480 - RNA, 32 nt, Homo Sapiens
gguuucacuguguuggccaggcuggucgugaa

SEQ ID NO: 141481 - RNA, 32 nt, Homo Sapiens
acucuauggaaaucauaauugucaucuucuuc

SEQ ID NO: 141482 - RNA, 32 nt, Homo Sapiens
cagcuuguaguaacagaagugaauguuuguac

SEQ ID NO: 141483 - RNA, 32 nt, Homo Sapiens
gagcuaguuuuuguaagccauguaauagaucc

SEQ ID NO: 141484 - RNA, 32 nt, Homo Sapiens
ugggcuuaagaaaucuaguauuucaugcuggg

SEQ ID NO: 141485 - RNA, 32 nt, Homo Sapiens
ggacuccaaaagaaagcacaaaaacuagacag

SEQ ID NO: 141486 - RNA, 32 nt, Homo Sapiens
caccucacaggccccaggaaaggcccagccac

SEQ ID NO: 141487 - RNA, 32 nt, Homo Sapiens
cggaggagccccacaacuauacccccauccuc

SEQ ID NO: 141488 - RNA, 32 nt, Homo Sapiens
gagagcugacaccaaguccuccccugccacgu

SEQ ID NO: 141489 - RNA, 30 nt, Homo Sapiens
cgcgcugucugugaggcgccaguuccgggg

SEQ ID NO: 141490 - RNA, 32 nt, Homo Sapiens
uuccuccuaaaauuaaagaagauauuagaaua

SEQ ID NO: 141491 - RNA, 32 nt, Homo Sapiens
auggagagaaaagaugaucugaagguaccugu

SEQ ID NO: 141492 - RNA, 32 nt, Homo Sapiens
ccaccaccacuuccacccguccuacgccacug

SEQ ID NO: 141493 - RNA, 32 nt, Homo Sapiens
ccucgcccggaugccucuccccgggggacuau

SEQ ID NO: 141494 - RNA, 32 nt, Homo Sapiens
cgccuguaaucccagcacuuugggagacggag

SEQ ID NO: 141495 - RNA, 32 nt, Homo Sapiens
uaaaaguccacuuuuaaaacuauauuuauuua

SEQ ID NO: 141496 - RNA, 32 nt, Homo Sapiens
uuagcucauaaauauuugauugaaggaaugaa

SEQ ID NO: 141497 - RNA, 28 nt, Homo Sapiens
cuauugaaagacauacauuugaaccacu

SEQ ID NO: 141498 - RNA, 32 nt, Homo Sapiens
ucuucuccacugggucccacuguucccuggag

SEQ ID NO: 141499 - RNA, 32 nt, Homo Sapiens
gacaaaugagcgacuucugugcuuccagagga

SEQ ID NO: 141500 - RNA, 32 nt, Homo Sapiens
caacuccagaagcuucagacuuuggugauggg

SEQ ID NO: 141501 - RNA, 32 nt, Homo Sapiens
gcaaggcggcggcggcggcugcgggugaggaa

SEQ ID NO: 141502 - RNA, 32 nt, Homo Sapiens
auuccaagcccaggguuuggcuccuuaaaccc

SEQ ID NO: 141503 - RNA, 32 nt, Homo Sapiens
cauguuggcucuucucagcuuuuuuuguacau

SEQ ID NO: 141504 - RNA, 32 nt, Homo Sapiens
uugcaagagcuugacuccugguugccuuuucc

SEQ ID NO: 141505 - RNA, 32 nt, Homo Sapiens
cucuucucuguuagccuucccuaaccuccuca

SEQ ID NO: 141506 - RNA, 32 nt, Homo Sapiens
cgcccagccucccgcacccccaucgccggagc

SEQ ID NO: 141507 - RNA, 32 nt, Homo Sapiens
ugcagacagcuauuucgcacuguauuaaaugu

SEQ ID NO: 141508 - RNA, 32 nt, Homo Sapiens
auacauacuguaaaucacauauuauauaaaau

SEQ ID NO: 141509 - RNA, 32 nt, Homo Sapiens
gguagaaacauuugcuccuuaauggcaaaggu

SEQ ID NO: 141510 - RNA, 32 nt, Homo Sapiens
cagacgcugcgucacaacucccccgcuggcgc

SEQ ID NO: 141511 - RNA, 32 nt, Homo Sapiens
acuuugcaucuagcgggugcugccugcaucuc

SEQ ID NO: 141512 - RNA, 32 nt, Homo Sapiens
cagacagggaaagaggagucagacauggccca

SEQ ID NO: 141513 - RNA, 32 nt, Homo Sapiens
gguggagcuggacccugaaauuaccuggaccu

SEQ ID NO: 141514 - RNA, 32 nt, Homo Sapiens
gcaugcaggcugccuccguuuuuggguacugu

SEQ ID NO: 141515 - RNA, 32 nt, Homo Sapiens
cuccccgcgacgccccaguccaguggccucgc

SEQ ID NO: 141516 - RNA, 32 nt, Homo Sapiens
ucaugagcucagugagaagggcccuguauuca

SEQ ID NO: 141517 - RNA, 32 nt, Homo Sapiens
gcgggugggaggggaacuagggacccgagccc

SEQ ID NO: 141518 - RNA, 32 nt, Homo Sapiens
agcgagcccaacccgcgacgacccacgccccu

SEQ ID NO: 141519 - RNA, 32 nt, Homo Sapiens
aagguguaacauauguuaaauaaaacuguuau

SEQ ID NO: 141520 - RNA, 32 nt, Homo Sapiens
ggccuacaaaguaaaccgcauuucuguaaaaa

SEQ ID NO: 141521 - RNA, 32 nt, Homo Sapiens
ccccaacugcgguuaaaguggcuggaguggag

SEQ ID NO: 141522 - RNA, 32 nt, Homo Sapiens
gcaaaacaaaaauauucuacaaaaugacauaa

SEQ ID NO: 141523 - RNA, 32 nt, Homo Sapiens
gguuuacaaaugaccucugugcucauucaccu

SEQ ID NO: 141524 - RNA, 32 nt, Homo Sapiens
ggcccagauguccauagcaguuccucccacag

SEQ ID NO: 141525 - RNA, 32 nt, Homo Sapiens
guuggugccccgagacucacugaguugcgggg

SEQ ID NO: 141526 - RNA, 32 nt, Homo Sapiens
cgagugagugucgugguuggggugcuggaccc

SEQ ID NO: 141527 - RNA, 32 nt, Homo Sapiens
agccuuugccugcuccuccuuccaagagcacu

SEQ ID NO: 141528 - RNA, 32 nt, Homo Sapiens
cugacccucagucuccuccccugcccucuaca

SEQ ID NO: 141529 - RNA, 32 nt, Homo Sapiens
agggccucccagcagagcuugggaagggccau

SEQ ID NO: 141530 - RNA, 32 nt, Homo Sapiens
gcucccagcucuucuucccuaucuccauccaa

SEQ ID NO: 141531 - RNA, 32 nt, Homo Sapiens
ggaacuguuauagauuaagagaauagaggcau

SEQ ID NO: 141532 - RNA, 32 nt, Homo Sapiens
ucgguguauguggccaucguggucuacuccgu

SEQ ID NO: 141533 - RNA, 32 nt, Homo Sapiens
gccuccuuucccugugucauacugucauguca

SEQ ID NO: 141534 - RNA, 32 nt, Homo Sapiens
uaaagucuuaaaugugugcauaaaaaacuaaa

SEQ ID NO: 141535 - RNA, 32 nt, Homo Sapiens
aggagaaugaaacagcuagagaaggaccagaa

SEQ ID NO: 141536 - RNA, 32 nt, Homo Sapiens
gccaacaguacuggaagaaacuggacacaguc

SEQ ID NO: 141537 - RNA, 32 nt, Homo Sapiens
cacucaggcguagaagaaaagacacauauuuu

SEQ ID NO: 141538 - RNA, 32 nt, Homo Sapiens
ccccuuagcuggaagcguuucuccaggacccc

SEQ ID NO: 141539 - RNA, 32 nt, Homo Sapiens
ugcaggaucaggggugggaggggaggccccug

SEQ ID NO: 141540 - RNA, 32 nt, Homo Sapiens
ccuagaugcucuaugugcuuguaaaaagucaa

SEQ ID NO: 141541 - RNA, 32 nt, Homo Sapiens
gagacaggggagacugggaaggcuggcgugga

SEQ ID NO: 141542 - RNA, 32 nt, Homo Sapiens
gauggaagaaugaccuaguugcuccucucaac

SEQ ID NO: 141543 - RNA, 32 nt, Homo Sapiens
aaaaaacguguaauaagguuaguugcuacuuc

SEQ ID NO: 141544 - RNA, 32 nt, Homo Sapiens
aguccgaccgcggaagccagacugcuguccag

SEQ ID NO: 141545 - RNA, 32 nt, Homo Sapiens
augggauggguuccagagguauuccucucuua

SEQ ID NO: 141546 - RNA, 32 nt, Homo Sapiens
cuucuuucuuucgucgcagccagucuuuuuug

SEQ ID NO: 141547 - RNA, 32 nt, Homo Sapiens
gccuagauuuugcugcagauuaaauccuuuga

SEQ ID NO: 141548 - RNA, 32 nt, Homo Sapiens
uuccaugacgcaggagcuguggaaauggugag

SEQ ID NO: 141549 - RNA, 32 nt, Homo Sapiens
auaagcggggucgggggcgggggucucugcag

SEQ ID NO: 141550 - RNA, 32 nt, Homo Sapiens
uuauagagcugggauugguggagggagcaggu

SEQ ID NO: 141551 - RNA, 32 nt, Homo Sapiens
ucccuuuucuuuaaguuuuauuuaacuuuucu

SEQ ID NO: 141552 - RNA, 32 nt, Homo Sapiens
aaaauaucuaaaaacuaaucccgauuugaaca

SEQ ID NO: 141553 - RNA, 32 nt, Homo Sapiens
ccauauccugccucagcccgccaagguagcca

SEQ ID NO: 141554 - RNA, 32 nt, Homo Sapiens
accaaagcucuagagaauuuugaaaguaaaaa

SEQ ID NO: 141555 - RNA, 32 nt, Homo Sapiens
gcaaccuucgccucuggguucaagugauucuc

SEQ ID NO: 141556 - RNA, 32 nt, Homo Sapiens
cucugcuagaugcggcagcugugacucagggg

SEQ ID NO: 141557 - RNA, 32 nt, Homo Sapiens
auuuacuuugaaaaacaauuguaaugaauauu

SEQ ID NO: 141558 - RNA, 32 nt, Homo Sapiens
agccccacccaaggggacccuggucucuccgc

SEQ ID NO: 141559 - RNA, 32 nt, Homo Sapiens
gcagcacccuccccgccgggucccaccuugcc

SEQ ID NO: 141560 - RNA, 32 nt, Homo Sapiens
aaaauauagcuuucauaacaucgaaaaguuau

SEQ ID NO: 141561 - RNA, 32 nt, Homo Sapiens
uaugaacaugauuuuucuuuauguacaaaaac

SEQ ID NO: 141562 - RNA, 32 nt, Homo Sapiens
agccauugacuuccaaagacuccuggcacaug

SEQ ID NO: 141563 - RNA, 32 nt, Homo Sapiens
uaaggggccccuccuugugcugccagucagcc

SEQ ID NO: 141564 - RNA, 32 nt, Homo Sapiens
gccgauuuccugacagaggagcuuacacucug

SEQ ID NO: 141565 - RNA, 32 nt, Homo Sapiens
gaaaauaagacuucuggugcugcugggguaug

SEQ ID NO: 141566 - RNA, 32 nt, Homo Sapiens
aucuuuuugccgauuuuuaucuauguuaauuu

SEQ ID NO: 141567 - RNA, 32 nt, Homo Sapiens
cccaaggagaggcugcccucagacacaacuau

SEQ ID NO: 141568 - RNA, 32 nt, Homo Sapiens
augucacuuuuguacuuuuuuaaauaaaguau

SEQ ID NO: 141569 - RNA, 32 nt, Homo Sapiens
uucccucuucuguggucaccccaucuuccaac

SEQ ID NO: 141570 - RNA, 32 nt, Homo Sapiens
acgccucccucgcgcccuugccgcccaccugc

SEQ ID NO: 141571 - RNA, 32 nt, Homo Sapiens
uuccaauccagaaaaaauauuuguauuuauuu

SEQ ID NO: 141572 - RNA, 32 nt, Homo Sapiens
ggguuuacugaauguuauccaaaguuuguccu

SEQ ID NO: 141573 - RNA, 32 nt, Homo Sapiens
cgagcucucgccaggaccccaaggcuguuggu

SEQ ID NO: 141574 - RNA, 32 nt, Homo Sapiens
gguguggggcugugcugcuggagcaccagaga

SEQ ID NO: 141575 - RNA, 32 nt, Homo Sapiens
uggguccuuucuggggagugaggaauguggga

SEQ ID NO: 141576 - RNA, 32 nt, Homo Sapiens
cuccgggccugucaucguccucaugggcggaa

SEQ ID NO: 141577 - RNA, 32 nt, Homo Sapiens
cuuaaguugacgguugucaauauaucgaacug

SEQ ID NO: 141578 - RNA, 32 nt, Homo Sapiens
uuaaaaucgcauauucaacaaacaaaugccuu

SEQ ID NO: 141579 - RNA, 32 nt, Homo Sapiens
gccauggaauuugaacuuuaucaggcaggcca

SEQ ID NO: 141580 - RNA, 32 nt, Homo Sapiens
uccugcucaucccuccuucuuuaguaucuuua

SEQ ID NO: 141581 - RNA, 32 nt, Homo Sapiens
ugcgaggaccucugugguggaggaguuggugc

SEQ ID NO: 141582 - RNA, 32 nt, Homo Sapiens
cugcaguuucgguuuucauuugcuucagcuua

SEQ ID NO: 141583 - RNA, 32 nt, Homo Sapiens
acuggucugacuuuauaaauuauuuaauaaaa

SEQ ID NO: 141584 - RNA, 32 nt, Homo Sapiens
uauaauuuaccuagguuuuucucguuguuagu

SEQ ID NO: 141585 - RNA, 32 nt, Homo Sapiens
gaggccuaaaauugaaauaaguacuaaacaga

SEQ ID NO: 141586 - RNA, 32 nt, Homo Sapiens
acaaagcaaaauaaauaaucauuagaaucuuc

SEQ ID NO: 141587 - RNA, 28 nt, Homo Sapiens
aaauaaaauuguauuauguguuuauagc

SEQ ID NO: 141588 - RNA, 32 nt, Homo Sapiens
ggcuaccucgggagggcccaccuccccgccca

SEQ ID NO: 141589 - RNA, 32 nt, Homo Sapiens
caagcuaggggcacgaggcaucaguugggaag

SEQ ID NO: 141590 - RNA, 31 nt, Homo Sapiens
gaacaaaagcgacccauucagagacuguccc

SEQ ID NO: 141591 - RNA, 32 nt, Homo Sapiens
cugccauuuagguuaugacaguuucucuagcg

SEQ ID NO: 141592 - RNA, 32 nt, Homo Sapiens
aaaauguauauucggauauguaucgaugccuu

SEQ ID NO: 141593 - RNA, 32 nt, Homo Sapiens
ggcugcaggaccagguggugaucaucgacgag

SEQ ID NO: 141594 - RNA, 32 nt, Homo Sapiens
acgaugugcccagggagggacccaccagagca

SEQ ID NO: 141595 - RNA, 32 nt, Homo Sapiens
aaauguuuguuguuuaagccuuucaggcuacg

SEQ ID NO: 141596 - RNA, 32 nt, Homo Sapiens
cggaccuuucccugcauuucguuucggccagu

SEQ ID NO: 141597 - RNA, 32 nt, Homo Sapiens
ugucucucuccucuccucaggcucaauaauuc

SEQ ID NO: 141598 - RNA, 32 nt, Homo Sapiens
cucagaauauuucaaacuauuucauuguuaua

SEQ ID NO: 141599 - RNA, 32 nt, Homo Sapiens
cacgugccaggguggggggcuauaaaauaccc

SEQ ID NO: 141600 - RNA, 32 nt, Homo Sapiens
ccucuccuucgugaccccggagugggcaagug

SEQ ID NO: 141601 - RNA, 32 nt, Homo Sapiens
aauugauagauuucucuuugacuuccaagacc

SEQ ID NO: 141602 - RNA, 32 nt, Homo Sapiens
gcaggcacuuuuacuucuuuuaccauuagaaa

SEQ ID NO: 141603 - RNA, 32 nt, Homo Sapiens
gggguagcacgaggcagcgaaacggaacaguc

SEQ ID NO: 141604 - RNA, 32 nt, Homo Sapiens
aaacucauuuuuguuuucauuaucucaaaacu

SEQ ID NO: 141605 - RNA, 32 nt, Homo Sapiens
guuucugaugcagcugagaaaaaugcagaccg

SEQ ID NO: 141606 - RNA, 32 nt, Homo Sapiens
gcucagguggguggagcaguaaggcacuaccc

SEQ ID NO: 141607 - RNA, 31 nt, Homo Sapiens
aaucaguguaacauuggucaaguuguuaccc

SEQ ID NO: 141608 - RNA, 32 nt, Homo Sapiens
ccacuggcggugugaagacccucucugcuuac

SEQ ID NO: 141609 - RNA, 31 nt, Homo Sapiens
uugucacccgcggucgcuucgggcggggauc

SEQ ID NO: 141610 - RNA, 32 nt, Homo Sapiens
uuucccauguguauccugugaccauucuaucu

SEQ ID NO: 141611 - RNA, 32 nt, Homo Sapiens
gucuagaaggcaccaccucgcuuucauguccc

SEQ ID NO: 141612 - RNA, 32 nt, Homo Sapiens
ccagcuguacugaguucucauccacagaggcc

SEQ ID NO: 141613 - RNA, 31 nt, Homo Sapiens
uccaggcaggcgaggagaagcugugcuguga

SEQ ID NO: 141614 - RNA, 32 nt, Homo Sapiens
caggaaaaaacaaacaaacaaacaaaaaaaga

SEQ ID NO: 141615 - RNA, 32 nt, Homo Sapiens
ugggugaaaugaggcugaggccugcugugcug

SEQ ID NO: 141616 - RNA, 32 nt, Homo Sapiens
uuggacuccaacgcagagccugcuucaguaaa

SEQ ID NO: 141617 - RNA, 32 nt, Homo Sapiens
acccuuccaaggugggggauugccagggggag

SEQ ID NO: 141618 - RNA, 32 nt, Homo Sapiens
gcuuccuguggguggggugagggccaaaggcu

SEQ ID NO: 141619 - RNA, 32 nt, Homo Sapiens
cugagagagggcagaguggaugccccacugcc

SEQ ID NO: 141620 - RNA, 32 nt, Homo Sapiens
cauaacccuggugucaucaucucccaggaucc

SEQ ID NO: 141621 - RNA, 32 nt, Homo Sapiens
caugucauuguuccccauuuaacaucaguccu

SEQ ID NO: 141622 - RNA, 32 nt, Homo Sapiens
gagaaggucucucuucccaucauauuuacauu

SEQ ID NO: 141623 - RNA, 32 nt, Homo Sapiens
cagggcagccuguuuuacccagaugggccugc

SEQ ID NO: 141624 - RNA, 32 nt, Homo Sapiens
ucuucaugcacccagauuccagcccuccuccc

SEQ ID NO: 141625 - RNA, 32 nt, Homo Sapiens
uucagguucaagugauucuccucccucagccu

SEQ ID NO: 141626 - RNA, 30 nt, Homo Sapiens
ccgccaugaccuggagcgccacggcccggg

SEQ ID NO: 141627 - RNA, 32 nt, Homo Sapiens
cgggccgccagacgcucggagggagcccggcc

SEQ ID NO: 141628 - RNA, 32 nt, Homo Sapiens
cugggaccgugaugcccggcccugcuccugac

SEQ ID NO: 141629 - RNA, 32 nt, Homo Sapiens
guuucuccuagagcuucaaaacaucauuauuc

SEQ ID NO: 141630 - RNA, 32 nt, Homo Sapiens
gauguucaacaucaguuuacuugcagcuggaa

SEQ ID NO: 141631 - RNA, 32 nt, Homo Sapiens
gcgcagcccuugccagggaagugucgcuucgg

SEQ ID NO: 141632 - RNA, 32 nt, Homo Sapiens
uagaaagaucugaaacaguugggauggaggcu

SEQ ID NO: 141633 - RNA, 32 nt, Homo Sapiens
cacaugcugagucaaggcaacagcauaggaau

SEQ ID NO: 141634 - RNA, 31 nt, Homo Sapiens
cagcucuggcacugcccccucccagccgccc

SEQ ID NO: 141635 - RNA, 32 nt, Homo Sapiens
gaaucaacugugucaucaaaauuuaaguaaug

SEQ ID NO: 141636 - RNA, 32 nt, Homo Sapiens
uguucuuaaaacugguugucuuuuacuaggac

SEQ ID NO: 141637 - RNA, 32 nt, Homo Sapiens
ccguaccaccagggacgccacccccucccgcg

SEQ ID NO: 141638 - RNA, 32 nt, Homo Sapiens
caugguggaaaacacacucucuccuuugagcc

SEQ ID NO: 141639 - RNA, 32 nt, Homo Sapiens
auggccuccagaggaaaccaacccugucucca

SEQ ID NO: 141640 - RNA, 32 nt, Homo Sapiens
acacuguaaucccagcacuuugggaggccaag

SEQ ID NO: 141641 - RNA, 32 nt, Homo Sapiens
guauauaacauaagaaacuuugaaagucaaaa

SEQ ID NO: 141642 - RNA, 32 nt, Homo Sapiens
gacgugggcgugcccgcggaauucaccuccuc

SEQ ID NO: 141643 - RNA, 32 nt, Homo Sapiens
agaacugugccagcuggcaguggggcugccca

SEQ ID NO: 141644 - RNA, 32 nt, Homo Sapiens
cauaagcuucuuccucugaaucuuauugaggg

SEQ ID NO: 141645 - RNA, 32 nt, Homo Sapiens
auggaggaguuugaaaacuuuuuauguucuug

SEQ ID NO: 141646 - RNA, 32 nt, Homo Sapiens
cugcaauuguauuuuaaaauauuuucaagaag

SEQ ID NO: 141647 - RNA, 32 nt, Homo Sapiens
uuuguuuugucaaaaaauuaaaaacucaaugu

SEQ ID NO: 141648 - RNA, 32 nt, Homo Sapiens
guguaucuuugggacagacggcaagaugggga

SEQ ID NO: 141649 - RNA, 31 nt, Homo Sapiens
ggcacgagggcggaaaagaaagccucagaac

SEQ ID NO: 141650 - RNA, 32 nt, Homo Sapiens
ucaacuccccccacccaaugcccagcaccaag

SEQ ID NO: 141651 - RNA, 32 nt, Homo Sapiens
uguaagguuugugacaaggcuuuccggaguga

SEQ ID NO: 141652 - RNA, 32 nt, Homo Sapiens
cgcccaugggccgcucgucccggcgcugaggg

SEQ ID NO: 141653 - RNA, 31 nt, Homo Sapiens
gacgggguuucacuguguuagccaggaaagu

SEQ ID NO: 141654 - RNA, 32 nt, Homo Sapiens
gaagcaaagggaggaagacugguagcggggag

SEQ ID NO: 141655 - RNA, 31 nt, Homo Sapiens
cagagcugagauccuacaggaguccagggcu

SEQ ID NO: 141656 - RNA, 32 nt, Homo Sapiens
agcagagaacagaggaggcccaucugaggaga

SEQ ID NO: 141657 - RNA, 32 nt, Homo Sapiens
aaagagaagcaguuugacggaccuugugauuu

SEQ ID NO: 141658 - RNA, 32 nt, Homo Sapiens
cuggauguacacacaccugaaagugaguugag

SEQ ID NO: 141659 - RNA, 32 nt, Homo Sapiens
gugcgguacucaguaacacagugcaguacuca

SEQ ID NO: 141660 - RNA, 32 nt, Homo Sapiens
accugcugguauauaauuccauguagccuuua

SEQ ID NO: 141661 - RNA, 32 nt, Homo Sapiens
cgcggggagagugagcugugccgcccgcagca

SEQ ID NO: 141662 - RNA, 32 nt, Homo Sapiens
gacgaugaugccguuggggcggaggcugcccu

SEQ ID NO: 141663 - RNA, 32 nt, Homo Sapiens
uauuggggccccacagcaagacugcuuggguc

SEQ ID NO: 141664 - RNA, 32 nt, Homo Sapiens
ccucauggaacuuaauuuuuuauuaaauauuc

SEQ ID NO: 141665 - RNA, 32 nt, Homo Sapiens
caauggaaagaauggaagcucagaagggagaa

SEQ ID NO: 141666 - RNA, 32 nt, Homo Sapiens
cagagaaugaaauggacgugaguuggggacuu

SEQ ID NO: 141667 - RNA, 32 nt, Homo Sapiens
ucgcucuccgcuuaugcuucuggcgccccagc

SEQ ID NO: 141668 - RNA, 32 nt, Homo Sapiens
acuccucauuggcggcgccuggugcaagaagu

SEQ ID NO: 141669 - RNA, 32 nt, Homo Sapiens
uagucuuugaaaaauaaaguuauguaagguuu

SEQ ID NO: 141670 - RNA, 32 nt, Homo Sapiens
uugcccuguguuucccacuuuaccaaaggagu

SEQ ID NO: 141671 - RNA, 32 nt, Homo Sapiens
cuguauguggaauggaaggaccgugccggagu

SEQ ID NO: 141672 - RNA, 32 nt, Homo Sapiens
ccugcaguccuggggaggcaggaggcacaugu

SEQ ID NO: 141673 - RNA, 32 nt, Homo Sapiens
ucccaaccccauuuccucucccuguuguccuc

SEQ ID NO: 141674 - RNA, 32 nt, Homo Sapiens
ccugcagcacaagcuccuccacucacugccuu

SEQ ID NO: 141675 - RNA, 32 nt, Homo Sapiens
ggcgccgcgggcccugcaccagacgcugggcu

SEQ ID NO: 141676 - RNA, 30 nt, Homo Sapiens
aaauuugucuguguaacugaggugcuaugc

SEQ ID NO: 141677 - RNA, 32 nt, Homo Sapiens
gaaagcuucugugggagcacaaauccuugccg

SEQ ID NO: 141678 - RNA, 32 nt, Homo Sapiens
ccuguccacggugccuccugcauguccugcug

SEQ ID NO: 141679 - RNA, 32 nt, Homo Sapiens
uaucaucuuuugcugucguaaaaagcgcagag

SEQ ID NO: 141680 - RNA, 32 nt, Homo Sapiens
ccaauaaagcuuuacagccuucugcaaagaaa

SEQ ID NO: 141681 - RNA, 32 nt, Homo Sapiens
aauaacuguuuuaaaugaaaguuuuaguaaaa

SEQ ID NO: 141682 - RNA, 32 nt, Homo Sapiens
ucaaugccccucuuuucucccacacaucucac

SEQ ID NO: 141683 - RNA, 32 nt, Homo Sapiens
aauacaauuuguacuuuuuucuuaaggcauac

SEQ ID NO: 141684 - RNA, 32 nt, Homo Sapiens
acgaugacuacuaccaugacuugccacacgcu

SEQ ID NO: 141685 - RNA, 32 nt, Homo Sapiens
cagaaagaaagagcaauaauaauuauucacac

SEQ ID NO: 141686 - RNA, 32 nt, Homo Sapiens
gguccuugccuggcccagcaugagaggugcuu

SEQ ID NO: 141687 - RNA, 32 nt, Homo Sapiens
gcgcgcccgcuggucuucgccacgcgcccucc

SEQ ID NO: 141688 - RNA, 32 nt, Homo Sapiens
uguauggagucaccuguaaauugauucaagug

SEQ ID NO: 141689 - RNA, 32 nt, Homo Sapiens
cuaaugauuccaacuuggcagacgcuaaacuc

SEQ ID NO: 141690 - RNA, 32 nt, Homo Sapiens
acuuccuguaauauuucuuuccaauaaauauu

SEQ ID NO: 141691 - RNA, 32 nt, Homo Sapiens
uccugggcugcucagagcugcugcucccuguu

SEQ ID NO: 141692 - RNA, 32 nt, Homo Sapiens
guggccacgaggccugggccagcugccacgga

SEQ ID NO: 141693 - RNA, 32 nt, Homo Sapiens
uaauccauugcaugcauuagcagcucaaagau

SEQ ID NO: 141694 - RNA, 32 nt, Homo Sapiens
aacaggcuaugaaauaagauggcaagaaagaa

SEQ ID NO: 141695 - RNA, 32 nt, Homo Sapiens
uguuugugcagggacuuaauucuuugaaagau

SEQ ID NO: 141696 - RNA, 32 nt, Homo Sapiens
ggaguagagcagccucgccucccagcuggacc

SEQ ID NO: 141697 - RNA, 32 nt, Homo Sapiens
uaaaugaaugaaauauaaacugugagauaaau

SEQ ID NO: 141698 - RNA, 31 nt, Homo Sapiens
aagcagagaaagaaaaguuaaauaccagaua

SEQ ID NO: 141699 - RNA, 29 nt, Homo Sapiens
ugucuuauagugaugguuguaauggugaa

SEQ ID NO: 141700 - RNA, 32 nt, Homo Sapiens
caggggaaauaccgccagaaaacaagaagguc

SEQ ID NO: 141701 - RNA, 32 nt, Homo Sapiens
uguugucuggguacuuucuacucucauuuuug

SEQ ID NO: 141702 - RNA, 32 nt, Homo Sapiens
uguuuucugaauccaauuuaacuuauucuucc

SEQ ID NO: 141703 - RNA, 30 nt, Homo Sapiens
acaggcgugagccacuacaagugugagcca

SEQ ID NO: 141704 - RNA, 28 nt, Homo Sapiens
uaaagacaaaaauuaaagcuuuuacagu

SEQ ID NO: 141705 - RNA, 32 nt, Homo Sapiens
gcaucaagguagagggcggccgggcagggagg

SEQ ID NO: 141706 - RNA, 32 nt, Homo Sapiens
ccagcgcccaaccugucgcugcggaagaccgg

SEQ ID NO: 141707 - RNA, 31 nt, Homo Sapiens
uccagggcccccugccugcucugguccaccc

SEQ ID NO: 141708 - RNA, 32 nt, Homo Sapiens
uagaaugcauucaaauguaaggcugcuucugg

SEQ ID NO: 141709 - RNA, 32 nt, Homo Sapiens
gcacagcuccccgcgccgcgcacgccgcccga

SEQ ID NO: 141710 - RNA, 32 nt, Homo Sapiens
cuuuuuaacaauauuuaaggcuguuuugauga

SEQ ID NO: 141711 - RNA, 32 nt, Homo Sapiens
ucuacuccauucuccccucucccccgcaacca

SEQ ID NO: 141712 - RNA, 31 nt, Homo Sapiens
aggugccaagccaaccgugggguuagcucua

SEQ ID NO: 141713 - RNA, 32 nt, Homo Sapiens
caggcaucaucucagcugacagugacgccauc

SEQ ID NO: 141714 - RNA, 29 nt, Homo Sapiens
gaagggaggggacagagggcccuggaagg

SEQ ID NO: 141715 - RNA, 32 nt, Homo Sapiens
ccugguaaaggagguagcugucuccaaaaaug

SEQ ID NO: 141716 - RNA, 32 nt, Homo Sapiens
cacucacuuuucuuuauugcugugaauagucu

SEQ ID NO: 141717 - RNA, 32 nt, Homo Sapiens
cuauuuauugacuuugacaauuacucagguuu

SEQ ID NO: 141718 - RNA, 32 nt, Homo Sapiens
ggaccccugccagccacuggucccaccgcuuu

SEQ ID NO: 141719 - RNA, 32 nt, Homo Sapiens
gucggugacaccugccucccaggugguggcag

SEQ ID NO: 141720 - RNA, 32 nt, Homo Sapiens
agcauguaucacagaucacacuugcuugauga

SEQ ID NO: 141721 - RNA, 32 nt, Homo Sapiens
uauuucaggguucuacauuuuaucuguaaaau

SEQ ID NO: 141722 - RNA, 32 nt, Homo Sapiens
cccucuccgggaacuuccccugcuccuuccag

SEQ ID NO: 141723 - RNA, 32 nt, Homo Sapiens
cuauuacuuuaggacuguguaguuguauauuu

SEQ ID NO: 141724 - RNA, 32 nt, Homo Sapiens
gcaccuuucuguacaaauacuaauucaauuuu

SEQ ID NO: 141725 - RNA, 32 nt, Homo Sapiens
aucuggccucauaccuuguccacacagaguuc

SEQ ID NO: 141726 - RNA, 32 nt, Homo Sapiens
acgccaucucugagagccauggagggagccac

SEQ ID NO: 141727 - RNA, 32 nt, Homo Sapiens
cugcggcuggugacuuguggcaguguaccccg

SEQ ID NO: 141728 - RNA, 32 nt, Homo Sapiens
ggcgugugcuuggcccggggaaccgggagggc

SEQ ID NO: 141729 - RNA, 32 nt, Homo Sapiens
ugguggugguauggaauuguaauuacagguag

SEQ ID NO: 141730 - RNA, 32 nt, Homo Sapiens
cuuugcaagguugcuggacagauggaacugga

SEQ ID NO: 141731 - RNA, 32 nt, Homo Sapiens
guauuguggcagucuuuuuuucuaguuaauuu

SEQ ID NO: 141732 - RNA, 32 nt, Homo Sapiens
cauagacagcuaugaaagcuggucagugaaag

SEQ ID NO: 141733 - RNA, 32 nt, Homo Sapiens
gacagagcagaucagucuuugucaaugcucua

SEQ ID NO: 141734 - RNA, 32 nt, Homo Sapiens
gcccaacuuacugucuucuucaugucaucaaa

SEQ ID NO: 141735 - RNA, 32 nt, Homo Sapiens
uaauuuaaauuugauguuaaucgagaaauaca

SEQ ID NO: 141736 - RNA, 32 nt, Homo Sapiens
ggcaggccugaggcugggaucccgugcugcuu

SEQ ID NO: 141737 - RNA, 32 nt, Homo Sapiens
ucuggaggcagacagggugggcugggggccag

SEQ ID NO: 141738 - RNA, 32 nt, Homo Sapiens
aggaugcgccuccucucccccaucccagcccu

SEQ ID NO: 141739 - RNA, 32 nt, Homo Sapiens
acuucuaccuguacaucccccaucccuucaau

SEQ ID NO: 141740 - RNA, 32 nt, Homo Sapiens
uacguagaaguguaauaacaaacaagaguaca

SEQ ID NO: 141741 - RNA, 32 nt, Homo Sapiens
gcuggcuugcggcuaccggggccggcucucug

SEQ ID NO: 141742 - RNA, 32 nt, Homo Sapiens
acuaggcaagacagggucagugcuuacauuuu

SEQ ID NO: 141743 - RNA, 32 nt, Homo Sapiens
gagcaggagacggcggcggcgcgaacccugcu

SEQ ID NO: 141744 - RNA, 32 nt, Homo Sapiens
cucggguuguagacagagcggcggggauccca

SEQ ID NO: 141745 - RNA, 32 nt, Homo Sapiens
gcacgcggguccggcgcacaguucccgggcga

SEQ ID NO: 141746 - RNA, 32 nt, Homo Sapiens
cgggaaagcagcccucccgagucaggaacggg

SEQ ID NO: 141747 - RNA, 32 nt, Homo Sapiens
ucagcucccuuuucuuuuucccuugaacuguu

SEQ ID NO: 141748 - RNA, 32 nt, Homo Sapiens
ggccaggagcgagagcgagacucuggagcggu

SEQ ID NO: 141749 - RNA, 30 nt, Homo Sapiens
cugcauggugguggcauguuagaaauacau

SEQ ID NO: 141750 - RNA, 32 nt, Homo Sapiens
gucacuggggacgaguccauguucccaagggc

SEQ ID NO: 141751 - RNA, 32 nt, Homo Sapiens
gcuaaggcuggguaagaauaguugugcaggga

SEQ ID NO: 141752 - RNA, 32 nt, Homo Sapiens
uuuguagagaauagagacguuugucuugucug

SEQ ID NO: 141753 - RNA, 32 nt, Homo Sapiens
cucccacauacacaggcaugcuugcgguagac

SEQ ID NO: 141754 - RNA, 31 nt, Homo Sapiens
ucagcaccgcccucagcucugagacauaagu

SEQ ID NO: 141755 - RNA, 32 nt, Homo Sapiens
acaugggaauuugaauuguaaaccuguuaucu

SEQ ID NO: 141756 - RNA, 32 nt, Homo Sapiens
gucugggguucagugacacacuucuuaacucc

SEQ ID NO: 141757 - RNA, 32 nt, Homo Sapiens
ugccggugcagguccuuggugugcugagugcc

SEQ ID NO: 141758 - RNA, 32 nt, Homo Sapiens
caggggacugcagggcggcugcaccgcccggg

SEQ ID NO: 141759 - RNA, 32 nt, Homo Sapiens
aaaagggucuugccggccucgcucgugcaggg

SEQ ID NO: 141760 - RNA, 32 nt, Homo Sapiens
ggcaucaguguagacggugcugauugggaaaa

SEQ ID NO: 141761 - RNA, 32 nt, Homo Sapiens
accaugaggaggaggaggggaaagcgccagug

SEQ ID NO: 141762 - RNA, 32 nt, Homo Sapiens
uaaaacugcauaucaguuauaucugugaucag

SEQ ID NO: 141763 - RNA, 32 nt, Homo Sapiens
ugcucccggaggcugcgccccggcgccuggaa

SEQ ID NO: 141764 - RNA, 32 nt, Homo Sapiens
cggcggggcggcggcugcagcugcagcuccgg

SEQ ID NO: 141765 - RNA, 32 nt, Homo Sapiens
caaauauaaauauuuacaggauuuuaaaguua

SEQ ID NO: 141766 - RNA, 30 nt, Homo Sapiens
cacagacuuugucuucaagaagcucacagu

SEQ ID NO: 141767 - RNA, 32 nt, Homo Sapiens
uuaagaaacucuauucugcugcuguauuuaua

SEQ ID NO: 141768 - RNA, 32 nt, Homo Sapiens
auggguaguucuucagacacaauguaacuuag

SEQ ID NO: 141769 - RNA, 32 nt, Homo Sapiens
ccucuggcccgggcccgggcccugcaaccgcc

SEQ ID NO: 141770 - RNA, 32 nt, Homo Sapiens
uugucugaaaccuuugugaucagagggaauaa

SEQ ID NO: 141771 - RNA, 32 nt, Homo Sapiens
uuacauucaaggaaggucaaaacuauuauucu

SEQ ID NO: 141772 - RNA, 31 nt, Homo Sapiens
uaacauuugugcuuaaauuguuacagaaaug

SEQ ID NO: 141773 - RNA, 32 nt, Homo Sapiens
accgcgggugcgggcaggaggcggcggcagca

SEQ ID NO: 141774 - RNA, 32 nt, Homo Sapiens
auguuuuaaaacagagauggacauuuuauuga

SEQ ID NO: 141775 - RNA, 32 nt, Homo Sapiens
ggugagaacugaggagcggacucacuugaugu

SEQ ID NO: 141776 - RNA, 32 nt, Homo Sapiens
aacaacuuucgccuugaauguccuuagaacca

SEQ ID NO: 141777 - RNA, 32 nt, Homo Sapiens
uaggccaccucccagaggggccccuugguguu

SEQ ID NO: 141778 - RNA, 32 nt, Homo Sapiens
aaaaaggggaacagggaugauuccuagucaga

SEQ ID NO: 141779 - RNA, 32 nt, Homo Sapiens
uggaucuccucccuccucccagggguucagau

SEQ ID NO: 141780 - RNA, 32 nt, Homo Sapiens
cugcagugucuguggcacucacugcuuuucua

SEQ ID NO: 141781 - RNA, 32 nt, Homo Sapiens
cugagcuagaaaauugaaggugugguucuuag

SEQ ID NO: 141782 - RNA, 32 nt, Homo Sapiens
auugcacaaaaauuaugugcuuuuuaaaauau

SEQ ID NO: 141783 - RNA, 32 nt, Homo Sapiens
cacgagaaucacguggggagcguguuaaaauu

SEQ ID NO: 141784 - RNA, 32 nt, Homo Sapiens
auuuaucuaggaaacuaagucuaacucauugu

SEQ ID NO: 141785 - RNA, 32 nt, Homo Sapiens
accaucuauugagugagcuggaugcacgcuga

SEQ ID NO: 141786 - RNA, 32 nt, Homo Sapiens
ccugaacucuucugccauuuuccuccuucacu

SEQ ID NO: 141787 - RNA, 32 nt, Homo Sapiens
gggccuggagagagggggaacgggcagcgggg

SEQ ID NO: 141788 - RNA, 32 nt, Homo Sapiens
ggucuuccccacccacccccagcccccuaguc

SEQ ID NO: 141789 - RNA, 32 nt, Homo Sapiens
uguaaaagucaccccccagaaucuaaaaaugc

SEQ ID NO: 141790 - RNA, 32 nt, Homo Sapiens
aaugucaaaguuguguccaauuuuauggauuu

SEQ ID NO: 141791 - RNA, 32 nt, Homo Sapiens
cuuacugcauguguagauuguaaaaugaugag

SEQ ID NO: 141792 - RNA, 32 nt, Homo Sapiens
uuguacaguccuugagcccaguuuacagaucu

SEQ ID NO: 141793 - RNA, 32 nt, Homo Sapiens
ggagcagcauuucgucgccgcgggggugccgg

SEQ ID NO: 141794 - RNA, 32 nt, Homo Sapiens
aagacgggcccagaauggggucgggagucucg

SEQ ID NO: 141795 - RNA, 32 nt, Homo Sapiens
ugacuuugguggaaguccuugguuacuuauca

SEQ ID NO: 141796 - RNA, 32 nt, Homo Sapiens
gaagaucucagaaccccgccccggccugucuc

SEQ ID NO: 141797 - RNA, 30 nt, Homo Sapiens
gaagaacgguuccugggggaagcagaggcc

SEQ ID NO: 141798 - RNA, 32 nt, Homo Sapiens
uucugauggcugccuugcuccuugcuccccca

SEQ ID NO: 141799 - RNA, 32 nt, Homo Sapiens
uagaucugguucuggaggacagaaguugaaga

SEQ ID NO: 141800 - RNA, 32 nt, Homo Sapiens
uggggagcccucgcggcaagcagggugggggg

SEQ ID NO: 141801 - RNA, 29 nt, Homo Sapiens
agccuuucguguuuuuccacagguguuua

SEQ ID NO: 141802 - RNA, 32 nt, Homo Sapiens
caguucuggagcucaggccuuccugaggagca

SEQ ID NO: 141803 - RNA, 32 nt, Homo Sapiens
ggggcaucuuuuagccuccccccgccaccaca

SEQ ID NO: 141804 - RNA, 32 nt, Homo Sapiens
cuggugaauucugcacuuacacguacucaagg

SEQ ID NO: 141805 - RNA, 32 nt, Homo Sapiens
aauucgaaugccacccucccagaugggggcag

SEQ ID NO: 141806 - RNA, 32 nt, Homo Sapiens
auacaagcauauuuaaugcugaguuuaauuua

SEQ ID NO: 141807 - RNA, 32 nt, Homo Sapiens
auucauguuauaguuucaguauuaaagcugac

SEQ ID NO: 141808 - RNA, 32 nt, Homo Sapiens
cucccgagccacacgcugggggugcuggcuga

SEQ ID NO: 141809 - RNA, 32 nt, Homo Sapiens
gguuuccccacuuuugaccggaaguauguggg

SEQ ID NO: 141810 - RNA, 32 nt, Homo Sapiens
cccgcggugugaccccggccggugccuugguu

SEQ ID NO: 141811 - RNA, 32 nt, Homo Sapiens
guauuccggaagcugaggcaggagaauugccu

SEQ ID NO: 141812 - RNA, 32 nt, Homo Sapiens
ugaaugaaaaaaucauuacuauucuguauaua

SEQ ID NO: 141813 - RNA, 32 nt, Homo Sapiens
cugguccuggggacucgcucaggccuggaugu

SEQ ID NO: 141814 - RNA, 32 nt, Homo Sapiens
gccccaggagagcccugaaaccaagucggagc

SEQ ID NO: 141815 - RNA, 32 nt, Homo Sapiens
uagaauuugaacuuauaugugucuggcuuaaa

SEQ ID NO: 141816 - RNA, 32 nt, Homo Sapiens
uccccucccccagcugagguguggcccucagg

SEQ ID NO: 141817 - RNA, 32 nt, Homo Sapiens
cuuaaugacaacacuuaauagcaacagagcac

SEQ ID NO: 141818 - RNA, 32 nt, Homo Sapiens
gaggcucugaagcggcugcugcaccgcggggc

SEQ ID NO: 141819 - RNA, 32 nt, Homo Sapiens
ccaggcccugcucuccacggccucccucuggc

SEQ ID NO: 141820 - RNA, 32 nt, Homo Sapiens
uuuuuuauuucuguaaguucaaauuaauguau

SEQ ID NO: 141821 - RNA, 32 nt, Homo Sapiens
gaacugcgugugccccugggccugcaggcucc

SEQ ID NO: 141822 - RNA, 32 nt, Homo Sapiens
uccuguuuucgccagauuucuucuugaauggc

SEQ ID NO: 141823 - RNA, 32 nt, Homo Sapiens
acaaacagaaacacaaacaauuuggaucaaaa

SEQ ID NO: 141824 - RNA, 32 nt, Homo Sapiens
uauucagccaaggggaccacagucccugcugg

SEQ ID NO: 141825 - RNA, 32 nt, Homo Sapiens
guugcaggugccaaugacuaacuuuuugaauu

SEQ ID NO: 141826 - RNA, 32 nt, Homo Sapiens
gcuucccauguaacuucuccaguguucuggca

SEQ ID NO: 141827 - RNA, 32 nt, Homo Sapiens
gccucuuucugaugaagugauuguaguaggug

SEQ ID NO: 141828 - RNA, 32 nt, Homo Sapiens
cacugacgcccagcccgcccagcccaggugac

SEQ ID NO: 141829 - RNA, 32 nt, Homo Sapiens
caaaggaccuaucaccugagcacaacuaccuc

SEQ ID NO: 141830 - RNA, 32 nt, Homo Sapiens
uggcuaaaucuuuaccuucucauagcugaugg

SEQ ID NO: 141831 - RNA, 30 nt, Homo Sapiens
ccagcugugcuccuggggccggcgcggguu

SEQ ID NO: 141832 - RNA, 32 nt, Homo Sapiens
ucaucauuggaaggaagaagauauaacucuuu

SEQ ID NO: 141833 - RNA, 32 nt, Homo Sapiens
aauguuucugggugugcaauagagugaucaca

SEQ ID NO: 141834 - RNA, 32 nt, Homo Sapiens
uaaucagaguguggcauagaagcuauuuaaug

SEQ ID NO: 141835 - RNA, 32 nt, Homo Sapiens
cuccgcagcacugcucugccaagcccugucga

SEQ ID NO: 141836 - RNA, 32 nt, Homo Sapiens
cuuuuccuuuagcagcccuuuccacuaguuuc

SEQ ID NO: 141837 - RNA, 32 nt, Homo Sapiens
gggaugauauaaaacauuuuguguuucaucua

SEQ ID NO: 141838 - RNA, 28 nt, Homo Sapiens
gucagggggcggccgauggcuuugaggg

SEQ ID NO: 141839 - RNA, 32 nt, Homo Sapiens
auuguuaacauuuuaauuuuuacaauugaugu

SEQ ID NO: 141840 - RNA, 32 nt, Homo Sapiens
caugacaaagacugaguacguugugcauuugg

SEQ ID NO: 141841 - RNA, 32 nt, Homo Sapiens
cuugagccaggcagaaguuuguggccaggguu

SEQ ID NO: 141842 - RNA, 32 nt, Homo Sapiens
uuugaaaaacaaaaaucaaaaacaguaacuau

SEQ ID NO: 141843 - RNA, 32 nt, Homo Sapiens
uccggcaacgaagguaccauggccggacuccg

SEQ ID NO: 141844 - RNA, 32 nt, Homo Sapiens
ugccggaagcggggccuuggugggccaggcca

SEQ ID NO: 141845 - RNA, 32 nt, Homo Sapiens
ggcucccgcgcaccgaagacggccgccaugcc

SEQ ID NO: 141846 - RNA, 32 nt, Homo Sapiens
guggucacguaugcuuaggaagcagcacagcc

SEQ ID NO: 141847 - RNA, 32 nt, Homo Sapiens
cuuuaggaaaugucgguggaguguucagcaag

SEQ ID NO: 141848 - RNA, 32 nt, Homo Sapiens
ggcucaguuauggcagacaguuuuuugaaagu

SEQ ID NO: 141849 - RNA, 32 nt, Homo Sapiens
ucugagagugugggcagagagaauuauguggc

SEQ ID NO: 141850 - RNA, 32 nt, Homo Sapiens
agaggcaaggacccagccggggcauucacagu

SEQ ID NO: 141851 - RNA, 32 nt, Homo Sapiens
ucuaaaaugcuguucucaaucauugucagaga

SEQ ID NO: 141852 - RNA, 32 nt, Homo Sapiens
guuaacuuccuaaaacagaauuugaacuuuau

SEQ ID NO: 141853 - RNA, 32 nt, Homo Sapiens
acauacaggaaacaggcgggacacaguggcuc

SEQ ID NO: 141854 - RNA, 32 nt, Homo Sapiens
gcauuuagggagaucauguuuucuuaaucaug

SEQ ID NO: 141855 - RNA, 32 nt, Homo Sapiens
acuuccauaaaagaagcguggugggcgggucc

SEQ ID NO: 141856 - RNA, 32 nt, Homo Sapiens
ccacacaccacuuuuauuggccauaaggaaaa

SEQ ID NO: 141857 - RNA, 32 nt, Homo Sapiens
gcugcugcuccuauauuuuuuaagaaauauaa

SEQ ID NO: 141858 - RNA, 32 nt, Homo Sapiens
uggcuuacaccuguaaucgcagcauuuuggga

SEQ ID NO: 141859 - RNA, 32 nt, Homo Sapiens
aaaauauauauucaugauaggaaguuauaacu

SEQ ID NO: 141860 - RNA, 32 nt, Homo Sapiens
ccaaaagcucaaggaauagacaguguucugug

SEQ ID NO: 141861 - RNA, 32 nt, Homo Sapiens
ccagcuaaguucauuauuccucaugggguggg

SEQ ID NO: 141862 - RNA, 32 nt, Homo Sapiens
cugggucagaucuguguggccagcccugucca

SEQ ID NO: 141863 - RNA, 32 nt, Homo Sapiens
cauuagguaauuacauuagugucaagauaugc

SEQ ID NO: 141864 - RNA, 32 nt, Homo Sapiens
gauucagcugucagccuuuccaguuccaguga

SEQ ID NO: 141865 - RNA, 32 nt, Homo Sapiens
cuuguuucucgagucaucuuuggacuugcuug

SEQ ID NO: 141866 - RNA, 32 nt, Homo Sapiens
agaacacaaaggccucuagaacagcacugaca

SEQ ID NO: 141867 - RNA, 32 nt, Homo Sapiens
cagcugucguggggcagggcgguggcgccuuc

SEQ ID NO: 141868 - RNA, 32 nt, Homo Sapiens
cugacaaagggaaagggaaaaauacauuuccc

SEQ ID NO: 141869 - RNA, 32 nt, Homo Sapiens
auuuaauuuuuaaauuuuugcuuggaagcagc

SEQ ID NO: 141870 - RNA, 32 nt, Homo Sapiens
ugaggaucuguguuuggugaaaaggagccaaa

SEQ ID NO: 141871 - RNA, 32 nt, Homo Sapiens
ggcgcccacagcauggcgcccgggccgcgcug

SEQ ID NO: 141872 - RNA, 32 nt, Homo Sapiens
uuuaaaaaaucaaugaucaauuuuaucuuacu

SEQ ID NO: 141873 - RNA, 32 nt, Homo Sapiens
aaacggaagcaucuugcuguacuugaaagaua

SEQ ID NO: 141874 - RNA, 32 nt, Homo Sapiens
cgacccgacgcaagauggcgaguaaagagaug

SEQ ID NO: 141875 - RNA, 32 nt, Homo Sapiens
uuuguuuuauacauuuaaggcuuagacucaua

SEQ ID NO: 141876 - RNA, 32 nt, Homo Sapiens
gauggagggguggugaugucaggguugggcgc

SEQ ID NO: 141877 - RNA, 32 nt, Homo Sapiens
ggagcagcagugcaggccuggccugugucccc

SEQ ID NO: 141878 - RNA, 32 nt, Homo Sapiens
guuccagauuuauguguauguuacuuuguuuu

SEQ ID NO: 141879 - RNA, 32 nt, Homo Sapiens
uucgcacacaacagcacccagcccuguccccu

SEQ ID NO: 141880 - RNA, 32 nt, Homo Sapiens
uagaaagcccaccagcaguugcugggccaccc

SEQ ID NO: 141881 - RNA, 32 nt, Homo Sapiens
uccaagcaccgggaagaccuccaggcugaccc

SEQ ID NO: 141882 - RNA, 32 nt, Homo Sapiens
uaaaucauggggauuuuauugauuuauuuuca

SEQ ID NO: 141883 - RNA, 32 nt, Homo Sapiens
gaggagagaaauaauaacuaaaaaauauaccc

SEQ ID NO: 141884 - RNA, 32 nt, Homo Sapiens
augcccuggccaaggucuucguaugugcccac

SEQ ID NO: 141885 - RNA, 30 nt, Homo Sapiens
acgggguuucaccguguuagccaggauagu

SEQ ID NO: 141886 - RNA, 32 nt, Homo Sapiens
acgaggaaugcuaucuaucagaauagacuggc

SEQ ID NO: 141887 - RNA, 32 nt, Homo Sapiens
uuuuuuauauugcaucaaacuuggaacaucaa

SEQ ID NO: 141888 - RNA, 32 nt, Homo Sapiens
uaaacagaccuaccccaccccaacucagaguu

SEQ ID NO: 141889 - RNA, 32 nt, Homo Sapiens
gguaccuaaaauguaacaugaaaauacuagcu

SEQ ID NO: 141890 - RNA, 32 nt, Homo Sapiens
ugugacuuuauuuggaaaugggaccuuuaagg

SEQ ID NO: 141891 - RNA, 32 nt, Homo Sapiens
agaugaggcgacaugaggagauauauuauuca

SEQ ID NO: 141892 - RNA, 32 nt, Homo Sapiens
ugucagcacugacuucuguaucaugucaggga

SEQ ID NO: 141893 - RNA, 32 nt, Homo Sapiens
uggugugguuguuggagccggagggagcgugu

SEQ ID NO: 141894 - RNA, 32 nt, Homo Sapiens
gcuuuguagagcuggauuuggaacuucgggau

SEQ ID NO: 141895 - RNA, 32 nt, Homo Sapiens
aucagugacgcccuucccuaaguaucaacuua

SEQ ID NO: 141896 - RNA, 32 nt, Homo Sapiens
uacucaauaauggcaccuuacauuuauaaauu

SEQ ID NO: 141897 - RNA, 32 nt, Homo Sapiens
ccccgcucgggcccgacccgcucggucaccgc

SEQ ID NO: 141898 - RNA, 29 nt, Homo Sapiens
accccuccgguccuggagcucccacagcu

SEQ ID NO: 141899 - RNA, 32 nt, Homo Sapiens
gccucccgggucuccuggcggcggcggaguga

SEQ ID NO: 141900 - RNA, 32 nt, Homo Sapiens
agaagguuauuuaaaaugauacuuaaauaaag

SEQ ID NO: 141901 - RNA, 32 nt, Homo Sapiens
cagauggcuaguguuaaauuucuauagacgau

SEQ ID NO: 141902 - RNA, 32 nt, Homo Sapiens
ucuuuucaguuauacacugaacuuuacuguag

SEQ ID NO: 141903 - RNA, 32 nt, Homo Sapiens
ccguuggcaggcuaggguuggcggcggcguau

SEQ ID NO: 141904 - RNA, 32 nt, Homo Sapiens
uccagguaaaagcagccguauugggggaaggc

SEQ ID NO: 141905 - RNA, 32 nt, Homo Sapiens
acaucaacuauguaaaaugacacacauacaua

SEQ ID NO: 141906 - RNA, 32 nt, Homo Sapiens
gugugcacuggccacgucucaacagcagugug

SEQ ID NO: 141907 - RNA, 31 nt, Homo Sapiens
ggacaagcagcuggugcuccaagcacaggag

SEQ ID NO: 141908 - RNA, 32 nt, Homo Sapiens
cccaccugcccccgagacccagccccacgcug

SEQ ID NO: 141909 - RNA, 32 nt, Homo Sapiens
uacaggcaggcaguaccagaccacugugcuug

SEQ ID NO: 141910 - RNA, 32 nt, Homo Sapiens
aaacuuagcucccugggacauucuucaauucc

SEQ ID NO: 141911 - RNA, 32 nt, Homo Sapiens
cgugucuugugcgcccucuccuggcuacucug

SEQ ID NO: 141912 - RNA, 32 nt, Homo Sapiens
uguggcuuuuuggcaaggggaggugauuuuga

SEQ ID NO: 141913 - RNA, 32 nt, Homo Sapiens
cauauuuuuuauuuuguuucucuaguguuaug

SEQ ID NO: 141914 - RNA, 32 nt, Homo Sapiens
uuaaagaaccaucaagaaauggggaccuggau

SEQ ID NO: 141915 - RNA, 32 nt, Homo Sapiens
auuuuaaagaugucuuuuuuuauuuuacuuuu

SEQ ID NO: 141916 - RNA, 32 nt, Homo Sapiens
gucaggccuuccacaagaagugguggagcaga

SEQ ID NO: 141917 - RNA, 32 nt, Homo Sapiens
aucuggacuuauuuuaugucaaucuguuuaua

SEQ ID NO: 141918 - RNA, 32 nt, Homo Sapiens
uugucucuccaaguggcuccucucuuaaaaga

SEQ ID NO: 141919 - RNA, 32 nt, Homo Sapiens
ccugagcgccuucggcggcgcggcgcggcucc

SEQ ID NO: 141920 - RNA, 30 nt, Homo Sapiens
ucaaaggccgaggccagcgcccugacggcc

SEQ ID NO: 141921 - RNA, 32 nt, Homo Sapiens
ccugguggccuugauggggacaaugguuuauu

SEQ ID NO: 141922 - RNA, 32 nt, Homo Sapiens
gguaaaggggcuuagggaaaagggggcauacc

SEQ ID NO: 141923 - RNA, 31 nt, Homo Sapiens
aggcugcauugagccaugauugcaccacugc

SEQ ID NO: 141924 - RNA, 32 nt, Homo Sapiens
ucuguucuugcaccaccauccagaaugccccc

SEQ ID NO: 141925 - RNA, 32 nt, Homo Sapiens
auagcucugaccacccggcgaagagcugagaa

SEQ ID NO: 141926 - RNA, 32 nt, Homo Sapiens
ggaccuagagaaugggagggagaacggggccc

SEQ ID NO: 141927 - RNA, 32 nt, Homo Sapiens
ugacucccuucucgucucgaggccuguggcgu

SEQ ID NO: 141928 - RNA, 32 nt, Homo Sapiens
caaucaaugucacaugaacaaacaagcugccc

SEQ ID NO: 141929 - RNA, 32 nt, Homo Sapiens
cuuaguaggagggucuggcccggggcggggag

SEQ ID NO: 141930 - RNA, 32 nt, Homo Sapiens
accugucggccgcgucggcgcugcugcgguau

SEQ ID NO: 141931 - RNA, 32 nt, Homo Sapiens
cagccugggcgacagagcgagagucugucuca

SEQ ID NO: 141932 - RNA, 32 nt, Homo Sapiens
ccaaggcccugagaccccggcgggggagccua

SEQ ID NO: 141933 - RNA, 32 nt, Homo Sapiens
gggggcagcugagagcgagagguggaucgggg

SEQ ID NO: 141934 - RNA, 32 nt, Homo Sapiens
cuucuacguguacaucauuaauccccauugcc

SEQ ID NO: 141935 - RNA, 31 nt, Homo Sapiens
ccccaugggcacugcgugccgccugcacgug

SEQ ID NO: 141936 - RNA, 32 nt, Homo Sapiens
gaucgcuugagcucaggaguuugagaccagcu

SEQ ID NO: 141937 - RNA, 32 nt, Homo Sapiens
ccucccagacugcagggacagcacccgguaac

SEQ ID NO: 141938 - RNA, 32 nt, Homo Sapiens
uuugucuaauuuucuucaugaguuaugguggc

SEQ ID NO: 141939 - RNA, 32 nt, Homo Sapiens
ggagggaggaacaccggugccucggucacucu

SEQ ID NO: 141940 - RNA, 32 nt, Homo Sapiens
gcccgugucugcuacucuguaccuugcuggua

SEQ ID NO: 141941 - RNA, 32 nt, Homo Sapiens
uguuucuuaagucuaggugaauuuauauauau

SEQ ID NO: 141942 - RNA, 32 nt, Homo Sapiens
caaccucguguggagaacccaggcucccagua

SEQ ID NO: 141943 - RNA, 32 nt, Homo Sapiens
cauggccguugucgucgccgccgcggcucccg

SEQ ID NO: 141944 - RNA, 32 nt, Homo Sapiens
gcuaucaaauggaauagaauacacuuauuuuu

SEQ ID NO: 141945 - RNA, 32 nt, Homo Sapiens
caaggucauacaccuaaucagugguauauuca

SEQ ID NO: 141946 - RNA, 32 nt, Homo Sapiens
cuccaucuuuuuuucgucuuuacaauuuuugu

SEQ ID NO: 141947 - RNA, 32 nt, Homo Sapiens
uccugccccacuuuggcccagaaaccaaaugu

SEQ ID NO: 141948 - RNA, 32 nt, Homo Sapiens
auauaguaaacacuuggaaaugguggugcuuu

SEQ ID NO: 141949 - RNA, 32 nt, Homo Sapiens
auaaggaacaaagggggagauuguugaguccu

SEQ ID NO: 141950 - RNA, 32 nt, Homo Sapiens
ccauugugaacaucaucuaaaggguggguggu

SEQ ID NO: 141951 - RNA, 32 nt, Homo Sapiens
uguaauuuuccucauuuaguuauaaugacauc

SEQ ID NO: 141952 - RNA, 32 nt, Homo Sapiens
gguuugucauauucaucuuugguuuacuaaau

SEQ ID NO: 141953 - RNA, 32 nt, Homo Sapiens
acugcguucuggaagcccugcccaggccucac

SEQ ID NO: 141954 - RNA, 32 nt, Homo Sapiens
uauaauguacagaagagcaaaagggaggaaca

SEQ ID NO: 141955 - RNA, 32 nt, Homo Sapiens
ucuguuuuaaagauuauuaaaaaacauugugu

SEQ ID NO: 141956 - RNA, 32 nt, Homo Sapiens
gcaaugccggaaagagcaaaagaauaucacug

SEQ ID NO: 141957 - RNA, 32 nt, Homo Sapiens
uaaaacuuauaguuucuuuaaauugguuaaug

SEQ ID NO: 141958 - RNA, 32 nt, Homo Sapiens
ggcaggaucccaccccacuugaagagaauaaa

SEQ ID NO: 141959 - RNA, 32 nt, Homo Sapiens
auuuaaaaagugcuauacuaagggaaagaauu

SEQ ID NO: 141960 - RNA, 32 nt, Homo Sapiens
ugacagcggggacgaggcgacggcgagcgcga

SEQ ID NO: 141961 - RNA, 32 nt, Homo Sapiens
uuaaauguauauauauuuuaaaaugccugagg

SEQ ID NO: 141962 - RNA, 32 nt, Homo Sapiens
gccggcgaaggaggaggcguugccgguuuucu

SEQ ID NO: 141963 - RNA, 32 nt, Homo Sapiens
uccucagaccccaguccuaccucccccgccua

SEQ ID NO: 141964 - RNA, 32 nt, Homo Sapiens
aagagcauguccucccucgagaaacagugccg

SEQ ID NO: 141965 - RNA, 32 nt, Homo Sapiens
acugaagggcugccccgcccccgccccucccc

SEQ ID NO: 141966 - RNA, 32 nt, Homo Sapiens
uacagauaaaauugcagacacuguucuauuua

SEQ ID NO: 141967 - RNA, 32 nt, Homo Sapiens
gagaugcuuuuguagacaagcauauggaauau

SEQ ID NO: 141968 - RNA, 32 nt, Homo Sapiens
gaaaaagucagcaguggauugcuugagaucuu

SEQ ID NO: 141969 - RNA, 32 nt, Homo Sapiens
uuuugauggggaaguggauccauuccaucccc

SEQ ID NO: 141970 - RNA, 32 nt, Homo Sapiens
guuuuuaauguuaauuugauaguguguguuuu

SEQ ID NO: 141971 - RNA, 32 nt, Homo Sapiens
auggcggcugagaggagcugcgcgugcgcgaa

SEQ ID NO: 141972 - RNA, 32 nt, Homo Sapiens
aggaaguucagagcuuccagaggaauuauuau

SEQ ID NO: 141973 - RNA, 32 nt, Homo Sapiens
caaacagaguuucugagccaaagcagaccucu

SEQ ID NO: 141974 - RNA, 32 nt, Homo Sapiens
cugccccagacacugcccuuggcugccagccu

SEQ ID NO: 141975 - RNA, 32 nt, Homo Sapiens
uugcacagauacauuaauauuaucauaguuug

SEQ ID NO: 141976 - RNA, 32 nt, Homo Sapiens
ucuccccucacuuuucccuacuuccucugcaa

SEQ ID NO: 141977 - RNA, 32 nt, Homo Sapiens
aagaagggcccauccuauuuccccucaucuag

SEQ ID NO: 141978 - RNA, 32 nt, Homo Sapiens
uuccccugacuucuauagcccucugugucggu

SEQ ID NO: 141979 - RNA, 32 nt, Homo Sapiens
gucucgcccgcgaucccggcccggggcugugg

SEQ ID NO: 141980 - RNA, 32 nt, Homo Sapiens
aggggcaucugcuuauagaagugagagagaag

SEQ ID NO: 141981 - RNA, 32 nt, Homo Sapiens
aaacaggaugcuggcagauuugaugugaguuu

SEQ ID NO: 141982 - RNA, 31 nt, Homo Sapiens
cugucugugaccugcgagggaguccaauguc

SEQ ID NO: 141983 - RNA, 32 nt, Homo Sapiens
cccaguccagaggcugcccuugaacccgggcg

SEQ ID NO: 141984 - RNA, 32 nt, Homo Sapiens
aaaucagacccacaacgaaugaaugaacagcc

SEQ ID NO: 141985 - RNA, 32 nt, Homo Sapiens
cucacaacauuauaaacaguugugagaaaaua

SEQ ID NO: 141986 - RNA, 32 nt, Homo Sapiens
acgagaagagccuccgcccggcccgggcacca

SEQ ID NO: 141987 - RNA, 32 nt, Homo Sapiens
uuucaggccucaggaacucuucuauuuccuuc

SEQ ID NO: 141988 - RNA, 32 nt, Homo Sapiens
cagacgugauucaaaacucuguucuaaggugu

SEQ ID NO: 141989 - RNA, 32 nt, Homo Sapiens
gaguccccaguguccccuccccuccaucucuc

SEQ ID NO: 141990 - RNA, 32 nt, Homo Sapiens
gcauuggaaagaaaccacaccugcacgagaau

SEQ ID NO: 141991 - RNA, 32 nt, Homo Sapiens
cggaagcugacugguccacgcacggccgaagc

SEQ ID NO: 141992 - RNA, 32 nt, Homo Sapiens
uucuggucugcaccguaccagcgcaugagggg

SEQ ID NO: 141993 - RNA, 32 nt, Homo Sapiens
agaaggcgcucgccucccuagcccgcaaaaac

SEQ ID NO: 141994 - RNA, 32 nt, Homo Sapiens
gauugccaauacucaugugcguuucauguguu

SEQ ID NO: 141995 - RNA, 30 nt, Homo Sapiens
uagaaacaacugucuugagaagcucuucga

SEQ ID NO: 141996 - RNA, 32 nt, Homo Sapiens
gggagggcgggggaauggaccuuguauagauc

SEQ ID NO: 141997 - RNA, 32 nt, Homo Sapiens
guucccugcagcacaccugaucuccuaggagg

SEQ ID NO: 141998 - RNA, 32 nt, Homo Sapiens
cucgccugcccccgggguugucagcacuggga

SEQ ID NO: 141999 - RNA, 32 nt, Homo Sapiens
gccgaccagacgcagcuggggaugagcccaag

SEQ ID NO: 142000 - RNA, 32 nt, Homo Sapiens
ucgugucgcagaagaaggcagaugaaguauug

SEQ ID NO: 142001 - RNA, 32 nt, Homo Sapiens
ccagccacaaaccagcagaucaggguuugaug

SEQ ID NO: 142002 - RNA, 32 nt, Homo Sapiens
cgauccugcaccuuccucucccaggucgcugc

SEQ ID NO: 142003 - RNA, 32 nt, Homo Sapiens
gacugcuggaaguuuaaauuuuuauaagcaua

SEQ ID NO: 142004 - RNA, 32 nt, Homo Sapiens
gccaccccacugagagcugcuccuuuggggga

SEQ ID NO: 142005 - RNA, 32 nt, Homo Sapiens
aagccgaguccgcgcgcgggucgggccgcgac

SEQ ID NO: 142006 - RNA, 32 nt, Homo Sapiens
caacaacaaaacaaacaaaaacaccuugaccu

SEQ ID NO: 142007 - RNA, 32 nt, Homo Sapiens
uccacaaaaaauacaaaaauuugcugagugca

SEQ ID NO: 142008 - RNA, 32 nt, Homo Sapiens
gggagaaucuuccauguugguguuuuuccugu

SEQ ID NO: 142009 - RNA, 29 nt, Homo Sapiens
auccagggacgucgcggcguggcccggca

SEQ ID NO: 142010 - RNA, 29 nt, Homo Sapiens
ggacaaguauggagaugaaagcuaucaca

SEQ ID NO: 142011 - RNA, 32 nt, Homo Sapiens
uccaccauugcgaugcagcagcaagaaaaacu

SEQ ID NO: 142012 - RNA, 32 nt, Homo Sapiens
caucacucaaauccuuuuauccugcuuuauuu

SEQ ID NO: 142013 - RNA, 32 nt, Homo Sapiens
ccacauggcugcucccuucacacuggguaaca

SEQ ID NO: 142014 - RNA, 32 nt, Homo Sapiens
aauuuuguuguuguuguuguuguuuugagacg

SEQ ID NO: 142015 - RNA, 32 nt, Homo Sapiens
cuugcagauaaaaauuaauuccaucuuuuuca

SEQ ID NO: 142016 - RNA, 32 nt, Homo Sapiens
ggcggggacaacugggucuuuugcggcugcag

SEQ ID NO: 142017 - RNA, 32 nt, Homo Sapiens
ugauuuuuaccucuguaacaaacacaagaaau

SEQ ID NO: 142018 - RNA, 32 nt, Homo Sapiens
ugaaguccuggaaaagggcaucugaaaaaccu

SEQ ID NO: 142019 - RNA, 32 nt, Homo Sapiens
aacaguguauuacauagugauauugagagugu

SEQ ID NO: 142020 - RNA, 32 nt, Homo Sapiens
agugccuuuguccaguuaaaucugcagagguu

SEQ ID NO: 142021 - RNA, 32 nt, Homo Sapiens
cacuuauuccaaggcuaagaauaggagucagg

SEQ ID NO: 142022 - RNA, 32 nt, Homo Sapiens
gugaaaagguuggguaaauauuugcaauacau

SEQ ID NO: 142023 - RNA, 32 nt, Homo Sapiens
uaauuggcaaaauaacaaauugugaaaauaga

SEQ ID NO: 142024 - RNA, 32 nt, Homo Sapiens
acaacuguguuagacuaacaaguaauuauaaa

SEQ ID NO: 142025 - RNA, 32 nt, Homo Sapiens
gggagcgcggacgaggcccacgggcugcucgg

SEQ ID NO: 142026 - RNA, 32 nt, Homo Sapiens
ugacccucugcgguugucaggcgugaauccuc

SEQ ID NO: 142027 - RNA, 32 nt, Homo Sapiens
acauguuaaaauuuaaauuugcuauuucaaaa

SEQ ID NO: 142028 - RNA, 32 nt, Homo Sapiens
uaaaacagacaaaaacuaauaacauauuagcu

SEQ ID NO: 142029 - RNA, 32 nt, Homo Sapiens
cuuucugauggucaguaaaaucuuaaaugauu

SEQ ID NO: 142030 - RNA, 32 nt, Homo Sapiens
cuccucggggaugagcucugcugcugaguagg

SEQ ID NO: 142031 - RNA, 32 nt, Homo Sapiens
uucuuggagguagaagucgaguaugaggcagu

SEQ ID NO: 142032 - RNA, 32 nt, Homo Sapiens
gguggggucggccagcgccuucccuucgccca

SEQ ID NO: 142033 - RNA, 32 nt, Homo Sapiens
acccagcaagggacuauagauacucguguccc

SEQ ID NO: 142034 - RNA, 32 nt, Homo Sapiens
caguugugcagguuguucacugcacaagggca

SEQ ID NO: 142035 - RNA, 32 nt, Homo Sapiens
aaaaaagucaaaggggaauuuuuaucucaaga

SEQ ID NO: 142036 - RNA, 32 nt, Homo Sapiens
uguugcccaggcuugccuggaacuccuagccu

SEQ ID NO: 142037 - RNA, 32 nt, Homo Sapiens
uggguccauacaccagcaaugaaggagauaga

SEQ ID NO: 142038 - RNA, 30 nt, Homo Sapiens
gaauuucacacaacauacaagaguaccauu

SEQ ID NO: 142039 - RNA, 32 nt, Homo Sapiens
auuucugggaggaugacgcagaugucugcugc

SEQ ID NO: 142040 - RNA, 32 nt, Homo Sapiens
ugcaucacaccuguaaucccagcacuuuggga

SEQ ID NO: 142041 - RNA, 32 nt, Homo Sapiens
uugaaagagauuagagaagaucaaaauaaaug

SEQ ID NO: 142042 - RNA, 32 nt, Homo Sapiens
ggccaccucaugaauccaacaagcauuagugu

SEQ ID NO: 142043 - RNA, 32 nt, Homo Sapiens
uugcggugaggcugcgcggggccgaggccgcc

SEQ ID NO: 142044 - RNA, 32 nt, Homo Sapiens
agaauggugcauacacaauguauuauuaucac

SEQ ID NO: 142045 - RNA, 32 nt, Homo Sapiens
ugaagauggcaaagccacaagauggaaagugc

SEQ ID NO: 142046 - RNA, 32 nt, Homo Sapiens
gaaaauuaguuaacaaauguuccuccucccuc

SEQ ID NO: 142047 - RNA, 32 nt, Homo Sapiens
gcagguaggaggcggugcgcgcggcccggcga

SEQ ID NO: 142048 - RNA, 32 nt, Homo Sapiens
agagcucccuccccggccuuguuuugcucugg

SEQ ID NO: 142049 - RNA, 32 nt, Homo Sapiens
agcucuagauaaaacuuucuuuucugaucaug

SEQ ID NO: 142050 - RNA, 32 nt, Homo Sapiens
gacuggugcccauggcugggggugcugaggag

SEQ ID NO: 142051 - RNA, 30 nt, Homo Sapiens
cucccaggcaggcuccgguucucuccuggg

SEQ ID NO: 142052 - RNA, 32 nt, Homo Sapiens
accuuuacauuugauccaacccuaucaaauaa

SEQ ID NO: 142053 - RNA, 32 nt, Homo Sapiens
acagagcugcugacccugcugaagaugccuag

SEQ ID NO: 142054 - RNA, 32 nt, Homo Sapiens
gacccaugacucccauauccacagccugucca

SEQ ID NO: 142055 - RNA, 32 nt, Homo Sapiens
cucuuuucuccucuugauccuuucaagcgagu

SEQ ID NO: 142056 - RNA, 32 nt, Homo Sapiens
gaauaguguuugucaacugucuuuucucuguc

SEQ ID NO: 142057 - RNA, 32 nt, Homo Sapiens
cagucgcuuuuucugcccacaaugauaaauua

SEQ ID NO: 142058 - RNA, 32 nt, Homo Sapiens
ugaauuguuuugcuguucuccccacuccauau

SEQ ID NO: 142059 - RNA, 32 nt, Homo Sapiens
gcaauacauccgccccuuacagcccucuggcu

SEQ ID NO: 142060 - RNA, 32 nt, Homo Sapiens
cccucagccugccugaagagaggaaacuggcg

SEQ ID NO: 142061 - RNA, 32 nt, Homo Sapiens
ggugcuggacuccaaggccggcuggggcucuc

SEQ ID NO: 142062 - RNA, 32 nt, Homo Sapiens
agggcgagaaaaguaaacguaguccuugcggc

SEQ ID NO: 142063 - RNA, 32 nt, Homo Sapiens
ggcauuuaaaaauuauuaucaaacaugcacau

SEQ ID NO: 142064 - RNA, 32 nt, Homo Sapiens
ggauuuuugagugauaaaacauuuacuaccuu

SEQ ID NO: 142065 - RNA, 32 nt, Homo Sapiens
gagaaaacaaacgaagaaaaacagguagauuu

SEQ ID NO: 142066 - RNA, 32 nt, Homo Sapiens
aagaagccugaaguagguaaagagugcuccuc

SEQ ID NO: 142067 - RNA, 32 nt, Homo Sapiens
cucccuccccucugcuggccagagggucugca

SEQ ID NO: 142068 - RNA, 31 nt, Homo Sapiens
guuugggaacgaggggaaaguucucagaacu

SEQ ID NO: 142069 - RNA, 32 nt, Homo Sapiens
uaaagauucaacaugcaagauuguacuuauug

SEQ ID NO: 142070 - RNA, 32 nt, Homo Sapiens
uguccagaaaggaggagaagggcuguugucug

SEQ ID NO: 142071 - RNA, 32 nt, Homo Sapiens
cgggcccggccgcugugucgcccugagcggag

SEQ ID NO: 142072 - RNA, 32 nt, Homo Sapiens
cucugcuagacaauugcggugagccagucucc

SEQ ID NO: 142073 - RNA, 32 nt, Homo Sapiens
auguggccugaagaucugugagugggacugcu

SEQ ID NO: 142074 - RNA, 32 nt, Homo Sapiens
ugccucaguccauuuuaaccuguagcaaccuu

SEQ ID NO: 142075 - RNA, 32 nt, Homo Sapiens
cucugauaauauuuauuuuaaaugucuguagu

SEQ ID NO: 142076 - RNA, 32 nt, Homo Sapiens
agcccugggaggagggcagaaggcuacgcagg

SEQ ID NO: 142077 - RNA, 32 nt, Homo Sapiens
gucccugcuauuggagucagugcuuguguuug

SEQ ID NO: 142078 - RNA, 32 nt, Homo Sapiens
uuaaaauuuccagaauuuuaagcaaaaagcau

SEQ ID NO: 142079 - RNA, 32 nt, Homo Sapiens
ccagugacucacucacagaaacuccaagacag

SEQ ID NO: 142080 - RNA, 32 nt, Homo Sapiens
ggggcuccuggcauuucuggcucuuuagccua

SEQ ID NO: 142081 - RNA, 32 nt, Homo Sapiens
agucacacaucuuuugugggaaugggaaagga

SEQ ID NO: 142082 - RNA, 32 nt, Homo Sapiens
cauacccugcuguuccucucccugccuguucu

SEQ ID NO: 142083 - RNA, 32 nt, Homo Sapiens
cgguugaaggauucugugugcugucggaccca

SEQ ID NO: 142084 - RNA, 32 nt, Homo Sapiens
cuccgcaaauaccacugagaggacacacucug

SEQ ID NO: 142085 - RNA, 32 nt, Homo Sapiens
gggaacgacacaccagcuccugggaucagacu

SEQ ID NO: 142086 - RNA, 32 nt, Homo Sapiens
cguuuccccucccccuccccucugaggagccu

SEQ ID NO: 142087 - RNA, 32 nt, Homo Sapiens
gagcgccggccgcaccaccgcccucuggccgu

SEQ ID NO: 142088 - RNA, 32 nt, Homo Sapiens
uuuccauauaucuauauccauaacucugauua

SEQ ID NO: 142089 - RNA, 32 nt, Homo Sapiens
gucucagggucccagggcuggugguugcuuug

SEQ ID NO: 142090 - RNA, 32 nt, Homo Sapiens
uccggggaacaaugacggggugggagagggga

SEQ ID NO: 142091 - RNA, 32 nt, Homo Sapiens
gccaugauguaauauaaggcugucuuggugua

SEQ ID NO: 142092 - RNA, 32 nt, Homo Sapiens
acgucccucagcgcccccgcgugcguccccac

SEQ ID NO: 142093 - RNA, 32 nt, Homo Sapiens
aaucaaucaaauucccuuaaauuuguauggca

SEQ ID NO: 142094 - RNA, 29 nt, Homo Sapiens
auaucaguggauuauaugccgaauugauu

SEQ ID NO: 142095 - RNA, 32 nt, Homo Sapiens
aaaauuauccaggcgugguggugcgugcuugu

SEQ ID NO: 142096 - RNA, 32 nt, Homo Sapiens
cuguucuuugaacaucucagaaaguuggucuu

SEQ ID NO: 142097 - RNA, 32 nt, Homo Sapiens
uugucagggguucuggaaugggaccaggggac

SEQ ID NO: 142098 - RNA, 32 nt, Homo Sapiens
ccccacuagcuacuccacgaagcccccgagcc

SEQ ID NO: 142099 - RNA, 32 nt, Homo Sapiens
caauauaggugugauggcuagaguagcagcug

SEQ ID NO: 142100 - RNA, 32 nt, Homo Sapiens
agaggccuccuggccucagggcaugcccugcc

SEQ ID NO: 142101 - RNA, 32 nt, Homo Sapiens
gaaauggcuccaaaauggcagcucaucagagg

SEQ ID NO: 142102 - RNA, 32 nt, Homo Sapiens
aacauguuuuaccugcagaaauucucucacaa

SEQ ID NO: 142103 - RNA, 32 nt, Homo Sapiens
auguguuguaaaaaugucuuucauguaaaaag

SEQ ID NO: 142104 - RNA, 32 nt, Homo Sapiens
ugauugcccccuugcuggccaagcccaggggc

SEQ ID NO: 142105 - RNA, 32 nt, Homo Sapiens
ugcgugaacagguguggaccgcaggaucucag

SEQ ID NO: 142106 - RNA, 32 nt, Homo Sapiens
ccauggcgggguggagacccggaaccagcagc

SEQ ID NO: 142107 - RNA, 32 nt, Homo Sapiens
aaggaauguggacuuuauuggaagcauggaug

SEQ ID NO: 142108 - RNA, 32 nt, Homo Sapiens
gacgagacagaucauucuaauuugagcagaag

SEQ ID NO: 142109 - RNA, 32 nt, Homo Sapiens
gggaugauagacacagaaguuuccaagcguau

SEQ ID NO: 142110 - RNA, 32 nt, Homo Sapiens
ccuuucuauggacuuuggauccuucugacuuu

SEQ ID NO: 142111 - RNA, 32 nt, Homo Sapiens
cuggagaaaaagagagugugaaagacugcuca

SEQ ID NO: 142112 - RNA, 32 nt, Homo Sapiens
auuugccccuuaggcccggcccgggccccucg

SEQ ID NO: 142113 - RNA, 32 nt, Homo Sapiens
cuauuaagaaugcugggggcugggcgcagugg

SEQ ID NO: 142114 - RNA, 32 nt, Homo Sapiens
aggguaucgggcgggggagccgccggcccucg

SEQ ID NO: 142115 - RNA, 32 nt, Homo Sapiens
ucuuagaauaguaggaacauuauacccaguuu

SEQ ID NO: 142116 - RNA, 32 nt, Homo Sapiens
ccaucaguaaagacauaagcaaauaaaugguc

SEQ ID NO: 142117 - RNA, 32 nt, Homo Sapiens
uuguuugugcauuuggggggaauucaucucuc

SEQ ID NO: 142118 - RNA, 32 nt, Homo Sapiens
auacuacuugcagacuaacaaguuugccugcc

SEQ ID NO: 142119 - RNA, 32 nt, Homo Sapiens
cccaggcgccgcgcggacccggcagcugucug

SEQ ID NO: 142120 - RNA, 32 nt, Homo Sapiens
uggcaccauggggauacagggauugcuacaau

SEQ ID NO: 142121 - RNA, 32 nt, Homo Sapiens
gagaaauggcgaaugucauacacaugagaugg

SEQ ID NO: 142122 - RNA, 32 nt, Homo Sapiens
uaccagauaaaauuauagaugggaaugaagcu

SEQ ID NO: 142123 - RNA, 32 nt, Homo Sapiens
uggaauuuugcucgucacccaggcuggagugc

SEQ ID NO: 142124 - RNA, 32 nt, Homo Sapiens
ucaaaagaaaaaggaaacaaaaauauauuaaa

SEQ ID NO: 142125 - RNA, 32 nt, Homo Sapiens
cccagaauggaauuuaaagauguucaguguug

SEQ ID NO: 142126 - RNA, 30 nt, Homo Sapiens
gaaauucaccaugucuauucucaagaucca

SEQ ID NO: 142127 - RNA, 32 nt, Homo Sapiens
aaugaaaauuguuuuucuacuucauuuuuccu

SEQ ID NO: 142128 - RNA, 32 nt, Homo Sapiens
gcccucccggccucgcuccccccggagugggg

SEQ ID NO: 142129 - RNA, 32 nt, Homo Sapiens
ugcaccggguggccugcaagauugccggggua

SEQ ID NO: 142130 - RNA, 32 nt, Homo Sapiens
cauuugcgcaggguggugguauucugucauuu

SEQ ID NO: 142131 - RNA, 32 nt, Homo Sapiens
ggaaaagggaaggaggagacugagugauuaag

SEQ ID NO: 142132 - RNA, 32 nt, Homo Sapiens
ccccugcccuccccuccccaacuacccccggu

SEQ ID NO: 142133 - RNA, 32 nt, Homo Sapiens
agaagauuuccuggcucuggcuuuuaguaauu

SEQ ID NO: 142134 - RNA, 30 nt, Homo Sapiens
ccuuuggcaagugcgggggaaaugaaauga

SEQ ID NO: 142135 - RNA, 32 nt, Homo Sapiens
aaacuccaugcaaaccaugccuuuuuuuuaag

SEQ ID NO: 142136 - RNA, 32 nt, Homo Sapiens
cuugggaccacaguuacagaaaaaauguaaac

SEQ ID NO: 142137 - RNA, 32 nt, Homo Sapiens
gaacaaagaauuuguccuguauggaaaacggg

SEQ ID NO: 142138 - RNA, 28 nt, Homo Sapiens
cagcuggcuguuaccaggaugugacauc

SEQ ID NO: 142139 - RNA, 32 nt, Homo Sapiens
uagucagaggugaauaaaauuauuuugaauaa

SEQ ID NO: 142140 - RNA, 32 nt, Homo Sapiens
agccccuguggccucuuggagaggcgagccag

SEQ ID NO: 142141 - RNA, 28 nt, Homo Sapiens
cacuggggcucaggaccaagggaggcag

SEQ ID NO: 142142 - RNA, 32 nt, Homo Sapiens
uuuucaugucuuauuucuuuaaagagcugcuu

SEQ ID NO: 142143 - RNA, 32 nt, Homo Sapiens
uuuaagauuuuuguaagguguuguguacauuu

SEQ ID NO: 142144 - RNA, 32 nt, Homo Sapiens
cugcuaacugugcagagagaggugauagucuc

SEQ ID NO: 142145 - RNA, 32 nt, Homo Sapiens
cggcuccgccccugccccccagcccucgugug

SEQ ID NO: 142146 - RNA, 32 nt, Homo Sapiens
cgucagaccugccuccacgugccugugggaag

SEQ ID NO: 142147 - RNA, 32 nt, Homo Sapiens
auaaugccuccuccuccugccauucucucucc

SEQ ID NO: 142148 - RNA, 32 nt, Homo Sapiens
uuggugccuuuucucucuucuuuaccugagua

SEQ ID NO: 142149 - RNA, 32 nt, Homo Sapiens
cuugugggaaacugaggcccagcuuggggaag

SEQ ID NO: 142150 - RNA, 32 nt, Homo Sapiens
ggggagagcggguguuugaaggcuccgcggac

SEQ ID NO: 142151 - RNA, 32 nt, Homo Sapiens
agaaucaggcgcccagacaccaugucacaacc

SEQ ID NO: 142152 - RNA, 32 nt, Homo Sapiens
ggacaaguaguuauggcuaaggacaugaaauu

SEQ ID NO: 142153 - RNA, 32 nt, Homo Sapiens
cuguguuagggcuggguccgcgggaggcugcc

SEQ ID NO: 142154 - RNA, 32 nt, Homo Sapiens
ccaccagcacgcgccgcuucugagagacacca

SEQ ID NO: 142155 - RNA, 32 nt, Homo Sapiens
aucuuggccccggccaccuuccccagggaaac

SEQ ID NO: 142156 - RNA, 32 nt, Homo Sapiens
acguccgagcagccgccuugacuggggaaggg

SEQ ID NO: 142157 - RNA, 32 nt, Homo Sapiens
uccugcaacacuuuucaauucuuguagaaggu

SEQ ID NO: 142158 - RNA, 32 nt, Homo Sapiens
ggugugggaggaggaguguugaccuuggacgc

SEQ ID NO: 142159 - RNA, 32 nt, Homo Sapiens
ugagccaccgcgccuggccugaugccugugug

SEQ ID NO: 142160 - RNA, 32 nt, Homo Sapiens
cccugguuuuaucaucucuacucuguuucagc

SEQ ID NO: 142161 - RNA, 32 nt, Homo Sapiens
cuguggccuuggagcugaacgagaugauucag

SEQ ID NO: 142162 - RNA, 32 nt, Homo Sapiens
ccaaaaagugauaaaaccaaaauaucacugac

SEQ ID NO: 142163 - RNA, 32 nt, Homo Sapiens
gaugcacagaagcuccuagaaaaaaugggugg

SEQ ID NO: 142164 - RNA, 32 nt, Homo Sapiens
aggaagaaacgcaaaguugucaagaaccaagu

SEQ ID NO: 142165 - RNA, 32 nt, Homo Sapiens
cggccuggcugggccuggcuuuccagacuccu

SEQ ID NO: 142166 - RNA, 32 nt, Homo Sapiens
caugucccgcccagccccgcccccaacccaag

SEQ ID NO: 142167 - RNA, 32 nt, Homo Sapiens
augccggcccggcggcugcugcugcugcugac

SEQ ID NO: 142168 - RNA, 32 nt, Homo Sapiens
ggauauuuuuuacuucacauugaauauagcca

SEQ ID NO: 142169 - RNA, 32 nt, Homo Sapiens
cgaggccggccgcgaagaugccaguggcggug

SEQ ID NO: 142170 - RNA, 32 nt, Homo Sapiens
cugccgccauacugaggcugagcacagauuug

SEQ ID NO: 142171 - RNA, 32 nt, Homo Sapiens
acggacagccucuggagcucucgucugguggg

SEQ ID NO: 142172 - RNA, 32 nt, Homo Sapiens
aacuuuucacagugaagugccuuuuuccuaga

SEQ ID NO: 142173 - RNA, 32 nt, Homo Sapiens
uauguuacugaauuugaaacugaccuuuuuuc

SEQ ID NO: 142174 - RNA, 27 nt, Homo Sapiens
acauggcgaagguggagcagguccuga

SEQ ID NO: 142175 - RNA, 32 nt, Homo Sapiens
aacaagagaagcugaggcagagcugcggcuaa

SEQ ID NO: 142176 - RNA, 32 nt, Homo Sapiens
cuccuucccuggaugcugugcuguucuccucu

SEQ ID NO: 142177 - RNA, 32 nt, Homo Sapiens
ccgcucucugcucugggccccgaggguccgcu

SEQ ID NO: 142178 - RNA, 32 nt, Homo Sapiens
acccagauuuaaaagacauaagguggauaauu

SEQ ID NO: 142179 - RNA, 32 nt, Homo Sapiens
cuggggcccggguugggggcagaaaugagccu

SEQ ID NO: 142180 - RNA, 32 nt, Homo Sapiens
ugagcagaauuuugaugggacaucagaugaag

SEQ ID NO: 142181 - RNA, 32 nt, Homo Sapiens
cccugaguacuacgagugagugaggcugggag

SEQ ID NO: 142182 - RNA, 32 nt, Homo Sapiens
cucugaauuucugaugcacagacacuguggga

SEQ ID NO: 142183 - RNA, 32 nt, Homo Sapiens
uauuucauauauauuuuguacauuuuguauuu

SEQ ID NO: 142184 - RNA, 32 nt, Homo Sapiens
gcugaaagaaugauuuagaaaacuagugauac

SEQ ID NO: 142185 - RNA, 32 nt, Homo Sapiens
uuuguuuuuacuacuuacuagcuggugaccac

SEQ ID NO: 142186 - RNA, 32 nt, Homo Sapiens
uggagcugggcucgcgccggggcucugggugu

SEQ ID NO: 142187 - RNA, 32 nt, Homo Sapiens
agcgccuccaccuucagauguaccuccagccu

SEQ ID NO: 142188 - RNA, 32 nt, Homo Sapiens
cagagguggggggacauaucacagccucugcc

SEQ ID NO: 142189 - RNA, 32 nt, Homo Sapiens
ccuuggggaaauguggagaacauucaaucuug

SEQ ID NO: 142190 - RNA, 32 nt, Homo Sapiens
uuguccuuuguuccuucauguauuauauugau

SEQ ID NO: 142191 - RNA, 32 nt, Homo Sapiens
aacaggaaauuaaacacugcaaaaggaguguu

SEQ ID NO: 142192 - RNA, 32 nt, Homo Sapiens
cagaaaguguaaagcuaucuccauuagugaag

SEQ ID NO: 142193 - RNA, 32 nt, Homo Sapiens
gagagcgacggcggggggcgggcgguggaccc

SEQ ID NO: 142194 - RNA, 32 nt, Homo Sapiens
gguucccccgcugagaucuuuccuccugguua

SEQ ID NO: 142195 - RNA, 31 nt, Homo Sapiens
gcuacuacaaagaaaaguggcugaugauaag

SEQ ID NO: 142196 - RNA, 31 nt, Homo Sapiens
ggucccucacggaggaaauugucuucuccuc

SEQ ID NO: 142197 - RNA, 32 nt, Homo Sapiens
gcccgaaguccgcuagagcacagucccaucca

SEQ ID NO: 142198 - RNA, 32 nt, Homo Sapiens
gaagcacaggacucaccccaggggucucacag

SEQ ID NO: 142199 - RNA, 32 nt, Homo Sapiens
ggagcagaggccaggcugcugcucugggagau

SEQ ID NO: 142200 - RNA, 32 nt, Homo Sapiens
ucccgcguucccucggcggcugccggcguagu

SEQ ID NO: 142201 - RNA, 32 nt, Homo Sapiens
aaauaauuacauuuuccaacauaaaugugcca

SEQ ID NO: 142202 - RNA, 32 nt, Homo Sapiens
cuccaggccucagccaccugcccgccacaucc

SEQ ID NO: 142203 - RNA, 31 nt, Homo Sapiens
gcugggcuccuggaugcuccaaggcccugcu

SEQ ID NO: 142204 - RNA, 32 nt, Homo Sapiens
ugggguagggugggggcgugcgagguuggauu

SEQ ID NO: 142205 - RNA, 32 nt, Homo Sapiens
cagcucacugcaacuucugccuccuggguuca

SEQ ID NO: 142206 - RNA, 32 nt, Homo Sapiens
cggcucacugcaacuucugccuccuagguuca

SEQ ID NO: 142207 - RNA, 32 nt, Homo Sapiens
caggcgcccucccuccgcgcccucccuccccc

SEQ ID NO: 142208 - RNA, 32 nt, Homo Sapiens
cauagucauuuucuguaucuuuucaccucaca

SEQ ID NO: 142209 - RNA, 32 nt, Homo Sapiens
gaucauacagaaacagaagaaaauuacgaggu

SEQ ID NO: 142210 - RNA, 32 nt, Homo Sapiens
gcuccgggucauuccuggggugggaaucggau

SEQ ID NO: 142211 - RNA, 32 nt, Homo Sapiens
uauaaauuaacauaaaucaugcaugucuguuu

SEQ ID NO: 142212 - RNA, 32 nt, Homo Sapiens
ugagggguggggccuggcagggcuugcuugag

SEQ ID NO: 142213 - RNA, 32 nt, Homo Sapiens
uggguugggagacggggcuggcacggaauggu

SEQ ID NO: 142214 - RNA, 32 nt, Homo Sapiens
aaguucauuuuuuaacuugaugaugaaugaag

SEQ ID NO: 142215 - RNA, 32 nt, Homo Sapiens
uuuaaugugaguuugugccuuuuugucucaau

SEQ ID NO: 142216 - RNA, 32 nt, Homo Sapiens
guguacacaugccuccuagaaacuacacuaug

SEQ ID NO: 142217 - RNA, 32 nt, Homo Sapiens
acacagucaucuccuuggugaaaucuaauccg

SEQ ID NO: 142218 - RNA, 32 nt, Homo Sapiens
aguuauauuuaaugguuauuuucaucaccaga

SEQ ID NO: 142219 - RNA, 32 nt, Homo Sapiens
uuuuucgagacacucugucacccaggcuggag

SEQ ID NO: 142220 - RNA, 32 nt, Homo Sapiens
acgggacaaaaauuuucuugcugaugggucaa

SEQ ID NO: 142221 - RNA, 32 nt, Homo Sapiens
cccuccccagaccgccugggccgcccggaugu

SEQ ID NO: 142222 - RNA, 32 nt, Homo Sapiens
cgugagagaaaacagcugguguuuaugaagag

SEQ ID NO: 142223 - RNA, 32 nt, Homo Sapiens
aggaggcucuacaggagaaucauuuccuuguc

SEQ ID NO: 142224 - RNA, 32 nt, Homo Sapiens
agaugggcugggaggggagaucccggagguaa

SEQ ID NO: 142225 - RNA, 32 nt, Homo Sapiens
uuucaugcuguaaagucaaauauuugauaucc

SEQ ID NO: 142226 - RNA, 32 nt, Homo Sapiens
cuaacuuauuuuuauuuuuuauggagaugggg

SEQ ID NO: 142227 - RNA, 32 nt, Homo Sapiens
uugcagauagucaucaguggcucuguaaaaac

SEQ ID NO: 142228 - RNA, 32 nt, Homo Sapiens
ggccaggucaacauggcaccuuaacuuauuuu

SEQ ID NO: 142229 - RNA, 32 nt, Homo Sapiens
ccccacccagcccacguguccaaauacacucc

SEQ ID NO: 142230 - RNA, 32 nt, Homo Sapiens
augcccucaccaucuuccaguccaucgaauau

SEQ ID NO: 142231 - RNA, 32 nt, Homo Sapiens
uucugacccaagugaaaaugcucagaauuuca

SEQ ID NO: 142232 - RNA, 32 nt, Homo Sapiens
guuggagaggggcugccaagcaggggcucaga

SEQ ID NO: 142233 - RNA, 32 nt, Homo Sapiens
aagagacaaaaauaaaauaggaauauaaauua

SEQ ID NO: 142234 - RNA, 32 nt, Homo Sapiens
ccuuacacagagcuauuaaccuagggaaggcu

SEQ ID NO: 142235 - RNA, 32 nt, Homo Sapiens
cuagcugccgugcauuugccaggcuggguuac

SEQ ID NO: 142236 - RNA, 32 nt, Homo Sapiens
aauuuagaaaaauuauacuaaagugagaugca

SEQ ID NO: 142237 - RNA, 32 nt, Homo Sapiens
cuccugucggauuuuuaauuucugcgcacccc

SEQ ID NO: 142238 - RNA, 32 nt, Homo Sapiens
accacucagugauuacugucaaggcugcuuac

SEQ ID NO: 142239 - RNA, 32 nt, Homo Sapiens
ggaccccggccgcgcauuccauucugccgaca

SEQ ID NO: 142240 - RNA, 32 nt, Homo Sapiens
auaaaacuaaaauaaaugucuauaaugaaacu

SEQ ID NO: 142241 - RNA, 32 nt, Homo Sapiens
ggcauccuuuugcucuguccuccccaccccga

SEQ ID NO: 142242 - RNA, 32 nt, Homo Sapiens
cugcccuuuugaagcaggacuggcucacucug

SEQ ID NO: 142243 - RNA, 32 nt, Homo Sapiens
uuucugcuuuuauauugaucugcuuucauagc

SEQ ID NO: 142244 - RNA, 32 nt, Homo Sapiens
agaguguccacccaccagggcaggaggccggg

SEQ ID NO: 142245 - RNA, 32 nt, Homo Sapiens
cuuuuuucuaacugcagcauauugugguaaau

SEQ ID NO: 142246 - RNA, 32 nt, Homo Sapiens
gaugggcugcagaauggggucuggccaccugg

SEQ ID NO: 142247 - RNA, 32 nt, Homo Sapiens
agcacccuuuacuccuucugaaccaucaugcc

SEQ ID NO: 142248 - RNA, 32 nt, Homo Sapiens
guauucugaggauguuaaagacuuuguuaaau

SEQ ID NO: 142249 - RNA, 32 nt, Homo Sapiens
ggauguuacacugaauccuuaaagaauaaaag

SEQ ID NO: 142250 - RNA, 32 nt, Homo Sapiens
uuuauugcuuauuacuuucuuaauuuuacagg

SEQ ID NO: 142251 - RNA, 32 nt, Homo Sapiens
aacaugagaagugugauacaugugaacccaac

SEQ ID NO: 142252 - RNA, 32 nt, Homo Sapiens
caggggcguagugggauauggccaacucgggc

SEQ ID NO: 142253 - RNA, 32 nt, Homo Sapiens
gaggcccagagugggcaaagggcuugccaagg

SEQ ID NO: 142254 - RNA, 32 nt, Homo Sapiens
ccagugcuuacagguuaaugcauguuaaugaa

SEQ ID NO: 142255 - RNA, 32 nt, Homo Sapiens
uuugucucccugagccccuuggcacuuaucac

SEQ ID NO: 142256 - RNA, 32 nt, Homo Sapiens
gaaggcuggugauggaucugcugcuccugccg

SEQ ID NO: 142257 - RNA, 32 nt, Homo Sapiens
cuguguccuuggaggugaccagggccacugca

SEQ ID NO: 142258 - RNA, 32 nt, Homo Sapiens
gacagcagucuagaagcagcagcugggccucu

SEQ ID NO: 142259 - RNA, 32 nt, Homo Sapiens
augucaguauguuuauacuaaccuucaugcuu

SEQ ID NO: 142260 - RNA, 32 nt, Homo Sapiens
cuggggguagccuggaugugggcgaaguccac

SEQ ID NO: 142261 - RNA, 32 nt, Homo Sapiens
ucuuguaguuucuuuucuuaauugucauuuuu

SEQ ID NO: 142262 - RNA, 32 nt, Homo Sapiens
augaaacggcuuucccggggccaaacggugga

SEQ ID NO: 142263 - RNA, 32 nt, Homo Sapiens
auucucucauagaacaaugaucuguuuuacag

SEQ ID NO: 142264 - RNA, 32 nt, Homo Sapiens
auaaccuaagaaacagaauggaauugaaucau

SEQ ID NO: 142265 - RNA, 32 nt, Homo Sapiens
gugcacugcugccuguacuucaucucacccuu

SEQ ID NO: 142266 - RNA, 32 nt, Homo Sapiens
aagaggaaaagccuaaagaugacacaccuucc

SEQ ID NO: 142267 - RNA, 32 nt, Homo Sapiens
ucccauuuaagugucugaaucgagugagacaa

SEQ ID NO: 142268 - RNA, 32 nt, Homo Sapiens
cgccgccgcgcgcggauucugcuucucagaag

SEQ ID NO: 142269 - RNA, 28 nt, Homo Sapiens
cugaaaaugugucacauuauaaacaaua

SEQ ID NO: 142270 - RNA, 32 nt, Homo Sapiens
aacaggauuaagaaagggcuugaaagaagcuu

SEQ ID NO: 142271 - RNA, 32 nt, Homo Sapiens
agaggcuccccgugcaccuccucgcugugguc

SEQ ID NO: 142272 - RNA, 32 nt, Homo Sapiens
aaguacaaaccagauuuagagaauugagugcu

SEQ ID NO: 142273 - RNA, 32 nt, Homo Sapiens
cucccauguuccauguuuccgauuuaaaugag

SEQ ID NO: 142274 - RNA, 32 nt, Homo Sapiens
cuuaguuuuccuaaaugucuacaguggacgcc

SEQ ID NO: 142275 - RNA, 32 nt, Homo Sapiens
cuuccacaaccuggucuugacucgucugcuga

SEQ ID NO: 142276 - RNA, 32 nt, Homo Sapiens
augacacaauauaucuauauagccucacugua

SEQ ID NO: 142277 - RNA, 32 nt, Homo Sapiens
uaguggccaccauagauugaacaguagaacaa

SEQ ID NO: 142278 - RNA, 32 nt, Homo Sapiens
aaugucaggacauuccuuuuccaauugugugu

SEQ ID NO: 142279 - RNA, 32 nt, Homo Sapiens
agcgugugcagggcaagugccgucacugggaa

SEQ ID NO: 142280 - RNA, 32 nt, Homo Sapiens
aacaaaaacaaauagccaucugcuaucagcau

SEQ ID NO: 142281 - RNA, 32 nt, Homo Sapiens
caaaagugaagauuuugugaggaauaagugca

SEQ ID NO: 142282 - RNA, 32 nt, Homo Sapiens
ucuggcuggguggaagaaggguguggaaggua

SEQ ID NO: 142283 - RNA, 32 nt, Homo Sapiens
cuaugucuaucuaaaaaucaagucucggcagu

SEQ ID NO: 142284 - RNA, 32 nt, Homo Sapiens
gguguucucucuguggccaccaucaaguuuga

SEQ ID NO: 142285 - RNA, 32 nt, Homo Sapiens
cagagagcucugcggcccgucccacacgcagu

SEQ ID NO: 142286 - RNA, 32 nt, Homo Sapiens
acgcgucgcccaagcgaacccugcgucgagga

SEQ ID NO: 142287 - RNA, 32 nt, Homo Sapiens
ucagcugcugucacaaauacccaucuuaggau

SEQ ID NO: 142288 - RNA, 32 nt, Homo Sapiens
gagcauugucuggguguuucugcgcuugaccc

SEQ ID NO: 142289 - RNA, 32 nt, Homo Sapiens
acugcucugaugccgaaggggaggcagaaagu

SEQ ID NO: 142290 - RNA, 32 nt, Homo Sapiens
ggaaaaggcagaccgugugagggggccugugg

SEQ ID NO: 142291 - RNA, 32 nt, Homo Sapiens
aagucaacccucauagcacaccagagaacuca

SEQ ID NO: 142292 - RNA, 32 nt, Homo Sapiens
ggcucaaaguuccaaugaaggacagggagcaa

SEQ ID NO: 142293 - RNA, 32 nt, Homo Sapiens
uccacugggcucucuuggccauccgcugccuu

SEQ ID NO: 142294 - RNA, 32 nt, Homo Sapiens
agcugcugccccagcucuggaacucccagacg

SEQ ID NO: 142295 - RNA, 32 nt, Homo Sapiens
augucaaagagaugagagaguguuauuucuug

SEQ ID NO: 142296 - RNA, 32 nt, Homo Sapiens
cuccucuuugucauacugcacauauaaaacgu

SEQ ID NO: 142297 - RNA, 32 nt, Homo Sapiens
gacagucauagauggugugacaguguuuaaac

SEQ ID NO: 142298 - RNA, 32 nt, Homo Sapiens
ugcucgccgcagccgccuccgccgcgcgccuc

SEQ ID NO: 142299 - RNA, 29 nt, Homo Sapiens
aagaugucauaugguagagagagccugug

SEQ ID NO: 142300 - RNA, 32 nt, Homo Sapiens
uauuuuaguguuucauuuaugugcggucucca

SEQ ID NO: 142301 - RNA, 32 nt, Homo Sapiens
uuguugaaauguuuaaauuugcugauaacaaa

SEQ ID NO: 142302 - RNA, 32 nt, Homo Sapiens
uuugcccaguguuugugcaaggauggaguggg

SEQ ID NO: 142303 - RNA, 32 nt, Homo Sapiens
ccccgccgaggccugacccccggagccgggac

SEQ ID NO: 142304 - RNA, 32 nt, Homo Sapiens
agucacugacauucuuuagaguggguugggug

SEQ ID NO: 142305 - RNA, 32 nt, Homo Sapiens
cgacccccauccccgucccccaucuccguccc

SEQ ID NO: 142306 - RNA, 32 nt, Homo Sapiens
auucuucucuacagcauccauucauauauuca

SEQ ID NO: 142307 - RNA, 32 nt, Homo Sapiens
uggugaaaaaauaaauuucugucgucuuaagc

SEQ ID NO: 142308 - RNA, 32 nt, Homo Sapiens
ugguggccaaacugagggcaucagcaguauug

SEQ ID NO: 142309 - RNA, 32 nt, Homo Sapiens
ucucaagaucuaucuggacagacggccagaga

SEQ ID NO: 142310 - RNA, 32 nt, Homo Sapiens
caggagauucaugcuugcucugcacagcaggg

SEQ ID NO: 142311 - RNA, 32 nt, Homo Sapiens
guuucagcgucgucgccuggagcggcgguuua

SEQ ID NO: 142312 - RNA, 32 nt, Homo Sapiens
ucuucugguuucuuccucuccgcugggaguaa

SEQ ID NO: 142313 - RNA, 32 nt, Homo Sapiens
gaggcugcagugagucgagaucgugccacugc

SEQ ID NO: 142314 - RNA, 32 nt, Homo Sapiens
uuuccuuuuuaauuucagcuuuaucugaauuu

SEQ ID NO: 142315 - RNA, 32 nt, Homo Sapiens
ccgagugcccugggggucaccccuccccuccc

SEQ ID NO: 142316 - RNA, 32 nt, Homo Sapiens
gagggcagggaguuugggcuugguuuugaacu

SEQ ID NO: 142317 - RNA, 32 nt, Homo Sapiens
ugaaagaagagauagaacuuagcaggcagacu

SEQ ID NO: 142318 - RNA, 32 nt, Homo Sapiens
ugguuuaaacaaacagaagauuguuuuuccac

SEQ ID NO: 142319 - RNA, 32 nt, Homo Sapiens
acggccagcacucggcuccgggcccgccccuc

SEQ ID NO: 142320 - RNA, 32 nt, Homo Sapiens
ucaaguuugacuguuuuaaugggguuucaccc

SEQ ID NO: 142321 - RNA, 32 nt, Homo Sapiens
cgcuugcuggaacacaggggccuuuuaaguug

SEQ ID NO: 142322 - RNA, 32 nt, Homo Sapiens
uuaaaucugucuucugcucaguuucugguccc

SEQ ID NO: 142323 - RNA, 32 nt, Homo Sapiens
ccugguggacgaagacaggcagccaggggcug

SEQ ID NO: 142324 - RNA, 32 nt, Homo Sapiens
uagcauuuggggauuuggguuagaugaucuaa

SEQ ID NO: 142325 - RNA, 32 nt, Homo Sapiens
ucuguggguucuggcaccaccugagcccacug

SEQ ID NO: 142326 - RNA, 32 nt, Homo Sapiens
ccgagugcuguguucuuccucagucuggcugu

SEQ ID NO: 142327 - RNA, 32 nt, Homo Sapiens
gguucggaaaucaaucgaaaauaauccaugca

SEQ ID NO: 142328 - RNA, 32 nt, Homo Sapiens
uaugugaugguuccuuaccugugcagggaaaa

SEQ ID NO: 142329 - RNA, 32 nt, Homo Sapiens
gucugugccuggagagcuaauagugcauuagu

SEQ ID NO: 142330 - RNA, 32 nt, Homo Sapiens
uuguuuucuucuuuuucuuuuccuuuaucugu

SEQ ID NO: 142331 - RNA, 28 nt, Homo Sapiens
gcagagaggggcagcaggaugaaugugg

SEQ ID NO: 142332 - RNA, 32 nt, Homo Sapiens
cagcugcggggcaagauggaggcgcugauuuu

SEQ ID NO: 142333 - RNA, 32 nt, Homo Sapiens
gaagccucggccgccaucccugcccgauuauc

SEQ ID NO: 142334 - RNA, 32 nt, Homo Sapiens
ucagagucuuuuuggccugaugaugacucuug

SEQ ID NO: 142335 - RNA, 32 nt, Homo Sapiens
aucaggcaguugcagaaugacugcaugaggcu

SEQ ID NO: 142336 - RNA, 32 nt, Homo Sapiens
gccccagccccggcccccagcagggaagggau

SEQ ID NO: 142337 - RNA, 32 nt, Homo Sapiens
ugguggcuucugagaggugacucauuguggac

SEQ ID NO: 142338 - RNA, 32 nt, Homo Sapiens
guuagaugugauuauuugauaauguuagucca

SEQ ID NO: 142339 - RNA, 32 nt, Homo Sapiens
ucuguauguugacuuugcauuuccugauuuaa

SEQ ID NO: 142340 - RNA, 32 nt, Homo Sapiens
augguuuagaaauggaaaaauguuacaaaugu

SEQ ID NO: 142341 - RNA, 30 nt, Homo Sapiens
accagaugcaacacucucaccugcaaccac

SEQ ID NO: 142342 - RNA, 32 nt, Homo Sapiens
aacuugcuguugauuucuuuugagggguaaaa

SEQ ID NO: 142343 - RNA, 32 nt, Homo Sapiens
ccccaaguauucaaauccaaugaauggacaga

SEQ ID NO: 142344 - RNA, 32 nt, Homo Sapiens
ccacaagaacagagaauuguuuguccauggcu

SEQ ID NO: 142345 - RNA, 32 nt, Homo Sapiens
uuacgccaugucaccgagccccauugauuccc

SEQ ID NO: 142346 - RNA, 32 nt, Homo Sapiens
cccucuuucuucagcccucccuuuacuccggu

SEQ ID NO: 142347 - RNA, 32 nt, Homo Sapiens
agcugggaagcuugggacucucgucugcacug

SEQ ID NO: 142348 - RNA, 32 nt, Homo Sapiens
aaagcuuuuuaaaaacuguuauuuaauaccaa

SEQ ID NO: 142349 - RNA, 32 nt, Homo Sapiens
gcuguccugcgguuugaggaccaucuaggugg

SEQ ID NO: 142350 - RNA, 32 nt, Homo Sapiens
ugcuccgugcuguucgggaauuguuuuaugua

SEQ ID NO: 142351 - RNA, 32 nt, Homo Sapiens
ccuauuugugacuuuuacuaauaaaaauaaau

SEQ ID NO: 142352 - RNA, 32 nt, Homo Sapiens
ccauacgaugguuauggacagcagccagaaag

SEQ ID NO: 142353 - RNA, 32 nt, Homo Sapiens
uuacacggccccaauaaagccugcucuggccu

SEQ ID NO: 142354 - RNA, 32 nt, Homo Sapiens
ugcucaaauaaugcuaauugauaauauaaaua

SEQ ID NO: 142355 - RNA, 32 nt, Homo Sapiens
cugaggcugcgauggcggcggcaggccggggu

SEQ ID NO: 142356 - RNA, 32 nt, Homo Sapiens
uguguuaaaaauuugaccauauuagauaaauu

SEQ ID NO: 142357 - RNA, 32 nt, Homo Sapiens
uguucaacuugaaaaugagcuggagaauuuua

SEQ ID NO: 142358 - RNA, 32 nt, Homo Sapiens
cucuguccuccuuuucuucucuauagccccga

SEQ ID NO: 142359 - RNA, 32 nt, Homo Sapiens
gagcaguaaaacugaugacauaaagaaauuaa

SEQ ID NO: 142360 - RNA, 32 nt, Homo Sapiens
aguuaacuuuguaucuggcauuauuuuaauua

SEQ ID NO: 142361 - RNA, 32 nt, Homo Sapiens
gauuaggaaauucauguaagacuuuuuaagag

SEQ ID NO: 142362 - RNA, 32 nt, Homo Sapiens
cacgcccuauuucagucuuuuacauuuguucu

SEQ ID NO: 142363 - RNA, 32 nt, Homo Sapiens
ggcaaguucaggugcucugcugggcucagagg

SEQ ID NO: 142364 - RNA, 32 nt, Homo Sapiens
gcccugcugaggaugcccaagaugccagaauu

SEQ ID NO: 142365 - RNA, 32 nt, Homo Sapiens
gggguaaggaaugcaccgucagggucucucac

SEQ ID NO: 142366 - RNA, 32 nt, Homo Sapiens
ucagcacugaugggaggcuggugcccaagcug

SEQ ID NO: 142367 - RNA, 32 nt, Homo Sapiens
agcacucaccuuaacuuaaauguaauguuuua

SEQ ID NO: 142368 - RNA, 32 nt, Homo Sapiens
aguaaccccaguguuaucugcagaccaucuga

SEQ ID NO: 142369 - RNA, 32 nt, Homo Sapiens
uacaguuccagauggguuauugcagauuaaca

SEQ ID NO: 142370 - RNA, 32 nt, Homo Sapiens
cuguacauuguuagcucugguuauuuuucucu

SEQ ID NO: 142371 - RNA, 32 nt, Homo Sapiens
cccuccccguagccucgcggcgcggccucgcc

SEQ ID NO: 142372 - RNA, 32 nt, Homo Sapiens
ugccuccgccgggcgcccaggguguagcggag

SEQ ID NO: 142373 - RNA, 32 nt, Homo Sapiens
ccgcuccggucccaggagggauggaaucugcu

SEQ ID NO: 142374 - RNA, 32 nt, Homo Sapiens
gauuuuggguucaaauaucuuucuauauuaaa

SEQ ID NO: 142375 - RNA, 32 nt, Homo Sapiens
cuggccuuuucuccugguuagaggaggaagcg

SEQ ID NO: 142376 - RNA, 32 nt, Homo Sapiens
uacuauucaaggaaacuggguagaggcuacau

SEQ ID NO: 142377 - RNA, 32 nt, Homo Sapiens
acauucccacauugcauucugcacgggcauug

SEQ ID NO: 142378 - RNA, 32 nt, Homo Sapiens
accaaauaaagagcuuccacuggaggcuugua

SEQ ID NO: 142379 - RNA, 32 nt, Homo Sapiens
aaagaaauuaguuuuucuuuuucuuuuuucuu

SEQ ID NO: 142380 - RNA, 30 nt, Homo Sapiens
ccugggcccauggcggcgccggcguuggca

SEQ ID NO: 142381 - RNA, 32 nt, Homo Sapiens
accgagaucaguauuuaacuaauuauaccagu

SEQ ID NO: 142382 - RNA, 32 nt, Homo Sapiens
acgccaggcuaauguuuuuguauuuuuaauag

SEQ ID NO: 142383 - RNA, 32 nt, Homo Sapiens
uuuguggaacgcuuuuucuccaucuacuaagg

SEQ ID NO: 142384 - RNA, 32 nt, Homo Sapiens
uagagauguaaaaauaagaaugaauguggcgc

SEQ ID NO: 142385 - RNA, 32 nt, Homo Sapiens
gcauacggggcgacggcgaaacaaaggguggu

SEQ ID NO: 142386 - RNA, 32 nt, Homo Sapiens
uucaaagauaaugugggugcuagaugcagugg

SEQ ID NO: 142387 - RNA, 32 nt, Homo Sapiens
uucuugcuuucauuuuaauuaguccaaaauua

SEQ ID NO: 142388 - RNA, 32 nt, Homo Sapiens
uagauggccuuaugaaacucuuucuaaccucu

SEQ ID NO: 142389 - RNA, 32 nt, Homo Sapiens
caucuggagacugggcauccugagagauuuuc

SEQ ID NO: 142390 - RNA, 32 nt, Homo Sapiens
cccuucugcccccaagauguggcacagcgucg

SEQ ID NO: 142391 - RNA, 29 nt, Homo Sapiens
auuucuauauguauaguguaauagccuuu

SEQ ID NO: 142392 - RNA, 28 nt, Homo Sapiens
ugugagauggauuaacaugagaagugcu

SEQ ID NO: 142393 - RNA, 32 nt, Homo Sapiens
cacgcugagaaccuggaggggagacugcagag

SEQ ID NO: 142394 - RNA, 32 nt, Homo Sapiens
ccgggguguugaauguuuguuuucuaaaggag

SEQ ID NO: 142395 - RNA, 32 nt, Homo Sapiens
uguauuugcccccuuuuuuuuauaaaagguga

SEQ ID NO: 142396 - RNA, 32 nt, Homo Sapiens
auuuguuucuuuucuuuuuuaaggagaaaaaa

SEQ ID NO: 142397 - RNA, 32 nt, Homo Sapiens
uucuuacauaugauccaguuaacaucaucacu

SEQ ID NO: 142398 - RNA, 31 nt, Homo Sapiens
gcuccagugggacagcccagagccuggcugc

SEQ ID NO: 142399 - RNA, 32 nt, Homo Sapiens
uucuauuuugccacacacuuggagacaauaag

SEQ ID NO: 142400 - RNA, 32 nt, Homo Sapiens
ugcucccuaguggcccagggccccagggaaua

SEQ ID NO: 142401 - RNA, 32 nt, Homo Sapiens
acugucaggccgaggcggcugcggcggcgaau

SEQ ID NO: 142402 - RNA, 30 nt, Homo Sapiens
uugggaguguguggcaugcauccucaucau

SEQ ID NO: 142403 - RNA, 32 nt, Homo Sapiens
cucucacacacacacacacacacacacacaca

SEQ ID NO: 142404 - RNA, 32 nt, Homo Sapiens
guuuugaauauuacuccuauuuuuguaaacug

SEQ ID NO: 142405 - RNA, 32 nt, Homo Sapiens
uaucucucgccgccgcugcaccccgcagcgac

SEQ ID NO: 142406 - RNA, 32 nt, Homo Sapiens
aguggaauauguauuugccuauauugugaacg

SEQ ID NO: 142407 - RNA, 32 nt, Homo Sapiens
ggcacccccgccccgcggcgccccacauuccc

SEQ ID NO: 142408 - RNA, 32 nt, Homo Sapiens
gcccugagccugcguccugggguccugggccg

SEQ ID NO: 142409 - RNA, 32 nt, Homo Sapiens
guuaagaacaauuuagucaaucguucaucugu

SEQ ID NO: 142410 - RNA, 32 nt, Homo Sapiens
ugucucuuuuucugucuuaggugguuucauua

SEQ ID NO: 142411 - RNA, 26 nt, Homo Sapiens
augggagaugagaauguacggcugug

SEQ ID NO: 142412 - RNA, 32 nt, Homo Sapiens
aauguaggguggguaugucuuacaaugaguaa

SEQ ID NO: 142413 - RNA, 32 nt, Homo Sapiens
ccggcgaccuggcaagguggggcccccuaccg

SEQ ID NO: 142414 - RNA, 32 nt, Homo Sapiens
cugcccgccuuggccucccaaauugcugggau

SEQ ID NO: 142415 - RNA, 32 nt, Homo Sapiens
ccagguugaaagauguuauaacagccccuugu

SEQ ID NO: 142416 - RNA, 32 nt, Homo Sapiens
agggcucugccaaucauuaucaucauaaugaa

SEQ ID NO: 142417 - RNA, 32 nt, Homo Sapiens
aggaggccgcacccgcgccgcgcucugcggcu

SEQ ID NO: 142418 - RNA, 32 nt, Homo Sapiens
ucuguuuuccuaauguuuuucucuauaaaggg

SEQ ID NO: 142419 - RNA, 32 nt, Homo Sapiens
caaauuuuaaacaaaacgaguuuucaguuguu

SEQ ID NO: 142420 - RNA, 32 nt, Homo Sapiens
uggggcguccccagccuccccguccucugucu

SEQ ID NO: 142421 - RNA, 32 nt, Homo Sapiens
auggcaguucccuuugucagugguuguuacau

SEQ ID NO: 142422 - RNA, 32 nt, Homo Sapiens
cuaagauauuagcauguuuuugaaauauuuau

SEQ ID NO: 142423 - RNA, 32 nt, Homo Sapiens
ugauagcaccucaugucuucagaggagcaaga

SEQ ID NO: 142424 - RNA, 32 nt, Homo Sapiens
ccacgugugcugugcacagcggcuccaguggg

SEQ ID NO: 142425 - RNA, 32 nt, Homo Sapiens
ucucugcucucuccgcucuccccuggaaauga

SEQ ID NO: 142426 - RNA, 32 nt, Homo Sapiens
augugagaggauguuuucuggcacaguguuau

SEQ ID NO: 142427 - RNA, 32 nt, Homo Sapiens
uggccccggaaggcccuguggucaugugcucc

SEQ ID NO: 142428 - RNA, 32 nt, Homo Sapiens
ggaggcagcagccgugcagagccugggcuccg

SEQ ID NO: 142429 - RNA, 32 nt, Homo Sapiens
ucucuccacuuugggggagaguucuugcucuc

SEQ ID NO: 142430 - RNA, 32 nt, Homo Sapiens
ugaccaggaauuguuuuaauucuguuaggugg

SEQ ID NO: 142431 - RNA, 32 nt, Homo Sapiens
cccuuccgcggagacucccaggaacacccgaa

SEQ ID NO: 142432 - RNA, 32 nt, Homo Sapiens
gggcugguaggagggagugucuggaggccauu

SEQ ID NO: 142433 - RNA, 32 nt, Homo Sapiens
caucaucaauuuccaucgcagcgggcacagau

SEQ ID NO: 142434 - RNA, 32 nt, Homo Sapiens
gcuggcuuaccacucuucucucauggauccug

SEQ ID NO: 142435 - RNA, 32 nt, Homo Sapiens
uuuuuucaacugacuaacuucauuaccuuaaa

SEQ ID NO: 142436 - RNA, 32 nt, Homo Sapiens
gcugcggaaccgcccgcccgccgcccguucgg

SEQ ID NO: 142437 - RNA, 32 nt, Homo Sapiens
aaguagccaggcgugguggugcaugccuguaa

SEQ ID NO: 142438 - RNA, 32 nt, Homo Sapiens
cgcugugugaccucgggccacucgcugccccu

SEQ ID NO: 142439 - RNA, 32 nt, Homo Sapiens
aaguggaugaagcaugauaaugaaagagugaa

SEQ ID NO: 142440 - RNA, 32 nt, Homo Sapiens
gacgcucggccgcggcgaggcgggcaagccug

SEQ ID NO: 142441 - RNA, 32 nt, Homo Sapiens
uuuguacccagacaaaacaauuauguuacauu

SEQ ID NO: 142442 - RNA, 32 nt, Homo Sapiens
caaagagauccgauuucccugggacugcuaug

SEQ ID NO: 142443 - RNA, 32 nt, Homo Sapiens
ucagguggguggcagucagaacaugcguaaua

SEQ ID NO: 142444 - RNA, 31 nt, Homo Sapiens
cgcagggggcaccugcugccccguccuucgg

SEQ ID NO: 142445 - RNA, 32 nt, Homo Sapiens
uaguauuaggaaguccuagacaguccaaucag

SEQ ID NO: 142446 - RNA, 32 nt, Homo Sapiens
ucguauccccucucagucgcccggggcugucc

SEQ ID NO: 142447 - RNA, 32 nt, Homo Sapiens
ucagugcuucaggucuuaaugccuccauaccu

SEQ ID NO: 142448 - RNA, 32 nt, Homo Sapiens
uggcgagcaccuguaaucucagcacuuuggga

SEQ ID NO: 142449 - RNA, 32 nt, Homo Sapiens
cccaaugcuuauaugcugaagcucacagaaug

SEQ ID NO: 142450 - RNA, 32 nt, Homo Sapiens
gaacucuuucuuucuuccacuuucuuuggggg

SEQ ID NO: 142451 - RNA, 32 nt, Homo Sapiens
aggccgcaccgccccuggggcccccugccagc

SEQ ID NO: 142452 - RNA, 32 nt, Homo Sapiens
ggagccagaaaguuaagagcuccccaucucua

SEQ ID NO: 142453 - RNA, 32 nt, Homo Sapiens
aagacaugagagagcugaacugaaguggagga

SEQ ID NO: 142454 - RNA, 32 nt, Homo Sapiens
gccacugcaccucggcauaugccaccuccaug

SEQ ID NO: 142455 - RNA, 32 nt, Homo Sapiens
cuuguaacuauauguuaaucucguguuaaaau

SEQ ID NO: 142456 - RNA, 32 nt, Homo Sapiens
aauuacauuauuccacauccacagaacacugg

SEQ ID NO: 142457 - RNA, 32 nt, Homo Sapiens
gaguuucgcucuuguugcccaggcccgagugc

SEQ ID NO: 142458 - RNA, 32 nt, Homo Sapiens
aaaccaagauguaacuaacauaaagaaacacu

SEQ ID NO: 142459 - RNA, 32 nt, Homo Sapiens
ggucuucugaagauucagguccuccucuccgg

SEQ ID NO: 142460 - RNA, 30 nt, Homo Sapiens
accuggaauaucccuuauugccuauaaugg

SEQ ID NO: 142461 - RNA, 32 nt, Homo Sapiens
gcagauagggagaagggaaaaggggccucacu

SEQ ID NO: 142462 - RNA, 32 nt, Homo Sapiens
guuuuauuuuuccuuuuuuuuacauauauaug

SEQ ID NO: 142463 - RNA, 32 nt, Homo Sapiens
uagaaguuucccaguggcauucacuagugaga

SEQ ID NO: 142464 - RNA, 32 nt, Homo Sapiens
uuuuguucugaagagaagagugguaccauaug

SEQ ID NO: 142465 - RNA, 32 nt, Homo Sapiens
cgccuucugcccagacacgacgacuucgcucg

SEQ ID NO: 142466 - RNA, 32 nt, Homo Sapiens
gaacuuggaucacggcuugguucagcagagca

SEQ ID NO: 142467 - RNA, 32 nt, Homo Sapiens
acacgcucaaccccaaguccuuuaugcuuugu

SEQ ID NO: 142468 - RNA, 32 nt, Homo Sapiens
gccagguggagagcuucccaagcugugccgau

SEQ ID NO: 142469 - RNA, 32 nt, Homo Sapiens
gucaggcccccagugggaccacaugccacugc

SEQ ID NO: 142470 - RNA, 32 nt, Homo Sapiens
cggcugaaggauuucuccccagcuggugcagu

SEQ ID NO: 142471 - RNA, 32 nt, Homo Sapiens
acaccacaccccacucuggccggagcacgcca

SEQ ID NO: 142472 - RNA, 32 nt, Homo Sapiens
cuacuucuuguuaaggaaauucaucucuuguu

SEQ ID NO: 142473 - RNA, 31 nt, Homo Sapiens
agccccauggaggucucccggaggaaggcgc

SEQ ID NO: 142474 - RNA, 30 nt, Homo Sapiens
cucccgcgcgcucagcaccaccagcggcgc

SEQ ID NO: 142475 - RNA, 32 nt, Homo Sapiens
uucagguugcuuaggguccacauuucauuaaa

SEQ ID NO: 142476 - RNA, 32 nt, Homo Sapiens
cauaauuggaauauacuuuucuuaaaaaaaag

SEQ ID NO: 142477 - RNA, 30 nt, Homo Sapiens
augucucuggacuuugcaagcauccccucg

SEQ ID NO: 142478 - RNA, 32 nt, Homo Sapiens
uuacauauauauauuuauaaugugucuuuuua

SEQ ID NO: 142479 - RNA, 32 nt, Homo Sapiens
gcuccaugaagaugcguugaagaaauggacca

SEQ ID NO: 142480 - RNA, 32 nt, Homo Sapiens
gaaagaucaguuaaguccuuuggaccugauca

SEQ ID NO: 142481 - RNA, 32 nt, Homo Sapiens
gugcuuuggaauugauauuugcauuuggugau

SEQ ID NO: 142482 - RNA, 32 nt, Homo Sapiens
uauagaaauauuaaauaagacggacagaggag

SEQ ID NO: 142483 - RNA, 32 nt, Homo Sapiens
uauggagaacuaaaaguacaucacacaaaacg

SEQ ID NO: 142484 - RNA, 32 nt, Homo Sapiens
agcccacacccaccccagacggccaccacacu

SEQ ID NO: 142485 - RNA, 32 nt, Homo Sapiens
uucacaaaugaaaucuuaaugugggcuguuuu

SEQ ID NO: 142486 - RNA, 32 nt, Homo Sapiens
ccugaaacuacuguaucugauguuuguuuucg

SEQ ID NO: 142487 - RNA, 32 nt, Homo Sapiens
cuuuacucgugaauuuuuuucuuaauggaggu

SEQ ID NO: 142488 - RNA, 32 nt, Homo Sapiens
uuuauucuguuacuuuuuguuauuuucuauaa

SEQ ID NO: 142489 - RNA, 32 nt, Homo Sapiens
accaaaucuggcuauuuuuuuauuauuauuau

SEQ ID NO: 142490 - RNA, 32 nt, Homo Sapiens
gucaccaaacggugaauauuauagaagaaugg

SEQ ID NO: 142491 - RNA, 32 nt, Homo Sapiens
ggggagaacauacagcccagcgugccucucac

SEQ ID NO: 142492 - RNA, 32 nt, Homo Sapiens
uauuuuuuaaaauaaacauuugauauaauuau

SEQ ID NO: 142493 - RNA, 32 nt, Homo Sapiens
agggcaccauccagcuccccagcccaccugcu

SEQ ID NO: 142494 - RNA, 32 nt, Homo Sapiens
cgcccuuucuucucaggccccagcccuuccga

SEQ ID NO: 142495 - RNA, 30 nt, Homo Sapiens
caaaaugggaagcuugccugaagcuguuga

SEQ ID NO: 142496 - RNA, 32 nt, Homo Sapiens
cauaaauaaaaauaagauguguauguaaaaua

SEQ ID NO: 142497 - RNA, 32 nt, Homo Sapiens
caguugaaugccuuuaaaauguucugucugua

SEQ ID NO: 142498 - RNA, 32 nt, Homo Sapiens
gccccgacaccagaacccuggugcuggugggc

SEQ ID NO: 142499 - RNA, 32 nt, Homo Sapiens
uucuuugcuuuuagucaaaccauuccauauca

SEQ ID NO: 142500 - RNA, 32 nt, Homo Sapiens
aaauuccaaaauguuucuuuuauuccccagag

SEQ ID NO: 142501 - RNA, 31 nt, Homo Sapiens
aaguugaacauauggcuuugguuacaugugg

SEQ ID NO: 142502 - RNA, 32 nt, Homo Sapiens
cccgcacucaggagcacagccauagcagacgg

SEQ ID NO: 142503 - RNA, 32 nt, Homo Sapiens
uuaaagaugagggauggaggccaggcaugcug

SEQ ID NO: 142504 - RNA, 32 nt, Homo Sapiens
uaagauuuaccuuguuuuuauuuuucuacuuu

SEQ ID NO: 142505 - RNA, 32 nt, Homo Sapiens
ugggcgaugacaguuguuucuaugccuucuga

SEQ ID NO: 142506 - RNA, 32 nt, Homo Sapiens
uuuaacauuuagauuuacuuaauuguagaaaa

SEQ ID NO: 142507 - RNA, 32 nt, Homo Sapiens
gcccucccauucucccccuccaguaguagcug

SEQ ID NO: 142508 - RNA, 29 nt, Homo Sapiens
ggaucauaaaguuagaaucuauuuucuau

SEQ ID NO: 142509 - RNA, 32 nt, Homo Sapiens
gauaaaauugagaauaaaaagauuuuauuuag

SEQ ID NO: 142510 - RNA, 32 nt, Homo Sapiens
cucccggacgccugcuggccaggccccgguca

SEQ ID NO: 142511 - RNA, 32 nt, Homo Sapiens
ugaugaaaugacuuuggaacuuuaucuguguu

SEQ ID NO: 142512 - RNA, 32 nt, Homo Sapiens
gcgccccgcccggcccccaccagucuucgccg

SEQ ID NO: 142513 - RNA, 32 nt, Homo Sapiens
aauuagccgggcgugguggcgggugccuggga

SEQ ID NO: 142514 - RNA, 30 nt, Homo Sapiens
acgggccaggccgggccgggucccucaucu

SEQ ID NO: 142515 - RNA, 32 nt, Homo Sapiens
gcugauagcauguguccagagcccugucucuu

SEQ ID NO: 142516 - RNA, 32 nt, Homo Sapiens
gaaaagaaacaguaaacuuuaugauucuuaaa

SEQ ID NO: 142517 - RNA, 32 nt, Homo Sapiens
ggacaaagacucuggagagagagccauuggcu

SEQ ID NO: 142518 - RNA, 32 nt, Homo Sapiens
cggagcgcggaucggcacgggcucugggcucc

SEQ ID NO: 142519 - RNA, 32 nt, Homo Sapiens
agcauguuucaaagcugaacucuacagagcga

SEQ ID NO: 142520 - RNA, 32 nt, Homo Sapiens
gacucuggcugccaagauaccuucaugguguu

SEQ ID NO: 142521 - RNA, 32 nt, Homo Sapiens
auuaauuuuucucguuagacauaaggaaauuu

SEQ ID NO: 142522 - RNA, 32 nt, Homo Sapiens
agucgcuguucgcucugcggaguggcucgcca

SEQ ID NO: 142523 - RNA, 32 nt, Homo Sapiens
gggcccggacgcccaggaccccauggcagugg

SEQ ID NO: 142524 - RNA, 32 nt, Homo Sapiens
aaagauugaaccucaagucacuguagcuuuag

SEQ ID NO: 142525 - RNA, 32 nt, Homo Sapiens
ccaucuuguuucuaaccuccaagcugucuuug

SEQ ID NO: 142526 - RNA, 32 nt, Homo Sapiens
ccgggaccccuggccacccccggcgccugcua

SEQ ID NO: 142527 - RNA, 30 nt, Homo Sapiens
gcccacuguccagcugcagaaauucguugc

SEQ ID NO: 142528 - RNA, 32 nt, Homo Sapiens
ggggagaagcgcgggggcuggagcaccaccaa

SEQ ID NO: 142529 - RNA, 32 nt, Homo Sapiens
agccccagugucugaagaaaagaggcagugua

SEQ ID NO: 142530 - RNA, 30 nt, Homo Sapiens
cauuaggauaucccucaccuguuccugaug

SEQ ID NO: 142531 - RNA, 32 nt, Homo Sapiens
cgucuuuaaaucaaucacugaucccagccccu

SEQ ID NO: 142532 - RNA, 32 nt, Homo Sapiens
accaggccaaacugcaggcaaccaccucgggc

SEQ ID NO: 142533 - RNA, 32 nt, Homo Sapiens
gggacaggaaaugccugugucuggccagugug

SEQ ID NO: 142534 - RNA, 32 nt, Homo Sapiens
ucagacuuucgaggccgcaacgcaacugacau

SEQ ID NO: 142535 - RNA, 32 nt, Homo Sapiens
augggcauauauaaaaguagacacauuucauu

SEQ ID NO: 142536 - RNA, 32 nt, Homo Sapiens
ucgcuaacuccaugggacgacggggugucaaa

SEQ ID NO: 142537 - RNA, 32 nt, Homo Sapiens
agcccggagcccagcccccugccccggcccug

SEQ ID NO: 142538 - RNA, 32 nt, Homo Sapiens
aggcgugccggggagggggcgagggcggccag

SEQ ID NO: 142539 - RNA, 28 nt, Homo Sapiens
acgccgccgccgccgccgaguggauccg

SEQ ID NO: 142540 - RNA, 32 nt, Homo Sapiens
ugagauugggcauggggugcgguguggggggc

SEQ ID NO: 142541 - RNA, 32 nt, Homo Sapiens
gccgggccgcugccgcgccauggacucccgug

SEQ ID NO: 142542 - RNA, 32 nt, Homo Sapiens
uggccauucccucuccccucucuauccaaccc

SEQ ID NO: 142543 - RNA, 32 nt, Homo Sapiens
guucugagguuaucauaugccuuuuuuaaaag

SEQ ID NO: 142544 - RNA, 32 nt, Homo Sapiens
caagucccuggaacugcccacccuuccccugc

SEQ ID NO: 142545 - RNA, 30 nt, Homo Sapiens
aaggauuuggacugcauuuaauuguaccau

SEQ ID NO: 142546 - RNA, 32 nt, Homo Sapiens
acacagagacacggcaccauucugccuggggc

SEQ ID NO: 142547 - RNA, 32 nt, Homo Sapiens
cagcgcggggauggcgcuguccgcggaggacc

SEQ ID NO: 142548 - RNA, 32 nt, Homo Sapiens
gggcucaguggggcuucucuucccuccaugag

SEQ ID NO: 142549 - RNA, 32 nt, Homo Sapiens
ccuagcucgguuccgccuccuccucgcgcggc

SEQ ID NO: 142550 - RNA, 31 nt, Homo Sapiens
uaccucugugcucagugccaggcaaaacacu

SEQ ID NO: 142551 - RNA, 32 nt, Homo Sapiens
cuuuuucccaguguuauuugaaucauacuacc

SEQ ID NO: 142552 - RNA, 32 nt, Homo Sapiens
cacuagcccagcugcggaagccacagcugugu

SEQ ID NO: 142553 - RNA, 32 nt, Homo Sapiens
uugacuuguuuaaaaaucacauuuauaaguga

SEQ ID NO: 142554 - RNA, 32 nt, Homo Sapiens
gaucuuucacuucugcccacuccaugcuaugg

SEQ ID NO: 142555 - RNA, 32 nt, Homo Sapiens
gaaggcaggguggagcggggggaagaccauca

SEQ ID NO: 142556 - RNA, 32 nt, Homo Sapiens
agagccgggcgccugggcgcccggggcgugug

SEQ ID NO: 142557 - RNA, 32 nt, Homo Sapiens
agcccccuccccagcccucaggcccucccugc

SEQ ID NO: 142558 - RNA, 30 nt, Homo Sapiens
ccuaggaauauccuuacucugggcuauaga

SEQ ID NO: 142559 - RNA, 32 nt, Homo Sapiens
cgcccggcccgccccgcucuccuagucccuug

SEQ ID NO: 142560 - RNA, 32 nt, Homo Sapiens
ccagccgccgcgcaccaacgccgccgccuucg

SEQ ID NO: 142561 - RNA, 32 nt, Homo Sapiens
gaggagcaugcccacccccacccccgcagugu

SEQ ID NO: 142562 - RNA, 32 nt, Homo Sapiens
gcgaaguccgcggcugcccccggggcccuagu

SEQ ID NO: 142563 - RNA, 32 nt, Homo Sapiens
ugaaaauacuaaaaacuaaguuauguuauuau

SEQ ID NO: 142564 - RNA, 30 nt, Homo Sapiens
uacucucuggacuucugcccucuuuugugc

SEQ ID NO: 142565 - RNA, 32 nt, Homo Sapiens
aguuuuaaauguuauaauucauguuacuggcu

SEQ ID NO: 142566 - RNA, 32 nt, Homo Sapiens
cagcagugaucuuuccucuccuccuucccaag

SEQ ID NO: 142567 - RNA, 29 nt, Homo Sapiens
uugugacuguaguggacuauaaaacccac

SEQ ID NO: 142568 - RNA, 32 nt, Homo Sapiens
uucugagaacuaaaaacacacauuauuugaaa

SEQ ID NO: 142569 - RNA, 32 nt, Homo Sapiens
uaauaagaugacuuacuguacaugaauuacac

SEQ ID NO: 142570 - RNA, 32 nt, Homo Sapiens
uuagggugugauggaaaucuuaaugaugguau

SEQ ID NO: 142571 - RNA, 32 nt, Homo Sapiens
gcggcccagcgaaggagcgcgcgggcggucug

SEQ ID NO: 142572 - RNA, 32 nt, Homo Sapiens
agaggagugucuggaaggaucugugccuggac

SEQ ID NO: 142573 - RNA, 32 nt, Homo Sapiens
uuacaaaaauuuguauaggcaaaccauuucuu

SEQ ID NO: 142574 - RNA, 32 nt, Homo Sapiens
uuguaacccuccccacuagccuucugagcauu

SEQ ID NO: 142575 - RNA, 32 nt, Homo Sapiens
ucacagcuugacucacuaacugaggccuuucc

SEQ ID NO: 142576 - RNA, 32 nt, Homo Sapiens
gagagccgacccagccccucaggaacccucau

SEQ ID NO: 142577 - RNA, 32 nt, Homo Sapiens
auaaccacuauaacagggucagcgccaaguuu

SEQ ID NO: 142578 - RNA, 32 nt, Homo Sapiens
uuucggcaccugcccuuccccagcgcccccac

SEQ ID NO: 142579 - RNA, 32 nt, Homo Sapiens
cacccccuugccugucccaccucgcugaacac

SEQ ID NO: 142580 - RNA, 31 nt, Homo Sapiens
accccugccccaugccugcccugcgugcugg

SEQ ID NO: 142581 - RNA, 30 nt, Homo Sapiens
gaaagaggaaagcuugauuaguguuaauau

SEQ ID NO: 142582 - RNA, 32 nt, Homo Sapiens
caggugagugaccaccugggugccaguuacag

SEQ ID NO: 142583 - RNA, 32 nt, Homo Sapiens
uuguugcucgcccggcccaagcgggagcuguu

SEQ ID NO: 142584 - RNA, 32 nt, Homo Sapiens
guaaaaauggagaaacaaaacuuacguucauu

SEQ ID NO: 142585 - RNA, 32 nt, Homo Sapiens
agucgggucuugcucucucacccaggcuggag

SEQ ID NO: 142586 - RNA, 32 nt, Homo Sapiens
acaguaugaugauuuggggauuuucugaauca

SEQ ID NO: 142587 - RNA, 32 nt, Homo Sapiens
uugagaauauaaacacaccuguuuuguuuuuc

SEQ ID NO: 142588 - RNA, 31 nt, Homo Sapiens
ugauagucaucuuuaaacugaguuaaaagau

SEQ ID NO: 142589 - RNA, 32 nt, Homo Sapiens
gucuaguuuguagguaucauuuguuuucuaug

SEQ ID NO: 142590 - RNA, 32 nt, Homo Sapiens
aggugaggcggggcgggugucgucgcgcuggg

SEQ ID NO: 142591 - RNA, 32 nt, Homo Sapiens
gaaguuuaaguacacacugucaaccguggggu

SEQ ID NO: 142592 - RNA, 32 nt, Homo Sapiens
aaagaggggccagggaagaaugagauacuggc

SEQ ID NO: 142593 - RNA, 32 nt, Homo Sapiens
ucaaagcucccucccaucuguaggagauuagu

SEQ ID NO: 142594 - RNA, 29 nt, Homo Sapiens
cuuuauuuaaagagguauuuucuaauuau

SEQ ID NO: 142595 - RNA, 32 nt, Homo Sapiens
uaaacuucuuauggaugaaaugauaugucugg

SEQ ID NO: 142596 - RNA, 32 nt, Homo Sapiens
ugguccgagcgcgggaaacggcggguccccga

SEQ ID NO: 142597 - RNA, 32 nt, Homo Sapiens
cugaucuaggaggcugggagccaggugacagg

SEQ ID NO: 142598 - RNA, 32 nt, Homo Sapiens
aggugguccuggcacagcuugguuuuauacau

SEQ ID NO: 142599 - RNA, 32 nt, Homo Sapiens
gucgccggcgaccgcggaguucugggcuagug

SEQ ID NO: 142600 - RNA, 32 nt, Homo Sapiens
gucuugucauuuuacaagcauuagauuccuuu

SEQ ID NO: 142601 - RNA, 32 nt, Homo Sapiens
ucucugacaccuguggugguucaguuugcuga

SEQ ID NO: 142602 - RNA, 32 nt, Homo Sapiens
gggucuaggggugcagggagcggccagcgcug

SEQ ID NO: 142603 - RNA, 32 nt, Homo Sapiens
gacaggcguggcggccggagccccagcauccc

SEQ ID NO: 142604 - RNA, 32 nt, Homo Sapiens
uauuauauauugcuuugucuuggccaauuacu

SEQ ID NO: 142605 - RNA, 32 nt, Homo Sapiens
ucuuagcuuccagcugcagggcugguggcccu

SEQ ID NO: 142606 - RNA, 30 nt, Homo Sapiens
ucgagaugccgaagucgugcgcggcccggc

SEQ ID NO: 142607 - RNA, 32 nt, Homo Sapiens
uguucaaaggucaaauaaaaaccuagucuccu

SEQ ID NO: 142608 - RNA, 30 nt, Homo Sapiens
ccccgugucugugcaggauugucuggguug

SEQ ID NO: 142609 - RNA, 32 nt, Homo Sapiens
gacuugcuguccaugaugagugaugagaagaa

SEQ ID NO: 142610 - RNA, 32 nt, Homo Sapiens
ggccucccggguggaugaagccaggcgucgcc

SEQ ID NO: 142611 - RNA, 32 nt, Homo Sapiens
gccggaacgaugccggccgugagccucccgcc

SEQ ID NO: 142612 - RNA, 32 nt, Homo Sapiens
cacguggaugcugccuaccccggcgcccgcgu

SEQ ID NO: 142613 - RNA, 32 nt, Homo Sapiens
ugggaaagaaacaaaacaucauucuauaaguc

SEQ ID NO: 142614 - RNA, 32 nt, Homo Sapiens
cauacugcaaacuuaaaagauacauacaccaa

SEQ ID NO: 142615 - RNA, 32 nt, Homo Sapiens
gucggaauauauuuaaauaaauuguguuaucu

SEQ ID NO: 142616 - RNA, 32 nt, Homo Sapiens
gaagaaggaaaacacagcacgcuggagccaac

SEQ ID NO: 142617 - RNA, 32 nt, Homo Sapiens
ccauagaagaugaggucuaaccgggaagaugc

SEQ ID NO: 142618 - RNA, 31 nt, Homo Sapiens
gccgggucaagguccgcgggccucgcagauc

SEQ ID NO: 142619 - RNA, 32 nt, Homo Sapiens
ggaacaauucuauuuuggauguucacugauaa

SEQ ID NO: 142620 - RNA, 32 nt, Homo Sapiens
aguugaaaucccaaagauugaugucuaccucu

SEQ ID NO: 142621 - RNA, 32 nt, Homo Sapiens
uacaagggguggggaagaaguuaauguguaau

SEQ ID NO: 142622 - RNA, 32 nt, Homo Sapiens
acaugcuggugcccgucuuccuccuaaggggc

SEQ ID NO: 142623 - RNA, 32 nt, Homo Sapiens
cucguuuggcuuuauaaacaaacaaacauugu

SEQ ID NO: 142624 - RNA, 32 nt, Homo Sapiens
accaaucauguucaucuuuguaucgucacagc

SEQ ID NO: 142625 - RNA, 32 nt, Homo Sapiens
caggaaagcugauggugcaagguccaguccaa

SEQ ID NO: 142626 - RNA, 32 nt, Homo Sapiens
aaggcaugaaggaugccaagaaguuuaaggaa

SEQ ID NO: 142627 - RNA, 32 nt, Homo Sapiens
agggcccuccgucuacacccucuucuucuccu

SEQ ID NO: 142628 - RNA, 32 nt, Homo Sapiens
aagaggaaauaaaaacagaacaggagguggua

SEQ ID NO: 142629 - RNA, 32 nt, Homo Sapiens
gggggcccagcccuagagagcggggcgcgggc

SEQ ID NO: 142630 - RNA, 32 nt, Homo Sapiens
auuguuauuuuugucucgaaauaauuuuuuag

SEQ ID NO: 142631 - RNA, 32 nt, Homo Sapiens
agaccagccugggcaacauagcaagaucccuu

SEQ ID NO: 142632 - RNA, 32 nt, Homo Sapiens
aggccagagcagccucuuccucuccugguccc

SEQ ID NO: 142633 - RNA, 32 nt, Homo Sapiens
aagcccucucagaucaccccagccucacucca

SEQ ID NO: 142634 - RNA, 32 nt, Homo Sapiens
cccaggguugagaacagaaggugggcggcagg

SEQ ID NO: 142635 - RNA, 32 nt, Homo Sapiens
caucagccaaagcaaaagauggcugcugcuuu

SEQ ID NO: 142636 - RNA, 32 nt, Homo Sapiens
guagagaaaauaaugcagauacccugacuagc

SEQ ID NO: 142637 - RNA, 32 nt, Homo Sapiens
uagggagaacaaaaacaaaaacccaggaugaa

SEQ ID NO: 142638 - RNA, 32 nt, Homo Sapiens
ccugguccggugcccccuggccccagauggca

SEQ ID NO: 142639 - RNA, 32 nt, Homo Sapiens
ccuuuuguauuuuuaauacaauaauuguacau

SEQ ID NO: 142640 - RNA, 32 nt, Homo Sapiens
ugaggcagcgagugauucccgcgcuccggcuc

SEQ ID NO: 142641 - RNA, 30 nt, Homo Sapiens
caucucgggaagcuugauggcaauccugga

SEQ ID NO: 142642 - RNA, 32 nt, Homo Sapiens
ugucuuccugaauugcagucuucuuaucugca

SEQ ID NO: 142643 - RNA, 32 nt, Homo Sapiens
aaaaauugugcaaauauaauaaauuuggaaaa

SEQ ID NO: 142644 - RNA, 32 nt, Homo Sapiens
agggggcugacacccccaccucccucccggac

SEQ ID NO: 142645 - RNA, 31 nt, Homo Sapiens
gagccccaggaauaagaacgcacagcccgca

SEQ ID NO: 142646 - RNA, 32 nt, Homo Sapiens
gaaccugaucagugaggccuugucaauaauga

SEQ ID NO: 142647 - RNA, 32 nt, Homo Sapiens
gguguaugugcugacaguacugaaagcuuucc

SEQ ID NO: 142648 - RNA, 32 nt, Homo Sapiens
cugagaaagggaggagagacagaaggaaccgg

SEQ ID NO: 142649 - RNA, 32 nt, Homo Sapiens
gcuauguguuggggcccuucuuccucaucacc

SEQ ID NO: 142650 - RNA, 32 nt, Homo Sapiens
auguauguucuucccuuuccucugcuguuucc

SEQ ID NO: 142651 - RNA, 32 nt, Homo Sapiens
caggagaagggcaauucacacccaggguccau

SEQ ID NO: 142652 - RNA, 28 nt, Homo Sapiens
aaagcaccuggcuccaggaugaugacau

SEQ ID NO: 142653 - RNA, 32 nt, Homo Sapiens
aaagaagggccuauauuaaaugcugaaaguga

SEQ ID NO: 142654 - RNA, 32 nt, Homo Sapiens
ucaucaggaaaugugacgcagagauugugcug

SEQ ID NO: 142655 - RNA, 32 nt, Homo Sapiens
auuaaaucagagucuuuaauucuugcauguuu

SEQ ID NO: 142656 - RNA, 32 nt, Homo Sapiens
guuuugaaucaugguuuuguuuuguuuuugca

SEQ ID NO: 142657 - RNA, 32 nt, Homo Sapiens
ugacugugcaccagagaaucugcacaauaaac

SEQ ID NO: 142658 - RNA, 29 nt, Homo Sapiens
uuguaauaaaaagguagauaaaccauugu

SEQ ID NO: 142659 - RNA, 32 nt, Homo Sapiens
guaauuuguauuugcauagaucuuugaucuau

SEQ ID NO: 142660 - RNA, 32 nt, Homo Sapiens
gaggaucuggugugcacaccgcagcaguaccg

SEQ ID NO: 142661 - RNA, 32 nt, Homo Sapiens
guuguaaugaauuuguaaaucacacugaagag

SEQ ID NO: 142662 - RNA, 32 nt, Homo Sapiens
uggaguuggugcccaguauucauccugggguu

SEQ ID NO: 142663 - RNA, 32 nt, Homo Sapiens
gagacugcgggggcugugcgcgcgcgagcggg

SEQ ID NO: 142664 - RNA, 32 nt, Homo Sapiens
cgccaaagagaggccgccgcccugcccccgcc

SEQ ID NO: 142665 - RNA, 32 nt, Homo Sapiens
acauuguauaaaauauguagagauuccaggug

SEQ ID NO: 142666 - RNA, 32 nt, Homo Sapiens
gcagguguaagggagugaaaagaaaggcuagc

SEQ ID NO: 142667 - RNA, 30 nt, Homo Sapiens
aaauuuuuaugucuuaucuaacucuauagu

SEQ ID NO: 142668 - RNA, 32 nt, Homo Sapiens
gccagccgagcugucacgaccggaggggggac

SEQ ID NO: 142669 - RNA, 32 nt, Homo Sapiens
guagugacuuuuuucuuuuucgugggaggggu

SEQ ID NO: 142670 - RNA, 32 nt, Homo Sapiens
cugaguagauaaaaaacaucaucgcucccaaa

SEQ ID NO: 142671 - RNA, 32 nt, Homo Sapiens
agacagacggggacaggcggcgggucuuuugu

SEQ ID NO: 142672 - RNA, 32 nt, Homo Sapiens
uuuuuucauuuuaaaugugucagcacuguagu

SEQ ID NO: 142673 - RNA, 32 nt, Homo Sapiens
ccugcucugugcuagacagaugugcggaggga

SEQ ID NO: 142674 - RNA, 32 nt, Homo Sapiens
caaaagucaaaaggugccugugaggcaggggc

SEQ ID NO: 142675 - RNA, 32 nt, Homo Sapiens
aauauuauaucuaauuaugucuaugugguaau

SEQ ID NO: 142676 - RNA, 32 nt, Homo Sapiens
ugcuaaaaaugaaaauucuaacccaagacaug

SEQ ID NO: 142677 - RNA, 32 nt, Homo Sapiens
agaaaggcgaggggcgccgggaacuggcgugu

SEQ ID NO: 142678 - RNA, 32 nt, Homo Sapiens
cggggaccccuuuguucccagcccagacgcca

SEQ ID NO: 142679 - RNA, 28 nt, Homo Sapiens
ggacaggggcggccauggcggcggcagc

SEQ ID NO: 142680 - RNA, 32 nt, Homo Sapiens
gaggguggguggcagaggggagcagagccauc

SEQ ID NO: 142681 - RNA, 32 nt, Homo Sapiens
gaggagcccguggucagcugugacggcugggg

SEQ ID NO: 142682 - RNA, 32 nt, Homo Sapiens
uauuuugcuguagaaaaauaaaaauaaauuug

SEQ ID NO: 142683 - RNA, 32 nt, Homo Sapiens
auuugcuuuuuucucucaguacuguagcaguu

SEQ ID NO: 142684 - RNA, 32 nt, Homo Sapiens
uccuuagccuacugccacugaggcaguagguu

SEQ ID NO: 142685 - RNA, 32 nt, Homo Sapiens
uuuaauaagaugauacacucgaaggaaacuuu

SEQ ID NO: 142686 - RNA, 32 nt, Homo Sapiens
agaaagaggagaagaauauuuuguguguuccu

SEQ ID NO: 142687 - RNA, 32 nt, Homo Sapiens
uguauauauuuuuuaacuuccgucagggcucc

SEQ ID NO: 142688 - RNA, 32 nt, Homo Sapiens
cuguccugagccuuagccauggccgaggcagg

SEQ ID NO: 142689 - RNA, 32 nt, Homo Sapiens
acccaucugaccaucuccuuaagguuucaccc

SEQ ID NO: 142690 - RNA, 32 nt, Homo Sapiens
gagccaccacgcccggccccaaaguucuaaag

SEQ ID NO: 142691 - RNA, 32 nt, Homo Sapiens
gaauugaaggcacaaaaugcaucaauuccugu

SEQ ID NO: 142692 - RNA, 32 nt, Homo Sapiens
acauuuuaaauuauaauaaaaugauggugccg

SEQ ID NO: 142693 - RNA, 32 nt, Homo Sapiens
cccaauaauuuuccuccugguggagacagugg

SEQ ID NO: 142694 - RNA, 32 nt, Homo Sapiens
gcuggcucgggaaguacugugcaugcguggca

SEQ ID NO: 142695 - RNA, 32 nt, Homo Sapiens
auucuuccaaaggaucuuauuuugugaacuau

SEQ ID NO: 142696 - RNA, 32 nt, Homo Sapiens
uuaauguucacauuuuuacaaauagguagagu

SEQ ID NO: 142697 - RNA, 32 nt, Homo Sapiens
gugguuuucuccacugugaacucugugauuca

SEQ ID NO: 142698 - RNA, 32 nt, Homo Sapiens
acuucccuuuaccccaggacccagggcagccu

SEQ ID NO: 142699 - RNA, 32 nt, Homo Sapiens
uccuagguucaagagauucuucugccucagcc

SEQ ID NO: 142700 - RNA, 32 nt, Homo Sapiens
uuuuguuuuaguucuuuuuuuuuuucuuuucu

SEQ ID NO: 142701 - RNA, 32 nt, Homo Sapiens
ucuaggauauaaaauucacauuacuuuugaaa

SEQ ID NO: 142702 - RNA, 32 nt, Homo Sapiens
uuucgcggccugggcagccuggaccggcugcu

SEQ ID NO: 142703 - RNA, 32 nt, Homo Sapiens
ccccaacuucucggggacugugggcgaugugc

SEQ ID NO: 142704 - RNA, 32 nt, Homo Sapiens
aagcccgucuuggguccucgcugcuggcugcu

SEQ ID NO: 142705 - RNA, 32 nt, Homo Sapiens
auucacaccaaaaauguagaacauauuauaga

SEQ ID NO: 142706 - RNA, 32 nt, Homo Sapiens
aggugcuuuauguaccgugugugcguguaugu

SEQ ID NO: 142707 - RNA, 32 nt, Homo Sapiens
uacauauuauaaauauguugcuuauuguauug

SEQ ID NO: 142708 - RNA, 32 nt, Homo Sapiens
uggaugaguuugauuucuuuugcuauuuaauu

SEQ ID NO: 142709 - RNA, 32 nt, Homo Sapiens
aaggaaaaaaaaguaaaguaagaucauaaaac

SEQ ID NO: 142710 - RNA, 32 nt, Homo Sapiens
gcaauggugucugaaaggaaaaaauuuaacau

SEQ ID NO: 142711 - RNA, 32 nt, Homo Sapiens
cuuagaaaugacuucaaacugcuucacuauug

SEQ ID NO: 142712 - RNA, 32 nt, Homo Sapiens
guccacuucuucugcaggaucuucuucccucc

SEQ ID NO: 142713 - RNA, 31 nt, Homo Sapiens
ggguucguggcgaggaaguccacccacugcu

SEQ ID NO: 142714 - RNA, 31 nt, Homo Sapiens
ggagugcagcaguugcucagagcucacugca

SEQ ID NO: 142715 - RNA, 32 nt, Homo Sapiens
uuagauaacaaaugaggaugucuaagaggcau

SEQ ID NO: 142716 - RNA, 32 nt, Homo Sapiens
agaccccgggcugcccaccgcggccuagcgcg

SEQ ID NO: 142717 - RNA, 32 nt, Homo Sapiens
aaccugaaauauauuuuaaauguggaaugaug

SEQ ID NO: 142718 - RNA, 32 nt, Homo Sapiens
uguauuuuuaucaucuacacgucaaauauccc

SEQ ID NO: 142719 - RNA, 32 nt, Homo Sapiens
uuucacagucagaagugggucugugggaucug

SEQ ID NO: 142720 - RNA, 32 nt, Homo Sapiens
ccuggcggggcuauccucuccucccuuggcuc

SEQ ID NO: 142721 - RNA, 32 nt, Homo Sapiens
caggcaguggguagaaaggggcagccagccac

SEQ ID NO: 142722 - RNA, 32 nt, Homo Sapiens
cuuaucuagaucaauucccuuacuucuuguua

SEQ ID NO: 142723 - RNA, 32 nt, Homo Sapiens
uacaaauccaaauauugacuuuaagaaaccug

SEQ ID NO: 142724 - RNA, 32 nt, Homo Sapiens
ugccaucaguuuuuuccaagcugacuuguucu

SEQ ID NO: 142725 - RNA, 32 nt, Homo Sapiens
guggccaccacucccacaagaccuccacaacu

SEQ ID NO: 142726 - RNA, 32 nt, Homo Sapiens
cccugaccuggggugucaugaccgcugacacc

SEQ ID NO: 142727 - RNA, 28 nt, Homo Sapiens
accucuuaauaaacuucuucugaaauau

SEQ ID NO: 142728 - RNA, 32 nt, Homo Sapiens
auguuuuuaacccugagaucaaguuuaguagg

SEQ ID NO: 142729 - RNA, 32 nt, Homo Sapiens
cgccccuccucgcccgccgccggaguuuucuu

SEQ ID NO: 142730 - RNA, 32 nt, Homo Sapiens
aaggcuggaaaaauuugcuaccaagggccaag

SEQ ID NO: 142731 - RNA, 32 nt, Homo Sapiens
gcuccacuuacaaagaacugcuucuugcucuu

SEQ ID NO: 142732 - RNA, 32 nt, Homo Sapiens
uccuauaccauuuccguaauucuuauuccaua

SEQ ID NO: 142733 - RNA, 32 nt, Homo Sapiens
cucccauugucccucugccccauccuccagca

SEQ ID NO: 142734 - RNA, 32 nt, Homo Sapiens
uuccagagaaggaaaugaaaugugcugggugg

SEQ ID NO: 142735 - RNA, 32 nt, Homo Sapiens
ggcggaucuggucagucccaccccuagguggg

SEQ ID NO: 142736 - RNA, 32 nt, Homo Sapiens
ggcaggugggacgagccccacagcccccuccu

SEQ ID NO: 142737 - RNA, 32 nt, Homo Sapiens
uuacaagauggaagaagaauaacaguagggca

SEQ ID NO: 142738 - RNA, 32 nt, Homo Sapiens
acuuacuguauaucuuuucauuuacauacuug

SEQ ID NO: 142739 - RNA, 32 nt, Homo Sapiens
caaaaaguucauauaauuuaaagaaacacuaa

SEQ ID NO: 142740 - RNA, 32 nt, Homo Sapiens
aaaucagacuagagaauaauuuuuguggcaug

SEQ ID NO: 142741 - RNA, 32 nt, Homo Sapiens
augaacuauuuucucucaguccggggugguac

SEQ ID NO: 142742 - RNA, 32 nt, Homo Sapiens
acauugcauuuugcaggcuuuaccaagccaau

SEQ ID NO: 142743 - RNA, 32 nt, Homo Sapiens
gaaggaacagggcccccuggggccuauaggcc

SEQ ID NO: 142744 - RNA, 32 nt, Homo Sapiens
uuuuugaaaucucugcaucacucauuggaagu

SEQ ID NO: 142745 - RNA, 32 nt, Homo Sapiens
ugccuauaaucccggcacuuugggagucugug

SEQ ID NO: 142746 - RNA, 32 nt, Homo Sapiens
auguagugcuaaggagggauaugucucugaau

SEQ ID NO: 142747 - RNA, 32 nt, Homo Sapiens
cugcugaugagcuuuuuggugcucuccacaca

SEQ ID NO: 142748 - RNA, 32 nt, Homo Sapiens
agcuucggccccggccggccgggcggggaaga

SEQ ID NO: 142749 - RNA, 32 nt, Homo Sapiens
caguucuuuccccacaccccucccccaagaaa

SEQ ID NO: 142750 - RNA, 32 nt, Homo Sapiens
ggcggcggcggcggaggcgcccggucccggcc

SEQ ID NO: 142751 - RNA, 32 nt, Homo Sapiens
ggagcccgaggcggcggagggcccgcgguagc

SEQ ID NO: 142752 - RNA, 32 nt, Homo Sapiens
gaaccgccugcgccaucgcgggcuggggcgcc

SEQ ID NO: 142753 - RNA, 32 nt, Homo Sapiens
acacauuuuuaaaugacuaacuucuaaaagcc

SEQ ID NO: 142754 - RNA, 32 nt, Homo Sapiens
ccacaguggcugggcaggcaaguucugugaca

SEQ ID NO: 142755 - RNA, 32 nt, Homo Sapiens
augccuuugacaaagauugcaguggccccucg

SEQ ID NO: 142756 - RNA, 32 nt, Homo Sapiens
gaugcaagauagauacuauauuaaacuguacu

SEQ ID NO: 142757 - RNA, 32 nt, Homo Sapiens
uuugggcccagcggccggcgaggccgccagac

SEQ ID NO: 142758 - RNA, 32 nt, Homo Sapiens
agagacagcauugcuccccagcccuccagaaa

SEQ ID NO: 142759 - RNA, 32 nt, Homo Sapiens
cucagggaccucaccucacgccccacauaaau

SEQ ID NO: 142760 - RNA, 32 nt, Homo Sapiens
gaggggcuuggugaucucuggaggaagagugu

SEQ ID NO: 142761 - RNA, 32 nt, Homo Sapiens
cgccccugggacgccuggagccugcugagugc

SEQ ID NO: 142762 - RNA, 32 nt, Homo Sapiens
aaugaaguccugaaauaaagugaugggcuuug

SEQ ID NO: 142763 - RNA, 32 nt, Homo Sapiens
uccuuucuuggcuuuuucaaacuggaccauga

SEQ ID NO: 142764 - RNA, 30 nt, Homo Sapiens
ggggugcuggaacaauaaacggcacuaucc

SEQ ID NO: 142765 - RNA, 32 nt, Homo Sapiens
ugaagaugaugaugaggaugaagauaaggaag

SEQ ID NO: 142766 - RNA, 32 nt, Homo Sapiens
gguauaaaaaaauuagcuauauugaucauauc

SEQ ID NO: 142767 - RNA, 32 nt, Homo Sapiens
gagcuugcagugagccgagaucgcgccaccac

SEQ ID NO: 142768 - RNA, 32 nt, Homo Sapiens
ccucgcgguuccuggggugcuugugcccacug

SEQ ID NO: 142769 - RNA, 32 nt, Homo Sapiens
ccucauguaggauccggcaggcugguggguua

SEQ ID NO: 142770 - RNA, 32 nt, Homo Sapiens
ggcuggauccugaaacaguggaggcugcuggg

SEQ ID NO: 142771 - RNA, 32 nt, Homo Sapiens
cucuaauggugcuaauggcaaucuagcuaaug

SEQ ID NO: 142772 - RNA, 32 nt, Homo Sapiens
caacuguuuacaugugauacaucgaaaacugu

SEQ ID NO: 142773 - RNA, 32 nt, Homo Sapiens
uuagagcaaugggaagcauacuguggccuacc

SEQ ID NO: 142774 - RNA, 32 nt, Homo Sapiens
ggugugagccaccacacccagccucuguaguu

SEQ ID NO: 142775 - RNA, 32 nt, Homo Sapiens
ucccccuggccaguuuuauauuuuaaucacac

SEQ ID NO: 142776 - RNA, 32 nt, Homo Sapiens
auuuccauacuggcuuuugauuauaugcagau

SEQ ID NO: 142777 - RNA, 32 nt, Homo Sapiens
aaaaguuuugcuuugcagaaacacagccaauu

SEQ ID NO: 142778 - RNA, 32 nt, Homo Sapiens
uggacgcagagaaccuggagcugcgcaggcug

SEQ ID NO: 142779 - RNA, 32 nt, Homo Sapiens
gaaggaccuucauaauaaugugcuuaaagagu

SEQ ID NO: 142780 - RNA, 32 nt, Homo Sapiens
gcagggcccgccccgcgucugagggagcggag

SEQ ID NO: 142781 - RNA, 32 nt, Homo Sapiens
ucgaggacgcagagggcagaggcccaguggag

SEQ ID NO: 142782 - RNA, 32 nt, Homo Sapiens
acuagaaacugggcacaugguagaggcucaca

SEQ ID NO: 142783 - RNA, 32 nt, Homo Sapiens
ugggcgccgagcacgcguugcugcuggacgcu

SEQ ID NO: 142784 - RNA, 32 nt, Homo Sapiens
cacuugcagccucagcuuucauacuucagccc

SEQ ID NO: 142785 - RNA, 27 nt, Homo Sapiens
ugcuccuuuuaauucuguauaaacaaa

SEQ ID NO: 142786 - RNA, 32 nt, Homo Sapiens
uaaagaccaaagggcaucuaaaucugcagcaa

SEQ ID NO: 142787 - RNA, 32 nt, Homo Sapiens
agcccccggcccagcccugcagguauauugca

SEQ ID NO: 142788 - RNA, 32 nt, Homo Sapiens
ccuuaggggaucagcccucucuggccaauauc

SEQ ID NO: 142789 - RNA, 32 nt, Homo Sapiens
cacacccuuucugcaucccugucccuggcauc

SEQ ID NO: 142790 - RNA, 32 nt, Homo Sapiens
acuggcuuguguucuuuaagcauacuaacauc

SEQ ID NO: 142791 - RNA, 32 nt, Homo Sapiens
gccaauacagaaaaggaguauccaaacaaugu

SEQ ID NO: 142792 - RNA, 32 nt, Homo Sapiens
ucugacacuugccuagcccuggauggagggac

SEQ ID NO: 142793 - RNA, 32 nt, Homo Sapiens
uuaacauucuauaauguugaugaccuuaaaau

SEQ ID NO: 142794 - RNA, 32 nt, Homo Sapiens
accagauaaaaagccuaaugaugacgcuuguc

SEQ ID NO: 142795 - RNA, 32 nt, Homo Sapiens
ccccaccucccucuccaaguucaaggacuggg

SEQ ID NO: 142796 - RNA, 32 nt, Homo Sapiens
cgagcugcauuaccagcuuaaaacacuucuua

SEQ ID NO: 142797 - RNA, 32 nt, Homo Sapiens
aagcucuccuccagcccuucccagggcucagc

SEQ ID NO: 142798 - RNA, 32 nt, Homo Sapiens
augaaagugcuaauuuauuaauuuauaauggc

SEQ ID NO: 142799 - RNA, 32 nt, Homo Sapiens
aaggaacuaaauaucauauaguuaauguuuau

SEQ ID NO: 142800 - RNA, 32 nt, Homo Sapiens
agcucauccaagagaauaacauacaguagauu

SEQ ID NO: 142801 - RNA, 32 nt, Homo Sapiens
aagcaaaacaaauacauggugcugaaauuaac

SEQ ID NO: 142802 - RNA, 32 nt, Homo Sapiens
ggggagggccgcccggcaguggacucgcugau

SEQ ID NO: 142803 - RNA, 32 nt, Homo Sapiens
auuuugucuuccaggagcugccccuauggggc

SEQ ID NO: 142804 - RNA, 32 nt, Homo Sapiens
aauuuucucauccacaaaaugagggcaauaau

SEQ ID NO: 142805 - RNA, 32 nt, Homo Sapiens
auuuacuauacaagauccuuucuuauauaaaa

SEQ ID NO: 142806 - RNA, 32 nt, Homo Sapiens
ggaccagugacucccauuuucauuuuagccau

SEQ ID NO: 142807 - RNA, 32 nt, Homo Sapiens
acaaagcccucgcgucggacccuugccagaac

SEQ ID NO: 142808 - RNA, 32 nt, Homo Sapiens
cauccaggccccaggaccaggccuagggugug

SEQ ID NO: 142809 - RNA, 32 nt, Homo Sapiens
cacgagcaagccuccuaaauccaaucaauuaa

SEQ ID NO: 142810 - RNA, 32 nt, Homo Sapiens
acccggcgcuuucuuccuucugcagcugaggc

SEQ ID NO: 142811 - RNA, 32 nt, Homo Sapiens
ccugcccggcccggcccucccuggcaaucccu

SEQ ID NO: 142812 - RNA, 32 nt, Homo Sapiens
ggcccuccugucaucugcugacuucacagaag

SEQ ID NO: 142813 - RNA, 32 nt, Homo Sapiens
guugggggaauaaauaauuggcacaacuaaaa

SEQ ID NO: 142814 - RNA, 32 nt, Homo Sapiens
gauuuagucagugaugagauuuagucaaacgg

SEQ ID NO: 142815 - RNA, 32 nt, Homo Sapiens
cgccaagccgcgccuauuccccggccugcagc

SEQ ID NO: 142816 - RNA, 32 nt, Homo Sapiens
cugcaggccgagccgcucccgcggcggaacuu

SEQ ID NO: 142817 - RNA, 32 nt, Homo Sapiens
uuuuuuccaaauaaauuacucauccuuaaagu

SEQ ID NO: 142818 - RNA, 32 nt, Homo Sapiens
agguccugccagcacagagcugccugcgucca

SEQ ID NO: 142819 - RNA, 32 nt, Homo Sapiens
aguaauugauucaacaauacuaacaguucuag

SEQ ID NO: 142820 - RNA, 32 nt, Homo Sapiens
uggaggcagcgggggcggcggcgugaagaaag

SEQ ID NO: 142821 - RNA, 32 nt, Homo Sapiens
acaaauauuuuuaaugaacaaacagaaauuau

SEQ ID NO: 142822 - RNA, 32 nt, Homo Sapiens
ucccaagggcuuugggcuuuccugggcucucc

SEQ ID NO: 142823 - RNA, 32 nt, Homo Sapiens
uggaacacagaaauugaacacaaaaauaaagc

SEQ ID NO: 142824 - RNA, 32 nt, Homo Sapiens
auuaaugaaauccugaugaggaccugcuuuuu

SEQ ID NO: 142825 - RNA, 32 nt, Homo Sapiens
ugccuagccaccccgccgcggcccucaggucg

SEQ ID NO: 142826 - RNA, 32 nt, Homo Sapiens
cagccugcggacgaggccgggacuuggccgag

SEQ ID NO: 142827 - RNA, 32 nt, Homo Sapiens
cauugguugggagucagauugguuucuuaaaa

SEQ ID NO: 142828 - RNA, 32 nt, Homo Sapiens
uuauaucaccaaauaaaaauuacaaguauaug

SEQ ID NO: 142829 - RNA, 32 nt, Homo Sapiens
ugcaauugcuuaggauguuuuucaugaaaaua

SEQ ID NO: 142830 - RNA, 32 nt, Homo Sapiens
aacuuggugucuaugauucaguuuauguaaaa

SEQ ID NO: 142831 - RNA, 32 nt, Homo Sapiens
uuuuagcauuuucucuuugucuuuugacaauu

SEQ ID NO: 142832 - RNA, 32 nt, Homo Sapiens
cggcacaaggguugugcagagccagccugugg

SEQ ID NO: 142833 - RNA, 32 nt, Homo Sapiens
cccaaccuccuccauuuccccagccagaccga

SEQ ID NO: 142834 - RNA, 32 nt, Homo Sapiens
ucucuacuaaaaguacaaaaauuagccaggug

SEQ ID NO: 142835 - RNA, 32 nt, Homo Sapiens
gugcuguagggccaggcucccucugagggcac

SEQ ID NO: 142836 - RNA, 32 nt, Homo Sapiens
ucccauuuucccuucgauauaugacuuuuucu

SEQ ID NO: 142837 - RNA, 32 nt, Homo Sapiens
cuagcgggcggugggggcgccagcagcgcgga

SEQ ID NO: 142838 - RNA, 32 nt, Homo Sapiens
ccgcgucugccagccuggcuggcaguccgucu

SEQ ID NO: 142839 - RNA, 32 nt, Homo Sapiens
gugguagcggcggagggcggagggauccggag

SEQ ID NO: 142840 - RNA, 32 nt, Homo Sapiens
agggggcgcggugggaggaguaggagaagaca

SEQ ID NO: 142841 - RNA, 32 nt, Homo Sapiens
gcgggcucucagugcccgccucgcuggaagug

SEQ ID NO: 142842 - RNA, 32 nt, Homo Sapiens
cuuaaauuauuauaaacuuuugcugcuguuua

SEQ ID NO: 142843 - RNA, 32 nt, Homo Sapiens
cuguggaagugugaggauuauuaaacugauca

SEQ ID NO: 142844 - RNA, 32 nt, Homo Sapiens
caaucugugcaggguauaugcauguuaauucu

SEQ ID NO: 142845 - RNA, 32 nt, Homo Sapiens
ugggggagggagagggcaguuuguaguauuug

SEQ ID NO: 142846 - RNA, 32 nt, Homo Sapiens
ccucucaacuguguucgaaaaccaacaaagau

SEQ ID NO: 142847 - RNA, 32 nt, Homo Sapiens
uuuuugucaacacuccuuggacgcagcagaag

SEQ ID NO: 142848 - RNA, 32 nt, Homo Sapiens
cguccaaggagaugcucuccccggucuucugc

SEQ ID NO: 142849 - RNA, 32 nt, Homo Sapiens
gccauuuuuuuuuuuucuucuguacucuucuu

SEQ ID NO: 142850 - RNA, 32 nt, Homo Sapiens
auuuguuauuuuguauaaaccuuuaaguaaaa

SEQ ID NO: 142851 - RNA, 32 nt, Homo Sapiens
cuuccuucacaccuuauaucagcacuugguag

SEQ ID NO: 142852 - RNA, 30 nt, Homo Sapiens
ccugguucauucugugcagaagcucuuugc

SEQ ID NO: 142853 - RNA, 32 nt, Homo Sapiens
cacgcgcgggagcgggacucggcggcauggcg

SEQ ID NO: 142854 - RNA, 32 nt, Homo Sapiens
acuggcuggaacaaaaucuccuccacaccuug

SEQ ID NO: 142855 - RNA, 32 nt, Homo Sapiens
ccucugugaugaaguuccaguaaaaacccuga

SEQ ID NO: 142856 - RNA, 32 nt, Homo Sapiens
uuucauaaaauguaauuuuaaaaaagaauggu

SEQ ID NO: 142857 - RNA, 32 nt, Homo Sapiens
uuuacucgggccugcguccgcugccgccgucc

SEQ ID NO: 142858 - RNA, 32 nt, Homo Sapiens
cgcgccgcucccuccgcugcacgcccaggccu

SEQ ID NO: 142859 - RNA, 32 nt, Homo Sapiens
uuauauuaacuguguuuuccuuuuaauaauau

SEQ ID NO: 142860 - RNA, 32 nt, Homo Sapiens
gcacgaaggcccagcccuggcccuggccgcgg

SEQ ID NO: 142861 - RNA, 32 nt, Homo Sapiens
gauuuguugcuguguaauuauugucuuguaug

SEQ ID NO: 142862 - RNA, 32 nt, Homo Sapiens
gaguaagugcccucgcugggcugugagaauga

SEQ ID NO: 142863 - RNA, 32 nt, Homo Sapiens
uuuuuuacuuuuuaaaugcuuuuuucucuacu

SEQ ID NO: 142864 - RNA, 32 nt, Homo Sapiens
caaguuuccuacccuucccacccacagaaacc

SEQ ID NO: 142865 - RNA, 32 nt, Homo Sapiens
gccuuauguaauuauuuucuuuuuguaauuag

SEQ ID NO: 142866 - RNA, 32 nt, Homo Sapiens
aaagguauugugacagauccacugggcuguaa

SEQ ID NO: 142867 - RNA, 32 nt, Homo Sapiens
cugcuguugcuguucucuguccuuggcccagg

SEQ ID NO: 142868 - RNA, 32 nt, Homo Sapiens
guggcaggggcaguggccuggaugcacagugc

SEQ ID NO: 142869 - RNA, 32 nt, Homo Sapiens
gaguuccauuuaauggaaauaaaacgguauaa

SEQ ID NO: 142870 - RNA, 32 nt, Homo Sapiens
cucuuuuccuuccuucccauuccaaaauucag

SEQ ID NO: 142871 - RNA, 32 nt, Homo Sapiens
ucauuguaauguuucuuaauucuccucuccuu

SEQ ID NO: 142872 - RNA, 32 nt, Homo Sapiens
ccaucagagaauaauauaaacaccucuaugca

SEQ ID NO: 142873 - RNA, 32 nt, Homo Sapiens
ggagggacccgcccguuucucagcuacucccu

SEQ ID NO: 142874 - RNA, 32 nt, Homo Sapiens
acaagagugucuauggagcagccggaagucug

SEQ ID NO: 142875 - RNA, 32 nt, Homo Sapiens
uacaugcacccccccacaaacacacccugccu

SEQ ID NO: 142876 - RNA, 32 nt, Homo Sapiens
accaucauuggaaaugaaacugcugugaaugu

SEQ ID NO: 142877 - RNA, 32 nt, Homo Sapiens
cuugcaaugaacuguuucaguagccaauccuc

SEQ ID NO: 142878 - RNA, 32 nt, Homo Sapiens
aguguuacaagccccagaaugcugcccggccu

SEQ ID NO: 142879 - RNA, 32 nt, Homo Sapiens
uacaacuuuacuaucauuuuaguggaugcaag

SEQ ID NO: 142880 - RNA, 32 nt, Homo Sapiens
ugaucugaauaguauuaaaauaaaauaccugg

SEQ ID NO: 142881 - RNA, 32 nt, Homo Sapiens
uaugucccacuuucccacacuuggugcccugg

SEQ ID NO: 142882 - RNA, 32 nt, Homo Sapiens
cugacuuuaagcuucauaaaaccaucagugcc

SEQ ID NO: 142883 - RNA, 32 nt, Homo Sapiens
caauuuggugccuuguaucuguugcugauuca

SEQ ID NO: 142884 - RNA, 32 nt, Homo Sapiens
gaaauaacacuggguuuuaauuauaucacagg

SEQ ID NO: 142885 - RNA, 32 nt, Homo Sapiens
aguaaaugcuguaaaauagauuuauauucagu

SEQ ID NO: 142886 - RNA, 31 nt, Homo Sapiens
aucccuuugugcucaagaucucagagggggu

SEQ ID NO: 142887 - RNA, 32 nt, Homo Sapiens
accauggguguuggauaucuuccucacuuugg

SEQ ID NO: 142888 - RNA, 32 nt, Homo Sapiens
cuguuugggaaucuuggugaauaaagauucau

SEQ ID NO: 142889 - RNA, 32 nt, Homo Sapiens
gcaguuugauguaagauauuuuaaauauugua

SEQ ID NO: 142890 - RNA, 32 nt, Homo Sapiens
ccuccuugauucucaguuuugcuggaggccgc

SEQ ID NO: 142891 - RNA, 32 nt, Homo Sapiens
uggcucaaauuauccaaacuacaguggcugau

SEQ ID NO: 142892 - RNA, 32 nt, Homo Sapiens
ggauguggggccugggacuucuccagaagcuu

SEQ ID NO: 142893 - RNA, 30 nt, Homo Sapiens
uggaugaaaucuugcucagaagcucaauau

SEQ ID NO: 142894 - RNA, 32 nt, Homo Sapiens
gauuuguuguguugauuuuguaaacugcagug

SEQ ID NO: 142895 - RNA, 32 nt, Homo Sapiens
caccaucuuguagaaucacuuuuccucaauug

SEQ ID NO: 142896 - RNA, 32 nt, Homo Sapiens
guuugaaaugucgaucaagagaaucaacagau

SEQ ID NO: 142897 - RNA, 32 nt, Homo Sapiens
cuucccuguugaccauuugguaacuuauaauc

SEQ ID NO: 142898 - RNA, 32 nt, Homo Sapiens
ccauauccugcagcugcugcagcagggccacc

SEQ ID NO: 142899 - RNA, 32 nt, Homo Sapiens
ugugugucaggcgcccacccugucccacucuc

SEQ ID NO: 142900 - RNA, 32 nt, Homo Sapiens
agccuucaacccuuuccuccuguccacaaugg

SEQ ID NO: 142901 - RNA, 32 nt, Homo Sapiens
agauaaacuucgcucuguuacaacugaacccu

SEQ ID NO: 142902 - RNA, 32 nt, Homo Sapiens
agcacguuaacuuuuccauucggaucauuauc

SEQ ID NO: 142903 - RNA, 32 nt, Homo Sapiens
cagauaaaguuccacuuaggucuaauaaaagu

SEQ ID NO: 142904 - RNA, 32 nt, Homo Sapiens
augugaagcaggagaaguugugggacgugucu

SEQ ID NO: 142905 - RNA, 32 nt, Homo Sapiens
aaagggcagcgaagugacgagcgagacccgcg

SEQ ID NO: 142906 - RNA, 32 nt, Homo Sapiens
cuuggauccccggcugccccgggcaugagugu

SEQ ID NO: 142907 - RNA, 32 nt, Homo Sapiens
ggaggaggcagaaaaagcugcagaugagagug

SEQ ID NO: 142908 - RNA, 32 nt, Homo Sapiens
gcgcugggaggggugggggcggugccauuggu

SEQ ID NO: 142909 - RNA, 32 nt, Homo Sapiens
uauucagaaacccaaggaauggcuguccccau

SEQ ID NO: 142910 - RNA, 32 nt, Homo Sapiens
ggagagcaccccggcuucccgcgcgcccucac

SEQ ID NO: 142911 - RNA, 32 nt, Homo Sapiens
ggcagggcucaggagcagcugcccaaagggcg

SEQ ID NO: 142912 - RNA, 32 nt, Homo Sapiens
gccaaaccuuugggcuuaaauaucuuuuuccu

SEQ ID NO: 142913 - RNA, 32 nt, Homo Sapiens
ugggccagggaagaggaggguuggggggcucc

SEQ ID NO: 142914 - RNA, 32 nt, Homo Sapiens
uauaggaaaauauuuguaucauuuccuuuuua

SEQ ID NO: 142915 - RNA, 32 nt, Homo Sapiens
cugcuuugcagaaauuaucugcuugcagcugu

SEQ ID NO: 142916 - RNA, 32 nt, Homo Sapiens
cacauagguucaaugccaucucucccuuucca

SEQ ID NO: 142917 - RNA, 32 nt, Homo Sapiens
ggguggggugggggguucgcuaugucggauga

SEQ ID NO: 142918 - RNA, 32 nt, Homo Sapiens
accccgcugcucgggcuggagaauagaugguu

SEQ ID NO: 142919 - RNA, 32 nt, Homo Sapiens
gccacugcacucuagccggggcgacagagcga

SEQ ID NO: 142920 - RNA, 32 nt, Homo Sapiens
cagcauuccugccuguaagucuucccaagaca

SEQ ID NO: 142921 - RNA, 32 nt, Homo Sapiens
cccaacaauuuaacauccagauuuuuaucuua

SEQ ID NO: 142922 - RNA, 32 nt, Homo Sapiens
ggauuccagaaagccccuuggcuggugugcgu

SEQ ID NO: 142923 - RNA, 32 nt, Homo Sapiens
guacgugugcgccaggacucgggcgcugaggg

SEQ ID NO: 142924 - RNA, 32 nt, Homo Sapiens
ggcacucuagaaucugccacauucauuuucaa

SEQ ID NO: 142925 - RNA, 32 nt, Homo Sapiens
cggucugcauaucuguguguccguaucugcgu

SEQ ID NO: 142926 - RNA, 32 nt, Homo Sapiens
agagaauguuguaccaacuacacaagaccuca

SEQ ID NO: 142927 - RNA, 32 nt, Homo Sapiens
gcaaggccuguggucagcagcuacugaugguu

SEQ ID NO: 142928 - RNA, 32 nt, Homo Sapiens
auuaucuggcuuauuucaacaugaguaauaug

SEQ ID NO: 142929 - RNA, 32 nt, Homo Sapiens
cacugcugcccccugccacacagggggccggg

SEQ ID NO: 142930 - RNA, 32 nt, Homo Sapiens
cccccgaggaggaggaggaggacgcgggccug

SEQ ID NO: 142931 - RNA, 32 nt, Homo Sapiens
gcauguggcuccugggacuggcuggagcggga

SEQ ID NO: 142932 - RNA, 32 nt, Homo Sapiens
caaccucuacugaaaacacaaacaacaaagca

SEQ ID NO: 142933 - RNA, 32 nt, Homo Sapiens
aagugggcagucaccacccagcccuuccuugg

SEQ ID NO: 142934 - RNA, 32 nt, Homo Sapiens
uguagcagucuucagccuccucuacccuacga

SEQ ID NO: 142935 - RNA, 32 nt, Homo Sapiens
cgggcuccugacaaccuccuccccucggcgga

SEQ ID NO: 142936 - RNA, 32 nt, Homo Sapiens
cagacacaggaugugcucauggccaccugcgu

SEQ ID NO: 142937 - RNA, 32 nt, Homo Sapiens
uugguucacaaaucauuuaguuguauauauuu

SEQ ID NO: 142938 - RNA, 32 nt, Homo Sapiens
cauguguaguauuuuuauuuugaaaggaaaau

SEQ ID NO: 142939 - RNA, 32 nt, Homo Sapiens
ggaggggagcgcgggccggccggccgaguucg

SEQ ID NO: 142940 - RNA, 32 nt, Homo Sapiens
aagacagcauauauuuuuuucaaaauaaaguu

SEQ ID NO: 142941 - RNA, 32 nt, Homo Sapiens
acaggaauuuacauuuucaaagucauuuuuga

SEQ ID NO: 142942 - RNA, 32 nt, Homo Sapiens
caccccugugccaccccagagcccuggggggu

SEQ ID NO: 142943 - RNA, 32 nt, Homo Sapiens
auacggcagguggccuaaggcugcuguaaagu

SEQ ID NO: 142944 - RNA, 32 nt, Homo Sapiens
gcggcagacaccuuccaggagcccugagggug

SEQ ID NO: 142945 - RNA, 32 nt, Homo Sapiens
gggcuggccgggagugcccaccccgcccugcu

SEQ ID NO: 142946 - RNA, 32 nt, Homo Sapiens
agcgauucucccaccucagccauccaaauagc

SEQ ID NO: 142947 - RNA, 32 nt, Homo Sapiens
uauuaaccaaacuuaaauuuuuuuuccagaag

SEQ ID NO: 142948 - RNA, 32 nt, Homo Sapiens
uggagagggacaagugagagccagccaaaaag

SEQ ID NO: 142949 - RNA, 32 nt, Homo Sapiens
acguguuaaaucuugugauuauuaaaauaaag

SEQ ID NO: 142950 - RNA, 32 nt, Homo Sapiens
cauagaaaacaauguauuugaauuuugaugua

SEQ ID NO: 142951 - RNA, 32 nt, Homo Sapiens
uuacuaggcaauuuaauaaucguuugcaaaaa

SEQ ID NO: 142952 - RNA, 32 nt, Homo Sapiens
gcgaugcuggaacacaucccugccuccgggaa

SEQ ID NO: 142953 - RNA, 32 nt, Homo Sapiens
ggcugggcgggggucgcggcgccgcagcuagc

SEQ ID NO: 142954 - RNA, 32 nt, Homo Sapiens
caucuggacccugcucagaggacccuguagag

SEQ ID NO: 142955 - RNA, 32 nt, Homo Sapiens
ccacggggacgcgggauucaagaaugaaguaa

SEQ ID NO: 142956 - RNA, 32 nt, Homo Sapiens
ccugccggggccccugcccacccccuccuuug

SEQ ID NO: 142957 - RNA, 32 nt, Homo Sapiens
ccaaacgagaagagaagagccuugcuucuguu

SEQ ID NO: 142958 - RNA, 32 nt, Homo Sapiens
ccugccagcccccggauucccacacaugcaga

SEQ ID NO: 142959 - RNA, 32 nt, Homo Sapiens
cuuuucaacagccccaguuauccuggccccau

SEQ ID NO: 142960 - RNA, 32 nt, Homo Sapiens
aaccuguccugucccccucuuuuaagacucca

SEQ ID NO: 142961 - RNA, 32 nt, Homo Sapiens
aggggcaagaauuuauacaaauaagcagaauu

SEQ ID NO: 142962 - RNA, 32 nt, Homo Sapiens
aaucccucguguguccauaauuaggguccacg

SEQ ID NO: 142963 - RNA, 32 nt, Homo Sapiens
ucuuucucuuucguuaacacaucuucccuaug

SEQ ID NO: 142964 - RNA, 32 nt, Homo Sapiens
gggcagggcuuguggcucugguguuagguuca

SEQ ID NO: 142965 - RNA, 32 nt, Homo Sapiens
cagccauuuugacauugggguggauagucgau

SEQ ID NO: 142966 - RNA, 32 nt, Homo Sapiens
ccguggcccuccccugcaucuacuaccugcug

SEQ ID NO: 142967 - RNA, 32 nt, Homo Sapiens
uguuuuaguuuauaaaacaugugcauuuuaca

SEQ ID NO: 142968 - RNA, 32 nt, Homo Sapiens
uaccccgacuggccggccccgccccgugcccc

SEQ ID NO: 142969 - RNA, 32 nt, Homo Sapiens
ccaagaggagggcagcgugugccuguggucug

SEQ ID NO: 142970 - RNA, 32 nt, Homo Sapiens
ccagauggaaaggggguauuguuugccucacu

SEQ ID NO: 142971 - RNA, 32 nt, Homo Sapiens
uucauugucaucaaucaugguuuuugaagaua

SEQ ID NO: 142972 - RNA, 31 nt, Homo Sapiens
cauguuaaauaaaaauagcuuaauuguuaaa

SEQ ID NO: 142973 - RNA, 32 nt, Homo Sapiens
caggaaguacucucaguggggaccaccugcuu

SEQ ID NO: 142974 - RNA, 32 nt, Homo Sapiens
agagggccggggcucgggacuggccaccacug

SEQ ID NO: 142975 - RNA, 27 nt, Homo Sapiens
caaugcccaucccugccuccccacucc

SEQ ID NO: 142976 - RNA, 32 nt, Homo Sapiens
cuccgcgggcagccaacauugauuuccuccgg

SEQ ID NO: 142977 - RNA, 32 nt, Homo Sapiens
uauuuucguuggaaacugauuuuuguuucauu

SEQ ID NO: 142978 - RNA, 32 nt, Homo Sapiens
cuuuuuguuugauuuuuuuuuacaagcuaacu

SEQ ID NO: 142979 - RNA, 32 nt, Homo Sapiens
cacugcacuccagccugggugacagaguagga

SEQ ID NO: 142980 - RNA, 32 nt, Homo Sapiens
ugaugguaaaagacagagaugucaaggcucug

SEQ ID NO: 142981 - RNA, 32 nt, Homo Sapiens
uaaaaaugaagaugaagagcuauuuaaugaca

SEQ ID NO: 142982 - RNA, 32 nt, Homo Sapiens
auuggucagaugucuuugagaaguguuaaacu

SEQ ID NO: 142983 - RNA, 32 nt, Homo Sapiens
agcggaggaggaaauggcagguccuaaucaac

SEQ ID NO: 142984 - RNA, 32 nt, Homo Sapiens
gccuaauaacgugaaacuuauaguuaauauuu

SEQ ID NO: 142985 - RNA, 32 nt, Homo Sapiens
gcuccugcagcaagcagaagugaggcagcugc

SEQ ID NO: 142986 - RNA, 32 nt, Homo Sapiens
acuuuucuccucgccuccucgccccgcauguu

SEQ ID NO: 142987 - RNA, 32 nt, Homo Sapiens
cucccccuuucugugccugggaacuguuuggu

SEQ ID NO: 142988 - RNA, 32 nt, Homo Sapiens
agccucccacccaccagacaaaggugcgggaa

SEQ ID NO: 142989 - RNA, 32 nt, Homo Sapiens
uguucauuuacugugugccacauauuagacaa

SEQ ID NO: 142990 - RNA, 32 nt, Homo Sapiens
cucuucccuucccuggcccccggguguaaaua

SEQ ID NO: 142991 - RNA, 32 nt, Homo Sapiens
gugagcccaugcccggccccacucacaccaac

SEQ ID NO: 142992 - RNA, 32 nt, Homo Sapiens
cucaugcucccucucaguccccuggauugccc

SEQ ID NO: 142993 - RNA, 32 nt, Homo Sapiens
ucccccuccuucccugucaguccgcugccuga

SEQ ID NO: 142994 - RNA, 32 nt, Homo Sapiens
ccagucauacaaauuaaaaucauauuuccuuc

SEQ ID NO: 142995 - RNA, 32 nt, Homo Sapiens
uuuacgucuuuuuuuucuuucucuuuuuuuuu

SEQ ID NO: 142996 - RNA, 32 nt, Homo Sapiens
gcaugccgaggguguggcccggcugagcaugc

SEQ ID NO: 142997 - RNA, 32 nt, Homo Sapiens
uguauguccauaucagagagccucaacuucuu

SEQ ID NO: 142998 - RNA, 32 nt, Homo Sapiens
cugagcccaggggagggaaaauugauuaagau

SEQ ID NO: 142999 - RNA, 32 nt, Homo Sapiens
auucucccuguuuccuucucugcccccagaga

SEQ ID NO: 143000 - RNA, 32 nt, Homo Sapiens
ggccacuucaaagugaagccagcaaagugaua

SEQ ID NO: 143001 - RNA, 32 nt, Homo Sapiens
gggaucaagaaaccucuuuucacugcaccuga

SEQ ID NO: 143002 - RNA, 32 nt, Homo Sapiens
aaaucuaguaaaagaagaaaguuguacuuccu

SEQ ID NO: 143003 - RNA, 32 nt, Homo Sapiens
cccgcggcugugacaaccgcccggggcauggg

SEQ ID NO: 143004 - RNA, 32 nt, Homo Sapiens
cccugggccugugcuuccuguauuaguccguc

SEQ ID NO: 143005 - RNA, 32 nt, Homo Sapiens
ccgcggcggaugcggcggccaggcuucuccgg

SEQ ID NO: 143006 - RNA, 32 nt, Homo Sapiens
ugaauuauuuuugacuaauggauagccgaagg

SEQ ID NO: 143007 - RNA, 32 nt, Homo Sapiens
ugguugggggagagaagggcagcagcuuauug

SEQ ID NO: 143008 - RNA, 32 nt, Homo Sapiens
uauugcauuuuuuuuuuuuuuaacuaaacagc

SEQ ID NO: 143009 - RNA, 32 nt, Homo Sapiens
gguguauaaaauguuuuccaugagaaaccaag

SEQ ID NO: 143010 - RNA, 30 nt, Homo Sapiens
cccgggcgcgcgcggucgugugggaguugu

SEQ ID NO: 143011 - RNA, 32 nt, Homo Sapiens
uccucugugcccccauagcacuguguauaccg

SEQ ID NO: 143012 - RNA, 32 nt, Homo Sapiens
guuuccuugcaaccacccuuggaccugacuca

SEQ ID NO: 143013 - RNA, 32 nt, Homo Sapiens
caacagcugccgcgcgcaggcuuagcucauuc

SEQ ID NO: 143014 - RNA, 32 nt, Homo Sapiens
gccccgcugcgcccaccuccccggcugcuccc

SEQ ID NO: 143015 - RNA, 32 nt, Homo Sapiens
accaggucaggagaucaagaccauccuggcua

SEQ ID NO: 143016 - RNA, 32 nt, Homo Sapiens
acacucucaggauacccaguucccucauagcc

SEQ ID NO: 143017 - RNA, 32 nt, Homo Sapiens
aauuucuuugguuuuucuauugcuuguuauua

SEQ ID NO: 143018 - RNA, 32 nt, Homo Sapiens
gucagcagaggagagcucugggguuggggaug

SEQ ID NO: 143019 - RNA, 32 nt, Homo Sapiens
ggcgggcgcggggucuuggcgaacggucuucg

SEQ ID NO: 143020 - RNA, 32 nt, Homo Sapiens
agccggaggccgcguggacccgaaagccgcug

SEQ ID NO: 143021 - RNA, 32 nt, Homo Sapiens
guuuuuaaaaguaaguuuuaaggaguauuucu

SEQ ID NO: 143022 - RNA, 32 nt, Homo Sapiens
gugaucaggccagugauguuucccuuugggcc

SEQ ID NO: 143023 - RNA, 32 nt, Homo Sapiens
cccgggaagagcugcaggaaaagccggaaugg

SEQ ID NO: 143024 - RNA, 32 nt, Homo Sapiens
ucagguaugaacagacacuuugaaacgacuuu

SEQ ID NO: 143025 - RNA, 32 nt, Homo Sapiens
caaggucagggugccagcucggucccucccug

SEQ ID NO: 143026 - RNA, 32 nt, Homo Sapiens
acaaauaaaaauuguauauauauuuauugugu

SEQ ID NO: 143027 - RNA, 30 nt, Homo Sapiens
gggagggucugugcugcugugagaaccgcu

SEQ ID NO: 143028 - RNA, 32 nt, Homo Sapiens
gcagaagugaagugccugaggaccggaaggau

SEQ ID NO: 143029 - RNA, 32 nt, Homo Sapiens
aucaccaucucuuucucacuagguucuuucua

SEQ ID NO: 143030 - RNA, 32 nt, Homo Sapiens
uuugacuauuuuuauauauaaagaagaacuca

SEQ ID NO: 143031 - RNA, 32 nt, Homo Sapiens
accacagcucugcggaccuuggccauugccgc

SEQ ID NO: 143032 - RNA, 32 nt, Homo Sapiens
agguugguuaaagugauggccuuuuugauggg

SEQ ID NO: 143033 - RNA, 32 nt, Homo Sapiens
caauaugcugggaaacaaaaugaaaggauuuc

SEQ ID NO: 143034 - RNA, 32 nt, Homo Sapiens
gagucugcuuagaguuugagguugccucucac

SEQ ID NO: 143035 - RNA, 32 nt, Homo Sapiens
auguuuguacauauauuacuauuaacgugaua

SEQ ID NO: 143036 - RNA, 32 nt, Homo Sapiens
auucuauaguuaucuuuuuuguaccaacacau

SEQ ID NO: 143037 - RNA, 32 nt, Homo Sapiens
ggcagggcuggggucccggcgcugagcgcccc

SEQ ID NO: 143038 - RNA, 32 nt, Homo Sapiens
gaucuaaaauuccaucauucuaucaugagccc

SEQ ID NO: 143039 - RNA, 32 nt, Homo Sapiens
agguggaggguggggggcgcugaguagggacu

SEQ ID NO: 143040 - RNA, 32 nt, Homo Sapiens
uagggggaauggggacaggcucuuucccccuu

SEQ ID NO: 143041 - RNA, 32 nt, Homo Sapiens
gcuuuucaguucuguauugaguaucuuaagua

SEQ ID NO: 143042 - RNA, 32 nt, Homo Sapiens
uugcaguguuuguuucuguaggguguuuaagg

SEQ ID NO: 143043 - RNA, 32 nt, Homo Sapiens
aacacccuucagagccuaaccaaagaacauaa

SEQ ID NO: 143044 - RNA, 32 nt, Homo Sapiens
ggugucccacuuuaaucuuuugcacauggaug

SEQ ID NO: 143045 - RNA, 32 nt, Homo Sapiens
cauuugcuguuaugaauguccaggcagagaga

SEQ ID NO: 143046 - RNA, 32 nt, Homo Sapiens
aaaggccacgaacaaugaauccauuucaugca

SEQ ID NO: 143047 - RNA, 32 nt, Homo Sapiens
cuaaccacgguucaacaacaacuaauuaggga

SEQ ID NO: 143048 - RNA, 32 nt, Homo Sapiens
uuuaacuauacuugagugcaauaaaaaacuua

SEQ ID NO: 143049 - RNA, 32 nt, Homo Sapiens
ugccagcacccaagugcccuccccucacagug

SEQ ID NO: 143050 - RNA, 32 nt, Homo Sapiens
ucuuuuacuugggcugaauauuuaguguaauu

SEQ ID NO: 143051 - RNA, 32 nt, Homo Sapiens
gccauuugacuucagagauuuguuuucauuaa

SEQ ID NO: 143052 - RNA, 32 nt, Homo Sapiens
acccauguacuccucaccccagcccaucuucu

SEQ ID NO: 143053 - RNA, 32 nt, Homo Sapiens
gcuuuauugcagugacuuuccaaguuuaauua

SEQ ID NO: 143054 - RNA, 32 nt, Homo Sapiens
cugaauguagaguaucucuguauguuaauugc

SEQ ID NO: 143055 - RNA, 32 nt, Homo Sapiens
uucuggucugcaccacaccagugcaugagggg

SEQ ID NO: 143056 - RNA, 32 nt, Homo Sapiens
cugaccacgugauccgcccaccucggccuccc

SEQ ID NO: 143057 - RNA, 32 nt, Homo Sapiens
acuucugcuccggcugcccccgaaggcgcugc

SEQ ID NO: 143058 - RNA, 32 nt, Homo Sapiens
guuggggauauuaauuggggguuuuaauucua

SEQ ID NO: 143059 - RNA, 32 nt, Homo Sapiens
uuguuuuucuaaaaucuaacugcgccagaugg

SEQ ID NO: 143060 - RNA, 32 nt, Homo Sapiens
cugaguuuggcaaagaaaguaccuuuggaauu

SEQ ID NO: 143061 - RNA, 32 nt, Homo Sapiens
aauaguuuguacaagcagcuuucguugaaguu

SEQ ID NO: 143062 - RNA, 32 nt, Homo Sapiens
agaguagaugaugaggcccaugccccucaccc

SEQ ID NO: 143063 - RNA, 32 nt, Homo Sapiens
ugccugugaucccagcacuuugggaggcgggu

SEQ ID NO: 143064 - RNA, 32 nt, Homo Sapiens
gccaggagaagcugaagcuggaggcggagcuu

SEQ ID NO: 143065 - RNA, 32 nt, Homo Sapiens
gaccaugaauuucuuucuuuuauaaauuuucu

SEQ ID NO: 143066 - RNA, 32 nt, Homo Sapiens
uguuuucacaggcaggaugucuguuuucugcc

SEQ ID NO: 143067 - RNA, 32 nt, Homo Sapiens
caugaaccaguaugugaauaagaaauucagca

SEQ ID NO: 143068 - RNA, 32 nt, Homo Sapiens
cgcggcgggcccugcgggaggcggcaugcucc

SEQ ID NO: 143069 - RNA, 32 nt, Homo Sapiens
gccgcaggaguagccgccgccggagccgcgcg

SEQ ID NO: 143070 - RNA, 32 nt, Homo Sapiens
uuggaauuuccagccgcacagaaucuggugcc

SEQ ID NO: 143071 - RNA, 32 nt, Homo Sapiens
uuacaggcuuuauuuaaaucugaacaauccua

SEQ ID NO: 143072 - RNA, 32 nt, Homo Sapiens
gcggagcaguuccagccgcgggcucccccaca

SEQ ID NO: 143073 - RNA, 32 nt, Homo Sapiens
agcugaucagaccucaauaauuuuauacugua

SEQ ID NO: 143074 - RNA, 32 nt, Homo Sapiens
gugcaauuugaaaggaugugaaucauggaugg

SEQ ID NO: 143075 - RNA, 32 nt, Homo Sapiens
caacggccucagaaguuuggccggagaggggg

SEQ ID NO: 143076 - RNA, 32 nt, Homo Sapiens
agcccuccagacuggggcagguccuguucaga

SEQ ID NO: 143077 - RNA, 32 nt, Homo Sapiens
ucaucuuccacaacaaggaauuaaaguaauua

SEQ ID NO: 143078 - RNA, 30 nt, Homo Sapiens
cccugucuggacuucagcccguauuccgag

SEQ ID NO: 143079 - RNA, 32 nt, Homo Sapiens
uugcuggcugacucuuuuuugucuggggccug

SEQ ID NO: 143080 - RNA, 32 nt, Homo Sapiens
auucuucccacccacgcggcagaugggacucc

SEQ ID NO: 143081 - RNA, 32 nt, Homo Sapiens
agcaaccccacuccccgcccgugggaagaaga

SEQ ID NO: 143082 - RNA, 32 nt, Homo Sapiens
gguuaacugucaccuuccacucagggccucug

SEQ ID NO: 143083 - RNA, 32 nt, Homo Sapiens
ugguaaugacuuaggggggcuuccucacaaug

SEQ ID NO: 143084 - RNA, 32 nt, Homo Sapiens
aucuguguuucauaaugggggcuguaugaaua

SEQ ID NO: 143085 - RNA, 32 nt, Homo Sapiens
cuuugucaucuuauaggaaaauauaugaagaa

SEQ ID NO: 143086 - RNA, 32 nt, Homo Sapiens
gcggagccggcccgaggcgcgcgccgagggag

SEQ ID NO: 143087 - RNA, 32 nt, Homo Sapiens
aagagcucgccggggcgccgggccaggacggg

SEQ ID NO: 143088 - RNA, 32 nt, Homo Sapiens
uuuagaauucccaagagggcuuuauuacaccu

SEQ ID NO: 143089 - RNA, 32 nt, Homo Sapiens
ugcuuuucuuuuucuuuuuuuauaccccacaa

SEQ ID NO: 143090 - RNA, 32 nt, Homo Sapiens
acacucaacuccccggccccuggcucccagga

SEQ ID NO: 143091 - RNA, 32 nt, Homo Sapiens
caggaguuccaagagucuagagugguuuuugc

SEQ ID NO: 143092 - RNA, 32 nt, Homo Sapiens
gggucccagccccaccaaguacgcagagaacc

SEQ ID NO: 143093 - RNA, 30 nt, Homo Sapiens
cugaaugucugugaauuucagaggucucug

SEQ ID NO: 143094 - RNA, 32 nt, Homo Sapiens
uagagagcagaagcagaagaguaaaauuuauu

SEQ ID NO: 143095 - RNA, 32 nt, Homo Sapiens
agguuggacccccugucuggggugcugugcac

SEQ ID NO: 143096 - RNA, 32 nt, Homo Sapiens
cagggcuucuuguccuggggcccccuugagcu

SEQ ID NO: 143097 - RNA, 32 nt, Homo Sapiens
ucccccuuuuaaaaauaaacuucccaugucuu

SEQ ID NO: 143098 - RNA, 32 nt, Homo Sapiens
uuuucagggcugauaggauaucauuaagagug

SEQ ID NO: 143099 - RNA, 32 nt, Homo Sapiens
agggggacagaacuaaagaacaauaagcuugg

SEQ ID NO: 143100 - RNA, 32 nt, Homo Sapiens
acaccugcaagcucagcacggccaaagaugag

SEQ ID NO: 143101 - RNA, 32 nt, Homo Sapiens
gcucgccaccccacccacucccgcuggaacgg

SEQ ID NO: 143102 - RNA, 32 nt, Homo Sapiens
auuugggauuuuaauuuccuauggaaaguugc

SEQ ID NO: 143103 - RNA, 32 nt, Homo Sapiens
agagccccgggcacggccccagcuccgugggg

SEQ ID NO: 143104 - RNA, 32 nt, Homo Sapiens
aggauguugucugcgacgugugucgcucuccu

SEQ ID NO: 143105 - RNA, 32 nt, Homo Sapiens
ggaggggcuguggacuucggacucgggccugg

SEQ ID NO: 143106 - RNA, 32 nt, Homo Sapiens
cccucgguggcgcuagggcucccggccucucu

SEQ ID NO: 143107 - RNA, 32 nt, Homo Sapiens
gugauuagguuuagaucauaucaugaggaugg

SEQ ID NO: 143108 - RNA, 32 nt, Homo Sapiens
ucagccuguuuucucucucauggucugaaauu

SEQ ID NO: 143109 - RNA, 32 nt, Homo Sapiens
gcgcccccaucccacccuaccccacccuaccc

SEQ ID NO: 143110 - RNA, 32 nt, Homo Sapiens
acauaagugcacagagcuucaguguccaccaa

SEQ ID NO: 143111 - RNA, 32 nt, Homo Sapiens
uuuguuuuccuuuuuuccccagccucuugcau

SEQ ID NO: 143112 - RNA, 32 nt, Homo Sapiens
caggggaaaucagaccauccccaaggcuugag

SEQ ID NO: 143113 - RNA, 32 nt, Homo Sapiens
ggagccugucccaaaaaggugccaacugggag

SEQ ID NO: 143114 - RNA, 32 nt, Homo Sapiens
auccuuccacuacuccccagccuagaagaucc

SEQ ID NO: 143115 - RNA, 32 nt, Homo Sapiens
uuggccuugacucuuuccuggcuccagagcuc

SEQ ID NO: 143116 - RNA, 32 nt, Homo Sapiens
cgaggcccacugggccaaggccccacacaagg

SEQ ID NO: 143117 - RNA, 32 nt, Homo Sapiens
uaaaaguguccauuguucuuugaaaguagacg

SEQ ID NO: 143118 - RNA, 31 nt, Homo Sapiens
caccggcgagguggccugccccagcacaccu

SEQ ID NO: 143119 - RNA, 29 nt, Homo Sapiens
ggcugucggggacaagguguauuggaccu

SEQ ID NO: 143120 - RNA, 32 nt, Homo Sapiens
cugagacauacgcucgugacacugccccaccc

SEQ ID NO: 143121 - RNA, 32 nt, Homo Sapiens
ggccagaggccaugcugcugcugcucacgcuu

SEQ ID NO: 143122 - RNA, 32 nt, Homo Sapiens
augguaaguauuugugcauguaaacauaccua

SEQ ID NO: 143123 - RNA, 32 nt, Homo Sapiens
acuucaugcaucaugugauugaagauacagaa

SEQ ID NO: 143124 - RNA, 32 nt, Homo Sapiens
uauuuuugcugucuucaaaagucauuuugcua

SEQ ID NO: 143125 - RNA, 32 nt, Homo Sapiens
agacgaggcaggggcucugcuuccucagcccu

SEQ ID NO: 143126 - RNA, 32 nt, Homo Sapiens
aucucuuuuugcaaaaguuuccaauuaugucu

SEQ ID NO: 143127 - RNA, 32 nt, Homo Sapiens
aaaauggaccuuuuuuuuuuuaauggcaauag

SEQ ID NO: 143128 - RNA, 32 nt, Homo Sapiens
cuggagaccacggaguucaucaucucggagcc

SEQ ID NO: 143129 - RNA, 32 nt, Homo Sapiens
ccgagcgcggaacgcgaggggcugcuggggug

SEQ ID NO: 143130 - RNA, 32 nt, Homo Sapiens
cgauuuggaaaacaaacugccucagguugaca

SEQ ID NO: 143131 - RNA, 32 nt, Homo Sapiens
ggagccugggcuuccugucacaguacaggccc

SEQ ID NO: 143132 - RNA, 32 nt, Homo Sapiens
gugccuuguuuuuauguacaguuuauauacag

SEQ ID NO: 143133 - RNA, 32 nt, Homo Sapiens
guugugacucuaagcucagugcucucuccacu

SEQ ID NO: 143134 - RNA, 32 nt, Homo Sapiens
gcagcugaaaugggaacacuggcugccucucc

SEQ ID NO: 143135 - RNA, 32 nt, Homo Sapiens
gccugacuugggggaacgaugugucuguauuu

SEQ ID NO: 143136 - RNA, 32 nt, Homo Sapiens
auucggauaaauuuaagcaaaaaaugaacaau

SEQ ID NO: 143137 - RNA, 32 nt, Homo Sapiens
cgggggagcugcugcccucgcugcagaggcug

SEQ ID NO: 143138 - RNA, 32 nt, Homo Sapiens
gcagagguggcaggggcggggcggcuggcggu

SEQ ID NO: 143139 - RNA, 32 nt, Homo Sapiens
cucgguaucugcagguuucucauccauggauu

SEQ ID NO: 143140 - RNA, 32 nt, Homo Sapiens
agucuccccccaccacccgugcacgacuuccu

SEQ ID NO: 143141 - RNA, 32 nt, Homo Sapiens
cuucccugacuucucaaaaagcacugcacaga

SEQ ID NO: 143142 - RNA, 32 nt, Homo Sapiens
uuauuguuccuuugcuacuuugaaaggaaaaa

SEQ ID NO: 143143 - RNA, 32 nt, Homo Sapiens
uugcauuguucuuuucaaguauguuucguauu

SEQ ID NO: 143144 - RNA, 32 nt, Homo Sapiens
aggauuaaaaacaguaaugaaaagugaguggc

SEQ ID NO: 143145 - RNA, 32 nt, Homo Sapiens
gaacagguagucaggaagaugaaaauuuuacu

SEQ ID NO: 143146 - RNA, 32 nt, Homo Sapiens
cggcgcuccaggugcugacagcgcgagagagc

SEQ ID NO: 143147 - RNA, 32 nt, Homo Sapiens
gauugucacguuggcagccacagugaauaaag

SEQ ID NO: 143148 - RNA, 32 nt, Homo Sapiens
gggugcucuugugagcugcugcuccugcgguu

SEQ ID NO: 143149 - RNA, 32 nt, Homo Sapiens
cgccguuccugcgacauggaccgcggccagcc

SEQ ID NO: 143150 - RNA, 32 nt, Homo Sapiens
ccucugccccagccggccccgcgccaccaugc

SEQ ID NO: 143151 - RNA, 32 nt, Homo Sapiens
uccccacgguagguccuagaaacuagaacccu

SEQ ID NO: 143152 - RNA, 32 nt, Homo Sapiens
cucccagugcuggcuccaggcuccucgugugg

SEQ ID NO: 143153 - RNA, 32 nt, Homo Sapiens
uguaaguacuuuguauuuaauauauaauauug

SEQ ID NO: 143154 - RNA, 32 nt, Homo Sapiens
uaacaaaugugaacagaagccagcagagaauu

SEQ ID NO: 143155 - RNA, 32 nt, Homo Sapiens
uuauagaaaauauuuucuguuuuaaucuuuuc

SEQ ID NO: 143156 - RNA, 32 nt, Homo Sapiens
ucucucagugaggagcugcugcugugcuguuu

SEQ ID NO: 143157 - RNA, 29 nt, Homo Sapiens
auuuucuaaaguuuguauuuucuagcuug

SEQ ID NO: 143158 - RNA, 32 nt, Homo Sapiens
gaaggaacugguuuuguuuuuguuuuuguuuu

SEQ ID NO: 143159 - RNA, 32 nt, Homo Sapiens
aaacgaugaugaugaacacagaggacggggca

SEQ ID NO: 143160 - RNA, 32 nt, Homo Sapiens
aagcuucccuccccugcuccgaccuuugaguu

SEQ ID NO: 143161 - RNA, 32 nt, Homo Sapiens
gcuuccuguccuaaaagucauugguuaaaugu

SEQ ID NO: 143162 - RNA, 32 nt, Homo Sapiens
ggaugggugcaguucaggagauagcuguucuc

SEQ ID NO: 143163 - RNA, 32 nt, Homo Sapiens
uuuguuuucuucauagcccuagcaucacagaa

SEQ ID NO: 143164 - RNA, 32 nt, Homo Sapiens
gaauuugaggacuuugaggacaauggugacag

SEQ ID NO: 143165 - RNA, 32 nt, Homo Sapiens
uucgggccugucaugaucaucucucgguuugc

SEQ ID NO: 143166 - RNA, 31 nt, Homo Sapiens
uuauagugaaacaaagccagagcaucuuugu

SEQ ID NO: 143167 - RNA, 32 nt, Homo Sapiens
cugucacugucaaucugcuauauuuuucacua

SEQ ID NO: 143168 - RNA, 32 nt, Homo Sapiens
ugaaagaugcaacugccaauauuaucuuucuu

SEQ ID NO: 143169 - RNA, 32 nt, Homo Sapiens
uaccuuccugauguuccaacccuuuauaagaa

SEQ ID NO: 143170 - RNA, 32 nt, Homo Sapiens
uccacuggcauaguagauauaaacuauuccuu

SEQ ID NO: 143171 - RNA, 29 nt, Homo Sapiens
ugguugaggagacagaggacccagguggg

SEQ ID NO: 143172 - RNA, 32 nt, Homo Sapiens
aguaagggaaagggagugucaggacauuccca

SEQ ID NO: 143173 - RNA, 32 nt, Homo Sapiens
ccuugugccaccugguggacgggaaaggcagg

SEQ ID NO: 143174 - RNA, 32 nt, Homo Sapiens
agccccuaugaguaggguguuuguggacuacc

SEQ ID NO: 143175 - RNA, 32 nt, Homo Sapiens
uagaacaaaaauagccaauaaaaacgcugagu

SEQ ID NO: 143176 - RNA, 32 nt, Homo Sapiens
uacauaaaacuagauaacuuugaaaaaagcca

SEQ ID NO: 143177 - RNA, 32 nt, Homo Sapiens
guagaggaccuguguguguacucugugguucu

SEQ ID NO: 143178 - RNA, 31 nt, Homo Sapiens
gcaccgaggcacgcucugccccguguuugac

SEQ ID NO: 143179 - RNA, 31 nt, Homo Sapiens
aagcuggagccccuagaagcuagaaaaggca

SEQ ID NO: 143180 - RNA, 32 nt, Homo Sapiens
gggggagggggaggagaaggggcaguugugac

SEQ ID NO: 143181 - RNA, 32 nt, Homo Sapiens
uggagauggcuggggcggcgccccacagugug

SEQ ID NO: 143182 - RNA, 32 nt, Homo Sapiens
agcccaggcugcccacaagaccaugagccacc

SEQ ID NO: 143183 - RNA, 32 nt, Homo Sapiens
auacucucaucccaccuccagacugacaacaa

SEQ ID NO: 143184 - RNA, 32 nt, Homo Sapiens
auagaaaacuaaaggggcaggggaagugaaag

SEQ ID NO: 143185 - RNA, 32 nt, Homo Sapiens
acuguguauaaaauauuuaugccguuaaaacu

SEQ ID NO: 143186 - RNA, 32 nt, Homo Sapiens
ugucagaagcaaacaggagcggcaacuucuaa

SEQ ID NO: 143187 - RNA, 32 nt, Homo Sapiens
auugugcaggacaguaaauaaugaaaaccaaa

SEQ ID NO: 143188 - RNA, 32 nt, Homo Sapiens
aaagacauuuauguuucuuuuacauucaugac

SEQ ID NO: 143189 - RNA, 32 nt, Homo Sapiens
ugaaguuuucuuuuacuaucuuuucauuuauc

SEQ ID NO: 143190 - RNA, 32 nt, Homo Sapiens
aggaggccaagaagaagugcugggggcauggg

SEQ ID NO: 143191 - RNA, 32 nt, Homo Sapiens
ucauccucccagguggcugaaacuacaggcac

SEQ ID NO: 143192 - RNA, 32 nt, Homo Sapiens
acccggaaagacugaaagaauacauuuuauau

SEQ ID NO: 143193 - RNA, 32 nt, Homo Sapiens
ggcuguaacuacuuuauaacuaacauguccug

SEQ ID NO: 143194 - RNA, 32 nt, Homo Sapiens
uucuuagauauuuagagcaucaccuuguuuuu

SEQ ID NO: 143195 - RNA, 32 nt, Homo Sapiens
uacauuuuaagugauucauuuuuaguuuuucu

SEQ ID NO: 143196 - RNA, 32 nt, Homo Sapiens
ugggaguauggccacccugcuccacgaugcgg

SEQ ID NO: 143197 - RNA, 32 nt, Homo Sapiens
ggaggcucagcaaagcugauuaacucaggcag

SEQ ID NO: 143198 - RNA, 32 nt, Homo Sapiens
agcccuucccagcuccuccuccaaugaaggaa

SEQ ID NO: 143199 - RNA, 32 nt, Homo Sapiens
uuuuuucuuagauuuuacaugcauuuucccaa

SEQ ID NO: 143200 - RNA, 32 nt, Homo Sapiens
caccccacucccuguuugacggcccagccugg

SEQ ID NO: 143201 - RNA, 32 nt, Homo Sapiens
agcucggggcugaagcacuggaugcacuucuu

SEQ ID NO: 143202 - RNA, 32 nt, Homo Sapiens
ugcuguuacugggcagaaccacguuuuaugua

SEQ ID NO: 143203 - RNA, 32 nt, Homo Sapiens
gaauauucuuugauuuauagaauucauuuuug

SEQ ID NO: 143204 - RNA, 32 nt, Homo Sapiens
gcugugaacccaugaggcuugccaaguaggga

SEQ ID NO: 143205 - RNA, 32 nt, Homo Sapiens
uaaauguagacuauuuguuggcuaguacuuga

SEQ ID NO: 143206 - RNA, 32 nt, Homo Sapiens
cucaaugucuucuacccucguuuucccaauag

SEQ ID NO: 143207 - RNA, 32 nt, Homo Sapiens
ccugauugaggguggguggguggacccaggcu

SEQ ID NO: 143208 - RNA, 32 nt, Homo Sapiens
aggagggaccacuggaacauguggugcuuggg

SEQ ID NO: 143209 - RNA, 32 nt, Homo Sapiens
uucaaaagugaaauaaaaauuuuaucaguuaa

SEQ ID NO: 143210 - RNA, 32 nt, Homo Sapiens
cuugaaauguucuguuuaaaucaguaggcuua

SEQ ID NO: 143211 - RNA, 32 nt, Homo Sapiens
gggauccuggaggacuuugugcaugggcaggc

SEQ ID NO: 143212 - RNA, 32 nt, Homo Sapiens
aaaccagagagaaagaagauuuauuaugaacc

SEQ ID NO: 143213 - RNA, 32 nt, Homo Sapiens
cagcagguuuuuauuagggauuuuaaaagggg

SEQ ID NO: 143214 - RNA, 32 nt, Homo Sapiens
aagguguugcuuaauuuauuucuagaaaagca

SEQ ID NO: 143215 - RNA, 32 nt, Homo Sapiens
accucacugugguggucgugcacuauggcuuu

SEQ ID NO: 143216 - RNA, 32 nt, Homo Sapiens
uauggggaaagucuugccuguuuuccaaggcu

SEQ ID NO: 143217 - RNA, 32 nt, Homo Sapiens
uuugcuaaaaauuauuggcuuaaaucugugua

SEQ ID NO: 143218 - RNA, 32 nt, Homo Sapiens
agccgccgccccagcaucacguccucuauuuc

SEQ ID NO: 143219 - RNA, 32 nt, Homo Sapiens
cccccgcccccucucccgcugcguccgcacuc

SEQ ID NO: 143220 - RNA, 32 nt, Homo Sapiens
auggccuggcccugcccucccgaaggccgcag

SEQ ID NO: 143221 - RNA, 32 nt, Homo Sapiens
guuucggagcuuguguaacaguuuuugggaua

SEQ ID NO: 143222 - RNA, 32 nt, Homo Sapiens
ucagguugguuccuggcaaaaauguaccucca

SEQ ID NO: 143223 - RNA, 32 nt, Homo Sapiens
uggauggauggcugcuggaaaccccuugccau

SEQ ID NO: 143224 - RNA, 32 nt, Homo Sapiens
auauuuucuaagauuauuuggaagcauguuug

SEQ ID NO: 143225 - RNA, 32 nt, Homo Sapiens
gcgcacucucucccgcgccggcggcucagccu

SEQ ID NO: 143226 - RNA, 32 nt, Homo Sapiens
cacauauuuuugcaugccacauuuuugcuuuu

SEQ ID NO: 143227 - RNA, 32 nt, Homo Sapiens
gcugauugggcagggaaaacauccuuucauuu

SEQ ID NO: 143228 - RNA, 32 nt, Homo Sapiens
gaggaguuacccuacagccugaucugcaccug

SEQ ID NO: 143229 - RNA, 32 nt, Homo Sapiens
ggcucagaggccccacccugccccacaccugc

SEQ ID NO: 143230 - RNA, 32 nt, Homo Sapiens
aacaucaaccgggucucaaccuguuacaguga

SEQ ID NO: 143231 - RNA, 28 nt, Homo Sapiens
uugauaaaaguaccuuuucaugugguga

SEQ ID NO: 143232 - RNA, 32 nt, Homo Sapiens
cugccgugugauguuucaauaaagguggaucu

SEQ ID NO: 143233 - RNA, 32 nt, Homo Sapiens
agaccaguaauauauaagucacuuuacagugc

SEQ ID NO: 143234 - RNA, 32 nt, Homo Sapiens
uuucaaaaaagcaaaaucauggaaaauuuuug

SEQ ID NO: 143235 - RNA, 32 nt, Homo Sapiens
guugaggacuucuugcuggucuagucacgcau

SEQ ID NO: 143236 - RNA, 32 nt, Homo Sapiens
uguaucaauauguuugugcagugaugaaugua

SEQ ID NO: 143237 - RNA, 32 nt, Homo Sapiens
gcauuuuucagagugcucuggaugucguguga

SEQ ID NO: 143238 - RNA, 32 nt, Homo Sapiens
uuaacaagucuuucuccuccagcccuucucuu

SEQ ID NO: 143239 - RNA, 28 nt, Homo Sapiens
uacaugaaaaggaugguuucuuggagcu

SEQ ID NO: 143240 - RNA, 32 nt, Homo Sapiens
cauuaaaguauuuauuggcagaaucacaaaaa

SEQ ID NO: 143241 - RNA, 32 nt, Homo Sapiens
ccacaggagagccggccagccacgggcuccau

SEQ ID NO: 143242 - RNA, 32 nt, Homo Sapiens
ucaauuaauaaggauuuauaaucaaccuauaa

SEQ ID NO: 143243 - RNA, 30 nt, Homo Sapiens
cuuauguuccaaguguacaagaguaagauu

SEQ ID NO: 143244 - RNA, 32 nt, Homo Sapiens
cauugaugggcauuuaguuugauuccaugucu

SEQ ID NO: 143245 - RNA, 32 nt, Homo Sapiens
ccaacccccuccucgucuccugcuggguuacu

SEQ ID NO: 143246 - RNA, 32 nt, Homo Sapiens
aaauaucuuaugucccuaauugccuuucuuuu

SEQ ID NO: 143247 - RNA, 32 nt, Homo Sapiens
cuuaagaauuauuuaaguuguguuggguuaag

SEQ ID NO: 143248 - RNA, 32 nt, Homo Sapiens
aauaauguauuaccaugaaaaauguuucuaau

SEQ ID NO: 143249 - RNA, 32 nt, Homo Sapiens
cuuuguuaauuguuucauuuuguuuuguuuuu

SEQ ID NO: 143250 - RNA, 32 nt, Homo Sapiens
acucuucugcaguuauacuaaaaaugaaaaug

SEQ ID NO: 143251 - RNA, 32 nt, Homo Sapiens
ccuuagucuucucauagcauuaacuaaucuau

SEQ ID NO: 143252 - RNA, 32 nt, Homo Sapiens
aagaccacucaaaacaugcuuacacuaacacu

SEQ ID NO: 143253 - RNA, 32 nt, Homo Sapiens
gcagccaucuugccggcaccgccccgccccuc

SEQ ID NO: 143254 - RNA, 32 nt, Homo Sapiens
auugauuuuugacaaauaccauuugaaauauu

SEQ ID NO: 143255 - RNA, 32 nt, Homo Sapiens
aacuucauagacagaagguagaauggugguug

SEQ ID NO: 143256 - RNA, 32 nt, Homo Sapiens
gcucggcccgcggccugacagggacuuagccc

SEQ ID NO: 143257 - RNA, 32 nt, Homo Sapiens
ugucuuuuauuuuaagcaucaaauuguuuuag

SEQ ID NO: 143258 - RNA, 32 nt, Homo Sapiens
gacggaccccucguccucccccagcgguggua

SEQ ID NO: 143259 - RNA, 32 nt, Homo Sapiens
ucugcugaggauggggcaggcugggguguggg

SEQ ID NO: 143260 - RNA, 32 nt, Homo Sapiens
agaugugaauggcagaauauuaagaagggggu

SEQ ID NO: 143261 - RNA, 32 nt, Homo Sapiens
cgccggcuucccugcuaggagcagcagaggau

SEQ ID NO: 143262 - RNA, 32 nt, Homo Sapiens
ugcgcacagucaaucaggguagaggggguauu

SEQ ID NO: 143263 - RNA, 32 nt, Homo Sapiens
acggacgaggggccuggcggagcuaacugaga

SEQ ID NO: 143264 - RNA, 32 nt, Homo Sapiens
uugguauguacaaacuguugacuuguaaaauc

SEQ ID NO: 143265 - RNA, 32 nt, Homo Sapiens
aauaacaaaucguccaaagaucucaaaguaag

SEQ ID NO: 143266 - RNA, 32 nt, Homo Sapiens
gagcagaaaaaguuugacacaguauuauauga

SEQ ID NO: 143267 - RNA, 32 nt, Homo Sapiens
ugcuaucccguccacaccgcuucauugaugag

SEQ ID NO: 143268 - RNA, 32 nt, Homo Sapiens
cugcgcggccccagccugggcacccugauuuu

SEQ ID NO: 143269 - RNA, 32 nt, Homo Sapiens
auacagagugcagcugcagugccaaacagaag

SEQ ID NO: 143270 - RNA, 32 nt, Homo Sapiens
cccuucccgaacgccggcacccccuuccgcuu

SEQ ID NO: 143271 - RNA, 32 nt, Homo Sapiens
cauuuuaaacacaaaugugaagaacuuguaua

SEQ ID NO: 143272 - RNA, 32 nt, Homo Sapiens
ccucagaccuggcuuuuuccucagucccuguu

SEQ ID NO: 143273 - RNA, 32 nt, Homo Sapiens
gaaaagcagaaagacaagaacaauuagucaag

SEQ ID NO: 143274 - RNA, 32 nt, Homo Sapiens
ucgggccgcguguacaggcgcgggaagcugau

SEQ ID NO: 143275 - RNA, 32 nt, Homo Sapiens
cucaacuauaaacuggagaugauaacuuauac

SEQ ID NO: 143276 - RNA, 32 nt, Homo Sapiens
gacagagucccacucugucacccaggcuggag

SEQ ID NO: 143277 - RNA, 32 nt, Homo Sapiens
aauacagcaugcacgguccuagcugauagacc

SEQ ID NO: 143278 - RNA, 32 nt, Homo Sapiens
aauauguccauaucuaaccagugauucgagcu

SEQ ID NO: 143279 - RNA, 32 nt, Homo Sapiens
cccugagauuuaaccccuccacugcugggggu

SEQ ID NO: 143280 - RNA, 32 nt, Homo Sapiens
cacgcauacauagcauaacauuagcagcauau

SEQ ID NO: 143281 - RNA, 32 nt, Homo Sapiens
auauguauauauacauauauauacgcacacac

SEQ ID NO: 143282 - RNA, 32 nt, Homo Sapiens
uaauaacgcuuuauguuauacauuaaauguaa

SEQ ID NO: 143283 - RNA, 31 nt, Homo Sapiens
aacuuagcaacacuauauugaguuaauagaa

SEQ ID NO: 143284 - RNA, 32 nt, Homo Sapiens
ccaugaugaugaugaugggacucaauuguauu

SEQ ID NO: 143285 - RNA, 32 nt, Homo Sapiens
ccgcuagcacgcuuccugcucagagcagugaa

SEQ ID NO: 143286 - RNA, 32 nt, Homo Sapiens
ccugcuggccccaggacuucugaucucagucc

SEQ ID NO: 143287 - RNA, 32 nt, Homo Sapiens
auuuaguuuaacugaaauuugcugcugauaug

SEQ ID NO: 143288 - RNA, 32 nt, Homo Sapiens
cccugcccacaaaacauugcucuuaacuucac

SEQ ID NO: 143289 - RNA, 32 nt, Homo Sapiens
auucuaaugcuguucuuauuauuguguuuuaa

SEQ ID NO: 143290 - RNA, 32 nt, Homo Sapiens
gcugccugucuucgcgccacuguugucccacc

SEQ ID NO: 143291 - RNA, 32 nt, Homo Sapiens
cuuuccaucugcuuuuucagcuucuccaucgc

SEQ ID NO: 143292 - RNA, 32 nt, Homo Sapiens
gaaauaauuuuuuguacuuuguaaaauaugga

SEQ ID NO: 143293 - RNA, 32 nt, Homo Sapiens
auagacuuuugcugguuauaaaacagauguuu

SEQ ID NO: 143294 - RNA, 32 nt, Homo Sapiens
ccagggcccugccuccuccccacccccucguc

SEQ ID NO: 143295 - RNA, 32 nt, Homo Sapiens
gucucagauugggauuaacauaaaagagugga

SEQ ID NO: 143296 - RNA, 30 nt, Homo Sapiens
ugaugaggcaggcacaccugucggucuugg

SEQ ID NO: 143297 - RNA, 32 nt, Homo Sapiens
gaaacagcuuugggggccgggcgugguggcuc

SEQ ID NO: 143298 - RNA, 32 nt, Homo Sapiens
ccaagugagaagaugguauauuugguacugua

SEQ ID NO: 143299 - RNA, 32 nt, Homo Sapiens
uuuugucugcuagccauaugggacaucuaauu

SEQ ID NO: 143300 - RNA, 32 nt, Homo Sapiens
agauguagccucuguuccuccuggacauagga

SEQ ID NO: 143301 - RNA, 32 nt, Homo Sapiens
uggagcuggaugcccaggaauaugagcuccug

SEQ ID NO: 143302 - RNA, 32 nt, Homo Sapiens
gagcagcccggguccugaccccggcccggcuc

SEQ ID NO: 143303 - RNA, 32 nt, Homo Sapiens
cuuuuguugcaugcaaaaauuuuuucucauua

SEQ ID NO: 143304 - RNA, 32 nt, Homo Sapiens
uauuucccgagcuccauugcggaagcugaggc

SEQ ID NO: 143305 - RNA, 32 nt, Homo Sapiens
cccagacacauacuuugguuucuaguguuuca

SEQ ID NO: 143306 - RNA, 32 nt, Homo Sapiens
cugagaugccgagcggugcccgggcccgcuua

SEQ ID NO: 143307 - RNA, 32 nt, Homo Sapiens
ccguaaucauaucuuuuuccuaucugaggcac

SEQ ID NO: 143308 - RNA, 32 nt, Homo Sapiens
gaauguggaaaauuauuuagacaaaacuccag

SEQ ID NO: 143309 - RNA, 32 nt, Homo Sapiens
ugggcucggcccggacccggcauucggacuug

SEQ ID NO: 143310 - RNA, 30 nt, Homo Sapiens
cucagcuaaguauuugccuaacccugacca

SEQ ID NO: 143311 - RNA, 32 nt, Homo Sapiens
ugcugggacugggcugguuuuguccuugaagu

SEQ ID NO: 143312 - RNA, 32 nt, Homo Sapiens
ggccucuacuuuuuuuuuuuuaagcugcauac

SEQ ID NO: 143313 - RNA, 32 nt, Homo Sapiens
gcucggccucuccccggcacguucucagcugc

SEQ ID NO: 143314 - RNA, 32 nt, Homo Sapiens
auuucaagauaaaauuuaaguauucaguaaaa

SEQ ID NO: 143315 - RNA, 31 nt, Homo Sapiens
gcucccuggcgcagccacgcaggcgcaccgc

SEQ ID NO: 143316 - RNA, 32 nt, Homo Sapiens
guguguggugggcagacaccacaggguggcau

SEQ ID NO: 143317 - RNA, 32 nt, Homo Sapiens
uguacuugcuaaaaaucaacugugcgcuugaa

SEQ ID NO: 143318 - RNA, 32 nt, Homo Sapiens
acucauaaaauaagauuuccuguuucauguag

SEQ ID NO: 143319 - RNA, 32 nt, Homo Sapiens
gcgggaggcagagggaggacccuggaacaucc

SEQ ID NO: 143320 - RNA, 32 nt, Homo Sapiens
auguuuucucagucuccuuaaaguuacgucca

SEQ ID NO: 143321 - RNA, 32 nt, Homo Sapiens
cuagaggggcuuaaaaaguaaucauuugaugu

SEQ ID NO: 143322 - RNA, 32 nt, Homo Sapiens
uuuuguguacagagagauauuuuugcaacuau

SEQ ID NO: 143323 - RNA, 32 nt, Homo Sapiens
cugcaggugaccguaacaacaugcaaauggug

SEQ ID NO: 143324 - RNA, 32 nt, Homo Sapiens
uguuacaaaaagacaaaaaugaaauauauaac

SEQ ID NO: 143325 - RNA, 32 nt, Homo Sapiens
auguauaucuucuacaugcaauuuagaacuag

SEQ ID NO: 143326 - RNA, 32 nt, Homo Sapiens
aguccucuucugcugcucccagcccccuccuc

SEQ ID NO: 143327 - RNA, 32 nt, Homo Sapiens
cacaagaaaaagauaagaaauacuagaguaaa

SEQ ID NO: 143328 - RNA, 32 nt, Homo Sapiens
aaccguacaguuucauuugcauuuugacauua

SEQ ID NO: 143329 - RNA, 32 nt, Homo Sapiens
auguaaucuacaguauaaaaaauauaucucau

SEQ ID NO: 143330 - RNA, 32 nt, Homo Sapiens
gagagugggaggagggcacguaccgggugcca

SEQ ID NO: 143331 - RNA, 32 nt, Homo Sapiens
cagggcguucacucagaccaucugugcucugc

SEQ ID NO: 143332 - RNA, 32 nt, Homo Sapiens
augauguuuaccagcacuauuaacuuacugca

SEQ ID NO: 143333 - RNA, 32 nt, Homo Sapiens
uguuggugaugaaauucccagugguguuucuu

SEQ ID NO: 143334 - RNA, 32 nt, Homo Sapiens
ugagaaugccugcuucucuacauccuggaaga

SEQ ID NO: 143335 - RNA, 32 nt, Homo Sapiens
ucuagcuuuucucacuguggaaaagaaacguu

SEQ ID NO: 143336 - RNA, 29 nt, Homo Sapiens
gcaucaagaaaaguagauuuucuagaaau

SEQ ID NO: 143337 - RNA, 27 nt, Homo Sapiens
augcaauaaaguuaguuuuugaaaugu

SEQ ID NO: 143338 - RNA, 32 nt, Homo Sapiens
ccuaagggcugggauuacaggaaugagccagc

SEQ ID NO: 143339 - RNA, 27 nt, Homo Sapiens
uggggcuccuucuucagcccuccccuu

SEQ ID NO: 143340 - RNA, 32 nt, Homo Sapiens
uguagugccagacaaugauuuacacagcucag

SEQ ID NO: 143341 - RNA, 32 nt, Homo Sapiens
aaaaaagaaacaaccuuggccuuaaugucaau

SEQ ID NO: 143342 - RNA, 32 nt, Homo Sapiens
cugagccgacagcggauguaaacuacaucguc

SEQ ID NO: 143343 - RNA, 32 nt, Homo Sapiens
guguaaucuguguucuuuuuuauuuggucaua

SEQ ID NO: 143344 - RNA, 32 nt, Homo Sapiens
uguccaagugagccagugucuucaucacaaga

SEQ ID NO: 143345 - RNA, 32 nt, Homo Sapiens
ccugacucuuacauuucuuuggcagagcaguu

SEQ ID NO: 143346 - RNA, 32 nt, Homo Sapiens
uaccuuuagacuacucugugacuacagaaaua

SEQ ID NO: 143347 - RNA, 32 nt, Homo Sapiens
ucugcauuucuuuuauaaaacuaaguauauac

SEQ ID NO: 143348 - RNA, 32 nt, Homo Sapiens
ggaagugacaacaagauugacauggaaugaug

SEQ ID NO: 143349 - RNA, 32 nt, Homo Sapiens
gagcaguguucgccucagcacagacccgggcg

SEQ ID NO: 143350 - RNA, 32 nt, Homo Sapiens
cugauuuucauacuuuuuccucuuagucuaca

SEQ ID NO: 143351 - RNA, 32 nt, Homo Sapiens
gcugcaaaauggugcuucaggcugucagcaaa

SEQ ID NO: 143352 - RNA, 32 nt, Homo Sapiens
uggcuacacagaccccuccccucgugucagcu

SEQ ID NO: 143353 - RNA, 32 nt, Homo Sapiens
gcugaaauggaagucagaagugagugaccugu

SEQ ID NO: 143354 - RNA, 32 nt, Homo Sapiens
cacugggccuccaguucuuccacaugugugca

SEQ ID NO: 143355 - RNA, 32 nt, Homo Sapiens
gcuguccugcuuccugcccuucaauagccguu

SEQ ID NO: 143356 - RNA, 32 nt, Homo Sapiens
acauuaaaaagaaaacaaaacaaacccuaacu

SEQ ID NO: 143357 - RNA, 32 nt, Homo Sapiens
ugccauaaauaauucagaaacacuuguauggu

SEQ ID NO: 143358 - RNA, 32 nt, Homo Sapiens
ucugggccccgguucauggaucuuuuguccuc

SEQ ID NO: 143359 - RNA, 32 nt, Homo Sapiens
gcauuuuaaacacaaaugugaagaacuuguau

SEQ ID NO: 143360 - RNA, 32 nt, Homo Sapiens
uuccaggcacugggagugguccuccugcagga

SEQ ID NO: 143361 - RNA, 32 nt, Homo Sapiens
gaaacagguucagcauguuugcacuuguuauu

SEQ ID NO: 143362 - RNA, 32 nt, Homo Sapiens
cugaaggaggcagaggacguggagcgggaggc

SEQ ID NO: 143363 - RNA, 32 nt, Homo Sapiens
gagucucucuccaugccccucaucucuuccuu

SEQ ID NO: 143364 - RNA, 32 nt, Homo Sapiens
aggagccugcccagcccccuggucuuugagcu

SEQ ID NO: 143365 - RNA, 32 nt, Homo Sapiens
augaugcuauuaaagaaauguguguacuaagc

SEQ ID NO: 143366 - RNA, 32 nt, Homo Sapiens
gcauuuuaaaagacaucaauaagauaauggaa

SEQ ID NO: 143367 - RNA, 32 nt, Homo Sapiens
cccacuguucuucuguuguacgagcucccuga

SEQ ID NO: 143368 - RNA, 32 nt, Homo Sapiens
ccagccuccaauccgacccccauuucggcugc

SEQ ID NO: 143369 - RNA, 32 nt, Homo Sapiens
guagucagccacuuaugcaccaaugugaggaa

SEQ ID NO: 143370 - RNA, 32 nt, Homo Sapiens
agagcgcccucgguagccccagccaggcacug

SEQ ID NO: 143371 - RNA, 32 nt, Homo Sapiens
auauucuugcugucaaucaaucacaaauuuau

SEQ ID NO: 143372 - RNA, 32 nt, Homo Sapiens
ggcagaaggacagucugguuaaaauuauauug

SEQ ID NO: 143373 - RNA, 32 nt, Homo Sapiens
gcauaauggauauuuuuuaacuuggcgagaug

SEQ ID NO: 143374 - RNA, 32 nt, Homo Sapiens
ugggagguggagguuauagugagccuagauug

SEQ ID NO: 143375 - RNA, 32 nt, Homo Sapiens
aagugugcaccaagaccauucauuucagguag

SEQ ID NO: 143376 - RNA, 32 nt, Homo Sapiens
cacuauaagggaguaggcuguauuuucuuuua

SEQ ID NO: 143377 - RNA, 32 nt, Homo Sapiens
ucugguuugugucagaaccagacgccaacuuu

SEQ ID NO: 143378 - RNA, 32 nt, Homo Sapiens
uuaauaaaugucauuucacuacugguguucug

SEQ ID NO: 143379 - RNA, 32 nt, Homo Sapiens
uucaccguguggaacaagugucugacgauuau

SEQ ID NO: 143380 - RNA, 32 nt, Homo Sapiens
caucuguugcuuuggguccuccacgacucuua

SEQ ID NO: 143381 - RNA, 32 nt, Homo Sapiens
auuuauugccuugcucugcccucucccuuccc

SEQ ID NO: 143382 - RNA, 32 nt, Homo Sapiens
ucuuacugauuucaaacacuuuuuucuucugu

SEQ ID NO: 143383 - RNA, 32 nt, Homo Sapiens
cagcuggcacgcugugcagcagcagugaagcc

SEQ ID NO: 143384 - RNA, 32 nt, Homo Sapiens
gcaaucuggaucuuaaauuuaugugaauacau

SEQ ID NO: 143385 - RNA, 32 nt, Homo Sapiens
uauuuuuggaaugaaaaguuuggggcuuuuuu

SEQ ID NO: 143386 - RNA, 32 nt, Homo Sapiens
acaagcaaggacccagaugcaucagacacagc

SEQ ID NO: 143387 - RNA, 32 nt, Homo Sapiens
uccuugucaugcccggccuguggacagccagc

SEQ ID NO: 143388 - RNA, 32 nt, Homo Sapiens
aauuaaaaagaaagaaacuuuuuucuggaaaa

SEQ ID NO: 143389 - RNA, 32 nt, Homo Sapiens
ugccuuaccccucuguucccagccccagccuu

SEQ ID NO: 143390 - RNA, 32 nt, Homo Sapiens
cuccagcaaccucagaggacucccccauccag

SEQ ID NO: 143391 - RNA, 32 nt, Homo Sapiens
aauuauuuuugcauguuuuucuuaauuccaug

SEQ ID NO: 143392 - RNA, 31 nt, Homo Sapiens
gacauagagagaaaggaacgauauucucauc

SEQ ID NO: 143393 - RNA, 32 nt, Homo Sapiens
ggaacgcgacuggcagccaggccugucgggcc

SEQ ID NO: 143394 - RNA, 32 nt, Homo Sapiens
guuuccccagccucagccccagccccagcccc

SEQ ID NO: 143395 - RNA, 31 nt, Homo Sapiens
aguguuuaaaauaaaaaugaauauggucuuc

SEQ ID NO: 143396 - RNA, 32 nt, Homo Sapiens
agagauuguaaaagaagcagauugaaugaaga

SEQ ID NO: 143397 - RNA, 32 nt, Homo Sapiens
ccagagcuuggguuccucucuccucucccccu

SEQ ID NO: 143398 - RNA, 32 nt, Homo Sapiens
auauuuuuacuucuucauucugggauauugug

SEQ ID NO: 143399 - RNA, 32 nt, Homo Sapiens
gaaaaugugucugguugaaaugucuucuggau

SEQ ID NO: 143400 - RNA, 32 nt, Homo Sapiens
ugccaggcauggugcuggguuacaugugugug

SEQ ID NO: 143401 - RNA, 32 nt, Homo Sapiens
uagagacuaucuuuuuaacaucucuuguacau

SEQ ID NO: 143402 - RNA, 30 nt, Homo Sapiens
accaccaugccuagcuauucuuuuguauuu

SEQ ID NO: 143403 - RNA, 32 nt, Homo Sapiens
gaggugaucauguccggucgcgggaaacaggg

SEQ ID NO: 143404 - RNA, 32 nt, Homo Sapiens
aaauauaauauugugugaugcauauuacaaag

SEQ ID NO: 143405 - RNA, 32 nt, Homo Sapiens
caacucuccagugccuggauccccucugucua

SEQ ID NO: 143406 - RNA, 32 nt, Homo Sapiens
augacucuauagaaagaugucuuaacuucaua

SEQ ID NO: 143407 - RNA, 32 nt, Homo Sapiens
ugguucugacuucugggaacugcuuugcauuu

SEQ ID NO: 143408 - RNA, 32 nt, Homo Sapiens
gcgcaggcaccggcccggggagaggcaccaug

SEQ ID NO: 143409 - RNA, 32 nt, Homo Sapiens
cuuugaaagcuacgaagccaaggcaagaauuc

SEQ ID NO: 143410 - RNA, 32 nt, Homo Sapiens
uauugugcuucagugccauugcagcuugaaaa

SEQ ID NO: 143411 - RNA, 32 nt, Homo Sapiens
uuggcugcucucccggccccaagccugaguga

SEQ ID NO: 143412 - RNA, 32 nt, Homo Sapiens
auuggaaaaaagucugaaagauacaucauuuc

SEQ ID NO: 143413 - RNA, 32 nt, Homo Sapiens
gaaggggcaguuuggagaagguugugccaguc

SEQ ID NO: 143414 - RNA, 32 nt, Homo Sapiens
ccacgguguucccuggcaucgucuguguccac

SEQ ID NO: 143415 - RNA, 32 nt, Homo Sapiens
caaauuuacaagaaaaaacaaacaaccccauc

SEQ ID NO: 143416 - RNA, 32 nt, Homo Sapiens
cuuuguuagacuauuugcaggucgugagauag

SEQ ID NO: 143417 - RNA, 32 nt, Homo Sapiens
cuccaaaguuaaaauaauuaacuagcuaagca

SEQ ID NO: 143418 - RNA, 32 nt, Homo Sapiens
acuuaaguagcauacacugcccuacaaaccuc

SEQ ID NO: 143419 - RNA, 30 nt, Homo Sapiens
uccaauuuuuaagggggggaaagguuucaa

SEQ ID NO: 143420 - RNA, 32 nt, Homo Sapiens
ucuccaccccucaaaaugauagcaaucucugc

SEQ ID NO: 143421 - RNA, 32 nt, Homo Sapiens
gguuuguacagcuccaccuuuuagaggucuua

SEQ ID NO: 143422 - RNA, 32 nt, Homo Sapiens
gggaggugggucuggccaauggagaugggaca

SEQ ID NO: 143423 - RNA, 32 nt, Homo Sapiens
caaaaagcaaagugggauucuuguuaccuggc

SEQ ID NO: 143424 - RNA, 32 nt, Homo Sapiens
ccacgcccggccucuuuuuuuuuuagcugcca

SEQ ID NO: 143425 - RNA, 32 nt, Homo Sapiens
gcuaaaacagcauuaccucagcucuaaacuag

SEQ ID NO: 143426 - RNA, 32 nt, Homo Sapiens
uuuuucugcuauaaguuuuccuuaccuguccu

SEQ ID NO: 143427 - RNA, 32 nt, Homo Sapiens
gggccuggguaucacaugcucuccaggaaagg

SEQ ID NO: 143428 - RNA, 32 nt, Homo Sapiens
caugaacaacagugucuagaaacccauuuuga

SEQ ID NO: 143429 - RNA, 32 nt, Homo Sapiens
gggggcggggacgaccaacuuggggcgcggcg

SEQ ID NO: 143430 - RNA, 32 nt, Homo Sapiens
caagaagagaguccguugaaaacuaaaucaca

SEQ ID NO: 143431 - RNA, 32 nt, Homo Sapiens
gcaucgaaggccuccgcgugcgcacggguugc

SEQ ID NO: 143432 - RNA, 32 nt, Homo Sapiens
gguggaaauaguaaaccuauauuuucauaauu

SEQ ID NO: 143433 - RNA, 32 nt, Homo Sapiens
ggagauguggccauggucuugugcuagagaug

SEQ ID NO: 143434 - RNA, 32 nt, Homo Sapiens
acugaauagggaggaaggucagggcuagaaag

SEQ ID NO: 143435 - RNA, 32 nt, Homo Sapiens
uguguucuuuugcgucugaugucucacuuugg

SEQ ID NO: 143436 - RNA, 32 nt, Homo Sapiens
acuacccagacacccucuuccugcauggcgag

SEQ ID NO: 143437 - RNA, 32 nt, Homo Sapiens
aggacugaccaguugcucuuccuuccaagaac

SEQ ID NO: 143438 - RNA, 32 nt, Homo Sapiens
auuauauuuucugaagcuguuuaguugguuaa

SEQ ID NO: 143439 - RNA, 32 nt, Homo Sapiens
aauauugauauguuucaauucuuaaugaaaau

SEQ ID NO: 143440 - RNA, 32 nt, Homo Sapiens
uugaaaaugaguuguauugcuaaucuugaugu

SEQ ID NO: 143441 - RNA, 32 nt, Homo Sapiens
caucucaaaccgagcuggcagcuccaggcucc

SEQ ID NO: 143442 - RNA, 32 nt, Homo Sapiens
cggagggcgagggucggagaagcggauugggu

SEQ ID NO: 143443 - RNA, 32 nt, Homo Sapiens
guaauaaaaaaguuaaaauaugcuucacuagu

SEQ ID NO: 143444 - RNA, 32 nt, Homo Sapiens
uuuggacaagauuuuccaaccuugcuggcuac

SEQ ID NO: 143445 - RNA, 30 nt, Homo Sapiens
ucuguuuuagaaaagggggaaaugaagcaa

SEQ ID NO: 143446 - RNA, 32 nt, Homo Sapiens
augggaacuauauguguguacucugugugugc

SEQ ID NO: 143447 - RNA, 32 nt, Homo Sapiens
uuacaggugugagccaccacaccugacccaua

SEQ ID NO: 143448 - RNA, 32 nt, Homo Sapiens
aaucucacccucuggggugcuggcaaggaggu

SEQ ID NO: 143449 - RNA, 32 nt, Homo Sapiens
ugaagaaauggcaguacugcuccacuucaccu

SEQ ID NO: 143450 - RNA, 32 nt, Homo Sapiens
uagauuagauuagauuagauugucaacagauu

SEQ ID NO: 143451 - RNA, 32 nt, Homo Sapiens
aggcuucuugucacacugaacacauccagcca

SEQ ID NO: 143452 - RNA, 32 nt, Homo Sapiens
ggccucggguggccacagcugccggguccucc

SEQ ID NO: 143453 - RNA, 32 nt, Homo Sapiens
ccaaaaguaaauguauuuauuuuuuagucagc

SEQ ID NO: 143454 - RNA, 32 nt, Homo Sapiens
cguuagaugauuggaagugcugccuacgucuu

SEQ ID NO: 143455 - RNA, 32 nt, Homo Sapiens
gcugaggagagccccauuuagagugagggaga

SEQ ID NO: 143456 - RNA, 31 nt, Homo Sapiens
cccgucccugccccauccugaguucuuuuga

SEQ ID NO: 143457 - RNA, 32 nt, Homo Sapiens
cugccucuuccgguuggaggcucucaugucuc

SEQ ID NO: 143458 - RNA, 32 nt, Homo Sapiens
auauaaaugggcuaaaugcccaauuaacacug

SEQ ID NO: 143459 - RNA, 32 nt, Homo Sapiens
gacaucuuuuuauucgaaaauuuuacuuuuca

SEQ ID NO: 143460 - RNA, 32 nt, Homo Sapiens
aaagcaugagagagcaaaaccuaugaguugac

SEQ ID NO: 143461 - RNA, 32 nt, Homo Sapiens
agccugcggggacgggccggccgcggccguag

SEQ ID NO: 143462 - RNA, 32 nt, Homo Sapiens
aguuuugaaggauguuugagcuuuuguauaau

SEQ ID NO: 143463 - RNA, 32 nt, Homo Sapiens
ggaugccgagaacgcgagcgauccgagcaggg

SEQ ID NO: 143464 - RNA, 32 nt, Homo Sapiens
aucacgggcaugcacagcguggaggucagcgg

SEQ ID NO: 143465 - RNA, 32 nt, Homo Sapiens
uggcuuuauuuuauguuuuucuuucuuuugaa

SEQ ID NO: 143466 - RNA, 32 nt, Homo Sapiens
ucuaauggauaguguacauucuucuuaaaguc

SEQ ID NO: 143467 - RNA, 32 nt, Homo Sapiens
caugaugcugucccuccugaugagaugguuuu

SEQ ID NO: 143468 - RNA, 32 nt, Homo Sapiens
uaugcuugaaagaaugucacuaacugguccag

SEQ ID NO: 143469 - RNA, 32 nt, Homo Sapiens
caguagcuauggaagugacauaccuaaaacac

SEQ ID NO: 143470 - RNA, 32 nt, Homo Sapiens
accuagucuguaacucuuucugaggagcuguu

SEQ ID NO: 143471 - RNA, 32 nt, Homo Sapiens
aggaguuggcaagagaacccccugcccugucc

SEQ ID NO: 143472 - RNA, 32 nt, Homo Sapiens
cccucccccaacucccgcacaggcccugcccc

SEQ ID NO: 143473 - RNA, 32 nt, Homo Sapiens
cgcccaaugcaaaaucgaugaaauggggaguu

SEQ ID NO: 143474 - RNA, 32 nt, Homo Sapiens
agggaggggcccuggaggagaggcugacuaca

SEQ ID NO: 143475 - RNA, 32 nt, Homo Sapiens
ucccaucuugguuacacagaaaugguagcccu

SEQ ID NO: 143476 - RNA, 32 nt, Homo Sapiens
uuccccacucccaccucaaacccaggagcaga

SEQ ID NO: 143477 - RNA, 32 nt, Homo Sapiens
auuucuuaucaaauuucuuuuguagcaaucua

SEQ ID NO: 143478 - RNA, 32 nt, Homo Sapiens
uccagaccccccagccccuccucccucagacc

SEQ ID NO: 143479 - RNA, 32 nt, Homo Sapiens
aguaauuuuuaaaaauacaaucuccgcguaaa

SEQ ID NO: 143480 - RNA, 32 nt, Homo Sapiens
gcagugagccgugauggcgccacugcacuuca

SEQ ID NO: 143481 - RNA, 32 nt, Homo Sapiens
caggaggugcacggauccugcugggcacuggg

SEQ ID NO: 143482 - RNA, 32 nt, Homo Sapiens
ccuuuccccagcgccccugagggccagaggca

SEQ ID NO: 143483 - RNA, 32 nt, Homo Sapiens
guuccugccuuacgcugaaaggcugagugggg

SEQ ID NO: 143484 - RNA, 32 nt, Homo Sapiens
ccugugauaggggcugaugagauggaaucugu

SEQ ID NO: 143485 - RNA, 30 nt, Homo Sapiens
cacagggacaucccugccaggccuagaggg

SEQ ID NO: 143486 - RNA, 32 nt, Homo Sapiens
ugguucaugucugcagccccagcuacucggga

SEQ ID NO: 143487 - RNA, 32 nt, Homo Sapiens
aagaaagguggagucaguuuguaucaguuaau

SEQ ID NO: 143488 - RNA, 32 nt, Homo Sapiens
uguccugcguccagaaagaaugagauauaacu

SEQ ID NO: 143489 - RNA, 32 nt, Homo Sapiens
gauauuuuuccacauuuucuugucgcuuguuu

SEQ ID NO: 143490 - RNA, 32 nt, Homo Sapiens
accaguagaaugccuuggucugaauauuugau

SEQ ID NO: 143491 - RNA, 32 nt, Homo Sapiens
uuagcaucuucuuuaccuccaguguuccugcc

SEQ ID NO: 143492 - RNA, 32 nt, Homo Sapiens
aggaaaacaacucagggcaggauacagggagu

SEQ ID NO: 143493 - RNA, 32 nt, Homo Sapiens
uaugauauugugcaaauguuugccauaggcaa

SEQ ID NO: 143494 - RNA, 32 nt, Homo Sapiens
uaacguacaaccucaucauuuuaguggcuagc

SEQ ID NO: 143495 - RNA, 32 nt, Homo Sapiens
aaccucccuggcccggcccggugcuuguccuc

SEQ ID NO: 143496 - RNA, 32 nt, Homo Sapiens
uacggcugggcucuguacuaugcaaaaucuag

SEQ ID NO: 143497 - RNA, 32 nt, Homo Sapiens
cuuuugcauacuuuguuuugauagucugaggc

SEQ ID NO: 143498 - RNA, 32 nt, Homo Sapiens
acccuaagcaaguuccuucuccucuuagggcc

SEQ ID NO: 143499 - RNA, 32 nt, Homo Sapiens
gcaaauguggaggcggccagggcaguuguugg

SEQ ID NO: 143500 - RNA, 31 nt, Homo Sapiens
caugauugagagaauuccugaguugaucuaa

SEQ ID NO: 143501 - RNA, 32 nt, Homo Sapiens
accugggagggagagcggagaaacugggauuu

SEQ ID NO: 143502 - RNA, 32 nt, Homo Sapiens
agcaggaggagcuucaucuguucccuucccac

SEQ ID NO: 143503 - RNA, 32 nt, Homo Sapiens
ggaaagagucgccugccuccggaccggagugc

SEQ ID NO: 143504 - RNA, 32 nt, Homo Sapiens
cagcuccagaaagcagcgaguuggcagagcag

SEQ ID NO: 143505 - RNA, 32 nt, Homo Sapiens
agaccucaggcaccaccuucgcauaaacuuuu

SEQ ID NO: 143506 - RNA, 32 nt, Homo Sapiens
ccaaaaguccuuucaucuauucaccaauuauc

SEQ ID NO: 143507 - RNA, 32 nt, Homo Sapiens
agaggcgggucuauaacaggcaaucaacaaac

SEQ ID NO: 143508 - RNA, 32 nt, Homo Sapiens
accagguguggccacgggaggcggggcugcau

SEQ ID NO: 143509 - RNA, 32 nt, Homo Sapiens
uucuuccugcgguuuauucuauguuuuauaua

SEQ ID NO: 143510 - RNA, 32 nt, Homo Sapiens
ucccggccgcgcugcgcgccgcgcuccucgga

SEQ ID NO: 143511 - RNA, 32 nt, Homo Sapiens
cccacauuuguaauauagucgccauugaaaag

SEQ ID NO: 143512 - RNA, 32 nt, Homo Sapiens
auggucagcugugaggggagggggcaaguggc

SEQ ID NO: 143513 - RNA, 32 nt, Homo Sapiens
acaagaaagggaggguacgccaggcgagccca

SEQ ID NO: 143514 - RNA, 32 nt, Homo Sapiens
ucaaugugcauuccuuuugaaauacacagaaa

SEQ ID NO: 143515 - RNA, 32 nt, Homo Sapiens
gagacaccaggcaucguuuugaggaugugggu

SEQ ID NO: 143516 - RNA, 32 nt, Homo Sapiens
cauagaaguauaacugcccaaucuaugaguaa

SEQ ID NO: 143517 - RNA, 32 nt, Homo Sapiens
gcacucuagccgccgcgcccggagccggggcc

SEQ ID NO: 143518 - RNA, 32 nt, Homo Sapiens
aacagucaaaaaguuuucaaauaggcccacag

SEQ ID NO: 143519 - RNA, 32 nt, Homo Sapiens
gagcucgcauggacaaggaaggcuacuuuugg

SEQ ID NO: 143520 - RNA, 32 nt, Homo Sapiens
gagaaguagaaaguaacagugacuucuagauu

SEQ ID NO: 143521 - RNA, 32 nt, Homo Sapiens
cugaggaucugccccugaacaucucccgagaa

SEQ ID NO: 143522 - RNA, 32 nt, Homo Sapiens
ugcccaacagccuggcaucuucuuguuucucu

SEQ ID NO: 143523 - RNA, 32 nt, Homo Sapiens
agcugccguggcggccucugcgcaugcuccgu

SEQ ID NO: 143524 - RNA, 32 nt, Homo Sapiens
ugcuugcucauauuuuuugucuugauccugag

SEQ ID NO: 143525 - RNA, 32 nt, Homo Sapiens
ucugccuuggaaaacuauauggugguucuccc

SEQ ID NO: 143526 - RNA, 32 nt, Homo Sapiens
gcugcuaggcaaaauaaaacuguuucuugcuc

SEQ ID NO: 143527 - RNA, 32 nt, Homo Sapiens
cgagacuccuuggguccuccccgcccucccuc

SEQ ID NO: 143528 - RNA, 32 nt, Homo Sapiens
gacucuugaaacaaaaugagacguggucuaaa

SEQ ID NO: 143529 - RNA, 32 nt, Homo Sapiens
aguaaggcugaccucccugugugaccugccca

SEQ ID NO: 143530 - RNA, 32 nt, Homo Sapiens
aucugcacaacacaaaccaaagcccccuuucu

SEQ ID NO: 143531 - RNA, 32 nt, Homo Sapiens
ccuuuccccacuuuucauuucauauucuguuu

SEQ ID NO: 143532 - RNA, 32 nt, Homo Sapiens
acugagggaggggacagacugcuggaggacaa

SEQ ID NO: 143533 - RNA, 32 nt, Homo Sapiens
cucucccugacauaagcaaggacuuagagcug

SEQ ID NO: 143534 - RNA, 32 nt, Homo Sapiens
uuggcacuuacaaaguuuuuuuuguuuauuuu

SEQ ID NO: 143535 - RNA, 32 nt, Homo Sapiens
gaaaaucagaugaaaucagggauguggcugaa

SEQ ID NO: 143536 - RNA, 32 nt, Homo Sapiens
aaauuauguaaaauaugugccauauaaaggaa

SEQ ID NO: 143537 - RNA, 32 nt, Homo Sapiens
ucccaaagugacucacaucaaguagucugaau

SEQ ID NO: 143538 - RNA, 32 nt, Homo Sapiens
cacugaaaugguagaauaugugagauacaaau

SEQ ID NO: 143539 - RNA, 32 nt, Homo Sapiens
acuucaccugccucuagcccaagccccuaaua

SEQ ID NO: 143540 - RNA, 32 nt, Homo Sapiens
aaaugcuguagcucugcaccaacagcacagcu

SEQ ID NO: 143541 - RNA, 32 nt, Homo Sapiens
cagcuuuaugauaucaaagacucauugcuuaa

SEQ ID NO: 143542 - RNA, 32 nt, Homo Sapiens
cuauugugaugaugauuauuuauuaguaacug

SEQ ID NO: 143543 - RNA, 32 nt, Homo Sapiens
agaaaugcauaaaggaggaaacaaagcauaua

SEQ ID NO: 143544 - RNA, 32 nt, Homo Sapiens
ccaagucggagcggcguccccugcugagcccc

SEQ ID NO: 143545 - RNA, 32 nt, Homo Sapiens
gguuucaccguguuggccgggcuggucucaaa

SEQ ID NO: 143546 - RNA, 32 nt, Homo Sapiens
gccagagugucuuuuuaccuccaaacgaucac

SEQ ID NO: 143547 - RNA, 32 nt, Homo Sapiens
gauuucaccauguuggccgggcuggucucaaa

SEQ ID NO: 143548 - RNA, 32 nt, Homo Sapiens
aauuuuguuuugugcauucuaugugucagaac

SEQ ID NO: 143549 - RNA, 32 nt, Homo Sapiens
cagcggcuggucccgcuuuccuggaauuuggc

SEQ ID NO: 143550 - RNA, 32 nt, Homo Sapiens
uguaaccgaggucagagcucugggguuggcag

SEQ ID NO: 143551 - RNA, 32 nt, Homo Sapiens
gccccaaagcacuuaaagcauaagguagauug

SEQ ID NO: 143552 - RNA, 32 nt, Homo Sapiens
ccucuucaacaggguuucuuugagauccuaca

SEQ ID NO: 143553 - RNA, 32 nt, Homo Sapiens
gcagacagcuggaagggucuugguuuucugaa

SEQ ID NO: 143554 - RNA, 32 nt, Homo Sapiens
ugggcugugcaguuccucccccugccuuaaaa

SEQ ID NO: 143555 - RNA, 32 nt, Homo Sapiens
auaauaaaaaggcaaucacauaaaaaagaguu

SEQ ID NO: 143556 - RNA, 32 nt, Homo Sapiens
ucucuggagcagcauucguuuaucuucguccg

SEQ ID NO: 143557 - RNA, 32 nt, Homo Sapiens
cuuagguacccaccccacuuccuucucggaag

SEQ ID NO: 143558 - RNA, 32 nt, Homo Sapiens
ucacuucuugccuucuguggauuuugucugau

SEQ ID NO: 143559 - RNA, 32 nt, Homo Sapiens
ucacaaguaacaguugaagaaaaaauggcaag

SEQ ID NO: 143560 - RNA, 32 nt, Homo Sapiens
ucucguguguguuauuuccccagccacaggcc

SEQ ID NO: 143561 - RNA, 32 nt, Homo Sapiens
gguuuuuguuuuuucuuauugcuguggaaccu

SEQ ID NO: 143562 - RNA, 32 nt, Homo Sapiens
gucgcccgccuggcauggccaacuggguguuc

SEQ ID NO: 143563 - RNA, 32 nt, Homo Sapiens
uugugaaaauuccucaaaaggaaauuaugcug

SEQ ID NO: 143564 - RNA, 32 nt, Homo Sapiens
gaaguucgcuggcgccagcagcgggaaaaggc

SEQ ID NO: 143565 - RNA, 32 nt, Homo Sapiens
augguagaucauugugaugugccucggggccc

SEQ ID NO: 143566 - RNA, 32 nt, Homo Sapiens
guuuugaggaggagggugucugugaagaugaa

SEQ ID NO: 143567 - RNA, 32 nt, Homo Sapiens
gggacuugggguagggggacagacgggaaagg

SEQ ID NO: 143568 - RNA, 32 nt, Homo Sapiens
gcuagcugcagcggcggcggcgcggaggggaa

SEQ ID NO: 143569 - RNA, 32 nt, Homo Sapiens
ugcccacggugaucuggugccagcugguggaa

SEQ ID NO: 143570 - RNA, 32 nt, Homo Sapiens
ucuaaagguugcauuuucaguuauaggggaaa

SEQ ID NO: 143571 - RNA, 32 nt, Homo Sapiens
cuacaaguuuugaguaugaugaaacuauauca

SEQ ID NO: 143572 - RNA, 32 nt, Homo Sapiens
aacgugguggggggccuuccucccucagaggc

SEQ ID NO: 143573 - RNA, 32 nt, Homo Sapiens
agcagcuuguugcauuuguuuuucuggcuuag

SEQ ID NO: 143574 - RNA, 32 nt, Homo Sapiens
caauaaugguggcaguggugggauaaacggag

SEQ ID NO: 143575 - RNA, 32 nt, Homo Sapiens
caggauguggccauccugucaccagguaguuu

SEQ ID NO: 143576 - RNA, 32 nt, Homo Sapiens
aaaaccccgcggcagcuguugccccgggauua

SEQ ID NO: 143577 - RNA, 32 nt, Homo Sapiens
guuaguuuugacuucaucuauuuuuuauuugu

SEQ ID NO: 143578 - RNA, 32 nt, Homo Sapiens
gauaucuguucuuucagaagucucucuccacc

SEQ ID NO: 143579 - RNA, 32 nt, Homo Sapiens
uuguuaaugucaucuuuuuuugguccuugcua

SEQ ID NO: 143580 - RNA, 32 nt, Homo Sapiens
uggaugaggcggagcugggucgccugcuaccc

SEQ ID NO: 143581 - RNA, 32 nt, Homo Sapiens
cagacuggggaagaguccaaggaagggaggga

SEQ ID NO: 143582 - RNA, 32 nt, Homo Sapiens
uguugcuuucaaauccuucucuuuccuggguu

SEQ ID NO: 143583 - RNA, 32 nt, Homo Sapiens
agcuuuaaguuuuaaaaguugagauugaauau

SEQ ID NO: 143584 - RNA, 32 nt, Homo Sapiens
uuggaaccauuucucucuuggucucuguuuaa

SEQ ID NO: 143585 - RNA, 32 nt, Homo Sapiens
gcuggguugaggguggacugugcgaggccugg

SEQ ID NO: 143586 - RNA, 32 nt, Homo Sapiens
ugaggggcuguuuuaugucauguuggcauaaa

SEQ ID NO: 143587 - RNA, 32 nt, Homo Sapiens
ggccucugggaccagcuuucucuccuggacac

SEQ ID NO: 143588 - RNA, 32 nt, Homo Sapiens
aauauagccuauuauauauaaauagaucuauc

SEQ ID NO: 143589 - RNA, 32 nt, Homo Sapiens
uugccuguccuuucucccacucuacugaaacc

SEQ ID NO: 143590 - RNA, 32 nt, Homo Sapiens
ggacauggacacccaaccugcugcuggugaca

SEQ ID NO: 143591 - RNA, 32 nt, Homo Sapiens
aucacccagauuucuucaguuauaaauaugcc

SEQ ID NO: 143592 - RNA, 32 nt, Homo Sapiens
ccaaaggagugaauucaggcccuuguaucacu

SEQ ID NO: 143593 - RNA, 32 nt, Homo Sapiens
cucaguaagaaguggaucugccuuugggaccu

SEQ ID NO: 143594 - RNA, 32 nt, Homo Sapiens
uaccucuggcucagcgcacgcccccugcccug

SEQ ID NO: 143595 - RNA, 32 nt, Homo Sapiens
uaagcacgcaacuguuaauuauuguuaaugua

SEQ ID NO: 143596 - RNA, 32 nt, Homo Sapiens
gcaauuugccuucagcuggcaaggcuggcaau

SEQ ID NO: 143597 - RNA, 32 nt, Homo Sapiens
uaagcuaacuagcucuuuuuuauggguccaug

SEQ ID NO: 143598 - RNA, 32 nt, Homo Sapiens
cgcgcaccaggcgccggggcggcggccgaaug

SEQ ID NO: 143599 - RNA, 32 nt, Homo Sapiens
uucaaauuuuaaaacugugucuguuguagucu

SEQ ID NO: 143600 - RNA, 32 nt, Homo Sapiens
aucucaguuaauucuaaaagcagagcuaacca

SEQ ID NO: 143601 - RNA, 32 nt, Homo Sapiens
ucaaauaugaaauuauuaugaguauucaagcu

SEQ ID NO: 143602 - RNA, 32 nt, Homo Sapiens
cgcggcgcaaugucagagcagacgccggccga

SEQ ID NO: 143603 - RNA, 32 nt, Homo Sapiens
cuucagagaagcugaguccugauccucaagga

SEQ ID NO: 143604 - RNA, 32 nt, Homo Sapiens
uguuaaagcaggaagcagcaucaaguugcccc

SEQ ID NO: 143605 - RNA, 32 nt, Homo Sapiens
aggaacaaaaucuucugaaagcucggagcaga

SEQ ID NO: 143606 - RNA, 32 nt, Homo Sapiens
gugcucugccccuguuugaagacagggaaaau

SEQ ID NO: 143607 - RNA, 32 nt, Homo Sapiens
uggcauugucuccuggcugcaauaacaaacau

SEQ ID NO: 143608 - RNA, 32 nt, Homo Sapiens
ucguaauguuggcaucauggggcaucaucagg

SEQ ID NO: 143609 - RNA, 32 nt, Homo Sapiens
cgucugucugucgcccuucucccggcccucac

SEQ ID NO: 143610 - RNA, 32 nt, Homo Sapiens
gcccucaguuugggguugcuuauugggaaaga

SEQ ID NO: 143611 - RNA, 32 nt, Homo Sapiens
ugagcccugauuauccucauacucauucuggg

SEQ ID NO: 143612 - RNA, 32 nt, Homo Sapiens
guuucacauuuuuauuuuuauuuuuuccuuau

SEQ ID NO: 143613 - RNA, 32 nt, Homo Sapiens
agcggagguacucagagggucugugcuuggga

SEQ ID NO: 143614 - RNA, 32 nt, Homo Sapiens
aggaaggggcuuugggaucuggaaaccagcag

SEQ ID NO: 143615 - RNA, 32 nt, Homo Sapiens
acugccuggugcccuccuggcuccucccacag

SEQ ID NO: 143616 - RNA, 32 nt, Homo Sapiens
acaguguuuaccauuuugauaauuaaaaggaa

SEQ ID NO: 143617 - RNA, 32 nt, Homo Sapiens
gggugggagcccaauuauucauucucccuuua

SEQ ID NO: 143618 - RNA, 32 nt, Homo Sapiens
gaaggcuugggcucgcgccgcugaagucggcu

SEQ ID NO: 143619 - RNA, 32 nt, Homo Sapiens
gggguacacaggauacugggggugccgcuccu

SEQ ID NO: 143620 - RNA, 32 nt, Homo Sapiens
ucaaaggagccccuggucuucccugugugacu

SEQ ID NO: 143621 - RNA, 32 nt, Homo Sapiens
uuugagaagagagggacauaggcuagcaugga

SEQ ID NO: 143622 - RNA, 32 nt, Homo Sapiens
aggcuuucccauggucacaggaugcacuguca

SEQ ID NO: 143623 - RNA, 32 nt, Homo Sapiens
gugaagcaauaccagcaguuccuguaauacca

SEQ ID NO: 143624 - RNA, 32 nt, Homo Sapiens
cucuggacaucuuuaaauuauuuauccuaaug

SEQ ID NO: 143625 - RNA, 32 nt, Homo Sapiens
guguuaguggcauccaggucuccggauuacug

SEQ ID NO: 143626 - RNA, 32 nt, Homo Sapiens
ccagccacagaccccugggagcuuccgcuuug

SEQ ID NO: 143627 - RNA, 32 nt, Homo Sapiens
aauucagagucuuuuucuagugauuaacguau

SEQ ID NO: 143628 - RNA, 32 nt, Homo Sapiens
uuuuaucaauaugaaggcaaccuuggcugaua

SEQ ID NO: 143629 - RNA, 32 nt, Homo Sapiens
uuugucaauuuaagcugcuuuugauuucagcu

SEQ ID NO: 143630 - RNA, 32 nt, Homo Sapiens
cccuuccugugacuuuugcgccccgcgccugg

SEQ ID NO: 143631 - RNA, 32 nt, Homo Sapiens
uccggggaugcuucgcggucuguuaucgcguc

SEQ ID NO: 143632 - RNA, 32 nt, Homo Sapiens
gcuuuugaaaguaaacugcaaacaagugcaug

SEQ ID NO: 143633 - RNA, 32 nt, Homo Sapiens
cuccccugccccccaccaccugccugcuugcu

SEQ ID NO: 143634 - RNA, 32 nt, Homo Sapiens
accggcucgcgggugcggguccgggugaagcg

SEQ ID NO: 143635 - RNA, 32 nt, Homo Sapiens
gcaucaugcuugcugugcagccugcagaacug

SEQ ID NO: 143636 - RNA, 32 nt, Homo Sapiens
acaaaugaaaacaguaaaagaaacugaaagua

SEQ ID NO: 143637 - RNA, 32 nt, Homo Sapiens
gcacgaggccuggguugcgcugccggccacgu

SEQ ID NO: 143638 - RNA, 32 nt, Homo Sapiens
uggccugcgcgucccugcccagcccgccucuc

SEQ ID NO: 143639 - RNA, 32 nt, Homo Sapiens
ccacugcugccucuccugggcauggcuguuag

SEQ ID NO: 143640 - RNA, 32 nt, Homo Sapiens
cagcacugcuggaagccgcggcugccagggag

SEQ ID NO: 143641 - RNA, 32 nt, Homo Sapiens
ucagggugaccuggagcccauaaaaaauucug

SEQ ID NO: 143642 - RNA, 32 nt, Homo Sapiens
caagcucaaaauuuauguugugaugaugaauu

SEQ ID NO: 143643 - RNA, 32 nt, Homo Sapiens
agucccacggugguuccuagggccguacugcc

SEQ ID NO: 143644 - RNA, 32 nt, Homo Sapiens
agggcuuucuaaaaccauuucuguccaagaga

SEQ ID NO: 143645 - RNA, 32 nt, Homo Sapiens
cuguagcacccauuggagguguguggucgccc

SEQ ID NO: 143646 - RNA, 32 nt, Homo Sapiens
aaauguacaagagcacuacugaagaaguccag

SEQ ID NO: 143647 - RNA, 32 nt, Homo Sapiens
ucccccgacucgccgcccggagaccccgaggc

SEQ ID NO: 143648 - RNA, 32 nt, Homo Sapiens
cugaggguugccuggaguuuauacagaaauug

SEQ ID NO: 143649 - RNA, 32 nt, Homo Sapiens
uccuggugaugucacggcgcucgcagccgucg

SEQ ID NO: 143650 - RNA, 32 nt, Homo Sapiens
accccaaacgcuuuguuugggugucugcugag

SEQ ID NO: 143651 - RNA, 32 nt, Homo Sapiens
aaaauacaaaaauuagccaggugugguggugg

SEQ ID NO: 143652 - RNA, 32 nt, Homo Sapiens
aguccauucuguuaggauuauauccucuccuu

SEQ ID NO: 143653 - RNA, 32 nt, Homo Sapiens
gugcagaggagguggccugcccgggaagccgg

SEQ ID NO: 143654 - RNA, 32 nt, Homo Sapiens
uuuugguuccuaguaacagccuuuccaaagcu

SEQ ID NO: 143655 - RNA, 31 nt, Homo Sapiens
ccaaaucauuugaaggcuugauaaauuuuua

SEQ ID NO: 143656 - RNA, 32 nt, Homo Sapiens
gcuuccucuuccgggcagaaacaauaaaacca

SEQ ID NO: 143657 - RNA, 32 nt, Homo Sapiens
guguguauauauagaagucauuauggcagaug

SEQ ID NO: 143658 - RNA, 32 nt, Homo Sapiens
ugcugcccugcgcccgugccuacgugagcccg

SEQ ID NO: 143659 - RNA, 32 nt, Homo Sapiens
gcuguccucacagccuagucacaguccugggc

SEQ ID NO: 143660 - RNA, 32 nt, Homo Sapiens
gggcucagcaacccaggaggccaugacuucug

SEQ ID NO: 143661 - RNA, 32 nt, Homo Sapiens
uugaaaaaggcacagaucaacauuguguuuga

SEQ ID NO: 143662 - RNA, 32 nt, Homo Sapiens
ggcuacuauaugccugguauuguucuuugaaa

SEQ ID NO: 143663 - RNA, 32 nt, Homo Sapiens
ggcuuuauuuucaccuuguguacaacauggca

SEQ ID NO: 143664 - RNA, 32 nt, Homo Sapiens
uagguacuucaagcaacacaauaaaaaguaaa

SEQ ID NO: 143665 - RNA, 32 nt, Homo Sapiens
ucuuagggcucucgggaagcacaaggggcugu

SEQ ID NO: 143666 - RNA, 32 nt, Homo Sapiens
cuacauauaaacaauacacguucagacucggc

SEQ ID NO: 143667 - RNA, 32 nt, Homo Sapiens
ccucugggggccugggcaucagcaagucggau

SEQ ID NO: 143668 - RNA, 32 nt, Homo Sapiens
auaugucccacuuugaaagccaaagagcaaaa

SEQ ID NO: 143669 - RNA, 32 nt, Homo Sapiens
gaaacccagaaagcugccucacagaugcagac

SEQ ID NO: 143670 - RNA, 32 nt, Homo Sapiens
gaggacgacauccugaccugcugcugaggcug

SEQ ID NO: 143671 - RNA, 32 nt, Homo Sapiens
cuuagcacgcgccccagcgccggagcacgguc

SEQ ID NO: 143672 - RNA, 32 nt, Homo Sapiens
gauuuucaguggcucccuaagaacccagacac

SEQ ID NO: 143673 - RNA, 32 nt, Homo Sapiens
agcccgaagaccagcaccuggaucuggaggag

SEQ ID NO: 143674 - RNA, 32 nt, Homo Sapiens
agaucccaaauaaaugauuaaucuucauuggu

SEQ ID NO: 143675 - RNA, 32 nt, Homo Sapiens
uaaguugcuucgcuugaaguuaggaucaggaa

SEQ ID NO: 143676 - RNA, 32 nt, Homo Sapiens
agucagcaacagauuauagugacccugacaau

SEQ ID NO: 143677 - RNA, 32 nt, Homo Sapiens
cagcuucucuaggauagcacccugcgugaaca

SEQ ID NO: 143678 - RNA, 32 nt, Homo Sapiens
ucuggcaaccaccauucugcuucaugacauug

SEQ ID NO: 143679 - RNA, 32 nt, Homo Sapiens
guuccuuccaaauauguuaguaccuacccuuu

SEQ ID NO: 143680 - RNA, 32 nt, Homo Sapiens
agagcugccauuuuuccaaagccugcagcgug

SEQ ID NO: 143681 - RNA, 32 nt, Homo Sapiens
caggcagcccggcuggccgccgccgcuccucc

SEQ ID NO: 143682 - RNA, 32 nt, Homo Sapiens
gcggcaugggauaacgcggccauggugcgccg

SEQ ID NO: 143683 - RNA, 32 nt, Homo Sapiens
caacuaugaauauggugacuagauuuuaauuc

SEQ ID NO: 143684 - RNA, 32 nt, Homo Sapiens
cgguugggccaagggcagagggggcugcaccu

SEQ ID NO: 143685 - RNA, 32 nt, Homo Sapiens
ggauauucgcaaauaucuguauuauacacuaa

SEQ ID NO: 143686 - RNA, 32 nt, Homo Sapiens
uacaguccucccgggcugccagcccugacugu

SEQ ID NO: 143687 - RNA, 32 nt, Homo Sapiens
ccucgcucgcugcaggcucgcuccucaccucu

SEQ ID NO: 143688 - RNA, 32 nt, Homo Sapiens
ucucuccucccaugaaauuaaucauucauggu

SEQ ID NO: 143689 - RNA, 32 nt, Homo Sapiens
ugagugaagaaccuagauauaaagcuuuacag

SEQ ID NO: 143690 - RNA, 32 nt, Homo Sapiens
ggcaaugucuagaguauggagagauggucaga

SEQ ID NO: 143691 - RNA, 32 nt, Homo Sapiens
guuucugauccaaugauucaguaaugucauca

SEQ ID NO: 143692 - RNA, 32 nt, Homo Sapiens
gugcucacucugcagacaguacucacauuccu

SEQ ID NO: 143693 - RNA, 32 nt, Homo Sapiens
auuugguauucauacuacuaguagcaaaauac

SEQ ID NO: 143694 - RNA, 32 nt, Homo Sapiens
acgaggggcagcauggcguccgugacgcugag

SEQ ID NO: 143695 - RNA, 32 nt, Homo Sapiens
gccucuucaaccaccggcaccccuugcccugu

SEQ ID NO: 143696 - RNA, 32 nt, Homo Sapiens
cugggaguaaagggcugccuucccaucuaauu

SEQ ID NO: 143697 - RNA, 31 nt, Homo Sapiens
aaagaauaaugaaaacaggauauggagucaa

SEQ ID NO: 143698 - RNA, 32 nt, Homo Sapiens
gguggaggguggggggcgcugaguagggacuc

SEQ ID NO: 143699 - RNA, 32 nt, Homo Sapiens
uaucccuuccaagucucacaccucccuuaguc

SEQ ID NO: 143700 - RNA, 32 nt, Homo Sapiens
gagccuaugauauuccccauuuccuguacaau

SEQ ID NO: 143701 - RNA, 32 nt, Homo Sapiens
cgagaagacuaaggcagaugggcuuccaggac

SEQ ID NO: 143702 - RNA, 32 nt, Homo Sapiens
caggcacgguggcucacgccuauaaucccagc

SEQ ID NO: 143703 - RNA, 31 nt, Homo Sapiens
agguggaaauaaacaacaacuuuauuaaaac

SEQ ID NO: 143704 - RNA, 32 nt, Homo Sapiens
ugucacucuuguuuuuguuuucuguuccuuuc

SEQ ID NO: 143705 - RNA, 32 nt, Homo Sapiens
cugcucccucggcgugccccagcuggggccuc

SEQ ID NO: 143706 - RNA, 32 nt, Homo Sapiens
caggaagagguucauugaaauaaucaugcaug

SEQ ID NO: 143707 - RNA, 32 nt, Homo Sapiens
cccucugcguucgcuccgcgcugcuggaggcu

SEQ ID NO: 143708 - RNA, 32 nt, Homo Sapiens
gaacauucugucaucaccccgugaagcaauca

SEQ ID NO: 143709 - RNA, 32 nt, Homo Sapiens
cuuuuauuuuauaauuugauaaugaauauauu

SEQ ID NO: 143710 - RNA, 32 nt, Homo Sapiens
gccugcggcagccgggucuuccugguccccac

SEQ ID NO: 143711 - RNA, 32 nt, Homo Sapiens
uguauugauaaggagaugauguugaacgcacu

SEQ ID NO: 143712 - RNA, 32 nt, Homo Sapiens
ggaaagcguguaauugcuguugguagauaagu

SEQ ID NO: 143713 - RNA, 32 nt, Homo Sapiens
ggccucgccucccagggcugucucuccuacac

SEQ ID NO: 143714 - RNA, 32 nt, Homo Sapiens
aguauuuucccagucagcuuugccauacugac

SEQ ID NO: 143715 - RNA, 32 nt, Homo Sapiens
ugcuagcuggaaagucuguaauguucauguca

SEQ ID NO: 143716 - RNA, 32 nt, Homo Sapiens
ccucaggugaucugcccgccucagccacccaa

SEQ ID NO: 143717 - RNA, 32 nt, Homo Sapiens
ccgccucgauccugcaccuuccucucccaggu

SEQ ID NO: 143718 - RNA, 32 nt, Homo Sapiens
ugaagggugcagcucugguucuuccagagaga

SEQ ID NO: 143719 - RNA, 29 nt, Homo Sapiens
gugauacaaagcaaauauuuucuaaauau

SEQ ID NO: 143720 - RNA, 32 nt, Homo Sapiens
gagcagcggggcuccugccucccggccugguc

SEQ ID NO: 143721 - RNA, 32 nt, Homo Sapiens
uaaaguguacuauuugauaaguuuucacaccu

SEQ ID NO: 143722 - RNA, 32 nt, Homo Sapiens
augaauuuuacaaaaagcauuuaaggaauaag

SEQ ID NO: 143723 - RNA, 32 nt, Homo Sapiens
gaucuuuccuugauaucccuccagguggggcu

SEQ ID NO: 143724 - RNA, 32 nt, Homo Sapiens
gccaugcugaccaagcucaaguucgaggucuu

SEQ ID NO: 143725 - RNA, 32 nt, Homo Sapiens
ggccguggucggacccugguguccugguuacu

SEQ ID NO: 143726 - RNA, 32 nt, Homo Sapiens
gugaauuaaugaauuaagaguggcuggcagag

SEQ ID NO: 143727 - RNA, 32 nt, Homo Sapiens
cuccuggagggcucugggaccuggacaggccc

SEQ ID NO: 143728 - RNA, 32 nt, Homo Sapiens
gcuuauaucaucuauuuaauaaaaauacaugu

SEQ ID NO: 143729 - RNA, 32 nt, Homo Sapiens
gaggagcugggcgggguggggggaaggcggag

SEQ ID NO: 143730 - RNA, 32 nt, Homo Sapiens
ugcauggugcccggcgccucggcugccuggca

SEQ ID NO: 143731 - RNA, 32 nt, Homo Sapiens
aggagcgucucugcccggccgccccgucugag

SEQ ID NO: 143732 - RNA, 32 nt, Homo Sapiens
gcaucaguguggaggaagugugucacagugaa

SEQ ID NO: 143733 - RNA, 32 nt, Homo Sapiens
ccgcgagggucucgguagccgcgcgcccagag

SEQ ID NO: 143734 - RNA, 32 nt, Homo Sapiens
ucggugccgcgugggcaguacgcaggucccac

SEQ ID NO: 143735 - RNA, 32 nt, Homo Sapiens
uauucuuuuuauucauuguuucaguucugauu

SEQ ID NO: 143736 - RNA, 32 nt, Homo Sapiens
ugucucuguacagcccucuccuccucaauauu

SEQ ID NO: 143737 - RNA, 32 nt, Homo Sapiens
uccgccgccgccggggcccccggcagcaugga

SEQ ID NO: 143738 - RNA, 32 nt, Homo Sapiens
aagccauuugaaaaaauaccaaaugugccauu

SEQ ID NO: 143739 - RNA, 32 nt, Homo Sapiens
gacauccucauuaccaggaucuauaccuuuaa

SEQ ID NO: 143740 - RNA, 32 nt, Homo Sapiens
ucacuuacaucauagauaaauuuuagcuuccc

SEQ ID NO: 143741 - RNA, 32 nt, Homo Sapiens
gggccucuuccuuucucugacccaggcaccuc

SEQ ID NO: 143742 - RNA, 32 nt, Homo Sapiens
acuuaaaaucaucucuacuguauaaauuuguu

SEQ ID NO: 143743 - RNA, 32 nt, Homo Sapiens
uaugauaccauucacuacuuuguucaauuauc

SEQ ID NO: 143744 - RNA, 32 nt, Homo Sapiens
agcaacugcaagcagcugucucaaauauggag

SEQ ID NO: 143745 - RNA, 32 nt, Homo Sapiens
cagcugcuucuccacaccccugcccacccccu

SEQ ID NO: 143746 - RNA, 32 nt, Homo Sapiens
ccuguucagagguuuaugcaugagcauauuuc

SEQ ID NO: 143747 - RNA, 32 nt, Homo Sapiens
aucauggacugugauacuaagaauaaaggaaa

SEQ ID NO: 143748 - RNA, 32 nt, Homo Sapiens
aaggaggugugcgacgcguggagccugacgca

SEQ ID NO: 143749 - RNA, 32 nt, Homo Sapiens
uuacgcauaguaucuuauaacauuuugaacac

SEQ ID NO: 143750 - RNA, 32 nt, Homo Sapiens
guacuauguauuaacaucuaaaggaaaccugc

SEQ ID NO: 143751 - RNA, 30 nt, Homo Sapiens
cucccugccaggcgcgugcgggacgccgcu

SEQ ID NO: 143752 - RNA, 32 nt, Homo Sapiens
acugaagguucaauuuuuuuuauauaaguuua

SEQ ID NO: 143753 - RNA, 32 nt, Homo Sapiens
caggaaguccuuccccuucucuucccaggccu

SEQ ID NO: 143754 - RNA, 30 nt, Homo Sapiens
cccagggcaguggggacgggucccagcacc

SEQ ID NO: 143755 - RNA, 32 nt, Homo Sapiens
auggugccugucauacccaccugccacccugg

SEQ ID NO: 143756 - RNA, 32 nt, Homo Sapiens
uagccgcgcuggcugcacccgcccaggcccgc

SEQ ID NO: 143757 - RNA, 32 nt, Homo Sapiens
aaguccucugcgauagcucuggcgaugcuuca

SEQ ID NO: 143758 - RNA, 32 nt, Homo Sapiens
uaggcauguacaggaucgugggacaugggaag

SEQ ID NO: 143759 - RNA, 32 nt, Homo Sapiens
gguaguacuaguucagugaaaaucacaacaaa

SEQ ID NO: 143760 - RNA, 32 nt, Homo Sapiens
uacuucagugauuacacuuuugcucauauuca

SEQ ID NO: 143761 - RNA, 32 nt, Homo Sapiens
ccccgcgcgggcccgggcagcaggggcgugau

SEQ ID NO: 143762 - RNA, 32 nt, Homo Sapiens
uuugaucugggagaugagacgggauccuucau

SEQ ID NO: 143763 - RNA, 32 nt, Homo Sapiens
uaaaucuguauaauucagucgauuucaguucu

SEQ ID NO: 143764 - RNA, 32 nt, Homo Sapiens
gcucucccacccaggggcccuggguguggaug

SEQ ID NO: 143765 - RNA, 32 nt, Homo Sapiens
ccuaggugagacucaccuguccuucugggguc

SEQ ID NO: 143766 - RNA, 32 nt, Homo Sapiens
ccccagacccccuccaccccccggccacacgu

SEQ ID NO: 143767 - RNA, 32 nt, Homo Sapiens
aaagaaccaaaaugacuuuauuaaaauaauuu

SEQ ID NO: 143768 - RNA, 32 nt, Homo Sapiens
gagauuuguaaauuguauauaaccaucuuaag

SEQ ID NO: 143769 - RNA, 32 nt, Homo Sapiens
gcagagugaauugccgcugccggagcggagag

SEQ ID NO: 143770 - RNA, 32 nt, Homo Sapiens
ccagaauacuccuuggucaauuguagguauuc

SEQ ID NO: 143771 - RNA, 32 nt, Homo Sapiens
acuuggagaagcugcguaacaucaugugcagc

SEQ ID NO: 143772 - RNA, 32 nt, Homo Sapiens
acucaggaccagcguucggagcucccaccugg

SEQ ID NO: 143773 - RNA, 30 nt, Homo Sapiens
acagcaggggggcuugauguuuuucugugu

SEQ ID NO: 143774 - RNA, 32 nt, Homo Sapiens
ccuuaaccuaacccaacccagcccuaacucca

SEQ ID NO: 143775 - RNA, 32 nt, Homo Sapiens
ccagguugcgcgggcuccggacgagacccagc

SEQ ID NO: 143776 - RNA, 32 nt, Homo Sapiens
gugcucuaccuguuccuucucugaagcuagaa

SEQ ID NO: 143777 - RNA, 32 nt, Homo Sapiens
cuguuucagaaaccaacagugauggcauucua

SEQ ID NO: 143778 - RNA, 32 nt, Homo Sapiens
cugcuuguuuuuccuuuggccauaggaagguu

SEQ ID NO: 143779 - RNA, 32 nt, Homo Sapiens
gcaauccuaccuugcuuuugcuucuagagcuu

SEQ ID NO: 143780 - RNA, 32 nt, Homo Sapiens
agugcaggccccagccgcucucgggcgcggcg

SEQ ID NO: 143781 - RNA, 32 nt, Homo Sapiens
cccuauagauaaguggcauucaguauaugcca

SEQ ID NO: 143782 - RNA, 32 nt, Homo Sapiens
uggcauuucuaaaaguaccuacccuaccucaa

SEQ ID NO: 143783 - RNA, 32 nt, Homo Sapiens
ucugagcagugcuucuuagcucuuuggagaca

SEQ ID NO: 143784 - RNA, 28 nt, Homo Sapiens
ggcgcugggcggccgcuuaccuuggugu

SEQ ID NO: 143785 - RNA, 32 nt, Homo Sapiens
aacucaauacuaugaaaaauuaauggaauuuc

SEQ ID NO: 143786 - RNA, 32 nt, Homo Sapiens
gcagaugugggagaggauggacgagggaugcg

SEQ ID NO: 143787 - RNA, 32 nt, Homo Sapiens
aaugggaccugccccucccaugggggcuggag

SEQ ID NO: 143788 - RNA, 32 nt, Homo Sapiens
gucgguccauuuucccagguagcaauccaucc

SEQ ID NO: 143789 - RNA, 32 nt, Homo Sapiens
ccaauaccucccgagcagcauuaccugcauac

SEQ ID NO: 143790 - RNA, 32 nt, Homo Sapiens
gugaguugaaacaaaugaggguuggguaggag

SEQ ID NO: 143791 - RNA, 32 nt, Homo Sapiens
agcguugggcugcggcagcggaggagcucaac

SEQ ID NO: 143792 - RNA, 32 nt, Homo Sapiens
guuugccgguugcuccagcccggcgcccagcc

SEQ ID NO: 143793 - RNA, 32 nt, Homo Sapiens
ccggggcgccgcguccgcaggaagaggcgcgg

SEQ ID NO: 143794 - RNA, 32 nt, Homo Sapiens
cgaccucacuguuccuuagagcucgagagcuc

SEQ ID NO: 143795 - RNA, 32 nt, Homo Sapiens
guacccccaagcccccagggacgucagaacca

SEQ ID NO: 143796 - RNA, 32 nt, Homo Sapiens
agaaagcgaaaucuuggacuucuauucaaagu

SEQ ID NO: 143797 - RNA, 32 nt, Homo Sapiens
ugagauacaauuuuuuaguuuucaguuuaagu

SEQ ID NO: 143798 - RNA, 32 nt, Homo Sapiens
gggcagggcgggggaggcagggacauggcugu

SEQ ID NO: 143799 - RNA, 32 nt, Homo Sapiens
cuucgaaacugggcagagaaaaaauaaagugg

SEQ ID NO: 143800 - RNA, 32 nt, Homo Sapiens
uaaaguucacaauauucuaugucccuagccug

SEQ ID NO: 143801 - RNA, 32 nt, Homo Sapiens
cuggggaucaaauuauuuuaagagguauuuca

SEQ ID NO: 143802 - RNA, 32 nt, Homo Sapiens
acauacaccccagccgcacagaugcgugugac

SEQ ID NO: 143803 - RNA, 32 nt, Homo Sapiens
auggggcccaagaguaugcauucuuaccagau

SEQ ID NO: 143804 - RNA, 32 nt, Homo Sapiens
ugcugccuggcucgggauacaccuggcuuucc

SEQ ID NO: 143805 - RNA, 32 nt, Homo Sapiens
ggcugagcuuucugggggcgccuggcaucgcc

SEQ ID NO: 143806 - RNA, 32 nt, Homo Sapiens
uguggcgcuggggccuggccucgcccacggug

SEQ ID NO: 143807 - RNA, 32 nt, Homo Sapiens
uaagaagaugccaauauaauuuuuguaagaag

SEQ ID NO: 143808 - RNA, 32 nt, Homo Sapiens
uacaggaauauuuuaauaaguguaucaccaug

SEQ ID NO: 143809 - RNA, 32 nt, Homo Sapiens
gggcaguccccucagguuccagcccucagcag

SEQ ID NO: 143810 - RNA, 32 nt, Homo Sapiens
cagucucugccaggggaagauuccuuggagga

SEQ ID NO: 143811 - RNA, 32 nt, Homo Sapiens
uucuguaccuccuuuucuuuuucuuuguugau

SEQ ID NO: 143812 - RNA, 31 nt, Homo Sapiens
cugucccugccggucuccaagugccccuggu

SEQ ID NO: 143813 - RNA, 32 nt, Homo Sapiens
uccauuugauucuuuuguuuucguuuuguagu

SEQ ID NO: 143814 - RNA, 32 nt, Homo Sapiens
auccauauauuuuuagcuaccaaaaaagagaa

SEQ ID NO: 143815 - RNA, 32 nt, Homo Sapiens
uaucuaccccuucuuuuucuccaaauauguca

SEQ ID NO: 143816 - RNA, 32 nt, Homo Sapiens
cgcacgguccaauggccggggaggcggaggcu

SEQ ID NO: 143817 - RNA, 32 nt, Homo Sapiens
aagauuacgaaguuuagaugaccaaaauggau

SEQ ID NO: 143818 - RNA, 32 nt, Homo Sapiens
aaguggggugccagggccggccacagaggcca

SEQ ID NO: 143819 - RNA, 32 nt, Homo Sapiens
uccagggacaacucugcugaaaaaggccugga

SEQ ID NO: 143820 - RNA, 32 nt, Homo Sapiens
agguggagggugcagaggggcugggguagggc

SEQ ID NO: 143821 - RNA, 32 nt, Homo Sapiens
caaguagacaccucucucaggagcuucugagu

SEQ ID NO: 143822 - RNA, 32 nt, Homo Sapiens
gccuuccaguguuccuuaagaauggcggaacc

SEQ ID NO: 143823 - RNA, 32 nt, Homo Sapiens
cagguagcuuugcaucacagaccaagcccauu

SEQ ID NO: 143824 - RNA, 32 nt, Homo Sapiens
cucccugcccccaccccacuaugaccuuugac

SEQ ID NO: 143825 - RNA, 32 nt, Homo Sapiens
aggcaggcagaucaccugaggucgggaguucg

SEQ ID NO: 143826 - RNA, 32 nt, Homo Sapiens
aggcaggcagaucaccugaggucaggaguuca

SEQ ID NO: 143827 - RNA, 32 nt, Homo Sapiens
aaacauugauuugaacuauuuuaguaaaagga

SEQ ID NO: 143828 - RNA, 32 nt, Homo Sapiens
gccugagcaccaaccaccuugccggguguccu

SEQ ID NO: 143829 - RNA, 32 nt, Homo Sapiens
uuacuucaucuucauucauuauuaccugacag

SEQ ID NO: 143830 - RNA, 32 nt, Homo Sapiens
guaaugaauguggcgagguuuucaaucaacaa

SEQ ID NO: 143831 - RNA, 32 nt, Homo Sapiens
uuuucuuuucuuucuuuuuuuuuccaacugag

SEQ ID NO: 143832 - RNA, 32 nt, Homo Sapiens
uagcgauuuggcauaaaccuugaaagacucag

SEQ ID NO: 143833 - RNA, 32 nt, Homo Sapiens
uuugcugggagcuucucugcugcuuaaauugu

SEQ ID NO: 143834 - RNA, 32 nt, Homo Sapiens
aaugaguaauguuuuucuuuucuuuuaaaaaa

SEQ ID NO: 143835 - RNA, 32 nt, Homo Sapiens
gacugccggccgccgcgauggcgagccgggcg

SEQ ID NO: 143836 - RNA, 32 nt, Homo Sapiens
uuggccugcuccagcaggaguggaggcuggac

SEQ ID NO: 143837 - RNA, 32 nt, Homo Sapiens
uuaaacuguuuccauacccuuucuuuuucuug

SEQ ID NO: 143838 - RNA, 32 nt, Homo Sapiens
cgccgggcgauauggggugccugcuguuucug

SEQ ID NO: 143839 - RNA, 32 nt, Homo Sapiens
ggggcaucauaugggcggggcugaggcgaggc

SEQ ID NO: 143840 - RNA, 32 nt, Homo Sapiens
uagaugcuuauuuuuauugacauguguauaau

SEQ ID NO: 143841 - RNA, 32 nt, Homo Sapiens
ugacuucuuuggguagccauuuucauaagaaa

SEQ ID NO: 143842 - RNA, 32 nt, Homo Sapiens
cccuucuuguacuuuuuucaucuuuacccugc

SEQ ID NO: 143843 - RNA, 32 nt, Homo Sapiens
gagaauaacaauauuacuuacaagaugaaaug

SEQ ID NO: 143844 - RNA, 32 nt, Homo Sapiens
auauuuucaaggacucacucuuagaaacaaaa

SEQ ID NO: 143845 - RNA, 32 nt, Homo Sapiens
ccgggagggcccggcaugcugcgccagcugcu

SEQ ID NO: 143846 - RNA, 32 nt, Homo Sapiens
uguaauggcuaguuuugugucaacgugacuag

SEQ ID NO: 143847 - RNA, 32 nt, Homo Sapiens
guuccuaaggcacaaauuugauauuugagauu

SEQ ID NO: 143848 - RNA, 32 nt, Homo Sapiens
auucugacccgccccgguuccgggacgcuccc

SEQ ID NO: 143849 - RNA, 32 nt, Homo Sapiens
uucaguaucucaccaaucagauuaaggcgauc

SEQ ID NO: 143850 - RNA, 32 nt, Homo Sapiens
ugagauguuauugcagaagagauugagaaaau

SEQ ID NO: 143851 - RNA, 32 nt, Homo Sapiens
cagucucauugucugguaaaucuaauuuuaac

SEQ ID NO: 143852 - RNA, 32 nt, Homo Sapiens
auguuacuuuguuaaugaaauuuaggaaagca

SEQ ID NO: 143853 - RNA, 30 nt, Homo Sapiens
cugccaugcccggcggccccaguccccgca

SEQ ID NO: 143854 - RNA, 32 nt, Homo Sapiens
gauuucucuaauuuuccaacuagaggaagaga

SEQ ID NO: 143855 - RNA, 32 nt, Homo Sapiens
uagugaaccuggaaauacaacuuugcuucuuu

SEQ ID NO: 143856 - RNA, 30 nt, Homo Sapiens
gucccauggaggaggaggcgagccgcagcg

SEQ ID NO: 143857 - RNA, 32 nt, Homo Sapiens
auaccaucugguacugcaggaccuccagcuga

SEQ ID NO: 143858 - RNA, 32 nt, Homo Sapiens
cgucucugaauuuuuucuuuaacguuauaguu

SEQ ID NO: 143859 - RNA, 31 nt, Homo Sapiens
gaggugggggcgguggugcuggacccaaugc

SEQ ID NO: 143860 - RNA, 32 nt, Homo Sapiens
ugugcuugaaaacacaaaccuuuuggguuaaa

SEQ ID NO: 143861 - RNA, 32 nt, Homo Sapiens
guguuuuggccaucccgguccacucucacagg

SEQ ID NO: 143862 - RNA, 32 nt, Homo Sapiens
cgugcucggagcggauucugcccgccgucccc

SEQ ID NO: 143863 - RNA, 32 nt, Homo Sapiens
uccggaggccugcggcagagucgccuaagcau

SEQ ID NO: 143864 - RNA, 32 nt, Homo Sapiens
uagccuuuuagcuccacagagccccgccaugu

SEQ ID NO: 143865 - RNA, 32 nt, Homo Sapiens
cgucugugagagaucagaaagaaagagacuua

SEQ ID NO: 143866 - RNA, 32 nt, Homo Sapiens
cccacauuugucauuugaaaaaguauauauaa

SEQ ID NO: 143867 - RNA, 32 nt, Homo Sapiens
uuugaaauuauugaucagaacaauauacaagg

SEQ ID NO: 143868 - RNA, 32 nt, Homo Sapiens
ggcacgagggggaagaaaagggaauuccaacc

SEQ ID NO: 143869 - RNA, 32 nt, Homo Sapiens
gcaauaauacuauggacacauuagauuauaua

SEQ ID NO: 143870 - RNA, 32 nt, Homo Sapiens
cgauaaacaugauacauaaugaaaaugcuuau

SEQ ID NO: 143871 - RNA, 31 nt, Homo Sapiens
cugcccccacccuccccaccgccacauuuuu

SEQ ID NO: 143872 - RNA, 32 nt, Homo Sapiens
cuguauguguaguucugcagagcuaguuuuug

SEQ ID NO: 143873 - RNA, 32 nt, Homo Sapiens
cagucucuucccucccccagucucucuucuca

SEQ ID NO: 143874 - RNA, 32 nt, Homo Sapiens
auagaauagaguucuuuuuuuucugcaguccg

SEQ ID NO: 143875 - RNA, 32 nt, Homo Sapiens
aggauucugugguuugguggguccccuagggc

SEQ ID NO: 143876 - RNA, 32 nt, Homo Sapiens
gaccacagaaucaaccauuucaugagguugua

SEQ ID NO: 143877 - RNA, 32 nt, Homo Sapiens
ucagcagcuuggaagaaaucccagaagcggac

SEQ ID NO: 143878 - RNA, 32 nt, Homo Sapiens
uagcugggcaugguggugggcgccuguaaucc

SEQ ID NO: 143879 - RNA, 32 nt, Homo Sapiens
ugagccuuggauaaagggucaggcuccuuuuu

SEQ ID NO: 143880 - RNA, 32 nt, Homo Sapiens
agcuuccuucacagggggaagaaccaacaacg

SEQ ID NO: 143881 - RNA, 32 nt, Homo Sapiens
ccgggccaggccugggugaucugcugcugaga

SEQ ID NO: 143882 - RNA, 32 nt, Homo Sapiens
accuccccucucuggggugcuuccugugguag

SEQ ID NO: 143883 - RNA, 32 nt, Homo Sapiens
acacaaugaaaacacaucuguuggggugauca

SEQ ID NO: 143884 - RNA, 31 nt, Homo Sapiens
uuuaaaacaaauugcauggauuuguauuaag

SEQ ID NO: 143885 - RNA, 32 nt, Homo Sapiens
cccgccccgcggcugcaaaggggcugaauuug

SEQ ID NO: 143886 - RNA, 32 nt, Homo Sapiens
guuuuugaaacacaagcugggcuucugguagu

SEQ ID NO: 143887 - RNA, 32 nt, Homo Sapiens
cuguucucugcuuuuccauucuggguguuuuc

SEQ ID NO: 143888 - RNA, 32 nt, Homo Sapiens
ucugcuugccagccaggagugcggacaccaug

SEQ ID NO: 143889 - RNA, 32 nt, Homo Sapiens
cuacaccccucccccagcuccuuccccagauu

SEQ ID NO: 143890 - RNA, 28 nt, Homo Sapiens
auuugggggcggcuccuucagugcuuug

SEQ ID NO: 143891 - RNA, 32 nt, Homo Sapiens
ccgccggcguguuucucauccagccacgucuc

SEQ ID NO: 143892 - RNA, 32 nt, Homo Sapiens
gguacaaggcccagcugcagugucccuaagug

SEQ ID NO: 143893 - RNA, 32 nt, Homo Sapiens
uuuaauuuggcaaguguugcucuucuuaaaac

SEQ ID NO: 143894 - RNA, 32 nt, Homo Sapiens
cgacaggccauucccacccccacacacaaccu

SEQ ID NO: 143895 - RNA, 32 nt, Homo Sapiens
aauuagcaagcauuaauauauuuucagugcag

SEQ ID NO: 143896 - RNA, 32 nt, Homo Sapiens
aaauguaaaaauucccauuuguauccccugau

SEQ ID NO: 143897 - RNA, 32 nt, Homo Sapiens
auugggauuuccccccaccccgccccacccag

SEQ ID NO: 143898 - RNA, 32 nt, Homo Sapiens
uugcuugcugguuuugcuugcaucugaugagu

SEQ ID NO: 143899 - RNA, 32 nt, Homo Sapiens
gacguccgcgccccggccgccuguuggccaug

SEQ ID NO: 143900 - RNA, 32 nt, Homo Sapiens
ugguuugguuuuucuuuuuuuuuuuuuuugaa

SEQ ID NO: 143901 - RNA, 32 nt, Homo Sapiens
uccgugggguggcaucugguuucuggugcuau

SEQ ID NO: 143902 - RNA, 32 nt, Homo Sapiens
acccgccccuccccccacuccaggcccccucc

SEQ ID NO: 143903 - RNA, 32 nt, Homo Sapiens
uccugcggcagggcaagcugugcgacgugacc

SEQ ID NO: 143904 - RNA, 32 nt, Homo Sapiens
aacccgcagagggaggggaggggcugagcugu

SEQ ID NO: 143905 - RNA, 32 nt, Homo Sapiens
gaacugucaacaaaugauaccuuuggauaucc

SEQ ID NO: 143906 - RNA, 32 nt, Homo Sapiens
gggcuccguuugaaacauggcgcgggcuggcc

SEQ ID NO: 143907 - RNA, 32 nt, Homo Sapiens
gaaauauaguaauaaacuuuaugcacggacaa

SEQ ID NO: 143908 - RNA, 32 nt, Homo Sapiens
accagaccucuggccuggcccuccccaggggc

SEQ ID NO: 143909 - RNA, 32 nt, Homo Sapiens
ggccagugauuacccacccccaaucccacccc

SEQ ID NO: 143910 - RNA, 32 nt, Homo Sapiens
ugauugggauaauucagaaauuccuaauauua

SEQ ID NO: 143911 - RNA, 32 nt, Homo Sapiens
aacgccaucucuacuaaaaauagaaaaauugg

SEQ ID NO: 143912 - RNA, 32 nt, Homo Sapiens
guuuccgcugcugagcccugcccgccggccgg

SEQ ID NO: 143913 - RNA, 32 nt, Homo Sapiens
cucagcccugugcaggccuaggcggcggggcc

SEQ ID NO: 143914 - RNA, 32 nt, Homo Sapiens
uugcagcacagcgaacggggucggguauaaaa

SEQ ID NO: 143915 - RNA, 32 nt, Homo Sapiens
guuuauuaucugucuccuuccauuaucccucu

SEQ ID NO: 143916 - RNA, 32 nt, Homo Sapiens
acccagagggauuuuucagugggaagcauuac

SEQ ID NO: 143917 - RNA, 32 nt, Homo Sapiens
uuaagaauuuuuuaucuuaggcaaaguguguc

SEQ ID NO: 143918 - RNA, 32 nt, Homo Sapiens
uugcauauaacucucggguaauauuuugaagc

SEQ ID NO: 143919 - RNA, 32 nt, Homo Sapiens
ucuaggaaaugggaauuuacauccuaaaaccu

SEQ ID NO: 143920 - RNA, 32 nt, Homo Sapiens
ccuucucuaguuuccccucucaucugaccuua

SEQ ID NO: 143921 - RNA, 32 nt, Homo Sapiens
ccggggccgcgugcgcucagggcaccuugcag

SEQ ID NO: 143922 - RNA, 32 nt, Homo Sapiens
ucuagauagcccucagaauccggccuccaccc

SEQ ID NO: 143923 - RNA, 32 nt, Homo Sapiens
ugugggggccagggccaucucccuuuaaugug

SEQ ID NO: 143924 - RNA, 32 nt, Homo Sapiens
aaaaacaaaaacaacuaacaaaaaaaaaaaaa

SEQ ID NO: 143925 - RNA, 32 nt, Homo Sapiens
caaaaaaauaaucaagugcauuucugggccuu

SEQ ID NO: 143926 - RNA, 32 nt, Homo Sapiens
gcuuguggcuccguugagcaccggccgccggg

SEQ ID NO: 143927 - RNA, 32 nt, Homo Sapiens
uagaauaugcacaaguuuuucuacacucagug

SEQ ID NO: 143928 - RNA, 32 nt, Homo Sapiens
uuugcuucuagaucucuggggugggaggagug

SEQ ID NO: 143929 - RNA, 32 nt, Homo Sapiens
ugcugaaucucacccuguagacucacacacga

SEQ ID NO: 143930 - RNA, 32 nt, Homo Sapiens
cugcuucuuuaacauagagaucuuuaaaaagg

SEQ ID NO: 143931 - RNA, 32 nt, Homo Sapiens
aaguuuaauuuucagcuccucuguuggacaua

SEQ ID NO: 143932 - RNA, 32 nt, Homo Sapiens
ggccaggugcgguggcucaugccuauaauccc

SEQ ID NO: 143933 - RNA, 32 nt, Homo Sapiens
cuaguggagggagagaggacuuaagucagaug

SEQ ID NO: 143934 - RNA, 32 nt, Homo Sapiens
uggugcauuaaaguuaagauuguuauguugaa

SEQ ID NO: 143935 - RNA, 32 nt, Homo Sapiens
gggcgggacgaggcccgggcucggggaccuuu

SEQ ID NO: 143936 - RNA, 32 nt, Homo Sapiens
ucuuguccugaguccaggaagaaugagguaug

SEQ ID NO: 143937 - RNA, 32 nt, Homo Sapiens
agagugucaagaaacaaaaaaaguaccgggca

SEQ ID NO: 143938 - RNA, 32 nt, Homo Sapiens
uccaggcuauauauuucuuuuuaaugggccac

SEQ ID NO: 143939 - RNA, 32 nt, Homo Sapiens
augaggccgcucacucgggggguguugggcug

SEQ ID NO: 143940 - RNA, 32 nt, Homo Sapiens
gcaagacauaucugauuggaacuuguaucuac

SEQ ID NO: 143941 - RNA, 32 nt, Homo Sapiens
cgucaccgcagaagcuggccgacguggcagca

SEQ ID NO: 143942 - RNA, 32 nt, Homo Sapiens
ucuuuagauaaucaacacuacuaacauuacau

SEQ ID NO: 143943 - RNA, 32 nt, Homo Sapiens
auacauaccauguuuucuuuuuuuaaaaaaau

SEQ ID NO: 143944 - RNA, 32 nt, Homo Sapiens
cucguccuccgcggccccggcgacgugggccg

SEQ ID NO: 143945 - RNA, 32 nt, Homo Sapiens
gcgugaccuuuuuauauacauuuuauaucugg

SEQ ID NO: 143946 - RNA, 32 nt, Homo Sapiens
aucccacguacuuauaaagaagguuggugaau

SEQ ID NO: 143947 - RNA, 32 nt, Homo Sapiens
cagcugcagcagccuuggauguuucuggauag

SEQ ID NO: 143948 - RNA, 32 nt, Homo Sapiens
acucccugcuguuccgcaggaccuccaccuuc

SEQ ID NO: 143949 - RNA, 32 nt, Homo Sapiens
ucugagcaacuuucguccacaagcauguuccu

SEQ ID NO: 143950 - RNA, 32 nt, Homo Sapiens
uggaguggauaauugucccuccccucagcccu

SEQ ID NO: 143951 - RNA, 32 nt, Homo Sapiens
uguucaacauucaaacaguuauuucaaccagu

SEQ ID NO: 143952 - RNA, 32 nt, Homo Sapiens
gggaggcucagaugagaugcuauaugugaaaa

SEQ ID NO: 143953 - RNA, 32 nt, Homo Sapiens
uuuaaauccagcugccagaccccuggacggga

SEQ ID NO: 143954 - RNA, 32 nt, Homo Sapiens
agccccagccccggccccggcgccggccccgc

SEQ ID NO: 143955 - RNA, 32 nt, Homo Sapiens
cacuuggcaggcuccuacugccugcagacccu

SEQ ID NO: 143956 - RNA, 32 nt, Homo Sapiens
ggaauuuuaaacacacauuugauugcagccac

SEQ ID NO: 143957 - RNA, 32 nt, Homo Sapiens
ucccagugcagggucagaugggccguaaacag

SEQ ID NO: 143958 - RNA, 32 nt, Homo Sapiens
ccgguggacgucagggacucggggggcaggcc

SEQ ID NO: 143959 - RNA, 32 nt, Homo Sapiens
gggaguccucucuauuaauaccucucucaaua

SEQ ID NO: 143960 - RNA, 32 nt, Homo Sapiens
uuccaaauaaagaauaggccccugccuggcuc

SEQ ID NO: 143961 - RNA, 32 nt, Homo Sapiens
aucuccuaguguuuaaauuuggcaguuacucg

SEQ ID NO: 143962 - RNA, 32 nt, Homo Sapiens
ugaaaauauuacacuuuuuuucuucuauaucu

SEQ ID NO: 143963 - RNA, 32 nt, Homo Sapiens
ggacuucguggaaguggggauguacuuauauu

SEQ ID NO: 143964 - RNA, 32 nt, Homo Sapiens
agguuccaaauugauccaaauacccaagcuug

SEQ ID NO: 143965 - RNA, 32 nt, Homo Sapiens
caaagucaggcuugcccucccggcacccuggc

SEQ ID NO: 143966 - RNA, 32 nt, Homo Sapiens
ucuagagcagugguugucaaaguguggucugg

SEQ ID NO: 143967 - RNA, 32 nt, Homo Sapiens
gugaucuauaaaauuaaacuggauaaaauguu

SEQ ID NO: 143968 - RNA, 32 nt, Homo Sapiens
uaacauuaauaaacuuauauuugugcuuuguu

SEQ ID NO: 143969 - RNA, 32 nt, Homo Sapiens
cacucuccgucagccgcauugcccgcucggcg

SEQ ID NO: 143970 - RNA, 32 nt, Homo Sapiens
auccccuuucugcugcaggaaccucucaucag

SEQ ID NO: 143971 - RNA, 32 nt, Homo Sapiens
aucuuccucauuuggauuugcuuucaguuggu

SEQ ID NO: 143972 - RNA, 32 nt, Homo Sapiens
cugcuccgggguggagcuggggugugggaugc

SEQ ID NO: 143973 - RNA, 32 nt, Homo Sapiens
accugugguuguuuuuaaugggaaauaccucu

SEQ ID NO: 143974 - RNA, 32 nt, Homo Sapiens
ggacaccagccaggcucugugcugacccuccu

SEQ ID NO: 143975 - RNA, 32 nt, Homo Sapiens
cucccugccuggcccuggaccccaucccagga

SEQ ID NO: 143976 - RNA, 32 nt, Homo Sapiens
auguuuccuggaagcugacucagucuguucac

SEQ ID NO: 143977 - RNA, 32 nt, Homo Sapiens
aaggcaucuuaccauggcuggggaauugucug

SEQ ID NO: 143978 - RNA, 32 nt, Homo Sapiens
caauaucuguaauuuuuugacuuuuuaauaau

SEQ ID NO: 143979 - RNA, 32 nt, Homo Sapiens
caugagugaacaguuguuuccuaacccauggc

SEQ ID NO: 143980 - RNA, 32 nt, Homo Sapiens
gcgccaccacacuccagccugggcaacagaga

SEQ ID NO: 143981 - RNA, 32 nt, Homo Sapiens
aggaggccccaggcugagagccagaugccucc

SEQ ID NO: 143982 - RNA, 32 nt, Homo Sapiens
guucugcaggucgggagugggcugaggagugg

SEQ ID NO: 143983 - RNA, 32 nt, Homo Sapiens
ggauggggaugggaaaacuaaaggggcccccu

SEQ ID NO: 143984 - RNA, 32 nt, Homo Sapiens
acucagggauccuccuggccgccccgcagggg

SEQ ID NO: 143985 - RNA, 32 nt, Homo Sapiens
aaaaaucaagauuuaaauuuuuuauuuguacu

SEQ ID NO: 143986 - RNA, 32 nt, Homo Sapiens
ggucugagccccacgaaggccuugggcugugg

SEQ ID NO: 143987 - RNA, 32 nt, Homo Sapiens
uccaccggcuccccggcucgcgccgcuccaug

SEQ ID NO: 143988 - RNA, 32 nt, Homo Sapiens
ccuugugaagauaauuugaggaccaugacuca

SEQ ID NO: 143989 - RNA, 32 nt, Homo Sapiens
ucacuuaagaaacuuaaguugcugcaaaugau

SEQ ID NO: 143990 - RNA, 28 nt, Homo Sapiens
cugcuuuucuauuguauguguuuaagag

SEQ ID NO: 143991 - RNA, 32 nt, Homo Sapiens
aaagcaaaacaaaaacaauucaggaacaacgg

SEQ ID NO: 143992 - RNA, 30 nt, Homo Sapiens
gugugagcgccgcagcaccaguggcuuuag

SEQ ID NO: 143993 - RNA, 32 nt, Homo Sapiens
gucuacagugcggcuacaaaucugggauuuuu

SEQ ID NO: 143994 - RNA, 32 nt, Homo Sapiens
caaaguguccgccuaccaacacuggagccgcu

SEQ ID NO: 143995 - RNA, 32 nt, Homo Sapiens
guuuccagaucagcugaacagcagccaucaga

SEQ ID NO: 143996 - RNA, 32 nt, Homo Sapiens
aauucauccuacugccuacuaccauuuggacc

SEQ ID NO: 143997 - RNA, 32 nt, Homo Sapiens
ccuggcuccuccccgcuucagccagagcgacc

SEQ ID NO: 143998 - RNA, 32 nt, Homo Sapiens
cugccugcgucccgcgccccagccgccgcgca

SEQ ID NO: 143999 - RNA, 32 nt, Homo Sapiens
ugcugugcauggccagagguguuuacauccag

SEQ ID NO: 144000 - RNA, 32 nt, Homo Sapiens
ggaagccugagggggcggggccggcgcgaggc

SEQ ID NO: 144001 - RNA, 32 nt, Homo Sapiens
acccgaccuugugcagccccccugcccuggug

SEQ ID NO: 144002 - RNA, 32 nt, Homo Sapiens
uuuuuguuguuguuaaugagcagaaagagaga

SEQ ID NO: 144003 - RNA, 32 nt, Homo Sapiens
aaguuuagagcauuuagccaucgccuuuuauc

SEQ ID NO: 144004 - RNA, 32 nt, Homo Sapiens
gaaggaacuguagaugggcugaaaauagcaag

SEQ ID NO: 144005 - RNA, 32 nt, Homo Sapiens
augaagaaaugaaaaugaaaguucuggaacgg

SEQ ID NO: 144006 - RNA, 32 nt, Homo Sapiens
ucgccgcccguccccggcacacgcgcagcccc

SEQ ID NO: 144007 - RNA, 32 nt, Homo Sapiens
ugcagaaaacuuugauuaaaucuuaaugggag

SEQ ID NO: 144008 - RNA, 32 nt, Homo Sapiens
uccagcacucccugcggcugcugcuggaggag

SEQ ID NO: 144009 - RNA, 27 nt, Homo Sapiens
agcgggucugaccucagccccacucag

SEQ ID NO: 144010 - RNA, 32 nt, Homo Sapiens
uguggagaccucucggggacucgcagauacca

SEQ ID NO: 144011 - RNA, 31 nt, Homo Sapiens
ccggcgccguacugccugcguugugucagag

SEQ ID NO: 144012 - RNA, 32 nt, Homo Sapiens
ccauugggcccuuuuucagucuucaauggggg

SEQ ID NO: 144013 - RNA, 32 nt, Homo Sapiens
uuuuaaugaguaauuaaagauguugcccuuuc

SEQ ID NO: 144014 - RNA, 32 nt, Homo Sapiens
gccaccuuagucuggcuggggaggcggacgau

SEQ ID NO: 144015 - RNA, 32 nt, Homo Sapiens
cugggcuuugaauacgugauguucuacaauga

SEQ ID NO: 144016 - RNA, 32 nt, Homo Sapiens
cuuucuagugaacaaaaggugccuauucuuuu

SEQ ID NO: 144017 - RNA, 32 nt, Homo Sapiens
gaagauggauaaaaaccuauuacauauuugua

SEQ ID NO: 144018 - RNA, 32 nt, Homo Sapiens
ggaauaaaaagguauuugcugauaaaaggcau

SEQ ID NO: 144019 - RNA, 32 nt, Homo Sapiens
uggaggcgacgaacacuaauggcccguccuau

SEQ ID NO: 144020 - RNA, 32 nt, Homo Sapiens
ccaaccccugccucugguggaccucugguggg

SEQ ID NO: 144021 - RNA, 32 nt, Homo Sapiens
caccacugggaccaaguuaaaccugguccugg

SEQ ID NO: 144022 - RNA, 32 nt, Homo Sapiens
auguuuaaaaaguuucuaauauuaaagucaga

SEQ ID NO: 144023 - RNA, 32 nt, Homo Sapiens
accugaguuccgaggagcaccugggaagcucu

SEQ ID NO: 144024 - RNA, 32 nt, Homo Sapiens
ggcccugcccucuagcucccgcgcucgcuccc

SEQ ID NO: 144025 - RNA, 32 nt, Homo Sapiens
auuaaauguauauauccacacauuuuauauug

SEQ ID NO: 144026 - RNA, 32 nt, Homo Sapiens
aagaccccaagccuugacuccagcugcgccca

SEQ ID NO: 144027 - RNA, 32 nt, Homo Sapiens
cgauuccccucuaucagucacugccaguuaau

SEQ ID NO: 144028 - RNA, 30 nt, Homo Sapiens
caggaggccgcgagggcggguccccagaag

SEQ ID NO: 144029 - RNA, 32 nt, Homo Sapiens
ggccagauuguggccucuggcugccucaggca

SEQ ID NO: 144030 - RNA, 32 nt, Homo Sapiens
cugcucgggucagugcgccgcgcugcgcuggg

SEQ ID NO: 144031 - RNA, 32 nt, Homo Sapiens
cccuggcuagauaugugugaauguguggcauc

SEQ ID NO: 144032 - RNA, 32 nt, Homo Sapiens
aaaccugccccgcgcagcggcgguggcuggag

SEQ ID NO: 144033 - RNA, 32 nt, Homo Sapiens
aaauaaauuuuaugggcgggugccaaauacug

SEQ ID NO: 144034 - RNA, 32 nt, Homo Sapiens
acgugugugaaugguuguacguuuugcacauu

SEQ ID NO: 144035 - RNA, 32 nt, Homo Sapiens
gguggaggcuuagguagccggaccugccugcc

SEQ ID NO: 144036 - RNA, 32 nt, Homo Sapiens
ccgccuccuccagccagagucggugggacugg

SEQ ID NO: 144037 - RNA, 32 nt, Homo Sapiens
cccugccagcccagcccaggcuggcccagcuu

SEQ ID NO: 144038 - RNA, 32 nt, Homo Sapiens
guauauuuucuuuuccucugucccuuccccca

SEQ ID NO: 144039 - RNA, 32 nt, Homo Sapiens
uuuaaaaacacuuuuuauuaaagauucuauca

SEQ ID NO: 144040 - RNA, 32 nt, Homo Sapiens
ucuuaauuuauuauuuuuuuuauauuuauugu

SEQ ID NO: 144041 - RNA, 32 nt, Homo Sapiens
uggcugagagggguccugggguguuucagacc

SEQ ID NO: 144042 - RNA, 32 nt, Homo Sapiens
uuggcugggucugagugccacccccaggccac

SEQ ID NO: 144043 - RNA, 32 nt, Homo Sapiens
acgcccagcuuggcucccccugcccgagcucc

SEQ ID NO: 144044 - RNA, 32 nt, Homo Sapiens
gaguuuugguaccagaggcuagaguggacaaa

SEQ ID NO: 144045 - RNA, 32 nt, Homo Sapiens
caccuccuggcaggcuuccuucugggacaggg

SEQ ID NO: 144046 - RNA, 32 nt, Homo Sapiens
ucaaaaauaucuuugcuuacuaucaagaagug

SEQ ID NO: 144047 - RNA, 32 nt, Homo Sapiens
cacagauuggugcuuucuaaauaaaaauugaa

SEQ ID NO: 144048 - RNA, 32 nt, Homo Sapiens
uucaguggaucuuuauaaaauacugaccuucu

SEQ ID NO: 144049 - RNA, 31 nt, Homo Sapiens
ucuguccguguucuucucagagacuguucua

SEQ ID NO: 144050 - RNA, 32 nt, Homo Sapiens
ccuaaggugguuaugcugugacgcugcugucu

SEQ ID NO: 144051 - RNA, 32 nt, Homo Sapiens
acuuccuugcauucuucuaccuuuaaauagca

SEQ ID NO: 144052 - RNA, 32 nt, Homo Sapiens
cuuugucacaacgaaaucaacaaaauuauuuc

SEQ ID NO: 144053 - RNA, 32 nt, Homo Sapiens
aagggccuugggggcuggccccccaccaggcc

SEQ ID NO: 144054 - RNA, 32 nt, Homo Sapiens
ucguguugagauuacgcugccuuaauguaaca

SEQ ID NO: 144055 - RNA, 32 nt, Homo Sapiens
agguugaggucacagugagcugugauugcacc

SEQ ID NO: 144056 - RNA, 32 nt, Homo Sapiens
uuuuauaucuguucaauuuuuaucauuccccu

SEQ ID NO: 144057 - RNA, 32 nt, Homo Sapiens
acguuuuggggauaauuuucucuucuuuaggc

SEQ ID NO: 144058 - RNA, 32 nt, Homo Sapiens
gagcaggagagaaugcaggacauggcacuggc

SEQ ID NO: 144059 - RNA, 32 nt, Homo Sapiens
acgggcaucucacguacccccaucugagaccu

SEQ ID NO: 144060 - RNA, 32 nt, Homo Sapiens
auuuaugauaauaaauauguucauacacuuac

SEQ ID NO: 144061 - RNA, 32 nt, Homo Sapiens
aacaugcugagcacauuuuguaggguggcacc

SEQ ID NO: 144062 - RNA, 32 nt, Homo Sapiens
uauuccaguuccaugaugucuuccuggcugua

SEQ ID NO: 144063 - RNA, 32 nt, Homo Sapiens
uauuccgagggaagggacccaggccaccuccc

SEQ ID NO: 144064 - RNA, 32 nt, Homo Sapiens
gccugaaauugucugcauuaucccuaagucac

SEQ ID NO: 144065 - RNA, 32 nt, Homo Sapiens
ccauccccugucauguggaucgguccagcacc

SEQ ID NO: 144066 - RNA, 32 nt, Homo Sapiens
gaagugggcuugggaagaccgcccugccaagu

SEQ ID NO: 144067 - RNA, 32 nt, Homo Sapiens
aucauuguauucuuuaagaaucuuauuuugau

SEQ ID NO: 144068 - RNA, 32 nt, Homo Sapiens
aaagcuguaugacuuagugcugaaggauauga

SEQ ID NO: 144069 - RNA, 32 nt, Homo Sapiens
uguuaggaacuuuccucggaugugugggccca

SEQ ID NO: 144070 - RNA, 29 nt, Homo Sapiens
gccugaccgguccgcucauggugccgcca

SEQ ID NO: 144071 - RNA, 32 nt, Homo Sapiens
uggcuaaggcagaggcugagggggcugggcga

SEQ ID NO: 144072 - RNA, 32 nt, Homo Sapiens
uugauccaaugggaauuacauugaucuggugu

SEQ ID NO: 144073 - RNA, 32 nt, Homo Sapiens
cucccgcagcccuacuggaacacagcagaguc

SEQ ID NO: 144074 - RNA, 32 nt, Homo Sapiens
agggucuuuuaauggcagaaaucacccaagca

SEQ ID NO: 144075 - RNA, 32 nt, Homo Sapiens
cucaaggaauccgggugugcugagauaauugg

SEQ ID NO: 144076 - RNA, 32 nt, Homo Sapiens
uuaguacacugagaaaaaucuuauaguaaaac

SEQ ID NO: 144077 - RNA, 32 nt, Homo Sapiens
gguagaaagaagcagcucuuuuuuaaagauga

SEQ ID NO: 144078 - RNA, 32 nt, Homo Sapiens
aaguguggaaugcaucuauccaacauaaaugc

SEQ ID NO: 144079 - RNA, 32 nt, Homo Sapiens
cccagcaagccccagcagccccagccccagcc

SEQ ID NO: 144080 - RNA, 32 nt, Homo Sapiens
cauccugcugucaacaguaccugggaaggacu

SEQ ID NO: 144081 - RNA, 32 nt, Homo Sapiens
aggugcuagcaagggcgcuaggaggcccuguu

SEQ ID NO: 144082 - RNA, 32 nt, Homo Sapiens
uaccaccucaggagaguuccagggaagaaccc

SEQ ID NO: 144083 - RNA, 32 nt, Homo Sapiens
cuuuaacgggaaggcugcuuucuccuuuugcc

SEQ ID NO: 144084 - RNA, 32 nt, Homo Sapiens
gaguauacaaccuggugaaggguggauggggu

SEQ ID NO: 144085 - RNA, 32 nt, Homo Sapiens
aagaaagugaugauucuggaaaaggaacgcgu

SEQ ID NO: 144086 - RNA, 32 nt, Homo Sapiens
aggcuacaagauagauaagauagagaguaaug

SEQ ID NO: 144087 - RNA, 32 nt, Homo Sapiens
uggcucacaccuguauucccagcacuuuggga

SEQ ID NO: 144088 - RNA, 32 nt, Homo Sapiens
ucuguuuugagaagagagaacuguaguugcuu

SEQ ID NO: 144089 - RNA, 32 nt, Homo Sapiens
uccccugaggugguccccauuccucccucccu

SEQ ID NO: 144090 - RNA, 32 nt, Homo Sapiens
ccaauguuuagcaaauacauauuuuauagaac

SEQ ID NO: 144091 - RNA, 32 nt, Homo Sapiens
guaaaggaggcaggagugucagagugacggaa

SEQ ID NO: 144092 - RNA, 32 nt, Homo Sapiens
uggaaaaacaacagccauaauggcagcauggc

SEQ ID NO: 144093 - RNA, 32 nt, Homo Sapiens
gcauccagugaacacuggaagaggcuucuaga

SEQ ID NO: 144094 - RNA, 32 nt, Homo Sapiens
gccuuugccuucucguaggcguggguugccug

SEQ ID NO: 144095 - RNA, 32 nt, Homo Sapiens
cugacucagggugggcccugcaugugaugacu

SEQ ID NO: 144096 - RNA, 32 nt, Homo Sapiens
gccucuccuccggcugccccccuucccuggaa

SEQ ID NO: 144097 - RNA, 32 nt, Homo Sapiens
agccuuuucuauuugcguucaaaacugugugu

SEQ ID NO: 144098 - RNA, 32 nt, Homo Sapiens
cucaccuaggacccgaguugcgccagagaaaa

SEQ ID NO: 144099 - RNA, 32 nt, Homo Sapiens
ggcggcggcgcggcgggcggacuucgucccuc

SEQ ID NO: 144100 - RNA, 32 nt, Homo Sapiens
aucuguuggcagcagcccuuauagaaagagaa

SEQ ID NO: 144101 - RNA, 32 nt, Homo Sapiens
uucacacacccagacacacaccccgcuguaca

SEQ ID NO: 144102 - RNA, 32 nt, Homo Sapiens
cacccgccccccagccucccgcucugggcgag

SEQ ID NO: 144103 - RNA, 32 nt, Homo Sapiens
gaugggaggaucucuugagaccagguguucaa

SEQ ID NO: 144104 - RNA, 32 nt, Homo Sapiens
aggagaagguggagugagggcuggggucggga

SEQ ID NO: 144105 - RNA, 31 nt, Homo Sapiens
acccagcggcacugaucgccuugugaccgga

SEQ ID NO: 144106 - RNA, 32 nt, Homo Sapiens
cuccauggugccucuggaggccucugggccuc

SEQ ID NO: 144107 - RNA, 32 nt, Homo Sapiens
ugugccgugucuggcggugaaccuacccugaa

SEQ ID NO: 144108 - RNA, 32 nt, Homo Sapiens
cuguauuauagcaaguucuuuauuaaagauuu

SEQ ID NO: 144109 - RNA, 32 nt, Homo Sapiens
ucucaucagcagaaguggccccugcccacccc

SEQ ID NO: 144110 - RNA, 32 nt, Homo Sapiens
gccuucuccccuccccaguuggacuaggggca

SEQ ID NO: 144111 - RNA, 32 nt, Homo Sapiens
augaaaauaaacaaaaugaagggauuaugaca

SEQ ID NO: 144112 - RNA, 32 nt, Homo Sapiens
cccgaucaucugugcuuggggcugccugaggc

SEQ ID NO: 144113 - RNA, 32 nt, Homo Sapiens
gugacacccuuaaauuuuaagucuuccagucu

SEQ ID NO: 144114 - RNA, 32 nt, Homo Sapiens
uuguccaccacuaaaaugccucugccacuuug

SEQ ID NO: 144115 - RNA, 32 nt, Homo Sapiens
uaacuuauuuccccuauugaccugucuauaag

SEQ ID NO: 144116 - RNA, 32 nt, Homo Sapiens
ucacuuucaguaaaaauaaauaaaacagcagc

SEQ ID NO: 144117 - RNA, 32 nt, Homo Sapiens
gcccgcccccacccucaaagcugagcagguug

SEQ ID NO: 144118 - RNA, 32 nt, Homo Sapiens
gcuagucugaaccaaagaguuguuugggcauu

SEQ ID NO: 144119 - RNA, 32 nt, Homo Sapiens
uaaauauuugcuaauuugauaaugaaaaaaua

SEQ ID NO: 144120 - RNA, 32 nt, Homo Sapiens
uuccagcagcucccccaccucccuuagccccc

SEQ ID NO: 144121 - RNA, 32 nt, Homo Sapiens
agaugaaguaaaugcaguguucuacugccuga

SEQ ID NO: 144122 - RNA, 32 nt, Homo Sapiens
uauuuuggaaaaaacuguuauugugaaauuca

SEQ ID NO: 144123 - RNA, 32 nt, Homo Sapiens
acacauuuccacguugcaagcaugcaacucca

SEQ ID NO: 144124 - RNA, 32 nt, Homo Sapiens
uggagagugacaugugcuggacacuguccaug

SEQ ID NO: 144125 - RNA, 32 nt, Homo Sapiens
uggcgucucugguuacggggucgggcaaaggg

SEQ ID NO: 144126 - RNA, 32 nt, Homo Sapiens
ggcuccaccgaggcccgggucccccagcccgu

SEQ ID NO: 144127 - RNA, 32 nt, Homo Sapiens
cgcuucccgucucuccucuccccauucugugc

SEQ ID NO: 144128 - RNA, 32 nt, Homo Sapiens
cccaccugcuccuuugaccccuggacuuggua

SEQ ID NO: 144129 - RNA, 32 nt, Homo Sapiens
agguaugugggaagcucugaggagguucauug

SEQ ID NO: 144130 - RNA, 32 nt, Homo Sapiens
cacucugagaauaaauaggcauaugauaccca

SEQ ID NO: 144131 - RNA, 32 nt, Homo Sapiens
gccccugccucgcgcgccgcccgcgccaugaa

SEQ ID NO: 144132 - RNA, 32 nt, Homo Sapiens
uuccauuaaguacaugugccaggaaacagcga

SEQ ID NO: 144133 - RNA, 32 nt, Homo Sapiens
caacuauauucucacuacauggcucaccacca

SEQ ID NO: 144134 - RNA, 32 nt, Homo Sapiens
gaagaaaacucuaugcacaauacaguuguguu

SEQ ID NO: 144135 - RNA, 32 nt, Homo Sapiens
uucuauacuugugccuuagaaaaauuggaaga

SEQ ID NO: 144136 - RNA, 32 nt, Homo Sapiens
ugaaccacuuucaaugauacaaguuugggguu

SEQ ID NO: 144137 - RNA, 32 nt, Homo Sapiens
ggugaccagccagcugaucccucugugccacc

SEQ ID NO: 144138 - RNA, 32 nt, Homo Sapiens
ggacauacggaaagacugugacuuuauuuugu

SEQ ID NO: 144139 - RNA, 32 nt, Homo Sapiens
ugggguaugggauagaagcccuugcuuauuuu

SEQ ID NO: 144140 - RNA, 31 nt, Homo Sapiens
gggaucauuuuuaguuugccaaaugaugaaa

SEQ ID NO: 144141 - RNA, 32 nt, Homo Sapiens
uaaugcuauccuuccccccucuucccauccca

SEQ ID NO: 144142 - RNA, 32 nt, Homo Sapiens
agggaagaagcugcgccgugucguccgucucc

SEQ ID NO: 144143 - RNA, 32 nt, Homo Sapiens
aaaguacuucagaucauaaugauaaaauacuu

SEQ ID NO: 144144 - RNA, 32 nt, Homo Sapiens
ggucucuuguuuggaagugacuaacagcauuu

SEQ ID NO: 144145 - RNA, 32 nt, Homo Sapiens
gugcucccuaccaccuccccagccuuugauca

SEQ ID NO: 144146 - RNA, 30 nt, Homo Sapiens
agccugcccgccugcucgccggcgcccgga

SEQ ID NO: 144147 - RNA, 32 nt, Homo Sapiens
gcgggcaagucucagcugaggcugaaaccucg

SEQ ID NO: 144148 - RNA, 32 nt, Homo Sapiens
ccuuuggacuuggauggguauuaaacucuuca

SEQ ID NO: 144149 - RNA, 32 nt, Homo Sapiens
gagacccauuuucuccagccauauuacauuag

SEQ ID NO: 144150 - RNA, 30 nt, Homo Sapiens
gagcgugcgggcgacgcgggucucacucgu

SEQ ID NO: 144151 - RNA, 32 nt, Homo Sapiens
gugagcgccauccugcugaacguguauuucag

SEQ ID NO: 144152 - RNA, 32 nt, Homo Sapiens
guuacugagagaaaugaggaaaaaauaauugu

SEQ ID NO: 144153 - RNA, 32 nt, Homo Sapiens
cgcccccggcuggggagggaagcacugucaug

SEQ ID NO: 144154 - RNA, 32 nt, Homo Sapiens
aaaaauauuuuuuuuucuuauucuaaacugag

SEQ ID NO: 144155 - RNA, 32 nt, Homo Sapiens
gaggcgacccccagcccccucccguccgcaca

SEQ ID NO: 144156 - RNA, 32 nt, Homo Sapiens
acaccguggagcggggcggggcgugcugggau

SEQ ID NO: 144157 - RNA, 32 nt, Homo Sapiens
aggcgauuuaauuaaauggcugugaugcauuu

SEQ ID NO: 144158 - RNA, 32 nt, Homo Sapiens
cagcacucugugagccauguccagucccuuuu

SEQ ID NO: 144159 - RNA, 32 nt, Homo Sapiens
uuuauggaaaauaaauuggcuaucuuauuuuu

SEQ ID NO: 144160 - RNA, 32 nt, Homo Sapiens
aaggccugugcggaagaaacgccgcucccugc

SEQ ID NO: 144161 - RNA, 32 nt, Homo Sapiens
gguuucaccauguugaccaggcuggucuugaa

SEQ ID NO: 144162 - RNA, 32 nt, Homo Sapiens
uagcuguccuggcuggugccccucccaggcuc

SEQ ID NO: 144163 - RNA, 32 nt, Homo Sapiens
cggaauauugaagagauggggaaaugguguga

SEQ ID NO: 144164 - RNA, 32 nt, Homo Sapiens
ugucaugguuuuguuaccuuuuuguuuuugua

SEQ ID NO: 144165 - RNA, 32 nt, Homo Sapiens
agcuuggaaagcuguaguauccgcucauuuuu

SEQ ID NO: 144166 - RNA, 32 nt, Homo Sapiens
ccacuacaaaagacaucauuccagacuaaaua

SEQ ID NO: 144167 - RNA, 32 nt, Homo Sapiens
uguucugcucagagcaccaccaggccuacuuc

SEQ ID NO: 144168 - RNA, 32 nt, Homo Sapiens
gaacacgaucuucuuccacaucuccagcaagu

SEQ ID NO: 144169 - RNA, 32 nt, Homo Sapiens
aauguucaaaaauaaauuuauacauagaaaca

SEQ ID NO: 144170 - RNA, 32 nt, Homo Sapiens
gcuccuuccuuccacuccccucccugccagag

SEQ ID NO: 144171 - RNA, 32 nt, Homo Sapiens
agaaagaagggagaggcagcagucuccuccca

SEQ ID NO: 144172 - RNA, 32 nt, Homo Sapiens
gaucuuuuugguaaaagaguuaaugaacuaug

SEQ ID NO: 144173 - RNA, 32 nt, Homo Sapiens
caugaugacuggauguugaauuuugugaaaug

SEQ ID NO: 144174 - RNA, 32 nt, Homo Sapiens
aagggagggacccucaguucccugccccuuuc

SEQ ID NO: 144175 - RNA, 32 nt, Homo Sapiens
gagcagcuuuagagagcgacugagcgucucgc

SEQ ID NO: 144176 - RNA, 32 nt, Homo Sapiens
cauucguggucuuuuuaccuauccuaagcuua

SEQ ID NO: 144177 - RNA, 32 nt, Homo Sapiens
agggugcagggagaggggaggcggggacggug

SEQ ID NO: 144178 - RNA, 32 nt, Homo Sapiens
uggucucccguccagcccuggcugcagccucc

SEQ ID NO: 144179 - RNA, 32 nt, Homo Sapiens
aaaguguacaauuuaauggcuuucaguaaauu

SEQ ID NO: 144180 - RNA, 32 nt, Homo Sapiens
aagcucccacgguccuggaucccgcuccaccu

SEQ ID NO: 144181 - RNA, 32 nt, Homo Sapiens
ccccggcggggggucaggauccuccacaggua

SEQ ID NO: 144182 - RNA, 32 nt, Homo Sapiens
caaggcuggcucucugcagggcuggucagguc

SEQ ID NO: 144183 - RNA, 32 nt, Homo Sapiens
gccuuaaauaaaacugcauugcugauucaaaa

SEQ ID NO: 144184 - RNA, 32 nt, Homo Sapiens
gugugcacggccucugccccccggccuuugcu

SEQ ID NO: 144185 - RNA, 32 nt, Homo Sapiens
uagccuuugucugcgauuuuggcuucaucucc

SEQ ID NO: 144186 - RNA, 32 nt, Homo Sapiens
acucgcgcuuuucucuccgugccauggcgcca

SEQ ID NO: 144187 - RNA, 32 nt, Homo Sapiens
ugccacaucuucugccauccuaaggggacaug

SEQ ID NO: 144188 - RNA, 32 nt, Homo Sapiens
uuucacaguccuccagauuuuuccaagagcag

SEQ ID NO: 144189 - RNA, 32 nt, Homo Sapiens
uuuguuuacauaucaucugcagcuguuuuuug

SEQ ID NO: 144190 - RNA, 32 nt, Homo Sapiens
acacuuuaaaauuuaucauacaacagaaaaug

SEQ ID NO: 144191 - RNA, 32 nt, Homo Sapiens
gaggcuucauucuugguucucuagcuaaaaac

SEQ ID NO: 144192 - RNA, 32 nt, Homo Sapiens
ggcaccggguggcacugaacccucuggcccuc

SEQ ID NO: 144193 - RNA, 32 nt, Homo Sapiens
agaaguuucugcacaaucugugucuugaccug

SEQ ID NO: 144194 - RNA, 32 nt, Homo Sapiens
uuuuagguuaauuuucuugcugugauauauau

SEQ ID NO: 144195 - RNA, 32 nt, Homo Sapiens
aaguuccagaagcccugcgauaaaaacaugau

SEQ ID NO: 144196 - RNA, 32 nt, Homo Sapiens
cucugccucucccacacucucccagagcucac

SEQ ID NO: 144197 - RNA, 32 nt, Homo Sapiens
uuaacuaaaagcugguucccaaaugcauagcu

SEQ ID NO: 144198 - RNA, 29 nt, Homo Sapiens
agcuaugucacguguggcaggcacaagaa

SEQ ID NO: 144199 - RNA, 32 nt, Homo Sapiens
aucccacuugaauaucacaacaaccuagggag

SEQ ID NO: 144200 - RNA, 32 nt, Homo Sapiens
aaccucuugggcuguggugaccaagggcuaaa

SEQ ID NO: 144201 - RNA, 32 nt, Homo Sapiens
ucggacugggcugcccggggccaccgcagcuc

SEQ ID NO: 144202 - RNA, 32 nt, Homo Sapiens
cguugcugcaguacuuuacaaacuucuaguuc

SEQ ID NO: 144203 - RNA, 32 nt, Homo Sapiens
uguucauaucucauuucuuuuuuuaucauguu

SEQ ID NO: 144204 - RNA, 32 nt, Homo Sapiens
ggcugcuccgccuccugaccagcccucgucag

SEQ ID NO: 144205 - RNA, 32 nt, Homo Sapiens
uugguuugguuugguuugauaauuaaauuuca

SEQ ID NO: 144206 - RNA, 32 nt, Homo Sapiens
ugagccguuccagccggugacugugguggcuc

SEQ ID NO: 144207 - RNA, 32 nt, Homo Sapiens
ggacaugggcauuuuucuuacuuuuguaauua

SEQ ID NO: 144208 - RNA, 32 nt, Homo Sapiens
cuuuacaaacuuagguuaaacauuccuaaucu

SEQ ID NO: 144209 - RNA, 28 nt, Homo Sapiens
ggcgggcugcggccgcugauuaaaggcc

SEQ ID NO: 144210 - RNA, 32 nt, Homo Sapiens
gcggacaggaacuucaccuugcagugcccccu

SEQ ID NO: 144211 - RNA, 32 nt, Homo Sapiens
ucacuggaaaggaaagaugaugcucaguuuua

SEQ ID NO: 144212 - RNA, 32 nt, Homo Sapiens
gcuaauuugaacuaauuguauaaaaacaccaa

SEQ ID NO: 144213 - RNA, 32 nt, Homo Sapiens
uuauaaagaaagauuaaagccauguugacuau

SEQ ID NO: 144214 - RNA, 32 nt, Homo Sapiens
aggcugccaugugagggugugcaggucgugga

SEQ ID NO: 144215 - RNA, 32 nt, Homo Sapiens
guaucccccagccccaggaaauguggggucgg

SEQ ID NO: 144216 - RNA, 32 nt, Homo Sapiens
cuggucagcucuuucagcauggugcaggugug

SEQ ID NO: 144217 - RNA, 32 nt, Homo Sapiens
acagcagcaauagccaauguauggacaccuca

SEQ ID NO: 144218 - RNA, 32 nt, Homo Sapiens
uucuuucaaaacuugaguggucucugagcucc

SEQ ID NO: 144219 - RNA, 32 nt, Homo Sapiens
ugaaacgcuaggggcgggaucuggcggagugg

SEQ ID NO: 144220 - RNA, 32 nt, Homo Sapiens
ccagaacgaaguuuauuugaccaaggaguaaa

SEQ ID NO: 144221 - RNA, 30 nt, Homo Sapiens
gcccgggcgcccgagccuccucggccuugg

SEQ ID NO: 144222 - RNA, 32 nt, Homo Sapiens
uuuaaaagggaagaagauuucagacucaugcc

SEQ ID NO: 144223 - RNA, 32 nt, Homo Sapiens
cacgcgggaagacagccuuggugucugggagg

SEQ ID NO: 144224 - RNA, 32 nt, Homo Sapiens
ccuccauguccgaagccaacaacuagcugguc

SEQ ID NO: 144225 - RNA, 32 nt, Homo Sapiens
cuuuguuucuuacauguguacuuuuuuguuua

SEQ ID NO: 144226 - RNA, 32 nt, Homo Sapiens
uggauucugcggugcugcugacaggugaacuc

SEQ ID NO: 144227 - RNA, 32 nt, Homo Sapiens
uuaucuggguuaauucauuugguucaaauagu

SEQ ID NO: 144228 - RNA, 32 nt, Homo Sapiens
agggcugcugucauagugaacaauuuauaagu

SEQ ID NO: 144229 - RNA, 32 nt, Homo Sapiens
cccggcccuagccagcugggccccaggucaag

SEQ ID NO: 144230 - RNA, 32 nt, Homo Sapiens
cccacacuuucugcgccagcugggagugcgcg

SEQ ID NO: 144231 - RNA, 32 nt, Homo Sapiens
gcagggucaggagagucugguccugccuagcu

SEQ ID NO: 144232 - RNA, 32 nt, Homo Sapiens
ugagccaucauaccucuuucccauauaaacua

SEQ ID NO: 144233 - RNA, 32 nt, Homo Sapiens
aaauuuguuuuauaaugaugucuuagagggac

SEQ ID NO: 144234 - RNA, 32 nt, Homo Sapiens
auuuucuacccaguguugggguuguuucuuaa

SEQ ID NO: 144235 - RNA, 32 nt, Homo Sapiens
gcccaaaacagaaagacgcagaugagccgucu

SEQ ID NO: 144236 - RNA, 32 nt, Homo Sapiens
caaaaaguuggaaaaaacagaaguaaaauaaa

SEQ ID NO: 144237 - RNA, 32 nt, Homo Sapiens
auuguuuugacaaagcugacaugguucauuac

SEQ ID NO: 144238 - RNA, 32 nt, Homo Sapiens
uaugagaggcggagccaagaugaugccauugc

SEQ ID NO: 144239 - RNA, 32 nt, Homo Sapiens
gccauaaaacaaaggaaacaacaaaauggaaa

SEQ ID NO: 144240 - RNA, 32 nt, Homo Sapiens
caaucuuacaaguauugauccauuucaacaaa

SEQ ID NO: 144241 - RNA, 32 nt, Homo Sapiens
ugauuaaauuccuaaggggccugaagaagaca

SEQ ID NO: 144242 - RNA, 27 nt, Homo Sapiens
cguguuuucuuuuucagccccggagag

SEQ ID NO: 144243 - RNA, 32 nt, Homo Sapiens
cacggaccgcgcgcccgggugccugcuccgcu

SEQ ID NO: 144244 - RNA, 32 nt, Homo Sapiens
uucagugacuccugauggcaaguggcuguucu

SEQ ID NO: 144245 - RNA, 31 nt, Homo Sapiens
aauauuaaaaauuaccauauuaugaaauugc

SEQ ID NO: 144246 - RNA, 32 nt, Homo Sapiens
gccuggccacgcccucccucucccaggcccga

SEQ ID NO: 144247 - RNA, 32 nt, Homo Sapiens
gucccagggguugucggguacacagguccugu

SEQ ID NO: 144248 - RNA, 32 nt, Homo Sapiens
auguagacugggucaaagcuuauuuaaguaua

SEQ ID NO: 144249 - RNA, 32 nt, Homo Sapiens
cgugcaucccgcaccaucccccggccccgggc

SEQ ID NO: 144250 - RNA, 32 nt, Homo Sapiens
cagccagcgcgccuacggcggccccaaccggc

SEQ ID NO: 144251 - RNA, 32 nt, Homo Sapiens
ccugaaccacacacucuaaagaaauauuuuuu

SEQ ID NO: 144252 - RNA, 32 nt, Homo Sapiens
uaggccuaguugaaagucaagaaggacagcag

SEQ ID NO: 144253 - RNA, 32 nt, Homo Sapiens
ucuuuguuuuaaaauaaaaauucugaauguac

SEQ ID NO: 144254 - RNA, 32 nt, Homo Sapiens
cgcaauacucucugguguccccucaccacccu

SEQ ID NO: 144255 - RNA, 32 nt, Homo Sapiens
aaccccugccagcagcccugggacccugccag

SEQ ID NO: 144256 - RNA, 32 nt, Homo Sapiens
aggccgucccaggagcagcugcccgugcggaa

SEQ ID NO: 144257 - RNA, 32 nt, Homo Sapiens
ccccagcgugcaccaccuggcccggcacugug

SEQ ID NO: 144258 - RNA, 32 nt, Homo Sapiens
cuuaaugaaaauagauauggucacaaguacau

SEQ ID NO: 144259 - RNA, 32 nt, Homo Sapiens
caucugcacacgagccaguggcugcuugcagu

SEQ ID NO: 144260 - RNA, 32 nt, Homo Sapiens
caccugucauccacaccaagcauuacucccca

SEQ ID NO: 144261 - RNA, 32 nt, Homo Sapiens
uuuccuucaccgaugcuccauccucguauuuc

SEQ ID NO: 144262 - RNA, 32 nt, Homo Sapiens
uucaagacaauuuuuuccccuugcuguaucuc

SEQ ID NO: 144263 - RNA, 32 nt, Homo Sapiens
ggcucacugcaacccccgccuccaggguucaa

SEQ ID NO: 144264 - RNA, 32 nt, Homo Sapiens
ggggcggcccucgccgcggcgacgucacggaa

SEQ ID NO: 144265 - RNA, 32 nt, Homo Sapiens
agccagacccgggcgcugccgagaccccucgg

SEQ ID NO: 144266 - RNA, 32 nt, Homo Sapiens
aaauggagaaaagaagagaggacucucaaggc

SEQ ID NO: 144267 - RNA, 32 nt, Homo Sapiens
ccagaacuucgggaggccgagacaggcagauc

SEQ ID NO: 144268 - RNA, 32 nt, Homo Sapiens
ugccugcggcccggggcugaaggcgccguggc

SEQ ID NO: 144269 - RNA, 32 nt, Homo Sapiens
uauagucacuccuggugaugauaugggcugaa

SEQ ID NO: 144270 - RNA, 32 nt, Homo Sapiens
ccgucgggagcgagggcggaggggaagggagg

SEQ ID NO: 144271 - RNA, 32 nt, Homo Sapiens
aacauagggacaguucugcugcuguuauuuau

SEQ ID NO: 144272 - RNA, 32 nt, Homo Sapiens
cccaaauccucgcaggcagcucaucaacgcaa

SEQ ID NO: 144273 - RNA, 32 nt, Homo Sapiens
ggcagaagacagccugaugccuugaagacuuc

SEQ ID NO: 144274 - RNA, 32 nt, Homo Sapiens
cucgcgggucuccucagcaucagacgggcuuc

SEQ ID NO: 144275 - RNA, 32 nt, Homo Sapiens
uggccaguuccaccugccccagccagagggca

SEQ ID NO: 144276 - RNA, 32 nt, Homo Sapiens
cggccuucaccucccuucuccuccuguguuua

SEQ ID NO: 144277 - RNA, 32 nt, Homo Sapiens
gacauguaguacccacaucucuaggccugcag

SEQ ID NO: 144278 - RNA, 32 nt, Homo Sapiens
agcgaguaccccagccacuccucaaccuugac

SEQ ID NO: 144279 - RNA, 32 nt, Homo Sapiens
ugguuccuccucuacgcccacccgccugcccc

SEQ ID NO: 144280 - RNA, 32 nt, Homo Sapiens
caaugaccaaaauaaauaaauaaauaaaacuc

SEQ ID NO: 144281 - RNA, 32 nt, Homo Sapiens
aaauaccuuaauuuuucuuugauuuuuauuuu

SEQ ID NO: 144282 - RNA, 32 nt, Homo Sapiens
cuuggcagacugccuuuccuggaagagggcac

SEQ ID NO: 144283 - RNA, 32 nt, Homo Sapiens
gcagaugcagaagcagaagagggaggggaaac

SEQ ID NO: 144284 - RNA, 32 nt, Homo Sapiens
ggcuuuacucuucccccuccuuuucucaagca

SEQ ID NO: 144285 - RNA, 32 nt, Homo Sapiens
aggcagugaaggguauccauguguagaucaca

SEQ ID NO: 144286 - RNA, 32 nt, Homo Sapiens
guagccaggaaauaagaagagcuuacacagag

SEQ ID NO: 144287 - RNA, 32 nt, Homo Sapiens
cucugcugacuucugagcaguuuuccaggagg

SEQ ID NO: 144288 - RNA, 32 nt, Homo Sapiens
cacggaggcgccauggacacgcacuuugcaaa

SEQ ID NO: 144289 - RNA, 32 nt, Homo Sapiens
uguguggcuugagaaucccaucuccuaaauug

SEQ ID NO: 144290 - RNA, 32 nt, Homo Sapiens
auuuuacacaucauaccuagcagguaauaaaa

SEQ ID NO: 144291 - RNA, 32 nt, Homo Sapiens
cuggcgaaagcagaggaggagaaugaagaaag

SEQ ID NO: 144292 - RNA, 32 nt, Homo Sapiens
gaggugcccgcccuggccccaggagaaugaac

SEQ ID NO: 144293 - RNA, 32 nt, Homo Sapiens
agggcuggccccagggcacccuguggcccugg

SEQ ID NO: 144294 - RNA, 32 nt, Homo Sapiens
augcuuugcaagauguaaaaugcuguaugaua

SEQ ID NO: 144295 - RNA, 32 nt, Homo Sapiens
ucaucaauauaaauaaaagagcagaaaaauau

SEQ ID NO: 144296 - RNA, 32 nt, Homo Sapiens
ucaagucuucuaaucaucuauguguguaugau

SEQ ID NO: 144297 - RNA, 32 nt, Homo Sapiens
gauuaguauaauauuucuuaauuuggauaaua

SEQ ID NO: 144298 - RNA, 32 nt, Homo Sapiens
uagcaggcugaauaauaucccccaaagauauc

SEQ ID NO: 144299 - RNA, 32 nt, Homo Sapiens
aguccggagcagcagccagaguuuauuaacca

SEQ ID NO: 144300 - RNA, 23 nt, Homo Sapiens
cgucugagccuggccgcggccgc

SEQ ID NO: 144301 - RNA, 32 nt, Homo Sapiens
cuuggaaaaaagauagugaacaacuugagaau

SEQ ID NO: 144302 - RNA, 32 nt, Homo Sapiens
ucuuaaaagaaauuaagaagaaccccuccagu

SEQ ID NO: 144303 - RNA, 32 nt, Homo Sapiens
gcucccagcgguuuccgcagccaccuccacca

SEQ ID NO: 144304 - RNA, 32 nt, Homo Sapiens
cagagcaucuucuggccacgcccaccuugcug

SEQ ID NO: 144305 - RNA, 32 nt, Homo Sapiens
uggugucaucaccuggaggaucugcaauaacc

SEQ ID NO: 144306 - RNA, 32 nt, Homo Sapiens
gcacacagcucacuccucccucuggcccuccu

SEQ ID NO: 144307 - RNA, 32 nt, Homo Sapiens
ccaaucaucuucugcuuuuauucacucaggaa

SEQ ID NO: 144308 - RNA, 32 nt, Homo Sapiens
auaaauaguuuauaaaauguauuacuuaaggu

SEQ ID NO: 144309 - RNA, 32 nt, Homo Sapiens
uugccauuuuucucuuuuuucuuccucugacu

SEQ ID NO: 144310 - RNA, 32 nt, Homo Sapiens
agagcagacuauuuuucuuguucccucacaag

SEQ ID NO: 144311 - RNA, 32 nt, Homo Sapiens
gccauuguugaaaauuaaacaauauaaacuua

SEQ ID NO: 144312 - RNA, 32 nt, Homo Sapiens
cuggagugacugcccuacccccgggaugccua

SEQ ID NO: 144313 - RNA, 32 nt, Homo Sapiens
cugaagucagaggauagcacaugcauucuuag

SEQ ID NO: 144314 - RNA, 32 nt, Homo Sapiens
aagugaugcagucucuucccagcccaagcggg

SEQ ID NO: 144315 - RNA, 28 nt, Homo Sapiens
uuauuaguggcuauaaugacguggaaau

SEQ ID NO: 144316 - RNA, 32 nt, Homo Sapiens
cuccugcagaucugucugggcugugaugacga

SEQ ID NO: 144317 - RNA, 32 nt, Homo Sapiens
cuccuuuuguguuguaucugguaauuaaauag

SEQ ID NO: 144318 - RNA, 32 nt, Homo Sapiens
ccugaagacauauagaggcagaaggacaggaa

SEQ ID NO: 144319 - RNA, 32 nt, Homo Sapiens
aauuuacugaaucguauauauucaucugagau

SEQ ID NO: 144320 - RNA, 32 nt, Homo Sapiens
agacugguguaagagugugggguguggcaggc

SEQ ID NO: 144321 - RNA, 32 nt, Homo Sapiens
aaugguuauccuguuuuguucauuucaggcau

SEQ ID NO: 144322 - RNA, 32 nt, Homo Sapiens
gcugaugguuguggcagaaacaucucaaggua

SEQ ID NO: 144323 - RNA, 32 nt, Homo Sapiens
gguaagagcuauaggaggaaaaaacaggcucc

SEQ ID NO: 144324 - RNA, 32 nt, Homo Sapiens
caaaacaagacugacaaaaaucugaaaaacua

SEQ ID NO: 144325 - RNA, 32 nt, Homo Sapiens
caugacugacuucacaugcucagcuuucucag

SEQ ID NO: 144326 - RNA, 32 nt, Homo Sapiens
acugaacuuuuuuguuuauuaagguguuuaaa

SEQ ID NO: 144327 - RNA, 32 nt, Homo Sapiens
agagagugcuauuguagagccagaggucuggc

SEQ ID NO: 144328 - RNA, 32 nt, Homo Sapiens
uucuaaucugcuaugcuugaaugccacgcggu

SEQ ID NO: 144329 - RNA, 32 nt, Homo Sapiens
gcugagccaggcaggaauuugcugauuaauuu

SEQ ID NO: 144330 - RNA, 32 nt, Homo Sapiens
ggguugaauucaguaaguuuccucugaagcac

SEQ ID NO: 144331 - RNA, 32 nt, Homo Sapiens
cacuguccaguccagcagcagccuggcugccu

SEQ ID NO: 144332 - RNA, 32 nt, Homo Sapiens
accaggagccagucgccgcgggccuggcucug

SEQ ID NO: 144333 - RNA, 32 nt, Homo Sapiens
aacuacaacguggccuucgaggagaccacauu

SEQ ID NO: 144334 - RNA, 32 nt, Homo Sapiens
gggagcaucucugcccugccgccccguccggg

SEQ ID NO: 144335 - RNA, 30 nt, Homo Sapiens
ucgcguaggaggcgcgcagaccuugcaccu

SEQ ID NO: 144336 - RNA, 32 nt, Homo Sapiens
aguacugugaugccaggcugcuccacauccag

SEQ ID NO: 144337 - RNA, 32 nt, Homo Sapiens
ucuaucaaaacaccgcuacauaaaaaaucccc

SEQ ID NO: 144338 - RNA, 32 nt, Homo Sapiens
acacacggcaacacugguccuugggccuauga

SEQ ID NO: 144339 - RNA, 32 nt, Homo Sapiens
aagcaugaaaggcuuuuaaauuagaucauccc

SEQ ID NO: 144340 - RNA, 32 nt, Homo Sapiens
cuuugacaagcacaucuggcucuccauauggg

SEQ ID NO: 144341 - RNA, 32 nt, Homo Sapiens
gcuuguuuguuguuuucaccagagugagcucc

SEQ ID NO: 144342 - RNA, 32 nt, Homo Sapiens
ggccgggcgcgguggcucaugccuguaacccc

SEQ ID NO: 144343 - RNA, 32 nt, Homo Sapiens
auuuuaucaacaaagugugaaaaaauaauaag

SEQ ID NO: 144344 - RNA, 32 nt, Homo Sapiens
guuuuaaaauuccuacuuuuuugaguguuuuc

SEQ ID NO: 144345 - RNA, 32 nt, Homo Sapiens
cauacagcagaggcauugaacacacaccacca

SEQ ID NO: 144346 - RNA, 32 nt, Homo Sapiens
caauugucgaaaagagucuuccaauuaaugcu

SEQ ID NO: 144347 - RNA, 32 nt, Homo Sapiens
ccccuauauuuuaguccuuccauuccuagaga

SEQ ID NO: 144348 - RNA, 32 nt, Homo Sapiens
uaaucauauuuaugucugucuuucucuacuuu

SEQ ID NO: 144349 - RNA, 32 nt, Homo Sapiens
caucacgggaggaggaggaauggucuucagca

SEQ ID NO: 144350 - RNA, 32 nt, Homo Sapiens
uaaaguguuggucuuucuaauguagcuauuuu

SEQ ID NO: 144351 - RNA, 32 nt, Homo Sapiens
acacugauuuugcugcugaagaguuuaccuau

SEQ ID NO: 144352 - RNA, 32 nt, Homo Sapiens
gacauagcugaaugucuuaauaaauuuaaauu

SEQ ID NO: 144353 - RNA, 32 nt, Homo Sapiens
guuuuugccuacuucaagagcuuuuguaauua

SEQ ID NO: 144354 - RNA, 32 nt, Homo Sapiens
cauuaauuuuuacuuuuuauggguuuugcuua

SEQ ID NO: 144355 - RNA, 32 nt, Homo Sapiens
aaagaucugauccaaaugagaacagauugguu

SEQ ID NO: 144356 - RNA, 32 nt, Homo Sapiens
uugcagugagccaaaaucaugccacugcacuc

SEQ ID NO: 144357 - RNA, 32 nt, Homo Sapiens
ccugcacgccgccuucauccccggccugucuc

SEQ ID NO: 144358 - RNA, 32 nt, Homo Sapiens
cugaggucuccaucaccguuggcgccaucagu

SEQ ID NO: 144359 - RNA, 32 nt, Homo Sapiens
gcuuuuuuguaucuuaucuuggacacuuaugc

SEQ ID NO: 144360 - RNA, 32 nt, Homo Sapiens
gaaggcggcgagccccggggccccgaggccuu

SEQ ID NO: 144361 - RNA, 32 nt, Homo Sapiens
uucugccgagaccccaagaacucgggguguca

SEQ ID NO: 144362 - RNA, 32 nt, Homo Sapiens
uugauacauucagcaaauuuggagcacauuga

SEQ ID NO: 144363 - RNA, 32 nt, Homo Sapiens
cucuuccugcugucaccucccaucaucccacu

SEQ ID NO: 144364 - RNA, 32 nt, Homo Sapiens
acaauaaauauaaaaugaaauguuuauguuga

SEQ ID NO: 144365 - RNA, 32 nt, Homo Sapiens
acaguggcaaacaugaaugaugagaagacagc

SEQ ID NO: 144366 - RNA, 32 nt, Homo Sapiens
auugaaagggguuuuucccuagucaagcauuu

SEQ ID NO: 144367 - RNA, 32 nt, Homo Sapiens
ggaaggaccaaauuuucugaaaaaauuggaac

SEQ ID NO: 144368 - RNA, 32 nt, Homo Sapiens
auaggggugaaaaacuaacuucaagugucccu

SEQ ID NO: 144369 - RNA, 32 nt, Homo Sapiens
uuggcauguucccaccgggagugccgggcagg

SEQ ID NO: 144370 - RNA, 32 nt, Homo Sapiens
auucauuuuuuguagaaauucuaaugcaugau

SEQ ID NO: 144371 - RNA, 32 nt, Homo Sapiens
cuggggggccccagucuaagcucugcuuaugc

SEQ ID NO: 144372 - RNA, 32 nt, Homo Sapiens
ccgcuccgugggaaaaaacagcuccuccauuu

SEQ ID NO: 144373 - RNA, 32 nt, Homo Sapiens
ggugcggcugcaggccguuguuggucgagcug

SEQ ID NO: 144374 - RNA, 32 nt, Homo Sapiens
ucuacuaaaaauuuaaaaauuagcugggcaug

SEQ ID NO: 144375 - RNA, 32 nt, Homo Sapiens
cgaguccagcuagcggcuguugcggggaccgu

SEQ ID NO: 144376 - RNA, 32 nt, Homo Sapiens
uugcuuuuuguacaguuaaauaaggucacaau

SEQ ID NO: 144377 - RNA, 32 nt, Homo Sapiens
ggcggggggaggaggcggcccuagcgccauuu

SEQ ID NO: 144378 - RNA, 31 nt, Homo Sapiens
auaaauuguaacauaaguguauguucuucga

SEQ ID NO: 144379 - RNA, 32 nt, Homo Sapiens
acauguaaauuaauuauuuuaucaauacuaga

SEQ ID NO: 144380 - RNA, 32 nt, Homo Sapiens
uggggcggcuggccgggcagggggcugacccc

SEQ ID NO: 144381 - RNA, 32 nt, Homo Sapiens
gacacugccccaccccagccaccuccacuugc

SEQ ID NO: 144382 - RNA, 32 nt, Homo Sapiens
uauccuggugccuacaacagugccugacacau

SEQ ID NO: 144383 - RNA, 32 nt, Homo Sapiens
acgccaaccugggucacauagcaagacucugu

SEQ ID NO: 144384 - RNA, 32 nt, Homo Sapiens
guugugacugguuuacauaauuacacgauuaa

SEQ ID NO: 144385 - RNA, 30 nt, Homo Sapiens
gucggcccaggagggcggggucccguggug

SEQ ID NO: 144386 - RNA, 32 nt, Homo Sapiens
agauucacuuuaauuucuuaauuuuuuuuuua

SEQ ID NO: 144387 - RNA, 32 nt, Homo Sapiens
cuuaauuuuuaaagaugcuggugauaauaaaa

SEQ ID NO: 144388 - RNA, 32 nt, Homo Sapiens
aacuagacuaccuuuacugaacuuaaugaaau

SEQ ID NO: 144389 - RNA, 28 nt, Homo Sapiens
uucucgcugcggccgcccaggugcccgc

SEQ ID NO: 144390 - RNA, 32 nt, Homo Sapiens
gaaccuaaugcacucugggucuggccagggcu

SEQ ID NO: 144391 - RNA, 32 nt, Homo Sapiens
guccauucccaauugacuaaguaagugagauu

SEQ ID NO: 144392 - RNA, 32 nt, Homo Sapiens
agucacccacccagccuuggagcuggaugccu

SEQ ID NO: 144393 - RNA, 32 nt, Homo Sapiens
uuaaaauaaucuuuuuaacaaugugacgccaa

SEQ ID NO: 144394 - RNA, 32 nt, Homo Sapiens
aaggcaucacuuuuaagaaagcuuacaguugg

SEQ ID NO: 144395 - RNA, 32 nt, Homo Sapiens
acaccagggucucagccuuuuggggugaacga

SEQ ID NO: 144396 - RNA, 32 nt, Homo Sapiens
aaaaagacugguuuuaauuuuaccaaugugug

SEQ ID NO: 144397 - RNA, 30 nt, Homo Sapiens
aaaauauguugauagcuuuagguucauuuc

SEQ ID NO: 144398 - RNA, 32 nt, Homo Sapiens
auaauuuaaaacuaaaguugguagguaaauaa

SEQ ID NO: 144399 - RNA, 32 nt, Homo Sapiens
cucuagacuccauggucuaacaagggagacau

SEQ ID NO: 144400 - RNA, 32 nt, Homo Sapiens
guuuccuugaaaagaacugaaaacugaugaaa

SEQ ID NO: 144401 - RNA, 32 nt, Homo Sapiens
guucugguaagugauggccauugauuucaagg

SEQ ID NO: 144402 - RNA, 32 nt, Homo Sapiens
acggaugguggcggcggggcgcgggccagcgc

SEQ ID NO: 144403 - RNA, 32 nt, Homo Sapiens
gggccgcagcucaggacucggagcaggagagu

SEQ ID NO: 144404 - RNA, 32 nt, Homo Sapiens
aacauaguuuuaucuuuguaugugugugggga

SEQ ID NO: 144405 - RNA, 32 nt, Homo Sapiens
ccucugccaaacugggaaccagcagugcuagu

SEQ ID NO: 144406 - RNA, 32 nt, Homo Sapiens
gauacugucucacagcacuuuguaugaacgca

SEQ ID NO: 144407 - RNA, 32 nt, Homo Sapiens
aggaagaugucugggugucuguagaagaugcu

SEQ ID NO: 144408 - RNA, 32 nt, Homo Sapiens
cugaagcacuacugcuggccagcaggcucacg

SEQ ID NO: 144409 - RNA, 32 nt, Homo Sapiens
ggcccguccacaggcccggcucugggccacgu

SEQ ID NO: 144410 - RNA, 32 nt, Homo Sapiens
gacacaagcgcacacacacacacacacuugca

SEQ ID NO: 144411 - RNA, 32 nt, Homo Sapiens
cagcccaaaguucuugucaccuccucaugcaa

SEQ ID NO: 144412 - RNA, 32 nt, Homo Sapiens
aaccgccgcucccacugacgcugcuuucgcuu

SEQ ID NO: 144413 - RNA, 32 nt, Homo Sapiens
cuuguauaauuuuggaaauugguuucaaaucu

SEQ ID NO: 144414 - RNA, 32 nt, Homo Sapiens
ugggaaaacuaccaccuguugagugagccaau

SEQ ID NO: 144415 - RNA, 32 nt, Homo Sapiens
accaaccugugccccaggggcuucaagaguug

SEQ ID NO: 144416 - RNA, 32 nt, Homo Sapiens
ucaagcuuuacacauaaauauuuucagcaaag

SEQ ID NO: 144417 - RNA, 32 nt, Homo Sapiens
aaugcaguugcuucucaggggaggaagaagga

SEQ ID NO: 144418 - RNA, 32 nt, Homo Sapiens
agaaugauucucuccaccuggugcucauauga

SEQ ID NO: 144419 - RNA, 32 nt, Homo Sapiens
uucauuccauucccuuucaucugugcucauac

SEQ ID NO: 144420 - RNA, 32 nt, Homo Sapiens
uauauaaacuauucuuuuuugccacacauuuu

SEQ ID NO: 144421 - RNA, 32 nt, Homo Sapiens
cucaggcugcagagagagacaccuggucaccc

SEQ ID NO: 144422 - RNA, 32 nt, Homo Sapiens
ugcaguuuaucccacacacugcacuuagggag

SEQ ID NO: 144423 - RNA, 32 nt, Homo Sapiens
gcuuuguucuccugggguugcuuccuggaccc

SEQ ID NO: 144424 - RNA, 32 nt, Homo Sapiens
ugcgugauguaccccaucgacugcgucaagac

SEQ ID NO: 144425 - RNA, 32 nt, Homo Sapiens
aaucugucucccacuaugaaccucugauggcc

SEQ ID NO: 144426 - RNA, 32 nt, Homo Sapiens
agaugaugaugaugacuuugaugaugaggaag

SEQ ID NO: 144427 - RNA, 32 nt, Homo Sapiens
caacucagacagugacucaggccaccugccgg

SEQ ID NO: 144428 - RNA, 32 nt, Homo Sapiens
cagggccggcuagggggcgccgcgccccucac

SEQ ID NO: 144429 - RNA, 32 nt, Homo Sapiens
acauauaccaaugaaagaaauugguuuaaauu

SEQ ID NO: 144430 - RNA, 32 nt, Homo Sapiens
guuucuccccaccuuauccccaucccaccuuu

SEQ ID NO: 144431 - RNA, 32 nt, Homo Sapiens
uaaaacauauauaugcacauguauuugguaug

SEQ ID NO: 144432 - RNA, 32 nt, Homo Sapiens
gaaauuaccugcugaagacaagagggaucucu

SEQ ID NO: 144433 - RNA, 32 nt, Homo Sapiens
ucuggacguggcggcccgcgccgggcugaguc

SEQ ID NO: 144434 - RNA, 32 nt, Homo Sapiens
cugggccacagaggggaggcaucaggaaagcu

SEQ ID NO: 144435 - RNA, 30 nt, Homo Sapiens
aagccgaguccgcgcgcgggucgggccgcg

SEQ ID NO: 144436 - RNA, 32 nt, Homo Sapiens
cucuuuguuuaguuaguacuguucaugaaugu

SEQ ID NO: 144437 - RNA, 32 nt, Homo Sapiens
gcagguuaaugauuucauaggugucuguuuuc

SEQ ID NO: 144438 - RNA, 32 nt, Homo Sapiens
aauagauacaugauuucuuuucagugugauga

SEQ ID NO: 144439 - RNA, 32 nt, Homo Sapiens
ugauuuuugugauguccuuuggucauguuucu

SEQ ID NO: 144440 - RNA, 32 nt, Homo Sapiens
acacucagacugccgagccugccaggcacuuc

SEQ ID NO: 144441 - RNA, 32 nt, Homo Sapiens
uucuaucuacgcccuuccugugccugugacuc

SEQ ID NO: 144442 - RNA, 32 nt, Homo Sapiens
cucuccgugccauggcgccagcgaaagccacg

SEQ ID NO: 144443 - RNA, 32 nt, Homo Sapiens
ucggaggcaggguggggcccagguaaagugaa

SEQ ID NO: 144444 - RNA, 32 nt, Homo Sapiens
gauggcuugguaguggacuuucugggguuugc

SEQ ID NO: 144445 - RNA, 32 nt, Homo Sapiens
ggggagggcuccuggggcagagaaguuccuua

SEQ ID NO: 144446 - RNA, 32 nt, Homo Sapiens
aucaaacaccuaggucacgugccucucaaaua

SEQ ID NO: 144447 - RNA, 32 nt, Homo Sapiens
cuccaauucugaccgagugcugaucauucccu

SEQ ID NO: 144448 - RNA, 32 nt, Homo Sapiens
ucagggaaugcagaagguauuaaugaagagac

SEQ ID NO: 144449 - RNA, 32 nt, Homo Sapiens
auuccuucugguggguucguggucucgcuggc

SEQ ID NO: 144450 - RNA, 32 nt, Homo Sapiens
cggguggggcggggcccaacugucccagcucc

SEQ ID NO: 144451 - RNA, 32 nt, Homo Sapiens
cguccuuccuccccgggucccggccauggcgc

SEQ ID NO: 144452 - RNA, 32 nt, Homo Sapiens
ggcacgaguggcugcuugcggcuaguggaugg

SEQ ID NO: 144453 - RNA, 32 nt, Homo Sapiens
auucuauuauagcagcaugaaauggucuaaua

SEQ ID NO: 144454 - RNA, 32 nt, Homo Sapiens
cgcagccgccgggcgaucuccaagcggcgauc

SEQ ID NO: 144455 - RNA, 32 nt, Homo Sapiens
ugcccggaggccggcgggcagcagcguggcuc

SEQ ID NO: 144456 - RNA, 32 nt, Homo Sapiens
acccccaacaacaucugaggaagcagaacagg

SEQ ID NO: 144457 - RNA, 32 nt, Homo Sapiens
ggauagaauguguuucuuucugguuaaaaaaa

SEQ ID NO: 144458 - RNA, 32 nt, Homo Sapiens
ucuccucugcagcaucuuuccuccccacugcu

SEQ ID NO: 144459 - RNA, 32 nt, Homo Sapiens
ggagagucaaauuuuuaccagaauuugugaau

SEQ ID NO: 144460 - RNA, 32 nt, Homo Sapiens
cgacugccucaacucugucuccaggucuauuc

SEQ ID NO: 144461 - RNA, 32 nt, Homo Sapiens
gagcagauggccuggcugcugcugugcagucc

SEQ ID NO: 144462 - RNA, 32 nt, Homo Sapiens
cuaggugccugcccagggaggaacggaggagg

SEQ ID NO: 144463 - RNA, 32 nt, Homo Sapiens
ugggcuuucuucauucuucagcauauuauccg

SEQ ID NO: 144464 - RNA, 32 nt, Homo Sapiens
caucuuagaaaaaacauagauagugcuaguaa

SEQ ID NO: 144465 - RNA, 32 nt, Homo Sapiens
gugggcaaaagaguguaaaauauuuuaaaaua

SEQ ID NO: 144466 - RNA, 32 nt, Homo Sapiens
ucuucuggaaaaggucuucuggagagcugaga

SEQ ID NO: 144467 - RNA, 32 nt, Homo Sapiens
cacugcaagcucugcccuccccggguucgcac

SEQ ID NO: 144468 - RNA, 32 nt, Homo Sapiens
uacaaguuauacuggcaguuauugaagauacu

SEQ ID NO: 144469 - RNA, 32 nt, Homo Sapiens
ugguggcucaugccuguaaucccggcacuuug

SEQ ID NO: 144470 - RNA, 32 nt, Homo Sapiens
gaauaagcauuguuuugguauaagguacauau

SEQ ID NO: 144471 - RNA, 32 nt, Homo Sapiens
uuuaguuugaguuuuuaaaaacuaggaagaca

SEQ ID NO: 144472 - RNA, 32 nt, Homo Sapiens
cuaccucucccucugccccuuuauuacuugaa

SEQ ID NO: 144473 - RNA, 32 nt, Homo Sapiens
cccaccccuugcaaaagaccaggccguggaag

SEQ ID NO: 144474 - RNA, 32 nt, Homo Sapiens
cgcucccggccgccaucaugcuggcgcucauc

SEQ ID NO: 144475 - RNA, 32 nt, Homo Sapiens
ccugaggagucuaucauccuuucccuguaaag

SEQ ID NO: 144476 - RNA, 32 nt, Homo Sapiens
agucaggacggugccuaguggaccucagacau

SEQ ID NO: 144477 - RNA, 32 nt, Homo Sapiens
gggagcucauccacgcagaggucucucccugu

SEQ ID NO: 144478 - RNA, 32 nt, Homo Sapiens
aauauccagaaauuauuuucauuuuauguaua

SEQ ID NO: 144479 - RNA, 32 nt, Homo Sapiens
gagggcacaauuucauucaguacaagagaagu

SEQ ID NO: 144480 - RNA, 32 nt, Homo Sapiens
cuucgcaguccucauucaugcugcaagauaga

SEQ ID NO: 144481 - RNA, 32 nt, Homo Sapiens
ucacauuuaugaugauguucagagauucauca

SEQ ID NO: 144482 - RNA, 32 nt, Homo Sapiens
cuuuggacagcuguuucaggauguugggaacu

SEQ ID NO: 144483 - RNA, 32 nt, Homo Sapiens
cucuuuuucuaaaacuaauauggcuuauauau

SEQ ID NO: 144484 - RNA, 32 nt, Homo Sapiens
aacccuuuccauuuccucucauuccauucaug

SEQ ID NO: 144485 - RNA, 32 nt, Homo Sapiens
gcuugucuguggaacuccugacgucugaagcu

SEQ ID NO: 144486 - RNA, 32 nt, Homo Sapiens
ugucuugaauuuggcccucccucuccccucuc

SEQ ID NO: 144487 - RNA, 29 nt, Homo Sapiens
gcuccugaauaaagauucuacaacacacg

SEQ ID NO: 144488 - RNA, 32 nt, Homo Sapiens
uugacucaugugauuauggaggcugagaaguc

SEQ ID NO: 144489 - RNA, 32 nt, Homo Sapiens
ucagagagaaugagcagagagcaaaggagaaa

SEQ ID NO: 144490 - RNA, 30 nt, Homo Sapiens
cccacguugccugccacccagccuugcugc

SEQ ID NO: 144491 - RNA, 32 nt, Homo Sapiens
uucucugugcuuucucucguccuuccaaaguc

SEQ ID NO: 144492 - RNA, 28 nt, Homo Sapiens
agaaugagggagaaacauuugccugccu

SEQ ID NO: 144493 - RNA, 32 nt, Homo Sapiens
cuauucuccuuccccccacugcacaaccccgc

SEQ ID NO: 144494 - RNA, 32 nt, Homo Sapiens
gcggcccagacgcgccaggucuguagcaggag

SEQ ID NO: 144495 - RNA, 32 nt, Homo Sapiens
ucaauaaacacacacacacacacacacacaca

SEQ ID NO: 144496 - RNA, 32 nt, Homo Sapiens
ugcuggggccucuggacacaggcuggaccaga

SEQ ID NO: 144497 - RNA, 32 nt, Homo Sapiens
cauaaaaugaccuuuacauaucccugcagagu

SEQ ID NO: 144498 - RNA, 32 nt, Homo Sapiens
uaaauggaagguuucuaaaauuccucaucuau

SEQ ID NO: 144499 - RNA, 32 nt, Homo Sapiens
ugaugaugaugaugaagaugaugcuaaguaaa

SEQ ID NO: 144500 - RNA, 32 nt, Homo Sapiens
guuuauauguugcauuuguacuuaagucauuc

SEQ ID NO: 144501 - RNA, 32 nt, Homo Sapiens
acugaaaaaauaugacguacgaaauggacaaa

SEQ ID NO: 144502 - RNA, 32 nt, Homo Sapiens
uugagggagcuaggcuguuuugcuagagauaa

SEQ ID NO: 144503 - RNA, 32 nt, Homo Sapiens
cgugcgugcgcgacuucagcccccgcucgcgg

SEQ ID NO: 144504 - RNA, 32 nt, Homo Sapiens
ucaucagcuuauuuuuagucgcguuauguaag

SEQ ID NO: 144505 - RNA, 32 nt, Homo Sapiens
ccacacaaccucaaagggucagugcgucagug

SEQ ID NO: 144506 - RNA, 29 nt, Homo Sapiens
guuguuaugaagauugaauuaggugauuc

SEQ ID NO: 144507 - RNA, 32 nt, Homo Sapiens
cccgcacgcucgcucgcucgggagagucgcgg

SEQ ID NO: 144508 - RNA, 32 nt, Homo Sapiens
accgcaguagggaaagacccaggcugcgggac

SEQ ID NO: 144509 - RNA, 32 nt, Homo Sapiens
cgcagaggacaaacucucacccgcguuuucga

SEQ ID NO: 144510 - RNA, 32 nt, Homo Sapiens
cgggcggcuacgggcggggugucgcagcucuc

SEQ ID NO: 144511 - RNA, 32 nt, Homo Sapiens
uuguuuuuacacaaauuuuuaaaaaguaauau

SEQ ID NO: 144512 - RNA, 32 nt, Homo Sapiens
ucgcugggcucccagcagugcuucccuccucc

SEQ ID NO: 144513 - RNA, 32 nt, Homo Sapiens
ugagaauuuguauugaugaaccucuuuuagaa

SEQ ID NO: 144514 - RNA, 32 nt, Homo Sapiens
cugaucuugugcccuccacccaggaacugacu

SEQ ID NO: 144515 - RNA, 32 nt, Homo Sapiens
aguuagccgggcgugguggcaugcguguauag

SEQ ID NO: 144516 - RNA, 32 nt, Homo Sapiens
uagagacuuaccauuuucugauaugacaucug

SEQ ID NO: 144517 - RNA, 32 nt, Homo Sapiens
gaaccccauccucagagcugcucccagccagc

SEQ ID NO: 144518 - RNA, 32 nt, Homo Sapiens
gucuggcugcaccuggcaugacuguuuguuuc

SEQ ID NO: 144519 - RNA, 32 nt, Homo Sapiens
auuuuuuaauaaagucugaagaauuacuguuu

SEQ ID NO: 144520 - RNA, 32 nt, Homo Sapiens
guuauaucuuuuuaaugauuuauuugcaagua

SEQ ID NO: 144521 - RNA, 32 nt, Homo Sapiens
uuuucuuuuuaaaauagacacuauaguuuuac

SEQ ID NO: 144522 - RNA, 32 nt, Homo Sapiens
aggagcugacuucuggcaggaaacguggaacu

SEQ ID NO: 144523 - RNA, 29 nt, Homo Sapiens
cugaggaaucaaggggccauuaccaaggg

SEQ ID NO: 144524 - RNA, 32 nt, Homo Sapiens
gcccucgaguggaggacgagaaggaaagcacc

SEQ ID NO: 144525 - RNA, 32 nt, Homo Sapiens
caaaagcccccaguccucggcccccgcgcaag

SEQ ID NO: 144526 - RNA, 32 nt, Homo Sapiens
auucaauacaguguuggauaucugucaugcac

SEQ ID NO: 144527 - RNA, 32 nt, Homo Sapiens
auaagcagcaacccacaccuuugacacgaucu

SEQ ID NO: 144528 - RNA, 32 nt, Homo Sapiens
ggaagcaggacugcgccgcgucuuccucaagg

SEQ ID NO: 144529 - RNA, 32 nt, Homo Sapiens
aaaagaaaaaucaacucacuguucagugcuga

SEQ ID NO: 144530 - RNA, 32 nt, Homo Sapiens
ucacccugaugacaccaggauuugaaauaaga

SEQ ID NO: 144531 - RNA, 32 nt, Homo Sapiens
uauuuuauaauauaauacuaagaaagaggaca

SEQ ID NO: 144532 - RNA, 32 nt, Homo Sapiens
ggacaggacuuggaccucggaggggucugagc

SEQ ID NO: 144533 - RNA, 31 nt, Homo Sapiens
aggagggcaggccuuuuuaaucugaucagaa

SEQ ID NO: 144534 - RNA, 32 nt, Homo Sapiens
uugaaaggccgcgguuggcacuucgagaagga

SEQ ID NO: 144535 - RNA, 32 nt, Homo Sapiens
gaccagcccagcugcgugggguacaggcauug

SEQ ID NO: 144536 - RNA, 32 nt, Homo Sapiens
guuuugaguugacuauucuacugcuuguuagc

SEQ ID NO: 144537 - RNA, 32 nt, Homo Sapiens
uccugauagugggaugggaaggucuuccuguu

SEQ ID NO: 144538 - RNA, 32 nt, Homo Sapiens
gggacauagaaagggacaagacgcagcccgug

SEQ ID NO: 144539 - RNA, 32 nt, Homo Sapiens
ccgggguggggaggaggcaggaggcggcugcg

SEQ ID NO: 144540 - RNA, 32 nt, Homo Sapiens
gacaucuggagaagaaacaucuuuuccuuaua

SEQ ID NO: 144541 - RNA, 32 nt, Homo Sapiens
gucuaggagcugucuccaggauggugcaggau

SEQ ID NO: 144542 - RNA, 32 nt, Homo Sapiens
ugcuuuaaguuuuuauacuuucagaaacuuuu

SEQ ID NO: 144543 - RNA, 32 nt, Homo Sapiens
agaauuggaaaacugccugacuuaucuugcau

SEQ ID NO: 144544 - RNA, 32 nt, Homo Sapiens
agguuauuacgcacuuuagaaaccagugaaag

SEQ ID NO: 144545 - RNA, 32 nt, Homo Sapiens
caaggcauaugaugaaauucaccgugcauuuu

SEQ ID NO: 144546 - RNA, 32 nt, Homo Sapiens
aaagcuaacacauuuugagcuagacaguauuc

SEQ ID NO: 144547 - RNA, 32 nt, Homo Sapiens
gcgcggcggaauccagggccgacccgggccgg

SEQ ID NO: 144548 - RNA, 32 nt, Homo Sapiens
aggacguaucuuauuccaauuuuuugaagaua

SEQ ID NO: 144549 - RNA, 32 nt, Homo Sapiens
uuucuugcacacgcgcugccuugcgggagggg

SEQ ID NO: 144550 - RNA, 32 nt, Homo Sapiens
gggcgaaaaaucucaaggcugcuucaugugga

SEQ ID NO: 144551 - RNA, 32 nt, Homo Sapiens
ucagggaucgugggggcggggagguggagugg

SEQ ID NO: 144552 - RNA, 32 nt, Homo Sapiens
agacgccggccgccaagaucugcaucccuagg

SEQ ID NO: 144553 - RNA, 32 nt, Homo Sapiens
uuauuaauauccaagacuuagagcugggaauc

SEQ ID NO: 144554 - RNA, 32 nt, Homo Sapiens
aaugcagugggaagaagaccaggggacaagag

SEQ ID NO: 144555 - RNA, 32 nt, Homo Sapiens
aacaucaaaaagacacugcacaaguucugugg

SEQ ID NO: 144556 - RNA, 32 nt, Homo Sapiens
gccggaccuuagacccgagaucgaugagaggc

SEQ ID NO: 144557 - RNA, 32 nt, Homo Sapiens
acaucaagcaauuuaacuuuuucuuguaaugu

SEQ ID NO: 144558 - RNA, 32 nt, Homo Sapiens
uugagccuugcccucuuugaucuuuaaucccu

SEQ ID NO: 144559 - RNA, 32 nt, Homo Sapiens
gaggcaaaugacuccugcuuaacuuaugaaga

SEQ ID NO: 144560 - RNA, 32 nt, Homo Sapiens
gauccccagagccccaggggacggaaaaucua

SEQ ID NO: 144561 - RNA, 32 nt, Homo Sapiens
ggauaccaccuccuggcagagcccuggagcug

SEQ ID NO: 144562 - RNA, 32 nt, Homo Sapiens
gauauagcaagcucuuucgaccauaguugaug

SEQ ID NO: 144563 - RNA, 32 nt, Homo Sapiens
cgucgccgcccucugcacccagcccaggucgc

SEQ ID NO: 144564 - RNA, 32 nt, Homo Sapiens
auaaaagccaucucccuagcuuuuguuuguau

SEQ ID NO: 144565 - RNA, 32 nt, Homo Sapiens
uaacuugugagacauuaugaaaaggaugcugg

SEQ ID NO: 144566 - RNA, 32 nt, Homo Sapiens
uucuaauuuuaaaauaaugauucuaauucuag

SEQ ID NO: 144567 - RNA, 32 nt, Homo Sapiens
uuuaggucgaggacuggccccuaggcugcugc

SEQ ID NO: 144568 - RNA, 32 nt, Homo Sapiens
gauuuucaaacaugcauagcuauuuuuaucac

SEQ ID NO: 144569 - RNA, 32 nt, Homo Sapiens
ucaucuccuccugucuggcccgaggccgcccc

SEQ ID NO: 144570 - RNA, 32 nt, Homo Sapiens
uguuugcaagcugugccuucugagagagugcu

SEQ ID NO: 144571 - RNA, 32 nt, Homo Sapiens
augccaaaaugaaauaccaggagugcaacaag

SEQ ID NO: 144572 - RNA, 32 nt, Homo Sapiens
acuacccuagaaugccauccuucuucaggagc

SEQ ID NO: 144573 - RNA, 32 nt, Homo Sapiens
aguucucugaagaacugauguuauuacaaaga

SEQ ID NO: 144574 - RNA, 32 nt, Homo Sapiens
cguuuuuuauccugcugaaaaaguauauauaa

SEQ ID NO: 144575 - RNA, 32 nt, Homo Sapiens
ugauuuuuuguuucaucugcauuuggucuucu

SEQ ID NO: 144576 - RNA, 32 nt, Homo Sapiens
auuuuuuucuauuuuuaggagagaccgguuuu

SEQ ID NO: 144577 - RNA, 32 nt, Homo Sapiens
cugaggucgugccacugcacuccagccugggc

SEQ ID NO: 144578 - RNA, 32 nt, Homo Sapiens
aggcccagccucagccucacaguggacucucc

SEQ ID NO: 144579 - RNA, 32 nt, Homo Sapiens
cugugugcuauuuguguuaacauggaagagga

SEQ ID NO: 144580 - RNA, 29 nt, Homo Sapiens
uuaaaaauagugauguagcuguaacauau

SEQ ID NO: 144581 - RNA, 32 nt, Homo Sapiens
aggccucagaggaggagaaaggccggagccag

SEQ ID NO: 144582 - RNA, 32 nt, Homo Sapiens
acuacaugucacacauuguacauggaaacaag

SEQ ID NO: 144583 - RNA, 32 nt, Homo Sapiens
cuccagugaaguaaugggguccugcucaaguu

SEQ ID NO: 144584 - RNA, 32 nt, Homo Sapiens
auuuuuggcuuacucauggacaaaguucugua

SEQ ID NO: 144585 - RNA, 32 nt, Homo Sapiens
uccccuccacacuguuggcucuggccgaagcu

SEQ ID NO: 144586 - RNA, 32 nt, Homo Sapiens
agucucugccuugccuuuagccccucccaagc

SEQ ID NO: 144587 - RNA, 32 nt, Homo Sapiens
acaucugugaugaugaugacuuuuaggacccu

SEQ ID NO: 144588 - RNA, 32 nt, Homo Sapiens
cagcacuugggggcaucuccggcacuugggug

SEQ ID NO: 144589 - RNA, 32 nt, Homo Sapiens
ugcgcucggccugagguuacccggcccggccc

SEQ ID NO: 144590 - RNA, 32 nt, Homo Sapiens
uuuaaaggcagacaguuuugcuuuaguacaau

SEQ ID NO: 144591 - RNA, 32 nt, Homo Sapiens
aaaauuacaucauaccgucuauuuugcccaua

SEQ ID NO: 144592 - RNA, 32 nt, Homo Sapiens
gagcucacuucgcccgaauuacaaaaugagug

SEQ ID NO: 144593 - RNA, 32 nt, Homo Sapiens
cgucggaacucggccgcgggacauccacgggg

SEQ ID NO: 144594 - RNA, 32 nt, Homo Sapiens
aagucacacuuuuuuguccaccucacagaugu

SEQ ID NO: 144595 - RNA, 32 nt, Homo Sapiens
cuuuuuuuuuuuuuuucuuuuacuguucugaa

SEQ ID NO: 144596 - RNA, 32 nt, Homo Sapiens
cugaggucaggaguucgagagcagccuggcca

SEQ ID NO: 144597 - RNA, 32 nt, Homo Sapiens
caauauuagaugugccugaggaguccaauuaa

SEQ ID NO: 144598 - RNA, 32 nt, Homo Sapiens
uuaugaaucuagaauuuuuuuacauauuuuua

SEQ ID NO: 144599 - RNA, 32 nt, Homo Sapiens
cagggacgaagaggaacacagugccccaaaca

SEQ ID NO: 144600 - RNA, 32 nt, Homo Sapiens
gaccugaugaauuuauagaaugugaagaccca

SEQ ID NO: 144601 - RNA, 32 nt, Homo Sapiens
aggaggggcggggaagacauggauaguauagg

SEQ ID NO: 144602 - RNA, 32 nt, Homo Sapiens
cguuaucuggaacuggagaaaagcagaguuga

SEQ ID NO: 144603 - RNA, 30 nt, Homo Sapiens
gcaggaggagguggcggcggcgggaagaug

SEQ ID NO: 144604 - RNA, 32 nt, Homo Sapiens
gaaguccagacaccuccccuguaccucucgua

SEQ ID NO: 144605 - RNA, 32 nt, Homo Sapiens
cuuauggaacugaguguuagugacuuuggcau

SEQ ID NO: 144606 - RNA, 32 nt, Homo Sapiens
accacauaguucaaaucaaagaucaaggugaa

SEQ ID NO: 144607 - RNA, 32 nt, Homo Sapiens
ccaucucuucuccaccuucucuccacagaaug

SEQ ID NO: 144608 - RNA, 32 nt, Homo Sapiens
cuuaccauuggguuucugaaagccagaagcua

SEQ ID NO: 144609 - RNA, 32 nt, Homo Sapiens
agucaccgucugaguucuccaguugcugccuc

SEQ ID NO: 144610 - RNA, 30 nt, Homo Sapiens
gcacaaagggguaagagcuauaggaggaaa

SEQ ID NO: 144611 - RNA, 32 nt, Homo Sapiens
caugucaagugcccugcuucccgggaacuugu

SEQ ID NO: 144612 - RNA, 32 nt, Homo Sapiens
acucaaaugcaaacagacuuucccuagaggug

SEQ ID NO: 144613 - RNA, 32 nt, Homo Sapiens
gcuuuuauugcggccuaccaucuuuaaguggg

SEQ ID NO: 144614 - RNA, 32 nt, Homo Sapiens
uauaauuguauauauacagucaugcacugcau

SEQ ID NO: 144615 - RNA, 32 nt, Homo Sapiens
ucucaguacaagcaacuguuauccauugaguc

SEQ ID NO: 144616 - RNA, 32 nt, Homo Sapiens
ugauuugacuguuuuuacccauauccccucuc

SEQ ID NO: 144617 - RNA, 32 nt, Homo Sapiens
cugaaggacacagugcguggagacggcccuga

SEQ ID NO: 144618 - RNA, 32 nt, Homo Sapiens
uuucaaauauccaaauuaaaacacaguagcau

SEQ ID NO: 144619 - RNA, 32 nt, Homo Sapiens
uucuaaguaugucugugagauuuuaaaauaua

SEQ ID NO: 144620 - RNA, 32 nt, Homo Sapiens
gcugcucuccaugcgggagccggcgccugcug

SEQ ID NO: 144621 - RNA, 29 nt, Homo Sapiens
cagcauggugugucugaagcucccuggag

SEQ ID NO: 144622 - RNA, 32 nt, Homo Sapiens
aucagcugccgccgccucuggagcucagucuc

SEQ ID NO: 144623 - RNA, 32 nt, Homo Sapiens
cucacacuccucuuaggugacuaauaaagagg

SEQ ID NO: 144624 - RNA, 29 nt, Homo Sapiens
augaauauuauuuaauaccacaacagaau

SEQ ID NO: 144625 - RNA, 32 nt, Homo Sapiens
aguugauuuucauuucuuuguagcuuucuggu

SEQ ID NO: 144626 - RNA, 32 nt, Homo Sapiens
accccugggacguuaaagugaccagagcggau

SEQ ID NO: 144627 - RNA, 32 nt, Homo Sapiens
acagggucuccuuggcagcuguauucuggagu

SEQ ID NO: 144628 - RNA, 32 nt, Homo Sapiens
agggcugcugggagccucuccuguccccgccg

SEQ ID NO: 144629 - RNA, 32 nt, Homo Sapiens
caaaaguagggccagguuuugacaacggauac

SEQ ID NO: 144630 - RNA, 32 nt, Homo Sapiens
uuuucuauuuauugacuucucauguucuagag

SEQ ID NO: 144631 - RNA, 32 nt, Homo Sapiens
cugccucaggaagcuuggcuucccucccaugg

SEQ ID NO: 144632 - RNA, 32 nt, Homo Sapiens
ugaguugaggacuuaaaaguauuguagcauuu

SEQ ID NO: 144633 - RNA, 32 nt, Homo Sapiens
uuuuuauaaaaauuauucccuauugaauauuu

SEQ ID NO: 144634 - RNA, 32 nt, Homo Sapiens
cugcggcaagggcaaggaccccugccuccuug

SEQ ID NO: 144635 - RNA, 32 nt, Homo Sapiens
aaaugaugagagaagagaaaaggugggacaau

SEQ ID NO: 144636 - RNA, 32 nt, Homo Sapiens
ccgcauucagagcuugggucaccuggacacug

SEQ ID NO: 144637 - RNA, 32 nt, Homo Sapiens
gaagcuguggggcugggcuggcagccuuuauu

SEQ ID NO: 144638 - RNA, 32 nt, Homo Sapiens
gccaugaugauuacauuugugguuccaaaaua

SEQ ID NO: 144639 - RNA, 32 nt, Homo Sapiens
aaacaacgggucgggcuuccggggagagggcc

SEQ ID NO: 144640 - RNA, 32 nt, Homo Sapiens
gcagauuaacuuuccauucuacuuauggagau

SEQ ID NO: 144641 - RNA, 32 nt, Homo Sapiens
agcucaggggguaggcucuaggcuccaaagua

SEQ ID NO: 144642 - RNA, 32 nt, Homo Sapiens
cagggcugcuuguccccagagcccagguuuau

SEQ ID NO: 144643 - RNA, 32 nt, Homo Sapiens
caggaccaggugguccugggucuccaugauuu

SEQ ID NO: 144644 - RNA, 32 nt, Homo Sapiens
aaugaugauggcaaaaucaugauauagaagaa

SEQ ID NO: 144645 - RNA, 32 nt, Homo Sapiens
ucaauacuucuguagcuucccauucauguucu

SEQ ID NO: 144646 - RNA, 32 nt, Homo Sapiens
cugagcugagcuggggcgcggucgccugucug

SEQ ID NO: 144647 - RNA, 32 nt, Homo Sapiens
agugggcccgcccgcuggcccguuuccggucc

SEQ ID NO: 144648 - RNA, 32 nt, Homo Sapiens
gccccugacuccgucccggccagggagggcca

SEQ ID NO: 144649 - RNA, 32 nt, Homo Sapiens
ucagguggaggguggggcgugggcaucagcca

SEQ ID NO: 144650 - RNA, 32 nt, Homo Sapiens
auuaugccaguacuacauuguaaaacagaguu

SEQ ID NO: 144651 - RNA, 32 nt, Homo Sapiens
aaaccaaguuuaagcccaccaaugcacugcug

SEQ ID NO: 144652 - RNA, 32 nt, Homo Sapiens
uuuuuuauguuccaauaauguuuuauacauca

SEQ ID NO: 144653 - RNA, 32 nt, Homo Sapiens
guucuguuaacugaaugccacucuguaauugc

SEQ ID NO: 144654 - RNA, 32 nt, Homo Sapiens
ggcuggugcccaagcuguggccugcagucugu

SEQ ID NO: 144655 - RNA, 32 nt, Homo Sapiens
auccucugucugaagaaauuguguucaaagug

SEQ ID NO: 144656 - RNA, 32 nt, Homo Sapiens
cucugaccgcgcguccccggcccgccauggcc

SEQ ID NO: 144657 - RNA, 32 nt, Homo Sapiens
ggagcggccccgagacgcgccuggcgcggauc

SEQ ID NO: 144658 - RNA, 32 nt, Homo Sapiens
uuaccuauauucuccugauacugauuaccaag

SEQ ID NO: 144659 - RNA, 32 nt, Homo Sapiens
acugccaccccucccagacuguggacgggagg

SEQ ID NO: 144660 - RNA, 32 nt, Homo Sapiens
cgacacgcguccucgggcgccaccgggcgcuc

SEQ ID NO: 144661 - RNA, 32 nt, Homo Sapiens
agcccugcugaaggugaagaaugccaccaggc

SEQ ID NO: 144662 - RNA, 32 nt, Homo Sapiens
aaugaaauaccuauuacacacccauuagaaug

SEQ ID NO: 144663 - RNA, 32 nt, Homo Sapiens
gcauccacgcacccccacccugggacuuugga

SEQ ID NO: 144664 - RNA, 32 nt, Homo Sapiens
cucccgcccuccccagucccaccaucucagcc

SEQ ID NO: 144665 - RNA, 32 nt, Homo Sapiens
ugauugaccacaucgugcugcacuggaagagc

SEQ ID NO: 144666 - RNA, 32 nt, Homo Sapiens
aaguugacgcuaaaguucuuauggaaaaauac

SEQ ID NO: 144667 - RNA, 32 nt, Homo Sapiens
uggacaugcaaauauaaaucuauggagcauuc

SEQ ID NO: 144668 - RNA, 32 nt, Homo Sapiens
acaaaaaaaaacaaaauuagccgggcgugguu

SEQ ID NO: 144669 - RNA, 32 nt, Homo Sapiens
ggccauggagggcaucugaauacaggaguagg

SEQ ID NO: 144670 - RNA, 32 nt, Homo Sapiens
uuuagaagguucucuccuccccaaggagacac

SEQ ID NO: 144671 - RNA, 32 nt, Homo Sapiens
agucuggaaaauuuguugaauguacugagcaa

SEQ ID NO: 144672 - RNA, 32 nt, Homo Sapiens
gaaaauuaaucuugauacauggcucuuucugu

SEQ ID NO: 144673 - RNA, 32 nt, Homo Sapiens
ucugagcccuccccugccccaggaacccuggc

SEQ ID NO: 144674 - RNA, 32 nt, Homo Sapiens
uuaacaaauaaucaaggacauuuuauauguaa

SEQ ID NO: 144675 - RNA, 28 nt, Homo Sapiens
aagaugggggccguccugaggagccucc

SEQ ID NO: 144676 - RNA, 32 nt, Homo Sapiens
cuuaggggcugcugaccuccacagcuuccccu

SEQ ID NO: 144677 - RNA, 32 nt, Homo Sapiens
gcccgcgcggugaccugcggccucgaggcugg

SEQ ID NO: 144678 - RNA, 32 nt, Homo Sapiens
aguucucuugacucaagaacucuuuauuuucu

SEQ ID NO: 144679 - RNA, 32 nt, Homo Sapiens
aucuuuuuaaaacuauaucaugaugaauugaa

SEQ ID NO: 144680 - RNA, 32 nt, Homo Sapiens
cuaccaguugcacagauucagauuugaaaauc

SEQ ID NO: 144681 - RNA, 32 nt, Homo Sapiens
cugcucuugccagcuggccccugcuuccccua

SEQ ID NO: 144682 - RNA, 32 nt, Homo Sapiens
ccaccuccuggccagggguucucuuagcucua

SEQ ID NO: 144683 - RNA, 32 nt, Homo Sapiens
ucagggcagcagggcugccucucaucuaaagc

SEQ ID NO: 144684 - RNA, 32 nt, Homo Sapiens
ugucucagaugcuaacgugugaaaauauaaau

SEQ ID NO: 144685 - RNA, 32 nt, Homo Sapiens
cuuguucccucauauucuguucuuccgacucc

SEQ ID NO: 144686 - RNA, 32 nt, Homo Sapiens
ucgggacuuggucgcccggcgcugccagaaug

SEQ ID NO: 144687 - RNA, 32 nt, Homo Sapiens
ggcagacucgggaccaauacuacugcguccuc

SEQ ID NO: 144688 - RNA, 32 nt, Homo Sapiens
cggaggcggcgguguuauggguguacauauuu

SEQ ID NO: 144689 - RNA, 32 nt, Homo Sapiens
ugccaucuacagcacuccgugaagaauaugcu

SEQ ID NO: 144690 - RNA, 32 nt, Homo Sapiens
augggccugugacaccccaaagagaagaaggg

SEQ ID NO: 144691 - RNA, 32 nt, Homo Sapiens
gugagggagguaggugcacuuacccucuccuc

SEQ ID NO: 144692 - RNA, 32 nt, Homo Sapiens
cugggggcagcccuuccccugccuaguccccg

SEQ ID NO: 144693 - RNA, 32 nt, Homo Sapiens
gaggagcagaggagcacacagaugaagcaggu

SEQ ID NO: 144694 - RNA, 32 nt, Homo Sapiens
ccacugcaucgcgucccaccuccgcggcccug

SEQ ID NO: 144695 - RNA, 32 nt, Homo Sapiens
cccccuccccacagcaggccggcgcgcgacgc

SEQ ID NO: 144696 - RNA, 32 nt, Homo Sapiens
caucacaggacacggggcaguggcaaccuugu

SEQ ID NO: 144697 - RNA, 32 nt, Homo Sapiens
uuguauauaaagauuauauauaaguacuuauu

SEQ ID NO: 144698 - RNA, 32 nt, Homo Sapiens
gaggcauaugcuuguguguguacauggggugu

SEQ ID NO: 144699 - RNA, 32 nt, Homo Sapiens
gcaagaguaggggccugaauccugcuacaacu

SEQ ID NO: 144700 - RNA, 32 nt, Homo Sapiens
ggugcucccuccacccaauaccauuucuuacc

SEQ ID NO: 144701 - RNA, 32 nt, Homo Sapiens
uggagugacugacuuauucaaugucauauugc

SEQ ID NO: 144702 - RNA, 32 nt, Homo Sapiens
cugguuugugauuugguggacaaaacacucgc

SEQ ID NO: 144703 - RNA, 32 nt, Homo Sapiens
ucgcucacugacccucaauuguccucuuuggc

SEQ ID NO: 144704 - RNA, 32 nt, Homo Sapiens
cagaccagcccacuacagagccaggcaugguc

SEQ ID NO: 144705 - RNA, 32 nt, Homo Sapiens
auguaaagaaaaauaaaacuguuuaugauacu

SEQ ID NO: 144706 - RNA, 32 nt, Homo Sapiens
cccugggagagccgcgccguucuggaacccgg

SEQ ID NO: 144707 - RNA, 32 nt, Homo Sapiens
uguauauauucuuuauucuuuugcuuuuuuaa

SEQ ID NO: 144708 - RNA, 32 nt, Homo Sapiens
ccuucucaaugagcaaaaccauuuucuaagua

SEQ ID NO: 144709 - RNA, 31 nt, Homo Sapiens
gugacagugacgugacucagagcuuuucgaa

SEQ ID NO: 144710 - RNA, 32 nt, Homo Sapiens
ccuuucgcacucugcgggccguguagagcccc

SEQ ID NO: 144711 - RNA, 32 nt, Homo Sapiens
cuuuguaaauugucuuuuuuuuucugcuucag

SEQ ID NO: 144712 - RNA, 32 nt, Homo Sapiens
ggugucaggcgcggcggcggcgcggcgggcgg

SEQ ID NO: 144713 - RNA, 32 nt, Homo Sapiens
agggcccggcggggcgggcgugaaggcggccu

SEQ ID NO: 144714 - RNA, 32 nt, Homo Sapiens
gaguuuacagacagaagcccgaaguggaaaga

SEQ ID NO: 144715 - RNA, 32 nt, Homo Sapiens
cugugggcgacuguguggccgcggcggccgcc

SEQ ID NO: 144716 - RNA, 31 nt, Homo Sapiens
cuggggugaaacaacugacagagggucucug

SEQ ID NO: 144717 - RNA, 32 nt, Homo Sapiens
auuuuuaauuuccuuugguuaaagguccccca

SEQ ID NO: 144718 - RNA, 30 nt, Homo Sapiens
gcuccgcgcagccuggcgggucccgggcug

SEQ ID NO: 144719 - RNA, 32 nt, Homo Sapiens
cucaucuggucgggggcgggggcggcaggagc

SEQ ID NO: 144720 - RNA, 32 nt, Homo Sapiens
aaaggguucuuuguucccauccagccgaugaa

SEQ ID NO: 144721 - RNA, 32 nt, Homo Sapiens
auccuggcggccugggcggccgcaccauggac

SEQ ID NO: 144722 - RNA, 30 nt, Homo Sapiens
ucugagcuuagugacccccaucuuguaacc

SEQ ID NO: 144723 - RNA, 32 nt, Homo Sapiens
uguugcuguuaaacuauaauaugugcuucuuu

SEQ ID NO: 144724 - RNA, 32 nt, Homo Sapiens
cgcgcccggccgcaggggcucuugggaaggcg

SEQ ID NO: 144725 - RNA, 32 nt, Homo Sapiens
uuaaguuuacuuuuuugaaacacauguagaaa

SEQ ID NO: 144726 - RNA, 32 nt, Homo Sapiens
augauacuacaaguugagcaucucuaauucaa

SEQ ID NO: 144727 - RNA, 32 nt, Homo Sapiens
uuucccugugagcuagcagacacaaugaccag

SEQ ID NO: 144728 - RNA, 32 nt, Homo Sapiens
uuucuuuucuucacucaaauuuuggcgaaucu

SEQ ID NO: 144729 - RNA, 32 nt, Homo Sapiens
uuugcuucaauuuuuauuaauauaugaagcca

SEQ ID NO: 144730 - RNA, 32 nt, Homo Sapiens
aaaaucaaucagauuuauuguaccuacaaaaa

SEQ ID NO: 144731 - RNA, 32 nt, Homo Sapiens
guauuuuggaagacauauauuauauauagaaa

SEQ ID NO: 144732 - RNA, 32 nt, Homo Sapiens
agaggugaggagcuugccuagagucaguccag

SEQ ID NO: 144733 - RNA, 32 nt, Homo Sapiens
acccagucuucgccggccgcugcccgcugcgu

SEQ ID NO: 144734 - RNA, 32 nt, Homo Sapiens
gcccgggugaggggcggagcugggggcauggc

SEQ ID NO: 144735 - RNA, 32 nt, Homo Sapiens
gauucugguuuacagcagcuuuacagugauag

SEQ ID NO: 144736 - RNA, 32 nt, Homo Sapiens
gagugugcuucgcuuguacaguuguaaauaau

SEQ ID NO: 144737 - RNA, 29 nt, Homo Sapiens
ugguggcaaggacagagggccuggaccag

SEQ ID NO: 144738 - RNA, 32 nt, Homo Sapiens
caagucaggcccaugaggaagaagaggcuuug

SEQ ID NO: 144739 - RNA, 32 nt, Homo Sapiens
uuaaagccaaaauaaaaauuccuaaagcaguu

SEQ ID NO: 144740 - RNA, 32 nt, Homo Sapiens
gaaucagaauaaaguuguauuucaaauaucua

SEQ ID NO: 144741 - RNA, 32 nt, Homo Sapiens
cgaauuugacuucauggaaaaagcgacucugc

SEQ ID NO: 144742 - RNA, 32 nt, Homo Sapiens
cggacgcugccaucucucuuucugggaguuua

SEQ ID NO: 144743 - RNA, 32 nt, Homo Sapiens
gccauaaccacuuuuccuucuuguagacucag

SEQ ID NO: 144744 - RNA, 32 nt, Homo Sapiens
gagucugauuuccauccuguauuugcauaaua

SEQ ID NO: 144745 - RNA, 32 nt, Homo Sapiens
cuuuggaagauaagagagcuucuucaagacca

SEQ ID NO: 144746 - RNA, 32 nt, Homo Sapiens
gccgaugaaggagcaaacgucuggcuauguga

SEQ ID NO: 144747 - RNA, 32 nt, Homo Sapiens
cuagcugccgucgccgccgccggggcucuaug

SEQ ID NO: 144748 - RNA, 28 nt, Homo Sapiens
agagaaguuacaguccaggugaacuugg

SEQ ID NO: 144749 - RNA, 32 nt, Homo Sapiens
uugucacuucagacacuguuaaaucaggacaa

SEQ ID NO: 144750 - RNA, 32 nt, Homo Sapiens
acugcggcucacggucugguaugggcccccug

SEQ ID NO: 144751 - RNA, 32 nt, Homo Sapiens
uuguauugccuuaaguuuucacucauugucuu

SEQ ID NO: 144752 - RNA, 32 nt, Homo Sapiens
cccacucugaccaccaccuccuagcuauccag

SEQ ID NO: 144753 - RNA, 32 nt, Homo Sapiens
cgguaccccgggccccggggcccuggggcaca

SEQ ID NO: 144754 - RNA, 32 nt, Homo Sapiens
uguauagcuuuucuccuauguuuucugcuagu

SEQ ID NO: 144755 - RNA, 32 nt, Homo Sapiens
aaggcucaucugggccucggcccccgcaccug

SEQ ID NO: 144756 - RNA, 32 nt, Homo Sapiens
uucacacacacacacacacacacacacacacg

SEQ ID NO: 144757 - RNA, 32 nt, Homo Sapiens
cagcuucagcuauacuuacacuguauugaagu

SEQ ID NO: 144758 - RNA, 32 nt, Homo Sapiens
cuugaagcucuuuauagcauugauacuaggug

SEQ ID NO: 144759 - RNA, 32 nt, Homo Sapiens
gcuccucucaagcucacucucuaggucuccag

SEQ ID NO: 144760 - RNA, 32 nt, Homo Sapiens
ggcaggcagggccaggaggguaggacgggguc

SEQ ID NO: 144761 - RNA, 32 nt, Homo Sapiens
acauguauacauauguaacaaaccugcacauu

SEQ ID NO: 144762 - RNA, 32 nt, Homo Sapiens
uggaaaccccccaccccaccccucagcccauc

SEQ ID NO: 144763 - RNA, 32 nt, Homo Sapiens
gccugcagggaucggaagccgguuggggugug

SEQ ID NO: 144764 - RNA, 32 nt, Homo Sapiens
gacuuccuuuuguauuacaacgucaugauuac

SEQ ID NO: 144765 - RNA, 32 nt, Homo Sapiens
cacgagcgggugacgcugggccugcagcgcgg

SEQ ID NO: 144766 - RNA, 32 nt, Homo Sapiens
acaaggauuucuuuuaagaaauuuauagcauu

SEQ ID NO: 144767 - RNA, 32 nt, Homo Sapiens
uggccacuggccaugcugcugcccagcucuac

SEQ ID NO: 144768 - RNA, 32 nt, Homo Sapiens
gaaaaagaccucuugcaugaaaauaguacguu

SEQ ID NO: 144769 - RNA, 32 nt, Homo Sapiens
auauuugguuaccauggaggccaaugcuuuuu

SEQ ID NO: 144770 - RNA, 32 nt, Homo Sapiens
agaggcagcugggccgggccaaggcaggaagg

SEQ ID NO: 144771 - RNA, 32 nt, Homo Sapiens
auggauuuuuaaauuauacuguagcugaugaa

SEQ ID NO: 144772 - RNA, 32 nt, Homo Sapiens
cgggcuacacgcugcuuagggcuccggcuuuu

SEQ ID NO: 144773 - RNA, 32 nt, Homo Sapiens
uuauuagaugacuaucucaaaugaacuuuuua

SEQ ID NO: 144774 - RNA, 32 nt, Homo Sapiens
gguuguggcagaggauucuguguuccugucca

SEQ ID NO: 144775 - RNA, 32 nt, Homo Sapiens
gcgcacccuccuccacggcucuggccacaccc

SEQ ID NO: 144776 - RNA, 32 nt, Homo Sapiens
ucuccuuuguaucccucuguugguggggaaag

SEQ ID NO: 144777 - RNA, 32 nt, Homo Sapiens
cacaugauggagggggacccagacacacuggc

SEQ ID NO: 144778 - RNA, 30 nt, Homo Sapiens
uguggugucugugugugaagcugcauuguu

SEQ ID NO: 144779 - RNA, 32 nt, Homo Sapiens
uaccaaacugaaaucuuaguucaaucugccau

SEQ ID NO: 144780 - RNA, 32 nt, Homo Sapiens
ccuugaauugguuaggaagcugcuuccuuuuc

SEQ ID NO: 144781 - RNA, 32 nt, Homo Sapiens
cccucucauuggcauauacaguacuccucgcu

SEQ ID NO: 144782 - RNA, 32 nt, Homo Sapiens
uggggacuuaggggugcggggaggggaaggac

SEQ ID NO: 144783 - RNA, 32 nt, Homo Sapiens
auguuaguguucuuugucgauguaugucuuuu

SEQ ID NO: 144784 - RNA, 32 nt, Homo Sapiens
gcugguugcagggcuauuugccccgacagcau

SEQ ID NO: 144785 - RNA, 32 nt, Homo Sapiens
caggacuugcuaaagcacuuugcacuuaaugg

SEQ ID NO: 144786 - RNA, 32 nt, Homo Sapiens
agggaggcccaugguggagaucauuuguaagg

SEQ ID NO: 144787 - RNA, 32 nt, Homo Sapiens
acuccagccugggaagcagagugagacccugu

SEQ ID NO: 144788 - RNA, 32 nt, Homo Sapiens
gacccuggagucugccucuccugccagucccc

SEQ ID NO: 144789 - RNA, 32 nt, Homo Sapiens
gauuuaggaugguaaaguuagguacagagacc

SEQ ID NO: 144790 - RNA, 32 nt, Homo Sapiens
aaacuucaaauuaucuuauuuggauagaaguc

SEQ ID NO: 144791 - RNA, 32 nt, Homo Sapiens
ggggauaucaacaaagagacucccacaguggu

SEQ ID NO: 144792 - RNA, 32 nt, Homo Sapiens
cucucucucccucuuucuagccuggggcuuga

SEQ ID NO: 144793 - RNA, 32 nt, Homo Sapiens
ccggguccuggcgggcggcgaggcuggggcug

SEQ ID NO: 144794 - RNA, 32 nt, Homo Sapiens
ccaaaagaauuaaauaaucgugcauguuuauu

SEQ ID NO: 144795 - RNA, 32 nt, Homo Sapiens
gguuguucuuggagaauucuuaaaagaaauua

SEQ ID NO: 144796 - RNA, 32 nt, Homo Sapiens
uuuaggugcccauugcaucuuuuugugcuaug

SEQ ID NO: 144797 - RNA, 30 nt, Homo Sapiens
agcuggacuggcggcggcggcaccucuggg

SEQ ID NO: 144798 - RNA, 32 nt, Homo Sapiens
guacagcaagguggcgaaucuuccgugaacuc

SEQ ID NO: 144799 - RNA, 32 nt, Homo Sapiens
caagagcaaacacacaacaaugaugguggcaa

SEQ ID NO: 144800 - RNA, 32 nt, Homo Sapiens
uuuuauuaugcauaaaauaaagaaauucuuag

SEQ ID NO: 144801 - RNA, 32 nt, Homo Sapiens
cugggggcccagcagagccugcucccacccuc

SEQ ID NO: 144802 - RNA, 32 nt, Homo Sapiens
auauuuuaguacuuucaguagccuuuuaaaau

SEQ ID NO: 144803 - RNA, 32 nt, Homo Sapiens
uacugcagaggcugaggccacuagauaaacua

SEQ ID NO: 144804 - RNA, 32 nt, Homo Sapiens
cuugcucaggugacaaguuacaguccaacugg

SEQ ID NO: 144805 - RNA, 32 nt, Homo Sapiens
ugacggaaguaccgccuccucccgucugacgc

SEQ ID NO: 144806 - RNA, 32 nt, Homo Sapiens
agggggccuccgacucgggcccggcccggagg

SEQ ID NO: 144807 - RNA, 32 nt, Homo Sapiens
aucuucccaggggccucagaagaaggaauuaa

SEQ ID NO: 144808 - RNA, 32 nt, Homo Sapiens
caugggaacgcccacaugggaccgcccacaua

SEQ ID NO: 144809 - RNA, 32 nt, Homo Sapiens
ucaucacagcuugugacucuuccacuuuuuga

SEQ ID NO: 144810 - RNA, 32 nt, Homo Sapiens
cugcaaccagcccuuuugaagagcagcuucug

SEQ ID NO: 144811 - RNA, 32 nt, Homo Sapiens
gaugagaaaugaugaaaagguugccugaaaaa

SEQ ID NO: 144812 - RNA, 32 nt, Homo Sapiens
ucggugcuugagucccugcagcucugggucug

SEQ ID NO: 144813 - RNA, 32 nt, Homo Sapiens
agcaagaaaaagaagauaaggaaauggaagcu

SEQ ID NO: 144814 - RNA, 32 nt, Homo Sapiens
uaauuuauuuuugugauaggagggauauuuac

SEQ ID NO: 144815 - RNA, 32 nt, Homo Sapiens
ucaagcuugacaauagaggauuuaauucugua

SEQ ID NO: 144816 - RNA, 32 nt, Homo Sapiens
aaucuuuuuccagcguucucucuucuccaaug

SEQ ID NO: 144817 - RNA, 32 nt, Homo Sapiens
ccgagauggcggccuccgggggccuagaggga

SEQ ID NO: 144818 - RNA, 32 nt, Homo Sapiens
agaucagaccucuugaaaaugcuuauucuucc

SEQ ID NO: 144819 - RNA, 32 nt, Homo Sapiens
guucaauuagaccauggaaauuuuuauuucaa

SEQ ID NO: 144820 - RNA, 32 nt, Homo Sapiens
uuaaugagaaagaucacagauacguaauaauu

SEQ ID NO: 144821 - RNA, 32 nt, Homo Sapiens
aaaauguuuuguuuuucuuguguauuuaugau

SEQ ID NO: 144822 - RNA, 32 nt, Homo Sapiens
aucagcauuuuguauggugucagacacagcac

SEQ ID NO: 144823 - RNA, 32 nt, Homo Sapiens
uguucagaagagaauaaaccaguguuuuuacc

SEQ ID NO: 144824 - RNA, 32 nt, Homo Sapiens
aguaauuuuugaugaggagaaaugguacaaua

SEQ ID NO: 144825 - RNA, 32 nt, Homo Sapiens
gguggggaagggguugucuuugcauggguggg

SEQ ID NO: 144826 - RNA, 32 nt, Homo Sapiens
aucagccaggacuuaaauucagaccuacuggu

SEQ ID NO: 144827 - RNA, 32 nt, Homo Sapiens
cccuggggacagccccaccuccgggucccucc

SEQ ID NO: 144828 - RNA, 32 nt, Homo Sapiens
cucuugggcagcuuagggcccugccucuguuu

SEQ ID NO: 144829 - RNA, 32 nt, Homo Sapiens
cuucccccgccgcgcguccgggccaaucggcu

SEQ ID NO: 144830 - RNA, 32 nt, Homo Sapiens
ugacccaucuucuaccaggcagaucuuuauua

SEQ ID NO: 144831 - RNA, 32 nt, Homo Sapiens
cauuaccuagaguaaacuuauugcauauuuuc

SEQ ID NO: 144832 - RNA, 32 nt, Homo Sapiens
cugucaaaugcuaugguuuucuuaaaauguua

SEQ ID NO: 144833 - RNA, 32 nt, Homo Sapiens
gaaccauuguaucagauguugauaaaagcaau

SEQ ID NO: 144834 - RNA, 32 nt, Homo Sapiens
ccagcgccauguccagccagguggugggcauu

SEQ ID NO: 144835 - RNA, 32 nt, Homo Sapiens
guauaauacuaaaauguaacuuuuuaaucauc

SEQ ID NO: 144836 - RNA, 32 nt, Homo Sapiens
uuguaaugucuccuuuuucauuucugauugua

SEQ ID NO: 144837 - RNA, 32 nt, Homo Sapiens
ugcgauagggaacgcgcccuugccccgaggcu

SEQ ID NO: 144838 - RNA, 32 nt, Homo Sapiens
gaaaugucaacaguauugagccaaaagaagac

SEQ ID NO: 144839 - RNA, 28 nt, Homo Sapiens
gaaacuaaaaaauaaaauguugaaagaa

SEQ ID NO: 144840 - RNA, 32 nt, Homo Sapiens
gccuugauggacaauuuuugcuggagcaaaua

SEQ ID NO: 144841 - RNA, 32 nt, Homo Sapiens
uccagugcaccuguaggaacaacuagacuucu

SEQ ID NO: 144842 - RNA, 32 nt, Homo Sapiens
ucuugacauuuuaaaagccugguuaugaucag

SEQ ID NO: 144843 - RNA, 32 nt, Homo Sapiens
agggggagccccaagcccaagucuuuccuccc

SEQ ID NO: 144844 - RNA, 32 nt, Homo Sapiens
agcggucugaguucuuuagcuaucucggagau

SEQ ID NO: 144845 - RNA, 32 nt, Homo Sapiens
guguagcccucccacuuugcuguucuuuacuu

SEQ ID NO: 144846 - RNA, 31 nt, Homo Sapiens
gaaaggggggcggugaucaggucaccaguga

SEQ ID NO: 144847 - RNA, 32 nt, Homo Sapiens
guaaucucuaugccggccccugaggucaucac

SEQ ID NO: 144848 - RNA, 32 nt, Homo Sapiens
guaugucagucgcuuuuucugcccacaaugau

SEQ ID NO: 144849 - RNA, 32 nt, Homo Sapiens
ucccacuguccugguuucuccuccuggagucu

SEQ ID NO: 144850 - RNA, 32 nt, Homo Sapiens
acccccaaagacaagacaagcacuuauuuuua

SEQ ID NO: 144851 - RNA, 32 nt, Homo Sapiens
ucaucaacccucauccuaagagccgaagcagg

SEQ ID NO: 144852 - RNA, 32 nt, Homo Sapiens
caaaagcagaugcacuuugacuucugacagcu

SEQ ID NO: 144853 - RNA, 32 nt, Homo Sapiens
cuggcagaagcugaaauugaaguggucucuga

SEQ ID NO: 144854 - RNA, 32 nt, Homo Sapiens
caguauaccuugugagaaaugcuaaguuuauc

SEQ ID NO: 144855 - RNA, 32 nt, Homo Sapiens
cacacacacacacacacacacacacacaugcu

SEQ ID NO: 144856 - RNA, 32 nt, Homo Sapiens
ugagucagaaaguuaacaaggauauccaggaa

SEQ ID NO: 144857 - RNA, 32 nt, Homo Sapiens
uccccuacgccucaccccuccucccucucaca

SEQ ID NO: 144858 - RNA, 32 nt, Homo Sapiens
aaacucggggacgaaccccuaacccaccucuc

SEQ ID NO: 144859 - RNA, 32 nt, Homo Sapiens
auccagcccuccccuggacccuaggucacggc

SEQ ID NO: 144860 - RNA, 32 nt, Homo Sapiens
augagaugcguaguuuguuuucuuucauggga

SEQ ID NO: 144861 - RNA, 32 nt, Homo Sapiens
aagaucucaucaugccauaaagggcagcauga

SEQ ID NO: 144862 - RNA, 32 nt, Homo Sapiens
cuuaggcccccuccccaucaguguggccugcc

SEQ ID NO: 144863 - RNA, 32 nt, Homo Sapiens
gaggcuuugcuguggcagcugcuggagcggcg

SEQ ID NO: 144864 - RNA, 32 nt, Homo Sapiens
ugggaucgggagaggugggcgcacgaguuuua

SEQ ID NO: 144865 - RNA, 32 nt, Homo Sapiens
auggcacuguuuuuuaucacaaauauguauau

SEQ ID NO: 144866 - RNA, 32 nt, Homo Sapiens
uugguuaauuguagccuccauacagugggguc

SEQ ID NO: 144867 - RNA, 30 nt, Homo Sapiens
cagcgucaagguggcauccgaaggugucuc

SEQ ID NO: 144868 - RNA, 32 nt, Homo Sapiens
gcugugggagugcggguggggguguggccgag

SEQ ID NO: 144869 - RNA, 32 nt, Homo Sapiens
ucuguuuuauuaccaaguaauuuaaacuguau

SEQ ID NO: 144870 - RNA, 32 nt, Homo Sapiens
aaacaaaaaccaaaacaaaaaaaacaaugaaa

SEQ ID NO: 144871 - RNA, 32 nt, Homo Sapiens
gagcacacguccucgucucauuccugaucgaa

SEQ ID NO: 144872 - RNA, 32 nt, Homo Sapiens
aaucagccuuggcggggcccaaauaccacccc

SEQ ID NO: 144873 - RNA, 32 nt, Homo Sapiens
cggcaugggcgucucccgcgggcccuccgcug

SEQ ID NO: 144874 - RNA, 32 nt, Homo Sapiens
ugauacucagcugucauguuuauaauucaaac

SEQ ID NO: 144875 - RNA, 32 nt, Homo Sapiens
aagaaaaaacaaacagcaggaaucggugggac

SEQ ID NO: 144876 - RNA, 32 nt, Homo Sapiens
agaauguaaaaugagauauugaaggcguguuu

SEQ ID NO: 144877 - RNA, 32 nt, Homo Sapiens
ccagguccaccgucuccccuccccucauuugu

SEQ ID NO: 144878 - RNA, 32 nt, Homo Sapiens
ccaccaaggccauagccugugcucucucugag

SEQ ID NO: 144879 - RNA, 32 nt, Homo Sapiens
uggcacuguauauguuaagaaauuuuauuuua

SEQ ID NO: 144880 - RNA, 32 nt, Homo Sapiens
aaauguucaaggaauuauuuucaucuuaguuu

SEQ ID NO: 144881 - RNA, 32 nt, Homo Sapiens
ccugccccugccccucccccagccuugaggug

SEQ ID NO: 144882 - RNA, 32 nt, Homo Sapiens
ccaccugccccggccucccaaagcacuaggau

SEQ ID NO: 144883 - RNA, 29 nt, Homo Sapiens
uuuguuuaauaaaggcugaagcuuuuugu

SEQ ID NO: 144884 - RNA, 32 nt, Homo Sapiens
gcgaagccgccgcaguucagugcuuggauaau

SEQ ID NO: 144885 - RNA, 32 nt, Homo Sapiens
gagcaacuuggcuggaacacuccaucaauucu

SEQ ID NO: 144886 - RNA, 32 nt, Homo Sapiens
cugggaauccuccucaggcaggucccaccugc

SEQ ID NO: 144887 - RNA, 32 nt, Homo Sapiens
augaaauaaaauguguaucugagugagaaaac

SEQ ID NO: 144888 - RNA, 32 nt, Homo Sapiens
ccaccuggcagagcccucagagaugacgucag

SEQ ID NO: 144889 - RNA, 32 nt, Homo Sapiens
ggaugagugcugguuccgcccagcgccuacuu

SEQ ID NO: 144890 - RNA, 32 nt, Homo Sapiens
ccaccaaguccucuugggcccugucuguccgg

SEQ ID NO: 144891 - RNA, 32 nt, Homo Sapiens
agcugaaggauaaaguagcugguauaauaaaa

SEQ ID NO: 144892 - RNA, 31 nt, Homo Sapiens
cccuggcccagcugccucagagccuguccug

SEQ ID NO: 144893 - RNA, 32 nt, Homo Sapiens
uuuuucuccccuccccacagaucccaucucaa

SEQ ID NO: 144894 - RNA, 32 nt, Homo Sapiens
augcacccguguuuguaaaaauguagagcaca

SEQ ID NO: 144895 - RNA, 32 nt, Homo Sapiens
aauaccaaacuuauggauuaucacuagguuau

SEQ ID NO: 144896 - RNA, 32 nt, Homo Sapiens
uacaugcaggacuuaucauuuugcuaauaaca

SEQ ID NO: 144897 - RNA, 32 nt, Homo Sapiens
uacuuguacuaugaaggaaaauacucaguguc

SEQ ID NO: 144898 - RNA, 32 nt, Homo Sapiens
ucgugacccacuuuucuaccaguaaaagacau

SEQ ID NO: 144899 - RNA, 32 nt, Homo Sapiens
ucuaguauauuccuguaaaugucaguuacuga

SEQ ID NO: 144900 - RNA, 32 nt, Homo Sapiens
ccccuuugacuucacacacuugacguuuacau

SEQ ID NO: 144901 - RNA, 32 nt, Homo Sapiens
aaccaaaguauuaucuuccuccuuccauugga

SEQ ID NO: 144902 - RNA, 32 nt, Homo Sapiens
cgcaggccccacucaugccggcgguugcaggu

SEQ ID NO: 144903 - RNA, 32 nt, Homo Sapiens
cgcucguccuccccgggcccagaggcaccucg

SEQ ID NO: 144904 - RNA, 32 nt, Homo Sapiens
aaggguuaguguccagcucacuccagcauccu

SEQ ID NO: 144905 - RNA, 32 nt, Homo Sapiens
ugcagggccccggccugucuaugauccugccu

SEQ ID NO: 144906 - RNA, 32 nt, Homo Sapiens
gucggggcgugcgggcagcuggaacccacccc

SEQ ID NO: 144907 - RNA, 32 nt, Homo Sapiens
ccaauccuggggauuggagaggccuggggcug

SEQ ID NO: 144908 - RNA, 32 nt, Homo Sapiens
cagcugcgcccggcuccuccccucccaggccc

SEQ ID NO: 144909 - RNA, 32 nt, Homo Sapiens
caggagaaggcacccuuaacuggauguccaga

SEQ ID NO: 144910 - RNA, 32 nt, Homo Sapiens
gacguuagguaguuuguugggccggguucuga

SEQ ID NO: 144911 - RNA, 32 nt, Homo Sapiens
guuuaaugauggucauggcaacuuuuuggcac

SEQ ID NO: 144912 - RNA, 30 nt, Homo Sapiens
ccgagacgcgcgcaccaugagcggugguga

SEQ ID NO: 144913 - RNA, 32 nt, Homo Sapiens
cgcuugggccgccgcacaccccgcaguguccu

SEQ ID NO: 144914 - RNA, 32 nt, Homo Sapiens
cuccuguugucuuuuucccugcuccuggugcc

SEQ ID NO: 144915 - RNA, 32 nt, Homo Sapiens
gcugagcgucccggagcgcccaauccugggcu

SEQ ID NO: 144916 - RNA, 32 nt, Homo Sapiens
auaauuugaagaauauauuaugaguaaacucc

SEQ ID NO: 144917 - RNA, 32 nt, Homo Sapiens
uuccccuggguaugccucugugccacaggagc

SEQ ID NO: 144918 - RNA, 32 nt, Homo Sapiens
cguguccauccaugucucuguugugugucugu

SEQ ID NO: 144919 - RNA, 32 nt, Homo Sapiens
ucuuggcaguugcugauacgcuugucucauuc

SEQ ID NO: 144920 - RNA, 32 nt, Homo Sapiens
caucugcgcuuuaaaggguccgggucagcuga

SEQ ID NO: 144921 - RNA, 32 nt, Homo Sapiens
guaaaguagcaggcuuuugaugugucacugcu

SEQ ID NO: 144922 - RNA, 32 nt, Homo Sapiens
aucccuguuuuauuucugauauuaauuugugc

SEQ ID NO: 144923 - RNA, 32 nt, Homo Sapiens
uaaacucuaaucuuauacuuauugaagaauaa

SEQ ID NO: 144924 - RNA, 32 nt, Homo Sapiens
augaggcccuguaaacacugcuuauauuuggc

SEQ ID NO: 144925 - RNA, 32 nt, Homo Sapiens
auucauucaaagcuuuagaugugucccaugug

SEQ ID NO: 144926 - RNA, 32 nt, Homo Sapiens
gcccugugguggcgacgacgauggaccaggag

SEQ ID NO: 144927 - RNA, 32 nt, Homo Sapiens
cggcggcggagcagaucuucuggugaccccac

SEQ ID NO: 144928 - RNA, 32 nt, Homo Sapiens
ggauggaagauaauauagacuaccacccacug

SEQ ID NO: 144929 - RNA, 32 nt, Homo Sapiens
aguaaucuaucuacuuuuuuuaaagcagggau

SEQ ID NO: 144930 - RNA, 32 nt, Homo Sapiens
gcuccuguuugucugauguggcaaaaggcccu

SEQ ID NO: 144931 - RNA, 32 nt, Homo Sapiens
gaggggcugacaacaggaaguaccaucaucac

SEQ ID NO: 144932 - RNA, 32 nt, Homo Sapiens
ccaguccauccucauuuccugguggcaucugu

SEQ ID NO: 144933 - RNA, 32 nt, Homo Sapiens
agcagguguggccaauggaggggggugcuggc

SEQ ID NO: 144934 - RNA, 32 nt, Homo Sapiens
accgcacaugugccacuguucagcggagcuga

SEQ ID NO: 144935 - RNA, 32 nt, Homo Sapiens
gcaaccauacccaagaaauagcuagcaucaag

SEQ ID NO: 144936 - RNA, 32 nt, Homo Sapiens
cgacgagggcgcugagacaaauuuacauguau

SEQ ID NO: 144937 - RNA, 32 nt, Homo Sapiens
uuaauugucagccaccagacugucccggcacc

SEQ ID NO: 144938 - RNA, 32 nt, Homo Sapiens
ucucuacuaaaaguacaaaaauuagccgggcg

SEQ ID NO: 144939 - RNA, 32 nt, Homo Sapiens
cggcaagcccgccccaucccagacaggaagca

SEQ ID NO: 144940 - RNA, 32 nt, Homo Sapiens
uuguagaauaaaugguuucucauuaaacucua

SEQ ID NO: 144941 - RNA, 28 nt, Homo Sapiens
gcugucuuuacaggagaaagaggugauu

SEQ ID NO: 144942 - RNA, 32 nt, Homo Sapiens
gagggcucagucuuaugggaaaugccuccaac

SEQ ID NO: 144943 - RNA, 32 nt, Homo Sapiens
ugccacuggccgagacacagaggcacacagcu

SEQ ID NO: 144944 - RNA, 32 nt, Homo Sapiens
ugucuuagccccugcccuuucaagcaguuccu

SEQ ID NO: 144945 - RNA, 32 nt, Homo Sapiens
cagcuggagggccaggccuccucuuccccagg

SEQ ID NO: 144946 - RNA, 32 nt, Homo Sapiens
uguaaauacaccgaugggcacucuguaucuag

SEQ ID NO: 144947 - RNA, 32 nt, Homo Sapiens
uuccacagauauaaagaacaaacacuuagcau

SEQ ID NO: 144948 - RNA, 32 nt, Homo Sapiens
ccaccaggccccagcucuccacccugaacucc

SEQ ID NO: 144949 - RNA, 32 nt, Homo Sapiens
cagagcggccacccccaccucaucuuccccuc

SEQ ID NO: 144950 - RNA, 32 nt, Homo Sapiens
uucauuccauagagcugaaaucugguuuucaa

SEQ ID NO: 144951 - RNA, 32 nt, Homo Sapiens
ucgacgaaggacccggggcccugguauuggag

SEQ ID NO: 144952 - RNA, 32 nt, Homo Sapiens
aaaaacuccccuuuuuugcccacagcuugccu

SEQ ID NO: 144953 - RNA, 32 nt, Homo Sapiens
cguccuucucagacaaaccacucacuggguac

SEQ ID NO: 144954 - RNA, 32 nt, Homo Sapiens
aggaaaaugaaauuauuuuuucauuguguuuu

SEQ ID NO: 144955 - RNA, 32 nt, Homo Sapiens
uuuucauucucauugcagaauaauguucuauu

SEQ ID NO: 144956 - RNA, 32 nt, Homo Sapiens
cuuauuccuguaaucccaacacuguggaaggc

SEQ ID NO: 144957 - RNA, 32 nt, Homo Sapiens
gagacucacaugcuuugguuaguaucuguguu

SEQ ID NO: 144958 - RNA, 32 nt, Homo Sapiens
ugccuguacuaguuuuuagaccccaagucaac

SEQ ID NO: 144959 - RNA, 32 nt, Homo Sapiens
accugccccccgcgccagcccagccccagccu

SEQ ID NO: 144960 - RNA, 32 nt, Homo Sapiens
aacacagcugagguuuuuauccugucuuuucu

SEQ ID NO: 144961 - RNA, 32 nt, Homo Sapiens
aauaacuggaaugucauuuuugcuuuuaagcc

SEQ ID NO: 144962 - RNA, 32 nt, Homo Sapiens
gguacuuuuuauuauuauuuuuucuguuugaa

SEQ ID NO: 144963 - RNA, 32 nt, Homo Sapiens
gugucacuuuucugccugaaaccucuggcugg

SEQ ID NO: 144964 - RNA, 32 nt, Homo Sapiens
gccagaaaacaaaugaugaggcaacuacaguc

SEQ ID NO: 144965 - RNA, 32 nt, Homo Sapiens
aagaagacgcccgcgccccagccccaggcgcc

SEQ ID NO: 144966 - RNA, 32 nt, Homo Sapiens
uggcgaugcccugguggagcagaugggugcuc

SEQ ID NO: 144967 - RNA, 32 nt, Homo Sapiens
auguacaccuaaaaauaaaaacuuuccugcau

SEQ ID NO: 144968 - RNA, 32 nt, Homo Sapiens
ugaacacauaugagucaagggauugcaauucu

SEQ ID NO: 144969 - RNA, 32 nt, Homo Sapiens
ugauaggacacaguaguagcgguggucagaca

SEQ ID NO: 144970 - RNA, 32 nt, Homo Sapiens
ucguuuucuuugaucuaugcuuagauuuucug

SEQ ID NO: 144971 - RNA, 32 nt, Homo Sapiens
acuggguaguguggguuuggccgagguugguc

SEQ ID NO: 144972 - RNA, 32 nt, Homo Sapiens
ucucuccgacccagcccuagacgcucagcaag

SEQ ID NO: 144973 - RNA, 32 nt, Homo Sapiens
guccagccugcaccggccccuuggcaugcccu

SEQ ID NO: 144974 - RNA, 32 nt, Homo Sapiens
agaacauuccuccuggcuuaguuguagcagac

SEQ ID NO: 144975 - RNA, 32 nt, Homo Sapiens
cuaaguaacccucuugccaccaaauaccacac

SEQ ID NO: 144976 - RNA, 32 nt, Homo Sapiens
ccuuuuguucuuccuuuacuucuccagcuugu

SEQ ID NO: 144977 - RNA, 32 nt, Homo Sapiens
ucuucaauugugacuguuaauuuuaaagcaac

SEQ ID NO: 144978 - RNA, 32 nt, Homo Sapiens
ucugauuuuccacuuacacauuucuuccaccu

SEQ ID NO: 144979 - RNA, 32 nt, Homo Sapiens
uaauguaauguuucuccugucauuuuugaagu

SEQ ID NO: 144980 - RNA, 32 nt, Homo Sapiens
uuuggugagaaccuggguugcagacaggaauc

SEQ ID NO: 144981 - RNA, 32 nt, Homo Sapiens
aagcagagaaugccuuugcaguggucucccgg

SEQ ID NO: 144982 - RNA, 32 nt, Homo Sapiens
acugacaauucagaacagacaagcccagauug

SEQ ID NO: 144983 - RNA, 32 nt, Homo Sapiens
uggagacagaaagccacugcugucaguguccu

SEQ ID NO: 144984 - RNA, 32 nt, Homo Sapiens
agaaauaacaaggcauugaagaauggcagaug

SEQ ID NO: 144985 - RNA, 32 nt, Homo Sapiens
ggggaagauaaaagacuuugauucaugaagaa

SEQ ID NO: 144986 - RNA, 32 nt, Homo Sapiens
auggguauggggaaacaaaucucuuucugaug

SEQ ID NO: 144987 - RNA, 32 nt, Homo Sapiens
ggcccuggguuccuccucuccuacucggcucu

SEQ ID NO: 144988 - RNA, 32 nt, Homo Sapiens
auucaggggcuucaagccagcugcugaaaauc

SEQ ID NO: 144989 - RNA, 32 nt, Homo Sapiens
uccuggggccccagcucuggguccucauguau

SEQ ID NO: 144990 - RNA, 32 nt, Homo Sapiens
gagggaugucuggucagcccccagcucucucc

SEQ ID NO: 144991 - RNA, 32 nt, Homo Sapiens
ggauucuguauccaugggauuggguguucauc

SEQ ID NO: 144992 - RNA, 32 nt, Homo Sapiens
ggcaccgccgccgucgucucccggccccucgc

SEQ ID NO: 144993 - RNA, 32 nt, Homo Sapiens
aaaucuugacuacagucaggaaaggaaucauu

SEQ ID NO: 144994 - RNA, 32 nt, Homo Sapiens
ucuagggggucucagauuggcggggaugggca

SEQ ID NO: 144995 - RNA, 30 nt, Homo Sapiens
auuccacaaugucuuaccuaacucuagcuu

SEQ ID NO: 144996 - RNA, 32 nt, Homo Sapiens
uaucuguacauagauauagacacacacuuuaa

SEQ ID NO: 144997 - RNA, 32 nt, Homo Sapiens
aagaauugccccagcucugggcacccuggcca

SEQ ID NO: 144998 - RNA, 32 nt, Homo Sapiens
ccagcccuaccuuccaccacagaugucuccca

SEQ ID NO: 144999 - RNA, 32 nt, Homo Sapiens
gaacuugaacaaagucucugggucacguuuug

SEQ ID NO: 145000 - RNA, 32 nt, Homo Sapiens
cucccuucugagaggcagcugcagcucaggcc

SEQ ID NO: 145001 - RNA, 32 nt, Homo Sapiens
uucauuugaguugugaccauuauuuuucauuc

SEQ ID NO: 145002 - RNA, 30 nt, Homo Sapiens
uugguuauccacaguagcaagaguaaagca

SEQ ID NO: 145003 - RNA, 32 nt, Homo Sapiens
uuuaaguuuaaaaaacagaaaaacagacaaaa

SEQ ID NO: 145004 - RNA, 32 nt, Homo Sapiens
gauaccuggggguggggaggggccacagaaga

SEQ ID NO: 145005 - RNA, 32 nt, Homo Sapiens
uaagcuaacaauaacagucuguguuuucucua

SEQ ID NO: 145006 - RNA, 32 nt, Homo Sapiens
auugauguauuauauguuuuuguauuugaugc

SEQ ID NO: 145007 - RNA, 32 nt, Homo Sapiens
cuguucccggguggcuucggaccccugucgga

SEQ ID NO: 145008 - RNA, 32 nt, Homo Sapiens
cuaggugaucauuuggaucuggagcagagucu

SEQ ID NO: 145009 - RNA, 32 nt, Homo Sapiens
ccaacuagaaaauuauuuuguugacgagaugu

SEQ ID NO: 145010 - RNA, 32 nt, Homo Sapiens
aaucaauaagaaagacaaaaccacagugagau

SEQ ID NO: 145011 - RNA, 32 nt, Homo Sapiens
agccuucuucuuugggaccccucgauauccca

SEQ ID NO: 145012 - RNA, 32 nt, Homo Sapiens
gccgaagguuucugcgcacagcacggaccugc

SEQ ID NO: 145013 - RNA, 32 nt, Homo Sapiens
uaggcccauugagguuuuuagaaaagcaggau

SEQ ID NO: 145014 - RNA, 32 nt, Homo Sapiens
ucagagguagagaagacagggauugggaagug

SEQ ID NO: 145015 - RNA, 32 nt, Homo Sapiens
cuuccucuugguuuuucauuauaauugguagc

SEQ ID NO: 145016 - RNA, 32 nt, Homo Sapiens
gaggaagacacacacaccuacacacacacaca

SEQ ID NO: 145017 - RNA, 32 nt, Homo Sapiens
auauaaaaaugaauuuuaugcauagaucagaa

SEQ ID NO: 145018 - RNA, 32 nt, Homo Sapiens
ugcuugugguguuuucguuucuuuuucaucuc

SEQ ID NO: 145019 - RNA, 31 nt, Homo Sapiens
uucccggccggugucgcuccgcggcgggcca

SEQ ID NO: 145020 - RNA, 32 nt, Homo Sapiens
cgcucuccggaggcagaaguuguggaucggcc

SEQ ID NO: 145021 - RNA, 31 nt, Homo Sapiens
ccggcuauggacgugugucugagcuccgcgc

SEQ ID NO: 145022 - RNA, 32 nt, Homo Sapiens
gagcacauaccaugguacacuauaguuaucug

SEQ ID NO: 145023 - RNA, 32 nt, Homo Sapiens
agugagggcauggguaaaaauauuucuuuaaa

SEQ ID NO: 145024 - RNA, 32 nt, Homo Sapiens
cuugccuuucccuuuaaaaacaucuuuuacaa

SEQ ID NO: 145025 - RNA, 32 nt, Homo Sapiens
ugccgucccuccccugccuccagaaucacagc

SEQ ID NO: 145026 - RNA, 32 nt, Homo Sapiens
aaucuuuaaacacaagggucagcaagcuuugg

SEQ ID NO: 145027 - RNA, 30 nt, Homo Sapiens
cgggaggcgcccggugagcccacgucuguu

SEQ ID NO: 145028 - RNA, 32 nt, Homo Sapiens
cuguggagggaagaggauugagcuuuguguca

SEQ ID NO: 145029 - RNA, 32 nt, Homo Sapiens
ucuguaucuucaguaucuuggucuuccagaac

SEQ ID NO: 145030 - RNA, 31 nt, Homo Sapiens
cugcagccgccggucggcgcccgggcucccu

SEQ ID NO: 145031 - RNA, 32 nt, Homo Sapiens
uggaggugacacuugauggggguguguucugg

SEQ ID NO: 145032 - RNA, 32 nt, Homo Sapiens
aucaccuucuaaauuacuauguaauuuacuca

SEQ ID NO: 145033 - RNA, 32 nt, Homo Sapiens
acacacuguacauguuuaugggguacgauuug

SEQ ID NO: 145034 - RNA, 32 nt, Homo Sapiens
aucuuucaugcaauagcgugcacaucgaaauu

SEQ ID NO: 145035 - RNA, 32 nt, Homo Sapiens
uggccgcccgucugcgccugucucucgccacg

SEQ ID NO: 145036 - RNA, 32 nt, Homo Sapiens
ccaggagaacagagccccaccuggaccaccug

SEQ ID NO: 145037 - RNA, 32 nt, Homo Sapiens
gccccuggggguacagggagaacagcaugcug

SEQ ID NO: 145038 - RNA, 32 nt, Homo Sapiens
caagcauugagaagaauucugaguauuaucca

SEQ ID NO: 145039 - RNA, 32 nt, Homo Sapiens
ccucugaugagaaucuaaugucgcuguugauc

SEQ ID NO: 145040 - RNA, 32 nt, Homo Sapiens
ccuaauuauuuuuucuuuuaaaaugccuuaag

SEQ ID NO: 145041 - RNA, 32 nt, Homo Sapiens
gauuugggucauuuagaagccugacaacucau

SEQ ID NO: 145042 - RNA, 32 nt, Homo Sapiens
uuugauuucuaaaaauaccaugaccuuuaaaa

SEQ ID NO: 145043 - RNA, 32 nt, Homo Sapiens
auauuuuugugauguguaccauacugugugcu

SEQ ID NO: 145044 - RNA, 32 nt, Homo Sapiens
ggcuuugagcuaggccguuuccgggaggcgga

SEQ ID NO: 145045 - RNA, 32 nt, Homo Sapiens
ucauccuuuuauauuucuuuucaagauuggau

SEQ ID NO: 145046 - RNA, 32 nt, Homo Sapiens
cagcgggcgaggggcagcugccggagccgggc

SEQ ID NO: 145047 - RNA, 32 nt, Homo Sapiens
uggcaacugccccgucugagaagugaggagcc

SEQ ID NO: 145048 - RNA, 32 nt, Homo Sapiens
ccaucccggagcugagucgccggcggcggugg

SEQ ID NO: 145049 - RNA, 32 nt, Homo Sapiens
cgugcggcgagaggcguccgagcacugccaau

SEQ ID NO: 145050 - RNA, 32 nt, Homo Sapiens
gaacuguacaguauguuauacuguugacugua

SEQ ID NO: 145051 - RNA, 32 nt, Homo Sapiens
ggaaaggaagacuuaaaguuguuagugagugg

SEQ ID NO: 145052 - RNA, 32 nt, Homo Sapiens
gugggaagccugcccuggcccagccuggcugg

SEQ ID NO: 145053 - RNA, 32 nt, Homo Sapiens
aaacuguuuuuaaggguuuucuuaaucucucc

SEQ ID NO: 145054 - RNA, 32 nt, Homo Sapiens
gcagagggagugugcgaaucaaaccugaccaa

SEQ ID NO: 145055 - RNA, 31 nt, Homo Sapiens
gccaguggucgagcacugccccgccgccaaa

SEQ ID NO: 145056 - RNA, 32 nt, Homo Sapiens
gggaccuuuggcugcuuucucuccuuaaacuu

SEQ ID NO: 145057 - RNA, 32 nt, Homo Sapiens
aauuguuccucauagagucuuuugccaugauu

SEQ ID NO: 145058 - RNA, 32 nt, Homo Sapiens
cuacucccugcccacaccaucuaugcucuugg

SEQ ID NO: 145059 - RNA, 32 nt, Homo Sapiens
aacuuggccucccacacguuccauuucauuuu

SEQ ID NO: 145060 - RNA, 32 nt, Homo Sapiens
guggggagcuggugcuguucucagauguuucc

SEQ ID NO: 145061 - RNA, 32 nt, Homo Sapiens
cuucauacugguuuccucagccuuccuucagc

SEQ ID NO: 145062 - RNA, 32 nt, Homo Sapiens
aaaccaggcccagacccugcaagcauuuguug

SEQ ID NO: 145063 - RNA, 32 nt, Homo Sapiens
aauguuggaaagauucugugggauggaaagau

SEQ ID NO: 145064 - RNA, 32 nt, Homo Sapiens
ugguuaaauaaaccucuaucgauugagacucc

SEQ ID NO: 145065 - RNA, 32 nt, Homo Sapiens
aaauauaaacacauuaaaagacaaauauguag

SEQ ID NO: 145066 - RNA, 32 nt, Homo Sapiens
ugcccccaacuggcuguauaaccuuugaaaaa

SEQ ID NO: 145067 - RNA, 27 nt, Homo Sapiens
auuaaaggaaaugaaacauggcaauuc

SEQ ID NO: 145068 - RNA, 32 nt, Homo Sapiens
gagaaacaccggguuucagcuuucuugaccuu

SEQ ID NO: 145069 - RNA, 32 nt, Homo Sapiens
uccugccuuucugcagccucuacaggcccagc

SEQ ID NO: 145070 - RNA, 32 nt, Homo Sapiens
auuggaggguaaaugauguggugccugagguc

SEQ ID NO: 145071 - RNA, 32 nt, Homo Sapiens
ggcucccacccuccccugaggauggccuggau

SEQ ID NO: 145072 - RNA, 32 nt, Homo Sapiens
aaacaaauuaauguuguucuaaaggcuguuaa

SEQ ID NO: 145073 - RNA, 32 nt, Homo Sapiens
auggagggguguucaccuuaccggagggccuu

SEQ ID NO: 145074 - RNA, 29 nt, Homo Sapiens
ccacauggacacugaggcgcugaaaaaac

SEQ ID NO: 145075 - RNA, 32 nt, Homo Sapiens
caaaaaacaaaagauggaguguuuacaaguag

SEQ ID NO: 145076 - RNA, 32 nt, Homo Sapiens
cauuccagaaugaagagagcugucuggggaga

SEQ ID NO: 145077 - RNA, 32 nt, Homo Sapiens
cuccaucgccgacggggccauguggaggcggc

SEQ ID NO: 145078 - RNA, 32 nt, Homo Sapiens
gacaggaccccuuagugcccagcccucuguug

SEQ ID NO: 145079 - RNA, 32 nt, Homo Sapiens
ugugcccugugaacacucuccucucaccuauu

SEQ ID NO: 145080 - RNA, 32 nt, Homo Sapiens
uuuaguucucugaaggcccacguuuuuaucau

SEQ ID NO: 145081 - RNA, 32 nt, Homo Sapiens
cucccacccacccagcuagggcagagggguca

SEQ ID NO: 145082 - RNA, 32 nt, Homo Sapiens
uuguguuuaauuucuucuuuggcacucuaaag

SEQ ID NO: 145083 - RNA, 32 nt, Homo Sapiens
cggccccuggcucccagcugccggcgaccgcu

SEQ ID NO: 145084 - RNA, 32 nt, Homo Sapiens
agauauccuauauagauuguauacagaacuga

SEQ ID NO: 145085 - RNA, 32 nt, Homo Sapiens
uaaauacucauauauauacacaccuacacaug

SEQ ID NO: 145086 - RNA, 32 nt, Homo Sapiens
uaaaaaaguauuuuuauacuaucugacauaac

SEQ ID NO: 145087 - RNA, 32 nt, Homo Sapiens
aaauuauauaccguaaugauaaugacuauguu

SEQ ID NO: 145088 - RNA, 32 nt, Homo Sapiens
ccugagaguguggcgcgggcccggggccacgc

SEQ ID NO: 145089 - RNA, 32 nt, Homo Sapiens
ucaucuggauguauuagaaguaaaaguaguag

SEQ ID NO: 145090 - RNA, 32 nt, Homo Sapiens
gaucucucagccugcuuucucaucuguaaaaa

SEQ ID NO: 145091 - RNA, 32 nt, Homo Sapiens
aauuggaaauaucagaauaaagucaugauuuu

SEQ ID NO: 145092 - RNA, 32 nt, Homo Sapiens
uaauuauuggauaaguuuuauuaacuauuauu

SEQ ID NO: 145093 - RNA, 32 nt, Homo Sapiens
gcugaggcggguggaucaagaggucaggagau

SEQ ID NO: 145094 - RNA, 32 nt, Homo Sapiens
ggucuaguggaguaaagaugcuguuugaaacc

SEQ ID NO: 145095 - RNA, 32 nt, Homo Sapiens
ugucagaaagcacugaacaauuaagaaauuuu

SEQ ID NO: 145096 - RNA, 32 nt, Homo Sapiens
cacaucgaauggaguuuuaacuuucucagacc

SEQ ID NO: 145097 - RNA, 32 nt, Homo Sapiens
cgaaggagcccgagaagcagccacgaugugcg

SEQ ID NO: 145098 - RNA, 32 nt, Homo Sapiens
cgugcccuaugcugccgagggcaagcggcggg

SEQ ID NO: 145099 - RNA, 32 nt, Homo Sapiens
auaccgcucuaaaaaugaaauuguuaggugaa

SEQ ID NO: 145100 - RNA, 32 nt, Homo Sapiens
ucuguaaugaagaugguuguauguuuggguua

SEQ ID NO: 145101 - RNA, 32 nt, Homo Sapiens
acauugcaucgcccuauuuucuuucuuuaaaa

SEQ ID NO: 145102 - RNA, 32 nt, Homo Sapiens
cgaggccaggugcggggcgcgcugcaccggag

SEQ ID NO: 145103 - RNA, 32 nt, Homo Sapiens
uagguuggcgccguuuggggucggggucugag

SEQ ID NO: 145104 - RNA, 32 nt, Homo Sapiens
guuccccgagccagcugagcuguggcagcggg

SEQ ID NO: 145105 - RNA, 32 nt, Homo Sapiens
gcagaggugcggccggggaggcgcgcggaggc

SEQ ID NO: 145106 - RNA, 32 nt, Homo Sapiens
acuuucuacaguuuucuuaaucaaaagugguc

SEQ ID NO: 145107 - RNA, 32 nt, Homo Sapiens
uuuuguucuucucuccuuggcccacauagacu

SEQ ID NO: 145108 - RNA, 32 nt, Homo Sapiens
ugccaugccgggcuguguuugcagcuguccga

SEQ ID NO: 145109 - RNA, 32 nt, Homo Sapiens
uggaaaagaaaagaaaugaauagacuaucuag

SEQ ID NO: 145110 - RNA, 32 nt, Homo Sapiens
gauagagucucacugugucacccaggcuggag

SEQ ID NO: 145111 - RNA, 32 nt, Homo Sapiens
cagcugauccccacucauuccacaccucuucu

SEQ ID NO: 145112 - RNA, 32 nt, Homo Sapiens
ggggauagcugggaccccggggagggcgaggg

SEQ ID NO: 145113 - RNA, 32 nt, Homo Sapiens
aaauacaguuugguaccuuguuuauuucaaau

SEQ ID NO: 145114 - RNA, 32 nt, Homo Sapiens
ccagccuccuggcuccuccuguggccugucaa

SEQ ID NO: 145115 - RNA, 32 nt, Homo Sapiens
auucaguauaacuauuugagguuuacuagaug

SEQ ID NO: 145116 - RNA, 32 nt, Homo Sapiens
gugcagcuccugggcccggcucaggcccgucg

SEQ ID NO: 145117 - RNA, 32 nt, Homo Sapiens
uggcccgcaagagggacagagcccgggagaga

SEQ ID NO: 145118 - RNA, 32 nt, Homo Sapiens
cggcucccgcggcugcaggcgcgcggcuagag

SEQ ID NO: 145119 - RNA, 32 nt, Homo Sapiens
uggaacauuaaaucaugcuguauaaagcaaua

SEQ ID NO: 145120 - RNA, 32 nt, Homo Sapiens
cuucuucugaaucuuauguucauuuaaaaaca

SEQ ID NO: 145121 - RNA, 32 nt, Homo Sapiens
gaccacugcaggucagaagagcaggucucagg

SEQ ID NO: 145122 - RNA, 32 nt, Homo Sapiens
gguggggcuugccagagacuguguguuuuguu

SEQ ID NO: 145123 - RNA, 32 nt, Homo Sapiens
uuuauaaucuggagagaauacuuuuuaaggcu

SEQ ID NO: 145124 - RNA, 32 nt, Homo Sapiens
gaggugaaaaggaaaaagguuguccacaugaa

SEQ ID NO: 145125 - RNA, 32 nt, Homo Sapiens
gucacggggagcuuccugggcaagcaacaucu

SEQ ID NO: 145126 - RNA, 27 nt, Homo Sapiens
ugauucccuugcuucagccucccaagu

SEQ ID NO: 145127 - RNA, 32 nt, Homo Sapiens
cggcgcguaggucgcggggagcuccgaaccgc

SEQ ID NO: 145128 - RNA, 32 nt, Homo Sapiens
uuuaugagauggaucacauauuuuauuaagaa

SEQ ID NO: 145129 - RNA, 32 nt, Homo Sapiens
cccaucccaaccuuucucuccucagucccugc

SEQ ID NO: 145130 - RNA, 32 nt, Homo Sapiens
cgaggacaucagugaagcagcagugaaccagg

SEQ ID NO: 145131 - RNA, 32 nt, Homo Sapiens
cgccggaauggcgaaagcaacaacaaucaaag

SEQ ID NO: 145132 - RNA, 32 nt, Homo Sapiens
cgaucuguggauguugaauaugcaaggagcug

SEQ ID NO: 145133 - RNA, 32 nt, Homo Sapiens
augauagugucugaaauugagaauccaguuuc

SEQ ID NO: 145134 - RNA, 32 nt, Homo Sapiens
aggcuugcacccagacacgacaccaugcaucu

SEQ ID NO: 145135 - RNA, 32 nt, Homo Sapiens
accucggcugccucccccacuccacugugcac

SEQ ID NO: 145136 - RNA, 32 nt, Homo Sapiens
cugcuucguuuuuacauaugucuuugccuauu

SEQ ID NO: 145137 - RNA, 32 nt, Homo Sapiens
ugacugaaaaucagcacugccugaguaguuuu

SEQ ID NO: 145138 - RNA, 32 nt, Homo Sapiens
uaauguuuuaucauguauuuauauguuguaca

SEQ ID NO: 145139 - RNA, 32 nt, Homo Sapiens
ugcaguucuucccaguucagacuagccacauu

SEQ ID NO: 145140 - RNA, 32 nt, Homo Sapiens
gauggcauuaugugguuaagagcauggggcga

SEQ ID NO: 145141 - RNA, 32 nt, Homo Sapiens
ccagggguccugaaaaccaaaggaggagcagc

SEQ ID NO: 145142 - RNA, 32 nt, Homo Sapiens
uuauauuacaguuacaagguaaaauuccucaa

SEQ ID NO: 145143 - RNA, 32 nt, Homo Sapiens
aaggaccggcgccugggcuugcugucuguucu

SEQ ID NO: 145144 - RNA, 32 nt, Homo Sapiens
cacuugucucagauuuuggagcuccguggauu

SEQ ID NO: 145145 - RNA, 32 nt, Homo Sapiens
ugguggugcagggucagcgguugaugaaaacc

SEQ ID NO: 145146 - RNA, 32 nt, Homo Sapiens
gguggacuuuuagggaucaaaaacagaauuau

SEQ ID NO: 145147 - RNA, 32 nt, Homo Sapiens
aagaccucagggggcgggugcuggggucuucu

SEQ ID NO: 145148 - RNA, 32 nt, Homo Sapiens
cucuggcccgcaagaacacgugcauggcgucc

SEQ ID NO: 145149 - RNA, 32 nt, Homo Sapiens
guuggaaggucucugguuuucuuuucuuuuuu

SEQ ID NO: 145150 - RNA, 32 nt, Homo Sapiens
uuguuuuguuuuauucuuuuuuuccagaaauu

SEQ ID NO: 145151 - RNA, 32 nt, Homo Sapiens
ucagaucugcccuguacagccauguaggcugu

SEQ ID NO: 145152 - RNA, 32 nt, Homo Sapiens
cugggucggccggggucggggagggggguggu

SEQ ID NO: 145153 - RNA, 32 nt, Homo Sapiens
ggggagagcagcauggccagguccuccagugc

SEQ ID NO: 145154 - RNA, 32 nt, Homo Sapiens
ugcacucacaugccacagcaacccauucucgc

SEQ ID NO: 145155 - RNA, 32 nt, Homo Sapiens
gaacuuucccauuaaccuucugcauuuagaag

SEQ ID NO: 145156 - RNA, 32 nt, Homo Sapiens
ucgccgagacuccuuggguccuccccgcccuc

SEQ ID NO: 145157 - RNA, 32 nt, Homo Sapiens
aaaaagacccccagcaauaaaaagugggucac

SEQ ID NO: 145158 - RNA, 32 nt, Homo Sapiens
cucuccuuuccaccgcuaaucccggggccugu

SEQ ID NO: 145159 - RNA, 32 nt, Homo Sapiens
ugguggugaggccgcggccccgggccggccag

SEQ ID NO: 145160 - RNA, 32 nt, Homo Sapiens
cucuggggaaggagcacuccccugccuggggu

SEQ ID NO: 145161 - RNA, 32 nt, Homo Sapiens
uuuguaauaaauuuauguuuucuuuaauaauu

SEQ ID NO: 145162 - RNA, 32 nt, Homo Sapiens
uaggaaaagggggugguggggaggcuugggga

SEQ ID NO: 145163 - RNA, 32 nt, Homo Sapiens
uucauuuuuuauuuaauuucuuuucuuccugu

SEQ ID NO: 145164 - RNA, 32 nt, Homo Sapiens
gcuggcccccgcgggccuccccggaccuuccc

SEQ ID NO: 145165 - RNA, 32 nt, Homo Sapiens
uuguccccacuuuacagauguggauauuuagg

SEQ ID NO: 145166 - RNA, 32 nt, Homo Sapiens
auuguggccccggccgcgguggccggcgcggc

SEQ ID NO: 145167 - RNA, 32 nt, Homo Sapiens
acacaggaccagaauggaagcgugugaugcac

SEQ ID NO: 145168 - RNA, 32 nt, Homo Sapiens
aaaugaagccccaaaaaagaaaagugccuugc

SEQ ID NO: 145169 - RNA, 32 nt, Homo Sapiens
guuggguugugggcagggacagugauggauga

SEQ ID NO: 145170 - RNA, 32 nt, Homo Sapiens
aauguggcgucuucugcaaacaauagcaauug

SEQ ID NO: 145171 - RNA, 32 nt, Homo Sapiens
augacuuuuuuuuuuucuuuuaaugaagaaac

SEQ ID NO: 145172 - RNA, 32 nt, Homo Sapiens
aggcuggaaccugcacaccucccccucagcuc

SEQ ID NO: 145173 - RNA, 32 nt, Homo Sapiens
cacguggcuauccugaauccagcccuucuugg

SEQ ID NO: 145174 - RNA, 32 nt, Homo Sapiens
ccccagcaagcacuugccuguucauucccguu

SEQ ID NO: 145175 - RNA, 32 nt, Homo Sapiens
ggggacagcuggcagccccgcgcggaccagac

SEQ ID NO: 145176 - RNA, 32 nt, Homo Sapiens
ucccagcagcgggguucuggccccagcacgcg

SEQ ID NO: 145177 - RNA, 32 nt, Homo Sapiens
aaaaauuacauaucaguuguccuuuaaugaaa

SEQ ID NO: 145178 - RNA, 32 nt, Homo Sapiens
guuaagaaauggagaugcugcagagcccaacg

SEQ ID NO: 145179 - RNA, 32 nt, Homo Sapiens
cagacccuucagcuguggcuggcaccgagagg

SEQ ID NO: 145180 - RNA, 32 nt, Homo Sapiens
uccagagaugaaagguuagacuguauuuugcc

SEQ ID NO: 145181 - RNA, 27 nt, Homo Sapiens
cgaugcuccugcuucagccucccaaag

SEQ ID NO: 145182 - RNA, 32 nt, Homo Sapiens
caguggggguuugaaagagaauuuuuggaacc

SEQ ID NO: 145183 - RNA, 32 nt, Homo Sapiens
caagcuuuuaaaaauagagaauguaggcuuaa

SEQ ID NO: 145184 - RNA, 32 nt, Homo Sapiens
auaaguugcuccauucauauuggacugaugga

SEQ ID NO: 145185 - RNA, 32 nt, Homo Sapiens
aagauaaauuuauguguagacuuuuuuguaag

SEQ ID NO: 145186 - RNA, 32 nt, Homo Sapiens
uuaggaucauaugcuuuuuuuuuuuuuuuuuu

SEQ ID NO: 145187 - RNA, 32 nt, Homo Sapiens
uuaauuaacaauauaaacauuaugugaguaaa

SEQ ID NO: 145188 - RNA, 32 nt, Homo Sapiens
cgccuacggacggaaaagaaaaguugauuaca

SEQ ID NO: 145189 - RNA, 32 nt, Homo Sapiens
ggaagugguuagugugcccacccguguucucc

SEQ ID NO: 145190 - RNA, 32 nt, Homo Sapiens
caaugcuguuguaaauugaauuuaaaguggua

SEQ ID NO: 145191 - RNA, 32 nt, Homo Sapiens
cguuucugcccagcccucuguggccaggagcc

SEQ ID NO: 145192 - RNA, 32 nt, Homo Sapiens
ccaccgcugccucuccuuccuccgcaugagcc

SEQ ID NO: 145193 - RNA, 32 nt, Homo Sapiens
cuugcagaaaaguuaagucuaauugcccauug

SEQ ID NO: 145194 - RNA, 32 nt, Homo Sapiens
ggggcuuccagaaggcccgggggucuccgagg

SEQ ID NO: 145195 - RNA, 32 nt, Homo Sapiens
uaauaggaaaauguauuucuguauaagauuuc

SEQ ID NO: 145196 - RNA, 32 nt, Homo Sapiens
ugcccuugcccugaccucccagcccuauggau

SEQ ID NO: 145197 - RNA, 32 nt, Homo Sapiens
cccguggaugauuaacgggccuuuuucacuua

SEQ ID NO: 145198 - RNA, 32 nt, Homo Sapiens
gagagggagagaauucuccacaaauuccauca

SEQ ID NO: 145199 - RNA, 32 nt, Homo Sapiens
uuacagcggugccaagcagaggggcggcagag

SEQ ID NO: 145200 - RNA, 32 nt, Homo Sapiens
agcauuccgaggcccaugccagcccugaguga

SEQ ID NO: 145201 - RNA, 32 nt, Homo Sapiens
guguguugaaagauguacaucaauuugcuaac

SEQ ID NO: 145202 - RNA, 32 nt, Homo Sapiens
gauauucuagccaccaguucucuucuuccuuu

SEQ ID NO: 145203 - RNA, 32 nt, Homo Sapiens
uaauaacaggcaaaaggaagcaggguugguuu

SEQ ID NO: 145204 - RNA, 32 nt, Homo Sapiens
cauuaguuggacccuggguccuggaguaaagu

SEQ ID NO: 145205 - RNA, 32 nt, Homo Sapiens
auggccacagaaaggaagcaggacagcagggc

SEQ ID NO: 145206 - RNA, 32 nt, Homo Sapiens
agggccucuguucuccucuccacugggccaaa

SEQ ID NO: 145207 - RNA, 32 nt, Homo Sapiens
accaugccaggcuaauuuuuuauauuuuuagu

SEQ ID NO: 145208 - RNA, 32 nt, Homo Sapiens
aggguugccugcagggucuccaggcgaggggg

SEQ ID NO: 145209 - RNA, 32 nt, Homo Sapiens
cggggggcggggggcggggguguguaugggaa

SEQ ID NO: 145210 - RNA, 32 nt, Homo Sapiens
accuccgauggcggccuucgcuggcagggugg

SEQ ID NO: 145211 - RNA, 32 nt, Homo Sapiens
caaaucuaaaauuggcaaaaagucacuuaaaa

SEQ ID NO: 145212 - RNA, 32 nt, Homo Sapiens
acaaaugaaaagacaucuuauagucauggaua

SEQ ID NO: 145213 - RNA, 32 nt, Homo Sapiens
agacugcaggagaugugggccgugccaaagag

SEQ ID NO: 145214 - RNA, 32 nt, Homo Sapiens
uucucuugccucagccucccaaguaucuggga

SEQ ID NO: 145215 - RNA, 32 nt, Homo Sapiens
ucuugacgcugacuugcccccgcagcgguggc

SEQ ID NO: 145216 - RNA, 32 nt, Homo Sapiens
uggaccucacuggcaaaggcuagcccggagca

SEQ ID NO: 145217 - RNA, 32 nt, Homo Sapiens
caguaacaccauuuauacuaccauagaaagua

SEQ ID NO: 145218 - RNA, 30 nt, Homo Sapiens
ccuguuucugcgccggaccagucgaggacu

SEQ ID NO: 145219 - RNA, 32 nt, Homo Sapiens
ugcauaacuuauuuaauguacuguauaaauga

SEQ ID NO: 145220 - RNA, 32 nt, Homo Sapiens
aggagcugccccaccagccauccuugaagaga

SEQ ID NO: 145221 - RNA, 32 nt, Homo Sapiens
uccgcacacaccagagcagcugcucugacgcc

SEQ ID NO: 145222 - RNA, 32 nt, Homo Sapiens
acagcauggugacuggaauggaugagcaccca

SEQ ID NO: 145223 - RNA, 32 nt, Homo Sapiens
uguggacuauagaaauuaucugcuacauaaau

SEQ ID NO: 145224 - RNA, 32 nt, Homo Sapiens
uacauguguuugugucuuggguaugcauaagc

SEQ ID NO: 145225 - RNA, 32 nt, Homo Sapiens
ggcgacugagggcgaggcagggagggagcaag

SEQ ID NO: 145226 - RNA, 32 nt, Homo Sapiens
uauaggagaacacauucagaugcaagugauga

SEQ ID NO: 145227 - RNA, 32 nt, Homo Sapiens
gaaauacaacgacuuuggaacaaaaugaagca

SEQ ID NO: 145228 - RNA, 32 nt, Homo Sapiens
aaagagaauuagauuauauuggugguucucag

SEQ ID NO: 145229 - RNA, 32 nt, Homo Sapiens
ggaggcacuugccguggcacaccuggacuccu

SEQ ID NO: 145230 - RNA, 32 nt, Homo Sapiens
auuuaauccaaauaauaaauggcuguuucaaa

SEQ ID NO: 145231 - RNA, 32 nt, Homo Sapiens
guuaccggcauccugcacacguggauaguuug

SEQ ID NO: 145232 - RNA, 32 nt, Homo Sapiens
cagccccagccgcuccuccacgccuguccuua

SEQ ID NO: 145233 - RNA, 31 nt, Homo Sapiens
agcaugcuuuccagaaagucacacucucaga

SEQ ID NO: 145234 - RNA, 32 nt, Homo Sapiens
gaaacaaagcaagguaaagccuuuuuuuuuca

SEQ ID NO: 145235 - RNA, 32 nt, Homo Sapiens
uuuaacaucgugcuucuuauauggaaaguuuu

SEQ ID NO: 145236 - RNA, 32 nt, Homo Sapiens
ggucgggcgcgguggcucacgucuguaauccc

SEQ ID NO: 145237 - RNA, 32 nt, Homo Sapiens
aaucauugccaaauccaaugucuugaauauuu

SEQ ID NO: 145238 - RNA, 32 nt, Homo Sapiens
cgccgcggggcggaggcgacagugucuagcgg

SEQ ID NO: 145239 - RNA, 31 nt, Homo Sapiens
caggccagugaggcacccagagccugagcca

SEQ ID NO: 145240 - RNA, 32 nt, Homo Sapiens
ccgucuaccuccccaucccacccaggccccca

SEQ ID NO: 145241 - RNA, 32 nt, Homo Sapiens
cccuucgcaccaagguguacggacgccaaaca

SEQ ID NO: 145242 - RNA, 32 nt, Homo Sapiens
agcucuugaugccuuucuuuuaaauuaauuau

SEQ ID NO: 145243 - RNA, 32 nt, Homo Sapiens
ccaaggcagcgaagcuguuucuguaccuugga

SEQ ID NO: 145244 - RNA, 32 nt, Homo Sapiens
ggaaucacgugaagcugacaccacugaaggga

SEQ ID NO: 145245 - RNA, 32 nt, Homo Sapiens
ucaauaaugcucuuggaguaaguuggguauuu

SEQ ID NO: 145246 - RNA, 32 nt, Homo Sapiens
aaagguuuucccuuuucugaucugcauuucaa

SEQ ID NO: 145247 - RNA, 32 nt, Homo Sapiens
cugaugucuuuuucugccuccccucuuugggu

SEQ ID NO: 145248 - RNA, 32 nt, Homo Sapiens
agaaauuaugcaaugguuuguugagauacgga

SEQ ID NO: 145249 - RNA, 32 nt, Homo Sapiens
cgagcgguucucacccgcccucuccgcacguc

SEQ ID NO: 145250 - RNA, 32 nt, Homo Sapiens
gaaugaagguagaaaacugaaaagggaguaaa

SEQ ID NO: 145251 - RNA, 32 nt, Homo Sapiens
uuuggggguguucauggggccuggacuugcaa

SEQ ID NO: 145252 - RNA, 32 nt, Homo Sapiens
aaggacaugaauugaaagaggaauuaucagag

SEQ ID NO: 145253 - RNA, 32 nt, Homo Sapiens
uguucugaacucucuuuucaaggaucuguuau

SEQ ID NO: 145254 - RNA, 32 nt, Homo Sapiens
cagacuaaagauugcagcauuuauguuagaga

SEQ ID NO: 145255 - RNA, 32 nt, Homo Sapiens
ugggagggcuugggcuuuuagccacagcuguu

SEQ ID NO: 145256 - RNA, 32 nt, Homo Sapiens
uucaccaagccgccuccacagugccggugggc

SEQ ID NO: 145257 - RNA, 32 nt, Homo Sapiens
acugacugcccuuuuccaugugucuucauucu

SEQ ID NO: 145258 - RNA, 32 nt, Homo Sapiens
guacccugaggugcccucucacuuccuccuuc

SEQ ID NO: 145259 - RNA, 32 nt, Homo Sapiens
agggagggggcggcccggcccggcccagcucu

SEQ ID NO: 145260 - RNA, 32 nt, Homo Sapiens
ugcagggcacgcugccagaauccaggcugguc

SEQ ID NO: 145261 - RNA, 32 nt, Homo Sapiens
agguaccucuaugaggucauggagcagccccg

SEQ ID NO: 145262 - RNA, 32 nt, Homo Sapiens
augugcugggugugguuaggccucgagccggg

SEQ ID NO: 145263 - RNA, 32 nt, Homo Sapiens
uugcaaauauguucauugggaauauuggccug

SEQ ID NO: 145264 - RNA, 32 nt, Homo Sapiens
uugcaucuguggcaaaauuucagacuauuuuu

SEQ ID NO: 145265 - RNA, 32 nt, Homo Sapiens
cccauggagagccucagccauggcaaguccau

SEQ ID NO: 145266 - RNA, 32 nt, Homo Sapiens
ggcugggggaaaagguuagauuuuguauucag

SEQ ID NO: 145267 - RNA, 32 nt, Homo Sapiens
gugcgaagugaacacuguagucuuguuguuuu

SEQ ID NO: 145268 - RNA, 32 nt, Homo Sapiens
gccucugugccagccccgggggccccccaguu

SEQ ID NO: 145269 - RNA, 32 nt, Homo Sapiens
cccagguugagcuuaaacaaucucuuuucugu

SEQ ID NO: 145270 - RNA, 32 nt, Homo Sapiens
guccuuuaugguuucuauuacaugcaguaaga

SEQ ID NO: 145271 - RNA, 32 nt, Homo Sapiens
agauaguguccauggcuggagccgacccuuug

SEQ ID NO: 145272 - RNA, 32 nt, Homo Sapiens
auuuaagccuacuccugacuaacuuggcauuu

SEQ ID NO: 145273 - RNA, 32 nt, Homo Sapiens
gggagggcgucaaggccaaguaccucaugccg

SEQ ID NO: 145274 - RNA, 32 nt, Homo Sapiens
cggaggagccggcugcauggggugcugugugu

SEQ ID NO: 145275 - RNA, 32 nt, Homo Sapiens
uucaagucaucuuuugaucuuuuaaaaagcac

SEQ ID NO: 145276 - RNA, 32 nt, Homo Sapiens
uugagacuguucgggaggaaaaguuccucacc

SEQ ID NO: 145277 - RNA, 32 nt, Homo Sapiens
ggggacaggaugugugcuaaagggcacagcaa

SEQ ID NO: 145278 - RNA, 32 nt, Homo Sapiens
guguauuuucccuugcaucagauaacuauaca

SEQ ID NO: 145279 - RNA, 32 nt, Homo Sapiens
caagugggugacgugugccggaccuucuggcc

SEQ ID NO: 145280 - RNA, 32 nt, Homo Sapiens
gcuccaggggagccccgacgccggcggggagg

SEQ ID NO: 145281 - RNA, 32 nt, Homo Sapiens
cccuacccacccacccaccuuuguagaguccc

SEQ ID NO: 145282 - RNA, 32 nt, Homo Sapiens
gggagaagaaacauggugaaaacaggcugagg

SEQ ID NO: 145283 - RNA, 32 nt, Homo Sapiens
ggguagaaagacuguauuguauaaacagaccu

SEQ ID NO: 145284 - RNA, 32 nt, Homo Sapiens
cugaaggacuaccagaauaaaacagggucuac

SEQ ID NO: 145285 - RNA, 32 nt, Homo Sapiens
gugccggccggcgcggaccugccgcccccuaa

SEQ ID NO: 145286 - RNA, 32 nt, Homo Sapiens
aggcagaaggcacagcaaaagcaccguccugg

SEQ ID NO: 145287 - RNA, 32 nt, Homo Sapiens
aggcugaggaccaguaggcagcucccaagaug

SEQ ID NO: 145288 - RNA, 32 nt, Homo Sapiens
auguucugacuucaggauacaccauucauauu

SEQ ID NO: 145289 - RNA, 32 nt, Homo Sapiens
aauaaaguauauuaaaaucauaaaaaaaaaaa

SEQ ID NO: 145290 - RNA, 32 nt, Homo Sapiens
gcauuuaauuguaccauucagaauggacuguu

SEQ ID NO: 145291 - RNA, 32 nt, Homo Sapiens
uuuaaauauucuuuuuaauuuuauuuuagauu

SEQ ID NO: 145292 - RNA, 32 nt, Homo Sapiens
ccagagacccggggagcuuucccagagacccg

SEQ ID NO: 145293 - RNA, 32 nt, Homo Sapiens
uggucaucacauuggugagcuggagucaucag

SEQ ID NO: 145294 - RNA, 32 nt, Homo Sapiens
ccugggcucaggugcgguguggccaccgccac

SEQ ID NO: 145295 - RNA, 32 nt, Homo Sapiens
aaauuaguauuguuagcaucuauuuggcuuau

SEQ ID NO: 145296 - RNA, 32 nt, Homo Sapiens
uuuuuaacagagcauuuaauuauguuggaaua

SEQ ID NO: 145297 - RNA, 32 nt, Homo Sapiens
gugcaggagcaggacuuacggcagugggggcu

SEQ ID NO: 145298 - RNA, 32 nt, Homo Sapiens
uuaugagccagacaaauggaggaauaugacgg

SEQ ID NO: 145299 - RNA, 32 nt, Homo Sapiens
ggcugggagcgcgucgggcccgggcggaaagu

SEQ ID NO: 145300 - RNA, 32 nt, Homo Sapiens
uuuuuucuucuauaucucuacuccuagcucuc

SEQ ID NO: 145301 - RNA, 32 nt, Homo Sapiens
ucguuuuucccugggcuggucuucccuuguac

SEQ ID NO: 145302 - RNA, 32 nt, Homo Sapiens
cugggcccuacucagcugggguggcagagggc

SEQ ID NO: 145303 - RNA, 32 nt, Homo Sapiens
uggcugcugugcugggacagaaugggaugcca

SEQ ID NO: 145304 - RNA, 32 nt, Homo Sapiens
gaaccugggagguggagguugcggugagcuga

SEQ ID NO: 145305 - RNA, 32 nt, Homo Sapiens
gaacccgggagguggagguuguggugagcuga

SEQ ID NO: 145306 - RNA, 32 nt, Homo Sapiens
uagugagugucugcguuucguucaagucuacg

SEQ ID NO: 145307 - RNA, 32 nt, Homo Sapiens
gaccgccccaaagacuccaugggauggaccug

SEQ ID NO: 145308 - RNA, 32 nt, Homo Sapiens
ugcguugugggcaucaaaucuaccuccaaaag

SEQ ID NO: 145309 - RNA, 32 nt, Homo Sapiens
cuuugcuuaucccacaauucucuauuucacuu

SEQ ID NO: 145310 - RNA, 32 nt, Homo Sapiens
cggcggcgccgacuccguuccacucucggccc

SEQ ID NO: 145311 - RNA, 32 nt, Homo Sapiens
ugcuguaucugcaucccugucauucguuucac

SEQ ID NO: 145312 - RNA, 32 nt, Homo Sapiens
ccgggccuguccugggcccccggucugugcac

SEQ ID NO: 145313 - RNA, 32 nt, Homo Sapiens
gucucuuuaagugaaugcauuuaaaauaggga

SEQ ID NO: 145314 - RNA, 32 nt, Homo Sapiens
ggcugaucuggaacuccugaccucaggugauc

SEQ ID NO: 145315 - RNA, 32 nt, Homo Sapiens
ggccaggcuaaggggacaggggucuguuucug

SEQ ID NO: 145316 - RNA, 32 nt, Homo Sapiens
aaaaaguaaaauugaagugcuauugcagacau

SEQ ID NO: 145317 - RNA, 32 nt, Homo Sapiens
gaagaugugaacaagaauaaaaggaaaaaauu

SEQ ID NO: 145318 - RNA, 32 nt, Homo Sapiens
cuugagaugcauccaaacuguuguguauauca

SEQ ID NO: 145319 - RNA, 32 nt, Homo Sapiens
gggaguaucaccuagcacuuuuaaacagaugg

SEQ ID NO: 145320 - RNA, 32 nt, Homo Sapiens
cggggcuuguacagaagagacaguccaagggg

SEQ ID NO: 145321 - RNA, 32 nt, Homo Sapiens
uuucauucuuucaugcucuguaccucaaaugg

SEQ ID NO: 145322 - RNA, 32 nt, Homo Sapiens
cucguucccccgcuccucggggcccuccaagg

SEQ ID NO: 145323 - RNA, 32 nt, Homo Sapiens
uuacaggugugagccacugcacccaacccaac

SEQ ID NO: 145324 - RNA, 32 nt, Homo Sapiens
gcaaaugucuuaggugauuuaaauaaaugagu

SEQ ID NO: 145325 - RNA, 32 nt, Homo Sapiens
uaggaucuugucaccugccugcguccugccag

SEQ ID NO: 145326 - RNA, 32 nt, Homo Sapiens
ugcaaagcagauuuaaugucauguucagccaa

SEQ ID NO: 145327 - RNA, 32 nt, Homo Sapiens
aucugcauacaccucccugucuucaaauaaug

SEQ ID NO: 145328 - RNA, 32 nt, Homo Sapiens
acuucuggggacgccugguucguucgcccacc

SEQ ID NO: 145329 - RNA, 32 nt, Homo Sapiens
gguuauguucacgaccucgagggaaauugcau

SEQ ID NO: 145330 - RNA, 32 nt, Homo Sapiens
uccaccuccgccuuugcccuggcggcgcgacc

SEQ ID NO: 145331 - RNA, 32 nt, Homo Sapiens
auauaaaacaauuguuuacguguacuuuuaac

SEQ ID NO: 145332 - RNA, 32 nt, Homo Sapiens
uuuaguaacgguuucccucuccccuugccccg

SEQ ID NO: 145333 - RNA, 32 nt, Homo Sapiens
ggcucggacgugggcucuguguccugaucaaa

SEQ ID NO: 145334 - RNA, 32 nt, Homo Sapiens
augugggggccgaugggcaggggaccucggug

SEQ ID NO: 145335 - RNA, 32 nt, Homo Sapiens
acggaccuugguuuccuguucaccucuuucca

SEQ ID NO: 145336 - RNA, 32 nt, Homo Sapiens
ggaagguugagagagaggugcuggggucugcg

SEQ ID NO: 145337 - RNA, 32 nt, Homo Sapiens
ggacaggagaucuaggguacuccagaaccagg

SEQ ID NO: 145338 - RNA, 32 nt, Homo Sapiens
cacagaggggugccggccuggccccuguuaug

SEQ ID NO: 145339 - RNA, 32 nt, Homo Sapiens
gugccaaaaauauuuaaguaaaaacuugagcu

SEQ ID NO: 145340 - RNA, 32 nt, Homo Sapiens
ggaagcggaagcugcagcuggggugggggcag

SEQ ID NO: 145341 - RNA, 32 nt, Homo Sapiens
acucauagaagcugggguauguguguaagggu

SEQ ID NO: 145342 - RNA, 32 nt, Homo Sapiens
caaccggcagcuggcgggccugguggagagcg

SEQ ID NO: 145343 - RNA, 32 nt, Homo Sapiens
uuaacuauuuuggagacugcgagcugaucauu

SEQ ID NO: 145344 - RNA, 32 nt, Homo Sapiens
uaaauaaaaaacagucacaacuuuuggaaauc

SEQ ID NO: 145345 - RNA, 32 nt, Homo Sapiens
aagucagauuccagguagaggauguauagacu

SEQ ID NO: 145346 - RNA, 29 nt, Homo Sapiens
auauuuccugaguaaagucauucugaguu

SEQ ID NO: 145347 - RNA, 32 nt, Homo Sapiens
ugugcucuggggauuucugggauauauggagg

SEQ ID NO: 145348 - RNA, 32 nt, Homo Sapiens
aggaaaggcagagugggccggauggggcugag

SEQ ID NO: 145349 - RNA, 32 nt, Homo Sapiens
uuugcaccccgcugcgggcccacgugguuggg

SEQ ID NO: 145350 - RNA, 32 nt, Homo Sapiens
gcaccuucaguccgggaaacccgccccagccg

SEQ ID NO: 145351 - RNA, 32 nt, Homo Sapiens
gugagcagacugcaaaucugccugauaggacc

SEQ ID NO: 145352 - RNA, 32 nt, Homo Sapiens
aaaacauuguuaaaaugaagagugguggaaau

SEQ ID NO: 145353 - RNA, 32 nt, Homo Sapiens
ugagaagucugcuuguaguauuagaauguuau

SEQ ID NO: 145354 - RNA, 32 nt, Homo Sapiens
uuuugcccucuggaaugaccgcagcccacaga

SEQ ID NO: 145355 - RNA, 32 nt, Homo Sapiens
uugcagggucauuaucagaacaugaggauaac

SEQ ID NO: 145356 - RNA, 32 nt, Homo Sapiens
gcuaucuaauuccacacucuguauugaaaaug

SEQ ID NO: 145357 - RNA, 32 nt, Homo Sapiens
cccggccaacuuuucuuuagaaaaaugaguaa

SEQ ID NO: 145358 - RNA, 32 nt, Homo Sapiens
uuguaagugcccuuacuaagggcacaugucuu

SEQ ID NO: 145359 - RNA, 32 nt, Homo Sapiens
auuuuguagaaucuuacagcaucuuugauaaa

SEQ ID NO: 145360 - RNA, 32 nt, Homo Sapiens
uacaugggaauaugcaguacuccagugaagac

SEQ ID NO: 145361 - RNA, 32 nt, Homo Sapiens
cuuggaaggagcagguggggcuggaggcccug

SEQ ID NO: 145362 - RNA, 32 nt, Homo Sapiens
gcgugugcuagaaggggugggcugggacacaa

SEQ ID NO: 145363 - RNA, 32 nt, Homo Sapiens
agccaggaggaacacauguggugucuguaugg

SEQ ID NO: 145364 - RNA, 32 nt, Homo Sapiens
uuugaauauaaguuugucugacccucaaaacc

SEQ ID NO: 145365 - RNA, 32 nt, Homo Sapiens
gcgaaccuccucuuuggauacaauaacaggac

SEQ ID NO: 145366 - RNA, 31 nt, Homo Sapiens
aaaaacauggaggagcgggagcggggggcga

SEQ ID NO: 145367 - RNA, 32 nt, Homo Sapiens
auuuucagucacuggaggaacagaagaaaagu

SEQ ID NO: 145368 - RNA, 32 nt, Homo Sapiens
uccgcaaggaggaggacuccacgguggggaug

SEQ ID NO: 145369 - RNA, 32 nt, Homo Sapiens
ucucggcccacacaauaugaccucggggagga

SEQ ID NO: 145370 - RNA, 32 nt, Homo Sapiens
ccugguacuugcugucauagcucuauauaugu

SEQ ID NO: 145371 - RNA, 32 nt, Homo Sapiens
ccugaguguccauggccucugugcuccggaug

SEQ ID NO: 145372 - RNA, 32 nt, Homo Sapiens
ggcugccucccucuccugaucucuucaagcca

SEQ ID NO: 145373 - RNA, 32 nt, Homo Sapiens
ucugcucccaccuccuucugugucccagaccc

SEQ ID NO: 145374 - RNA, 32 nt, Homo Sapiens
uuuggguaaauuuuaaauggugugaaaaucga

SEQ ID NO: 145375 - RNA, 32 nt, Homo Sapiens
auaaauuuguguucaauauauaggagaaaaaa

SEQ ID NO: 145376 - RNA, 32 nt, Homo Sapiens
gcuuucaaacaaaacaaaaaccucuugcuuuu

SEQ ID NO: 145377 - RNA, 32 nt, Homo Sapiens
gguaacgggcugccagaagagagagaggcaga

SEQ ID NO: 145378 - RNA, 32 nt, Homo Sapiens
uuuauuuaggguggaguucaggaucagaaugg

SEQ ID NO: 145379 - RNA, 32 nt, Homo Sapiens
gucuucaauuuaauaguuguuaaguuuuugcc

SEQ ID NO: 145380 - RNA, 32 nt, Homo Sapiens
cuacuaggaaaugugcagaauaaacuauuuuu

SEQ ID NO: 145381 - RNA, 32 nt, Homo Sapiens
aguccacuuuugucacaauucauuuuuauuaa

SEQ ID NO: 145382 - RNA, 32 nt, Homo Sapiens
acauuucuguacuagugagaagagggaauaug

SEQ ID NO: 145383 - RNA, 32 nt, Homo Sapiens
ugcuuugaacaaaaaccagccuagugaauuga

SEQ ID NO: 145384 - RNA, 32 nt, Homo Sapiens
aaacagcaaccucgggauuccauuuaaauucu

SEQ ID NO: 145385 - RNA, 32 nt, Homo Sapiens
ggaccauugaugcacuuggugggugggacccu

SEQ ID NO: 145386 - RNA, 32 nt, Homo Sapiens
acauuucugaagauauuuguaaauuuuuuaaa

SEQ ID NO: 145387 - RNA, 32 nt, Homo Sapiens
cauugcuagugagcguaugacacacacagcca

SEQ ID NO: 145388 - RNA, 32 nt, Homo Sapiens
agccagcgcccucuccccucucccgagggcug

SEQ ID NO: 145389 - RNA, 32 nt, Homo Sapiens
guuaaucgcagaugaacuagaagucacagguu

SEQ ID NO: 145390 - RNA, 28 nt, Homo Sapiens
cuucuggugccaggaccaaggaaaugcu

SEQ ID NO: 145391 - RNA, 32 nt, Homo Sapiens
accggugggaggccgggccggcugggucuggg

SEQ ID NO: 145392 - RNA, 32 nt, Homo Sapiens
uaagacuuauuguaggaaguaauuuuaaaucu

SEQ ID NO: 145393 - RNA, 32 nt, Homo Sapiens
ggaaguguauuuuacucugaucaaauaaauaa

SEQ ID NO: 145394 - RNA, 32 nt, Homo Sapiens
cauggugagcugaguucauggcuuuuuuuugu

SEQ ID NO: 145395 - RNA, 32 nt, Homo Sapiens
guugaguuuacuacuaaauaaucuaccauucu

SEQ ID NO: 145396 - RNA, 32 nt, Homo Sapiens
aucugaacagagcuauggguuucuaccauaag

SEQ ID NO: 145397 - RNA, 32 nt, Homo Sapiens
cuaauaauacacuaucuugauuguacucucca

SEQ ID NO: 145398 - RNA, 32 nt, Homo Sapiens
ucccugcccucccacccagguuugguuccucc

SEQ ID NO: 145399 - RNA, 30 nt, Homo Sapiens
cggcuccgcgcgcaguacggugcagcugaa

SEQ ID NO: 145400 - RNA, 32 nt, Homo Sapiens
uggcaaggccccaggccagccaggcccacccc

SEQ ID NO: 145401 - RNA, 32 nt, Homo Sapiens
gauugcuugagcccaugagauugaggcugcag

SEQ ID NO: 145402 - RNA, 32 nt, Homo Sapiens
uuuuaaacaaacaaaaucaccgaccuugcaaa

SEQ ID NO: 145403 - RNA, 31 nt, Homo Sapiens
cauguggauuugacuuacgggaguaaagcgu

SEQ ID NO: 145404 - RNA, 32 nt, Homo Sapiens
cggaggcccgggcaggccggcugagcuaacuc

SEQ ID NO: 145405 - RNA, 32 nt, Homo Sapiens
ugccacacaacaccuaacuuaccuuuuccuga

SEQ ID NO: 145406 - RNA, 32 nt, Homo Sapiens
guuuuagccucuucagaaaugagguuucuuca

SEQ ID NO: 145407 - RNA, 32 nt, Homo Sapiens
uugaaaaugaccugguaucuugccagagggcu

SEQ ID NO: 145408 - RNA, 32 nt, Homo Sapiens
uugucccuggccugccuggagccccggagcuc

SEQ ID NO: 145409 - RNA, 32 nt, Homo Sapiens
cucuaucuguguauauuuuauaagauguccuu

SEQ ID NO: 145410 - RNA, 32 nt, Homo Sapiens
uuuuccucauuucucaugggcaacagaggcca

SEQ ID NO: 145411 - RNA, 32 nt, Homo Sapiens
gaccgcggagggcauucgcugugugacucagg

SEQ ID NO: 145412 - RNA, 32 nt, Homo Sapiens
aauuauaaaauguauaugucuaugaagcuucg

SEQ ID NO: 145413 - RNA, 32 nt, Homo Sapiens
agcuugggagacgucccggggccaggcuacgg

SEQ ID NO: 145414 - RNA, 32 nt, Homo Sapiens
cccuggugaucauguucuggcuccugauugcc

SEQ ID NO: 145415 - RNA, 32 nt, Homo Sapiens
cuccucuuuaaggcuaaauaauaauccaucau

SEQ ID NO: 145416 - RNA, 32 nt, Homo Sapiens
aauauuauuauuauuguuuuugagacaagguc

SEQ ID NO: 145417 - RNA, 32 nt, Homo Sapiens
gaacgugggaaauaugaaccuuugaaaguuaa

SEQ ID NO: 145418 - RNA, 32 nt, Homo Sapiens
aggagaggcgccugccaccuccuccucaucuc

SEQ ID NO: 145419 - RNA, 32 nt, Homo Sapiens
gaacccuggacuuuggccccagucccuuuaag

SEQ ID NO: 145420 - RNA, 32 nt, Homo Sapiens
caggacagcuggaaauagcgugccgcaggcuc

SEQ ID NO: 145421 - RNA, 29 nt, Homo Sapiens
uuguugcagagaaauuauuuucuacucag

SEQ ID NO: 145422 - RNA, 32 nt, Homo Sapiens
cgggacuuuguacagcagugucuuauccagca

SEQ ID NO: 145423 - RNA, 32 nt, Homo Sapiens
ggguaaaaaguacaacucugacucugguuccu

SEQ ID NO: 145424 - RNA, 32 nt, Homo Sapiens
auuuugugguaguugaaauuguaucacuucua

SEQ ID NO: 145425 - RNA, 32 nt, Homo Sapiens
uuguggagagcuucagccuguuuaugguguua

SEQ ID NO: 145426 - RNA, 30 nt, Homo Sapiens
ggcccauguccuccgcgccgcgcucgccca

SEQ ID NO: 145427 - RNA, 32 nt, Homo Sapiens
caggaggaagcagucccuccucaccagcucuc

SEQ ID NO: 145428 - RNA, 32 nt, Homo Sapiens
caccccguuuugcugugugcucacccccagga

SEQ ID NO: 145429 - RNA, 32 nt, Homo Sapiens
guguuuguuuuucaagaaaugauucaaauugc

SEQ ID NO: 145430 - RNA, 32 nt, Homo Sapiens
ccauccacuggagaagagcagaggaacugggu

SEQ ID NO: 145431 - RNA, 32 nt, Homo Sapiens
acagccugccccagcgucccugcccccagcug

SEQ ID NO: 145432 - RNA, 31 nt, Homo Sapiens
gcggccccgcgcagccauggacuggcucaug

SEQ ID NO: 145433 - RNA, 32 nt, Homo Sapiens
cgccagccugucccgcgccauggccccgcgcg

SEQ ID NO: 145434 - RNA, 32 nt, Homo Sapiens
cuccugucugggggauaacagugcucucuuac

SEQ ID NO: 145435 - RNA, 32 nt, Homo Sapiens
aaggaggcugucccagccuggaccuggcuucc

SEQ ID NO: 145436 - RNA, 32 nt, Homo Sapiens
auuggcaugccacagggauucuccuccuucau

SEQ ID NO: 145437 - RNA, 32 nt, Homo Sapiens
gucuguccguucggcccgguccggcccgaagc

SEQ ID NO: 145438 - RNA, 32 nt, Homo Sapiens
aauauuaugauggccgcagauacgauggcuac

SEQ ID NO: 145439 - RNA, 31 nt, Homo Sapiens
gguggacuucggagaaauucucauacugaag

SEQ ID NO: 145440 - RNA, 32 nt, Homo Sapiens
aaggcugugaggaugccaugggguaugaaugu

SEQ ID NO: 145441 - RNA, 32 nt, Homo Sapiens
augugcaggcugggcuaggagccgccgccucc

SEQ ID NO: 145442 - RNA, 32 nt, Homo Sapiens
gauaugauuggaaaaucaagaguguagaagaa

SEQ ID NO: 145443 - RNA, 32 nt, Homo Sapiens
aagaaagcaccaagcuuagucuccggggcaag

SEQ ID NO: 145444 - RNA, 32 nt, Homo Sapiens
gcugagccuccugcccucccccaggaacaugc

SEQ ID NO: 145445 - RNA, 32 nt, Homo Sapiens
agccuccgugcagccguggcgugcaggacucg

SEQ ID NO: 145446 - RNA, 28 nt, Homo Sapiens
gcuccauagaaguggcauuugaagggug

SEQ ID NO: 145447 - RNA, 32 nt, Homo Sapiens
acuggguggugucagcugggacaguucaggua

SEQ ID NO: 145448 - RNA, 32 nt, Homo Sapiens
gccuaucagggugcuggcuuugugcauaauca

SEQ ID NO: 145449 - RNA, 32 nt, Homo Sapiens
cuuucauguauuuccacaagugccaaacauuu

SEQ ID NO: 145450 - RNA, 32 nt, Homo Sapiens
uuggcaguuaguucuauggucaucucuuuugc

SEQ ID NO: 145451 - RNA, 32 nt, Homo Sapiens
ucaguguaugccugggguggugggcugggcac

SEQ ID NO: 145452 - RNA, 32 nt, Homo Sapiens
uguggcaugcugcaaggaucagagccagacac

SEQ ID NO: 145453 - RNA, 32 nt, Homo Sapiens
gcugcucaguguucccaggggugagaggccuc

SEQ ID NO: 145454 - RNA, 32 nt, Homo Sapiens
uauguuuauuuuuauauucagucuucccaaua

SEQ ID NO: 145455 - RNA, 32 nt, Homo Sapiens
ugcuuuacuguaauuuuagggucaauauacug

SEQ ID NO: 145456 - RNA, 32 nt, Homo Sapiens
cuguauuguaaauucucaguguggcacuuacc

SEQ ID NO: 145457 - RNA, 32 nt, Homo Sapiens
uugacuaauguuuuuucuauaauuguauaugg

SEQ ID NO: 145458 - RNA, 32 nt, Homo Sapiens
uuuuuaauucguuuuucuuaugcugguuuguu

SEQ ID NO: 145459 - RNA, 32 nt, Homo Sapiens
uauuuuuauaucuauuuuugacauuugggcgg

SEQ ID NO: 145460 - RNA, 32 nt, Homo Sapiens
gcuugcucaggccccaggguggcugccucggc

SEQ ID NO: 145461 - RNA, 32 nt, Homo Sapiens
ccuaggaagagucccaucugagcaggaaggua

SEQ ID NO: 145462 - RNA, 32 nt, Homo Sapiens
ugcauauauuguaaaugugucugguauuuaca

SEQ ID NO: 145463 - RNA, 32 nt, Homo Sapiens
aaggaccccuccccgacccccgcagccacugg

SEQ ID NO: 145464 - RNA, 28 nt, Homo Sapiens
acgcaggggcggcuucuaggugcugccg

SEQ ID NO: 145465 - RNA, 32 nt, Homo Sapiens
ucgaaucucacguauuucauguuacuuucaag

SEQ ID NO: 145466 - RNA, 28 nt, Homo Sapiens
cagccaggcacaggaccgagccuggcuc

SEQ ID NO: 145467 - RNA, 32 nt, Homo Sapiens
uuuuaauguuugucgauccaaugacuuguggu

SEQ ID NO: 145468 - RNA, 32 nt, Homo Sapiens
acagcaugugcagcuggugacucugcgugggc

SEQ ID NO: 145469 - RNA, 32 nt, Homo Sapiens
uuugcauaauuucagcuucuauauauuguaug

SEQ ID NO: 145470 - RNA, 32 nt, Homo Sapiens
cccuucugcggccgggacccaggccuuucaca

SEQ ID NO: 145471 - RNA, 30 nt, Homo Sapiens
cgccaccaugcucagcuaauuuuuguauuu

SEQ ID NO: 145472 - RNA, 32 nt, Homo Sapiens
agaagcuuuacuuuuccacuuuuuuuuaaaaa

SEQ ID NO: 145473 - RNA, 32 nt, Homo Sapiens
agaggauguaagucaguuugauuccaaguuua

SEQ ID NO: 145474 - RNA, 32 nt, Homo Sapiens
auucagacuauuuguaacuuauuguuauaggg

SEQ ID NO: 145475 - RNA, 32 nt, Homo Sapiens
uccaggggcgccagccggcggauuacauaacg

SEQ ID NO: 145476 - RNA, 32 nt, Homo Sapiens
ugcucccagucagauauagugaaacagcuuac

SEQ ID NO: 145477 - RNA, 32 nt, Homo Sapiens
aggaaagaaucaggcagugcuuccucauucuc

SEQ ID NO: 145478 - RNA, 32 nt, Homo Sapiens
caaaaugcugguuuuguguuuuauccaacuuu

SEQ ID NO: 145479 - RNA, 32 nt, Homo Sapiens
uuaagccauuuucucaucugauauauugagcu

SEQ ID NO: 145480 - RNA, 30 nt, Homo Sapiens
guucgacuggacugugcugagugcgggcac

SEQ ID NO: 145481 - RNA, 32 nt, Homo Sapiens
uuuuauuuaacccuguauauugugacuuacuu

SEQ ID NO: 145482 - RNA, 32 nt, Homo Sapiens
caggcuggucucaaccucuggaccucagguga

SEQ ID NO: 145483 - RNA, 32 nt, Homo Sapiens
acccggcuaggcggcggcgggggcggcgaugu

SEQ ID NO: 145484 - RNA, 32 nt, Homo Sapiens
cuguuugggcagccuugccuccagagagcaga

SEQ ID NO: 145485 - RNA, 32 nt, Homo Sapiens
aggcaucccccggggcagcaucagagugccuu

SEQ ID NO: 145486 - RNA, 32 nt, Homo Sapiens
cuaauuacacaacgcaaacuacguacucagga

SEQ ID NO: 145487 - RNA, 32 nt, Homo Sapiens
auagucuuaaguagaagaaggcaguuagagaa

SEQ ID NO: 145488 - RNA, 32 nt, Homo Sapiens
gggagucugagaagucaccaccaugaaguugu

SEQ ID NO: 145489 - RNA, 32 nt, Homo Sapiens
ggguggggaccaugugggacucuuggcacuga

SEQ ID NO: 145490 - RNA, 32 nt, Homo Sapiens
uggcuguaaaauugggucuuccgggagcuuuu

SEQ ID NO: 145491 - RNA, 32 nt, Homo Sapiens
uuuaaauaaaucaauuuguacuguauauuugu

SEQ ID NO: 145492 - RNA, 32 nt, Homo Sapiens
auaacauuccuaggcugaaauuuccacaaaga

SEQ ID NO: 145493 - RNA, 32 nt, Homo Sapiens
gagaauuaaugaugagguuacaugcugcuugc

SEQ ID NO: 145494 - RNA, 29 nt, Homo Sapiens
cuuagagaauaguuauauuuucuauuaca

SEQ ID NO: 145495 - RNA, 32 nt, Homo Sapiens
ggccaggcacggugacucacgccuguaauccc

SEQ ID NO: 145496 - RNA, 32 nt, Homo Sapiens
ccaugccagaacuauccuucugauggggugcu

SEQ ID NO: 145497 - RNA, 32 nt, Homo Sapiens
acgugagccggccucagcuggugcugccgugg

SEQ ID NO: 145498 - RNA, 32 nt, Homo Sapiens
guccacagggcuguuucaaggcccuguucuca

SEQ ID NO: 145499 - RNA, 32 nt, Homo Sapiens
acauuuuuucuuuaaaacuuggauagauucca

SEQ ID NO: 145500 - RNA, 32 nt, Homo Sapiens
uccaggaagccuucccaguccugggcaucugu

SEQ ID NO: 145501 - RNA, 32 nt, Homo Sapiens
gcgagacgucaucggggcgccggacgccgggg

SEQ ID NO: 145502 - RNA, 32 nt, Homo Sapiens
uuuaaucuauuuuuauuagaaguuuuucugcu

SEQ ID NO: 145503 - RNA, 32 nt, Homo Sapiens
ugcucccaccuccacacccccauguacuucuu

SEQ ID NO: 145504 - RNA, 32 nt, Homo Sapiens
agccugcgucugcaccugcaccucugaccguu

SEQ ID NO: 145505 - RNA, 32 nt, Homo Sapiens
uuaauuacugugguaauuaaauguguucagua

SEQ ID NO: 145506 - RNA, 32 nt, Homo Sapiens
aagcacaagaucuaaggaaaucuuauucacau

SEQ ID NO: 145507 - RNA, 32 nt, Homo Sapiens
agccuucauagcguauuuuccuugaagcauuu

SEQ ID NO: 145508 - RNA, 32 nt, Homo Sapiens
aaaauaaacaaaugcauuauguaaggucaguc

SEQ ID NO: 145509 - RNA, 32 nt, Homo Sapiens
acacugacgugaaccaguaucuuuuaccacca

SEQ ID NO: 145510 - RNA, 32 nt, Homo Sapiens
cugacaucaaaacagucuuggcagggcacggu

SEQ ID NO: 145511 - RNA, 32 nt, Homo Sapiens
auccucucugcucaacucucuaccacauguca

SEQ ID NO: 145512 - RNA, 32 nt, Homo Sapiens
cagcagcagcagcagcagcagcaaccuccccc

SEQ ID NO: 145513 - RNA, 32 nt, Homo Sapiens
aguucaaauccucaccauccacagcaagauga

SEQ ID NO: 145514 - RNA, 32 nt, Homo Sapiens
gauacaguuucacucugucacccaggcuggag

SEQ ID NO: 145515 - RNA, 32 nt, Homo Sapiens
aggcccugcccccaccccuuccugucucacuc

SEQ ID NO: 145516 - RNA, 32 nt, Homo Sapiens
ugugugggagggagcgggggcuggcuagcggg

SEQ ID NO: 145517 - RNA, 32 nt, Homo Sapiens
gcugaagauuuaauuugugauaccuuuguaug

SEQ ID NO: 145518 - RNA, 32 nt, Homo Sapiens
aacgguguuaaaaguuaauagaacugucucuc

SEQ ID NO: 145519 - RNA, 32 nt, Homo Sapiens
uggcucuggguagaaccccggccggacaugcg

SEQ ID NO: 145520 - RNA, 32 nt, Homo Sapiens
uugaucacagccaugaagaucccggacucaua

SEQ ID NO: 145521 - RNA, 32 nt, Homo Sapiens
aacucuguaaugcagccaauaauacaaacccg

SEQ ID NO: 145522 - RNA, 32 nt, Homo Sapiens
auugaggugucugaugagggugugcuuuggug

SEQ ID NO: 145523 - RNA, 32 nt, Homo Sapiens
ccgcugccagagagggccagggcagggcaggg

SEQ ID NO: 145524 - RNA, 32 nt, Homo Sapiens
agccccaaauuuaugacauuacacaauauuaa

SEQ ID NO: 145525 - RNA, 32 nt, Homo Sapiens
uguggggauuaccauuguuccuggaguacucc

SEQ ID NO: 145526 - RNA, 32 nt, Homo Sapiens
ucuucccucccucuugugggccagccuguccu

SEQ ID NO: 145527 - RNA, 32 nt, Homo Sapiens
gcucacagucuggcugcacgggcucaccgcua

SEQ ID NO: 145528 - RNA, 32 nt, Homo Sapiens
ucuacuaaaaauacaaaaauuaguucggcaug

SEQ ID NO: 145529 - RNA, 32 nt, Homo Sapiens
aaggcuugagauuggacgagaucaucuaugga

SEQ ID NO: 145530 - RNA, 32 nt, Homo Sapiens
auagccucuggaagccagacaaaguaucacuu

SEQ ID NO: 145531 - RNA, 32 nt, Homo Sapiens
gguggaaggcgcggaccugacagcauuccaau

SEQ ID NO: 145532 - RNA, 32 nt, Homo Sapiens
auuauagguugcaaauuauccaaauauauauc

SEQ ID NO: 145533 - RNA, 32 nt, Homo Sapiens
agaaugucaauaaauuugcuuuuugagauguu

SEQ ID NO: 145534 - RNA, 30 nt, Homo Sapiens
gccccugucugugcucaggacucuugcaga

SEQ ID NO: 145535 - RNA, 32 nt, Homo Sapiens
gacacagcggaggucccuccucacccacuccu

SEQ ID NO: 145536 - RNA, 32 nt, Homo Sapiens
guuugcgcaggcgugcgccccuggcgucggga

SEQ ID NO: 145537 - RNA, 32 nt, Homo Sapiens
ggaauaaaaaauacuguugggcucaaacuaaa

SEQ ID NO: 145538 - RNA, 32 nt, Homo Sapiens
cugaggggggugcccgggguccuccuucccua

SEQ ID NO: 145539 - RNA, 32 nt, Homo Sapiens
agcgucuuguggcugcggccugccccucagcc

SEQ ID NO: 145540 - RNA, 32 nt, Homo Sapiens
acugcagagaucggggcggggguuggggggca

SEQ ID NO: 145541 - RNA, 32 nt, Homo Sapiens
acagcuucuacugggagauuaauuauagaagc

SEQ ID NO: 145542 - RNA, 32 nt, Homo Sapiens
ggacacacugguuuuaaucuguagaacuguuu

SEQ ID NO: 145543 - RNA, 32 nt, Homo Sapiens
ggcucguuagacagugcuuuaauuuaauauug

SEQ ID NO: 145544 - RNA, 32 nt, Homo Sapiens
ugcugggcaugguggcucacgccugugguccc

SEQ ID NO: 145545 - RNA, 32 nt, Homo Sapiens
cuccaagacaccuugaaugaaagcccugaaaa

SEQ ID NO: 145546 - RNA, 32 nt, Homo Sapiens
agggaaccuaggggggaccccugggccugggg

SEQ ID NO: 145547 - RNA, 32 nt, Homo Sapiens
gccccugauaucuggagggggcggguuggccu

SEQ ID NO: 145548 - RNA, 32 nt, Homo Sapiens
ggcuguaucuguguuuucccucugggagucuc

SEQ ID NO: 145549 - RNA, 32 nt, Homo Sapiens
cucacucuggauacaaacaauaugagugugca

SEQ ID NO: 145550 - RNA, 32 nt, Homo Sapiens
auuucaaaacaaaaacaagagggcauagaugc

SEQ ID NO: 145551 - RNA, 32 nt, Homo Sapiens
acagagggaaccugagagccagagacuucuug

SEQ ID NO: 145552 - RNA, 32 nt, Homo Sapiens
cagauguuggguggagcaacugcuacagaggu

SEQ ID NO: 145553 - RNA, 32 nt, Homo Sapiens
acuuagagggugggcagaagcggggguuccca

SEQ ID NO: 145554 - RNA, 32 nt, Homo Sapiens
cauugcucuucaaauacacagauauuggggca

SEQ ID NO: 145555 - RNA, 32 nt, Homo Sapiens
cucuucuagacagaaaaucaagggaagcucaa

SEQ ID NO: 145556 - RNA, 32 nt, Homo Sapiens
uggaggcagaauucuguaaauccucgccaagu

SEQ ID NO: 145557 - RNA, 31 nt, Homo Sapiens
ggagcgcauccacggcugccccgugugcagg

SEQ ID NO: 145558 - RNA, 32 nt, Homo Sapiens
uuucugaauauaaagugugaaaacacagaaca

SEQ ID NO: 145559 - RNA, 32 nt, Homo Sapiens
acaaaacaaaacaaacagaauagaggggagau

SEQ ID NO: 145560 - RNA, 32 nt, Homo Sapiens
gcuguggaggcugguuuugaccaaaagugagu

SEQ ID NO: 145561 - RNA, 32 nt, Homo Sapiens
gcagagcagacugaugagucguuggaacaaaa

SEQ ID NO: 145562 - RNA, 32 nt, Homo Sapiens
uugagucccuggcccuuccuccaggugugugg

SEQ ID NO: 145563 - RNA, 32 nt, Homo Sapiens
gcaaaugcggacccucccugccugcagccugc

SEQ ID NO: 145564 - RNA, 32 nt, Homo Sapiens
ugggauuaccuguuuaaaucugucuuggggga

SEQ ID NO: 145565 - RNA, 32 nt, Homo Sapiens
auaagcacuguccaucucuccccauucccaaa

SEQ ID NO: 145566 - RNA, 32 nt, Homo Sapiens
gcaagcugagggggcgucgccgccgccggccc

SEQ ID NO: 145567 - RNA, 32 nt, Homo Sapiens
gucacuugugucacguuuccugaaacagcacg

SEQ ID NO: 145568 - RNA, 32 nt, Homo Sapiens
caggaagugauuggucuaagcuaacacagcaa

SEQ ID NO: 145569 - RNA, 32 nt, Homo Sapiens
uauuggccauuuucuuuuucuuuuucuuuauu

SEQ ID NO: 145570 - RNA, 32 nt, Homo Sapiens
cuuccgacgcgugaccccggcgcgcuagcguc

SEQ ID NO: 145571 - RNA, 32 nt, Homo Sapiens
aaucggcccacccauuaucccuauguaucucg

SEQ ID NO: 145572 - RNA, 32 nt, Homo Sapiens
acagauucuuuuuuuuuuuuuaauugaaacag

SEQ ID NO: 145573 - RNA, 32 nt, Homo Sapiens
uagagcuaugaacuuggaauuuuggugucaga

SEQ ID NO: 145574 - RNA, 32 nt, Homo Sapiens
ugccgcgccucgggacaauuauaaaaaugugg

SEQ ID NO: 145575 - RNA, 30 nt, Homo Sapiens
aaaugcaccacaugaugagaugcuccuggg

SEQ ID NO: 145576 - RNA, 32 nt, Homo Sapiens
gaguguggauauuuuuaaaaugcaauaaacau

SEQ ID NO: 145577 - RNA, 32 nt, Homo Sapiens
aaacagaacaaaagcaaaggaaaaugcuuuag

SEQ ID NO: 145578 - RNA, 32 nt, Homo Sapiens
ugggagaccccauaggccgggacucuuggguc

SEQ ID NO: 145579 - RNA, 32 nt, Homo Sapiens
ccaacucugaagagauagaacacaaacauggc

SEQ ID NO: 145580 - RNA, 32 nt, Homo Sapiens
cuaugaccaaaaugaguuguaaauucucuggu

SEQ ID NO: 145581 - RNA, 32 nt, Homo Sapiens
cugccccccagcugagggaccagcucuacuuc

SEQ ID NO: 145582 - RNA, 32 nt, Homo Sapiens
aagucgagguuagagggaacugggaggcacuu

SEQ ID NO: 145583 - RNA, 32 nt, Homo Sapiens
uuaacaaauacuuuaaaaauuuggccaaaauu

SEQ ID NO: 145584 - RNA, 32 nt, Homo Sapiens
cuacuuagagauauucuagaaaaugucacuug

SEQ ID NO: 145585 - RNA, 32 nt, Homo Sapiens
uucccagagcaaaaguuuuuaauuguaacgac

SEQ ID NO: 145586 - RNA, 32 nt, Homo Sapiens
ugcacuucuggccuugaauaucgagucacgag

SEQ ID NO: 145587 - RNA, 32 nt, Homo Sapiens
ggcucguucauucauucauucacuauaaaagg

SEQ ID NO: 145588 - RNA, 32 nt, Homo Sapiens
cauggagcccucaggaauccauggaggacauc

SEQ ID NO: 145589 - RNA, 32 nt, Homo Sapiens
cuccucuuccuccccacccccacccaagaugg

SEQ ID NO: 145590 - RNA, 32 nt, Homo Sapiens
aaaaagaaaaagacaaacacaaauaaaauauc

SEQ ID NO: 145591 - RNA, 32 nt, Homo Sapiens
uuccaguucaggccagaaugggccucgcuccc

SEQ ID NO: 145592 - RNA, 32 nt, Homo Sapiens
ccccuaaaauauucuauguuuguuaugagauu

SEQ ID NO: 145593 - RNA, 32 nt, Homo Sapiens
aaaaguggagugcuguaucuuuugcauugcuu

SEQ ID NO: 145594 - RNA, 32 nt, Homo Sapiens
acuucagcugucugucccuugaaugcuuccac

SEQ ID NO: 145595 - RNA, 32 nt, Homo Sapiens
cauccauacuuauguugucuggaagagccaug

SEQ ID NO: 145596 - RNA, 32 nt, Homo Sapiens
augucggaaaaauuaauauauguuaaauauuu

SEQ ID NO: 145597 - RNA, 32 nt, Homo Sapiens
uagcacagaacugacuacuuugaaaaacauuc

SEQ ID NO: 145598 - RNA, 32 nt, Homo Sapiens
ugaacagauauguuuuuauuuaaaagaguaga

SEQ ID NO: 145599 - RNA, 32 nt, Homo Sapiens
caaauuaaugaaaugaagauauuucaaacaga

SEQ ID NO: 145600 - RNA, 32 nt, Homo Sapiens
caggcagcgggaggaggggcggcgcgaaccau

SEQ ID NO: 145601 - RNA, 32 nt, Homo Sapiens
gccaccgcccuccagccugggcgacagagcaa

SEQ ID NO: 145602 - RNA, 32 nt, Homo Sapiens
aucccauccaugauuuuccccaucuccaggca

SEQ ID NO: 145603 - RNA, 32 nt, Homo Sapiens
ggcugcccuguuaacagauggugcuggaccuu

SEQ ID NO: 145604 - RNA, 32 nt, Homo Sapiens
aacaagaaggcuuaccaccaaaaaagagguac

SEQ ID NO: 145605 - RNA, 32 nt, Homo Sapiens
cucuuguaaguguuaaaugugauaaaaguaca

SEQ ID NO: 145606 - RNA, 32 nt, Homo Sapiens
uaucuaccaaaaguacuugaccucaaguaacc

SEQ ID NO: 145607 - RNA, 30 nt, Homo Sapiens
uacaauuuacuugccauguuuuauaauuug

SEQ ID NO: 145608 - RNA, 32 nt, Homo Sapiens
aacccuuggggacgccucuccuccggcugccc

SEQ ID NO: 145609 - RNA, 32 nt, Homo Sapiens
acgccuccaguccccgcgggacgccacgccug

SEQ ID NO: 145610 - RNA, 32 nt, Homo Sapiens
aaugcugagauuacaggugugagccaccaugc

SEQ ID NO: 145611 - RNA, 32 nt, Homo Sapiens
uauuuaaaaaguauauaacauacuauauaugu

SEQ ID NO: 145612 - RNA, 32 nt, Homo Sapiens
gguuuugccauguuggccaggcuggucucgaa

SEQ ID NO: 145613 - RNA, 32 nt, Homo Sapiens
ggcagcuucucacaugguaaacacggaauuac

SEQ ID NO: 145614 - RNA, 32 nt, Homo Sapiens
augccuuuuuuggagacuauauuaugcugaag

SEQ ID NO: 145615 - RNA, 32 nt, Homo Sapiens
cagccaugguuuucagggggacaguggacagg

SEQ ID NO: 145616 - RNA, 32 nt, Homo Sapiens
gagagguugugucuucguucuuuccgccaucu

SEQ ID NO: 145617 - RNA, 32 nt, Homo Sapiens
uggcuaauuuuuguauauuuuugcagagaugg

SEQ ID NO: 145618 - RNA, 32 nt, Homo Sapiens
guguuuaaauguuacuuguuuucaaacuuucu

SEQ ID NO: 145619 - RNA, 32 nt, Homo Sapiens
gcggagaggauacacugauggaguauuuggag

SEQ ID NO: 145620 - RNA, 32 nt, Homo Sapiens
ccguugccggugccggccuagcguccuggaau

SEQ ID NO: 145621 - RNA, 32 nt, Homo Sapiens
uuuagaaugaauggagaaaugccaaagaugaa

SEQ ID NO: 145622 - RNA, 32 nt, Homo Sapiens
gaguguggacauuuuuauuuuaaaauuuaggc

SEQ ID NO: 145623 - RNA, 32 nt, Homo Sapiens
ccuucgcgcccuggaguccgcggugggcgaga

SEQ ID NO: 145624 - RNA, 31 nt, Homo Sapiens
ugcccccgagccaccaucaugccugggcacu

SEQ ID NO: 145625 - RNA, 32 nt, Homo Sapiens
gggaggaggaaucggcggacgcgggacaccug

SEQ ID NO: 145626 - RNA, 30 nt, Homo Sapiens
aggugcgcacuugccccuacuauugcccuu

SEQ ID NO: 145627 - RNA, 32 nt, Homo Sapiens
ccuggaccgagaugugaguccuguugaagacu

SEQ ID NO: 145628 - RNA, 32 nt, Homo Sapiens
augccaugaagaauacauuagaagaauugagg

SEQ ID NO: 145629 - RNA, 32 nt, Homo Sapiens
ccuugggucgaccugcgcaaagggcgggccug

SEQ ID NO: 145630 - RNA, 32 nt, Homo Sapiens
ugauuuagcucuuuuauugugcuuacuugguc

SEQ ID NO: 145631 - RNA, 32 nt, Homo Sapiens
ugaucuucuccacacaccccaucacccagaua

SEQ ID NO: 145632 - RNA, 32 nt, Homo Sapiens
gcccggggccccgggacuccccggcugcacac

SEQ ID NO: 145633 - RNA, 32 nt, Homo Sapiens
agcggaguagcagaagacaaggcauguagggg

SEQ ID NO: 145634 - RNA, 32 nt, Homo Sapiens
cuuccuuuuuacaguuuguaauuuucacuguu

SEQ ID NO: 145635 - RNA, 32 nt, Homo Sapiens
uggauucagaagcucaagaagacaccagagaa

SEQ ID NO: 145636 - RNA, 32 nt, Homo Sapiens
uuuuaggcccccaagagguagucuuacucuuu

SEQ ID NO: 145637 - RNA, 32 nt, Homo Sapiens
aagugaaaccugggggaggagaaggacuuccc

SEQ ID NO: 145638 - RNA, 32 nt, Homo Sapiens
gagcagggagggugggggaggguguuccaggc

SEQ ID NO: 145639 - RNA, 32 nt, Homo Sapiens
cuaacggcuggauagaggcauauuuuuaguuu

SEQ ID NO: 145640 - RNA, 32 nt, Homo Sapiens
agcuccuucggccccaucuccauccucagcag

SEQ ID NO: 145641 - RNA, 32 nt, Homo Sapiens
augacuuucaagggccagaauauggugaaaau

SEQ ID NO: 145642 - RNA, 32 nt, Homo Sapiens
gcccacgucauccgcgcgcccgcggcccuagc

SEQ ID NO: 145643 - RNA, 30 nt, Homo Sapiens
uaccauguuccaaaugaggaaaccggggug

SEQ ID NO: 145644 - RNA, 32 nt, Homo Sapiens
guuagcauuacauuuuaauauuuacuauugcu

SEQ ID NO: 145645 - RNA, 32 nt, Homo Sapiens
caucugguccaggacagugaccaucugggucu

SEQ ID NO: 145646 - RNA, 32 nt, Homo Sapiens
cagggcaucgccacgcacgugcagcacuucuc

SEQ ID NO: 145647 - RNA, 32 nt, Homo Sapiens
ucacaggaucuguuugaguccuguccaccgga

SEQ ID NO: 145648 - RNA, 32 nt, Homo Sapiens
ugugacuuuaccauugaccaccagucuugcuc

SEQ ID NO: 145649 - RNA, 32 nt, Homo Sapiens
cccuuuuucugaugaagucuuaauucccuaaa

SEQ ID NO: 145650 - RNA, 32 nt, Homo Sapiens
ccggggcucaagcgcuucuccugccucagccu

SEQ ID NO: 145651 - RNA, 32 nt, Homo Sapiens
uuuguagagacaggguuuugcuaugcugccca

SEQ ID NO: 145652 - RNA, 32 nt, Homo Sapiens
uugcauaguuuaucuuuaaaaacaacuuuaaa

SEQ ID NO: 145653 - RNA, 32 nt, Homo Sapiens
uuuuaccaaaaauuauacugaauauaauuuaa

SEQ ID NO: 145654 - RNA, 32 nt, Homo Sapiens
uuggcuuugugcuuggggcuauuuguguguau

SEQ ID NO: 145655 - RNA, 32 nt, Homo Sapiens
gggccucugcuguccuguggugggugggagcu

SEQ ID NO: 145656 - RNA, 32 nt, Homo Sapiens
ugcuguccguggccagcaccccggggcccggg

SEQ ID NO: 145657 - RNA, 32 nt, Homo Sapiens
auaccaagcugcaggcgagcugccgggcgcuu

SEQ ID NO: 145658 - RNA, 32 nt, Homo Sapiens
uucgaaaacugccugccgcugucugaggaguc

SEQ ID NO: 145659 - RNA, 32 nt, Homo Sapiens
aacauccaguugcaggaaaacaagcuuaacac

SEQ ID NO: 145660 - RNA, 32 nt, Homo Sapiens
ucagcugacuucuuccagugucuugcaggccc

SEQ ID NO: 145661 - RNA, 32 nt, Homo Sapiens
cguuggaggcuuugaaaggcgagcagaagcag

SEQ ID NO: 145662 - RNA, 32 nt, Homo Sapiens
cggccggcggcggcgagcagcaggggcaugag

SEQ ID NO: 145663 - RNA, 32 nt, Homo Sapiens
aauauaaagcgaauucuacugugcuuuuaaau

SEQ ID NO: 145664 - RNA, 32 nt, Homo Sapiens
uccaggccuggcuuccucucuugggagacccc

SEQ ID NO: 145665 - RNA, 32 nt, Homo Sapiens
uuauagaaaugauuucuuaauuagcuguugug

SEQ ID NO: 145666 - RNA, 32 nt, Homo Sapiens
acuacacuggagaaaacaaaacaaaccaaauu

SEQ ID NO: 145667 - RNA, 32 nt, Homo Sapiens
guccagccuacuuacuuguaacuauuaaccuu

SEQ ID NO: 145668 - RNA, 32 nt, Homo Sapiens
cgccuguaaucccagcacuuugcgauaccaag

SEQ ID NO: 145669 - RNA, 32 nt, Homo Sapiens
caggacuagagcucagggcaucugacucccuc

SEQ ID NO: 145670 - RNA, 32 nt, Homo Sapiens
ucuacucugccaagcgccccagcaggcacugu

SEQ ID NO: 145671 - RNA, 30 nt, Homo Sapiens
aaucugggagguggaaguugcagugagccg

SEQ ID NO: 145672 - RNA, 32 nt, Homo Sapiens
uguagucaagcauuaauagaaacuaguuuaau

SEQ ID NO: 145673 - RNA, 32 nt, Homo Sapiens
auaacccaucaaauuucuuuaucuauaaagca

SEQ ID NO: 145674 - RNA, 32 nt, Homo Sapiens
guauugggguucuuguagcuuguuaaaaauug

SEQ ID NO: 145675 - RNA, 32 nt, Homo Sapiens
aacacuacacuccagccugggcgacagagcaa

SEQ ID NO: 145676 - RNA, 32 nt, Homo Sapiens
ugguauuuguggagccuauguuuaauguugcc

SEQ ID NO: 145677 - RNA, 32 nt, Homo Sapiens
aaguccaguaauuuuuuauaaaucuucagauu

SEQ ID NO: 145678 - RNA, 32 nt, Homo Sapiens
gccacguagcccggcccggauuggacguuggc

SEQ ID NO: 145679 - RNA, 32 nt, Homo Sapiens
cagacugcaucaugcauaugaaucaggggaac

SEQ ID NO: 145680 - RNA, 32 nt, Homo Sapiens
aaugauuaguccuuuacacuccaggucaauuu

SEQ ID NO: 145681 - RNA, 32 nt, Homo Sapiens
gguaaucgccuuugcuugccugucgucagugc

SEQ ID NO: 145682 - RNA, 32 nt, Homo Sapiens
aacuuauuccagacuaaacauaaaagauaauc

SEQ ID NO: 145683 - RNA, 32 nt, Homo Sapiens
uuggggcagcuucgccugggaauuggcaauga

SEQ ID NO: 145684 - RNA, 32 nt, Homo Sapiens
ggaccaggugggcugguaaaguccucagugcu

SEQ ID NO: 145685 - RNA, 32 nt, Homo Sapiens
cgaggccgcccgggcuuugccuccaccagcgc

SEQ ID NO: 145686 - RNA, 32 nt, Homo Sapiens
uggggugcagacauggcaaggcucaaggcugu

SEQ ID NO: 145687 - RNA, 32 nt, Homo Sapiens
cugucucagcuggcagaggggcacccaguccc

SEQ ID NO: 145688 - RNA, 32 nt, Homo Sapiens
aacugaugcaggagggugcagcuuuggaguca

SEQ ID NO: 145689 - RNA, 32 nt, Homo Sapiens
gauaaauucacagagggaagagauagaaagac

SEQ ID NO: 145690 - RNA, 32 nt, Homo Sapiens
gaucgcgcgacgaaucugcgccucgaacccuc

SEQ ID NO: 145691 - RNA, 32 nt, Homo Sapiens
ggccacagucgcagccccggcgccccgaagcg

SEQ ID NO: 145692 - RNA, 32 nt, Homo Sapiens
gcacguguggccccgcugggccccgagcagcu

SEQ ID NO: 145693 - RNA, 32 nt, Homo Sapiens
cccucccuccccacccccacccuguaacucca

SEQ ID NO: 145694 - RNA, 32 nt, Homo Sapiens
gggccuuggucccagacagcuggacccauuug

SEQ ID NO: 145695 - RNA, 32 nt, Homo Sapiens
agccagcccggagagaugcaguucuugcccuu

SEQ ID NO: 145696 - RNA, 32 nt, Homo Sapiens
ugcuacauuuuaaaagcaauuguauuaguaag

SEQ ID NO: 145697 - RNA, 29 nt, Homo Sapiens
uguacuggguaugaguggaaggugaugga

SEQ ID NO: 145698 - RNA, 32 nt, Homo Sapiens
augaauaucauagccuuuacuucuucacagcc

SEQ ID NO: 145699 - RNA, 32 nt, Homo Sapiens
cgccgcugcccggggagggagacggagcagua

SEQ ID NO: 145700 - RNA, 29 nt, Homo Sapiens
guauccaugugauucagaggcugagaccu

SEQ ID NO: 145701 - RNA, 32 nt, Homo Sapiens
acagcgcaguugcauucuggccacuuugaccu

SEQ ID NO: 145702 - RNA, 32 nt, Homo Sapiens
gcacugcugggcuccuggacugagaauaguug

SEQ ID NO: 145703 - RNA, 32 nt, Homo Sapiens
cacucugugccgccaccucuaccuguucccag

SEQ ID NO: 145704 - RNA, 32 nt, Homo Sapiens
acgacggaccagcucccucucccuucuaucuu

SEQ ID NO: 145705 - RNA, 32 nt, Homo Sapiens
gcagcggcgaugagggcgagggcgcggggagg

SEQ ID NO: 145706 - RNA, 32 nt, Homo Sapiens
guauaaaaaugaacacugccaagauaaagcca

SEQ ID NO: 145707 - RNA, 32 nt, Homo Sapiens
ugacuuagacaaaaucacaaagguaaagugga

SEQ ID NO: 145708 - RNA, 32 nt, Homo Sapiens
gcauuuauauuuauaugacagcuugaacugac

SEQ ID NO: 145709 - RNA, 32 nt, Homo Sapiens
gcacuggccuggggacagcugcugcucugaug

SEQ ID NO: 145710 - RNA, 30 nt, Homo Sapiens
gaggcggguuauggcggcggcggcagugag

SEQ ID NO: 145711 - RNA, 32 nt, Homo Sapiens
uuguuguagcaacaacaaaaaaugaacacgaa

SEQ ID NO: 145712 - RNA, 32 nt, Homo Sapiens
uuaccucuucaguguuuucucaugcaaaauuu

SEQ ID NO: 145713 - RNA, 32 nt, Homo Sapiens
cuuacauacuuugaauguucaaguauaaaguc

SEQ ID NO: 145714 - RNA, 32 nt, Homo Sapiens
ccagaugguuguuuccaacuuuuuauucccau

SEQ ID NO: 145715 - RNA, 32 nt, Homo Sapiens
cacuccaucuucucuuuccuucuuacuguguc

SEQ ID NO: 145716 - RNA, 31 nt, Homo Sapiens
ccccagcaccccugccugcuuuugcuggugg

SEQ ID NO: 145717 - RNA, 32 nt, Homo Sapiens
ccgggacggggcgcgaagccggaggcuccggg

SEQ ID NO: 145718 - RNA, 32 nt, Homo Sapiens
gauaccgguuucagaguccugggcagcgugcg

SEQ ID NO: 145719 - RNA, 32 nt, Homo Sapiens
gagccgcggccgcgggaaguucggcagccaga

SEQ ID NO: 145720 - RNA, 32 nt, Homo Sapiens
uguauaagaaugcuugugauuuuuguacauug

SEQ ID NO: 145721 - RNA, 32 nt, Homo Sapiens
auggcaaccacuguuauggagcacuaacugcu

SEQ ID NO: 145722 - RNA, 32 nt, Homo Sapiens
acaaauggugauggcagagagccccggacagg

SEQ ID NO: 145723 - RNA, 32 nt, Homo Sapiens
gauccagccaaggcccggggggagacccgcau

SEQ ID NO: 145724 - RNA, 32 nt, Homo Sapiens
ccacgucccucauauccccaggcacacucugg

SEQ ID NO: 145725 - RNA, 32 nt, Homo Sapiens
cccuucugucugcucgaaccacuugccucggg

SEQ ID NO: 145726 - RNA, 32 nt, Homo Sapiens
uaaccaagucuuuccccucaucuaugaugcaa

SEQ ID NO: 145727 - RNA, 32 nt, Homo Sapiens
ugccccgccuccccgaaacaggcuacucuccu

SEQ ID NO: 145728 - RNA, 32 nt, Homo Sapiens
agacagaaggaaccggcgacaguggucucagg

SEQ ID NO: 145729 - RNA, 32 nt, Homo Sapiens
aucaucgagaucuuguuaaaauguagauccug

SEQ ID NO: 145730 - RNA, 32 nt, Homo Sapiens
ugcagugugugggacaaaggcugggccgcuca

SEQ ID NO: 145731 - RNA, 32 nt, Homo Sapiens
caagccuuucccucccucuccuuuuugauguu

SEQ ID NO: 145732 - RNA, 32 nt, Homo Sapiens
gauggagucucacuuuguaacccaggcuggaa

SEQ ID NO: 145733 - RNA, 32 nt, Homo Sapiens
uggaagcccuccuuccacggauccauguagca

SEQ ID NO: 145734 - RNA, 32 nt, Homo Sapiens
cggggacaggggcggccauggcggcggcagcc

SEQ ID NO: 145735 - RNA, 32 nt, Homo Sapiens
uuugggcucucccagaccuacccaggccacug

SEQ ID NO: 145736 - RNA, 32 nt, Homo Sapiens
ucuacccagaucugggcuggguggaggugugg

SEQ ID NO: 145737 - RNA, 32 nt, Homo Sapiens
agugauacugguuuuucuuuugugcuguuaug

SEQ ID NO: 145738 - RNA, 32 nt, Homo Sapiens
ccaguguuacuugcggcugggcgugggggacu

SEQ ID NO: 145739 - RNA, 32 nt, Homo Sapiens
cugaauuccugcgccuuccugacgugagcccu

SEQ ID NO: 145740 - RNA, 32 nt, Homo Sapiens
ucagguuuauaaauagcuuuagugaugccucc

SEQ ID NO: 145741 - RNA, 32 nt, Homo Sapiens
uauaaaguauauaaaagugcaucagugguuua

SEQ ID NO: 145742 - RNA, 32 nt, Homo Sapiens
cagaagcaacugaguccaaguugucuggcggc

SEQ ID NO: 145743 - RNA, 32 nt, Homo Sapiens
gccgcguuugcccugcagacccugcaccccgg

SEQ ID NO: 145744 - RNA, 32 nt, Homo Sapiens
caccuguaauuccagcacuuugggaggcugag

SEQ ID NO: 145745 - RNA, 32 nt, Homo Sapiens
caucuguaaucccagcacuuugggaggcugag

SEQ ID NO: 145746 - RNA, 32 nt, Homo Sapiens
agcccagcugucgguccccagcccugcccggc

SEQ ID NO: 145747 - RNA, 32 nt, Homo Sapiens
agcugggccaaggggcccaggcccuguccucu

SEQ ID NO: 145748 - RNA, 32 nt, Homo Sapiens
ccaggcacaagagaaagcucuggggcuugagu

SEQ ID NO: 145749 - RNA, 32 nt, Homo Sapiens
guauuuucacugaacaaggucaauugguuacc

SEQ ID NO: 145750 - RNA, 32 nt, Homo Sapiens
agugucaagaucaccuuuccccgggagugucu

SEQ ID NO: 145751 - RNA, 32 nt, Homo Sapiens
uacucaaacucacaugccuagagcagcuccgu

SEQ ID NO: 145752 - RNA, 32 nt, Homo Sapiens
uguuuucaccaccauccccccaucccccaucu

SEQ ID NO: 145753 - RNA, 32 nt, Homo Sapiens
uucuuauccuaagagaaagcuuucauauuuaa

SEQ ID NO: 145754 - RNA, 32 nt, Homo Sapiens
ucgcgcccaguccuccucccugguucuccuca

SEQ ID NO: 145755 - RNA, 32 nt, Homo Sapiens
cucaaacccggcgggggccgcagacugggagc

SEQ ID NO: 145756 - RNA, 32 nt, Homo Sapiens
aagagugggacagggacaagcauaucuaagag

SEQ ID NO: 145757 - RNA, 30 nt, Homo Sapiens
ucuuuggggcacugcaucuguuuuggagga

SEQ ID NO: 145758 - RNA, 32 nt, Homo Sapiens
ucuaauuaaaaauacaccuugcccuaugugau

SEQ ID NO: 145759 - RNA, 32 nt, Homo Sapiens
accccucucccaucccagcagugacuggugac

SEQ ID NO: 145760 - RNA, 32 nt, Homo Sapiens
auaaccaaaaaccaccuguaccccaaaaagua

SEQ ID NO: 145761 - RNA, 32 nt, Homo Sapiens
ucccaaguucaacugauucuucugccucagcc

SEQ ID NO: 145762 - RNA, 32 nt, Homo Sapiens
gcagauguaaaaauagauaaacuauacacuua

SEQ ID NO: 145763 - RNA, 32 nt, Homo Sapiens
auaaauuuucuuuugaucuucaugacugaaca

SEQ ID NO: 145764 - RNA, 32 nt, Homo Sapiens
aauaaucuuuugcugcuuaauuugcacauccc

SEQ ID NO: 145765 - RNA, 27 nt, Homo Sapiens
ugauccucccaccucagcccccugaau

SEQ ID NO: 145766 - RNA, 32 nt, Homo Sapiens
guucuuuuuuaaauagaaacuuuaguuuuuug

SEQ ID NO: 145767 - RNA, 32 nt, Homo Sapiens
uccaaucauccauuuuuaauagcaauaaagaa

SEQ ID NO: 145768 - RNA, 32 nt, Homo Sapiens
aggcccggcucgccgcagcucaccgccgccuu

SEQ ID NO: 145769 - RNA, 32 nt, Homo Sapiens
ccauggugauacagcucugugugauucaaguu

SEQ ID NO: 145770 - RNA, 32 nt, Homo Sapiens
agguaucagugugaucugaucaacacucuggu

SEQ ID NO: 145771 - RNA, 32 nt, Homo Sapiens
ucuauuuauuuuauugcugucuaaucaauaaa

SEQ ID NO: 145772 - RNA, 32 nt, Homo Sapiens
uuaugaaauguuuuuucuuacacuuugucaug

SEQ ID NO: 145773 - RNA, 32 nt, Homo Sapiens
auacuucugccucuauccugaacucuagguuc

SEQ ID NO: 145774 - RNA, 30 nt, Homo Sapiens
aguaauguguuacacuacaaguuaugaggg

SEQ ID NO: 145775 - RNA, 30 nt, Homo Sapiens
gguuuccacugggccacccacuugcuggac

SEQ ID NO: 145776 - RNA, 32 nt, Homo Sapiens
gguuucagcuccggguacacuuccuccuuccu

SEQ ID NO: 145777 - RNA, 32 nt, Homo Sapiens
uucaagaacaacauaagcauagugcaaggagc

SEQ ID NO: 145778 - RNA, 32 nt, Homo Sapiens
ggccgggggcccggccagagcggggcugcaug

SEQ ID NO: 145779 - RNA, 32 nt, Homo Sapiens
aaaggcuccuuugggguucagaauccagagac

SEQ ID NO: 145780 - RNA, 32 nt, Homo Sapiens
uuuuccguuucucucuucuccuaagagcugcc

SEQ ID NO: 145781 - RNA, 30 nt, Homo Sapiens
guugcugucuguguuguugcuguggccuau

SEQ ID NO: 145782 - RNA, 32 nt, Homo Sapiens
acugcgggacgccucagcucgacacggaggcg

SEQ ID NO: 145783 - RNA, 32 nt, Homo Sapiens
uuugaguaaauacaaagacugaagaaauuuca

SEQ ID NO: 145784 - RNA, 32 nt, Homo Sapiens
aagcauugaguuaauuuuuuuaaauaucaacu

SEQ ID NO: 145785 - RNA, 32 nt, Homo Sapiens
uggguuccagcauggacacagggguagccugg

SEQ ID NO: 145786 - RNA, 32 nt, Homo Sapiens
gcgcauccaaucucaaggaaucuuuaagcaga

SEQ ID NO: 145787 - RNA, 32 nt, Homo Sapiens
cauucaaguaaucaacggaaguuuucacccuu

SEQ ID NO: 145788 - RNA, 32 nt, Homo Sapiens
ggccuggcuagagcuucgggugugugugucug

SEQ ID NO: 145789 - RNA, 32 nt, Homo Sapiens
ggacacuccuggcgugcuggcuccucggauug

SEQ ID NO: 145790 - RNA, 32 nt, Homo Sapiens
uuucacuaucauguuauggaauggaaaguaca

SEQ ID NO: 145791 - RNA, 32 nt, Homo Sapiens
uauuuuuguaaaauguauuugugacagugaaa

SEQ ID NO: 145792 - RNA, 32 nt, Homo Sapiens
uuucuuuugggaagagggagaaaaugaaauaa

SEQ ID NO: 145793 - RNA, 32 nt, Homo Sapiens
cucaaagagauuacagaaugaacaaaucaaga

SEQ ID NO: 145794 - RNA, 32 nt, Homo Sapiens
agaaucuuuuuguuuuucagauucauugauuc

SEQ ID NO: 145795 - RNA, 32 nt, Homo Sapiens
agaauucucugagucagacuucuuucauggaa

SEQ ID NO: 145796 - RNA, 32 nt, Homo Sapiens
augugaaaacaagcuguaguugugaaaagagu

SEQ ID NO: 145797 - RNA, 32 nt, Homo Sapiens
ccaggugaccccugcgaucuggauguuuccgc

SEQ ID NO: 145798 - RNA, 32 nt, Homo Sapiens
uucccccaaaacaaaauaaaauugagggcaug

SEQ ID NO: 145799 - RNA, 32 nt, Homo Sapiens
cgagcucugugggaaaaaagaaaaaccugcuc

SEQ ID NO: 145800 - RNA, 32 nt, Homo Sapiens
gauauuuuaaacaauauuuaaaagucaguaua

SEQ ID NO: 145801 - RNA, 32 nt, Homo Sapiens
ucugcccuuuccccuucucccccucccccucc

SEQ ID NO: 145802 - RNA, 32 nt, Homo Sapiens
gucccagcuccagccgcgcgcuuuccgcccgg

SEQ ID NO: 145803 - RNA, 28 nt, Homo Sapiens
aaacccaaagauggaaagugcuuguugg

SEQ ID NO: 145804 - RNA, 32 nt, Homo Sapiens
ccagcugccugccugcccuagccagcucccag

SEQ ID NO: 145805 - RNA, 32 nt, Homo Sapiens
gauaagaugucgugacgcaaagaaauuggaaa

SEQ ID NO: 145806 - RNA, 32 nt, Homo Sapiens
agcaggauggauuuucuuuugauaaaagaguc

SEQ ID NO: 145807 - RNA, 32 nt, Homo Sapiens
ggcaucuccgcggagcugagccggggaagggc

SEQ ID NO: 145808 - RNA, 32 nt, Homo Sapiens
acagaagucaagaauugggguuuggaaaccuu

SEQ ID NO: 145809 - RNA, 32 nt, Homo Sapiens
cugccuucccugcaguguucugcagccaugcu

SEQ ID NO: 145810 - RNA, 32 nt, Homo Sapiens
ugccuagccaccccgccgcggccccucagguc

SEQ ID NO: 145811 - RNA, 32 nt, Homo Sapiens
uguuguaugccuucauuuuccauuucacuuau

SEQ ID NO: 145812 - RNA, 32 nt, Homo Sapiens
uguggcugagaagacuuaaacuuuacaaguau

SEQ ID NO: 145813 - RNA, 32 nt, Homo Sapiens
uuuugagacagggucuuacucuugucacccag

SEQ ID NO: 145814 - RNA, 32 nt, Homo Sapiens
uugugcagagaaggaagaagaugcccccugcc

SEQ ID NO: 145815 - RNA, 32 nt, Homo Sapiens
uuguaucauuuucaaaaguacacauuauuagg

SEQ ID NO: 145816 - RNA, 27 nt, Homo Sapiens
ccccuguccuucuuaguuguccaggug

SEQ ID NO: 145817 - RNA, 32 nt, Homo Sapiens
auuaccaauuuaaaaauauauguaguucugug

SEQ ID NO: 145818 - RNA, 32 nt, Homo Sapiens
uuuuugauagaccuuuuacaaaauccauuugc

SEQ ID NO: 145819 - RNA, 32 nt, Homo Sapiens
uucaguugcaggugcuguauuuauguauaccu

SEQ ID NO: 145820 - RNA, 32 nt, Homo Sapiens
ggcccgucugcaccacccucuccccacagucc

SEQ ID NO: 145821 - RNA, 32 nt, Homo Sapiens
uuuugcccaguggcagaagagaccagcccucc

SEQ ID NO: 145822 - RNA, 32 nt, Homo Sapiens
ggcguggcacuuccuuccuuccugggcccgca

SEQ ID NO: 145823 - RNA, 32 nt, Homo Sapiens
ugugcugaacucccaaaauguagcaaguccag

SEQ ID NO: 145824 - RNA, 32 nt, Homo Sapiens
gcuuaaucaaauggaugaaaacaaagaaucag

SEQ ID NO: 145825 - RNA, 32 nt, Homo Sapiens
ggaguugucaguuuucugggcugugacugaaa

SEQ ID NO: 145826 - RNA, 32 nt, Homo Sapiens
aucacccauaguccaggcauggggaccucaac

SEQ ID NO: 145827 - RNA, 32 nt, Homo Sapiens
aaaauacaaaaaugagucggacaugguggugc

SEQ ID NO: 145828 - RNA, 32 nt, Homo Sapiens
cacccuugucucagucccacucaguauacacc

SEQ ID NO: 145829 - RNA, 27 nt, Homo Sapiens
ccacugaaauaaacaaguucuauaaca

SEQ ID NO: 145830 - RNA, 32 nt, Homo Sapiens
gcccggcccgucucgcgaacucgcgguggucg

SEQ ID NO: 145831 - RNA, 32 nt, Homo Sapiens
uuaauaauuuaaaaguuauguuuguuaaacac

SEQ ID NO: 145832 - RNA, 32 nt, Homo Sapiens
uaugugaggggacugaaugcagacacaccaua

SEQ ID NO: 145833 - RNA, 32 nt, Homo Sapiens
uaccagccccugucacaucugacuguggguuu

SEQ ID NO: 145834 - RNA, 32 nt, Homo Sapiens
acagaccaagaaguuuaacaugugcaucaggu

SEQ ID NO: 145835 - RNA, 32 nt, Homo Sapiens
cuguucccaucccccagcccuggcuccuaggu

SEQ ID NO: 145836 - RNA, 32 nt, Homo Sapiens
gcuaaggccuuuuuaaaaagcuuaugcuuaca

SEQ ID NO: 145837 - RNA, 32 nt, Homo Sapiens
ggaaccugucuccauugugugauccagcccug

SEQ ID NO: 145838 - RNA, 32 nt, Homo Sapiens
cugcgcugcugagaccaacggggugggugcag

SEQ ID NO: 145839 - RNA, 32 nt, Homo Sapiens
agacuguuugguuuuugagcauauucugaaaa

SEQ ID NO: 145840 - RNA, 32 nt, Homo Sapiens
caggggucagggcaucacuggucucgcgugcg

SEQ ID NO: 145841 - RNA, 32 nt, Homo Sapiens
cauuucugagaaauuagcacaaauguacagcu

SEQ ID NO: 145842 - RNA, 32 nt, Homo Sapiens
uuuccucuacccuguuuggccagaccagagcc

SEQ ID NO: 145843 - RNA, 32 nt, Homo Sapiens
gcaggcccugagccuucugaccucacauccuc

SEQ ID NO: 145844 - RNA, 32 nt, Homo Sapiens
uuuucgcuuguaaauuuuuugaagcuucuuau

SEQ ID NO: 145845 - RNA, 32 nt, Homo Sapiens
uuuucaagaggaaggaugaaaacucuacauag

SEQ ID NO: 145846 - RNA, 32 nt, Homo Sapiens
cacugucagaggugaccggagaacugaguugc

SEQ ID NO: 145847 - RNA, 32 nt, Homo Sapiens
gccugccucuuuagugacuacagaccucacuu

SEQ ID NO: 145848 - RNA, 32 nt, Homo Sapiens
agauaaaagguuucaugugcaaugcagaugaa

SEQ ID NO: 145849 - RNA, 32 nt, Homo Sapiens
accagccuggccaacauagugaaacccugucu

SEQ ID NO: 145850 - RNA, 32 nt, Homo Sapiens
cuaccugcggcccggcucuccuccgcgccccc

SEQ ID NO: 145851 - RNA, 32 nt, Homo Sapiens
uaauggauuggaaagaauguugggaaaggaca

SEQ ID NO: 145852 - RNA, 32 nt, Homo Sapiens
gcaguuuguauauaauucccuuucuuguggaa

SEQ ID NO: 145853 - RNA, 32 nt, Homo Sapiens
ugcagccacgucagccaaaugacuucauuucu

SEQ ID NO: 145854 - RNA, 32 nt, Homo Sapiens
auguaaauugcaaauaaaccacuuucuaauuu

SEQ ID NO: 145855 - RNA, 32 nt, Homo Sapiens
cucuccaucauuccaaagcuaaauguacaugu

SEQ ID NO: 145856 - RNA, 32 nt, Homo Sapiens
cagacuuuucuuuuuaaaaauuuaacaugauu

SEQ ID NO: 145857 - RNA, 32 nt, Homo Sapiens
uauuaucccccauuuuuaguagagacgggguu

SEQ ID NO: 145858 - RNA, 32 nt, Homo Sapiens
ugcaugugacggggugggagggggagguuucu

SEQ ID NO: 145859 - RNA, 32 nt, Homo Sapiens
agugccuuucuauggacuuuggauccuucuga

SEQ ID NO: 145860 - RNA, 32 nt, Homo Sapiens
accccguuugcuucccucuccucuccgaacuc

SEQ ID NO: 145861 - RNA, 32 nt, Homo Sapiens
cgccgguauccgcguccgcagcgccgccagcc

SEQ ID NO: 145862 - RNA, 32 nt, Homo Sapiens
gacucggagguaggugaugcucugaugcugcu

SEQ ID NO: 145863 - RNA, 32 nt, Homo Sapiens
acauuccugccagcagguggcagcaggccucc

SEQ ID NO: 145864 - RNA, 32 nt, Homo Sapiens
cuacccccgccacucuuucucaaauggaaaga

SEQ ID NO: 145865 - RNA, 32 nt, Homo Sapiens
uguuuaccaaaauguuguuaacuuguguuaaa

SEQ ID NO: 145866 - RNA, 26 nt, Homo Sapiens
caugcugaucccauuuucaaugaaga

SEQ ID NO: 145867 - RNA, 32 nt, Homo Sapiens
uccuccugccuuagccucccaagcagcuggua

SEQ ID NO: 145868 - RNA, 32 nt, Homo Sapiens
cugccggccugccugccacagccggacuccgc

SEQ ID NO: 145869 - RNA, 32 nt, Homo Sapiens
cgccgccaggguuugaggaugggggaguagcu

SEQ ID NO: 145870 - RNA, 32 nt, Homo Sapiens
uccuuuuuggccugguuuucuuccucaaacag

SEQ ID NO: 145871 - RNA, 32 nt, Homo Sapiens
ucuucugcgggaagagagagugcgcgcggaga

SEQ ID NO: 145872 - RNA, 32 nt, Homo Sapiens
ucuucugucaauccuuacccucugcagcuugu

SEQ ID NO: 145873 - RNA, 32 nt, Homo Sapiens
cccaugaaaacugagaugaggaccuugguacu

SEQ ID NO: 145874 - RNA, 32 nt, Homo Sapiens
cauagcucacuauaaccuugaacuccugggcu

SEQ ID NO: 145875 - RNA, 32 nt, Homo Sapiens
agaaggcucugcugggucuccauggugggggu

SEQ ID NO: 145876 - RNA, 32 nt, Homo Sapiens
uauaaacuugauguaauugguuugggaggggg

SEQ ID NO: 145877 - RNA, 32 nt, Homo Sapiens
ccuccccugccagggcucgggcgcuguggcuc

SEQ ID NO: 145878 - RNA, 32 nt, Homo Sapiens
ucaaugaugcaguggauaaugaugggagaaag

SEQ ID NO: 145879 - RNA, 32 nt, Homo Sapiens
ccuugaauuuaccgucuucucauccucuguac

SEQ ID NO: 145880 - RNA, 32 nt, Homo Sapiens
auugaagccaguucaguaaucacacacauucc

SEQ ID NO: 145881 - RNA, 28 nt, Homo Sapiens
uucagaguucggggaccaagucuagcag

SEQ ID NO: 145882 - RNA, 32 nt, Homo Sapiens
cagaugaagauaaguugguugaaugucuccag

SEQ ID NO: 145883 - RNA, 32 nt, Homo Sapiens
guuuauguauaaaaauaacuuucuggauuuug

SEQ ID NO: 145884 - RNA, 32 nt, Homo Sapiens
cacugccuuccucucccucuccuuccacggga

SEQ ID NO: 145885 - RNA, 32 nt, Homo Sapiens
agagcuugggcugggaacgcgccugaugucua

SEQ ID NO: 145886 - RNA, 32 nt, Homo Sapiens
cgccaaacuauuuagacaaacacacacccucc

SEQ ID NO: 145887 - RNA, 32 nt, Homo Sapiens
gcgcggcacgugcggugacggcacccgagccc

SEQ ID NO: 145888 - RNA, 32 nt, Homo Sapiens
cagggacucgguuucccccgcaggccucccuc

SEQ ID NO: 145889 - RNA, 32 nt, Homo Sapiens
ccaaaccggcucuuugcccccgcagcccacgu

SEQ ID NO: 145890 - RNA, 32 nt, Homo Sapiens
gagaugauuugcugguggggcuggggaaggcc

SEQ ID NO: 145891 - RNA, 32 nt, Homo Sapiens
ggaagcaguauuacuagaucuggaggcaacca

SEQ ID NO: 145892 - RNA, 32 nt, Homo Sapiens
caucuguuugagugcugcuuucuggggucagg

SEQ ID NO: 145893 - RNA, 32 nt, Homo Sapiens
gccgcccccgguucggugcccgcggucccgga

SEQ ID NO: 145894 - RNA, 32 nt, Homo Sapiens
gccgcccgccuucgcuccuuccccucaggccg

SEQ ID NO: 145895 - RNA, 32 nt, Homo Sapiens
acugauguuaucuauagauuauagaaagacau

SEQ ID NO: 145896 - RNA, 32 nt, Homo Sapiens
gcuccgcugucgggugcgcggcguggagcggc

SEQ ID NO: 145897 - RNA, 32 nt, Homo Sapiens
uaucugauuggaaaugugugcaugugagucgg

SEQ ID NO: 145898 - RNA, 32 nt, Homo Sapiens
gguuuuuguauacuagcuuuuguauuugaauu

SEQ ID NO: 145899 - RNA, 32 nt, Homo Sapiens
uguugauuuccuguuuccuccucccccgccuc

SEQ ID NO: 145900 - RNA, 32 nt, Homo Sapiens
ccuagagccugguaccugaggcuccauacacc

SEQ ID NO: 145901 - RNA, 32 nt, Homo Sapiens
uuuguguuggguucuuuuuuuuuuuaaaugaa

SEQ ID NO: 145902 - RNA, 32 nt, Homo Sapiens
uugccaccuucacuccugugucuccagcugau

SEQ ID NO: 145903 - RNA, 32 nt, Homo Sapiens
ggcuuugcugaauucuaacauuaaaucacagc

SEQ ID NO: 145904 - RNA, 32 nt, Homo Sapiens
ucacaaggggguacccccagcagccucucgaa

SEQ ID NO: 145905 - RNA, 32 nt, Homo Sapiens
ccagggccaguucccuucuccccucccggcca

SEQ ID NO: 145906 - RNA, 32 nt, Homo Sapiens
aguauaucuuaccagggauguaacugaacauu

SEQ ID NO: 145907 - RNA, 32 nt, Homo Sapiens
gcuggggcucuggcugccuucuccacccaccc

SEQ ID NO: 145908 - RNA, 32 nt, Homo Sapiens
aauucuaaugaaacccugauaucaacuuuuua

SEQ ID NO: 145909 - RNA, 32 nt, Homo Sapiens
aggguugccauggagugccgcuugguccucgg

SEQ ID NO: 145910 - RNA, 32 nt, Homo Sapiens
guagccaucucucuguucugcauuaucuuaug

SEQ ID NO: 145911 - RNA, 32 nt, Homo Sapiens
acagaucccucaugaauggcuugggccauccg

SEQ ID NO: 145912 - RNA, 32 nt, Homo Sapiens
aacuacgccaguagcauguggaugccauggag

SEQ ID NO: 145913 - RNA, 32 nt, Homo Sapiens
uccagaaaauuaacacaaaaaaguauguauua

SEQ ID NO: 145914 - RNA, 32 nt, Homo Sapiens
cggccaggaggcugaggccugcacugcagaug

SEQ ID NO: 145915 - RNA, 32 nt, Homo Sapiens
aaagagagaaaacaaaauguuauuuuuauacc

SEQ ID NO: 145916 - RNA, 32 nt, Homo Sapiens
ugggauggggcaggccgugguccuccagcaug

SEQ ID NO: 145917 - RNA, 32 nt, Homo Sapiens
cuuaguuaauaaaauaagccaggcuugcaacu

SEQ ID NO: 145918 - RNA, 32 nt, Homo Sapiens
uaaucuuaaaauugguggucauuucaaugguu

SEQ ID NO: 145919 - RNA, 32 nt, Homo Sapiens
gaaguguuuaucgagcaugcaaaagaaacccu

SEQ ID NO: 145920 - RNA, 31 nt, Homo Sapiens
uauaagcauguguugcaggugcuguuugauu

SEQ ID NO: 145921 - RNA, 32 nt, Homo Sapiens
gucggcggcccucaagagacaccaggaggacu

SEQ ID NO: 145922 - RNA, 32 nt, Homo Sapiens
guugucauugaucuguaauauuucucacacaa

SEQ ID NO: 145923 - RNA, 31 nt, Homo Sapiens
uagcuuuccacaucaagaguccuuauguuau

SEQ ID NO: 145924 - RNA, 32 nt, Homo Sapiens
uaggaauccaacaaauacugcucuauuggauc

SEQ ID NO: 145925 - RNA, 32 nt, Homo Sapiens
ccuggggacaaagcggaggcacccaaagggca

SEQ ID NO: 145926 - RNA, 32 nt, Homo Sapiens
ggguuggcuagagagcgaguauugugauuuug

SEQ ID NO: 145927 - RNA, 32 nt, Homo Sapiens
ggucgacggagcaaggaucugggcuuugcucg

SEQ ID NO: 145928 - RNA, 32 nt, Homo Sapiens
gccaggcccgcggcccgagcccaugagcacca

SEQ ID NO: 145929 - RNA, 28 nt, Homo Sapiens
gcaauggaagaacuucuaccugauggac

SEQ ID NO: 145930 - RNA, 32 nt, Homo Sapiens
ucaauggacgauuuauacuuuuauuuuuuaug

SEQ ID NO: 145931 - RNA, 32 nt, Homo Sapiens
gaaucucuauagaauguggauuuuucccacaa

SEQ ID NO: 145932 - RNA, 32 nt, Homo Sapiens
auuucacucugcagaguauccuggaacuacau

SEQ ID NO: 145933 - RNA, 32 nt, Homo Sapiens
aauuuuguauuuuuaguagacacaggguuucu

SEQ ID NO: 145934 - RNA, 32 nt, Homo Sapiens
uuucccuuugucccguuucacacuaaacgggu

SEQ ID NO: 145935 - RNA, 32 nt, Homo Sapiens
gccuguccugcuaaguuuuuacuugcuggaug

SEQ ID NO: 145936 - RNA, 32 nt, Homo Sapiens
guuuauuuauagaacaaaaauacaugaggaug

SEQ ID NO: 145937 - RNA, 32 nt, Homo Sapiens
gucauauaucuuggaaugaaugaccuaaaauc

SEQ ID NO: 145938 - RNA, 32 nt, Homo Sapiens
augguucaucaucaggcugcaaugacagaaug

SEQ ID NO: 145939 - RNA, 32 nt, Homo Sapiens
cccuuucugcacccuucccuggcacugagcag

SEQ ID NO: 145940 - RNA, 32 nt, Homo Sapiens
ucuugcucccuggccugcccuccggcacccug

SEQ ID NO: 145941 - RNA, 32 nt, Homo Sapiens
gauuucccaggccaccucuccuuucccuuucc

SEQ ID NO: 145942 - RNA, 32 nt, Homo Sapiens
uugcauuucggcucccuucucuucucgcugcc

SEQ ID NO: 145943 - RNA, 32 nt, Homo Sapiens
acgucugccuggggagacccagugcaggccua

SEQ ID NO: 145944 - RNA, 32 nt, Homo Sapiens
agcugcacuugucuggugaggaccuugcccuc

SEQ ID NO: 145945 - RNA, 32 nt, Homo Sapiens
cucaguccugacgcuugccaccugcuccuacc

SEQ ID NO: 145946 - RNA, 32 nt, Homo Sapiens
uuaauaugcagcauaccauagguguauauaua

SEQ ID NO: 145947 - RNA, 32 nt, Homo Sapiens
guacccggcccgagacgggaggagacgcucgg

SEQ ID NO: 145948 - RNA, 32 nt, Homo Sapiens
cuaguguucccucuccugcuccaggaccuccg

SEQ ID NO: 145949 - RNA, 30 nt, Homo Sapiens
aguugggcaacccgcucggguccccuucca

SEQ ID NO: 145950 - RNA, 32 nt, Homo Sapiens
gguagggggcuuugucuuggcugagccacauc

SEQ ID NO: 145951 - RNA, 32 nt, Homo Sapiens
gggccccgagcagcugcggcagguccugaagc

SEQ ID NO: 145952 - RNA, 32 nt, Homo Sapiens
acugccaggucccaagcuucagacugcugugc

SEQ ID NO: 145953 - RNA, 32 nt, Homo Sapiens
aggaggccaagaguuuaugcuaugggaggaac

SEQ ID NO: 145954 - RNA, 32 nt, Homo Sapiens
uccaggcacgcgaggccccucagguacgcccu

SEQ ID NO: 145955 - RNA, 29 nt, Homo Sapiens
acuuagcuaucagaagaccacaaaaauug

SEQ ID NO: 145956 - RNA, 32 nt, Homo Sapiens
uuuaucuucgugcucugcaacuucuucaauuc

SEQ ID NO: 145957 - RNA, 32 nt, Homo Sapiens
auggauguguuguucuauugcauuguaaguaa

SEQ ID NO: 145958 - RNA, 32 nt, Homo Sapiens
gugcauacaacuuaaggaauuuuuuccuccuc

SEQ ID NO: 145959 - RNA, 32 nt, Homo Sapiens
ccuauuaaaaauuuuuucuauguguuguuaua

SEQ ID NO: 145960 - RNA, 32 nt, Homo Sapiens
gcccggucccgcaugccaccgccccgcgagga

SEQ ID NO: 145961 - RNA, 32 nt, Homo Sapiens
ugguucugucuccucacaggcuucacccacgg

SEQ ID NO: 145962 - RNA, 32 nt, Homo Sapiens
guucauuugucaacgacaacaccauuugcuac

SEQ ID NO: 145963 - RNA, 32 nt, Homo Sapiens
cacagcgguggggaggcggggaggagcagcug

SEQ ID NO: 145964 - RNA, 32 nt, Homo Sapiens
gcguuucucuuucuccuucucuuucccuugag

SEQ ID NO: 145965 - RNA, 32 nt, Homo Sapiens
cagaaacgaaacagcgaguuuuuggccaacgu

SEQ ID NO: 145966 - RNA, 32 nt, Homo Sapiens
acaucgaauaugacuuugauaauaaauaccgg

SEQ ID NO: 145967 - RNA, 32 nt, Homo Sapiens
cacuggcggcagcuggagguguaauagugcgg

SEQ ID NO: 145968 - RNA, 32 nt, Homo Sapiens
ugagguggaggaacagaagugaaaugagcaau

SEQ ID NO: 145969 - RNA, 32 nt, Homo Sapiens
auuucucaaauguauuugauugaugucucaug

SEQ ID NO: 145970 - RNA, 32 nt, Homo Sapiens
acacaguuaaacuguccauauuugagcuuuau

SEQ ID NO: 145971 - RNA, 32 nt, Homo Sapiens
uaauguuuucuuuuucuuucucuugcuguuuc

SEQ ID NO: 145972 - RNA, 32 nt, Homo Sapiens
uuccuacugggggcaacccuggugaccagcac

SEQ ID NO: 145973 - RNA, 32 nt, Homo Sapiens
ugccuguaaucccagcacuuugauaggcugag

SEQ ID NO: 145974 - RNA, 32 nt, Homo Sapiens
gaagcugugggaaggacagcaggggucccggg

SEQ ID NO: 145975 - RNA, 32 nt, Homo Sapiens
ggggaagauaaacuuuuaaaaagcucuuaucu

SEQ ID NO: 145976 - RNA, 32 nt, Homo Sapiens
uucuacaucuuacuggucgagcaacuuuagag

SEQ ID NO: 145977 - RNA, 32 nt, Homo Sapiens
gaugaaccaaaauuacaaaaaguuaugaaaau

SEQ ID NO: 145978 - RNA, 32 nt, Homo Sapiens
uuucaauugcggcuugccauuuucuuaguguu

SEQ ID NO: 145979 - RNA, 32 nt, Homo Sapiens
cuuauuuuacuccauauagaaacuguagagac

SEQ ID NO: 145980 - RNA, 32 nt, Homo Sapiens
ucggaccacucccagccccccauccccccguu

SEQ ID NO: 145981 - RNA, 32 nt, Homo Sapiens
gcgcacgggcugccuccaucagggcacuuaag

SEQ ID NO: 145982 - RNA, 32 nt, Homo Sapiens
ggagcuguggcugagccaccucuggcggaugu

SEQ ID NO: 145983 - RNA, 32 nt, Homo Sapiens
ccggucucucuccagggcuggacuuaauaacu

SEQ ID NO: 145984 - RNA, 32 nt, Homo Sapiens
gagagagcgcgcgggcgugcgagcagcgaaag

SEQ ID NO: 145985 - RNA, 32 nt, Homo Sapiens
acucacacuggauaacccacuccacaugugcu

SEQ ID NO: 145986 - RNA, 29 nt, Homo Sapiens
ucugucauugcauggugaaagcgauaaag

SEQ ID NO: 145987 - RNA, 32 nt, Homo Sapiens
ugucuggagguaccaccuucuauucugguuuc

SEQ ID NO: 145988 - RNA, 32 nt, Homo Sapiens
cuucucuuuuacaggcuguuugacuucucugc

SEQ ID NO: 145989 - RNA, 32 nt, Homo Sapiens
uuagcacuucgggaggcugaggcagguggauc

SEQ ID NO: 145990 - RNA, 32 nt, Homo Sapiens
agucacucagaauaucacuguaaaugaaagug

SEQ ID NO: 145991 - RNA, 32 nt, Homo Sapiens
gcaaacauccacagauggcccuggacaucagc

SEQ ID NO: 145992 - RNA, 32 nt, Homo Sapiens
gacggggcaagauguccaagcugcugaaccca

SEQ ID NO: 145993 - RNA, 30 nt, Homo Sapiens
cuggagugcggcggcggcgggacccggagc

SEQ ID NO: 145994 - RNA, 32 nt, Homo Sapiens
gagcagccggcuggccccgccgcggccgagca

SEQ ID NO: 145995 - RNA, 32 nt, Homo Sapiens
cccucgucaacagaacuuccaguggguugugg

SEQ ID NO: 145996 - RNA, 32 nt, Homo Sapiens
acaggagcccaccagcaggauuuuugaauaau

SEQ ID NO: 145997 - RNA, 32 nt, Homo Sapiens
acaugaguguccugcuuacauguagcuucaga

SEQ ID NO: 145998 - RNA, 32 nt, Homo Sapiens
gcuucacaaaaaucuccucaaauguaaaagau

SEQ ID NO: 145999 - RNA, 32 nt, Homo Sapiens
aaaacuaguauagaaaauaauacgaaacuuua

SEQ ID NO: 146000 - RNA, 30 nt, Homo Sapiens
gcaaggcaggggcuugaugggcuugucuuc

SEQ ID NO: 146001 - RNA, 32 nt, Homo Sapiens
gacgaggcggcuuucccggcagaaugcuagcg

SEQ ID NO: 146002 - RNA, 32 nt, Homo Sapiens
ucauggggcuuccaaugugcugccccccucuu

SEQ ID NO: 146003 - RNA, 32 nt, Homo Sapiens
gaggacccgcugcuccugcugcucccggggau

SEQ ID NO: 146004 - RNA, 32 nt, Homo Sapiens
gcccuacacccagccuggcccagggccggcuu

SEQ ID NO: 146005 - RNA, 32 nt, Homo Sapiens
acuaccugagaagucauguagguccaaccaua

SEQ ID NO: 146006 - RNA, 31 nt, Homo Sapiens
cacagugacacacacaaaagagccugaaacg

SEQ ID NO: 146007 - RNA, 32 nt, Homo Sapiens
aagcugaaggugcuggagaugccaagugaagu

SEQ ID NO: 146008 - RNA, 32 nt, Homo Sapiens
aucaguacuccauuuuuuuuuauuguugguag

SEQ ID NO: 146009 - RNA, 32 nt, Homo Sapiens
cuuguccuauuuugaaacuaccugucugguuu

SEQ ID NO: 146010 - RNA, 32 nt, Homo Sapiens
cgagacuugcggagcugucuuccccggacccu

SEQ ID NO: 146011 - RNA, 32 nt, Homo Sapiens
gccucugacccagccccuccccgggccaggcu

SEQ ID NO: 146012 - RNA, 32 nt, Homo Sapiens
cauucaggggcgcgccugagggugcuggcugc

SEQ ID NO: 146013 - RNA, 32 nt, Homo Sapiens
ucaguuuugugauuccuggauauuuguguguu

SEQ ID NO: 146014 - RNA, 32 nt, Homo Sapiens
ggcgacccaggcaucuggggagccacagaagu

SEQ ID NO: 146015 - RNA, 32 nt, Homo Sapiens
cuugggcuccugggagcugcaguuggagcugg

SEQ ID NO: 146016 - RNA, 32 nt, Homo Sapiens
ugccaguugccaacaaaucuaguucuauacag

SEQ ID NO: 146017 - RNA, 32 nt, Homo Sapiens
cauccuaggggcugggcccccaucccaugacu

SEQ ID NO: 146018 - RNA, 32 nt, Homo Sapiens
ugaaaggucagguuggugguaaaagucaugag

SEQ ID NO: 146019 - RNA, 32 nt, Homo Sapiens
agauggguaagaggcauuuguaauuuuaaaaa

SEQ ID NO: 146020 - RNA, 32 nt, Homo Sapiens
uccaugcaguguauauauugagaugcuguaac

SEQ ID NO: 146021 - RNA, 32 nt, Homo Sapiens
gccucucccguggucuggaguucagcugcagg

SEQ ID NO: 146022 - RNA, 32 nt, Homo Sapiens
acauaucuaauuuuuguauuuuuuauagagac

SEQ ID NO: 146023 - RNA, 32 nt, Homo Sapiens
aauagagccaaugguuauaacuuggcuagaaa

SEQ ID NO: 146024 - RNA, 32 nt, Homo Sapiens
acucuccauguggcaagggcaccuggaggugg

SEQ ID NO: 146025 - RNA, 32 nt, Homo Sapiens
uuauuuuccuuccccaugcuguuguccccaug

SEQ ID NO: 146026 - RNA, 32 nt, Homo Sapiens
aaauccauuuugaagugauauuuuggacuuag

SEQ ID NO: 146027 - RNA, 32 nt, Homo Sapiens
ucuuuuccacugacaggcuuucccaggcagcu

SEQ ID NO: 146028 - RNA, 32 nt, Homo Sapiens
guucaaaagaagaaucagcuugugaaaaauca

SEQ ID NO: 146029 - RNA, 32 nt, Homo Sapiens
ggaugugauucuaaaagcuuuuauugagcauu

SEQ ID NO: 146030 - RNA, 31 nt, Homo Sapiens
ugggacucacaugaucguuggaugaccaagu

SEQ ID NO: 146031 - RNA, 32 nt, Homo Sapiens
aauagagaggggcggcuuugucacugauuuuu

SEQ ID NO: 146032 - RNA, 32 nt, Homo Sapiens
ggcuggccucacaagaggcuucuuccacgggg

SEQ ID NO: 146033 - RNA, 32 nt, Homo Sapiens
cugcucuccucuuuccucuaaaccucaaccuc

SEQ ID NO: 146034 - RNA, 32 nt, Homo Sapiens
uaauacacugaaaauuuuaacugugucaaguc

SEQ ID NO: 146035 - RNA, 32 nt, Homo Sapiens
aaaauuauacugaauauaauuuaaccuugggg

SEQ ID NO: 146036 - RNA, 32 nt, Homo Sapiens
ugugagcuuguccgccaugcuguacccugcaa

SEQ ID NO: 146037 - RNA, 32 nt, Homo Sapiens
cucucacuauacaguauauugucaaugugaaa

SEQ ID NO: 146038 - RNA, 32 nt, Homo Sapiens
gccgggagcagcugagccgccggcgccucggc

SEQ ID NO: 146039 - RNA, 32 nt, Homo Sapiens
cggggacacuagugacaguauaaagggcaaag

SEQ ID NO: 146040 - RNA, 32 nt, Homo Sapiens
uaauuuucccaaugucagguauagaaguuauc

SEQ ID NO: 146041 - RNA, 32 nt, Homo Sapiens
cuccagccacgcugcuaaauagggcuccucuc

SEQ ID NO: 146042 - RNA, 32 nt, Homo Sapiens
uuuaauguuaauuuauauucauuguagaauug

SEQ ID NO: 146043 - RNA, 32 nt, Homo Sapiens
accuacacuccagccugggugacagagcaaac

SEQ ID NO: 146044 - RNA, 32 nt, Homo Sapiens
auuucaaaaugaaguauaagaauaucagaucc

SEQ ID NO: 146045 - RNA, 30 nt, Homo Sapiens
cccuacaggguccgcgcggggccggugggu

SEQ ID NO: 146046 - RNA, 32 nt, Homo Sapiens
aauuagaguauuuugagguguccuuucuuuac

SEQ ID NO: 146047 - RNA, 32 nt, Homo Sapiens
aggagcaacggcugcgcaggugacucgguggc

SEQ ID NO: 146048 - RNA, 32 nt, Homo Sapiens
acccccugcccccgcaccaaccacccauauuc

SEQ ID NO: 146049 - RNA, 31 nt, Homo Sapiens
cgcuccaggccggucgcuccaccccccggcu

SEQ ID NO: 146050 - RNA, 32 nt, Homo Sapiens
aguggggaaaauuuucagcaccaaagcuucac

SEQ ID NO: 146051 - RNA, 32 nt, Homo Sapiens
gaauucuugaguucuggaagggacuuuagaga

SEQ ID NO: 146052 - RNA, 32 nt, Homo Sapiens
ggcuggguaugguggcucaugccaguaauugc

SEQ ID NO: 146053 - RNA, 32 nt, Homo Sapiens
aaugggaaacaaaaggauaaugaauacuuuau

SEQ ID NO: 146054 - RNA, 32 nt, Homo Sapiens
gucggggcuuggcuuauggagaugccucguga

SEQ ID NO: 146055 - RNA, 32 nt, Homo Sapiens
agaucuuggagcccgcggcgcuugggggaaau

SEQ ID NO: 146056 - RNA, 32 nt, Homo Sapiens
acagcaggaagcaaagcagagguggagaagau

SEQ ID NO: 146057 - RNA, 32 nt, Homo Sapiens
gcuacgcuccagccccggguguggacauugaa

SEQ ID NO: 146058 - RNA, 32 nt, Homo Sapiens
uaacugguuuggaugccuggguugugacuucu

SEQ ID NO: 146059 - RNA, 32 nt, Homo Sapiens
uugcacugguuuaauuuguugcuaaagaaaua

SEQ ID NO: 146060 - RNA, 32 nt, Homo Sapiens
ugccaggcacgcugggaggaggacggcagcug

SEQ ID NO: 146061 - RNA, 32 nt, Homo Sapiens
ggcggcggcggcgggcggguacccuucgacug

SEQ ID NO: 146062 - RNA, 32 nt, Homo Sapiens
uuacuugcugcccugugcuccuccccgcagga

SEQ ID NO: 146063 - RNA, 32 nt, Homo Sapiens
ccaaggcuagcuucccaaaaguuguuugauag

SEQ ID NO: 146064 - RNA, 32 nt, Homo Sapiens
gccuggagccucggcuccucgcagucaggugg

SEQ ID NO: 146065 - RNA, 32 nt, Homo Sapiens
uccuguaccuuucuucguuuuaccuauguguc

SEQ ID NO: 146066 - RNA, 32 nt, Homo Sapiens
uuuacaaacaaaugauaugucauuuaaguuuc

SEQ ID NO: 146067 - RNA, 32 nt, Homo Sapiens
ggcacuuugugccagcagcaugagcucauugc

SEQ ID NO: 146068 - RNA, 32 nt, Homo Sapiens
uucuacccugaaagugacugccugcagaaaga

SEQ ID NO: 146069 - RNA, 32 nt, Homo Sapiens
ccugcagcucugugucccaggccacagcaaag

SEQ ID NO: 146070 - RNA, 32 nt, Homo Sapiens
ggaauggucaaucccuguccugguuguccaag

SEQ ID NO: 146071 - RNA, 32 nt, Homo Sapiens
auuuugucuuauuuuacauauauccuaguagc

SEQ ID NO: 146072 - RNA, 32 nt, Homo Sapiens
cguucuuucuucauugcaggcuaguauauacc

SEQ ID NO: 146073 - RNA, 32 nt, Homo Sapiens
aggcugaggcugcggcagaggcggcgaggcgc

SEQ ID NO: 146074 - RNA, 27 nt, Homo Sapiens
cccagcccaugcaucugguaugugguu

SEQ ID NO: 146075 - RNA, 30 nt, Homo Sapiens
caccaaucauaguguacccaucuuuaauuu

SEQ ID NO: 146076 - RNA, 32 nt, Homo Sapiens
ccaccccagccccacaccugcuccuucccuaa

SEQ ID NO: 146077 - RNA, 32 nt, Homo Sapiens
gcuccggggggccucaagaaccggaggcagcc

SEQ ID NO: 146078 - RNA, 32 nt, Homo Sapiens
ugggugagccucuggccccgggcccccagggu

SEQ ID NO: 146079 - RNA, 32 nt, Homo Sapiens
cacagggaggcagguggccacggcgagguccc

SEQ ID NO: 146080 - RNA, 32 nt, Homo Sapiens
gggcaggggcgcgcuccacuucguugcacgcg

SEQ ID NO: 146081 - RNA, 32 nt, Homo Sapiens
cauuguuugcaggacgaaaacuucugaguuac

SEQ ID NO: 146082 - RNA, 32 nt, Homo Sapiens
ggagcucuagagggcugcguggcauccuccua

SEQ ID NO: 146083 - RNA, 32 nt, Homo Sapiens
acuaguugucuccuauuuuuccauaacuagca

SEQ ID NO: 146084 - RNA, 32 nt, Homo Sapiens
aacauggccuuuucucucuccccuuccacuuu

SEQ ID NO: 146085 - RNA, 32 nt, Homo Sapiens
auagcuggggcccucaggaucaucauuaaccc

SEQ ID NO: 146086 - RNA, 32 nt, Homo Sapiens
ggacucuucccucucgcuccccucugccgguc

SEQ ID NO: 146087 - RNA, 32 nt, Homo Sapiens
uuaaauccaaaaaguuauuuccucagaaaaau

SEQ ID NO: 146088 - RNA, 32 nt, Homo Sapiens
ucccuucccuccccuuugcuggccuacucugg

SEQ ID NO: 146089 - RNA, 32 nt, Homo Sapiens
ugauguuccuucccuccaucagccaucaaucc

SEQ ID NO: 146090 - RNA, 32 nt, Homo Sapiens
cuuggcccuucccauaucuacucuucugugau

SEQ ID NO: 146091 - RNA, 32 nt, Homo Sapiens
ccugccgcgugcccuucccccaucccuccaau

SEQ ID NO: 146092 - RNA, 32 nt, Homo Sapiens
uaucuuuugcaccugcugaacuucauuucugu

SEQ ID NO: 146093 - RNA, 32 nt, Homo Sapiens
aacaucugcuccaugacauucacaauaccagg

SEQ ID NO: 146094 - RNA, 32 nt, Homo Sapiens
cccaguucccuccucccucgguuauaaagauu

SEQ ID NO: 146095 - RNA, 32 nt, Homo Sapiens
guacuuuuucuuuucuagaggaaguaucuauu

SEQ ID NO: 146096 - RNA, 32 nt, Homo Sapiens
ucauuaaacuucagccagaaagcagaguggca

SEQ ID NO: 146097 - RNA, 29 nt, Homo Sapiens
guaaauuggggacaguaaauguauggggu

SEQ ID NO: 146098 - RNA, 32 nt, Homo Sapiens
ccaucagagugaacaggcaaccuacaaaaugg

SEQ ID NO: 146099 - RNA, 32 nt, Homo Sapiens
acucugccaucccaccaccaugugccagccaa

SEQ ID NO: 146100 - RNA, 32 nt, Homo Sapiens
ccuuucccgggagggggcccugcccggcccuc

SEQ ID NO: 146101 - RNA, 32 nt, Homo Sapiens
gaaauuguugguaaaguaaguaaaacgauuuu

SEQ ID NO: 146102 - RNA, 32 nt, Homo Sapiens
ucacauuuaagcaggaaugcaauauaaaaaug

SEQ ID NO: 146103 - RNA, 32 nt, Homo Sapiens
agagauggggagcaucauucuguuauacuucu

SEQ ID NO: 146104 - RNA, 32 nt, Homo Sapiens
aguaaggaggguggccaaaugguaaacuauug

SEQ ID NO: 146105 - RNA, 32 nt, Homo Sapiens
ucugaccuagcugcgcggccccggcccgggag

SEQ ID NO: 146106 - RNA, 32 nt, Homo Sapiens
uucccugguuugggggauuugggacuuggccu

SEQ ID NO: 146107 - RNA, 32 nt, Homo Sapiens
uucacugccuucauuauguaucuucucuugcc

SEQ ID NO: 146108 - RNA, 32 nt, Homo Sapiens
aauugggccaggcugaggcgcugcugcuggag

SEQ ID NO: 146109 - RNA, 32 nt, Homo Sapiens
uggcacuaaaaauacuaccacuauccaaaaac

SEQ ID NO: 146110 - RNA, 32 nt, Homo Sapiens
gaugacagggugaguuugaugaaaauaucuga

SEQ ID NO: 146111 - RNA, 32 nt, Homo Sapiens
augcugugugagaggcagagugccaaggauga

SEQ ID NO: 146112 - RNA, 32 nt, Homo Sapiens
ccuuguuuugcugucuucaucaucuuaccugu

SEQ ID NO: 146113 - RNA, 32 nt, Homo Sapiens
aggacuggggacggcgguguccuugucuugcc

SEQ ID NO: 146114 - RNA, 32 nt, Homo Sapiens
cauuuuacauuauucuuggaugaugauggauc

SEQ ID NO: 146115 - RNA, 32 nt, Homo Sapiens
ugucauugccagcagaggcuguuccuuccugc

SEQ ID NO: 146116 - RNA, 32 nt, Homo Sapiens
agacucuggcacuggccaggccucgaaccugg

SEQ ID NO: 146117 - RNA, 32 nt, Homo Sapiens
gcaccaaucuggagauucagcaguaaaagaaa

SEQ ID NO: 146118 - RNA, 32 nt, Homo Sapiens
gccaguuacaccucagaaaauaugauuccaaa

SEQ ID NO: 146119 - RNA, 32 nt, Homo Sapiens
aucuuuguuguagaauauuaaaaacuauuuua

SEQ ID NO: 146120 - RNA, 32 nt, Homo Sapiens
aaauuucaaaagacauguuguaaauuaggagg

SEQ ID NO: 146121 - RNA, 32 nt, Homo Sapiens
uuggacccugaacugcaccucugucaagagcc

SEQ ID NO: 146122 - RNA, 32 nt, Homo Sapiens
aggugccuucuuauucucacuccaccacccaa

SEQ ID NO: 146123 - RNA, 32 nt, Homo Sapiens
cuggaucugcugugaccaggguguggcugaca

SEQ ID NO: 146124 - RNA, 32 nt, Homo Sapiens
gagcggugaagagcuuacagucgggugagcaa

SEQ ID NO: 146125 - RNA, 32 nt, Homo Sapiens
agccauuuauaccuuugaaauauuaaaaucac

SEQ ID NO: 146126 - RNA, 32 nt, Homo Sapiens
cagccauccuccccgccuugggggcuccauga

SEQ ID NO: 146127 - RNA, 32 nt, Homo Sapiens
uuuccauagcuacuauaugcauaaacaacagu

SEQ ID NO: 146128 - RNA, 32 nt, Homo Sapiens
gcaccguguguggggggcuggcgugggcacgu

SEQ ID NO: 146129 - RNA, 28 nt, Homo Sapiens
acauauagguuguaaauguguuuaaaac

SEQ ID NO: 146130 - RNA, 32 nt, Homo Sapiens
aagauguuuacuacaaaagcaugccaaaccua

SEQ ID NO: 146131 - RNA, 32 nt, Homo Sapiens
aaagcuggcgagcgcggcaccccaccagaguc

SEQ ID NO: 146132 - RNA, 32 nt, Homo Sapiens
ggggccagcagccccaggagucccagacccgu

SEQ ID NO: 146133 - RNA, 32 nt, Homo Sapiens
agggccacaggcugaggcgcccgcgucccgga

SEQ ID NO: 146134 - RNA, 32 nt, Homo Sapiens
gcucuggccccaauccuccccaccagucucac

SEQ ID NO: 146135 - RNA, 32 nt, Homo Sapiens
gcggggcuccugccucccggccugguccccga

SEQ ID NO: 146136 - RNA, 32 nt, Homo Sapiens
ggcuggaacacuuucaguuucaggagugcaag

SEQ ID NO: 146137 - RNA, 32 nt, Homo Sapiens
gaaguuacugaaugcaccauggucaaaacgga

SEQ ID NO: 146138 - RNA, 32 nt, Homo Sapiens
caggccccagcaugugcauuggagccuucauu

SEQ ID NO: 146139 - RNA, 32 nt, Homo Sapiens
caguuaauuuuuguauuuuugguagagauagg

SEQ ID NO: 146140 - RNA, 31 nt, Homo Sapiens
auucauaguuugacuuuucauaagcaaauaa

SEQ ID NO: 146141 - RNA, 32 nt, Homo Sapiens
gugagcaucuccucuccacaccugccuggcac

SEQ ID NO: 146142 - RNA, 32 nt, Homo Sapiens
caggccaguauggagcaccucacgcacagcuc

SEQ ID NO: 146143 - RNA, 32 nt, Homo Sapiens
uuuaaauauuuugacuuguugaggguauguuu

SEQ ID NO: 146144 - RNA, 32 nt, Homo Sapiens
cucaccucuaccccaaauaccucuguucuuag

SEQ ID NO: 146145 - RNA, 30 nt, Homo Sapiens
uauaaaccacuugcuacaugacccaugaaa

SEQ ID NO: 146146 - RNA, 32 nt, Homo Sapiens
ggcuucggcucccgcccggcgcagagccgcgg

SEQ ID NO: 146147 - RNA, 32 nt, Homo Sapiens
cuucugaccagcugcauagacauggcuccagg

SEQ ID NO: 146148 - RNA, 32 nt, Homo Sapiens
ggacgcggcagagucacgguggcagcauugag

SEQ ID NO: 146149 - RNA, 32 nt, Homo Sapiens
gcgccauuauaaauaucaaagcccaagaaaug

SEQ ID NO: 146150 - RNA, 32 nt, Homo Sapiens
caguggaaaacuugcaaggaaagcugccgucu

SEQ ID NO: 146151 - RNA, 32 nt, Homo Sapiens
ugcgggugacgucugcugcugcugacugagga

SEQ ID NO: 146152 - RNA, 32 nt, Homo Sapiens
acccucccaucccugcccucuacacugcaagc

SEQ ID NO: 146153 - RNA, 32 nt, Homo Sapiens
gaguuacauuucguauaaaaguuuacaaauaa

SEQ ID NO: 146154 - RNA, 32 nt, Homo Sapiens
uacgaugcgcccgguggugaugacuccuacau

SEQ ID NO: 146155 - RNA, 32 nt, Homo Sapiens
uggucgugacccccaugauggggagugucagg

SEQ ID NO: 146156 - RNA, 32 nt, Homo Sapiens
agaaggaaauacccccaccugcccucagccgu

SEQ ID NO: 146157 - RNA, 32 nt, Homo Sapiens
cuaacuucugcucgucuuucagagcauugucu

SEQ ID NO: 146158 - RNA, 32 nt, Homo Sapiens
gcggggaggcgccccuuguuucccugggguca

SEQ ID NO: 146159 - RNA, 32 nt, Homo Sapiens
auuugaaggagggagggggugcagguucaguu

SEQ ID NO: 146160 - RNA, 31 nt, Homo Sapiens
guuuaccagugagcucucagagcuuaucacu

SEQ ID NO: 146161 - RNA, 32 nt, Homo Sapiens
uaccucaccucuucucaggcaccccucuuccc

SEQ ID NO: 146162 - RNA, 30 nt, Homo Sapiens
gaaaggggaggugcccagugaaauggagcc

SEQ ID NO: 146163 - RNA, 32 nt, Homo Sapiens
gcagggaggagaaauaaaguggugauagucug

SEQ ID NO: 146164 - RNA, 32 nt, Homo Sapiens
gaauauggaauauaguaaaauaaguaaauuuc

SEQ ID NO: 146165 - RNA, 32 nt, Homo Sapiens
gcaauguguuccgcuuuguccugcugacccac

SEQ ID NO: 146166 - RNA, 32 nt, Homo Sapiens
ucuuccucuaguagcccucagugucgaaggug

SEQ ID NO: 146167 - RNA, 32 nt, Homo Sapiens
cacccgacucgcgccuggacacucgcggggcg

SEQ ID NO: 146168 - RNA, 32 nt, Homo Sapiens
ucuguguucuuuguuacuugggugcaauagca

SEQ ID NO: 146169 - RNA, 32 nt, Homo Sapiens
gccaugcgcuggcagcacacccucugcucuuu

SEQ ID NO: 146170 - RNA, 32 nt, Homo Sapiens
cggaagcggcgguggcggccgcggcguaggcg

SEQ ID NO: 146171 - RNA, 32 nt, Homo Sapiens
uuuaugcucuguaaaacaaagaauuguauuca

SEQ ID NO: 146172 - RNA, 32 nt, Homo Sapiens
agacauaaauagaaacaaaacugaaaguagac

SEQ ID NO: 146173 - RNA, 32 nt, Homo Sapiens
aggauugucagcaggacuggggugauggcccc

SEQ ID NO: 146174 - RNA, 32 nt, Homo Sapiens
uugagcuguguggugggcagggggcugguuug

SEQ ID NO: 146175 - RNA, 32 nt, Homo Sapiens
gcggcggcgcgucgggaagugcuuggggcggc

SEQ ID NO: 146176 - RNA, 32 nt, Homo Sapiens
aaauauguauaaauauaugaugcugagucugu

SEQ ID NO: 146177 - RNA, 32 nt, Homo Sapiens
uccugcacggcucagcccugcccgccucccac

SEQ ID NO: 146178 - RNA, 32 nt, Homo Sapiens
auacuguuaacacaccaaaaagaauauggaau

SEQ ID NO: 146179 - RNA, 32 nt, Homo Sapiens
ucucaaaaacaaaauuuaaaaaagauauaagg

SEQ ID NO: 146180 - RNA, 32 nt, Homo Sapiens
aaaacuagcauuacauuauuaaacgauuucua

SEQ ID NO: 146181 - RNA, 32 nt, Homo Sapiens
ucagagagggaagaucugguauuuccuggccu

SEQ ID NO: 146182 - RNA, 32 nt, Homo Sapiens
cuauuucucaugaaauaaugucauuaaaguau

SEQ ID NO: 146183 - RNA, 32 nt, Homo Sapiens
cuugacuuuuucugcuaguguugucuugagug

SEQ ID NO: 146184 - RNA, 32 nt, Homo Sapiens
guucaguauuuaaugccauuuuauucacaugc

SEQ ID NO: 146185 - RNA, 32 nt, Homo Sapiens
auggaauguaucuauuuaaaaagcagcuggaa

SEQ ID NO: 146186 - RNA, 32 nt, Homo Sapiens
gacagggcccccggggccuccucuauaaauca

SEQ ID NO: 146187 - RNA, 32 nt, Homo Sapiens
caagaaggcggggagcagcagagccuugccuu

SEQ ID NO: 146188 - RNA, 32 nt, Homo Sapiens
cuuuuaauuagggaugauaauacuaccuaccu

SEQ ID NO: 146189 - RNA, 32 nt, Homo Sapiens
auuucaaagaggaacucugugcucugcguggg

SEQ ID NO: 146190 - RNA, 32 nt, Homo Sapiens
agaauauagaauucuuuuuuuuuuaaagaagg

SEQ ID NO: 146191 - RNA, 32 nt, Homo Sapiens
aucaggaauaacaaagguacuacaucuuucca

SEQ ID NO: 146192 - RNA, 32 nt, Homo Sapiens
aacacggcuccuagaggccccgcggccucgca

SEQ ID NO: 146193 - RNA, 32 nt, Homo Sapiens
gcugccuucucugccucccacccagggcaaca

SEQ ID NO: 146194 - RNA, 32 nt, Homo Sapiens
uagacucuuggcaagcuccggguugguauacu

SEQ ID NO: 146195 - RNA, 32 nt, Homo Sapiens
ucugccuuccugagucccuuccagucaugugu

SEQ ID NO: 146196 - RNA, 32 nt, Homo Sapiens
auuuaauuugaaguggacuuugaaagucaugg

SEQ ID NO: 146197 - RNA, 32 nt, Homo Sapiens
aacagcgugguacggauaccaguggggcucug

SEQ ID NO: 146198 - RNA, 32 nt, Homo Sapiens
ccggccccccagccccuacaccccgcuucucc

SEQ ID NO: 146199 - RNA, 31 nt, Homo Sapiens
ugagcugcccggcgccugcccugcccaagug

SEQ ID NO: 146200 - RNA, 32 nt, Homo Sapiens
aacucauuucggcuaccauuugcuccaaauuc

SEQ ID NO: 146201 - RNA, 32 nt, Homo Sapiens
uggggguagaaacggugaaaucucuagccucu

SEQ ID NO: 146202 - RNA, 32 nt, Homo Sapiens
cagcucaccggguuagccguggcaccguuggg

SEQ ID NO: 146203 - RNA, 32 nt, Homo Sapiens
caccucccaucagaaaucauguccuugaaagu

SEQ ID NO: 146204 - RNA, 32 nt, Homo Sapiens
uacgggcgcaggggcggggagccggcccggag

SEQ ID NO: 146205 - RNA, 32 nt, Homo Sapiens
ggcugcgucaggcucuuaaagucauguguuug

SEQ ID NO: 146206 - RNA, 32 nt, Homo Sapiens
ucuugugggcauuugucucuagugugauauau

SEQ ID NO: 146207 - RNA, 32 nt, Homo Sapiens
agaugugcggagguuccugggggaaucaaaga

SEQ ID NO: 146208 - RNA, 32 nt, Homo Sapiens
gcugguccuggagcccauccccggggcgcaca

SEQ ID NO: 146209 - RNA, 32 nt, Homo Sapiens
uuaagaugcaaagauaaauaagaaaguugcuu

SEQ ID NO: 146210 - RNA, 32 nt, Homo Sapiens
ucggcagccugcgggggcucucggcccagcag

SEQ ID NO: 146211 - RNA, 32 nt, Homo Sapiens
cagcugaaagagauggauggcuuuuagguuug

SEQ ID NO: 146212 - RNA, 32 nt, Homo Sapiens
uggacguguucgcuuggguuccugcugcggca

SEQ ID NO: 146213 - RNA, 32 nt, Homo Sapiens
ggccgggugcgguggcuuaugcaaaauggcuc

SEQ ID NO: 146214 - RNA, 32 nt, Homo Sapiens
ccugcagacaacaugcagccaugcagggaccc

SEQ ID NO: 146215 - RNA, 32 nt, Homo Sapiens
cacuggaaucugcuuuaccauggccuuuccua

SEQ ID NO: 146216 - RNA, 32 nt, Homo Sapiens
agguaccuaccacuucuucacaugacacaggg

SEQ ID NO: 146217 - RNA, 32 nt, Homo Sapiens
ccggcgcagcccagcccaguccggcgaggucu

SEQ ID NO: 146218 - RNA, 28 nt, Homo Sapiens
aaguaauugucuaaguguuuuucuucgu

SEQ ID NO: 146219 - RNA, 32 nt, Homo Sapiens
gaauacaguacaaucccaacccuacugggagg

SEQ ID NO: 146220 - RNA, 32 nt, Homo Sapiens
guaaguuaucuuacacauaauauguuuuauuu

SEQ ID NO: 146221 - RNA, 32 nt, Homo Sapiens
cugaguuuuacuaccaggcugaaugcuggaga

SEQ ID NO: 146222 - RNA, 32 nt, Homo Sapiens
uccggucauuugugcccuucucuugucaucuc

SEQ ID NO: 146223 - RNA, 32 nt, Homo Sapiens
gucauguuuccacaacaucgugaaugaguuua

SEQ ID NO: 146224 - RNA, 32 nt, Homo Sapiens
cccagcaguuuggaaggccagggcagguggau

SEQ ID NO: 146225 - RNA, 32 nt, Homo Sapiens
agacaagacagaggggagcaguggccaucauc

SEQ ID NO: 146226 - RNA, 32 nt, Homo Sapiens
aaauuagcugggugugguggcagucaccugua

SEQ ID NO: 146227 - RNA, 32 nt, Homo Sapiens
ggugguuaagguuuagugggaugaaggaccug

SEQ ID NO: 146228 - RNA, 32 nt, Homo Sapiens
aggggacccaccccagugaggaaguagauugc

SEQ ID NO: 146229 - RNA, 32 nt, Homo Sapiens
ggcauuacugucaccugacuugaggagcuguu

SEQ ID NO: 146230 - RNA, 32 nt, Homo Sapiens
ucccugcccgucuugucccucugccccuccca

SEQ ID NO: 146231 - RNA, 32 nt, Homo Sapiens
ccggcgguggccugggauuggcugugaggucc

SEQ ID NO: 146232 - RNA, 32 nt, Homo Sapiens
gagcaucaggcuccugcagagccccauccccc

SEQ ID NO: 146233 - RNA, 30 nt, Homo Sapiens
cuuugaaagccaaugggggaaaaaaaucca

SEQ ID NO: 146234 - RNA, 32 nt, Homo Sapiens
ccacgucagggugaccaucugugguaaccgag

SEQ ID NO: 146235 - RNA, 32 nt, Homo Sapiens
ucuuaggugauuuauaaagguuuggggugagg

SEQ ID NO: 146236 - RNA, 32 nt, Homo Sapiens
agccggugaugaacaaggaaagugccugguug

SEQ ID NO: 146237 - RNA, 31 nt, Homo Sapiens
gggccggagcgagaagauggcgaagacguac

SEQ ID NO: 146238 - RNA, 32 nt, Homo Sapiens
gcccuagugggagaggcggcggcggcggccga

SEQ ID NO: 146239 - RNA, 32 nt, Homo Sapiens
caagaucugcagggggugugucugcucaguaa

SEQ ID NO: 146240 - RNA, 32 nt, Homo Sapiens
aagcaagaaauauuuauguagaaguucuuaug

SEQ ID NO: 146241 - RNA, 32 nt, Homo Sapiens
aaauauuuucuuuguuaaaauagaaugguauc

SEQ ID NO: 146242 - RNA, 32 nt, Homo Sapiens
caacauaggaauuuggggagcacauaauucaa

SEQ ID NO: 146243 - RNA, 32 nt, Homo Sapiens
ccuguguguguguagaugagugugcugaaggu

SEQ ID NO: 146244 - RNA, 32 nt, Homo Sapiens
uuguuaaaguuccauauuggaaggaaaagacu

SEQ ID NO: 146245 - RNA, 32 nt, Homo Sapiens
guuccacuuguggagaucccaccugccgcuag

SEQ ID NO: 146246 - RNA, 32 nt, Homo Sapiens
gcgucugacccuugguggguugccagacauuc

SEQ ID NO: 146247 - RNA, 32 nt, Homo Sapiens
aguugauuuuuccaagagcgucgaagacucuc

SEQ ID NO: 146248 - RNA, 32 nt, Homo Sapiens
cugugucccagagcuucacugguggagcugga

SEQ ID NO: 146249 - RNA, 32 nt, Homo Sapiens
augggaaggugggcgggcaggggagggucagc

SEQ ID NO: 146250 - RNA, 32 nt, Homo Sapiens
aagcuugggcugggcugcuuggggcuuggcau

SEQ ID NO: 146251 - RNA, 32 nt, Homo Sapiens
accuggaaggcagaugggagggggcuggucug

SEQ ID NO: 146252 - RNA, 32 nt, Homo Sapiens
uggggccgcgcgccucgggcgcuacgaacccg

SEQ ID NO: 146253 - RNA, 26 nt, Homo Sapiens
gauggcugccgcugggggcgcccggc

SEQ ID NO: 146254 - RNA, 32 nt, Homo Sapiens
guaauuugacuucugacauguuggcaaucaaa

SEQ ID NO: 146255 - RNA, 32 nt, Homo Sapiens
uggaaauaaacuaauuuguauggguuuagaug

SEQ ID NO: 146256 - RNA, 32 nt, Homo Sapiens
caaacaaagcuugcaaaauauuuuaugguuuc

SEQ ID NO: 146257 - RNA, 32 nt, Homo Sapiens
cccgcacccuccccguggcucaggucuccccu

SEQ ID NO: 146258 - RNA, 32 nt, Homo Sapiens
uuaugugguuuucuuuuaaaaagcuccuguuu

SEQ ID NO: 146259 - RNA, 32 nt, Homo Sapiens
ccucagacggaagaggcaggauuggagagauu

SEQ ID NO: 146260 - RNA, 32 nt, Homo Sapiens
gccgcacgcgccggacgaggcucgcugcgcuc

SEQ ID NO: 146261 - RNA, 32 nt, Homo Sapiens
ugacauguacuuagaaagcuuaucuuagagcc

SEQ ID NO: 146262 - RNA, 32 nt, Homo Sapiens
aucuccacucucuagcacaucuggccucacgc

SEQ ID NO: 146263 - RNA, 32 nt, Homo Sapiens
ucacaucuaccuaaauguugcacuaugcccuu

SEQ ID NO: 146264 - RNA, 30 nt, Homo Sapiens
ugucugcuccggcagcaccaugucgcucuu

SEQ ID NO: 146265 - RNA, 32 nt, Homo Sapiens
gccaggcuggagaggagacauucugcgcugca

SEQ ID NO: 146266 - RNA, 32 nt, Homo Sapiens
gaacuuuuuuaaaaagaauuuguaauaauccg

SEQ ID NO: 146267 - RNA, 32 nt, Homo Sapiens
uggcauuucauucauacuucuguagagaacgg

SEQ ID NO: 146268 - RNA, 32 nt, Homo Sapiens
agugacuuggauuuuguaaaucuuuccuuucc

SEQ ID NO: 146269 - RNA, 30 nt, Homo Sapiens
ccagcugucugugaccugcgagggagucca

SEQ ID NO: 146270 - RNA, 32 nt, Homo Sapiens
acaauuugggucuauuuuuuuauauggauugu

SEQ ID NO: 146271 - RNA, 32 nt, Homo Sapiens
aaaaauccuaaaaacaaacaaacaaaaaaaac

SEQ ID NO: 146272 - RNA, 32 nt, Homo Sapiens
uuguuuuuuaagaaacaaaagugcauaguuua

SEQ ID NO: 146273 - RNA, 32 nt, Homo Sapiens
auaaugggcuuuugcacuguuauuauuuuucc

SEQ ID NO: 146274 - RNA, 32 nt, Homo Sapiens
guggggaggacgaggaugugggaccgccagcc

SEQ ID NO: 146275 - RNA, 32 nt, Homo Sapiens
gaagugcuugagaugugacaugaccaauugaa

SEQ ID NO: 146276 - RNA, 32 nt, Homo Sapiens
cuuucuaaaaauuuagaaaauguuaucuuuuu

SEQ ID NO: 146277 - RNA, 32 nt, Homo Sapiens
guucccuggggguggggcgcuugcccaggaga

SEQ ID NO: 146278 - RNA, 32 nt, Homo Sapiens
ccccaccccuccccacugccagauccuuauug

SEQ ID NO: 146279 - RNA, 32 nt, Homo Sapiens
cacugcauguacccggaccccuaggccuggcc

SEQ ID NO: 146280 - RNA, 32 nt, Homo Sapiens
gcaauacuucucugcccuucauugucucaucu

SEQ ID NO: 146281 - RNA, 32 nt, Homo Sapiens
ccggacccugcgaccgggccugaggaggugau

SEQ ID NO: 146282 - RNA, 32 nt, Homo Sapiens
ugaaguaaaaaauaaauuugcucugcaauauu

SEQ ID NO: 146283 - RNA, 32 nt, Homo Sapiens
cacuuugcaaaggagcucacuguggugucugu

SEQ ID NO: 146284 - RNA, 32 nt, Homo Sapiens
uagguacccagugugaugugggacaugaaugu

SEQ ID NO: 146285 - RNA, 32 nt, Homo Sapiens
cuguucgcaugcugaccuguguuuccucccca

SEQ ID NO: 146286 - RNA, 32 nt, Homo Sapiens
ggcuuugagacuuucccacaugauaaaagaaa

SEQ ID NO: 146287 - RNA, 32 nt, Homo Sapiens
uaucaaauuuuuguuauaagauaaauguuauc

SEQ ID NO: 146288 - RNA, 32 nt, Homo Sapiens
agacaaacagaaaaagaagacuaagaugacag

SEQ ID NO: 146289 - RNA, 32 nt, Homo Sapiens
cuucucuucacugcucugcguccucuguuccu

SEQ ID NO: 146290 - RNA, 32 nt, Homo Sapiens
ugugagccaaccccacccgcuccacccuuuuu

SEQ ID NO: 146291 - RNA, 32 nt, Homo Sapiens
acuguggccugaacaggagauuuuauuauauc

SEQ ID NO: 146292 - RNA, 32 nt, Homo Sapiens
ccaccugccgcaguggaccccuggcuuaguuu

SEQ ID NO: 146293 - RNA, 30 nt, Homo Sapiens
agagggaugcccaugggggaacaugugacu

SEQ ID NO: 146294 - RNA, 32 nt, Homo Sapiens
uuuucaucauuaccauuaaaugccauuggaua

SEQ ID NO: 146295 - RNA, 32 nt, Homo Sapiens
ggauucaggggugucuuuguauaauaugagag

SEQ ID NO: 146296 - RNA, 32 nt, Homo Sapiens
gagaugccugacggcagcugguucugcaauga

SEQ ID NO: 146297 - RNA, 32 nt, Homo Sapiens
gcuugaagaggaauaauauacacauaacuucu

SEQ ID NO: 146298 - RNA, 32 nt, Homo Sapiens
cagacccgagggucgccgcugguagggucgcu

SEQ ID NO: 146299 - RNA, 32 nt, Homo Sapiens
ggccgcggccggccgagcugccuggcgggguu

SEQ ID NO: 146300 - RNA, 32 nt, Homo Sapiens
caaagccaguguggacaaaugaaacagacaaa

SEQ ID NO: 146301 - RNA, 32 nt, Homo Sapiens
aggcugcuggcaggauuugucagauaaucaac

SEQ ID NO: 146302 - RNA, 32 nt, Homo Sapiens
uugggggaaucuguuuuccaguuucucagaac

SEQ ID NO: 146303 - RNA, 32 nt, Homo Sapiens
uauuauuuucccuuauuuuucuuucauuaguu

SEQ ID NO: 146304 - RNA, 32 nt, Homo Sapiens
uuucuauuuugcagcaguaccaucccacugau

SEQ ID NO: 146305 - RNA, 32 nt, Homo Sapiens
accugagacauucugauuuggaugaugcuaga

SEQ ID NO: 146306 - RNA, 32 nt, Homo Sapiens
uuccaaagaaagaagaaguaaaaacuaaaagg

SEQ ID NO: 146307 - RNA, 32 nt, Homo Sapiens
uaccauaaccaaccuauugccuaugagaaaca

SEQ ID NO: 146308 - RNA, 32 nt, Homo Sapiens
caagggaaagugagaagaaaauuaauguauua

SEQ ID NO: 146309 - RNA, 32 nt, Homo Sapiens
gauauagccuucaaaacagaugggucagaggu

SEQ ID NO: 146310 - RNA, 32 nt, Homo Sapiens
ugaauaaaauguuucagguauuuuuguuucau

SEQ ID NO: 146311 - RNA, 32 nt, Homo Sapiens
cuuuaccaucuuugaauauauuucauagaaau

SEQ ID NO: 146312 - RNA, 32 nt, Homo Sapiens
aaugagcuaauagagcaaauguagcaaaacau

SEQ ID NO: 146313 - RNA, 32 nt, Homo Sapiens
ccuggucucuccagcccucacucggaaccgca

SEQ ID NO: 146314 - RNA, 32 nt, Homo Sapiens
agacuuugauucacuuaauuccaacucaguga

SEQ ID NO: 146315 - RNA, 32 nt, Homo Sapiens
ggauugaguuuggggguagcuccaagccuucu

SEQ ID NO: 146316 - RNA, 31 nt, Homo Sapiens
gaggccucacggagcucguaguuucccggac

SEQ ID NO: 146317 - RNA, 32 nt, Homo Sapiens
caucaaacuucagauuuucugaugcuugcaug

SEQ ID NO: 146318 - RNA, 32 nt, Homo Sapiens
cuggggggaaggacggggcgcccggcgaggcc

SEQ ID NO: 146319 - RNA, 32 nt, Homo Sapiens
cuggacugccccccugcacccagcagcacagg

SEQ ID NO: 146320 - RNA, 32 nt, Homo Sapiens
cugccccgucggacugcccccagaaagccucc

SEQ ID NO: 146321 - RNA, 32 nt, Homo Sapiens
ugcccgaggggcgggcggcggugucuguaugu

SEQ ID NO: 146322 - RNA, 32 nt, Homo Sapiens
gagggggccaucugcugcgcccggccccacug

SEQ ID NO: 146323 - RNA, 32 nt, Homo Sapiens
uuuuggaaguuccaacaaugacuuuauuuugc

SEQ ID NO: 146324 - RNA, 32 nt, Homo Sapiens
cgcagaagaagcuggaccuggccuggacucug

SEQ ID NO: 146325 - RNA, 32 nt, Homo Sapiens
gaaacuagaaacaaaaugcuugcucaucuccc

SEQ ID NO: 146326 - RNA, 32 nt, Homo Sapiens
ugcuuuacuucauucaucacugcaucuccaac

SEQ ID NO: 146327 - RNA, 32 nt, Homo Sapiens
cccgcggcgcgcgcagcugacggacauugagg

SEQ ID NO: 146328 - RNA, 32 nt, Homo Sapiens
uucacuauacaauauguaguagauaaauuuac

SEQ ID NO: 146329 - RNA, 32 nt, Homo Sapiens
ccagcaccagccccagccccagcucccuccgg

SEQ ID NO: 146330 - RNA, 32 nt, Homo Sapiens
aacccuacaaauaaauaagcggggucgggggc

SEQ ID NO: 146331 - RNA, 32 nt, Homo Sapiens
gcacagggccagcagcagcacaaccuugacca

SEQ ID NO: 146332 - RNA, 32 nt, Homo Sapiens
gggccccagugagacucccucgaagcggcagc

SEQ ID NO: 146333 - RNA, 29 nt, Homo Sapiens
gggugcgaggggagcaggacgcccggccg

SEQ ID NO: 146334 - RNA, 32 nt, Homo Sapiens
gggcugauggguaggcgcuuguccccagugag

SEQ ID NO: 146335 - RNA, 32 nt, Homo Sapiens
aguuagagaaagggcuggcuucuguuuaccug

SEQ ID NO: 146336 - RNA, 32 nt, Homo Sapiens
gagcugcuugggaggcacagguccugggacau

SEQ ID NO: 146337 - RNA, 32 nt, Homo Sapiens
acauauuauaguaaaaaaugaggugggagggc

SEQ ID NO: 146338 - RNA, 32 nt, Homo Sapiens
acagacaucucaacugguucaaaauugaaguu

SEQ ID NO: 146339 - RNA, 32 nt, Homo Sapiens
gcugggcccgggggcgggacuggggagggaac

SEQ ID NO: 146340 - RNA, 32 nt, Homo Sapiens
gaugaggaggacaacacugccuuucaaacuuu

SEQ ID NO: 146341 - RNA, 32 nt, Homo Sapiens
auuuuguguaaauuauuuauauuuaauauuau

SEQ ID NO: 146342 - RNA, 32 nt, Homo Sapiens
cuggccgugugcauggccucccgggcuguggg

SEQ ID NO: 146343 - RNA, 32 nt, Homo Sapiens
cucagugcauaugugaaagagaaugaugcauu

SEQ ID NO: 146344 - RNA, 32 nt, Homo Sapiens
cucagaggaaguggucugugucuguaugaacu

SEQ ID NO: 146345 - RNA, 32 nt, Homo Sapiens
aagcgacauaaggaugaaauacugaugaaucu

SEQ ID NO: 146346 - RNA, 32 nt, Homo Sapiens
aaauaaaggcgcugccacucagcccucaaaaa

SEQ ID NO: 146347 - RNA, 30 nt, Homo Sapiens
gggacucuggacuccauuccuccaggagcu

SEQ ID NO: 146348 - RNA, 32 nt, Homo Sapiens
ccccagccucccgaggcccagcccuugccuca

SEQ ID NO: 146349 - RNA, 32 nt, Homo Sapiens
uuauguauuaauauaugcauucacuugaaaaa

SEQ ID NO: 146350 - RNA, 32 nt, Homo Sapiens
uucucagccccggcuccugccugucauggccu

SEQ ID NO: 146351 - RNA, 32 nt, Homo Sapiens
agggguccgcgggggugcgcgcggggccucga

SEQ ID NO: 146352 - RNA, 32 nt, Homo Sapiens
cgggcaugggugggggcgccgggccgucacga

SEQ ID NO: 146353 - RNA, 32 nt, Homo Sapiens
agucuaggaaaagaaagaugggaaaacgggau

SEQ ID NO: 146354 - RNA, 32 nt, Homo Sapiens
cccagcgggaugcggugaagggcgagcggcgc

SEQ ID NO: 146355 - RNA, 32 nt, Homo Sapiens
ggcucaaguuuuuauaguuauuaaauguuuca

SEQ ID NO: 146356 - RNA, 31 nt, Homo Sapiens
caagggaaauaaaaggugguaaaauucaguu

SEQ ID NO: 146357 - RNA, 32 nt, Homo Sapiens
cauaauaugcuguuuacauuuauuuucuucag

SEQ ID NO: 146358 - RNA, 32 nt, Homo Sapiens
ucggcauuguuugccuggauccaguccugcca

SEQ ID NO: 146359 - RNA, 32 nt, Homo Sapiens
uuucauauguguggcuauuucuuaauuuaaaa

SEQ ID NO: 146360 - RNA, 32 nt, Homo Sapiens
uuugcaauuuucugggguuuuguuuuuuaccu

SEQ ID NO: 146361 - RNA, 32 nt, Homo Sapiens
aaauagcacauccuccaacguuaaaagacagu

SEQ ID NO: 146362 - RNA, 32 nt, Homo Sapiens
gggcccaaaaacaagcaaaaccaaagaauaug

SEQ ID NO: 146363 - RNA, 32 nt, Homo Sapiens
uggccgguagaaaacagacaggugauaauuac

SEQ ID NO: 146364 - RNA, 32 nt, Homo Sapiens
cugcccgcccccagccuccccacccaggccgg

SEQ ID NO: 146365 - RNA, 32 nt, Homo Sapiens
uaugaauucacagauauuuaaagaaugagaaa

SEQ ID NO: 146366 - RNA, 32 nt, Homo Sapiens
guauucgggcaaagaggacaugagcaagcgua

SEQ ID NO: 146367 - RNA, 32 nt, Homo Sapiens
ccuggccccaauuuacuaauccugucuuauuu

SEQ ID NO: 146368 - RNA, 32 nt, Homo Sapiens
uuuuaaugggcacuucugggacccugaagaga

SEQ ID NO: 146369 - RNA, 32 nt, Homo Sapiens
gguaggcagcaaaugagauuaucccuccaguc

SEQ ID NO: 146370 - RNA, 32 nt, Homo Sapiens
cucuucauauguuaacuuuucuuauugauuug

SEQ ID NO: 146371 - RNA, 32 nt, Homo Sapiens
cauauaaauuuaauaauuuguuuucuauuccu

SEQ ID NO: 146372 - RNA, 32 nt, Homo Sapiens
uuguucgcuuuagugccggcgccauggggucg

SEQ ID NO: 146373 - RNA, 32 nt, Homo Sapiens
ucaagauuuaauaugagcaacccauuauuugc

SEQ ID NO: 146374 - RNA, 32 nt, Homo Sapiens
acagggcagggacacauguguggcauacaguu

SEQ ID NO: 146375 - RNA, 32 nt, Homo Sapiens
ccccgucuccccuuuccaaccccaaaggcuca

SEQ ID NO: 146376 - RNA, 32 nt, Homo Sapiens
uacuuucuguuguaucacaaucagguaaaagu

SEQ ID NO: 146377 - RNA, 32 nt, Homo Sapiens
ucucggcagcaacacccaccccugcccuucuu

SEQ ID NO: 146378 - RNA, 32 nt, Homo Sapiens
ugaacaacugguuuaucuacaaucucaaaucc

SEQ ID NO: 146379 - RNA, 32 nt, Homo Sapiens
ucuguuuuugggcugagucaccaccuuugccu

SEQ ID NO: 146380 - RNA, 32 nt, Homo Sapiens
gcagugaucccuccgcggccaaccuccccagg

SEQ ID NO: 146381 - RNA, 32 nt, Homo Sapiens
gcccggucccugucacauuuguuaaaugaaag

SEQ ID NO: 146382 - RNA, 32 nt, Homo Sapiens
aggaggccacugggcugaggccaaugaauggg

SEQ ID NO: 146383 - RNA, 32 nt, Homo Sapiens
cuuuguuccuucccggguuuguccugagccug

SEQ ID NO: 146384 - RNA, 32 nt, Homo Sapiens
cgaggacuguauuugugacuaauuguauaaca

SEQ ID NO: 146385 - RNA, 32 nt, Homo Sapiens
gcaggugccccgaggccaggccuguguuuucc

SEQ ID NO: 146386 - RNA, 32 nt, Homo Sapiens
cagccuuccaaguagcugggaguacaagcaua

SEQ ID NO: 146387 - RNA, 32 nt, Homo Sapiens
aaguaugcaauuuuuauuuugguuauauuaca

SEQ ID NO: 146388 - RNA, 32 nt, Homo Sapiens
cuaaaaugugauuguuucuguucauuguguau

SEQ ID NO: 146389 - RNA, 32 nt, Homo Sapiens
ccgcugcagcugucacaucccugggcuuaugg

SEQ ID NO: 146390 - RNA, 32 nt, Homo Sapiens
uuggguaccauguauauuuuccgcuuugacuu

SEQ ID NO: 146391 - RNA, 32 nt, Homo Sapiens
caaaaauguauaauucagugguuuuuagucuc

SEQ ID NO: 146392 - RNA, 32 nt, Homo Sapiens
cuuccaccagggccuuuuuggccauggcagcg

SEQ ID NO: 146393 - RNA, 32 nt, Homo Sapiens
caugauuaacuccccaagguccugcauauuuu

SEQ ID NO: 146394 - RNA, 32 nt, Homo Sapiens
gcucauuccucuugucaucucuccaggcccag

SEQ ID NO: 146395 - RNA, 32 nt, Homo Sapiens
gaaaggcugaugaaacuaucagauacuaaaac

SEQ ID NO: 146396 - RNA, 32 nt, Homo Sapiens
gguacuugauauaaaaaggaauauuacauuau

SEQ ID NO: 146397 - RNA, 32 nt, Homo Sapiens
aaauacucggccugggggaggcugguccguga

SEQ ID NO: 146398 - RNA, 32 nt, Homo Sapiens
agcacccucagggucuuaggucuucaugcccu

SEQ ID NO: 146399 - RNA, 32 nt, Homo Sapiens
uguguccuuggaguguguguccugcaaggcac

SEQ ID NO: 146400 - RNA, 32 nt, Homo Sapiens
ggcggcggcggcagcgggagcgcagcucagcu

SEQ ID NO: 146401 - RNA, 32 nt, Homo Sapiens
gugagugaaaaacuugauggaaguggaagauu

SEQ ID NO: 146402 - RNA, 32 nt, Homo Sapiens
gagcuacccgucuggacucgcaggcccugugg

SEQ ID NO: 146403 - RNA, 32 nt, Homo Sapiens
uagcucagugauugucccaaugucacacaagu

SEQ ID NO: 146404 - RNA, 32 nt, Homo Sapiens
ggacacgagcccccgggcgcccgcugggagcg

SEQ ID NO: 146405 - RNA, 32 nt, Homo Sapiens
acaagcacaauauaaaaaacaauuagaccagu

SEQ ID NO: 146406 - RNA, 32 nt, Homo Sapiens
gucccaguuuaauuaaucuuccaauuagcuga

SEQ ID NO: 146407 - RNA, 32 nt, Homo Sapiens
gucggagaaaagugccgcgaaaaaauggauga

SEQ ID NO: 146408 - RNA, 32 nt, Homo Sapiens
aggcugucuggcuugggggagaucugacagcc

SEQ ID NO: 146409 - RNA, 32 nt, Homo Sapiens
ggguuauaaaacaaaacaaaauccuuacauca

SEQ ID NO: 146410 - RNA, 32 nt, Homo Sapiens
uaccauuugucuuuuaauuggcaaauuugaug

SEQ ID NO: 146411 - RNA, 32 nt, Homo Sapiens
ucuaauuugucuugugauuuuaaacuuaugag

SEQ ID NO: 146412 - RNA, 32 nt, Homo Sapiens
ugggucccccugcuccuccucgaccccgcaau

SEQ ID NO: 146413 - RNA, 32 nt, Homo Sapiens
uuuuucccaaaacaucgucucagcucauuuau

SEQ ID NO: 146414 - RNA, 32 nt, Homo Sapiens
auucaugauuuaagagcaguuuuguaaaaaau

SEQ ID NO: 146415 - RNA, 32 nt, Homo Sapiens
agaacaaggucuggaaauguuuagacaggaua

SEQ ID NO: 146416 - RNA, 32 nt, Homo Sapiens
uaucgcuucucagccgccuucuccaggcgcag

SEQ ID NO: 146417 - RNA, 32 nt, Homo Sapiens
augcucgauuggaaacaaagcaucuaucucug

SEQ ID NO: 146418 - RNA, 32 nt, Homo Sapiens
guuagucagcauagaauccuggagcgggaauc

SEQ ID NO: 146419 - RNA, 32 nt, Homo Sapiens
gggcugugcgcgcgcgagcgggugugacgacu

SEQ ID NO: 146420 - RNA, 32 nt, Homo Sapiens
aaguaaaaccaucaagccaacaacagggucuu

SEQ ID NO: 146421 - RNA, 32 nt, Homo Sapiens
acauugagucuucaugcaucaaugaaaugaaa

SEQ ID NO: 146422 - RNA, 32 nt, Homo Sapiens
aggguucuggagggcucuguccuuccggcaag

SEQ ID NO: 146423 - RNA, 32 nt, Homo Sapiens
agcacauuuccacuuuuagauccuacuccaua

SEQ ID NO: 146424 - RNA, 32 nt, Homo Sapiens
ggaccguuauuuauaaucaggguagcauuaaa

SEQ ID NO: 146425 - RNA, 32 nt, Homo Sapiens
uucccugccggggccugcuggccccuguaagg

SEQ ID NO: 146426 - RNA, 32 nt, Homo Sapiens
aguacuguguuuaaaaaaauguuaugcaaugu

SEQ ID NO: 146427 - RNA, 32 nt, Homo Sapiens
gcucgaggacaaaacacgcgugcgcgcggcgg

SEQ ID NO: 146428 - RNA, 31 nt, Homo Sapiens
aagauaaacaggagaaaguucacacuccugc

SEQ ID NO: 146429 - RNA, 32 nt, Homo Sapiens
gucuuuucauuuuguacauucuucccauucug

SEQ ID NO: 146430 - RNA, 32 nt, Homo Sapiens
cuuaagauuuguuuuucucuuuucacagcaac

SEQ ID NO: 146431 - RNA, 32 nt, Homo Sapiens
gccccugcccucugcccuuuugccuguccuca

SEQ ID NO: 146432 - RNA, 30 nt, Homo Sapiens
uggaaaaaauaaaaauagaguuguacauug

SEQ ID NO: 146433 - RNA, 32 nt, Homo Sapiens
cgccuguaacccuagcacuuugggaguccgag

SEQ ID NO: 146434 - RNA, 32 nt, Homo Sapiens
ucuguggauuaacucaguggcucaacaggcug

SEQ ID NO: 146435 - RNA, 32 nt, Homo Sapiens
ugagucgucuuugcucauggacuugcagcaga

SEQ ID NO: 146436 - RNA, 32 nt, Homo Sapiens
uauaccauccccaccccaagaauuuugaaagc

SEQ ID NO: 146437 - RNA, 32 nt, Homo Sapiens
aauuauaaaugcaauuaacuaagaacagcucu

SEQ ID NO: 146438 - RNA, 32 nt, Homo Sapiens
uggcagagcugugccaaugggaaaucacagau

SEQ ID NO: 146439 - RNA, 32 nt, Homo Sapiens
aggaaugucaggcucugucagagucagccaag

SEQ ID NO: 146440 - RNA, 32 nt, Homo Sapiens
cggacccggccgccgggccccgugcucucagg

SEQ ID NO: 146441 - RNA, 32 nt, Homo Sapiens
ugucauauuccucaccaagaaggggcggcaag

SEQ ID NO: 146442 - RNA, 32 nt, Homo Sapiens
ucauuugcaucauuuuaaccaucuuuuccuug

SEQ ID NO: 146443 - RNA, 32 nt, Homo Sapiens
aggcuggccuacugucaguucaagcaaccagc

SEQ ID NO: 146444 - RNA, 32 nt, Homo Sapiens
cagcuaggacccagcccauccccagaugccug

SEQ ID NO: 146445 - RNA, 32 nt, Homo Sapiens
ccaggguacagcaugugggugccuguuccuuu

SEQ ID NO: 146446 - RNA, 32 nt, Homo Sapiens
aauggggaaaauacccuuuaaauuaugacaga

SEQ ID NO: 146447 - RNA, 29 nt, Homo Sapiens
cucacuugaccuagucauggcaggacaac

SEQ ID NO: 146448 - RNA, 32 nt, Homo Sapiens
cugggaaagggagaauggcaaagacaggcaga

SEQ ID NO: 146449 - RNA, 32 nt, Homo Sapiens
ucaugcaccacuaugagaacuucuggccuguc

SEQ ID NO: 146450 - RNA, 32 nt, Homo Sapiens
ugcccauucccuccacccccaagccccuggca

SEQ ID NO: 146451 - RNA, 32 nt, Homo Sapiens
ucggggccccccagccuccgccaacccagaca

SEQ ID NO: 146452 - RNA, 32 nt, Homo Sapiens
gcacagagguuuguggcacagaauuaaggcgu

SEQ ID NO: 146453 - RNA, 32 nt, Homo Sapiens
cuaugauuaacuugcuucaaauaaaaaguucc

SEQ ID NO: 146454 - RNA, 32 nt, Homo Sapiens
cuugagaaaauuuuucugaaauaugucauuga

SEQ ID NO: 146455 - RNA, 32 nt, Homo Sapiens
uggacguagggucauuagcuuugggaauagaa

SEQ ID NO: 146456 - RNA, 32 nt, Homo Sapiens
ggauccguucgcgcuccuccagccgcugcgcc

SEQ ID NO: 146457 - RNA, 32 nt, Homo Sapiens
cuccacccauucucugauuuuccugccuuugc

SEQ ID NO: 146458 - RNA, 32 nt, Homo Sapiens
uguauggcggguggugggcaaggggcacuggg

SEQ ID NO: 146459 - RNA, 32 nt, Homo Sapiens
gaguagcuggaaccacaggcaugugccaccau

SEQ ID NO: 146460 - RNA, 32 nt, Homo Sapiens
gaggagacguguuaacacucuugccuccuagc

SEQ ID NO: 146461 - RNA, 32 nt, Homo Sapiens
cugccaaggaggagggagagcggcgggagggg

SEQ ID NO: 146462 - RNA, 32 nt, Homo Sapiens
ccucccgaguagcugggauuccaggcgcccgc

SEQ ID NO: 146463 - RNA, 32 nt, Homo Sapiens
ccagucgucuucugccacaaugacauccagga

SEQ ID NO: 146464 - RNA, 32 nt, Homo Sapiens
cuuacacacacacacacacacacacacacacc

SEQ ID NO: 146465 - RNA, 32 nt, Homo Sapiens
uaauuccccccauuuugccucuguccgugccc

SEQ ID NO: 146466 - RNA, 32 nt, Homo Sapiens
uacucauauauuuacauagauauacugucuuu

SEQ ID NO: 146467 - RNA, 32 nt, Homo Sapiens
gaggccguggcgcaggacacgcggcggcgccu

SEQ ID NO: 146468 - RNA, 32 nt, Homo Sapiens
aggcaaaacaaauguaauguugcagauccgca

SEQ ID NO: 146469 - RNA, 32 nt, Homo Sapiens
cugaaccagcaauguaaugauggccucucuca

SEQ ID NO: 146470 - RNA, 32 nt, Homo Sapiens
ugccucccggcggccucugcaggcccaagucg

SEQ ID NO: 146471 - RNA, 32 nt, Homo Sapiens
auuucuuacucuauguauggcuuuguuuucag

SEQ ID NO: 146472 - RNA, 32 nt, Homo Sapiens
gcucuucucgggaaaaagaaaacgcuggggag

SEQ ID NO: 146473 - RNA, 32 nt, Homo Sapiens
ccuuugcugggaggaagaauccacaccgaauc

SEQ ID NO: 146474 - RNA, 32 nt, Homo Sapiens
uauuuuaguucuguuuucuuggggaauauguu

SEQ ID NO: 146475 - RNA, 32 nt, Homo Sapiens
gagucuuuuuaaauaugcucuguuaguuugua

SEQ ID NO: 146476 - RNA, 32 nt, Homo Sapiens
aagacugguuucuagcacuaccggucacggcc

SEQ ID NO: 146477 - RNA, 31 nt, Homo Sapiens
cccuuguugcacugcccccugcuuggccagg

SEQ ID NO: 146478 - RNA, 32 nt, Homo Sapiens
cacggacaugcgcugagccggccggagcgggg

SEQ ID NO: 146479 - RNA, 32 nt, Homo Sapiens
acccuauagagcaugcagucuccaacaugcua

SEQ ID NO: 146480 - RNA, 32 nt, Homo Sapiens
uauguuaaauuugagcugacaguaaaacaugc

SEQ ID NO: 146481 - RNA, 32 nt, Homo Sapiens
uuuguugucuuauuugugguggcacucguuua

SEQ ID NO: 146482 - RNA, 32 nt, Homo Sapiens
gaagggcugaugcagguguggagucaaaugug

SEQ ID NO: 146483 - RNA, 32 nt, Homo Sapiens
uccuggcuccagaggcagcugggccgggccaa

SEQ ID NO: 146484 - RNA, 32 nt, Homo Sapiens
guccacgccccgaggccugggcucaggccgaa

SEQ ID NO: 146485 - RNA, 32 nt, Homo Sapiens
gauaggcaaccacuugauuggugugugcuacu

SEQ ID NO: 146486 - RNA, 32 nt, Homo Sapiens
cucgaggaucaaacagagcauacugaaucagc

SEQ ID NO: 146487 - RNA, 32 nt, Homo Sapiens
aacuuuauuuuggucugaacaaaccuuguaaa

SEQ ID NO: 146488 - RNA, 32 nt, Homo Sapiens
cugggguuugcaucacuccacugcacaguguu

SEQ ID NO: 146489 - RNA, 32 nt, Homo Sapiens
accaaaaaacugaacugaaaucaucuaaagag

SEQ ID NO: 146490 - RNA, 32 nt, Homo Sapiens
uuaacgaauacuuuguucagggcucacucucu

SEQ ID NO: 146491 - RNA, 27 nt, Homo Sapiens
caaugaggggcagggcccgaggagugg

SEQ ID NO: 146492 - RNA, 32 nt, Homo Sapiens
acauaaaacuaaaauuuucugaaucgugaaaa

SEQ ID NO: 146493 - RNA, 32 nt, Homo Sapiens
uccaagugcugaagaagaccuggucagccuaa

SEQ ID NO: 146494 - RNA, 32 nt, Homo Sapiens
aacccaggccccaucucacucuucaguuuccc

SEQ ID NO: 146495 - RNA, 32 nt, Homo Sapiens
cagguuaggcagggugggaggggaggcucucu

SEQ ID NO: 146496 - RNA, 32 nt, Homo Sapiens
agggguccuuugcggugagcuauguuuacauu

SEQ ID NO: 146497 - RNA, 32 nt, Homo Sapiens
uccaacaccugggcggccgccgcgccccuccc

SEQ ID NO: 146498 - RNA, 32 nt, Homo Sapiens
gcuuagcgucugggcaucuuccuugacuuacu

SEQ ID NO: 146499 - RNA, 32 nt, Homo Sapiens
uugucucaguauuacuuguuuaaaagacuauc

SEQ ID NO: 146500 - RNA, 32 nt, Homo Sapiens
aaaauaaaugucaguuuauauuuuacacaucc

SEQ ID NO: 146501 - RNA, 32 nt, Homo Sapiens
ugagguuguagauaagauagugaccagagugg

SEQ ID NO: 146502 - RNA, 31 nt, Homo Sapiens
auugcaucgggccccuauucggacuuggucu

SEQ ID NO: 146503 - RNA, 32 nt, Homo Sapiens
gacacggcuccugccuucauggagcuuuuagg

SEQ ID NO: 146504 - RNA, 32 nt, Homo Sapiens
uauuuaacaaauaaauaccucauugauuauau

SEQ ID NO: 146505 - RNA, 32 nt, Homo Sapiens
ggacauuuucucauugguuuugccgugaaaau

SEQ ID NO: 146506 - RNA, 32 nt, Homo Sapiens
uuuuaacaaaaauaaucuuaggauaagaauua

SEQ ID NO: 146507 - RNA, 31 nt, Homo Sapiens
aaaugucauuugacuaugucaaucuguauau

SEQ ID NO: 146508 - RNA, 32 nt, Homo Sapiens
acacucaacagccuccaccucccuuucuaccc

SEQ ID NO: 146509 - RNA, 32 nt, Homo Sapiens
uuauugggggaaucagagcccauuccacaccg

SEQ ID NO: 146510 - RNA, 32 nt, Homo Sapiens
ggcugggccccgaggguggaaacguauucgcg

SEQ ID NO: 146511 - RNA, 32 nt, Homo Sapiens
uuuuuuaaauauauuuuuuagauugguaauau

SEQ ID NO: 146512 - RNA, 32 nt, Homo Sapiens
ucugacaaucaaucaaucaauggccuagagca

SEQ ID NO: 146513 - RNA, 32 nt, Homo Sapiens
ucgcccuagacuuuggggguggcucucuugua

SEQ ID NO: 146514 - RNA, 32 nt, Homo Sapiens
cgucacgcgucccgcgccuccucgcgccugca

SEQ ID NO: 146515 - RNA, 32 nt, Homo Sapiens
ucaguauuuuugcuggauaaauccauuuuaga

SEQ ID NO: 146516 - RNA, 28 nt, Homo Sapiens
cguguguguaugcguauguguuucauuu

SEQ ID NO: 146517 - RNA, 32 nt, Homo Sapiens
cgcguaccuaggaugccgcguggaagccgaag

SEQ ID NO: 146518 - RNA, 32 nt, Homo Sapiens
acgauagucaccccugcccccaggggcuccuu

SEQ ID NO: 146519 - RNA, 32 nt, Homo Sapiens
uuuucagauaauaugugaccaauauacuggga

SEQ ID NO: 146520 - RNA, 32 nt, Homo Sapiens
cggaugccaggagucgcaaagggccgaccacg

SEQ ID NO: 146521 - RNA, 32 nt, Homo Sapiens
cauguccuaccccugaccccagccucaagggg

SEQ ID NO: 146522 - RNA, 32 nt, Homo Sapiens
gcagaugcugucagccucgcauccuacaggaa

SEQ ID NO: 146523 - RNA, 32 nt, Homo Sapiens
uguccagcacaccugccgucuucacuucccca

SEQ ID NO: 146524 - RNA, 32 nt, Homo Sapiens
agcugcuuucuguuuuuuuuuaauaugcgaua

SEQ ID NO: 146525 - RNA, 32 nt, Homo Sapiens
cagggcgucacugagggcuacaauggcaccau

SEQ ID NO: 146526 - RNA, 32 nt, Homo Sapiens
gaauggcguggcacauauugaagcauuucuca

SEQ ID NO: 146527 - RNA, 32 nt, Homo Sapiens
cggcuccgaggcuuccaggagccccggccccg

SEQ ID NO: 146528 - RNA, 32 nt, Homo Sapiens
aaaacucagguucguuuccucaauguuuuuca

SEQ ID NO: 146529 - RNA, 32 nt, Homo Sapiens
cccugccguguauuuccuccccagggaguggg

SEQ ID NO: 146530 - RNA, 32 nt, Homo Sapiens
ucagauucuagauauugagcugaguuuucauu

SEQ ID NO: 146531 - RNA, 32 nt, Homo Sapiens
guagagaaguuaaaguuuuguauuuuaauacu

SEQ ID NO: 146532 - RNA, 32 nt, Homo Sapiens
ccgaggccgccuccccgccagcccuggggucc

SEQ ID NO: 146533 - RNA, 32 nt, Homo Sapiens
uggcagaagcacaggaggccaagcccuaccuu

SEQ ID NO: 146534 - RNA, 32 nt, Homo Sapiens
ggaacaagcuugggcugcgcggcggccgggag

SEQ ID NO: 146535 - RNA, 32 nt, Homo Sapiens
gggagaaccucugcuuggggucucgauuggag

SEQ ID NO: 146536 - RNA, 32 nt, Homo Sapiens
uugguuuuagaagcuauaguuuuuuagagauu

SEQ ID NO: 146537 - RNA, 32 nt, Homo Sapiens
caacccugccaguggauugucuuccaaaagaa

SEQ ID NO: 146538 - RNA, 32 nt, Homo Sapiens
aagagauuauugaguucuugggacuggauccu

SEQ ID NO: 146539 - RNA, 32 nt, Homo Sapiens
cugucacuccuggaauaagaugccagacuccu

SEQ ID NO: 146540 - RNA, 32 nt, Homo Sapiens
ucuguggggcugagcaacauuuuuacauuuau

SEQ ID NO: 146541 - RNA, 32 nt, Homo Sapiens
ucauuuuccccgaggacaucuuucucugcaag

SEQ ID NO: 146542 - RNA, 32 nt, Homo Sapiens
ucuuuggguguuuguuuuuuuauaaagcauau

SEQ ID NO: 146543 - RNA, 32 nt, Homo Sapiens
ugucugucugcucuuagcugucuccauugccu

SEQ ID NO: 146544 - RNA, 31 nt, Homo Sapiens
caguaaggcagaguccaaccauugauaauac

SEQ ID NO: 146545 - RNA, 32 nt, Homo Sapiens
aagccuggcuccagcccugccugcugcuccuu

SEQ ID NO: 146546 - RNA, 32 nt, Homo Sapiens
cuagcuuuagaacacaugcaaacagcugcagc

SEQ ID NO: 146547 - RNA, 32 nt, Homo Sapiens
ccuugcccacuucuccuucgcuuuccugagcc

SEQ ID NO: 146548 - RNA, 32 nt, Homo Sapiens
aguggaguggaaauacauauggucaacuaugc

SEQ ID NO: 146549 - RNA, 32 nt, Homo Sapiens
ggugcggaggggcucuccggugcugcugggcu

SEQ ID NO: 146550 - RNA, 32 nt, Homo Sapiens
uugaagaaugggaaagagaaagagacagagac

SEQ ID NO: 146551 - RNA, 32 nt, Homo Sapiens
ucaaaauaaaauuccugaauuuguacaagcca

SEQ ID NO: 146552 - RNA, 32 nt, Homo Sapiens
cucgcgggcuucugcugggucccgccugaggu

SEQ ID NO: 146553 - RNA, 32 nt, Homo Sapiens
aggcagagcuggucuccucccagcagacggag

SEQ ID NO: 146554 - RNA, 30 nt, Homo Sapiens
uuucuuuugugcauauggcaacguucaugu

SEQ ID NO: 146555 - RNA, 32 nt, Homo Sapiens
accccaucuucagguggcggccccucggagga

SEQ ID NO: 146556 - RNA, 31 nt, Homo Sapiens
uuaucaucaaguuauguuccaaauaagacuu

SEQ ID NO: 146557 - RNA, 32 nt, Homo Sapiens
gcagcaggaugucccucuacuguuacacagau

SEQ ID NO: 146558 - RNA, 32 nt, Homo Sapiens
auuuaggggccuggcuugcugcucuccauuuc

SEQ ID NO: 146559 - RNA, 32 nt, Homo Sapiens
ccagcucccgcaccacucagugaagcccagcc

SEQ ID NO: 146560 - RNA, 32 nt, Homo Sapiens
ccugucucaaagaaacaaacaaacaaacaaac

SEQ ID NO: 146561 - RNA, 32 nt, Homo Sapiens
ucuacaaaaaauuuaaaaaauuagccaggcau

SEQ ID NO: 146562 - RNA, 32 nt, Homo Sapiens
ccccuacaguagagauuccuccccugcuaaag

SEQ ID NO: 146563 - RNA, 32 nt, Homo Sapiens
uuugucacaaaacaaugauauuugcuaaacga

SEQ ID NO: 146564 - RNA, 32 nt, Homo Sapiens
ccaggcuggcugccgccucgcuguggccggau

SEQ ID NO: 146565 - RNA, 32 nt, Homo Sapiens
uauaagcaaacaucggccuuguccuccuugug

SEQ ID NO: 146566 - RNA, 32 nt, Homo Sapiens
ggaagaggccaccaacaucuggacggcaggua

SEQ ID NO: 146567 - RNA, 32 nt, Homo Sapiens
uacagaugaggguguccgcugcugcuuuccuu

SEQ ID NO: 146568 - RNA, 32 nt, Homo Sapiens
ucugggcgagcagcggcccaccccagcccuug

SEQ ID NO: 146569 - RNA, 32 nt, Homo Sapiens
cacuccucaugcucacagggauugacaggaga

SEQ ID NO: 146570 - RNA, 32 nt, Homo Sapiens
uuucugcauccacaaguuaguagcaaacuggg

SEQ ID NO: 146571 - RNA, 32 nt, Homo Sapiens
cccgucucagaaucuaaacguggucaccuucg

SEQ ID NO: 146572 - RNA, 32 nt, Homo Sapiens
ggcaagucucgaacucaugaccucaagugauc

SEQ ID NO: 146573 - RNA, 32 nt, Homo Sapiens
uaugaaauauuuuacaguuuuucuuguacaga

SEQ ID NO: 146574 - RNA, 32 nt, Homo Sapiens
gaagggggugggugcugcuugugguuuagucu

SEQ ID NO: 146575 - RNA, 32 nt, Homo Sapiens
guggaauaugaguaagguugcugaaugaauuc

SEQ ID NO: 146576 - RNA, 32 nt, Homo Sapiens
cuggccccggagccccgggugcgcccuggucu

SEQ ID NO: 146577 - RNA, 32 nt, Homo Sapiens
cgccacugcacuccagccuggcgacaaagcga

SEQ ID NO: 146578 - RNA, 32 nt, Homo Sapiens
uaaacacuuuuuaaaacaaauguaaagggucu

SEQ ID NO: 146579 - RNA, 32 nt, Homo Sapiens
agaccagaacuauagcccuugcucucccaugc

SEQ ID NO: 146580 - RNA, 32 nt, Homo Sapiens
cuucgggcccuguccuggcccaggccucugcc

SEQ ID NO: 146581 - RNA, 32 nt, Homo Sapiens
aggcggcggcggcggcggggaucgucuccggc

SEQ ID NO: 146582 - RNA, 32 nt, Homo Sapiens
augaaggcagaagagaugguggucuauuaaau

SEQ ID NO: 146583 - RNA, 32 nt, Homo Sapiens
gagagcccgaaggagaggcauccugacagccg

SEQ ID NO: 146584 - RNA, 32 nt, Homo Sapiens
ucuggguucaagcgcuucuccugccucagccu

SEQ ID NO: 146585 - RNA, 32 nt, Homo Sapiens
aagaaaaucuuuuaaaucuuuggauuugauca

SEQ ID NO: 146586 - RNA, 32 nt, Homo Sapiens
ugcugcugaggcuguaccuccuugacuaagcu

SEQ ID NO: 146587 - RNA, 32 nt, Homo Sapiens
acuugggagagcucgggguggucccugguuuu

SEQ ID NO: 146588 - RNA, 32 nt, Homo Sapiens
acggucacagcugucgcccaucggagaggcag

SEQ ID NO: 146589 - RNA, 31 nt, Homo Sapiens
gacagccggcacugcuguuccaccgccgacu

SEQ ID NO: 146590 - RNA, 32 nt, Homo Sapiens
uuugaauccuggcuauaaaacucaagggacuc

SEQ ID NO: 146591 - RNA, 32 nt, Homo Sapiens
ccaaagcagcauauuagagcauaggcuugaac

SEQ ID NO: 146592 - RNA, 32 nt, Homo Sapiens
gaagugguggcggggagggaggcgcugacgga

SEQ ID NO: 146593 - RNA, 32 nt, Homo Sapiens
cccuauggacuccccacucuccccuccgcccg

SEQ ID NO: 146594 - RNA, 32 nt, Homo Sapiens
ugagauuucuauuucaauaacccaccucucuc

SEQ ID NO: 146595 - RNA, 32 nt, Homo Sapiens
agacaccggccccucccaccccccugccucuc

SEQ ID NO: 146596 - RNA, 32 nt, Homo Sapiens
uacauuggaaaacaaugucuuuacaaaaucac

SEQ ID NO: 146597 - RNA, 30 nt, Homo Sapiens
guggaagccgcgcagccuccgguggagagg

SEQ ID NO: 146598 - RNA, 32 nt, Homo Sapiens
agugaaagggaaguaggaccagagaaguggaa

SEQ ID NO: 146599 - RNA, 32 nt, Homo Sapiens
cgcucccgcugcaauugcucgcugggcucguc

SEQ ID NO: 146600 - RNA, 32 nt, Homo Sapiens
uuaaaauuucuuuuuagagcaaauguuauggg

SEQ ID NO: 146601 - RNA, 32 nt, Homo Sapiens
cuaggcauuaucagugacugugcucgugagcg

SEQ ID NO: 146602 - RNA, 32 nt, Homo Sapiens
uucuuuggggguguucauggggccuggacuug

SEQ ID NO: 146603 - RNA, 32 nt, Homo Sapiens
uuuuauccaaagcuuuuucucuguguccacuc

SEQ ID NO: 146604 - RNA, 32 nt, Homo Sapiens
ggaccccguccuccuucaugacucccacugcu

SEQ ID NO: 146605 - RNA, 32 nt, Homo Sapiens
ccauaagaggaacauuuccucaguguagccua

SEQ ID NO: 146606 - RNA, 32 nt, Homo Sapiens
gcccaaccccgucuucagggagaaggucaccu

SEQ ID NO: 146607 - RNA, 32 nt, Homo Sapiens
cugcgagaagaccugcccuccucacugggauc

SEQ ID NO: 146608 - RNA, 32 nt, Homo Sapiens
ccugugcccccgcuccagugccugcucagcug

SEQ ID NO: 146609 - RNA, 32 nt, Homo Sapiens
augccuguaucccagcacuuugggaggcugag

SEQ ID NO: 146610 - RNA, 32 nt, Homo Sapiens
cggaggggcucuccggugcugcugggcugggu

SEQ ID NO: 146611 - RNA, 30 nt, Homo Sapiens
cccaccuggggcgagugcgcgcacggccag

SEQ ID NO: 146612 - RNA, 32 nt, Homo Sapiens
ucacauccaucugauugcaccauuucugcagc

SEQ ID NO: 146613 - RNA, 29 nt, Homo Sapiens
gccaacuccgaggcggggacgccgcgacg

SEQ ID NO: 146614 - RNA, 32 nt, Homo Sapiens
acagaacaugagaauacacacacacacacaca

SEQ ID NO: 146615 - RNA, 32 nt, Homo Sapiens
auauauccaugugauauagugaaaaauaucuc

SEQ ID NO: 146616 - RNA, 32 nt, Homo Sapiens
ugcaccccaagcccuugccccagcccagucca

SEQ ID NO: 146617 - RNA, 32 nt, Homo Sapiens
cuccagcagaucccuuguuuuccugucaguug

SEQ ID NO: 146618 - RNA, 32 nt, Homo Sapiens
ucgcggugccaugcugccccggcggcggcgcu

SEQ ID NO: 146619 - RNA, 32 nt, Homo Sapiens
cacucauaggaucauccagacucucaugcggc

SEQ ID NO: 146620 - RNA, 32 nt, Homo Sapiens
guuccacacccccacaccaucaggauagcaca

SEQ ID NO: 146621 - RNA, 32 nt, Homo Sapiens
cagcggcauggugacccagcucugccgguggc

SEQ ID NO: 146622 - RNA, 32 nt, Homo Sapiens
ccagcagguaccagcuccucccccucaacuaa

SEQ ID NO: 146623 - RNA, 32 nt, Homo Sapiens
aaguaugcaggguuuaaauuuuuaaguauaau

SEQ ID NO: 146624 - RNA, 32 nt, Homo Sapiens
uauaaagcacaauuacuauauuucacaguuuu

SEQ ID NO: 146625 - RNA, 32 nt, Homo Sapiens
ccacgagaggaugucucccagccuucaggaag

SEQ ID NO: 146626 - RNA, 32 nt, Homo Sapiens
gguggggcuucucugggaccaggcuccaaugg

SEQ ID NO: 146627 - RNA, 32 nt, Homo Sapiens
acagcuguauguuucuuuuucuuuucuaauuu

SEQ ID NO: 146628 - RNA, 32 nt, Homo Sapiens
cucuguguaacacuaacauuuccaguagucac

SEQ ID NO: 146629 - RNA, 32 nt, Homo Sapiens
guagcuaaaugcuguggauauuucaugucugu

SEQ ID NO: 146630 - RNA, 32 nt, Homo Sapiens
caaacagaauccacauugaguuccugcugcug

SEQ ID NO: 146631 - RNA, 32 nt, Homo Sapiens
uaugcaacauauaugcuuuaauauuuuaaugu

SEQ ID NO: 146632 - RNA, 32 nt, Homo Sapiens
aaauagacaaagugcuuggagagcauugagaa

SEQ ID NO: 146633 - RNA, 32 nt, Homo Sapiens
aguaccagcgguggucccggugugggucucuc

SEQ ID NO: 146634 - RNA, 32 nt, Homo Sapiens
aaagaguggugguguggaacccaagauucuug

SEQ ID NO: 146635 - RNA, 32 nt, Homo Sapiens
uaaggacagguggugacaaacacauggucccu

SEQ ID NO: 146636 - RNA, 32 nt, Homo Sapiens
gugguaaauuaacuuuuuucuguucagccagc

SEQ ID NO: 146637 - RNA, 28 nt, Homo Sapiens
aauuaacuguuuaauaugugugaacuau

SEQ ID NO: 146638 - RNA, 32 nt, Homo Sapiens
uuuguacucccacuuccuccaaauccauacag

SEQ ID NO: 146639 - RNA, 32 nt, Homo Sapiens
gggagucauuagugaauagaugauguuggaag

SEQ ID NO: 146640 - RNA, 32 nt, Homo Sapiens
ccucaaaccguuuaaucaauaaagccucuucc

SEQ ID NO: 146641 - RNA, 32 nt, Homo Sapiens
uuuuuguuguuguuuuacuucguggaaacaua

SEQ ID NO: 146642 - RNA, 32 nt, Homo Sapiens
gcuccuccaggcacgucccggaccuguggggc

SEQ ID NO: 146643 - RNA, 32 nt, Homo Sapiens
caauggcuaugaaaaugcaaguaguuuccucg

SEQ ID NO: 146644 - RNA, 32 nt, Homo Sapiens
gaauuuucaugaccuucuauuguauacaaaua

SEQ ID NO: 146645 - RNA, 32 nt, Homo Sapiens
gugugguggugcgugccuguauucccggccac

SEQ ID NO: 146646 - RNA, 32 nt, Homo Sapiens
auuacuuucuuccauguucaaagcuagauuuu

SEQ ID NO: 146647 - RNA, 32 nt, Homo Sapiens
agaugcacaggaccuuguguaccuguuuguga

SEQ ID NO: 146648 - RNA, 32 nt, Homo Sapiens
uaucuagaaaaauuauuauuuugcaguuaucu

SEQ ID NO: 146649 - RNA, 32 nt, Homo Sapiens
gcaguuuuuuucugguggaguugcuguaaguc

SEQ ID NO: 146650 - RNA, 32 nt, Homo Sapiens
gaacggggcaucgcgguuccaacgauuaacug

SEQ ID NO: 146651 - RNA, 32 nt, Homo Sapiens
uuaagguuucaacagggaaauucuucacggcg

SEQ ID NO: 146652 - RNA, 32 nt, Homo Sapiens
ccccacccgagcugcagccuguuccuucccca

SEQ ID NO: 146653 - RNA, 31 nt, Homo Sapiens
uucggcgguugucuuggagaagcaagauggc

SEQ ID NO: 146654 - RNA, 32 nt, Homo Sapiens
cuugcauuugaauuaguucucuauucuccuau

SEQ ID NO: 146655 - RNA, 32 nt, Homo Sapiens
aguuucauuugcauaguaagcgccaggcuuug

SEQ ID NO: 146656 - RNA, 32 nt, Homo Sapiens
gcuggacggaggcugccuccucacgcggcucc

SEQ ID NO: 146657 - RNA, 32 nt, Homo Sapiens
gccuccugauccggaagcacgcagcauguucc

SEQ ID NO: 146658 - RNA, 32 nt, Homo Sapiens
aggcagugcguagaccuaacgucuaccuuuac

SEQ ID NO: 146659 - RNA, 32 nt, Homo Sapiens
cuacccuccuuccccauuuucugugguccaac

SEQ ID NO: 146660 - RNA, 32 nt, Homo Sapiens
gaagggcuuugguuccuucucugggucugauu

SEQ ID NO: 146661 - RNA, 32 nt, Homo Sapiens
uauuauuuuauuuuauuuuuuacaauuagccu

SEQ ID NO: 146662 - RNA, 32 nt, Homo Sapiens
agguucuguuuuucgccggcccggggccgcuu

SEQ ID NO: 146663 - RNA, 32 nt, Homo Sapiens
gagaggcuccgucuugugcaaggguccugugg

SEQ ID NO: 146664 - RNA, 32 nt, Homo Sapiens
guagcggcggucgccgccaccggcgccuccac

SEQ ID NO: 146665 - RNA, 32 nt, Homo Sapiens
ccugagcugcugcgcccggcgcugcuccuccu

SEQ ID NO: 146666 - RNA, 32 nt, Homo Sapiens
aaaauccuggcagcuuuucuccaggcaucugg

SEQ ID NO: 146667 - RNA, 32 nt, Homo Sapiens
auaauacuugaaaaauaaaaaugaacaagcua

SEQ ID NO: 146668 - RNA, 32 nt, Homo Sapiens
aggcaccaggacuugggaggcauguugaucca

SEQ ID NO: 146669 - RNA, 32 nt, Homo Sapiens
ccuuuacuacgacauuccugugcagagcacca

SEQ ID NO: 146670 - RNA, 32 nt, Homo Sapiens
guaugcgggugacgucugcugcugcugacuga

SEQ ID NO: 146671 - RNA, 29 nt, Homo Sapiens
ugggaagcucauuuuaguuuaaccauguu

SEQ ID NO: 146672 - RNA, 32 nt, Homo Sapiens
ucacuggagacgggguuucacuguguuagcca

SEQ ID NO: 146673 - RNA, 29 nt, Homo Sapiens
ucucccacuggacagaggaggcuggccau

SEQ ID NO: 146674 - RNA, 32 nt, Homo Sapiens
gcggucguggcggucggagauccgagagcucu

SEQ ID NO: 146675 - RNA, 32 nt, Homo Sapiens
guauuuaaaaauuaacuuaaaaauaauuguaa

SEQ ID NO: 146676 - RNA, 32 nt, Homo Sapiens
ucuuuaauuauuuucagcuuguccuaaaaaaa

SEQ ID NO: 146677 - RNA, 32 nt, Homo Sapiens
caacgccggcccuaccgcaggcgaagguuccc

SEQ ID NO: 146678 - RNA, 32 nt, Homo Sapiens
agagguaagcacaauuuuuaauuuaggcucug

SEQ ID NO: 146679 - RNA, 32 nt, Homo Sapiens
uuuuucaaauauauuucuuguaaagacaucua

SEQ ID NO: 146680 - RNA, 32 nt, Homo Sapiens
ugaagcuagcuaagcggaugcuguaucaacua

SEQ ID NO: 146681 - RNA, 32 nt, Homo Sapiens
guuuguaaagcacuuugagauccuugguugaa

SEQ ID NO: 146682 - RNA, 32 nt, Homo Sapiens
ggcgugcagugugcgcugagccugcaggaguu

SEQ ID NO: 146683 - RNA, 32 nt, Homo Sapiens
ucauacaccuucugcccuuacagcaccucaug

SEQ ID NO: 146684 - RNA, 32 nt, Homo Sapiens
cuucaucugcuuuuuauuguuguuguuguguu

SEQ ID NO: 146685 - RNA, 32 nt, Homo Sapiens
cucuggccucgcugagcggcugcccgaggagg

SEQ ID NO: 146686 - RNA, 32 nt, Homo Sapiens
acaagaagggaagcagaaggugcuuuggaaca

SEQ ID NO: 146687 - RNA, 32 nt, Homo Sapiens
gcaaucugcuccauuuagaagucagucgcuuc

SEQ ID NO: 146688 - RNA, 32 nt, Homo Sapiens
uguagcggaaagggcucgccguccuccuccgu

SEQ ID NO: 146689 - RNA, 32 nt, Homo Sapiens
cccuggaggccgcgggaccccuggccgguccg

SEQ ID NO: 146690 - RNA, 32 nt, Homo Sapiens
aauauuaaauauauguuacuuuccaagcacug

SEQ ID NO: 146691 - RNA, 32 nt, Homo Sapiens
ucuuucauauccucuugggccuggugauuaau

SEQ ID NO: 146692 - RNA, 32 nt, Homo Sapiens
uuuguaaauaauuuauauucugcucuaauacu

SEQ ID NO: 146693 - RNA, 32 nt, Homo Sapiens
aggcgaggacgcagaccugaaggcggccggug

SEQ ID NO: 146694 - RNA, 32 nt, Homo Sapiens
cuaugagacauaaauuucuguuguguauaagc

SEQ ID NO: 146695 - RNA, 32 nt, Homo Sapiens
auacguccaacaucgaaagaaaaccaguguua

SEQ ID NO: 146696 - RNA, 31 nt, Homo Sapiens
aaaaugauaaagaaaaauggaauuacuucaa

SEQ ID NO: 146697 - RNA, 32 nt, Homo Sapiens
uuuguagcagacaagaucuagaucccagacag

SEQ ID NO: 146698 - RNA, 32 nt, Homo Sapiens
aguagagucugucucugucacccaggcuggag

SEQ ID NO: 146699 - RNA, 32 nt, Homo Sapiens
gcuaaggaagagaacaggacgucugagugugu

SEQ ID NO: 146700 - RNA, 32 nt, Homo Sapiens
ccagacccaagccugaccccauccgaguggaa

SEQ ID NO: 146701 - RNA, 32 nt, Homo Sapiens
cucgcucuaaaaugcauagguuagagaaaugg

SEQ ID NO: 146702 - RNA, 32 nt, Homo Sapiens
ccuccagccugucccuggccaagccgccuccu

SEQ ID NO: 146703 - RNA, 32 nt, Homo Sapiens
uuuaaaaagcuacuuucuuuuauauugccuau

SEQ ID NO: 146704 - RNA, 30 nt, Homo Sapiens
aaccugggagguggagcuugcagugagcgg

SEQ ID NO: 146705 - RNA, 32 nt, Homo Sapiens
cccugagaccucagaaucuucccuuuaaccca

SEQ ID NO: 146706 - RNA, 32 nt, Homo Sapiens
cuaauguauaugcuggugauucuuaugcaaag

SEQ ID NO: 146707 - RNA, 32 nt, Homo Sapiens
uuuuucuguauauagugaccuucuuugcauau

SEQ ID NO: 146708 - RNA, 32 nt, Homo Sapiens
ggaguguuuuuggcauggugaccugucugggc

SEQ ID NO: 146709 - RNA, 32 nt, Homo Sapiens
acauuugaaaauaaaaucauacucuuauuuug

SEQ ID NO: 146710 - RNA, 32 nt, Homo Sapiens
ccgcccuggccgcgaagguggcacccgcagcg

SEQ ID NO: 146711 - RNA, 32 nt, Homo Sapiens
ggagggaaggcaggggaaggacaggcucccug

SEQ ID NO: 146712 - RNA, 32 nt, Homo Sapiens
uuucaaaauggcagagggaguuccuacacaca

SEQ ID NO: 146713 - RNA, 32 nt, Homo Sapiens
gccucucuaaggaaacaguaauaauaacuucu

SEQ ID NO: 146714 - RNA, 32 nt, Homo Sapiens
uggcucacaccuguaauuccaacacuuuggga

SEQ ID NO: 146715 - RNA, 32 nt, Homo Sapiens
guccuaaauaaucaacacauuuuacuuuuuau

SEQ ID NO: 146716 - RNA, 32 nt, Homo Sapiens
ucugcaccacaccagugcaugaggggauggag

SEQ ID NO: 146717 - RNA, 32 nt, Homo Sapiens
caucggcuuugacugcagacuguucacccaca

SEQ ID NO: 146718 - RNA, 32 nt, Homo Sapiens
cuguuucuuauuuguuaugaguuucuguuuua

SEQ ID NO: 146719 - RNA, 32 nt, Homo Sapiens
uccuauuuccuuuauuaagucuucccucauca

SEQ ID NO: 146720 - RNA, 32 nt, Homo Sapiens
gucccuuugcaagcuuccaggcgaucuaaggu

SEQ ID NO: 146721 - RNA, 32 nt, Homo Sapiens
guaaguagaacauagauaaugaaaaugcuggc

SEQ ID NO: 146722 - RNA, 32 nt, Homo Sapiens
ggagguaucucccgaaucaauaccuucaugug

SEQ ID NO: 146723 - RNA, 32 nt, Homo Sapiens
aacacacaggguucuagauuugaacucugcug

SEQ ID NO: 146724 - RNA, 30 nt, Homo Sapiens
agugucuugggcgauccagccagcgcaggc

SEQ ID NO: 146725 - RNA, 32 nt, Homo Sapiens
augugucaaauuagagagcaaaguauaacagg

SEQ ID NO: 146726 - RNA, 32 nt, Homo Sapiens
auuaagcuuuaaagugcuagaaaucuugugcc

SEQ ID NO: 146727 - RNA, 32 nt, Homo Sapiens
ucuguuucugguucuuuccccaacuccagccc

SEQ ID NO: 146728 - RNA, 32 nt, Homo Sapiens
ggguuaaauuuucaggugaagagugagguugu

SEQ ID NO: 146729 - RNA, 32 nt, Homo Sapiens
ccaggccggccgcucacaaccgagcgcagggc

SEQ ID NO: 146730 - RNA, 32 nt, Homo Sapiens
aucauucugcucaugauuccaaggaucagccu

SEQ ID NO: 146731 - RNA, 32 nt, Homo Sapiens
aaugaccagcucgauucccugugcaguucaga

SEQ ID NO: 146732 - RNA, 31 nt, Homo Sapiens
uuuauuuugugcucauuuaaguuucaaacuu

SEQ ID NO: 146733 - RNA, 32 nt, Homo Sapiens
uucugagggcuuuguagguuccagcucaaauc

SEQ ID NO: 146734 - RNA, 32 nt, Homo Sapiens
ggaggcaggcuggcagguggacaggcgggcaa

SEQ ID NO: 146735 - RNA, 32 nt, Homo Sapiens
cugguguucuaagaguaguaugugauggaaga

SEQ ID NO: 146736 - RNA, 32 nt, Homo Sapiens
gaggggcggggcccggcgacugaggggagggg

SEQ ID NO: 146737 - RNA, 30 nt, Homo Sapiens
cucccagguucaagcuauucuccugccuca

SEQ ID NO: 146738 - RNA, 32 nt, Homo Sapiens
caaagccaccgccgcuguuaccgccgcucagc

SEQ ID NO: 146739 - RNA, 32 nt, Homo Sapiens
cauauaaaaaauacuugagaugaagauuaucu

SEQ ID NO: 146740 - RNA, 32 nt, Homo Sapiens
uaucaauugugaaugauuggaacuuuuaaacc

SEQ ID NO: 146741 - RNA, 32 nt, Homo Sapiens
agcggacugacgcuccuccccuuucucuuuaa

SEQ ID NO: 146742 - RNA, 32 nt, Homo Sapiens
aaaaguacugaauuagaaaccaggaaguuuua

SEQ ID NO: 146743 - RNA, 32 nt, Homo Sapiens
uuaaaccauuuucaucaguuucaaaugguaaa

SEQ ID NO: 146744 - RNA, 32 nt, Homo Sapiens
uccucaguuggauaacauuagauccaaagugc

SEQ ID NO: 146745 - RNA, 32 nt, Homo Sapiens
cauacccuuucuuuuucuugcuuuuuguuuuu

SEQ ID NO: 146746 - RNA, 32 nt, Homo Sapiens
ucuccguaacuguggucuccacauuuagaucc

SEQ ID NO: 146747 - RNA, 32 nt, Homo Sapiens
cagcagaccguccaaaccgacacgcgugguau

SEQ ID NO: 146748 - RNA, 32 nt, Homo Sapiens
cagauaccuucuauuuuaguugcuaauaaagg

SEQ ID NO: 146749 - RNA, 32 nt, Homo Sapiens
ccuugaguguguccggccccagccaccagccu

SEQ ID NO: 146750 - RNA, 32 nt, Homo Sapiens
gaacuuauuggccuguaacuuauuuacuaaau

SEQ ID NO: 146751 - RNA, 32 nt, Homo Sapiens
cagucuugguuguguauugcauauacuguauu

SEQ ID NO: 146752 - RNA, 32 nt, Homo Sapiens
cagaccaagggcuccaaggaaauacugcccac

SEQ ID NO: 146753 - RNA, 32 nt, Homo Sapiens
cugcgugugcacaagcacacacaugcaaggca

SEQ ID NO: 146754 - RNA, 32 nt, Homo Sapiens
aauguuugaaagucuguaaagcuuaagguuuu

SEQ ID NO: 146755 - RNA, 32 nt, Homo Sapiens
ccaucucugacguaagcuuccaugcgacagcc

SEQ ID NO: 146756 - RNA, 32 nt, Homo Sapiens
augagaagacuuuuuucccccugccuuucuuu

SEQ ID NO: 146757 - RNA, 32 nt, Homo Sapiens
auacaaauauauuuaauugugucauauuaaac

SEQ ID NO: 146758 - RNA, 32 nt, Homo Sapiens
uacuguugucccuguuuuccuuugggggaauu

SEQ ID NO: 146759 - RNA, 32 nt, Homo Sapiens
agugacuuuucucacagaagaagaaccagcaa

SEQ ID NO: 146760 - RNA, 32 nt, Homo Sapiens
cgcccucugccgccagucguggcaccgcaccc

SEQ ID NO: 146761 - RNA, 32 nt, Homo Sapiens
aaaauuguggagguuuuguuggugugcaaugg

SEQ ID NO: 146762 - RNA, 32 nt, Homo Sapiens
cuaaauguuucuagaauuuauacuguuuuuua

SEQ ID NO: 146763 - RNA, 32 nt, Homo Sapiens
ccaagcuccucuggcugugggaccacagauga

SEQ ID NO: 146764 - RNA, 32 nt, Homo Sapiens
gccuccugugugguauuagaaaguauaccguc

SEQ ID NO: 146765 - RNA, 32 nt, Homo Sapiens
uuaagugcucauccauaaucacagcaaaauga

SEQ ID NO: 146766 - RNA, 32 nt, Homo Sapiens
guaacuguauugucuuaggagcaucaucaugg

SEQ ID NO: 146767 - RNA, 32 nt, Homo Sapiens
gaguuaagguuccauaauaaacuguuaggugc

SEQ ID NO: 146768 - RNA, 32 nt, Homo Sapiens
ucccucuuuuucucuguauauuuaugaccaga

SEQ ID NO: 146769 - RNA, 32 nt, Homo Sapiens
caguaaaaaugaaguuuuuguaggauuaauuu

SEQ ID NO: 146770 - RNA, 32 nt, Homo Sapiens
ccacuugcuuggggagaaaaccacuugugugu

SEQ ID NO: 146771 - RNA, 32 nt, Homo Sapiens
aaaccucugcgccaugagagccaaguggagga

SEQ ID NO: 146772 - RNA, 32 nt, Homo Sapiens
uagaugacaauuuugugaguuuuucaaaugug

SEQ ID NO: 146773 - RNA, 32 nt, Homo Sapiens
gccuugcuuuuguaaaacaaguucauaacacc

SEQ ID NO: 146774 - RNA, 32 nt, Homo Sapiens
ucuuuaagcagcuguuuaccgaaggcaccagu

SEQ ID NO: 146775 - RNA, 32 nt, Homo Sapiens
gggagcuccgcggcgggacggagcgugguccg

SEQ ID NO: 146776 - RNA, 31 nt, Homo Sapiens
guccguguggagggcugcagagccugcaggg

SEQ ID NO: 146777 - RNA, 32 nt, Homo Sapiens
gggcagaaugcagaguagacucgggggaggau

SEQ ID NO: 146778 - RNA, 32 nt, Homo Sapiens
cacgguguuucauacagaaugucuucauauca

SEQ ID NO: 146779 - RNA, 32 nt, Homo Sapiens
agauagcucaagcaguuaaaagaaauucugca

SEQ ID NO: 146780 - RNA, 32 nt, Homo Sapiens
ugcacuccagccugggcaacguggugagaccc

SEQ ID NO: 146781 - RNA, 32 nt, Homo Sapiens
agcagcuggggccaaagagguguuagguucaa

SEQ ID NO: 146782 - RNA, 32 nt, Homo Sapiens
uggaacagcccauuuuaucuuugaauggucuu

SEQ ID NO: 146783 - RNA, 32 nt, Homo Sapiens
uucgcguccggccugaggcggcuggggccgcg

SEQ ID NO: 146784 - RNA, 32 nt, Homo Sapiens
acuccgcggggaccgaacgagcagcccgaagc

SEQ ID NO: 146785 - RNA, 32 nt, Homo Sapiens
uuuuguauauuuuugcuacuugguuuuucuug

SEQ ID NO: 146786 - RNA, 32 nt, Homo Sapiens
uuagcugggcauggcggcgugugucuguaauc

SEQ ID NO: 146787 - RNA, 32 nt, Homo Sapiens
aaugcucuuauuuuuccaacagcuaaacuacu

SEQ ID NO: 146788 - RNA, 32 nt, Homo Sapiens
caauuggaagagaaaaggauauggaacauacu

SEQ ID NO: 146789 - RNA, 32 nt, Homo Sapiens
auugaggucacaucuucaguacuucaugcaaa

SEQ ID NO: 146790 - RNA, 32 nt, Homo Sapiens
gaggaggucagcaaaggucuugaauagauuuu

SEQ ID NO: 146791 - RNA, 32 nt, Homo Sapiens
uuccugugugugcucuggacccugccucggcc

SEQ ID NO: 146792 - RNA, 32 nt, Homo Sapiens
gaaaauuucaucaucuaagaaaaugauuccau

SEQ ID NO: 146793 - RNA, 32 nt, Homo Sapiens
ucaauaugagagacagaaagcagaaacaguag

SEQ ID NO: 146794 - RNA, 32 nt, Homo Sapiens
cccgcuaaggagacccgugcgcggccuacacg

SEQ ID NO: 146795 - RNA, 32 nt, Homo Sapiens
aaccuuucaaggaggaaaccagacaccugaga

SEQ ID NO: 146796 - RNA, 32 nt, Homo Sapiens
gaguucaucuucuaauguccucauccugguuu

SEQ ID NO: 146797 - RNA, 32 nt, Homo Sapiens
cagaggcgcuggccguggaacggugcggccac

SEQ ID NO: 146798 - RNA, 32 nt, Homo Sapiens
gguucugccccuacucccccagcccuaaauac

SEQ ID NO: 146799 - RNA, 32 nt, Homo Sapiens
cagcauuggucccagagcccugggcaucagac

SEQ ID NO: 146800 - RNA, 32 nt, Homo Sapiens
uuaguuugacauuuuguaguuaaugauuccaa

SEQ ID NO: 146801 - RNA, 32 nt, Homo Sapiens
acucagccagcuuauuuuuuguuucucuucua

SEQ ID NO: 146802 - RNA, 31 nt, Homo Sapiens
gcaaauaaauaaaagcaaucagccuuuauuc

SEQ ID NO: 146803 - RNA, 32 nt, Homo Sapiens
uccaagugcacugcccggccaagccccagccu

SEQ ID NO: 146804 - RNA, 32 nt, Homo Sapiens
agagcuagaguuugaauggguuuuauauaaac

SEQ ID NO: 146805 - RNA, 32 nt, Homo Sapiens
cuuguuauugccucgcuuagauccaggacaga

SEQ ID NO: 146806 - RNA, 32 nt, Homo Sapiens
ggccaggaaggggacaggauugucugcugccu

SEQ ID NO: 146807 - RNA, 30 nt, Homo Sapiens
uucucggcgcccgggccuuggccagccugg

SEQ ID NO: 146808 - RNA, 32 nt, Homo Sapiens
guagccgugugagcuccgguaaauuacauaac

SEQ ID NO: 146809 - RNA, 32 nt, Homo Sapiens
ccggagucuccaucucucucguaagccaccug

SEQ ID NO: 146810 - RNA, 32 nt, Homo Sapiens
ggccuuuucucuuccugcuucaucucuaaagg

SEQ ID NO: 146811 - RNA, 32 nt, Homo Sapiens
gcaggguccccaaggauggaaagggaauguuc

SEQ ID NO: 146812 - RNA, 32 nt, Homo Sapiens
gaugagaaggauuggcuccugcugcaaauaaa

SEQ ID NO: 146813 - RNA, 32 nt, Homo Sapiens
uucuauuuuuaaaauaaucauugauuugugug

SEQ ID NO: 146814 - RNA, 32 nt, Homo Sapiens
uggcagcugcugaguucucggugaagguauuu

SEQ ID NO: 146815 - RNA, 32 nt, Homo Sapiens
cuggcauuccccagccucucugcccauuaggg

SEQ ID NO: 146816 - RNA, 32 nt, Homo Sapiens
cagagcacuuccuuuugguuuuucaguacugu

SEQ ID NO: 146817 - RNA, 32 nt, Homo Sapiens
gaaguuaagcagccuuucuguggagagugaga

SEQ ID NO: 146818 - RNA, 32 nt, Homo Sapiens
cagagugcuuggauugcaggcaugagccacuu

SEQ ID NO: 146819 - RNA, 31 nt, Homo Sapiens
ugggagagggcggcccggacggguauuuggu

SEQ ID NO: 146820 - RNA, 32 nt, Homo Sapiens
cuuucucugcacuccuuccaauuuaauucugc

SEQ ID NO: 146821 - RNA, 32 nt, Homo Sapiens
auuucaucuuaaagcacuuucauuuuauacca

SEQ ID NO: 146822 - RNA, 32 nt, Homo Sapiens
ccugggggcuucuggaggagaggaugagaugg

SEQ ID NO: 146823 - RNA, 32 nt, Homo Sapiens
uagcaaugaaaaucuaauauauccuucuguug

SEQ ID NO: 146824 - RNA, 32 nt, Homo Sapiens
ggcccuggcugccagaugcccacagcacccug

SEQ ID NO: 146825 - RNA, 32 nt, Homo Sapiens
uguguuugacauucugaggguuuucuuuuucu

SEQ ID NO: 146826 - RNA, 32 nt, Homo Sapiens
agaucccaggguccuccacccucccccugacc

SEQ ID NO: 146827 - RNA, 32 nt, Homo Sapiens
gccccaggccccagcagucuccgcucccgcag

SEQ ID NO: 146828 - RNA, 32 nt, Homo Sapiens
cguuuuuguuuuaaggaaaaaagauuuuuaaa

SEQ ID NO: 146829 - RNA, 32 nt, Homo Sapiens
aguguuuuaaaauuuucuuuuaaaauuguuua

SEQ ID NO: 146830 - RNA, 32 nt, Homo Sapiens
aaacugcagucacugaaugaccaagagcagca

SEQ ID NO: 146831 - RNA, 32 nt, Homo Sapiens
gagagaauauguuuaauccauguauugguacu

SEQ ID NO: 146832 - RNA, 32 nt, Homo Sapiens
gcaggcgggaccagccccauggucuggcuccu

SEQ ID NO: 146833 - RNA, 32 nt, Homo Sapiens
uacuaucuccuggccuggaccucagaaggagc

SEQ ID NO: 146834 - RNA, 32 nt, Homo Sapiens
ucccccagccucagccucccaaagugcuagga

SEQ ID NO: 146835 - RNA, 32 nt, Homo Sapiens
agagauacuccuucuuuuuuauuuacuugcuu

SEQ ID NO: 146836 - RNA, 32 nt, Homo Sapiens
ugcuuaccauaaauaaagcuugcagguuggaa

SEQ ID NO: 146837 - RNA, 32 nt, Homo Sapiens
ugguaaagcugauguuuuugugcuuauuguga

SEQ ID NO: 146838 - RNA, 32 nt, Homo Sapiens
agaauguacuaaaaaccaaugaacuuuaaaaa

SEQ ID NO: 146839 - RNA, 29 nt, Homo Sapiens
aaaagugugacuuuuucucggagcauaua

SEQ ID NO: 146840 - RNA, 32 nt, Homo Sapiens
cgcuagcucccggcccuucugccccgccgccu

SEQ ID NO: 146841 - RNA, 32 nt, Homo Sapiens
gaucugaauuguaguuacuuggguuuagacau

SEQ ID NO: 146842 - RNA, 32 nt, Homo Sapiens
agacuacaucucuauuuggaaugaugagguaa

SEQ ID NO: 146843 - RNA, 32 nt, Homo Sapiens
gaggaagggcaguucgugggcuggggugggaa

SEQ ID NO: 146844 - RNA, 30 nt, Homo Sapiens
caucaucaccaagaugcccaucuugaggga

SEQ ID NO: 146845 - RNA, 32 nt, Homo Sapiens
agccccaucccuccccaugaggggccaagaca

SEQ ID NO: 146846 - RNA, 32 nt, Homo Sapiens
uguuuagaacagaacaucucuauucuacauuu

SEQ ID NO: 146847 - RNA, 32 nt, Homo Sapiens
accuucgcccuguguccuuccauuuccugucu

SEQ ID NO: 146848 - RNA, 32 nt, Homo Sapiens
ccccuccccccucucccaacuaaugccagacc

SEQ ID NO: 146849 - RNA, 32 nt, Homo Sapiens
aggaaauauuuaauuagguaaaacuaaaucau

SEQ ID NO: 146850 - RNA, 32 nt, Homo Sapiens
agcaaagagcccuugggaccugagaacguuuc

SEQ ID NO: 146851 - RNA, 32 nt, Homo Sapiens
ccaggggcagccggcgguggcuccucuuccug

SEQ ID NO: 146852 - RNA, 32 nt, Homo Sapiens
aacccugugaaugugaugaauguaggaaaacu

SEQ ID NO: 146853 - RNA, 32 nt, Homo Sapiens
guacuuuucuuacuucuaauauccaucccugg

SEQ ID NO: 146854 - RNA, 32 nt, Homo Sapiens
cugauuccaaauauguaugcaccucaagguca

SEQ ID NO: 146855 - RNA, 32 nt, Homo Sapiens
gucuuuguugagccucuuucugugucucugcc

SEQ ID NO: 146856 - RNA, 32 nt, Homo Sapiens
guaccuguuggcggccgggugcaguggcucac

SEQ ID NO: 146857 - RNA, 27 nt, Homo Sapiens
uucaaaacuaucuucagcucuuaaugu

SEQ ID NO: 146858 - RNA, 32 nt, Homo Sapiens
ugaaggcccgucugaggccccgcaaugcgagg

SEQ ID NO: 146859 - RNA, 32 nt, Homo Sapiens
ucgccccauugggaaacucggccccacgcuuc

SEQ ID NO: 146860 - RNA, 32 nt, Homo Sapiens
uguacccccguccacuuacugcgugaccucag

SEQ ID NO: 146861 - RNA, 32 nt, Homo Sapiens
aaagccggaaucaccagcuuugaaaaaaaaaa

SEQ ID NO: 146862 - RNA, 32 nt, Homo Sapiens
cauccgagccgccucuccggaauaccagcagc

SEQ ID NO: 146863 - RNA, 32 nt, Homo Sapiens
guacugcuccuacuccaggacucucacaaagc

SEQ ID NO: 146864 - RNA, 32 nt, Homo Sapiens
auggaggcacauuauccuggagcccacgaaga

SEQ ID NO: 146865 - RNA, 32 nt, Homo Sapiens
cccagcagcuggagccgcaagaaugaacugca

SEQ ID NO: 146866 - RNA, 32 nt, Homo Sapiens
cguccacaauguuuaaaauauuucauaggcga

SEQ ID NO: 146867 - RNA, 32 nt, Homo Sapiens
aaggugaggcgagguggggaguuggcagaauc

SEQ ID NO: 146868 - RNA, 32 nt, Homo Sapiens
cauggucuucccggaugcuggcaccuucaaca

SEQ ID NO: 146869 - RNA, 32 nt, Homo Sapiens
uaaauuaacacgggcauuuguauuuuguaauu

SEQ ID NO: 146870 - RNA, 32 nt, Homo Sapiens
gggcggggauucagcgcguguauguaaaggug

SEQ ID NO: 146871 - RNA, 32 nt, Homo Sapiens
uccugcccaagcacaggccagaugcaagaaug

SEQ ID NO: 146872 - RNA, 32 nt, Homo Sapiens
auucuguaauggaaaaguguugccugccacca

SEQ ID NO: 146873 - RNA, 32 nt, Homo Sapiens
guugggggaaagcagcagcagcagcaggagcg

SEQ ID NO: 146874 - RNA, 32 nt, Homo Sapiens
ugaguggcaggggacaggaguccacuuuguuu

SEQ ID NO: 146875 - RNA, 32 nt, Homo Sapiens
auuuuucugcaccuuccuuucuuccacaaaca

SEQ ID NO: 146876 - RNA, 32 nt, Homo Sapiens
cuccugaauuguaguccaccuuaaaagagaga

SEQ ID NO: 146877 - RNA, 32 nt, Homo Sapiens
ggugauucaguucccuccuucuuacagaagua

SEQ ID NO: 146878 - RNA, 30 nt, Homo Sapiens
cagcagaucgguggcaugcccaguggcuuu

SEQ ID NO: 146879 - RNA, 32 nt, Homo Sapiens
ggcucacaccaaugacuugguccugggguggc

SEQ ID NO: 146880 - RNA, 32 nt, Homo Sapiens
accuguaacagaauuaaaggugaauguucuga

SEQ ID NO: 146881 - RNA, 32 nt, Homo Sapiens
cucccucggucccaggucacuggagcuccagg

SEQ ID NO: 146882 - RNA, 32 nt, Homo Sapiens
accgcccccaccaccacccccagcuccugagg

SEQ ID NO: 146883 - RNA, 32 nt, Homo Sapiens
acagguaaaaaauuauuaaaaguuaaauugug

SEQ ID NO: 146884 - RNA, 32 nt, Homo Sapiens
acuuaaaaauuccuacagugauuguuacuuua

SEQ ID NO: 146885 - RNA, 32 nt, Homo Sapiens
cucgucacugugucccccacuccaugaaacug

SEQ ID NO: 146886 - RNA, 32 nt, Homo Sapiens
gccaaauauuucccuuccgucuuccuucuccu

SEQ ID NO: 146887 - RNA, 32 nt, Homo Sapiens
cggaggggaaggcauccaggaugcggugcggg

SEQ ID NO: 146888 - RNA, 32 nt, Homo Sapiens
cagacucaggacuuaaacauagccacgccacc

SEQ ID NO: 146889 - RNA, 32 nt, Homo Sapiens
uugaguaaaaagacauuuuuuaaaagccuucc

SEQ ID NO: 146890 - RNA, 32 nt, Homo Sapiens
ggcugcgggugugcaggcgucugcuaaguugu

SEQ ID NO: 146891 - RNA, 32 nt, Homo Sapiens
uugccauguugcucagucccaauaucaucacc

SEQ ID NO: 146892 - RNA, 32 nt, Homo Sapiens
ucaucugucuagauguuuuucuucaccugggc

SEQ ID NO: 146893 - RNA, 32 nt, Homo Sapiens
gauagcaaacuccagguuccugaaauauccag

SEQ ID NO: 146894 - RNA, 32 nt, Homo Sapiens
cagggacggcagugcauagaggaacacugggg

SEQ ID NO: 146895 - RNA, 32 nt, Homo Sapiens
guggaugguacccuuucugugcugggcuccug

SEQ ID NO: 146896 - RNA, 32 nt, Homo Sapiens
uccaguguauaaagugacauggaauccauuuu

SEQ ID NO: 146897 - RNA, 32 nt, Homo Sapiens
cagccucugcccgugaggcugaucauggccgu

SEQ ID NO: 146898 - RNA, 32 nt, Homo Sapiens
ucaaaagaaugguguuucuuuucuuguccaau

SEQ ID NO: 146899 - RNA, 32 nt, Homo Sapiens
gcggcauggcggugcggcggcggcugcgaaca

SEQ ID NO: 146900 - RNA, 32 nt, Homo Sapiens
ugggaaggaaaugggguguuuucuugcugacc

SEQ ID NO: 146901 - RNA, 32 nt, Homo Sapiens
gccacccaggaccgcgccgccggccucugccg

SEQ ID NO: 146902 - RNA, 32 nt, Homo Sapiens
guucuugaaauuuccuaauagcaagaccagcg

SEQ ID NO: 146903 - RNA, 32 nt, Homo Sapiens
gucauuagugaaaucuuauuuuuguuucugua

SEQ ID NO: 146904 - RNA, 31 nt, Homo Sapiens
accgagcugagcagaggcugaguuagggggc

SEQ ID NO: 146905 - RNA, 32 nt, Homo Sapiens
ugucugcauagguuuccacuucuuguccccac

SEQ ID NO: 146906 - RNA, 32 nt, Homo Sapiens
cugggcguguuugggccggugcuggagccugu

SEQ ID NO: 146907 - RNA, 32 nt, Homo Sapiens
gagagucagugcaguccagagaauugucagua

SEQ ID NO: 146908 - RNA, 32 nt, Homo Sapiens
aagaugcauucuagauucaaagaaauacguuu

SEQ ID NO: 146909 - RNA, 32 nt, Homo Sapiens
cucagucauugacucuucaauguaaugaucag

SEQ ID NO: 146910 - RNA, 32 nt, Homo Sapiens
cacauaaaguuccauguguaagcuucucuaaa

SEQ ID NO: 146911 - RNA, 32 nt, Homo Sapiens
uggccagggcgggccacugugcuccuggaaaa

SEQ ID NO: 146912 - RNA, 32 nt, Homo Sapiens
aauguaaacugcuuaugaagagguuacaacug

SEQ ID NO: 146913 - RNA, 32 nt, Homo Sapiens
ucagggucaaauuugagcaaacuguaaacugu

SEQ ID NO: 146914 - RNA, 32 nt, Homo Sapiens
ccgagccacgcggucuuccgggcccgggucgg

SEQ ID NO: 146915 - RNA, 32 nt, Homo Sapiens
ggccggagaucugcgagugaagagggacgagg

SEQ ID NO: 146916 - RNA, 32 nt, Homo Sapiens
ggagaccuggagaucucgcucaccagccccau

SEQ ID NO: 146917 - RNA, 32 nt, Homo Sapiens
gccaagggaaugccucuugccacccaccaucc

SEQ ID NO: 146918 - RNA, 32 nt, Homo Sapiens
ccuugugggucguccuggcuccagggcgaaau

SEQ ID NO: 146919 - RNA, 32 nt, Homo Sapiens
cgguuaauauucucucuuaacccaggccuccg

SEQ ID NO: 146920 - RNA, 32 nt, Homo Sapiens
gagagaaagggagaggcauguacggugugggg

SEQ ID NO: 146921 - RNA, 32 nt, Homo Sapiens
gaccaccuaagccccaggaggucgaggcugca

SEQ ID NO: 146922 - RNA, 32 nt, Homo Sapiens
cgccuguaauuccagcacuuugagaggcagag

SEQ ID NO: 146923 - RNA, 32 nt, Homo Sapiens
cuguuagcagacaggccccgugaggcaauggg

SEQ ID NO: 146924 - RNA, 32 nt, Homo Sapiens
ugaaugguagcuucauuuuuuauuuuaaccuu

SEQ ID NO: 146925 - RNA, 32 nt, Homo Sapiens
uacaagccaggugcacgcccugucccaggcau

SEQ ID NO: 146926 - RNA, 32 nt, Homo Sapiens
caugucuuucagagcccggcaccacccaucuu

SEQ ID NO: 146927 - RNA, 32 nt, Homo Sapiens
gcuguccucgcaccuggauggcagcaggggcg

SEQ ID NO: 146928 - RNA, 32 nt, Homo Sapiens
agggcacuacgcgccaccaguucccgguaccc

SEQ ID NO: 146929 - RNA, 32 nt, Homo Sapiens
auggugugaagggcaggaaacaguccucugaa

SEQ ID NO: 146930 - RNA, 32 nt, Homo Sapiens
cgagcgacgcugccuccuuggggccgggcugc

SEQ ID NO: 146931 - RNA, 32 nt, Homo Sapiens
cuggggaggguggggaugggaggggagagaca

SEQ ID NO: 146932 - RNA, 32 nt, Homo Sapiens
gcugaggggaugcacagaggcagccagaaccu

SEQ ID NO: 146933 - RNA, 32 nt, Homo Sapiens
cugggaggcgggggguugcagugagccgagau

SEQ ID NO: 146934 - RNA, 32 nt, Homo Sapiens
cuuauugcccaaauagagaggguggcccuggc

SEQ ID NO: 146935 - RNA, 32 nt, Homo Sapiens
ggaggagccucccagucucuuucagaggauaa

SEQ ID NO: 146936 - RNA, 32 nt, Homo Sapiens
aaucuuugcccccugacuuuggaaaucucguu

SEQ ID NO: 146937 - RNA, 32 nt, Homo Sapiens
cacagaguucuugauggacugaagaugcccaa

SEQ ID NO: 146938 - RNA, 32 nt, Homo Sapiens
gcaucggcucugcugcugcggagcccccgccu

SEQ ID NO: 146939 - RNA, 32 nt, Homo Sapiens
cuguucauuuugggggcugggggaagugagcc

SEQ ID NO: 146940 - RNA, 32 nt, Homo Sapiens
gacccaggaagaccaggcuuguccuguggagg

SEQ ID NO: 146941 - RNA, 32 nt, Homo Sapiens
cugcaggcguacaacuaacaagcugggugcag

SEQ ID NO: 146942 - RNA, 32 nt, Homo Sapiens
cuauaaaaaaaauuauuuuauaaaggaggaaa

SEQ ID NO: 146943 - RNA, 32 nt, Homo Sapiens
ugaaguauuacauaaccuggaagacugagaag

SEQ ID NO: 146944 - RNA, 32 nt, Homo Sapiens
ggggcugcaggagacuccagggcagggagagc

SEQ ID NO: 146945 - RNA, 32 nt, Homo Sapiens
aaacuagagaauaaagauuuggguuuuagaaa

SEQ ID NO: 146946 - RNA, 32 nt, Homo Sapiens
cagaugauuuccccccuccgccucccaggaag

SEQ ID NO: 146947 - RNA, 32 nt, Homo Sapiens
guugugaucaggcaggcugugcucucaggaca

SEQ ID NO: 146948 - RNA, 32 nt, Homo Sapiens
ugccaaucucuucugugaggcaucauagacac

SEQ ID NO: 146949 - RNA, 32 nt, Homo Sapiens
gguaaaguugaacgucuaugagcauugucugu

SEQ ID NO: 146950 - RNA, 32 nt, Homo Sapiens
agacuaacugucuacaucuccauauguuguag

SEQ ID NO: 146951 - RNA, 32 nt, Homo Sapiens
aguguguugcccgugugucuguguguaugugu

SEQ ID NO: 146952 - RNA, 30 nt, Homo Sapiens
gagcgcgcgcccgugcugggcggcagcuuu

SEQ ID NO: 146953 - RNA, 32 nt, Homo Sapiens
gagaggaaaugaugaugucaauuaaguuucag

SEQ ID NO: 146954 - RNA, 29 nt, Homo Sapiens
gcuuauuuagaaguauauuuuuuaacuuc

SEQ ID NO: 146955 - RNA, 32 nt, Homo Sapiens
accucuggaggcggcaggugcacgggaaugaa

SEQ ID NO: 146956 - RNA, 32 nt, Homo Sapiens
uaauuccuccuccugagaugcacuauacuuaa

SEQ ID NO: 146957 - RNA, 32 nt, Homo Sapiens
ugguuucuugacaagucuuauuuccuuaucau

SEQ ID NO: 146958 - RNA, 32 nt, Homo Sapiens
auguuucugugcuauauuggaugcucagaagu

SEQ ID NO: 146959 - RNA, 32 nt, Homo Sapiens
cccucagugguguagcuguaacuauuacucag

SEQ ID NO: 146960 - RNA, 32 nt, Homo Sapiens
uacccguaaaauguaauacuggacuagaguau

SEQ ID NO: 146961 - RNA, 32 nt, Homo Sapiens
gcaauguaauuaugcuauucacaggggccuca

SEQ ID NO: 146962 - RNA, 32 nt, Homo Sapiens
caugcaaagguaaaugaacacuuuuuaaaugu

SEQ ID NO: 146963 - RNA, 32 nt, Homo Sapiens
ucuuucuaauguuuuucuuuaucccuuuaaua

SEQ ID NO: 146964 - RNA, 32 nt, Homo Sapiens
gaccccucccccaacacccccaaauucaagag

SEQ ID NO: 146965 - RNA, 32 nt, Homo Sapiens
cccuuagcagccacugccaccugggcccggag

SEQ ID NO: 146966 - RNA, 32 nt, Homo Sapiens
uaaauacuucagaacuggcuucuuuucucaaa

SEQ ID NO: 146967 - RNA, 32 nt, Homo Sapiens
uaaaaaauaaacaaaauuagccgggcguggug

SEQ ID NO: 146968 - RNA, 32 nt, Homo Sapiens
uuucuuuuuuuuuuuuuuuuuaaugugugcaa

SEQ ID NO: 146969 - RNA, 32 nt, Homo Sapiens
gccauucagggugacacaguuauuuccacugg

SEQ ID NO: 146970 - RNA, 32 nt, Homo Sapiens
uuuuccugucauugggucauguuaucuuugag

SEQ ID NO: 146971 - RNA, 32 nt, Homo Sapiens
aucucuuuagauuuuuucagcuauuuucuuaa

SEQ ID NO: 146972 - RNA, 32 nt, Homo Sapiens
auggcucgggguggagcuagggugggggcugu

SEQ ID NO: 146973 - RNA, 32 nt, Homo Sapiens
caccacuauuuuuucuugcauggaaauugaaa

SEQ ID NO: 146974 - RNA, 32 nt, Homo Sapiens
aaguuucauaccaaauauuugaaaggauggua

SEQ ID NO: 146975 - RNA, 32 nt, Homo Sapiens
cggcccggccccagccccauggaccuccgagc

SEQ ID NO: 146976 - RNA, 32 nt, Homo Sapiens
aaguuaucaaggagauaauucuagaaugaaaa

SEQ ID NO: 146977 - RNA, 32 nt, Homo Sapiens
ucauuucucucauucuuuuuuauuuuggaaaa

SEQ ID NO: 146978 - RNA, 32 nt, Homo Sapiens
cugcugcugcgcacgcuuccugccaacguucc

SEQ ID NO: 146979 - RNA, 32 nt, Homo Sapiens
gagcugacugccuagcucccagggcuuugugc

SEQ ID NO: 146980 - RNA, 32 nt, Homo Sapiens
ucgguucgagugaccucggcccgggaugcccc

SEQ ID NO: 146981 - RNA, 32 nt, Homo Sapiens
aaguuacaaggucccaggccaagccccucucc

SEQ ID NO: 146982 - RNA, 32 nt, Homo Sapiens
uauggagugacgacuucgguuugaguuuagau

SEQ ID NO: 146983 - RNA, 32 nt, Homo Sapiens
aauuugaaaguaaaaauaaaccagagugauca

SEQ ID NO: 146984 - RNA, 32 nt, Homo Sapiens
cugaagugccagcaccaccagcaccagauccu

SEQ ID NO: 146985 - RNA, 32 nt, Homo Sapiens
ccaguauaaaauaccaaugcaacuacucuaca

SEQ ID NO: 146986 - RNA, 32 nt, Homo Sapiens
cccaccccaaacugcucccccucccccaaauu

SEQ ID NO: 146987 - RNA, 31 nt, Homo Sapiens
uuggaauugaagacucucagggcucaccugg

SEQ ID NO: 146988 - RNA, 32 nt, Homo Sapiens
aaguagcuucagcugggacugccagggccgcg

SEQ ID NO: 146989 - RNA, 32 nt, Homo Sapiens
ugcaaguauuaugugaaaaauauaguccugaa

SEQ ID NO: 146990 - RNA, 32 nt, Homo Sapiens
auucuauauuguuguuuuuucuuaauguguca

SEQ ID NO: 146991 - RNA, 32 nt, Homo Sapiens
cccaagauauuuucuuuuuucacacugaaugc

SEQ ID NO: 146992 - RNA, 32 nt, Homo Sapiens
aguuuggaaaauaaaaaucaugucaucuucua

SEQ ID NO: 146993 - RNA, 32 nt, Homo Sapiens
auagaaguaaucaaguagcaucugagacuguu

SEQ ID NO: 146994 - RNA, 32 nt, Homo Sapiens
gauuuaaaaaaauaaagcacuuauucugaaaa

SEQ ID NO: 146995 - RNA, 32 nt, Homo Sapiens
gaagaggcgagggcacuugggggucauuauuu

SEQ ID NO: 146996 - RNA, 32 nt, Homo Sapiens
uacuguagaugcccuccaaauccuugguuaug

SEQ ID NO: 146997 - RNA, 32 nt, Homo Sapiens
ucagccuauacuuuuccauaugguauaccuug

SEQ ID NO: 146998 - RNA, 32 nt, Homo Sapiens
aaaaaugaugcacacauagauauauucuuaca

SEQ ID NO: 146999 - RNA, 32 nt, Homo Sapiens
ugagacuucgaucaaaccauaagauuuuauac

SEQ ID NO: 147000 - RNA, 32 nt, Homo Sapiens
acaugucuugucugcugccuggguggcacaga

SEQ ID NO: 147001 - RNA, 32 nt, Homo Sapiens
gagaggacacaggggaugacugagagacagag

SEQ ID NO: 147002 - RNA, 32 nt, Homo Sapiens
gcucccuaaacacuaccaaauacucuuauggg

SEQ ID NO: 147003 - RNA, 32 nt, Homo Sapiens
cuucauucagccaacagcguuuauugagcacc

SEQ ID NO: 147004 - RNA, 32 nt, Homo Sapiens
ucagccgcucucugcccuucucucggccccgc

SEQ ID NO: 147005 - RNA, 32 nt, Homo Sapiens
acacugggggcaggagugucaucuuuugggca

SEQ ID NO: 147006 - RNA, 32 nt, Homo Sapiens
cuccuaucucaacucuguuuauuugaugaguu

SEQ ID NO: 147007 - RNA, 32 nt, Homo Sapiens
ggucauguggaggugggguuuauugggaugcu

SEQ ID NO: 147008 - RNA, 32 nt, Homo Sapiens
gaaguguggaauuugggguuguccuguguaaa

SEQ ID NO: 147009 - RNA, 30 nt, Homo Sapiens
aguccucuggacuuccccugccuaucuguu

SEQ ID NO: 147010 - RNA, 32 nt, Homo Sapiens
gcguagucucccgcgccgccguccacugcgcg

SEQ ID NO: 147011 - RNA, 32 nt, Homo Sapiens
guuuaggaguaagagucuuguuuuuuacucaa

SEQ ID NO: 147012 - RNA, 32 nt, Homo Sapiens
gcauggcaccucaccugugggggaacucggcg

SEQ ID NO: 147013 - RNA, 32 nt, Homo Sapiens
uuuggaggauuugggguguuuacuuuuuaaau

SEQ ID NO: 147014 - RNA, 32 nt, Homo Sapiens
cccugccccacuuuaccauagagaccagugcc

SEQ ID NO: 147015 - RNA, 32 nt, Homo Sapiens
caagacugacugggcccggcuucggccccucg

SEQ ID NO: 147016 - RNA, 32 nt, Homo Sapiens
ugcccacucccucuccuuacuuagcuuccagg

SEQ ID NO: 147017 - RNA, 32 nt, Homo Sapiens
cagccuauuaccuuuacguuguacuuaguccc

SEQ ID NO: 147018 - RNA, 32 nt, Homo Sapiens
guugggcgcacgcuccuucugccugucguugg

SEQ ID NO: 147019 - RNA, 32 nt, Homo Sapiens
uuugaugauauuaaccauguauuauuuucagu

SEQ ID NO: 147020 - RNA, 32 nt, Homo Sapiens
cuagucucauuucucugagaagaaaacuaagg

SEQ ID NO: 147021 - RNA, 32 nt, Homo Sapiens
gaacacacacacacauacacaaacacacacac

SEQ ID NO: 147022 - RNA, 32 nt, Homo Sapiens
ucaccaaaguggguaguauaguccucaaauau

SEQ ID NO: 147023 - RNA, 32 nt, Homo Sapiens
cuccacaccgacaccaucuggaggaggcguug

SEQ ID NO: 147024 - RNA, 32 nt, Homo Sapiens
uaaauuaaacaaauaaacaaacagaacccaaa

SEQ ID NO: 147025 - RNA, 32 nt, Homo Sapiens
gccuaccuggccgggggcgcggggggugcagg

SEQ ID NO: 147026 - RNA, 32 nt, Homo Sapiens
ggggcucugaccaccuaugggggccgggcagg

SEQ ID NO: 147027 - RNA, 32 nt, Homo Sapiens
caccucagccuggauuuuauuguccauaucau

SEQ ID NO: 147028 - RNA, 32 nt, Homo Sapiens
uuuucuuaguuauaauauuacaugcauuuuug

SEQ ID NO: 147029 - RNA, 32 nt, Homo Sapiens
uacaggcaugagcuaccacgccuggcccgugu

SEQ ID NO: 147030 - RNA, 32 nt, Homo Sapiens
ugcaccugugacugaugacacaucucacccag

SEQ ID NO: 147031 - RNA, 32 nt, Homo Sapiens
gcacauucccccuguucccagguggguccaga

SEQ ID NO: 147032 - RNA, 32 nt, Homo Sapiens
uuuuuaagggaagaggaagaaauugcugcuca

SEQ ID NO: 147033 - RNA, 32 nt, Homo Sapiens
agccagcagccuuuuccagagaggcugugguc

SEQ ID NO: 147034 - RNA, 32 nt, Homo Sapiens
gugccauuuacccuuccaccuuuccauccugc

SEQ ID NO: 147035 - RNA, 32 nt, Homo Sapiens
cgcagaccagaucuggucagguccucggaagc

SEQ ID NO: 147036 - RNA, 32 nt, Homo Sapiens
uuauucuucaacaaugucuacuccauccccaa

SEQ ID NO: 147037 - RNA, 32 nt, Homo Sapiens
ggggcuagaaggcgagaggggcugggaaagga

SEQ ID NO: 147038 - RNA, 31 nt, Homo Sapiens
gggcccggagcuugccugccucccucgcucg

SEQ ID NO: 147039 - RNA, 32 nt, Homo Sapiens
aaaaucagugaguggcucucugcagugguuac

SEQ ID NO: 147040 - RNA, 32 nt, Homo Sapiens
gguuuugggggugggggcaggggacucugggc

SEQ ID NO: 147041 - RNA, 32 nt, Homo Sapiens
guguccauauauuauuauauguuaagagaaaa

SEQ ID NO: 147042 - RNA, 32 nt, Homo Sapiens
aucaggcaagcuugccagacaucaauccagca

SEQ ID NO: 147043 - RNA, 32 nt, Homo Sapiens
ugacugcaggccugggcgacugcggggagcuu

SEQ ID NO: 147044 - RNA, 32 nt, Homo Sapiens
gaaaagaaaaagaagaaguagcuggcucaggu

SEQ ID NO: 147045 - RNA, 32 nt, Homo Sapiens
uggcaaaagcuacagaucccggagagccagug

SEQ ID NO: 147046 - RNA, 32 nt, Homo Sapiens
gucccagggugcugcaguggcucacagagaug

SEQ ID NO: 147047 - RNA, 32 nt, Homo Sapiens
cugagagacagaggcagcaucugccauucuaa

SEQ ID NO: 147048 - RNA, 32 nt, Homo Sapiens
cuugcccucagcccugcgucccgggcauggcu

SEQ ID NO: 147049 - RNA, 32 nt, Homo Sapiens
aguccagacugcucuugaaauagaaaagacug

SEQ ID NO: 147050 - RNA, 32 nt, Homo Sapiens
aagcaccuugagugugaaaugucaacagaaau

SEQ ID NO: 147051 - RNA, 32 nt, Homo Sapiens
gagcucugacaguguggggaagugucccugug

SEQ ID NO: 147052 - RNA, 32 nt, Homo Sapiens
agcggaggcuggaaggccacaaggugcuugcu

SEQ ID NO: 147053 - RNA, 32 nt, Homo Sapiens
agccuggccaacuuggugaaaccccgucuuua

SEQ ID NO: 147054 - RNA, 32 nt, Homo Sapiens
cccuuaggggugaugaggaagugggagcucag

SEQ ID NO: 147055 - RNA, 28 nt, Homo Sapiens
agcaugcgcgcccgccgggggcugcugc

SEQ ID NO: 147056 - RNA, 32 nt, Homo Sapiens
aguguuuaauggauuucuuuuauauaacucau

SEQ ID NO: 147057 - RNA, 32 nt, Homo Sapiens
cccagccuugcgcgucgucgcuaccuccucgg

SEQ ID NO: 147058 - RNA, 32 nt, Homo Sapiens
acgggugccgugguugggagcuguucagcgca

SEQ ID NO: 147059 - RNA, 32 nt, Homo Sapiens
uggguggggcuuuggaauugagcacuucgcca

SEQ ID NO: 147060 - RNA, 32 nt, Homo Sapiens
gauccgcuugccuuggccuccuagggugcugg

SEQ ID NO: 147061 - RNA, 32 nt, Homo Sapiens
agaaggaucagugaauguaagagccuuggaaa

SEQ ID NO: 147062 - RNA, 32 nt, Homo Sapiens
ugaauuuuuuaaaaauaaagauuuuugcuucc

SEQ ID NO: 147063 - RNA, 32 nt, Homo Sapiens
agcccucccagccuacuccccaucccagcuuu

SEQ ID NO: 147064 - RNA, 32 nt, Homo Sapiens
uuugauuucuaaaaacaauuuauucaacacuc

SEQ ID NO: 147065 - RNA, 32 nt, Homo Sapiens
cccgccuccucaggcccuagggugcuggagcu

SEQ ID NO: 147066 - RNA, 32 nt, Homo Sapiens
gcagggccagagugacacagccgaaaaauugc

SEQ ID NO: 147067 - RNA, 32 nt, Homo Sapiens
agugggggcccaugggucuuuggaagcugcuc

SEQ ID NO: 147068 - RNA, 32 nt, Homo Sapiens
ggaaacucagggcuguuuucucuucccuuagg

SEQ ID NO: 147069 - RNA, 32 nt, Homo Sapiens
auuccccaagucaagcaggcaagaugccuaga

SEQ ID NO: 147070 - RNA, 32 nt, Homo Sapiens
uguuaaaaaugaauuuuuacuauggcagauau

SEQ ID NO: 147071 - RNA, 32 nt, Homo Sapiens
uucuucccaagcccgagcagagggucaugcgg

SEQ ID NO: 147072 - RNA, 32 nt, Homo Sapiens
uugccagcucccagcucucccccaggcugcag

SEQ ID NO: 147073 - RNA, 32 nt, Homo Sapiens
gccacaguuuuuagaucagcaccuggaauaca

SEQ ID NO: 147074 - RNA, 32 nt, Homo Sapiens
ccgccccacccggugauggagccccgggggga

SEQ ID NO: 147075 - RNA, 32 nt, Homo Sapiens
ugcacuacucauaaugauaaccucaagacuau

SEQ ID NO: 147076 - RNA, 32 nt, Homo Sapiens
gcacagaggacgugcaccucccugcccuccuc

SEQ ID NO: 147077 - RNA, 32 nt, Homo Sapiens
uugcucacgugcuucgggucgguuggauucag

SEQ ID NO: 147078 - RNA, 32 nt, Homo Sapiens
caggaccgcccuccugaccccugguaggaggg

SEQ ID NO: 147079 - RNA, 32 nt, Homo Sapiens
accacugugaggaccuaggaacgccuucuccc

SEQ ID NO: 147080 - RNA, 32 nt, Homo Sapiens
uuugggaggcggaggcaggcggguugcuugag

SEQ ID NO: 147081 - RNA, 32 nt, Homo Sapiens
cagcagacguacccucccucgcugccugccug

SEQ ID NO: 147082 - RNA, 31 nt, Homo Sapiens
acuccgcgcacgagagcuucacggcggccga

SEQ ID NO: 147083 - RNA, 32 nt, Homo Sapiens
augaaauacuaaaacaaacaaacaaacaaaaa

SEQ ID NO: 147084 - RNA, 32 nt, Homo Sapiens
gcuucugccuucccuguaguuucccagaugug

SEQ ID NO: 147085 - RNA, 32 nt, Homo Sapiens
ugagugcugugaauuucuuuacugauuucucu

SEQ ID NO: 147086 - RNA, 32 nt, Homo Sapiens
gaaaaugugugugccguagacacaaagaaggg

SEQ ID NO: 147087 - RNA, 32 nt, Homo Sapiens
gaaaugagagcugacugccuagcucccagggc

SEQ ID NO: 147088 - RNA, 32 nt, Homo Sapiens
gcacuugaaauacacuggauaauuacuuuugu

SEQ ID NO: 147089 - RNA, 25 nt, Homo Sapiens
cgaugaugaugaugaugaugucgac

SEQ ID NO: 147090 - RNA, 32 nt, Homo Sapiens
gugauuuuuuuuucuuuuuuuuaaaccaugaa

SEQ ID NO: 147091 - RNA, 32 nt, Homo Sapiens
accaugagauaaaggaaagagauguggcuuuu

SEQ ID NO: 147092 - RNA, 32 nt, Homo Sapiens
gcagcaggaaggaccccuccgggaguagcggu

SEQ ID NO: 147093 - RNA, 32 nt, Homo Sapiens
uacuccugccaggcugcccccgccugcugugc

SEQ ID NO: 147094 - RNA, 32 nt, Homo Sapiens
ugaccagcaaauccucuucccuuauucuaaag

SEQ ID NO: 147095 - RNA, 32 nt, Homo Sapiens
cugaccuagaucugauggagauuugguguugg

SEQ ID NO: 147096 - RNA, 32 nt, Homo Sapiens
gggaggucagggaggcggggccaagggugucc

SEQ ID NO: 147097 - RNA, 32 nt, Homo Sapiens
cuguggucaggaguuugagaccagccuggcca

SEQ ID NO: 147098 - RNA, 32 nt, Homo Sapiens
guuuauuucauuuaugcagaguaucuuggagu

SEQ ID NO: 147099 - RNA, 32 nt, Homo Sapiens
guauaacauuaacauuugaauguuugucugug

SEQ ID NO: 147100 - RNA, 32 nt, Homo Sapiens
aaaucacagaugcauauagacacacauacaua

SEQ ID NO: 147101 - RNA, 32 nt, Homo Sapiens
cagcuccacucgcgccggacacagggagcagc

SEQ ID NO: 147102 - RNA, 32 nt, Homo Sapiens
ggggagcggggagugaguggacagcgcugccc

SEQ ID NO: 147103 - RNA, 32 nt, Homo Sapiens
cacugcacuccagccugggugacagagcagga

SEQ ID NO: 147104 - RNA, 32 nt, Homo Sapiens
cacugcacuccagccuggguggcagagcaaga

SEQ ID NO: 147105 - RNA, 32 nt, Homo Sapiens
ccagcccagauugucuuaauuucuaucuuguu

SEQ ID NO: 147106 - RNA, 32 nt, Homo Sapiens
cccugcagaagcugugcagcugagagaggguu

SEQ ID NO: 147107 - RNA, 32 nt, Homo Sapiens
guuuuugaauucuauuugaaugguuuugggua

SEQ ID NO: 147108 - RNA, 32 nt, Homo Sapiens
uuuuccauuuuucuuuuccccuggggaagcuu

SEQ ID NO: 147109 - RNA, 32 nt, Homo Sapiens
auuacugccuugguagcauuuauuuaagggcu

SEQ ID NO: 147110 - RNA, 32 nt, Homo Sapiens
cuguuuauaugaugaaucauauuuauugauuu

SEQ ID NO: 147111 - RNA, 32 nt, Homo Sapiens
uucuucacacugaguucucuauauuuauugaa

SEQ ID NO: 147112 - RNA, 32 nt, Homo Sapiens
gagccccgcgcccuuuccgggaccccugcccc

SEQ ID NO: 147113 - RNA, 32 nt, Homo Sapiens
ucuuggggcuuccaauugacccaucuaucugc

SEQ ID NO: 147114 - RNA, 32 nt, Homo Sapiens
aaaagugaucuguccccucuccccucauggag

SEQ ID NO: 147115 - RNA, 32 nt, Homo Sapiens
aagacagagucuuacucugucgcccaggcugg

SEQ ID NO: 147116 - RNA, 27 nt, Homo Sapiens
ccaugugcaauuccuccgggaccucca

SEQ ID NO: 147117 - RNA, 32 nt, Homo Sapiens
gcugcagaaaacaaaagccuggcugaguugau

SEQ ID NO: 147118 - RNA, 32 nt, Homo Sapiens
ugcaagguaaauaucauuuaauuggaaguagu

SEQ ID NO: 147119 - RNA, 32 nt, Homo Sapiens
uguccaucuuucuccuuucuuccagcacacac

SEQ ID NO: 147120 - RNA, 32 nt, Homo Sapiens
cuucucuuucuaauguuuuucuuuaucccuuu

SEQ ID NO: 147121 - RNA, 27 nt, Homo Sapiens
uguggcuacuucuccagcccccuccuu

SEQ ID NO: 147122 - RNA, 32 nt, Homo Sapiens
ccgcucgccagccggcucuccucccgccgcag

SEQ ID NO: 147123 - RNA, 32 nt, Homo Sapiens
acuugcuggacgcacauuaaagaauaaagcuc

SEQ ID NO: 147124 - RNA, 32 nt, Homo Sapiens
ugguccuggaagcugacucaucggagagggaa

SEQ ID NO: 147125 - RNA, 32 nt, Homo Sapiens
aucuagcagguggucagcuucagcuuucucca

SEQ ID NO: 147126 - RNA, 32 nt, Homo Sapiens
uucuucauuguuggguugauuccccaaaaccu

SEQ ID NO: 147127 - RNA, 32 nt, Homo Sapiens
ggaccaaauaaauuauuuuauaugacuacuag

SEQ ID NO: 147128 - RNA, 32 nt, Homo Sapiens
auuauugaggcagaaaacuaacaaagauauuc

SEQ ID NO: 147129 - RNA, 32 nt, Homo Sapiens
gcauacuuaguagaauagaucacaacauacaa

SEQ ID NO: 147130 - RNA, 32 nt, Homo Sapiens
gacauuuuagaaauauuacaauuaaaaauagu

SEQ ID NO: 147131 - RNA, 32 nt, Homo Sapiens
gcagucaggcuggacaccccuccaccuggcgg

SEQ ID NO: 147132 - RNA, 31 nt, Homo Sapiens
gcacagaaauaaauggcagaaauauuaggcu

SEQ ID NO: 147133 - RNA, 32 nt, Homo Sapiens
gaaacgagggaagagagagaaauuggggaccc

SEQ ID NO: 147134 - RNA, 32 nt, Homo Sapiens
gccuccucguuuuccuucucuuuuucgacaau

SEQ ID NO: 147135 - RNA, 32 nt, Homo Sapiens
caguaaaaacaaaagaguaguggggagagaaa

SEQ ID NO: 147136 - RNA, 32 nt, Homo Sapiens
ccgagcaagauggcgccgcgggcauuucuucc

SEQ ID NO: 147137 - RNA, 32 nt, Homo Sapiens
ugugaaaacaaguaggggucuaaucuccuaga

SEQ ID NO: 147138 - RNA, 32 nt, Homo Sapiens
cgcgcaacuucccgggagcccgggccaaagug

SEQ ID NO: 147139 - RNA, 32 nt, Homo Sapiens
gauuacuauugagcauauauccacaauguuca

SEQ ID NO: 147140 - RNA, 32 nt, Homo Sapiens
augcauaaaacauggguaggugucacucacac

SEQ ID NO: 147141 - RNA, 32 nt, Homo Sapiens
auuuuuuucuaaucuucaguauguagugagca

SEQ ID NO: 147142 - RNA, 32 nt, Homo Sapiens
cggcaggggaggagguggaacccgcggccgga

SEQ ID NO: 147143 - RNA, 32 nt, Homo Sapiens
uguaccccuuuaaugacccguacuggaccaca

SEQ ID NO: 147144 - RNA, 32 nt, Homo Sapiens
ggcagggaacggcaccggggccuccaaugugg

SEQ ID NO: 147145 - RNA, 29 nt, Homo Sapiens
uuguaugggacuuuccuuuggauccccca

SEQ ID NO: 147146 - RNA, 32 nt, Homo Sapiens
gaauaugagcggcugucacacccaugagcaag

SEQ ID NO: 147147 - RNA, 32 nt, Homo Sapiens
cccagacuccuccggucuccccgggcagcaug

SEQ ID NO: 147148 - RNA, 32 nt, Homo Sapiens
agcaguuguauuugaauuguauuuucagugaa

SEQ ID NO: 147149 - RNA, 32 nt, Homo Sapiens
cggauuugauaaaagacuuaugagcaagcugg

SEQ ID NO: 147150 - RNA, 32 nt, Homo Sapiens
aaaacuggaaaacaaguccuagcugguuccag

SEQ ID NO: 147151 - RNA, 32 nt, Homo Sapiens
aagccaugcuguuaacaguuuaucucaaguaa

SEQ ID NO: 147152 - RNA, 32 nt, Homo Sapiens
gccccuucccuggcagguggccaggcaggcgg

SEQ ID NO: 147153 - RNA, 32 nt, Homo Sapiens
uauuuuuuggccuuagaaucugcagaaauuag

SEQ ID NO: 147154 - RNA, 32 nt, Homo Sapiens
uuccggaagaaagggaucugggagcgagaugc

SEQ ID NO: 147155 - RNA, 32 nt, Homo Sapiens
uuggagaggcaggaccugcugcuuuagagugc

SEQ ID NO: 147156 - RNA, 32 nt, Homo Sapiens
ugaacucccggcugcagacaguugugcuauca

SEQ ID NO: 147157 - RNA, 32 nt, Homo Sapiens
uauaucccauucuuccuaccuccaucucuggu

SEQ ID NO: 147158 - RNA, 32 nt, Homo Sapiens
aucaugcacugaaaugcuuucuggagaaggug

SEQ ID NO: 147159 - RNA, 32 nt, Homo Sapiens
uuuauuaaugaaacuuccuuugaaaaacugcu

SEQ ID NO: 147160 - RNA, 31 nt, Homo Sapiens
caagugucugaucaagccucaguguaugggc

SEQ ID NO: 147161 - RNA, 32 nt, Homo Sapiens
gcagacaggacacuuaaggaccaggacugggc

SEQ ID NO: 147162 - RNA, 32 nt, Homo Sapiens
caaauaggaauauuuucauggaauuuuaccua

SEQ ID NO: 147163 - RNA, 32 nt, Homo Sapiens
ugugcacgauccccaaacccugguccccaaua

SEQ ID NO: 147164 - RNA, 32 nt, Homo Sapiens
caccuggauggcaacgugcuggaccacuucuc

SEQ ID NO: 147165 - RNA, 32 nt, Homo Sapiens
uauguacauuuuaauuuacauguuguguagaa

SEQ ID NO: 147166 - RNA, 32 nt, Homo Sapiens
ggcagccugccagugaaggucacuggacucua

SEQ ID NO: 147167 - RNA, 32 nt, Homo Sapiens
ccagcacaaaaccccaggacccuggcucugca

SEQ ID NO: 147168 - RNA, 32 nt, Homo Sapiens
cucccuuuccaccugcugaacuuggcugugac

SEQ ID NO: 147169 - RNA, 32 nt, Homo Sapiens
gauuggaucauuugacugggcuggagaacauc

SEQ ID NO: 147170 - RNA, 32 nt, Homo Sapiens
cuuuaaaauggcaucucuguuccuuauucucu

SEQ ID NO: 147171 - RNA, 32 nt, Homo Sapiens
uuaaaacguacacucacauguuagaaugaaaa

SEQ ID NO: 147172 - RNA, 32 nt, Homo Sapiens
ucuccccuguccugcacccaucccccgccuga

SEQ ID NO: 147173 - RNA, 32 nt, Homo Sapiens
uagagaagcugaugccucauuucuacauucug

SEQ ID NO: 147174 - RNA, 30 nt, Homo Sapiens
ucacuucugcuaaggagggacccguguugc

SEQ ID NO: 147175 - RNA, 32 nt, Homo Sapiens
gauggugggaugcugaggucggaggcuucgcu

SEQ ID NO: 147176 - RNA, 32 nt, Homo Sapiens
auuauuacugucagugucagucuugguugugu

SEQ ID NO: 147177 - RNA, 32 nt, Homo Sapiens
cccaggugggcgcgcagcgucugcgcgcucug

SEQ ID NO: 147178 - RNA, 32 nt, Homo Sapiens
gcagcacagaacucagcucaaggguucugggg

SEQ ID NO: 147179 - RNA, 32 nt, Homo Sapiens
caucuuagagaauuauacaacuuuuauuguuu

SEQ ID NO: 147180 - RNA, 32 nt, Homo Sapiens
ccacucggggggagggcggggauccccacuug

SEQ ID NO: 147181 - RNA, 32 nt, Homo Sapiens
ugcagagcuggaaccggaggcuccacaguccu

SEQ ID NO: 147182 - RNA, 32 nt, Homo Sapiens
gccuggaaaaggaaaggauugccuuucgauga

SEQ ID NO: 147183 - RNA, 32 nt, Homo Sapiens
ucaguagccccauugcggggccccaccauuca

SEQ ID NO: 147184 - RNA, 32 nt, Homo Sapiens
ugcugugggcuggguccccggcgggacuguca

SEQ ID NO: 147185 - RNA, 32 nt, Homo Sapiens
gggcaggaaggggcucaaucucagcacuuaac

SEQ ID NO: 147186 - RNA, 32 nt, Homo Sapiens
ccaagggcguucguaacgggaaugccgaagcg

SEQ ID NO: 147187 - RNA, 32 nt, Homo Sapiens
cucucuucagcugugacuuauccaccacauag

SEQ ID NO: 147188 - RNA, 32 nt, Homo Sapiens
uuaugccaccugugugucaggaugcaccugaa

SEQ ID NO: 147189 - RNA, 30 nt, Homo Sapiens
cuuguauuccuugccacuuuauuuuguuag

SEQ ID NO: 147190 - RNA, 32 nt, Homo Sapiens
uacuuagaaacuccauuuuaaauaaucauuuc

SEQ ID NO: 147191 - RNA, 32 nt, Homo Sapiens
aagcucugucccuauucccccagcccagcuag

SEQ ID NO: 147192 - RNA, 32 nt, Homo Sapiens
cuccacaaggccagaagcagccacuuguuaca

SEQ ID NO: 147193 - RNA, 32 nt, Homo Sapiens
ccaaacggccuucgcgggcagcagccgucgcc

SEQ ID NO: 147194 - RNA, 32 nt, Homo Sapiens
aaugaugagccuaucauuugauuugaguucua

SEQ ID NO: 147195 - RNA, 32 nt, Homo Sapiens
aaaauaagaacaaaaauccagagugaaagugu

SEQ ID NO: 147196 - RNA, 32 nt, Homo Sapiens
gccgccggagcucuguaguauggcaucgagga

SEQ ID NO: 147197 - RNA, 32 nt, Homo Sapiens
ccucucgcgggucucccauccccucccuccuu

SEQ ID NO: 147198 - RNA, 32 nt, Homo Sapiens
agcuugugguauaaaacaauaguucaagaucc

SEQ ID NO: 147199 - RNA, 32 nt, Homo Sapiens
gagguugaaaauaaucaugcagucauuccuca

SEQ ID NO: 147200 - RNA, 32 nt, Homo Sapiens
aggacuccccaggagcacccaggcaugggcag

SEQ ID NO: 147201 - RNA, 32 nt, Homo Sapiens
uguuguuguuguuuuuaauugcuguuaauauu

SEQ ID NO: 147202 - RNA, 32 nt, Homo Sapiens
auuuaauuaaaauuauuccaaucaaaauauau

SEQ ID NO: 147203 - RNA, 32 nt, Homo Sapiens
ugccccccaagcaucaguguacccagcccagu

SEQ ID NO: 147204 - RNA, 32 nt, Homo Sapiens
caggcaccagugccgcugcgcgggagcuaggg

SEQ ID NO: 147205 - RNA, 32 nt, Homo Sapiens
aguguuuccagauggguccuaggcacccaucu

SEQ ID NO: 147206 - RNA, 32 nt, Homo Sapiens
guccgccuagccccgcuccgccugaggccguc

SEQ ID NO: 147207 - RNA, 32 nt, Homo Sapiens
aauccacacccccacguccuggacguuuaaaa

SEQ ID NO: 147208 - RNA, 32 nt, Homo Sapiens
guguucuuucccuucuaaucuuuaagaucaac

SEQ ID NO: 147209 - RNA, 32 nt, Homo Sapiens
aucauggggaguaauaggaccagagcgguauc

SEQ ID NO: 147210 - RNA, 32 nt, Homo Sapiens
aagcgcgccagcugcgccugcucaacuucauc

SEQ ID NO: 147211 - RNA, 32 nt, Homo Sapiens
uacaguuaacaauggaauaugccuucucugcu

SEQ ID NO: 147212 - RNA, 32 nt, Homo Sapiens
uagcugggauuacaggcaugcgccaccaugac

SEQ ID NO: 147213 - RNA, 32 nt, Homo Sapiens
ugaagaggcccuuugaggcauucccuauggcu

SEQ ID NO: 147214 - RNA, 32 nt, Homo Sapiens
cccacuuuaaaggcugugcagcuccuuaaaua

SEQ ID NO: 147215 - RNA, 32 nt, Homo Sapiens
uucccucucauucuugcaugcgggcguccaca

SEQ ID NO: 147216 - RNA, 32 nt, Homo Sapiens
ccucggagcuacuguggccccgggccagagaa

SEQ ID NO: 147217 - RNA, 32 nt, Homo Sapiens
cucacucuugucagagucggagcuacagucag

SEQ ID NO: 147218 - RNA, 32 nt, Homo Sapiens
ggccgagguuggucaugaggcugggguucccg

SEQ ID NO: 147219 - RNA, 32 nt, Homo Sapiens
acucugugggucuggugauggaagaugcaguc

SEQ ID NO: 147220 - RNA, 32 nt, Homo Sapiens
cugcgugagaggaaaagaugcuagaaccacag

SEQ ID NO: 147221 - RNA, 32 nt, Homo Sapiens
augcuugguggcugugcugcugauuaagccgu

SEQ ID NO: 147222 - RNA, 31 nt, Homo Sapiens
cccaauggggcggugaccccagccucgcccg

SEQ ID NO: 147223 - RNA, 32 nt, Homo Sapiens
cagauggccuucuuugucaucuucacucucca

SEQ ID NO: 147224 - RNA, 32 nt, Homo Sapiens
uaccagacucacggucuccauuauuggagcuu

SEQ ID NO: 147225 - RNA, 32 nt, Homo Sapiens
gaauccugugcauuauacuaagaauuacaugc

SEQ ID NO: 147226 - RNA, 32 nt, Homo Sapiens
cuugugugcuaccuggguuccgggccagugau

SEQ ID NO: 147227 - RNA, 32 nt, Homo Sapiens
cggaagugacacacucuggauugaauaauacu

SEQ ID NO: 147228 - RNA, 32 nt, Homo Sapiens
agaccuaaggguuuuaucuccuccccuugaau

SEQ ID NO: 147229 - RNA, 32 nt, Homo Sapiens
ggguuucuugucccgggaagcaacggacauaa

SEQ ID NO: 147230 - RNA, 32 nt, Homo Sapiens
uugguggcagcggcgguagcagcaauggacuu

SEQ ID NO: 147231 - RNA, 31 nt, Homo Sapiens
uagcaaagucuguguuuucagaauuacagug

SEQ ID NO: 147232 - RNA, 32 nt, Homo Sapiens
aacucauaucuuccugucuuuccuucugaaua

SEQ ID NO: 147233 - RNA, 32 nt, Homo Sapiens
uuugacaauaauuuaauucuuuuauuguucaa

SEQ ID NO: 147234 - RNA, 32 nt, Homo Sapiens
aaauuauggggagcugcaguuuuuugcaauga

SEQ ID NO: 147235 - RNA, 32 nt, Homo Sapiens
gucgcuggacuccagcccgggcgacagaguga

SEQ ID NO: 147236 - RNA, 32 nt, Homo Sapiens
acuuuucugggggcaucgcggcguccccuuuu

SEQ ID NO: 147237 - RNA, 32 nt, Homo Sapiens
uuuaaaauggugcuuaaguuccagcagaugcc

SEQ ID NO: 147238 - RNA, 32 nt, Homo Sapiens
gcccggccgggcgugcgggcggggacauggua

SEQ ID NO: 147239 - RNA, 32 nt, Homo Sapiens
cgcccgcguugcccgcgccugcgcaccagucg

SEQ ID NO: 147240 - RNA, 32 nt, Homo Sapiens
acuuaucuuuuggagaacagcuuuaagugccu

SEQ ID NO: 147241 - RNA, 32 nt, Homo Sapiens
ucagucaucuggugcaccagcugcuggaagcg

SEQ ID NO: 147242 - RNA, 32 nt, Homo Sapiens
uauggaagaacgagguuuauauuuucaugugg

SEQ ID NO: 147243 - RNA, 32 nt, Homo Sapiens
caaagaaaucuacuauaucccuuaaugaaaua

SEQ ID NO: 147244 - RNA, 30 nt, Homo Sapiens
gggggcggggguggcaugggaaaugaaaga

SEQ ID NO: 147245 - RNA, 32 nt, Homo Sapiens
auccagucucuagcuaagcaucaggcuccagg

SEQ ID NO: 147246 - RNA, 32 nt, Homo Sapiens
aaauguuuucagacaaagcacugaauuugaaa

SEQ ID NO: 147247 - RNA, 32 nt, Homo Sapiens
aaauaaaaugauuaaaguucugauggaaaaau

SEQ ID NO: 147248 - RNA, 32 nt, Homo Sapiens
ccuugccuguuuuucaaucucaucugauaugc

SEQ ID NO: 147249 - RNA, 31 nt, Homo Sapiens
uccuaagcucagagaaaguuccauuuccguu

SEQ ID NO: 147250 - RNA, 32 nt, Homo Sapiens
uauuuugccucugauguagugaaaaacggggu

SEQ ID NO: 147251 - RNA, 32 nt, Homo Sapiens
ugucccuaaugggaaacguggcugagacaggg

SEQ ID NO: 147252 - RNA, 32 nt, Homo Sapiens
gccgaauuuaacuggcacuuuauuuuacuucu

SEQ ID NO: 147253 - RNA, 32 nt, Homo Sapiens
uuuuccucauuucagaaaccgaaacagaaacg

SEQ ID NO: 147254 - RNA, 32 nt, Homo Sapiens
ggaacugcaauaauaucaaaacaaguacuggu

SEQ ID NO: 147255 - RNA, 32 nt, Homo Sapiens
gaaggacacaggccauuuuagaugggguacac

SEQ ID NO: 147256 - RNA, 32 nt, Homo Sapiens
gaagggagccccaccagggauaauucagacag

SEQ ID NO: 147257 - RNA, 32 nt, Homo Sapiens
ugcuccaauaaauccacuccuucaccacccaa

SEQ ID NO: 147258 - RNA, 32 nt, Homo Sapiens
aguuaagcauuuuuauacuaguaacuauuuau

SEQ ID NO: 147259 - RNA, 32 nt, Homo Sapiens
aauacugggagcuucucugccuccugauccug

SEQ ID NO: 147260 - RNA, 32 nt, Homo Sapiens
aaaucacaaauguuuuuuccuucuugguugcu

SEQ ID NO: 147261 - RNA, 32 nt, Homo Sapiens
aucugggcgucccagucaguccucagugcuug

SEQ ID NO: 147262 - RNA, 32 nt, Homo Sapiens
auaaaggguucaguacuaucugcaguuucaga

SEQ ID NO: 147263 - RNA, 32 nt, Homo Sapiens
uucugauuuucuuuuucuuuugcaagucuaaa

SEQ ID NO: 147264 - RNA, 32 nt, Homo Sapiens
ggaacuuuuccacaguaggccaagcuugacaa

SEQ ID NO: 147265 - RNA, 32 nt, Homo Sapiens
agacuuaaaacauggugccuauaucugagaga

SEQ ID NO: 147266 - RNA, 32 nt, Homo Sapiens
uccagccagcccccaaacaagauuccucucca

SEQ ID NO: 147267 - RNA, 32 nt, Homo Sapiens
aggcgcgccgacgccugugccaccccuuccuc

SEQ ID NO: 147268 - RNA, 32 nt, Homo Sapiens
cagaaacuaugaaauaugaauaucucugcuuc

SEQ ID NO: 147269 - RNA, 26 nt, Homo Sapiens
ccaauaaagggagcuuugacugacgu

SEQ ID NO: 147270 - RNA, 32 nt, Homo Sapiens
gaaaucauuugcugguuguuuauuuuuuggua

SEQ ID NO: 147271 - RNA, 32 nt, Homo Sapiens
uaaaaucaguaugauucagagaaggaccaaau

SEQ ID NO: 147272 - RNA, 32 nt, Homo Sapiens
uagcucugcccucuccucuccucucuacgugg

SEQ ID NO: 147273 - RNA, 32 nt, Homo Sapiens
uagacuacccauaguucauccuccucacauaa

SEQ ID NO: 147274 - RNA, 32 nt, Homo Sapiens
augccugcaauccagcacuuugggaagcugag

SEQ ID NO: 147275 - RNA, 32 nt, Homo Sapiens
ccugccccuagcccggccccugccccacgcgc

SEQ ID NO: 147276 - RNA, 32 nt, Homo Sapiens
gauuucccgcggcagccccgggcuccccagug

SEQ ID NO: 147277 - RNA, 32 nt, Homo Sapiens
caggcguggagguguccccaccccuuccaccu

SEQ ID NO: 147278 - RNA, 32 nt, Homo Sapiens
cagagccguauccaggaaccccccuucaggcu

SEQ ID NO: 147279 - RNA, 32 nt, Homo Sapiens
uccccaggaggagacccuccccugccuucgag

SEQ ID NO: 147280 - RNA, 32 nt, Homo Sapiens
cugccuacaaaauggagaaauaggaccuucca

SEQ ID NO: 147281 - RNA, 32 nt, Homo Sapiens
guguugauguuuccuucuuaauuuauaggauu

SEQ ID NO: 147282 - RNA, 32 nt, Homo Sapiens
aucucagcacuuugggagacugagaugagaag

SEQ ID NO: 147283 - RNA, 32 nt, Homo Sapiens
ccgcggcuggcucggguucccgggccgacaug

SEQ ID NO: 147284 - RNA, 32 nt, Homo Sapiens
caacuaucuuaauugaaauauuugcucucugc

SEQ ID NO: 147285 - RNA, 32 nt, Homo Sapiens
uauguggccacugguuuaagaagugcugacuu

SEQ ID NO: 147286 - RNA, 32 nt, Homo Sapiens
aggcgcuggccgggcuggcugcggccgcccug

SEQ ID NO: 147287 - RNA, 32 nt, Homo Sapiens
aggaaaacagagcaucagaagccugcaguggu

SEQ ID NO: 147288 - RNA, 32 nt, Homo Sapiens
augguuuuucuuuucuuuauuuuuaaagaaau

SEQ ID NO: 147289 - RNA, 32 nt, Homo Sapiens
guguguuuaauuucuuuugauuccauuuuggu

SEQ ID NO: 147290 - RNA, 32 nt, Homo Sapiens
agugccaggaccagcuggguucacugaugugu

SEQ ID NO: 147291 - RNA, 32 nt, Homo Sapiens
cacuugaaauuugagaagggcaaucagucugg

SEQ ID NO: 147292 - RNA, 31 nt, Homo Sapiens
aggggaggacgcgucaccagagccuggggcc

SEQ ID NO: 147293 - RNA, 32 nt, Homo Sapiens
auucucucauagaacauugaucuguuuuacag

SEQ ID NO: 147294 - RNA, 32 nt, Homo Sapiens
uguugcauuuacacaguuguuucaugcugucu

SEQ ID NO: 147295 - RNA, 32 nt, Homo Sapiens
ccaggcgggaggagggaguggagagacugacu

SEQ ID NO: 147296 - RNA, 32 nt, Homo Sapiens
ugugcgcucucggcgcguggcgcuaggcaugg

SEQ ID NO: 147297 - RNA, 32 nt, Homo Sapiens
aacuuaaaucugaacuuuuucuuaaagacaau

SEQ ID NO: 147298 - RNA, 32 nt, Homo Sapiens
auguugguuuaaaaauauuauugcuugcuacu

SEQ ID NO: 147299 - RNA, 32 nt, Homo Sapiens
ccagcugaagcgggcgcacggcugcuuccagg

SEQ ID NO: 147300 - RNA, 32 nt, Homo Sapiens
ucugucaggagcuucagccuagcugaugaaua

SEQ ID NO: 147301 - RNA, 32 nt, Homo Sapiens
gcaguuuuaaauuuauaauauuauuggauguu

SEQ ID NO: 147302 - RNA, 32 nt, Homo Sapiens
cgggaagcuggugcccgagcugcgggaguacu

SEQ ID NO: 147303 - RNA, 32 nt, Homo Sapiens
gcggguaacauacaaccccuccccuccagaag

SEQ ID NO: 147304 - RNA, 32 nt, Homo Sapiens
auguauaaauuaacauaaaucaugcaugucug

SEQ ID NO: 147305 - RNA, 30 nt, Homo Sapiens
gccucuuuggcuuggaccuauauggccaug

SEQ ID NO: 147306 - RNA, 32 nt, Homo Sapiens
guuauuuucuuacuguugcuucagaucuaaug

SEQ ID NO: 147307 - RNA, 32 nt, Homo Sapiens
gauauccggcccggagcguuugugcggcgcgg

SEQ ID NO: 147308 - RNA, 32 nt, Homo Sapiens
guuugggagagcccauggugacugcgugagug

SEQ ID NO: 147309 - RNA, 32 nt, Homo Sapiens
agccucccuggccccagguggccgucagccuc

SEQ ID NO: 147310 - RNA, 32 nt, Homo Sapiens
ccagugcucucugggccuggcucccagucagu

SEQ ID NO: 147311 - RNA, 32 nt, Homo Sapiens
cccucugggguuccucucuccucuccgcccac

SEQ ID NO: 147312 - RNA, 32 nt, Homo Sapiens
gcauuuagaaaagagcacaaaaacauaggcua

SEQ ID NO: 147313 - RNA, 32 nt, Homo Sapiens
uguggagucugcugucuccaggcugaagagga

SEQ ID NO: 147314 - RNA, 32 nt, Homo Sapiens
gggagccgccuccgucgccgccgucagagccg

SEQ ID NO: 147315 - RNA, 32 nt, Homo Sapiens
cugcugcugccaacuugcaccuggccaccucc

SEQ ID NO: 147316 - RNA, 32 nt, Homo Sapiens
aauauuuaaguacaaauaaacaauauauugac

SEQ ID NO: 147317 - RNA, 32 nt, Homo Sapiens
ggcgguggauggcaugauggugcggggaaggc

SEQ ID NO: 147318 - RNA, 32 nt, Homo Sapiens
gcccgggcggacaucgcccgggccccgauggu

SEQ ID NO: 147319 - RNA, 32 nt, Homo Sapiens
ucuguagacuguugagacugaguuccuguugg

SEQ ID NO: 147320 - RNA, 32 nt, Homo Sapiens
uaugggaaagucauuguauauuauuaauaucc

SEQ ID NO: 147321 - RNA, 32 nt, Homo Sapiens
ggcuuccuggcauccacccccaggcccaaggg

SEQ ID NO: 147322 - RNA, 32 nt, Homo Sapiens
uugggggugugggaaggcagaagucccaggga

SEQ ID NO: 147323 - RNA, 32 nt, Homo Sapiens
uauguucaauuauauauacucauauaugaaua

SEQ ID NO: 147324 - RNA, 32 nt, Homo Sapiens
gggacgggcgccuggcggggcccugggaggcu

SEQ ID NO: 147325 - RNA, 32 nt, Homo Sapiens
cuaccuagugucaucauuucuucauucugcau

SEQ ID NO: 147326 - RNA, 28 nt, Homo Sapiens
ucagcagcauaggcuuuaucucccuacu

SEQ ID NO: 147327 - RNA, 32 nt, Homo Sapiens
ggcuguccgucggcgcccacugcccggcggca

SEQ ID NO: 147328 - RNA, 32 nt, Homo Sapiens
accugggggguucugguuuuuacuuuuuuaau

SEQ ID NO: 147329 - RNA, 32 nt, Homo Sapiens
gggaccgcacgugggcgccgcgcgcuuccccc

SEQ ID NO: 147330 - RNA, 32 nt, Homo Sapiens
acugaccagagccccaggaauaaaugguuuuc

SEQ ID NO: 147331 - RNA, 32 nt, Homo Sapiens
cagcgcccucuccccucucccgagggcugggc

SEQ ID NO: 147332 - RNA, 32 nt, Homo Sapiens
gauuuugguuuuuauuuuuuuauuugaacuuu

SEQ ID NO: 147333 - RNA, 32 nt, Homo Sapiens
gcacucccgggacucaggauccccaggccacg

SEQ ID NO: 147334 - RNA, 32 nt, Homo Sapiens
aaaacuuuaauuucuuuuuuuuaaaaauggug

SEQ ID NO: 147335 - RNA, 32 nt, Homo Sapiens
guccugcauuguccagccccagcuccaccuaa

SEQ ID NO: 147336 - RNA, 32 nt, Homo Sapiens
uucuuaagacaauuuucucaccucuguaaauu

SEQ ID NO: 147337 - RNA, 32 nt, Homo Sapiens
uauuaauguguguacuuaauauagaaagauca

SEQ ID NO: 147338 - RNA, 32 nt, Homo Sapiens
auaaugcaaaaauuauguaauagauaccaaau

SEQ ID NO: 147339 - RNA, 32 nt, Homo Sapiens
aguugcauggcaucaccuccaccauacuccau

SEQ ID NO: 147340 - RNA, 32 nt, Homo Sapiens
gcuuccaaauuuccuaaaacccuaagcugggc

SEQ ID NO: 147341 - RNA, 32 nt, Homo Sapiens
aguaggauuggaaaaaagugggugguguggca

SEQ ID NO: 147342 - RNA, 32 nt, Homo Sapiens
ucuucuggagcucagcagcagcagcugguuug

SEQ ID NO: 147343 - RNA, 32 nt, Homo Sapiens
cuuccggagcagccuucaccuucucucuggga

SEQ ID NO: 147344 - RNA, 32 nt, Homo Sapiens
ggccccaggaccagcgugcugcugcagaaagg

SEQ ID NO: 147345 - RNA, 32 nt, Homo Sapiens
aauguaucuccaugggaggcugaggcaggaga

SEQ ID NO: 147346 - RNA, 32 nt, Homo Sapiens
ccccacugcccaggagcccccauccuaagcuc

SEQ ID NO: 147347 - RNA, 32 nt, Homo Sapiens
gaaacugcaggagaaaaaucaaauaaacuuag

SEQ ID NO: 147348 - RNA, 32 nt, Homo Sapiens
uccuuccgcccgcuccucguuucuuuggaggu

SEQ ID NO: 147349 - RNA, 32 nt, Homo Sapiens
ggagggcaagccccuugguccuggaacacagg

SEQ ID NO: 147350 - RNA, 32 nt, Homo Sapiens
cgcgucacguggugaggaaggaggcggagguc

SEQ ID NO: 147351 - RNA, 32 nt, Homo Sapiens
auuucccuuucuucuuuccuuuuuguuuuugu

SEQ ID NO: 147352 - RNA, 32 nt, Homo Sapiens
aaagaaaauauaccaauucuuuggggaauuua

SEQ ID NO: 147353 - RNA, 32 nt, Homo Sapiens
accuaacaguagcuaugcauaauccuguggcg

SEQ ID NO: 147354 - RNA, 32 nt, Homo Sapiens
ucucuugguguuggcuucgugcuuccggaggg

SEQ ID NO: 147355 - RNA, 32 nt, Homo Sapiens
auacaguguaauuauuuuauguuuuaaagaua

SEQ ID NO: 147356 - RNA, 32 nt, Homo Sapiens
uccuguacuauuaacaaucuguaaccaagcua

SEQ ID NO: 147357 - RNA, 30 nt, Homo Sapiens
cuagaagauaaaagaaaaagaugugcauaa

SEQ ID NO: 147358 - RNA, 32 nt, Homo Sapiens
aaaaucucuaagggaggucaugagaacuagaa

SEQ ID NO: 147359 - RNA, 32 nt, Homo Sapiens
uguuguucaucgcaguguggacaccauuaccc

SEQ ID NO: 147360 - RNA, 32 nt, Homo Sapiens
cugagcuuuguuuuauaauaauuaaaauccuu

SEQ ID NO: 147361 - RNA, 32 nt, Homo Sapiens
agcacauuucucugcccucacacgccucuccc

SEQ ID NO: 147362 - RNA, 32 nt, Homo Sapiens
uagaucaggaggacuggggcccccagcggacc

SEQ ID NO: 147363 - RNA, 32 nt, Homo Sapiens
aaacaagagucuggccacguuuuuguagugug

SEQ ID NO: 147364 - RNA, 32 nt, Homo Sapiens
uuaaaaaagcauuauccuuuuaucucacaaau

SEQ ID NO: 147365 - RNA, 32 nt, Homo Sapiens
cuaacuuuugucaucacuauuaccagcauugu

SEQ ID NO: 147366 - RNA, 32 nt, Homo Sapiens
uguuaaugucauuuguuuuuguuuggcuguuu

SEQ ID NO: 147367 - RNA, 30 nt, Homo Sapiens
cuaucacacaucuguuuuucucgaagaaaa

SEQ ID NO: 147368 - RNA, 32 nt, Homo Sapiens
uuucuucuguacccggauuagggcgcgggggg

SEQ ID NO: 147369 - RNA, 32 nt, Homo Sapiens
gaggccgcgccgggagcgcgguggggcuaggc

SEQ ID NO: 147370 - RNA, 32 nt, Homo Sapiens
aguucugcucuccccaucaucuuugugcaagg

SEQ ID NO: 147371 - RNA, 32 nt, Homo Sapiens
acacauuacaaauuauugaauagggcagcuaa

SEQ ID NO: 147372 - RNA, 32 nt, Homo Sapiens
ucuuggcugcuguacaugaugugcuuaaugaa

SEQ ID NO: 147373 - RNA, 32 nt, Homo Sapiens
auuuugauguaaauauuaaaagaaugugcaaa

SEQ ID NO: 147374 - RNA, 29 nt, Homo Sapiens
aauggucauuguaagugaaagccucucgc

SEQ ID NO: 147375 - RNA, 32 nt, Homo Sapiens
gcugcuggagucacagaggaaauauuuuucug

SEQ ID NO: 147376 - RNA, 32 nt, Homo Sapiens
cucugcacuccagccugggugacagagcaaga

SEQ ID NO: 147377 - RNA, 32 nt, Homo Sapiens
ugaucucucggaggcgccggcugcuggccaac

SEQ ID NO: 147378 - RNA, 32 nt, Homo Sapiens
gagggagggagugaaggcaggcuugggaaagu

SEQ ID NO: 147379 - RNA, 32 nt, Homo Sapiens
agaguucuuugccuuucucaucuaauuuuuag

SEQ ID NO: 147380 - RNA, 32 nt, Homo Sapiens
uucugguccccgcucucugucccaucauccgc

SEQ ID NO: 147381 - RNA, 32 nt, Homo Sapiens
ugagauccugguuuccucucaaacaauuccuu

SEQ ID NO: 147382 - RNA, 32 nt, Homo Sapiens
accuacacagaaaggaaauugccuaggcaaua

SEQ ID NO: 147383 - RNA, 32 nt, Homo Sapiens
gguccccagcggcucccuccccgaacagcugc

SEQ ID NO: 147384 - RNA, 32 nt, Homo Sapiens
uaccuguugucauucuuuuucuuuuaaauuug

SEQ ID NO: 147385 - RNA, 32 nt, Homo Sapiens
auugacuggaacaacugucagagcuaaaccga

SEQ ID NO: 147386 - RNA, 32 nt, Homo Sapiens
acugaaaacaacauagcaaaauaagccaagau

SEQ ID NO: 147387 - RNA, 32 nt, Homo Sapiens
acuuucugucuccugucucuucucgccccugc

SEQ ID NO: 147388 - RNA, 32 nt, Homo Sapiens
cccaggaaagagaaaagguuguauguuuugug

SEQ ID NO: 147389 - RNA, 32 nt, Homo Sapiens
cugugaugagcuugcuguugcuuucuuucucc

SEQ ID NO: 147390 - RNA, 32 nt, Homo Sapiens
gaccccaggaccagcccuggggcucagggcag

SEQ ID NO: 147391 - RNA, 31 nt, Homo Sapiens
agcaggaaauaaagagacagcugaaggugua

SEQ ID NO: 147392 - RNA, 32 nt, Homo Sapiens
aauuaccacuugccauuaagcuauuucauaau

SEQ ID NO: 147393 - RNA, 32 nt, Homo Sapiens
ugucucuugagcaucaaucuuguuacugcuga

SEQ ID NO: 147394 - RNA, 32 nt, Homo Sapiens
cggaucccgcggcguccggcccggguggucug

SEQ ID NO: 147395 - RNA, 32 nt, Homo Sapiens
uccauggcaacgcuggugcuugauacacugug

SEQ ID NO: 147396 - RNA, 32 nt, Homo Sapiens
ccucaugaccagacagaagaagaaaguaaaga

SEQ ID NO: 147397 - RNA, 32 nt, Homo Sapiens
aaaucacaacuggcagagaagcugguggaucc

SEQ ID NO: 147398 - RNA, 32 nt, Homo Sapiens
ccccugaccccucuaacccauccucugccucc

SEQ ID NO: 147399 - RNA, 32 nt, Homo Sapiens
gccggcacuucggcugcagaguuuugcccacg

SEQ ID NO: 147400 - RNA, 32 nt, Homo Sapiens
ccccaacccuaauuuccaaccuuuggaggacu

SEQ ID NO: 147401 - RNA, 32 nt, Homo Sapiens
cuaaggggacgccggccggggaagaggcgcgg

SEQ ID NO: 147402 - RNA, 32 nt, Homo Sapiens
aagcgugcgggaagcacaugcccuggggaggc

SEQ ID NO: 147403 - RNA, 32 nt, Homo Sapiens
accaggacagagcugccaacugcacauggaga

SEQ ID NO: 147404 - RNA, 32 nt, Homo Sapiens
ccuguaggggagaggaagcaggcagcaggagg

SEQ ID NO: 147405 - RNA, 32 nt, Homo Sapiens
aucuucaggcacuuuuaacaucuggcauucgg

SEQ ID NO: 147406 - RNA, 32 nt, Homo Sapiens
agccagcuccgaaagcagaagaaggaggcggu

SEQ ID NO: 147407 - RNA, 32 nt, Homo Sapiens
caucccuuuucccccuucacagaugguggugg

SEQ ID NO: 147408 - RNA, 32 nt, Homo Sapiens
auacaauaccugugauacuccucccccucuca

SEQ ID NO: 147409 - RNA, 32 nt, Homo Sapiens
accucaagucaccagcauaagaacaucaacag

SEQ ID NO: 147410 - RNA, 32 nt, Homo Sapiens
uaccuuuauuaagaaauuauacuaaacauuga

SEQ ID NO: 147411 - RNA, 32 nt, Homo Sapiens
ucaugugaauuaaaggaccuucauuuuggcca

SEQ ID NO: 147412 - RNA, 32 nt, Homo Sapiens
agccugggggucggcuggggacagccguaugu

SEQ ID NO: 147413 - RNA, 32 nt, Homo Sapiens
uuugauauuuaugacaguacuucugaagcgcu

SEQ ID NO: 147414 - RNA, 32 nt, Homo Sapiens
ggcugggcagguaagggcuggugcgggacggg

SEQ ID NO: 147415 - RNA, 32 nt, Homo Sapiens
acuuuugcaguccauagggccuuuuuuuuucc

SEQ ID NO: 147416 - RNA, 32 nt, Homo Sapiens
ugcucugggccagggcucugugccggccccuc

SEQ ID NO: 147417 - RNA, 28 nt, Homo Sapiens
uccccaggcgcuaccaggaggggcaggu

SEQ ID NO: 147418 - RNA, 32 nt, Homo Sapiens
cccugacuuugccccacccccaucaucuggga

SEQ ID NO: 147419 - RNA, 32 nt, Homo Sapiens
aauguuuccaguugggccaacuauuucuagcc

SEQ ID NO: 147420 - RNA, 32 nt, Homo Sapiens
ggccaggcgugguggcucaugacuguaauccc

SEQ ID NO: 147421 - RNA, 32 nt, Homo Sapiens
caaaaucacucuuuccucucucccucuccuug

SEQ ID NO: 147422 - RNA, 32 nt, Homo Sapiens
gcaaagggagaacuggggggcuggcagguaau

SEQ ID NO: 147423 - RNA, 32 nt, Homo Sapiens
ggcacgaggcacgugguuaugcugccggaguu

SEQ ID NO: 147424 - RNA, 32 nt, Homo Sapiens
guuaguaauuaugcaguauguacucuauuuaa

SEQ ID NO: 147425 - RNA, 32 nt, Homo Sapiens
gccagacagcaggcuccaggcuccaccgcccc

SEQ ID NO: 147426 - RNA, 32 nt, Homo Sapiens
uuuaugaaacacacaccuggaauaaaaccacu

SEQ ID NO: 147427 - RNA, 32 nt, Homo Sapiens
gcagcugcuuuucuaacaaacuguugaucagc

SEQ ID NO: 147428 - RNA, 32 nt, Homo Sapiens
ggggguggcugugaaagaaaauaauggagaau

SEQ ID NO: 147429 - RNA, 32 nt, Homo Sapiens
gagaaggcaaccccagauccccugagcuaacc

SEQ ID NO: 147430 - RNA, 32 nt, Homo Sapiens
ccgaggcuccuggcagaagguuuucccucuuc

SEQ ID NO: 147431 - RNA, 32 nt, Homo Sapiens
ucuccugcuccuggacacccaggccugcccuc

SEQ ID NO: 147432 - RNA, 32 nt, Homo Sapiens
cgagcggagggagccggggcugggaguucucc

SEQ ID NO: 147433 - RNA, 29 nt, Homo Sapiens
cgccauggaagacacgccguuggugauau

SEQ ID NO: 147434 - RNA, 32 nt, Homo Sapiens
ggcagcaggaaguaaaggcaucugagauagaa

SEQ ID NO: 147435 - RNA, 32 nt, Homo Sapiens
gaaacacuugcuuacagaccgaaacuggcauc

SEQ ID NO: 147436 - RNA, 32 nt, Homo Sapiens
auauaugacuuugaauaaaauaaagcuaccau

SEQ ID NO: 147437 - RNA, 32 nt, Homo Sapiens
uugucacgggcacagaugagcagacgcagaug

SEQ ID NO: 147438 - RNA, 32 nt, Homo Sapiens
gacucggacccgcuacugccugcccccaacuc

SEQ ID NO: 147439 - RNA, 32 nt, Homo Sapiens
uuaaggguuuguggggcggggcgggauuaaca

SEQ ID NO: 147440 - RNA, 32 nt, Homo Sapiens
aacaaagaccugaguucuacaacugcaagaaa

SEQ ID NO: 147441 - RNA, 32 nt, Homo Sapiens
agggccaggaggaggaagagucugcagcauuu

SEQ ID NO: 147442 - RNA, 32 nt, Homo Sapiens
cagcccaggacucugcacuccuccccccaccu

SEQ ID NO: 147443 - RNA, 32 nt, Homo Sapiens
uaaauccuugggcuaugucagaggcacaaagu

SEQ ID NO: 147444 - RNA, 32 nt, Homo Sapiens
caagccagauccugaugugaaaaaagagaucu

SEQ ID NO: 147445 - RNA, 32 nt, Homo Sapiens
agacaguccaaggggacuggaucccagcagug

SEQ ID NO: 147446 - RNA, 32 nt, Homo Sapiens
ccuccgcccugcccucacccagcccgcuguuc

SEQ ID NO: 147447 - RNA, 32 nt, Homo Sapiens
cucgguaaagauuauauggaaauacuauaaag

SEQ ID NO: 147448 - RNA, 32 nt, Homo Sapiens
gaauggggucugggcugcuggaaccuauuccc

SEQ ID NO: 147449 - RNA, 32 nt, Homo Sapiens
ggguuuuuuuucugguaagauuuggaccuaaa

SEQ ID NO: 147450 - RNA, 31 nt, Homo Sapiens
aaagacguuuauuaaaugaaaauauuuuugu

SEQ ID NO: 147451 - RNA, 32 nt, Homo Sapiens
gcuuucaguuuacuaucagggauuucuuuuuc

SEQ ID NO: 147452 - RNA, 32 nt, Homo Sapiens
aaggggcagauguucccggagcagaagacguc

SEQ ID NO: 147453 - RNA, 32 nt, Homo Sapiens
gccccuggacgaaggucugaaucccgacucug

SEQ ID NO: 147454 - RNA, 32 nt, Homo Sapiens
cccuggggcuuuccugguggccccacuggggc

SEQ ID NO: 147455 - RNA, 32 nt, Homo Sapiens
accucaggaggcccccaccucugcccuccacc

SEQ ID NO: 147456 - RNA, 32 nt, Homo Sapiens
aaaacaggauaaaggcuuguuauagucacuua

SEQ ID NO: 147457 - RNA, 32 nt, Homo Sapiens
cuacaugugaacugggaccugcaggccaaugu

SEQ ID NO: 147458 - RNA, 32 nt, Homo Sapiens
uaaugacucacuugucaacuaguggacuaauu

SEQ ID NO: 147459 - RNA, 32 nt, Homo Sapiens
agccgguuccuacuuuggacugagagaaggga

SEQ ID NO: 147460 - RNA, 32 nt, Homo Sapiens
gucagggcgggugcagggacugaagaagggca

SEQ ID NO: 147461 - RNA, 32 nt, Homo Sapiens
ccucuggcccccaccccauuacuguaccucug

SEQ ID NO: 147462 - RNA, 32 nt, Homo Sapiens
cucucuucucuccccaggacccaggcugugga

SEQ ID NO: 147463 - RNA, 30 nt, Homo Sapiens
cccaaacagaagcuugcagaggguuugucu

SEQ ID NO: 147464 - RNA, 32 nt, Homo Sapiens
cuucaucuuuccauuuacugauauuuggggga

SEQ ID NO: 147465 - RNA, 32 nt, Homo Sapiens
auaguaaugguugcaugauuugguaaaaauac

SEQ ID NO: 147466 - RNA, 32 nt, Homo Sapiens
cucucggucuacugccuuuucaaucaggaaua

SEQ ID NO: 147467 - RNA, 32 nt, Homo Sapiens
cagcuugauugagauauaauccacauaccuua

SEQ ID NO: 147468 - RNA, 32 nt, Homo Sapiens
aaagacuuguugagaaauccacugaauucuau

SEQ ID NO: 147469 - RNA, 32 nt, Homo Sapiens
gcagggugagcggagcggggccccgcaagucc

SEQ ID NO: 147470 - RNA, 32 nt, Homo Sapiens
auguuuuucuuugcagucuguuuaacguuacc

SEQ ID NO: 147471 - RNA, 32 nt, Homo Sapiens
ucugggccgcuggccugggaggcgggggccgg

SEQ ID NO: 147472 - RNA, 32 nt, Homo Sapiens
caagcuauacuuccuguuuucacgugugaaag

SEQ ID NO: 147473 - RNA, 32 nt, Homo Sapiens
ccaaaccugggaccccgagcuuccucgguagc

SEQ ID NO: 147474 - RNA, 32 nt, Homo Sapiens
gcuuaugugugggcacucuacugccucacaga

SEQ ID NO: 147475 - RNA, 32 nt, Homo Sapiens
acccccgcuggaggaugugggcagcuuagggc

SEQ ID NO: 147476 - RNA, 32 nt, Homo Sapiens
gccuggaggagcuuuuagguguugagaugggg

SEQ ID NO: 147477 - RNA, 32 nt, Homo Sapiens
gaggccgcacuaccugucugcgggaaagcggg

SEQ ID NO: 147478 - RNA, 32 nt, Homo Sapiens
guggauggguucugggguggcuccugagguag

SEQ ID NO: 147479 - RNA, 32 nt, Homo Sapiens
cuuguaaaaugcaacagccuccugcuagagug

SEQ ID NO: 147480 - RNA, 32 nt, Homo Sapiens
acagugccuaccugcuguuuggcaccgacuac

SEQ ID NO: 147481 - RNA, 32 nt, Homo Sapiens
auuuaauaaaagacuuauaaaauaccuaacua

SEQ ID NO: 147482 - RNA, 32 nt, Homo Sapiens
ccuacacuauggcacgggaggacccagccuca

SEQ ID NO: 147483 - RNA, 32 nt, Homo Sapiens
gauugcuugagcucaggaguuugagaccagcu

SEQ ID NO: 147484 - RNA, 32 nt, Homo Sapiens
uuuuuuuuuuuuucuuuuugaaacagucuuac

SEQ ID NO: 147485 - RNA, 32 nt, Homo Sapiens
gaucuagcuccucagaguuggaggaaggcuga

SEQ ID NO: 147486 - RNA, 32 nt, Homo Sapiens
agaacuaauuuucugcagcuuuuaguuuggaa

SEQ ID NO: 147487 - RNA, 32 nt, Homo Sapiens
uucaggcugauccaggagaugcucacaggcca

SEQ ID NO: 147488 - RNA, 32 nt, Homo Sapiens
ugacuggcuucccaggaccaucgcgccccucc

SEQ ID NO: 147489 - RNA, 32 nt, Homo Sapiens
ccagggcgcuggcccucgugcuggaaugguug

SEQ ID NO: 147490 - RNA, 32 nt, Homo Sapiens
gaaauauugguaguacuacuuugggaaccugu

SEQ ID NO: 147491 - RNA, 32 nt, Homo Sapiens
ccgggccguccucggcggcagugucaggagca

SEQ ID NO: 147492 - RNA, 32 nt, Homo Sapiens
agggggcacguggucaggcuccaccgcacaga

SEQ ID NO: 147493 - RNA, 32 nt, Homo Sapiens
uagacugugaauguuaaugccagagagguaua

SEQ ID NO: 147494 - RNA, 32 nt, Homo Sapiens
aagcugugacuucuccaggucucacgggcaug

SEQ ID NO: 147495 - RNA, 32 nt, Homo Sapiens
auuguguggaaaagucagaacucaggaaaugu

SEQ ID NO: 147496 - RNA, 32 nt, Homo Sapiens
caugagugcagcgugcugcggcugggcugggg

SEQ ID NO: 147497 - RNA, 32 nt, Homo Sapiens
cuaggagacaguuaauaaaaauguauuaaagg

SEQ ID NO: 147498 - RNA, 32 nt, Homo Sapiens
ucaaaacgaaacaagcaaaucauggagaagaa

SEQ ID NO: 147499 - RNA, 32 nt, Homo Sapiens
cuaggagaaagaucuuuuuuaaauaaucuuuu

SEQ ID NO: 147500 - RNA, 32 nt, Homo Sapiens
ucuauuuuauuaaacaaacaaacacagaguuu

SEQ ID NO: 147501 - RNA, 32 nt, Homo Sapiens
auccuuacuacagaauccguccuuucauuuca

SEQ ID NO: 147502 - RNA, 32 nt, Homo Sapiens
uggcuaauuuuuuguauuuuuguagagaugag

SEQ ID NO: 147503 - RNA, 32 nt, Homo Sapiens
agaagggaugacugaagcuugggacuaacaca

SEQ ID NO: 147504 - RNA, 32 nt, Homo Sapiens
cucuaggcuguagaaauuuaaaaacuacaaug

SEQ ID NO: 147505 - RNA, 32 nt, Homo Sapiens
augggucaccuuaucugagaccuugugcuacu

SEQ ID NO: 147506 - RNA, 32 nt, Homo Sapiens
augaaugcugaauaaauaauuaucauccuaca

SEQ ID NO: 147507 - RNA, 32 nt, Homo Sapiens
gggcgggcaagcgggcgggcggcaacagcaug

SEQ ID NO: 147508 - RNA, 32 nt, Homo Sapiens
agagggccagguccuaagcugcugcuugugcg

SEQ ID NO: 147509 - RNA, 32 nt, Homo Sapiens
uccccuuucauugaaucuccauugucuggagu

SEQ ID NO: 147510 - RNA, 32 nt, Homo Sapiens
ugucucugcccccacaccgcuacuggggucua

SEQ ID NO: 147511 - RNA, 32 nt, Homo Sapiens
agauggauuaaagacuuacauguuagaccuaa

SEQ ID NO: 147512 - RNA, 32 nt, Homo Sapiens
gguuguggaguuggaaauaguguguuuccaau

SEQ ID NO: 147513 - RNA, 32 nt, Homo Sapiens
ugauuuugaucagauuugauuuugaugaaauu

SEQ ID NO: 147514 - RNA, 32 nt, Homo Sapiens
aacggugaugaaauuuagucaaauguugauga

SEQ ID NO: 147515 - RNA, 32 nt, Homo Sapiens
ugagaagagcauuuuuaccuuuuuaaaaaagc

SEQ ID NO: 147516 - RNA, 32 nt, Homo Sapiens
uaugagaugaaacuuuuauaugacguguauac

SEQ ID NO: 147517 - RNA, 32 nt, Homo Sapiens
ucucuugugaaauagaugaauaaaaugugaua

SEQ ID NO: 147518 - RNA, 32 nt, Homo Sapiens
gugugagguuaacccacccccacuuccacucu

SEQ ID NO: 147519 - RNA, 32 nt, Homo Sapiens
ccgggccccccgccggcaucucugcgcugcgu

SEQ ID NO: 147520 - RNA, 32 nt, Homo Sapiens
aguuuaucugcuuuuccaacccaaaagcagac

SEQ ID NO: 147521 - RNA, 32 nt, Homo Sapiens
ugagaaaaaguaccaaaagguugacacauggc

SEQ ID NO: 147522 - RNA, 32 nt, Homo Sapiens
aauggguaauucaagaggccuuucuuuuaaaa

SEQ ID NO: 147523 - RNA, 32 nt, Homo Sapiens
uuuucuauguguuugguggaaauguaccuggu

SEQ ID NO: 147524 - RNA, 32 nt, Homo Sapiens
gcuuggccccacuguuaguccagcgagcuccu

SEQ ID NO: 147525 - RNA, 32 nt, Homo Sapiens
cuuggagcccgcgcucucggaggcugucuucu

SEQ ID NO: 147526 - RNA, 32 nt, Homo Sapiens
cuccugagcgcggacuccuucucacgggcgga

SEQ ID NO: 147527 - RNA, 32 nt, Homo Sapiens
acuaaauauaucaagacuauuuagugacucuc

SEQ ID NO: 147528 - RNA, 32 nt, Homo Sapiens
guaguuuguaguauuucauugaauuuuagaga

SEQ ID NO: 147529 - RNA, 32 nt, Homo Sapiens
aaggggcuuuuauuuucuuuuagagaggggaa

SEQ ID NO: 147530 - RNA, 32 nt, Homo Sapiens
ccaaaaguauuuacaaguauggacucaugagc

SEQ ID NO: 147531 - RNA, 32 nt, Homo Sapiens
aggagacagccucagcggacaagcagcuggug

SEQ ID NO: 147532 - RNA, 32 nt, Homo Sapiens
ugaccucagcaauccuuucugacaauuaccau

SEQ ID NO: 147533 - RNA, 32 nt, Homo Sapiens
ccgcacugucuccagucacgauccagccgaua

SEQ ID NO: 147534 - RNA, 32 nt, Homo Sapiens
aaagauccgcgagguugucugcuaaaccugcu

SEQ ID NO: 147535 - RNA, 29 nt, Homo Sapiens
uuaacuucuaaauuuacaaggccuaucau

SEQ ID NO: 147536 - RNA, 32 nt, Homo Sapiens
aaauaaaaagucgaggacacggcggucguuuu

SEQ ID NO: 147537 - RNA, 32 nt, Homo Sapiens
gaccacgauuccuccgcacaccagcuacaggc

SEQ ID NO: 147538 - RNA, 32 nt, Homo Sapiens
ccuggagcccucauccccucucccaggcuggg

SEQ ID NO: 147539 - RNA, 32 nt, Homo Sapiens
gaccgcuuccccugccuucucucugccguggc

SEQ ID NO: 147540 - RNA, 32 nt, Homo Sapiens
gagaagaagauaagcuggaagaggccagggaa

SEQ ID NO: 147541 - RNA, 32 nt, Homo Sapiens
gcauggggaaaggcaccuggggccugggggag

SEQ ID NO: 147542 - RNA, 32 nt, Homo Sapiens
ucuagguaaaauuuagauuguagugaauguag

SEQ ID NO: 147543 - RNA, 32 nt, Homo Sapiens
gggaggaaauggggcugcugggugcacagaug

SEQ ID NO: 147544 - RNA, 32 nt, Homo Sapiens
auagaaaaagaaaaaaggcuggguuuacuauu

SEQ ID NO: 147545 - RNA, 32 nt, Homo Sapiens
ccauccucacacugccaccuccccucuguccu

SEQ ID NO: 147546 - RNA, 32 nt, Homo Sapiens
gugaaugugcuaaauaaaaaguguuauuaauu

SEQ ID NO: 147547 - RNA, 32 nt, Homo Sapiens
uacuauuaaugauuagagauuuagccuaacac

SEQ ID NO: 147548 - RNA, 32 nt, Homo Sapiens
uugccgaaggauuuugcaguccucugucagua

SEQ ID NO: 147549 - RNA, 32 nt, Homo Sapiens
gcuccaagaaaagaaccaaagagggcagagga

SEQ ID NO: 147550 - RNA, 32 nt, Homo Sapiens
guuggcaggaccaccuccgccuacuucuccac

SEQ ID NO: 147551 - RNA, 32 nt, Homo Sapiens
aaugggaggacagacacugaauguguguuuug

SEQ ID NO: 147552 - RNA, 32 nt, Homo Sapiens
uggagcuggcccggcgccugggcgcgccaugc

SEQ ID NO: 147553 - RNA, 32 nt, Homo Sapiens
agguuuugaaagauuacaugauucaagcgagg

SEQ ID NO: 147554 - RNA, 32 nt, Homo Sapiens
auuaagauuacguauugguccuuuaaauuauu

SEQ ID NO: 147555 - RNA, 32 nt, Homo Sapiens
uuuuuucugagcuacucggacucuuuauuaga

SEQ ID NO: 147556 - RNA, 32 nt, Homo Sapiens
aaagugugauaaaaccucuggcucagacuugc

SEQ ID NO: 147557 - RNA, 32 nt, Homo Sapiens
aguaucugaaguuaucaaaaccacacugaaag

SEQ ID NO: 147558 - RNA, 32 nt, Homo Sapiens
accucaugccuggccccccuccaggcaugcug

SEQ ID NO: 147559 - RNA, 32 nt, Homo Sapiens
acacggugcgcccgccgccagcuccucggagg

SEQ ID NO: 147560 - RNA, 32 nt, Homo Sapiens
ugcaucagagauaugaaagauucuuuuuuauu

SEQ ID NO: 147561 - RNA, 32 nt, Homo Sapiens
gcuucaaauuuaugucccugcugauugucaaa

SEQ ID NO: 147562 - RNA, 32 nt, Homo Sapiens
gcucaaauuccuguccucucccucccucccug

SEQ ID NO: 147563 - RNA, 32 nt, Homo Sapiens
ucaauaacauuauauugauuguguuccccuca

SEQ ID NO: 147564 - RNA, 32 nt, Homo Sapiens
caugauuaucuaaaauuguguuagguggauga

SEQ ID NO: 147565 - RNA, 32 nt, Homo Sapiens
uuggaagaaaaaaucaugaugcuuauacaaua

SEQ ID NO: 147566 - RNA, 32 nt, Homo Sapiens
auuuucuccuguaucugaauuuuaaaauuaaa

SEQ ID NO: 147567 - RNA, 32 nt, Homo Sapiens
uuuagauaaaagacgaauuaaggaaaaccuuu

SEQ ID NO: 147568 - RNA, 32 nt, Homo Sapiens
gacucaggacuggggcagcuguccgccccgcc

SEQ ID NO: 147569 - RNA, 32 nt, Homo Sapiens
ccaguugugcauuuccaguuugccaugacaca

SEQ ID NO: 147570 - RNA, 32 nt, Homo Sapiens
uagcagcaguggaaccgcgagcaagucccuuc

SEQ ID NO: 147571 - RNA, 32 nt, Homo Sapiens
aaauuuuacuagcuuuuucauugucuuuccau

SEQ ID NO: 147572 - RNA, 32 nt, Homo Sapiens
uauacuguccagagcccucccucccagcccca

SEQ ID NO: 147573 - RNA, 32 nt, Homo Sapiens
ugacauggggaaggcagaggcuggcacgaugg

SEQ ID NO: 147574 - RNA, 32 nt, Homo Sapiens
aggguuuucaccuuagcaacaaugggagcugu

SEQ ID NO: 147575 - RNA, 32 nt, Homo Sapiens
gagggguaauuuuuaagcaguaaaaagaucaa

SEQ ID NO: 147576 - RNA, 28 nt, Homo Sapiens
gcggcgccggcucccaggaugcagugug

SEQ ID NO: 147577 - RNA, 32 nt, Homo Sapiens
ucucucugucuccugcacucucguuacuaagc

SEQ ID NO: 147578 - RNA, 32 nt, Homo Sapiens
acccagccugaccccugagagcugccccgugc

SEQ ID NO: 147579 - RNA, 32 nt, Homo Sapiens
gagauuacaccagcgguaacacugccaaccga

SEQ ID NO: 147580 - RNA, 32 nt, Homo Sapiens
ugggauaagaaaccacaaaacgcauggaacaa

SEQ ID NO: 147581 - RNA, 32 nt, Homo Sapiens
gacucccgagaccggccaaagccaagccagcc

SEQ ID NO: 147582 - RNA, 32 nt, Homo Sapiens
uucgugcugugucugccuggacaguugcaauu

SEQ ID NO: 147583 - RNA, 32 nt, Homo Sapiens
ugguauauaccuguagucccagcuacucagga

SEQ ID NO: 147584 - RNA, 32 nt, Homo Sapiens
cuccgccagaccgccgccgcgccgccaucaug

SEQ ID NO: 147585 - RNA, 32 nt, Homo Sapiens
guauuccuguccaaaaaucaagccggacagug

SEQ ID NO: 147586 - RNA, 32 nt, Homo Sapiens
auaguauguaauguuguguacauauuauuuau

SEQ ID NO: 147587 - RNA, 32 nt, Homo Sapiens
cagcugggccuucgaggcgcaccuuccccucc

SEQ ID NO: 147588 - RNA, 32 nt, Homo Sapiens
ugucuuaugauuaugcuguucuauuccuccau

SEQ ID NO: 147589 - RNA, 32 nt, Homo Sapiens
aaguagccgggcguggugaugcgugccuguaa

SEQ ID NO: 147590 - RNA, 32 nt, Homo Sapiens
cgugcuguguggaaacccuccccucugagacu

SEQ ID NO: 147591 - RNA, 32 nt, Homo Sapiens
uucucugcugaccuugccaaguuguucgaggu

SEQ ID NO: 147592 - RNA, 32 nt, Homo Sapiens
uuuucuaucacauuuucagucuguaaauuuuu

SEQ ID NO: 147593 - RNA, 32 nt, Homo Sapiens
ugauacuguugccugccuuuuuagucaccccg

SEQ ID NO: 147594 - RNA, 32 nt, Homo Sapiens
guuuuccagcgggcucuguuuccccucccaag

SEQ ID NO: 147595 - RNA, 32 nt, Homo Sapiens
aacaaaagauuuuaaaguacuucucuagucau

SEQ ID NO: 147596 - RNA, 32 nt, Homo Sapiens
gaacuuaacuguauauagcaaaacagaagagu

SEQ ID NO: 147597 - RNA, 30 nt, Homo Sapiens
aacuugucacuugccagucacuccguuuug

SEQ ID NO: 147598 - RNA, 32 nt, Homo Sapiens
aguuccaaaaauaccauuuaucuacuauuuga

SEQ ID NO: 147599 - RNA, 32 nt, Homo Sapiens
cuccggccccugucggcgccaagccccuccgc

SEQ ID NO: 147600 - RNA, 32 nt, Homo Sapiens
cggacggaggagggggcggggcucucgggagc

SEQ ID NO: 147601 - RNA, 32 nt, Homo Sapiens
acuuuuaauuuaacuuaaaaaugccuucccuu

SEQ ID NO: 147602 - RNA, 32 nt, Homo Sapiens
uuuuaauugugguauauauaaucuucaguaac

SEQ ID NO: 147603 - RNA, 32 nt, Homo Sapiens
ccacccagugcagcucccagugcugcagugug

SEQ ID NO: 147604 - RNA, 32 nt, Homo Sapiens
gacucagagagauaaagcuguugcccaaugag

SEQ ID NO: 147605 - RNA, 32 nt, Homo Sapiens
ccuuguaaggugcaccugugcugcugggagcc

SEQ ID NO: 147606 - RNA, 32 nt, Homo Sapiens
caucucauguuuuuauucccuuuauucuucuu

SEQ ID NO: 147607 - RNA, 32 nt, Homo Sapiens
aguguauucuuaauguuauacucaauuuuuaa

SEQ ID NO: 147608 - RNA, 32 nt, Homo Sapiens
cuuuuuuuuccuucuuuuuuuuuugagacagg

SEQ ID NO: 147609 - RNA, 32 nt, Homo Sapiens
cuuuggaggcaucagguucugugcacaacuug

SEQ ID NO: 147610 - RNA, 32 nt, Homo Sapiens
ugagcaaauggcacaaagguugcuuuuuagug

SEQ ID NO: 147611 - RNA, 31 nt, Homo Sapiens
ccuucuccacccucucccugagcacaggccg

SEQ ID NO: 147612 - RNA, 32 nt, Homo Sapiens
gccuagucuuguaugguguaaauaucaagagu

SEQ ID NO: 147613 - RNA, 32 nt, Homo Sapiens
uuggugguugguguucuaucuaggcgaugaga

SEQ ID NO: 147614 - RNA, 32 nt, Homo Sapiens
cacaaggauugagaagaguuaaaggcuaaaga

SEQ ID NO: 147615 - RNA, 32 nt, Homo Sapiens
ccaggcccugcuccauggagccuucagucucc

SEQ ID NO: 147616 - RNA, 32 nt, Homo Sapiens
ugccaugcuccucuccuggaaaacacuugagu

SEQ ID NO: 147617 - RNA, 32 nt, Homo Sapiens
ggcagggaacucgucccuuuuauucuugccuc

SEQ ID NO: 147618 - RNA, 32 nt, Homo Sapiens
gagagcuacaccaucaaaggugccaaaaucua

SEQ ID NO: 147619 - RNA, 32 nt, Homo Sapiens
aggggcggccccauccugcugacgucaggccc

SEQ ID NO: 147620 - RNA, 32 nt, Homo Sapiens
ucuucuuuccuucaccaccacccaggagcuca

SEQ ID NO: 147621 - RNA, 32 nt, Homo Sapiens
aguuucuguauuacaacacuguaguggaacau

SEQ ID NO: 147622 - RNA, 32 nt, Homo Sapiens
gagcgagccucgagcgggcgggccccagccug

SEQ ID NO: 147623 - RNA, 32 nt, Homo Sapiens
ugaaggugccugcagaggagcccgccaaugag

SEQ ID NO: 147624 - RNA, 32 nt, Homo Sapiens
uuacaggugugagccaccacgcccggccgauu

SEQ ID NO: 147625 - RNA, 32 nt, Homo Sapiens
aggaggaguccucccccuucuccugcagucuc

SEQ ID NO: 147626 - RNA, 32 nt, Homo Sapiens
gauugauguucccucuugcacugaauaauaca

SEQ ID NO: 147627 - RNA, 32 nt, Homo Sapiens
accccaaacuggguaauuauuauaaaggaaag

SEQ ID NO: 147628 - RNA, 32 nt, Homo Sapiens
ggaauccuggacuuaauuuaggagaaaggccc

SEQ ID NO: 147629 - RNA, 32 nt, Homo Sapiens
gcugacgucugggugacagugaaacgggguau

SEQ ID NO: 147630 - RNA, 32 nt, Homo Sapiens
acuugaucuauuaugacuuuuucauguagacc

SEQ ID NO: 147631 - RNA, 32 nt, Homo Sapiens
gcggcccccucgcggugcccguggugaugcca

SEQ ID NO: 147632 - RNA, 29 nt, Homo Sapiens
cgcuaugugacuuuugcuuaauccaauau

SEQ ID NO: 147633 - RNA, 32 nt, Homo Sapiens
cagccuuagaaagcgucaaggcaaguggaugg

SEQ ID NO: 147634 - RNA, 32 nt, Homo Sapiens
aguggagccuguggcuucggaaaucaccuuuc

SEQ ID NO: 147635 - RNA, 32 nt, Homo Sapiens
aggggaaaucaucauaauuguuggauuaaaac

SEQ ID NO: 147636 - RNA, 32 nt, Homo Sapiens
acauccgccggaggcccggccgggcggcgcuc

SEQ ID NO: 147637 - RNA, 32 nt, Homo Sapiens
gaggcugcagugagccgagaucgugccacugc

SEQ ID NO: 147638 - RNA, 32 nt, Homo Sapiens
acugggcugagccgcacagccuggcuuugggc

SEQ ID NO: 147639 - RNA, 32 nt, Homo Sapiens
agccccauggccucagaauuuccccccaguuc

SEQ ID NO: 147640 - RNA, 32 nt, Homo Sapiens
cuccaggggcuuuggguuugucacuuaugcca

SEQ ID NO: 147641 - RNA, 32 nt, Homo Sapiens
agccucggaaccgagacgaugcgugcgcuccg

SEQ ID NO: 147642 - RNA, 32 nt, Homo Sapiens
uccugcgcccacccgaccgacggagucgugcg

SEQ ID NO: 147643 - RNA, 32 nt, Homo Sapiens
ucuaauguaagaaaauuugaaguaaaggauug

SEQ ID NO: 147644 - RNA, 32 nt, Homo Sapiens
ggcacccaacucccacaagcaugcaacagcag

SEQ ID NO: 147645 - RNA, 30 nt, Homo Sapiens
ggccucaagcgauccacccaucuuggccuc

SEQ ID NO: 147646 - RNA, 32 nt, Homo Sapiens
acuguuuguauguauaaaauaaaggugcugcu

SEQ ID NO: 147647 - RNA, 31 nt, Homo Sapiens
cuuaagugagcagaacagguaguauuacacc

SEQ ID NO: 147648 - RNA, 32 nt, Homo Sapiens
acggugaccuucgcuugguguccuccuggccu

SEQ ID NO: 147649 - RNA, 32 nt, Homo Sapiens
agguccugagccccggcccccguaaccaagca

SEQ ID NO: 147650 - RNA, 32 nt, Homo Sapiens
uuacugucaggaggucaaggaaaggaacuuug

SEQ ID NO: 147651 - RNA, 32 nt, Homo Sapiens
ccggguuuuuaaaaguagugucuggaguuugu

SEQ ID NO: 147652 - RNA, 32 nt, Homo Sapiens
aguaacaaaaauugaauugcauuuugugcuca

SEQ ID NO: 147653 - RNA, 32 nt, Homo Sapiens
ccauuuauggauucuaugaauaaaauaucaca

SEQ ID NO: 147654 - RNA, 32 nt, Homo Sapiens
caugcuuuaaccccauuguauguuuguggaaa

SEQ ID NO: 147655 - RNA, 32 nt, Homo Sapiens
cagcacgucgccauccgucaccagaauuaguc

SEQ ID NO: 147656 - RNA, 32 nt, Homo Sapiens
ccguugccucuggcugucugcacuuuuguuca

SEQ ID NO: 147657 - RNA, 32 nt, Homo Sapiens
uaaggccccuggagccugucugcccgauggcc

SEQ ID NO: 147658 - RNA, 32 nt, Homo Sapiens
cauaaugauuucauuuugauaaugugcagaau

SEQ ID NO: 147659 - RNA, 31 nt, Homo Sapiens
ccgccaccguggcggccgccccgcgcugucu

SEQ ID NO: 147660 - RNA, 32 nt, Homo Sapiens
gcucugggcagcgccccuuuggacagcacagg

SEQ ID NO: 147661 - RNA, 32 nt, Homo Sapiens
gccgcuucaccggcugccacuccccggagugc

SEQ ID NO: 147662 - RNA, 32 nt, Homo Sapiens
ugguacugguuucuaacaacuuacgaguauau

SEQ ID NO: 147663 - RNA, 32 nt, Homo Sapiens
ccagaagucuuacugauaacauaaacagucaa

SEQ ID NO: 147664 - RNA, 32 nt, Homo Sapiens
gggccugccuacgugcugcccgagggcagggg

SEQ ID NO: 147665 - RNA, 32 nt, Homo Sapiens
ugacaguauuaauaaacuauuauuuuguaggu

SEQ ID NO: 147666 - RNA, 32 nt, Homo Sapiens
agagcaaugaguuagcaaauagaaauacagaa

SEQ ID NO: 147667 - RNA, 32 nt, Homo Sapiens
cccaggcaaaccagcaacaagaaacugggugg

SEQ ID NO: 147668 - RNA, 32 nt, Homo Sapiens
gguugccauaugcuagucagaauggugaaaag

SEQ ID NO: 147669 - RNA, 32 nt, Homo Sapiens
cagccacagggcuaagcaugcauguuaacagg

SEQ ID NO: 147670 - RNA, 32 nt, Homo Sapiens
gcaaccugaguaagagacucucugccacuggg

SEQ ID NO: 147671 - RNA, 32 nt, Homo Sapiens
cacugcccggccuccccuccccgcaggaagcc

SEQ ID NO: 147672 - RNA, 32 nt, Homo Sapiens
cggcugaagaucugauuaugucucugugcaua

SEQ ID NO: 147673 - RNA, 32 nt, Homo Sapiens
aaccaucccuucccuuucucccuuggcuguuc

SEQ ID NO: 147674 - RNA, 31 nt, Homo Sapiens
cggaggggcggguccucgacggcuacgggaa

SEQ ID NO: 147675 - RNA, 32 nt, Homo Sapiens
cuaaauuacuuuucuuuuuuaagucuacuuuu

SEQ ID NO: 147676 - RNA, 32 nt, Homo Sapiens
gggacgaucucuaggcuucugacuugaguugg

SEQ ID NO: 147677 - RNA, 32 nt, Homo Sapiens
cgcccaggcugcggaggggcucgggggcagga

SEQ ID NO: 147678 - RNA, 32 nt, Homo Sapiens
cucuaccccccucuccccuuccuuguagguga

SEQ ID NO: 147679 - RNA, 32 nt, Homo Sapiens
auuugaaccauguaucucuggguagcuacaaa

SEQ ID NO: 147680 - RNA, 32 nt, Homo Sapiens
uacuauuuuuaaaauauuuugcugcuucuguu

SEQ ID NO: 147681 - RNA, 32 nt, Homo Sapiens
ggugucucuggcucaccuccgucuguucauca

SEQ ID NO: 147682 - RNA, 32 nt, Homo Sapiens
aauauccauuauuuaaauuuauaauuguguca

SEQ ID NO: 147683 - RNA, 32 nt, Homo Sapiens
gggugugaccaaaagugccauuuguuaaagac

SEQ ID NO: 147684 - RNA, 32 nt, Homo Sapiens
uuuucguucaugauucuauuggcacuagaauu

SEQ ID NO: 147685 - RNA, 32 nt, Homo Sapiens
cugucauagaaagugccagaaaguguuuaacu

SEQ ID NO: 147686 - RNA, 32 nt, Homo Sapiens
cacuaaccagaauugguaugaaaaugaaaugu

SEQ ID NO: 147687 - RNA, 32 nt, Homo Sapiens
agagaagguggcuaccugggggugucccaggg

SEQ ID NO: 147688 - RNA, 32 nt, Homo Sapiens
uuuugaaauaagauuauaugauuagguauuag

SEQ ID NO: 147689 - RNA, 32 nt, Homo Sapiens
gagaccaaggaccuguuugccgcccugcccca

SEQ ID NO: 147690 - RNA, 32 nt, Homo Sapiens
caaggcuuuucucuguuuccaguaaucggagc

SEQ ID NO: 147691 - RNA, 32 nt, Homo Sapiens
cgucacaguguuccaggcaaccuggacuuguc

SEQ ID NO: 147692 - RNA, 32 nt, Homo Sapiens
gcagagccccggggucucggcugagcggcggc

SEQ ID NO: 147693 - RNA, 32 nt, Homo Sapiens
gaggaaggggagaauggguggccaccugcccu

SEQ ID NO: 147694 - RNA, 32 nt, Homo Sapiens
aacuuuuuauaguucaaaaauuaagcauggac

SEQ ID NO: 147695 - RNA, 32 nt, Homo Sapiens
uguucauagcuguguagacauuuuaauucagu

SEQ ID NO: 147696 - RNA, 32 nt, Homo Sapiens
uuguagguuuauucuauccucuccucuuccuc

SEQ ID NO: 147697 - RNA, 32 nt, Homo Sapiens
gcaggagcuggcgggggcgcacgggcagcgcu

SEQ ID NO: 147698 - RNA, 32 nt, Homo Sapiens
gagcccgcgagacccgggucuccagggucugc

SEQ ID NO: 147699 - RNA, 32 nt, Homo Sapiens
acaaagaggagagaaaguuugcgcggccgagc

SEQ ID NO: 147700 - RNA, 32 nt, Homo Sapiens
ggugagcugcugccggccacgccagaggcugc

SEQ ID NO: 147701 - RNA, 32 nt, Homo Sapiens
ucuacuucaaccaaaaucagaucuuugagguu

SEQ ID NO: 147702 - RNA, 32 nt, Homo Sapiens
agaaauauagaagcccucuuuaccaaaaucau

SEQ ID NO: 147703 - RNA, 32 nt, Homo Sapiens
ccgauguggggauagagaggcggaagagcagu

SEQ ID NO: 147704 - RNA, 32 nt, Homo Sapiens
ccccacucaaaaucaauuggauuaauuuuaau

SEQ ID NO: 147705 - RNA, 32 nt, Homo Sapiens
cgcgggccggcggcguuuuccagcucgagugc

SEQ ID NO: 147706 - RNA, 31 nt, Homo Sapiens
augggugaggaccagaaccagacucugagca

SEQ ID NO: 147707 - RNA, 32 nt, Homo Sapiens
ccauaacaagauacuguagacugagaaauuua

SEQ ID NO: 147708 - RNA, 32 nt, Homo Sapiens
cuaagccgucuuucccaggaauccugggugga

SEQ ID NO: 147709 - RNA, 32 nt, Homo Sapiens
ugugguuacugauagaaucaagacaauuacaa

SEQ ID NO: 147710 - RNA, 32 nt, Homo Sapiens
gugcuuuuuggaagagacuauuaggaaaggaa

SEQ ID NO: 147711 - RNA, 32 nt, Homo Sapiens
aagguuuugcuuuaagaugcugugacauccug

SEQ ID NO: 147712 - RNA, 32 nt, Homo Sapiens
caggacagcaucgcagggaggugcugggauuc

SEQ ID NO: 147713 - RNA, 32 nt, Homo Sapiens
uaaaacauauauuauauugaacuauguguuaa

SEQ ID NO: 147714 - RNA, 32 nt, Homo Sapiens
ggcuucgugacggaguuaucagagacauugag

SEQ ID NO: 147715 - RNA, 32 nt, Homo Sapiens
gagaacugccagcaccuccuggcccgagacgu

SEQ ID NO: 147716 - RNA, 32 nt, Homo Sapiens
aaaauguauuuacuuagaagcauucagaaugu

SEQ ID NO: 147717 - RNA, 32 nt, Homo Sapiens
gagaagguccacuggggcacccguuacgccau

SEQ ID NO: 147718 - RNA, 32 nt, Homo Sapiens
uuaucacccucagucuuaauccauccaccaga

SEQ ID NO: 147719 - RNA, 28 nt, Homo Sapiens
gcgaugcgcgucggaaacucgcggcccc

SEQ ID NO: 147720 - RNA, 32 nt, Homo Sapiens
ccaguccuggggacucuaaggacucugaggac

SEQ ID NO: 147721 - RNA, 32 nt, Homo Sapiens
aggguugaauuuuuuucuuuuuucuccauggu

SEQ ID NO: 147722 - RNA, 32 nt, Homo Sapiens
gcuguaaucuggagaugcuuuuuacacaacca

SEQ ID NO: 147723 - RNA, 32 nt, Homo Sapiens
aaaguuaacuaaaugguugacacacaaaaauu

SEQ ID NO: 147724 - RNA, 32 nt, Homo Sapiens
agccccuccagugcccucuccucgaugccucg

SEQ ID NO: 147725 - RNA, 32 nt, Homo Sapiens
ugggcucggcccggaccuggcauccggauuug

SEQ ID NO: 147726 - RNA, 32 nt, Homo Sapiens
ucacaagguccagaguucaagagcagccuggc

SEQ ID NO: 147727 - RNA, 32 nt, Homo Sapiens
caucuccaaauauauuuaugcauagagagugc

SEQ ID NO: 147728 - RNA, 32 nt, Homo Sapiens
ucuguggcgggugcgagagugaggcugugggg

SEQ ID NO: 147729 - RNA, 32 nt, Homo Sapiens
uaucauugcccauuuguaggccuaacuuuauu

SEQ ID NO: 147730 - RNA, 32 nt, Homo Sapiens
cuuaguuccaaugcauuuggcuccagaaagac

SEQ ID NO: 147731 - RNA, 32 nt, Homo Sapiens
gaguaacgaaacaugaucacgagcacuaacaa

SEQ ID NO: 147732 - RNA, 32 nt, Homo Sapiens
uagaagcuucuccuuaaccuguauugauacug

SEQ ID NO: 147733 - RNA, 29 nt, Homo Sapiens
agaggacggggacaggcgccgugcgaacc

SEQ ID NO: 147734 - RNA, 32 nt, Homo Sapiens
augacuaaaaauuugaaaaagauaaaaauuuc

SEQ ID NO: 147735 - RNA, 32 nt, Homo Sapiens
ggccauuauugaucucuuucuucuguuuugga

SEQ ID NO: 147736 - RNA, 32 nt, Homo Sapiens
uuaaauauaagguagcuaguuuuuacaccuga

SEQ ID NO: 147737 - RNA, 32 nt, Homo Sapiens
gugucaagcugaugauaggcauugaugcuaca

SEQ ID NO: 147738 - RNA, 32 nt, Homo Sapiens
uccgggacgcccucgcaccccuggacaccaga

SEQ ID NO: 147739 - RNA, 32 nt, Homo Sapiens
uccagguucaacaguauauuaagaagcucuac

SEQ ID NO: 147740 - RNA, 32 nt, Homo Sapiens
agugggcgggagggagaggggguguccgaggg

SEQ ID NO: 147741 - RNA, 32 nt, Homo Sapiens
acuuuggagcuuuaaaccuuggguucauaauc

SEQ ID NO: 147742 - RNA, 32 nt, Homo Sapiens
acugcuugccuggccucgugcuuggauugucc

SEQ ID NO: 147743 - RNA, 32 nt, Homo Sapiens
guaagggcagaagggacaagcucucuauccca

SEQ ID NO: 147744 - RNA, 32 nt, Homo Sapiens
ugggaggcgcagguugcagggaggcggagguu

SEQ ID NO: 147745 - RNA, 32 nt, Homo Sapiens
cuuuuagaaaguuaaaaauguauaguaacuga

SEQ ID NO: 147746 - RNA, 32 nt, Homo Sapiens
cagacuuuccugaaaucaugugguauucaaga

SEQ ID NO: 147747 - RNA, 32 nt, Homo Sapiens
aagacccucggccuccucccccgccgccuucc

SEQ ID NO: 147748 - RNA, 32 nt, Homo Sapiens
ugccaaguuauuuuaaaauguaccauuauuau

SEQ ID NO: 147749 - RNA, 32 nt, Homo Sapiens
ggaggcuauguagcuggugcgcugcucacggc

SEQ ID NO: 147750 - RNA, 32 nt, Homo Sapiens
caugagggcggggaguucccccugcuccaucc

SEQ ID NO: 147751 - RNA, 32 nt, Homo Sapiens
cauccuggcugcuugccuuccauuuccgugua

SEQ ID NO: 147752 - RNA, 32 nt, Homo Sapiens
agaacugacuuccagguguucaccaagggaaa

SEQ ID NO: 147753 - RNA, 32 nt, Homo Sapiens
uuuccuguuuugucuuuuuuuuuuuuuuuuuu

SEQ ID NO: 147754 - RNA, 32 nt, Homo Sapiens
guacccaaccuucccuucucccuugagugcuu

SEQ ID NO: 147755 - RNA, 32 nt, Homo Sapiens
ccaaguccuccauggcggccccagccgggaag

SEQ ID NO: 147756 - RNA, 32 nt, Homo Sapiens
aaaaguaucuaagguaacaacaacaauuuugc

SEQ ID NO: 147757 - RNA, 32 nt, Homo Sapiens
accuugcuguguuaaaucaugacagugagacg

SEQ ID NO: 147758 - RNA, 32 nt, Homo Sapiens
acaagcccuuuaggaagcaguaccucucgccu

SEQ ID NO: 147759 - RNA, 32 nt, Homo Sapiens
aauacagagguugcuggggucugugacauugg

SEQ ID NO: 147760 - RNA, 32 nt, Homo Sapiens
gcacuccuccgucuaccauggccacccuuaac

SEQ ID NO: 147761 - RNA, 32 nt, Homo Sapiens
aguuuuauuauuaacugcagguuucauuacug

SEQ ID NO: 147762 - RNA, 32 nt, Homo Sapiens
gucuauggagcagagaugacuccauggagcuu

SEQ ID NO: 147763 - RNA, 32 nt, Homo Sapiens
uauccuuuugacuuaaaauuuuuguuaccaac

SEQ ID NO: 147764 - RNA, 32 nt, Homo Sapiens
caggcagcugggugaccuugcugcaaagggca

SEQ ID NO: 147765 - RNA, 31 nt, Homo Sapiens
ucagaguguugccacgucuagcuccucuccc

SEQ ID NO: 147766 - RNA, 32 nt, Homo Sapiens
uggggccacaugcugacccagccccacaucca

SEQ ID NO: 147767 - RNA, 32 nt, Homo Sapiens
cguuuugcucacacagcagcuuuugcacgccc

SEQ ID NO: 147768 - RNA, 32 nt, Homo Sapiens
agagcgaggcggaggagggggugccauggccg

SEQ ID NO: 147769 - RNA, 32 nt, Homo Sapiens
cuauaucaugaauauucauuuauuuuuauagu

SEQ ID NO: 147770 - RNA, 30 nt, Homo Sapiens
aggucccgggcgcagcacgcucgguguccc

SEQ ID NO: 147771 - RNA, 32 nt, Homo Sapiens
uaugcucugccuuuuuaaccacugacauguaa

SEQ ID NO: 147772 - RNA, 32 nt, Homo Sapiens
cagauugcuucaguuuguauaaaauuagcauu

SEQ ID NO: 147773 - RNA, 32 nt, Homo Sapiens
ccagcgagugaccgagagacucgggggagagg

SEQ ID NO: 147774 - RNA, 32 nt, Homo Sapiens
aguggggacuugcaugcacauccaccauuguc

SEQ ID NO: 147775 - RNA, 32 nt, Homo Sapiens
gggauugcugaauaaucagucagacuaaaacc

SEQ ID NO: 147776 - RNA, 32 nt, Homo Sapiens
aggaaaauugcuugaacucaggaggcagaagu

SEQ ID NO: 147777 - RNA, 32 nt, Homo Sapiens
ucuucuaugaaagccuaugugcaugugugugu

SEQ ID NO: 147778 - RNA, 32 nt, Homo Sapiens
agaaaaucuauuuuguaacuuucucuaugaac

SEQ ID NO: 147779 - RNA, 32 nt, Homo Sapiens
aaucucuuuucucuguaaaaauguagacugaa

SEQ ID NO: 147780 - RNA, 32 nt, Homo Sapiens
cuugucuccuuucuacccuuguccucuuuccu

SEQ ID NO: 147781 - RNA, 32 nt, Homo Sapiens
gagaaucugcccuuggggaagagggaaugccg

SEQ ID NO: 147782 - RNA, 32 nt, Homo Sapiens
cauuauaaaaaauuaaaugauuuaaauuuaua

SEQ ID NO: 147783 - RNA, 32 nt, Homo Sapiens
gaguagggcagggcuacggggauacacggugc

SEQ ID NO: 147784 - RNA, 32 nt, Homo Sapiens
aggaacagaaaagaaacgcagagaucauagga

SEQ ID NO: 147785 - RNA, 28 nt, Homo Sapiens
uaaauguucaugaugcugacucuuguga

SEQ ID NO: 147786 - RNA, 27 nt, Homo Sapiens
gagcuuucauuuuucugguagauacau

SEQ ID NO: 147787 - RNA, 32 nt, Homo Sapiens
gauacaguauaaauaugcuaugguuuguuugu

SEQ ID NO: 147788 - RNA, 32 nt, Homo Sapiens
uagcuguucucucuagauggugucucacaaug

SEQ ID NO: 147789 - RNA, 30 nt, Homo Sapiens
aagaggaauauccuucccaacaucaccacu

SEQ ID NO: 147790 - RNA, 32 nt, Homo Sapiens
cagagccccggagcaccacggggucgggggag

SEQ ID NO: 147791 - RNA, 32 nt, Homo Sapiens
gaggccgagcaggcugcagacccagccacaug

SEQ ID NO: 147792 - RNA, 32 nt, Homo Sapiens
ggaggaagggggcuguccgucaugcucaccag

SEQ ID NO: 147793 - RNA, 32 nt, Homo Sapiens
acccagccugacggcgccucccggccccaagc

SEQ ID NO: 147794 - RNA, 32 nt, Homo Sapiens
aguuccguccacuucagccgcagcgucccucg

SEQ ID NO: 147795 - RNA, 32 nt, Homo Sapiens
ugguucuuguugguugugcuucugccucugga

SEQ ID NO: 147796 - RNA, 32 nt, Homo Sapiens
ucccggggcgcagcugcgggcggcgggagcag

SEQ ID NO: 147797 - RNA, 32 nt, Homo Sapiens
gagggaacacuggguauccucuccacagucca

SEQ ID NO: 147798 - RNA, 32 nt, Homo Sapiens
gugcauacaucaugucauuucaccuccuguuc

SEQ ID NO: 147799 - RNA, 32 nt, Homo Sapiens
gcggggaggagcuucgcgugcggggugaacgc

SEQ ID NO: 147800 - RNA, 32 nt, Homo Sapiens
ucuuugaacuccuuuuuguaaaacagccucca

SEQ ID NO: 147801 - RNA, 32 nt, Homo Sapiens
gcugaacauuacugaggaacagcaggccgugc

SEQ ID NO: 147802 - RNA, 32 nt, Homo Sapiens
ggcgcucacaccugagcucacucgcgcacgcc

SEQ ID NO: 147803 - RNA, 32 nt, Homo Sapiens
cagguggaugcucggcggccggccuuguggac

SEQ ID NO: 147804 - RNA, 32 nt, Homo Sapiens
acagcauuuucuuacacccccuccccagcgug

SEQ ID NO: 147805 - RNA, 32 nt, Homo Sapiens
uuacacuuuucugaaagcuacuccacccuacc

SEQ ID NO: 147806 - RNA, 32 nt, Homo Sapiens
augggggcgcugggcucuguucccagcguuug

SEQ ID NO: 147807 - RNA, 32 nt, Homo Sapiens
uucauaggucugaaauuuuucuucuugagggg

SEQ ID NO: 147808 - RNA, 32 nt, Homo Sapiens
gguggaaaaaucaacguggccuuugaguucag

SEQ ID NO: 147809 - RNA, 32 nt, Homo Sapiens
cauuccugcugggucuuaacaagcauaaaaag

SEQ ID NO: 147810 - RNA, 31 nt, Homo Sapiens
uucgaguugguguuucuuucaguguaaugca

SEQ ID NO: 147811 - RNA, 32 nt, Homo Sapiens
cuuauaaagacugaaggcaaaggucagaaugc

SEQ ID NO: 147812 - RNA, 32 nt, Homo Sapiens
cagcuccguuugcgucagcuggaaaaaucucu

SEQ ID NO: 147813 - RNA, 32 nt, Homo Sapiens
augagauuuuuaaaaaauauuuucucuguacu

SEQ ID NO: 147814 - RNA, 32 nt, Homo Sapiens
gaccgggccgggcgcccgcagaugagccccgc

SEQ ID NO: 147815 - RNA, 32 nt, Homo Sapiens
auacaaagauagcuaacacucauuucuucucc

SEQ ID NO: 147816 - RNA, 32 nt, Homo Sapiens
uugccaacauccuaaaacuaaaaaauaaugau

SEQ ID NO: 147817 - RNA, 31 nt, Homo Sapiens
ccuggcugagaggcguuaggaguccgggggu

SEQ ID NO: 147818 - RNA, 32 nt, Homo Sapiens
agaaagcugcauauggaaucaaguuggagaaa

SEQ ID NO: 147819 - RNA, 32 nt, Homo Sapiens
uuucuuugcauucucaguaguacacguuguau

SEQ ID NO: 147820 - RNA, 32 nt, Homo Sapiens
ugauaaaauggaauuuuugcauuauuaaacuu

SEQ ID NO: 147821 - RNA, 29 nt, Homo Sapiens
caguuggugaagcagaggacgcaaaugca

SEQ ID NO: 147822 - RNA, 32 nt, Homo Sapiens
agcugcccgggcugcuggcgcagcuggcgcgg

SEQ ID NO: 147823 - RNA, 32 nt, Homo Sapiens
cagagcuugaaauaugacacaauauaaaagga

SEQ ID NO: 147824 - RNA, 32 nt, Homo Sapiens
cugcagccuugacuucccaggcucaggcucag

SEQ ID NO: 147825 - RNA, 32 nt, Homo Sapiens
ugcguccccauggaggcgcccgggcuggccca

SEQ ID NO: 147826 - RNA, 32 nt, Homo Sapiens
caccacagcugcuuaugugugaccgauggggu

SEQ ID NO: 147827 - RNA, 32 nt, Homo Sapiens
aacaagauauuuuuagcuugacgcuuuuggac

SEQ ID NO: 147828 - RNA, 32 nt, Homo Sapiens
ccuaaaacaccccaaauauaaaaagaagccuu

SEQ ID NO: 147829 - RNA, 32 nt, Homo Sapiens
uccucugccugcgcccgcaguuugcgccgccc

SEQ ID NO: 147830 - RNA, 32 nt, Homo Sapiens
acccgccugccagccggucccuccggccgccg

SEQ ID NO: 147831 - RNA, 32 nt, Homo Sapiens
uuuguucccugccacuaaguggcucagucaca

SEQ ID NO: 147832 - RNA, 32 nt, Homo Sapiens
gcuccccagcaucuucuguuuccuggugagug

SEQ ID NO: 147833 - RNA, 32 nt, Homo Sapiens
ucuaaaacaauuuuuuaaauaaaccagcaggu

SEQ ID NO: 147834 - RNA, 30 nt, Homo Sapiens
gcgguaugcuggggaaaggaguagucggcg

SEQ ID NO: 147835 - RNA, 32 nt, Homo Sapiens
accucugccucccagguucaagugcuucucca

SEQ ID NO: 147836 - RNA, 32 nt, Homo Sapiens
gggggccugggccccaggaccagcgugcugcu

SEQ ID NO: 147837 - RNA, 32 nt, Homo Sapiens
ggugugcagcauggggaccaguccugcucuug

SEQ ID NO: 147838 - RNA, 32 nt, Homo Sapiens
acaccaauuucuucuuugcuuaaaucuuaauu

SEQ ID NO: 147839 - RNA, 32 nt, Homo Sapiens
aaaagcaguuuagagcaaacugucacuaaacu

SEQ ID NO: 147840 - RNA, 32 nt, Homo Sapiens
uacacuagagugcuagaugccuuuuuccccug

SEQ ID NO: 147841 - RNA, 32 nt, Homo Sapiens
gacccggucgcagcgcccggggcggcuccucc

SEQ ID NO: 147842 - RNA, 32 nt, Homo Sapiens
cccuccugaccgcagcucccaggcccuggaga

SEQ ID NO: 147843 - RNA, 32 nt, Homo Sapiens
cgggagcccgccccgcuucccccagagccugu

SEQ ID NO: 147844 - RNA, 32 nt, Homo Sapiens
uuaaguagaaagaaaaaguaaucauauacaua

SEQ ID NO: 147845 - RNA, 32 nt, Homo Sapiens
ccccucccuucgccaaagcagugucuaugcuc

SEQ ID NO: 147846 - RNA, 32 nt, Homo Sapiens
ccagcauagaagcaagcaccaaugcagacaug

SEQ ID NO: 147847 - RNA, 32 nt, Homo Sapiens
ccaaguagcugagacuacaggccugugccacc

SEQ ID NO: 147848 - RNA, 32 nt, Homo Sapiens
ggcguacuguuguugacagggauuguguacug

SEQ ID NO: 147849 - RNA, 32 nt, Homo Sapiens
cugccaugccccagccuucuccaggacaaccu

SEQ ID NO: 147850 - RNA, 32 nt, Homo Sapiens
aaaaacauuuguauucuucucuucccauucuu

SEQ ID NO: 147851 - RNA, 32 nt, Homo Sapiens
ucuggggccccugugaggaagaaaaggcugcu

SEQ ID NO: 147852 - RNA, 32 nt, Homo Sapiens
agauacuucaacucacaggacugcgauguuga

SEQ ID NO: 147853 - RNA, 32 nt, Homo Sapiens
gaucuuggcaucaaggaagggaugcacaucau

SEQ ID NO: 147854 - RNA, 32 nt, Homo Sapiens
ugcgaucccggaccuugccgcggccgccuggc

SEQ ID NO: 147855 - RNA, 32 nt, Homo Sapiens
acuuacugcucuucuguuuuauuuuguuuugu

SEQ ID NO: 147856 - RNA, 32 nt, Homo Sapiens
agcugagugucugucagcuucauucucucuca

SEQ ID NO: 147857 - RNA, 32 nt, Homo Sapiens
cgccucucaguugcagcagagaagccccuggc

SEQ ID NO: 147858 - RNA, 32 nt, Homo Sapiens
caguggcggcggcgaagguggcggcggcucgg

SEQ ID NO: 147859 - RNA, 30 nt, Homo Sapiens
cuuccugucuguggacucggagcaaagacg

SEQ ID NO: 147860 - RNA, 32 nt, Homo Sapiens
ggacccaucgacgacuucccggggcgacagga

SEQ ID NO: 147861 - RNA, 32 nt, Homo Sapiens
gccaggaaggcacaagguagcugugggccaag

SEQ ID NO: 147862 - RNA, 32 nt, Homo Sapiens
cuuuuuugauaaaaaagcaaauaauauugccu

SEQ ID NO: 147863 - RNA, 32 nt, Homo Sapiens
aacaccuauuuucaguccuuuggggauacaga

SEQ ID NO: 147864 - RNA, 32 nt, Homo Sapiens
accauuuuaugauguguaugggacauacguug

SEQ ID NO: 147865 - RNA, 32 nt, Homo Sapiens
guauauguauacauugugaagagacuaccaca

SEQ ID NO: 147866 - RNA, 32 nt, Homo Sapiens
gaacaagcucucggggacuauccggaggcagc

SEQ ID NO: 147867 - RNA, 32 nt, Homo Sapiens
uaggcuuugcugucuagucuuauaguuugagg

SEQ ID NO: 147868 - RNA, 32 nt, Homo Sapiens
uaguuucgaugccggaacgugcagguugcgaa

SEQ ID NO: 147869 - RNA, 32 nt, Homo Sapiens
acuugaagcucccucaaugaaaacagacacca

SEQ ID NO: 147870 - RNA, 30 nt, Homo Sapiens
cgcggggucugugcugagaauaauggcccg

SEQ ID NO: 147871 - RNA, 29 nt, Homo Sapiens
cugggucggggacacgcggaggucaggcu

SEQ ID NO: 147872 - RNA, 32 nt, Homo Sapiens
aaaauggcagcauccuucggaccucaccacgc

SEQ ID NO: 147873 - RNA, 32 nt, Homo Sapiens
ggcuuccguuuguugguggaggagguggcagg

SEQ ID NO: 147874 - RNA, 29 nt, Homo Sapiens
agccaaggaagcuguagaagaggacgcuu

SEQ ID NO: 147875 - RNA, 32 nt, Homo Sapiens
ggagccagacgcugcccccggcgcggggagaa

SEQ ID NO: 147876 - RNA, 32 nt, Homo Sapiens
ccagcuuucugcuuccugaggacucccgcucc

SEQ ID NO: 147877 - RNA, 32 nt, Homo Sapiens
uccuguagguauugggagauccacagccaaga

SEQ ID NO: 147878 - RNA, 32 nt, Homo Sapiens
aggauaauauucugcccaacuccauccucugu

SEQ ID NO: 147879 - RNA, 32 nt, Homo Sapiens
augguuuuugguuuccugucuuggucucuguc

SEQ ID NO: 147880 - RNA, 32 nt, Homo Sapiens
aaaauugugacaacauuaugugaauguuuuau

SEQ ID NO: 147881 - RNA, 32 nt, Homo Sapiens
cgugaguccaaggcgcugcuccugccuugaag

SEQ ID NO: 147882 - RNA, 32 nt, Homo Sapiens
gucgcccccgcccgccugcagcgcccggcacc

SEQ ID NO: 147883 - RNA, 32 nt, Homo Sapiens
agccacaaauauguaguucugaagauguugaa

SEQ ID NO: 147884 - RNA, 32 nt, Homo Sapiens
agagcccauugcacaagaagagccgcugccaa

SEQ ID NO: 147885 - RNA, 32 nt, Homo Sapiens
ugauuuuucuuuuaauuuuuuacuuuaccaga

SEQ ID NO: 147886 - RNA, 26 nt, Homo Sapiens
aacggagcuggcgcugcggguccggc

SEQ ID NO: 147887 - RNA, 32 nt, Homo Sapiens
agcauaaaggcacaguucagagacagaauaac

SEQ ID NO: 147888 - RNA, 32 nt, Homo Sapiens
cucgcccccacuuuucuaguuaacuuuuucca

SEQ ID NO: 147889 - RNA, 32 nt, Homo Sapiens
gaaauggcucuggccuggcugccuggccgugg

SEQ ID NO: 147890 - RNA, 32 nt, Homo Sapiens
gagggcgcacgcugcggguaccggggcuuggg

SEQ ID NO: 147891 - RNA, 32 nt, Homo Sapiens
agggccacaucccacugccacccuugacgccc

SEQ ID NO: 147892 - RNA, 32 nt, Homo Sapiens
acuccagugagauuaugauuuguagcuucaua

SEQ ID NO: 147893 - RNA, 32 nt, Homo Sapiens
auuuuucucauaucaggugauauaaugauggu

SEQ ID NO: 147894 - RNA, 32 nt, Homo Sapiens
aagauugcauuaaaggaaagauauauucuauu

SEQ ID NO: 147895 - RNA, 32 nt, Homo Sapiens
cacagauuguguuuuucuuugguuuuguuuuc

SEQ ID NO: 147896 - RNA, 32 nt, Homo Sapiens
agguugaaucugaggaaaauaauccuugugcc

SEQ ID NO: 147897 - RNA, 32 nt, Homo Sapiens
gggcccugucuccucagcuucaggcaccacca

SEQ ID NO: 147898 - RNA, 32 nt, Homo Sapiens
uuacacuuuauuaugauggacacacacgagca

SEQ ID NO: 147899 - RNA, 32 nt, Homo Sapiens
agcuggucucaaacuccugaccucagguaauc

SEQ ID NO: 147900 - RNA, 32 nt, Homo Sapiens
gugcugcagcgggucucccgcucaucacuacu

SEQ ID NO: 147901 - RNA, 32 nt, Homo Sapiens
acgcucucuccccacaucgucuucccaucugg

SEQ ID NO: 147902 - RNA, 32 nt, Homo Sapiens
aacccagguucaggguaggacaggcaagacca

SEQ ID NO: 147903 - RNA, 32 nt, Homo Sapiens
ucucguggccgcggcagcgcggucucugcgga

SEQ ID NO: 147904 - RNA, 32 nt, Homo Sapiens
ccccgcuggggcaaugcuccccggggccgcgg

SEQ ID NO: 147905 - RNA, 32 nt, Homo Sapiens
gcacgcccgccucggcggcugggcgcgauuug

SEQ ID NO: 147906 - RNA, 32 nt, Homo Sapiens
cgagcuucugccuucccuguaguuucccagau

SEQ ID NO: 147907 - RNA, 32 nt, Homo Sapiens
cauggcuccuccacuugaaaucuuugaauucu

SEQ ID NO: 147908 - RNA, 32 nt, Homo Sapiens
cuaugguuucuaugagucugcuccauccaugu

SEQ ID NO: 147909 - RNA, 32 nt, Homo Sapiens
uugggaccaaagggggagucccucgucucuug

SEQ ID NO: 147910 - RNA, 32 nt, Homo Sapiens
auaccuuuuuugguugauuccuuuuauuucuu

SEQ ID NO: 147911 - RNA, 32 nt, Homo Sapiens
ucuuacccaaggaaaaguaacaaauuauagaa

SEQ ID NO: 147912 - RNA, 32 nt, Homo Sapiens
aggaggugggagaggguagcagcaugggcuac

SEQ ID NO: 147913 - RNA, 32 nt, Homo Sapiens
caagauaauguuuguauuuucaguagagaugg

SEQ ID NO: 147914 - RNA, 32 nt, Homo Sapiens
uaguaacugugaguauaugaauguguugcaca

SEQ ID NO: 147915 - RNA, 32 nt, Homo Sapiens
ggcaggaaagaugccucuaaguucuugucucu

SEQ ID NO: 147916 - RNA, 32 nt, Homo Sapiens
ccaggaaagagaaaagguuguauguuuugugu

SEQ ID NO: 147917 - RNA, 32 nt, Homo Sapiens
guaucuguccagaaaaaugugcaugucuaaga

SEQ ID NO: 147918 - RNA, 29 nt, Homo Sapiens
gaauauggauacauguuacuuuugaucca

SEQ ID NO: 147919 - RNA, 32 nt, Homo Sapiens
acuuuguuauuuacaagaugcuucuuaaaugg

SEQ ID NO: 147920 - RNA, 32 nt, Homo Sapiens
cguugugucucauauucaagcauuccagauug

SEQ ID NO: 147921 - RNA, 27 nt, Homo Sapiens
cuccuguccuucugaaguugcuccuug

SEQ ID NO: 147922 - RNA, 32 nt, Homo Sapiens
gcucugugaaggaaccgccuuucucuccgcgu

SEQ ID NO: 147923 - RNA, 32 nt, Homo Sapiens
cagcgaccagcggguccaugggcuugcugggg

SEQ ID NO: 147924 - RNA, 32 nt, Homo Sapiens
guacacccacccaaguacugaggugugacgcg

SEQ ID NO: 147925 - RNA, 32 nt, Homo Sapiens
ggguggcgcgggaggaagcggcggcgguggcu

SEQ ID NO: 147926 - RNA, 32 nt, Homo Sapiens
gacauguaacugugugcuccuuccuaucaguu

SEQ ID NO: 147927 - RNA, 32 nt, Homo Sapiens
ugaggggagcgaagguuggggguccccgagcc

SEQ ID NO: 147928 - RNA, 32 nt, Homo Sapiens
guucccugucuccagacccuauucuccugccu

SEQ ID NO: 147929 - RNA, 32 nt, Homo Sapiens
aaaucaagauuuaaauuuuuuauuuguacuga

SEQ ID NO: 147930 - RNA, 32 nt, Homo Sapiens
gcaggaggcagacuguugggggaugugcgcau

SEQ ID NO: 147931 - RNA, 32 nt, Homo Sapiens
gcaagggaaaauuuaaaauaacaaaugaagca

SEQ ID NO: 147932 - RNA, 32 nt, Homo Sapiens
gcacucaucccaugguaaaauauucaaguaac

SEQ ID NO: 147933 - RNA, 32 nt, Homo Sapiens
guuuuacuaaaaucuguaaauacuguauuuuu

SEQ ID NO: 147934 - RNA, 32 nt, Homo Sapiens
gcacgccuuuuucugcuggauugggaaggaca

SEQ ID NO: 147935 - RNA, 32 nt, Homo Sapiens
ugcugcacagaaaacccacagccagagccccu

SEQ ID NO: 147936 - RNA, 32 nt, Homo Sapiens
agaguccagugagauggaaccacacaaccagu

SEQ ID NO: 147937 - RNA, 32 nt, Homo Sapiens
caaaauugaucuguacauccacaaaaauaugc

SEQ ID NO: 147938 - RNA, 32 nt, Homo Sapiens
aaggagucaguggggaacuccacgcgcauuga

SEQ ID NO: 147939 - RNA, 32 nt, Homo Sapiens
aacagauccuggaauugcuggugcuggagcag

SEQ ID NO: 147940 - RNA, 32 nt, Homo Sapiens
cugcuuugaagaaacagaauuuguaaagguau

SEQ ID NO: 147941 - RNA, 29 nt, Homo Sapiens
ucccuucagagaguauauuuuucuagcuu

SEQ ID NO: 147942 - RNA, 32 nt, Homo Sapiens
gggagcaaaagguuugaauaauuuauauguga

SEQ ID NO: 147943 - RNA, 32 nt, Homo Sapiens
uggggaagacacagccucuacuguacuuuaga

SEQ ID NO: 147944 - RNA, 32 nt, Homo Sapiens
uuuuuagaagucuuuuuguaaacuaauuucuu

SEQ ID NO: 147945 - RNA, 32 nt, Homo Sapiens
ccgggagaaaccgaggccccucccuccuccug

SEQ ID NO: 147946 - RNA, 32 nt, Homo Sapiens
agugacguauuuuucaccuguuuggauucuau

SEQ ID NO: 147947 - RNA, 32 nt, Homo Sapiens
uauaccuucacaguucuuaauaccuguuuugu

SEQ ID NO: 147948 - RNA, 32 nt, Homo Sapiens
ggauacucaaguaaguuuuguuaaaugaauga

SEQ ID NO: 147949 - RNA, 32 nt, Homo Sapiens
aaauuuuacuaaaauugugcauguaaauuaau

SEQ ID NO: 147950 - RNA, 32 nt, Homo Sapiens
cacuggaggcugcagggaccaagaggccauca

SEQ ID NO: 147951 - RNA, 32 nt, Homo Sapiens
ccgugguagggccccucccuccccugaggaca

SEQ ID NO: 147952 - RNA, 31 nt, Homo Sapiens
uuucuaggggaaguuuccugaguugaaacuu

SEQ ID NO: 147953 - RNA, 32 nt, Homo Sapiens
gccgcgguuucccccugggccuccccagcagc

SEQ ID NO: 147954 - RNA, 32 nt, Homo Sapiens
cauugauuuugaauaaggaacugcuggccgag

SEQ ID NO: 147955 - RNA, 32 nt, Homo Sapiens
acuggauauuguguuugaguaugugagucuuc

SEQ ID NO: 147956 - RNA, 32 nt, Homo Sapiens
ugucuuuugagcccccagugucugguuucauu

SEQ ID NO: 147957 - RNA, 32 nt, Homo Sapiens
uagauuguccagugacuuauggcaugaauuuc

SEQ ID NO: 147958 - RNA, 28 nt, Homo Sapiens
gugccaguggcuagggggugaagaggaa

SEQ ID NO: 147959 - RNA, 32 nt, Homo Sapiens
aaaguuggagaacaagacuuugaaagaauuug

SEQ ID NO: 147960 - RNA, 32 nt, Homo Sapiens
uguagagucucgcuccgucacccaggcuggag

SEQ ID NO: 147961 - RNA, 30 nt, Homo Sapiens
gagugcacgccggugccgccugggcuccag

SEQ ID NO: 147962 - RNA, 32 nt, Homo Sapiens
cggacuccuccuccuccucuucucgccauugc

SEQ ID NO: 147963 - RNA, 32 nt, Homo Sapiens
uggggacgagggaugagaaggguguggguuug

SEQ ID NO: 147964 - RNA, 32 nt, Homo Sapiens
ugauguuuaaugggggcgguuggggugggggg

SEQ ID NO: 147965 - RNA, 32 nt, Homo Sapiens
uccuugccaccggcuuucuagagcagcguaga

SEQ ID NO: 147966 - RNA, 32 nt, Homo Sapiens
acuccuuggaggaggaggaacauguucagggg

SEQ ID NO: 147967 - RNA, 32 nt, Homo Sapiens
guuuaugacuguugcauagaauucacaaugca

SEQ ID NO: 147968 - RNA, 32 nt, Homo Sapiens
gcgguagcacgcuguguuggcggcggcucccc

SEQ ID NO: 147969 - RNA, 32 nt, Homo Sapiens
ggcauuaagaacaaagauugagguuuccuaaa

SEQ ID NO: 147970 - RNA, 32 nt, Homo Sapiens
cugugcccaucccaggcugacccacccagcuu

SEQ ID NO: 147971 - RNA, 28 nt, Homo Sapiens
ccucuggggagaaugcauuugaacucau

SEQ ID NO: 147972 - RNA, 32 nt, Homo Sapiens
ggaagugacaacacgcugacuaggaaaaggag

SEQ ID NO: 147973 - RNA, 32 nt, Homo Sapiens
guuauuuaccucccuuuuuuuuuuuuuuuuaa

SEQ ID NO: 147974 - RNA, 32 nt, Homo Sapiens
cuacuugggaggcugaggcagcagaagcacuu

SEQ ID NO: 147975 - RNA, 32 nt, Homo Sapiens
uguuuuggaaaacagucugaaaacucuuccac

SEQ ID NO: 147976 - RNA, 30 nt, Homo Sapiens
gcugugcccugugcuguagcuucuuuccag

SEQ ID NO: 147977 - RNA, 31 nt, Homo Sapiens
cggacgagggcggcggcgacuggagcuucau

SEQ ID NO: 147978 - RNA, 32 nt, Homo Sapiens
ucuaucagacugccuggccagccuggggcacu

SEQ ID NO: 147979 - RNA, 32 nt, Homo Sapiens
uucugugaaaauguauuaugaaauaaaauggg

SEQ ID NO: 147980 - RNA, 32 nt, Homo Sapiens
ggcaucagcugagaccuuuuaugacggcccuu

SEQ ID NO: 147981 - RNA, 32 nt, Homo Sapiens
uguagacgcugcggcccggcccggcggguaaa

SEQ ID NO: 147982 - RNA, 32 nt, Homo Sapiens
uguuuugauuuuugucuuuuuaucuguuuuau

SEQ ID NO: 147983 - RNA, 32 nt, Homo Sapiens
ccagacuccaagcagcugcuaucaacccucuc

SEQ ID NO: 147984 - RNA, 32 nt, Homo Sapiens
gguuuuuuuuuuuuaccccccuuuuuuauuua

SEQ ID NO: 147985 - RNA, 32 nt, Homo Sapiens
aaaccaaguuaucuuauuaauuauauguaauu

SEQ ID NO: 147986 - RNA, 32 nt, Homo Sapiens
ucauaauauagaaguuaaaauaaguauuagug

SEQ ID NO: 147987 - RNA, 32 nt, Homo Sapiens
agcacguugcccaagguugcacagcaagaaaa

SEQ ID NO: 147988 - RNA, 32 nt, Homo Sapiens
uguugggcaccgugacaggcugcccuccccuc

SEQ ID NO: 147989 - RNA, 32 nt, Homo Sapiens
uuaaccaagaaugcuuccugguggaacagagc

SEQ ID NO: 147990 - RNA, 32 nt, Homo Sapiens
gguugguguacuuggcuuaaguacuucaugcu

SEQ ID NO: 147991 - RNA, 32 nt, Homo Sapiens
agacaauuagaauggggaccaauaugccaggc

SEQ ID NO: 147992 - RNA, 32 nt, Homo Sapiens
ggcagaaagccugggaauggguucggcaggaa

SEQ ID NO: 147993 - RNA, 32 nt, Homo Sapiens
aauuucgcaauuaagauuuaccaagcaaacug

SEQ ID NO: 147994 - RNA, 32 nt, Homo Sapiens
cuggcccggcgccugggcgcgccaugcgcagc

SEQ ID NO: 147995 - RNA, 32 nt, Homo Sapiens
aaaugcgguuaagaugcaaacacaagcaaaua

SEQ ID NO: 147996 - RNA, 32 nt, Homo Sapiens
ugcauuaauuuucaggaacuauuuugaauuau

SEQ ID NO: 147997 - RNA, 32 nt, Homo Sapiens
uggccaaaauaaaacuaucugucuugaauucu

SEQ ID NO: 147998 - RNA, 30 nt, Homo Sapiens
cagggccaugcuccuguucucaguguugcu

SEQ ID NO: 147999 - RNA, 32 nt, Homo Sapiens
augauccuuucugcuccuagaacccacagccu

SEQ ID NO: 148000 - RNA, 32 nt, Homo Sapiens
ucggucacccaccaacgccgcucccucgaucc

SEQ ID NO: 148001 - RNA, 32 nt, Homo Sapiens
agagaggcgggggccucgggagggugaaagga

SEQ ID NO: 148002 - RNA, 32 nt, Homo Sapiens
cugccacccagagcuuccugccuagucccacu

SEQ ID NO: 148003 - RNA, 32 nt, Homo Sapiens
caucacaucuugcagaucagaaugggauggaa

SEQ ID NO: 148004 - RNA, 32 nt, Homo Sapiens
ucuccucugcggcaucuuuccuccccaccgcu

SEQ ID NO: 148005 - RNA, 32 nt, Homo Sapiens
augacaacgacaccuauagauauggcaccaac

SEQ ID NO: 148006 - RNA, 32 nt, Homo Sapiens
ugcagccuggaaaaacuuaagguggcgccuua

SEQ ID NO: 148007 - RNA, 32 nt, Homo Sapiens
auaguuagaacaauucuuauuuaugcccacaa

SEQ ID NO: 148008 - RNA, 32 nt, Homo Sapiens
gauaggcggucaugcauacgaauuuucagcuc

SEQ ID NO: 148009 - RNA, 32 nt, Homo Sapiens
cagcccugcugccauuugaucaucucauuucu

SEQ ID NO: 148010 - RNA, 32 nt, Homo Sapiens
agcaguccuggagacccaggcgugccuagagg

SEQ ID NO: 148011 - RNA, 27 nt, Homo Sapiens
ggcaagaccagcuucagcccuucuugc

SEQ ID NO: 148012 - RNA, 32 nt, Homo Sapiens
agaucaaccauauuaauagcaauuaaagaaaa

SEQ ID NO: 148013 - RNA, 32 nt, Homo Sapiens
cucuauuucucuucuuuuuucucuuucuuuuu

SEQ ID NO: 148014 - RNA, 31 nt, Homo Sapiens
agaagucagcuuaucuuuccaaauaacauuu

SEQ ID NO: 148015 - RNA, 32 nt, Homo Sapiens
agcauguaauaacuaauaaauaaugcagaucc

SEQ ID NO: 148016 - RNA, 32 nt, Homo Sapiens
gucugucaggggcguauccacaaaaucaccaa

SEQ ID NO: 148017 - RNA, 32 nt, Homo Sapiens
uugagcccggugcuccucccucgcgcagcggu

SEQ ID NO: 148018 - RNA, 32 nt, Homo Sapiens
uagugcagaguguuuagagaucacucaguuuu

SEQ ID NO: 148019 - RNA, 32 nt, Homo Sapiens
aggaaccuaugacuauauucucucccuuggac

SEQ ID NO: 148020 - RNA, 32 nt, Homo Sapiens
agggcagaaacaauguuaguauuuucacugcu

SEQ ID NO: 148021 - RNA, 32 nt, Homo Sapiens
aacaaaacaaaauugcaaaagacuuaguugcu

SEQ ID NO: 148022 - RNA, 32 nt, Homo Sapiens
aauucgcugccaaaagagugucaaucagaaua

SEQ ID NO: 148023 - RNA, 32 nt, Homo Sapiens
cccguguugcccgugcguugcugcagaccauc

SEQ ID NO: 148024 - RNA, 32 nt, Homo Sapiens
cccugggcgggggcgcgcgagaagcggugacg

SEQ ID NO: 148025 - RNA, 32 nt, Homo Sapiens
ccggugggcgacccugacaaguaccgccuguc

SEQ ID NO: 148026 - RNA, 32 nt, Homo Sapiens
cuuaucucuaaagauggaguuaaggucccacc

SEQ ID NO: 148027 - RNA, 32 nt, Homo Sapiens
ggcaaaggaaaugcaauagcccuuucuuccca

SEQ ID NO: 148028 - RNA, 32 nt, Homo Sapiens
gagagaauauuguaugggccaucaaccauuua

SEQ ID NO: 148029 - RNA, 32 nt, Homo Sapiens
aaauuagcugggugugguggcaugcaccugua

SEQ ID NO: 148030 - RNA, 32 nt, Homo Sapiens
uggugugcuuugcaggaggacuuggaagcaga

SEQ ID NO: 148031 - RNA, 32 nt, Homo Sapiens
uuagaaaguccccagugccgcuguccguauga

SEQ ID NO: 148032 - RNA, 32 nt, Homo Sapiens
caaguaaaacaguaauagcaagagugaaggua

SEQ ID NO: 148033 - RNA, 32 nt, Homo Sapiens
ucuguaaagcuaggccugcugggagaggauga

SEQ ID NO: 148034 - RNA, 32 nt, Homo Sapiens
ggggugucaugucggggugcugccagcguccc

SEQ ID NO: 148035 - RNA, 32 nt, Homo Sapiens
cgaggccaccgccgcugcccgccucgagaagc

SEQ ID NO: 148036 - RNA, 32 nt, Homo Sapiens
gcccacggcugcggcggcgccaccgugcgcca

SEQ ID NO: 148037 - RNA, 32 nt, Homo Sapiens
gucaucaccucccaagacccaugaugcccaau

SEQ ID NO: 148038 - RNA, 32 nt, Homo Sapiens
cccgcggucccggucccggccgcaucacccac

SEQ ID NO: 148039 - RNA, 32 nt, Homo Sapiens
uggcugcuccccgguggggugugugcucagcc

SEQ ID NO: 148040 - RNA, 32 nt, Homo Sapiens
ggcgugucugggggcgggggcaggaggggagc

SEQ ID NO: 148041 - RNA, 32 nt, Homo Sapiens
aaaaccugguucaaguuuuuuuuaaaaugugg

SEQ ID NO: 148042 - RNA, 32 nt, Homo Sapiens
ggucaugaagcaaacaaugcucuaaucacaau

SEQ ID NO: 148043 - RNA, 32 nt, Homo Sapiens
aaaagcuuuauacaauuuuucuuugugcacua

SEQ ID NO: 148044 - RNA, 32 nt, Homo Sapiens
uccauccagcagcuggggguucugguggcacu

SEQ ID NO: 148045 - RNA, 32 nt, Homo Sapiens
aguuauccccaggccuggcacgucaaagaggc

SEQ ID NO: 148046 - RNA, 31 nt, Homo Sapiens
ccucgcggugugugccugccccgcugcgaug

SEQ ID NO: 148047 - RNA, 32 nt, Homo Sapiens
gcuuuuuuaaggcugcagaaaacuucacucuu

SEQ ID NO: 148048 - RNA, 32 nt, Homo Sapiens
caccuguacuggcgcgggcugcggaagccugc

SEQ ID NO: 148049 - RNA, 32 nt, Homo Sapiens
auacuguuuuguuccucugaguuucuuucagu

SEQ ID NO: 148050 - RNA, 32 nt, Homo Sapiens
uggucuuaacaucaggcugugcaggaagaagc

SEQ ID NO: 148051 - RNA, 32 nt, Homo Sapiens
guggggggucgccagcagguucccucuccccg

SEQ ID NO: 148052 - RNA, 32 nt, Homo Sapiens
ucccaccugugggaaacgcaggcccugagaga

SEQ ID NO: 148053 - RNA, 32 nt, Homo Sapiens
uguagcaaaaucgcugggaucuggagaggaag

SEQ ID NO: 148054 - RNA, 32 nt, Homo Sapiens
agcagguuuuucuuccucucuuuccuuuucuc

SEQ ID NO: 148055 - RNA, 32 nt, Homo Sapiens
ucccugcugagugcgcugcccgggccgugacc

SEQ ID NO: 148056 - RNA, 32 nt, Homo Sapiens
aagccggcgacaucaucauuuacuccaaggug

SEQ ID NO: 148057 - RNA, 32 nt, Homo Sapiens
gccuaguccucccacaccugcccccuaauaaa

SEQ ID NO: 148058 - RNA, 32 nt, Homo Sapiens
guggacuucugcaaaacaaaaauacauuuguu

SEQ ID NO: 148059 - RNA, 32 nt, Homo Sapiens
agcaacuuucccucccuccccuccccccgaac

SEQ ID NO: 148060 - RNA, 32 nt, Homo Sapiens
gcggccgcgcauucuugcgucuggccagccgc

SEQ ID NO: 148061 - RNA, 32 nt, Homo Sapiens
uccgcagaucacagaaugaaggcggggagcgc

SEQ ID NO: 148062 - RNA, 32 nt, Homo Sapiens
uaaaccauaguuuguggcacccgcuuuucuaa

SEQ ID NO: 148063 - RNA, 32 nt, Homo Sapiens
cgcucaugcgcggcguccggaguucgugcccc

SEQ ID NO: 148064 - RNA, 32 nt, Homo Sapiens
caucccgcccugcaguucuccuugacugauuc

SEQ ID NO: 148065 - RNA, 32 nt, Homo Sapiens
uggguucugcugugugacucugggcaagucac

SEQ ID NO: 148066 - RNA, 32 nt, Homo Sapiens
ugagcugcuagggggugaaggacccccgaacc

SEQ ID NO: 148067 - RNA, 32 nt, Homo Sapiens
guccggcccgcccauucccgaccuccaccuag

SEQ ID NO: 148068 - RNA, 32 nt, Homo Sapiens
aaucgcuugagcccgagagguggagacugcag

SEQ ID NO: 148069 - RNA, 32 nt, Homo Sapiens
gagccuguccaagcucagaauuccgaaggcug

SEQ ID NO: 148070 - RNA, 32 nt, Homo Sapiens
uuuucacuuugucuuaucuuucuuauagguug

SEQ ID NO: 148071 - RNA, 31 nt, Homo Sapiens
gaguucugcuggagaaaguugcugcuacucu

SEQ ID NO: 148072 - RNA, 32 nt, Homo Sapiens
cggagacugcuucauggugucuucagaggcag

SEQ ID NO: 148073 - RNA, 32 nt, Homo Sapiens
aaaggagggaaaacuuucuacgaaucuaagau

SEQ ID NO: 148074 - RNA, 32 nt, Homo Sapiens
ccgacaaugaacugucugucugagucuaaaac

SEQ ID NO: 148075 - RNA, 32 nt, Homo Sapiens
auccccaaaaauauguaugugugggcuugcuu

SEQ ID NO: 148076 - RNA, 32 nt, Homo Sapiens
gcccaagucaacacccgcagugauucaggguc

SEQ ID NO: 148077 - RNA, 32 nt, Homo Sapiens
ugguuuggcugaugugguagaaaauccuggua

SEQ ID NO: 148078 - RNA, 32 nt, Homo Sapiens
ucaguuacaccugcagcucuugucuaaaguga

SEQ ID NO: 148079 - RNA, 32 nt, Homo Sapiens
ccaacuuaucagagaccucccauuugccuuuu

SEQ ID NO: 148080 - RNA, 32 nt, Homo Sapiens
guagauuagaaaacuagauugcuaguuuauuu

SEQ ID NO: 148081 - RNA, 32 nt, Homo Sapiens
ucuguuugaauuugaaacaguguuaugcuuac

SEQ ID NO: 148082 - RNA, 32 nt, Homo Sapiens
aaaacucugugcuacacaggaguggauccagg

SEQ ID NO: 148083 - RNA, 32 nt, Homo Sapiens
cccuaggagccuuuguguguccugcucacauu

SEQ ID NO: 148084 - RNA, 32 nt, Homo Sapiens
ucaaagacauucuccuucuccucgucgaaaaa

SEQ ID NO: 148085 - RNA, 32 nt, Homo Sapiens
uuucugggcgggggguucgcccagcgucgugg

SEQ ID NO: 148086 - RNA, 32 nt, Homo Sapiens
aacaaggggcuuugggagggucagccucuguc

SEQ ID NO: 148087 - RNA, 32 nt, Homo Sapiens
aucuccugccagcugaacuguaguuagaaucu

SEQ ID NO: 148088 - RNA, 32 nt, Homo Sapiens
auuuugucuaccucacagggauguugugaggc

SEQ ID NO: 148089 - RNA, 32 nt, Homo Sapiens
cugcucccaggaagauucuuagguccucuuca

SEQ ID NO: 148090 - RNA, 32 nt, Homo Sapiens
gcuguccugagccugaguacucuagcugccuu

SEQ ID NO: 148091 - RNA, 32 nt, Homo Sapiens
cucguggcugguuuuucauuggccugaccucu

SEQ ID NO: 148092 - RNA, 32 nt, Homo Sapiens
aagagcugcacuguggccccagcuuuccaccg

SEQ ID NO: 148093 - RNA, 32 nt, Homo Sapiens
uuccagcuacucaggacacugacguaggaggg

SEQ ID NO: 148094 - RNA, 32 nt, Homo Sapiens
uguauggaaacuugauauuaaaaacuagucug

SEQ ID NO: 148095 - RNA, 32 nt, Homo Sapiens
agcuggcgggaaggggugggggugugcagucu

SEQ ID NO: 148096 - RNA, 32 nt, Homo Sapiens
cagcccccaaccccagcccuuccguaucuuuc

SEQ ID NO: 148097 - RNA, 32 nt, Homo Sapiens
aacaaaauauuuuuuccuuuuguaaaauuucu

SEQ ID NO: 148098 - RNA, 32 nt, Homo Sapiens
auauuucuguuguauuucuauaauggguuugg

SEQ ID NO: 148099 - RNA, 32 nt, Homo Sapiens
ggagcccuccguaacugcccagcccugccccu

SEQ ID NO: 148100 - RNA, 32 nt, Homo Sapiens
ccauuuauuuuaugacauuuuacaauguaagu

SEQ ID NO: 148101 - RNA, 32 nt, Homo Sapiens
auucucaguguagaagaccuagcugagaccuc

SEQ ID NO: 148102 - RNA, 32 nt, Homo Sapiens
agggcaguuucccccaugcuguucucaugaua

SEQ ID NO: 148103 - RNA, 32 nt, Homo Sapiens
agcugagcgccuccgcccgccaggcgcgccgg

SEQ ID NO: 148104 - RNA, 32 nt, Homo Sapiens
aggcgggagcagcuucccuguucugauccuau

SEQ ID NO: 148105 - RNA, 32 nt, Homo Sapiens
auacagcaauaccaccuucaguacuuggcaag

SEQ ID NO: 148106 - RNA, 32 nt, Homo Sapiens
cccagcuuucccuucugacuucuuguuacucu

SEQ ID NO: 148107 - RNA, 32 nt, Homo Sapiens
gccugacucugcgggccgcggggccgcguucc

SEQ ID NO: 148108 - RNA, 32 nt, Homo Sapiens
uggcuaccuuuuguuaaaucugcacuuucuaa

SEQ ID NO: 148109 - RNA, 32 nt, Homo Sapiens
gagggggagggaggagggagcaggcagguccc

SEQ ID NO: 148110 - RNA, 32 nt, Homo Sapiens
cacuauaaggaccagcccaaccccaugggcgg

SEQ ID NO: 148111 - RNA, 30 nt, Homo Sapiens
cagagauguggugcauuguccuguuuucac

SEQ ID NO: 148112 - RNA, 32 nt, Homo Sapiens
gucaucuuucugcugcagacagauuuuguuuc

SEQ ID NO: 148113 - RNA, 32 nt, Homo Sapiens
cacagagauaaggggccaggagggauugaaag

SEQ ID NO: 148114 - RNA, 32 nt, Homo Sapiens
cuaggaucaaggaagaagaaccugauccugaa

SEQ ID NO: 148115 - RNA, 32 nt, Homo Sapiens
ugcucccugggcugcuggucuucuuuaccuuc

SEQ ID NO: 148116 - RNA, 32 nt, Homo Sapiens
gagacagcuaccccggcccgggcucuggaggc

SEQ ID NO: 148117 - RNA, 32 nt, Homo Sapiens
aaggaagaauaaaauaaacguguaagcaaaau

SEQ ID NO: 148118 - RNA, 32 nt, Homo Sapiens
aaaggcaaaccucaaaaacaugaaagggcauu

SEQ ID NO: 148119 - RNA, 32 nt, Homo Sapiens
acucacugcugcgccuggaccucgaccgugaa

SEQ ID NO: 148120 - RNA, 32 nt, Homo Sapiens
cacagagagcggcuuccccaucgccuucuggg

SEQ ID NO: 148121 - RNA, 32 nt, Homo Sapiens
ugcccacugccagucccccacccaggcuucag

SEQ ID NO: 148122 - RNA, 32 nt, Homo Sapiens
gcgcucagagaugggggcagggggcggggaga

SEQ ID NO: 148123 - RNA, 32 nt, Homo Sapiens
auguagauauugugaaguacauauuaggaaaa

SEQ ID NO: 148124 - RNA, 32 nt, Homo Sapiens
aguaauaauuucuaauguauauuuucaauaca

SEQ ID NO: 148125 - RNA, 32 nt, Homo Sapiens
cagcgggcggcggacgccgucaugaacgcggc

SEQ ID NO: 148126 - RNA, 32 nt, Homo Sapiens
gcgggcggcgucugggucucuggcgcccccau

SEQ ID NO: 148127 - RNA, 32 nt, Homo Sapiens
cucaaauauuuuacuauuuguuuuauuuggag

SEQ ID NO: 148128 - RNA, 32 nt, Homo Sapiens
ccuacccaaacacuggcugcuggcauuccacc

SEQ ID NO: 148129 - RNA, 32 nt, Homo Sapiens
accggcugaagcagggcaaguucugaccagga

SEQ ID NO: 148130 - RNA, 32 nt, Homo Sapiens
caugaauauucucccauaacggauucaacuau

SEQ ID NO: 148131 - RNA, 32 nt, Homo Sapiens
gcuggcccgcccgcccgucgcacauguuccgg

SEQ ID NO: 148132 - RNA, 32 nt, Homo Sapiens
cucuggcagggccaggagacauggcuucugca

SEQ ID NO: 148133 - RNA, 32 nt, Homo Sapiens
ggaccccccgucccacgccaacuuuucagaca

SEQ ID NO: 148134 - RNA, 32 nt, Homo Sapiens
caaacucagaucucuagucuagucuagucuag

SEQ ID NO: 148135 - RNA, 32 nt, Homo Sapiens
acuugaagggccagagccaggggggugaggag

SEQ ID NO: 148136 - RNA, 32 nt, Homo Sapiens
cagagcucuggcggaaauuugcucgucucgcc

SEQ ID NO: 148137 - RNA, 32 nt, Homo Sapiens
cgagcuguguccgggcgggggagcccgcguug

SEQ ID NO: 148138 - RNA, 32 nt, Homo Sapiens
ucugaccugcuccugcccuccugucucucuug

SEQ ID NO: 148139 - RNA, 32 nt, Homo Sapiens
gcucauucauauuuuuucuguugcuugcuugg

SEQ ID NO: 148140 - RNA, 32 nt, Homo Sapiens
ccccacaacugaaagcacugccacaggacccc

SEQ ID NO: 148141 - RNA, 32 nt, Homo Sapiens
ccuuaggucucuuuuuaccuuguaagagaccu

SEQ ID NO: 148142 - RNA, 32 nt, Homo Sapiens
uagcaagugagagcacaccucccgcacucgcg

SEQ ID NO: 148143 - RNA, 32 nt, Homo Sapiens
caaaugggacaaucugauaagaauuucaugca

SEQ ID NO: 148144 - RNA, 32 nt, Homo Sapiens
ucucucuauaaaaugaauaaaauguuuaagaa

SEQ ID NO: 148145 - RNA, 32 nt, Homo Sapiens
uguguucuuuuggaaucaucccaauuauaaca

SEQ ID NO: 148146 - RNA, 32 nt, Homo Sapiens
gagcuaaagcuacucgcccaccuggauguccc

SEQ ID NO: 148147 - RNA, 32 nt, Homo Sapiens
augccgugguggagaacacaccuguggcuauc

SEQ ID NO: 148148 - RNA, 32 nt, Homo Sapiens
augcaagagggagaggggaaggagcugguagu

SEQ ID NO: 148149 - RNA, 32 nt, Homo Sapiens
acaggggcggggggcgggaggcuugccaccuu

SEQ ID NO: 148150 - RNA, 32 nt, Homo Sapiens
uugacuccuuuccaauagaaagaaacuaaaca

SEQ ID NO: 148151 - RNA, 32 nt, Homo Sapiens
cuaaccuuuuuuaaagcuccauugucuuaugu

SEQ ID NO: 148152 - RNA, 32 nt, Homo Sapiens
uauccugauaauuauuuaaauuguuacuuuca

SEQ ID NO: 148153 - RNA, 32 nt, Homo Sapiens
caacgcuggaggaggagccggcccucacgccc

SEQ ID NO: 148154 - RNA, 32 nt, Homo Sapiens
accaagcucuugacucuguuucccuuaaugau

SEQ ID NO: 148155 - RNA, 28 nt, Homo Sapiens
cugaugcuauucuccucucuuccuccaa

SEQ ID NO: 148156 - RNA, 32 nt, Homo Sapiens
guaaccacagugcaaggcaacugucagcgcaa

SEQ ID NO: 148157 - RNA, 32 nt, Homo Sapiens
gacgagcgggagggacccuucuccggccugau

SEQ ID NO: 148158 - RNA, 32 nt, Homo Sapiens
cugagaagagagaucaaauggaaaggagagga

SEQ ID NO: 148159 - RNA, 32 nt, Homo Sapiens
accuucaucuagccuggccgcggccuuucgcu

SEQ ID NO: 148160 - RNA, 32 nt, Homo Sapiens
uccgcccgccucagccuuccaaaguguuggga

SEQ ID NO: 148161 - RNA, 32 nt, Homo Sapiens
aauccucuuggugggugcugaaacaaugccgg

SEQ ID NO: 148162 - RNA, 32 nt, Homo Sapiens
ccaccucccacggccccgccccugcccccgcu

SEQ ID NO: 148163 - RNA, 32 nt, Homo Sapiens
cgcgcgcccggcgucggggcuuccaggaggau

SEQ ID NO: 148164 - RNA, 32 nt, Homo Sapiens
auacuggcguacuuuauauucucuaaaaugcu

SEQ ID NO: 148165 - RNA, 32 nt, Homo Sapiens
cggacgccggaggauuggggcggcaauuuguc

SEQ ID NO: 148166 - RNA, 32 nt, Homo Sapiens
cuaaauugugaguaaaucauucuugaacuuag

SEQ ID NO: 148167 - RNA, 32 nt, Homo Sapiens
aacuccaugggccccagggcugggccccaggg

SEQ ID NO: 148168 - RNA, 32 nt, Homo Sapiens
ucaagcuuauaacaacuuaacuuugcauauaa

SEQ ID NO: 148169 - RNA, 32 nt, Homo Sapiens
aucaauaauaauaugcaaacaguugugccugu

SEQ ID NO: 148170 - RNA, 32 nt, Homo Sapiens
cccuacagccgcugauuccccccgcaucgccu

SEQ ID NO: 148171 - RNA, 32 nt, Homo Sapiens
aacaugguccaugugacugcuguccuuugaau

SEQ ID NO: 148172 - RNA, 28 nt, Homo Sapiens
uuuauaauggcgaaauauuagaaucagc

SEQ ID NO: 148173 - RNA, 32 nt, Homo Sapiens
gcccggcuccggcggcagccgcgccucucgcu

SEQ ID NO: 148174 - RNA, 32 nt, Homo Sapiens
uucuugauauagauacuucauaaaccucaaua

SEQ ID NO: 148175 - RNA, 32 nt, Homo Sapiens
ggcucaggcugaagaaccggggugcuguuuaa

SEQ ID NO: 148176 - RNA, 32 nt, Homo Sapiens
gugacguucaggugcugugggaagcaggcuug

SEQ ID NO: 148177 - RNA, 32 nt, Homo Sapiens
ugcccaccugccuggggugugggugggaggcu

SEQ ID NO: 148178 - RNA, 32 nt, Homo Sapiens
guaguugucauucucuuuuguuuccuuuaauu

SEQ ID NO: 148179 - RNA, 32 nt, Homo Sapiens
gaaggagggagcuuggggggcuggcuugugag

SEQ ID NO: 148180 - RNA, 32 nt, Homo Sapiens
uuaagcuccagagaacagaaccacugauuuaa

SEQ ID NO: 148181 - RNA, 32 nt, Homo Sapiens
ccuacaaagcacugccucuacugggcgugcug

SEQ ID NO: 148182 - RNA, 32 nt, Homo Sapiens
uagucaagauuuuuuuuuuuuaaagccaugug

SEQ ID NO: 148183 - RNA, 32 nt, Homo Sapiens
aagccucacacucccuugucuuuuuccagacu

SEQ ID NO: 148184 - RNA, 32 nt, Homo Sapiens
aaaaaugacuuaaaguuggaauuuauauuuaa

SEQ ID NO: 148185 - RNA, 32 nt, Homo Sapiens
cugucguaucguaggcguuuauauuauaaaau

SEQ ID NO: 148186 - RNA, 32 nt, Homo Sapiens
caugcggugcccguggcccgccccacaccacc

SEQ ID NO: 148187 - RNA, 32 nt, Homo Sapiens
cuuuuaacacugcuaauagaaauuauguuuuc

SEQ ID NO: 148188 - RNA, 32 nt, Homo Sapiens
ccaccccaugcauuaaauuuuaagguagaacc

SEQ ID NO: 148189 - RNA, 32 nt, Homo Sapiens
uagguuggcagagcuccaccgcagucccgggu

SEQ ID NO: 148190 - RNA, 32 nt, Homo Sapiens
gacuggucugaagagacgcggggacaaagugg

SEQ ID NO: 148191 - RNA, 32 nt, Homo Sapiens
gaggagccccagcgccccgguuugcaaagcag

SEQ ID NO: 148192 - RNA, 32 nt, Homo Sapiens
cccucgaggaggaggcagcggcagccgcccuc

SEQ ID NO: 148193 - RNA, 32 nt, Homo Sapiens
cuauuuuucaccagaacacauaaaaacacuuu

SEQ ID NO: 148194 - RNA, 32 nt, Homo Sapiens
auagguauuaguugguuuuuuauuauuuuuaa

SEQ ID NO: 148195 - RNA, 32 nt, Homo Sapiens
guuggaagccccaggguggacacucagcacga

SEQ ID NO: 148196 - RNA, 32 nt, Homo Sapiens
gacguggcugugacagcgucagggcuuguggu

SEQ ID NO: 148197 - RNA, 32 nt, Homo Sapiens
cuucuucccagagaccacggacaucuaugaca

SEQ ID NO: 148198 - RNA, 32 nt, Homo Sapiens
uauuuuuaguuuuauuaguugauuuucauuuc

SEQ ID NO: 148199 - RNA, 32 nt, Homo Sapiens
guuucauuuauuucuauacuuuuucuguuuuu

SEQ ID NO: 148200 - RNA, 32 nt, Homo Sapiens
uaaacauuugguucuggauacauguugaaccu

SEQ ID NO: 148201 - RNA, 32 nt, Homo Sapiens
acggcgagcgcaccgcgccgcagugucuacuc

SEQ ID NO: 148202 - RNA, 32 nt, Homo Sapiens
aaacuuuuauaaucuuugcuuaauuuguuuuu

SEQ ID NO: 148203 - RNA, 32 nt, Homo Sapiens
aaaauacaaaaauuagucaggcaugguggugg

SEQ ID NO: 148204 - RNA, 32 nt, Homo Sapiens
ggauggcggaagcugcuacucgugagcgccag

SEQ ID NO: 148205 - RNA, 32 nt, Homo Sapiens
guuuaggcucugcaucaagauugcacaaaaaa

SEQ ID NO: 148206 - RNA, 32 nt, Homo Sapiens
agggaggcugagagggccgggccgggcggcgg

SEQ ID NO: 148207 - RNA, 32 nt, Homo Sapiens
ccgggauuccccagccccgcgcggcucccuac

SEQ ID NO: 148208 - RNA, 32 nt, Homo Sapiens
ugcauauuuagugaccaaggcaucaaggacau

SEQ ID NO: 148209 - RNA, 32 nt, Homo Sapiens
agaccaaucugggcaacagagagaccccaucu

SEQ ID NO: 148210 - RNA, 32 nt, Homo Sapiens
ccccaccccccgcucccuucugcuccuucaau

SEQ ID NO: 148211 - RNA, 32 nt, Homo Sapiens
ccucugcugugggcacggggcugcugaggguc

SEQ ID NO: 148212 - RNA, 32 nt, Homo Sapiens
gagacagaguuucauugucacccaggcuggag

SEQ ID NO: 148213 - RNA, 32 nt, Homo Sapiens
gugccuaaauuaaccauccccauuuuuaucau

SEQ ID NO: 148214 - RNA, 32 nt, Homo Sapiens
ugaugggaggggcugcugugaagaccucugac

SEQ ID NO: 148215 - RNA, 32 nt, Homo Sapiens
ugccuggcguccccucccucugucuucagcac

SEQ ID NO: 148216 - RNA, 32 nt, Homo Sapiens
aaaacacaagcauuucuguuuagagauucuag

SEQ ID NO: 148217 - RNA, 32 nt, Homo Sapiens
ccuuucacuuggauuugcauuuuaaccugcau

SEQ ID NO: 148218 - RNA, 32 nt, Homo Sapiens
gcgggggccuuucggauaucacaugggacaga

SEQ ID NO: 148219 - RNA, 32 nt, Homo Sapiens
ucauguuagggugaagcagaggaccucagugc

SEQ ID NO: 148220 - RNA, 32 nt, Homo Sapiens
uugcgcacggugcgcgcacccacugaccugcg

SEQ ID NO: 148221 - RNA, 32 nt, Homo Sapiens
ugggacgaggcccauuucaggguuuucuguca

SEQ ID NO: 148222 - RNA, 32 nt, Homo Sapiens
guccccugccauuuaauugaucgucuacagug

SEQ ID NO: 148223 - RNA, 32 nt, Homo Sapiens
guaugauccaacauggcccaguucagaaucag

SEQ ID NO: 148224 - RNA, 32 nt, Homo Sapiens
agcggcagcagcagcggcggugcggagagcuu

SEQ ID NO: 148225 - RNA, 32 nt, Homo Sapiens
guaucuauuuuuuuuucuuuuagcacauuggu

SEQ ID NO: 148226 - RNA, 32 nt, Homo Sapiens
auguugcugggggaccuacaaaagucaaacau

SEQ ID NO: 148227 - RNA, 32 nt, Homo Sapiens
cuacaauuaguagaucauguagauggcgguga

SEQ ID NO: 148228 - RNA, 32 nt, Homo Sapiens
gcccuggccaucucgggaagcuugauggcaau

SEQ ID NO: 148229 - RNA, 32 nt, Homo Sapiens
gagccucggcccgcgcccggcgcccucgcccu

SEQ ID NO: 148230 - RNA, 32 nt, Homo Sapiens
cgcaccuaaugaugaugaaaauaagacuauua

SEQ ID NO: 148231 - RNA, 32 nt, Homo Sapiens
uggcagggcuugcaggaucccugcugccuugg

SEQ ID NO: 148232 - RNA, 32 nt, Homo Sapiens
gagcaaauuauggaaauguguauuuuauauga

SEQ ID NO: 148233 - RNA, 32 nt, Homo Sapiens
uuauuuucagaauuaaugcuuauucuacauac

SEQ ID NO: 148234 - RNA, 32 nt, Homo Sapiens
auuugcugggcaugguggcgcgugccuguaau

SEQ ID NO: 148235 - RNA, 32 nt, Homo Sapiens
agacacugcccccaggaugacacaggcaagag

SEQ ID NO: 148236 - RNA, 32 nt, Homo Sapiens
gcaggaaggccauggcggggcccgagcgcugg

SEQ ID NO: 148237 - RNA, 32 nt, Homo Sapiens
cggcaccgcucccgaaguaacggagcccggag

SEQ ID NO: 148238 - RNA, 32 nt, Homo Sapiens
ggggugcugcggcuacaccaccacccgcgcgg

SEQ ID NO: 148239 - RNA, 32 nt, Homo Sapiens
cucaugauauuuuugauguauuuaucuauugg

SEQ ID NO: 148240 - RNA, 32 nt, Homo Sapiens
auaaucaugcaauagcccuaacaucaauucau

SEQ ID NO: 148241 - RNA, 32 nt, Homo Sapiens
aauuauaaucccaauauauuggggagggaccu

SEQ ID NO: 148242 - RNA, 32 nt, Homo Sapiens
uaccacauacagauggaugaaacuacuuacug

SEQ ID NO: 148243 - RNA, 31 nt, Homo Sapiens
ccggagccuccggucgcgggucuaagaggac

SEQ ID NO: 148244 - RNA, 32 nt, Homo Sapiens
cugacuucccucuggagaaugacuauggacag

SEQ ID NO: 148245 - RNA, 32 nt, Homo Sapiens
guuuuagcaucaaaaaaguaaauagauguuga

SEQ ID NO: 148246 - RNA, 32 nt, Homo Sapiens
gcgcccccgccaccuguccccucccccuccgc

SEQ ID NO: 148247 - RNA, 32 nt, Homo Sapiens
caagcccugucuuuguuccgggcucagccuuu

SEQ ID NO: 148248 - RNA, 32 nt, Homo Sapiens
ggacuaugucccucacucaagaucuuaaggau

SEQ ID NO: 148249 - RNA, 32 nt, Homo Sapiens
aucaugaaagaaccaagaaucuaguaauuuau

SEQ ID NO: 148250 - RNA, 32 nt, Homo Sapiens
aggugaaugcaaaugccuagggccuaaguaua

SEQ ID NO: 148251 - RNA, 32 nt, Homo Sapiens
ggugaacagaacuuaaauugccauucuggaua

SEQ ID NO: 148252 - RNA, 31 nt, Homo Sapiens
cugcaagugguuaagaauguauaucaggguu

SEQ ID NO: 148253 - RNA, 32 nt, Homo Sapiens
ccacccugaaggagcucaugccaggcagggga

SEQ ID NO: 148254 - RNA, 32 nt, Homo Sapiens
uguagaacuaguuuuaugucaaacccagggcc

SEQ ID NO: 148255 - RNA, 32 nt, Homo Sapiens
gccggacaagguggcgcaugccuauaauccca

SEQ ID NO: 148256 - RNA, 32 nt, Homo Sapiens
cugggcuggaggaggagcuggaagaggccgug

SEQ ID NO: 148257 - RNA, 32 nt, Homo Sapiens
uuugauccagcaucaaaacuucacuuuuuguu

SEQ ID NO: 148258 - RNA, 32 nt, Homo Sapiens
ugagcccgaggaagaggcaggcagaggcugag

SEQ ID NO: 148259 - RNA, 32 nt, Homo Sapiens
uaauggaaagcagucacagcuggagguuuuuc

SEQ ID NO: 148260 - RNA, 32 nt, Homo Sapiens
acacaacgucgcgcccucggcauuuugucuga

SEQ ID NO: 148261 - RNA, 32 nt, Homo Sapiens
agguaauugggggugaggaagaugugcgggcc

SEQ ID NO: 148262 - RNA, 32 nt, Homo Sapiens
ggcucagcggugccacugaggacccgugugac

SEQ ID NO: 148263 - RNA, 32 nt, Homo Sapiens
cucuuccuuuuggagauuaggauauuuggguu

SEQ ID NO: 148264 - RNA, 32 nt, Homo Sapiens
uuuugaauggguuuuucuuuuuugaagaaguc

SEQ ID NO: 148265 - RNA, 32 nt, Homo Sapiens
uucccucucggaccucgggcgccgggccgcgc

SEQ ID NO: 148266 - RNA, 32 nt, Homo Sapiens
accuuacagucccuaagaggaaugccugcugg

SEQ ID NO: 148267 - RNA, 32 nt, Homo Sapiens
auugguagcaaacaucucugguaaggugcaua

SEQ ID NO: 148268 - RNA, 32 nt, Homo Sapiens
ccccaggccucccacgguuggugcuggcuccu

SEQ ID NO: 148269 - RNA, 32 nt, Homo Sapiens
caauuagaaaaaauccacauagauggauauuu

SEQ ID NO: 148270 - RNA, 32 nt, Homo Sapiens
ccagagauauccacagcuuggaggagcccaga

SEQ ID NO: 148271 - RNA, 32 nt, Homo Sapiens
caaggcgccgccaugucuuuugagggcgguga

SEQ ID NO: 148272 - RNA, 32 nt, Homo Sapiens
ugagagggugcagugagaagauagcuaucuuu

SEQ ID NO: 148273 - RNA, 31 nt, Homo Sapiens
aauagcaaguacuuaaagguauauuaacauc

SEQ ID NO: 148274 - RNA, 32 nt, Homo Sapiens
gccggguggcgcgggaggaagucacgugggag

SEQ ID NO: 148275 - RNA, 32 nt, Homo Sapiens
ccaguucuccuuucucaccacucuccugcuag

SEQ ID NO: 148276 - RNA, 32 nt, Homo Sapiens
cuaaaagguauaucaaaagccuugaaaaaauu

SEQ ID NO: 148277 - RNA, 32 nt, Homo Sapiens
ugggaaagauggugugguguccugccugucug

SEQ ID NO: 148278 - RNA, 32 nt, Homo Sapiens
cggcccggcggcugcugcugcugcugacgcug

SEQ ID NO: 148279 - RNA, 32 nt, Homo Sapiens
uguaucuucuaaauuguauauauuuauggggu

SEQ ID NO: 148280 - RNA, 32 nt, Homo Sapiens
agauacacuauaaaaauagaguuuuuaccaaa

SEQ ID NO: 148281 - RNA, 32 nt, Homo Sapiens
gcugguacguacccacaugcaggaccugaagg

SEQ ID NO: 148282 - RNA, 32 nt, Homo Sapiens
cauuuauuaaugaaacuuccuuugaaaaacug

SEQ ID NO: 148283 - RNA, 32 nt, Homo Sapiens
cuaguaauuuaacuucaucaugaaugaacuau

SEQ ID NO: 148284 - RNA, 32 nt, Homo Sapiens
gaagaggaugacugagacauuaugggccacgc

SEQ ID NO: 148285 - RNA, 32 nt, Homo Sapiens
cuggaaaauaucuuaaagugaacagccaggua

SEQ ID NO: 148286 - RNA, 32 nt, Homo Sapiens
ccuuuguucccaaggacuuccacauuuuugca

SEQ ID NO: 148287 - RNA, 32 nt, Homo Sapiens
gcagggagaagcugcccuuugaguuugucaaa

SEQ ID NO: 148288 - RNA, 32 nt, Homo Sapiens
ugagagaauggguggcuguaugcacaguaccc

SEQ ID NO: 148289 - RNA, 30 nt, Homo Sapiens
gggaaggaggcggcggcgccggcggaggug

SEQ ID NO: 148290 - RNA, 32 nt, Homo Sapiens
cccuuuuacagcacgucaaggguggcaaaaac

SEQ ID NO: 148291 - RNA, 32 nt, Homo Sapiens
uggauaucaaaggaaaucaugaugcauucaau

SEQ ID NO: 148292 - RNA, 32 nt, Homo Sapiens
aacuuuaaaaauuuuaauauaaacuuucaucc

SEQ ID NO: 148293 - RNA, 32 nt, Homo Sapiens
acuaauacaucacuuuuuaacuucuguaaaau

SEQ ID NO: 148294 - RNA, 32 nt, Homo Sapiens
ucucucgcacccacccacccccucacccccuu

SEQ ID NO: 148295 - RNA, 32 nt, Homo Sapiens
caaagcauaaaccguaagaaaaauuuuaaaua

SEQ ID NO: 148296 - RNA, 32 nt, Homo Sapiens
auauaaggauaaaggcauguguauagagcaaa

SEQ ID NO: 148297 - RNA, 32 nt, Homo Sapiens
agcuuccaaacgacagugaucuuaccagccag

SEQ ID NO: 148298 - RNA, 32 nt, Homo Sapiens
cugccacauggauuuucuuaaucguuuuaugu

SEQ ID NO: 148299 - RNA, 32 nt, Homo Sapiens
agcccggcaccuuuuuugcucccugauggacu

SEQ ID NO: 148300 - RNA, 32 nt, Homo Sapiens
auuacugacaguucuagauuaauuucuuuuag

SEQ ID NO: 148301 - RNA, 32 nt, Homo Sapiens
gaagugccaaacucuaggcgaaauuauugggg

SEQ ID NO: 148302 - RNA, 32 nt, Homo Sapiens
aucguuugguucugaggccugguuugcucuua

SEQ ID NO: 148303 - RNA, 32 nt, Homo Sapiens
acaaaugcaucaugaguugcaagaugcccuaa

SEQ ID NO: 148304 - RNA, 27 nt, Homo Sapiens
caaagccccuucuucgccccuauccag

SEQ ID NO: 148305 - RNA, 32 nt, Homo Sapiens
ggaaaugucaggggcggggagggugacagugg

SEQ ID NO: 148306 - RNA, 28 nt, Homo Sapiens
ugaaugcagggccccaggugcuccagcu

SEQ ID NO: 148307 - RNA, 32 nt, Homo Sapiens
uugguggugaauguauuguacauaaaguggga

SEQ ID NO: 148308 - RNA, 31 nt, Homo Sapiens
ccuauccaugggucaaaguccaccucuccug

SEQ ID NO: 148309 - RNA, 32 nt, Homo Sapiens
cagagagaaagccgggcccagcccuuccucac

SEQ ID NO: 148310 - RNA, 32 nt, Homo Sapiens
ugggugcggcgcggggaccccgggccgaagaa

SEQ ID NO: 148311 - RNA, 32 nt, Homo Sapiens
ggacacguccaagcugcagucggcucuguggu

SEQ ID NO: 148312 - RNA, 32 nt, Homo Sapiens
gcaggcaucagucagcuauccuugcacucagu

SEQ ID NO: 148313 - RNA, 32 nt, Homo Sapiens
cauucuuguuaacuauaugugaaacauuuuuu

SEQ ID NO: 148314 - RNA, 30 nt, Homo Sapiens
uggcuucuggacucugcaguccaggucucc

SEQ ID NO: 148315 - RNA, 32 nt, Homo Sapiens
cacgggugcucugaccugcuuggaagaggcca

SEQ ID NO: 148316 - RNA, 32 nt, Homo Sapiens
aauauuugcauucuuguaaucuucuauggugu

SEQ ID NO: 148317 - RNA, 28 nt, Homo Sapiens
aagauggugcccagcucuccgcgcgcgc

SEQ ID NO: 148318 - RNA, 32 nt, Homo Sapiens
cuagccaaggugcuacugcugccucgacuguu

SEQ ID NO: 148319 - RNA, 31 nt, Homo Sapiens
agaaggaugccugggugccaggcaagacaag

SEQ ID NO: 148320 - RNA, 32 nt, Homo Sapiens
auucauuacauaucugucucauucugccuuuu

SEQ ID NO: 148321 - RNA, 32 nt, Homo Sapiens
acuuuaaaaaaauuauuguacaugugauuuuu

SEQ ID NO: 148322 - RNA, 28 nt, Homo Sapiens
aaguagaaagauuugaaacaguuggcau

SEQ ID NO: 148323 - RNA, 32 nt, Homo Sapiens
ggagagugaacagguagauuuagacguuacuu

SEQ ID NO: 148324 - RNA, 32 nt, Homo Sapiens
uuuuacaaggaaauaaaauacaaaucuuguuu

SEQ ID NO: 148325 - RNA, 32 nt, Homo Sapiens
uaaauacccgaaaaugugaaaacgacuuugga

SEQ ID NO: 148326 - RNA, 32 nt, Homo Sapiens
gagaccauccucagcccuccucagaccuuauc

SEQ ID NO: 148327 - RNA, 32 nt, Homo Sapiens
cucccaucuccucuccuucccaggaauccuug

SEQ ID NO: 148328 - RNA, 32 nt, Homo Sapiens
uucaugaaagaacaacucuugcaccucucaga

SEQ ID NO: 148329 - RNA, 32 nt, Homo Sapiens
augucacuugcuacagacaauagugcaugaga

SEQ ID NO: 148330 - RNA, 32 nt, Homo Sapiens
ggcgggcgucuucggucaucuccggcgcuucu

SEQ ID NO: 148331 - RNA, 32 nt, Homo Sapiens
ugcacccggggccgcgcucgccaggccgcgga

SEQ ID NO: 148332 - RNA, 30 nt, Homo Sapiens
ggcgggcgcgcgcaccaugggggagaaacc

SEQ ID NO: 148333 - RNA, 32 nt, Homo Sapiens
guuagcuacaagaggguuaaggugauugugug

SEQ ID NO: 148334 - RNA, 32 nt, Homo Sapiens
uugugucggacuauguaauuguaacuauaccu

SEQ ID NO: 148335 - RNA, 32 nt, Homo Sapiens
aauuacagaccaaagauugaguaaagucaaau

SEQ ID NO: 148336 - RNA, 32 nt, Homo Sapiens
cucucaaggugauuccaaugcggagcuggggc

SEQ ID NO: 148337 - RNA, 32 nt, Homo Sapiens
gggagcccucgcgacgcgcccggcccggagcc

SEQ ID NO: 148338 - RNA, 32 nt, Homo Sapiens
gucugggaaguaggacugauggucaucuucau

SEQ ID NO: 148339 - RNA, 32 nt, Homo Sapiens
cuugcgguuugauuguugucuaaucccuguaa

SEQ ID NO: 148340 - RNA, 32 nt, Homo Sapiens
ucugccgucugugucuucacaaugaaggaugu

SEQ ID NO: 148341 - RNA, 32 nt, Homo Sapiens
ccgucucugcccgcucgacuccuccgcccggg

SEQ ID NO: 148342 - RNA, 32 nt, Homo Sapiens
cuguuugggcuucgggaagccgugggcugcag

SEQ ID NO: 148343 - RNA, 32 nt, Homo Sapiens
aaaaaacuauugcugcagucauucagauggaa

SEQ ID NO: 148344 - RNA, 32 nt, Homo Sapiens
gcuccaggacauucagguaccagguagcccca

SEQ ID NO: 148345 - RNA, 32 nt, Homo Sapiens
ugaacccagaucuauuuauuagcuuggugacc

SEQ ID NO: 148346 - RNA, 32 nt, Homo Sapiens
ugcaucugcugcaaacuucucaucugcugugc

SEQ ID NO: 148347 - RNA, 32 nt, Homo Sapiens
aaguuucccggaggagccgcgggccgcccuuc

SEQ ID NO: 148348 - RNA, 32 nt, Homo Sapiens
ucuugccuuguaccucaaucuauucuguaaaa

SEQ ID NO: 148349 - RNA, 32 nt, Homo Sapiens
agacuguuacuaagagcaugacuuuauacaga

SEQ ID NO: 148350 - RNA, 32 nt, Homo Sapiens
gaaucccugcggcuacaggagcagguggcccu

SEQ ID NO: 148351 - RNA, 32 nt, Homo Sapiens
agguuugggagcuagccuuguuuuuugcaucu

SEQ ID NO: 148352 - RNA, 32 nt, Homo Sapiens
acguuuaauucugaauaacucuaucuacuuua

SEQ ID NO: 148353 - RNA, 30 nt, Homo Sapiens
auagaggccguucugcucccagccuucacu

SEQ ID NO: 148354 - RNA, 28 nt, Homo Sapiens
aggaaggggcggcugcucagacagauuu

SEQ ID NO: 148355 - RNA, 32 nt, Homo Sapiens
uacauuauuuaaaaugaaaaagaucuaguuuu

SEQ ID NO: 148356 - RNA, 32 nt, Homo Sapiens
caggcgugaagucaggagaauuugagcuuugu

SEQ ID NO: 148357 - RNA, 32 nt, Homo Sapiens
gggagaaccugugccaacuguggaguggggag

SEQ ID NO: 148358 - RNA, 32 nt, Homo Sapiens
uaaggugauucaagguuuuaaaauauuugggg

SEQ ID NO: 148359 - RNA, 32 nt, Homo Sapiens
aaagaggagagaaaguuugcgcggccgagcgg

SEQ ID NO: 148360 - RNA, 32 nt, Homo Sapiens
cuugaguagucuuuuuuuuuuuuuugagacgg

SEQ ID NO: 148361 - RNA, 32 nt, Homo Sapiens
auauagcuuuaaaagucagaacuagaauuguu

SEQ ID NO: 148362 - RNA, 32 nt, Homo Sapiens
cugugggcccuacccuccugcugagcugcccc

SEQ ID NO: 148363 - RNA, 32 nt, Homo Sapiens
cacguaauuuaaaugguuacuguuuaaauuuc

SEQ ID NO: 148364 - RNA, 32 nt, Homo Sapiens
ucccugcacccaaggggccucuccaugccuuc

SEQ ID NO: 148365 - RNA, 32 nt, Homo Sapiens
gucugcggcggcggcggcggcggcgagcggau

SEQ ID NO: 148366 - RNA, 27 nt, Homo Sapiens
ucauggagaaaacuucaguggucaugg

SEQ ID NO: 148367 - RNA, 32 nt, Homo Sapiens
ccagcacuucgggaggccgaggcagguggaac

SEQ ID NO: 148368 - RNA, 32 nt, Homo Sapiens
auuuagauucagaauguaaauuuacaaaugau

SEQ ID NO: 148369 - RNA, 32 nt, Homo Sapiens
acucauuaacacacuacugugcaagcauugac

SEQ ID NO: 148370 - RNA, 32 nt, Homo Sapiens
ggcugcugcuccaguaaugggcguagaaagcc

SEQ ID NO: 148371 - RNA, 32 nt, Homo Sapiens
uauugaagaauugaauauaugcuacuucaaga

SEQ ID NO: 148372 - RNA, 32 nt, Homo Sapiens
auaguucugccccagagacaaguaugaauacc

SEQ ID NO: 148373 - RNA, 32 nt, Homo Sapiens
ggguuuauuucuggauuucuaaugcuauuccc

SEQ ID NO: 148374 - RNA, 32 nt, Homo Sapiens
gugaagagggccaggaugcugcugaguaucag

SEQ ID NO: 148375 - RNA, 32 nt, Homo Sapiens
uuacagggcauucaaaugggcugcugcuuagc

SEQ ID NO: 148376 - RNA, 32 nt, Homo Sapiens
aauucgguuuuauccaggaaaauauuuuagcu

SEQ ID NO: 148377 - RNA, 32 nt, Homo Sapiens
ucuugugcuguggggcugggggaugcccucuu

SEQ ID NO: 148378 - RNA, 32 nt, Homo Sapiens
cggcccgcccugugguugccccggccugggag

SEQ ID NO: 148379 - RNA, 32 nt, Homo Sapiens
ucucuggaaaucucuuucuccucccccgcccc

SEQ ID NO: 148380 - RNA, 31 nt, Homo Sapiens
agauuugaauauaaguucagagccugaucuc

SEQ ID NO: 148381 - RNA, 32 nt, Homo Sapiens
gcgggcacugccgacgcccccggggcugccga

SEQ ID NO: 148382 - RNA, 32 nt, Homo Sapiens
uccaucccagcuugcuugcugccuggcucagg

SEQ ID NO: 148383 - RNA, 32 nt, Homo Sapiens
gccacacggucuuuuucuuuuguagcacagcc

SEQ ID NO: 148384 - RNA, 32 nt, Homo Sapiens
gguagggugggaaggugagcaaagggagcaga

SEQ ID NO: 148385 - RNA, 32 nt, Homo Sapiens
aaugguuuuuaaauuuuguaaugaauuccuag

SEQ ID NO: 148386 - RNA, 32 nt, Homo Sapiens
aaaggacgaugaucugccugcuuucacugugu

SEQ ID NO: 148387 - RNA, 32 nt, Homo Sapiens
gacuggcucccaaacagcggccaggaccuugg

SEQ ID NO: 148388 - RNA, 32 nt, Homo Sapiens
gacucgggagacggaguggaacacccggcugg

SEQ ID NO: 148389 - RNA, 32 nt, Homo Sapiens
cggggcgguuugguggcggggaagcggcugua

SEQ ID NO: 148390 - RNA, 32 nt, Homo Sapiens
ugaacauuauuggaaaauauaaacuaguuauu

SEQ ID NO: 148391 - RNA, 27 nt, Homo Sapiens
accuuuuccuucuucagcagcaccuua

SEQ ID NO: 148392 - RNA, 32 nt, Homo Sapiens
agugggucucuuaauuugauugugggguucuu

SEQ ID NO: 148393 - RNA, 30 nt, Homo Sapiens
acucggaucuucgguggccucauguaaauc

SEQ ID NO: 148394 - RNA, 32 nt, Homo Sapiens
augcuccuaaugacaacccugcugcgugccac

SEQ ID NO: 148395 - RNA, 32 nt, Homo Sapiens
caccgcaggucacuucugcggccugggagcug

SEQ ID NO: 148396 - RNA, 32 nt, Homo Sapiens
cccuccccuuuauuuuuuuuuaaucaauacau

SEQ ID NO: 148397 - RNA, 32 nt, Homo Sapiens
aguuuuuacuuuuuuucuugauuauggaagua

SEQ ID NO: 148398 - RNA, 31 nt, Homo Sapiens
cuguauuggaguaauguguagauuaguggau

SEQ ID NO: 148399 - RNA, 32 nt, Homo Sapiens
cuuuaugcauuacuuuugucauuuuauauugc

SEQ ID NO: 148400 - RNA, 32 nt, Homo Sapiens
ugcuccuccuuccccagcuccgcgccuucccc

SEQ ID NO: 148401 - RNA, 32 nt, Homo Sapiens
ccagcgaaaaauuuggauuggaugguguaucu

SEQ ID NO: 148402 - RNA, 32 nt, Homo Sapiens
ccuucccugcuucugagacuucaaucuacagc

SEQ ID NO: 148403 - RNA, 32 nt, Homo Sapiens
cagaaacgugacggggcuggacuuugaucgcc

SEQ ID NO: 148404 - RNA, 32 nt, Homo Sapiens
aagcuccugggcggcccugccggaacccugcu

SEQ ID NO: 148405 - RNA, 32 nt, Homo Sapiens
gccuccgggcagcagugccaucuucaccugcg

SEQ ID NO: 148406 - RNA, 32 nt, Homo Sapiens
ccccuuugcuccaucaguuaucaggaaggaga

SEQ ID NO: 148407 - RNA, 32 nt, Homo Sapiens
gucuugugacuguggcagcugcuggccgcugg

SEQ ID NO: 148408 - RNA, 27 nt, Homo Sapiens
uugaugauaaagcuuuauuuucuauua

SEQ ID NO: 148409 - RNA, 32 nt, Homo Sapiens
auauuauauggacuuuauaugaaaaugaauau

SEQ ID NO: 148410 - RNA, 32 nt, Homo Sapiens
guauuucuuucuauucguuucuuuucguuugg

SEQ ID NO: 148411 - RNA, 32 nt, Homo Sapiens
ugccuguaauuccagcacuuugggaggccgag

SEQ ID NO: 148412 - RNA, 32 nt, Homo Sapiens
ugccuguaauuccagcacuuuaggaggccaag

SEQ ID NO: 148413 - RNA, 32 nt, Homo Sapiens
ugccuguaauuccggcacuuugggaggccaag

SEQ ID NO: 148414 - RNA, 32 nt, Homo Sapiens
cuuuuaauugacacagaaacauccucagagau

SEQ ID NO: 148415 - RNA, 32 nt, Homo Sapiens
gaaaugcaucuggaggcuaaguauugcuuucu

SEQ ID NO: 148416 - RNA, 32 nt, Homo Sapiens
uauaaaccauaguggauaaaagcccuauuaau

SEQ ID NO: 148417 - RNA, 32 nt, Homo Sapiens
cagucucacucaucuuggugccccgguguuua

SEQ ID NO: 148418 - RNA, 32 nt, Homo Sapiens
ggcggggcgggggaggggagguaggacccgcu

SEQ ID NO: 148419 - RNA, 32 nt, Homo Sapiens
aggcgugagcuaccgcacuggaccuagccucc

SEQ ID NO: 148420 - RNA, 32 nt, Homo Sapiens
agacaagauccgaucuacugagagcugcgagg

SEQ ID NO: 148421 - RNA, 32 nt, Homo Sapiens
auagaccuucacaaacgacuuccacugcugaa

SEQ ID NO: 148422 - RNA, 32 nt, Homo Sapiens
caggccuugacaagugggauggcgccucgggc

SEQ ID NO: 148423 - RNA, 32 nt, Homo Sapiens
ccagacagcugagaaauccagcccugugggaa

SEQ ID NO: 148424 - RNA, 32 nt, Homo Sapiens
uggcuagauuuaucuugggugauggaggaaau

SEQ ID NO: 148425 - RNA, 32 nt, Homo Sapiens
aaaguacuauuuuuuauuuuauaaaugaacag

SEQ ID NO: 148426 - RNA, 32 nt, Homo Sapiens
cagccccuccuggugcuggugcccugaugcug

SEQ ID NO: 148427 - RNA, 32 nt, Homo Sapiens
uuggaaagaacaagcaaagaaaaaucugauaa

SEQ ID NO: 148428 - RNA, 32 nt, Homo Sapiens
agacggaccgacggacucgcgccgcguccacc

SEQ ID NO: 148429 - RNA, 32 nt, Homo Sapiens
agcucuguuucccccucuccccaaagccuuca

SEQ ID NO: 148430 - RNA, 27 nt, Homo Sapiens
gaaggcaccuucuuccucgccucucca

SEQ ID NO: 148431 - RNA, 32 nt, Homo Sapiens
gaauuuuccagaaauucaguccugauuugucu

SEQ ID NO: 148432 - RNA, 28 nt, Homo Sapiens
ugugugcggggacauccgaggugguggu

SEQ ID NO: 148433 - RNA, 32 nt, Homo Sapiens
ugggggugggugggcgggaggacuuugcuaug

SEQ ID NO: 148434 - RNA, 32 nt, Homo Sapiens
uauacauuuuuacaauaagauguacaauuuau

SEQ ID NO: 148435 - RNA, 32 nt, Homo Sapiens
acuaaaaaaguacaaauaaauaaccuauggcc

SEQ ID NO: 148436 - RNA, 32 nt, Homo Sapiens
auuaaaaauggcagccuguuaaugguuucuga

SEQ ID NO: 148437 - RNA, 32 nt, Homo Sapiens
aaagucaaauuacaaggaaguacccagaucag

SEQ ID NO: 148438 - RNA, 32 nt, Homo Sapiens
ucuggcuccagcucagcuuccuagagauaauu

SEQ ID NO: 148439 - RNA, 32 nt, Homo Sapiens
ugcucucagaggugacacagaauaugauuccc

SEQ ID NO: 148440 - RNA, 32 nt, Homo Sapiens
gacagugggcagcuucuguuucuccuucuauc

SEQ ID NO: 148441 - RNA, 32 nt, Homo Sapiens
gggagcugaggcucugugcugcacccccagcc

SEQ ID NO: 148442 - RNA, 32 nt, Homo Sapiens
uuaccauaauuaccaaggaaaagaaaaguaaa

SEQ ID NO: 148443 - RNA, 32 nt, Homo Sapiens
gugagagcccuggagagaaacaucagucaaag

SEQ ID NO: 148444 - RNA, 32 nt, Homo Sapiens
aacuuuaggaggagggaaagggguggcucugg

SEQ ID NO: 148445 - RNA, 32 nt, Homo Sapiens
gaccaggaaggaacugaggaccaagaagugca

SEQ ID NO: 148446 - RNA, 32 nt, Homo Sapiens
auggaccacagugccagauccucaucacgccg

SEQ ID NO: 148447 - RNA, 32 nt, Homo Sapiens
uuaaccuuauuaugagaacuuccuuuuuaccc

SEQ ID NO: 148448 - RNA, 32 nt, Homo Sapiens
uuuacuccugggcacccuuaaucuucagaggu

SEQ ID NO: 148449 - RNA, 32 nt, Homo Sapiens
ucgccgagccgggagcccguguaggggccgcg

SEQ ID NO: 148450 - RNA, 32 nt, Homo Sapiens
ggugucgccguccaaauguacuguccuggcau

SEQ ID NO: 148451 - RNA, 32 nt, Homo Sapiens
gccucucugggugggugaggggcgcgcggauc

SEQ ID NO: 148452 - RNA, 32 nt, Homo Sapiens
acaaaaagauaaaucuucacagauaugaauac

SEQ ID NO: 148453 - RNA, 32 nt, Homo Sapiens
uuucaaaaugaaauauuuauguacuguuuuau

SEQ ID NO: 148454 - RNA, 32 nt, Homo Sapiens
accaauacaacacugaugugguguuugauucu

SEQ ID NO: 148455 - RNA, 32 nt, Homo Sapiens
cgccgagauugugccacugcacuccagccugg

SEQ ID NO: 148456 - RNA, 32 nt, Homo Sapiens
aacuguuucuuuucuuuuucuaggaguguuua

SEQ ID NO: 148457 - RNA, 32 nt, Homo Sapiens
uuggcauaauuucuuguuugaaugcugccucc

SEQ ID NO: 148458 - RNA, 28 nt, Homo Sapiens
aaacuggaagauuaagcuuuuguuaaca

SEQ ID NO: 148459 - RNA, 32 nt, Homo Sapiens
cauuacuauaagcuuguuauuuuuuaaguuua

SEQ ID NO: 148460 - RNA, 32 nt, Homo Sapiens
caguccccgccuuuucagagggaugugugacu

SEQ ID NO: 148461 - RNA, 32 nt, Homo Sapiens
agucucccuuugguuugccccuuucuguguuc

SEQ ID NO: 148462 - RNA, 32 nt, Homo Sapiens
cccacacugcucucugguggguuugggcaguc

SEQ ID NO: 148463 - RNA, 32 nt, Homo Sapiens
uccacagagcugcgccuuccucacguguguga

SEQ ID NO: 148464 - RNA, 32 nt, Homo Sapiens
uauauucuagcaaacauugaaaacacauuuug

SEQ ID NO: 148465 - RNA, 30 nt, Homo Sapiens
cucucgaggaacccugccugagacgccucc

SEQ ID NO: 148466 - RNA, 32 nt, Homo Sapiens
ccagagccuggggcuccugggcugcagaccug

SEQ ID NO: 148467 - RNA, 32 nt, Homo Sapiens
caucugcccuucaucaccgccucaccuguguc

SEQ ID NO: 148468 - RNA, 32 nt, Homo Sapiens
ggagguuggcagguuucgaggcugcuugagag

SEQ ID NO: 148469 - RNA, 32 nt, Homo Sapiens
agcagaguaggagagcaaggauuugguuuccc

SEQ ID NO: 148470 - RNA, 32 nt, Homo Sapiens
ccgccgggauccgacgcgcccgggugaggucu

SEQ ID NO: 148471 - RNA, 32 nt, Homo Sapiens
uucauuguuugugauugcauguuuccuuccuu

SEQ ID NO: 148472 - RNA, 32 nt, Homo Sapiens
aaauuccuaaaauacaugaauucgaguaugaa

SEQ ID NO: 148473 - RNA, 28 nt, Homo Sapiens
gccggggccgggacgaugacucuggagu

SEQ ID NO: 148474 - RNA, 32 nt, Homo Sapiens
guguuauuuuugggaugugagggugaucuggc

SEQ ID NO: 148475 - RNA, 32 nt, Homo Sapiens
ugucugaaaagacuugacauuguaaaaauaua

SEQ ID NO: 148476 - RNA, 32 nt, Homo Sapiens
ugucauugaacaagagcaaaugcugaaguauu

SEQ ID NO: 148477 - RNA, 32 nt, Homo Sapiens
gggaaacccagcugcagaggcugcagccccgg

SEQ ID NO: 148478 - RNA, 32 nt, Homo Sapiens
uuugguguuguccaaggaaaauuaaaaccugu

SEQ ID NO: 148479 - RNA, 32 nt, Homo Sapiens
ccugaucuccccauucucuuuggcucuguccc

SEQ ID NO: 148480 - RNA, 30 nt, Homo Sapiens
aguucguggggcgggacagcgucggccuga

SEQ ID NO: 148481 - RNA, 32 nt, Homo Sapiens
cccagacaccugcucacucaccaccagcuggg

SEQ ID NO: 148482 - RNA, 32 nt, Homo Sapiens
acaggauauauagacugauaaauauuuaggcu

SEQ ID NO: 148483 - RNA, 31 nt, Homo Sapiens
ggacucuguggggacgcgccccgcgccgcgg

SEQ ID NO: 148484 - RNA, 32 nt, Homo Sapiens
uuuauuacacuggguuuguugcaguaagccac

SEQ ID NO: 148485 - RNA, 32 nt, Homo Sapiens
ccccaccgugcacuucuccucucugggccuug

SEQ ID NO: 148486 - RNA, 32 nt, Homo Sapiens
uauccaaagaucuaguauuccaaagcucucca

SEQ ID NO: 148487 - RNA, 32 nt, Homo Sapiens
agaaauguguggaauuuauugaagauacaggg

SEQ ID NO: 148488 - RNA, 32 nt, Homo Sapiens
cuaucugcaucuggcugagagagacccguuuc

SEQ ID NO: 148489 - RNA, 32 nt, Homo Sapiens
cugcuuucacgguaaaauuauguugguuugaa

SEQ ID NO: 148490 - RNA, 32 nt, Homo Sapiens
caagucacaacacuggcccagauucaugcggu

SEQ ID NO: 148491 - RNA, 32 nt, Homo Sapiens
gcgucuuuuccggcaguuggaacgcuuccugu

SEQ ID NO: 148492 - RNA, 32 nt, Homo Sapiens
uugauauagaagauuauuuugacuaaaaaugg

SEQ ID NO: 148493 - RNA, 32 nt, Homo Sapiens
auauggaauauauuuuuaaauagagauuuuuc

SEQ ID NO: 148494 - RNA, 32 nt, Homo Sapiens
ggggaucucccuccccuagccaagggaagcca

SEQ ID NO: 148495 - RNA, 32 nt, Homo Sapiens
gugagacucugucucaauaaauaaaaaauaau

SEQ ID NO: 148496 - RNA, 32 nt, Homo Sapiens
aaauuagcuccccauccucccuccucacuccc

SEQ ID NO: 148497 - RNA, 32 nt, Homo Sapiens
uuuuugcucuucuugggauagugaguucuggu

SEQ ID NO: 148498 - RNA, 32 nt, Homo Sapiens
aacugugaauugcagaauaaauugaaagaaaa

SEQ ID NO: 148499 - RNA, 32 nt, Homo Sapiens
gccaucuuauuccaucucugguguaagagugu

SEQ ID NO: 148500 - RNA, 32 nt, Homo Sapiens
caugaggggaaugcagugucaguaccuggccu

SEQ ID NO: 148501 - RNA, 28 nt, Homo Sapiens
acgagugugggcgcgaggaugacgaccu

SEQ ID NO: 148502 - RNA, 32 nt, Homo Sapiens
cuuauaagaaacaaagucucuccuuuucuaaa

SEQ ID NO: 148503 - RNA, 32 nt, Homo Sapiens
gagccgcuuccuucucgccgcggccggcgcgg

SEQ ID NO: 148504 - RNA, 32 nt, Homo Sapiens
cuuggucccccuccccacagcaagggaaggca

SEQ ID NO: 148505 - RNA, 32 nt, Homo Sapiens
cagcaaugcuccuuccuucucaggguccaaag

SEQ ID NO: 148506 - RNA, 32 nt, Homo Sapiens
gaaaaaugacacuagaauguauacuccacaca

SEQ ID NO: 148507 - RNA, 32 nt, Homo Sapiens
agcucugccauuucuugaguaccuguuaguua

SEQ ID NO: 148508 - RNA, 32 nt, Homo Sapiens
cuaggugccggccgggagggcggccgcagcag

SEQ ID NO: 148509 - RNA, 32 nt, Homo Sapiens
aguacuucaagaaauuauuuuaucauaucugc

SEQ ID NO: 148510 - RNA, 32 nt, Homo Sapiens
cggauccgggagaggggcgggcgccauugugc

SEQ ID NO: 148511 - RNA, 32 nt, Homo Sapiens
cgcgagcucgggagagcgcccgggccgggcuc

SEQ ID NO: 148512 - RNA, 32 nt, Homo Sapiens
gguguauuuacagagaaaauauuuuguucuuc

SEQ ID NO: 148513 - RNA, 32 nt, Homo Sapiens
ccaagcgggacgccgcgccgggcgggugagag

SEQ ID NO: 148514 - RNA, 32 nt, Homo Sapiens
uucugccucucuggaucugcuuccugauauau

SEQ ID NO: 148515 - RNA, 32 nt, Homo Sapiens
ucgaugucucugucuuuuuuuuugucuuuaaa

SEQ ID NO: 148516 - RNA, 30 nt, Homo Sapiens
aaacaagagaagcuucauguuugaugauac

SEQ ID NO: 148517 - RNA, 32 nt, Homo Sapiens
cugcauucaaccaacuguaaugcaggauugga

SEQ ID NO: 148518 - RNA, 32 nt, Homo Sapiens
uucauuuuacuaaaaggacaaccaucacaacc

SEQ ID NO: 148519 - RNA, 32 nt, Homo Sapiens
gaaggccagaaaggguacaugugggagacggu

SEQ ID NO: 148520 - RNA, 32 nt, Homo Sapiens
aaaggagaaugaugaugauaguuuccuucugu

SEQ ID NO: 148521 - RNA, 32 nt, Homo Sapiens
aacucucuuuuuuauauuuugcuugaaguguc

SEQ ID NO: 148522 - RNA, 32 nt, Homo Sapiens
agagaacuuuuggcagauuuuguuggcauuau

SEQ ID NO: 148523 - RNA, 32 nt, Homo Sapiens
uugcauuagcuagcauguuuucccucugaugu

SEQ ID NO: 148524 - RNA, 32 nt, Homo Sapiens
uuauugcugggaugcgguguugguaaagguuu

SEQ ID NO: 148525 - RNA, 32 nt, Homo Sapiens
cccgaaagacgcgucccguacacacaccaucc

SEQ ID NO: 148526 - RNA, 32 nt, Homo Sapiens
caugcaucucucccagaggagaucucucccca

SEQ ID NO: 148527 - RNA, 32 nt, Homo Sapiens
auugcauguuucccuccaauauugguucauug

SEQ ID NO: 148528 - RNA, 32 nt, Homo Sapiens
ccgugcccuuccuguauccgcggcugccgcgc

SEQ ID NO: 148529 - RNA, 32 nt, Homo Sapiens
gugcuggcggccgcgcugcugcuccgcgcgca

SEQ ID NO: 148530 - RNA, 32 nt, Homo Sapiens
uuuaaauugcauuuauuaaucuuuuuaucuga

SEQ ID NO: 148531 - RNA, 32 nt, Homo Sapiens
acaagcccaaugcacuggucugacuuuauaaa

SEQ ID NO: 148532 - RNA, 32 nt, Homo Sapiens
uguccggcugucauuucuccaccuagagccuu

SEQ ID NO: 148533 - RNA, 32 nt, Homo Sapiens
ggucccuagacgccucgucuccucccgugucc

SEQ ID NO: 148534 - RNA, 31 nt, Homo Sapiens
ugagccccagugaggucagcgauuagaaacu

SEQ ID NO: 148535 - RNA, 32 nt, Homo Sapiens
ucugcagaaaucaaucuuuacuucaucagaga

SEQ ID NO: 148536 - RNA, 32 nt, Homo Sapiens
gaguuuuuuauguuuuuugucauaucgguaac

SEQ ID NO: 148537 - RNA, 29 nt, Homo Sapiens
gaaacuucuauccagaguuacacucgucu

SEQ ID NO: 148538 - RNA, 30 nt, Homo Sapiens
cugaggccucccgugccgccgccccagccg

SEQ ID NO: 148539 - RNA, 32 nt, Homo Sapiens
gaggggaagaguguacuggggguugcgggggg

SEQ ID NO: 148540 - RNA, 32 nt, Homo Sapiens
gcauacaucguucuuguagaaaacauggaaaa

SEQ ID NO: 148541 - RNA, 31 nt, Homo Sapiens
cagaagaaauaaaaaaugauguuucaaaaaa

SEQ ID NO: 148542 - RNA, 32 nt, Homo Sapiens
ccaccccaacuuucccaaugaccucugcaggc

SEQ ID NO: 148543 - RNA, 32 nt, Homo Sapiens
agaguggcgcaccgcccggccguccggacccg

SEQ ID NO: 148544 - RNA, 32 nt, Homo Sapiens
gaggcugcagcgagccgagaucgcgccgcugc

SEQ ID NO: 148545 - RNA, 32 nt, Homo Sapiens
gauggugcugagccgucccgggccccuacagc

SEQ ID NO: 148546 - RNA, 32 nt, Homo Sapiens
gccaugacagcccaccaaggacggggggaaua

SEQ ID NO: 148547 - RNA, 32 nt, Homo Sapiens
uaaguuaaaugcaaaucagggugguuuugaaa

SEQ ID NO: 148548 - RNA, 32 nt, Homo Sapiens
guuugcuaggaauaauacaugaugacuuggag

SEQ ID NO: 148549 - RNA, 32 nt, Homo Sapiens
ugcuagauaauccauauugacaagagaagcua

SEQ ID NO: 148550 - RNA, 32 nt, Homo Sapiens
agcuagacauaguggcaggcgccuguaguccc

SEQ ID NO: 148551 - RNA, 32 nt, Homo Sapiens
uuuacuuugugcuuuuuguguuuuacucagga

SEQ ID NO: 148552 - RNA, 32 nt, Homo Sapiens
agcucuaagacguuuaaggaaaugcugcagga

SEQ ID NO: 148553 - RNA, 32 nt, Homo Sapiens
aaugggaaaugccuaagaagaugacuucccaa

SEQ ID NO: 148554 - RNA, 32 nt, Homo Sapiens
ucaagaagccuggucagccagccaggcuaguc

SEQ ID NO: 148555 - RNA, 32 nt, Homo Sapiens
ccucaaauuucuuuuucuuuuucuuuggcuua

SEQ ID NO: 148556 - RNA, 32 nt, Homo Sapiens
gggcuagaucaguguuuuuccaaacuguuuua

SEQ ID NO: 148557 - RNA, 32 nt, Homo Sapiens
aaacuuagggggcaggcaaacaaacgaguucu

SEQ ID NO: 148558 - RNA, 32 nt, Homo Sapiens
aaggccucuuagugggaaagugaggcaggguc

SEQ ID NO: 148559 - RNA, 32 nt, Homo Sapiens
ccgggccgggaaaggcgggcgaugcccccaac

SEQ ID NO: 148560 - RNA, 32 nt, Homo Sapiens
gaagcaugcgguggcaaucaucuuucacgaug

SEQ ID NO: 148561 - RNA, 32 nt, Homo Sapiens
gauuaaaauuguuuccaagauagagagccgac

SEQ ID NO: 148562 - RNA, 32 nt, Homo Sapiens
ccaggcaaagauuuucuucaacuauaguacag

SEQ ID NO: 148563 - RNA, 32 nt, Homo Sapiens
ucagaauauaauacuuccauaauuacuuauaa

SEQ ID NO: 148564 - RNA, 32 nt, Homo Sapiens
uaaggauuccaauuuaacuuugaaaagaacug

SEQ ID NO: 148565 - RNA, 32 nt, Homo Sapiens
gguugguguccucauccuuuucauguucagaa

SEQ ID NO: 148566 - RNA, 32 nt, Homo Sapiens
ccucagacagggacacuggcgcacaaagaggc

SEQ ID NO: 148567 - RNA, 32 nt, Homo Sapiens
ggggagcccucccccgcugcagcccucucaga

SEQ ID NO: 148568 - RNA, 26 nt, Homo Sapiens
aauaaagguauuuuuucccugcuguu

SEQ ID NO: 148569 - RNA, 32 nt, Homo Sapiens
aaacuuuugaagaucuuaaguguauugcucuu

SEQ ID NO: 148570 - RNA, 32 nt, Homo Sapiens
uuuuguuuuuguuuuugaacugucucaaaugu

SEQ ID NO: 148571 - RNA, 32 nt, Homo Sapiens
cugagucuguguuuggagguguuacugagaug

SEQ ID NO: 148572 - RNA, 32 nt, Homo Sapiens
uacggggcggguggggaggggugcucugcugg

SEQ ID NO: 148573 - RNA, 32 nt, Homo Sapiens
ucaauugcgugauaguuuguaguuucaaccac

SEQ ID NO: 148574 - RNA, 32 nt, Homo Sapiens
uaagucuuuauaaggaagaauaaaauaaacgu

SEQ ID NO: 148575 - RNA, 32 nt, Homo Sapiens
gcucuucagaaagcaucugcaugugaacacca

SEQ ID NO: 148576 - RNA, 28 nt, Homo Sapiens
caucauuuugauuaacauuuggggccug

SEQ ID NO: 148577 - RNA, 32 nt, Homo Sapiens
cccuucucacccauggcccacccaggccugga

SEQ ID NO: 148578 - RNA, 32 nt, Homo Sapiens
cccucagggagaaauagccucacgugcaaucu

SEQ ID NO: 148579 - RNA, 32 nt, Homo Sapiens
ggcuugcccucccuuggcguccgucacccuuu

SEQ ID NO: 148580 - RNA, 32 nt, Homo Sapiens
ugggaagggcuuuggcugggccucaacucauc

SEQ ID NO: 148581 - RNA, 32 nt, Homo Sapiens
ccuaucccauccccugucacgcaucuggaagc

SEQ ID NO: 148582 - RNA, 32 nt, Homo Sapiens
gcggcugagggacugcacuuucuggggccccc

SEQ ID NO: 148583 - RNA, 32 nt, Homo Sapiens
ccagucugcugcccuccaucccgacauggacc

SEQ ID NO: 148584 - RNA, 32 nt, Homo Sapiens
ugcuuaucuguaauuuuguaugcaucuuggug

SEQ ID NO: 148585 - RNA, 32 nt, Homo Sapiens
ggccuagaaugcccuuagcucugcucucuagu

SEQ ID NO: 148586 - RNA, 32 nt, Homo Sapiens
gacagucauggcggcccggcgcggggcucuca

SEQ ID NO: 148587 - RNA, 32 nt, Homo Sapiens
caucgagacauuaggggguauuuucuguucac

SEQ ID NO: 148588 - RNA, 32 nt, Homo Sapiens
ggcgccaccccggcccccgagcccgcagauug

SEQ ID NO: 148589 - RNA, 32 nt, Homo Sapiens
cuccuaauuuguuuuauugcgugugugugcau

SEQ ID NO: 148590 - RNA, 32 nt, Homo Sapiens
cuucaagcgugacccuuuugccugugggauga

SEQ ID NO: 148591 - RNA, 32 nt, Homo Sapiens
aaugauaaaaauuaagaaagagauuuugaagu

SEQ ID NO: 148592 - RNA, 32 nt, Homo Sapiens
cagucgugcaaggcggcgcgggggcgaggccg

SEQ ID NO: 148593 - RNA, 32 nt, Homo Sapiens
ucuggguggggcacggaaugggauagaauggg

SEQ ID NO: 148594 - RNA, 32 nt, Homo Sapiens
gaaucugccgcaggcccgcgggccgcccggga

SEQ ID NO: 148595 - RNA, 32 nt, Homo Sapiens
ggucgccugugcuauucagccaauagugcugc

SEQ ID NO: 148596 - RNA, 32 nt, Homo Sapiens
ggccugagacugcccaccugaguggaugcaug

SEQ ID NO: 148597 - RNA, 32 nt, Homo Sapiens
acccuugcccgcgccuggcggcccgauguggc

SEQ ID NO: 148598 - RNA, 32 nt, Homo Sapiens
aagacauguauuauuuucacaacuggguagca

SEQ ID NO: 148599 - RNA, 32 nt, Homo Sapiens
cuguuucucgccaacacuacccaggacucuug

SEQ ID NO: 148600 - RNA, 32 nt, Homo Sapiens
aggugaccaauguuuccaacuguuggaucugc

SEQ ID NO: 148601 - RNA, 32 nt, Homo Sapiens
cagggcugccccaccgcccgccgucugccgcc

SEQ ID NO: 148602 - RNA, 32 nt, Homo Sapiens
aggaguauuuuuguauuagaagaggccuauua

SEQ ID NO: 148603 - RNA, 30 nt, Homo Sapiens
gcgcccggcucaguacugcgcgcgcccugc

SEQ ID NO: 148604 - RNA, 32 nt, Homo Sapiens
cccugucucucuccauguuggggguccuaacu

SEQ ID NO: 148605 - RNA, 32 nt, Homo Sapiens
cgcggcgacgggggcgcgggcgggcaccccgg

SEQ ID NO: 148606 - RNA, 32 nt, Homo Sapiens
cacccagacacacgcacgcacacacacgcgcg

SEQ ID NO: 148607 - RNA, 32 nt, Homo Sapiens
aaguuggagauuuuuccaaacuccuaaucaga

SEQ ID NO: 148608 - RNA, 32 nt, Homo Sapiens
aaacaauucaugaaguagacccagaaauuuag

SEQ ID NO: 148609 - RNA, 32 nt, Homo Sapiens
gaguaguggcccugacuuccggucggcuggcc

SEQ ID NO: 148610 - RNA, 32 nt, Homo Sapiens
gacaccacugggaaccaagggcccucacucag

SEQ ID NO: 148611 - RNA, 32 nt, Homo Sapiens
gaaggagagaagacgccacagauuuccuuccc

SEQ ID NO: 148612 - RNA, 32 nt, Homo Sapiens
cgucaguuauuuagggauggucuuuuguucau

SEQ ID NO: 148613 - RNA, 32 nt, Homo Sapiens
aagaacccuagcacaaauuugcuuugggauuu

SEQ ID NO: 148614 - RNA, 32 nt, Homo Sapiens
agaguuccuguuaaaugaauagcuuuagcuuu

SEQ ID NO: 148615 - RNA, 32 nt, Homo Sapiens
guggacaagggagaaggagccucccggggugg

SEQ ID NO: 148616 - RNA, 31 nt, Homo Sapiens
aguggcuauugagaguuuuacaggguuauac

SEQ ID NO: 148617 - RNA, 32 nt, Homo Sapiens
aacuuaaugcucacacuuuauugcuaggaaag

SEQ ID NO: 148618 - RNA, 32 nt, Homo Sapiens
gugcccaacguccuggccaacgugggugcggc

SEQ ID NO: 148619 - RNA, 32 nt, Homo Sapiens
uaugugaagauacauugcagauuaucuuaugc

SEQ ID NO: 148620 - RNA, 32 nt, Homo Sapiens
accgggggccgcgccugccaggccgacggguc

SEQ ID NO: 148621 - RNA, 32 nt, Homo Sapiens
auagguuuuauuauuuuuuuuaaauuaaugaa

SEQ ID NO: 148622 - RNA, 32 nt, Homo Sapiens
gccccaugggaaacguaugugugcaggagccu

SEQ ID NO: 148623 - RNA, 30 nt, Homo Sapiens
uccuacucaaaauaaauucuuagaaugcuu

SEQ ID NO: 148624 - RNA, 32 nt, Homo Sapiens
cucggacuguucucugcugggaccacccaggg

SEQ ID NO: 148625 - RNA, 32 nt, Homo Sapiens
uuuguguuguguauauuuugauguaugugguc

SEQ ID NO: 148626 - RNA, 32 nt, Homo Sapiens
cguacaauuuaaagaauaauuuuaaagugaau

SEQ ID NO: 148627 - RNA, 32 nt, Homo Sapiens
cgcuacuuguaacaagcuccagcccuuaaaau

SEQ ID NO: 148628 - RNA, 32 nt, Homo Sapiens
caccuacaugaauauucauagcuccuccugua

SEQ ID NO: 148629 - RNA, 32 nt, Homo Sapiens
cuucuguccccugccucuggggccugggaacc

SEQ ID NO: 148630 - RNA, 32 nt, Homo Sapiens
gguuuucuuuugccaugacaacuucuaauugc

SEQ ID NO: 148631 - RNA, 32 nt, Homo Sapiens
uauaauacaauauaauuguuaaaggcaagggu

SEQ ID NO: 148632 - RNA, 32 nt, Homo Sapiens
auuguccuauuaugauucuccugaagaugccu

SEQ ID NO: 148633 - RNA, 32 nt, Homo Sapiens
cccugggaauggggaaccccacaucccauccc

SEQ ID NO: 148634 - RNA, 32 nt, Homo Sapiens
cugagauucuucaaagccccagcccuuuugga

SEQ ID NO: 148635 - RNA, 32 nt, Homo Sapiens
aauuuuauuucuguuuggguccaauuaucuac

SEQ ID NO: 148636 - RNA, 32 nt, Homo Sapiens
auuaucaaaaggaaauguugagucaacauuaa

SEQ ID NO: 148637 - RNA, 32 nt, Homo Sapiens
aauuccuucucucuccagaacucuguacuuac

SEQ ID NO: 148638 - RNA, 32 nt, Homo Sapiens
gcagaccuccaaguuccucccugcucugcaac

SEQ ID NO: 148639 - RNA, 32 nt, Homo Sapiens
aaaauacaaaaauuagcugggugugauggugc

SEQ ID NO: 148640 - RNA, 32 nt, Homo Sapiens
accccccgcacacgucagccaacagcagugcc

SEQ ID NO: 148641 - RNA, 32 nt, Homo Sapiens
aagggccugccagggacccggcgcguccucgg

SEQ ID NO: 148642 - RNA, 32 nt, Homo Sapiens
aaucuccucccucugccaaaauaaaaaacccc

SEQ ID NO: 148643 - RNA, 32 nt, Homo Sapiens
cuagccguccugcgggacgccggcgcugaugg

SEQ ID NO: 148644 - RNA, 32 nt, Homo Sapiens
gaguuacagcgagaggcagagaaagaagagac

SEQ ID NO: 148645 - RNA, 32 nt, Homo Sapiens
cagacaugauggaggagauguguuaaaagcuc

SEQ ID NO: 148646 - RNA, 32 nt, Homo Sapiens
agaacagguucaaauaacuuuuccacugcaug

SEQ ID NO: 148647 - RNA, 32 nt, Homo Sapiens
ucacaucaugacuuuaauuugcuuuuccuuaa

SEQ ID NO: 148648 - RNA, 32 nt, Homo Sapiens
gccaggcugugacccugcugcuccauucuccu

SEQ ID NO: 148649 - RNA, 32 nt, Homo Sapiens
ccaggacaccggggauugucucucgcaaccgc

SEQ ID NO: 148650 - RNA, 32 nt, Homo Sapiens
caacggcaguuuuuuucuucuuaauuccacau

SEQ ID NO: 148651 - RNA, 32 nt, Homo Sapiens
ggcuugucauauuaucuuuguguauaugcuuc

SEQ ID NO: 148652 - RNA, 32 nt, Homo Sapiens
gagcccagcaaccuucuaggccugcuuuccag

SEQ ID NO: 148653 - RNA, 32 nt, Homo Sapiens
aggguuucgagaagcugcucuggaauuugcaa

SEQ ID NO: 148654 - RNA, 32 nt, Homo Sapiens
aagguucugaccagcuucugcagaggauaaaa

SEQ ID NO: 148655 - RNA, 32 nt, Homo Sapiens
uuuuuuuuuuuuuuuuaccauuuugugaaagg

SEQ ID NO: 148656 - RNA, 32 nt, Homo Sapiens
cucuggugggucucacagaugcuggagcaggu

SEQ ID NO: 148657 - RNA, 32 nt, Homo Sapiens
guauugcuuugcugugcuuuuggaagaaggga

SEQ ID NO: 148658 - RNA, 32 nt, Homo Sapiens
uauaggucugugccgccucccuccggucucgg

SEQ ID NO: 148659 - RNA, 32 nt, Homo Sapiens
ccuuacccacugacaacucugcuacuuuuauu

SEQ ID NO: 148660 - RNA, 32 nt, Homo Sapiens
gggcuagugaaucgccacuguacuguaauaau

SEQ ID NO: 148661 - RNA, 32 nt, Homo Sapiens
gcgugcugucgggggagggaugcugggacagc

SEQ ID NO: 148662 - RNA, 32 nt, Homo Sapiens
gggucucacgcggcugccccucgcccggcgcg

SEQ ID NO: 148663 - RNA, 32 nt, Homo Sapiens
gaggaauacugagggagggccuggcuacuguc

SEQ ID NO: 148664 - RNA, 32 nt, Homo Sapiens
ugaaaauguuuucuuguaguuuuguuugguuc

SEQ ID NO: 148665 - RNA, 32 nt, Homo Sapiens
uuauauacaaccugcuugggugaagaagccau

SEQ ID NO: 148666 - RNA, 32 nt, Homo Sapiens
aauaucuuuuuucuuuuuuuuaauguuucuga

SEQ ID NO: 148667 - RNA, 32 nt, Homo Sapiens
ucccaccuuuuuccuuuuuuuuuuuuuuuucu

SEQ ID NO: 148668 - RNA, 32 nt, Homo Sapiens
augccguugugauuuugacauguacaguaugu

SEQ ID NO: 148669 - RNA, 32 nt, Homo Sapiens
ugaagacuaauuagaaaaaguacaauaaaauu

SEQ ID NO: 148670 - RNA, 32 nt, Homo Sapiens
cuguagccucugcguccaaggcacacagggua

SEQ ID NO: 148671 - RNA, 32 nt, Homo Sapiens
ugaggcccucaaccuggcaucuuaggguaugg

SEQ ID NO: 148672 - RNA, 31 nt, Homo Sapiens
ucccugcaugggcccgcaggagagagggagg

SEQ ID NO: 148673 - RNA, 31 nt, Homo Sapiens
ccgcaccagcgcagccggcccucggcgggac

SEQ ID NO: 148674 - RNA, 32 nt, Homo Sapiens
auuucaucccccuguaggaugaggaaaccagg

SEQ ID NO: 148675 - RNA, 32 nt, Homo Sapiens
uagaaggacuaaaagcaguugaauguauggua

SEQ ID NO: 148676 - RNA, 32 nt, Homo Sapiens
ugauucuaguaaaauuagguccaguaacaccu

SEQ ID NO: 148677 - RNA, 32 nt, Homo Sapiens
ccucagaaagacaaauuuacggggucagacga

SEQ ID NO: 148678 - RNA, 32 nt, Homo Sapiens
ugucauuuucuuugcuaaacaaaagaggcuau

SEQ ID NO: 148679 - RNA, 32 nt, Homo Sapiens
gaaagccaagcccgcugcagcugccacauccc

SEQ ID NO: 148680 - RNA, 32 nt, Homo Sapiens
ugucuuuuguaucucagaaauuagaaacuugc

SEQ ID NO: 148681 - RNA, 31 nt, Homo Sapiens
aggugggagccccgcagaugaggucucugaa

SEQ ID NO: 148682 - RNA, 32 nt, Homo Sapiens
gcacccccacauucuccucgcgggaagcgcag

SEQ ID NO: 148683 - RNA, 32 nt, Homo Sapiens
ggagccgagcgagcgggagcgcggcguccggg

SEQ ID NO: 148684 - RNA, 32 nt, Homo Sapiens
cgcuccuuuuagaauucauugggauauuuugg

SEQ ID NO: 148685 - RNA, 29 nt, Homo Sapiens
gugcuguaaaguuucuucuuuccaguaaa

SEQ ID NO: 148686 - RNA, 32 nt, Homo Sapiens
gaagccugacagagcugcaucuugauuuagac

SEQ ID NO: 148687 - RNA, 32 nt, Homo Sapiens
cuucuauagaaagacugacagaaacaaaagau

SEQ ID NO: 148688 - RNA, 32 nt, Homo Sapiens
cuggggcugcaccacccggcccgaggcuuuug

SEQ ID NO: 148689 - RNA, 30 nt, Homo Sapiens
cgccguggaugugcugcagacccucgaaca

SEQ ID NO: 148690 - RNA, 32 nt, Homo Sapiens
aucuuguaauaugucacuguguuuccuuagug

SEQ ID NO: 148691 - RNA, 32 nt, Homo Sapiens
caggcuugugugucuuguguugucuucgucug

SEQ ID NO: 148692 - RNA, 32 nt, Homo Sapiens
uaggaaacaaauuggaauaugaucuguuaccg

SEQ ID NO: 148693 - RNA, 32 nt, Homo Sapiens
gagaaagaaaauuuaggggccaguucucaagg

SEQ ID NO: 148694 - RNA, 32 nt, Homo Sapiens
caugcaguuuaaaauauuacuaacuuaagggu

SEQ ID NO: 148695 - RNA, 32 nt, Homo Sapiens
cugauuuuuaauauuucuuuugagaaauucug

SEQ ID NO: 148696 - RNA, 32 nt, Homo Sapiens
ccaggccagugcugaggccuugugguggcgau

SEQ ID NO: 148697 - RNA, 32 nt, Homo Sapiens
aucuguauuuuuguauguagagggaaauaauu

SEQ ID NO: 148698 - RNA, 32 nt, Homo Sapiens
cuggcccccugccuccucccucaugagguucc

SEQ ID NO: 148699 - RNA, 32 nt, Homo Sapiens
aacacucaguugcagggucgggcuugcggugg

SEQ ID NO: 148700 - RNA, 32 nt, Homo Sapiens
ggcuuggaagggauuugccaagggcagcaggu

SEQ ID NO: 148701 - RNA, 32 nt, Homo Sapiens
ugaacaagaaacaaaaugggugggugaaagca

SEQ ID NO: 148702 - RNA, 32 nt, Homo Sapiens
agccaggugugguggcacacaccaguaauccu

SEQ ID NO: 148703 - RNA, 32 nt, Homo Sapiens
cgaugcugcuccaguaacuacaguggcauuag

SEQ ID NO: 148704 - RNA, 32 nt, Homo Sapiens
acaagaaggcuggucacugccuuguggguggg

SEQ ID NO: 148705 - RNA, 32 nt, Homo Sapiens
agaaaguuagcuuuguaaacuacuucauuuga

SEQ ID NO: 148706 - RNA, 32 nt, Homo Sapiens
cgagcgccgucgucugcccgggcccgcccauc

SEQ ID NO: 148707 - RNA, 32 nt, Homo Sapiens
ccaucuccucauccucccccagcccuugaaua

SEQ ID NO: 148708 - RNA, 32 nt, Homo Sapiens
ggggcccugccagcucuggggagcagcagccu

SEQ ID NO: 148709 - RNA, 32 nt, Homo Sapiens
cuggugcaugggaggggagccgggccaggaac

SEQ ID NO: 148710 - RNA, 32 nt, Homo Sapiens
guuaucuacuuagccaaauguacucuaguaga

SEQ ID NO: 148711 - RNA, 32 nt, Homo Sapiens
gaaguaagaugggucagguuacgacuuacaac

SEQ ID NO: 148712 - RNA, 32 nt, Homo Sapiens
cacguaguuugcauuccagcgucugcuguuga

SEQ ID NO: 148713 - RNA, 32 nt, Homo Sapiens
cucauuaauugucagauuccacuacacuuucu

SEQ ID NO: 148714 - RNA, 32 nt, Homo Sapiens
cacuuaaaauaucgacgguaaacuacuauuuu

SEQ ID NO: 148715 - RNA, 32 nt, Homo Sapiens
caucgucucucucauucaugacugggaagugc

SEQ ID NO: 148716 - RNA, 32 nt, Homo Sapiens
gcgggagccugccuaccugggccuggccagca

SEQ ID NO: 148717 - RNA, 32 nt, Homo Sapiens
aacugagauaugccacuguagaagugaaagua

SEQ ID NO: 148718 - RNA, 32 nt, Homo Sapiens
cugaggggagaugcuucugcagggccuaugac

SEQ ID NO: 148719 - RNA, 32 nt, Homo Sapiens
ggcccgugaugacagcuauuaagggagacuca

SEQ ID NO: 148720 - RNA, 32 nt, Homo Sapiens
uguaaauagauauuacuucuagaggagcuuag

SEQ ID NO: 148721 - RNA, 32 nt, Homo Sapiens
acucuguaaucccagcacuuugggaggccgag

SEQ ID NO: 148722 - RNA, 30 nt, Homo Sapiens
gaccugcccugcugcgugcccgcgcgccug

SEQ ID NO: 148723 - RNA, 32 nt, Homo Sapiens
uucucaggccccaugugccagccuucuuggga

SEQ ID NO: 148724 - RNA, 32 nt, Homo Sapiens
uuaucuuuauugauuagcacugaggauuuuaa

SEQ ID NO: 148725 - RNA, 32 nt, Homo Sapiens
cccgccuggcccggcgacgcccgcucagcagc

SEQ ID NO: 148726 - RNA, 29 nt, Homo Sapiens
acaccugugacuuacuugaauugggauaa

SEQ ID NO: 148727 - RNA, 32 nt, Homo Sapiens
ccucugguugccaguuccauccagucacccug

SEQ ID NO: 148728 - RNA, 32 nt, Homo Sapiens
aaggacauuaugugugcauguguguauaagug

SEQ ID NO: 148729 - RNA, 32 nt, Homo Sapiens
gcuggagaggaugucagcgagccugacauugc

SEQ ID NO: 148730 - RNA, 32 nt, Homo Sapiens
gcagccccuugccugccggccccugggcggcc

SEQ ID NO: 148731 - RNA, 32 nt, Homo Sapiens
cugaagcuccugggguguggggugugggcugg

SEQ ID NO: 148732 - RNA, 32 nt, Homo Sapiens
gaaacauuuuuaaaaguuuuugaaagagauaa

SEQ ID NO: 148733 - RNA, 32 nt, Homo Sapiens
cagauagcugucuauguugguucuuguuuggg

SEQ ID NO: 148734 - RNA, 32 nt, Homo Sapiens
uauaugaauacguaucuguguaaaacagugag

SEQ ID NO: 148735 - RNA, 32 nt, Homo Sapiens
ucaggggcaguggaggcuggcugcugaaggau

SEQ ID NO: 148736 - RNA, 32 nt, Homo Sapiens
uuccccacccaucuccucccagaacgucacag

SEQ ID NO: 148737 - RNA, 32 nt, Homo Sapiens
acugcaaacacaccuuggagaaguggcaucag

SEQ ID NO: 148738 - RNA, 32 nt, Homo Sapiens
uucagggccauguuggaauuguccuugcucac

SEQ ID NO: 148739 - RNA, 32 nt, Homo Sapiens
gcagaaccaccgcauuccacccugcccuuugg

SEQ ID NO: 148740 - RNA, 32 nt, Homo Sapiens
uucuuacacuguccagcuuguaaugguuaaug

SEQ ID NO: 148741 - RNA, 32 nt, Homo Sapiens
gcugauacugucaccacugggaccaaguuaaa

SEQ ID NO: 148742 - RNA, 32 nt, Homo Sapiens
aaagauggaaaacaagaaauacugucaaggau

SEQ ID NO: 148743 - RNA, 32 nt, Homo Sapiens
auguaacuggugcccccuccccgaugugacug

SEQ ID NO: 148744 - RNA, 32 nt, Homo Sapiens
gaauuuuguuuuacuuuuuuuuuuuuuaagcu

SEQ ID NO: 148745 - RNA, 32 nt, Homo Sapiens
agcggggaagcuggaaggcgucguucuccuuu

SEQ ID NO: 148746 - RNA, 29 nt, Homo Sapiens
ggggcugugacuucucucuaaauuguaua

SEQ ID NO: 148747 - RNA, 32 nt, Homo Sapiens
gcggugugaacagggauugccccccgccuuca

SEQ ID NO: 148748 - RNA, 32 nt, Homo Sapiens
uuggauagaauccagggcucguggcucuggaa

SEQ ID NO: 148749 - RNA, 32 nt, Homo Sapiens
aauauauaaaauuuaaauauaauauugauagc

SEQ ID NO: 148750 - RNA, 32 nt, Homo Sapiens
caacaugaauuuccuuuuaccagauguauaag

SEQ ID NO: 148751 - RNA, 32 nt, Homo Sapiens
uaacagcucaggugcuccuaaacuccgacaca

SEQ ID NO: 148752 - RNA, 32 nt, Homo Sapiens
uccagagccaaggaaauuuucugucacaagcu

SEQ ID NO: 148753 - RNA, 32 nt, Homo Sapiens
gccacacagagggaagcagaaaugagacgcag

SEQ ID NO: 148754 - RNA, 32 nt, Homo Sapiens
gugcacagggguccagggacugucccacagca

SEQ ID NO: 148755 - RNA, 32 nt, Homo Sapiens
ggccacacuggaagaaaggcaagaaagaggaa

SEQ ID NO: 148756 - RNA, 32 nt, Homo Sapiens
ggccuuggugcggcgagccgagcgaggcagcu

SEQ ID NO: 148757 - RNA, 32 nt, Homo Sapiens
ccaggccgggguggagcaugggccuggccacc

SEQ ID NO: 148758 - RNA, 32 nt, Homo Sapiens
ugaccuaauuuucuucugcaugaaacaucugc

SEQ ID NO: 148759 - RNA, 32 nt, Homo Sapiens
aaaaaauaaaaauuagcuagaugugguggcau

SEQ ID NO: 148760 - RNA, 32 nt, Homo Sapiens
ccuggcuuggcuguccccuaccuguguccccg

SEQ ID NO: 148761 - RNA, 32 nt, Homo Sapiens
gauauggaaauauuuuguugaaaaacuguaca

SEQ ID NO: 148762 - RNA, 32 nt, Homo Sapiens
agaagaaauaaagauagcaaacaacacaguag

SEQ ID NO: 148763 - RNA, 32 nt, Homo Sapiens
caucacuccugauuucaucuccaggcaaguug

SEQ ID NO: 148764 - RNA, 32 nt, Homo Sapiens
augugaccuggccagugagguuauuuucuuuu

SEQ ID NO: 148765 - RNA, 32 nt, Homo Sapiens
ucgccggccgaacgggagcugccgcuuccuuc

SEQ ID NO: 148766 - RNA, 32 nt, Homo Sapiens
ccccuccccuccccugcccuuaaccccaguaa

SEQ ID NO: 148767 - RNA, 32 nt, Homo Sapiens
gcccugggacaaagacccagaauagaacucgu

SEQ ID NO: 148768 - RNA, 32 nt, Homo Sapiens
ugcuucagccuggccugggcagcccuggaagc

SEQ ID NO: 148769 - RNA, 32 nt, Homo Sapiens
gcagaaagaacaagauccaaagaagcaaacuc

SEQ ID NO: 148770 - RNA, 32 nt, Homo Sapiens
gauccaaccuccccgcaccagccccaguccag

SEQ ID NO: 148771 - RNA, 32 nt, Homo Sapiens
gggcacuuggcagcgcggggagcccgucggua

SEQ ID NO: 148772 - RNA, 32 nt, Homo Sapiens
uguuauggucugucgacagcuccagcucgugc

SEQ ID NO: 148773 - RNA, 32 nt, Homo Sapiens
ggccccuccgugaggcacagccgcccgggggu

SEQ ID NO: 148774 - RNA, 30 nt, Homo Sapiens
ccagcugaauucugugccuaacuuagaaga

SEQ ID NO: 148775 - RNA, 32 nt, Homo Sapiens
aaaaauauuuuacaguuguaaaaaauauccau

SEQ ID NO: 148776 - RNA, 32 nt, Homo Sapiens
auguaaggaugauuuuaacaacuuuuuaauau

SEQ ID NO: 148777 - RNA, 32 nt, Homo Sapiens
cugagcccgccagacuccgccgccgucgggag

SEQ ID NO: 148778 - RNA, 32 nt, Homo Sapiens
gcagagcugacgcuccaccucccaccuccaag

SEQ ID NO: 148779 - RNA, 32 nt, Homo Sapiens
uuuuacugggguaugccugguaauaaacagua

SEQ ID NO: 148780 - RNA, 32 nt, Homo Sapiens
gccccacccuccccggcugggagggcucugga

SEQ ID NO: 148781 - RNA, 29 nt, Homo Sapiens
cuuuuuaugaaaagcugugcuuugaaaac

SEQ ID NO: 148782 - RNA, 32 nt, Homo Sapiens
gaaaauagaugacuuuaauguugaacucgaua

SEQ ID NO: 148783 - RNA, 32 nt, Homo Sapiens
gggucucacucuguuacccaggcuggagugca

SEQ ID NO: 148784 - RNA, 32 nt, Homo Sapiens
gacauuagucaaccaauuuaguuguaacacaa

SEQ ID NO: 148785 - RNA, 32 nt, Homo Sapiens
ucucgcugcguccucauuuccccucccaaucc

SEQ ID NO: 148786 - RNA, 32 nt, Homo Sapiens
ucucacgggcucuccccuccccaguguggccg

SEQ ID NO: 148787 - RNA, 32 nt, Homo Sapiens
ggccuugaugaaaauacuauauuuuguagauu

SEQ ID NO: 148788 - RNA, 32 nt, Homo Sapiens
gccaccgcaccuccagcaccggcuccucaccu

SEQ ID NO: 148789 - RNA, 32 nt, Homo Sapiens
uuacgaagagugaaauacguuuuuguaccucu

SEQ ID NO: 148790 - RNA, 32 nt, Homo Sapiens
caagggagguggaagggaaaagauuuucuuuu

SEQ ID NO: 148791 - RNA, 32 nt, Homo Sapiens
agccucuucuauuuaaugcagacccggcccag

SEQ ID NO: 148792 - RNA, 32 nt, Homo Sapiens
gguccagcagaaggaaacauggcugccaaagu

SEQ ID NO: 148793 - RNA, 27 nt, Homo Sapiens
uucccgaaccucuucagccgcccggag

SEQ ID NO: 148794 - RNA, 32 nt, Homo Sapiens
acgguuacccagcgggccgccggcggucgugg

SEQ ID NO: 148795 - RNA, 32 nt, Homo Sapiens
gaacgccgcuccccgcgcgccaacggacccgg

SEQ ID NO: 148796 - RNA, 32 nt, Homo Sapiens
ggaauguucuauaaccagcucuguaaaggaaa

SEQ ID NO: 148797 - RNA, 32 nt, Homo Sapiens
aagucaggguggguugucugucugcauuuggg

SEQ ID NO: 148798 - RNA, 32 nt, Homo Sapiens
aaguuugcaaagaggcgcgggaggcggcagcc

SEQ ID NO: 148799 - RNA, 32 nt, Homo Sapiens
ccagcuaugaagaucuggagcccgucucggag

SEQ ID NO: 148800 - RNA, 32 nt, Homo Sapiens
agaagcaucccauggaccauggggugaguguc

SEQ ID NO: 148801 - RNA, 32 nt, Homo Sapiens
gggaaccguggcgucccugcguggggcccaug

SEQ ID NO: 148802 - RNA, 31 nt, Homo Sapiens
uuaaaguuaggucuauuacagaauuaacaua

SEQ ID NO: 148803 - RNA, 32 nt, Homo Sapiens
cuucuagcccaugcccuuccccgguggaggga

SEQ ID NO: 148804 - RNA, 32 nt, Homo Sapiens
aaaaaaacaaaaaaacaaaaaaacaacuguuc

SEQ ID NO: 148805 - RNA, 31 nt, Homo Sapiens
cuaaauugcaagaucuaaggauauguguuuu

SEQ ID NO: 148806 - RNA, 32 nt, Homo Sapiens
auuccaugacccucacucagcacccccacccc

SEQ ID NO: 148807 - RNA, 32 nt, Homo Sapiens
agcuagcuggcauggcggccugcauugcagcg

SEQ ID NO: 148808 - RNA, 32 nt, Homo Sapiens
aggcuucaggugagaaggagcgguguguccag

SEQ ID NO: 148809 - RNA, 32 nt, Homo Sapiens
uguugggaaaagggcuuguggaaugccuguau

SEQ ID NO: 148810 - RNA, 32 nt, Homo Sapiens
uggaaagagcugcggggcgcgggaggaggaag

SEQ ID NO: 148811 - RNA, 32 nt, Homo Sapiens
gcgaguccaccgagcggccucugaggagcagc

SEQ ID NO: 148812 - RNA, 32 nt, Homo Sapiens
ugacuuaguuuauuuuugcaaaacgucgaucu

SEQ ID NO: 148813 - RNA, 32 nt, Homo Sapiens
uaauauuucuuacuuugucccugcuguguccu

SEQ ID NO: 148814 - RNA, 32 nt, Homo Sapiens
uauuaucuucauaaguuaauaaauaaguaaaa

SEQ ID NO: 148815 - RNA, 32 nt, Homo Sapiens
cucccggccucuugcgcuccuaggggcggaga

SEQ ID NO: 148816 - RNA, 32 nt, Homo Sapiens
gguccccagcucccuguccccggagccagagc

SEQ ID NO: 148817 - RNA, 32 nt, Homo Sapiens
caaugucuaaaauggacgaaucuauauagagu

SEQ ID NO: 148818 - RNA, 32 nt, Homo Sapiens
ugcuaucuauugauccaaaaaauauauucgug

SEQ ID NO: 148819 - RNA, 32 nt, Homo Sapiens
ucccagucuuucccggcccccaggucgcagca

SEQ ID NO: 148820 - RNA, 32 nt, Homo Sapiens
gucaccacguggcuugggaacuucuggagcca

SEQ ID NO: 148821 - RNA, 32 nt, Homo Sapiens
gagcagcuugcaaggggagccgguggagggaa

SEQ ID NO: 148822 - RNA, 32 nt, Homo Sapiens
ccagaaugccccggggaccuuguguccagcuc

SEQ ID NO: 148823 - RNA, 32 nt, Homo Sapiens
uaaccucuguuguagugacgcaguggugccau

SEQ ID NO: 148824 - RNA, 32 nt, Homo Sapiens
ccuggauucaaccucauagaaacuguaggcug

SEQ ID NO: 148825 - RNA, 32 nt, Homo Sapiens
uugcuucagggugaggaucgcuuguacuugaa

SEQ ID NO: 148826 - RNA, 32 nt, Homo Sapiens
gcccgcccaguucucugagcgugcggcggacg

SEQ ID NO: 148827 - RNA, 32 nt, Homo Sapiens
cgggaggagagccgggacuggacacaagccag

SEQ ID NO: 148828 - RNA, 32 nt, Homo Sapiens
gccccuccuugguucuaguccuccccgcagcc

SEQ ID NO: 148829 - RNA, 32 nt, Homo Sapiens
gaucuguaauuuuuauuuuaaaaacagcuuac

SEQ ID NO: 148830 - RNA, 32 nt, Homo Sapiens
ggguuuagagaacacgaguuguaguuccuugg

SEQ ID NO: 148831 - RNA, 32 nt, Homo Sapiens
uucuccucaaauuauuuuucucugucaccaga

SEQ ID NO: 148832 - RNA, 32 nt, Homo Sapiens
ccggcgggacaaagagcuccuguggggcucgu

SEQ ID NO: 148833 - RNA, 32 nt, Homo Sapiens
gguauguccuggugaauuaucucagcacagga

SEQ ID NO: 148834 - RNA, 32 nt, Homo Sapiens
agaagaagaggaggaagaagauauccucucuc

SEQ ID NO: 148835 - RNA, 32 nt, Homo Sapiens
gauaguagauauauuuuauuaauaaaaugguu

SEQ ID NO: 148836 - RNA, 32 nt, Homo Sapiens
gagacccagaaagcagugcagugcagcucuaa

SEQ ID NO: 148837 - RNA, 32 nt, Homo Sapiens
aaugagacccucuuguguuuuuaguuauaauu

SEQ ID NO: 148838 - RNA, 32 nt, Homo Sapiens
gagcacuggagccagagcuagagcuaagggcg

SEQ ID NO: 148839 - RNA, 32 nt, Homo Sapiens
ggacguggguggguccgagggguguguggggu

SEQ ID NO: 148840 - RNA, 32 nt, Homo Sapiens
cagcagcggcggugcggagagcuuggacuggg

SEQ ID NO: 148841 - RNA, 32 nt, Homo Sapiens
ccuuuucccgcgcuccaugccucccccucgac

SEQ ID NO: 148842 - RNA, 32 nt, Homo Sapiens
uggagggcagacuggaggaaggggaaggcaug

SEQ ID NO: 148843 - RNA, 32 nt, Homo Sapiens
aaucaacaaaagacauggcaggaaauggaaga

SEQ ID NO: 148844 - RNA, 32 nt, Homo Sapiens
auggcccuggccugggacagcuaaggacgaca

SEQ ID NO: 148845 - RNA, 27 nt, Homo Sapiens
cgcuguccugcguucagccccugaucu

SEQ ID NO: 148846 - RNA, 32 nt, Homo Sapiens
agaccacauaccccaaagugaccuaagaacac

SEQ ID NO: 148847 - RNA, 32 nt, Homo Sapiens
gaggagagcugcugggccccgagccacgaacu

SEQ ID NO: 148848 - RNA, 32 nt, Homo Sapiens
gccaccacauuuagaacuuuggcugccuuugg

SEQ ID NO: 148849 - RNA, 32 nt, Homo Sapiens
cuccaggcuccgggacccggcccgcgccaccg

SEQ ID NO: 148850 - RNA, 32 nt, Homo Sapiens
cguuagcccgcggccaggcagccgggaggagc

SEQ ID NO: 148851 - RNA, 32 nt, Homo Sapiens
uagagagugaagaugguagacuugaacagaua

SEQ ID NO: 148852 - RNA, 32 nt, Homo Sapiens
cccucggacucgggaucuccccggcggccucc

SEQ ID NO: 148853 - RNA, 32 nt, Homo Sapiens
cucuacaaugaaaacuauaaaacaucgaugag

SEQ ID NO: 148854 - RNA, 32 nt, Homo Sapiens
gugcccuuucccucugucacaaugaacagcca

SEQ ID NO: 148855 - RNA, 32 nt, Homo Sapiens
uuaaagaauuuaugaguuggcuuggacaaguu

SEQ ID NO: 148856 - RNA, 32 nt, Homo Sapiens
ucccaaaggcaugggagaagguuggcgagaag

SEQ ID NO: 148857 - RNA, 32 nt, Homo Sapiens
caaucugagaacaacagcauucauuuccauuc

SEQ ID NO: 148858 - RNA, 32 nt, Homo Sapiens
gagcaucccaggguuacagcaagagccacuga

SEQ ID NO: 148859 - RNA, 31 nt, Homo Sapiens
aauaacagaaacacucccagggacucugggg

SEQ ID NO: 148860 - RNA, 32 nt, Homo Sapiens
ugccuggcaucccaccacgcgaauccuagagg

SEQ ID NO: 148861 - RNA, 32 nt, Homo Sapiens
aaaaccaugucauuuauuucuacaucauguau

SEQ ID NO: 148862 - RNA, 32 nt, Homo Sapiens
uuccucucgcagcuugaugagccccggugugu

SEQ ID NO: 148863 - RNA, 31 nt, Homo Sapiens
ggagcucaaaagagaaaguucaucuagaaau

SEQ ID NO: 148864 - RNA, 32 nt, Homo Sapiens
ugccuuugcuuguccugucuggauagaggcac

SEQ ID NO: 148865 - RNA, 32 nt, Homo Sapiens
agaaaauuuuuaguggugucuuuguaaaaguc

SEQ ID NO: 148866 - RNA, 32 nt, Homo Sapiens
augaaaagguaagacaggcagaugagcaagag

SEQ ID NO: 148867 - RNA, 32 nt, Homo Sapiens
auuuucaagggcaucucuaucuuucgcugcag

SEQ ID NO: 148868 - RNA, 32 nt, Homo Sapiens
auccugccacucugucauguccugcugaugga

SEQ ID NO: 148869 - RNA, 32 nt, Homo Sapiens
cuucucucgaacaaaacagcaaagggaaugcc

SEQ ID NO: 148870 - RNA, 32 nt, Homo Sapiens
cuuacuugacauuuuaguuaucagaucaccug

SEQ ID NO: 148871 - RNA, 32 nt, Homo Sapiens
caaacccaauggcaauaaaggcacugacgaua

SEQ ID NO: 148872 - RNA, 32 nt, Homo Sapiens
aagaggacuucgggguagaggcugggaggagc

SEQ ID NO: 148873 - RNA, 32 nt, Homo Sapiens
augagaaauaaucuugcucugucaccuaggcu

SEQ ID NO: 148874 - RNA, 32 nt, Homo Sapiens
cuuugccuuguacuucuuguuagauuaauuaa

SEQ ID NO: 148875 - RNA, 32 nt, Homo Sapiens
uuuuuaucucauccaguuucauuucuauuuuu

SEQ ID NO: 148876 - RNA, 32 nt, Homo Sapiens
cauuuaauccaguaucucuaguguacaaagga

SEQ ID NO: 148877 - RNA, 32 nt, Homo Sapiens
ugcacucgcccucuccucucgccccccggcaa

SEQ ID NO: 148878 - RNA, 32 nt, Homo Sapiens
auuuggcuaauagauggaaaucaugcaaacua

SEQ ID NO: 148879 - RNA, 32 nt, Homo Sapiens
cuagggacucucuggaggaugggaugacagau

SEQ ID NO: 148880 - RNA, 32 nt, Homo Sapiens
ccugcggccucgcccgcacgccuagagucucg

SEQ ID NO: 148881 - RNA, 32 nt, Homo Sapiens
ggagcgcaggcaaugcggaagcacggugcaca

SEQ ID NO: 148882 - RNA, 32 nt, Homo Sapiens
cuccuucaggcccggaacuucccacaguccca

SEQ ID NO: 148883 - RNA, 32 nt, Homo Sapiens
guucaucccggggcuggagcugcugcuucaca

SEQ ID NO: 148884 - RNA, 32 nt, Homo Sapiens
aguggaaggaggaggggcgaaaguacgcccuu

SEQ ID NO: 148885 - RNA, 32 nt, Homo Sapiens
cuggcucucccuccccagccacgaguaugcca

SEQ ID NO: 148886 - RNA, 32 nt, Homo Sapiens
uucagaagaacaauuacaaaagaugacugaag

SEQ ID NO: 148887 - RNA, 32 nt, Homo Sapiens
cuguguugggggugggggguggcaggacucag

SEQ ID NO: 148888 - RNA, 32 nt, Homo Sapiens
uaccccugaagauaaucuuagcugccaaguaa

SEQ ID NO: 148889 - RNA, 32 nt, Homo Sapiens
agagaggguguaacuaggacauccucaagggc

SEQ ID NO: 148890 - RNA, 32 nt, Homo Sapiens
aacaaaaaacacaaaaaaaaccacucuucucc

SEQ ID NO: 148891 - RNA, 32 nt, Homo Sapiens
cagccccacagcauagaggcaaauggaaaggc

SEQ ID NO: 148892 - RNA, 32 nt, Homo Sapiens
cgccggcggagcccugagcggcugugacaggc

SEQ ID NO: 148893 - RNA, 32 nt, Homo Sapiens
aggucaccgagcgggggagcugcugcccucgc

SEQ ID NO: 148894 - RNA, 32 nt, Homo Sapiens
cuuucuucggagagggcgcgggggccggggcc

SEQ ID NO: 148895 - RNA, 32 nt, Homo Sapiens
uuuaugauggaacauaagaucucuaaaucuga

SEQ ID NO: 148896 - RNA, 32 nt, Homo Sapiens
uucgugagcugaagaacaagcugcucauggca

SEQ ID NO: 148897 - RNA, 32 nt, Homo Sapiens
uguuuuuguauauaauguauuuuuucacuuuu

SEQ ID NO: 148898 - RNA, 32 nt, Homo Sapiens
ggauuugggguggaaggcaggcauggucaaac

SEQ ID NO: 148899 - RNA, 32 nt, Homo Sapiens
cucuucccucaauaguugccuuuuagugcugu

SEQ ID NO: 148900 - RNA, 32 nt, Homo Sapiens
uuuggugccuuguaucuguugcugauucacuu

SEQ ID NO: 148901 - RNA, 32 nt, Homo Sapiens
uugaaaccuucccacacucccugcuccaggag

SEQ ID NO: 148902 - RNA, 32 nt, Homo Sapiens
agaagugaugugauggcguggagugggcugua

SEQ ID NO: 148903 - RNA, 32 nt, Homo Sapiens
cauacgaaauuugaacguagcuuuggaaaaag

SEQ ID NO: 148904 - RNA, 32 nt, Homo Sapiens
ccagggagcuacugagaaaucaccugaagaca

SEQ ID NO: 148905 - RNA, 31 nt, Homo Sapiens
guaccgcugccggcggaccaggauucccgcg

SEQ ID NO: 148906 - RNA, 32 nt, Homo Sapiens
aaguccaggucuguugucagugcucgcugggg

SEQ ID NO: 148907 - RNA, 32 nt, Homo Sapiens
ucaggguccacgggcggcuggugcuuuuuccu

SEQ ID NO: 148908 - RNA, 32 nt, Homo Sapiens
aaggaaucugaacacgacugauauuuucuuua

SEQ ID NO: 148909 - RNA, 32 nt, Homo Sapiens
agggagggccgcgccguucacuucuguaaggg

SEQ ID NO: 148910 - RNA, 32 nt, Homo Sapiens
caagcuuuccacucacaggggagaggcuacug

SEQ ID NO: 148911 - RNA, 32 nt, Homo Sapiens
gguccgugcacagucagcacaaaaaacucaaa

SEQ ID NO: 148912 - RNA, 32 nt, Homo Sapiens
aaauacuaacaaauuacacaccuaguaauuca

SEQ ID NO: 148913 - RNA, 32 nt, Homo Sapiens
ugccagccgggcgggccgcgggucgccucccu

SEQ ID NO: 148914 - RNA, 32 nt, Homo Sapiens
uagaaaucucaaagauuugcagugcaaguaau

SEQ ID NO: 148915 - RNA, 32 nt, Homo Sapiens
uugacugagcacuuagggcaucaggaacagug

SEQ ID NO: 148916 - RNA, 32 nt, Homo Sapiens
ggaaagcagcggggcugcugcugaccggagcc

SEQ ID NO: 148917 - RNA, 31 nt, Homo Sapiens
ccgcuguugcugcugacuccaaggucuucuc

SEQ ID NO: 148918 - RNA, 32 nt, Homo Sapiens
gagagagucgcgguugcugaucguggugcuug

SEQ ID NO: 148919 - RNA, 32 nt, Homo Sapiens
acgugccuggugccggccgcgcugcugggccu

SEQ ID NO: 148920 - RNA, 32 nt, Homo Sapiens
gucagcuccaccuccgacauuccuccugguca

SEQ ID NO: 148921 - RNA, 32 nt, Homo Sapiens
uuuuaaucugcauucuguuuccucuucuaguu

SEQ ID NO: 148922 - RNA, 32 nt, Homo Sapiens
gugggggagauuacaaaauacaucaguuagug

SEQ ID NO: 148923 - RNA, 32 nt, Homo Sapiens
cugagaagaggcauuugugacaaacucaagug

SEQ ID NO: 148924 - RNA, 32 nt, Homo Sapiens
aucugcucaggagcuaccggagcuggcccgcg

SEQ ID NO: 148925 - RNA, 32 nt, Homo Sapiens
agaaaaugguuuaccuuguuguuugugaauga

SEQ ID NO: 148926 - RNA, 32 nt, Homo Sapiens
gaguauguguggcagaggcacacauaaacagg

SEQ ID NO: 148927 - RNA, 32 nt, Homo Sapiens
cagcacuuccggccugaccccuguccagcgcc

SEQ ID NO: 148928 - RNA, 32 nt, Homo Sapiens
cuaaauugauuuagucagaauuccuagacuga

SEQ ID NO: 148929 - RNA, 32 nt, Homo Sapiens
ucuuccauguucugcccuuucccacaccuuug

SEQ ID NO: 148930 - RNA, 32 nt, Homo Sapiens
auuuaucgaugucauucuuaaucuuuugauac

SEQ ID NO: 148931 - RNA, 32 nt, Homo Sapiens
cugugguggguugcagaguucaugcucccuuc

SEQ ID NO: 148932 - RNA, 32 nt, Homo Sapiens
cggacucgggaucuccccggcggccucccuug

SEQ ID NO: 148933 - RNA, 32 nt, Homo Sapiens
uuguaggccuaacuuuauuuuauucuuuauuu

SEQ ID NO: 148934 - RNA, 32 nt, Homo Sapiens
acaacccucuggcuuccuaagacccaucugcc

SEQ ID NO: 148935 - RNA, 32 nt, Homo Sapiens
uccaacugucgccacagcugcccagcuggguc

SEQ ID NO: 148936 - RNA, 32 nt, Homo Sapiens
cuccccaccagccuccuccccacauccccagc

SEQ ID NO: 148937 - RNA, 32 nt, Homo Sapiens
gugccccacagccccagcaccagguggacugc

SEQ ID NO: 148938 - RNA, 32 nt, Homo Sapiens
cccccgucccccgccauccgccgcccggaucc

SEQ ID NO: 148939 - RNA, 32 nt, Homo Sapiens
uagcguggcccgacugggcagcuccuuuccuu

SEQ ID NO: 148940 - RNA, 32 nt, Homo Sapiens
cuuggcuccggggcccgcagccgucggggccc

SEQ ID NO: 148941 - RNA, 32 nt, Homo Sapiens
gcagcagcggcagccucaccccgggaccugua

SEQ ID NO: 148942 - RNA, 32 nt, Homo Sapiens
cucugccgauacuguuugucuuucuacuguuu

SEQ ID NO: 148943 - RNA, 32 nt, Homo Sapiens
ugggcguggucugcggggauccuguuacaaag

SEQ ID NO: 148944 - RNA, 32 nt, Homo Sapiens
gaacaaagaauuuguccuguauggaaaauagg

SEQ ID NO: 148945 - RNA, 32 nt, Homo Sapiens
agacuugagaaaugucuuaauacucacacugc

SEQ ID NO: 148946 - RNA, 32 nt, Homo Sapiens
ggcccuggacucccaaccccgccggcgaaacc

SEQ ID NO: 148947 - RNA, 32 nt, Homo Sapiens
gaagcgcccgcaacccuuggggacgccucucc

SEQ ID NO: 148948 - RNA, 32 nt, Homo Sapiens
ucaccuuccuagucacacacaaacacaggagc

SEQ ID NO: 148949 - RNA, 32 nt, Homo Sapiens
aagucuuaaagcuccaaaaugaucuccuuuga

SEQ ID NO: 148950 - RNA, 32 nt, Homo Sapiens
aggggaccucgccuugcgggaccccaccugga

SEQ ID NO: 148951 - RNA, 32 nt, Homo Sapiens
cuuacuacuuggaagauaaagcacuuggugau

SEQ ID NO: 148952 - RNA, 32 nt, Homo Sapiens
aguguggugggcgccggcccugcccgaggccc

SEQ ID NO: 148953 - RNA, 32 nt, Homo Sapiens
cuccagagggucaccuucccugugcggucuuc

SEQ ID NO: 148954 - RNA, 31 nt, Homo Sapiens
uugcacacaaagaagaaaauaaaguuauaau

SEQ ID NO: 148955 - RNA, 32 nt, Homo Sapiens
ggagagaauuuaaugaagaggcuguuuaccaa

SEQ ID NO: 148956 - RNA, 32 nt, Homo Sapiens
ccacagacuguugacuuuuaguuucuuaaaga

SEQ ID NO: 148957 - RNA, 31 nt, Homo Sapiens
gagucauauaugacuuuguucagaugaccuu

SEQ ID NO: 148958 - RNA, 32 nt, Homo Sapiens
aaggcuaugauuauccacccacagggagacga

SEQ ID NO: 148959 - RNA, 30 nt, Homo Sapiens
auacaguggagaaugggggugaccacaaaa

SEQ ID NO: 148960 - RNA, 32 nt, Homo Sapiens
aauuccagcucuucuuugcagauggcguccuu

SEQ ID NO: 148961 - RNA, 32 nt, Homo Sapiens
ggcccagcgcgggcgcucggcgcguccagacc

SEQ ID NO: 148962 - RNA, 32 nt, Homo Sapiens
gcuucugggcaccucggcuuuccccggugcca

SEQ ID NO: 148963 - RNA, 32 nt, Homo Sapiens
uguuucugccucuuaaggauagaucuucugca

SEQ ID NO: 148964 - RNA, 32 nt, Homo Sapiens
uagaugcuccacgagacauugcaacuggccua

SEQ ID NO: 148965 - RNA, 32 nt, Homo Sapiens
ugguaugugggaagaaguucagaggaaccguu

SEQ ID NO: 148966 - RNA, 32 nt, Homo Sapiens
aaagcucuuucagccaagagacugggacccca

SEQ ID NO: 148967 - RNA, 29 nt, Homo Sapiens
gccaaggcggguggaucacuugagaccag

SEQ ID NO: 148968 - RNA, 32 nt, Homo Sapiens
agcggcuacuucuggugcugcugcuggguggc

SEQ ID NO: 148969 - RNA, 32 nt, Homo Sapiens
ccguuucaaagucugucuuuccuuauagaaug

SEQ ID NO: 148970 - RNA, 32 nt, Homo Sapiens
auuugagaggauguucauuucauugguuaacc

SEQ ID NO: 148971 - RNA, 32 nt, Homo Sapiens
acacagaagcuacuauccaugucaggauuuau

SEQ ID NO: 148972 - RNA, 32 nt, Homo Sapiens
uuuaguucagacagcaaaggcauguacuacua

SEQ ID NO: 148973 - RNA, 32 nt, Homo Sapiens
uauuuuuugcugucaacuuuuuggcaaugcca

SEQ ID NO: 148974 - RNA, 32 nt, Homo Sapiens
gcaacuucggcgaccgcgcgccgcccgcccuc

SEQ ID NO: 148975 - RNA, 32 nt, Homo Sapiens
gagagcuugcggagccgagccgcugucgaguc

SEQ ID NO: 148976 - RNA, 32 nt, Homo Sapiens
ugugacuugcuugguggccucauuccaugugu

SEQ ID NO: 148977 - RNA, 32 nt, Homo Sapiens
cucuugcacuuccuuuguuuucuuucugccau

SEQ ID NO: 148978 - RNA, 32 nt, Homo Sapiens
cugugucggguaaugcguguggcugaaugggc

SEQ ID NO: 148979 - RNA, 32 nt, Homo Sapiens
uuaaacuuggauuuuucuuuuuauuaaugcag

SEQ ID NO: 148980 - RNA, 32 nt, Homo Sapiens
gaagauuucugcaggcaguugaauggcacucc

SEQ ID NO: 148981 - RNA, 29 nt, Homo Sapiens
uaccaugugacuuuaccugauugcccuca

SEQ ID NO: 148982 - RNA, 32 nt, Homo Sapiens
agguauguaacucaaaaguaaauaaaaccacu

SEQ ID NO: 148983 - RNA, 32 nt, Homo Sapiens
ccgggcagggacgaggccugguguccucgcuc

SEQ ID NO: 148984 - RNA, 32 nt, Homo Sapiens
ccagugcgugaggucagucaacagccaaauuc

SEQ ID NO: 148985 - RNA, 32 nt, Homo Sapiens
caaucugguugugauuuauauuuuaaagcuug

SEQ ID NO: 148986 - RNA, 32 nt, Homo Sapiens
cacacaaagagauagagaaucucuuuuacuug

SEQ ID NO: 148987 - RNA, 31 nt, Homo Sapiens
guccaaaggccugagaaccaggagagaugau

SEQ ID NO: 148988 - RNA, 32 nt, Homo Sapiens
auuaauucacuaagauuuuauuagagauuguu

SEQ ID NO: 148989 - RNA, 32 nt, Homo Sapiens
gaauuugcauuuuuaacaaauuccuaggugau

SEQ ID NO: 148990 - RNA, 32 nt, Homo Sapiens
gccccgccuccacuucauccugcccggaaugc

SEQ ID NO: 148991 - RNA, 32 nt, Homo Sapiens
gaaaaacuaugaugauguuaagaaaaugucau

SEQ ID NO: 148992 - RNA, 32 nt, Homo Sapiens
cuucugucuucuccagaaggcaauaccaaccu

SEQ ID NO: 148993 - RNA, 32 nt, Homo Sapiens
agugucuauuuuauuaaacaaacaaacacaga

SEQ ID NO: 148994 - RNA, 32 nt, Homo Sapiens
ggcggcgcccucugcuggccacuaggaagugc

SEQ ID NO: 148995 - RNA, 32 nt, Homo Sapiens
ugaugaacuaacaggagauaaaacaugaccca

SEQ ID NO: 148996 - RNA, 32 nt, Homo Sapiens
gauaauggacauuuguugacuugguuuuacag

SEQ ID NO: 148997 - RNA, 32 nt, Homo Sapiens
uucaacagacugcucacugugcuagaguccaa

SEQ ID NO: 148998 - RNA, 32 nt, Homo Sapiens
cagaaaacucuggcaggcuuaagauuuggaau

SEQ ID NO: 148999 - RNA, 32 nt, Homo Sapiens
ggccucgggaugcagccgccggugcccgggcc

SEQ ID NO: 149000 - RNA, 32 nt, Homo Sapiens
auaagugauauuuauuaagacguguaauaagg

SEQ ID NO: 149001 - RNA, 32 nt, Homo Sapiens
agcgcgcagaggcgggcgcggaggcggcuaga

SEQ ID NO: 149002 - RNA, 32 nt, Homo Sapiens
cugagcuguguggccagacaagaggucccugc

SEQ ID NO: 149003 - RNA, 32 nt, Homo Sapiens
ccuucagccggggcuucgggagacagugcagc

SEQ ID NO: 149004 - RNA, 32 nt, Homo Sapiens
aaccccguguccccggccucagcaccccuguc

SEQ ID NO: 149005 - RNA, 32 nt, Homo Sapiens
cuagcagcaccuguagcccacgugcugcuaau

SEQ ID NO: 149006 - RNA, 32 nt, Homo Sapiens
uccgccccucacccugcccagccccugccaug

SEQ ID NO: 149007 - RNA, 32 nt, Homo Sapiens
agauacugugcuucccaccuccccuucaguuc

SEQ ID NO: 149008 - RNA, 32 nt, Homo Sapiens
acucuccgcgguuaccugugccuagaggugau

SEQ ID NO: 149009 - RNA, 32 nt, Homo Sapiens
aguaaaacccuuuugagggaagagggagacug

SEQ ID NO: 149010 - RNA, 32 nt, Homo Sapiens
ucaaaaugaaucuauuucauaacucggacaau

SEQ ID NO: 149011 - RNA, 32 nt, Homo Sapiens
aacucaucaagagcuccuucugcccuuguaag

SEQ ID NO: 149012 - RNA, 32 nt, Homo Sapiens
auuggggcgcgagggccaugggcgcgcucucc

SEQ ID NO: 149013 - RNA, 32 nt, Homo Sapiens
uaagcagaauauuugcagagucaguuuugagc

SEQ ID NO: 149014 - RNA, 32 nt, Homo Sapiens
gagacggagcugccuccucugacugcgcggga

SEQ ID NO: 149015 - RNA, 32 nt, Homo Sapiens
aucgcccgucguggucaacgggccagccgagu

SEQ ID NO: 149016 - RNA, 32 nt, Homo Sapiens
caggcccgaagccccagcuugcccuggccugu

SEQ ID NO: 149017 - RNA, 32 nt, Homo Sapiens
uuuacaucuucuacugucaaacuaagagauuu

SEQ ID NO: 149018 - RNA, 32 nt, Homo Sapiens
caagcaaacaacuuaaauuugggguagaggaa

SEQ ID NO: 149019 - RNA, 32 nt, Homo Sapiens
ggacucucauucccuuuuccacggagccccgc

SEQ ID NO: 149020 - RNA, 32 nt, Homo Sapiens
auacuugcuauuuuucaugacuuucucuaaua

SEQ ID NO: 149021 - RNA, 32 nt, Homo Sapiens
uuuucuguugaaguuuacaaucaaaggaaaau

SEQ ID NO: 149022 - RNA, 32 nt, Homo Sapiens
agauggggcuccugaggcucaggagugaagau

SEQ ID NO: 149023 - RNA, 32 nt, Homo Sapiens
uacaaccccgguugccgcuuucuccucuccua

SEQ ID NO: 149024 - RNA, 32 nt, Homo Sapiens
ccugcggggcuggcagaggcgagggagguugc

SEQ ID NO: 149025 - RNA, 32 nt, Homo Sapiens
agcugucugaccacauuccuacccugagauga

SEQ ID NO: 149026 - RNA, 32 nt, Homo Sapiens
uguuauugguaguucugaacguuagauauuuu

SEQ ID NO: 149027 - RNA, 32 nt, Homo Sapiens
uuucaaauauaaaauccaguuuacucauggau

SEQ ID NO: 149028 - RNA, 32 nt, Homo Sapiens
augagaucaggaguuugagaccauccuggcca

SEQ ID NO: 149029 - RNA, 32 nt, Homo Sapiens
ccucaagaauuaauauccaauguuuaugaguc

SEQ ID NO: 149030 - RNA, 32 nt, Homo Sapiens
augcacuuuagaauguaaaauaacaaugacua

SEQ ID NO: 149031 - RNA, 32 nt, Homo Sapiens
ugagggagcugauguaugccuacugaugacgg

SEQ ID NO: 149032 - RNA, 30 nt, Homo Sapiens
cccaugggcaggcggguggggggaugggaa

SEQ ID NO: 149033 - RNA, 32 nt, Homo Sapiens
aacguaaacacuggugacauaaaccauucauu

SEQ ID NO: 149034 - RNA, 32 nt, Homo Sapiens
auacuggcaaguucuagaaggauucuaccauu

SEQ ID NO: 149035 - RNA, 32 nt, Homo Sapiens
uggugggacaccugggcaggagugcucucacc

SEQ ID NO: 149036 - RNA, 32 nt, Homo Sapiens
ggcaucuguaaauucuguuguagguauuauaa

SEQ ID NO: 149037 - RNA, 32 nt, Homo Sapiens
aucgcagaguuguauuuccucacaaacuucuu

SEQ ID NO: 149038 - RNA, 32 nt, Homo Sapiens
uauuagcauuuaaugaccuuuuaugccaguug

SEQ ID NO: 149039 - RNA, 32 nt, Homo Sapiens
agcaaaagucauaagaaucuaucacuaaguaa

SEQ ID NO: 149040 - RNA, 32 nt, Homo Sapiens
ccccaaaagugucaaggggcccuaggaaccuc

SEQ ID NO: 149041 - RNA, 32 nt, Homo Sapiens
ccugugcccagccuaccagaagagagcaucug

SEQ ID NO: 149042 - RNA, 32 nt, Homo Sapiens
ggcugaucucaaacuccugaccucaagugauc

SEQ ID NO: 149043 - RNA, 32 nt, Homo Sapiens
ccaccaucagucacgucacuccugggacugag

SEQ ID NO: 149044 - RNA, 32 nt, Homo Sapiens
uaauguuccaugaaugcuaauauuaaauuuug

SEQ ID NO: 149045 - RNA, 32 nt, Homo Sapiens
guggacaucaaacagagaagugggcaaccugg

SEQ ID NO: 149046 - RNA, 32 nt, Homo Sapiens
aggacacccagcugugcaucccgcccguggcc

SEQ ID NO: 149047 - RNA, 32 nt, Homo Sapiens
aaguuuguauaaagacauauuuuuguacuaca

SEQ ID NO: 149048 - RNA, 32 nt, Homo Sapiens
ucauugacagagcugccauaaugaacuugaaa

SEQ ID NO: 149049 - RNA, 32 nt, Homo Sapiens
gcuauuucuugacaguucuauaguuuuacaca

SEQ ID NO: 149050 - RNA, 32 nt, Homo Sapiens
uguacuguuuuuccuacuucuucaauggaagg

SEQ ID NO: 149051 - RNA, 32 nt, Homo Sapiens
ugccagcugggugggaggagcagccgagugaa

SEQ ID NO: 149052 - RNA, 32 nt, Homo Sapiens
acguugcuggucuugugucacgucuccuccug

SEQ ID NO: 149053 - RNA, 32 nt, Homo Sapiens
cugaggcgcgagaggaggggaugggcggggcg

SEQ ID NO: 149054 - RNA, 32 nt, Homo Sapiens
agauacuuccagaaccuucucugggucugcag

SEQ ID NO: 149055 - RNA, 32 nt, Homo Sapiens
agagcccagcgcugacgccggcaccggccuga

SEQ ID NO: 149056 - RNA, 32 nt, Homo Sapiens
uucguauuauucaaaaauuauauccugaucac

SEQ ID NO: 149057 - RNA, 32 nt, Homo Sapiens
cccucgguucccuccgggcucgcccccagcgg

SEQ ID NO: 149058 - RNA, 32 nt, Homo Sapiens
ccauggagagaugccucucuuaugucuucagc

SEQ ID NO: 149059 - RNA, 32 nt, Homo Sapiens
ccagguauguaccgcgggagcggcgcguucug

SEQ ID NO: 149060 - RNA, 32 nt, Homo Sapiens
aucaaagcaaaucaauggcagcuuguguuuaa

SEQ ID NO: 149061 - RNA, 32 nt, Homo Sapiens
uugcuuacauaugugaaaauaguuauccaaau

SEQ ID NO: 149062 - RNA, 32 nt, Homo Sapiens
gggcagcuugaaaggggauguggagcagaugg

SEQ ID NO: 149063 - RNA, 32 nt, Homo Sapiens
aagcggagauccccggcuuccgacguccuugg

SEQ ID NO: 149064 - RNA, 32 nt, Homo Sapiens
augaccccaaaauaggguuuucuugggcgagg

SEQ ID NO: 149065 - RNA, 32 nt, Homo Sapiens
gggucaauauaguggauaaaccugucuaucag

SEQ ID NO: 149066 - RNA, 32 nt, Homo Sapiens
gauauuacaaauaacaucacggaauguacacc

SEQ ID NO: 149067 - RNA, 32 nt, Homo Sapiens
uuagucaguuuaguuaaguagaugcagucccc

SEQ ID NO: 149068 - RNA, 32 nt, Homo Sapiens
aggacugauaagcaaacaaagaauuaacagag

SEQ ID NO: 149069 - RNA, 32 nt, Homo Sapiens
acagccauccagugaaaucaacuacucuggag

SEQ ID NO: 149070 - RNA, 32 nt, Homo Sapiens
cugaggugguggaggcggcggaggcggcggcg

SEQ ID NO: 149071 - RNA, 32 nt, Homo Sapiens
cggcaagaagcagcuagacacacgccagggcg

SEQ ID NO: 149072 - RNA, 32 nt, Homo Sapiens
uguguggggcuggacucugaggcggccagagg

SEQ ID NO: 149073 - RNA, 32 nt, Homo Sapiens
gaguuuugcuguugaaagucucccucaagaau

SEQ ID NO: 149074 - RNA, 32 nt, Homo Sapiens
gcgcugucaggauugcgagagauguguguuga

SEQ ID NO: 149075 - RNA, 32 nt, Homo Sapiens
aagagugcuuucaaggaaauuugucauauucu

SEQ ID NO: 149076 - RNA, 32 nt, Homo Sapiens
acuuaaucugccauccuuauaucaucauuggu

SEQ ID NO: 149077 - RNA, 32 nt, Homo Sapiens
cuauuucaaaaauuauugcaauguguaaaaaa

SEQ ID NO: 149078 - RNA, 32 nt, Homo Sapiens
ugaggcagcccacacacccccaccagcccuaa

SEQ ID NO: 149079 - RNA, 32 nt, Homo Sapiens
gcuccaagcccguggcccuggcauggcugugc

SEQ ID NO: 149080 - RNA, 28 nt, Homo Sapiens
aguagggggcggcgcgcaggagggagga

SEQ ID NO: 149081 - RNA, 32 nt, Homo Sapiens
aauccauguauuucuauauaaguaucuucuuc

SEQ ID NO: 149082 - RNA, 32 nt, Homo Sapiens
aagaaauaagggccgggcacggcggaucauga

SEQ ID NO: 149083 - RNA, 32 nt, Homo Sapiens
gccugaugacuaaaagauaugcuuuauuacac

SEQ ID NO: 149084 - RNA, 32 nt, Homo Sapiens
gcaucuuuuccuuccuuauuccuuccagucag

SEQ ID NO: 149085 - RNA, 32 nt, Homo Sapiens
cgaauaauuuuuguuaauuuuuuguagagaug

SEQ ID NO: 149086 - RNA, 32 nt, Homo Sapiens
ccagcuuuacuuuuuugcuccacauuuaaugc

SEQ ID NO: 149087 - RNA, 32 nt, Homo Sapiens
cuguaaguuggcaaccuaggcuccugacgcga

SEQ ID NO: 149088 - RNA, 32 nt, Homo Sapiens
gguuagggccagaggaggaaaagcugcccgcc

SEQ ID NO: 149089 - RNA, 32 nt, Homo Sapiens
agaagcgaaaacgagaaccugaagaugaggga

SEQ ID NO: 149090 - RNA, 32 nt, Homo Sapiens
ccgacgccggcuguaccgggaccuccuggucg

SEQ ID NO: 149091 - RNA, 32 nt, Homo Sapiens
guuguggcacuagccaaacauaaaggggcuua

SEQ ID NO: 149092 - RNA, 32 nt, Homo Sapiens
ccaaggcugggccagccuuuuuugggcaguca

SEQ ID NO: 149093 - RNA, 30 nt, Homo Sapiens
gcggugcccaggcgcgcuuggccugagagg

SEQ ID NO: 149094 - RNA, 32 nt, Homo Sapiens
ugauaggauuuauguaggaagaaacuugauuu

SEQ ID NO: 149095 - RNA, 32 nt, Homo Sapiens
uuuccuguuucugaaccaaguaaaaucagucc

SEQ ID NO: 149096 - RNA, 32 nt, Homo Sapiens
auauuauacauacuguuuggaacuuugcauuu

SEQ ID NO: 149097 - RNA, 32 nt, Homo Sapiens
aguuaucaaaacagucuauguggaaauccagu

SEQ ID NO: 149098 - RNA, 32 nt, Homo Sapiens
aggcuuccaguauauauagcaacgcucugaga

SEQ ID NO: 149099 - RNA, 30 nt, Homo Sapiens
cccgggagccgcaagaaccacgguguccgc

SEQ ID NO: 149100 - RNA, 32 nt, Homo Sapiens
ugcaaugaugcacuuuaacugaagauagagac

SEQ ID NO: 149101 - RNA, 32 nt, Homo Sapiens
cauauauuuuuauagcacuuuuggaaccuaua

SEQ ID NO: 149102 - RNA, 32 nt, Homo Sapiens
gggaaacaaucuuuuguaaaugcaaagcuguu

SEQ ID NO: 149103 - RNA, 32 nt, Homo Sapiens
gcuccgggccgccgccgcugcugcugagcgag

SEQ ID NO: 149104 - RNA, 32 nt, Homo Sapiens
aaauuuuauaacuuacuguuaaaagcaaaaau

SEQ ID NO: 149105 - RNA, 32 nt, Homo Sapiens
uggcucacacgcugcccuucgcccgcggcguc

SEQ ID NO: 149106 - RNA, 31 nt, Homo Sapiens
ugcaucccagccaccacccugagauuaugcg

SEQ ID NO: 149107 - RNA, 32 nt, Homo Sapiens
uucagggucuuuccucuaccagguggcacuca

SEQ ID NO: 149108 - RNA, 32 nt, Homo Sapiens
agcugcacuuuggcgcuaacgcccuguuuccc

SEQ ID NO: 149109 - RNA, 32 nt, Homo Sapiens
uuagagguauaaauaucugcccuuagcucugc

SEQ ID NO: 149110 - RNA, 32 nt, Homo Sapiens
ugccuguguuugucuggccaagacauuugcuu

SEQ ID NO: 149111 - RNA, 32 nt, Homo Sapiens
augaaguacaaguugaaauguaguuauuggaa

SEQ ID NO: 149112 - RNA, 32 nt, Homo Sapiens
aaagaaaaaaagacauguaaaauuuuguuauu

SEQ ID NO: 149113 - RNA, 32 nt, Homo Sapiens
agcccgcguggccgaagcuggaaaccaaaccu

SEQ ID NO: 149114 - RNA, 32 nt, Homo Sapiens
auacagaauuuaauuaaaauucaggcuauagc

SEQ ID NO: 149115 - RNA, 32 nt, Homo Sapiens
guggagcggagcaaggccaggcggccccugcu

SEQ ID NO: 149116 - RNA, 32 nt, Homo Sapiens
cucagagggcaggcagccugcagacgcuccau

SEQ ID NO: 149117 - RNA, 29 nt, Homo Sapiens
guucuuuguaucccuuaccacaaauaucu

SEQ ID NO: 149118 - RNA, 32 nt, Homo Sapiens
caaguaaacaauuugaugauaagcuacaguuu

SEQ ID NO: 149119 - RNA, 32 nt, Homo Sapiens
uccuucgggcgucgcuucccggaccgggugcg

SEQ ID NO: 149120 - RNA, 32 nt, Homo Sapiens
aaaguaacagaaaaugaugaaauaaagagacc

SEQ ID NO: 149121 - RNA, 32 nt, Homo Sapiens
agggagggagcacaggcggggacuaagcuggg

SEQ ID NO: 149122 - RNA, 32 nt, Homo Sapiens
gcuauaacugcuguguuuuuuauauuauuuuu

SEQ ID NO: 149123 - RNA, 32 nt, Homo Sapiens
aggagacgcagcguggagccuaccucccgaca

SEQ ID NO: 149124 - RNA, 32 nt, Homo Sapiens
gaucuauucuuuuuuucuuagucuagcuaaag

SEQ ID NO: 149125 - RNA, 30 nt, Homo Sapiens
ugaguguuucugcuuugggaaacccuucca

SEQ ID NO: 149126 - RNA, 32 nt, Homo Sapiens
ugagaggcaagaaaauaaaauaacuuucuacc

SEQ ID NO: 149127 - RNA, 32 nt, Homo Sapiens
gucauuccugacucaccaccguccccagguga

SEQ ID NO: 149128 - RNA, 32 nt, Homo Sapiens
uaaguugugagaagaaagggggaacaagacac

SEQ ID NO: 149129 - RNA, 32 nt, Homo Sapiens
acggaccccucuaacguuuccaaacugagcuc

SEQ ID NO: 149130 - RNA, 31 nt, Homo Sapiens
gaugggcuuucacuacguuagccaggcuggu

SEQ ID NO: 149131 - RNA, 32 nt, Homo Sapiens
gaguguuuguuuucuuuuucuuuuuuuuuuuu

SEQ ID NO: 149132 - RNA, 32 nt, Homo Sapiens
uccugaacaccugcuuuccuucugggagucug

SEQ ID NO: 149133 - RNA, 32 nt, Homo Sapiens
gccucagcccccaccucuggccugcaggagug

SEQ ID NO: 149134 - RNA, 32 nt, Homo Sapiens
ucgacugccccuauccccuggaccccaacaua

SEQ ID NO: 149135 - RNA, 32 nt, Homo Sapiens
cugugagcaaaguugagcugccacaaagcagg

SEQ ID NO: 149136 - RNA, 32 nt, Homo Sapiens
ucaaagagaggagaggcagcagcauggcgagu

SEQ ID NO: 149137 - RNA, 32 nt, Homo Sapiens
acuggaacugcuaguguagaauguuucagccc

SEQ ID NO: 149138 - RNA, 32 nt, Homo Sapiens
uggcacacaccuguagucccaggcugaggugg

SEQ ID NO: 149139 - RNA, 32 nt, Homo Sapiens
auuuagagagcagaaacugaagaacuguaugu

SEQ ID NO: 149140 - RNA, 32 nt, Homo Sapiens
ucccuggagcuagcggcugcugaaggcgucga

SEQ ID NO: 149141 - RNA, 32 nt, Homo Sapiens
cgcugcuguggccaggcgucuggcaugcugac

SEQ ID NO: 149142 - RNA, 32 nt, Homo Sapiens
auuauuccuaaauaaaaacauaaauauauuuc

SEQ ID NO: 149143 - RNA, 32 nt, Homo Sapiens
caaaguggaacagaguugggcggcaaugacag

SEQ ID NO: 149144 - RNA, 32 nt, Homo Sapiens
ggaaaguugcuuaaauuguggacacuggaauu

SEQ ID NO: 149145 - RNA, 32 nt, Homo Sapiens
accuagacacugggagugcugccaccacgugg

SEQ ID NO: 149146 - RNA, 30 nt, Homo Sapiens
gaggacuucugugcugcugcuucuccucca

SEQ ID NO: 149147 - RNA, 32 nt, Homo Sapiens
gacacaucuuuuccuuguuuuugcacaaauua

SEQ ID NO: 149148 - RNA, 32 nt, Homo Sapiens
auaauucauauuugggaauauggcuuuuaaua

SEQ ID NO: 149149 - RNA, 32 nt, Homo Sapiens
gcuccaggagaggcagcuccccugcccaaggg

SEQ ID NO: 149150 - RNA, 32 nt, Homo Sapiens
uuuuaaguuuccugguucugcaggauggugca

SEQ ID NO: 149151 - RNA, 32 nt, Homo Sapiens
gggcuuagcaggagcaguuucuggccagaagc

SEQ ID NO: 149152 - RNA, 28 nt, Homo Sapiens
gacgggucggggccgccgacauguuugg

SEQ ID NO: 149153 - RNA, 32 nt, Homo Sapiens
cagacggcucugcgggcugcaucugugcagcc

SEQ ID NO: 149154 - RNA, 32 nt, Homo Sapiens
ccagcacaaacacaaggucauggccacacugu

SEQ ID NO: 149155 - RNA, 32 nt, Homo Sapiens
caggacuugaguucucacguauggauuugggu

SEQ ID NO: 149156 - RNA, 32 nt, Homo Sapiens
uagcuuuuucucccuugggggcacauacaaau

SEQ ID NO: 149157 - RNA, 32 nt, Homo Sapiens
uggggucagcaggcccaggagaauuaggaagg

SEQ ID NO: 149158 - RNA, 32 nt, Homo Sapiens
gcgcucccccgucagccacgggcaggcaggcc

SEQ ID NO: 149159 - RNA, 32 nt, Homo Sapiens
gugaaccucacagggggcuucugauacccuca

SEQ ID NO: 149160 - RNA, 32 nt, Homo Sapiens
gcagggcccaaccgggaccuugagugcggcga

SEQ ID NO: 149161 - RNA, 32 nt, Homo Sapiens
ccaagcuauccuggcucuuuggagaucaagga

SEQ ID NO: 149162 - RNA, 32 nt, Homo Sapiens
gggguggccccggcuccacacccugccccauc

SEQ ID NO: 149163 - RNA, 32 nt, Homo Sapiens
uuuuugaucaagaauugcaauaucauauaaau

SEQ ID NO: 149164 - RNA, 32 nt, Homo Sapiens
ucugcuaaaucuccaaaccauucccaaaccuu

SEQ ID NO: 149165 - RNA, 32 nt, Homo Sapiens
gaauaagaaauauuugguguucuuuuuauaac

SEQ ID NO: 149166 - RNA, 32 nt, Homo Sapiens
uguguagguaauauuuucaauuaugaaaguga

SEQ ID NO: 149167 - RNA, 32 nt, Homo Sapiens
cuguuacaggaaugaaguaaaggucaguuuuu

SEQ ID NO: 149168 - RNA, 30 nt, Homo Sapiens
gcccaaaccggcgcuucgccggcgccaaga

SEQ ID NO: 149169 - RNA, 32 nt, Homo Sapiens
gccuggcaugacuugggucaccaaagaacuca

SEQ ID NO: 149170 - RNA, 30 nt, Homo Sapiens
aggaaggcaggggugccgggucccacccag

SEQ ID NO: 149171 - RNA, 32 nt, Homo Sapiens
uugcuguugcuaauucauggugaucaaaugau

SEQ ID NO: 149172 - RNA, 32 nt, Homo Sapiens
cuaacagggacuauaaucuugcagcaccaugc

SEQ ID NO: 149173 - RNA, 32 nt, Homo Sapiens
gggcggagacccggcccggggagguggagaag

SEQ ID NO: 149174 - RNA, 32 nt, Homo Sapiens
aauauguuuucuggcauugcuacuucaacauc

SEQ ID NO: 149175 - RNA, 32 nt, Homo Sapiens
caugaauuugaaagacauauuggcugaccuca

SEQ ID NO: 149176 - RNA, 32 nt, Homo Sapiens
cccugcccgcgcucagccgcugucggggcgcg

SEQ ID NO: 149177 - RNA, 32 nt, Homo Sapiens
cagcuauauaaaacauaauuugaugauguacu

SEQ ID NO: 149178 - RNA, 32 nt, Homo Sapiens
caguggccccgguggcuccaccgcagcgucug

SEQ ID NO: 149179 - RNA, 32 nt, Homo Sapiens
ccguaugcccugcgcuccuccacagccugggc

SEQ ID NO: 149180 - RNA, 32 nt, Homo Sapiens
ucagccugcacgcccuccgcgccccgcugcuu

SEQ ID NO: 149181 - RNA, 32 nt, Homo Sapiens
ccgcgcgcccccagcccuuuaagccagaugau

SEQ ID NO: 149182 - RNA, 32 nt, Homo Sapiens
agccgugugcuggcagauaggguuguauuauu

SEQ ID NO: 149183 - RNA, 32 nt, Homo Sapiens
cuuccucccuguuugcagacguccgugggaga

SEQ ID NO: 149184 - RNA, 32 nt, Homo Sapiens
uguguggcuuggcaauggaguucugcaugacg

SEQ ID NO: 149185 - RNA, 32 nt, Homo Sapiens
cacaugccugcgccugcugccugcugagauga

SEQ ID NO: 149186 - RNA, 32 nt, Homo Sapiens
cugcagacauguuuacuaaugaucauagccag

SEQ ID NO: 149187 - RNA, 32 nt, Homo Sapiens
guugauagacauuuggguuguuuccaccuauu

SEQ ID NO: 149188 - RNA, 32 nt, Homo Sapiens
cccuuccccaaucccggcccugcugugcugcu

SEQ ID NO: 149189 - RNA, 32 nt, Homo Sapiens
gugcacaugucucucccugcucuuccagggug

SEQ ID NO: 149190 - RNA, 32 nt, Homo Sapiens
agcugaaaaugaagguaauuaaaccauggagg

SEQ ID NO: 149191 - RNA, 32 nt, Homo Sapiens
gucgcaggcgucugguuuuucuuugguggcca

SEQ ID NO: 149192 - RNA, 32 nt, Homo Sapiens
gguucuuuuuuauauuguccuccaccuccauc

SEQ ID NO: 149193 - RNA, 32 nt, Homo Sapiens
caacaggggcggagcugcccaaggcuguggga

SEQ ID NO: 149194 - RNA, 32 nt, Homo Sapiens
gagugggauucagcugcagcagggcgcccccu

SEQ ID NO: 149195 - RNA, 32 nt, Homo Sapiens
guguuacucaucuuuauugucuccaugauuua

SEQ ID NO: 149196 - RNA, 32 nt, Homo Sapiens
acucgcgcgcacggucucgcgccagcagcagc

SEQ ID NO: 149197 - RNA, 32 nt, Homo Sapiens
aaaauaaugcccuuuacacaauggcaaggaaa

SEQ ID NO: 149198 - RNA, 32 nt, Homo Sapiens
gggacugugucugcaaacucucuugucuucac

SEQ ID NO: 149199 - RNA, 32 nt, Homo Sapiens
ugaaaguacucugcagcagcucuguuuuaugg

SEQ ID NO: 149200 - RNA, 32 nt, Homo Sapiens
ccuccuccauccacccugaggacccuggggcu

SEQ ID NO: 149201 - RNA, 32 nt, Homo Sapiens
ggagcccuuccuugacagcccgggccgagaag

SEQ ID NO: 149202 - RNA, 32 nt, Homo Sapiens
cugcgcccaccggcuccgcgcugcugccgccg

SEQ ID NO: 149203 - RNA, 32 nt, Homo Sapiens
uccuuccccaaauauuguccacuuccugagag

SEQ ID NO: 149204 - RNA, 32 nt, Homo Sapiens
aggccaacagagcucauaguacuugggaaaaa

SEQ ID NO: 149205 - RNA, 32 nt, Homo Sapiens
uagggauuaaucgauuccuuuauguuuuauaa

SEQ ID NO: 149206 - RNA, 32 nt, Homo Sapiens
acaggcguggaaggugcagggguguguguggg

SEQ ID NO: 149207 - RNA, 32 nt, Homo Sapiens
gugacggcagugccuggcuccauucuccucaa

SEQ ID NO: 149208 - RNA, 32 nt, Homo Sapiens
agacggagaugccaggcacagcccuucuguca

SEQ ID NO: 149209 - RNA, 32 nt, Homo Sapiens
ggcuucugcgugcccuggccccgggaggauaa

SEQ ID NO: 149210 - RNA, 32 nt, Homo Sapiens
guucaaauuggaaaccauguugaagagcucca

SEQ ID NO: 149211 - RNA, 31 nt, Homo Sapiens
ggagugggagggggcuugggaguccagacuc

SEQ ID NO: 149212 - RNA, 32 nt, Homo Sapiens
ucaacuccuccauggauggggcgacacgggga

SEQ ID NO: 149213 - RNA, 32 nt, Homo Sapiens
ucuccagguucaguaccugagcacugcugcua

SEQ ID NO: 149214 - RNA, 32 nt, Homo Sapiens
uucucaguguccccaaacucccugugggaugc

SEQ ID NO: 149215 - RNA, 32 nt, Homo Sapiens
ccaggugguugaagaaagccaugugggagcuc

SEQ ID NO: 149216 - RNA, 32 nt, Homo Sapiens
gguauuccaugaagcugaguucuuuagauaau

SEQ ID NO: 149217 - RNA, 32 nt, Homo Sapiens
cagacgacuagaugacuucugcacuuuuagcu

SEQ ID NO: 149218 - RNA, 32 nt, Homo Sapiens
caaaaaaugcaaaaauaaaaaauauaguacuc

SEQ ID NO: 149219 - RNA, 32 nt, Homo Sapiens
agagccaccaaaacuuuaggacuacccaaguc

SEQ ID NO: 149220 - RNA, 32 nt, Homo Sapiens
cucaagaggagcucauuaagguuguugaugug

SEQ ID NO: 149221 - RNA, 32 nt, Homo Sapiens
ucuggccaacugggguggguggggcagugcuu

SEQ ID NO: 149222 - RNA, 32 nt, Homo Sapiens
accacguggacgcgucugggcugcuggaggca

SEQ ID NO: 149223 - RNA, 32 nt, Homo Sapiens
ggaggccgccccacccccuucccuuuccucca

SEQ ID NO: 149224 - RNA, 32 nt, Homo Sapiens
cuucuuguuccauuaagucagaauacaaauca

SEQ ID NO: 149225 - RNA, 32 nt, Homo Sapiens
caucuccucaucacguucugugccguccuugg

SEQ ID NO: 149226 - RNA, 32 nt, Homo Sapiens
uauauguggagcaaagugucagugagaucauu

SEQ ID NO: 149227 - RNA, 32 nt, Homo Sapiens
cacaggggacgaaggaguccgggauuagcucc

SEQ ID NO: 149228 - RNA, 32 nt, Homo Sapiens
ugcugggagagggaacuggaaugccacacaag

SEQ ID NO: 149229 - RNA, 30 nt, Homo Sapiens
agacacgggcugcggcgcggcaggagagug

SEQ ID NO: 149230 - RNA, 32 nt, Homo Sapiens
accuuucucgccaaauugucggaggcuuuugu

SEQ ID NO: 149231 - RNA, 32 nt, Homo Sapiens
gaacauuuuacugaugugaacauucuagauga

SEQ ID NO: 149232 - RNA, 32 nt, Homo Sapiens
uuucuguggaggauauacuaagugcgacuuug

SEQ ID NO: 149233 - RNA, 32 nt, Homo Sapiens
ccaaggcauguggcucagcagcaagaaaggca

SEQ ID NO: 149234 - RNA, 32 nt, Homo Sapiens
aggaggaggaggaggaggcggcggcggcggug

SEQ ID NO: 149235 - RNA, 32 nt, Homo Sapiens
ugggaggaggggcuguccuggcucugaccugg

SEQ ID NO: 149236 - RNA, 29 nt, Homo Sapiens
ccccuggucauguccaguuuaaccuugaa

SEQ ID NO: 149237 - RNA, 32 nt, Homo Sapiens
ccucugccucaugggguaggaguggcugccuc

SEQ ID NO: 149238 - RNA, 32 nt, Homo Sapiens
uacaauccagauaaaacagagaagacugugau

SEQ ID NO: 149239 - RNA, 32 nt, Homo Sapiens
caaacuuauacaucugcuucuaacauaucgca

SEQ ID NO: 149240 - RNA, 32 nt, Homo Sapiens
aaacucaaacuuaugugggucuuuuguguuca

SEQ ID NO: 149241 - RNA, 32 nt, Homo Sapiens
agugcagccagagccggugcggcggccgcgac

SEQ ID NO: 149242 - RNA, 32 nt, Homo Sapiens
ggggggcggcugagccgcgcagugcggacccu

SEQ ID NO: 149243 - RNA, 32 nt, Homo Sapiens
auccuuucugcaauuacagccauuuugggucc

SEQ ID NO: 149244 - RNA, 32 nt, Homo Sapiens
cagggcgggggcggaggcgccggggcggggga

SEQ ID NO: 149245 - RNA, 31 nt, Homo Sapiens
gcagcuccacggagagaccacccggcgcuug

SEQ ID NO: 149246 - RNA, 32 nt, Homo Sapiens
ucuccacccagcugcugccuauucccugcccc

SEQ ID NO: 149247 - RNA, 32 nt, Homo Sapiens
cugccuaccauccuccucccuccccggcucuc

SEQ ID NO: 149248 - RNA, 32 nt, Homo Sapiens
agauggugcucuucuuuuuucuuucugaauug

SEQ ID NO: 149249 - RNA, 32 nt, Homo Sapiens
cugacuuuaggugauccacacgccucagacuc

SEQ ID NO: 149250 - RNA, 32 nt, Homo Sapiens
gucagggcggaccuggacucggcgcgccuagc

SEQ ID NO: 149251 - RNA, 32 nt, Homo Sapiens
uaagcaaucugugaaaugggaugcaacacaag

SEQ ID NO: 149252 - RNA, 32 nt, Homo Sapiens
ccuuccucuccccuccucccauccuucauagg

SEQ ID NO: 149253 - RNA, 32 nt, Homo Sapiens
cauuuccuggggaugguuaauccugugcccca

SEQ ID NO: 149254 - RNA, 32 nt, Homo Sapiens
ugaaaugcuguaauaaaauuucuauguuauug

SEQ ID NO: 149255 - RNA, 32 nt, Homo Sapiens
auuuuuuuuucuucuuuuuccaccccuucuug

SEQ ID NO: 149256 - RNA, 32 nt, Homo Sapiens
agguggagggcgguuuugcagacaucucagcu

SEQ ID NO: 149257 - RNA, 32 nt, Homo Sapiens
auccacagaaauacaugaaaugucuggucugu

SEQ ID NO: 149258 - RNA, 32 nt, Homo Sapiens
guauuaacucaucucccuuccacucaugaucc

SEQ ID NO: 149259 - RNA, 32 nt, Homo Sapiens
ugcaagauggaaugggacucccccggcugcuc

SEQ ID NO: 149260 - RNA, 32 nt, Homo Sapiens
acuuccuaaaagaaaagauugaaacccaaaaa

SEQ ID NO: 149261 - RNA, 32 nt, Homo Sapiens
gucuguccuccuuuccucucccuccccgacgu

SEQ ID NO: 149262 - RNA, 32 nt, Homo Sapiens
gcacuggacaggucguuguuggugcuuccgug

SEQ ID NO: 149263 - RNA, 32 nt, Homo Sapiens
gcauagacuguuauauauagcauauuauuguu

SEQ ID NO: 149264 - RNA, 32 nt, Homo Sapiens
uuucaugaaagaaaaaaggcccuguuuuguag

SEQ ID NO: 149265 - RNA, 32 nt, Homo Sapiens
guagccccuaaaaccaauuuugagcaaggaua

SEQ ID NO: 149266 - RNA, 32 nt, Homo Sapiens
gcauuugccugccuguccuggacggacuccua

SEQ ID NO: 149267 - RNA, 32 nt, Homo Sapiens
aacgauucugguguuacuuucuguuuuuccua

SEQ ID NO: 149268 - RNA, 32 nt, Homo Sapiens
caggaggggucuaugaagcaguccuggggagg

SEQ ID NO: 149269 - RNA, 32 nt, Homo Sapiens
augggaaaaggacagcacaggaugcccuccaa

SEQ ID NO: 149270 - RNA, 32 nt, Homo Sapiens
cacccggagcacccucuccggugagcggcgaa

SEQ ID NO: 149271 - RNA, 31 nt, Homo Sapiens
caguucccacccucagugggcaccacacacc

SEQ ID NO: 149272 - RNA, 32 nt, Homo Sapiens
guuuugaggaccagaagcugugcuuaaaucca

SEQ ID NO: 149273 - RNA, 32 nt, Homo Sapiens
caguccugggagccggccgcccucggucuggu

SEQ ID NO: 149274 - RNA, 32 nt, Homo Sapiens
uuauaguucuaucuuuucagauuccauuucuu

SEQ ID NO: 149275 - RNA, 32 nt, Homo Sapiens
uuaaagaccugugauaaaccacuuccgauaag

SEQ ID NO: 149276 - RNA, 32 nt, Homo Sapiens
ugcagcgcgaucugcgcgaccagaccggcccc

SEQ ID NO: 149277 - RNA, 32 nt, Homo Sapiens
aaaauacaaaaauuagcugggcaugaugacgg

SEQ ID NO: 149278 - RNA, 32 nt, Homo Sapiens
cugaagaaaaggaagcaaaugagcugauggaa

SEQ ID NO: 149279 - RNA, 31 nt, Homo Sapiens
gccaauaaacaccgucucagagccuccgccu

SEQ ID NO: 149280 - RNA, 32 nt, Homo Sapiens
acuauauuuggagauagcaucaucacagaguc

SEQ ID NO: 149281 - RNA, 31 nt, Homo Sapiens
aagccugucucuguaccucuaacuggcagca

SEQ ID NO: 149282 - RNA, 32 nt, Homo Sapiens
ggaugucuuucuggugccccaacuuucaggca

SEQ ID NO: 149283 - RNA, 32 nt, Homo Sapiens
agaagaaagugacuguaauccaaaugcaacau

SEQ ID NO: 149284 - RNA, 32 nt, Homo Sapiens
ugagagagaauuuuaauuacuaauugugcacg

SEQ ID NO: 149285 - RNA, 32 nt, Homo Sapiens
uugauaaggaacauuuauccaggaauugauac

SEQ ID NO: 149286 - RNA, 32 nt, Homo Sapiens
uuccuccaacuaacuuaacauaagggaauaca

SEQ ID NO: 149287 - RNA, 32 nt, Homo Sapiens
gcuccugaagaugcugggcgguccuggcacag

SEQ ID NO: 149288 - RNA, 32 nt, Homo Sapiens
ggaggcggcccaggcccggcggucuccgagau

SEQ ID NO: 149289 - RNA, 32 nt, Homo Sapiens
agacaccaugcuaaagcaaaacaucguuuaaa

SEQ ID NO: 149290 - RNA, 32 nt, Homo Sapiens
ccagguuuaacccugcaagcuguuuccacauc

SEQ ID NO: 149291 - RNA, 32 nt, Homo Sapiens
uagcuaaccauagaaaagguacaguaaaaaua

SEQ ID NO: 149292 - RNA, 32 nt, Homo Sapiens
aguucaugaaguaccaaugcaaguguuuuauu

SEQ ID NO: 149293 - RNA, 32 nt, Homo Sapiens
ggguugaguauuuuauauguaaaauguuaucu

SEQ ID NO: 149294 - RNA, 32 nt, Homo Sapiens
gcagcuccggcgccugguagcgagaggcgggu

SEQ ID NO: 149295 - RNA, 32 nt, Homo Sapiens
cggcggcucagacuucggcugcccgacgccag

SEQ ID NO: 149296 - RNA, 32 nt, Homo Sapiens
aacaaaaggugauacgaaagugauggauuuga

SEQ ID NO: 149297 - RNA, 32 nt, Homo Sapiens
gccaugucuugggcuccugcuggcuucugagg

SEQ ID NO: 149298 - RNA, 31 nt, Homo Sapiens
agcauaaucuaggugauuugaguuaaugaac

SEQ ID NO: 149299 - RNA, 32 nt, Homo Sapiens
gaaauaacaaagugaagagacaacccauagaa

SEQ ID NO: 149300 - RNA, 32 nt, Homo Sapiens
gcaaugacuuauauucaaaucuguauuuguuu

SEQ ID NO: 149301 - RNA, 32 nt, Homo Sapiens
caacucacccgucuccucccucuccuucccug

SEQ ID NO: 149302 - RNA, 32 nt, Homo Sapiens
acccagggcuuaauuguauguguugagaggga

SEQ ID NO: 149303 - RNA, 32 nt, Homo Sapiens
caggggaaugugggagagaaaaggguucuugg

SEQ ID NO: 149304 - RNA, 32 nt, Homo Sapiens
ggagcgggguggcagguaccguggcgccuccu

SEQ ID NO: 149305 - RNA, 32 nt, Homo Sapiens
cugggagcugccggucccacucugucuuugcc

SEQ ID NO: 149306 - RNA, 32 nt, Homo Sapiens
gcuuggagggucacauagguagaugguaaaga

SEQ ID NO: 149307 - RNA, 32 nt, Homo Sapiens
acaucucucuucuccuucccaacuacugcaug

SEQ ID NO: 149308 - RNA, 32 nt, Homo Sapiens
auacccagguucaaaucccagaucuaccacuu

SEQ ID NO: 149309 - RNA, 32 nt, Homo Sapiens
ccaacuuccaauacaacagccaucacuagcac

SEQ ID NO: 149310 - RNA, 32 nt, Homo Sapiens
uaaauauccaugaaucaccgucagaaguuaaa

SEQ ID NO: 149311 - RNA, 32 nt, Homo Sapiens
guucuggaggcugggaaggcgaagggcauggc

SEQ ID NO: 149312 - RNA, 32 nt, Homo Sapiens
uggguucuguuguugacauugcccuucagcac

SEQ ID NO: 149313 - RNA, 32 nt, Homo Sapiens
ugcgagcacagucagcacuuuggcagagacag

SEQ ID NO: 149314 - RNA, 30 nt, Homo Sapiens
cgagcggugguuuggacgccggcggagacg

SEQ ID NO: 149315 - RNA, 32 nt, Homo Sapiens
uucuacuggggagaguguaauauuuuggacug

SEQ ID NO: 149316 - RNA, 32 nt, Homo Sapiens
aauccgcccgcgcgucgccgccgucgucgccg

SEQ ID NO: 149317 - RNA, 32 nt, Homo Sapiens
acccggccgggcgcaggggcuggacuggcgga

SEQ ID NO: 149318 - RNA, 32 nt, Homo Sapiens
auaaugugagaugguucccaauaucaugugau

SEQ ID NO: 149319 - RNA, 32 nt, Homo Sapiens
cggagcgagcgcgggacgccgaugaguggccg

SEQ ID NO: 149320 - RNA, 32 nt, Homo Sapiens
aucccuggggagaguggagagaggggcagagc

SEQ ID NO: 149321 - RNA, 32 nt, Homo Sapiens
acagaacaccuuugcaccuagccugugcuaau

SEQ ID NO: 149322 - RNA, 32 nt, Homo Sapiens
uaauuugaagcaacuccuugcucacagugauu

SEQ ID NO: 149323 - RNA, 32 nt, Homo Sapiens
gcacuucccucuauuuucacucuuggcggcug

SEQ ID NO: 149324 - RNA, 32 nt, Homo Sapiens
gaaucuguacuuuguauguauagaauuuaucu

SEQ ID NO: 149325 - RNA, 32 nt, Homo Sapiens
uucuuucuuuuuucuuuuuuuuagacuggguc

SEQ ID NO: 149326 - RNA, 32 nt, Homo Sapiens
cggagccgcucccggagcccggccguagaggc

SEQ ID NO: 149327 - RNA, 32 nt, Homo Sapiens
cuuugcugcuucuuucuggguuguggccgaug

SEQ ID NO: 149328 - RNA, 32 nt, Homo Sapiens
uaggaaauguucaucuguuacauggaaaaaau

SEQ ID NO: 149329 - RNA, 32 nt, Homo Sapiens
cucucgcugugggacagggaccgggccuggaa

SEQ ID NO: 149330 - RNA, 32 nt, Homo Sapiens
aaguggagccuguuucccuaaggacuucuggu

SEQ ID NO: 149331 - RNA, 32 nt, Homo Sapiens
cuuuccucccuugcucucuccuccaaccacug

SEQ ID NO: 149332 - RNA, 32 nt, Homo Sapiens
ugcaauuucaucaucugccuucugcuuuucaa

SEQ ID NO: 149333 - RNA, 32 nt, Homo Sapiens
uauauugcauccuaacgcuaccucugacucaa

SEQ ID NO: 149334 - RNA, 32 nt, Homo Sapiens
uuccccaggaggaacgaggagagguggccacg

SEQ ID NO: 149335 - RNA, 32 nt, Homo Sapiens
cuuggaaaccaucagguacugccugcagacuu

SEQ ID NO: 149336 - RNA, 32 nt, Homo Sapiens
aaaggcuuccucugggugccugcugaacaacu

SEQ ID NO: 149337 - RNA, 32 nt, Homo Sapiens
ccgaaucuauagaauaaaguaccaccuaaaac

SEQ ID NO: 149338 - RNA, 32 nt, Homo Sapiens
cacugcaacuucugccucccggguucaaacga

SEQ ID NO: 149339 - RNA, 32 nt, Homo Sapiens
aauuccaucugucuuuaggagcucucauuauc

SEQ ID NO: 149340 - RNA, 32 nt, Homo Sapiens
gguccuccagcaucgugggcucaagaguuguc

SEQ ID NO: 149341 - RNA, 31 nt, Homo Sapiens
uaauacuuucggagaaauucucuuuaggaca

SEQ ID NO: 149342 - RNA, 31 nt, Homo Sapiens
accuuaauuuugacuuaacaaauaguuuaug

SEQ ID NO: 149343 - RNA, 32 nt, Homo Sapiens
uuuacuuuagaagcacaguaaauaucccaaac

SEQ ID NO: 149344 - RNA, 31 nt, Homo Sapiens
auauauuugugcuucgaguugguguuucuuu

SEQ ID NO: 149345 - RNA, 32 nt, Homo Sapiens
cuuggaacggcacgacgaugauggcaaccuga

SEQ ID NO: 149346 - RNA, 32 nt, Homo Sapiens
aaccgcacugaagaacucuuguccucacuggc

SEQ ID NO: 149347 - RNA, 32 nt, Homo Sapiens
uuuauuuguuuaaugauaugcaugcuuuucuu

SEQ ID NO: 149348 - RNA, 31 nt, Homo Sapiens
ccagcaccacggagaggauuuccaccucugg

SEQ ID NO: 149349 - RNA, 32 nt, Homo Sapiens
uucugagccaucugcugcucucucauuucauc

SEQ ID NO: 149350 - RNA, 32 nt, Homo Sapiens
guaggaucucgcugggcuggguccuggauucc

SEQ ID NO: 149351 - RNA, 32 nt, Homo Sapiens
caaacugcucugcugccacauacucuacuccu

SEQ ID NO: 149352 - RNA, 32 nt, Homo Sapiens
aagagugagagaagagagaaucagguaccuuu

SEQ ID NO: 149353 - RNA, 32 nt, Homo Sapiens
agccagaauguaacguguguguccucugggga

SEQ ID NO: 149354 - RNA, 31 nt, Homo Sapiens
gccaggcagcgcagguauagccaggcuggag

SEQ ID NO: 149355 - RNA, 32 nt, Homo Sapiens
gccggcacaguaccuuacacguaagaagagcu

SEQ ID NO: 149356 - RNA, 32 nt, Homo Sapiens
gagccgggugcgaggaggagcaugcacggacc

SEQ ID NO: 149357 - RNA, 32 nt, Homo Sapiens
uagccggggccauggccggcgcggcggcggag

SEQ ID NO: 149358 - RNA, 32 nt, Homo Sapiens
ccaguuugacuaugccgucuucugcccuaacc

SEQ ID NO: 149359 - RNA, 32 nt, Homo Sapiens
cucauugaugacuguaaagugaauuaacauuu

SEQ ID NO: 149360 - RNA, 32 nt, Homo Sapiens
acgguccccagagagccaccggaggagcagcu

SEQ ID NO: 149361 - RNA, 32 nt, Homo Sapiens
ucaaauucauuuccauuucaauaacuaacugc

SEQ ID NO: 149362 - RNA, 31 nt, Homo Sapiens
ccggcgaaauaaaaucagaguuguugcuucc

SEQ ID NO: 149363 - RNA, 32 nt, Homo Sapiens
ugggugugcagcaagauggccuauacuugagg

SEQ ID NO: 149364 - RNA, 32 nt, Homo Sapiens
uugguuaugcugaauuugaggaccuggauucc

SEQ ID NO: 149365 - RNA, 32 nt, Homo Sapiens
gugggcugcuccccggagcugggcucccagaa

SEQ ID NO: 149366 - RNA, 32 nt, Homo Sapiens
aguccagauuuaaaugucuacuuaguuaauua

SEQ ID NO: 149367 - RNA, 32 nt, Homo Sapiens
auauaacauuaaacuaucaagugaaccacugu

SEQ ID NO: 149368 - RNA, 32 nt, Homo Sapiens
ugacacaccagcccucucggagggguuucgga

SEQ ID NO: 149369 - RNA, 32 nt, Homo Sapiens
gggaggcagggccugggcagggcuucugcacu

SEQ ID NO: 149370 - RNA, 32 nt, Homo Sapiens
uuauguggcuuuuuuuuuuuuauaaguuauac

SEQ ID NO: 149371 - RNA, 32 nt, Homo Sapiens
cuuuggcuugugguaacaaccacaagaagaca

SEQ ID NO: 149372 - RNA, 32 nt, Homo Sapiens
cuuagagaccgagucccggcggcgacggcggg

SEQ ID NO: 149373 - RNA, 32 nt, Homo Sapiens
agcaaagugaacugggggauggguugaagggg

SEQ ID NO: 149374 - RNA, 32 nt, Homo Sapiens
gaccagaaggaaguaaccuaaaauauuacuag

SEQ ID NO: 149375 - RNA, 32 nt, Homo Sapiens
uagugcccuuuaggugccccagcuguugucau

SEQ ID NO: 149376 - RNA, 32 nt, Homo Sapiens
aaggccgguaccucgggcaagauggcuaucaa

SEQ ID NO: 149377 - RNA, 32 nt, Homo Sapiens
ccaagcggcauccaccaagcaucaaguuggag

SEQ ID NO: 149378 - RNA, 30 nt, Homo Sapiens
ugcgugcaugcccagcaccagcucgcccuu

SEQ ID NO: 149379 - RNA, 32 nt, Homo Sapiens
ccuucggcacuaccgcuggccggcgcccgggu

SEQ ID NO: 149380 - RNA, 32 nt, Homo Sapiens
agucuaucauugauuucuuuuggugguaaaaa

SEQ ID NO: 149381 - RNA, 32 nt, Homo Sapiens
aaguacaucuucucccagauucucuggccuuu

SEQ ID NO: 149382 - RNA, 32 nt, Homo Sapiens
cuucccgcgucccccgcccuucagcggugacu

SEQ ID NO: 149383 - RNA, 32 nt, Homo Sapiens
caggaggcugguggaccugaugaagaaugaca

SEQ ID NO: 149384 - RNA, 29 nt, Homo Sapiens
ucuaguguucaguguccucaucuuuaaaa

SEQ ID NO: 149385 - RNA, 28 nt, Homo Sapiens
gacccacgagugcugccgagguguggag

SEQ ID NO: 149386 - RNA, 32 nt, Homo Sapiens
caccuccaggugguucuucccgccgcagagug

SEQ ID NO: 149387 - RNA, 32 nt, Homo Sapiens
ccugcccuccucagacagccuccucccagugc

SEQ ID NO: 149388 - RNA, 32 nt, Homo Sapiens
gcagccgggcgggugagcgagcagaggcgugg

SEQ ID NO: 149389 - RNA, 32 nt, Homo Sapiens
agagcucaaaacuggauuaucaccuuagcaac

SEQ ID NO: 149390 - RNA, 27 nt, Homo Sapiens
cuguaguccuucuuugccuccuggggc

SEQ ID NO: 149391 - RNA, 32 nt, Homo Sapiens
aagucuggaaauaaaugucuguuuauuuuugu

SEQ ID NO: 149392 - RNA, 32 nt, Homo Sapiens
uauugcugugaaauuacuucugaugguagaga

SEQ ID NO: 149393 - RNA, 32 nt, Homo Sapiens
gcuggagcgggcccuggccaggcuggagagga

SEQ ID NO: 149394 - RNA, 32 nt, Homo Sapiens
gagcggcagacaccuuccaggagcccugaggg

SEQ ID NO: 149395 - RNA, 32 nt, Homo Sapiens
cacugccaagcagcugcauuccucgccgggaa

SEQ ID NO: 149396 - RNA, 32 nt, Homo Sapiens
ugcucgcaaggcgggggaggcggcggcccagc

SEQ ID NO: 149397 - RNA, 32 nt, Homo Sapiens
aaacuguugccucugacacacaaaacaaaacc

SEQ ID NO: 149398 - RNA, 32 nt, Homo Sapiens
cucaaggggggcccuuuuaggcaagaccucug

SEQ ID NO: 149399 - RNA, 32 nt, Homo Sapiens
ggauggcuuggggcugccugggccccccucca

SEQ ID NO: 149400 - RNA, 32 nt, Homo Sapiens
gguuucguggguccgcucuaggcggcugauag

SEQ ID NO: 149401 - RNA, 32 nt, Homo Sapiens
gcaccggggggaggagaugggaggacgaagag

SEQ ID NO: 149402 - RNA, 32 nt, Homo Sapiens
ugggacccagcugauaacacguggugauggga

SEQ ID NO: 149403 - RNA, 32 nt, Homo Sapiens
agccgcggggacgcagcgacagacucggggug

SEQ ID NO: 149404 - RNA, 32 nt, Homo Sapiens
agugguucacugcacugugaaaacagauucca

SEQ ID NO: 149405 - RNA, 32 nt, Homo Sapiens
aaggcugagagagaaaaauaugugcaguaucu

SEQ ID NO: 149406 - RNA, 32 nt, Homo Sapiens
auauguuuguuguuuucuccaccucugaggug

SEQ ID NO: 149407 - RNA, 32 nt, Homo Sapiens
cacugcaccagccccaggggucuaauuacuug

SEQ ID NO: 149408 - RNA, 32 nt, Homo Sapiens
cucgugguaggacuguagaaaagggaacugaa

SEQ ID NO: 149409 - RNA, 32 nt, Homo Sapiens
aaacccuauuaagacaggucuuuauuuuuguu

SEQ ID NO: 149410 - RNA, 32 nt, Homo Sapiens
uuuucuuccuuuuuccucucacucccagacau

SEQ ID NO: 149411 - RNA, 32 nt, Homo Sapiens
uuagugcccacccacccuccccgccccagcaa

SEQ ID NO: 149412 - RNA, 32 nt, Homo Sapiens
cuccagccaggccccaggcacugggaggcccu

SEQ ID NO: 149413 - RNA, 32 nt, Homo Sapiens
uucugagaugcuugaggccugaugacagcucu

SEQ ID NO: 149414 - RNA, 32 nt, Homo Sapiens
uugcggucaccaucauugcccgccgcccaaaa

SEQ ID NO: 149415 - RNA, 32 nt, Homo Sapiens
cuauuuucuucagauuucacuauaucacacag

SEQ ID NO: 149416 - RNA, 32 nt, Homo Sapiens
aaaggcugcgcauaaucauaauaauaaaagaa

SEQ ID NO: 149417 - RNA, 32 nt, Homo Sapiens
ggaggaguaccaggaaaaucacugccggcuag

SEQ ID NO: 149418 - RNA, 32 nt, Homo Sapiens
gaucaaauauaaaauucaucauaaugucuguu

SEQ ID NO: 149419 - RNA, 32 nt, Homo Sapiens
agggcuacagccugugcccagcccucuaauuu

SEQ ID NO: 149420 - RNA, 32 nt, Homo Sapiens
uuuccaagagaaaacucaauuuuuguagugaa

SEQ ID NO: 149421 - RNA, 32 nt, Homo Sapiens
uucucaucccugguuccuuggccacgguggaa

SEQ ID NO: 149422 - RNA, 32 nt, Homo Sapiens
ucuccuuccucuaccacucugucaccaggagu

SEQ ID NO: 149423 - RNA, 32 nt, Homo Sapiens
ggaggccgcccgcugagacccggagcccgcgu

SEQ ID NO: 149424 - RNA, 32 nt, Homo Sapiens
uuucggccaaaggagaacggggacuugugggg

SEQ ID NO: 149425 - RNA, 32 nt, Homo Sapiens
auccucauccucugcccucccaggaagucagu

SEQ ID NO: 149426 - RNA, 32 nt, Homo Sapiens
auaugguaucauuuguuaaauaaaaauaaagu

SEQ ID NO: 149427 - RNA, 32 nt, Homo Sapiens
ggauugacuugcggaaggaaaguaaaaauaaa

SEQ ID NO: 149428 - RNA, 32 nt, Homo Sapiens
uuuuaauuuacuucaaugauuagcucaguugc

SEQ ID NO: 149429 - RNA, 32 nt, Homo Sapiens
uacuuuucagaauugaaggagaaaaugcauua

SEQ ID NO: 149430 - RNA, 32 nt, Homo Sapiens
aaucgggggcagacaggcagggaggguguggc

SEQ ID NO: 149431 - RNA, 32 nt, Homo Sapiens
ccucggccgugcaacggcgagggcgccggcgg

SEQ ID NO: 149432 - RNA, 32 nt, Homo Sapiens
uacagaagacaaaauggaguucuccaaacuug

SEQ ID NO: 149433 - RNA, 32 nt, Homo Sapiens
uuggaguugugcacaaaaauuaggucaugccu

SEQ ID NO: 149434 - RNA, 32 nt, Homo Sapiens
caucuuuccggaagcucauggagcacaagcag

SEQ ID NO: 149435 - RNA, 32 nt, Homo Sapiens
acagugacugaguacgguggugguaguggugg

SEQ ID NO: 149436 - RNA, 32 nt, Homo Sapiens
cauugguauuaagauauaucuuguucauuuau

SEQ ID NO: 149437 - RNA, 32 nt, Homo Sapiens
guccccggaacugggccacaccacgugcccuc

SEQ ID NO: 149438 - RNA, 30 nt, Homo Sapiens
gccaggacauaaucucucuaacucuugcua

SEQ ID NO: 149439 - RNA, 32 nt, Homo Sapiens
accugucccuccugggcugcuggauugucucg

SEQ ID NO: 149440 - RNA, 32 nt, Homo Sapiens
gcgcggacucgcgucccguggagcguuccagg

SEQ ID NO: 149441 - RNA, 32 nt, Homo Sapiens
cuccauccuuugaguucugcauugccauccug

SEQ ID NO: 149442 - RNA, 32 nt, Homo Sapiens
ggccguccccacccugccuccucccugcugcu

SEQ ID NO: 149443 - RNA, 32 nt, Homo Sapiens
aagagaagcugauggggaguaaacccuggagu

SEQ ID NO: 149444 - RNA, 32 nt, Homo Sapiens
cagggggcugcuuauucacucuggggauucgc

SEQ ID NO: 149445 - RNA, 32 nt, Homo Sapiens
accaacauauucagccaggcaguguggggaug

SEQ ID NO: 149446 - RNA, 32 nt, Homo Sapiens
guggagguggugguuguagugugauggauccc

SEQ ID NO: 149447 - RNA, 32 nt, Homo Sapiens
uuuauuacuaccauuugaauauuuucauuugg

SEQ ID NO: 149448 - RNA, 32 nt, Homo Sapiens
ucugcuugcuacuucgcuugcccccagcuccc

SEQ ID NO: 149449 - RNA, 32 nt, Homo Sapiens
gucccucagucccccaggagccuccuucaugg

SEQ ID NO: 149450 - RNA, 32 nt, Homo Sapiens
gcucuuuccugccugcuucucagcucauuugg

SEQ ID NO: 149451 - RNA, 32 nt, Homo Sapiens
augcuuuacaacaugaaguauaacucaaccca

SEQ ID NO: 149452 - RNA, 32 nt, Homo Sapiens
augaaaauaaauugcuaguuuauauuuuagau

SEQ ID NO: 149453 - RNA, 32 nt, Homo Sapiens
agucauacuuuauguauuauuucuuagcagac

SEQ ID NO: 149454 - RNA, 32 nt, Homo Sapiens
auccaggcgggggguuggggggaaacuuggca

SEQ ID NO: 149455 - RNA, 32 nt, Homo Sapiens
cccucucguggucguucuggcccgaggcccuu

SEQ ID NO: 149456 - RNA, 32 nt, Homo Sapiens
ggaugccacugaggcuugagaagugccuugac

SEQ ID NO: 149457 - RNA, 30 nt, Homo Sapiens
aaggcaugaaacaaaaaauguggaguauug

SEQ ID NO: 149458 - RNA, 32 nt, Homo Sapiens
gggauccacuugugugucuuucugggauaauu

SEQ ID NO: 149459 - RNA, 30 nt, Homo Sapiens
uguucugucugugucuucaggagucucaug

SEQ ID NO: 149460 - RNA, 32 nt, Homo Sapiens
uacccaucuucagugucuuacuuguacuguau

SEQ ID NO: 149461 - RNA, 32 nt, Homo Sapiens
uauucuaggacuuuucccauuagagcaccuua

SEQ ID NO: 149462 - RNA, 32 nt, Homo Sapiens
gucuuccugagccccaccugcuucauggguug

SEQ ID NO: 149463 - RNA, 30 nt, Homo Sapiens
cuguggagaagcugagacagucguagagcc

SEQ ID NO: 149464 - RNA, 32 nt, Homo Sapiens
gcaucucccacccacccagcuagggcagaggg

SEQ ID NO: 149465 - RNA, 32 nt, Homo Sapiens
ccugccccgcggcaagauggcggccugaacgc

SEQ ID NO: 149466 - RNA, 32 nt, Homo Sapiens
gaggaggaggccgggguggaggggugggcucu

SEQ ID NO: 149467 - RNA, 32 nt, Homo Sapiens
ggcgggcaguggacgugagggcggcgagcggc

SEQ ID NO: 149468 - RNA, 32 nt, Homo Sapiens
gcugacaacuucuauuuuaaaaaacaagacuu

SEQ ID NO: 149469 - RNA, 32 nt, Homo Sapiens
aguuuguuuuuuucuuuuucugucuuucuuuc

SEQ ID NO: 149470 - RNA, 32 nt, Homo Sapiens
caaggauauuggaaccacaggacuauuuggau

SEQ ID NO: 149471 - RNA, 32 nt, Homo Sapiens
agcgcccgcucgccauggggagccccgcacau

SEQ ID NO: 149472 - RNA, 32 nt, Homo Sapiens
gcacgccgguccugggagcaggcggccucccg

SEQ ID NO: 149473 - RNA, 32 nt, Homo Sapiens
accggccaccccaccgcccacccggcucccgg

SEQ ID NO: 149474 - RNA, 32 nt, Homo Sapiens
gggagauuugucgccugccgcucgcucugggg

SEQ ID NO: 149475 - RNA, 32 nt, Homo Sapiens
cugauuuguaaugauuggcacucuucagccag

SEQ ID NO: 149476 - RNA, 32 nt, Homo Sapiens
agugcacauaaauuuacaauuguuauguccuc

SEQ ID NO: 149477 - RNA, 32 nt, Homo Sapiens
agccuuaaacucccaggcucaagcaauccuac

SEQ ID NO: 149478 - RNA, 32 nt, Homo Sapiens
caugcaauucaaauaaaaacgaaacuguguca

SEQ ID NO: 149479 - RNA, 32 nt, Homo Sapiens
aaccuaggugucacaauaaacagucuacacag

SEQ ID NO: 149480 - RNA, 32 nt, Homo Sapiens
gguauuucaguuccuaaguuacauaaaaagug

SEQ ID NO: 149481 - RNA, 32 nt, Homo Sapiens
ucucagggcgaccugggccucggacauucggg

SEQ ID NO: 149482 - RNA, 32 nt, Homo Sapiens
ccuccugaacucucucaucugcaguggggcau

SEQ ID NO: 149483 - RNA, 32 nt, Homo Sapiens
gagagaugcugcccggcccgccucggcuuuga

SEQ ID NO: 149484 - RNA, 32 nt, Homo Sapiens
ugauaguggccaaggagaaucuagggcuguau

SEQ ID NO: 149485 - RNA, 32 nt, Homo Sapiens
aauaaggaaaaugugguuuaucacuuaagaga

SEQ ID NO: 149486 - RNA, 32 nt, Homo Sapiens
augacucuuuucucuuuuuuuuuuuuuuuuuu

SEQ ID NO: 149487 - RNA, 32 nt, Homo Sapiens
uccugaggacaaagggccuggccacacuaggg

SEQ ID NO: 149488 - RNA, 32 nt, Homo Sapiens
cgcuucucagccgccuucuccaggcgcagcug

SEQ ID NO: 149489 - RNA, 30 nt, Homo Sapiens
cuggagucuccuguggccuaacuuucaaug

SEQ ID NO: 149490 - RNA, 32 nt, Homo Sapiens
cugagauuccauuuuugccaugugucaucgag

SEQ ID NO: 149491 - RNA, 32 nt, Homo Sapiens
guccuccccuuaaaucagugcaguggccaggg

SEQ ID NO: 149492 - RNA, 32 nt, Homo Sapiens
caagggauaugucaagguaaagcagaguuuga

SEQ ID NO: 149493 - RNA, 32 nt, Homo Sapiens
uauauuauaugcaauuaauaguaguuaagaau

SEQ ID NO: 149494 - RNA, 32 nt, Homo Sapiens
ugcuuucccccucccuucaauaugcuggggcg

SEQ ID NO: 149495 - RNA, 32 nt, Homo Sapiens
agagcaggcccuuucugacaugcuuuagcaga

SEQ ID NO: 149496 - RNA, 32 nt, Homo Sapiens
uagcgggugaagggcuggagaccuuauugcag

SEQ ID NO: 149497 - RNA, 32 nt, Homo Sapiens
ucuaucuguauauauuauuugauauucagaga

SEQ ID NO: 149498 - RNA, 32 nt, Homo Sapiens
gagauguuucccuuuccuuucuuucaccuugu

SEQ ID NO: 149499 - RNA, 32 nt, Homo Sapiens
uuucaaagaaaauuauucucaucucaaugcca

SEQ ID NO: 149500 - RNA, 32 nt, Homo Sapiens
auuacucuuugaugaaugcauaaguucuguac

SEQ ID NO: 149501 - RNA, 32 nt, Homo Sapiens
gcuuggcucuuguacgggauggaugaugugag

SEQ ID NO: 149502 - RNA, 32 nt, Homo Sapiens
uuguuccaccuccugaccugcuccaucugagc

SEQ ID NO: 149503 - RNA, 32 nt, Homo Sapiens
uacucugugaaucuaauuauuauucuuuaagu

SEQ ID NO: 149504 - RNA, 32 nt, Homo Sapiens
guaaaagaugaugaaagccacuaucaauccuc

SEQ ID NO: 149505 - RNA, 32 nt, Homo Sapiens
cccugaccucuuucucuccuccuugauuguau

SEQ ID NO: 149506 - RNA, 32 nt, Homo Sapiens
ccaaagaguauguaaacccuagcugugccagc

SEQ ID NO: 149507 - RNA, 28 nt, Homo Sapiens
ccagugaggcggccgccgcagcccaggc

SEQ ID NO: 149508 - RNA, 32 nt, Homo Sapiens
caaaaaggaucucaguuuggggccuguccuaa

SEQ ID NO: 149509 - RNA, 32 nt, Homo Sapiens
ccacgggauuugaugccuggaagauucuccuu

SEQ ID NO: 149510 - RNA, 32 nt, Homo Sapiens
uaauuuugacuucaugggaauuuugguuuuau

SEQ ID NO: 149511 - RNA, 32 nt, Homo Sapiens
cuuuuuaguuuuuauagcuuagcauuagugac

SEQ ID NO: 149512 - RNA, 32 nt, Homo Sapiens
ucuguauuucccuuguacagaacuuuuacauu

SEQ ID NO: 149513 - RNA, 32 nt, Homo Sapiens
cacugaggagaaugguagagaggagaggagag

SEQ ID NO: 149514 - RNA, 32 nt, Homo Sapiens
gagcagaggggcucacaucuccccucugauuc

SEQ ID NO: 149515 - RNA, 32 nt, Homo Sapiens
caaagguuucagacauuuuucuuaaagcacua

SEQ ID NO: 149516 - RNA, 32 nt, Homo Sapiens
caccaugguguaugagaggacacuggagccca

SEQ ID NO: 149517 - RNA, 31 nt, Homo Sapiens
gagaccgaaggcacagcuccccgcgccgcgc

SEQ ID NO: 149518 - RNA, 32 nt, Homo Sapiens
gccuuaccugcccugcccugauugugagaccc

SEQ ID NO: 149519 - RNA, 32 nt, Homo Sapiens
uggguucuugcugcugcccacccucugcuccc

SEQ ID NO: 149520 - RNA, 32 nt, Homo Sapiens
aaaaaagauucuguaaugaauuuuaugugugg

SEQ ID NO: 149521 - RNA, 32 nt, Homo Sapiens
auguaggagauuuuuuggucagaccuuuuuau

SEQ ID NO: 149522 - RNA, 32 nt, Homo Sapiens
acuagcgcggggccguggaggcgugcaccgug

SEQ ID NO: 149523 - RNA, 32 nt, Homo Sapiens
ggccggcagaggcuggcggggagcagccgggg

SEQ ID NO: 149524 - RNA, 32 nt, Homo Sapiens
cagaaagccugaugcaacauaaucuggaaaac

SEQ ID NO: 149525 - RNA, 32 nt, Homo Sapiens
aagugcuuuuaaaaauaacuucuuugcugaag

SEQ ID NO: 149526 - RNA, 32 nt, Homo Sapiens
cuaaaacugcagcauuuuaccuuuaaaugcag

SEQ ID NO: 149527 - RNA, 32 nt, Homo Sapiens
ccccggaaggcacgccucgcacccagcuguag

SEQ ID NO: 149528 - RNA, 31 nt, Homo Sapiens
gcugacgcuaacuggagagccuggccccgcg

SEQ ID NO: 149529 - RNA, 32 nt, Homo Sapiens
agaucaaggucucaccauuuguccucaauucg

SEQ ID NO: 149530 - RNA, 32 nt, Homo Sapiens
cccugggguauuuuagaguauuccucaaaacu

SEQ ID NO: 149531 - RNA, 30 nt, Homo Sapiens
uucuggccuuggccugcagaagcuuucaga

SEQ ID NO: 149532 - RNA, 32 nt, Homo Sapiens
caggccugagcagcggggagccgcccgagaag

SEQ ID NO: 149533 - RNA, 32 nt, Homo Sapiens
agcacaggggguaauggccuagagcucuaggg

SEQ ID NO: 149534 - RNA, 32 nt, Homo Sapiens
ccugccaggagagcggcuggcaguccugccug

SEQ ID NO: 149535 - RNA, 31 nt, Homo Sapiens
ccagagcugccggugccuuuaagaagacucg

SEQ ID NO: 149536 - RNA, 32 nt, Homo Sapiens
gagcgcaggcugccuccgggaccccacggcug

SEQ ID NO: 149537 - RNA, 32 nt, Homo Sapiens
agagauuuaagugucuaagucacaaaucugaa

SEQ ID NO: 149538 - RNA, 32 nt, Homo Sapiens
ucuuggguuucagugauuuuucugccucggcc

SEQ ID NO: 149539 - RNA, 32 nt, Homo Sapiens
agagagggcaagaacugaaaccagcagaaaau

SEQ ID NO: 149540 - RNA, 32 nt, Homo Sapiens
ggagcagcagccaguuauuccaaacuaaacaa

SEQ ID NO: 149541 - RNA, 32 nt, Homo Sapiens
ccauguuuucaagaguaggggaaugauguuua

SEQ ID NO: 149542 - RNA, 32 nt, Homo Sapiens
uacaguccccuagaagcagaaggacaaggagc

SEQ ID NO: 149543 - RNA, 32 nt, Homo Sapiens
cuguuuggacaugugcucucuugcuuccucuc

SEQ ID NO: 149544 - RNA, 32 nt, Homo Sapiens
acucaaggcucagcugguuuuguuccagagac

SEQ ID NO: 149545 - RNA, 32 nt, Homo Sapiens
ggggccgauccggcggagagcagagcccgagg

SEQ ID NO: 149546 - RNA, 32 nt, Homo Sapiens
cccagacucugcacggauguccuaggcccccu

SEQ ID NO: 149547 - RNA, 32 nt, Homo Sapiens
agaaagccacugacggcuuucuucaagcaaga

SEQ ID NO: 149548 - RNA, 32 nt, Homo Sapiens
ugacgguuaagcaagaaaauauucuuaugugc

SEQ ID NO: 149549 - RNA, 32 nt, Homo Sapiens
acuggaguuagcuaccggacugucccgcgagc

SEQ ID NO: 149550 - RNA, 32 nt, Homo Sapiens
aaaaugucuugggauaucuggaucaguaauaa

SEQ ID NO: 149551 - RNA, 32 nt, Homo Sapiens
uuuuuuuuguauagaaacagauccauuucuug

SEQ ID NO: 149552 - RNA, 32 nt, Homo Sapiens
ugagccacacuggcaguguggagccugcagga

SEQ ID NO: 149553 - RNA, 32 nt, Homo Sapiens
uucuggucucuuuauuuuuuuauuuuuguauu

SEQ ID NO: 149554 - RNA, 32 nt, Homo Sapiens
uccugcaagcgucgggagguguguuuucagau

SEQ ID NO: 149555 - RNA, 32 nt, Homo Sapiens
gugucacccagcuaagaaaauccgcgggccgg

SEQ ID NO: 149556 - RNA, 30 nt, Homo Sapiens
ggaggcgagagccgcgcgggcccgcggagu

SEQ ID NO: 149557 - RNA, 32 nt, Homo Sapiens
agaggagugggagaggggacacaggcaugggc

SEQ ID NO: 149558 - RNA, 32 nt, Homo Sapiens
ugucucccccuugaggucacagauguugaagu

SEQ ID NO: 149559 - RNA, 32 nt, Homo Sapiens
uccaaaagcugauggaaaauuauuuuaaacac

SEQ ID NO: 149560 - RNA, 32 nt, Homo Sapiens
aagccagaccuggcagaaagggugcuuuaugu

SEQ ID NO: 149561 - RNA, 32 nt, Homo Sapiens
ccaguucuccaaagcgauguauuuuuguacac

SEQ ID NO: 149562 - RNA, 32 nt, Homo Sapiens
agauaucuccggcgccgcccgccauuuugacu

SEQ ID NO: 149563 - RNA, 32 nt, Homo Sapiens
ccggaagcggcgccgcacggccucggccuggc

SEQ ID NO: 149564 - RNA, 32 nt, Homo Sapiens
uuuauuugguucguuucaaauuacaauugcug

SEQ ID NO: 149565 - RNA, 32 nt, Homo Sapiens
cugugacaagucauacuauauucuuuauagaa

SEQ ID NO: 149566 - RNA, 32 nt, Homo Sapiens
aguaugaggaaaucucuuucuguugcuggcuu

SEQ ID NO: 149567 - RNA, 32 nt, Homo Sapiens
uaggaccucagcccuggccgcggccgccgcgc

SEQ ID NO: 149568 - RNA, 32 nt, Homo Sapiens
cugccggugucauggcggagcugagugaggag

SEQ ID NO: 149569 - RNA, 32 nt, Homo Sapiens
acuguugaccaauaaauuguaauuuuggaacu

SEQ ID NO: 149570 - RNA, 32 nt, Homo Sapiens
ggguuaucugcaagugaggugugucacaauga

SEQ ID NO: 149571 - RNA, 32 nt, Homo Sapiens
caagcugucagcgccccucggaugcccagugu

SEQ ID NO: 149572 - RNA, 32 nt, Homo Sapiens
uaccauuaacaaauguaaaacaugacauuccc

SEQ ID NO: 149573 - RNA, 32 nt, Homo Sapiens
acucagaggcuccccugugcuccugccuaugc

SEQ ID NO: 149574 - RNA, 32 nt, Homo Sapiens
caggggaaacaaaacacacaauaaaccccaaa

SEQ ID NO: 149575 - RNA, 32 nt, Homo Sapiens
uugcccaggcuggucugaaacuuuugggcuca

SEQ ID NO: 149576 - RNA, 32 nt, Homo Sapiens
ccagagcagcgggaugagcuggcggccagaga

SEQ ID NO: 149577 - RNA, 32 nt, Homo Sapiens
accugcgcgggccugaauggccuucaggagca

SEQ ID NO: 149578 - RNA, 32 nt, Homo Sapiens
aagaauuuucaaggcgggugggauaagauuau

SEQ ID NO: 149579 - RNA, 32 nt, Homo Sapiens
acacacucgauuaaaaauguuaagcuaucuga

SEQ ID NO: 149580 - RNA, 32 nt, Homo Sapiens
agggccuggaccucuaaaauuuugcaaaaaca

SEQ ID NO: 149581 - RNA, 32 nt, Homo Sapiens
agucucugaagaagauucuguggcuacaggcu

SEQ ID NO: 149582 - RNA, 32 nt, Homo Sapiens
uuuuccacucugggcugggugggccagguguu

SEQ ID NO: 149583 - RNA, 32 nt, Homo Sapiens
uacaggaggucuugaagugugcugugaaccga

SEQ ID NO: 149584 - RNA, 32 nt, Homo Sapiens
aucugagcagugauaccaaccacaucugaagu

SEQ ID NO: 149585 - RNA, 32 nt, Homo Sapiens
aaaugaauuuuuggaaacauuaaugagguuua

SEQ ID NO: 149586 - RNA, 32 nt, Homo Sapiens
agcagagccgcugggcgccggagccgaggcga

SEQ ID NO: 149587 - RNA, 32 nt, Homo Sapiens
aauggaaaaauauuuuuugaaccuuaaucuag

SEQ ID NO: 149588 - RNA, 32 nt, Homo Sapiens
gcuguugagaagggugcagagccccuggcaca

SEQ ID NO: 149589 - RNA, 32 nt, Homo Sapiens
gagagcuguggcaaccgggaacuccucugugg

SEQ ID NO: 149590 - RNA, 32 nt, Homo Sapiens
ccucuucucaaggaaaugggugucaucaauuu

SEQ ID NO: 149591 - RNA, 32 nt, Homo Sapiens
uggaaaguucuuucuguagaucuuuaaagggu

SEQ ID NO: 149592 - RNA, 32 nt, Homo Sapiens
uggggauuucuugguuugugaaaacaggagag

SEQ ID NO: 149593 - RNA, 32 nt, Homo Sapiens
gaaauguuacuugguguuuuuugguuuuguga

SEQ ID NO: 149594 - RNA, 32 nt, Homo Sapiens
cagguguagcagcuguggauccaaugucuucc

SEQ ID NO: 149595 - RNA, 32 nt, Homo Sapiens
ggggugcagacacccacugccugucucacuuc

SEQ ID NO: 149596 - RNA, 32 nt, Homo Sapiens
uuuacaaugccuuuuuggauagagugguuuuu

SEQ ID NO: 149597 - RNA, 32 nt, Homo Sapiens
auagaucucaauuacaaauauuuugaauugau

SEQ ID NO: 149598 - RNA, 32 nt, Homo Sapiens
aagucuuuguaugcgcaaugcaucaucuucac

SEQ ID NO: 149599 - RNA, 32 nt, Homo Sapiens
ccacuugcaacuauucuguuucucuccugggc

SEQ ID NO: 149600 - RNA, 32 nt, Homo Sapiens
ccagauggacaccagcuucuuugugacaaagg

SEQ ID NO: 149601 - RNA, 32 nt, Homo Sapiens
gugcugggcuauuugcugugguacuuuaggcu

SEQ ID NO: 149602 - RNA, 32 nt, Homo Sapiens
ucuccccauccaauuaccuauuucaucuuuga

SEQ ID NO: 149603 - RNA, 32 nt, Homo Sapiens
uuggaaagcuaggaaggcugcauuguguggug

SEQ ID NO: 149604 - RNA, 32 nt, Homo Sapiens
uuguguucauuauauugaaguuuguuuauuga

SEQ ID NO: 149605 - RNA, 32 nt, Homo Sapiens
uaaaaggcuaugaaauaaaaauaaacuauacg

SEQ ID NO: 149606 - RNA, 32 nt, Homo Sapiens
aagacagagugaugcaccuucccgcugcugug

SEQ ID NO: 149607 - RNA, 32 nt, Homo Sapiens
acccgcgcgggccgugcgcucugcacuccgga

SEQ ID NO: 149608 - RNA, 32 nt, Homo Sapiens
gguguaugcacugcucacggaccccauguugg

SEQ ID NO: 149609 - RNA, 32 nt, Homo Sapiens
ugggaucacaugcuuuugucuccacagcaacc

SEQ ID NO: 149610 - RNA, 32 nt, Homo Sapiens
cucuagaaauuugaaaguagaucgaacagaau

SEQ ID NO: 149611 - RNA, 32 nt, Homo Sapiens
gaauggcugaugucucuuucuuggaauaugug

SEQ ID NO: 149612 - RNA, 32 nt, Homo Sapiens
ccacaacuaaugagggaaaucuguaaagccag

SEQ ID NO: 149613 - RNA, 32 nt, Homo Sapiens
aucuguguuuuacuugagacauguaaauauga

SEQ ID NO: 149614 - RNA, 32 nt, Homo Sapiens
ugaguuauguaagauuuaaauaaaaguuugcu

SEQ ID NO: 149615 - RNA, 32 nt, Homo Sapiens
cuuugaaaagguccugcagagaaaucaguaca

SEQ ID NO: 149616 - RNA, 32 nt, Homo Sapiens
uagugaggaaucaacagcaucccacagcagcc

SEQ ID NO: 149617 - RNA, 32 nt, Homo Sapiens
aacaaugucuacaaaaucaugguacuuuuuua

SEQ ID NO: 149618 - RNA, 32 nt, Homo Sapiens
agguucuggaggagcccaggauggauuauuga

SEQ ID NO: 149619 - RNA, 32 nt, Homo Sapiens
ggcucugggaccugagaccacccaggcgcaga

SEQ ID NO: 149620 - RNA, 32 nt, Homo Sapiens
gcagaagugacuccugcccacccccagcccuu

SEQ ID NO: 149621 - RNA, 32 nt, Homo Sapiens
uaacugaacacuuucagaauaauccaggucau

SEQ ID NO: 149622 - RNA, 32 nt, Homo Sapiens
ggaagaugcucuggugguagagguggacuuag

SEQ ID NO: 149623 - RNA, 32 nt, Homo Sapiens
ggguaguggcucugcgggacgucguggccauu

SEQ ID NO: 149624 - RNA, 32 nt, Homo Sapiens
agacuccagucauccucccccauccaugguuu

SEQ ID NO: 149625 - RNA, 32 nt, Homo Sapiens
guggaggcuggcagaagcugagacgugacugu

SEQ ID NO: 149626 - RNA, 32 nt, Homo Sapiens
cuuccucccucauggaagaugcaaguaaaagg

SEQ ID NO: 149627 - RNA, 32 nt, Homo Sapiens
agguggauaugucauaaaugucugcauuacuu

SEQ ID NO: 149628 - RNA, 32 nt, Homo Sapiens
uguggcaguggagaccugggggguggccagcg

SEQ ID NO: 149629 - RNA, 32 nt, Homo Sapiens
uuuaaccauuuucugugucccuacuuuugaca

SEQ ID NO: 149630 - RNA, 32 nt, Homo Sapiens
uugcagcugcccagccccuccucccugcccuc

SEQ ID NO: 149631 - RNA, 32 nt, Homo Sapiens
cacgagcucgcgucucggcuggggcugcggcc

SEQ ID NO: 149632 - RNA, 32 nt, Homo Sapiens
guuaauuuucccuuuuuguuaauuucaguccc

SEQ ID NO: 149633 - RNA, 32 nt, Homo Sapiens
auaagcaacuguaaaaaguuuuauuuguuuac

SEQ ID NO: 149634 - RNA, 32 nt, Homo Sapiens
auagacaauauuuguuugaaacuauguaauuu

SEQ ID NO: 149635 - RNA, 31 nt, Homo Sapiens
gacccaggcccucggccgccccgcgucaugg

SEQ ID NO: 149636 - RNA, 32 nt, Homo Sapiens
uuuuguuuacacauugggaaaaaaauuaguuu

SEQ ID NO: 149637 - RNA, 32 nt, Homo Sapiens
aaaauaacacugaacuuggaaacuauauuucu

SEQ ID NO: 149638 - RNA, 32 nt, Homo Sapiens
ucccggcggggaggaccggagacaaguggcag

SEQ ID NO: 149639 - RNA, 32 nt, Homo Sapiens
cuucacagugauuuuguguucagccgugaguc

SEQ ID NO: 149640 - RNA, 32 nt, Homo Sapiens
ugugccagccccgaugaggacgcugcugacca

SEQ ID NO: 149641 - RNA, 32 nt, Homo Sapiens
ugggagacgaguuagguaacugucccgggcug

SEQ ID NO: 149642 - RNA, 32 nt, Homo Sapiens
aggaaggaccgggaacccuguguggcuuuggg

SEQ ID NO: 149643 - RNA, 32 nt, Homo Sapiens
cuuuuccuagauacaccaagaagcuggaauuu

SEQ ID NO: 149644 - RNA, 32 nt, Homo Sapiens
caaguuuccugaggccuccccagccaugcaga

SEQ ID NO: 149645 - RNA, 32 nt, Homo Sapiens
gcgggagccgcgggucgagguuauggauccag

SEQ ID NO: 149646 - RNA, 32 nt, Homo Sapiens
aauucuuuaaguguuuucuuuuucagauuuau

SEQ ID NO: 149647 - RNA, 32 nt, Homo Sapiens
auaucaccaaagaaguccugcuauguuaaaaa

SEQ ID NO: 149648 - RNA, 32 nt, Homo Sapiens
accuuucagaaguuauguggacacugccucgu

SEQ ID NO: 149649 - RNA, 32 nt, Homo Sapiens
acucugcuuuuguaauuucaauuuucuuaucu

SEQ ID NO: 149650 - RNA, 32 nt, Homo Sapiens
gcagcuauuaccauucgcuuagucaaaacauu

SEQ ID NO: 149651 - RNA, 32 nt, Homo Sapiens
ugauuagaucgggucucggaagggaaguagcc

SEQ ID NO: 149652 - RNA, 32 nt, Homo Sapiens
cagcaggcagguguucugaggcuggucccucc

SEQ ID NO: 149653 - RNA, 32 nt, Homo Sapiens
cgcgcgcuggccaucaggcgcugcugacgcug

SEQ ID NO: 149654 - RNA, 32 nt, Homo Sapiens
uggaguggugcgccccggccccgcccccugac

SEQ ID NO: 149655 - RNA, 32 nt, Homo Sapiens
guguagacacuaaaaguauuacacaaaaucug

SEQ ID NO: 149656 - RNA, 32 nt, Homo Sapiens
cagccuccugaauagcugggaauacaggugca

SEQ ID NO: 149657 - RNA, 32 nt, Homo Sapiens
caccugcccucccgcgaccgccucucuccucc

SEQ ID NO: 149658 - RNA, 32 nt, Homo Sapiens
ggaaugaaauuugauaaagcaaauauaaauga

SEQ ID NO: 149659 - RNA, 32 nt, Homo Sapiens
gcgcggcugcaccggggccugccucgcggacc

SEQ ID NO: 149660 - RNA, 32 nt, Homo Sapiens
gggcugggcuggacaccagggcccgcccuccc

SEQ ID NO: 149661 - RNA, 32 nt, Homo Sapiens
auugacccuguaagauaggagcacucagcucu

SEQ ID NO: 149662 - RNA, 32 nt, Homo Sapiens
aauugcuuuuucauguucaucuuaauaguauu

SEQ ID NO: 149663 - RNA, 32 nt, Homo Sapiens
acuaauucauaugcuuuuccugcauacauuau

SEQ ID NO: 149664 - RNA, 29 nt, Homo Sapiens
uuccacauauguaagucucugggcggcgc

SEQ ID NO: 149665 - RNA, 32 nt, Homo Sapiens
guugaagucaaaggaccuuucugacauaauca

SEQ ID NO: 149666 - RNA, 32 nt, Homo Sapiens
caacacguaaaaugggagaggaguggggugua

SEQ ID NO: 149667 - RNA, 32 nt, Homo Sapiens
acuguaaugcuguuuuggaaucaucccaaggc

SEQ ID NO: 149668 - RNA, 32 nt, Homo Sapiens
cgggucccugucaugcuacuuucuccauccca

SEQ ID NO: 149669 - RNA, 32 nt, Homo Sapiens
auguauacagaaaaugaaacaugcaacaaaag

SEQ ID NO: 149670 - RNA, 32 nt, Homo Sapiens
caggcuaguauuuuaaaaguagaaaucaaaau

SEQ ID NO: 149671 - RNA, 32 nt, Homo Sapiens
agagaaugggccgacaccaucuccuggccgca

SEQ ID NO: 149672 - RNA, 32 nt, Homo Sapiens
uucuaguugaagugagcagagaaggcuauaaa

SEQ ID NO: 149673 - RNA, 32 nt, Homo Sapiens
ucuacuuaagauuuucugaaauacggaccacg

SEQ ID NO: 149674 - RNA, 32 nt, Homo Sapiens
cuacaaaugucuucaugaccuacuucaaaccc

SEQ ID NO: 149675 - RNA, 32 nt, Homo Sapiens
uuguacauaguuuaaccaaguguuauuugagc

SEQ ID NO: 149676 - RNA, 30 nt, Homo Sapiens
gguacgcagacgcgcgcggcgagacccgcu

SEQ ID NO: 149677 - RNA, 32 nt, Homo Sapiens
aaagaggccugagcagagugugcgaggggaga

SEQ ID NO: 149678 - RNA, 32 nt, Homo Sapiens
augcaaguucccuccaucauugccaccuuggu

SEQ ID NO: 149679 - RNA, 32 nt, Homo Sapiens
auggcggcggggggcggcagaggcggcggugg

SEQ ID NO: 149680 - RNA, 32 nt, Homo Sapiens
cggacuucaacuccagccuuucccuauugcau

SEQ ID NO: 149681 - RNA, 27 nt, Homo Sapiens
ucaauguuauucuucaguccuauuuaa

SEQ ID NO: 149682 - RNA, 32 nt, Homo Sapiens
cgggaaggucgcggccgccgcccugucagccg

SEQ ID NO: 149683 - RNA, 32 nt, Homo Sapiens
gauagccguucugacacuucucuucuagacag

SEQ ID NO: 149684 - RNA, 32 nt, Homo Sapiens
cccaguucuguccacaccccuucccuuuccug

SEQ ID NO: 149685 - RNA, 32 nt, Homo Sapiens
auuaucuuauuuccaaaauguuccaauuaaaa

SEQ ID NO: 149686 - RNA, 32 nt, Homo Sapiens
cccaggagcagccccaggagcacaaccugaga

SEQ ID NO: 149687 - RNA, 32 nt, Homo Sapiens
cggcugagugggaaccgcgcggugucugagga

SEQ ID NO: 149688 - RNA, 32 nt, Homo Sapiens
uaaccauacuuauuuuauuuuaaguugccauu

SEQ ID NO: 149689 - RNA, 32 nt, Homo Sapiens
aagcccuucuaaaaaguugaaauugcaagaau

SEQ ID NO: 149690 - RNA, 32 nt, Homo Sapiens
uugggcacuacccucccuguggagcuguucgg

SEQ ID NO: 149691 - RNA, 32 nt, Homo Sapiens
cugggcugccgggaaccucaucugccuggggc

SEQ ID NO: 149692 - RNA, 32 nt, Homo Sapiens
acaacuuugacuggucucaugggaacacagau

SEQ ID NO: 149693 - RNA, 32 nt, Homo Sapiens
gguuacuggaguucuuauucaauauaaggaaa

SEQ ID NO: 149694 - RNA, 32 nt, Homo Sapiens
ucuucuuggugcccugcccccaauaaaggaac

SEQ ID NO: 149695 - RNA, 32 nt, Homo Sapiens
aagaucacaggugcacucuacacauaacacug

SEQ ID NO: 149696 - RNA, 32 nt, Homo Sapiens
cugggaucuuuuucuuuuuuuuuaagucucac

SEQ ID NO: 149697 - RNA, 32 nt, Homo Sapiens
ugugcuugaucuuuauugucuaagaugcagua

SEQ ID NO: 149698 - RNA, 32 nt, Homo Sapiens
cauggugcggcggccgcgcgcgcggacauggg

SEQ ID NO: 149699 - RNA, 32 nt, Homo Sapiens
gcacccggucccggagcagccacgcgcggccc

SEQ ID NO: 149700 - RNA, 32 nt, Homo Sapiens
agggccacaccgucccucuccucgcugucccc

SEQ ID NO: 149701 - RNA, 32 nt, Homo Sapiens
gaggagguccccccggccgaggcuaacaagga

SEQ ID NO: 149702 - RNA, 32 nt, Homo Sapiens
cucuacccccauugcacccugcagucucagau

SEQ ID NO: 149703 - RNA, 32 nt, Homo Sapiens
gugcuggcccucugccuucucuaaagugcugu

SEQ ID NO: 149704 - RNA, 27 nt, Homo Sapiens
agauguugggaaaaaaggaaucagggc

SEQ ID NO: 149705 - RNA, 32 nt, Homo Sapiens
aaugggacagagaauaaaauuuuuguuaaaau

SEQ ID NO: 149706 - RNA, 32 nt, Homo Sapiens
aauugcuuauuuuugguguuggauagaggaua

SEQ ID NO: 149707 - RNA, 31 nt, Homo Sapiens
aagauggccuugacuuuuuaaauaauuugga

SEQ ID NO: 149708 - RNA, 32 nt, Homo Sapiens
ccuccaccuucucggcuucucuuuucuccaug

SEQ ID NO: 149709 - RNA, 32 nt, Homo Sapiens
uaauuuucaucuuccuucuuuggaucuauuug

SEQ ID NO: 149710 - RNA, 32 nt, Homo Sapiens
ccacccgccuuggccuccugggugcugggauu

SEQ ID NO: 149711 - RNA, 32 nt, Homo Sapiens
acauucuuccaagauaaauauguguguuacac

SEQ ID NO: 149712 - RNA, 32 nt, Homo Sapiens
ggugaugucugguggcucaacgggugggaggc

SEQ ID NO: 149713 - RNA, 32 nt, Homo Sapiens
auggagguaaguggccagcaaaaaugaaagug

SEQ ID NO: 149714 - RNA, 32 nt, Homo Sapiens
gugugcagguaucuugcucucuaggccugugu

SEQ ID NO: 149715 - RNA, 32 nt, Homo Sapiens
augagcgacuuaaaaugauugaaaauaaugcu

SEQ ID NO: 149716 - RNA, 32 nt, Homo Sapiens
gugcugcagcgggcagagugggaguuggcuca

SEQ ID NO: 149717 - RNA, 32 nt, Homo Sapiens
ccuauggaggggcugugggccaggcugcucag

SEQ ID NO: 149718 - RNA, 32 nt, Homo Sapiens
ggugaaggauccuaaagugcugugggagugau

SEQ ID NO: 149719 - RNA, 32 nt, Homo Sapiens
caugaggccaagggguaggccugagcgccaga

SEQ ID NO: 149720 - RNA, 32 nt, Homo Sapiens
ucucagcuauauuuagcaacacuccauguagc

SEQ ID NO: 149721 - RNA, 32 nt, Homo Sapiens
aacaugaaagugacaauuaugaacuaauguuc

SEQ ID NO: 149722 - RNA, 32 nt, Homo Sapiens
uauauuuuuaucagugguucauuguuaaagaa

SEQ ID NO: 149723 - RNA, 32 nt, Homo Sapiens
guauuuaaaaucaacuguaaauacauggauau

SEQ ID NO: 149724 - RNA, 32 nt, Homo Sapiens
ugccucccaagcccgagucuccagcccaaacc

SEQ ID NO: 149725 - RNA, 32 nt, Homo Sapiens
aaccaccaccgaggccccgaaaagcacugguc

SEQ ID NO: 149726 - RNA, 32 nt, Homo Sapiens
aguccucaaaaauuagauguaauugagcuuug

SEQ ID NO: 149727 - RNA, 32 nt, Homo Sapiens
agaccaucauccugguaaaucccagugcagac

SEQ ID NO: 149728 - RNA, 32 nt, Homo Sapiens
uaaagaaaaaauacgggauauggagacuggau

SEQ ID NO: 149729 - RNA, 32 nt, Homo Sapiens
caagagcuuccuucuuuugucucacgaguuuu

SEQ ID NO: 149730 - RNA, 32 nt, Homo Sapiens
ccaguguaauguagcuuucucucuuaccuucu

SEQ ID NO: 149731 - RNA, 32 nt, Homo Sapiens
uugccgcauccacgaaacuuugcccauagcag

SEQ ID NO: 149732 - RNA, 32 nt, Homo Sapiens
auuuuagcacaaaacagccuugugucuuagau

SEQ ID NO: 149733 - RNA, 32 nt, Homo Sapiens
uuucccuguaggucuccuggguguugagagac

SEQ ID NO: 149734 - RNA, 32 nt, Homo Sapiens
uugaaaacaaaauaaaauguggaacauaaaaa

SEQ ID NO: 149735 - RNA, 31 nt, Homo Sapiens
cuggaccgggacccauggcaagagcaccugg

SEQ ID NO: 149736 - RNA, 32 nt, Homo Sapiens
uuuuauguaaaaauguaauugcuuuucaugag

SEQ ID NO: 149737 - RNA, 32 nt, Homo Sapiens
cucccacgccaggcuguccccgcggccgcccg

SEQ ID NO: 149738 - RNA, 32 nt, Homo Sapiens
uggagaaguauuuauuuucaaauaucaaauug

SEQ ID NO: 149739 - RNA, 32 nt, Homo Sapiens
acuccacgucccgcucagggcaaagggugugg

SEQ ID NO: 149740 - RNA, 32 nt, Homo Sapiens
ggccaccgggucugaaaggagcaagacgauga

SEQ ID NO: 149741 - RNA, 32 nt, Homo Sapiens
ggcggcgggaggggaggcuccucuccaugguc

SEQ ID NO: 149742 - RNA, 30 nt, Homo Sapiens
cgcugccuucuucugggggaaaccagcuuc

SEQ ID NO: 149743 - RNA, 32 nt, Homo Sapiens
aggccucccuccccugugacucccuccacaca

SEQ ID NO: 149744 - RNA, 32 nt, Homo Sapiens
ccaggagugucuaaagccgagcuuugagugua

SEQ ID NO: 149745 - RNA, 32 nt, Homo Sapiens
acccccaggaccaggaugugucucagccugga

SEQ ID NO: 149746 - RNA, 32 nt, Homo Sapiens
uuuugcagacuuucuuccugaccauuugccac

SEQ ID NO: 149747 - RNA, 32 nt, Homo Sapiens
acuuguccacacucgucuuagcacuuacguuu

SEQ ID NO: 149748 - RNA, 32 nt, Homo Sapiens
gacaaucucuucuguccggccagccgcuggag

SEQ ID NO: 149749 - RNA, 32 nt, Homo Sapiens
gacggcagagaccccaggaucccagagcuucc

SEQ ID NO: 149750 - RNA, 32 nt, Homo Sapiens
aaggaaauuaguaucuuuaguuucagucauuc

SEQ ID NO: 149751 - RNA, 32 nt, Homo Sapiens
guuaaauggaaguacaaugcaguuugcucucu

SEQ ID NO: 149752 - RNA, 32 nt, Homo Sapiens
gaggggcggcccuggaggagacggaggccgcg

SEQ ID NO: 149753 - RNA, 32 nt, Homo Sapiens
gccauuucugaauaauagucacugccgccgag

SEQ ID NO: 149754 - RNA, 32 nt, Homo Sapiens
ugauguuuuucaaagauuuuagcaaaaacaga

SEQ ID NO: 149755 - RNA, 32 nt, Homo Sapiens
agcaauuugaagucagcuaaggcaauaaccuu

SEQ ID NO: 149756 - RNA, 32 nt, Homo Sapiens
ucucauuaauauuuaauuuugaggauguacuu

SEQ ID NO: 149757 - RNA, 32 nt, Homo Sapiens
cacugcacuccagccugggcaacggagacucu

SEQ ID NO: 149758 - RNA, 32 nt, Homo Sapiens
auaauguggucucaggcaaggacacagcaucu

SEQ ID NO: 149759 - RNA, 32 nt, Homo Sapiens
guagagcuuacuuuuauuauuaaauguauuga

SEQ ID NO: 149760 - RNA, 32 nt, Homo Sapiens
ucuggaguucauggaaauccgcaacuucagag

SEQ ID NO: 149761 - RNA, 32 nt, Homo Sapiens
cuaagccuuuaaaauauuguaacugauaauuu

SEQ ID NO: 149762 - RNA, 32 nt, Homo Sapiens
cuucagaccccauagcugggcaagaugcgcuu

SEQ ID NO: 149763 - RNA, 32 nt, Homo Sapiens
ucuuuaagggaaaagaaaaauguucugaaaaa

SEQ ID NO: 149764 - RNA, 32 nt, Homo Sapiens
agauuuggaaggggcucuggcucccuaacacc

SEQ ID NO: 149765 - RNA, 32 nt, Homo Sapiens
ugcugaacugucagcaccaucuguccgguccc

SEQ ID NO: 149766 - RNA, 32 nt, Homo Sapiens
gacagggaccccccggcccuaacacccaucag

SEQ ID NO: 149767 - RNA, 32 nt, Homo Sapiens
uagguggaggucuuuuuaaauaaccucauguu

SEQ ID NO: 149768 - RNA, 32 nt, Homo Sapiens
cuguaaaaugggggcgcuauugcuucagcugc

SEQ ID NO: 149769 - RNA, 32 nt, Homo Sapiens
auucuggaacuccgccugggauugugcacugu

SEQ ID NO: 149770 - RNA, 32 nt, Homo Sapiens
cgacucagggaucgugggggcggggaggugga

SEQ ID NO: 149771 - RNA, 32 nt, Homo Sapiens
aucugcauguagucugucucugauuuaggguu

SEQ ID NO: 149772 - RNA, 32 nt, Homo Sapiens
ccgagccccagcuguauuggaaacccuccuaa

SEQ ID NO: 149773 - RNA, 32 nt, Homo Sapiens
ccggagcucagccugcgcgcgccgcgcccugu

SEQ ID NO: 149774 - RNA, 32 nt, Homo Sapiens
ggagcccucacagaugaggagaaacguuugau

SEQ ID NO: 149775 - RNA, 32 nt, Homo Sapiens
cacauuucucugucuuuuuugaucaguguccu

SEQ ID NO: 149776 - RNA, 32 nt, Homo Sapiens
uuauucaacaugauucuuaagcacuaaagaaa

SEQ ID NO: 149777 - RNA, 32 nt, Homo Sapiens
agauugagggcuuauggaaccuggucacuccc

SEQ ID NO: 149778 - RNA, 32 nt, Homo Sapiens
gcucaggugggcagagcuuaaagggaacgccc

SEQ ID NO: 149779 - RNA, 32 nt, Homo Sapiens
gucagugaccgaagaagagaccaagaugaaug

SEQ ID NO: 149780 - RNA, 32 nt, Homo Sapiens
uugcauagccccugggacguggcgcugcaccc

SEQ ID NO: 149781 - RNA, 32 nt, Homo Sapiens
cccaugucagucucucaccaccuccagcuucg

SEQ ID NO: 149782 - RNA, 32 nt, Homo Sapiens
uuguuuuaaaagacauaaucacuuugaacuuc

SEQ ID NO: 149783 - RNA, 32 nt, Homo Sapiens
gcaagccugcugguggcagagccagguuccaa

SEQ ID NO: 149784 - RNA, 32 nt, Homo Sapiens
ugcauuuuuaaaaaucuuucugagaugggaga

SEQ ID NO: 149785 - RNA, 32 nt, Homo Sapiens
ccccuccucauuacaggagagaacgagcaccu

SEQ ID NO: 149786 - RNA, 32 nt, Homo Sapiens
cgggcgugguggcuguagucgcagcuacucag

SEQ ID NO: 149787 - RNA, 31 nt, Homo Sapiens
ccggaaugagcaugccugcccuuugcaagca

SEQ ID NO: 149788 - RNA, 32 nt, Homo Sapiens
aauguaccuucuaaugcucaguugccagguuc

SEQ ID NO: 149789 - RNA, 32 nt, Homo Sapiens
guguguaauuuucaguauaccuuaaucauuug

SEQ ID NO: 149790 - RNA, 32 nt, Homo Sapiens
accagccuggucaacauagugagacacugucu

SEQ ID NO: 149791 - RNA, 32 nt, Homo Sapiens
gccauuuccagaaugguaaaagguuuaaucag

SEQ ID NO: 149792 - RNA, 32 nt, Homo Sapiens
uuccuauacauccuggcagaauaccccccagc

SEQ ID NO: 149793 - RNA, 32 nt, Homo Sapiens
uaaaggcuguucuggcuuuuuaucuucuuagc

SEQ ID NO: 149794 - RNA, 30 nt, Homo Sapiens
gauagaggaggugggacccugacuaucacc

SEQ ID NO: 149795 - RNA, 32 nt, Homo Sapiens
aauuacuagauuuuuuucuaaucuucaguaug

SEQ ID NO: 149796 - RNA, 32 nt, Homo Sapiens
gaagcccaccggggcuggcccgccgcugaccc

SEQ ID NO: 149797 - RNA, 32 nt, Homo Sapiens
uaaaacuuauauauuuuuuaaaauaauuucaa

SEQ ID NO: 149798 - RNA, 32 nt, Homo Sapiens
uaauugaaggcacuaugcuuggugcugaagaa

SEQ ID NO: 149799 - RNA, 32 nt, Homo Sapiens
cugaaaugauuugcaaauauuuucucaaguuc

SEQ ID NO: 149800 - RNA, 32 nt, Homo Sapiens
guuuccugccagccuccccgucuguuucuccc

SEQ ID NO: 149801 - RNA, 32 nt, Homo Sapiens
uccuaacauuuugauagcacaaaauuuugaaa

SEQ ID NO: 149802 - RNA, 32 nt, Homo Sapiens
ucauuauggcagaugcacaaauugugcaguga

SEQ ID NO: 149803 - RNA, 32 nt, Homo Sapiens
gcugaccgccaaggcuccggcccgagaggguc

SEQ ID NO: 149804 - RNA, 32 nt, Homo Sapiens
aaaaaggcacucuaaauuccaaugcccacaug

SEQ ID NO: 149805 - RNA, 32 nt, Homo Sapiens
caugcaccuaccuuagaaaacaaguauuguca

SEQ ID NO: 149806 - RNA, 32 nt, Homo Sapiens
uccuagcacuguagacgccgacuuuaccaacc

SEQ ID NO: 149807 - RNA, 32 nt, Homo Sapiens
gcagggaagaaccuaggcaccugggguugucc

SEQ ID NO: 149808 - RNA, 32 nt, Homo Sapiens
cuucugugaugacuugguauguuguuugguag

SEQ ID NO: 149809 - RNA, 32 nt, Homo Sapiens
auuuguuuuaaugauuuugcuacauuuggaau

SEQ ID NO: 149810 - RNA, 32 nt, Homo Sapiens
cacggaacagcccuccugggguccccacgagc

SEQ ID NO: 149811 - RNA, 31 nt, Homo Sapiens
ucaacgccaagcaggaggauaugauguucca

SEQ ID NO: 149812 - RNA, 32 nt, Homo Sapiens
ccacuaaacugcgagagaagcuaaacguguuu

SEQ ID NO: 149813 - RNA, 32 nt, Homo Sapiens
ugaacccuggagguggcgguugcagugagcac

SEQ ID NO: 149814 - RNA, 32 nt, Homo Sapiens
cgcgccuccgccggccgccgcgcgaugugagg

SEQ ID NO: 149815 - RNA, 32 nt, Homo Sapiens
uaucuggcugcuuuagcuccagugcuacaagg

SEQ ID NO: 149816 - RNA, 32 nt, Homo Sapiens
ugugagugcuuccagggcaagcacugugaggc

SEQ ID NO: 149817 - RNA, 32 nt, Homo Sapiens
aaggucuccaaugcguaugaccucaucuuccu

SEQ ID NO: 149818 - RNA, 32 nt, Homo Sapiens
gcauuaaaauuaacaucucaguaaucagcauu

SEQ ID NO: 149819 - RNA, 29 nt, Homo Sapiens
acucacauauguacauguacccaccacaa

SEQ ID NO: 149820 - RNA, 30 nt, Homo Sapiens
gaaauuggagguggguagugagaagggaaa

SEQ ID NO: 149821 - RNA, 32 nt, Homo Sapiens
ugucuacuuuggauguuagcuaugucuuguga

SEQ ID NO: 149822 - RNA, 32 nt, Homo Sapiens
cauuaccguaauuguugagaaguuuccuauua

SEQ ID NO: 149823 - RNA, 32 nt, Homo Sapiens
uaaaugaugcucucaagcaaaaaaaaaaaaaa

SEQ ID NO: 149824 - RNA, 32 nt, Homo Sapiens
gaaaaaaugcuguagaaaauaaauuaucuucu

SEQ ID NO: 149825 - RNA, 32 nt, Homo Sapiens
ggcgaccgcugccuggucuuccucccggacgc

SEQ ID NO: 149826 - RNA, 32 nt, Homo Sapiens
gaaaaaggcagacuaagaaucagaagccaugu

SEQ ID NO: 149827 - RNA, 32 nt, Homo Sapiens
ugccgcucagcgccgaugcgccgcccgccucg

SEQ ID NO: 149828 - RNA, 32 nt, Homo Sapiens
ugagaccagugcuugucguggugugggguuca

SEQ ID NO: 149829 - RNA, 32 nt, Homo Sapiens
acugugagaaacacugauccuaaugcaaucua

SEQ ID NO: 149830 - RNA, 32 nt, Homo Sapiens
auuaaaauacaaacagacaaaaaauaaaacaa

SEQ ID NO: 149831 - RNA, 32 nt, Homo Sapiens
ucugaucuugugcucagcaugauucuuuaaua

SEQ ID NO: 149832 - RNA, 32 nt, Homo Sapiens
aauuuuaaaaauacugucggaaaaaagcguac

SEQ ID NO: 149833 - RNA, 32 nt, Homo Sapiens
ugauggagacuucaaggcaaucccuccauaaa

SEQ ID NO: 149834 - RNA, 32 nt, Homo Sapiens
aaacauauacauuuuucuugagucucaaggua

SEQ ID NO: 149835 - RNA, 31 nt, Homo Sapiens
uuucagcagcgcaaccagcaggacaggcucc

SEQ ID NO: 149836 - RNA, 32 nt, Homo Sapiens
cucugcugucuccuggugaucauuuccugagc

SEQ ID NO: 149837 - RNA, 32 nt, Homo Sapiens
gggaggcugagguagguggaucaugaggucag

SEQ ID NO: 149838 - RNA, 32 nt, Homo Sapiens
uccggggcgggcgggcgggaccagaccccucg

SEQ ID NO: 149839 - RNA, 32 nt, Homo Sapiens
gcugccucuccagaucuucaguugcuucaggc

SEQ ID NO: 149840 - RNA, 32 nt, Homo Sapiens
uagggcgcggggggugcgaggcgggguggcug

SEQ ID NO: 149841 - RNA, 32 nt, Homo Sapiens
ccagguuuuccccaaggacccuggacaaugcu

SEQ ID NO: 149842 - RNA, 32 nt, Homo Sapiens
ggaugaggaaacugaggccuggagagguuaaa

SEQ ID NO: 149843 - RNA, 32 nt, Homo Sapiens
caggcaggcccugcgccuccuaugcggagaug

SEQ ID NO: 149844 - RNA, 32 nt, Homo Sapiens
gugaugccccuuccaaaccaucauccuguccc

SEQ ID NO: 149845 - RNA, 32 nt, Homo Sapiens
gcugggacuacaggugugugccacuaagcuca

SEQ ID NO: 149846 - RNA, 32 nt, Homo Sapiens
agacugcuauacauuucuguggguggggguag

SEQ ID NO: 149847 - RNA, 28 nt, Homo Sapiens
aaaagaguuacagaccaacuuaaacauc

SEQ ID NO: 149848 - RNA, 32 nt, Homo Sapiens
aauuaucacuguauuugcagcagaauuuugag

SEQ ID NO: 149849 - RNA, 32 nt, Homo Sapiens
aguguuuuuccacuguauuucauuugcaaaag

SEQ ID NO: 149850 - RNA, 32 nt, Homo Sapiens
cccaccuugcgggugauguugugcacguaggg

SEQ ID NO: 149851 - RNA, 32 nt, Homo Sapiens
aagcucgcacucuugucuucuggucacuccuc

SEQ ID NO: 149852 - RNA, 32 nt, Homo Sapiens
gagagaauacugacagcagaggucuugguggg

SEQ ID NO: 149853 - RNA, 32 nt, Homo Sapiens
guccugaauuucuggcugggaagugcuuccag

SEQ ID NO: 149854 - RNA, 32 nt, Homo Sapiens
guuaaagguuuuaacugcuuuguuauguaagc

SEQ ID NO: 149855 - RNA, 32 nt, Homo Sapiens
ccacugcacuccagccugggugucagagcgag

SEQ ID NO: 149856 - RNA, 32 nt, Homo Sapiens
cucauagggcccggcgcggcggcucacgccug

SEQ ID NO: 149857 - RNA, 32 nt, Homo Sapiens
auuagaaaguagccacguaugguggcucaugu

SEQ ID NO: 149858 - RNA, 32 nt, Homo Sapiens
acccaggagacggagcuugcagugagccgaga

SEQ ID NO: 149859 - RNA, 32 nt, Homo Sapiens
agcugucugaccacguuccuacccugagguag

SEQ ID NO: 149860 - RNA, 32 nt, Homo Sapiens
uggggacccguccaaggacaggcuggcugcuc

SEQ ID NO: 149861 - RNA, 32 nt, Homo Sapiens
aaaauacaaaaagccgggcguggugggcgccu

SEQ ID NO: 149862 - RNA, 32 nt, Homo Sapiens
cuuugagcaaaagccauuaaaauacauaaaua

SEQ ID NO: 149863 - RNA, 32 nt, Homo Sapiens
aacucccagcccuccccuccccacaacaugaa

SEQ ID NO: 149864 - RNA, 32 nt, Homo Sapiens
cuuggagaauuagugacaguguguguagagca

SEQ ID NO: 149865 - RNA, 32 nt, Homo Sapiens
agugggcaagaaguagcaaacacacuggauuu

SEQ ID NO: 149866 - RNA, 32 nt, Homo Sapiens
cccacaaccucugaagaccucuauucaugugg

SEQ ID NO: 149867 - RNA, 32 nt, Homo Sapiens
ccgggcccuggccucgcgucucucacccaugc

SEQ ID NO: 149868 - RNA, 32 nt, Homo Sapiens
aucuuuaaaaauuuuaaaauguacagucccuu

SEQ ID NO: 149869 - RNA, 32 nt, Homo Sapiens
ugcgcagaaaccgcaggggcggggaggagccg

SEQ ID NO: 149870 - RNA, 32 nt, Homo Sapiens
accucuuggacaaaaacacaauaaaaauaguu

SEQ ID NO: 149871 - RNA, 32 nt, Homo Sapiens
ucugcccuggcccacuucccacucaccuccac

SEQ ID NO: 149872 - RNA, 32 nt, Homo Sapiens
caggugggcggggauuaacaaagacagcuguu

SEQ ID NO: 149873 - RNA, 32 nt, Homo Sapiens
ugcucuagucucaucucauaucuuuaauucau

SEQ ID NO: 149874 - RNA, 32 nt, Homo Sapiens
gucucuacucaaaaauacaaaaauuagccugg

SEQ ID NO: 149875 - RNA, 32 nt, Homo Sapiens
auaauguuuucuagucacuuccuccgucuccg

SEQ ID NO: 149876 - RNA, 32 nt, Homo Sapiens
uuuagagaccucugaagagacuuagauaauca

SEQ ID NO: 149877 - RNA, 32 nt, Homo Sapiens
uaguaacuuguacauuuuuguuacagcaggac

SEQ ID NO: 149878 - RNA, 32 nt, Homo Sapiens
uccugcucaugcaaaaucauggaagugguuua

SEQ ID NO: 149879 - RNA, 32 nt, Homo Sapiens
gucugguguuugugguucaagugucuugccgc

SEQ ID NO: 149880 - RNA, 32 nt, Homo Sapiens
aggagcgccggcggccagcagugcgcucugca

SEQ ID NO: 149881 - RNA, 32 nt, Homo Sapiens
uaccgcuacuaaaaauucgaaaauuucuucuu

SEQ ID NO: 149882 - RNA, 32 nt, Homo Sapiens
gcucugagaaggugcuggauucugagugggcc

SEQ ID NO: 149883 - RNA, 32 nt, Homo Sapiens
ccucaguauauuauuauuuaauuuuuuaggua

SEQ ID NO: 149884 - RNA, 32 nt, Homo Sapiens
uuggaaaaauggacaaggauugugaaaugaaa

SEQ ID NO: 149885 - RNA, 32 nt, Homo Sapiens
gccagcugucucccagccaugcugcuggaccc

SEQ ID NO: 149886 - RNA, 32 nt, Homo Sapiens
ugcacccuccgugcauucucuccgggcccagc

SEQ ID NO: 149887 - RNA, 32 nt, Homo Sapiens
cacgggagacccgcggggagggcgcggcccug

SEQ ID NO: 149888 - RNA, 32 nt, Homo Sapiens
agaugaguaauauaaacugaaaucuauaauuu

SEQ ID NO: 149889 - RNA, 32 nt, Homo Sapiens
gacagcaacucaggauggcaucaggcagggca

SEQ ID NO: 149890 - RNA, 32 nt, Homo Sapiens
ccagcgaggaggaggcggggagagaaacugcg

SEQ ID NO: 149891 - RNA, 32 nt, Homo Sapiens
caacaccucacagauuauaauagaaaaagaaa

SEQ ID NO: 149892 - RNA, 32 nt, Homo Sapiens
uguuaacaucuucauauuuuauauuccuaaua

SEQ ID NO: 149893 - RNA, 32 nt, Homo Sapiens
ggaaccuaggcggcgggagcccggggcgccuc

SEQ ID NO: 149894 - RNA, 32 nt, Homo Sapiens
aaaaagaaaaagaaaaagaaaaaauauuuucc

SEQ ID NO: 149895 - RNA, 32 nt, Homo Sapiens
uccaauuuuuaaauuuauuuauacuuaaucug

SEQ ID NO: 149896 - RNA, 32 nt, Homo Sapiens
guuuccccacccagugagcuggggcagaagag

SEQ ID NO: 149897 - RNA, 32 nt, Homo Sapiens
ggggcugggaaagaagcagaaagaggacugug

SEQ ID NO: 149898 - RNA, 32 nt, Homo Sapiens
gacacagacauucccucaguguggggggcagg

SEQ ID NO: 149899 - RNA, 32 nt, Homo Sapiens
gcaacaguuuagaugccuuuugaaaggaaugu

SEQ ID NO: 149900 - RNA, 32 nt, Homo Sapiens
guugcgccaagcccgguccugcgccgccaugg

SEQ ID NO: 149901 - RNA, 32 nt, Homo Sapiens
cugggcugugaugugaagacaccugcagccuu

SEQ ID NO: 149902 - RNA, 32 nt, Homo Sapiens
aguucgcgggggcagaggcauucuugccgcug

SEQ ID NO: 149903 - RNA, 32 nt, Homo Sapiens
aauggcagccucagcgcagaggcaaggucaga

SEQ ID NO: 149904 - RNA, 32 nt, Homo Sapiens
aguagugucuuacugguuuuuuaauaaauccu

SEQ ID NO: 149905 - RNA, 29 nt, Homo Sapiens
caucaauaaaguuguauguuucaacuuaa

SEQ ID NO: 149906 - RNA, 32 nt, Homo Sapiens
guuucuaaauuaaucucaaaacagucauuauu

SEQ ID NO: 149907 - RNA, 32 nt, Homo Sapiens
ugucaccuuuuggaagguuugcauuuuguuuc

SEQ ID NO: 149908 - RNA, 32 nt, Homo Sapiens
ucucacauuagggggaaaaaacauaugggauc

SEQ ID NO: 149909 - RNA, 32 nt, Homo Sapiens
cauuaggucaucgucggggacaucaggcccug

SEQ ID NO: 149910 - RNA, 32 nt, Homo Sapiens
gaaagguguuccuucccauggauauuuguaug

SEQ ID NO: 149911 - RNA, 32 nt, Homo Sapiens
gucaaggacucucuuaaagggaccacauuuuu

SEQ ID NO: 149912 - RNA, 32 nt, Homo Sapiens
gggcagucgaggaugucggugaauuacgcggc

SEQ ID NO: 149913 - RNA, 32 nt, Homo Sapiens
gcucaucgucggcaccaauuaacgaagcgaug

SEQ ID NO: 149914 - RNA, 32 nt, Homo Sapiens
cuggaaccaaaauggagucacuuaugccaaac

SEQ ID NO: 149915 - RNA, 32 nt, Homo Sapiens
uccagccaguguggggagcucugcggugauga

SEQ ID NO: 149916 - RNA, 31 nt, Homo Sapiens
cucccaggcuagaguaccguggcacaaucuc

SEQ ID NO: 149917 - RNA, 32 nt, Homo Sapiens
gcugcccuacgucuccuucccuaaggaugcug

SEQ ID NO: 149918 - RNA, 32 nt, Homo Sapiens
acaggagaaaacacauaacacauuuuccgagc

SEQ ID NO: 149919 - RNA, 32 nt, Homo Sapiens
caaaagagaaaguucaucuagaaaucucaaag

SEQ ID NO: 149920 - RNA, 32 nt, Homo Sapiens
caucccccgcgugcucuggcaggcgccugcca

SEQ ID NO: 149921 - RNA, 29 nt, Homo Sapiens
guacuggccuguauguacaugggguccuu

SEQ ID NO: 149922 - RNA, 32 nt, Homo Sapiens
ugacauuuuaucauguuuuccugcagcaggug

SEQ ID NO: 149923 - RNA, 32 nt, Homo Sapiens
ucauacauuugacuucuagaaaacauuuuugu

SEQ ID NO: 149924 - RNA, 32 nt, Homo Sapiens
acacuggguaacagagguuacccacgaggaaa

SEQ ID NO: 149925 - RNA, 32 nt, Homo Sapiens
aaaguuaagacauuuuaaucuugacacaguag

SEQ ID NO: 149926 - RNA, 32 nt, Homo Sapiens
gcagugcuuagagcuucugcagggcuucucuu

SEQ ID NO: 149927 - RNA, 32 nt, Homo Sapiens
uggagaucaagccuuuuuccuaugcucaugag

SEQ ID NO: 149928 - RNA, 32 nt, Homo Sapiens
ucuucccuuucuggcuucuaggacauccaugc

SEQ ID NO: 149929 - RNA, 32 nt, Homo Sapiens
caauggccggggacuuauaaauccacaacuac

SEQ ID NO: 149930 - RNA, 32 nt, Homo Sapiens
ggcccugguguuggcucugggaccugggcugg

SEQ ID NO: 149931 - RNA, 32 nt, Homo Sapiens
acuucaauuuuggagcgcaguagcuauguuaa

SEQ ID NO: 149932 - RNA, 32 nt, Homo Sapiens
ucuccucccugaucauccuauccaccagccca

SEQ ID NO: 149933 - RNA, 32 nt, Homo Sapiens
gcaagaaaacaaagacaaauaaacagcggaag

SEQ ID NO: 149934 - RNA, 32 nt, Homo Sapiens
uuagaccuaaaauuaauuaacauaucuacuua

SEQ ID NO: 149935 - RNA, 32 nt, Homo Sapiens
cucccccgcccggggacccccugugccucccc

SEQ ID NO: 149936 - RNA, 32 nt, Homo Sapiens
cucugccacacgcuuugugccuccaaagcucc

SEQ ID NO: 149937 - RNA, 32 nt, Homo Sapiens
gguaucacuauauuggucaggcuggucuugaa

SEQ ID NO: 149938 - RNA, 30 nt, Homo Sapiens
cagagguggggcgguaacuccaugcccgcg

SEQ ID NO: 149939 - RNA, 32 nt, Homo Sapiens
uguuuuauggacaaagaaaacuuuacagauuu

SEQ ID NO: 149940 - RNA, 32 nt, Homo Sapiens
caugacaggcucugggguggaugccaggacag

SEQ ID NO: 149941 - RNA, 32 nt, Homo Sapiens
guauaagaaugguguguuuggcuaauguuucu

SEQ ID NO: 149942 - RNA, 32 nt, Homo Sapiens
uuagccgcgugacggacauccaggcgugggac

SEQ ID NO: 149943 - RNA, 32 nt, Homo Sapiens
ugcaauaaauguuauuugauauuauuauugca

SEQ ID NO: 149944 - RNA, 32 nt, Homo Sapiens
aaggagccucuacaauauugacuauauauuuu

SEQ ID NO: 149945 - RNA, 32 nt, Homo Sapiens
agugauuacugucaaggcugcuuacaauccaa

SEQ ID NO: 149946 - RNA, 32 nt, Homo Sapiens
agugaacuugucuggcuuuggcacucucugcc

SEQ ID NO: 149947 - RNA, 32 nt, Homo Sapiens
agauugaggauacaggaagaugcaucuuguuu

SEQ ID NO: 149948 - RNA, 29 nt, Homo Sapiens
auguguauauguauuuacauauauuccac

SEQ ID NO: 149949 - RNA, 30 nt, Homo Sapiens
uauagugucuguguuauaacagcagcuuca

SEQ ID NO: 149950 - RNA, 32 nt, Homo Sapiens
gguucaggggguacaugugcagguuuguuaca

SEQ ID NO: 149951 - RNA, 32 nt, Homo Sapiens
cgcgggacggcggaugaggcgcggcggcugcg

SEQ ID NO: 149952 - RNA, 32 nt, Homo Sapiens
aggaggaggaggaggagaaggcucugggcucc

SEQ ID NO: 149953 - RNA, 31 nt, Homo Sapiens
uucuacugcaccugccugcucuggguggcag

SEQ ID NO: 149954 - RNA, 32 nt, Homo Sapiens
gaaccugggguacuuaaaaugccaaaugaacg

SEQ ID NO: 149955 - RNA, 32 nt, Homo Sapiens
gagccagcgucggacacgcgcaaccagccgcc

SEQ ID NO: 149956 - RNA, 32 nt, Homo Sapiens
guguuuuacuuuuuguuuuuuaucaucuuuaa

SEQ ID NO: 149957 - RNA, 32 nt, Homo Sapiens
aggcacagccacuuccugccuccugggacucc

SEQ ID NO: 149958 - RNA, 32 nt, Homo Sapiens
gacaauugcuuggaggacuaaacuauaagggc

SEQ ID NO: 149959 - RNA, 32 nt, Homo Sapiens
uggaccgagcagccuccuccuccuaggaugac

SEQ ID NO: 149960 - RNA, 32 nt, Homo Sapiens
cgaggcagcugacgaggcagcuggcccagucu

SEQ ID NO: 149961 - RNA, 32 nt, Homo Sapiens
ggaagcacagcucagagcuggucugccaugga

SEQ ID NO: 149962 - RNA, 32 nt, Homo Sapiens
gagcaugagaugagaaaaccagcggaugaaaa

SEQ ID NO: 149963 - RNA, 32 nt, Homo Sapiens
acucaguuugcaagacugcauuguaacuuuaa

SEQ ID NO: 149964 - RNA, 32 nt, Homo Sapiens
cucugcugggcugagacucagaggacacuggg

SEQ ID NO: 149965 - RNA, 32 nt, Homo Sapiens
cauucaguuaguaaugaugguugcagguugaa

SEQ ID NO: 149966 - RNA, 32 nt, Homo Sapiens
gaggauuauaacuuaggccuagccucuuuuaa

SEQ ID NO: 149967 - RNA, 32 nt, Homo Sapiens
cgauuuuccccucugcauuuacacaccagaca

SEQ ID NO: 149968 - RNA, 32 nt, Homo Sapiens
ugcuccaaccuuuuggccccaguuuuccucug

SEQ ID NO: 149969 - RNA, 32 nt, Homo Sapiens
ccuucucuguugccaaccuugccguccgaccu

SEQ ID NO: 149970 - RNA, 32 nt, Homo Sapiens
guacacuguuucuuuuucaauacuuucagaaa

SEQ ID NO: 149971 - RNA, 32 nt, Homo Sapiens
uacugcagccgcggcccccguccauccgcgag

SEQ ID NO: 149972 - RNA, 32 nt, Homo Sapiens
cccccagcaggagagcagcaaaauuuauguaa

SEQ ID NO: 149973 - RNA, 32 nt, Homo Sapiens
aauaguuacauaucacaaguauguaguucaug

SEQ ID NO: 149974 - RNA, 32 nt, Homo Sapiens
agcaggcagagcucggguucagcccucacaau

SEQ ID NO: 149975 - RNA, 32 nt, Homo Sapiens
aguagaaggguggaaaggggaggugcccagug

SEQ ID NO: 149976 - RNA, 30 nt, Homo Sapiens
uguacuuacugugcugagagcuuuccucgc

SEQ ID NO: 149977 - RNA, 32 nt, Homo Sapiens
gcgcccgcucuucgcgcucucguuucauuuuc

SEQ ID NO: 149978 - RNA, 32 nt, Homo Sapiens
aaagaacaaaaaucaucugguaauucuuuccu

SEQ ID NO: 149979 - RNA, 32 nt, Homo Sapiens
ccucccggcgcagucaccggcgcggucuaugg

SEQ ID NO: 149980 - RNA, 32 nt, Homo Sapiens
gguguuugugguuuuucccccucuuuggcugg

SEQ ID NO: 149981 - RNA, 32 nt, Homo Sapiens
aagcgcucucgucgccugcccgaggccggagc

SEQ ID NO: 149982 - RNA, 32 nt, Homo Sapiens
aauauuaaacauugaucacauaaaaaaaaaaa

SEQ ID NO: 149983 - RNA, 32 nt, Homo Sapiens
aagagcacccucacgccgggcccgcaggaaga

SEQ ID NO: 149984 - RNA, 32 nt, Homo Sapiens
gcuccgggaugaagugacccaggcuggcgauc

SEQ ID NO: 149985 - RNA, 32 nt, Homo Sapiens
agguauuguaagucauugagaugauuuaaagu

SEQ ID NO: 149986 - RNA, 32 nt, Homo Sapiens
gugcuagucuuagggcaauggaccugagcugu

SEQ ID NO: 149987 - RNA, 29 nt, Homo Sapiens
uuguauucuaucccagaucacaggaaagu

SEQ ID NO: 149988 - RNA, 32 nt, Homo Sapiens
cccucucugaccaauggggccucuaggcucug

SEQ ID NO: 149989 - RNA, 32 nt, Homo Sapiens
acugagcagcuaggcgcgagcgaaaacaaaca

SEQ ID NO: 149990 - RNA, 30 nt, Homo Sapiens
agcauggcgcccgggccgcgcuguccgucc

SEQ ID NO: 149991 - RNA, 32 nt, Homo Sapiens
gcaugcugugcagcuugauagcaucuuaccca

SEQ ID NO: 149992 - RNA, 32 nt, Homo Sapiens
cccgccccccgacagccgcggggauccagagc

SEQ ID NO: 149993 - RNA, 32 nt, Homo Sapiens
gcauaucuucucagcaauaacuccaugggcuc

SEQ ID NO: 149994 - RNA, 32 nt, Homo Sapiens
aguccgagccucgggggcuccuagcaacgggc

SEQ ID NO: 149995 - RNA, 32 nt, Homo Sapiens
gccugacuuggggagauggaguucuugugcca

SEQ ID NO: 149996 - RNA, 32 nt, Homo Sapiens
uguggagaaaacugaggccagggcugaacgcu

SEQ ID NO: 149997 - RNA, 32 nt, Homo Sapiens
ucauucgauaaggauuuauauuuaguaacuac

SEQ ID NO: 149998 - RNA, 32 nt, Homo Sapiens
ccccuccuucccucccucccaggccucagacg

SEQ ID NO: 149999 - RNA, 32 nt, Homo Sapiens
aauccacccacccaugaggggaaacgugggga

SEQ ID NO: 150000 - RNA, 32 nt, Homo Sapiens
ugggaaaauaccagaaaaugagggccgcuuug

SEQ ID NO: 150001 - RNA, 32 nt, Homo Sapiens
aauuugauauguuuuucuuucccuuaagaauc

SEQ ID NO: 150002 - RNA, 32 nt, Homo Sapiens
uugucauaagugacaguuuaacuuuuuucuuu

SEQ ID NO: 150003 - RNA, 32 nt, Homo Sapiens
acgccgaggcucuggagcagcacuggcaggag

SEQ ID NO: 150004 - RNA, 32 nt, Homo Sapiens
auggaauuauaauucagaaucaucuugguaga

SEQ ID NO: 150005 - RNA, 32 nt, Homo Sapiens
ccagaccuggcuggaguggccggagcggcggg

SEQ ID NO: 150006 - RNA, 32 nt, Homo Sapiens
auccaggcugcaccuacaaguaccugaacacc

SEQ ID NO: 150007 - RNA, 32 nt, Homo Sapiens
caccgguaaucccagcacuuugggaggcuggg

SEQ ID NO: 150008 - RNA, 32 nt, Homo Sapiens
gacugccucgggcugcugcagcucaggaggcc

SEQ ID NO: 150009 - RNA, 32 nt, Homo Sapiens
cguaccaaaugauguugaauaauuacauaucu

SEQ ID NO: 150010 - RNA, 32 nt, Homo Sapiens
aaggguaggggcggggcggggaagugaacccc

SEQ ID NO: 150011 - RNA, 32 nt, Homo Sapiens
gaauuggggcugccuuauauguguguuuaccc

SEQ ID NO: 150012 - RNA, 32 nt, Homo Sapiens
acagauagaguagaguuuuguuuucuggaucu

SEQ ID NO: 150013 - RNA, 32 nt, Homo Sapiens
aaucagaauuccacugcccaaaggaguccagc

SEQ ID NO: 150014 - RNA, 32 nt, Homo Sapiens
gccgccaguccagccgccccucgcccggugcc

SEQ ID NO: 150015 - RNA, 32 nt, Homo Sapiens
gcuuuuguguuaaauguagaugugcuaaaaua

SEQ ID NO: 150016 - RNA, 32 nt, Homo Sapiens
gcgcgggcggcgggccccuugguccucaggcg

SEQ ID NO: 150017 - RNA, 32 nt, Homo Sapiens
ccaagcccugaacuuacuccaguuggccucuc

SEQ ID NO: 150018 - RNA, 32 nt, Homo Sapiens
ggucucguuacucggcggucaggagcgggccc

SEQ ID NO: 150019 - RNA, 32 nt, Homo Sapiens
aaguuuuucagaauucaugccugguauugcug

SEQ ID NO: 150020 - RNA, 32 nt, Homo Sapiens
uuauccugacauaaaaugauaauuuuguauau

SEQ ID NO: 150021 - RNA, 32 nt, Homo Sapiens
auucgcguguggaaaccagugucguguccuua

SEQ ID NO: 150022 - RNA, 32 nt, Homo Sapiens
ccgcuccuguuguuuuccgccggcaggaguag

SEQ ID NO: 150023 - RNA, 32 nt, Homo Sapiens
gaggcugcugcggcgccggggcuccguggccu

SEQ ID NO: 150024 - RNA, 32 nt, Homo Sapiens
gggacugucuguaucaaggucuccaggugguc

SEQ ID NO: 150025 - RNA, 32 nt, Homo Sapiens
acuuacaucauaaugcacaauuuuauauacug

SEQ ID NO: 150026 - RNA, 32 nt, Homo Sapiens
ccaauacugcccaaggauagguauuuuauaga

SEQ ID NO: 150027 - RNA, 32 nt, Homo Sapiens
accuguccccgccuccucucccucccucggcc

SEQ ID NO: 150028 - RNA, 31 nt, Homo Sapiens
caacgugagcccugccugcucggacgccuuu

SEQ ID NO: 150029 - RNA, 32 nt, Homo Sapiens
guggguacugugugugauaucuguaaaaagug

SEQ ID NO: 150030 - RNA, 32 nt, Homo Sapiens
guggccccgaccccggccaugaagcguaucuu

SEQ ID NO: 150031 - RNA, 32 nt, Homo Sapiens
gaacagcacaguaugggagacacaccaacuac

SEQ ID NO: 150032 - RNA, 32 nt, Homo Sapiens
augaaacugacaauccaauuugaaaguuugug

SEQ ID NO: 150033 - RNA, 32 nt, Homo Sapiens
cuccugggcaagggcugaaggaggccacucca

SEQ ID NO: 150034 - RNA, 32 nt, Homo Sapiens
cuauauaccugugaauaugugaaacaguaaau

SEQ ID NO: 150035 - RNA, 32 nt, Homo Sapiens
aagcggcgcgggugcuguccagcuucccggug

SEQ ID NO: 150036 - RNA, 32 nt, Homo Sapiens
gcggcucggcccggccacagccgcgguagugc

SEQ ID NO: 150037 - RNA, 32 nt, Homo Sapiens
uggugguuaaggaaacaggagcaggaaaugua

SEQ ID NO: 150038 - RNA, 32 nt, Homo Sapiens
ccaccgaguccuccgacgcccucgccaggcug

SEQ ID NO: 150039 - RNA, 32 nt, Homo Sapiens
uccgucccugaggaaaaaccgccccgugcccg

SEQ ID NO: 150040 - RNA, 32 nt, Homo Sapiens
cggcccccgaacugugccuucgcuuggagacc

SEQ ID NO: 150041 - RNA, 32 nt, Homo Sapiens
cauggauuggaagaaucaauauuguuaaaaug

SEQ ID NO: 150042 - RNA, 32 nt, Homo Sapiens
cuucuguuuucugauuauguggcaccgucuuu

SEQ ID NO: 150043 - RNA, 32 nt, Homo Sapiens
gagggguacacagggacccagcccuucucuuc

SEQ ID NO: 150044 - RNA, 32 nt, Homo Sapiens
ccauuccauagucccuguguugcucugagccu

SEQ ID NO: 150045 - RNA, 32 nt, Homo Sapiens
accugagcuggguaaaggggauucugggaguu

SEQ ID NO: 150046 - RNA, 32 nt, Homo Sapiens
cuacuguuuuaaaauuacuguagcuuuaaaau

SEQ ID NO: 150047 - RNA, 32 nt, Homo Sapiens
agaagcauuguuaaagucucucuucacccugc

SEQ ID NO: 150048 - RNA, 32 nt, Homo Sapiens
ucuagcaaaacauguuuuuaaccaucagugcu

SEQ ID NO: 150049 - RNA, 32 nt, Homo Sapiens
uuacuguguuuugugauuuucauuuuuggccc

SEQ ID NO: 150050 - RNA, 32 nt, Homo Sapiens
ggggaggccgcugaacccacccggcccauauc

SEQ ID NO: 150051 - RNA, 32 nt, Homo Sapiens
gggucacuuuuaaaguuuuucugcgucaucuc

SEQ ID NO: 150052 - RNA, 32 nt, Homo Sapiens
aagcuaccaaaggaauuuugaucauggcauaa

SEQ ID NO: 150053 - RNA, 32 nt, Homo Sapiens
augaccgggcccaccuccaccaguggcaggca

SEQ ID NO: 150054 - RNA, 32 nt, Homo Sapiens
auuauccuugccaaacaaaaugcugaaaccaa

SEQ ID NO: 150055 - RNA, 32 nt, Homo Sapiens
ggggcuuguaaguuacagccccaauuucuuua

SEQ ID NO: 150056 - RNA, 32 nt, Homo Sapiens
agaagagaacagugaacagaaucacauugauc

SEQ ID NO: 150057 - RNA, 32 nt, Homo Sapiens
ugaagcaagcaagcaaacaaauccauaacaac

SEQ ID NO: 150058 - RNA, 32 nt, Homo Sapiens
cugcaacucggugcgcguggacagcggcugcu

SEQ ID NO: 150059 - RNA, 32 nt, Homo Sapiens
caaaauuguggauauguguuccagucacucau

SEQ ID NO: 150060 - RNA, 31 nt, Homo Sapiens
aaagucucaaguaccaccuguauuaucucac

SEQ ID NO: 150061 - RNA, 32 nt, Homo Sapiens
agugaacagaaaggagcagagagcaagauuag

SEQ ID NO: 150062 - RNA, 32 nt, Homo Sapiens
auauaauuauauaacuaacaauuguccaaaua

SEQ ID NO: 150063 - RNA, 32 nt, Homo Sapiens
gccgcucgaccccgcccucaccacacugacca

SEQ ID NO: 150064 - RNA, 32 nt, Homo Sapiens
cugccuggaagacgggcugucgcugcugcacc

SEQ ID NO: 150065 - RNA, 29 nt, Homo Sapiens
aguucugugacuuccaagccaggaauuaa

SEQ ID NO: 150066 - RNA, 32 nt, Homo Sapiens
aucccugauuccuccuucuucuuaacccucuc

SEQ ID NO: 150067 - RNA, 32 nt, Homo Sapiens
gaccuugaguguggcccucccuuucugggccu

SEQ ID NO: 150068 - RNA, 32 nt, Homo Sapiens
uugcuucuguguguuucccuguaggacucaau

SEQ ID NO: 150069 - RNA, 32 nt, Homo Sapiens
auguuuaugugcucucaaaacauggaaaauaa

SEQ ID NO: 150070 - RNA, 32 nt, Homo Sapiens
ucacggaauccagacucuuccuggacuggcuu

SEQ ID NO: 150071 - RNA, 32 nt, Homo Sapiens
ggaccacuggaacauguggugcuugggaaugc

SEQ ID NO: 150072 - RNA, 32 nt, Homo Sapiens
uauccaccacuuuaaccuuagagcuuggacag

SEQ ID NO: 150073 - RNA, 32 nt, Homo Sapiens
agaggagcuggguugaagcggacugcugcgga

SEQ ID NO: 150074 - RNA, 31 nt, Homo Sapiens
uacacgcacggucacuugccccgcgcguccc

SEQ ID NO: 150075 - RNA, 32 nt, Homo Sapiens
acugcugaaccccuggccccagagcccccagc

SEQ ID NO: 150076 - RNA, 32 nt, Homo Sapiens
caggccugguggagggggaggggagaagccaa

SEQ ID NO: 150077 - RNA, 32 nt, Homo Sapiens
acuuuaugaugaugugguauagccagaauguc

SEQ ID NO: 150078 - RNA, 32 nt, Homo Sapiens
agguuuuuucgaugccaugcagugugugcuuu

SEQ ID NO: 150079 - RNA, 32 nt, Homo Sapiens
ccgcugacccgggacgccggggcccgcucgcu

SEQ ID NO: 150080 - RNA, 32 nt, Homo Sapiens
ggaaaaaguggccuggaaaugauucagcagga

SEQ ID NO: 150081 - RNA, 32 nt, Homo Sapiens
agccuuauggacugccccuggaccaucaccua

SEQ ID NO: 150082 - RNA, 32 nt, Homo Sapiens
cccaucacacuguaccccuccauccuuucugc

SEQ ID NO: 150083 - RNA, 32 nt, Homo Sapiens
cauacugaacaaaugucauucuaguuuagaua

SEQ ID NO: 150084 - RNA, 28 nt, Homo Sapiens
agaaaaguuacaguacucugugggaaaa

SEQ ID NO: 150085 - RNA, 32 nt, Homo Sapiens
ugcuaacaccacauguuugccuaugacaaguu

SEQ ID NO: 150086 - RNA, 32 nt, Homo Sapiens
caaauuuuaaaauaaauguguguguguuucuu

SEQ ID NO: 150087 - RNA, 32 nt, Homo Sapiens
agucaaauaaacauauauucuugcuugcaucc

SEQ ID NO: 150088 - RNA, 32 nt, Homo Sapiens
ugagcggcgcagagcccuccaggccugcaggg

SEQ ID NO: 150089 - RNA, 32 nt, Homo Sapiens
uucaaacuggggaaaacgcauuuuagguuuuu

SEQ ID NO: 150090 - RNA, 32 nt, Homo Sapiens
gcggcuccuccuuggacccccggagcuccccg

SEQ ID NO: 150091 - RNA, 32 nt, Homo Sapiens
uuauuccuuuaaagugaguacuguuaagaaua

SEQ ID NO: 150092 - RNA, 32 nt, Homo Sapiens
uauuuaaauuauggcuggggucggggagggua

SEQ ID NO: 150093 - RNA, 32 nt, Homo Sapiens
uggcccugagccagcccugugcuccucccucc

SEQ ID NO: 150094 - RNA, 32 nt, Homo Sapiens
agaaaguguaccuugaguuugcuggcagcaua

SEQ ID NO: 150095 - RNA, 32 nt, Homo Sapiens
ccgcccucggaaccagagccuggaguagcccu

SEQ ID NO: 150096 - RNA, 32 nt, Homo Sapiens
gugacaauauaaaauggcauuguuauagaauc

SEQ ID NO: 150097 - RNA, 30 nt, Homo Sapiens
cauaaaccacuugcuacugauuugggcaua

SEQ ID NO: 150098 - RNA, 32 nt, Homo Sapiens
gagcuucauuuucuucuugucaggaucaugua

SEQ ID NO: 150099 - RNA, 32 nt, Homo Sapiens
ggaaaauuaaaccauuugccaauucaaggcac

SEQ ID NO: 150100 - RNA, 30 nt, Homo Sapiens
aaugucuuccuaauggggaagaauugcaua

SEQ ID NO: 150101 - RNA, 32 nt, Homo Sapiens
acauacacauauauucaauauauuuuauauuc

SEQ ID NO: 150102 - RNA, 32 nt, Homo Sapiens
cugaggggaaaguuaaggcuaucuugucacaa

SEQ ID NO: 150103 - RNA, 32 nt, Homo Sapiens
uuuuguauuuuuguauaacuugauugugugcc

SEQ ID NO: 150104 - RNA, 32 nt, Homo Sapiens
uggguucugggacuuuuaaauucaaauuuuau

SEQ ID NO: 150105 - RNA, 32 nt, Homo Sapiens
ggagcuuuauuaguuucuuuuguaggugucau

SEQ ID NO: 150106 - RNA, 31 nt, Homo Sapiens
aucacgaugucaacagaucaagaccauccug

SEQ ID NO: 150107 - RNA, 32 nt, Homo Sapiens
ggcgcgcacggcaacuuuggagaggcgagcag

SEQ ID NO: 150108 - RNA, 32 nt, Homo Sapiens
gucagggcagagaggaggagggaggcugucag

SEQ ID NO: 150109 - RNA, 32 nt, Homo Sapiens
caucuuugucugggaacaaacaugcuuauuug

SEQ ID NO: 150110 - RNA, 32 nt, Homo Sapiens
ccuccucccccgcuccccaacuucucgcccag

SEQ ID NO: 150111 - RNA, 32 nt, Homo Sapiens
aagcgggcgcuucaggaccuggcgccccccug

SEQ ID NO: 150112 - RNA, 32 nt, Homo Sapiens
ggcaucccuggccacugccucccagucuugcu

SEQ ID NO: 150113 - RNA, 32 nt, Homo Sapiens
ccacucuucugggauaaauuuccacuuuacuu

SEQ ID NO: 150114 - RNA, 32 nt, Homo Sapiens
uuuuaaucuucagaguuucgacuuuaucaaca

SEQ ID NO: 150115 - RNA, 32 nt, Homo Sapiens
gcuuggcaguggugcuggccucacagcccugg

SEQ ID NO: 150116 - RNA, 32 nt, Homo Sapiens
gaaagggaacagaguccauccaagcugccccc

SEQ ID NO: 150117 - RNA, 32 nt, Homo Sapiens
ugaauuuaugauguggauacuaacuucauaca

SEQ ID NO: 150118 - RNA, 32 nt, Homo Sapiens
cacuuguauaggaaacaauauuuuccaguguu

SEQ ID NO: 150119 - RNA, 32 nt, Homo Sapiens
ccuauuguauauauauucacauucuuaaaaua

SEQ ID NO: 150120 - RNA, 32 nt, Homo Sapiens
accgaguccgcccgcuggcccgucagugcucu

SEQ ID NO: 150121 - RNA, 32 nt, Homo Sapiens
cccucgacauccuggacaccacaggggcaccu

SEQ ID NO: 150122 - RNA, 32 nt, Homo Sapiens
aggccucccagcugucaggaaaucuggcucag

SEQ ID NO: 150123 - RNA, 32 nt, Homo Sapiens
agugucuuuccacggagccacuccucugacuc

SEQ ID NO: 150124 - RNA, 32 nt, Homo Sapiens
agauuauaucuacauacguguguuaugugugu

SEQ ID NO: 150125 - RNA, 32 nt, Homo Sapiens
agcauuggugaaaucacauauuuuauauucag

SEQ ID NO: 150126 - RNA, 32 nt, Homo Sapiens
agcuauuucggcgaagacaugagacagucccg

SEQ ID NO: 150127 - RNA, 32 nt, Homo Sapiens
ccccaggaacagagacuccuaguugagugaua

SEQ ID NO: 150128 - RNA, 32 nt, Homo Sapiens
cccaccuugaaguagcucauaguucucugggc

SEQ ID NO: 150129 - RNA, 32 nt, Homo Sapiens
ugugcagaugaccaaagcaauugacuuggcca

SEQ ID NO: 150130 - RNA, 32 nt, Homo Sapiens
guacuuugcuccauuguuaauugagaaacugu

SEQ ID NO: 150131 - RNA, 32 nt, Homo Sapiens
ucagaggcuggucugaggaaggggagaauggg

SEQ ID NO: 150132 - RNA, 32 nt, Homo Sapiens
ggcagaugacgugaaauugugauguuuguuac

SEQ ID NO: 150133 - RNA, 32 nt, Homo Sapiens
cccgaggcuauggugugagagcccccguccug

SEQ ID NO: 150134 - RNA, 32 nt, Homo Sapiens
augucuccugggggagagcggcugaggcugcc

SEQ ID NO: 150135 - RNA, 32 nt, Homo Sapiens
gggcagcgaccucuccuccgccugccccgcgc

SEQ ID NO: 150136 - RNA, 29 nt, Homo Sapiens
cgggcuuggggacagaagggagaggacuu

SEQ ID NO: 150137 - RNA, 32 nt, Homo Sapiens
accaugcugggagaggcggccagagccugggg

SEQ ID NO: 150138 - RNA, 32 nt, Homo Sapiens
ccgcucccauucugcccuugcuccugccaacc

SEQ ID NO: 150139 - RNA, 32 nt, Homo Sapiens
gcguaauucuugccgcuccccccagcccaucg

SEQ ID NO: 150140 - RNA, 32 nt, Homo Sapiens
ugauccugccccugccugaccccgccacgccc

SEQ ID NO: 150141 - RNA, 32 nt, Homo Sapiens
ugaaugaaugaaaucuaaacugugaaccugag

SEQ ID NO: 150142 - RNA, 32 nt, Homo Sapiens
uggccuuggugccccccuccucugguggucag

SEQ ID NO: 150143 - RNA, 32 nt, Homo Sapiens
agucucaaacucccgaccuuaggugaugcacu

SEQ ID NO: 150144 - RNA, 32 nt, Homo Sapiens
uaaacugaaacuugguguaagaauagaauuga

SEQ ID NO: 150145 - RNA, 32 nt, Homo Sapiens
cccagcgggcgccccgcagccgugccagcguc

SEQ ID NO: 150146 - RNA, 32 nt, Homo Sapiens
agugcugauccggcugcuccuccagcccuuca

SEQ ID NO: 150147 - RNA, 32 nt, Homo Sapiens
aaggaccucaggcaguggccaagcuucugauc

SEQ ID NO: 150148 - RNA, 32 nt, Homo Sapiens
cuccaagaagaguuccggcagcuuuccccagg

SEQ ID NO: 150149 - RNA, 32 nt, Homo Sapiens
gcccuuauaucccaaaaaugucuuagaaaaua

SEQ ID NO: 150150 - RNA, 32 nt, Homo Sapiens
ugcggggcgcgggccuagggccccagcagcca

SEQ ID NO: 150151 - RNA, 32 nt, Homo Sapiens
guguggccaaccccaugacccccaccccucca

SEQ ID NO: 150152 - RNA, 32 nt, Homo Sapiens
auauuccuuuuaaagaagcuuuaucgaacgug

SEQ ID NO: 150153 - RNA, 32 nt, Homo Sapiens
auuuuauauuugagaaaaauaaaggcguucaa

SEQ ID NO: 150154 - RNA, 32 nt, Homo Sapiens
uuuuaaaauguggaguagcuguaaucacuuua

SEQ ID NO: 150155 - RNA, 32 nt, Homo Sapiens
auuuucuacguuucuuuaaccuuguauaaauu

SEQ ID NO: 150156 - RNA, 32 nt, Homo Sapiens
ugauuauccauauguguucuuaauuuuuaacu

SEQ ID NO: 150157 - RNA, 32 nt, Homo Sapiens
auaacuuuuccacagcuggauauaaaccugaa

SEQ ID NO: 150158 - RNA, 32 nt, Homo Sapiens
ccaggauguucuauucuuggugcguguugagg

SEQ ID NO: 150159 - RNA, 32 nt, Homo Sapiens
aaucugaagauugcgguuuacagcuaucgaac

SEQ ID NO: 150160 - RNA, 32 nt, Homo Sapiens
ugggauggggagaacagagaguagcuguguuu

SEQ ID NO: 150161 - RNA, 32 nt, Homo Sapiens
gucaaaaacaauugagcaucaauuucauaugg

SEQ ID NO: 150162 - RNA, 32 nt, Homo Sapiens
gugaaggagcgcggcagccuggggcucguuug

SEQ ID NO: 150163 - RNA, 32 nt, Homo Sapiens
gcucggccucugugcagccucaucuccuggaa

SEQ ID NO: 150164 - RNA, 32 nt, Homo Sapiens
gcaggacccgcacgccucuucccacaccuguc

SEQ ID NO: 150165 - RNA, 32 nt, Homo Sapiens
uguguggcucaccagcaggcaugcuucgcuuu

SEQ ID NO: 150166 - RNA, 32 nt, Homo Sapiens
cugagcgcccagcggacaccggcagcgcgcgg

SEQ ID NO: 150167 - RNA, 32 nt, Homo Sapiens
uccaggccucuuugcugucagcccuucugaga

SEQ ID NO: 150168 - RNA, 32 nt, Homo Sapiens
aaugaucauaagauggcccauuuuggaccgga

SEQ ID NO: 150169 - RNA, 32 nt, Homo Sapiens
ccucaggucucaacacauccacgggaacaaua

SEQ ID NO: 150170 - RNA, 32 nt, Homo Sapiens
cuaauggaacauuuuuaguggugauuugggga

SEQ ID NO: 150171 - RNA, 32 nt, Homo Sapiens
uucaagaacauucuaccaaauuuuuguacuau

SEQ ID NO: 150172 - RNA, 32 nt, Homo Sapiens
aaaaauguuauuuguucauucaucauuaauuc

SEQ ID NO: 150173 - RNA, 32 nt, Homo Sapiens
gacaaauccgcaacuucaugauacugguaauu

SEQ ID NO: 150174 - RNA, 32 nt, Homo Sapiens
caauuccuugguacauuggcuuccucagaaaa

SEQ ID NO: 150175 - RNA, 32 nt, Homo Sapiens
cguuucuacuaaaaauacaaaaaauuagccgg

SEQ ID NO: 150176 - RNA, 32 nt, Homo Sapiens
gacuggaaacacacagaaaauagugacaauug

SEQ ID NO: 150177 - RNA, 32 nt, Homo Sapiens
agacagggaaagggacagauagcuuuccaagg

SEQ ID NO: 150178 - RNA, 32 nt, Homo Sapiens
gggaaagugcugucucuguaguauuguagcag

SEQ ID NO: 150179 - RNA, 32 nt, Homo Sapiens
acgggaccccccgggacuccccggacauggcc

SEQ ID NO: 150180 - RNA, 32 nt, Homo Sapiens
cuuggcccaaggaugccuggggccugccagcu

SEQ ID NO: 150181 - RNA, 32 nt, Homo Sapiens
aagcaaccaccuuguucucuauucugcugccc

SEQ ID NO: 150182 - RNA, 32 nt, Homo Sapiens
accuuuucuuacucccaaaaaagaaugaacac

SEQ ID NO: 150183 - RNA, 32 nt, Homo Sapiens
cggacggacgacggaggcgggagccgguagcc

SEQ ID NO: 150184 - RNA, 32 nt, Homo Sapiens
gagucuccccccacccaccuuuuuucuuuggu

SEQ ID NO: 150185 - RNA, 32 nt, Homo Sapiens
agguaugugucugcuauuugcaaagaaguugg

SEQ ID NO: 150186 - RNA, 32 nt, Homo Sapiens
uaagaagcucuggccccaggcuugucacuagc

SEQ ID NO: 150187 - RNA, 32 nt, Homo Sapiens
gcuuugaccaggcuuacccagcacuaaauccc

SEQ ID NO: 150188 - RNA, 32 nt, Homo Sapiens
cugguccaucucugcaccuugaaacaguggcu

SEQ ID NO: 150189 - RNA, 32 nt, Homo Sapiens
uaaguauuuacuuuaaaaaauuuaauggcuua

SEQ ID NO: 150190 - RNA, 32 nt, Homo Sapiens
cuugccccggccccggccccagccagaguucc

SEQ ID NO: 150191 - RNA, 32 nt, Homo Sapiens
ccacgaggggagaauuuaaaggccccggcugg

SEQ ID NO: 150192 - RNA, 32 nt, Homo Sapiens
uaggaacaaaguugauucccaauauauauuug

SEQ ID NO: 150193 - RNA, 32 nt, Homo Sapiens
acugacuauaaaagaauagagaaggaagggcu

SEQ ID NO: 150194 - RNA, 32 nt, Homo Sapiens
guuaauuaauaaaaucucaagguucucccccc

SEQ ID NO: 150195 - RNA, 32 nt, Homo Sapiens
aauaaaauauccucagcccugaugccucccca

SEQ ID NO: 150196 - RNA, 32 nt, Homo Sapiens
agaggcuggggcuuaagaagaggcucugcaga

SEQ ID NO: 150197 - RNA, 32 nt, Homo Sapiens
caugcugccacuuuucaauucugucagugcuu

SEQ ID NO: 150198 - RNA, 31 nt, Homo Sapiens
ggaaugaaauaaagcacaguaugugucugaa

SEQ ID NO: 150199 - RNA, 32 nt, Homo Sapiens
uaugcuguuggauuugccaagucuuuguauaa

SEQ ID NO: 150200 - RNA, 32 nt, Homo Sapiens
guacgauuaaaaguuggccguccccaggccuc

SEQ ID NO: 150201 - RNA, 32 nt, Homo Sapiens
ccacgauuuagauuuaaugaugcuucagugga

SEQ ID NO: 150202 - RNA, 32 nt, Homo Sapiens
uucuucauuucccaauagcauguuccucauuc

SEQ ID NO: 150203 - RNA, 32 nt, Homo Sapiens
gcugugaaauuuaagugaaauguucuuuguaa

SEQ ID NO: 150204 - RNA, 32 nt, Homo Sapiens
auaaaaacaacaaaacaaaacaaaaaaagaaa

SEQ ID NO: 150205 - RNA, 32 nt, Homo Sapiens
ccugaagaaaaauuauauuuguauauuuuuua

SEQ ID NO: 150206 - RNA, 32 nt, Homo Sapiens
ccuuaaaaggagagaagaaaguguagauaguu

SEQ ID NO: 150207 - RNA, 32 nt, Homo Sapiens
agaaaaaagagaugaagacgaguuggggauug

SEQ ID NO: 150208 - RNA, 32 nt, Homo Sapiens
cgugcugucuucuggucuguguguguucuuca

SEQ ID NO: 150209 - RNA, 32 nt, Homo Sapiens
aaaccauguacaaaaccagagcaaccuggcag

SEQ ID NO: 150210 - RNA, 32 nt, Homo Sapiens
gaggcugaggccagcauggaggcgcugcggga

SEQ ID NO: 150211 - RNA, 32 nt, Homo Sapiens
ugggaauuaagcaaaaucaagcaagccucucu

SEQ ID NO: 150212 - RNA, 32 nt, Homo Sapiens
agugauggcagacaaugucagccacuaacaac

SEQ ID NO: 150213 - RNA, 32 nt, Homo Sapiens
cucaaguccaugcgucucauggcacugccggg

SEQ ID NO: 150214 - RNA, 32 nt, Homo Sapiens
agacuccagggcagggagagcggcagcggggc

SEQ ID NO: 150215 - RNA, 32 nt, Homo Sapiens
auauuauuuuugguauuuggaauugaauuugc

SEQ ID NO: 150216 - RNA, 32 nt, Homo Sapiens
aguuggacacgagugcauguguccuugugcca

SEQ ID NO: 150217 - RNA, 32 nt, Homo Sapiens
cacugcuuccagcccucaaacuaagaauggag

SEQ ID NO: 150218 - RNA, 32 nt, Homo Sapiens
cuaaauuguuaagagagaucuuauaaugcaac

SEQ ID NO: 150219 - RNA, 32 nt, Homo Sapiens
gaauuuuucuucauuaauuuuguguuuaaguu

SEQ ID NO: 150220 - RNA, 32 nt, Homo Sapiens
cgccgccaugcccacggccgccgcccccauca

SEQ ID NO: 150221 - RNA, 32 nt, Homo Sapiens
ugucguccggugcaggccacauggccaccugg

SEQ ID NO: 150222 - RNA, 32 nt, Homo Sapiens
gagguggacuaaauggcuggugucacagcuua

SEQ ID NO: 150223 - RNA, 32 nt, Homo Sapiens
gcccagaggguggcaagaacagugggcguugg

SEQ ID NO: 150224 - RNA, 32 nt, Homo Sapiens
aaagagagcucaucaucagucuuaauauucag

SEQ ID NO: 150225 - RNA, 32 nt, Homo Sapiens
gaauagccauuuccagagggaaguacacacau

SEQ ID NO: 150226 - RNA, 32 nt, Homo Sapiens
uacacagacugggauaucuuguagaaugcuga

SEQ ID NO: 150227 - RNA, 32 nt, Homo Sapiens
caaggagaugaccuuucugcccccaaggaaac

SEQ ID NO: 150228 - RNA, 32 nt, Homo Sapiens
ugcauuuggugauuguuuuuuauuugauucag

SEQ ID NO: 150229 - RNA, 29 nt, Homo Sapiens
cuuaaaugaaguuuaucuacuucugaaua

SEQ ID NO: 150230 - RNA, 32 nt, Homo Sapiens
auucccccacccagagcgaccugcgggcagcg

SEQ ID NO: 150231 - RNA, 32 nt, Homo Sapiens
auauugggguccuggaggagacguucccagau

SEQ ID NO: 150232 - RNA, 32 nt, Homo Sapiens
cuucaggacuuccaaggcucccaaagacuccc

SEQ ID NO: 150233 - RNA, 32 nt, Homo Sapiens
cugaggucgggaguuugagaccagucugaccc

SEQ ID NO: 150234 - RNA, 32 nt, Homo Sapiens
ggucucugucuccucggcccagccagcugucc

SEQ ID NO: 150235 - RNA, 32 nt, Homo Sapiens
cagaacagucccuuccuaauagcagggaugcu

SEQ ID NO: 150236 - RNA, 32 nt, Homo Sapiens
uggccaggguggggcuccgagccccgggucac

SEQ ID NO: 150237 - RNA, 32 nt, Homo Sapiens
cugcccuaaaagauaguaaguagaaauauuug

SEQ ID NO: 150238 - RNA, 32 nt, Homo Sapiens
aaaccaauuccugcuguuugaaugggaauggu

SEQ ID NO: 150239 - RNA, 32 nt, Homo Sapiens
auauuucauauguaccuguuaagguacuuuuu

SEQ ID NO: 150240 - RNA, 32 nt, Homo Sapiens
ccaauacuuauuccaauaauggaugaauucau

SEQ ID NO: 150241 - RNA, 32 nt, Homo Sapiens
aguaagaauuguaagggagguucaguaguggg

SEQ ID NO: 150242 - RNA, 32 nt, Homo Sapiens
uguccuggaagacagcugccugccuggcugcc

SEQ ID NO: 150243 - RNA, 32 nt, Homo Sapiens
agacucuauauugacaguaggaucucaaaccc

SEQ ID NO: 150244 - RNA, 32 nt, Homo Sapiens
uugcuagagaccuagacauccaaauacaagaa

SEQ ID NO: 150245 - RNA, 30 nt, Homo Sapiens
uucucggccccgaccuucgcccugggaggu

SEQ ID NO: 150246 - RNA, 32 nt, Homo Sapiens
agaauaagguaaacagaaggaugcugcuagac

SEQ ID NO: 150247 - RNA, 32 nt, Homo Sapiens
uuguaauccaaauauugauauucuuuacacca

SEQ ID NO: 150248 - RNA, 32 nt, Homo Sapiens
uccugaccagcaccccaccaaguccucaguaa

SEQ ID NO: 150249 - RNA, 32 nt, Homo Sapiens
cucggaacaugaccuuuagucuguggacucca

SEQ ID NO: 150250 - RNA, 32 nt, Homo Sapiens
cccugucccugcggcugugagagcagcaggac

SEQ ID NO: 150251 - RNA, 32 nt, Homo Sapiens
gcggagagcgagagacccugcgcaccgcagcc

SEQ ID NO: 150252 - RNA, 32 nt, Homo Sapiens
uggcacaguaauguaauuauagagcggauuga

SEQ ID NO: 150253 - RNA, 32 nt, Homo Sapiens
ucccuuucucuaagaggccaucucuaagaugu

SEQ ID NO: 150254 - RNA, 32 nt, Homo Sapiens
aggaggaggagcuuaaaagaggcuacugaacc

SEQ ID NO: 150255 - RNA, 32 nt, Homo Sapiens
acccaucuggucucuugaauaaaggucaaagc

SEQ ID NO: 150256 - RNA, 32 nt, Homo Sapiens
uggguggggucuggccguuggcccuggcuaau

SEQ ID NO: 150257 - RNA, 32 nt, Homo Sapiens
cgucugccgcgcagccgccgcuccauccccag

SEQ ID NO: 150258 - RNA, 32 nt, Homo Sapiens
gcagcucuuagcucuuuuuugaucgaugaagc

SEQ ID NO: 150259 - RNA, 32 nt, Homo Sapiens
ucucuugauugugucauuuaccaauuaaauaa

SEQ ID NO: 150260 - RNA, 32 nt, Homo Sapiens
acacaggcuuuagagucaaaguaucucaaacc

SEQ ID NO: 150261 - RNA, 32 nt, Homo Sapiens
guaugcuagggaagagagcgugcuggcccuuc

SEQ ID NO: 150262 - RNA, 32 nt, Homo Sapiens
ucaccaggcuccccggcucgccguggcucucu

SEQ ID NO: 150263 - RNA, 32 nt, Homo Sapiens
uccggaggagagcggagcccggagcccggagc

SEQ ID NO: 150264 - RNA, 32 nt, Homo Sapiens
ccaacaacacugaggaagauagaguggugacu

SEQ ID NO: 150265 - RNA, 32 nt, Homo Sapiens
guagcauuaaauaaguauauggccguuuuuua

SEQ ID NO: 150266 - RNA, 32 nt, Homo Sapiens
auagcuccaaaugguuuuuuuauucucagugu

SEQ ID NO: 150267 - RNA, 32 nt, Homo Sapiens
cuggucgauccucuuuauggcaucccuguggg

SEQ ID NO: 150268 - RNA, 32 nt, Homo Sapiens
aguuucgccauguuggucaggcuggucucgaa

SEQ ID NO: 150269 - RNA, 32 nt, Homo Sapiens
agaucagucaucaacuuuuucuuaauuccucu

SEQ ID NO: 150270 - RNA, 32 nt, Homo Sapiens
cuucaccuguguuugccaugcaggaacaugag

SEQ ID NO: 150271 - RNA, 32 nt, Homo Sapiens
caaggagaaugaauucaagagccuguggauug

SEQ ID NO: 150272 - RNA, 32 nt, Homo Sapiens
acauuauguauauaauuaguuuauauuuacac

SEQ ID NO: 150273 - RNA, 32 nt, Homo Sapiens
cucugagaguuggagcggggcugggcccgaau

SEQ ID NO: 150274 - RNA, 32 nt, Homo Sapiens
gucaaacacauuuuuguuguuuuguuuuuuaa

SEQ ID NO: 150275 - RNA, 32 nt, Homo Sapiens
uuaguugauuuguuauuuauagacuuucguag

SEQ ID NO: 150276 - RNA, 32 nt, Homo Sapiens
uccuuuaaaaauucugagcuaaaaucuauuua

SEQ ID NO: 150277 - RNA, 31 nt, Homo Sapiens
gccgggcugccgggcgagagggcgaggccga

SEQ ID NO: 150278 - RNA, 32 nt, Homo Sapiens
cgugggaggagaaagaccugaccgucuccaag

SEQ ID NO: 150279 - RNA, 32 nt, Homo Sapiens
ugguaagaugaccaaugcucagauuauucuuc

SEQ ID NO: 150280 - RNA, 32 nt, Homo Sapiens
ugacacucuggugcccauuggcagauggcgac

SEQ ID NO: 150281 - RNA, 32 nt, Homo Sapiens
guuuccagccuggccugagguggaacccuguc

SEQ ID NO: 150282 - RNA, 32 nt, Homo Sapiens
gugagauaguuuaagauauuuuuaugugacca

SEQ ID NO: 150283 - RNA, 32 nt, Homo Sapiens
uggaggacaacgucugcuacgcgcugcccgug

SEQ ID NO: 150284 - RNA, 32 nt, Homo Sapiens
cuccugugaggucacugcugcagggccuuccu

SEQ ID NO: 150285 - RNA, 32 nt, Homo Sapiens
uucaccuccccuccccacccacaagggacaca

SEQ ID NO: 150286 - RNA, 32 nt, Homo Sapiens
cccugggugucaguccaaaugacuguauagga

SEQ ID NO: 150287 - RNA, 27 nt, Homo Sapiens
acagcagucuucuucacccgcugcagc

SEQ ID NO: 150288 - RNA, 32 nt, Homo Sapiens
aguccccccucgccccaaaguugcucaccgac

SEQ ID NO: 150289 - RNA, 32 nt, Homo Sapiens
gaaauagcuuuacagugcauuacuacagccag

SEQ ID NO: 150290 - RNA, 32 nt, Homo Sapiens
aguggcccaguccccacccccacaucuagcuc

SEQ ID NO: 150291 - RNA, 32 nt, Homo Sapiens
agcuuuggaaaacucagucucuuucauuauca

SEQ ID NO: 150292 - RNA, 32 nt, Homo Sapiens
acaacuacagucuuugaaauauggaaaaucag

SEQ ID NO: 150293 - RNA, 32 nt, Homo Sapiens
cacuguucaucuuuuucuucacauuuugcaca

SEQ ID NO: 150294 - RNA, 32 nt, Homo Sapiens
uucugcccccaucccaacccagcccuuauuau

SEQ ID NO: 150295 - RNA, 32 nt, Homo Sapiens
aacugccugcagcggggaccggaccugcacag

SEQ ID NO: 150296 - RNA, 32 nt, Homo Sapiens
ccuggcacuaacacuuuucaaucuucaggcuu

SEQ ID NO: 150297 - RNA, 32 nt, Homo Sapiens
accgugcggccgcgggacacgcucagcgaccu

SEQ ID NO: 150298 - RNA, 32 nt, Homo Sapiens
gaggggccaggguggggguagccgugagacuu

SEQ ID NO: 150299 - RNA, 32 nt, Homo Sapiens
ugcccugaggggcuggggaggggguaccucau

SEQ ID NO: 150300 - RNA, 32 nt, Homo Sapiens
ccuuccuacugguuuagacuacacuuacaaca

SEQ ID NO: 150301 - RNA, 32 nt, Homo Sapiens
aaagggaggaguaauugguucaugcucugagc

SEQ ID NO: 150302 - RNA, 32 nt, Homo Sapiens
aguugguugugauuuuuagaauagacuccugg

SEQ ID NO: 150303 - RNA, 32 nt, Homo Sapiens
aaaggcuuggcuucauuuucuacaugugagcu

SEQ ID NO: 150304 - RNA, 32 nt, Homo Sapiens
ggauucuaacuggcagacuggcacuuuaucuc

SEQ ID NO: 150305 - RNA, 32 nt, Homo Sapiens
cuuugaacgcccuuugaaauggcuuugcuaaa

SEQ ID NO: 150306 - RNA, 32 nt, Homo Sapiens
auuauuuuuaagaagaugccaauauaauuuuu

SEQ ID NO: 150307 - RNA, 32 nt, Homo Sapiens
gcaacaguucuucaaguguacucuguaggcuu

SEQ ID NO: 150308 - RNA, 29 nt, Homo Sapiens
uuugaccaaaguuuauuuuucuagugcau

SEQ ID NO: 150309 - RNA, 32 nt, Homo Sapiens
aaaaaaguagccaggcaugguggcaagcaccu

SEQ ID NO: 150310 - RNA, 32 nt, Homo Sapiens
acugcgaagcggcuucuucagagcacgggcug

SEQ ID NO: 150311 - RNA, 32 nt, Homo Sapiens
auuuguauauauaagcauuguguauguauuca

SEQ ID NO: 150312 - RNA, 32 nt, Homo Sapiens
auguguucggguuuccuuucccaagccagcag

SEQ ID NO: 150313 - RNA, 32 nt, Homo Sapiens
gcacaguuugaaaaugaugaaugaauuacacc

SEQ ID NO: 150314 - RNA, 32 nt, Homo Sapiens
aaaaaugaagcagacacacacacacacacaca

SEQ ID NO: 150315 - RNA, 32 nt, Homo Sapiens
uauuauuauuauuaauaaagugaggcaggaaa

SEQ ID NO: 150316 - RNA, 32 nt, Homo Sapiens
guguuuuaucuuuuccagaugugaauggaauc

SEQ ID NO: 150317 - RNA, 32 nt, Homo Sapiens
ccugggucgaggaaacagagacaaccuuucug

SEQ ID NO: 150318 - RNA, 32 nt, Homo Sapiens
auuacuauuauuauggaaaaauuaaaaugucu

SEQ ID NO: 150319 - RNA, 32 nt, Homo Sapiens
guggaagccggggucucgcgggccgcgggccg

SEQ ID NO: 150320 - RNA, 32 nt, Homo Sapiens
gacuguuuuuaaacaaacuguagaacucuuca

SEQ ID NO: 150321 - RNA, 32 nt, Homo Sapiens
uguuuuuuuuucuguccacguuggucacccuu

SEQ ID NO: 150322 - RNA, 32 nt, Homo Sapiens
cagggaagagacugagugucauggacucaggu

SEQ ID NO: 150323 - RNA, 32 nt, Homo Sapiens
aucugcuucccccaaggccucccacaggugac

SEQ ID NO: 150324 - RNA, 32 nt, Homo Sapiens
cugaauaaauuaauaguauucauuccugaagg

SEQ ID NO: 150325 - RNA, 32 nt, Homo Sapiens
aggaucccaggcaaggcaccacuuccucacau

SEQ ID NO: 150326 - RNA, 32 nt, Homo Sapiens
ugugaguggcauuugucagggauuuagcccau

SEQ ID NO: 150327 - RNA, 32 nt, Homo Sapiens
aauccauauauuccauguagacuggaaaaacu

SEQ ID NO: 150328 - RNA, 32 nt, Homo Sapiens
ggggagaaagcagcaggacaguggaggugugu

SEQ ID NO: 150329 - RNA, 32 nt, Homo Sapiens
agaauccaguguuucaagauggaguuggugaa

SEQ ID NO: 150330 - RNA, 32 nt, Homo Sapiens
gagaggguggcaggccugcugcuggaccccag

SEQ ID NO: 150331 - RNA, 32 nt, Homo Sapiens
cgcgcgcugugcagagguagccguggaaggcg

SEQ ID NO: 150332 - RNA, 32 nt, Homo Sapiens
cgucugcagaaagaaauugagcgccauaagca

SEQ ID NO: 150333 - RNA, 32 nt, Homo Sapiens
aggcucuuugguuuuucuaguccucaaccacu

SEQ ID NO: 150334 - RNA, 32 nt, Homo Sapiens
gauuuugaauacagugaaaaucuuauugcaau

SEQ ID NO: 150335 - RNA, 32 nt, Homo Sapiens
ccgggggccgacggggcuguccuggaggucca

SEQ ID NO: 150336 - RNA, 32 nt, Homo Sapiens
auuguuuagugucaguguaucauuuaguauuu

SEQ ID NO: 150337 - RNA, 32 nt, Homo Sapiens
ugggagaggccuuucccucagcccuuccucca

SEQ ID NO: 150338 - RNA, 32 nt, Homo Sapiens
aagagcccgcgcugcgcggagcccgcccccgc

SEQ ID NO: 150339 - RNA, 32 nt, Homo Sapiens
guuuccaacuacauuuuaauucuuguucaauc

SEQ ID NO: 150340 - RNA, 32 nt, Homo Sapiens
cauacccucccuccccccagcaguacagcuga

SEQ ID NO: 150341 - RNA, 32 nt, Homo Sapiens
gacagcauuuccccaguugcccuuuaaguucu

SEQ ID NO: 150342 - RNA, 32 nt, Homo Sapiens
ugugcccagagccccaggaaaaugggagugag

SEQ ID NO: 150343 - RNA, 32 nt, Homo Sapiens
gaaaucuuaggacugacaucccuuuacucagg

SEQ ID NO: 150344 - RNA, 32 nt, Homo Sapiens
ggggagggauaugucuuccuuuaugcaucugg

SEQ ID NO: 150345 - RNA, 32 nt, Homo Sapiens
uuauggaaagguccuguggggagcccaucauc

SEQ ID NO: 150346 - RNA, 32 nt, Homo Sapiens
aaugaaagggagagggaagaguagguggggcc

SEQ ID NO: 150347 - RNA, 32 nt, Homo Sapiens
auaauagagcuguucaucauggauauuucugc

SEQ ID NO: 150348 - RNA, 32 nt, Homo Sapiens
cagcaccagcgcauccacagcggcgagaagcc

SEQ ID NO: 150349 - RNA, 32 nt, Homo Sapiens
uuccggccaggaggcgggaggcgguugccggc

SEQ ID NO: 150350 - RNA, 32 nt, Homo Sapiens
caaggagggcugggcuuuggaguggggcagug

SEQ ID NO: 150351 - RNA, 32 nt, Homo Sapiens
ccacaugucacccacccaccgcaggcuggccg

SEQ ID NO: 150352 - RNA, 32 nt, Homo Sapiens
aggaucagugggugguaggagaaggaugguuc

SEQ ID NO: 150353 - RNA, 32 nt, Homo Sapiens
gacgcgaggcccagcucuacuuuucgccccgc

SEQ ID NO: 150354 - RNA, 32 nt, Homo Sapiens
ugaugcaaaucugccaagagagauguaugugu

SEQ ID NO: 150355 - RNA, 32 nt, Homo Sapiens
ggaaauguaaauaaauauaccacauuaaaaau

SEQ ID NO: 150356 - RNA, 32 nt, Homo Sapiens
gucuguauguguguaucauacacaucaaccuc

SEQ ID NO: 150357 - RNA, 32 nt, Homo Sapiens
ccugccccaccccaccucccccgggcuuccuc

SEQ ID NO: 150358 - RNA, 32 nt, Homo Sapiens
aggcgccgagacccaaggcgccacugagggca

SEQ ID NO: 150359 - RNA, 32 nt, Homo Sapiens
acucagcuuuacaaaaucaugucauuguggaa

SEQ ID NO: 150360 - RNA, 32 nt, Homo Sapiens
ucaugucgaggcuagaggcauuuggaacaaca

SEQ ID NO: 150361 - RNA, 32 nt, Homo Sapiens
ugugcgcaggcgaaaguguggaugcuguaggg

SEQ ID NO: 150362 - RNA, 32 nt, Homo Sapiens
gcaugaugggccgagccaccucggaucccacu

SEQ ID NO: 150363 - RNA, 32 nt, Homo Sapiens
ggugcccggagcucagagcgcgcagagcccgg

SEQ ID NO: 150364 - RNA, 32 nt, Homo Sapiens
auuucaucuucaggccuggacuacaccacuca

SEQ ID NO: 150365 - RNA, 32 nt, Homo Sapiens
aaggaggcagguuggguccagcauguucuucc

SEQ ID NO: 150366 - RNA, 30 nt, Homo Sapiens
cauaaucuggacuccucuguccaggcacug

SEQ ID NO: 150367 - RNA, 32 nt, Homo Sapiens
uggcugggguccgugaagcccaggccaggcag

SEQ ID NO: 150368 - RNA, 32 nt, Homo Sapiens
ggaaauguucuuggagcuacuuccucaaaaug

SEQ ID NO: 150369 - RNA, 32 nt, Homo Sapiens
ugggcaugauaacacaucccuguagucccagc

SEQ ID NO: 150370 - RNA, 32 nt, Homo Sapiens
aagaaccaaauauaaaucaugaaguugaaaau

SEQ ID NO: 150371 - RNA, 32 nt, Homo Sapiens
caaagaguuggaguuucugacccaggcacugg

SEQ ID NO: 150372 - RNA, 32 nt, Homo Sapiens
ucccauuuuuaaaauucuuauauuuaguccua

SEQ ID NO: 150373 - RNA, 32 nt, Homo Sapiens
accaucuaugcucuugguuggugcuggcuggg

SEQ ID NO: 150374 - RNA, 32 nt, Homo Sapiens
cgccgccguggucccggagcgcggcgacaugc

SEQ ID NO: 150375 - RNA, 32 nt, Homo Sapiens
ucccccaugaccauaacacaucaaaaaguuga

SEQ ID NO: 150376 - RNA, 32 nt, Homo Sapiens
gucacuuggcucugaacauacuggcuuugcug

SEQ ID NO: 150377 - RNA, 32 nt, Homo Sapiens
ccagugcagugggacgggcugcccugugagug

SEQ ID NO: 150378 - RNA, 32 nt, Homo Sapiens
gcacggcagauucaucugaaaacuacauuaag

SEQ ID NO: 150379 - RNA, 32 nt, Homo Sapiens
cggcaaccugggauggccgccgguugccaagg

SEQ ID NO: 150380 - RNA, 32 nt, Homo Sapiens
gaacacaauucuugugaauccauuugccuugu

SEQ ID NO: 150381 - RNA, 32 nt, Homo Sapiens
uccaagagauucugagaaauuuuuguauucag

SEQ ID NO: 150382 - RNA, 32 nt, Homo Sapiens
gaaacugguuaaaaaaggaauagggguagagu

SEQ ID NO: 150383 - RNA, 32 nt, Homo Sapiens
uccaugccacuacucugaggccuccuguguua

SEQ ID NO: 150384 - RNA, 32 nt, Homo Sapiens
guauucagacugcaugggccggccuaggaguc

SEQ ID NO: 150385 - RNA, 32 nt, Homo Sapiens
aaccaaauuuaacgugguauuuaaagguaaua

SEQ ID NO: 150386 - RNA, 32 nt, Homo Sapiens
accaccuugccggccacuccuccagcugccag

SEQ ID NO: 150387 - RNA, 32 nt, Homo Sapiens
cgcucuaauuugaaauguuuguaaucucauaa

SEQ ID NO: 150388 - RNA, 32 nt, Homo Sapiens
gucagaauguguucaaauacaugucaugaugg

SEQ ID NO: 150389 - RNA, 32 nt, Homo Sapiens
aguuggacccagcagcccggcgcgcaccgcgu

SEQ ID NO: 150390 - RNA, 32 nt, Homo Sapiens
ccgaacuggagggacaaggaucuuaacccaaa

SEQ ID NO: 150391 - RNA, 32 nt, Homo Sapiens
guuucccaggacugucaauggcaggauaccag

SEQ ID NO: 150392 - RNA, 32 nt, Homo Sapiens
cguuugcggccgcugcaggcgccgggcccugc

SEQ ID NO: 150393 - RNA, 32 nt, Homo Sapiens
gacuagguuagcauccugcccgagggcagccc

SEQ ID NO: 150394 - RNA, 32 nt, Homo Sapiens
acagcagcuucacugccugaaaaugaaaacug

SEQ ID NO: 150395 - RNA, 29 nt, Homo Sapiens
auucugcugaagauucaguuuaagaguuu

SEQ ID NO: 150396 - RNA, 32 nt, Homo Sapiens
uagucaacaacaauacacucuaguggaaaaga

SEQ ID NO: 150397 - RNA, 32 nt, Homo Sapiens
cccccaagcaccugcgcgucccggcccggccc

SEQ ID NO: 150398 - RNA, 32 nt, Homo Sapiens
aucugcguuuccucgggcccacacugucuagg

SEQ ID NO: 150399 - RNA, 32 nt, Homo Sapiens
cagagacgcacgcccggcaccaggcgcugggc

SEQ ID NO: 150400 - RNA, 32 nt, Homo Sapiens
aauucuguuucaugagauaugaucuguuaugc

SEQ ID NO: 150401 - RNA, 32 nt, Homo Sapiens
cacugcacuccagccuggguggcagagugaga

SEQ ID NO: 150402 - RNA, 32 nt, Homo Sapiens
uucugcugcugcccccaccucugcugccuccc

SEQ ID NO: 150403 - RNA, 32 nt, Homo Sapiens
acuaguaaacauuccaaauugcuacccaacau

SEQ ID NO: 150404 - RNA, 32 nt, Homo Sapiens
gagcugcuucucuuggcauuaccuguucuacu

SEQ ID NO: 150405 - RNA, 32 nt, Homo Sapiens
cccauaacagaggacuaaaaucucugaauuuu

SEQ ID NO: 150406 - RNA, 32 nt, Homo Sapiens
ugggacucuuggcucuccauggaggacaccac

SEQ ID NO: 150407 - RNA, 32 nt, Homo Sapiens
caaccgcuaugaaauguggucuacacagcacc

SEQ ID NO: 150408 - RNA, 32 nt, Homo Sapiens
agagccuauggcucugcgguuccaggagaacu

SEQ ID NO: 150409 - RNA, 32 nt, Homo Sapiens
gggagggguggcgggggaauagcggcggcagc

SEQ ID NO: 150410 - RNA, 32 nt, Homo Sapiens
cuuauucacaugccuggaaaguugauguuggu

SEQ ID NO: 150411 - RNA, 32 nt, Homo Sapiens
acuaaguuuugaaagcacuaagacauucuaga

SEQ ID NO: 150412 - RNA, 32 nt, Homo Sapiens
aaccauuggaacugugacuuugaaaggugcuc

SEQ ID NO: 150413 - RNA, 32 nt, Homo Sapiens
gaauuuauaugucuuuuuccagaguucugaug

SEQ ID NO: 150414 - RNA, 32 nt, Homo Sapiens
aaggcagagcacguauuucuccccucuaguac

SEQ ID NO: 150415 - RNA, 32 nt, Homo Sapiens
guaggagcuugucuucccugggcccccaggug

SEQ ID NO: 150416 - RNA, 32 nt, Homo Sapiens
agauugcuuuguguauuuuguaggguucucug

SEQ ID NO: 150417 - RNA, 32 nt, Homo Sapiens
gcuacugguguauguagcaguucuuaaaucag

SEQ ID NO: 150418 - RNA, 32 nt, Homo Sapiens
aacagcugugaacacugcugccucuucccagc

SEQ ID NO: 150419 - RNA, 32 nt, Homo Sapiens
ugaucuguuguaauaucaguuacaguggcagu

SEQ ID NO: 150420 - RNA, 32 nt, Homo Sapiens
aaugacugcaaguuuuuugucuuucuuucuua

SEQ ID NO: 150421 - RNA, 32 nt, Homo Sapiens
guguguauauuguauaggggcaacuguaugaa

SEQ ID NO: 150422 - RNA, 32 nt, Homo Sapiens
cuuucauggugucauauuucugucccaaaguc

SEQ ID NO: 150423 - RNA, 29 nt, Homo Sapiens
ucucuguauauguggugaaagcuuuguuc

SEQ ID NO: 150424 - RNA, 32 nt, Homo Sapiens
uguauguuagacagcaagaaaugaauacuuua

SEQ ID NO: 150425 - RNA, 32 nt, Homo Sapiens
accgcguuauguggcgggaggugaggcgggag

SEQ ID NO: 150426 - RNA, 32 nt, Homo Sapiens
cugcaacgaaaauauuuccugauucaagauuc

SEQ ID NO: 150427 - RNA, 32 nt, Homo Sapiens
auuuuugaugcaaagauaagcaguauuuuuuc

SEQ ID NO: 150428 - RNA, 32 nt, Homo Sapiens
aucuaaugcuuguguccuuauacucuauuaua

SEQ ID NO: 150429 - RNA, 32 nt, Homo Sapiens
aaucacgcauucaaagaggcucuuuacaccau

SEQ ID NO: 150430 - RNA, 32 nt, Homo Sapiens
aaauauaccuuuuuaauauaaaacagaaguuu

SEQ ID NO: 150431 - RNA, 32 nt, Homo Sapiens
ggucucugccagcuggaagugcuuggcuccac

SEQ ID NO: 150432 - RNA, 32 nt, Homo Sapiens
aguaccaacaaagggauuuugucagccaugaa

SEQ ID NO: 150433 - RNA, 32 nt, Homo Sapiens
gaugaggguuugggcccucaccacaguucuga

SEQ ID NO: 150434 - RNA, 32 nt, Homo Sapiens
agagucuagggucagaaaagcaauagucacua

SEQ ID NO: 150435 - RNA, 32 nt, Homo Sapiens
ugauuuccugcuucuccuuuucaugaguguuc

SEQ ID NO: 150436 - RNA, 32 nt, Homo Sapiens
accuaaauuacuuucgcucucuaaucagcauu

SEQ ID NO: 150437 - RNA, 32 nt, Homo Sapiens
ucgcugucgccugcugcuggcuccucacugac

SEQ ID NO: 150438 - RNA, 32 nt, Homo Sapiens
cuuugaccagcacuguuuauggcugcuauggu

SEQ ID NO: 150439 - RNA, 32 nt, Homo Sapiens
agcggggucugugacaaugcccacuccucauu

SEQ ID NO: 150440 - RNA, 32 nt, Homo Sapiens
ucuguguccacuuuuucuaaaguaaccccacc

SEQ ID NO: 150441 - RNA, 32 nt, Homo Sapiens
ugaaucuccgcuguagcgucaccuggaaggca

SEQ ID NO: 150442 - RNA, 32 nt, Homo Sapiens
acaggaagcucagccuucuccucccaagguuu

SEQ ID NO: 150443 - RNA, 32 nt, Homo Sapiens
cuugacagacaggacacagagaaggcuguggg

SEQ ID NO: 150444 - RNA, 32 nt, Homo Sapiens
aggcucgcugggcuugcuccugacgaggggac

SEQ ID NO: 150445 - RNA, 32 nt, Homo Sapiens
cggcuacugcagaggauucagagccgagucgc

SEQ ID NO: 150446 - RNA, 32 nt, Homo Sapiens
cagacuguggaggacaggaugcaggucaggga

SEQ ID NO: 150447 - RNA, 32 nt, Homo Sapiens
ccgccgggcuucccgcgccggacccaguaccu

SEQ ID NO: 150448 - RNA, 32 nt, Homo Sapiens
gggggcaaaucuuuuuccccuuucuguuaaua

SEQ ID NO: 150449 - RNA, 32 nt, Homo Sapiens
auccauacaucaagcccuuaaucccaaugugu

SEQ ID NO: 150450 - RNA, 32 nt, Homo Sapiens
uauucaacguuagaguuuaacaaaauacuccu

SEQ ID NO: 150451 - RNA, 32 nt, Homo Sapiens
gacauugaucugagauuaauuaugaccagcaa

SEQ ID NO: 150452 - RNA, 32 nt, Homo Sapiens
gaugcuauauuaacauuuaaaucaugaaaaug

SEQ ID NO: 150453 - RNA, 32 nt, Homo Sapiens
guggcugcaggccuuugaaaaguggaggaaag

SEQ ID NO: 150454 - RNA, 32 nt, Homo Sapiens
uccuauaaauguuuggguuguguuugguauug

SEQ ID NO: 150455 - RNA, 31 nt, Homo Sapiens
gccaauaaaugacaucagaauuuuaaacaua

SEQ ID NO: 150456 - RNA, 30 nt, Homo Sapiens
gcacucaugguaccggcgccggcgcagcug

SEQ ID NO: 150457 - RNA, 32 nt, Homo Sapiens
uggccucucuucagccagacccccagagcauu

SEQ ID NO: 150458 - RNA, 32 nt, Homo Sapiens
ccuaggcggaagcucagccauugaaaugacga

SEQ ID NO: 150459 - RNA, 32 nt, Homo Sapiens
aggaaagaaaaaaguuauucaaaguauuuuua

SEQ ID NO: 150460 - RNA, 32 nt, Homo Sapiens
ccacccccacucccggccccgguucccacagg

SEQ ID NO: 150461 - RNA, 32 nt, Homo Sapiens
ucacacaucaucccauccuuaauaugccugac

SEQ ID NO: 150462 - RNA, 32 nt, Homo Sapiens
caaugacuuuaacgugcuuggcugguuugucu

SEQ ID NO: 150463 - RNA, 30 nt, Homo Sapiens
cggcugcugcugcugccgccgcggaggcag

SEQ ID NO: 150464 - RNA, 32 nt, Homo Sapiens
gaggagucgaggugccggagccugcugccucg

SEQ ID NO: 150465 - RNA, 32 nt, Homo Sapiens
aucuuucucugcaaguuuuucuuuuucauuuu

SEQ ID NO: 150466 - RNA, 32 nt, Homo Sapiens
gaagaugggugggguaaggggguguguggggc

SEQ ID NO: 150467 - RNA, 32 nt, Homo Sapiens
gguuuucuccaauauuaaaaaauaucaccaaa

SEQ ID NO: 150468 - RNA, 29 nt, Homo Sapiens
cagaaauacauccaauauauacgaaaaaa

SEQ ID NO: 150469 - RNA, 32 nt, Homo Sapiens
acauuaucagaacuuaaguccuggagaucaga

SEQ ID NO: 150470 - RNA, 28 nt, Homo Sapiens
cuuaugcguggcgguggcggugcagggc

SEQ ID NO: 150471 - RNA, 32 nt, Homo Sapiens
uuaauaccuuacaagagauuguagaaggcaug

SEQ ID NO: 150472 - RNA, 32 nt, Homo Sapiens
cgauggacuuugcaugguggcccugucucauc

SEQ ID NO: 150473 - RNA, 32 nt, Homo Sapiens
cguccccgccgggcucgaaccucugcgaacac

SEQ ID NO: 150474 - RNA, 32 nt, Homo Sapiens
gguaauauuuuugacaugugauggugauaguc

SEQ ID NO: 150475 - RNA, 32 nt, Homo Sapiens
ugggaguuaacgauauaacauagcgcaaaugc

SEQ ID NO: 150476 - RNA, 32 nt, Homo Sapiens
auguuucuaaccacagagaauuucauauauau

SEQ ID NO: 150477 - RNA, 32 nt, Homo Sapiens
caucuguaugcugguagcuagugauuuacaca

SEQ ID NO: 150478 - RNA, 32 nt, Homo Sapiens
ggcggcggcgacugcaguggcuggacgauggc

SEQ ID NO: 150479 - RNA, 32 nt, Homo Sapiens
uacaaguaauuuuuaauauaaguaugucccaa

SEQ ID NO: 150480 - RNA, 32 nt, Homo Sapiens
acuugguuccuagaguagaguauugaagucgu

SEQ ID NO: 150481 - RNA, 32 nt, Homo Sapiens
uggaguaccuguuuuuccuccacacauagccc

SEQ ID NO: 150482 - RNA, 32 nt, Homo Sapiens
ccuguguugugauacuggaauuuuccaaugag

SEQ ID NO: 150483 - RNA, 32 nt, Homo Sapiens
cgcaugacgcuaaagaaauuccauguuuugcg

SEQ ID NO: 150484 - RNA, 32 nt, Homo Sapiens
agaaauaagauuauuuucugcuuuguaguucu

SEQ ID NO: 150485 - RNA, 32 nt, Homo Sapiens
gacaguugcuugaaaugaccuaaccaaaaaca

SEQ ID NO: 150486 - RNA, 32 nt, Homo Sapiens
auuucuucaguccagagaauuccuccuggcag

SEQ ID NO: 150487 - RNA, 32 nt, Homo Sapiens
cauuuuucauucaugaauauuuucaaguuuuu

SEQ ID NO: 150488 - RNA, 32 nt, Homo Sapiens
auucuguuauuuacauaucucuaauuuacuuu

SEQ ID NO: 150489 - RNA, 32 nt, Homo Sapiens
uaugaguugaacaaaaggaaaacucuagucuu

SEQ ID NO: 150490 - RNA, 28 nt, Homo Sapiens
agaaagaaaauuuaacauuugguucugg

SEQ ID NO: 150491 - RNA, 32 nt, Homo Sapiens
agcuagagauucagcaucuccaggauccucau

SEQ ID NO: 150492 - RNA, 32 nt, Homo Sapiens
cacuugcuagacucagaaaaaauacuacucuc

SEQ ID NO: 150493 - RNA, 32 nt, Homo Sapiens
uagguguucuucagcaccacugacaacacggu

SEQ ID NO: 150494 - RNA, 32 nt, Homo Sapiens
uaccuccccaucccagugcucccuuuauggca

SEQ ID NO: 150495 - RNA, 32 nt, Homo Sapiens
auauauuucuauuuaaagaggauccugaguuu

SEQ ID NO: 150496 - RNA, 32 nt, Homo Sapiens
ucaccucuagcacugggaaucagucccgugcu

SEQ ID NO: 150497 - RNA, 32 nt, Homo Sapiens
uuccuguagacacccuuuuccugcgcaacaga

SEQ ID NO: 150498 - RNA, 32 nt, Homo Sapiens
cacuaguucccauuuuaauuacuuaaaacacc

SEQ ID NO: 150499 - RNA, 32 nt, Homo Sapiens
agaaucauauccuuaaggaugaccaucauucc

SEQ ID NO: 150500 - RNA, 32 nt, Homo Sapiens
uugcugcaccuaguuccuuccacaucccuaca

SEQ ID NO: 150501 - RNA, 32 nt, Homo Sapiens
gcugcugaaaauagaaguuggcuacucucaga

SEQ ID NO: 150502 - RNA, 32 nt, Homo Sapiens
aauuuuagcaauuuauugcauuuugaaauaau

SEQ ID NO: 150503 - RNA, 32 nt, Homo Sapiens
gugaagucaggagaauuugagcuuuguuuaaa

SEQ ID NO: 150504 - RNA, 32 nt, Homo Sapiens
gaaagagacccgcuccuccacuuucaggugua

SEQ ID NO: 150505 - RNA, 32 nt, Homo Sapiens
ucuaccagcgggagcuguucagacacaccucu

SEQ ID NO: 150506 - RNA, 32 nt, Homo Sapiens
cgacccucggcuccagcccccggcgccugccg

SEQ ID NO: 150507 - RNA, 32 nt, Homo Sapiens
guccacaggcagccuuccucuggguccugcac

SEQ ID NO: 150508 - RNA, 32 nt, Homo Sapiens
acggcauguuaggugauucagaauagacaaga

SEQ ID NO: 150509 - RNA, 32 nt, Homo Sapiens
aguugguuaaaaaugcaauuggcauuaacaag

SEQ ID NO: 150510 - RNA, 32 nt, Homo Sapiens
auucaguauaugccacuuaaauaccaaagcaa

SEQ ID NO: 150511 - RNA, 32 nt, Homo Sapiens
uacccagagaugucaucucucuccagguagag

SEQ ID NO: 150512 - RNA, 32 nt, Homo Sapiens
ucuaauuauaaaauaguugaaaaugcuuuaug

SEQ ID NO: 150513 - RNA, 32 nt, Homo Sapiens
uugaucaacuguagacuggauaaagaaaaugu

SEQ ID NO: 150514 - RNA, 32 nt, Homo Sapiens
ucgaagaagccuucccaaaggcgugugaaaag

SEQ ID NO: 150515 - RNA, 32 nt, Homo Sapiens
agaaauuuuuaaagcucucaaggugauuccaa

SEQ ID NO: 150516 - RNA, 32 nt, Homo Sapiens
aggaauuccuuccugucaucuaaccucagucc

SEQ ID NO: 150517 - RNA, 32 nt, Homo Sapiens
ccagugguaggguagaagaaaacagcuguggu

SEQ ID NO: 150518 - RNA, 32 nt, Homo Sapiens
uggugcugcccagugccuugccugcugagcug

SEQ ID NO: 150519 - RNA, 32 nt, Homo Sapiens
uucugccacgugguggcccagcuccucaccca

SEQ ID NO: 150520 - RNA, 32 nt, Homo Sapiens
cgcccugccugccugccuguguggucugccuc

SEQ ID NO: 150521 - RNA, 32 nt, Homo Sapiens
ccaccugcucuguuucucucccggccccacug

SEQ ID NO: 150522 - RNA, 32 nt, Homo Sapiens
aguucagaaccaugguggaauaaagaaaugug

SEQ ID NO: 150523 - RNA, 32 nt, Homo Sapiens
guugcaaucugugcccuucauuggggacauuc

SEQ ID NO: 150524 - RNA, 32 nt, Homo Sapiens
cuuucuacugcuuuugaggcccucccucagcu

SEQ ID NO: 150525 - RNA, 32 nt, Homo Sapiens
cagauccugggguggggucuuuagguuuucuc

SEQ ID NO: 150526 - RNA, 32 nt, Homo Sapiens
acuuggucccugcccuagggaccuccagccug

SEQ ID NO: 150527 - RNA, 32 nt, Homo Sapiens
gcgggcugaggcggcccagcggcggcagguga

SEQ ID NO: 150528 - RNA, 32 nt, Homo Sapiens
acagccagguggauucacaugauccaauuuuu

SEQ ID NO: 150529 - RNA, 32 nt, Homo Sapiens
agacuucacuguggaagaaauuccuuccuuac

SEQ ID NO: 150530 - RNA, 32 nt, Homo Sapiens
uaggagacccgcguccccgcucggccuggcca

SEQ ID NO: 150531 - RNA, 32 nt, Homo Sapiens
agagccggcccagcugcacacacacaccaugc

SEQ ID NO: 150532 - RNA, 32 nt, Homo Sapiens
accuggugccuggcccagcggcaauaaagagu

SEQ ID NO: 150533 - RNA, 32 nt, Homo Sapiens
acaggcagcgcgcgacaauggcggucgcucgu

SEQ ID NO: 150534 - RNA, 32 nt, Homo Sapiens
gagccuggaaguguuacuggugccuggaacug

SEQ ID NO: 150535 - RNA, 32 nt, Homo Sapiens
aaaauaacugaaaucuggaacuaaucaacugu

SEQ ID NO: 150536 - RNA, 32 nt, Homo Sapiens
uccucuaguauuuuccauguaucaggacagag

SEQ ID NO: 150537 - RNA, 32 nt, Homo Sapiens
cuccaucuucccuucucugccagccgcgugua

SEQ ID NO: 150538 - RNA, 32 nt, Homo Sapiens
caacuucaacggaaacaaauacacucaaggga

SEQ ID NO: 150539 - RNA, 32 nt, Homo Sapiens
aacuauuuuucacuagcaaaauugguauuuua

SEQ ID NO: 150540 - RNA, 28 nt, Homo Sapiens
caaggaguuacagggggaaucaaggcag

SEQ ID NO: 150541 - RNA, 32 nt, Homo Sapiens
gggcuccccgucugcggcgcggucaggacccc

SEQ ID NO: 150542 - RNA, 32 nt, Homo Sapiens
uagggacaacccaagaggucuuuaguccucug

SEQ ID NO: 150543 - RNA, 32 nt, Homo Sapiens
caggucccugucaccucucacaugucccugcc

SEQ ID NO: 150544 - RNA, 32 nt, Homo Sapiens
uaaaacuccggauugcguuccuccccgccuuc

SEQ ID NO: 150545 - RNA, 32 nt, Homo Sapiens
aauauguugacuguuguauguuuggacuaaug

SEQ ID NO: 150546 - RNA, 32 nt, Homo Sapiens
uaugcuauuguuuaauacuggauguauguaag

SEQ ID NO: 150547 - RNA, 32 nt, Homo Sapiens
cccuguucaaccauauuuaaaaauuggaauuu

SEQ ID NO: 150548 - RNA, 32 nt, Homo Sapiens
aacuuuuuucuuuuccauuuuaaaagcaauau

SEQ ID NO: 150549 - RNA, 32 nt, Homo Sapiens
uagaggggaagcucugcugaggacucuugggc

SEQ ID NO: 150550 - RNA, 32 nt, Homo Sapiens
ucauauccucaauacagcaggacauccaggac

SEQ ID NO: 150551 - RNA, 32 nt, Homo Sapiens
gaaggugucuccaucaccaccaccagagccuc

SEQ ID NO: 150552 - RNA, 32 nt, Homo Sapiens
gacagagcucuacccacaagggcucacugaua

SEQ ID NO: 150553 - RNA, 32 nt, Homo Sapiens
cuguucccaccccaguucaucaucaucucuuu

SEQ ID NO: 150554 - RNA, 32 nt, Homo Sapiens
auuuuuuauuuuugagauggaguuuuacucuc

SEQ ID NO: 150555 - RNA, 32 nt, Homo Sapiens
uaaucuccccuuguagcuuccacucacuuauu

SEQ ID NO: 150556 - RNA, 32 nt, Homo Sapiens
aagagcuuaaaaaccaaaguugugccaguggc

SEQ ID NO: 150557 - RNA, 32 nt, Homo Sapiens
aaacaacaugcaaccaaaaacuucugacauuu

SEQ ID NO: 150558 - RNA, 32 nt, Homo Sapiens
ccaggaggcagaagauaacuaauuguguugaa

SEQ ID NO: 150559 - RNA, 32 nt, Homo Sapiens
gguaacuuguuuaauguaaaucuaauaguacu

SEQ ID NO: 150560 - RNA, 32 nt, Homo Sapiens
guggccggugugagcgcagagccgggcccugg

SEQ ID NO: 150561 - RNA, 32 nt, Homo Sapiens
aauugccaucauucuauuuuuauccaaaagua

SEQ ID NO: 150562 - RNA, 32 nt, Homo Sapiens
acccccgaagccgagcgagcuccggaggaauu

SEQ ID NO: 150563 - RNA, 32 nt, Homo Sapiens
ggaauuaucuuuauuacuucccguuuauugcc

SEQ ID NO: 150564 - RNA, 32 nt, Homo Sapiens
uauaugugucaaccaccauuucagcuauuaaa

SEQ ID NO: 150565 - RNA, 32 nt, Homo Sapiens
caggcaggggagaggaggauaucccaggcaga

SEQ ID NO: 150566 - RNA, 32 nt, Homo Sapiens
cccggcccgcggcgcgcaccguuggcgcugga

SEQ ID NO: 150567 - RNA, 32 nt, Homo Sapiens
agaguucugcacacugaggaaaagcacuuccu

SEQ ID NO: 150568 - RNA, 32 nt, Homo Sapiens
ggcccaguucccugcugcaaccagcucuccgu

SEQ ID NO: 150569 - RNA, 32 nt, Homo Sapiens
uucuaggcacugggcauuaccauagagaacaa

SEQ ID NO: 150570 - RNA, 32 nt, Homo Sapiens
cugugacuauaaagcuguuauucuuguuauac

SEQ ID NO: 150571 - RNA, 32 nt, Homo Sapiens
ugauacaguuauucuuuuuuuuaaagaacauu

SEQ ID NO: 150572 - RNA, 32 nt, Homo Sapiens
cggaccccauccccaccccagccgggcccgcu

SEQ ID NO: 150573 - RNA, 32 nt, Homo Sapiens
uggugcaggaggaaggaccgggaacccugugu

SEQ ID NO: 150574 - RNA, 32 nt, Homo Sapiens
ucaaaggucugugcccaagaauguggcuggga

SEQ ID NO: 150575 - RNA, 32 nt, Homo Sapiens
uuuaaacacacacacacacacacacacacaca

SEQ ID NO: 150576 - RNA, 32 nt, Homo Sapiens
cccugaucaccccccgucccagcccuugagug

SEQ ID NO: 150577 - RNA, 32 nt, Homo Sapiens
aacugcagcuucaaaucagugccaauguggau

SEQ ID NO: 150578 - RNA, 32 nt, Homo Sapiens
uggcagagcuggagcucaaacacgccaaggca

SEQ ID NO: 150579 - RNA, 31 nt, Homo Sapiens
ggcaccauggagcccgaagcggcggccggag

SEQ ID NO: 150580 - RNA, 32 nt, Homo Sapiens
gggagagcugucccuccuucuccaccugccca

SEQ ID NO: 150581 - RNA, 32 nt, Homo Sapiens
cguggauuuagggagggggcugugauguaaaa

SEQ ID NO: 150582 - RNA, 32 nt, Homo Sapiens
cagcaggcagcgcuggccuucuccagggaugg

SEQ ID NO: 150583 - RNA, 32 nt, Homo Sapiens
cacugcaaccucagccucccagguucaagaga

SEQ ID NO: 150584 - RNA, 32 nt, Homo Sapiens
ggacacaaccucagaauggcagccauggccuc

SEQ ID NO: 150585 - RNA, 32 nt, Homo Sapiens
acgaggccucaaacuggagcgcggcccggagc

SEQ ID NO: 150586 - RNA, 32 nt, Homo Sapiens
ucuuguuuguuuaucagccugagcauauuuca

SEQ ID NO: 150587 - RNA, 32 nt, Homo Sapiens
auuuugauacuauuuaaaaugguuucaccugu

SEQ ID NO: 150588 - RNA, 32 nt, Homo Sapiens
aguaaguuuaauccgaguguggugguguucac

SEQ ID NO: 150589 - RNA, 32 nt, Homo Sapiens
acccuuguguaucagcagcauuucugacugac

SEQ ID NO: 150590 - RNA, 32 nt, Homo Sapiens
guauauuuuaaugacuauaauguaauaaaguu

SEQ ID NO: 150591 - RNA, 32 nt, Homo Sapiens
auggucuucaacauggucuagagcuuaccagu

SEQ ID NO: 150592 - RNA, 32 nt, Homo Sapiens
gaggcucagugguucgucugcugcuggaagca

SEQ ID NO: 150593 - RNA, 32 nt, Homo Sapiens
caacaucuauagagaucuacuuuucuccuaug

SEQ ID NO: 150594 - RNA, 32 nt, Homo Sapiens
gcauccugccccaccccaaguuugacccgcgg

SEQ ID NO: 150595 - RNA, 32 nt, Homo Sapiens
aaccugggcacuccgcgccgaugccaccggcc

SEQ ID NO: 150596 - RNA, 32 nt, Homo Sapiens
cuuuuuccgcacuucuccaccccucccacauu

SEQ ID NO: 150597 - RNA, 32 nt, Homo Sapiens
cuuggccgggaggaggcugugcugcaccagca

SEQ ID NO: 150598 - RNA, 32 nt, Homo Sapiens
uggugaggcauuucucucugcugcugcggcgg

SEQ ID NO: 150599 - RNA, 32 nt, Homo Sapiens
acuuguucaggguugccaugcugcugcugagc

SEQ ID NO: 150600 - RNA, 31 nt, Homo Sapiens
cgcguccggcagcgccugcccuacacucgcc

SEQ ID NO: 150601 - RNA, 32 nt, Homo Sapiens
agugcgggcuccucuccggcgccaggcccguc

SEQ ID NO: 150602 - RNA, 32 nt, Homo Sapiens
agcagcucagucuacuggucucaucagugaaa

SEQ ID NO: 150603 - RNA, 32 nt, Homo Sapiens
ggccgcccccaccccucuggcuccugaauauc

SEQ ID NO: 150604 - RNA, 32 nt, Homo Sapiens
ccccucugcucuguccuccccuauugcgcucu

SEQ ID NO: 150605 - RNA, 32 nt, Homo Sapiens
uuuucuuucuugguuuuuguccaagaucuuug

SEQ ID NO: 150606 - RNA, 32 nt, Homo Sapiens
aguuuaggggacaaguuuuuuucuaauacuuu

SEQ ID NO: 150607 - RNA, 32 nt, Homo Sapiens
gaguuuaucucguuuguuuuaaaaguuuugcu

SEQ ID NO: 150608 - RNA, 32 nt, Homo Sapiens
uauucuauaaugguuuaagaucauggguuaca

SEQ ID NO: 150609 - RNA, 32 nt, Homo Sapiens
acucugccauuguagugugagagcagccauag

SEQ ID NO: 150610 - RNA, 32 nt, Homo Sapiens
aagccuguuuaaagagcagaugccaucuucug

SEQ ID NO: 150611 - RNA, 32 nt, Homo Sapiens
uuaacagcucuaugaagaaaauccauuuccau

SEQ ID NO: 150612 - RNA, 32 nt, Homo Sapiens
ccucacauuuccccuguuuguugccugugguc

SEQ ID NO: 150613 - RNA, 32 nt, Homo Sapiens
gcagcccagagccccaguccccgccuccccac

SEQ ID NO: 150614 - RNA, 32 nt, Homo Sapiens
auuguaacaaaguauguagaaucagaugauga

SEQ ID NO: 150615 - RNA, 32 nt, Homo Sapiens
agccgagagcauuggauccuccccgacugugg

SEQ ID NO: 150616 - RNA, 32 nt, Homo Sapiens
agauuuuccagaagcacaaacuuuguagaaua

SEQ ID NO: 150617 - RNA, 32 nt, Homo Sapiens
uaggaucaaugagagcccugagcuucuuuccc

SEQ ID NO: 150618 - RNA, 32 nt, Homo Sapiens
ggccauuccccacccaucuccucccagaacgu

SEQ ID NO: 150619 - RNA, 32 nt, Homo Sapiens
aaaaaaaaaauuauuucuuuuggagggaagug

SEQ ID NO: 150620 - RNA, 32 nt, Homo Sapiens
augucuucagccucugggugcuggccagugag

SEQ ID NO: 150621 - RNA, 32 nt, Homo Sapiens
gccaguagacauuugguuucgguccuuuaggc

SEQ ID NO: 150622 - RNA, 32 nt, Homo Sapiens
cuaucugcuuggauuuggagagccaaaaaaua

SEQ ID NO: 150623 - RNA, 32 nt, Homo Sapiens
ccuuucaaggaccagaaggauuccagagcucu

SEQ ID NO: 150624 - RNA, 32 nt, Homo Sapiens
cagacaguaaggauaguuuaaaaaagaaaaag

SEQ ID NO: 150625 - RNA, 32 nt, Homo Sapiens
gugguguuugacucuguacaaauucuaguccc

SEQ ID NO: 150626 - RNA, 32 nt, Homo Sapiens
uguguggcacagagggggagggggagggggag

SEQ ID NO: 150627 - RNA, 32 nt, Homo Sapiens
auuuuccucagagaaucuuucaucucuuugcu

SEQ ID NO: 150628 - RNA, 28 nt, Homo Sapiens
uugaugucuauuuccuugagcucuuuaa

SEQ ID NO: 150629 - RNA, 32 nt, Homo Sapiens
cagaaaccuggaucucauccuugccuuaucgc

SEQ ID NO: 150630 - RNA, 32 nt, Homo Sapiens
gucauaucugagguccaaaaccacaaugaaag

SEQ ID NO: 150631 - RNA, 32 nt, Homo Sapiens
acuguagacaccuuccacagcccaagaaagau

SEQ ID NO: 150632 - RNA, 32 nt, Homo Sapiens
agccccauucugccuccagggagucacccaaa

SEQ ID NO: 150633 - RNA, 32 nt, Homo Sapiens
gccccucaagacaggacugcuuauagcugacu

SEQ ID NO: 150634 - RNA, 32 nt, Homo Sapiens
uuugaaaccuguaucuuaauuauuuuuuuuuu

SEQ ID NO: 150635 - RNA, 32 nt, Homo Sapiens
cucugauaggaaaagcacuuuaaacauaauua

SEQ ID NO: 150636 - RNA, 32 nt, Homo Sapiens
cugccaacagcuuuuguucuggauaagccccu

SEQ ID NO: 150637 - RNA, 31 nt, Homo Sapiens
ucugccgcgucgaguucgccggcgacgucca

SEQ ID NO: 150638 - RNA, 32 nt, Homo Sapiens
uuauuggauuuuuuuucuuuuuuuuuagacag

SEQ ID NO: 150639 - RNA, 32 nt, Homo Sapiens
cagcccccugccccggcccugcuccagaaccc

SEQ ID NO: 150640 - RNA, 32 nt, Homo Sapiens
ugaggugcuaauuuugugugagaugaacuuug

SEQ ID NO: 150641 - RNA, 32 nt, Homo Sapiens
auggaguaauggucacgagguccagacccacu

SEQ ID NO: 150642 - RNA, 32 nt, Homo Sapiens
gucguguagcugagcaggccuggggcuugguu

SEQ ID NO: 150643 - RNA, 32 nt, Homo Sapiens
gcgcuucgcucuccgccgcccgaggcccgcgc

SEQ ID NO: 150644 - RNA, 32 nt, Homo Sapiens
gaaccgugccgggagagcgcgcggugcuggag

SEQ ID NO: 150645 - RNA, 32 nt, Homo Sapiens
gccaggcagcuuccgaagaccucguaagugcc

SEQ ID NO: 150646 - RNA, 32 nt, Homo Sapiens
ugugagaaggcacugaaucugccauccacauc

SEQ ID NO: 150647 - RNA, 32 nt, Homo Sapiens
gugcauguggaggccaggguaaggugaauggg

SEQ ID NO: 150648 - RNA, 32 nt, Homo Sapiens
cuggcuggcucuccugaguccucuggacaugg

SEQ ID NO: 150649 - RNA, 32 nt, Homo Sapiens
cuuccgaggaagauuaggcagagugggcagga

SEQ ID NO: 150650 - RNA, 32 nt, Homo Sapiens
uuuggugugugugacaauucuguuuuuaaugc

SEQ ID NO: 150651 - RNA, 32 nt, Homo Sapiens
cgaucugucuucugcuggacucugcuccugau

SEQ ID NO: 150652 - RNA, 32 nt, Homo Sapiens
uuucuuacaacaacagccacuguguuggcugg

SEQ ID NO: 150653 - RNA, 32 nt, Homo Sapiens
ccggguuccgccggcacucucgccaccaccgc

SEQ ID NO: 150654 - RNA, 32 nt, Homo Sapiens
aacuucuugcuuaaauugaauuucuauauuag

SEQ ID NO: 150655 - RNA, 32 nt, Homo Sapiens
ugcaugucuguucuuugguagaaauagcuuuu

SEQ ID NO: 150656 - RNA, 32 nt, Homo Sapiens
uugcccauuucccccauguugucuuucccuug

SEQ ID NO: 150657 - RNA, 32 nt, Homo Sapiens
uucuuauccaaauaguaauguucuaauugauc

SEQ ID NO: 150658 - RNA, 32 nt, Homo Sapiens
agguaggcuggaagaacaguuauuggcaagua

SEQ ID NO: 150659 - RNA, 32 nt, Homo Sapiens
agccccccaaacaaagaauuauccagcccaaa

SEQ ID NO: 150660 - RNA, 32 nt, Homo Sapiens
ccggaaguaaagcggcuccgugacggagcggc

SEQ ID NO: 150661 - RNA, 32 nt, Homo Sapiens
cuguacucugcuuuccauaccaaguaaauaug

SEQ ID NO: 150662 - RNA, 32 nt, Homo Sapiens
agagacagacacaacaguaucugaaaagaaua

SEQ ID NO: 150663 - RNA, 32 nt, Homo Sapiens
agccuuccggugcuuuacucgacgccacaaau

SEQ ID NO: 150664 - RNA, 32 nt, Homo Sapiens
uuaaauauaagaccugaaauuaugacaccaug

SEQ ID NO: 150665 - RNA, 32 nt, Homo Sapiens
acagguaauaauaauacauguacuuuuagccu

SEQ ID NO: 150666 - RNA, 32 nt, Homo Sapiens
ugcuuuuaggcuugcuggcccgcggggcuguc

SEQ ID NO: 150667 - RNA, 32 nt, Homo Sapiens
gguacccugugcucucccguggaggagagggg

SEQ ID NO: 150668 - RNA, 32 nt, Homo Sapiens
acuuucugcgcuucgaccacuaccucaacccc

SEQ ID NO: 150669 - RNA, 32 nt, Homo Sapiens
acaugaacugccaagagaggaaugggacacaa

SEQ ID NO: 150670 - RNA, 32 nt, Homo Sapiens
gcccggagcgcgcgcuggagcggcgcgaggag

SEQ ID NO: 150671 - RNA, 32 nt, Homo Sapiens
ggacaccugugggggagggagcgccuggagga

SEQ ID NO: 150672 - RNA, 32 nt, Homo Sapiens
aaaggaggaagagaagcagcagcugaggagac

SEQ ID NO: 150673 - RNA, 32 nt, Homo Sapiens
agcugagcggagcauccuuuccgggugagggg

SEQ ID NO: 150674 - RNA, 32 nt, Homo Sapiens
gcaaagagaaauguggcacuucacauuuuaaa

SEQ ID NO: 150675 - RNA, 32 nt, Homo Sapiens
gagcacugcccugggcuggccggcgccguacu

SEQ ID NO: 150676 - RNA, 31 nt, Homo Sapiens
agaaaaaugaacucaaaucaggcaagacucu

SEQ ID NO: 150677 - RNA, 32 nt, Homo Sapiens
gagcugccgccuggucccccaguucacuguau

SEQ ID NO: 150678 - RNA, 32 nt, Homo Sapiens
gggagugccccgagacccacgcacauguuggg

SEQ ID NO: 150679 - RNA, 29 nt, Homo Sapiens
ugcccuuuuuguauguagucaugggccgc

SEQ ID NO: 150680 - RNA, 32 nt, Homo Sapiens
gcaaacccaccccauuuuuuaauuuuauuauu

SEQ ID NO: 150681 - RNA, 32 nt, Homo Sapiens
cccgccaugaugcccggcucauuuucuguguu

SEQ ID NO: 150682 - RNA, 32 nt, Homo Sapiens
gaauauaaugugggauuaaauaaagcuaaucu

SEQ ID NO: 150683 - RNA, 32 nt, Homo Sapiens
ugcagacucaauaaaaucauguacauuucuga

SEQ ID NO: 150684 - RNA, 32 nt, Homo Sapiens
acccuugcaguagugaacuggaugccaugaug

SEQ ID NO: 150685 - RNA, 32 nt, Homo Sapiens
uuagggauacuuuguucucaccacugucccua

SEQ ID NO: 150686 - RNA, 32 nt, Homo Sapiens
ugcagcgggaggugaaggaggaggcggggcug

SEQ ID NO: 150687 - RNA, 32 nt, Homo Sapiens
gagaggagggucgggcagccccagggcgggcg

SEQ ID NO: 150688 - RNA, 32 nt, Homo Sapiens
cgggcccuggaggcccgggaugccaguggcuu

SEQ ID NO: 150689 - RNA, 32 nt, Homo Sapiens
auuauuuauuuucucuaucccggcauucuaau

SEQ ID NO: 150690 - RNA, 32 nt, Homo Sapiens
acagucacgcuaacaaucugguaaaugcagug

SEQ ID NO: 150691 - RNA, 32 nt, Homo Sapiens
cuugaaaaugacuuugccuuaacuuuuguaua

SEQ ID NO: 150692 - RNA, 32 nt, Homo Sapiens
cucauuucucaaagcuaaagagauauacauuc

SEQ ID NO: 150693 - RNA, 32 nt, Homo Sapiens
ugcaacgcucacgguaaaggucuacagcuuca

SEQ ID NO: 150694 - RNA, 32 nt, Homo Sapiens
aggcgggcucugcgugcgcaccgcgccuacac

SEQ ID NO: 150695 - RNA, 32 nt, Homo Sapiens
cauuguggaucacagcacacacauacauacac

SEQ ID NO: 150696 - RNA, 32 nt, Homo Sapiens
cggcgcgcaggcggggggcgcuguggucuugg

SEQ ID NO: 150697 - RNA, 32 nt, Homo Sapiens
aagguauauggacuuccacugaaucccucuca

SEQ ID NO: 150698 - RNA, 32 nt, Homo Sapiens
cugugaggucccuccgcaucacccagcucacg

SEQ ID NO: 150699 - RNA, 32 nt, Homo Sapiens
aggaggucaggaguucgagaccagccuggcca

SEQ ID NO: 150700 - RNA, 32 nt, Homo Sapiens
gccaaggaauauaguuuacagaggaaccaggu

SEQ ID NO: 150701 - RNA, 32 nt, Homo Sapiens
gggguuccgggggguggggggaggcuagacuc

SEQ ID NO: 150702 - RNA, 32 nt, Homo Sapiens
aguagagaccgugucugaaucaucauuguauu

SEQ ID NO: 150703 - RNA, 32 nt, Homo Sapiens
cccucggccuccugggcaacuugggguacaca

SEQ ID NO: 150704 - RNA, 32 nt, Homo Sapiens
ccccaggagagcccugaaaccaagucggagcc

SEQ ID NO: 150705 - RNA, 30 nt, Homo Sapiens
aucuguguccucuuugcagaaguucugugu

SEQ ID NO: 150706 - RNA, 32 nt, Homo Sapiens
uuaauuuaaugaucauuauauauguggggguu

SEQ ID NO: 150707 - RNA, 32 nt, Homo Sapiens
acuagacuucguacugugaguauugcuuauau

SEQ ID NO: 150708 - RNA, 32 nt, Homo Sapiens
cacacuccucaauaacauuauauugauugugu

SEQ ID NO: 150709 - RNA, 32 nt, Homo Sapiens
ugaggugaauaaaacgggauuuucagaaguua

SEQ ID NO: 150710 - RNA, 31 nt, Homo Sapiens
cucucuacucaggacccaggaguccaggccc

SEQ ID NO: 150711 - RNA, 32 nt, Homo Sapiens
aguagaaaaggcucaugugcugauggauaauu

SEQ ID NO: 150712 - RNA, 32 nt, Homo Sapiens
cagcacgcgcccuccgcccucccggccucgcu

SEQ ID NO: 150713 - RNA, 32 nt, Homo Sapiens
cccucaacuagccccggcaccagacucaaagg

SEQ ID NO: 150714 - RNA, 32 nt, Homo Sapiens
aagcuccuccagcagagccccguguucuuccu

SEQ ID NO: 150715 - RNA, 32 nt, Homo Sapiens
cgcagaggucugaggaggggcugggggcacgg

SEQ ID NO: 150716 - RNA, 32 nt, Homo Sapiens
aaauguaacguuuauuuuuuuaaacaauaaaa

SEQ ID NO: 150717 - RNA, 32 nt, Homo Sapiens
augggcuguuuuuauggaaguauuaacccaaa

SEQ ID NO: 150718 - RNA, 32 nt, Homo Sapiens
uccuggcgcgagcggccgcgggccaguuucua

SEQ ID NO: 150719 - RNA, 29 nt, Homo Sapiens
aggagcaguguuuuccugcuggacccgca

SEQ ID NO: 150720 - RNA, 32 nt, Homo Sapiens
cagcugacacccacccagucccugguguugcc

SEQ ID NO: 150721 - RNA, 32 nt, Homo Sapiens
ugacccugucuggguuggacccccagccccuc

SEQ ID NO: 150722 - RNA, 32 nt, Homo Sapiens
cccacguuccggggaccugaaugaggaccgac

SEQ ID NO: 150723 - RNA, 28 nt, Homo Sapiens
ugcaucuuugagaauauuauaaaaauau

SEQ ID NO: 150724 - RNA, 32 nt, Homo Sapiens
cuagcuuuauuuaaaaaucagcuggcaaagcg

SEQ ID NO: 150725 - RNA, 32 nt, Homo Sapiens
gguggaggggcuccggccgccacagccugaau

SEQ ID NO: 150726 - RNA, 32 nt, Homo Sapiens
gauuucgggggcggggcggggggcgggccuag

SEQ ID NO: 150727 - RNA, 32 nt, Homo Sapiens
augugcugccagcaggguguacggaguggagg

SEQ ID NO: 150728 - RNA, 32 nt, Homo Sapiens
auuuaucauuaauauuuaaaagaucaaauuca

SEQ ID NO: 150729 - RNA, 32 nt, Homo Sapiens
uguuucucagaaaaacaaaacaaaacaaaaca

SEQ ID NO: 150730 - RNA, 32 nt, Homo Sapiens
ggcaugugccccuggaggacaagcaugaaacg

SEQ ID NO: 150731 - RNA, 32 nt, Homo Sapiens
aggcacacuccuguagcucugucgccaaaacc

SEQ ID NO: 150732 - RNA, 32 nt, Homo Sapiens
cugugaaaauaugaggcuugauaauauuaggu

SEQ ID NO: 150733 - RNA, 32 nt, Homo Sapiens
ccaaaguacugcuuauuuguuugaagaaucca

SEQ ID NO: 150734 - RNA, 32 nt, Homo Sapiens
caggcgcggaccgcccggcguccggccggacu

SEQ ID NO: 150735 - RNA, 32 nt, Homo Sapiens
ugccacaccaaaacuuuuuacaugaagggcug

SEQ ID NO: 150736 - RNA, 32 nt, Homo Sapiens
auguacauuaugucuuuugacauguugaauuu

SEQ ID NO: 150737 - RNA, 32 nt, Homo Sapiens
cuagugguauggaggggugcugccuagcacug

SEQ ID NO: 150738 - RNA, 32 nt, Homo Sapiens
aggaccuuuuuccugcuuccuggucacuuuca

SEQ ID NO: 150739 - RNA, 32 nt, Homo Sapiens
ugcccuuucaguguaaagcugacuccaucaca

SEQ ID NO: 150740 - RNA, 32 nt, Homo Sapiens
caggagagaaacagcucuguuguucugcauug

SEQ ID NO: 150741 - RNA, 32 nt, Homo Sapiens
acagcuggcgcagcugccgcgcugcgcaccgg

SEQ ID NO: 150742 - RNA, 32 nt, Homo Sapiens
uugcccccuggccuacgucuccagcucacuga

SEQ ID NO: 150743 - RNA, 30 nt, Homo Sapiens
gcccagcgccggccuucgggucccaccuug

SEQ ID NO: 150744 - RNA, 32 nt, Homo Sapiens
ucugcugaugcacagagcugccuacaccuaga

SEQ ID NO: 150745 - RNA, 32 nt, Homo Sapiens
uggacaaggggaggagagaaaucagagguggc

SEQ ID NO: 150746 - RNA, 32 nt, Homo Sapiens
uguuaauuucugcacggucaacaaacaucaag

SEQ ID NO: 150747 - RNA, 32 nt, Homo Sapiens
guacgcucggccccaaacugguauuugucaga

SEQ ID NO: 150748 - RNA, 32 nt, Homo Sapiens
acaacuuuuacuacugcagaggcugaggccac

SEQ ID NO: 150749 - RNA, 32 nt, Homo Sapiens
ccaacccagaaauaaacuagaccuuacauagc

SEQ ID NO: 150750 - RNA, 32 nt, Homo Sapiens
gcagccccaucccauggggccccugaagaccc

SEQ ID NO: 150751 - RNA, 32 nt, Homo Sapiens
cccgaccccgucccgacccuggccgccccgag

SEQ ID NO: 150752 - RNA, 32 nt, Homo Sapiens
cucuggggccugugcugggaaccaucuggacc

SEQ ID NO: 150753 - RNA, 32 nt, Homo Sapiens
gaggggagcugcgggccagagccccggagggu

SEQ ID NO: 150754 - RNA, 32 nt, Homo Sapiens
cggcggcggcggcggcagcagcuagagcagcg

SEQ ID NO: 150755 - RNA, 27 nt, Homo Sapiens
gaguguuuuucuucaguugugccucuu

SEQ ID NO: 150756 - RNA, 32 nt, Homo Sapiens
gcacugcccuccauagacacagaugaaggggu

SEQ ID NO: 150757 - RNA, 32 nt, Homo Sapiens
cgagaccauccuguuuaacacggggaaacccc

SEQ ID NO: 150758 - RNA, 32 nt, Homo Sapiens
uucccuccacccccacaccccagccguguccc

SEQ ID NO: 150759 - RNA, 32 nt, Homo Sapiens
ccaauauugugaaaaauagcaacuauucauuu

SEQ ID NO: 150760 - RNA, 32 nt, Homo Sapiens
aucaguauuucugaauucaaauugcuugaauu

SEQ ID NO: 150761 - RNA, 32 nt, Homo Sapiens
ucaguccggcgcuucuuaccuuaccuccgucu

SEQ ID NO: 150762 - RNA, 32 nt, Homo Sapiens
caugcccagcuaauuuuuguauuuucaguaga

SEQ ID NO: 150763 - RNA, 32 nt, Homo Sapiens
ccccagcguuuucugagaaguacuucagaauc

SEQ ID NO: 150764 - RNA, 32 nt, Homo Sapiens
auggauauaguggcccaaaugagagaacaacg

SEQ ID NO: 150765 - RNA, 32 nt, Homo Sapiens
aauaucuauaauguaaauguaauuuaagaauc

SEQ ID NO: 150766 - RNA, 32 nt, Homo Sapiens
acauccgugacccagaaaguuacucuaguguu

SEQ ID NO: 150767 - RNA, 32 nt, Homo Sapiens
gaucccacgacuuuuuacugccaucugagcua

SEQ ID NO: 150768 - RNA, 31 nt, Homo Sapiens
gaggccucgauccgccuuccccgcgccgucc

SEQ ID NO: 150769 - RNA, 32 nt, Homo Sapiens
aaucuagugucuauugcaggagaaacgucccu

SEQ ID NO: 150770 - RNA, 32 nt, Homo Sapiens
gugaugaucaggacacaagcucuuccccgcug

SEQ ID NO: 150771 - RNA, 32 nt, Homo Sapiens
cagacagagcugugaaccaaccccgcucacgg

SEQ ID NO: 150772 - RNA, 32 nt, Homo Sapiens
ccaugaggccuugguucagagccccaggaaug

SEQ ID NO: 150773 - RNA, 32 nt, Homo Sapiens
ccccagguucagcgauacccaggccacgugcc

SEQ ID NO: 150774 - RNA, 32 nt, Homo Sapiens
gucugauauguaauaagcaugccauagauauu

SEQ ID NO: 150775 - RNA, 32 nt, Homo Sapiens
cugacgucuguccacgugggcgcggaagcaaa

SEQ ID NO: 150776 - RNA, 32 nt, Homo Sapiens
caccaugaagauggguuaagagucucaagguu

SEQ ID NO: 150777 - RNA, 32 nt, Homo Sapiens
uggaagacgaccagcugcugcagaagcucagg

SEQ ID NO: 150778 - RNA, 32 nt, Homo Sapiens
gacuuauaccaccgcgucuccuccuccaccac

SEQ ID NO: 150779 - RNA, 32 nt, Homo Sapiens
guugguuccaugccuggcccagccccaccuca

SEQ ID NO: 150780 - RNA, 32 nt, Homo Sapiens
auccaagcauauaaaaagccuguauauuuuuu

SEQ ID NO: 150781 - RNA, 32 nt, Homo Sapiens
cuucagggauuucaaaacacuuuacaaacacu

SEQ ID NO: 150782 - RNA, 32 nt, Homo Sapiens
aauuaccuuuucugaauccccuggaucaccua

SEQ ID NO: 150783 - RNA, 32 nt, Homo Sapiens
ccggcccugaggauggacccaggagaucccgc

SEQ ID NO: 150784 - RNA, 32 nt, Homo Sapiens
uugcaauccaaauaaagauaacccuuauucca

SEQ ID NO: 150785 - RNA, 32 nt, Homo Sapiens
gaccuuaugaguggaugaagauaccucaguug

SEQ ID NO: 150786 - RNA, 32 nt, Homo Sapiens
ugucauuagccaguuuaacugauucaaacucu

SEQ ID NO: 150787 - RNA, 32 nt, Homo Sapiens
agccuccccgcuugcgccccaaggcacgcgcg

SEQ ID NO: 150788 - RNA, 32 nt, Homo Sapiens
gacaagugagagccagccaaaaaggaaaaagc

SEQ ID NO: 150789 - RNA, 32 nt, Homo Sapiens
acgauaaguaaaagacaaaauauuuuguggug

SEQ ID NO: 150790 - RNA, 32 nt, Homo Sapiens
uggggagcaggaggcagacauguguugcuuug

SEQ ID NO: 150791 - RNA, 32 nt, Homo Sapiens
gauauuuuuaguacagaaaaacaaaacuggaa

SEQ ID NO: 150792 - RNA, 32 nt, Homo Sapiens
uuguguuuuaucuuaaccaccagaucauuccu

SEQ ID NO: 150793 - RNA, 32 nt, Homo Sapiens
auacucauauauauacacaccuacacauggcc

SEQ ID NO: 150794 - RNA, 32 nt, Homo Sapiens
aacgaaguaacgucuguaaaaccccuuccugg

SEQ ID NO: 150795 - RNA, 32 nt, Homo Sapiens
cuuucuggagggcaccaggggccuuucucuuu

SEQ ID NO: 150796 - RNA, 32 nt, Homo Sapiens
ccaacuauuaaggauuugucccaggccaaugg

SEQ ID NO: 150797 - RNA, 32 nt, Homo Sapiens
uucugacauuuuaaaaaguaauuguuauaaaa

SEQ ID NO: 150798 - RNA, 32 nt, Homo Sapiens
cccuguggguggcacggaggggcugugaccug

SEQ ID NO: 150799 - RNA, 32 nt, Homo Sapiens
gcuaaaucaaauguaauuuauagaguuaguuu

SEQ ID NO: 150800 - RNA, 32 nt, Homo Sapiens
gcccuucuuuugcugaaacugccuuacguaau

SEQ ID NO: 150801 - RNA, 32 nt, Homo Sapiens
cacucaggacaaaggggaaccagcugaacaga

SEQ ID NO: 150802 - RNA, 32 nt, Homo Sapiens
uauuauguuuuauugaauuucauuuucuagcu

SEQ ID NO: 150803 - RNA, 32 nt, Homo Sapiens
cuaaucagcauucuccagcaaugacaaagugc

SEQ ID NO: 150804 - RNA, 32 nt, Homo Sapiens
gauuuugcagauguaauugaguuaaagaucug

SEQ ID NO: 150805 - RNA, 32 nt, Homo Sapiens
uucuugauucauuuuuaccauucuuuccauag

SEQ ID NO: 150806 - RNA, 32 nt, Homo Sapiens
cgccgagccgggugacugccgcggcgggcaca

SEQ ID NO: 150807 - RNA, 32 nt, Homo Sapiens
gguugcuccggggccagguucuccuauuuccu

SEQ ID NO: 150808 - RNA, 32 nt, Homo Sapiens
aauaugcagaaagagauauucugugauagaua

SEQ ID NO: 150809 - RNA, 32 nt, Homo Sapiens
cagacaaaaauagaugacauggucaucuacaa

SEQ ID NO: 150810 - RNA, 32 nt, Homo Sapiens
cucuguccagagcgccagcagcgccaucauua

SEQ ID NO: 150811 - RNA, 32 nt, Homo Sapiens
aagugcugggauuccagaugcgagccaccgca

SEQ ID NO: 150812 - RNA, 32 nt, Homo Sapiens
ggcggggcgggcgggugccacaccugugcggg

SEQ ID NO: 150813 - RNA, 32 nt, Homo Sapiens
uugugucuuugauuuucuuaaacaacauaugg

SEQ ID NO: 150814 - RNA, 32 nt, Homo Sapiens
auggucaaacaaaauaauaucauaccuggaga

SEQ ID NO: 150815 - RNA, 32 nt, Homo Sapiens
uuuguauuuuuguagagaugagguuucaccuu

SEQ ID NO: 150816 - RNA, 28 nt, Homo Sapiens
gacaugagggcggcccgugcucugcugc

SEQ ID NO: 150817 - RNA, 32 nt, Homo Sapiens
gauggucuuugggcagggaauuaaugacagaa

SEQ ID NO: 150818 - RNA, 32 nt, Homo Sapiens
cacauagcuccauggagaugcccaugugacug

SEQ ID NO: 150819 - RNA, 32 nt, Homo Sapiens
ugucuguggugaauguauccggaaaggcaaag

SEQ ID NO: 150820 - RNA, 32 nt, Homo Sapiens
gcucgggccaccugccgcaguggaccccuggc

SEQ ID NO: 150821 - RNA, 32 nt, Homo Sapiens
agaacucaucauaaguacuugcugauggaaga

SEQ ID NO: 150822 - RNA, 32 nt, Homo Sapiens
cagcauaaaaguuaaaagugcaauucaggaag

SEQ ID NO: 150823 - RNA, 28 nt, Homo Sapiens
ugguagaaagauuuauauuucucugagu

SEQ ID NO: 150824 - RNA, 32 nt, Homo Sapiens
aacagcgccucccaccaguguccaggcaggca

SEQ ID NO: 150825 - RNA, 32 nt, Homo Sapiens
ggacgccgcuuuguugccugagguggguggcg

SEQ ID NO: 150826 - RNA, 32 nt, Homo Sapiens
accugagacauggggacaaagcucuguucuug

SEQ ID NO: 150827 - RNA, 32 nt, Homo Sapiens
ggagacaccagggguggaggguccugggagau

SEQ ID NO: 150828 - RNA, 32 nt, Homo Sapiens
accauuaaaaaucaacgcuuucucugauucug

SEQ ID NO: 150829 - RNA, 32 nt, Homo Sapiens
ucaacuucacgcuggcgcgagccccguccucc

SEQ ID NO: 150830 - RNA, 32 nt, Homo Sapiens
gcugggcccagcugccuauguaaggccuucua

SEQ ID NO: 150831 - RNA, 32 nt, Homo Sapiens
ucauacaagcauaguuaacaacaaagagccaa

SEQ ID NO: 150832 - RNA, 32 nt, Homo Sapiens
ggcgcgcaggcggggggcgcuguggucuuggc

SEQ ID NO: 150833 - RNA, 32 nt, Homo Sapiens
uuagauuugugauuuuacuauauguaaauuaa

SEQ ID NO: 150834 - RNA, 32 nt, Homo Sapiens
gugagaaugaauugcuauccaucauaauuuuu

SEQ ID NO: 150835 - RNA, 32 nt, Homo Sapiens
gggcagggccgcggacgccaggccccccguuc

SEQ ID NO: 150836 - RNA, 32 nt, Homo Sapiens
ucccggccucgcgucccggaugggacggcgcg

SEQ ID NO: 150837 - RNA, 32 nt, Homo Sapiens
acaguacuggaaaguaguuguguggcucugaa

SEQ ID NO: 150838 - RNA, 32 nt, Homo Sapiens
accuguugaaugcuuugcugcuuagaaauuuc

SEQ ID NO: 150839 - RNA, 32 nt, Homo Sapiens
cugagcagaucaauacucugcagacucgaaaa

SEQ ID NO: 150840 - RNA, 32 nt, Homo Sapiens
aucuucauucacaaguuggggcaaauucgagu

SEQ ID NO: 150841 - RNA, 32 nt, Homo Sapiens
auuaccccuggccucuagauuuuucagccuua

SEQ ID NO: 150842 - RNA, 29 nt, Homo Sapiens
auauacauauguauguuuauauacacaca

SEQ ID NO: 150843 - RNA, 32 nt, Homo Sapiens
cuacuguaaaaugggcucccugguaucuccug

SEQ ID NO: 150844 - RNA, 32 nt, Homo Sapiens
ugcaccuacaccgugacauccuccuccucagc

SEQ ID NO: 150845 - RNA, 32 nt, Homo Sapiens
gcucacugcugagacuucagagaucgcagcug

SEQ ID NO: 150846 - RNA, 32 nt, Homo Sapiens
ggugugugaggaagaaagaggggggcuggaug

SEQ ID NO: 150847 - RNA, 32 nt, Homo Sapiens
uugggggaaaauuuagaaauauaauugacagg

SEQ ID NO: 150848 - RNA, 32 nt, Homo Sapiens
cucaaacuugugaagguuaauaccauaauuuu

SEQ ID NO: 150849 - RNA, 32 nt, Homo Sapiens
gugagcugucgcgggcggcgcccggccuugcu

SEQ ID NO: 150850 - RNA, 32 nt, Homo Sapiens
acuuugccgugaagggcugugcgguucccgug

SEQ ID NO: 150851 - RNA, 28 nt, Homo Sapiens
gccaaagaagauuaacauuugggucagc

SEQ ID NO: 150852 - RNA, 32 nt, Homo Sapiens
ccuaaaagguuguuaauaguuggaggugauuc

SEQ ID NO: 150853 - RNA, 32 nt, Homo Sapiens
ccacgugagccuugggcaggacgcugcagugu

SEQ ID NO: 150854 - RNA, 32 nt, Homo Sapiens
agauccugucuccuuugccaucccgcugcaag

SEQ ID NO: 150855 - RNA, 32 nt, Homo Sapiens
uguaccuugguacagcuuuucacuuguuuagu

SEQ ID NO: 150856 - RNA, 32 nt, Homo Sapiens
ucauuucauuuucugcguuuccagcaugcccu

SEQ ID NO: 150857 - RNA, 32 nt, Homo Sapiens
aaaauguugaaaaauaagcaaauguauaccua

SEQ ID NO: 150858 - RNA, 32 nt, Homo Sapiens
caccccuguuuucggucggcccggguguucug

SEQ ID NO: 150859 - RNA, 32 nt, Homo Sapiens
gacauugaggccgggucagggagcgugagaua

SEQ ID NO: 150860 - RNA, 32 nt, Homo Sapiens
ugugucuuucccuuugacugguucauuuauau

SEQ ID NO: 150861 - RNA, 32 nt, Homo Sapiens
ccacggcuucccucuuggcucauuccaagcuu

SEQ ID NO: 150862 - RNA, 32 nt, Homo Sapiens
aauuuacagaaaaguuucaaaaauaguacaaa

SEQ ID NO: 150863 - RNA, 32 nt, Homo Sapiens
ccuuuuaaauauuuaauucuuauguggacuua

SEQ ID NO: 150864 - RNA, 32 nt, Homo Sapiens
uauuacaaacucccuuacaaaucaagacagug

SEQ ID NO: 150865 - RNA, 32 nt, Homo Sapiens
augaaucaaguuuuaauauacuguaugauggg

SEQ ID NO: 150866 - RNA, 32 nt, Homo Sapiens
gaguaucaggagaccauugaccagauagagcu

SEQ ID NO: 150867 - RNA, 32 nt, Homo Sapiens
acuuggcgcucgcccugccuggacaaucauaa

SEQ ID NO: 150868 - RNA, 32 nt, Homo Sapiens
agccccagccccagcuccuagagccaggcccg

SEQ ID NO: 150869 - RNA, 32 nt, Homo Sapiens
cuucugagaguucuuucacaccuuuggugguc

SEQ ID NO: 150870 - RNA, 32 nt, Homo Sapiens
uacagcacauucuaauuuuuuauuuuguuuag

SEQ ID NO: 150871 - RNA, 32 nt, Homo Sapiens
aacuccagugcagcugcccacccugccgccau

SEQ ID NO: 150872 - RNA, 32 nt, Homo Sapiens
uuuacuacaucauuaauugauguuacucugga

SEQ ID NO: 150873 - RNA, 32 nt, Homo Sapiens
guaagcuguaaaaauagauacaguggauggau

SEQ ID NO: 150874 - RNA, 32 nt, Homo Sapiens
ccuguuccucguuuggccaucuuucuuuuucu

SEQ ID NO: 150875 - RNA, 32 nt, Homo Sapiens
ucuuauuugacaaauaaagaaauuacaucuug

SEQ ID NO: 150876 - RNA, 32 nt, Homo Sapiens
acuacagcaagugaauccaccuugcauagagu

SEQ ID NO: 150877 - RNA, 32 nt, Homo Sapiens
aauuuuugucuccuaaacaucuucuaguuaua

SEQ ID NO: 150878 - RNA, 32 nt, Homo Sapiens
auggaugcucuuuauggaugacccuuuacagu

SEQ ID NO: 150879 - RNA, 32 nt, Homo Sapiens
guuguuuugaguuaguucuaccuagugcccau

SEQ ID NO: 150880 - RNA, 31 nt, Homo Sapiens
acuucugagccccagccccaauccagagaag

SEQ ID NO: 150881 - RNA, 32 nt, Homo Sapiens
gaaaagcucgcggaagacgagguucugcggag

SEQ ID NO: 150882 - RNA, 32 nt, Homo Sapiens
ugcgccgcguucuccuuuagccucccgggccu

SEQ ID NO: 150883 - RNA, 32 nt, Homo Sapiens
gcugaucaauuuaggacacuuccacugaagag

SEQ ID NO: 150884 - RNA, 32 nt, Homo Sapiens
ucuaguggggacguggaaaaccuuugugucca

SEQ ID NO: 150885 - RNA, 32 nt, Homo Sapiens
aggagaguguuuucauuuugugucuagguuug

SEQ ID NO: 150886 - RNA, 32 nt, Homo Sapiens
cgcugcacccacuaaugugucaucuagcauua

SEQ ID NO: 150887 - RNA, 32 nt, Homo Sapiens
cacggaggggccucuggugucaugcucccucc

SEQ ID NO: 150888 - RNA, 32 nt, Homo Sapiens
ccucuuagccccugcccuuccagcucuauccc

SEQ ID NO: 150889 - RNA, 32 nt, Homo Sapiens
cauguccagagccccaggaggaccagcaaagc

SEQ ID NO: 150890 - RNA, 32 nt, Homo Sapiens
gcucagugaggaggccagugcugcuggagcgg

SEQ ID NO: 150891 - RNA, 32 nt, Homo Sapiens
cuucaugugggaauauagagaggguucaugug

SEQ ID NO: 150892 - RNA, 32 nt, Homo Sapiens
ugauugugaacugugaagagaaugaugcagga

SEQ ID NO: 150893 - RNA, 32 nt, Homo Sapiens
cagaaaagcuguaaauguguguacaguuggca

SEQ ID NO: 150894 - RNA, 31 nt, Homo Sapiens
ggagggagggcggugacuugggggcauggag

SEQ ID NO: 150895 - RNA, 30 nt, Homo Sapiens
ccaggaugcugagccugcugcugcuggcgc

SEQ ID NO: 150896 - RNA, 32 nt, Homo Sapiens
cacuuauuauuaccuaaagaaaacauuuguuc

SEQ ID NO: 150897 - RNA, 32 nt, Homo Sapiens
ccugguaguuggauugguacauucacugcugc

SEQ ID NO: 150898 - RNA, 32 nt, Homo Sapiens
uguagaaggaaaugucugaaugucuauaaguu

SEQ ID NO: 150899 - RNA, 32 nt, Homo Sapiens
uaagugaggagaaacggcucuacaggucauga

SEQ ID NO: 150900 - RNA, 32 nt, Homo Sapiens
uaggccauaaaguguuagcaguguuaugcuau

SEQ ID NO: 150901 - RNA, 32 nt, Homo Sapiens
ggacaguggcaccugggaagccugggaguguu

SEQ ID NO: 150902 - RNA, 32 nt, Homo Sapiens
cccacccccuccccggccagccugaggcugcc

SEQ ID NO: 150903 - RNA, 32 nt, Homo Sapiens
cagcgcguccccuuugcuccagcccugcggcc

SEQ ID NO: 150904 - RNA, 32 nt, Homo Sapiens
aucugcacccucgccucuacccuaggacaaga

SEQ ID NO: 150905 - RNA, 32 nt, Homo Sapiens
cucaguguaggcccggagccugccugggaagc

SEQ ID NO: 150906 - RNA, 32 nt, Homo Sapiens
cucuggcuucugugucccacacggccuguucc

SEQ ID NO: 150907 - RNA, 32 nt, Homo Sapiens
cccccuguuuuaauguuucuuacaucuuguuu

SEQ ID NO: 150908 - RNA, 32 nt, Homo Sapiens
cacuugccaauggcugaaauggucaauaaaac

SEQ ID NO: 150909 - RNA, 32 nt, Homo Sapiens
gcgcccgcgggccaugccccacugacucuaag

SEQ ID NO: 150910 - RNA, 32 nt, Homo Sapiens
ugaucuuugugauuuacauauaauuuccuuaa

SEQ ID NO: 150911 - RNA, 32 nt, Homo Sapiens
ggaggugaguggcuuguugggaggaagcucag

SEQ ID NO: 150912 - RNA, 32 nt, Homo Sapiens
uagcugugcgccccggaacguguccaggagga

SEQ ID NO: 150913 - RNA, 32 nt, Homo Sapiens
ggaagugguucagucagguggcaaaaacauug

SEQ ID NO: 150914 - RNA, 32 nt, Homo Sapiens
aggaaaaugugggaaaguuuggacuuccuaga

SEQ ID NO: 150915 - RNA, 32 nt, Homo Sapiens
ucguuuuuuuuuuuuuuuuuuagccgccuuca

SEQ ID NO: 150916 - RNA, 32 nt, Homo Sapiens
cacagugaacccccauguacuccauguagcca

SEQ ID NO: 150917 - RNA, 32 nt, Homo Sapiens
cuaaaaacauauauuuauuuaaauugagauug

SEQ ID NO: 150918 - RNA, 32 nt, Homo Sapiens
gggaacgagaaaagugaagaugcugaaguuuu

SEQ ID NO: 150919 - RNA, 32 nt, Homo Sapiens
ccacugggugccaaguccuagcuccuccuccu

SEQ ID NO: 150920 - RNA, 32 nt, Homo Sapiens
auaucuguuggauauuugauauaauuuaaugg

SEQ ID NO: 150921 - RNA, 32 nt, Homo Sapiens
ucccucccaucccucagauccccacauuguuc

SEQ ID NO: 150922 - RNA, 32 nt, Homo Sapiens
ugaauguaaagaaugugggaaaacuuucaauc

SEQ ID NO: 150923 - RNA, 32 nt, Homo Sapiens
uggcucacaccuguaauucuagcacuuuggga

SEQ ID NO: 150924 - RNA, 32 nt, Homo Sapiens
cagagcagcugagggaggggcgcuggccacau

SEQ ID NO: 150925 - RNA, 29 nt, Homo Sapiens
aacuagaaaaguugguauuuucuaaagaa

SEQ ID NO: 150926 - RNA, 32 nt, Homo Sapiens
ugggucucugggacugccugugccguuguggg

SEQ ID NO: 150927 - RNA, 32 nt, Homo Sapiens
uucccuaaaaauuccaccaggauuaaucucua

SEQ ID NO: 150928 - RNA, 32 nt, Homo Sapiens
cgaugaucaugccacugcacuccagcuugggu

SEQ ID NO: 150929 - RNA, 32 nt, Homo Sapiens
auuucuuucuucagcuuucugacauguccagc

SEQ ID NO: 150930 - RNA, 32 nt, Homo Sapiens
aauguuuaaaaauuauuuagauugauucuccc

SEQ ID NO: 150931 - RNA, 32 nt, Homo Sapiens
aaguggagaagcaaagaucuuucugggguccu

SEQ ID NO: 150932 - RNA, 32 nt, Homo Sapiens
gcgucuuccgcgccgcgcauggagccucccgg

SEQ ID NO: 150933 - RNA, 32 nt, Homo Sapiens
cagagccugauccaggcuucggcggccggugg

SEQ ID NO: 150934 - RNA, 32 nt, Homo Sapiens
gagcuugguucuuuaaagauuuggagaagaua

SEQ ID NO: 150935 - RNA, 29 nt, Homo Sapiens
aaaguugaaaguuucuauuuucuaugaag

SEQ ID NO: 150936 - RNA, 32 nt, Homo Sapiens
uugcuuugacccccaucaaacaggaauaugug

SEQ ID NO: 150937 - RNA, 32 nt, Homo Sapiens
gcguuaaggggaggcggagagugacgcgguuu

SEQ ID NO: 150938 - RNA, 32 nt, Homo Sapiens
ugauauugccagcagacccccugccauccccc

SEQ ID NO: 150939 - RNA, 32 nt, Homo Sapiens
gcacccccauccccgccccgcacagacuccac

SEQ ID NO: 150940 - RNA, 32 nt, Homo Sapiens
agagaagugucuguguggcuccuuccacgugg

SEQ ID NO: 150941 - RNA, 32 nt, Homo Sapiens
guuucugccugccugaaagagagggcucuggg

SEQ ID NO: 150942 - RNA, 32 nt, Homo Sapiens
caugcgcuucuuccucccaggcuacccugagc

SEQ ID NO: 150943 - RNA, 32 nt, Homo Sapiens
ccucgggcucccggccggggccccaucauguu

SEQ ID NO: 150944 - RNA, 32 nt, Homo Sapiens
uaagccugcuccauggaggcagagaggcccgg

SEQ ID NO: 150945 - RNA, 32 nt, Homo Sapiens
gacucaaagggagaggucucagugguuagagc

SEQ ID NO: 150946 - RNA, 32 nt, Homo Sapiens
gagugugaauaaaacgauuggcaucacaaaca

SEQ ID NO: 150947 - RNA, 32 nt, Homo Sapiens
caguucccugcuugcacccccacauccaaagg

SEQ ID NO: 150948 - RNA, 32 nt, Homo Sapiens
cuucggagcugucagcgcccggugccugcccu

SEQ ID NO: 150949 - RNA, 32 nt, Homo Sapiens
guuucccuuucugcuuugguaaucaacacgug

SEQ ID NO: 150950 - RNA, 32 nt, Homo Sapiens
uaucaacaccaaucuaggaacucuaaugcuaa

SEQ ID NO: 150951 - RNA, 32 nt, Homo Sapiens
guugggcgcuggcguuuguguucugggcacca

SEQ ID NO: 150952 - RNA, 32 nt, Homo Sapiens
augucuagggagcacuccauggggucaucucc

SEQ ID NO: 150953 - RNA, 32 nt, Homo Sapiens
ugcagacccucaaugucuaccucugagccucc

SEQ ID NO: 150954 - RNA, 32 nt, Homo Sapiens
ccuauccccgcacuuagucauucgugguaacu

SEQ ID NO: 150955 - RNA, 32 nt, Homo Sapiens
augaaucauacacaauagguuuuuuaaaauua

SEQ ID NO: 150956 - RNA, 32 nt, Homo Sapiens
gagccgcguucccucccagggcuggagcagag

SEQ ID NO: 150957 - RNA, 32 nt, Homo Sapiens
gaugaagcccugggcuuugccugguuugcggg

SEQ ID NO: 150958 - RNA, 32 nt, Homo Sapiens
gagguggcccugccggcuccgcgcugcugugc

SEQ ID NO: 150959 - RNA, 31 nt, Homo Sapiens
ugcauucaguugacuuucaggguaaaaagaa

SEQ ID NO: 150960 - RNA, 32 nt, Homo Sapiens
cuuuugcugaagauauuuuuuauugaaucaaa

SEQ ID NO: 150961 - RNA, 32 nt, Homo Sapiens
ccugcuuugcagagaaggagccggggaccagc

SEQ ID NO: 150962 - RNA, 32 nt, Homo Sapiens
cugccggcggcccgggcgggcuggcagcuaga

SEQ ID NO: 150963 - RNA, 32 nt, Homo Sapiens
caaaaugugaaugaagcuaaugugaaugugag

SEQ ID NO: 150964 - RNA, 32 nt, Homo Sapiens
auaagauauaaaagcaaauaugacucacucau

SEQ ID NO: 150965 - RNA, 32 nt, Homo Sapiens
cuuucaguauuagugaugucaucugucacuau

SEQ ID NO: 150966 - RNA, 32 nt, Homo Sapiens
uucgcggcguggggcgggucucauugaaucuc

SEQ ID NO: 150967 - RNA, 32 nt, Homo Sapiens
uuuuagggagacaugagauaucaaucaauaua

SEQ ID NO: 150968 - RNA, 32 nt, Homo Sapiens
ggaggggggaagggcuggggcaguggcuaagg

SEQ ID NO: 150969 - RNA, 32 nt, Homo Sapiens
cuuaggaaagcagggauggagguaaauuguuu

SEQ ID NO: 150970 - RNA, 32 nt, Homo Sapiens
uaauaaauaagcacacuguuauaagcaaaaaa

SEQ ID NO: 150971 - RNA, 32 nt, Homo Sapiens
acaucaggcuguucuuuuuuuuuuuuuggagg

SEQ ID NO: 150972 - RNA, 32 nt, Homo Sapiens
uuguaaaaacaauuuauguacuaauaaaaaag

SEQ ID NO: 150973 - RNA, 32 nt, Homo Sapiens
cagggaagcagggcugcugcugcacaccgggg

SEQ ID NO: 150974 - RNA, 32 nt, Homo Sapiens
uguauuaaagggaugggaaaagaacacaugaa

SEQ ID NO: 150975 - RNA, 32 nt, Homo Sapiens
gcgggcacaggagagcgcagagggagcucugg

SEQ ID NO: 150976 - RNA, 32 nt, Homo Sapiens
cuaaaauuagucucucauccaaugaaagcugu

SEQ ID NO: 150977 - RNA, 32 nt, Homo Sapiens
ggaacagaugaaacuuuuugcaucgcuugagu

SEQ ID NO: 150978 - RNA, 32 nt, Homo Sapiens
acaagcaauacuaggcuucuauugucucuuuc

SEQ ID NO: 150979 - RNA, 32 nt, Homo Sapiens
gaauaaaacugggcaggggcaugagaauagga

SEQ ID NO: 150980 - RNA, 32 nt, Homo Sapiens
gcugggcccucccuggucuccagcuuaaacag

SEQ ID NO: 150981 - RNA, 32 nt, Homo Sapiens
cccccugcugccagccucccccguccccaaca

SEQ ID NO: 150982 - RNA, 32 nt, Homo Sapiens
uuuauaaguaucuauuuaaucuuuuguaguua

SEQ ID NO: 150983 - RNA, 32 nt, Homo Sapiens
cugaggggcagaggagcagagaugcaucagcu

SEQ ID NO: 150984 - RNA, 32 nt, Homo Sapiens
uuaaaugaauagugagucagaucuauugcuuc

SEQ ID NO: 150985 - RNA, 32 nt, Homo Sapiens
gcaagaaaaauauuugacauugugacuugacu

SEQ ID NO: 150986 - RNA, 32 nt, Homo Sapiens
uuguucuaggaaccagggauacgguggcaaaa

SEQ ID NO: 150987 - RNA, 32 nt, Homo Sapiens
ccgugagugcagcgcggggucuccauggugcu

SEQ ID NO: 150988 - RNA, 32 nt, Homo Sapiens
caguuaagccuuuguggacuccaggucccugg

SEQ ID NO: 150989 - RNA, 32 nt, Homo Sapiens
gcaacuuggaaugaguaagaagcagugcguua

SEQ ID NO: 150990 - RNA, 32 nt, Homo Sapiens
agaggaacagagccaaugauguguggguuaca

SEQ ID NO: 150991 - RNA, 32 nt, Homo Sapiens
cgaaggggggugggccgggggaggggagguuc

SEQ ID NO: 150992 - RNA, 32 nt, Homo Sapiens
cccacuccccuuccucauccccagcugugucu

SEQ ID NO: 150993 - RNA, 32 nt, Homo Sapiens
uggcacuauaaaauauaaaaacaagaaauaau

SEQ ID NO: 150994 - RNA, 32 nt, Homo Sapiens
gucugcuuaccuuguuuccuuuuaauugauaa

SEQ ID NO: 150995 - RNA, 32 nt, Homo Sapiens
uccaucccugucgaguccccuccaccucagcu

SEQ ID NO: 150996 - RNA, 32 nt, Homo Sapiens
uuuuccucuugcucuuuuuuuaccuguauauc

SEQ ID NO: 150997 - RNA, 32 nt, Homo Sapiens
ugaaaauaagcacauuugaaaacucuuagaaa

SEQ ID NO: 150998 - RNA, 32 nt, Homo Sapiens
uggguggaugcaucacacuaaggaagcgagug

SEQ ID NO: 150999 - RNA, 32 nt, Homo Sapiens
uuaacauacauaaagcacuuagaauaaugucu

SEQ ID NO: 151000 - RNA, 32 nt, Homo Sapiens
caagcacauuuuaaucauuaaauuguuuccuu

SEQ ID NO: 151001 - RNA, 32 nt, Homo Sapiens
cuuggagauuuggagaucugaugccacgauga

SEQ ID NO: 151002 - RNA, 32 nt, Homo Sapiens
aagaugaaguauuagauuuuacaucauaacac

SEQ ID NO: 151003 - RNA, 32 nt, Homo Sapiens
ggaagggggaugcacuguggaucugccaucca

SEQ ID NO: 151004 - RNA, 32 nt, Homo Sapiens
caugauuuucaaaauugauucccuuuaaagug

SEQ ID NO: 151005 - RNA, 32 nt, Homo Sapiens
gaccagaguuaaugucaugacucuucaaagau

SEQ ID NO: 151006 - RNA, 32 nt, Homo Sapiens
caccuaucagagaagcagcaucaaccuaggag

SEQ ID NO: 151007 - RNA, 32 nt, Homo Sapiens
uccucgcucgcaccugccuccggccugcacuc

SEQ ID NO: 151008 - RNA, 32 nt, Homo Sapiens
ccaccgcucagcgccucugaugccuucucauu

SEQ ID NO: 151009 - RNA, 32 nt, Homo Sapiens
ggcuccuugagccugucugagcgagggguggc

SEQ ID NO: 151010 - RNA, 32 nt, Homo Sapiens
uaauucaguguucccaugagcgccaaggcccc

SEQ ID NO: 151011 - RNA, 32 nt, Homo Sapiens
aagcaaagaagggaaaaaaugauuauuauauc

SEQ ID NO: 151012 - RNA, 32 nt, Homo Sapiens
ccccuggugcggggcgauuggcggcgggagcg

SEQ ID NO: 151013 - RNA, 32 nt, Homo Sapiens
uacucgaggggaggucugggggugucuuaaca

SEQ ID NO: 151014 - RNA, 32 nt, Homo Sapiens
uuaagugaaaaugauacauguuagaagacaug

SEQ ID NO: 151015 - RNA, 32 nt, Homo Sapiens
aggcaggcgccccuuccaccuuuccccgagac

SEQ ID NO: 151016 - RNA, 32 nt, Homo Sapiens
cagcgcuuuccacgguuucuguugcuaaaugg

SEQ ID NO: 151017 - RNA, 32 nt, Homo Sapiens
gugagaaagacgucauccgccuuuuuuuaauc

SEQ ID NO: 151018 - RNA, 32 nt, Homo Sapiens
aguaaaaagaaacccaugguauugauuuaaau

SEQ ID NO: 151019 - RNA, 32 nt, Homo Sapiens
cuauguuugaguuugauggcugcuggauccuc

SEQ ID NO: 151020 - RNA, 32 nt, Homo Sapiens
gccaccggccucauccagggccccacaguuug

SEQ ID NO: 151021 - RNA, 32 nt, Homo Sapiens
ucagucauuucugaaucuuuccacauuauauu

SEQ ID NO: 151022 - RNA, 32 nt, Homo Sapiens
cuaaauccccucacuaugaauggguuguuaaa

SEQ ID NO: 151023 - RNA, 32 nt, Homo Sapiens
gugcuccuuaugugaauuucaaacacguaugg

SEQ ID NO: 151024 - RNA, 32 nt, Homo Sapiens
caggggugaggagagcaagagggcaggggugg

SEQ ID NO: 151025 - RNA, 32 nt, Homo Sapiens
gagccaccaugcccggccccuuauuuuacuuu

SEQ ID NO: 151026 - RNA, 32 nt, Homo Sapiens
aggaugucagagcuaccagugugcugcuggga

SEQ ID NO: 151027 - RNA, 32 nt, Homo Sapiens
ugucaaauucuaagcauaugucuuaaaaggca

SEQ ID NO: 151028 - RNA, 32 nt, Homo Sapiens
ggaucccaguguugccuuaacagggugucugu

SEQ ID NO: 151029 - RNA, 32 nt, Homo Sapiens
auuuuagguuagaauuacauauuagaaacauu

SEQ ID NO: 151030 - RNA, 32 nt, Homo Sapiens
ugguagaugaaguacuuugcggugcucuguua

SEQ ID NO: 151031 - RNA, 32 nt, Homo Sapiens
ugccccgccagcccugggcagugucaggcagg

SEQ ID NO: 151032 - RNA, 32 nt, Homo Sapiens
auauucaaacuuaauggaauuauaauucucag

SEQ ID NO: 151033 - RNA, 32 nt, Homo Sapiens
cccggggagcagcucccuucccaggucagacu

SEQ ID NO: 151034 - RNA, 32 nt, Homo Sapiens
ucucuuuucuaccuguuugcucaaucgugguc

SEQ ID NO: 151035 - RNA, 32 nt, Homo Sapiens
guuauuuacauaaggaaaaauaaagugcugca

SEQ ID NO: 151036 - RNA, 32 nt, Homo Sapiens
cuggaggaagggggguugcaguggagagggac

SEQ ID NO: 151037 - RNA, 32 nt, Homo Sapiens
aaaaugcugauagugauguggacaauaaaguc

SEQ ID NO: 151038 - RNA, 32 nt, Homo Sapiens
caauaaacccucacugacuuuuuagcaauaaa

SEQ ID NO: 151039 - RNA, 32 nt, Homo Sapiens
uuccugauguucuugucauaugaguuacgggc

SEQ ID NO: 151040 - RNA, 32 nt, Homo Sapiens
uuccuaggagccagcucuaucgcuuuaaucag

SEQ ID NO: 151041 - RNA, 32 nt, Homo Sapiens
cacaaaggccccaagagcguaucuagcgcccg

SEQ ID NO: 151042 - RNA, 32 nt, Homo Sapiens
auuucuuccuuugauucugucaauguuuguuu

SEQ ID NO: 151043 - RNA, 32 nt, Homo Sapiens
ggaaucaagaacaaaauuauagugggauaauu

SEQ ID NO: 151044 - RNA, 32 nt, Homo Sapiens
uuucgaacucccuccucaauaucuagccuauu

SEQ ID NO: 151045 - RNA, 32 nt, Homo Sapiens
gugcacagaacacguggcucaaaugagaacau

SEQ ID NO: 151046 - RNA, 32 nt, Homo Sapiens
uugggguggaaggcaggcauggucaaacccau

SEQ ID NO: 151047 - RNA, 32 nt, Homo Sapiens
ugaauugcaauaaccagcuucacacaagcaua

SEQ ID NO: 151048 - RNA, 32 nt, Homo Sapiens
uuucuuuuuucuuaugugauaauuccacuagc

SEQ ID NO: 151049 - RNA, 32 nt, Homo Sapiens
cagccacuguuuauuuucuccuccccagcuca

SEQ ID NO: 151050 - RNA, 32 nt, Homo Sapiens
aucagaaagaaaaaaaucaugauauuuaaaaa

SEQ ID NO: 151051 - RNA, 32 nt, Homo Sapiens
ccuccgcccuccccgcgguggcagcggccgau

SEQ ID NO: 151052 - RNA, 32 nt, Homo Sapiens
acccggcgcggcugccugcgcgcacgcaggga

SEQ ID NO: 151053 - RNA, 32 nt, Homo Sapiens
uaauagauuaaugaaauuuaucagauacaacc

SEQ ID NO: 151054 - RNA, 28 nt, Homo Sapiens
ccgcgaguuacagagugggugagucuug

SEQ ID NO: 151055 - RNA, 32 nt, Homo Sapiens
auuaaugacaacaaaagggaaaaaagcaacuu

SEQ ID NO: 151056 - RNA, 32 nt, Homo Sapiens
gaaccucacaucuuguacuccauccugggccc

SEQ ID NO: 151057 - RNA, 31 nt, Homo Sapiens
acucugcugccgguccccucaccugcacuug

SEQ ID NO: 151058 - RNA, 32 nt, Homo Sapiens
gcagggcaggccagggaucuggacaaugggga

SEQ ID NO: 151059 - RNA, 32 nt, Homo Sapiens
auauuccaggugguuuuuagucuuuacugaug

SEQ ID NO: 151060 - RNA, 32 nt, Homo Sapiens
aaaguaagauauaguuuauuuucaugccuccc

SEQ ID NO: 151061 - RNA, 32 nt, Homo Sapiens
ggaacgagggcggagcuaaagucccagaauac

SEQ ID NO: 151062 - RNA, 32 nt, Homo Sapiens
aagaucugguucuucccuccccauccccaccc

SEQ ID NO: 151063 - RNA, 32 nt, Homo Sapiens
augcaauccuucccugcucuugcaguugcucu

SEQ ID NO: 151064 - RNA, 32 nt, Homo Sapiens
aaaccauuuuugcugaauucaucuauuucgag

SEQ ID NO: 151065 - RNA, 32 nt, Homo Sapiens
gauuuggcugacguggccccagccccgccucc

SEQ ID NO: 151066 - RNA, 32 nt, Homo Sapiens
ugcuuauuuuucucugaaauuuucaaccacuu

SEQ ID NO: 151067 - RNA, 32 nt, Homo Sapiens
ugucagccucccugucgccccucgguaccauc

SEQ ID NO: 151068 - RNA, 32 nt, Homo Sapiens
ccuaagaggaagaacuuuugggggcggggucc

SEQ ID NO: 151069 - RNA, 32 nt, Homo Sapiens
uguaauggauuuguauuuuucuuaauuuuaug

SEQ ID NO: 151070 - RNA, 32 nt, Homo Sapiens
auuggacccaaguuaggugugacacguucaca

SEQ ID NO: 151071 - RNA, 32 nt, Homo Sapiens
aaaccaaguguccucugugccuuuuuucuuuc

SEQ ID NO: 151072 - RNA, 32 nt, Homo Sapiens
auacugaagcuacuugcuguacuauaggagac

SEQ ID NO: 151073 - RNA, 32 nt, Homo Sapiens
auuuaaauuuauuuuucuuaauuauuuggggu

SEQ ID NO: 151074 - RNA, 32 nt, Homo Sapiens
ggcccugcugucaaccucuccuccaggcccug

SEQ ID NO: 151075 - RNA, 32 nt, Homo Sapiens
caacuuuggcugccuccucucagcuaggcacu

SEQ ID NO: 151076 - RNA, 32 nt, Homo Sapiens
auuagccggucaugguggugcaugucugcaaa

SEQ ID NO: 151077 - RNA, 32 nt, Homo Sapiens
aucaucucuuaucuaaauauuaaaagauaagu

SEQ ID NO: 151078 - RNA, 32 nt, Homo Sapiens
ugcguggccagacggugcuggugacucgucca

SEQ ID NO: 151079 - RNA, 32 nt, Homo Sapiens
uguacaaaggcccuguggcaagagggagugug

SEQ ID NO: 151080 - RNA, 32 nt, Homo Sapiens
ucaaagagaacccacauuugugagauuuacag

SEQ ID NO: 151081 - RNA, 32 nt, Homo Sapiens
ccauuggagucgacgccuccucagugcguccg

SEQ ID NO: 151082 - RNA, 32 nt, Homo Sapiens
uucuuuugauaaaagagucgaugccugaaaga

SEQ ID NO: 151083 - RNA, 32 nt, Homo Sapiens
gggaggagcagcccauuuccaagccgggaugc

SEQ ID NO: 151084 - RNA, 32 nt, Homo Sapiens
acaaggauaucucuucuggaguaucucaaguc

SEQ ID NO: 151085 - RNA, 32 nt, Homo Sapiens
uuccauggugaaaauauugaagcacuggacaa

SEQ ID NO: 151086 - RNA, 32 nt, Homo Sapiens
uuucaggcugguuuugguuuguauuagaucug

SEQ ID NO: 151087 - RNA, 32 nt, Homo Sapiens
acagcgacaaggccggccugugcguggugcca

SEQ ID NO: 151088 - RNA, 32 nt, Homo Sapiens
ugcuccuuaccuccccgguggucgggcgcgaa

SEQ ID NO: 151089 - RNA, 31 nt, Homo Sapiens
cgcccggagccccagcgggcgccccgcagcc

SEQ ID NO: 151090 - RNA, 32 nt, Homo Sapiens
uucacauaccauuccagaacacugcugccaug

SEQ ID NO: 151091 - RNA, 32 nt, Homo Sapiens
ucugaacaaaaauuaucuucaauuuaauaugu

SEQ ID NO: 151092 - RNA, 32 nt, Homo Sapiens
cauguauucaucuauuuuaaauugccggcgac

SEQ ID NO: 151093 - RNA, 32 nt, Homo Sapiens
uuuuuaguauuuugucuuuguaauuuacagaa

SEQ ID NO: 151094 - RNA, 32 nt, Homo Sapiens
uuuuggccccagcauucuuaauuucaaagcuu

SEQ ID NO: 151095 - RNA, 32 nt, Homo Sapiens
acucacagaaggcaucccacucaaccucaccu

SEQ ID NO: 151096 - RNA, 32 nt, Homo Sapiens
ggaaauauguaaauaaauauaucagcaaagca

SEQ ID NO: 151097 - RNA, 32 nt, Homo Sapiens
cccggcggccccgcgagcuaggaugaggggcc

SEQ ID NO: 151098 - RNA, 32 nt, Homo Sapiens
gccaagggcuucccccgccgcgcguccgggcc

SEQ ID NO: 151099 - RNA, 32 nt, Homo Sapiens
acuggagagaaaccuuauaaguguaaugagug

SEQ ID NO: 151100 - RNA, 32 nt, Homo Sapiens
aguguuuucucacgagaaaacaugucaggaaa

SEQ ID NO: 151101 - RNA, 32 nt, Homo Sapiens
gacagcugucuccgugcuuucaccagugagga

SEQ ID NO: 151102 - RNA, 32 nt, Homo Sapiens
auugaauuaaauaugaauaaauaagucccccu

SEQ ID NO: 151103 - RNA, 32 nt, Homo Sapiens
ggaggggaaguagggaggggggaaauacaguu

SEQ ID NO: 151104 - RNA, 32 nt, Homo Sapiens
cccgggaugaggaacuuuuucagaugcagauc

SEQ ID NO: 151105 - RNA, 32 nt, Homo Sapiens
augagcccgcggcuccccgucgcccgggccgu

SEQ ID NO: 151106 - RNA, 32 nt, Homo Sapiens
ucauggcagaggaggaagaugagggcacggac

SEQ ID NO: 151107 - RNA, 32 nt, Homo Sapiens
uauaacagaucuuugccaaauucuagauauua

SEQ ID NO: 151108 - RNA, 32 nt, Homo Sapiens
ccaaauccuugaccacgacuucauggagauuu

SEQ ID NO: 151109 - RNA, 32 nt, Homo Sapiens
gagucccgcccggcgugcgcggagcggggcag

SEQ ID NO: 151110 - RNA, 32 nt, Homo Sapiens
agagaaugcgauuuagggaaacgguggcagau

SEQ ID NO: 151111 - RNA, 30 nt, Homo Sapiens
caugcugcgugugcugcaagcucauuuuag

SEQ ID NO: 151112 - RNA, 32 nt, Homo Sapiens
gcgugauauuucuugcuucucaugaugcaugu

SEQ ID NO: 151113 - RNA, 32 nt, Homo Sapiens
ggccuaugcucccucccaaguaaguagaggag

SEQ ID NO: 151114 - RNA, 32 nt, Homo Sapiens
ccaaggacuugcaagcguggacccaggcucgg

SEQ ID NO: 151115 - RNA, 30 nt, Homo Sapiens
gcugguugcuagcugccgccgcugcucacc

SEQ ID NO: 151116 - RNA, 32 nt, Homo Sapiens
agaaagcacccuccaauaaacccaggcuccag

SEQ ID NO: 151117 - RNA, 32 nt, Homo Sapiens
gauguuccuucccuccaucagccaucaauccc

SEQ ID NO: 151118 - RNA, 32 nt, Homo Sapiens
agccugccagauauuguuagguccuggggcug

SEQ ID NO: 151119 - RNA, 32 nt, Homo Sapiens
ccacagguccagccggccggugagcgccuggg

SEQ ID NO: 151120 - RNA, 32 nt, Homo Sapiens
aauuuauauuuccaucuucagcccuuaaccca

SEQ ID NO: 151121 - RNA, 32 nt, Homo Sapiens
aaggacagagcgguggggacucggggucggcc

SEQ ID NO: 151122 - RNA, 32 nt, Homo Sapiens
uccaccccgcggcgcaggugaccgcugccaug

SEQ ID NO: 151123 - RNA, 32 nt, Homo Sapiens
gugaauuuguccauuguaaaucugaagaaagu

SEQ ID NO: 151124 - RNA, 31 nt, Homo Sapiens
uaaucaaauuugucuugaccaaauaaguuuc

SEQ ID NO: 151125 - RNA, 32 nt, Homo Sapiens
auccugcuagacgcgccgcgcaccgacguagg

SEQ ID NO: 151126 - RNA, 32 nt, Homo Sapiens
ugugaucaaggcugaggccaccugggaugaga

SEQ ID NO: 151127 - RNA, 32 nt, Homo Sapiens
ugaaccagaaaaugucugagauguuaagaucc

SEQ ID NO: 151128 - RNA, 32 nt, Homo Sapiens
uuuuugcugaaauaaugaagauaauaaucaau

SEQ ID NO: 151129 - RNA, 32 nt, Homo Sapiens
caggugccaaguuaaguguuuucaugcacucc

SEQ ID NO: 151130 - RNA, 32 nt, Homo Sapiens
aauuucucaagcaaaaucucugaggauuguuc

SEQ ID NO: 151131 - RNA, 32 nt, Homo Sapiens
auuucugucauccgugcucuguuuccuuuugg

SEQ ID NO: 151132 - RNA, 32 nt, Homo Sapiens
aacccuuggggauaaguuuagugaggggauug

SEQ ID NO: 151133 - RNA, 32 nt, Homo Sapiens
cgcugccggguccgccgcgcgcgcucccuccg

SEQ ID NO: 151134 - RNA, 32 nt, Homo Sapiens
agaggaauuacgugcucugugggucuccccca

SEQ ID NO: 151135 - RNA, 32 nt, Homo Sapiens
auccagcgugcaccccgccggaggaagguccc

SEQ ID NO: 151136 - RNA, 32 nt, Homo Sapiens
cacuucagcagcaucuuagauuuuaagccuca

SEQ ID NO: 151137 - RNA, 32 nt, Homo Sapiens
aggaggagucacaguggaacugucccagcuuu

SEQ ID NO: 151138 - RNA, 32 nt, Homo Sapiens
auuuucacuuuguaauuuuucuuaguauauag

SEQ ID NO: 151139 - RNA, 32 nt, Homo Sapiens
guagggacggggcgggucacgcggcgggcacc

SEQ ID NO: 151140 - RNA, 29 nt, Homo Sapiens
guuacaacuauccaaugccugauggcaga

SEQ ID NO: 151141 - RNA, 32 nt, Homo Sapiens
auccaaacagggauacaggggaggcggugggg

SEQ ID NO: 151142 - RNA, 32 nt, Homo Sapiens
agcacacagggucagggucacuucuagaaaua

SEQ ID NO: 151143 - RNA, 32 nt, Homo Sapiens
uuuccaacccacccccaaacuaaacacuaagu

SEQ ID NO: 151144 - RNA, 32 nt, Homo Sapiens
uuuuuuaaacacauuuucacaaguuuuugaga

SEQ ID NO: 151145 - RNA, 31 nt, Homo Sapiens
ccaaugauauauuccaacucgaguccacaug

SEQ ID NO: 151146 - RNA, 32 nt, Homo Sapiens
ggcuggcuuucccccucuuucccacggagccc

SEQ ID NO: 151147 - RNA, 32 nt, Homo Sapiens
gccaacaauuuaauguuuauguguugccaauu

SEQ ID NO: 151148 - RNA, 32 nt, Homo Sapiens
aaguaugacaacacauacacacuugccucucc

SEQ ID NO: 151149 - RNA, 30 nt, Homo Sapiens
augugugucuguggugccagcuacuuggaa

SEQ ID NO: 151150 - RNA, 32 nt, Homo Sapiens
agcgcucgccacccucacguggcucaccugcu

SEQ ID NO: 151151 - RNA, 32 nt, Homo Sapiens
augaugaguguuuugaaaaauguuuaguguuc

SEQ ID NO: 151152 - RNA, 32 nt, Homo Sapiens
uccccucgauccagcccucaugacccugaccc

SEQ ID NO: 151153 - RNA, 32 nt, Homo Sapiens
cacucaucuccaugaucaucucagccaacaug

SEQ ID NO: 151154 - RNA, 32 nt, Homo Sapiens
ccaaagguaguuucauuuuacuuuacuauaua

SEQ ID NO: 151155 - RNA, 32 nt, Homo Sapiens
caucccaccuaaauccaguccuccccuuggau

SEQ ID NO: 151156 - RNA, 32 nt, Homo Sapiens
aggacugcucuuucgaauccacaguguuaucu

SEQ ID NO: 151157 - RNA, 32 nt, Homo Sapiens
uuuugaacaucauauacaugcuguucucccuu

SEQ ID NO: 151158 - RNA, 32 nt, Homo Sapiens
agcucgccugccugccagcaguugcuggugag

SEQ ID NO: 151159 - RNA, 32 nt, Homo Sapiens
ugguuuugaagaacagauguauuacacuaacu

SEQ ID NO: 151160 - RNA, 32 nt, Homo Sapiens
ccuugugcgguuguguucucauuuuuauccca

SEQ ID NO: 151161 - RNA, 32 nt, Homo Sapiens
ccaugaugacacggaggccuacgucgagauag

SEQ ID NO: 151162 - RNA, 32 nt, Homo Sapiens
aggccugugggucacacguaggggcuagagcc

SEQ ID NO: 151163 - RNA, 32 nt, Homo Sapiens
gccaaauguaacuugcagaaaauuauugaaaa

SEQ ID NO: 151164 - RNA, 32 nt, Homo Sapiens
uuucggaagauaacugaaguucacaguuacca

SEQ ID NO: 151165 - RNA, 32 nt, Homo Sapiens
uuaaaaaguguaauaaaaucugacaugucaau

SEQ ID NO: 151166 - RNA, 32 nt, Homo Sapiens
ccaugccuuucugugccuuuaaugaggacuaa

SEQ ID NO: 151167 - RNA, 32 nt, Homo Sapiens
ggagcgggaaaggagcaguuucugagcugcaa

SEQ ID NO: 151168 - RNA, 32 nt, Homo Sapiens
ucacaggcgugggauccaggaugguguccucu

SEQ ID NO: 151169 - RNA, 32 nt, Homo Sapiens
ucuuccaggugggggagugccggcgcgugcag

SEQ ID NO: 151170 - RNA, 27 nt, Homo Sapiens
uaaugccauuaaugcaaauauacuucc

SEQ ID NO: 151171 - RNA, 32 nt, Homo Sapiens
cgcggcgcacgcugcaucgcggagccaggccg

SEQ ID NO: 151172 - RNA, 32 nt, Homo Sapiens
uuauaaagcauauaauaaaauaaucgugcuac

SEQ ID NO: 151173 - RNA, 30 nt, Homo Sapiens
cuuggggccaggcgcgguggcuucuguaau

SEQ ID NO: 151174 - RNA, 32 nt, Homo Sapiens
cgccccccuccccacaccuccaggaacuccac

SEQ ID NO: 151175 - RNA, 32 nt, Homo Sapiens
gcauggcgaugggggagggcgagggcgagaaa

SEQ ID NO: 151176 - RNA, 32 nt, Homo Sapiens
acuuagcagugccaguggcagcagcagccaug

SEQ ID NO: 151177 - RNA, 32 nt, Homo Sapiens
cugcucccaagccgucuaggagccgagcacgc

SEQ ID NO: 151178 - RNA, 32 nt, Homo Sapiens
gacaucuccucuaucacauuacaucauccucc

SEQ ID NO: 151179 - RNA, 32 nt, Homo Sapiens
ugaggagaguggaggccaggcugggguggggu

SEQ ID NO: 151180 - RNA, 32 nt, Homo Sapiens
aaacaguagaaauaagcaaacaauauaaagag

SEQ ID NO: 151181 - RNA, 32 nt, Homo Sapiens
ugccagccacgcguggggcgggccccuggcac

SEQ ID NO: 151182 - RNA, 32 nt, Homo Sapiens
cagccgucaucuccggggccaggggcugcagc

SEQ ID NO: 151183 - RNA, 32 nt, Homo Sapiens
gaauuaccuuuuacaagaagugcuucauugcu

SEQ ID NO: 151184 - RNA, 32 nt, Homo Sapiens
gugcucacccggcccggugccacccgggucca

SEQ ID NO: 151185 - RNA, 32 nt, Homo Sapiens
aucaaguggugacaccagcucugaaguaagca

SEQ ID NO: 151186 - RNA, 32 nt, Homo Sapiens
gaagucaggcugcagugagcugugacugcacc

SEQ ID NO: 151187 - RNA, 32 nt, Homo Sapiens
gcaucugcuguggggaucaucucacagugacc

SEQ ID NO: 151188 - RNA, 32 nt, Homo Sapiens
uccagaaaccaucauggaucugcucaggagca

SEQ ID NO: 151189 - RNA, 32 nt, Homo Sapiens
aguagagucaggcuuccuccauguuggccaug

SEQ ID NO: 151190 - RNA, 32 nt, Homo Sapiens
cuuaacucauuucagcauuaacccaaaagucc

SEQ ID NO: 151191 - RNA, 32 nt, Homo Sapiens
gucucaaauuuauaaauauuugcuuacaguuu

SEQ ID NO: 151192 - RNA, 32 nt, Homo Sapiens
caucauagacucccaagucaacgccauccugc

SEQ ID NO: 151193 - RNA, 32 nt, Homo Sapiens
cuuuggaggaagauuggaggcuggugcucacu

SEQ ID NO: 151194 - RNA, 32 nt, Homo Sapiens
accaaggcugcccccaccuggccacagccgcc

SEQ ID NO: 151195 - RNA, 32 nt, Homo Sapiens
ucccagcucugcuuuccagcgcuugguggaau

SEQ ID NO: 151196 - RNA, 32 nt, Homo Sapiens
uuguaucgugaauaaauugcacauaguagcua

SEQ ID NO: 151197 - RNA, 32 nt, Homo Sapiens
cuauucccacuuucauucaaucaaccugcacu

SEQ ID NO: 151198 - RNA, 32 nt, Homo Sapiens
cuauguagacuggucuuaacacuaauggcuug

SEQ ID NO: 151199 - RNA, 32 nt, Homo Sapiens
acagguggaaaagaaggaugaggaaggggcuu

SEQ ID NO: 151200 - RNA, 32 nt, Homo Sapiens
aggcccaggcugaaccugagcggcauguaugg

SEQ ID NO: 151201 - RNA, 32 nt, Homo Sapiens
aaccagagagaaucaacagaucaaugacauag

SEQ ID NO: 151202 - RNA, 32 nt, Homo Sapiens
cagaaaggcccacgugcagagccccugugucu

SEQ ID NO: 151203 - RNA, 30 nt, Homo Sapiens
ucgagaggcaggcaggggaucccggacccu

SEQ ID NO: 151204 - RNA, 32 nt, Homo Sapiens
ugcgcgcucgcggcuugccgcggcccggagcg

SEQ ID NO: 151205 - RNA, 32 nt, Homo Sapiens
acagcugucugguucaggccaagccccuuugc

SEQ ID NO: 151206 - RNA, 32 nt, Homo Sapiens
gcugaacuccguccaaggugcccgcaggcucc

SEQ ID NO: 151207 - RNA, 32 nt, Homo Sapiens
aacaugauggaauuuguaaaucuuggcauuga

SEQ ID NO: 151208 - RNA, 32 nt, Homo Sapiens
ugcgaaggggagagagcgagguuccuuagugg

SEQ ID NO: 151209 - RNA, 32 nt, Homo Sapiens
cacagguuuagaucugaagcauuuucacuauu

SEQ ID NO: 151210 - RNA, 32 nt, Homo Sapiens
ucuuuaaaugcuuuauaauuuuacacuaccuu

SEQ ID NO: 151211 - RNA, 32 nt, Homo Sapiens
ggcuggccggcuguggggagccaggcggccgc

SEQ ID NO: 151212 - RNA, 32 nt, Homo Sapiens
uggccccauaguccaggcagggaccaagauuc

SEQ ID NO: 151213 - RNA, 32 nt, Homo Sapiens
ccaccccagccagcugggcagggccggugugg

SEQ ID NO: 151214 - RNA, 32 nt, Homo Sapiens
gacauuuuuccugauauguagagcagucuguu

SEQ ID NO: 151215 - RNA, 27 nt, Homo Sapiens
aauacuauuaaacagcuuuuuacuuuc

SEQ ID NO: 151216 - RNA, 32 nt, Homo Sapiens
uuuguccuuuuucucagcaucagagccagaca

SEQ ID NO: 151217 - RNA, 32 nt, Homo Sapiens
cauaaaaauauaagugugcaacaucaauauca

SEQ ID NO: 151218 - RNA, 32 nt, Homo Sapiens
agcagcacccccagcccgggcgguuccgggga

SEQ ID NO: 151219 - RNA, 32 nt, Homo Sapiens
uggaagcccugaagucaacacuccauggagaa

SEQ ID NO: 151220 - RNA, 32 nt, Homo Sapiens
cuggcgguugugggcuucggagccugaugacu

SEQ ID NO: 151221 - RNA, 32 nt, Homo Sapiens
uugguuuccuuccuccccaaauugugacagga

SEQ ID NO: 151222 - RNA, 32 nt, Homo Sapiens
cuucccucgguuccagucuucccuuuaaaagc

SEQ ID NO: 151223 - RNA, 32 nt, Homo Sapiens
guguugggagacgaugaugauguccauugcug

SEQ ID NO: 151224 - RNA, 32 nt, Homo Sapiens
ugucccugagacugcgggaggcaggggaugca

SEQ ID NO: 151225 - RNA, 32 nt, Homo Sapiens
agguccagcuacugccugccaguggccucuuu

SEQ ID NO: 151226 - RNA, 32 nt, Homo Sapiens
gagcccaggagaggaagaacaaacaaacuacg

SEQ ID NO: 151227 - RNA, 32 nt, Homo Sapiens
cgucccucucgcguccccgcccggcgccacgc

SEQ ID NO: 151228 - RNA, 32 nt, Homo Sapiens
aaauuacaggaaauggugccuuugaaaauuag

SEQ ID NO: 151229 - RNA, 32 nt, Homo Sapiens
gcacuaaaggaagaggaagaaggagauuggga

SEQ ID NO: 151230 - RNA, 32 nt, Homo Sapiens
ucugcgcccccggcugcaccugccccccuggu

SEQ ID NO: 151231 - RNA, 32 nt, Homo Sapiens
accucucccucaugguuucaaacacuucuccu

SEQ ID NO: 151232 - RNA, 32 nt, Homo Sapiens
ugggcucuggggauaggcucugauuaauuagu

SEQ ID NO: 151233 - RNA, 32 nt, Homo Sapiens
accagaaccuucccuucuccuagaacgccccu

SEQ ID NO: 151234 - RNA, 32 nt, Homo Sapiens
uucaggcgugcaagcuggcccaggccaauggu

SEQ ID NO: 151235 - RNA, 32 nt, Homo Sapiens
uuugcguggggcucgcagcugccaccgcuucc

SEQ ID NO: 151236 - RNA, 32 nt, Homo Sapiens
uccccaguauuaucuuacuugcaaaauggaga

SEQ ID NO: 151237 - RNA, 32 nt, Homo Sapiens
gugauuauauugauuugguacacaguaaaugg

SEQ ID NO: 151238 - RNA, 32 nt, Homo Sapiens
uauuuucaguuauaugugcugaaauaauuacu

SEQ ID NO: 151239 - RNA, 30 nt, Homo Sapiens
uaaagcugcaggcagcaccacuugagauuu

SEQ ID NO: 151240 - RNA, 32 nt, Homo Sapiens
cauugauaauauauuucaccuuugccacgucu

SEQ ID NO: 151241 - RNA, 32 nt, Homo Sapiens
uuccaaauuuucuucuauuuuaugccuuuaaa

SEQ ID NO: 151242 - RNA, 32 nt, Homo Sapiens
uuuguggaaaaauauaagacugaucuauaagc

SEQ ID NO: 151243 - RNA, 32 nt, Homo Sapiens
caccuccccccggccugggcagcgcucgcccg

SEQ ID NO: 151244 - RNA, 32 nt, Homo Sapiens
aggcaauacuuauuauccacaggguaacagug

SEQ ID NO: 151245 - RNA, 32 nt, Homo Sapiens
cugcgccuccuagugggcucccggggcaccgu

SEQ ID NO: 151246 - RNA, 32 nt, Homo Sapiens
agagcagucaacauucuaaguagugaauggcc

SEQ ID NO: 151247 - RNA, 32 nt, Homo Sapiens
caaguggaacaucagcuggaagaaguaacgug

SEQ ID NO: 151248 - RNA, 32 nt, Homo Sapiens
guuuucaaucuggucacucuuuugggccaaac

SEQ ID NO: 151249 - RNA, 32 nt, Homo Sapiens
aauuccuagauauauaucuuugaugaaacggu

SEQ ID NO: 151250 - RNA, 32 nt, Homo Sapiens
uaguaacaagaguggcagucugcacaaccuag

SEQ ID NO: 151251 - RNA, 32 nt, Homo Sapiens
cgcguccccucgccgaguccccucgccagauu

SEQ ID NO: 151252 - RNA, 32 nt, Homo Sapiens
guucaaaagcaucaaccaaggcaagaggacca

SEQ ID NO: 151253 - RNA, 32 nt, Homo Sapiens
gcaauaauuuucagguaucucccuuuggcaaa

SEQ ID NO: 151254 - RNA, 32 nt, Homo Sapiens
gauaguagggugaugcccacuuugugccacau

SEQ ID NO: 151255 - RNA, 32 nt, Homo Sapiens
gaggugucaguggcagauagggaugcuucuug

SEQ ID NO: 151256 - RNA, 32 nt, Homo Sapiens
ggcauuggucugaacuguggguggaugggugg

SEQ ID NO: 151257 - RNA, 32 nt, Homo Sapiens
caaccauaucuagaaauagcuguuugucaagu

SEQ ID NO: 151258 - RNA, 32 nt, Homo Sapiens
agcagccaccgccgcgucccucucuccacgag

SEQ ID NO: 151259 - RNA, 32 nt, Homo Sapiens
ccggaucuggccgggggccggcggcggugugg

SEQ ID NO: 151260 - RNA, 32 nt, Homo Sapiens
ccaguguauuguaaaauugacacacacuaaua

SEQ ID NO: 151261 - RNA, 32 nt, Homo Sapiens
ccccauccgcggcugguccggcccugggaccg

SEQ ID NO: 151262 - RNA, 32 nt, Homo Sapiens
gugugcugucuccuucccacauccucagcccc

SEQ ID NO: 151263 - RNA, 32 nt, Homo Sapiens
auguggacacccccaaccuggaccgucuggcc

SEQ ID NO: 151264 - RNA, 32 nt, Homo Sapiens
uucccugagcccaggccuggcccgccagccuc

SEQ ID NO: 151265 - RNA, 32 nt, Homo Sapiens
agaccucaauaguggaagaaauccauauccua

SEQ ID NO: 151266 - RNA, 32 nt, Homo Sapiens
agccgccuuucugcucccggaaugcuucaccu

SEQ ID NO: 151267 - RNA, 32 nt, Homo Sapiens
cuugaauaucccaggaaaaauaaaacggcaga

SEQ ID NO: 151268 - RNA, 32 nt, Homo Sapiens
agccagagccagacgcgccggagcgggcgccu

SEQ ID NO: 151269 - RNA, 32 nt, Homo Sapiens
gauaauucuccccucccauguggcucgugcug

SEQ ID NO: 151270 - RNA, 32 nt, Homo Sapiens
agggaaaagagacccgaugccuuaaugggagu

SEQ ID NO: 151271 - RNA, 32 nt, Homo Sapiens
uuuggccuaaguaaaaagucagauuucauuuc

SEQ ID NO: 151272 - RNA, 32 nt, Homo Sapiens
ccccccaaugcaggccacuucuccucccuccu

SEQ ID NO: 151273 - RNA, 32 nt, Homo Sapiens
acuuaugugcuaguguugacuuugaaauuaua

SEQ ID NO: 151274 - RNA, 32 nt, Homo Sapiens
cuaguggcauuugauaauauagagaugacuuu

SEQ ID NO: 151275 - RNA, 32 nt, Homo Sapiens
cacccuugccugucugagagugucucaaaggg

SEQ ID NO: 151276 - RNA, 32 nt, Homo Sapiens
ggaccaugacaagguuccccuugccuccccca

SEQ ID NO: 151277 - RNA, 32 nt, Homo Sapiens
gccuuuaauuaacauaauauuaacuuuugcug

SEQ ID NO: 151278 - RNA, 32 nt, Homo Sapiens
ugugagcgcgggugugaggcggugcgcagggg

SEQ ID NO: 151279 - RNA, 32 nt, Homo Sapiens
ucuuaagggcuaaaaguuuauaaucaucccuu

SEQ ID NO: 151280 - RNA, 32 nt, Homo Sapiens
gaggaacucugagucacccaugccagcaucag

SEQ ID NO: 151281 - RNA, 32 nt, Homo Sapiens
uacauguucgguacuaagucauuuucagggga

SEQ ID NO: 151282 - RNA, 32 nt, Homo Sapiens
cuucaucaacagguauugaauuucauaaaaag

SEQ ID NO: 151283 - RNA, 32 nt, Homo Sapiens
acagccaccaaaaagggcacggcggcccccua

SEQ ID NO: 151284 - RNA, 32 nt, Homo Sapiens
aucaugauauugcacauaucccugcuucugcu

SEQ ID NO: 151285 - RNA, 32 nt, Homo Sapiens
ugauuuuguucuagauuuccuguagcugugaa

SEQ ID NO: 151286 - RNA, 32 nt, Homo Sapiens
gcacagccaagcccuaccucucgguuaucuuu

SEQ ID NO: 151287 - RNA, 32 nt, Homo Sapiens
ugcaggggucgcggccggcuggagcugggagu

SEQ ID NO: 151288 - RNA, 32 nt, Homo Sapiens
uuugugaagcaguauaaaaugguugccuuuuc

SEQ ID NO: 151289 - RNA, 32 nt, Homo Sapiens
uguguggaaugggcugugauagacucaaacau

SEQ ID NO: 151290 - RNA, 32 nt, Homo Sapiens
cagucggcccucgggggaggccuugcccaccu

SEQ ID NO: 151291 - RNA, 32 nt, Homo Sapiens
uuccccagcuucugccccaauacacauaccuc

SEQ ID NO: 151292 - RNA, 32 nt, Homo Sapiens
augagccaccgcgcccggccacguguaaauuc

SEQ ID NO: 151293 - RNA, 32 nt, Homo Sapiens
cuucccagaucuugaagaaaaucauauaaaaa

SEQ ID NO: 151294 - RNA, 32 nt, Homo Sapiens
gaugcuaugguuugccauuauuuaauauauga

SEQ ID NO: 151295 - RNA, 32 nt, Homo Sapiens
ccaacuaauauuuggaauuuucauauacgugg

SEQ ID NO: 151296 - RNA, 32 nt, Homo Sapiens
ggaagaggaaguuuaagaaguaggacucugcu

SEQ ID NO: 151297 - RNA, 30 nt, Homo Sapiens
uccugauggcccggcauggguuaccgcugc

SEQ ID NO: 151298 - RNA, 32 nt, Homo Sapiens
caagccccuccccugggcucucccaggcaggg

SEQ ID NO: 151299 - RNA, 32 nt, Homo Sapiens
cugccccgucuuucugccgcagcccucgcaga

SEQ ID NO: 151300 - RNA, 32 nt, Homo Sapiens
auagguugcuaaggaggggagucagauugugg

SEQ ID NO: 151301 - RNA, 32 nt, Homo Sapiens
ugcuauaaguucaaaucuguuguauuacccua

SEQ ID NO: 151302 - RNA, 32 nt, Homo Sapiens
uccuucaaucaggggcugcugcugagcuuaug

SEQ ID NO: 151303 - RNA, 32 nt, Homo Sapiens
caccccugcccuccccuucaucccaggggguc

SEQ ID NO: 151304 - RNA, 32 nt, Homo Sapiens
gagccaguagagacagcuguagauaacaauag

SEQ ID NO: 151305 - RNA, 32 nt, Homo Sapiens
guggcuguuaaccacccgccccgcccccuccc

SEQ ID NO: 151306 - RNA, 32 nt, Homo Sapiens
acauguuuuaucauccucucaaaguuggugga

SEQ ID NO: 151307 - RNA, 25 nt, Homo Sapiens
auggcggcgcccgggcugcggcugg

SEQ ID NO: 151308 - RNA, 32 nt, Homo Sapiens
ugagugcuugaaaugugucauacuguuuuagg

SEQ ID NO: 151309 - RNA, 32 nt, Homo Sapiens
ccuaacccacugcuuuuccccagcucucugcc

SEQ ID NO: 151310 - RNA, 32 nt, Homo Sapiens
ugacagaucuucugucauuuauuuuucccaag

SEQ ID NO: 151311 - RNA, 32 nt, Homo Sapiens
aauguuuugcucccagaagagaaucagaucau

SEQ ID NO: 151312 - RNA, 32 nt, Homo Sapiens
gccuucauuuuauguuuuuucuuaacuguuau

SEQ ID NO: 151313 - RNA, 32 nt, Homo Sapiens
uuguaagauucuguuuuuagcauaaaaaucaa

SEQ ID NO: 151314 - RNA, 32 nt, Homo Sapiens
ucauuaauguguucaucaaguuucacaucuaa

SEQ ID NO: 151315 - RNA, 32 nt, Homo Sapiens
ugucucacaccuguaaucccagcacuuugaga

SEQ ID NO: 151316 - RNA, 32 nt, Homo Sapiens
accuccgagaccccgccucaccucugagaccc

SEQ ID NO: 151317 - RNA, 32 nt, Homo Sapiens
uauuuauacauuauuuuacaguuuacaggaua

SEQ ID NO: 151318 - RNA, 32 nt, Homo Sapiens
uaaaaugaagaaaaauuaaaaaauagcucuau

SEQ ID NO: 151319 - RNA, 32 nt, Homo Sapiens
cuuccucuagguguuuccacuccacccuggcc

SEQ ID NO: 151320 - RNA, 32 nt, Homo Sapiens
guauaugugcaucugccugucuccauguaggu

SEQ ID NO: 151321 - RNA, 32 nt, Homo Sapiens
aggucucgucccagcccuccccaucucggggc

SEQ ID NO: 151322 - RNA, 32 nt, Homo Sapiens
cuggaaugucugaaaaguaguuaaugcuuuuu

SEQ ID NO: 151323 - RNA, 32 nt, Homo Sapiens
aaucuggcuuuaggguuaaaucauuuaagguc

SEQ ID NO: 151324 - RNA, 32 nt, Homo Sapiens
guaguuccaaauaguauuuuuguugucaaacu

SEQ ID NO: 151325 - RNA, 32 nt, Homo Sapiens
cggcgcugcugggccacggcucugccaugcag

SEQ ID NO: 151326 - RNA, 32 nt, Homo Sapiens
augguuaaacauuuucccacucauucugaauu

SEQ ID NO: 151327 - RNA, 32 nt, Homo Sapiens
acccuguauuagguagcgucaggugcuguaac

SEQ ID NO: 151328 - RNA, 32 nt, Homo Sapiens
guauuuauguaugaguuuuuccuauuuauuuu

SEQ ID NO: 151329 - RNA, 30 nt, Homo Sapiens
uagacauggcgagcgacuccccggcucgaa

SEQ ID NO: 151330 - RNA, 32 nt, Homo Sapiens
cuuucaaggguaaaaaccuuguuucauucauc

SEQ ID NO: 151331 - RNA, 32 nt, Homo Sapiens
uugaggaggcgagucuagcagauucuuucaga

SEQ ID NO: 151332 - RNA, 32 nt, Homo Sapiens
cuucauggagccuuuuuuccucccccaucccc

SEQ ID NO: 151333 - RNA, 32 nt, Homo Sapiens
agauagcugaccgagcucugguaaaucucuuu

SEQ ID NO: 151334 - RNA, 32 nt, Homo Sapiens
ccccaccuguguuuggcccaaaaccucacaau

SEQ ID NO: 151335 - RNA, 32 nt, Homo Sapiens
ucaggugauccuccugccucagccucuuaagu

SEQ ID NO: 151336 - RNA, 32 nt, Homo Sapiens
cgcuugguggccugggaucuggcacacucccu

SEQ ID NO: 151337 - RNA, 30 nt, Homo Sapiens
ugguuagagaagcuuguauuacuguagcca

SEQ ID NO: 151338 - RNA, 32 nt, Homo Sapiens
cagagcugcccucuccugggcauggccucccc

SEQ ID NO: 151339 - RNA, 32 nt, Homo Sapiens
caaaagcccccagaagccuccacacagccagc

SEQ ID NO: 151340 - RNA, 32 nt, Homo Sapiens
ugucgguuugaaaagucugugggagagagguu

SEQ ID NO: 151341 - RNA, 32 nt, Homo Sapiens
uugcuuugaaagauuaccuacuauuuuaugau

SEQ ID NO: 151342 - RNA, 31 nt, Homo Sapiens
gguuguguaguuugucucagagccucucgug

SEQ ID NO: 151343 - RNA, 32 nt, Homo Sapiens
ugcuguccagagcugaacauagacuugcacuu

SEQ ID NO: 151344 - RNA, 32 nt, Homo Sapiens
uuggagcccucgggcuuuugcggccucucggg

SEQ ID NO: 151345 - RNA, 32 nt, Homo Sapiens
uuuguaguuuuuaauuggggugugggaggggc

SEQ ID NO: 151346 - RNA, 32 nt, Homo Sapiens
augaugcugccucuccucucuguguugucugg

SEQ ID NO: 151347 - RNA, 32 nt, Homo Sapiens
aguuuuuagaaucguuuuuagaggguggugug

SEQ ID NO: 151348 - RNA, 32 nt, Homo Sapiens
ucugccccacccaagcccaaacuugguuucug

SEQ ID NO: 151349 - RNA, 32 nt, Homo Sapiens
uucucaucaaggaggcagagaccccuggugga

SEQ ID NO: 151350 - RNA, 32 nt, Homo Sapiens
acaggggaggaagagggauggggcugcaagcc

SEQ ID NO: 151351 - RNA, 32 nt, Homo Sapiens
gaaucuguuggcgaaucagggauuugggaguc

SEQ ID NO: 151352 - RNA, 32 nt, Homo Sapiens
cuggugugaacaggcaaucgagcuuuccuggu

SEQ ID NO: 151353 - RNA, 32 nt, Homo Sapiens
ugguggcugaauuuuccaacccacccccaaac

SEQ ID NO: 151354 - RNA, 32 nt, Homo Sapiens
cucauugugaaacggaaauauuugaagugaga

SEQ ID NO: 151355 - RNA, 32 nt, Homo Sapiens
cagccaauuuuuguacuuuuaguagagauggg

SEQ ID NO: 151356 - RNA, 32 nt, Homo Sapiens
ggacuuuggggggcugugagggaaauauacug

SEQ ID NO: 151357 - RNA, 32 nt, Homo Sapiens
gauauuccucuugaagacccagauagaccugu

SEQ ID NO: 151358 - RNA, 32 nt, Homo Sapiens
guuugcuugcuugccaacacaaugaagauaau

SEQ ID NO: 151359 - RNA, 32 nt, Homo Sapiens
acguaagccggaccucgcacuccggucccggu

SEQ ID NO: 151360 - RNA, 32 nt, Homo Sapiens
uuuggaucaaggaagcuaaaagaauuacaggg

SEQ ID NO: 151361 - RNA, 32 nt, Homo Sapiens
ucacacagacccgaggcagagaacagcucauu

SEQ ID NO: 151362 - RNA, 32 nt, Homo Sapiens
uuuuaacuguuuuucuauuagcucuagcugca

SEQ ID NO: 151363 - RNA, 32 nt, Homo Sapiens
cuggcucccgcucuugaggaucuugcuugucc

SEQ ID NO: 151364 - RNA, 32 nt, Homo Sapiens
acugggaccuugauccugccugcccggccgcc

SEQ ID NO: 151365 - RNA, 32 nt, Homo Sapiens
cucuaccugugcuaugugugagggaggcccgc

SEQ ID NO: 151366 - RNA, 32 nt, Homo Sapiens
ucauuuuuccuucucccuucccuuuggacagu

SEQ ID NO: 151367 - RNA, 32 nt, Homo Sapiens
cauccugcaucucccaucaccuccucaaagaa

SEQ ID NO: 151368 - RNA, 32 nt, Homo Sapiens
cuaauagaauaaaagugcaacagaagaauuug

SEQ ID NO: 151369 - RNA, 32 nt, Homo Sapiens
gagugcuuacacuuauggagcuaacauuuuca

SEQ ID NO: 151370 - RNA, 32 nt, Homo Sapiens
ccuuugccucuccagcagcaguagccagggcu

SEQ ID NO: 151371 - RNA, 32 nt, Homo Sapiens
ucagaauaaaauguacuguauacuuuuccuca

SEQ ID NO: 151372 - RNA, 32 nt, Homo Sapiens
ggucaggcagcuucuuuuuuuuuuuuuucaag

SEQ ID NO: 151373 - RNA, 32 nt, Homo Sapiens
gcccgugccccgcucaauccccgcaucaaucc

SEQ ID NO: 151374 - RNA, 32 nt, Homo Sapiens
aaacauaucauccuuggagaggaaguaaucaa

SEQ ID NO: 151375 - RNA, 32 nt, Homo Sapiens
uguauauauuuucaaacuuuguuuccugggua

SEQ ID NO: 151376 - RNA, 32 nt, Homo Sapiens
ucaugaagaaaagacagaggcagaaaggaaga

SEQ ID NO: 151377 - RNA, 32 nt, Homo Sapiens
gaguaauugcuguuugcacuuacugcaugguc

SEQ ID NO: 151378 - RNA, 32 nt, Homo Sapiens
ggaugguacuuuucuuuuuaacuuuuauuuua

SEQ ID NO: 151379 - RNA, 32 nt, Homo Sapiens
uugagaagggaccuccugaaaacucgcucuuu

SEQ ID NO: 151380 - RNA, 32 nt, Homo Sapiens
uauauaaaaauuauauuaaauagaugcugcua

SEQ ID NO: 151381 - RNA, 32 nt, Homo Sapiens
gacucuguaacauaaacuugaguuuuguaauu

SEQ ID NO: 151382 - RNA, 32 nt, Homo Sapiens
cagcggccagcuccucgccuccccucggccgu

SEQ ID NO: 151383 - RNA, 32 nt, Homo Sapiens
cuuccuugaagccccaggugccacuuugcugg

SEQ ID NO: 151384 - RNA, 32 nt, Homo Sapiens
gcgggggaagcagcgugagcagccggaggauc

SEQ ID NO: 151385 - RNA, 32 nt, Homo Sapiens
cuuaauuguaaaaggaagaaaucugaaaguua

SEQ ID NO: 151386 - RNA, 31 nt, Homo Sapiens
cguguggaugccugccugcccugcccugugc

SEQ ID NO: 151387 - RNA, 32 nt, Homo Sapiens
ucuggcuucaccuuuuucagagccagcagugc

SEQ ID NO: 151388 - RNA, 32 nt, Homo Sapiens
uacuuuuaaggguaagaguggaaaacagauag

SEQ ID NO: 151389 - RNA, 32 nt, Homo Sapiens
aaggucauauauuuuuugcuacuuuugcuguu

SEQ ID NO: 151390 - RNA, 32 nt, Homo Sapiens
aaauuucugaaauauuugguaacuaaaauuuu

SEQ ID NO: 151391 - RNA, 32 nt, Homo Sapiens
agcuggucuugaacuccugaccucaagugauc

SEQ ID NO: 151392 - RNA, 30 nt, Homo Sapiens
ggcugacgcacuucgccgccggccgacggg

SEQ ID NO: 151393 - RNA, 32 nt, Homo Sapiens
cucccuccugugagucccaccuccccccaccc

SEQ ID NO: 151394 - RNA, 32 nt, Homo Sapiens
auugacuauaacuuaagugcugauugugauuu

SEQ ID NO: 151395 - RNA, 32 nt, Homo Sapiens
agccccagccccagcuccagcccugaggacag

SEQ ID NO: 151396 - RNA, 32 nt, Homo Sapiens
cuuucuacuccagauccuguccuuccuggagc

SEQ ID NO: 151397 - RNA, 32 nt, Homo Sapiens
cuacugugcaccgcugcagagcauugaggaug

SEQ ID NO: 151398 - RNA, 32 nt, Homo Sapiens
gcuggagcggcugagcgaggagguggagcaga

SEQ ID NO: 151399 - RNA, 32 nt, Homo Sapiens
gaucaccugagcucaggaguucaagagcaacc

SEQ ID NO: 151400 - RNA, 32 nt, Homo Sapiens
acgcacgcggguggacgaggggaccgaucccg

SEQ ID NO: 151401 - RNA, 30 nt, Homo Sapiens
caaagauggcagcugaagacguuaucaucu

SEQ ID NO: 151402 - RNA, 32 nt, Homo Sapiens
uguacaacuuauucuaaauauuuucauuuucu

SEQ ID NO: 151403 - RNA, 32 nt, Homo Sapiens
acccucgauccgagagcgccccagccagagcu

SEQ ID NO: 151404 - RNA, 32 nt, Homo Sapiens
caggcauuccgggcugcagauugacggggauc

SEQ ID NO: 151405 - RNA, 32 nt, Homo Sapiens
cgagacagaaaguuaagaaaggauauccggga

SEQ ID NO: 151406 - RNA, 32 nt, Homo Sapiens
gugccucucccucugccuucucucacagugcc

SEQ ID NO: 151407 - RNA, 32 nt, Homo Sapiens
agucuuuuggauauagguuuccaauuaaguac

SEQ ID NO: 151408 - RNA, 32 nt, Homo Sapiens
gccgagaccuggccuggcaucaggaguccaaa

SEQ ID NO: 151409 - RNA, 31 nt, Homo Sapiens
cccgccauggcccggcugcugcaggcguccu

SEQ ID NO: 151410 - RNA, 32 nt, Homo Sapiens
cuccccauuuucugcccuggcccacuucccac

SEQ ID NO: 151411 - RNA, 32 nt, Homo Sapiens
uggcaucuaagggaagaauggguuuucuuccc

SEQ ID NO: 151412 - RNA, 32 nt, Homo Sapiens
uacuugguacuucuuucgcugaaugaccauac

SEQ ID NO: 151413 - RNA, 32 nt, Homo Sapiens
cuggaacggcuuaggcggcugcggcugcuacg

SEQ ID NO: 151414 - RNA, 32 nt, Homo Sapiens
cccgucggccccagcugccccaggacccccgg

SEQ ID NO: 151415 - RNA, 32 nt, Homo Sapiens
caggacuaauacugagugauugcagagugcuu

SEQ ID NO: 151416 - RNA, 32 nt, Homo Sapiens
gucccucucccagaccucuccucuuccagugu

SEQ ID NO: 151417 - RNA, 32 nt, Homo Sapiens
ucaaagguuccgaacucgggccugggauguga

SEQ ID NO: 151418 - RNA, 32 nt, Homo Sapiens
agacuccaacacucacaagagagcagaggagc

SEQ ID NO: 151419 - RNA, 31 nt, Homo Sapiens
ccgcgccagccccagaccacggacgcugagc

SEQ ID NO: 151420 - RNA, 32 nt, Homo Sapiens
gaaacagaagagcagggacauaaaggaaaaug

SEQ ID NO: 151421 - RNA, 32 nt, Homo Sapiens
caaacuauuuccuuuucuuaagcuuaaagaga

SEQ ID NO: 151422 - RNA, 32 nt, Homo Sapiens
auggcuaaagaaaaaauagugaaaauaccaaa

SEQ ID NO: 151423 - RNA, 32 nt, Homo Sapiens
uuggaugugaaguagaagagguccucgaucau

SEQ ID NO: 151424 - RNA, 32 nt, Homo Sapiens
agcuggagaccguuuucugcuaccucaaaacc

SEQ ID NO: 151425 - RNA, 32 nt, Homo Sapiens
uauuguuuuaaauuauuuucauuuuaaacaag

SEQ ID NO: 151426 - RNA, 32 nt, Homo Sapiens
uuuucaauauauuuuucuguguguucucagau

SEQ ID NO: 151427 - RNA, 32 nt, Homo Sapiens
aaggcuggcccccaccccggcccggccacacc

SEQ ID NO: 151428 - RNA, 32 nt, Homo Sapiens
cucgccccggcgggcuccuccggcgugucagg

SEQ ID NO: 151429 - RNA, 32 nt, Homo Sapiens
agaugaugaugaugaugaugaagaugaugcua

SEQ ID NO: 151430 - RNA, 32 nt, Homo Sapiens
ugcccugccugccuggccucggaggacccgca

SEQ ID NO: 151431 - RNA, 32 nt, Homo Sapiens
accauucugccgugagccacugcgcccggccu

SEQ ID NO: 151432 - RNA, 32 nt, Homo Sapiens
guggugaguggccucccugcucuggggccagc

SEQ ID NO: 151433 - RNA, 32 nt, Homo Sapiens
aaauggcucugaaaugucccacuacacuguua

SEQ ID NO: 151434 - RNA, 32 nt, Homo Sapiens
aggaagcccccucuccuucuccaugggcauga

SEQ ID NO: 151435 - RNA, 32 nt, Homo Sapiens
uggggccgaggccaguagccccggggcccuga

SEQ ID NO: 151436 - RNA, 32 nt, Homo Sapiens
uaauucauagaaaaaauguaaaaggucuuuuu

SEQ ID NO: 151437 - RNA, 32 nt, Homo Sapiens
agugaguuuuuccgugcuguguaggggcuaac

SEQ ID NO: 151438 - RNA, 32 nt, Homo Sapiens
ggggguggggccggggccuuucugccucauuu

SEQ ID NO: 151439 - RNA, 32 nt, Homo Sapiens
augccuggaguauuauuuuauauuuuugacuu

SEQ ID NO: 151440 - RNA, 31 nt, Homo Sapiens
uuauagaaauaaaagccaagguuaauguugg

SEQ ID NO: 151441 - RNA, 32 nt, Homo Sapiens
aaacuaaggggagguaaaggcagucuccuguu

SEQ ID NO: 151442 - RNA, 32 nt, Homo Sapiens
uuuuuauuuuugguaacugugaaaaauaagau

SEQ ID NO: 151443 - RNA, 32 nt, Homo Sapiens
uuguagacuuaagacuuuuuauuuucuaaacc

SEQ ID NO: 151444 - RNA, 32 nt, Homo Sapiens
cuguagcauaugcaugagaguccggaaaguuc

SEQ ID NO: 151445 - RNA, 32 nt, Homo Sapiens
cugggcuggggcagggggcagcuccucaagug

SEQ ID NO: 151446 - RNA, 32 nt, Homo Sapiens
guuauuuuaaacagucuucuguuuuggccagu

SEQ ID NO: 151447 - RNA, 32 nt, Homo Sapiens
uuucagaugaucagcucuguaucugguuaagu

SEQ ID NO: 151448 - RNA, 32 nt, Homo Sapiens
auccggccgggcgggcggcucccgccugugau

SEQ ID NO: 151449 - RNA, 32 nt, Homo Sapiens
aggcugaagauaaauagaugaucccagaaaag

SEQ ID NO: 151450 - RNA, 32 nt, Homo Sapiens
uuaaacaucagcaaaaaaguacuuaaaacugu

SEQ ID NO: 151451 - RNA, 32 nt, Homo Sapiens
gacaggaggagcuucgggcccagcuucacccu

SEQ ID NO: 151452 - RNA, 32 nt, Homo Sapiens
cagcgagcccgagugcccaucaucauucuccu

SEQ ID NO: 151453 - RNA, 32 nt, Homo Sapiens
uuccuugugcccguggggccgggagcgaguaa

SEQ ID NO: 151454 - RNA, 32 nt, Homo Sapiens
ccugccuguggcuacauaucuagccauucaca

SEQ ID NO: 151455 - RNA, 32 nt, Homo Sapiens
ccuuugugcugcgccugcaggcagagcuggag

SEQ ID NO: 151456 - RNA, 32 nt, Homo Sapiens
agaccccgcgccccgcugaucuuugcuucagu

SEQ ID NO: 151457 - RNA, 32 nt, Homo Sapiens
uggcacaacuuuaccucugugggagaugcaac

SEQ ID NO: 151458 - RNA, 32 nt, Homo Sapiens
uccuagggccccagcucucccugugauguuuu

SEQ ID NO: 151459 - RNA, 28 nt, Homo Sapiens
cuagcaaaugcugacauguguuuguucu

SEQ ID NO: 151460 - RNA, 32 nt, Homo Sapiens
uauaugaugcaucggauaggucauuaugauuu

SEQ ID NO: 151461 - RNA, 32 nt, Homo Sapiens
uaagauguaauuauuugagaaacaagugacua

SEQ ID NO: 151462 - RNA, 32 nt, Homo Sapiens
aguguagagugcaguggcaugaucucagcuca

SEQ ID NO: 151463 - RNA, 32 nt, Homo Sapiens
gguaaaauauuuuuauuuucuuccuugucuca

SEQ ID NO: 151464 - RNA, 32 nt, Homo Sapiens
guuggccuaaaauuggcgcuggaauuugggcu

SEQ ID NO: 151465 - RNA, 32 nt, Homo Sapiens
aacggaaucugcccuaugagcguggcuguuga

SEQ ID NO: 151466 - RNA, 32 nt, Homo Sapiens
uggggcgcuccucccucaggcuuucucccuca

SEQ ID NO: 151467 - RNA, 32 nt, Homo Sapiens
gguggcuagaaaaagaggcugugggcaggaaa

SEQ ID NO: 151468 - RNA, 32 nt, Homo Sapiens
caagaucgccgggaaggaaggcguccaguuuc

SEQ ID NO: 151469 - RNA, 32 nt, Homo Sapiens
accacaccuuggcaagucuuucccaagccauu

SEQ ID NO: 151470 - RNA, 32 nt, Homo Sapiens
ugagcgagagcagaggaggaggaggcaugagu

SEQ ID NO: 151471 - RNA, 28 nt, Homo Sapiens
ccuggggggcggcgaagguggguggggc

SEQ ID NO: 151472 - RNA, 32 nt, Homo Sapiens
ugcugcggcgaccgccgcagggacggggacug

SEQ ID NO: 151473 - RNA, 32 nt, Homo Sapiens
uuggggccugcgcauucuuugagcucucagau

SEQ ID NO: 151474 - RNA, 32 nt, Homo Sapiens
ggcgcccgccuccuccacggccacuccgccuc

SEQ ID NO: 151475 - RNA, 32 nt, Homo Sapiens
uaggagcucccucgucuagccaaggcccuaug

SEQ ID NO: 151476 - RNA, 32 nt, Homo Sapiens
ucagcucaaaggauuauauaguaacuauaucu

SEQ ID NO: 151477 - RNA, 32 nt, Homo Sapiens
cugcuuccgcagggaacccuggccugcccgcg

SEQ ID NO: 151478 - RNA, 32 nt, Homo Sapiens
cgcguugccaagacugcagaucagcaccucuc

SEQ ID NO: 151479 - RNA, 32 nt, Homo Sapiens
uuuuacccuauuugauuucuuaaauaaagaug

SEQ ID NO: 151480 - RNA, 32 nt, Homo Sapiens
ggucccuggcacaaagcagccaucugaguccu

SEQ ID NO: 151481 - RNA, 32 nt, Homo Sapiens
cucccugaaccagagugugcccugccccucau

SEQ ID NO: 151482 - RNA, 32 nt, Homo Sapiens
agggauuuuguuagaacuuuaacaucagucau

SEQ ID NO: 151483 - RNA, 32 nt, Homo Sapiens
ggggccguggcggcuggagguagcggcggcgg

SEQ ID NO: 151484 - RNA, 32 nt, Homo Sapiens
uuaauuuuauuuacauaaaaaugcuguucaau

SEQ ID NO: 151485 - RNA, 32 nt, Homo Sapiens
guaccaaccucgccccaccccauccuccugcc

SEQ ID NO: 151486 - RNA, 32 nt, Homo Sapiens
ggcuucccggacaccgcccacccgggacccgc

SEQ ID NO: 151487 - RNA, 32 nt, Homo Sapiens
ucacucccucgcgcacucgcccgcccccuccc

SEQ ID NO: 151488 - RNA, 32 nt, Homo Sapiens
acgccccaccuguguccccaucucggccggcc

SEQ ID NO: 151489 - RNA, 32 nt, Homo Sapiens
aguuauguaaauuaucuguuauaauccaaaaa

SEQ ID NO: 151490 - RNA, 32 nt, Homo Sapiens
uucaaagcaaguacucaguaaauagcaagucu

SEQ ID NO: 151491 - RNA, 32 nt, Homo Sapiens
ucuauuauuucugugucagauuccaaucugga

SEQ ID NO: 151492 - RNA, 32 nt, Homo Sapiens
uuuuagaugaauuguuuuguuucacaaucauu

SEQ ID NO: 151493 - RNA, 32 nt, Homo Sapiens
ccagccuaaccaugucccacuguggagcagug

SEQ ID NO: 151494 - RNA, 32 nt, Homo Sapiens
gccucucucgcacaccggggcccugcauguca

SEQ ID NO: 151495 - RNA, 32 nt, Homo Sapiens
cuguuaagaccuccuauugguuuuccaggucc

SEQ ID NO: 151496 - RNA, 32 nt, Homo Sapiens
aguggaugcuuaaguuuccuuaucuugccacu

SEQ ID NO: 151497 - RNA, 32 nt, Homo Sapiens
agauaacaggaaguacaagugcuucuugaccc

SEQ ID NO: 151498 - RNA, 32 nt, Homo Sapiens
uccuacuucuccuacuggaacaucucagcuuc

SEQ ID NO: 151499 - RNA, 32 nt, Homo Sapiens
cauuuuucuggggauugaaaucuuuaguccuu

SEQ ID NO: 151500 - RNA, 32 nt, Homo Sapiens
uucuccuucaguugugggguccugcuuugccc

SEQ ID NO: 151501 - RNA, 32 nt, Homo Sapiens
uauuuuauuuuuccauuuaaagguggacaaaa

SEQ ID NO: 151502 - RNA, 32 nt, Homo Sapiens
gaacauauuuuaaaauacauuucacagaaugg

SEQ ID NO: 151503 - RNA, 32 nt, Homo Sapiens
agaaaaacuuuuccucccucuucaucaacaua

SEQ ID NO: 151504 - RNA, 32 nt, Homo Sapiens
ugugacaccuccccccaccuuccuucugcucu

SEQ ID NO: 151505 - RNA, 32 nt, Homo Sapiens
aggagggaaugggacuguugcugauccucaaa

SEQ ID NO: 151506 - RNA, 32 nt, Homo Sapiens
ggccaccgaggguggguggcccugagauggug

SEQ ID NO: 151507 - RNA, 32 nt, Homo Sapiens
acauguccuuuuccuuuuuuuuuuucaaagau

SEQ ID NO: 151508 - RNA, 32 nt, Homo Sapiens
acuugacagcagccuucugagucugggucagg

SEQ ID NO: 151509 - RNA, 32 nt, Homo Sapiens
ugccgucgcucuucccgccgcacugggcggcc

SEQ ID NO: 151510 - RNA, 32 nt, Homo Sapiens
cggcccgaggucuccgcccgcaccaugcggcu

SEQ ID NO: 151511 - RNA, 32 nt, Homo Sapiens
aagaacaucuauuugaaauuuaguggccacca

SEQ ID NO: 151512 - RNA, 32 nt, Homo Sapiens
caaugugugaacacuucugaauguauuuugaa

SEQ ID NO: 151513 - RNA, 32 nt, Homo Sapiens
agccccugcuccacagaguagauugcacaugg

SEQ ID NO: 151514 - RNA, 32 nt, Homo Sapiens
ccacauuguauauaauaaucucuuacaaucuu

SEQ ID NO: 151515 - RNA, 32 nt, Homo Sapiens
cuuugcaauuuugucugccuccccucagccua

SEQ ID NO: 151516 - RNA, 32 nt, Homo Sapiens
caauagcugagaaggggagccaugaaaagaac

SEQ ID NO: 151517 - RNA, 32 nt, Homo Sapiens
ccugcgagcaccagcucccuucuccucgccac

SEQ ID NO: 151518 - RNA, 32 nt, Homo Sapiens
uucuggaagaacuagauuuacuggaagacuug

SEQ ID NO: 151519 - RNA, 30 nt, Homo Sapiens
gaccuucaguaucagcccuaacucuucucu

SEQ ID NO: 151520 - RNA, 30 nt, Homo Sapiens
aagagaggcaggcucucaguccccgcuucg

SEQ ID NO: 151521 - RNA, 32 nt, Homo Sapiens
acugcuuguuccaauuauguauggaaagucuu

SEQ ID NO: 151522 - RNA, 32 nt, Homo Sapiens
ggggauguuuauaaagugaggacccuggcccc

SEQ ID NO: 151523 - RNA, 32 nt, Homo Sapiens
gcgcagggcuccccggccacggcagcacagaa

SEQ ID NO: 151524 - RNA, 32 nt, Homo Sapiens
auccuggcucugccccugaugugcugugugau

SEQ ID NO: 151525 - RNA, 32 nt, Homo Sapiens
ccuccccaacuacuccagacuguccugcucac

SEQ ID NO: 151526 - RNA, 32 nt, Homo Sapiens
aaguuauuggauuuacaugaaaucuggcacuu

SEQ ID NO: 151527 - RNA, 32 nt, Homo Sapiens
caugccaucgccaucaacuaugacccaaugga

SEQ ID NO: 151528 - RNA, 32 nt, Homo Sapiens
uuguguuuuuggggaauguuuggaccuacuua

SEQ ID NO: 151529 - RNA, 32 nt, Homo Sapiens
uucuggcgucucucaccuccuucauccccuac

SEQ ID NO: 151530 - RNA, 32 nt, Homo Sapiens
cagcccggacgccagcagccccggggagccag

SEQ ID NO: 151531 - RNA, 32 nt, Homo Sapiens
accugcgcuccagugccgaccgcuggccuccu

SEQ ID NO: 151532 - RNA, 32 nt, Homo Sapiens
cugcacaacucuucuuuuuuuaauuacaauga

SEQ ID NO: 151533 - RNA, 32 nt, Homo Sapiens
gcuuccugaucccacagcaucgcagagcucgg

SEQ ID NO: 151534 - RNA, 32 nt, Homo Sapiens
uggguauuugucgaccaaaaugaugccaauuu

SEQ ID NO: 151535 - RNA, 32 nt, Homo Sapiens
ucugucuguugccugggauccaggcgcccggu

SEQ ID NO: 151536 - RNA, 32 nt, Homo Sapiens
gcaaagguuuagaacacauuauuuucaaagac

SEQ ID NO: 151537 - RNA, 32 nt, Homo Sapiens
ggaucuguggggagcuggggagcccgcagcgg

SEQ ID NO: 151538 - RNA, 32 nt, Homo Sapiens
ccgcacuguguccuuucuaucacguuauuguc

SEQ ID NO: 151539 - RNA, 32 nt, Homo Sapiens
caucuuggggagcagcagcaagaggguguaug

SEQ ID NO: 151540 - RNA, 32 nt, Homo Sapiens
cugaaucuucuuuuccacaagauaaaugaugc

SEQ ID NO: 151541 - RNA, 32 nt, Homo Sapiens
ccucccggguccucgggagaugaagcauccgu

SEQ ID NO: 151542 - RNA, 32 nt, Homo Sapiens
uaagauguugagagcucagaccacugcucaga

SEQ ID NO: 151543 - RNA, 32 nt, Homo Sapiens
uacucuuuuuauugcuauuucuaaauuuccuu

SEQ ID NO: 151544 - RNA, 32 nt, Homo Sapiens
auuuuaucauuaaauggcauuauuuucaaagg

SEQ ID NO: 151545 - RNA, 32 nt, Homo Sapiens
acguuuacgcugacuccuccagugccucauca

SEQ ID NO: 151546 - RNA, 32 nt, Homo Sapiens
uugcuucagaucuuaggucucaagggcacuuu

SEQ ID NO: 151547 - RNA, 32 nt, Homo Sapiens
aaggaagaccagauguagcuacaggaugauga

SEQ ID NO: 151548 - RNA, 32 nt, Homo Sapiens
guugaaaaaaauuuuguaucaaaauguuugga

SEQ ID NO: 151549 - RNA, 32 nt, Homo Sapiens
auuuucagcuccgccuuuuuucuccuauuuuc

SEQ ID NO: 151550 - RNA, 32 nt, Homo Sapiens
gggcuucgaggguggugauuacgguggcgcca

SEQ ID NO: 151551 - RNA, 32 nt, Homo Sapiens
ggacaugcgggauaucucccccugcucucugg

SEQ ID NO: 151552 - RNA, 32 nt, Homo Sapiens
cccagaagucaaacagaagggagugauucgcu

SEQ ID NO: 151553 - RNA, 32 nt, Homo Sapiens
ggucaaccuacaugauccuuaagcuaauggcg

SEQ ID NO: 151554 - RNA, 32 nt, Homo Sapiens
guccucuuggccauccuucuguguaccacuuc

SEQ ID NO: 151555 - RNA, 30 nt, Homo Sapiens
ggacgcaucaggcgcgaguguucccguaca

SEQ ID NO: 151556 - RNA, 31 nt, Homo Sapiens
aaggcggagcccccggacagcguagguucgc

SEQ ID NO: 151557 - RNA, 32 nt, Homo Sapiens
ucugugggaucuuugggcuuggggcugaauuu

SEQ ID NO: 151558 - RNA, 32 nt, Homo Sapiens
cagcgccuccccuccgcuccccacgcccccau

SEQ ID NO: 151559 - RNA, 32 nt, Homo Sapiens
aagcugggaggcggcccucccugcgggccucc

SEQ ID NO: 151560 - RNA, 32 nt, Homo Sapiens
gcagccuggcauuuggggccacuacuggucuc

SEQ ID NO: 151561 - RNA, 32 nt, Homo Sapiens
gagaugcgaaccacccaaaacacgcacacccu

SEQ ID NO: 151562 - RNA, 32 nt, Homo Sapiens
ucagugauuuaaguacaaacaugcaucucgug

SEQ ID NO: 151563 - RNA, 32 nt, Homo Sapiens
cgugacuccgggcgcgagccagugucagcaaa

SEQ ID NO: 151564 - RNA, 32 nt, Homo Sapiens
cugccagcaccagaauuuccaaaaaagacaaa

SEQ ID NO: 151565 - RNA, 30 nt, Homo Sapiens
ggagagaggccugugcuagaagcuccaugg

SEQ ID NO: 151566 - RNA, 32 nt, Homo Sapiens
ggaugugugcauuuuguaaauaaacauauuug

SEQ ID NO: 151567 - RNA, 32 nt, Homo Sapiens
cacggccaggugugggagggacuucgaagaua

SEQ ID NO: 151568 - RNA, 32 nt, Homo Sapiens
cccagcuacucaggagguugaggugggaggau

SEQ ID NO: 151569 - RNA, 32 nt, Homo Sapiens
uuggugucucucuucaauuuccacaacuauga

SEQ ID NO: 151570 - RNA, 32 nt, Homo Sapiens
augcagacccugcgugugguuuuggcaacccu

SEQ ID NO: 151571 - RNA, 32 nt, Homo Sapiens
uaaaaguccaacugacucauaaccugaagaga

SEQ ID NO: 151572 - RNA, 30 nt, Homo Sapiens
gugcguuuggacugccauagauagggauaa

SEQ ID NO: 151573 - RNA, 32 nt, Homo Sapiens
ugaucauagucuaaaacuaucacgucugaguu

SEQ ID NO: 151574 - RNA, 32 nt, Homo Sapiens
ggcccggcucuguggcacuuuggacuuauggg

SEQ ID NO: 151575 - RNA, 32 nt, Homo Sapiens
ugaggaacuaaauuuaaggaaaaaaugggauu

SEQ ID NO: 151576 - RNA, 32 nt, Homo Sapiens
cucuccuccccucccccugggguggcccaccg

SEQ ID NO: 151577 - RNA, 32 nt, Homo Sapiens
uugggguggugggaggcggggagcugccacuc

SEQ ID NO: 151578 - RNA, 32 nt, Homo Sapiens
cguguacacauacacacacacacacaccuggc

SEQ ID NO: 151579 - RNA, 32 nt, Homo Sapiens
uguugaaaaugguuucaaguuauucaaauuug

SEQ ID NO: 151580 - RNA, 32 nt, Homo Sapiens
uuaaaucuuaacaucauauaaaaagcagcaga

SEQ ID NO: 151581 - RNA, 32 nt, Homo Sapiens
gagucgcagugggaguccccggaccggagcac

SEQ ID NO: 151582 - RNA, 27 nt, Homo Sapiens
aaaacccuuugauucugguucaucucg

SEQ ID NO: 151583 - RNA, 32 nt, Homo Sapiens
uauuaucuauucuguuauuuuaucuuagcuau

SEQ ID NO: 151584 - RNA, 32 nt, Homo Sapiens
auacaauaacacgugauaaugugugucgaagg

SEQ ID NO: 151585 - RNA, 32 nt, Homo Sapiens
caacguucaauuuuuuaaaauuuuggaaaacu

SEQ ID NO: 151586 - RNA, 32 nt, Homo Sapiens
uacaggcccucccuccccuuggccucuaggag

SEQ ID NO: 151587 - RNA, 32 nt, Homo Sapiens
cacacauauuuccauccuuuuauguuuaaucu

SEQ ID NO: 151588 - RNA, 32 nt, Homo Sapiens
uggcgcggcugcgcugcggcccggggcagugc

SEQ ID NO: 151589 - RNA, 32 nt, Homo Sapiens
ugagucagaaggcggcacuucuggccaggucu

SEQ ID NO: 151590 - RNA, 32 nt, Homo Sapiens
uuaaauuauuaaggcuaucauucuuuuaguaa

SEQ ID NO: 151591 - RNA, 32 nt, Homo Sapiens
uuuacauaaauauuauacuagcauuuaccauc

SEQ ID NO: 151592 - RNA, 32 nt, Homo Sapiens
gggcugugcuaaggagggaagccugugaagag

SEQ ID NO: 151593 - RNA, 32 nt, Homo Sapiens
aguuauuaaaaagcacaguugaaauggggugg

SEQ ID NO: 151594 - RNA, 32 nt, Homo Sapiens
ucaggcagugaaugaauuauauuuucagaagu

SEQ ID NO: 151595 - RNA, 32 nt, Homo Sapiens
aggcccagcugccaagugaaaguugcaccaug

SEQ ID NO: 151596 - RNA, 32 nt, Homo Sapiens
uagaauacaauaaaacaaaacaaugacacaaa

SEQ ID NO: 151597 - RNA, 32 nt, Homo Sapiens
caagggacccucggcgccucggccuggccgcg

SEQ ID NO: 151598 - RNA, 32 nt, Homo Sapiens
ucuagucaguuauauugcuauuguaaauucuu

SEQ ID NO: 151599 - RNA, 32 nt, Homo Sapiens
gagcaagggaacaagggacaucugaacaucua

SEQ ID NO: 151600 - RNA, 32 nt, Homo Sapiens
ugcccacucccucuccucuccucucugguagg

SEQ ID NO: 151601 - RNA, 32 nt, Homo Sapiens
cuggagggcccucgccggcgucgugcugacgu

SEQ ID NO: 151602 - RNA, 32 nt, Homo Sapiens
cacugcgcccggcccgagaaaauacaguuuua

SEQ ID NO: 151603 - RNA, 32 nt, Homo Sapiens
gccuuugagaacugcuugacuccaugaucucc

SEQ ID NO: 151604 - RNA, 32 nt, Homo Sapiens
acgggcugcuagucauacugcccgcugcuccu

SEQ ID NO: 151605 - RNA, 32 nt, Homo Sapiens
guguuccagggccagugcucuucugggugauc

SEQ ID NO: 151606 - RNA, 32 nt, Homo Sapiens
cagagaaagggacagauacagaaggaccuugc

SEQ ID NO: 151607 - RNA, 32 nt, Homo Sapiens
uuaucuggccccacccacauccugcugauugg

SEQ ID NO: 151608 - RNA, 32 nt, Homo Sapiens
ucuuccaucuugcugugauuugcaauagguau

SEQ ID NO: 151609 - RNA, 32 nt, Homo Sapiens
guuucucugugccagaucuucagugccccuuu

SEQ ID NO: 151610 - RNA, 32 nt, Homo Sapiens
gguugaauauauauuuugaauauacauuagcu

SEQ ID NO: 151611 - RNA, 32 nt, Homo Sapiens
aggagcagaaaaguuacuggggaguacagaug

SEQ ID NO: 151612 - RNA, 32 nt, Homo Sapiens
auuagagaaaacauucuuaagcacgcauggaa

SEQ ID NO: 151613 - RNA, 32 nt, Homo Sapiens
ggucucgcaguguugcccaggcuggucucgaa

SEQ ID NO: 151614 - RNA, 32 nt, Homo Sapiens
gacgcugcagacccgcgacccggagcagcucg

SEQ ID NO: 151615 - RNA, 32 nt, Homo Sapiens
aaggugaacaaaugaacacaaugugucuaccu

SEQ ID NO: 151616 - RNA, 32 nt, Homo Sapiens
aguaauauccuuucuuuuuuuuuuccccccau

SEQ ID NO: 151617 - RNA, 32 nt, Homo Sapiens
cguggaagaugacaucuguaggucucaggcua

SEQ ID NO: 151618 - RNA, 32 nt, Homo Sapiens
caagagaguuacuugaacacagaagguggagg

SEQ ID NO: 151619 - RNA, 32 nt, Homo Sapiens
agggccucgccauguccugcugcccgacuucc

SEQ ID NO: 151620 - RNA, 32 nt, Homo Sapiens
agcugggugcgguggcucacgccuguaauccc

SEQ ID NO: 151621 - RNA, 32 nt, Homo Sapiens
ggccgggugcgguggcucaugccuauaauccc

SEQ ID NO: 151622 - RNA, 32 nt, Homo Sapiens
uaaaggaaaaggaauguagcucaacuugugau

SEQ ID NO: 151623 - RNA, 32 nt, Homo Sapiens
aauuggggcugaugucaucuugagcucuucau

SEQ ID NO: 151624 - RNA, 32 nt, Homo Sapiens
ccuuaugcuucuuucaaauugugugugcucug

SEQ ID NO: 151625 - RNA, 32 nt, Homo Sapiens
ugcugccuucccaaaaauaccacccagccugg

SEQ ID NO: 151626 - RNA, 32 nt, Homo Sapiens
ucguguucaaggagaagcuauuauauuuuguu

SEQ ID NO: 151627 - RNA, 32 nt, Homo Sapiens
augguguaggggcugggaauguggagggcguu

SEQ ID NO: 151628 - RNA, 32 nt, Homo Sapiens
gaggacacugagaaagauaaacaaaggggaag

SEQ ID NO: 151629 - RNA, 32 nt, Homo Sapiens
ucauuucuuuaaaaguuuuuuguuaguuuguu

SEQ ID NO: 151630 - RNA, 32 nt, Homo Sapiens
ucaguccagcugagaagacaguucuuaauaaa

SEQ ID NO: 151631 - RNA, 31 nt, Homo Sapiens
cgucccauggcgcaaccuacggccucggccc

SEQ ID NO: 151632 - RNA, 32 nt, Homo Sapiens
aggggccuggggauuggagaacggagaagaag

SEQ ID NO: 151633 - RNA, 32 nt, Homo Sapiens
aguacuccaccaucgacuuuguuuccucaggu

SEQ ID NO: 151634 - RNA, 32 nt, Homo Sapiens
ggcgcaggagcccucccuccccacccccaccc

SEQ ID NO: 151635 - RNA, 32 nt, Homo Sapiens
cacacccccacuuuccucuaccaggccacacc

SEQ ID NO: 151636 - RNA, 32 nt, Homo Sapiens
gugcaugucagugcugcuaaccaggaggagaa

SEQ ID NO: 151637 - RNA, 31 nt, Homo Sapiens
uggagcggcacugugccuaccucuagccaag

SEQ ID NO: 151638 - RNA, 32 nt, Homo Sapiens
ugccuguuaaggaaacuuuauuugugguaggu

SEQ ID NO: 151639 - RNA, 32 nt, Homo Sapiens
acccaccuucuggcauggcagugucagcaucu

SEQ ID NO: 151640 - RNA, 32 nt, Homo Sapiens
cagcugcgggagcggcuggagucaggggagcc

SEQ ID NO: 151641 - RNA, 32 nt, Homo Sapiens
gaucccaccacgagcaggcacgagacagcucc

SEQ ID NO: 151642 - RNA, 32 nt, Homo Sapiens
gaaguucgaagaguaacauggaggcagagugg

SEQ ID NO: 151643 - RNA, 32 nt, Homo Sapiens
cccacauaggauuccagaagccugcugcuggg

SEQ ID NO: 151644 - RNA, 32 nt, Homo Sapiens
uagccaccaaagacaugaggaaaucacaggag

SEQ ID NO: 151645 - RNA, 32 nt, Homo Sapiens
aaccugguucccuccaaaccucccagccacuc

SEQ ID NO: 151646 - RNA, 32 nt, Homo Sapiens
cccauacgcgggcgcugaagugccaaaccuuc

SEQ ID NO: 151647 - RNA, 32 nt, Homo Sapiens
acaggagaaaaauuauucccauguugacuguc

SEQ ID NO: 151648 - RNA, 32 nt, Homo Sapiens
aaaaugaccucaacaaaauuugcuaucuaccu

SEQ ID NO: 151649 - RNA, 32 nt, Homo Sapiens
gcuuaaugauuugcucacaucuaguaaaacau

SEQ ID NO: 151650 - RNA, 32 nt, Homo Sapiens
cucugccacaccugguggcugaacaucucugg

SEQ ID NO: 151651 - RNA, 32 nt, Homo Sapiens
gcagcugcaccucguggagucagaccccaacc

SEQ ID NO: 151652 - RNA, 32 nt, Homo Sapiens
ccucugaguagaguguugugggauaaaggaau

SEQ ID NO: 151653 - RNA, 32 nt, Homo Sapiens
aauugaggcuacagccuauuauuuuccuuugu

SEQ ID NO: 151654 - RNA, 32 nt, Homo Sapiens
aaggcacgugguuuccuuuucuccucucucug

SEQ ID NO: 151655 - RNA, 32 nt, Homo Sapiens
ccagcccuuccguccuuccccagccgcucuug

SEQ ID NO: 151656 - RNA, 32 nt, Homo Sapiens
guucagugcauuguuguuguugcuguuuuugg

SEQ ID NO: 151657 - RNA, 32 nt, Homo Sapiens
ccauguuaaaagcuuuuucacaguuuuaagaa

SEQ ID NO: 151658 - RNA, 32 nt, Homo Sapiens
aaggagaagaucugccugugggucuucauugc

SEQ ID NO: 151659 - RNA, 32 nt, Homo Sapiens
ugccaugccaaggaccaacuuccacagcucug

SEQ ID NO: 151660 - RNA, 32 nt, Homo Sapiens
ggagguucaaaaguaagaugguuuucaaauca

SEQ ID NO: 151661 - RNA, 32 nt, Homo Sapiens
acacugaggaucaagcucauggccucagaugc

SEQ ID NO: 151662 - RNA, 32 nt, Homo Sapiens
uuagcauuuaauaguuugcuugucuuccacuc

SEQ ID NO: 151663 - RNA, 32 nt, Homo Sapiens
uagggauuagucuuuuaggugcccuguucucc

SEQ ID NO: 151664 - RNA, 32 nt, Homo Sapiens
ccaugacaggacaggaagucagacauaccucc

SEQ ID NO: 151665 - RNA, 32 nt, Homo Sapiens
uauuagagaauauguuaauaaaacuucuugua

SEQ ID NO: 151666 - RNA, 32 nt, Homo Sapiens
auggggugauccuggggugccacugggauccc

SEQ ID NO: 151667 - RNA, 32 nt, Homo Sapiens
ccacuuugccccagccacuuugacccaaacug

SEQ ID NO: 151668 - RNA, 32 nt, Homo Sapiens
ugagauaaugaaaucaaacuagguucuagcac

SEQ ID NO: 151669 - RNA, 32 nt, Homo Sapiens
acaauucucccgcuccagacccucaccgacca

SEQ ID NO: 151670 - RNA, 32 nt, Homo Sapiens
aacugacuugccugcuuccuccuuccaggaac

SEQ ID NO: 151671 - RNA, 32 nt, Homo Sapiens
aauacauggaaauagcuugcuauuuuuauaua

SEQ ID NO: 151672 - RNA, 32 nt, Homo Sapiens
ggucuuccuagcagcuccuccuccucccuccc

SEQ ID NO: 151673 - RNA, 30 nt, Homo Sapiens
cggaccaggauucccgcggguccuggcggc

SEQ ID NO: 151674 - RNA, 30 nt, Homo Sapiens
gcacagcuggacuguguggcuggggccuga

SEQ ID NO: 151675 - RNA, 32 nt, Homo Sapiens
accgcgugcagggaaaggcgcacggcagccuc

SEQ ID NO: 151676 - RNA, 32 nt, Homo Sapiens
agggaguggguggaaagcaugggggguaaagu

SEQ ID NO: 151677 - RNA, 32 nt, Homo Sapiens
guuuuuguuuguuuguuuuucuuaaagaauau

SEQ ID NO: 151678 - RNA, 32 nt, Homo Sapiens
ggagucauguuuuguggggucuuccauggcac

SEQ ID NO: 151679 - RNA, 32 nt, Homo Sapiens
augucuauaacuccuuguuucagaugauucua

SEQ ID NO: 151680 - RNA, 30 nt, Homo Sapiens
gcgugaguggggccccacgcagcuccccgc

SEQ ID NO: 151681 - RNA, 32 nt, Homo Sapiens
cgaggaacacugggcugagcacaugacaggga

SEQ ID NO: 151682 - RNA, 32 nt, Homo Sapiens
uuuggaagaaggaaagucacaugaugaaacuc

SEQ ID NO: 151683 - RNA, 32 nt, Homo Sapiens
guucuuaaauucaaauauguauugaucuucaa

SEQ ID NO: 151684 - RNA, 32 nt, Homo Sapiens
acuuagucucaacccggguguguuugcacuac

SEQ ID NO: 151685 - RNA, 32 nt, Homo Sapiens
cauuguguugggcacagcucucacucacccuc

SEQ ID NO: 151686 - RNA, 32 nt, Homo Sapiens
gcuaugggucccugaggccuggcuggccagca

SEQ ID NO: 151687 - RNA, 32 nt, Homo Sapiens
agccauauuuuuaaaucaggguugaacugaca

SEQ ID NO: 151688 - RNA, 32 nt, Homo Sapiens
guacuagcucuguuuauauaaauagagaaaug

SEQ ID NO: 151689 - RNA, 32 nt, Homo Sapiens
agccuuucuguggagagugagaauaauugugu

SEQ ID NO: 151690 - RNA, 32 nt, Homo Sapiens
ggggugagaacaaacuagaggguauuuucuga

SEQ ID NO: 151691 - RNA, 32 nt, Homo Sapiens
cacacacauauggagcaccccaucccacagca

SEQ ID NO: 151692 - RNA, 32 nt, Homo Sapiens
uuuucuagaaaagaugaugggauccacuagaa

SEQ ID NO: 151693 - RNA, 32 nt, Homo Sapiens
auauuuuuaagugguacuucuaaaucauaaaa

SEQ ID NO: 151694 - RNA, 29 nt, Homo Sapiens
gcacguaugggccagguacgguucuucac

SEQ ID NO: 151695 - RNA, 32 nt, Homo Sapiens
cucagccccagccccagguguggaccucaugc

SEQ ID NO: 151696 - RNA, 32 nt, Homo Sapiens
uucuucauacugugucuguauuuaaucuuuuu

SEQ ID NO: 151697 - RNA, 32 nt, Homo Sapiens
aaacaggaguuauugauguuauacacucccuu

SEQ ID NO: 151698 - RNA, 32 nt, Homo Sapiens
agggcggcugccgaggcguugcggcugcugcg

SEQ ID NO: 151699 - RNA, 32 nt, Homo Sapiens
uuaccuuauauauuaaucuacucuugauucug

SEQ ID NO: 151700 - RNA, 32 nt, Homo Sapiens
gaaguggcagagcuaggacacaaaauuccuaa

SEQ ID NO: 151701 - RNA, 29 nt, Homo Sapiens
uuauuauagaaggugguaccauuaucaau

SEQ ID NO: 151702 - RNA, 32 nt, Homo Sapiens
cugcagcuuaggauuaaggagcauggucacag

SEQ ID NO: 151703 - RNA, 32 nt, Homo Sapiens
cagcauuuuuauuucggucuuauucguugugc

SEQ ID NO: 151704 - RNA, 32 nt, Homo Sapiens
cucucgcuuucuuuuuaauccccugcaucgga

SEQ ID NO: 151705 - RNA, 32 nt, Homo Sapiens
ucuacgccaucccauagaccuuucuuacacug

SEQ ID NO: 151706 - RNA, 32 nt, Homo Sapiens
gcuacuuuuuugggagccccaaggcuguacug

SEQ ID NO: 151707 - RNA, 31 nt, Homo Sapiens
gcagugaaguccccccucagagcccucagcc

SEQ ID NO: 151708 - RNA, 32 nt, Homo Sapiens
gacgcggccucgguggggcccgggccgaacgg

SEQ ID NO: 151709 - RNA, 32 nt, Homo Sapiens
ccccuggccagcacucggggaccucccugccc

SEQ ID NO: 151710 - RNA, 32 nt, Homo Sapiens
aagggcuaugcaauugaaugaagaagcauuaa

SEQ ID NO: 151711 - RNA, 32 nt, Homo Sapiens
gaguucgaauacuguucgcucgcugugugacc

SEQ ID NO: 151712 - RNA, 32 nt, Homo Sapiens
gauaaaaguauuuaacaaccgcuauggcauca

SEQ ID NO: 151713 - RNA, 32 nt, Homo Sapiens
cguccggccccggcccggaaccgggcugggua

SEQ ID NO: 151714 - RNA, 32 nt, Homo Sapiens
cacaugggauggccuuccugauguggcucucc

SEQ ID NO: 151715 - RNA, 32 nt, Homo Sapiens
gacugaagggcgagcagggucuggggguggcu

SEQ ID NO: 151716 - RNA, 29 nt, Homo Sapiens
gagcgauccuguuucagagaaaaaaaaga

SEQ ID NO: 151717 - RNA, 32 nt, Homo Sapiens
aaacuaaugaacuuggcugcuuuucaaagaca

SEQ ID NO: 151718 - RNA, 32 nt, Homo Sapiens
ucguggagcugcgaccccggcccuagggcagu

SEQ ID NO: 151719 - RNA, 32 nt, Homo Sapiens
ugugccgauggcagcagcgccacgugguaucu

SEQ ID NO: 151720 - RNA, 32 nt, Homo Sapiens
cccucuuuacaucacuuaucuuucucacugag

SEQ ID NO: 151721 - RNA, 32 nt, Homo Sapiens
ugggcuuucuuacacuaacucuguaccuacca

SEQ ID NO: 151722 - RNA, 32 nt, Homo Sapiens
ccaggcgcguccucccgcgcgcuaugacggcc

SEQ ID NO: 151723 - RNA, 32 nt, Homo Sapiens
ugagggagcugcacauggggcuggggggaguc

SEQ ID NO: 151724 - RNA, 32 nt, Homo Sapiens
gauacgagucugccaaugcucccggccaaaua

SEQ ID NO: 151725 - RNA, 32 nt, Homo Sapiens
ugaaucagcauuaauugaauugcuaaaugacu

SEQ ID NO: 151726 - RNA, 32 nt, Homo Sapiens
ucaugcugaggugauucaguucccuccuucuu

SEQ ID NO: 151727 - RNA, 32 nt, Homo Sapiens
uuuucauggggcuaugaaagugcacguuaaac

SEQ ID NO: 151728 - RNA, 32 nt, Homo Sapiens
aauaaugaauauuagcuacuagguuucagcaa

SEQ ID NO: 151729 - RNA, 32 nt, Homo Sapiens
acuuaacauuuuagauacugcuguuacuguga

SEQ ID NO: 151730 - RNA, 32 nt, Homo Sapiens
uggcaagcaucugcagacccaggcuccaggcc

SEQ ID NO: 151731 - RNA, 32 nt, Homo Sapiens
cuucaggguagagggauucccuugaguauagg

SEQ ID NO: 151732 - RNA, 32 nt, Homo Sapiens
uuauaucagaggugguacaaaaugcauuugaa

SEQ ID NO: 151733 - RNA, 32 nt, Homo Sapiens
ugcucagaaaccgaggaaaucgcggggcuccc

SEQ ID NO: 151734 - RNA, 32 nt, Homo Sapiens
aagauagugaauuuauaugaagggugugaaau

SEQ ID NO: 151735 - RNA, 32 nt, Homo Sapiens
uguugucaaaagucaaaagaaaaaauuuauaa

SEQ ID NO: 151736 - RNA, 32 nt, Homo Sapiens
ccaccucgaggagcuuccugagcagguggcag

SEQ ID NO: 151737 - RNA, 32 nt, Homo Sapiens
ggcagggugcgcgccugccgcgcgcccagguu

SEQ ID NO: 151738 - RNA, 32 nt, Homo Sapiens
gacucccugcccuuacccuaccucugaguuug

SEQ ID NO: 151739 - RNA, 32 nt, Homo Sapiens
uaaccuuguaaaacagaucuuuuauguaagaa

SEQ ID NO: 151740 - RNA, 27 nt, Homo Sapiens
ccuggcguuugcuucagcccuucccug

SEQ ID NO: 151741 - RNA, 32 nt, Homo Sapiens
agauaccguucgggaaaggcuuuugaaaggac

SEQ ID NO: 151742 - RNA, 32 nt, Homo Sapiens
cuucugacauuuuggaggaaacagacuuagcu

SEQ ID NO: 151743 - RNA, 32 nt, Homo Sapiens
gggaccccgagaccgcgcuggcccucugcuaa

SEQ ID NO: 151744 - RNA, 32 nt, Homo Sapiens
cgccuguaaucccagcacuuuaggaggccgag

SEQ ID NO: 151745 - RNA, 32 nt, Homo Sapiens
guauauaguugacucgcaguuuccugugaauc

SEQ ID NO: 151746 - RNA, 32 nt, Homo Sapiens
cgccuauaauccaagcacuuugggaggcagag

SEQ ID NO: 151747 - RNA, 32 nt, Homo Sapiens
cgccuguaaucccagcacuuugggaggccaag

SEQ ID NO: 151748 - RNA, 32 nt, Homo Sapiens
cgccuauaaucccagcacuuugggaggccgag

SEQ ID NO: 151749 - RNA, 32 nt, Homo Sapiens
aacccuugccccuagcagccucuucuuugugg

SEQ ID NO: 151750 - RNA, 32 nt, Homo Sapiens
uggccccaaacacugguuugcaucccagguuc

SEQ ID NO: 151751 - RNA, 32 nt, Homo Sapiens
augguguuuaaaaacacacuuugucuuaagga

SEQ ID NO: 151752 - RNA, 32 nt, Homo Sapiens
acaaagugaagauaauaauugucaauucacag

SEQ ID NO: 151753 - RNA, 31 nt, Homo Sapiens
uugguguggccccagagcuggcauaucuggu

SEQ ID NO: 151754 - RNA, 30 nt, Homo Sapiens
acgacagccacgcgcgcgggaacugggggc

SEQ ID NO: 151755 - RNA, 32 nt, Homo Sapiens
ccucuccugccagccuccuccucccugccaac

SEQ ID NO: 151756 - RNA, 32 nt, Homo Sapiens
uuacuugcuguuuuuauugaucuuaugguuua

SEQ ID NO: 151757 - RNA, 32 nt, Homo Sapiens
gccagaauuuaguugcagaacuucugacucca

SEQ ID NO: 151758 - RNA, 32 nt, Homo Sapiens
gguuuuuauuuuuaauuucuguacuaaugaaa

SEQ ID NO: 151759 - RNA, 32 nt, Homo Sapiens
cccgccgaaccgaggccacccggagccgugcc

SEQ ID NO: 151760 - RNA, 32 nt, Homo Sapiens
agauauucuggugacugaaaguauggucgggu

SEQ ID NO: 151761 - RNA, 32 nt, Homo Sapiens
ugcugaagagaggugccggggaggggcagaga

SEQ ID NO: 151762 - RNA, 32 nt, Homo Sapiens
aggacugaaggggacagccccuuugcaguggc

SEQ ID NO: 151763 - RNA, 32 nt, Homo Sapiens
aagguggcagagccuccacugagccaggccca

SEQ ID NO: 151764 - RNA, 32 nt, Homo Sapiens
accuguuuggucuaauagauguggauacaguu

SEQ ID NO: 151765 - RNA, 32 nt, Homo Sapiens
aggagccguggcggcacagggccugugcucuc

SEQ ID NO: 151766 - RNA, 32 nt, Homo Sapiens
aauuaccagggugaccccucccaguagagcac

SEQ ID NO: 151767 - RNA, 32 nt, Homo Sapiens
ucuuguccccugggggacccagacaaagcaca

SEQ ID NO: 151768 - RNA, 32 nt, Homo Sapiens
uugagcgguuuuguaauuugacauuuaggaga

SEQ ID NO: 151769 - RNA, 32 nt, Homo Sapiens
cccagcaaaugccaagugcucugccugccuuc

SEQ ID NO: 151770 - RNA, 32 nt, Homo Sapiens
cgggagggagacgcuccccuccccugucugca

SEQ ID NO: 151771 - RNA, 32 nt, Homo Sapiens
cagagguaacaagacagaaaauucaucuggga

SEQ ID NO: 151772 - RNA, 32 nt, Homo Sapiens
guggcauuuacgugcuuuauaugauuuuuacc

SEQ ID NO: 151773 - RNA, 32 nt, Homo Sapiens
aaacacauuugguuucugaauaaauugaacua

SEQ ID NO: 151774 - RNA, 32 nt, Homo Sapiens
cacugccaaggguggggucucaggagucaggc

SEQ ID NO: 151775 - RNA, 32 nt, Homo Sapiens
aagaggccaaacuucuaucaucaugguggaug

SEQ ID NO: 151776 - RNA, 32 nt, Homo Sapiens
cagcacaucauucucucaggauaaguagaaga

SEQ ID NO: 151777 - RNA, 32 nt, Homo Sapiens
auaguugaaaauaauuuuuaagguguaucaca

SEQ ID NO: 151778 - RNA, 32 nt, Homo Sapiens
caacccaaaugcccaucaaugaguggauaaag

SEQ ID NO: 151779 - RNA, 32 nt, Homo Sapiens
gaaaggggcuggggcugcuuucuccccucccu

SEQ ID NO: 151780 - RNA, 32 nt, Homo Sapiens
auucuuauuuuuccuaacaaaagaugaaagca

SEQ ID NO: 151781 - RNA, 32 nt, Homo Sapiens
ugugguugauucaaaagaaagugauucuauuu

SEQ ID NO: 151782 - RNA, 32 nt, Homo Sapiens
uggagugcagugccacaaucucagcucacagc

SEQ ID NO: 151783 - RNA, 32 nt, Homo Sapiens
gaggcuucaggaguaacagagauacaacaguc

SEQ ID NO: 151784 - RNA, 32 nt, Homo Sapiens
cucuuuaggcaggagcacucuugccuuccccc

SEQ ID NO: 151785 - RNA, 30 nt, Homo Sapiens
uaauuauguauuaccagcaggguguuuuua

SEQ ID NO: 151786 - RNA, 32 nt, Homo Sapiens
ccgugguucuucauugcagcugcuuucugcuc

SEQ ID NO: 151787 - RNA, 32 nt, Homo Sapiens
ggcagguuucucugcugucaagcacucugugu

SEQ ID NO: 151788 - RNA, 32 nt, Homo Sapiens
agaacccaaccgacagugggcggcaggacgca

SEQ ID NO: 151789 - RNA, 32 nt, Homo Sapiens
ugaugcuagguuggggcccacccugcucccug

SEQ ID NO: 151790 - RNA, 32 nt, Homo Sapiens
ucuguagugucugggauuugccggugcucaau

SEQ ID NO: 151791 - RNA, 32 nt, Homo Sapiens
gggcagcugaggggagcguccaggcccagaag

SEQ ID NO: 151792 - RNA, 32 nt, Homo Sapiens
uuuccugcuguaacauuuuaacuuuuuagaau

SEQ ID NO: 151793 - RNA, 32 nt, Homo Sapiens
ggagacgggagacccauccuccucggccguuc

SEQ ID NO: 151794 - RNA, 32 nt, Homo Sapiens
gcccccauucccaucacccccuccaucccucg

SEQ ID NO: 151795 - RNA, 32 nt, Homo Sapiens
ugagaagcaaggugugugcuccugucacgcau

SEQ ID NO: 151796 - RNA, 32 nt, Homo Sapiens
gccuuccaggacuauagcgcugcagccgcccc

SEQ ID NO: 151797 - RNA, 32 nt, Homo Sapiens
uuuucagcuguacuugagcaucugaaacugca

SEQ ID NO: 151798 - RNA, 32 nt, Homo Sapiens
cucaccggccccagaccgcggaccccagcucc

SEQ ID NO: 151799 - RNA, 32 nt, Homo Sapiens
gaagccuggcccagcccaccucccccuggagu

SEQ ID NO: 151800 - RNA, 32 nt, Homo Sapiens
ugaucaccaaaggacugagaaucugggagggc

SEQ ID NO: 151801 - RNA, 32 nt, Homo Sapiens
ucuguccuguggagcaggcagugauuuuguuc

SEQ ID NO: 151802 - RNA, 32 nt, Homo Sapiens
gaaggagagcuggagcgggugaacuaagagcg

SEQ ID NO: 151803 - RNA, 32 nt, Homo Sapiens
uggguuuguaaaauaaagugagauagcauccu

SEQ ID NO: 151804 - RNA, 32 nt, Homo Sapiens
gagugcaauggugcaaucuuggcucacugcac

SEQ ID NO: 151805 - RNA, 32 nt, Homo Sapiens
ugguacugugcaaagggaaaaaggaaaugggc

SEQ ID NO: 151806 - RNA, 32 nt, Homo Sapiens
cuggcgcuggcagaagacaaaucugaccuuga

SEQ ID NO: 151807 - RNA, 32 nt, Homo Sapiens
cuuccaggggauggccgagaugagcguuccca

SEQ ID NO: 151808 - RNA, 32 nt, Homo Sapiens
gguguaccuggcggccgugcuggagcaccuga

SEQ ID NO: 151809 - RNA, 32 nt, Homo Sapiens
ggaauaaacuaaaaguugggguaaugagcuug

SEQ ID NO: 151810 - RNA, 32 nt, Homo Sapiens
gauggcgcgcgggccuggcucaggagagcagc

SEQ ID NO: 151811 - RNA, 28 nt, Homo Sapiens
ccagcaguuacagggcccagccacaaau

SEQ ID NO: 151812 - RNA, 32 nt, Homo Sapiens
gcucucaacccaugcgcuaccaaauacgccug

SEQ ID NO: 151813 - RNA, 32 nt, Homo Sapiens
aaucugccuuuaucuuggauugauugguacag

SEQ ID NO: 151814 - RNA, 32 nt, Homo Sapiens
gguccucaguacaucagacacccagauuugaa

SEQ ID NO: 151815 - RNA, 29 nt, Homo Sapiens
uggucauauugagagugaaacugccaccu

SEQ ID NO: 151816 - RNA, 31 nt, Homo Sapiens
uucgugugaaacaucuucagggcgggaaagg

SEQ ID NO: 151817 - RNA, 32 nt, Homo Sapiens
ccccuccaccccagccugccugcugccucgga

SEQ ID NO: 151818 - RNA, 32 nt, Homo Sapiens
acucgccgagguuccuugggucauggugccag

SEQ ID NO: 151819 - RNA, 31 nt, Homo Sapiens
agcgcggagggagcagagggaguccauggag

SEQ ID NO: 151820 - RNA, 32 nt, Homo Sapiens
guucuccccggugcccggggcucccacaccac

SEQ ID NO: 151821 - RNA, 32 nt, Homo Sapiens
ucucuacuaaaaguacaaaaaauuagccgggc

SEQ ID NO: 151822 - RNA, 32 nt, Homo Sapiens
cuggccguuaaggaugccaaugccaagcucuc

SEQ ID NO: 151823 - RNA, 32 nt, Homo Sapiens
agggguuagaccucaagggugacuuggaguuc

SEQ ID NO: 151824 - RNA, 32 nt, Homo Sapiens
uuucuuaauguuuuuguuuguauguuuuucaa

SEQ ID NO: 151825 - RNA, 32 nt, Homo Sapiens
agaaagagggagagguuggugccgccccgcac

SEQ ID NO: 151826 - RNA, 32 nt, Homo Sapiens
ugucuauaaaaauuauguguuauuuaauucug

SEQ ID NO: 151827 - RNA, 32 nt, Homo Sapiens
cggccaugccccacagagcuuacccaggagaa

SEQ ID NO: 151828 - RNA, 32 nt, Homo Sapiens
cucagaaaggucuguuuuuguucccgauugua

SEQ ID NO: 151829 - RNA, 32 nt, Homo Sapiens
caugaggaauggggauggggcuggcauggaag

SEQ ID NO: 151830 - RNA, 32 nt, Homo Sapiens
uaauguauauauaugggaggaaaggccacauu

SEQ ID NO: 151831 - RNA, 32 nt, Homo Sapiens
ggucacugcacuccagccuggcuacagaguga

SEQ ID NO: 151832 - RNA, 32 nt, Homo Sapiens
ggggguuguaaauuggcauggaaauuuaaagc

SEQ ID NO: 151833 - RNA, 32 nt, Homo Sapiens
cagcggucccaggggccugaaaaggaaggacc

SEQ ID NO: 151834 - RNA, 32 nt, Homo Sapiens
guucccugacuucacuauaugucuuauguaug

SEQ ID NO: 151835 - RNA, 32 nt, Homo Sapiens
gaacugcccaccucgccggcugccgggagggg

SEQ ID NO: 151836 - RNA, 32 nt, Homo Sapiens
accaucccagccccgaagcccgggccaugcca

SEQ ID NO: 151837 - RNA, 31 nt, Homo Sapiens
ggaaggaaccugccuaaccaggcaccugugu

SEQ ID NO: 151838 - RNA, 32 nt, Homo Sapiens
uguauaaacaggaagccaggcuuuugagcugu

SEQ ID NO: 151839 - RNA, 32 nt, Homo Sapiens
caaggagaagaagccacauguauuuuggucug

SEQ ID NO: 151840 - RNA, 32 nt, Homo Sapiens
ugcaguucucucacuggagugaaagauguuuu

SEQ ID NO: 151841 - RNA, 28 nt, Homo Sapiens
gugaugggugcuccaucaaugaugaaag

SEQ ID NO: 151842 - RNA, 32 nt, Homo Sapiens
cuccugaggugacacagccuguaggaacauac

SEQ ID NO: 151843 - RNA, 32 nt, Homo Sapiens
ccccaucacacucggccacuagugggguccug

SEQ ID NO: 151844 - RNA, 32 nt, Homo Sapiens
gcccgaccccggccgcgcccagcccccaccau

SEQ ID NO: 151845 - RNA, 32 nt, Homo Sapiens
ccuguugacugggauuuuuaagaauccguuuc

SEQ ID NO: 151846 - RNA, 32 nt, Homo Sapiens
gccagccacaccuggggucuggggagacucuu

SEQ ID NO: 151847 - RNA, 32 nt, Homo Sapiens
ggggacuuaggcaugacacagguucuugcaaa

SEQ ID NO: 151848 - RNA, 32 nt, Homo Sapiens
gagacaccaaagggugaagcuauuuaucugua

SEQ ID NO: 151849 - RNA, 32 nt, Homo Sapiens
cucucggcaccuuucacccagcccaagcagcg

SEQ ID NO: 151850 - RNA, 32 nt, Homo Sapiens
aauccccagaagacauagacaguuuaaauuca

SEQ ID NO: 151851 - RNA, 32 nt, Homo Sapiens
uuaacaugaucaauguauuucucugccuugac

SEQ ID NO: 151852 - RNA, 32 nt, Homo Sapiens
ucugugcgggcucuugucaggauggugaagcu

SEQ ID NO: 151853 - RNA, 32 nt, Homo Sapiens
ggacugcggucucgggcagcaauggccgagaa

SEQ ID NO: 151854 - RNA, 32 nt, Homo Sapiens
auuuggcaaggcugucaucugcucuugggucc

SEQ ID NO: 151855 - RNA, 32 nt, Homo Sapiens
cuucuuuuccaagucacaacccgcccugcccg

SEQ ID NO: 151856 - RNA, 32 nt, Homo Sapiens
cagggucugaugggcugcuugggcauucugug

SEQ ID NO: 151857 - RNA, 32 nt, Homo Sapiens
cauucuuuuuuggcaauuuugauaagcaaggu

SEQ ID NO: 151858 - RNA, 32 nt, Homo Sapiens
uacuguguuuggaaauuauacucuguaucugg

SEQ ID NO: 151859 - RNA, 29 nt, Homo Sapiens
gcaaaugcacgacagcggccuccugaaca

SEQ ID NO: 151860 - RNA, 32 nt, Homo Sapiens
gaauauauguaugcaggauaucaucaaguuuc

SEQ ID NO: 151861 - RNA, 32 nt, Homo Sapiens
gaaguccuggaugccagagacccauuaggcug

SEQ ID NO: 151862 - RNA, 32 nt, Homo Sapiens
gugcgguggugguggcggcggcggcggggagg

SEQ ID NO: 151863 - RNA, 32 nt, Homo Sapiens
gacuuguuuuugcucagcaugaaguuuuauau

SEQ ID NO: 151864 - RNA, 32 nt, Homo Sapiens
ggguggauuuuuuaagcgcaccccacccccca

SEQ ID NO: 151865 - RNA, 32 nt, Homo Sapiens
uguaaaccuuugucccauacugugauauuacu

SEQ ID NO: 151866 - RNA, 32 nt, Homo Sapiens
cagccuccuugugcaaacugggcccccaugcc

SEQ ID NO: 151867 - RNA, 32 nt, Homo Sapiens
aaaugccaaaacaaaugggaaaaaauacacac

SEQ ID NO: 151868 - RNA, 32 nt, Homo Sapiens
ggucugcccacuucccucccccugccgaggcu

SEQ ID NO: 151869 - RNA, 32 nt, Homo Sapiens
uauguuggaaaugugcaaccacugcuucuugg

SEQ ID NO: 151870 - RNA, 32 nt, Homo Sapiens
ggaaguugcagugagucgagauugcacugcug

SEQ ID NO: 151871 - RNA, 32 nt, Homo Sapiens
ucuuuuguguuucgcuccaaaggguugucuuc

SEQ ID NO: 151872 - RNA, 32 nt, Homo Sapiens
gcaaggucaagcgcaagcucaccuaccaguuc

SEQ ID NO: 151873 - RNA, 32 nt, Homo Sapiens
cagggacaugauaaucugagcuaugcagagga

SEQ ID NO: 151874 - RNA, 32 nt, Homo Sapiens
uugcccagggucacucagguagaguugagauu

SEQ ID NO: 151875 - RNA, 32 nt, Homo Sapiens
uauaauuuuaggcuauuagcuuccucaauacu

SEQ ID NO: 151876 - RNA, 32 nt, Homo Sapiens
accacugucaggcucuuuugucaguccuauca

SEQ ID NO: 151877 - RNA, 32 nt, Homo Sapiens
agccaggccccggggagggagccagccacagu

SEQ ID NO: 151878 - RNA, 32 nt, Homo Sapiens
cgcuucugagucauucuuugggcucacccugc

SEQ ID NO: 151879 - RNA, 32 nt, Homo Sapiens
uggucaugaucaagauaguaguauuauuacac

SEQ ID NO: 151880 - RNA, 32 nt, Homo Sapiens
cuggaucccacacucugagaccggggcaaacu

SEQ ID NO: 151881 - RNA, 32 nt, Homo Sapiens
cuacuggaaaauuuauuuaauucuaacugaau

SEQ ID NO: 151882 - RNA, 32 nt, Homo Sapiens
accucugauguggucuuccucaccauuggcua

SEQ ID NO: 151883 - RNA, 32 nt, Homo Sapiens
cuccggcuccugcggcagcuccucugggcacc

SEQ ID NO: 151884 - RNA, 32 nt, Homo Sapiens
accacaggaagagguuuaggccucuggaugac

SEQ ID NO: 151885 - RNA, 32 nt, Homo Sapiens
cgggccgacggacgggaacccgggccgcgauc

SEQ ID NO: 151886 - RNA, 32 nt, Homo Sapiens
ugagauggaaaacaaaccaucucuaguuggcc

SEQ ID NO: 151887 - RNA, 32 nt, Homo Sapiens
ugguggaaggcacaccauggcuuccucugcuu

SEQ ID NO: 151888 - RNA, 32 nt, Homo Sapiens
cgaucucaccuccauccccauccacccacaca

SEQ ID NO: 151889 - RNA, 32 nt, Homo Sapiens
guaacagccaaggauaccuucauucaucuuuc

SEQ ID NO: 151890 - RNA, 32 nt, Homo Sapiens
cgccucgugaagccuccuccugggagcucggc

SEQ ID NO: 151891 - RNA, 32 nt, Homo Sapiens
ccuggaccgcggagacgcccaggccgaggaac

SEQ ID NO: 151892 - RNA, 32 nt, Homo Sapiens
uguaugaguucagugaucuuuaaacagcucag

SEQ ID NO: 151893 - RNA, 32 nt, Homo Sapiens
cuaugcugccucucaagacucccuuaugugug

SEQ ID NO: 151894 - RNA, 32 nt, Homo Sapiens
uugucaauguuuuuauucuuuuacaagaccug

SEQ ID NO: 151895 - RNA, 32 nt, Homo Sapiens
ggggcugaacgcggcccggaccgggaacggag

SEQ ID NO: 151896 - RNA, 32 nt, Homo Sapiens
agauggcugcuaaacccuucuaauaauauaau

SEQ ID NO: 151897 - RNA, 32 nt, Homo Sapiens
cccugcugcccccagcggacacaagagcgugc

SEQ ID NO: 151898 - RNA, 32 nt, Homo Sapiens
gcaccauuccuggucacgcaaaacagaaccca

SEQ ID NO: 151899 - RNA, 32 nt, Homo Sapiens
uugccgacgaugccuuccugugcagagcuugg

SEQ ID NO: 151900 - RNA, 32 nt, Homo Sapiens
uuauaucaaggguugucuuuucuucauuuccc

SEQ ID NO: 151901 - RNA, 32 nt, Homo Sapiens
gcgcugagugacccgagucgggacgcgggcug

SEQ ID NO: 151902 - RNA, 32 nt, Homo Sapiens
agauggaccagggaggacaggaugcugggcag

SEQ ID NO: 151903 - RNA, 32 nt, Homo Sapiens
acccacauauccuuuuggcagcagcuaccugc

SEQ ID NO: 151904 - RNA, 32 nt, Homo Sapiens
agggcuccccacucccuaagccccacagccag

SEQ ID NO: 151905 - RNA, 32 nt, Homo Sapiens
gccgcggccucugagcugggaugagccgugcu

SEQ ID NO: 151906 - RNA, 32 nt, Homo Sapiens
guggcgaggcgagguccggggagcgagcgagc

SEQ ID NO: 151907 - RNA, 32 nt, Homo Sapiens
agucugguaguucuucaaaugguuaaauguag

SEQ ID NO: 151908 - RNA, 32 nt, Homo Sapiens
ucuggcuccgcggguggcccauggcaaaauuu

SEQ ID NO: 151909 - RNA, 32 nt, Homo Sapiens
cgcaggcccugugccggugcccggggcaugag

SEQ ID NO: 151910 - RNA, 32 nt, Homo Sapiens
cggcugcccagccccagccucaccaccgcauc

SEQ ID NO: 151911 - RNA, 32 nt, Homo Sapiens
gcuggccgcgcgccgccgccucccgcacgcuu

SEQ ID NO: 151912 - RNA, 32 nt, Homo Sapiens
cccuucuccucagccuucuccuuagccggugg

SEQ ID NO: 151913 - RNA, 32 nt, Homo Sapiens
ugcugcagaguccgggagaagcagccacacuu

SEQ ID NO: 151914 - RNA, 32 nt, Homo Sapiens
agggccccagcacggggcuggacugccacagc

SEQ ID NO: 151915 - RNA, 32 nt, Homo Sapiens
cuggggcuccuucuccaccccagcccccaaag

SEQ ID NO: 151916 - RNA, 32 nt, Homo Sapiens
cauccuacccucgggcccaccuggccaccuga

SEQ ID NO: 151917 - RNA, 32 nt, Homo Sapiens
augguuccaucaucuccuuccauaucucacag

SEQ ID NO: 151918 - RNA, 32 nt, Homo Sapiens
aaaaauuccaccaggauuaaucucuaaaauuc

SEQ ID NO: 151919 - RNA, 32 nt, Homo Sapiens
aggcaggagaaucgcuugaaccagagaggugg

SEQ ID NO: 151920 - RNA, 32 nt, Homo Sapiens
ccauguuuugugcaauuuuaaagagauggcuu

SEQ ID NO: 151921 - RNA, 28 nt, Homo Sapiens
auaauaaaaaaguuguguaauguuuugc

SEQ ID NO: 151922 - RNA, 32 nt, Homo Sapiens
gggaagacagaaaauacaaagaaaguuauuca

SEQ ID NO: 151923 - RNA, 32 nt, Homo Sapiens
gcgauacccagguacaaaggaccuccagacca

SEQ ID NO: 151924 - RNA, 32 nt, Homo Sapiens
agcgggaggcgcgccgggcgucugcacucggg

SEQ ID NO: 151925 - RNA, 30 nt, Homo Sapiens
ccuucacaggcugcagugggucccgagccc

SEQ ID NO: 151926 - RNA, 32 nt, Homo Sapiens
cgccuuugcgaucccugcugcaaauaggcagu

SEQ ID NO: 151927 - RNA, 32 nt, Homo Sapiens
acugggugggagagggggagucucacggggcc

SEQ ID NO: 151928 - RNA, 32 nt, Homo Sapiens
uguauagaaguagauuaagagccauauaaguu

SEQ ID NO: 151929 - RNA, 32 nt, Homo Sapiens
gaggugggagggcaagggaggggagcuucuuu

SEQ ID NO: 151930 - RNA, 32 nt, Homo Sapiens
agaggacucugauguuacucuugagcuuauga

SEQ ID NO: 151931 - RNA, 32 nt, Homo Sapiens
ccaagcgcagggaccgccggccuccagcuggu

SEQ ID NO: 151932 - RNA, 32 nt, Homo Sapiens
accugggaaagcccuccucccuccugaaaaag

SEQ ID NO: 151933 - RNA, 32 nt, Homo Sapiens
uauuuauucaugcuagggaugguaauaccuug

SEQ ID NO: 151934 - RNA, 32 nt, Homo Sapiens
uggccagagacagagaggcauauaggaagguu

SEQ ID NO: 151935 - RNA, 32 nt, Homo Sapiens
auuucuacuggguuuuggaacaaacuccugcu

SEQ ID NO: 151936 - RNA, 32 nt, Homo Sapiens
uaaccuuucuuacucaugccuauguuauucuu

SEQ ID NO: 151937 - RNA, 32 nt, Homo Sapiens
acauacuguaaauuauuuauuaauggcuaaau

SEQ ID NO: 151938 - RNA, 31 nt, Homo Sapiens
aaggacgaacaaaagaaccaggagggcggga

SEQ ID NO: 151939 - RNA, 32 nt, Homo Sapiens
auccucccaucccuaucuuaaagaacaggaca

SEQ ID NO: 151940 - RNA, 32 nt, Homo Sapiens
acagcacucaaauuauugcagauucuaacuca

SEQ ID NO: 151941 - RNA, 32 nt, Homo Sapiens
gucggcuccgagagcucuggcuuaucaggacu

SEQ ID NO: 151942 - RNA, 32 nt, Homo Sapiens
ccuuuaccccccaccccccaccacugcccccu

SEQ ID NO: 151943 - RNA, 32 nt, Homo Sapiens
uccucaaguucaguauuuuauagugguaauug

SEQ ID NO: 151944 - RNA, 32 nt, Homo Sapiens
ggccggagccucucucgggggagccgcgccug

SEQ ID NO: 151945 - RNA, 32 nt, Homo Sapiens
ggcuuggccccggcccuagcucgucggcugug

SEQ ID NO: 151946 - RNA, 32 nt, Homo Sapiens
ucgacgcgggcccccaggauucucccggcgcc

SEQ ID NO: 151947 - RNA, 32 nt, Homo Sapiens
uacuauacuuuuuauuguuacuugaguguauu

SEQ ID NO: 151948 - RNA, 32 nt, Homo Sapiens
agaaacaaccucagcgacuccggcugcucugc

SEQ ID NO: 151949 - RNA, 32 nt, Homo Sapiens
uuuucuucucuuccucucaggcuaggcuuucu

SEQ ID NO: 151950 - RNA, 32 nt, Homo Sapiens
cgacuccccuccccaucucccucucaaccuca

SEQ ID NO: 151951 - RNA, 32 nt, Homo Sapiens
ugucaccagaaaccacauguauuugcauguuu

SEQ ID NO: 151952 - RNA, 32 nt, Homo Sapiens
cagugagccaaggucacgucacugcacucuag

SEQ ID NO: 151953 - RNA, 32 nt, Homo Sapiens
aacuuuaaagagggaaagagugagauucagaa

SEQ ID NO: 151954 - RNA, 32 nt, Homo Sapiens
aggagaugacuuuuuucuugucaucuuuuaaa

SEQ ID NO: 151955 - RNA, 32 nt, Homo Sapiens
uaacaacagacaauauuuuagaaggacggauu

SEQ ID NO: 151956 - RNA, 32 nt, Homo Sapiens
aacaaaaaacaauguaaugguuaauaguagaa

SEQ ID NO: 151957 - RNA, 32 nt, Homo Sapiens
gcagucgcgccggcgcugggcgaggaagcgga

SEQ ID NO: 151958 - RNA, 32 nt, Homo Sapiens
gguuauauaaauaacagauauggcagaacaau

SEQ ID NO: 151959 - RNA, 32 nt, Homo Sapiens
ggacuggguucgcucucagcucugcagcuguc

SEQ ID NO: 151960 - RNA, 32 nt, Homo Sapiens
agcucaaagguuuggaaggagcagaaaacccu

SEQ ID NO: 151961 - RNA, 32 nt, Homo Sapiens
uuuuauuuaaaauaaacauuugagggaaguua

SEQ ID NO: 151962 - RNA, 32 nt, Homo Sapiens
gagggagagguugauccuaugaggaaaucaac

SEQ ID NO: 151963 - RNA, 32 nt, Homo Sapiens
gugcagugucaucucagcgggaggaagggcua

SEQ ID NO: 151964 - RNA, 32 nt, Homo Sapiens
cagcacaugcgguggcucugggacauuggugg

SEQ ID NO: 151965 - RNA, 32 nt, Homo Sapiens
ugaccucccuccccgggggccuucgcaggcuu

SEQ ID NO: 151966 - RNA, 32 nt, Homo Sapiens
ggggacuugcuccucagcccccaucacugccc

SEQ ID NO: 151967 - RNA, 32 nt, Homo Sapiens
gggacccggcggggagggugcugcugaaccag

SEQ ID NO: 151968 - RNA, 32 nt, Homo Sapiens
cucagugaaacacugaagcuaaugggauguug

SEQ ID NO: 151969 - RNA, 32 nt, Homo Sapiens
gacacagaggggcaguagaggcugcaggcguc

SEQ ID NO: 151970 - RNA, 32 nt, Homo Sapiens
ggguaaagauuuuacaauagcaaguauuauca

SEQ ID NO: 151971 - RNA, 32 nt, Homo Sapiens
acacggaaacauuuuuaacagagcauuuaauu

SEQ ID NO: 151972 - RNA, 32 nt, Homo Sapiens
uggcggcggcggcggcagcggcaccaugaccc

SEQ ID NO: 151973 - RNA, 32 nt, Homo Sapiens
ucuugcucuugguaaaauauagaguggucagu

SEQ ID NO: 151974 - RNA, 32 nt, Homo Sapiens
gaccacaccaaaaugagucuacgugaugcuag

SEQ ID NO: 151975 - RNA, 32 nt, Homo Sapiens
cuacauagcaguguuauuuauguacagauaag

SEQ ID NO: 151976 - RNA, 32 nt, Homo Sapiens
cuuucuagaaaguugaggauguuugaagcuuc

SEQ ID NO: 151977 - RNA, 32 nt, Homo Sapiens
agaaaauccugacaugcacacccauuaaaaau

SEQ ID NO: 151978 - RNA, 32 nt, Homo Sapiens
cgccgcugccaaccccccuccuccucaccaga

SEQ ID NO: 151979 - RNA, 32 nt, Homo Sapiens
gcugcaggcgcgcgccggggccgugcugaugg

SEQ ID NO: 151980 - RNA, 32 nt, Homo Sapiens
aaagauuuuuuuugacagccacagcauguucc

SEQ ID NO: 151981 - RNA, 32 nt, Homo Sapiens
cucccaaccccugcaccacccacagccgggag

SEQ ID NO: 151982 - RNA, 32 nt, Homo Sapiens
cuaacagcuaguaagccaauuuuuuggggguc

SEQ ID NO: 151983 - RNA, 32 nt, Homo Sapiens
aauaauaucuuaacagaagggggugucaaaca

SEQ ID NO: 151984 - RNA, 32 nt, Homo Sapiens
uucuugauacuauagcucuauagcuuugugau

SEQ ID NO: 151985 - RNA, 26 nt, Homo Sapiens
gauggcggcagaagcagcugguggga

SEQ ID NO: 151986 - RNA, 32 nt, Homo Sapiens
ccaggugugugaggggcggggauuggacccgg

SEQ ID NO: 151987 - RNA, 32 nt, Homo Sapiens
acauccuuaccucuaaaagauacuucaaagug

SEQ ID NO: 151988 - RNA, 32 nt, Homo Sapiens
guauuuuugugaggaugaaaugcuaauaaaag

SEQ ID NO: 151989 - RNA, 32 nt, Homo Sapiens
aauagcaacuucccuuccucagcugccugaac

SEQ ID NO: 151990 - RNA, 32 nt, Homo Sapiens
aguuugcuagauccauggucucuagaugguuu

SEQ ID NO: 151991 - RNA, 32 nt, Homo Sapiens
cacuacaguuuaaugucauacuggcuuccaaa

SEQ ID NO: 151992 - RNA, 32 nt, Homo Sapiens
uucucuguuucuaccuuucagaauggacuuaa

SEQ ID NO: 151993 - RNA, 32 nt, Homo Sapiens
aguaaguguuagcugucuuuuucauuauauau

SEQ ID NO: 151994 - RNA, 32 nt, Homo Sapiens
gcacauuaauaaauaagaauuauacagcaaaa

SEQ ID NO: 151995 - RNA, 32 nt, Homo Sapiens
aaaggaauuggaaucaugucuuuguagaaugu

SEQ ID NO: 151996 - RNA, 32 nt, Homo Sapiens
uucuguugaauucuguuauuaagggcccauga

SEQ ID NO: 151997 - RNA, 31 nt, Homo Sapiens
agauucugauaaaaacauaaauguauuaguu

SEQ ID NO: 151998 - RNA, 32 nt, Homo Sapiens
gauggcugcuccacuggguuacagaaucacag

SEQ ID NO: 151999 - RNA, 32 nt, Homo Sapiens
cauagcuugggaccagucugugcccuccugcc

SEQ ID NO: 152000 - RNA, 32 nt, Homo Sapiens
uccuaggucaugccuccuccccuagggaaugg

SEQ ID NO: 152001 - RNA, 30 nt, Homo Sapiens
agccagcacugugcugcacaacuccaggaa

SEQ ID NO: 152002 - RNA, 32 nt, Homo Sapiens
gagauaaauguuucuuauauacauuuguguau

SEQ ID NO: 152003 - RNA, 32 nt, Homo Sapiens
agcacaucuuugaccacgucaucgggccagaa

SEQ ID NO: 152004 - RNA, 32 nt, Homo Sapiens
ggaagccuucccugccuucucugggcugugcg

SEQ ID NO: 152005 - RNA, 32 nt, Homo Sapiens
gccugggcgcggggcgggaggcggugaccagc

SEQ ID NO: 152006 - RNA, 32 nt, Homo Sapiens
ggcuacauaaggaaacagaaggagggauuuca

SEQ ID NO: 152007 - RNA, 32 nt, Homo Sapiens
acuacccccucuaggaaguuauuuuauguagc

SEQ ID NO: 152008 - RNA, 32 nt, Homo Sapiens
ugugugccccacgucaugcgcgcgggcguccg

SEQ ID NO: 152009 - RNA, 32 nt, Homo Sapiens
gcugcaucaaggaagccguuaaacuccugcua

SEQ ID NO: 152010 - RNA, 32 nt, Homo Sapiens
augauuguauaaaauguaugaaugguuagccu

SEQ ID NO: 152011 - RNA, 32 nt, Homo Sapiens
gaaguguaacugugcuauuauuucaauaaaga

SEQ ID NO: 152012 - RNA, 32 nt, Homo Sapiens
ugcuuucccucccccugcccccucaacagucc

SEQ ID NO: 152013 - RNA, 32 nt, Homo Sapiens
ggugcagacucgggauuggccuuggacacuca

SEQ ID NO: 152014 - RNA, 32 nt, Homo Sapiens
caggcaccagcaugaacaccaagcugggggug

SEQ ID NO: 152015 - RNA, 32 nt, Homo Sapiens
agggcaggccccagggcgagcuugccaucgug

SEQ ID NO: 152016 - RNA, 32 nt, Homo Sapiens
augccagaaaucagccaucuggucucccguag

SEQ ID NO: 152017 - RNA, 32 nt, Homo Sapiens
ucuuuuuaacaucaugugcgucucuugggauc

SEQ ID NO: 152018 - RNA, 32 nt, Homo Sapiens
aauuuuugugggucggggggacaguaaacuuc

SEQ ID NO: 152019 - RNA, 32 nt, Homo Sapiens
uucagggcucaggggcucccagcccuccuucc

SEQ ID NO: 152020 - RNA, 32 nt, Homo Sapiens
uuuaauaauuuaauuuaccccaaagucccuaa

SEQ ID NO: 152021 - RNA, 32 nt, Homo Sapiens
cgggggaaagagaguuaccggaguuuuagcaa

SEQ ID NO: 152022 - RNA, 32 nt, Homo Sapiens
cccucugccucggccuugucaguugcugagcu

SEQ ID NO: 152023 - RNA, 32 nt, Homo Sapiens
cggcccgagagccgcguccacguuccugccuc

SEQ ID NO: 152024 - RNA, 32 nt, Homo Sapiens
aggcccuucuguagccucccccuugcccucaa

SEQ ID NO: 152025 - RNA, 32 nt, Homo Sapiens
ucuuuuucuuuuuacuuuuuuaauuuuuugag

SEQ ID NO: 152026 - RNA, 32 nt, Homo Sapiens
cucaaagcugaauugauagauuucucuuugac

SEQ ID NO: 152027 - RNA, 32 nt, Homo Sapiens
ggcgcgucgcccucugcccccgccggcacccu

SEQ ID NO: 152028 - RNA, 32 nt, Homo Sapiens
uggaaaaaauguugauggugcauuguaaaauu

SEQ ID NO: 152029 - RNA, 32 nt, Homo Sapiens
acauccuagacuggauauuucagacacuuaaa

SEQ ID NO: 152030 - RNA, 32 nt, Homo Sapiens
cugccugccuggguccugcccgaggucuccau

SEQ ID NO: 152031 - RNA, 32 nt, Homo Sapiens
cugguauauaacagauaauaaauauccagugu

SEQ ID NO: 152032 - RNA, 32 nt, Homo Sapiens
augugugguuaguguuuuuuuauuccccuaag

SEQ ID NO: 152033 - RNA, 32 nt, Homo Sapiens
uuggcuuaaauauaguuccuaagaagcuucua

SEQ ID NO: 152034 - RNA, 32 nt, Homo Sapiens
guggucgcggggugggggccggagcggcgagg

SEQ ID NO: 152035 - RNA, 32 nt, Homo Sapiens
aaaaaacuucagaaauagaaaacuacauuuug

SEQ ID NO: 152036 - RNA, 32 nt, Homo Sapiens
ggggguauacucaagaauggaguggugcuuuu

SEQ ID NO: 152037 - RNA, 32 nt, Homo Sapiens
cuggguggcgggugggggccgggugggaggug

SEQ ID NO: 152038 - RNA, 32 nt, Homo Sapiens
cacaggauggaguuugauuuaucccuccuccc

SEQ ID NO: 152039 - RNA, 32 nt, Homo Sapiens
agugaggugaauccaggcacaugaugaacacc

SEQ ID NO: 152040 - RNA, 32 nt, Homo Sapiens
ugguaauuccuccucaucacguuucucucauu

SEQ ID NO: 152041 - RNA, 32 nt, Homo Sapiens
acgucucuacacggauaaaggcacauauacaa

SEQ ID NO: 152042 - RNA, 32 nt, Homo Sapiens
ggcaaagugggucuuauccagguacguggacc

SEQ ID NO: 152043 - RNA, 32 nt, Homo Sapiens
agccuggggaagaaggcucaccccccagaguc

SEQ ID NO: 152044 - RNA, 32 nt, Homo Sapiens
agaugucaaccgucugccggugacugggaagu

SEQ ID NO: 152045 - RNA, 32 nt, Homo Sapiens
ccgaggccagucugcugccgugugcgugugcg

SEQ ID NO: 152046 - RNA, 32 nt, Homo Sapiens
guuuacuuuuucccuuucuaaucggcugaugu

SEQ ID NO: 152047 - RNA, 32 nt, Homo Sapiens
aaacuaacagagcagguauaugccuguuagau

SEQ ID NO: 152048 - RNA, 32 nt, Homo Sapiens
cugcccucccucagccgucagccaucagccau

SEQ ID NO: 152049 - RNA, 32 nt, Homo Sapiens
guucaacgugagggaaggugggaaaugucuug

SEQ ID NO: 152050 - RNA, 32 nt, Homo Sapiens
cccccuccccacuucccaucuguaauuugcag

SEQ ID NO: 152051 - RNA, 32 nt, Homo Sapiens
ugcauauaaaauuuauuuuuaaucaagcugau

SEQ ID NO: 152052 - RNA, 32 nt, Homo Sapiens
caagauccuguaggaacaccuaccuuaagcac

SEQ ID NO: 152053 - RNA, 32 nt, Homo Sapiens
cuucccacccucaaagcauuaauagccaguug

SEQ ID NO: 152054 - RNA, 32 nt, Homo Sapiens
agccugacgcagaggaagcaucugagaucuuc

SEQ ID NO: 152055 - RNA, 32 nt, Homo Sapiens
cccugccccauuagauguuaugcuggcuggcu

SEQ ID NO: 152056 - RNA, 32 nt, Homo Sapiens
uugucagaaaucaacugaccuaccuguguggg

SEQ ID NO: 152057 - RNA, 32 nt, Homo Sapiens
guccugaucaggcuuggggccuaguuacagau

SEQ ID NO: 152058 - RNA, 32 nt, Homo Sapiens
uguccagcuggccauacaaauccaccgcagca

SEQ ID NO: 152059 - RNA, 32 nt, Homo Sapiens
aggggugccucuuuuagugcucucccaauaau

SEQ ID NO: 152060 - RNA, 32 nt, Homo Sapiens
aguccuucggaugagagcgucugggugccaga

SEQ ID NO: 152061 - RNA, 32 nt, Homo Sapiens
guuuuguuuuuauuugguuuuaucugagauaa

SEQ ID NO: 152062 - RNA, 32 nt, Homo Sapiens
accuuuggaugaugaaacuguaaaugaagaug

SEQ ID NO: 152063 - RNA, 32 nt, Homo Sapiens
gcccgcgacuucgcaucagggaccgcaugcug

SEQ ID NO: 152064 - RNA, 32 nt, Homo Sapiens
uaccacauucuguccccaaaauguggaaugca

SEQ ID NO: 152065 - RNA, 32 nt, Homo Sapiens
auaaguccaagccccggcuggccugcucucac

SEQ ID NO: 152066 - RNA, 32 nt, Homo Sapiens
uuuuucugaggaaguaaccaaacaagaagacc

SEQ ID NO: 152067 - RNA, 32 nt, Homo Sapiens
aaaggugccaacucucuaaaacguagacucug

SEQ ID NO: 152068 - RNA, 32 nt, Homo Sapiens
ugguguguccgagccgaagagcagccaaugac

SEQ ID NO: 152069 - RNA, 29 nt, Homo Sapiens
gaccuccuuguccggguguggucgggcgc

SEQ ID NO: 152070 - RNA, 32 nt, Homo Sapiens
agaacuaugaaguccaucaaguaagucaaaga

SEQ ID NO: 152071 - RNA, 32 nt, Homo Sapiens
cguggucugcuguccccugggcgugaggccuc

SEQ ID NO: 152072 - RNA, 32 nt, Homo Sapiens
uccuugccugugucugacgggaccacuacuaa

SEQ ID NO: 152073 - RNA, 31 nt, Homo Sapiens
aaaaggcuucuuguuugcccaagggccuauc

SEQ ID NO: 152074 - RNA, 32 nt, Homo Sapiens
gaaggagagcaacaucccuuuguuuucacaga

SEQ ID NO: 152075 - RNA, 32 nt, Homo Sapiens
ucuccaugcuuagucacacguugcagcuuuuu

SEQ ID NO: 152076 - RNA, 32 nt, Homo Sapiens
ccccgccuucucgcugcccagccccggggagg

SEQ ID NO: 152077 - RNA, 32 nt, Homo Sapiens
acccaugacuacaacacgucuuucucaaacuc

SEQ ID NO: 152078 - RNA, 32 nt, Homo Sapiens
ccaagaaaucauccaaaaauuaccucaaccau

SEQ ID NO: 152079 - RNA, 32 nt, Homo Sapiens
gguuuuaaaucucggagaaauggcuuucguuu

SEQ ID NO: 152080 - RNA, 32 nt, Homo Sapiens
ggcucaucagucucuguaaauauugguugcag

SEQ ID NO: 152081 - RNA, 32 nt, Homo Sapiens
agaacugggucgucaguccuccgagugguggg

SEQ ID NO: 152082 - RNA, 32 nt, Homo Sapiens
gaggcagggcgcgcaggcgggcggcgaugaga

SEQ ID NO: 152083 - RNA, 32 nt, Homo Sapiens
aaaaaucuguaaacgcgaaaaauacuagauuu

SEQ ID NO: 152084 - RNA, 32 nt, Homo Sapiens
augaguacguauguuuggcucauuacugguuu

SEQ ID NO: 152085 - RNA, 32 nt, Homo Sapiens
ucacauuauuaccaacugaauaaaagaaugaa

SEQ ID NO: 152086 - RNA, 32 nt, Homo Sapiens
cagccgccggguggagggucccggccgggagc

SEQ ID NO: 152087 - RNA, 32 nt, Homo Sapiens
acccuguuuccugaguuugggauugugguaca

SEQ ID NO: 152088 - RNA, 32 nt, Homo Sapiens
aggaccacaccuuccucccuggaguuuggcuu

SEQ ID NO: 152089 - RNA, 32 nt, Homo Sapiens
uggacuaugaauugggugauuuuuuaaaguaa

SEQ ID NO: 152090 - RNA, 32 nt, Homo Sapiens
ccaaaccccccuccugcguacagaacuucacc

SEQ ID NO: 152091 - RNA, 30 nt, Homo Sapiens
caaccccaugcucucauucucagucauaug

SEQ ID NO: 152092 - RNA, 32 nt, Homo Sapiens
acauuucaucuaauuuaauauuccuggcauac

SEQ ID NO: 152093 - RNA, 31 nt, Homo Sapiens
agaauaacaaagaaaugguauuucaaguuuu

SEQ ID NO: 152094 - RNA, 32 nt, Homo Sapiens
aaaauucaccacagcauuucuaucuuuauuau

SEQ ID NO: 152095 - RNA, 30 nt, Homo Sapiens
cucagauggcagcuuuuaaaagauuucuuu

SEQ ID NO: 152096 - RNA, 32 nt, Homo Sapiens
cucaauuugugggaagaagagaagcgaggcug

SEQ ID NO: 152097 - RNA, 32 nt, Homo Sapiens
cucuuuggguaucagggaucucauggaccaga

SEQ ID NO: 152098 - RNA, 32 nt, Homo Sapiens
uacucccggaggcaaugcugcuguucagcucu

SEQ ID NO: 152099 - RNA, 32 nt, Homo Sapiens
ucccugacccaggccccaggaccuccaggacc

SEQ ID NO: 152100 - RNA, 32 nt, Homo Sapiens
uuggagaauggaaucgacaucuucuugguauu

SEQ ID NO: 152101 - RNA, 32 nt, Homo Sapiens
ucugugggaaggaugugcgcgcggauggccgg

SEQ ID NO: 152102 - RNA, 27 nt, Homo Sapiens
uaauccuccugcuucagccucucagag

SEQ ID NO: 152103 - RNA, 32 nt, Homo Sapiens
uugcgcugcuucagccccaucuccagccugau

SEQ ID NO: 152104 - RNA, 32 nt, Homo Sapiens
uaaguuguuccacagggcugguucuucgacac

SEQ ID NO: 152105 - RNA, 32 nt, Homo Sapiens
uucuuucacuuaaaauguuuuaaugcccccuc

SEQ ID NO: 152106 - RNA, 32 nt, Homo Sapiens
gcugcuuucucacucagcaucauuuccuugag

SEQ ID NO: 152107 - RNA, 32 nt, Homo Sapiens
gcgcagcacgcgccgcgcagccauggggaggc

SEQ ID NO: 152108 - RNA, 32 nt, Homo Sapiens
gaaacauguuaaaaucauggcacaccugcaga

SEQ ID NO: 152109 - RNA, 32 nt, Homo Sapiens
cccuacuuucccuucaguuccaccugccacuc

SEQ ID NO: 152110 - RNA, 32 nt, Homo Sapiens
ggcucuuccuucugcccagcuccgucccaccc

SEQ ID NO: 152111 - RNA, 32 nt, Homo Sapiens
gcggcgccccgggaacuuggcggcgacccgag

SEQ ID NO: 152112 - RNA, 32 nt, Homo Sapiens
uuuaauaaaaauugugaaagcuuaaaaaaaaa

SEQ ID NO: 152113 - RNA, 32 nt, Homo Sapiens
guguacacauuuagcuugugguaaaugacuca

SEQ ID NO: 152114 - RNA, 32 nt, Homo Sapiens
cuucuauuuuuggaaagggcugcuaugauuga

SEQ ID NO: 152115 - RNA, 32 nt, Homo Sapiens
ugauuggcuucgguugucaucugugccaucug

SEQ ID NO: 152116 - RNA, 32 nt, Homo Sapiens
gggacucugauccucauugcaugcaggaagag

SEQ ID NO: 152117 - RNA, 32 nt, Homo Sapiens
ucucucucgagcuucggcacccgcccgagccg

SEQ ID NO: 152118 - RNA, 32 nt, Homo Sapiens
ugcuccuucaaaaacauucacuuuuuacaacg

SEQ ID NO: 152119 - RNA, 32 nt, Homo Sapiens
aaguuuauaucauauuaauacauuucagugga

SEQ ID NO: 152120 - RNA, 32 nt, Homo Sapiens
cuuuagguuauaucuugguaaauaaugcuaau

SEQ ID NO: 152121 - RNA, 32 nt, Homo Sapiens
gcggugccgcccgccguggccgccucagccca

SEQ ID NO: 152122 - RNA, 32 nt, Homo Sapiens
uuucaacgccagcuuucugugcuucugccugu

SEQ ID NO: 152123 - RNA, 32 nt, Homo Sapiens
cacaacacuugaaugacagucuuauuucagca

SEQ ID NO: 152124 - RNA, 32 nt, Homo Sapiens
gaaaaauagcagcuaccauagacuucaggaaa

SEQ ID NO: 152125 - RNA, 31 nt, Homo Sapiens
cauugccucaauggugcgucugccugcacug

SEQ ID NO: 152126 - RNA, 32 nt, Homo Sapiens
aggacuuuugacuuuuaucuggauagacauuu

SEQ ID NO: 152127 - RNA, 31 nt, Homo Sapiens
uacauaguaaggugacugccaaauaauauuu

SEQ ID NO: 152128 - RNA, 28 nt, Homo Sapiens
acauuggucucuaccaggaucccugccc

SEQ ID NO: 152129 - RNA, 32 nt, Homo Sapiens
uuguguuuauuacugcuugagguugagccuuu

SEQ ID NO: 152130 - RNA, 32 nt, Homo Sapiens
acguugcucagguucccccuguggguuccggu

SEQ ID NO: 152131 - RNA, 32 nt, Homo Sapiens
aaaggcccaccucuccuguccucugccagaca

SEQ ID NO: 152132 - RNA, 32 nt, Homo Sapiens
cucuguuccuuccccgagccccugccccggcu

SEQ ID NO: 152133 - RNA, 32 nt, Homo Sapiens
uuuaaugagaauuugaauguuuauugaacaau

SEQ ID NO: 152134 - RNA, 32 nt, Homo Sapiens
cauugcuggcggugggagcgccgcccggucuc

SEQ ID NO: 152135 - RNA, 32 nt, Homo Sapiens
ugcgcacacacagauaugcacacacauggaug

SEQ ID NO: 152136 - RNA, 32 nt, Homo Sapiens
cacacacacauacacacacacacacacacacg

SEQ ID NO: 152137 - RNA, 32 nt, Homo Sapiens
gugagggucugccugccuguuucugucugggu

SEQ ID NO: 152138 - RNA, 32 nt, Homo Sapiens
ccuggucuuucugcaccagcguggcucuuuaa

SEQ ID NO: 152139 - RNA, 32 nt, Homo Sapiens
aaggaagauugugaauaaucccaaagcuucuu

SEQ ID NO: 152140 - RNA, 32 nt, Homo Sapiens
aaagaagaaaaagaaggacugaacuccaucgc

SEQ ID NO: 152141 - RNA, 32 nt, Homo Sapiens
augagaacaugaaaacagaaaacgguuaaaac

SEQ ID NO: 152142 - RNA, 32 nt, Homo Sapiens
cgccugcccacacccuccuccccuccuuccag

SEQ ID NO: 152143 - RNA, 32 nt, Homo Sapiens
ugacccccaggggccucauccuccccauggaa

SEQ ID NO: 152144 - RNA, 32 nt, Homo Sapiens
guggggucuugcuggcuagcucccucacccuu

SEQ ID NO: 152145 - RNA, 32 nt, Homo Sapiens
agguggcuggacucaccugguuugccuucuuc

SEQ ID NO: 152146 - RNA, 32 nt, Homo Sapiens
cauccgcgcgcccgcggcccuagcaguggauc

SEQ ID NO: 152147 - RNA, 31 nt, Homo Sapiens
uugagggcaaggucaaggggugcagccagga

SEQ ID NO: 152148 - RNA, 32 nt, Homo Sapiens
uguaugaguauuuuuguauuaaaaacauuuua

SEQ ID NO: 152149 - RNA, 32 nt, Homo Sapiens
cgucuuuaaaucaaucacugacauggagcugg

SEQ ID NO: 152150 - RNA, 32 nt, Homo Sapiens
gguagugcugcagccccuccccgcccccaccg

SEQ ID NO: 152151 - RNA, 32 nt, Homo Sapiens
auuacuucaguguuaguuuucuuaauuuuuuu

SEQ ID NO: 152152 - RNA, 32 nt, Homo Sapiens
ccuucgagccaguggagauaugcugaaaggaa

SEQ ID NO: 152153 - RNA, 32 nt, Homo Sapiens
ucuauugcuguaaaguuuuguauauuuuguaa

SEQ ID NO: 152154 - RNA, 32 nt, Homo Sapiens
gcugaggcggguggaucaugaggucaggaguu

SEQ ID NO: 152155 - RNA, 32 nt, Homo Sapiens
ugccaaggaaaggggcuucuugugugucccuc

SEQ ID NO: 152156 - RNA, 32 nt, Homo Sapiens
ccucccuuuauaggcuccgagagcggggcggg

SEQ ID NO: 152157 - RNA, 32 nt, Homo Sapiens
cacccccaggaccucuucagcugcugacaauc

SEQ ID NO: 152158 - RNA, 32 nt, Homo Sapiens
gggccuuuauuuccaacuaggaggauaaugcc

SEQ ID NO: 152159 - RNA, 32 nt, Homo Sapiens
cauuugaagcugaguuccauuacuggugauug

SEQ ID NO: 152160 - RNA, 32 nt, Homo Sapiens
aguauucuccgcccgcuguccucccccuggag

SEQ ID NO: 152161 - RNA, 32 nt, Homo Sapiens
uggauacccggaaacacacacacacacacauc

SEQ ID NO: 152162 - RNA, 32 nt, Homo Sapiens
uccugaauauuuuuugcucuaaucucucugcc

SEQ ID NO: 152163 - RNA, 32 nt, Homo Sapiens
agcuaugugaaauuauuuaaaaggguaagggg

SEQ ID NO: 152164 - RNA, 32 nt, Homo Sapiens
uuuauuuggggaugggcugggagugacaguag

SEQ ID NO: 152165 - RNA, 32 nt, Homo Sapiens
gcugcuaaaaaguuauuaaagaauauugggaa

SEQ ID NO: 152166 - RNA, 32 nt, Homo Sapiens
cugauaaaaaugauauugcucuauauguaaua

SEQ ID NO: 152167 - RNA, 32 nt, Homo Sapiens
uuugcuugaaagaaaauaccaaggaacaggaa

SEQ ID NO: 152168 - RNA, 32 nt, Homo Sapiens
uaacuuuccuuccucauuucuugaggcuucug

SEQ ID NO: 152169 - RNA, 32 nt, Homo Sapiens
uuauagauguaaagacaaaauaaagguuaaag

SEQ ID NO: 152170 - RNA, 32 nt, Homo Sapiens
uccugugauacaugugcuguagcuucuugaga

SEQ ID NO: 152171 - RNA, 32 nt, Homo Sapiens
cggggacauuauugcgcguggaacggcugcuu

SEQ ID NO: 152172 - RNA, 32 nt, Homo Sapiens
guggguuuucuuucuccuccuccaaccuuggc

SEQ ID NO: 152173 - RNA, 32 nt, Homo Sapiens
gggaggaccagagggaugaagucagggcaggc

SEQ ID NO: 152174 - RNA, 32 nt, Homo Sapiens
uuauggaggaaaaauaaaucuaccauaggaau

SEQ ID NO: 152175 - RNA, 32 nt, Homo Sapiens
acagaaaaauuuaacuccagaauauggugaua

SEQ ID NO: 152176 - RNA, 32 nt, Homo Sapiens
gcagggcugggcagugcugccggagcaaaagc

SEQ ID NO: 152177 - RNA, 32 nt, Homo Sapiens
aaugaauuaaaguacaggauuggggcuaaaua

SEQ ID NO: 152178 - RNA, 32 nt, Homo Sapiens
cagcccaaauauuuauacaccagccagccucc

SEQ ID NO: 152179 - RNA, 32 nt, Homo Sapiens
uugcgugugggaaucccaaaggagaccccagc

SEQ ID NO: 152180 - RNA, 32 nt, Homo Sapiens
gcccuacugcuuccuggugcugcuggccgccg

SEQ ID NO: 152181 - RNA, 32 nt, Homo Sapiens
cucucucccucauguccugggauucuggggaa

SEQ ID NO: 152182 - RNA, 32 nt, Homo Sapiens
aacaugggucauuuaaaguccuguaugaacca

SEQ ID NO: 152183 - RNA, 32 nt, Homo Sapiens
uuccuuuucuugcuccuucuucaacuccuggu

SEQ ID NO: 152184 - RNA, 32 nt, Homo Sapiens
ugugggagguaugggcaggagaggaacccuua

SEQ ID NO: 152185 - RNA, 32 nt, Homo Sapiens
cuugggcuaaaauaaacagguuguggcugaug

SEQ ID NO: 152186 - RNA, 32 nt, Homo Sapiens
ccugcagauggccuauugugggaccuugugau

SEQ ID NO: 152187 - RNA, 32 nt, Homo Sapiens
aggcucucccugcucccuucuauacaggaauc

SEQ ID NO: 152188 - RNA, 32 nt, Homo Sapiens
gccaucuguccauucacccaucuguccaucug

SEQ ID NO: 152189 - RNA, 32 nt, Homo Sapiens
cugccuaggccuuuuuacugccugccaccguc

SEQ ID NO: 152190 - RNA, 32 nt, Homo Sapiens
ugugcuguugaacucugggaggggcagccaga

SEQ ID NO: 152191 - RNA, 32 nt, Homo Sapiens
caggguggagggcuugaugugauggugaucau

SEQ ID NO: 152192 - RNA, 32 nt, Homo Sapiens
uuuuccaacuuaugugaugggcgacaccaaga

SEQ ID NO: 152193 - RNA, 32 nt, Homo Sapiens
ucagggcacccagccgccccacgcucagcccu

SEQ ID NO: 152194 - RNA, 32 nt, Homo Sapiens
gucaugaggucccagagagaccaugcaucuga

SEQ ID NO: 152195 - RNA, 32 nt, Homo Sapiens
cucuugcccaaguucugcccuccagcugugcu

SEQ ID NO: 152196 - RNA, 32 nt, Homo Sapiens
ucuacuugaacuaaacaaacaucuuuuguuuc

SEQ ID NO: 152197 - RNA, 32 nt, Homo Sapiens
gugcccaagggagaugugagccuggcgggcug

SEQ ID NO: 152198 - RNA, 32 nt, Homo Sapiens
ugggaaggcagacaucccacggaaacaaugaa

SEQ ID NO: 152199 - RNA, 32 nt, Homo Sapiens
caaaacaaauaaaacguuuauaaaaguuaaaa

SEQ ID NO: 152200 - RNA, 32 nt, Homo Sapiens
ucuuuuacguuuccggcaaaacaucagugucu

SEQ ID NO: 152201 - RNA, 32 nt, Homo Sapiens
ugucccugauuuuuuuuuuuuaauucuauggc

SEQ ID NO: 152202 - RNA, 32 nt, Homo Sapiens
cgcuuccuucccuccccgcaaccaccccaggc

SEQ ID NO: 152203 - RNA, 32 nt, Homo Sapiens
cuaacagucuuaguuuccuggguuucaggugc

SEQ ID NO: 152204 - RNA, 32 nt, Homo Sapiens
uucugcaucgaugggagagaaaacagaaucuu

SEQ ID NO: 152205 - RNA, 32 nt, Homo Sapiens
aauauucagaaucuuuguuaagguccugaaag

SEQ ID NO: 152206 - RNA, 32 nt, Homo Sapiens
ucagaagccauggcugcccugaaguggggacg

SEQ ID NO: 152207 - RNA, 32 nt, Homo Sapiens
uuucucaauguuaugaaaaucuuauuuaaaag

SEQ ID NO: 152208 - RNA, 32 nt, Homo Sapiens
acuuagggggugagcgcgggugucgaggucug

SEQ ID NO: 152209 - RNA, 32 nt, Homo Sapiens
aaaaaggaaaaugaggacgugcagcagcauug

SEQ ID NO: 152210 - RNA, 32 nt, Homo Sapiens
gcugcggcgucccgcggccuccccgagucggg

SEQ ID NO: 152211 - RNA, 32 nt, Homo Sapiens
agcugaccaagacaccugaggacacaucuugg

SEQ ID NO: 152212 - RNA, 32 nt, Homo Sapiens
ucguggaaaaggagaagagagccgagcugcgc

SEQ ID NO: 152213 - RNA, 32 nt, Homo Sapiens
cgauugcauauaucaguuuaugcugugugcug

SEQ ID NO: 152214 - RNA, 32 nt, Homo Sapiens
gugacagaauaccuauuguuaagcagacuugg

SEQ ID NO: 152215 - RNA, 32 nt, Homo Sapiens
cacagaaccaaaugagaaacaguuccaacaug

SEQ ID NO: 152216 - RNA, 32 nt, Homo Sapiens
gggagcgggacucggcggcauggcgggcuccg

SEQ ID NO: 152217 - RNA, 32 nt, Homo Sapiens
cagccgcaccccuccacccccacccugcccac

SEQ ID NO: 152218 - RNA, 32 nt, Homo Sapiens
cucguuugaggauguggcgauguacuucacca

SEQ ID NO: 152219 - RNA, 32 nt, Homo Sapiens
accagcuggacgccaugcuggacuggcccucc

SEQ ID NO: 152220 - RNA, 32 nt, Homo Sapiens
uugaucauuuuuccacaaagaauuagguguua

SEQ ID NO: 152221 - RNA, 32 nt, Homo Sapiens
caagaugaaaauuccaucaucuuaccauagcu

SEQ ID NO: 152222 - RNA, 32 nt, Homo Sapiens
gguaauuguaaauauuuaauguguuauagcuc

SEQ ID NO: 152223 - RNA, 32 nt, Homo Sapiens
ccgcagccgccgccccagcaucacguccucua

SEQ ID NO: 152224 - RNA, 32 nt, Homo Sapiens
uguguccggugcucacgccgcggcgaggugag

SEQ ID NO: 152225 - RNA, 32 nt, Homo Sapiens
auuauagaauaaaauguucauacgcauagacu

SEQ ID NO: 152226 - RNA, 32 nt, Homo Sapiens
gguuugcccugcgauugagcugcgggucgcgg

SEQ ID NO: 152227 - RNA, 32 nt, Homo Sapiens
ggaguuauugaagaaaugauggaguaagagac

SEQ ID NO: 152228 - RNA, 32 nt, Homo Sapiens
auggacgugagccaccacacccgcccuugaaa

SEQ ID NO: 152229 - RNA, 32 nt, Homo Sapiens
cuuggagaccagccugguucccugcccgacca

SEQ ID NO: 152230 - RNA, 32 nt, Homo Sapiens
gcagaaaacucucuccauuuguccucucagca

SEQ ID NO: 152231 - RNA, 32 nt, Homo Sapiens
uugcagcuucgggucuuauauuuaaaucuuug

SEQ ID NO: 152232 - RNA, 32 nt, Homo Sapiens
agcaucuccaggcgcgggaucccgcuccgagc

SEQ ID NO: 152233 - RNA, 27 nt, Homo Sapiens
ucuaaucauuaauuuuguguuuaaaga

SEQ ID NO: 152234 - RNA, 32 nt, Homo Sapiens
cccugcgagcccucaggagcugcguggugggg

SEQ ID NO: 152235 - RNA, 32 nt, Homo Sapiens
ugccaguaaucccagcacuuucggaggccgag

SEQ ID NO: 152236 - RNA, 32 nt, Homo Sapiens
gugcuaaaauauuccauaaaucuuaagggugu

SEQ ID NO: 152237 - RNA, 32 nt, Homo Sapiens
agaauaguaucugcuaauguaagggacaucug

SEQ ID NO: 152238 - RNA, 32 nt, Homo Sapiens
ccaggcuggugcccuccuccuacccuggcuuu

SEQ ID NO: 152239 - RNA, 31 nt, Homo Sapiens
guaagucauuugaugcuuuagaaaauaaaaa

SEQ ID NO: 152240 - RNA, 32 nt, Homo Sapiens
ugcaggcagcaucaaggcuggccgccgcuccu

SEQ ID NO: 152241 - RNA, 32 nt, Homo Sapiens
cccaaggagggagaggaccugagaucgaagau

SEQ ID NO: 152242 - RNA, 32 nt, Homo Sapiens
gcucccugccuuaacuccuccucccacugccc

SEQ ID NO: 152243 - RNA, 32 nt, Homo Sapiens
ggaacccugacggcacuuagcugcugacaaac

SEQ ID NO: 152244 - RNA, 32 nt, Homo Sapiens
cuccccacugcagccagugucuccauagcaac

SEQ ID NO: 152245 - RNA, 32 nt, Homo Sapiens
cucuaguaagaucugacauaugcugaaguuau

SEQ ID NO: 152246 - RNA, 32 nt, Homo Sapiens
gccgaggguuuccgcgcccgggacgcguuucg

SEQ ID NO: 152247 - RNA, 32 nt, Homo Sapiens
ccuaagagguuuuuccucuuugcucccuccaa

SEQ ID NO: 152248 - RNA, 32 nt, Homo Sapiens
cccugcgucugacgaugcugcagcgccuggag

SEQ ID NO: 152249 - RNA, 32 nt, Homo Sapiens
gccuggggauggggacggcagcucucaugagg

SEQ ID NO: 152250 - RNA, 32 nt, Homo Sapiens
aagcacuuagggccagaugcacuguaaacauu

SEQ ID NO: 152251 - RNA, 32 nt, Homo Sapiens
aggaaauuuagguacaaugcaugcaucacaga

SEQ ID NO: 152252 - RNA, 32 nt, Homo Sapiens
aauaugauucccucacugccccugccccccag

SEQ ID NO: 152253 - RNA, 32 nt, Homo Sapiens
uagagcacagugguuaggaacacacacucuag

SEQ ID NO: 152254 - RNA, 32 nt, Homo Sapiens
cuaaaaucugguuauuucuuucucuucagguc

SEQ ID NO: 152255 - RNA, 32 nt, Homo Sapiens
aguccccgaccucggcgcugccugggcuccug

SEQ ID NO: 152256 - RNA, 32 nt, Homo Sapiens
auuguuuuaugguguguuccuaacauaaaaua

SEQ ID NO: 152257 - RNA, 32 nt, Homo Sapiens
ccccuaguauuggaucaugaagagcucuucau

SEQ ID NO: 152258 - RNA, 32 nt, Homo Sapiens
cagcugugcccggccccgccuggagccaccgg

SEQ ID NO: 152259 - RNA, 32 nt, Homo Sapiens
aaaggcuaaagcugcuggcccggggcccacag

SEQ ID NO: 152260 - RNA, 32 nt, Homo Sapiens
auuacuuuuauaauuuuuuaaauugguucuga

SEQ ID NO: 152261 - RNA, 32 nt, Homo Sapiens
guggccgccagccccaggagcccagccucuug

SEQ ID NO: 152262 - RNA, 32 nt, Homo Sapiens
gggcucuccuguugguaguuccugcuuuucuu

SEQ ID NO: 152263 - RNA, 32 nt, Homo Sapiens
uuaugauuauacuuagccuccuccuccuuuuu

SEQ ID NO: 152264 - RNA, 32 nt, Homo Sapiens
cucagcccgccagcacccaggcucucauuaaa

SEQ ID NO: 152265 - RNA, 32 nt, Homo Sapiens
gugauccuuuuggagucagacagaugugguug

SEQ ID NO: 152266 - RNA, 32 nt, Homo Sapiens
uaaacauaaaaguuuuaaauugguauuaacuc

SEQ ID NO: 152267 - RNA, 32 nt, Homo Sapiens
cuuuucagugugauggcaaggugcuuguuaug

SEQ ID NO: 152268 - RNA, 32 nt, Homo Sapiens
accaggaaaaagauaugcaugugcuguaaguc

SEQ ID NO: 152269 - RNA, 32 nt, Homo Sapiens
ucuuuuugagacggaguuucgcuuuugucccc

SEQ ID NO: 152270 - RNA, 32 nt, Homo Sapiens
ccuuuguuuuaaaacugugguuuuuuaaaaaa

SEQ ID NO: 152271 - RNA, 32 nt, Homo Sapiens
aggcgggggcuggggcccgaggccgggagugc

SEQ ID NO: 152272 - RNA, 32 nt, Homo Sapiens
guagaggccuguccugggcuccagguuggccc

SEQ ID NO: 152273 - RNA, 32 nt, Homo Sapiens
ucaugcuucucccccauucccacccucucugc

SEQ ID NO: 152274 - RNA, 32 nt, Homo Sapiens
uguacuuuucagaaccauuuugucucauuauu

SEQ ID NO: 152275 - RNA, 32 nt, Homo Sapiens
agcuccucgggcucugggucccggcgccccuc

SEQ ID NO: 152276 - RNA, 32 nt, Homo Sapiens
aggaagugccgcgucuuggugggucuggagcu

SEQ ID NO: 152277 - RNA, 32 nt, Homo Sapiens
ggcguuugccgguccggcugcccggugcgcca

SEQ ID NO: 152278 - RNA, 32 nt, Homo Sapiens
ggcccaggccgcggaacggugaugcucgggcc

SEQ ID NO: 152279 - RNA, 32 nt, Homo Sapiens
cuuggcuauuuagaaaaagugauaauggguca

SEQ ID NO: 152280 - RNA, 32 nt, Homo Sapiens
gacguccugcaaggcccgcuccaggugcgcca

SEQ ID NO: 152281 - RNA, 32 nt, Homo Sapiens
cuaaaguuacuucaucuccaucuagcaaauga

SEQ ID NO: 152282 - RNA, 32 nt, Homo Sapiens
gucaggaguuugagaucagccuggacaacaga

SEQ ID NO: 152283 - RNA, 32 nt, Homo Sapiens
cugacacuuguuaaaauggccaggaggacuuc

SEQ ID NO: 152284 - RNA, 32 nt, Homo Sapiens
uuaugcauuaaguuuaauugugauaaauuugu

SEQ ID NO: 152285 - RNA, 32 nt, Homo Sapiens
auuugugcugcccagagcugugccuaguucau

SEQ ID NO: 152286 - RNA, 28 nt, Homo Sapiens
acuaugucguccccggcgucgaccccga

SEQ ID NO: 152287 - RNA, 32 nt, Homo Sapiens
gccuaagauaaaauuguauauuuuuuccaucu

SEQ ID NO: 152288 - RNA, 32 nt, Homo Sapiens
uuccugcccuggcccuggcccugcgaucucuc

SEQ ID NO: 152289 - RNA, 32 nt, Homo Sapiens
augauucuuggaccuagauaacaaguaaaaaa

SEQ ID NO: 152290 - RNA, 32 nt, Homo Sapiens
aaagaaauauuguguaaaaugggugcugccaa

SEQ ID NO: 152291 - RNA, 32 nt, Homo Sapiens
cuucaugccugcucuagucucaucucauaucu

SEQ ID NO: 152292 - RNA, 32 nt, Homo Sapiens
ucuagcacaauuuuuccaguaaaguuuuaagg

SEQ ID NO: 152293 - RNA, 32 nt, Homo Sapiens
uauuuccucaucugaaaauuauacaggugugu

SEQ ID NO: 152294 - RNA, 32 nt, Homo Sapiens
auccugcgcuggcgcccccaccuggugaugcc

SEQ ID NO: 152295 - RNA, 32 nt, Homo Sapiens
guauuucagaaccaccaacugcucuugacaau

SEQ ID NO: 152296 - RNA, 32 nt, Homo Sapiens
agugaaggccggccgucacuucugggagcaga

SEQ ID NO: 152297 - RNA, 32 nt, Homo Sapiens
ccggccuccuccuccuccccagccguccuugg

SEQ ID NO: 152298 - RNA, 32 nt, Homo Sapiens
aauauuuugucaaaugcacuaaacauuugggu

SEQ ID NO: 152299 - RNA, 32 nt, Homo Sapiens
gaagucauauuaggaaauauuuagacaaugaa

SEQ ID NO: 152300 - RNA, 32 nt, Homo Sapiens
ccucugccccaggcccggccccgcccccagcc

SEQ ID NO: 152301 - RNA, 32 nt, Homo Sapiens
uuauuagccccauuuuaaaaguggagagacug

SEQ ID NO: 152302 - RNA, 32 nt, Homo Sapiens
ucugaagagaggaaacaacacggaucaagaug

SEQ ID NO: 152303 - RNA, 32 nt, Homo Sapiens
ccagcaugaaaacacguuuacaggaaaguguu

SEQ ID NO: 152304 - RNA, 32 nt, Homo Sapiens
aauguguacagauuauuuguuaugacaauaaa

SEQ ID NO: 152305 - RNA, 32 nt, Homo Sapiens
ccugaauuuuuccauggcacaggagcagauga

SEQ ID NO: 152306 - RNA, 32 nt, Homo Sapiens
acuuuacacugugaaagguggggggugagucc

SEQ ID NO: 152307 - RNA, 32 nt, Homo Sapiens
uuuaguaaauuaacguuuuggauauaaguugu

SEQ ID NO: 152308 - RNA, 32 nt, Homo Sapiens
acucuaaguaucaaaaucuuccaauuaucaug

SEQ ID NO: 152309 - RNA, 32 nt, Homo Sapiens
cacucugacaguguuacucccuaauauccuuc

SEQ ID NO: 152310 - RNA, 32 nt, Homo Sapiens
cauaaaaaaugaaauauucacagaaucagauc

SEQ ID NO: 152311 - RNA, 32 nt, Homo Sapiens
ggcuauuuuuaaaagcuguccuccagaaacaa

SEQ ID NO: 152312 - RNA, 32 nt, Homo Sapiens
gccaggggucuuagguguccccuccuagcccu

SEQ ID NO: 152313 - RNA, 32 nt, Homo Sapiens
cuccgccgucauggcccggcaucggaauguuc

SEQ ID NO: 152314 - RNA, 32 nt, Homo Sapiens
cagcucugagcaugugcaaggcuguguaggac

SEQ ID NO: 152315 - RNA, 32 nt, Homo Sapiens
agauugccagcuccgagacccgggacuccucc

SEQ ID NO: 152316 - RNA, 32 nt, Homo Sapiens
guaaauguguguauauacacacacauaaauua

SEQ ID NO: 152317 - RNA, 32 nt, Homo Sapiens
ggcugcagggaucaauacccaauauacccaac

SEQ ID NO: 152318 - RNA, 32 nt, Homo Sapiens
ugcaggcaagcuggcgcaaauuuaagacucca

SEQ ID NO: 152319 - RNA, 32 nt, Homo Sapiens
cacaaacaagacuuuagggucugcguuaugga

SEQ ID NO: 152320 - RNA, 32 nt, Homo Sapiens
uuuaaaucaguuguagguucacagcaaaagug

SEQ ID NO: 152321 - RNA, 32 nt, Homo Sapiens
uggagugaugcagggaggaaaggcagaguggg

SEQ ID NO: 152322 - RNA, 32 nt, Homo Sapiens
uauugaguuuaggaauugcggcacgaagaaug

SEQ ID NO: 152323 - RNA, 32 nt, Homo Sapiens
aggaguuuuugugguugaucuagacagaugcu

SEQ ID NO: 152324 - RNA, 32 nt, Homo Sapiens
ccaaagcugcggggcguucggugucgccgaag

SEQ ID NO: 152325 - RNA, 32 nt, Homo Sapiens
ugaauaauuuguggaccagggauugcuuuucu

SEQ ID NO: 152326 - RNA, 32 nt, Homo Sapiens
cucuguuaugcaauggguucuacagcacccuu

SEQ ID NO: 152327 - RNA, 32 nt, Homo Sapiens
gaagaaucaacauaagaaaguagcagguauug

SEQ ID NO: 152328 - RNA, 32 nt, Homo Sapiens
uggagaugauauuagaagcuuuucucaccaaa

SEQ ID NO: 152329 - RNA, 32 nt, Homo Sapiens
agcuuacccugugccaggagcaaugggacugg

SEQ ID NO: 152330 - RNA, 32 nt, Homo Sapiens
cacaggucagaaaaagcuccagagaccucaca

SEQ ID NO: 152331 - RNA, 32 nt, Homo Sapiens
ccuccgcaccaaucaggugguggucauuaggg

SEQ ID NO: 152332 - RNA, 32 nt, Homo Sapiens
cccgcaccgccccgaggcgcccggcccggcuc

SEQ ID NO: 152333 - RNA, 32 nt, Homo Sapiens
gcuggaggaccgagugagggaccuggugccau

SEQ ID NO: 152334 - RNA, 32 nt, Homo Sapiens
aauugcugugcaaagaaauuccagaggggaga

SEQ ID NO: 152335 - RNA, 31 nt, Homo Sapiens
guccugguggcgguguacgguuucgaacacu

SEQ ID NO: 152336 - RNA, 27 nt, Homo Sapiens
agauggcggcggugcugaacgcagagc

SEQ ID NO: 152337 - RNA, 32 nt, Homo Sapiens
ucgcuugucauucaaggucucugugaauccuc

SEQ ID NO: 152338 - RNA, 32 nt, Homo Sapiens
uuuguaaugagccuuaaaaugguucuauggag

SEQ ID NO: 152339 - RNA, 32 nt, Homo Sapiens
gagaccagccuggccaauaaggugaaacucca

SEQ ID NO: 152340 - RNA, 32 nt, Homo Sapiens
uuucaucaguuauaacaaauguaccacucugg

SEQ ID NO: 152341 - RNA, 32 nt, Homo Sapiens
acuggccaacaaugagacaauuugagcauccc

SEQ ID NO: 152342 - RNA, 32 nt, Homo Sapiens
uuuugcugugagaguagccgucacgugucucu

SEQ ID NO: 152343 - RNA, 32 nt, Homo Sapiens
gcucugcgccccgacgcggcuccuggauccgc

SEQ ID NO: 152344 - RNA, 32 nt, Homo Sapiens
gucuuuuugugauguuauauaaaauuguagau

SEQ ID NO: 152345 - RNA, 32 nt, Homo Sapiens
gucccggcggagacccgagauccugagcuucu

SEQ ID NO: 152346 - RNA, 32 nt, Homo Sapiens
uccuugggacccggacccggcgcccgcgccuc

SEQ ID NO: 152347 - RNA, 32 nt, Homo Sapiens
caucuaacaguagagcccaaaauacaugaagc

SEQ ID NO: 152348 - RNA, 32 nt, Homo Sapiens
ugaggucugcaccucucggaccagccaggacc

SEQ ID NO: 152349 - RNA, 32 nt, Homo Sapiens
uuuauuucugauauaagggaaugcuauugguu

SEQ ID NO: 152350 - RNA, 32 nt, Homo Sapiens
uaagcugugucccugugaaaagagguuuguag

SEQ ID NO: 152351 - RNA, 32 nt, Homo Sapiens
aggaggucaaggaaaggaacuuugcacaacuu

SEQ ID NO: 152352 - RNA, 32 nt, Homo Sapiens
agggcagcugggugugcagggacugggggcuc

SEQ ID NO: 152353 - RNA, 32 nt, Homo Sapiens
ggugagcaaauguuaaacaaaaugauucuaga

SEQ ID NO: 152354 - RNA, 32 nt, Homo Sapiens
cgagcucuucauucagcuuugacuccaccugc

SEQ ID NO: 152355 - RNA, 32 nt, Homo Sapiens
uuggcagauaaaauuuuauguauuuaccacgu

SEQ ID NO: 152356 - RNA, 32 nt, Homo Sapiens
uccaugggcugcggggggcugcacccggaccc

SEQ ID NO: 152357 - RNA, 30 nt, Homo Sapiens
cagagggugauggugggggaaaugauacca

SEQ ID NO: 152358 - RNA, 32 nt, Homo Sapiens
cagugcgcaccucuggugccagugucgccccg

SEQ ID NO: 152359 - RNA, 32 nt, Homo Sapiens
cuuaaaauagaguuugaacaaauauuuuaaag

SEQ ID NO: 152360 - RNA, 32 nt, Homo Sapiens
agcccagggacuggcuucucuuucucugagug

SEQ ID NO: 152361 - RNA, 32 nt, Homo Sapiens
uuuagaggaaguuaaaacaacaacaaaaaaca

SEQ ID NO: 152362 - RNA, 32 nt, Homo Sapiens
gccacaauaaguguauguuuuauauuuuauug

SEQ ID NO: 152363 - RNA, 32 nt, Homo Sapiens
ucgcagcgcggcaggguuaucaccagaucugg

SEQ ID NO: 152364 - RNA, 32 nt, Homo Sapiens
cugggcccuggggcugcccucggcaaccgugg

SEQ ID NO: 152365 - RNA, 32 nt, Homo Sapiens
acugcucuacacaacagaagugaggcccaggg

SEQ ID NO: 152366 - RNA, 32 nt, Homo Sapiens
aucuuacaaaaauggaguauuuuaguaugaau

SEQ ID NO: 152367 - RNA, 32 nt, Homo Sapiens
uaaacacugagagcuucaugguguuuggccau

SEQ ID NO: 152368 - RNA, 32 nt, Homo Sapiens
caguaaggugcgaggcugauggucaaugugga

SEQ ID NO: 152369 - RNA, 32 nt, Homo Sapiens
ucccacugugcuuuccucuaaccaaaauauac

SEQ ID NO: 152370 - RNA, 32 nt, Homo Sapiens
cugcucuuggaagggaggcugugcgggcuggg

SEQ ID NO: 152371 - RNA, 32 nt, Homo Sapiens
uggccucggagggccuggcgggggcgcuggcu

SEQ ID NO: 152372 - RNA, 32 nt, Homo Sapiens
gcauuuuauaugccugugucagcgagcacaua

SEQ ID NO: 152373 - RNA, 32 nt, Homo Sapiens
auuguuaauguguuauuuuaaaguuaagacau

SEQ ID NO: 152374 - RNA, 29 nt, Homo Sapiens
ggucuacacacacagaggaugcuggauac

SEQ ID NO: 152375 - RNA, 32 nt, Homo Sapiens
ggcugcacaccgugagauguggagggcguagg

SEQ ID NO: 152376 - RNA, 32 nt, Homo Sapiens
cguauuugugcauugggcuccgugccacaacc

SEQ ID NO: 152377 - RNA, 32 nt, Homo Sapiens
gcccacacagaaagguggcaagaagaucggga

SEQ ID NO: 152378 - RNA, 32 nt, Homo Sapiens
ucucccucaacccccaggagaauugcucucca

SEQ ID NO: 152379 - RNA, 32 nt, Homo Sapiens
gagaucuuucaccucccugguuagcuguauuc

SEQ ID NO: 152380 - RNA, 32 nt, Homo Sapiens
gcucaggagguaguggcagccaugguucaucu

SEQ ID NO: 152381 - RNA, 32 nt, Homo Sapiens
cgugcgcacacacacaaacacacacacacugg

SEQ ID NO: 152382 - RNA, 32 nt, Homo Sapiens
acgccccgagggucggggaaggaaccgagguc

SEQ ID NO: 152383 - RNA, 32 nt, Homo Sapiens
uccaucggcacccaagcgggcaucaucccccc

SEQ ID NO: 152384 - RNA, 32 nt, Homo Sapiens
aaagauagcguauuugcauuuacaauaacagu

SEQ ID NO: 152385 - RNA, 32 nt, Homo Sapiens
ggccuguguguagcauugaagagaggaguugc

SEQ ID NO: 152386 - RNA, 32 nt, Homo Sapiens
cugcacgaugaacuauuggagcauacaguacu

SEQ ID NO: 152387 - RNA, 32 nt, Homo Sapiens
guuuccgccccucccuuccugggguguggaaa

SEQ ID NO: 152388 - RNA, 32 nt, Homo Sapiens
cuaaaacaaagguggcacuuuuuuauguuaac

SEQ ID NO: 152389 - RNA, 32 nt, Homo Sapiens
cguagacuaugaaauuacaaaugcuucaaaau

SEQ ID NO: 152390 - RNA, 32 nt, Homo Sapiens
ugggccggcaggaagauggcgaacguggggcu

SEQ ID NO: 152391 - RNA, 32 nt, Homo Sapiens
aaggaaaaaggauuaggcaaaaauaauuuauu

SEQ ID NO: 152392 - RNA, 32 nt, Homo Sapiens
uugggaagcugaugcccuaauuuugaccucuu

SEQ ID NO: 152393 - RNA, 32 nt, Homo Sapiens
gggggccaaugggggucagcgcggcggaaccg

SEQ ID NO: 152394 - RNA, 30 nt, Homo Sapiens
ucaugucuguuaauaaagaaauccagaucc

SEQ ID NO: 152395 - RNA, 32 nt, Homo Sapiens
auaucauuccaccagcaccaccaagaccugau

SEQ ID NO: 152396 - RNA, 32 nt, Homo Sapiens
cuuauuucagucuccuuuauuaauuuucaauc

SEQ ID NO: 152397 - RNA, 32 nt, Homo Sapiens
accuuauaaaugcuguagauauuaucaaaaaa

SEQ ID NO: 152398 - RNA, 32 nt, Homo Sapiens
caaggccucucccacaccccagccauccacac

SEQ ID NO: 152399 - RNA, 32 nt, Homo Sapiens
agcaaguuugcuuuugguuuuaucuuggcuuu

SEQ ID NO: 152400 - RNA, 32 nt, Homo Sapiens
uggaugcccuuggcagggugagcccacaagga

SEQ ID NO: 152401 - RNA, 32 nt, Homo Sapiens
uuugucaagauuuagggacauaaaaugaucuu

SEQ ID NO: 152402 - RNA, 32 nt, Homo Sapiens
ggucgggcgcgguggcucaugcuuguaauccc

SEQ ID NO: 152403 - RNA, 32 nt, Homo Sapiens
gugggcgcucacacugcccccggagccugcug

SEQ ID NO: 152404 - RNA, 30 nt, Homo Sapiens
gaggggcgcgcgcaggaucucagguuaagg

SEQ ID NO: 152405 - RNA, 32 nt, Homo Sapiens
acucugauccugcaucccacucccugggagcc

SEQ ID NO: 152406 - RNA, 32 nt, Homo Sapiens
ggucuaugucgcgggcggcggcggcggcggcg

SEQ ID NO: 152407 - RNA, 32 nt, Homo Sapiens
gcuccauccccggccugggagguucaugcaga

SEQ ID NO: 152408 - RNA, 30 nt, Homo Sapiens
cggccuguccuacugccgccggcgccgcgg

SEQ ID NO: 152409 - RNA, 32 nt, Homo Sapiens
uccuggggagagaauaaaugaauuuugcucaa

SEQ ID NO: 152410 - RNA, 32 nt, Homo Sapiens
gaauuagggguguuacagaggcagcuuuuugc

SEQ ID NO: 152411 - RNA, 32 nt, Homo Sapiens
ggcugcccugcacaccggugcccgccacaugc

SEQ ID NO: 152412 - RNA, 32 nt, Homo Sapiens
gugagagcacgcugggccgggggccgggcggg

SEQ ID NO: 152413 - RNA, 32 nt, Homo Sapiens
cccuuuggaaaauaaacauaagacuaaacaug

SEQ ID NO: 152414 - RNA, 32 nt, Homo Sapiens
gugcuguuagauuuuggcacccguuuucucag

SEQ ID NO: 152415 - RNA, 30 nt, Homo Sapiens
ucauucaucugugcugccagggccgggcug

SEQ ID NO: 152416 - RNA, 32 nt, Homo Sapiens
uggagucauuugagucucuuaauagccaugua

SEQ ID NO: 152417 - RNA, 32 nt, Homo Sapiens
auaaacguuauuuauuuuuuuauuuaugauac

SEQ ID NO: 152418 - RNA, 32 nt, Homo Sapiens
uaggaggcauuuggcauucuguggaauaagag

SEQ ID NO: 152419 - RNA, 32 nt, Homo Sapiens
cccauucucccucucaaggcaggggucauaga

SEQ ID NO: 152420 - RNA, 32 nt, Homo Sapiens
guuuuuggcuuaaguuuauuauagaaaaucaa

SEQ ID NO: 152421 - RNA, 32 nt, Homo Sapiens
cgagugcccacccaaugucagagcagcccgag

SEQ ID NO: 152422 - RNA, 32 nt, Homo Sapiens
ccauacacaacacuaaaggacgaaccugaucu

SEQ ID NO: 152423 - RNA, 32 nt, Homo Sapiens
cccaguugcuccuggucacucccuuuauagcc

SEQ ID NO: 152424 - RNA, 32 nt, Homo Sapiens
acagguugaaauaguucuguggcuguccuaag

SEQ ID NO: 152425 - RNA, 32 nt, Homo Sapiens
gaauggacugaugcccauccacauuagugagg

SEQ ID NO: 152426 - RNA, 32 nt, Homo Sapiens
ucaagaaccuggugggagcccuggacgagggu

SEQ ID NO: 152427 - RNA, 32 nt, Homo Sapiens
gggcuucuuuucccuuuuacccuccgccucug

SEQ ID NO: 152428 - RNA, 32 nt, Homo Sapiens
gauuaucuaaacauuagaaacaugacauuuaa

SEQ ID NO: 152429 - RNA, 32 nt, Homo Sapiens
augaggggauucccuuccuucuguugcuggug

SEQ ID NO: 152430 - RNA, 32 nt, Homo Sapiens
acuguggccggguccaggauccuggcauccug

SEQ ID NO: 152431 - RNA, 32 nt, Homo Sapiens
ugccggacggugcugcgccugcaccgcgcccu

SEQ ID NO: 152432 - RNA, 32 nt, Homo Sapiens
ggcaggggugguggagagauggaagggcauca

SEQ ID NO: 152433 - RNA, 28 nt, Homo Sapiens
agggcaguuacaggagagaguagguggu

SEQ ID NO: 152434 - RNA, 32 nt, Homo Sapiens
uuuuaaccaacccaaaagcucuucaggucauu

SEQ ID NO: 152435 - RNA, 32 nt, Homo Sapiens
ugucugccauaauuuuuaaaaauacauucauu

SEQ ID NO: 152436 - RNA, 32 nt, Homo Sapiens
uucucugaucagugacauccacagcuuugcaa

SEQ ID NO: 152437 - RNA, 32 nt, Homo Sapiens
guaagguaaauauuuggacuaacuuuuagaaa

SEQ ID NO: 152438 - RNA, 32 nt, Homo Sapiens
ccucaaaauugaguaauaauuaaugaaauguc

SEQ ID NO: 152439 - RNA, 32 nt, Homo Sapiens
gauccuaaucccuuccucucccauucacccug

SEQ ID NO: 152440 - RNA, 32 nt, Homo Sapiens
gcauggcgggagcggggcugcagaguauccga

SEQ ID NO: 152441 - RNA, 32 nt, Homo Sapiens
ccagguucaaggauaaaaaccaucaggcccaa

SEQ ID NO: 152442 - RNA, 32 nt, Homo Sapiens
cagaaugaaugaauugaauugaaagggaggag

SEQ ID NO: 152443 - RNA, 32 nt, Homo Sapiens
augguuguacuucuuuuuuggauauaaagauu

SEQ ID NO: 152444 - RNA, 32 nt, Homo Sapiens
gcucgguuucuguguccccaccccccacgaag

SEQ ID NO: 152445 - RNA, 32 nt, Homo Sapiens
aaaacggacaauggguggauucggguccagau

SEQ ID NO: 152446 - RNA, 32 nt, Homo Sapiens
ucaggcucaacccccgcugugcucugcggucg

SEQ ID NO: 152447 - RNA, 32 nt, Homo Sapiens
uaaaauuucaaagagccagaaguucuaugccu

SEQ ID NO: 152448 - RNA, 32 nt, Homo Sapiens
uccuaacguuugucauuccaguuugaguuaau

SEQ ID NO: 152449 - RNA, 32 nt, Homo Sapiens
acuagguuuugugucuccuggaucuauuuuuu

SEQ ID NO: 152450 - RNA, 32 nt, Homo Sapiens
ucucugcagcgaaaggguggcgccccgcagcc

SEQ ID NO: 152451 - RNA, 32 nt, Homo Sapiens
ugugauuggcaaguacaguauccuuugggaag

SEQ ID NO: 152452 - RNA, 32 nt, Homo Sapiens
gaaguuuuuuaaaccucugaauuuguacacau

SEQ ID NO: 152453 - RNA, 32 nt, Homo Sapiens
uauuuggcucucugccuucucuucauguuggc

SEQ ID NO: 152454 - RNA, 32 nt, Homo Sapiens
uuuucuugaaagauuaaguaauuuuauuuuag

SEQ ID NO: 152455 - RNA, 32 nt, Homo Sapiens
aggcgggcaaaucaccugaggucaagaguuug

SEQ ID NO: 152456 - RNA, 32 nt, Homo Sapiens
cacauauaacuggcuguuuucuguucuuguuu

SEQ ID NO: 152457 - RNA, 32 nt, Homo Sapiens
gagaaguugggucuccauuucaaaggcucccg

SEQ ID NO: 152458 - RNA, 32 nt, Homo Sapiens
cugauuaacuguaaauaacaauuaaaaacaca

SEQ ID NO: 152459 - RNA, 32 nt, Homo Sapiens
ggcgcccucaggugcucccugagaugccagca

SEQ ID NO: 152460 - RNA, 29 nt, Homo Sapiens
gaagauuaaggguaguauuuucuaaggaa

SEQ ID NO: 152461 - RNA, 32 nt, Homo Sapiens
aauuuaaauuagauuuuuuuuaaacucaacuc

SEQ ID NO: 152462 - RNA, 32 nt, Homo Sapiens
cacugcccuguucugaugucagugccuguaca

SEQ ID NO: 152463 - RNA, 32 nt, Homo Sapiens
gcuuugagccgagauugcaccauuguacucca

SEQ ID NO: 152464 - RNA, 32 nt, Homo Sapiens
ucaaugaaauaccauauuuugauuccauuccu

SEQ ID NO: 152465 - RNA, 32 nt, Homo Sapiens
aguucagccgaacaacgauggugaaaaggguc

SEQ ID NO: 152466 - RNA, 32 nt, Homo Sapiens
uauacuaaagaugaguuuaucugauagaguua

SEQ ID NO: 152467 - RNA, 32 nt, Homo Sapiens
guaagggcccucuggaaaucaagcagagaaug

SEQ ID NO: 152468 - RNA, 32 nt, Homo Sapiens
cguaaaucucuuuacuauguccuagcucuguc

SEQ ID NO: 152469 - RNA, 32 nt, Homo Sapiens
gucuuauuacuaaagaaagugauuuacuccug

SEQ ID NO: 152470 - RNA, 29 nt, Homo Sapiens
caaaaggaauuuagggucuuauuuucaau

SEQ ID NO: 152471 - RNA, 32 nt, Homo Sapiens
gaagagcagcuggcaugaugacugcuguuuga

SEQ ID NO: 152472 - RNA, 32 nt, Homo Sapiens
augccugacaacacagcugcacagaagcucug

SEQ ID NO: 152473 - RNA, 32 nt, Homo Sapiens
ucgauuugugcgugugaacacucucaagaccu

SEQ ID NO: 152474 - RNA, 32 nt, Homo Sapiens
cacacaccaaaaaaccgggauuauuuacagca

SEQ ID NO: 152475 - RNA, 32 nt, Homo Sapiens
cucucugcgggcccagucgcccuuuggccggg

SEQ ID NO: 152476 - RNA, 32 nt, Homo Sapiens
cccugcgccugggaccgcguccguccugcucg

SEQ ID NO: 152477 - RNA, 32 nt, Homo Sapiens
uauuuaauuuaaaagaaaucucuuaccaaccu

SEQ ID NO: 152478 - RNA, 32 nt, Homo Sapiens
ggcugcuccugccugcuucgaucauuucuccc

SEQ ID NO: 152479 - RNA, 32 nt, Homo Sapiens
ggucacuggggagugguggggguguaggcagu

SEQ ID NO: 152480 - RNA, 32 nt, Homo Sapiens
ucuggccaggguugcuuggagaaggcucagug

SEQ ID NO: 152481 - RNA, 32 nt, Homo Sapiens
agaggccagccuggggagcucuggccacugcu

SEQ ID NO: 152482 - RNA, 32 nt, Homo Sapiens
uguugucaaccaaaaguaauaguuggguauug

SEQ ID NO: 152483 - RNA, 32 nt, Homo Sapiens
cccacgcucccauuuuaccgagguggaucuga

SEQ ID NO: 152484 - RNA, 32 nt, Homo Sapiens
ccuugguacaagcuccucuccccccucuuuuc

SEQ ID NO: 152485 - RNA, 32 nt, Homo Sapiens
uuuuuuacucaaauugggaaauccauuccauu

SEQ ID NO: 152486 - RNA, 32 nt, Homo Sapiens
gaagaguuggaaaauuuguaaccaucauaaua

SEQ ID NO: 152487 - RNA, 32 nt, Homo Sapiens
ugagcgcgggcucgagucacagugaaugccuu

SEQ ID NO: 152488 - RNA, 32 nt, Homo Sapiens
gaugauccaauauuuacugaacuuuuuguaau

SEQ ID NO: 152489 - RNA, 32 nt, Homo Sapiens
uuucugagugcacuuuggccauuguuugguca

SEQ ID NO: 152490 - RNA, 32 nt, Homo Sapiens
ugggacuagucuguaucuuguuuuuuaagucu

SEQ ID NO: 152491 - RNA, 32 nt, Homo Sapiens
uaacuccagaaagaagcacuuagcgugcuguu

SEQ ID NO: 152492 - RNA, 32 nt, Homo Sapiens
acuuuugauagcagaccacaauccauuuccuu

SEQ ID NO: 152493 - RNA, 31 nt, Homo Sapiens
agugccugcuccugccugcccuggcccugag

SEQ ID NO: 152494 - RNA, 32 nt, Homo Sapiens
cagcccucaaggaagcuaugccgugaaagggg

SEQ ID NO: 152495 - RNA, 32 nt, Homo Sapiens
cagcccccuucgggcccuccccugcaucccag

SEQ ID NO: 152496 - RNA, 32 nt, Homo Sapiens
uuuugauccaaaugugugaucugcccugauaa

SEQ ID NO: 152497 - RNA, 32 nt, Homo Sapiens
uauuuuauaacaguagaaaacauauagucagu

SEQ ID NO: 152498 - RNA, 32 nt, Homo Sapiens
auguauccaaaaauaaguuaaucaggagcugu

SEQ ID NO: 152499 - RNA, 28 nt, Homo Sapiens
caggcaguggcuaugacagugaggacug

SEQ ID NO: 152500 - RNA, 32 nt, Homo Sapiens
cccucgcacacacaaaaggcggcgcgccggag

SEQ ID NO: 152501 - RNA, 32 nt, Homo Sapiens
guauucuguggccgccauuugcgcaggguggu

SEQ ID NO: 152502 - RNA, 32 nt, Homo Sapiens
ugccaaaaauaaauuguuuaaaacuuuucuua

SEQ ID NO: 152503 - RNA, 32 nt, Homo Sapiens
accugauuaaagaaguuucuuauuuaaacauc

SEQ ID NO: 152504 - RNA, 32 nt, Homo Sapiens
cccggcuccggcgcgccgcggaguuggcugcu

SEQ ID NO: 152505 - RNA, 32 nt, Homo Sapiens
ugccagcagagagggugugucugggggccacc

SEQ ID NO: 152506 - RNA, 32 nt, Homo Sapiens
uccaccaaaauaauguuuucuacauuuucauu

SEQ ID NO: 152507 - RNA, 32 nt, Homo Sapiens
gagucacucagugucccucguuuugcucggag

SEQ ID NO: 152508 - RNA, 32 nt, Homo Sapiens
gcccugcccucacuccacuccccucauccacu

SEQ ID NO: 152509 - RNA, 32 nt, Homo Sapiens
agugcucagguggauuuuauccucgcaagcau

SEQ ID NO: 152510 - RNA, 32 nt, Homo Sapiens
ucgugccucaaguacagacuccugaagauuua

SEQ ID NO: 152511 - RNA, 32 nt, Homo Sapiens
uuagugguuuugucauauaacugucugaguuu

SEQ ID NO: 152512 - RNA, 32 nt, Homo Sapiens
gcacgccguggcgaugcgcagcccgcggcccu

SEQ ID NO: 152513 - RNA, 32 nt, Homo Sapiens
ccucgcccgccggcugcgcucccagcacuggg

SEQ ID NO: 152514 - RNA, 32 nt, Homo Sapiens
uauguuucucuacuguauggaaaauaaaguuu

SEQ ID NO: 152515 - RNA, 32 nt, Homo Sapiens
gcgcucagaacaaaaguuugaaaaaugcauug

SEQ ID NO: 152516 - RNA, 32 nt, Homo Sapiens
aguuggcggaggaggagaaggaaggggccggg

SEQ ID NO: 152517 - RNA, 32 nt, Homo Sapiens
caaaaaucaaaugccuauaauaccauaaugcc

SEQ ID NO: 152518 - RNA, 32 nt, Homo Sapiens
cauuuggaauaauuuuaaguauugaucuuaaa

SEQ ID NO: 152519 - RNA, 32 nt, Homo Sapiens
ggaaucuacuuugucauuuauccaccacagug

SEQ ID NO: 152520 - RNA, 32 nt, Homo Sapiens
ugggagcuuuuagaugagacaucuuuccaggg

SEQ ID NO: 152521 - RNA, 32 nt, Homo Sapiens
acauguggauggucaucagugccucgcccaga

SEQ ID NO: 152522 - RNA, 32 nt, Homo Sapiens
ugacuuugcucugccgccccccggggacccgg

SEQ ID NO: 152523 - RNA, 32 nt, Homo Sapiens
cuuccccuccccgugcgcucuggggacugagc

SEQ ID NO: 152524 - RNA, 32 nt, Homo Sapiens
uaugauuucuaaaaauuaugcaguauacacaa

SEQ ID NO: 152525 - RNA, 32 nt, Homo Sapiens
auccuuuucuucaucuuucauuguuuucccca

SEQ ID NO: 152526 - RNA, 32 nt, Homo Sapiens
agucaucugaagaugacugagucacacugccu

SEQ ID NO: 152527 - RNA, 32 nt, Homo Sapiens
aaugaaaguacuucaccugcaagaugcacaau

SEQ ID NO: 152528 - RNA, 32 nt, Homo Sapiens
cuauggguccugucuucagugaaacacugaac

SEQ ID NO: 152529 - RNA, 32 nt, Homo Sapiens
aguuugaccccauuuggguccugagcaaaccc

SEQ ID NO: 152530 - RNA, 32 nt, Homo Sapiens
agaauagcuucagauccucuuguguauuugca

SEQ ID NO: 152531 - RNA, 32 nt, Homo Sapiens
agcaugugcguugguuugagggggcgggcggu

SEQ ID NO: 152532 - RNA, 32 nt, Homo Sapiens
gcucugagaucaccccacuuccaucauuuccu

SEQ ID NO: 152533 - RNA, 32 nt, Homo Sapiens
ucccucggcucagucggcccagccccucucag

SEQ ID NO: 152534 - RNA, 32 nt, Homo Sapiens
gccccaaucccuguccucuccucuccugccgc

SEQ ID NO: 152535 - RNA, 32 nt, Homo Sapiens
cugcaaccucgcgcccaaggacagcgggcgcu

SEQ ID NO: 152536 - RNA, 32 nt, Homo Sapiens
auguuuauucaagacauugaaacuacuuugca

SEQ ID NO: 152537 - RNA, 32 nt, Homo Sapiens
uccaggaaaaggaggaauguagccagcucccc

SEQ ID NO: 152538 - RNA, 32 nt, Homo Sapiens
gacuguagagcggucuugugcggcaaugugcu

SEQ ID NO: 152539 - RNA, 32 nt, Homo Sapiens
acuauugacaucagcaucaccuagaaacuugu

SEQ ID NO: 152540 - RNA, 32 nt, Homo Sapiens
gcuggagagagcugaggauuuccaggacuuug

SEQ ID NO: 152541 - RNA, 32 nt, Homo Sapiens
gcacugcagggccggucucucgcuccagcaga

SEQ ID NO: 152542 - RNA, 32 nt, Homo Sapiens
gaauuaaaacagauauuucauaaaaaaaaaaa

SEQ ID NO: 152543 - RNA, 32 nt, Homo Sapiens
uuuuaguagagacggggcuuugccauguuggc

SEQ ID NO: 152544 - RNA, 32 nt, Homo Sapiens
ucuaugcuuuaaaccggcaagguuauagauac

SEQ ID NO: 152545 - RNA, 31 nt, Homo Sapiens
guccagagggcgggcggcugcgggcuccucu

SEQ ID NO: 152546 - RNA, 32 nt, Homo Sapiens
uccccgggggguuccaaagacccggugucugg

SEQ ID NO: 152547 - RNA, 28 nt, Homo Sapiens
uggaugggggcuaccaaagugagacuug

SEQ ID NO: 152548 - RNA, 32 nt, Homo Sapiens
gugucugccugcgccaccuccgugcuugcuua

SEQ ID NO: 152549 - RNA, 32 nt, Homo Sapiens
aaugauagcagaagcugauggcaucuagagau

SEQ ID NO: 152550 - RNA, 32 nt, Homo Sapiens
aguugaugccuugcagggcauucuucaaaaaa

SEQ ID NO: 152551 - RNA, 32 nt, Homo Sapiens
ggccccgccccggcuuuuagucccgaacuccg

SEQ ID NO: 152552 - RNA, 32 nt, Homo Sapiens
aaacaaugaagauuaaaugacucaguauuugu

SEQ ID NO: 152553 - RNA, 32 nt, Homo Sapiens
uagcauaaugagaacauuuacuuuuuaaauaa

SEQ ID NO: 152554 - RNA, 31 nt, Homo Sapiens
uuccugcugccccagaacauaggucuuggaa

SEQ ID NO: 152555 - RNA, 32 nt, Homo Sapiens
uuauguccuaaauuauuuuguauacaaagacc

SEQ ID NO: 152556 - RNA, 32 nt, Homo Sapiens
gaagauaaggucugaauaauagcagaaaaacc

SEQ ID NO: 152557 - RNA, 32 nt, Homo Sapiens
ggguacaggaggaggacgccgcagaggugcgu

SEQ ID NO: 152558 - RNA, 32 nt, Homo Sapiens
gaucuuacuccagcuugauuacggagacugaa

SEQ ID NO: 152559 - RNA, 32 nt, Homo Sapiens
acucagugaggccaggauuugcucuccaaaag

SEQ ID NO: 152560 - RNA, 32 nt, Homo Sapiens
ucugauuguuauuuaaauuugugguucagcga

SEQ ID NO: 152561 - RNA, 32 nt, Homo Sapiens
ucuuacagaaacagcaaaaucuuacuaaagau

SEQ ID NO: 152562 - RNA, 32 nt, Homo Sapiens
ccugacaguguuuaagguguccguugaacugg

SEQ ID NO: 152563 - RNA, 32 nt, Homo Sapiens
cgaaacacagaaagggaaaauaaacugacuuu

SEQ ID NO: 152564 - RNA, 32 nt, Homo Sapiens
gcgcggcgcggcaacauggcgacggugcccgu

SEQ ID NO: 152565 - RNA, 32 nt, Homo Sapiens
gacccggggaggcuggacagggcgcggaaccc

SEQ ID NO: 152566 - RNA, 32 nt, Homo Sapiens
ggggagcugcggaagcgcggcgcugcgggccg

SEQ ID NO: 152567 - RNA, 32 nt, Homo Sapiens
ucuaauuuucuuuccgacacauuuaccaaauu

SEQ ID NO: 152568 - RNA, 32 nt, Homo Sapiens
uguaguggcccccuccuccccggccccuuuuc

SEQ ID NO: 152569 - RNA, 32 nt, Homo Sapiens
uugcauugugauaaguuuuggaaauucaaaag

SEQ ID NO: 152570 - RNA, 32 nt, Homo Sapiens
cugggguugggucugugcugagcuggagggcc

SEQ ID NO: 152571 - RNA, 32 nt, Homo Sapiens
cacggggccgacauugucucccgccccccaca

SEQ ID NO: 152572 - RNA, 32 nt, Homo Sapiens
acuauugacaaugucauuuccugguuucuuau

SEQ ID NO: 152573 - RNA, 32 nt, Homo Sapiens
ggaccccaccugagagcagcucgggcugcuga

SEQ ID NO: 152574 - RNA, 32 nt, Homo Sapiens
acaaaucaagauacaugugugugaaaccauuc

SEQ ID NO: 152575 - RNA, 32 nt, Homo Sapiens
acuaaaucucaaacuuuacuaaacauaagaaa

SEQ ID NO: 152576 - RNA, 32 nt, Homo Sapiens
agauagcaaaacgggugguugaagauaauuca

SEQ ID NO: 152577 - RNA, 32 nt, Homo Sapiens
ucgguccccgcguccacugagcgccgcgcucg

SEQ ID NO: 152578 - RNA, 32 nt, Homo Sapiens
ccgcugccgccgccgcgcgcggauucugcuuc

SEQ ID NO: 152579 - RNA, 31 nt, Homo Sapiens
guuaccaugcauccugccgucuuccuauccu

SEQ ID NO: 152580 - RNA, 32 nt, Homo Sapiens
uucugcccuccagagcucccaaacugaugggg

SEQ ID NO: 152581 - RNA, 32 nt, Homo Sapiens
aguacauucguucauuuguccacuguuucuug

SEQ ID NO: 152582 - RNA, 32 nt, Homo Sapiens
aacaaggcugaauuuuuaaagaguauuugaau

SEQ ID NO: 152583 - RNA, 32 nt, Homo Sapiens
cguggaaagggagaguggccacuauguggaga

SEQ ID NO: 152584 - RNA, 32 nt, Homo Sapiens
uccagggggaggacugcccacccuuccagauc

SEQ ID NO: 152585 - RNA, 32 nt, Homo Sapiens
agaucaggugcccggcaccccugggcauccug

SEQ ID NO: 152586 - RNA, 32 nt, Homo Sapiens
cuccggcuggcaucuggugggugccccucugg

SEQ ID NO: 152587 - RNA, 32 nt, Homo Sapiens
cucacaggcagacucgcagacggggcagugag

SEQ ID NO: 152588 - RNA, 32 nt, Homo Sapiens
ugucaggacuuccugaaggauuagauguggaa

SEQ ID NO: 152589 - RNA, 32 nt, Homo Sapiens
aaacugccaagggagcucuaacuugaagccac

SEQ ID NO: 152590 - RNA, 32 nt, Homo Sapiens
uauugacacggggguuacagagaugaaccuga

SEQ ID NO: 152591 - RNA, 32 nt, Homo Sapiens
gggagugucaguggccuagucaugcuuucuac

SEQ ID NO: 152592 - RNA, 32 nt, Homo Sapiens
guaagauuaauagauagcaaaauauagcuggg

SEQ ID NO: 152593 - RNA, 32 nt, Homo Sapiens
aauuuuaaaaagacauaaaaaaaaaaaaaaaa

SEQ ID NO: 152594 - RNA, 32 nt, Homo Sapiens
gggcagggacucggucccccuugccgugcucc

SEQ ID NO: 152595 - RNA, 32 nt, Homo Sapiens
ccacagggucauugggaagguuugaaaugaag

SEQ ID NO: 152596 - RNA, 32 nt, Homo Sapiens
gcaaagauguaaauuuuugaagggcaguuuag

SEQ ID NO: 152597 - RNA, 32 nt, Homo Sapiens
gcagaggggcgagggagaggcuuuugcuguga

SEQ ID NO: 152598 - RNA, 32 nt, Homo Sapiens
ucuguuauaugauguuauuuuugccaggagac

SEQ ID NO: 152599 - RNA, 32 nt, Homo Sapiens
uguaugcgugacuuggcuguggcugucuuuuu

SEQ ID NO: 152600 - RNA, 32 nt, Homo Sapiens
cuggaguuaccucagcagaagacuagaauuag

SEQ ID NO: 152601 - RNA, 32 nt, Homo Sapiens
aauaacacaaauuuuucuuaaguucugcagau

SEQ ID NO: 152602 - RNA, 32 nt, Homo Sapiens
cugcagccucaucucccuccccgcucccuggu

SEQ ID NO: 152603 - RNA, 32 nt, Homo Sapiens
acgcagaauaccucgaaccaggcgggcuguga

SEQ ID NO: 152604 - RNA, 32 nt, Homo Sapiens
cggcaccggccgcggggagacaggggcugggg

SEQ ID NO: 152605 - RNA, 32 nt, Homo Sapiens
uaugucuguaugcaugugaacacacacacaca

SEQ ID NO: 152606 - RNA, 32 nt, Homo Sapiens
gcauuuguauaaagaaacugguccauguaaau

SEQ ID NO: 152607 - RNA, 32 nt, Homo Sapiens
ucagcgcugcccgaccccgcuggcgcgcccuc

SEQ ID NO: 152608 - RNA, 32 nt, Homo Sapiens
acugagaugccagcuguggggcccgucaggag

SEQ ID NO: 152609 - RNA, 32 nt, Homo Sapiens
aaagaaaacaaaaaacgaaugaaaauaacuga

SEQ ID NO: 152610 - RNA, 32 nt, Homo Sapiens
auucacauuaaaccgguuucugugggcaccuu

SEQ ID NO: 152611 - RNA, 32 nt, Homo Sapiens
uacguucacagcauggacggucagugugaaga

SEQ ID NO: 152612 - RNA, 32 nt, Homo Sapiens
gggaugggaagggugaggaagggcuggggcca

SEQ ID NO: 152613 - RNA, 32 nt, Homo Sapiens
gagggcagaaaagucuuuggggaugauucagu

SEQ ID NO: 152614 - RNA, 32 nt, Homo Sapiens
aucccugcacgcugccaggguccuucugcugg

SEQ ID NO: 152615 - RNA, 30 nt, Homo Sapiens
gccaccaacgccuugccgccgccgcucgcc

SEQ ID NO: 152616 - RNA, 32 nt, Homo Sapiens
uucccuuugagucaugaugacagaugguguga

SEQ ID NO: 152617 - RNA, 32 nt, Homo Sapiens
gggccuggaugccucucgcucuggccaaaugc

SEQ ID NO: 152618 - RNA, 32 nt, Homo Sapiens
accccucugccccaguccccccggcccaggcg

SEQ ID NO: 152619 - RNA, 32 nt, Homo Sapiens
ugaggcuuuccagcaaaggggcugggacguaa

SEQ ID NO: 152620 - RNA, 32 nt, Homo Sapiens
aucugcggcuaggaagaccugggccgccagaa

SEQ ID NO: 152621 - RNA, 32 nt, Homo Sapiens
agaacaaucaucuaaaucuauaugauuucaga

SEQ ID NO: 152622 - RNA, 32 nt, Homo Sapiens
auuauggaccgucauugagggguaacuccucc

SEQ ID NO: 152623 - RNA, 32 nt, Homo Sapiens
gucaugcagcgaagguuuugucuguuucaaag

SEQ ID NO: 152624 - RNA, 32 nt, Homo Sapiens
cagaacuaacugugccugcagucuucacucuc

SEQ ID NO: 152625 - RNA, 32 nt, Homo Sapiens
cagcggcucuguuuccuccuuccuuccuuggc

SEQ ID NO: 152626 - RNA, 29 nt, Homo Sapiens
ggcuacuugggaggcagaggcaggagaau

SEQ ID NO: 152627 - RNA, 32 nt, Homo Sapiens
aaaggaggaaagaauggaugacacuuagggac

SEQ ID NO: 152628 - RNA, 32 nt, Homo Sapiens
uggccagguguucgggacgcgaccaggugggc

SEQ ID NO: 152629 - RNA, 32 nt, Homo Sapiens
cuccuucacagacaccucuccugucuucagca

SEQ ID NO: 152630 - RNA, 32 nt, Homo Sapiens
gccuaguccccgcccuccgcccggcccggagc

SEQ ID NO: 152631 - RNA, 32 nt, Homo Sapiens
gugggaaauagggcaagaauucuuaugcuuau

SEQ ID NO: 152632 - RNA, 32 nt, Homo Sapiens
uauauuucauuuccacacccucagagaagacu

SEQ ID NO: 152633 - RNA, 32 nt, Homo Sapiens
cucuuacaaaaaugcuacugaucaaauaagcu

SEQ ID NO: 152634 - RNA, 32 nt, Homo Sapiens
guugugucaggccacacacuuuagucuuccgu

SEQ ID NO: 152635 - RNA, 32 nt, Homo Sapiens
aggaaguagaaagugguaaagaauugaggcuu

SEQ ID NO: 152636 - RNA, 32 nt, Homo Sapiens
ggagaagcugcagcugcaggagugcuuguggg

SEQ ID NO: 152637 - RNA, 32 nt, Homo Sapiens
aauuauggacauuuuuggugagaaagaacaau

SEQ ID NO: 152638 - RNA, 32 nt, Homo Sapiens
cgcagcguuuccccccaucccuguugccugug

SEQ ID NO: 152639 - RNA, 32 nt, Homo Sapiens
ugggacagaaauuugagggaggggaacaaaga

SEQ ID NO: 152640 - RNA, 32 nt, Homo Sapiens
gggggugaagguggggggcgggcgcgcucagg

SEQ ID NO: 152641 - RNA, 32 nt, Homo Sapiens
aagaguuauagcaaauugauuucuaauuuuua

SEQ ID NO: 152642 - RNA, 32 nt, Homo Sapiens
aguuaucuuuaaaauuuaaguaucuuuuuucc

SEQ ID NO: 152643 - RNA, 32 nt, Homo Sapiens
ccuguugaagacuuccucucuaccccccaccu

SEQ ID NO: 152644 - RNA, 32 nt, Homo Sapiens
cguggggaccucagccaucccagggcauugug

SEQ ID NO: 152645 - RNA, 32 nt, Homo Sapiens
auuauaugaaugccuauuugugucuagaacca

SEQ ID NO: 152646 - RNA, 32 nt, Homo Sapiens
agucgagaggggcuggagcuuucccucugauc

SEQ ID NO: 152647 - RNA, 32 nt, Homo Sapiens
ugguuuuuaaacagucacuccguuucaaaguc

SEQ ID NO: 152648 - RNA, 32 nt, Homo Sapiens
ccuaaccauuauaguuuauaaguuuuaagaca

SEQ ID NO: 152649 - RNA, 32 nt, Homo Sapiens
caacuuuuucuuucucacaaucccagauaauc

SEQ ID NO: 152650 - RNA, 32 nt, Homo Sapiens
aaacagcuggcccugcaaauguuuacagaaau

SEQ ID NO: 152651 - RNA, 32 nt, Homo Sapiens
aaagaaaaaugaaguaaaagaauagaaaaucc

SEQ ID NO: 152652 - RNA, 32 nt, Homo Sapiens
ucuguguguuuguguguaucugugggucucca

SEQ ID NO: 152653 - RNA, 32 nt, Homo Sapiens
uauauaaauauuuggucucuauuucauuuuuu

SEQ ID NO: 152654 - RNA, 31 nt, Homo Sapiens
uguauuuuacauaacggaaaguuuuuagaau

SEQ ID NO: 152655 - RNA, 32 nt, Homo Sapiens
agcggggcggccuggaucuguuuucugccccu

SEQ ID NO: 152656 - RNA, 32 nt, Homo Sapiens
acagagugaagcagggcccagcccuuggagaa

SEQ ID NO: 152657 - RNA, 32 nt, Homo Sapiens
gugccaccauugcucugucugauguauguaau

SEQ ID NO: 152658 - RNA, 32 nt, Homo Sapiens
agcacuuugggaggccgagacaggcggaucac

SEQ ID NO: 152659 - RNA, 32 nt, Homo Sapiens
augucugucucugguguuaaccagaggcugcu

SEQ ID NO: 152660 - RNA, 32 nt, Homo Sapiens
accaucacguaugucgcagcagcauuucaccc

SEQ ID NO: 152661 - RNA, 32 nt, Homo Sapiens
uaagccauacauauuucuuuucccacauucug

SEQ ID NO: 152662 - RNA, 32 nt, Homo Sapiens
uaucauuuguuucucucugcuguagguguucu

SEQ ID NO: 152663 - RNA, 32 nt, Homo Sapiens
aggcugcgggagcuggagaggaugcuggagcu

SEQ ID NO: 152664 - RNA, 32 nt, Homo Sapiens
aucgccagcaaggaacacagggcuugcaggau

SEQ ID NO: 152665 - RNA, 32 nt, Homo Sapiens
gcuuagggggagagcgggaaaggacugcagcc

SEQ ID NO: 152666 - RNA, 32 nt, Homo Sapiens
acgugacucccucuccucuccaaaaccaacug

SEQ ID NO: 152667 - RNA, 31 nt, Homo Sapiens
aggcagacggcgaguaccgagcgcggguggc

SEQ ID NO: 152668 - RNA, 32 nt, Homo Sapiens
uaauuuggaaagguucuuuacauggcagaaua

SEQ ID NO: 152669 - RNA, 30 nt, Homo Sapiens
uuuaauaaauaaaaaugucuugauaucagu

SEQ ID NO: 152670 - RNA, 32 nt, Homo Sapiens
uuuguaaaggauaucaaugccuugauuagacc

SEQ ID NO: 152671 - RNA, 32 nt, Homo Sapiens
aggaggaggcccgcgucgccuccggcggggcu

SEQ ID NO: 152672 - RNA, 32 nt, Homo Sapiens
guacauaguguggugaagaaaagugaacgccc

SEQ ID NO: 152673 - RNA, 32 nt, Homo Sapiens
cuccaauccuucccucccuccaguauugcccc

SEQ ID NO: 152674 - RNA, 32 nt, Homo Sapiens
uccuuuuauguguaguugucucucuucagacu

SEQ ID NO: 152675 - RNA, 32 nt, Homo Sapiens
ccugugcugggggcaugcugggaccagccgca

SEQ ID NO: 152676 - RNA, 27 nt, Homo Sapiens
ucaagguccuucuagaacuccggcaca

SEQ ID NO: 152677 - RNA, 30 nt, Homo Sapiens
ggaggagagaagccaguugugugucucagu

SEQ ID NO: 152678 - RNA, 32 nt, Homo Sapiens
ugugggccgcgugcgucucugucguggacacg

SEQ ID NO: 152679 - RNA, 32 nt, Homo Sapiens
uuaaauaucuuggugucuuguuucuauugugu

SEQ ID NO: 152680 - RNA, 32 nt, Homo Sapiens
aauuaaacaauauaaacuuauaaucaaauaua

SEQ ID NO: 152681 - RNA, 32 nt, Homo Sapiens
aaaacaaaacaaaaacacacuacuguauuuug

SEQ ID NO: 152682 - RNA, 32 nt, Homo Sapiens
guagguugcauucuuuaugcacugugucugcu

SEQ ID NO: 152683 - RNA, 27 nt, Homo Sapiens
ggauucuccugcuucagccuccugagu

SEQ ID NO: 152684 - RNA, 32 nt, Homo Sapiens
uucacuacugcaaaauguguccugucuaaaaa

SEQ ID NO: 152685 - RNA, 32 nt, Homo Sapiens
ccaagucuccucaggagccgccggcaaggggg

SEQ ID NO: 152686 - RNA, 32 nt, Homo Sapiens
gcaggcugggcaauuugcccucaaacagaaca

SEQ ID NO: 152687 - RNA, 32 nt, Homo Sapiens
cuuguauauaagaauguauauuugaugccuca

SEQ ID NO: 152688 - RNA, 32 nt, Homo Sapiens
ugacuacauuuaauuucuuuuugagaaaggug

SEQ ID NO: 152689 - RNA, 32 nt, Homo Sapiens
ggagaggaagcagcccggugaacggccacuuu

SEQ ID NO: 152690 - RNA, 32 nt, Homo Sapiens
cugggcuggauucucccuccagucucuggggu

SEQ ID NO: 152691 - RNA, 32 nt, Homo Sapiens
guuuaacagcuauuaaugguggcauaguaccu

SEQ ID NO: 152692 - RNA, 32 nt, Homo Sapiens
ugcaaaaaaaaauuauuugcuuugggguuuua

SEQ ID NO: 152693 - RNA, 32 nt, Homo Sapiens
auuuuacuggguaugagaguagacuuagcaua

SEQ ID NO: 152694 - RNA, 32 nt, Homo Sapiens
cuuuuauuuucccccuuuucacagagaaauaa

SEQ ID NO: 152695 - RNA, 32 nt, Homo Sapiens
uauguccccgucccacugaggaccucaguuug

SEQ ID NO: 152696 - RNA, 32 nt, Homo Sapiens
ucacuuuauuuuggaccugcugugaucucgac

SEQ ID NO: 152697 - RNA, 32 nt, Homo Sapiens
cgacccggcugcgccguagugggaggccacgg

SEQ ID NO: 152698 - RNA, 32 nt, Homo Sapiens
cugcucaaggcacaaccucugggcuggaguag

SEQ ID NO: 152699 - RNA, 32 nt, Homo Sapiens
cuuauauuaagcaaugagauauacuaaacaau

SEQ ID NO: 152700 - RNA, 32 nt, Homo Sapiens
gaguagaacgagccagaguuccugacuugagc

SEQ ID NO: 152701 - RNA, 32 nt, Homo Sapiens
uccugcccaacauggugaaaccccguuucuac

SEQ ID NO: 152702 - RNA, 32 nt, Homo Sapiens
caccaaaacugaauucuuaugcagaauuuccu

SEQ ID NO: 152703 - RNA, 32 nt, Homo Sapiens
ucgucugcaauaaccucaacagaugggcuggg

SEQ ID NO: 152704 - RNA, 32 nt, Homo Sapiens
aauacaaaggaggaagugaaaacuaugugaga

SEQ ID NO: 152705 - RNA, 32 nt, Homo Sapiens
gugugaauauuuuuugucaauggcuuucucaa

SEQ ID NO: 152706 - RNA, 32 nt, Homo Sapiens
agacucuauuuucucugauucggugugcgcca

SEQ ID NO: 152707 - RNA, 32 nt, Homo Sapiens
ugucaagauaguuguaauuccuguucuggaaa

SEQ ID NO: 152708 - RNA, 32 nt, Homo Sapiens
uguuccccagugaccuuggagacacccugccc

SEQ ID NO: 152709 - RNA, 32 nt, Homo Sapiens
auaauuugggggcuaacuccauuugguuucca

SEQ ID NO: 152710 - RNA, 32 nt, Homo Sapiens
cguccggggcgcuggagacgccaggcccgagu

SEQ ID NO: 152711 - RNA, 32 nt, Homo Sapiens
ccuuguaugcaaacugaugauaaacuagucag

SEQ ID NO: 152712 - RNA, 32 nt, Homo Sapiens
gacaucugccugggcuugagugcuacggacuu

SEQ ID NO: 152713 - RNA, 32 nt, Homo Sapiens
uauaaagaauaguuuuacacacguauuuaccg

SEQ ID NO: 152714 - RNA, 32 nt, Homo Sapiens
aacuaaauuuaaaggcaauaaaaguuugguac

SEQ ID NO: 152715 - RNA, 32 nt, Homo Sapiens
agcagccuuagucgccgccgccgcggggcgag

SEQ ID NO: 152716 - RNA, 32 nt, Homo Sapiens
cccauauuugcugacuuuuuaagggaaggauu

SEQ ID NO: 152717 - RNA, 32 nt, Homo Sapiens
caggggccugcgauccggcgcuuccaacaagc

SEQ ID NO: 152718 - RNA, 32 nt, Homo Sapiens
uauguugugguccuuuggcagaugaaaaagaa

SEQ ID NO: 152719 - RNA, 32 nt, Homo Sapiens
uguaauguuaauuuauacuuuuggauugugcc

SEQ ID NO: 152720 - RNA, 32 nt, Homo Sapiens
accagcaaaucugcaaaccaagcacuuuguua

SEQ ID NO: 152721 - RNA, 32 nt, Homo Sapiens
cugccugggcuuuggugcagacuaggugugga

SEQ ID NO: 152722 - RNA, 32 nt, Homo Sapiens
cucagcuuccagcagaaggaacugccacauga

SEQ ID NO: 152723 - RNA, 32 nt, Homo Sapiens
aaugcaauguuuuuauuuuuucauccuaaaaa

SEQ ID NO: 152724 - RNA, 32 nt, Homo Sapiens
cugaggcagccaucuuucucuugccgcgugcu

SEQ ID NO: 152725 - RNA, 32 nt, Homo Sapiens
accauuaggaggagguagauuguuucgucuuc

SEQ ID NO: 152726 - RNA, 32 nt, Homo Sapiens
ucccuacugcuuccuaggagcuuccucaaauu

SEQ ID NO: 152727 - RNA, 32 nt, Homo Sapiens
ccuuuguaaccucagugcuggggacugaggcg

SEQ ID NO: 152728 - RNA, 32 nt, Homo Sapiens
guggaugguacuucaagcauucaucaaaguaa

SEQ ID NO: 152729 - RNA, 32 nt, Homo Sapiens
cuauaacgagaacacauccuaccccaccagca

SEQ ID NO: 152730 - RNA, 32 nt, Homo Sapiens
agcaaacaccaauugauugacugagaaucuga

SEQ ID NO: 152731 - RNA, 32 nt, Homo Sapiens
uguacuuaguguggugcacggaugcacggacu

SEQ ID NO: 152732 - RNA, 32 nt, Homo Sapiens
guuccuggagaaugggggcgugguggccgcca

SEQ ID NO: 152733 - RNA, 32 nt, Homo Sapiens
cgcagccgccuggcccagccugggcacguucu

SEQ ID NO: 152734 - RNA, 32 nt, Homo Sapiens
acaggagagauuaaagcagguucaaaaacaca

SEQ ID NO: 152735 - RNA, 32 nt, Homo Sapiens
aggagaucaaggaagcaucuuuuuaaaaacua

SEQ ID NO: 152736 - RNA, 32 nt, Homo Sapiens
agagaggcuggugaugaaaaggugaaggccug

SEQ ID NO: 152737 - RNA, 32 nt, Homo Sapiens
gucaaaagggaagucgagggauggggcgucgu

SEQ ID NO: 152738 - RNA, 32 nt, Homo Sapiens
uucugagguggacagcacuuugaauguagcau

SEQ ID NO: 152739 - RNA, 32 nt, Homo Sapiens
gaggaaagcaccucuuucauuuuuuaguguga

SEQ ID NO: 152740 - RNA, 32 nt, Homo Sapiens
ugccugucuucccagggguguaccucuuggcu

SEQ ID NO: 152741 - RNA, 32 nt, Homo Sapiens
ccuguucugcaccccucuccccaugggaccuu

SEQ ID NO: 152742 - RNA, 32 nt, Homo Sapiens
gcagaagaaaaaauuagugagcuugaagacaa

SEQ ID NO: 152743 - RNA, 32 nt, Homo Sapiens
uguauuuuaaucuuguauaaaaauaugcauga

SEQ ID NO: 152744 - RNA, 32 nt, Homo Sapiens
ucuuugucuucaucagaaaguucacaugggag

SEQ ID NO: 152745 - RNA, 32 nt, Homo Sapiens
cucuggcuuuguucuuuuuguucaagauuguu

SEQ ID NO: 152746 - RNA, 32 nt, Homo Sapiens
ccccgccccucgcccguuauucgucguggcuc

SEQ ID NO: 152747 - RNA, 32 nt, Homo Sapiens
agggcggugacggcgccgggccggccaugcug

SEQ ID NO: 152748 - RNA, 32 nt, Homo Sapiens
ccugugccaggggcuccccgggggaugagcau

SEQ ID NO: 152749 - RNA, 32 nt, Homo Sapiens
gcugaucgaugcaccgaugaaguaaacgccuu

SEQ ID NO: 152750 - RNA, 32 nt, Homo Sapiens
cccugccccccgccccucuccaaacaccggca

SEQ ID NO: 152751 - RNA, 32 nt, Homo Sapiens
guuuguguguaugaauuuguaccuguuuuccg

SEQ ID NO: 152752 - RNA, 32 nt, Homo Sapiens
aagggucccccgccagcccgcggccgcgccau

SEQ ID NO: 152753 - RNA, 32 nt, Homo Sapiens
gagccccgacuccccggacgccgcccgccgug

SEQ ID NO: 152754 - RNA, 32 nt, Homo Sapiens
ggcgcuggucagagcccucccaugaccauggg

SEQ ID NO: 152755 - RNA, 32 nt, Homo Sapiens
ugagugcugaggaggaaaggggauuacgcugc

SEQ ID NO: 152756 - RNA, 32 nt, Homo Sapiens
ucugucccucuguacagcugcccucauguaua

SEQ ID NO: 152757 - RNA, 32 nt, Homo Sapiens
gcugcaaucucuacuuucgaugaggaaauccc

SEQ ID NO: 152758 - RNA, 32 nt, Homo Sapiens
acauugggcucugggaauuuuaucuggguuuu

SEQ ID NO: 152759 - RNA, 32 nt, Homo Sapiens
ugagugcgugacucacaacgggguuaacucgg

SEQ ID NO: 152760 - RNA, 32 nt, Homo Sapiens
gguuccuuccugcuucacuccuccccacugcu

SEQ ID NO: 152761 - RNA, 32 nt, Homo Sapiens
agaucaaaauuuuuauacuggcacuaugaugu

SEQ ID NO: 152762 - RNA, 32 nt, Homo Sapiens
uucacuuugaagagggucugaggccugggaga

SEQ ID NO: 152763 - RNA, 32 nt, Homo Sapiens
cccauggcuggcaggccagagccccgugcugu

SEQ ID NO: 152764 - RNA, 32 nt, Homo Sapiens
uuguauuuuuaaaaugcgugauguuuuaugaa

SEQ ID NO: 152765 - RNA, 32 nt, Homo Sapiens
gauggcacucccgaugccuggaccucagguga

SEQ ID NO: 152766 - RNA, 32 nt, Homo Sapiens
uacaaaugccuugguauguaccucuggcaaau

SEQ ID NO: 152767 - RNA, 32 nt, Homo Sapiens
uccguggaacuauucgggaucccgggcugcuc

SEQ ID NO: 152768 - RNA, 28 nt, Homo Sapiens
acuaugaaagauuaugaugaacuucuca

SEQ ID NO: 152769 - RNA, 32 nt, Homo Sapiens
uaugauggaugugaccauuuauaugucaugug

SEQ ID NO: 152770 - RNA, 32 nt, Homo Sapiens
cugccugggcagcccucacacccaugcucccu

SEQ ID NO: 152771 - RNA, 32 nt, Homo Sapiens
ccgcuccagcggggcgcuccagucccucagac

SEQ ID NO: 152772 - RNA, 32 nt, Homo Sapiens
ggcacugugcuaggcguggugggcaguauaaa

SEQ ID NO: 152773 - RNA, 32 nt, Homo Sapiens
cuggccagaacccacacccggccccuucccac

SEQ ID NO: 152774 - RNA, 32 nt, Homo Sapiens
uccaacugccagcccggguuggcgccauguac

SEQ ID NO: 152775 - RNA, 32 nt, Homo Sapiens
uccugccccuuguuuccacaccuaccauuccu

SEQ ID NO: 152776 - RNA, 32 nt, Homo Sapiens
aaacagggaaaggaccugcugcugaaaaggga

SEQ ID NO: 152777 - RNA, 32 nt, Homo Sapiens
auuagcauuuuucuuugaaguaaaaaauaaau

SEQ ID NO: 152778 - RNA, 32 nt, Homo Sapiens
guggucugccagcugagaugcuccucgggcug

SEQ ID NO: 152779 - RNA, 32 nt, Homo Sapiens
ccacucccaccccacaccagcccugccucaag

SEQ ID NO: 152780 - RNA, 32 nt, Homo Sapiens
auccugcagggccacagucggcacuguuauuu

SEQ ID NO: 152781 - RNA, 32 nt, Homo Sapiens
aguuuuaaguuugauggucuccauucaggcaa

SEQ ID NO: 152782 - RNA, 32 nt, Homo Sapiens
gacacucuuugggaagagaaucucuaaugacg

SEQ ID NO: 152783 - RNA, 32 nt, Homo Sapiens
agugcaugugcaugcauaccacaagacauuuc

SEQ ID NO: 152784 - RNA, 32 nt, Homo Sapiens
ucccuccgcugcucuuuccccacggcccagaa

SEQ ID NO: 152785 - RNA, 32 nt, Homo Sapiens
cuacugaccaagcaggagagccagcagcacuu

SEQ ID NO: 152786 - RNA, 32 nt, Homo Sapiens
uuuguuuguuuguuuaccugucuugggcuuug

SEQ ID NO: 152787 - RNA, 32 nt, Homo Sapiens
agagaaguguagaggaugauguuuacauaauu

SEQ ID NO: 152788 - RNA, 32 nt, Homo Sapiens
uguuaaauauuuucccucuuuuguugggaagc

SEQ ID NO: 152789 - RNA, 32 nt, Homo Sapiens
gggccuguagggugggaggccuggcccgggcc

SEQ ID NO: 152790 - RNA, 32 nt, Homo Sapiens
cauucuauuucucauguauaaaacuaggaauc

SEQ ID NO: 152791 - RNA, 29 nt, Homo Sapiens
gcucugaugaauaaaaaguuuuguaaaac

SEQ ID NO: 152792 - RNA, 32 nt, Homo Sapiens
acaucgaguauacugcuagaaaaaucuaccag

SEQ ID NO: 152793 - RNA, 32 nt, Homo Sapiens
gggaauugauuucacaguucguuaccuuagua

SEQ ID NO: 152794 - RNA, 32 nt, Homo Sapiens
cuaaaauaaaaugaaaagcauaaaacucucug

SEQ ID NO: 152795 - RNA, 32 nt, Homo Sapiens
auaccagcaaguagaagcugggaugggcagug

SEQ ID NO: 152796 - RNA, 32 nt, Homo Sapiens
gugaaaggaaucuuggcgcagauguuuguguu

SEQ ID NO: 152797 - RNA, 32 nt, Homo Sapiens
ccgucaggugccuguccccagccccaacccca

SEQ ID NO: 152798 - RNA, 32 nt, Homo Sapiens
auaucacugaaauuauugacauuuaagauuau

SEQ ID NO: 152799 - RNA, 32 nt, Homo Sapiens
cacaaggggaccccggccuaggaggcaggaag

SEQ ID NO: 152800 - RNA, 32 nt, Homo Sapiens
gaguguguggagugggcggggggucuccgcgg

SEQ ID NO: 152801 - RNA, 32 nt, Homo Sapiens
gugguagaggggcccuggaauugcagcuguac

SEQ ID NO: 152802 - RNA, 32 nt, Homo Sapiens
agacacugggagugcugccaccacguggugca

SEQ ID NO: 152803 - RNA, 32 nt, Homo Sapiens
cucucuggccccagccccgcgggaagaaaacg

SEQ ID NO: 152804 - RNA, 32 nt, Homo Sapiens
cugaucauccucccuuucuccuuggcuugaag

SEQ ID NO: 152805 - RNA, 32 nt, Homo Sapiens
cuugaaggaaauguuucaccuuauuuuugguc

SEQ ID NO: 152806 - RNA, 32 nt, Homo Sapiens
ggcucccccacuuucccuuccccaccccacuu

SEQ ID NO: 152807 - RNA, 32 nt, Homo Sapiens
guaucauaggugacuuacacaguguccuuggu

SEQ ID NO: 152808 - RNA, 32 nt, Homo Sapiens
uagucuuuguuuucuucagugcuguacuguga

SEQ ID NO: 152809 - RNA, 32 nt, Homo Sapiens
agagacccugaagaauauuugaugugaugauu

SEQ ID NO: 152810 - RNA, 32 nt, Homo Sapiens
ucuucccuguauuuucuuucucuacuuugagg

SEQ ID NO: 152811 - RNA, 32 nt, Homo Sapiens
ccuucugcuccauggaggcaccagagccaggg

SEQ ID NO: 152812 - RNA, 32 nt, Homo Sapiens
acccccuaaccaaacuauucuaauuucuguag

SEQ ID NO: 152813 - RNA, 32 nt, Homo Sapiens
aaauucuccgaguccuuugccucuuuugauaa

SEQ ID NO: 152814 - RNA, 32 nt, Homo Sapiens
uucuaggugcugucacaccuuguaacgucaga

SEQ ID NO: 152815 - RNA, 32 nt, Homo Sapiens
auggagcagcccagcccacgugcccggccuuc

SEQ ID NO: 152816 - RNA, 32 nt, Homo Sapiens
ccugaccuccaaaucauccauccaccccugcu

SEQ ID NO: 152817 - RNA, 32 nt, Homo Sapiens
cccugucugccagcagaggcaguagggcacag

SEQ ID NO: 152818 - RNA, 32 nt, Homo Sapiens
gcgcaucgggugucagugacucauggagaaga

SEQ ID NO: 152819 - RNA, 32 nt, Homo Sapiens
cagcuggcagacucgggaccaauacuacugac

SEQ ID NO: 152820 - RNA, 32 nt, Homo Sapiens
ggggagguggguggagaggugagcccaggcac

SEQ ID NO: 152821 - RNA, 32 nt, Homo Sapiens
ugugcuuccuucccucugaggcccauagaagc

SEQ ID NO: 152822 - RNA, 32 nt, Homo Sapiens
ccuccagcaaggaaacaaugaccgauaaaaca

SEQ ID NO: 152823 - RNA, 32 nt, Homo Sapiens
caugaugcagagcggccagcugggcggggacc

SEQ ID NO: 152824 - RNA, 32 nt, Homo Sapiens
auuucuaagggucaggaggccuucaccgcugc

SEQ ID NO: 152825 - RNA, 32 nt, Homo Sapiens
ugccuggagcagggacggagggggagaauggg

SEQ ID NO: 152826 - RNA, 32 nt, Homo Sapiens
auuuaacaugucauauuuuugaaauagauuua

SEQ ID NO: 152827 - RNA, 32 nt, Homo Sapiens
gacagcugccagcugaccgcagaccucgacgg

SEQ ID NO: 152828 - RNA, 32 nt, Homo Sapiens
ccucaggacuggccauauaaucugcaaggucc

SEQ ID NO: 152829 - RNA, 32 nt, Homo Sapiens
caagacagaaaagugccugagcuggggaagcc

SEQ ID NO: 152830 - RNA, 32 nt, Homo Sapiens
aucuugucucaaauacuaauacaguggagauu

SEQ ID NO: 152831 - RNA, 32 nt, Homo Sapiens
auggguucaguauuuaauuuuaaaagacaaag

SEQ ID NO: 152832 - RNA, 32 nt, Homo Sapiens
acuuaaauauccaucaauggaagacgaguuau

SEQ ID NO: 152833 - RNA, 32 nt, Homo Sapiens
uauaaggaagcagcugucuaaaaugcaguggg

SEQ ID NO: 152834 - RNA, 32 nt, Homo Sapiens
auuuauagcuaagacuccaggacaccccugaa

SEQ ID NO: 152835 - RNA, 32 nt, Homo Sapiens
ucugccuccccuaugggacucccuucuaccaa

SEQ ID NO: 152836 - RNA, 32 nt, Homo Sapiens
cccgcgaccaccccugugcgcgcguucgcggc

SEQ ID NO: 152837 - RNA, 30 nt, Homo Sapiens
cugcaaugggccgcggcuggggauucuugu

SEQ ID NO: 152838 - RNA, 32 nt, Homo Sapiens
ugcaccgcgucuccagcgaucccggauccacu

SEQ ID NO: 152839 - RNA, 32 nt, Homo Sapiens
cccagggccucgugccuucucucuuggccuag

SEQ ID NO: 152840 - RNA, 32 nt, Homo Sapiens
aaagaaccauguggaaauggaauagaauuggu

SEQ ID NO: 152841 - RNA, 32 nt, Homo Sapiens
ggauacggaggcggccgcggcgcgggcugcag

SEQ ID NO: 152842 - RNA, 32 nt, Homo Sapiens
acugcucgccugggauggaacgguggggaggu

SEQ ID NO: 152843 - RNA, 32 nt, Homo Sapiens
agugccaggcuggcuccuggggauggccaggu

SEQ ID NO: 152844 - RNA, 32 nt, Homo Sapiens
auaaugcuggcuauugugaauaaugcugcuac

SEQ ID NO: 152845 - RNA, 32 nt, Homo Sapiens
aaucuauguaucuaaaaaugugagaugugcga

SEQ ID NO: 152846 - RNA, 32 nt, Homo Sapiens
agccugcccucccgcgccucgucggggcccgg

SEQ ID NO: 152847 - RNA, 32 nt, Homo Sapiens
aggccccugugcccccucuccccuucccaggg

SEQ ID NO: 152848 - RNA, 32 nt, Homo Sapiens
guauuuauaaaagcuuuuuuuucuagauuuga

SEQ ID NO: 152849 - RNA, 32 nt, Homo Sapiens
uauuuuuuagucagcagaacucuguaauucca

SEQ ID NO: 152850 - RNA, 32 nt, Homo Sapiens
ggauguaaauagccgcacaaagggguccaaca

SEQ ID NO: 152851 - RNA, 32 nt, Homo Sapiens
aggugugggcccagccccccuccuuccagccu

SEQ ID NO: 152852 - RNA, 32 nt, Homo Sapiens
gcuucucugcaccucugcugccuuucugagua

SEQ ID NO: 152853 - RNA, 29 nt, Homo Sapiens
agacaugucucgggaucgguuccggaguc

SEQ ID NO: 152854 - RNA, 32 nt, Homo Sapiens
ucucuuuuucuuccucucggcuggaagaacau

SEQ ID NO: 152855 - RNA, 32 nt, Homo Sapiens
uugaguaaacacauuaugucaccuaugaaauu

SEQ ID NO: 152856 - RNA, 32 nt, Homo Sapiens
ugcaaaccaaaauguaucuguguuacgacauu

SEQ ID NO: 152857 - RNA, 32 nt, Homo Sapiens
auguggcagagcuugcaaauguccuugagauu

SEQ ID NO: 152858 - RNA, 32 nt, Homo Sapiens
cguguguguuagcauuugugugugucuguggg

SEQ ID NO: 152859 - RNA, 32 nt, Homo Sapiens
ccuuccuacuugccuucuuugaugccaacccc

SEQ ID NO: 152860 - RNA, 32 nt, Homo Sapiens
cccuucucagaccgaggcgccaccaccccagg

SEQ ID NO: 152861 - RNA, 32 nt, Homo Sapiens
ugucugcgaaguccggcgcgggcccuucggcg

SEQ ID NO: 152862 - RNA, 32 nt, Homo Sapiens
gaaucccucaauccccguggcccgcaccacug

SEQ ID NO: 152863 - RNA, 32 nt, Homo Sapiens
caucugggccccacaguaacaccuaguggcaa

SEQ ID NO: 152864 - RNA, 31 nt, Homo Sapiens
gccuucaaggcucucccaggagucccccucu

SEQ ID NO: 152865 - RNA, 32 nt, Homo Sapiens
ggauaacuaagauuacauacuuucucaggaga

SEQ ID NO: 152866 - RNA, 32 nt, Homo Sapiens
auaauuuaaaggagcugcuuuuuuauagcaca

SEQ ID NO: 152867 - RNA, 32 nt, Homo Sapiens
ugccugcucuuuaggccuuuggcacccauggu

SEQ ID NO: 152868 - RNA, 32 nt, Homo Sapiens
ggccugcucccggccccccugcacucugccuc

SEQ ID NO: 152869 - RNA, 32 nt, Homo Sapiens
cgcgcggccucgcuccuccuagaggacgcucu

SEQ ID NO: 152870 - RNA, 32 nt, Homo Sapiens
cuccaaacugucaaguuuagauaauccccucc

SEQ ID NO: 152871 - RNA, 32 nt, Homo Sapiens
guccugaaaaagaaaaaaugaaagauuaccuu

SEQ ID NO: 152872 - RNA, 32 nt, Homo Sapiens
accuggguccccagcccuuccucugcuccccc

SEQ ID NO: 152873 - RNA, 32 nt, Homo Sapiens
cguccuuauaugccagaguaaguacugaccag

SEQ ID NO: 152874 - RNA, 32 nt, Homo Sapiens
uuggacuccauuugcuauucucuucuuucucc

SEQ ID NO: 152875 - RNA, 32 nt, Homo Sapiens
gguuuuaaaaauuguauccuagggaacaguuu

SEQ ID NO: 152876 - RNA, 32 nt, Homo Sapiens
uggcugucgagaaugggggucuguggguaccu

SEQ ID NO: 152877 - RNA, 28 nt, Homo Sapiens
gggucagaaacaggaccggguggaaggg

SEQ ID NO: 152878 - RNA, 32 nt, Homo Sapiens
agugugggcaccugguggccaagccucaguuu

SEQ ID NO: 152879 - RNA, 32 nt, Homo Sapiens
uggagguggggugggagaaagagcuaaaauca

SEQ ID NO: 152880 - RNA, 32 nt, Homo Sapiens
gaguuguuuuugggggggagguggggguaggg

SEQ ID NO: 152881 - RNA, 32 nt, Homo Sapiens
agguuuaggaggagauacuaagauacuggaug

SEQ ID NO: 152882 - RNA, 32 nt, Homo Sapiens
aggcuggcccucauucggggucgggaaccaag

SEQ ID NO: 152883 - RNA, 32 nt, Homo Sapiens
agaguaacaaggaaacaagagauagugaucag

SEQ ID NO: 152884 - RNA, 32 nt, Homo Sapiens
acagccgguggcccgcgucgccgcucgguguc

SEQ ID NO: 152885 - RNA, 32 nt, Homo Sapiens
cauuuuaccuucucucuuucuaaugagauggc

SEQ ID NO: 152886 - RNA, 32 nt, Homo Sapiens
cuggggaguugccuggcggcgccgugccagaa

SEQ ID NO: 152887 - RNA, 32 nt, Homo Sapiens
cugccucuacugggaaggcuacuucggggcug

SEQ ID NO: 152888 - RNA, 32 nt, Homo Sapiens
uuguuggaggcugcaaaauguuaguagauaug

SEQ ID NO: 152889 - RNA, 32 nt, Homo Sapiens
cugcagcgcccugcgccccacccagcaacagc

SEQ ID NO: 152890 - RNA, 32 nt, Homo Sapiens
cccuaagaauguauuuuuaaacacaugaaaua

SEQ ID NO: 152891 - RNA, 32 nt, Homo Sapiens
uuuaaagagaauaaacauuuugcacauacaug

SEQ ID NO: 152892 - RNA, 32 nt, Homo Sapiens
uuacuacaaacuugauuaaacuucugguggaa

SEQ ID NO: 152893 - RNA, 32 nt, Homo Sapiens
uuaaacagauauucccucuuguccuuuaauau

SEQ ID NO: 152894 - RNA, 32 nt, Homo Sapiens
ucuuaacauugcagcuuucucuccaucugcag

SEQ ID NO: 152895 - RNA, 32 nt, Homo Sapiens
gggccgcacggcagggcuggcccaggcagcuc

SEQ ID NO: 152896 - RNA, 32 nt, Homo Sapiens
uauuuuuaauuucaaagccuagcugcuugcuu

SEQ ID NO: 152897 - RNA, 32 nt, Homo Sapiens
ccugacaucuucugcccugguccccuuucucu

SEQ ID NO: 152898 - RNA, 32 nt, Homo Sapiens
uuugucauuuagaguauucugauaaaaucucu

SEQ ID NO: 152899 - RNA, 32 nt, Homo Sapiens
uuaggucugccauuuuacacuuuucugaucuc

SEQ ID NO: 152900 - RNA, 32 nt, Homo Sapiens
ggggccuccagaucugggggaaggacaggguu

SEQ ID NO: 152901 - RNA, 32 nt, Homo Sapiens
cuucagaguaacgucaguggcuuaggguuaaa

SEQ ID NO: 152902 - RNA, 32 nt, Homo Sapiens
gguugcgauugauuaagguacauuaauggauc

SEQ ID NO: 152903 - RNA, 32 nt, Homo Sapiens
uguaauacauauauuuacaaauaaaaugccuc

SEQ ID NO: 152904 - RNA, 32 nt, Homo Sapiens
ucccagggccaccucacagccauccugcacug

SEQ ID NO: 152905 - RNA, 32 nt, Homo Sapiens
aaaucccccaucagugggggcggggggggggg

SEQ ID NO: 152906 - RNA, 32 nt, Homo Sapiens
cuuacaccuaauauaagcuuguccucccuccc

SEQ ID NO: 152907 - RNA, 32 nt, Homo Sapiens
uacauauuguucccuccaugggcuuaagagaa

SEQ ID NO: 152908 - RNA, 32 nt, Homo Sapiens
uuauguuacauucaaagcucuuguuuucauca

SEQ ID NO: 152909 - RNA, 32 nt, Homo Sapiens
ggcugucagucccucccucgugggugguaccu

SEQ ID NO: 152910 - RNA, 32 nt, Homo Sapiens
uaguuggaaacaacauacuuauggaaaagaaa

SEQ ID NO: 152911 - RNA, 32 nt, Homo Sapiens
cuucccugacuucucauuucauuacucuuauu

SEQ ID NO: 152912 - RNA, 32 nt, Homo Sapiens
ccuugccaaaaauagaagaaugugauuuggua

SEQ ID NO: 152913 - RNA, 32 nt, Homo Sapiens
uuuuggcucuguugcgcguggggaugcgggga

SEQ ID NO: 152914 - RNA, 32 nt, Homo Sapiens
ucugacucgcugugcgccccgcggccggcggg

SEQ ID NO: 152915 - RNA, 32 nt, Homo Sapiens
gggucccaugggcggcgccgcgcagggcgcua

SEQ ID NO: 152916 - RNA, 32 nt, Homo Sapiens
ucggaagcagugccuuccauaauuaugacagu

SEQ ID NO: 152917 - RNA, 32 nt, Homo Sapiens
cagaguggggacugccccgaggaggacaagaa

SEQ ID NO: 152918 - RNA, 32 nt, Homo Sapiens
agaucuugaaagggcaguugcuacugauccau

SEQ ID NO: 152919 - RNA, 32 nt, Homo Sapiens
aguuagggcgugcgucugagugcggagaaagc

SEQ ID NO: 152920 - RNA, 32 nt, Homo Sapiens
ccgaugcccuugcucccccucuucccacccca

SEQ ID NO: 152921 - RNA, 32 nt, Homo Sapiens
ggaggagcgcgggugaccuggcggcggcgaga

SEQ ID NO: 152922 - RNA, 32 nt, Homo Sapiens
ugucccuccauaauucauauacugaauucuua

SEQ ID NO: 152923 - RNA, 32 nt, Homo Sapiens
aauuauaaauacguauuacaaacaaguggaug

SEQ ID NO: 152924 - RNA, 32 nt, Homo Sapiens
uaguuauuccauuguaugaauaugccacaauu

SEQ ID NO: 152925 - RNA, 32 nt, Homo Sapiens
uuuuuuuuuuuuuuuucuuuuuugagauggag

SEQ ID NO: 152926 - RNA, 32 nt, Homo Sapiens
cuacauuguaaguuccuugagggcagggccau

SEQ ID NO: 152927 - RNA, 32 nt, Homo Sapiens
ggccacaugggguauagucaaggggugagcac

SEQ ID NO: 152928 - RNA, 32 nt, Homo Sapiens
guggccuggguugcuugcacuuggggcguggc

SEQ ID NO: 152929 - RNA, 32 nt, Homo Sapiens
agugggaggagaacggucagaaucaaagugac

SEQ ID NO: 152930 - RNA, 32 nt, Homo Sapiens
ccgggagugccgacccacccacguuccggauc

SEQ ID NO: 152931 - RNA, 32 nt, Homo Sapiens
ggguagagaccaacccugaggacucagugugc

SEQ ID NO: 152932 - RNA, 32 nt, Homo Sapiens
cccggcucccccacccauucugcuccccuaga

SEQ ID NO: 152933 - RNA, 32 nt, Homo Sapiens
uauucaugagggggcgggccgagcggggcggc

SEQ ID NO: 152934 - RNA, 32 nt, Homo Sapiens
guggaaagaguuaagagcaagauggaaugauu

SEQ ID NO: 152935 - RNA, 32 nt, Homo Sapiens
caagacguuaauuuuucuuuuaacuguuuugg

SEQ ID NO: 152936 - RNA, 32 nt, Homo Sapiens
ccaguuuugaauuuaaacucaacuaagucugc

SEQ ID NO: 152937 - RNA, 32 nt, Homo Sapiens
ucucagacagaaucaucuccccugccccacaa

SEQ ID NO: 152938 - RNA, 32 nt, Homo Sapiens
uaaauuauugcuuaaugguaucauauuaacau

SEQ ID NO: 152939 - RNA, 32 nt, Homo Sapiens
ucaaaauguauuaugaccauugaaaguucucu

SEQ ID NO: 152940 - RNA, 32 nt, Homo Sapiens
cagcugcccgguggugcccccgacaccagagu

SEQ ID NO: 152941 - RNA, 32 nt, Homo Sapiens
aucaugguuuuuuguuguuuucguuuugaacu

SEQ ID NO: 152942 - RNA, 32 nt, Homo Sapiens
gcuggggucacuucgugaauucaccagagacu

SEQ ID NO: 152943 - RNA, 32 nt, Homo Sapiens
guggugcgaccucagcucacugcacccucugu

SEQ ID NO: 152944 - RNA, 32 nt, Homo Sapiens
gccugaacaaaacaggcuguuugcugugagga

SEQ ID NO: 152945 - RNA, 32 nt, Homo Sapiens
aaccgcuuucuuaucugacacuuuaagugcuu

SEQ ID NO: 152946 - RNA, 32 nt, Homo Sapiens
acaauguaaaauguaugacuugguguuuuaaa

SEQ ID NO: 152947 - RNA, 32 nt, Homo Sapiens
aaagagucccugcugggcaugcuaguggggcc

SEQ ID NO: 152948 - RNA, 32 nt, Homo Sapiens
auuuccaaacugguauuuuaaauagacacuuc

SEQ ID NO: 152949 - RNA, 31 nt, Homo Sapiens
aagugcaaauaaaaagucauuuaucauuugu

SEQ ID NO: 152950 - RNA, 32 nt, Homo Sapiens
aguuaccaugucugcaaguagggcgaacagga

SEQ ID NO: 152951 - RNA, 32 nt, Homo Sapiens
gagaaagaaaaaauaaaauauacuuggggaag

SEQ ID NO: 152952 - RNA, 32 nt, Homo Sapiens
aaauucuuaaaacauuggagaauagcuuguua

SEQ ID NO: 152953 - RNA, 32 nt, Homo Sapiens
gucuucagcaaccuugaaagauuggacaagcu

SEQ ID NO: 152954 - RNA, 32 nt, Homo Sapiens
auuccagagaacagccuugaccagagaugugg

SEQ ID NO: 152955 - RNA, 32 nt, Homo Sapiens
aagucucugaccaggcuuugguuucugcccac

SEQ ID NO: 152956 - RNA, 32 nt, Homo Sapiens
cacuuauguucccuguaugguuguccucuggc

SEQ ID NO: 152957 - RNA, 26 nt, Homo Sapiens
gcagucauuucuuuuugguuugcaaa

SEQ ID NO: 152958 - RNA, 32 nt, Homo Sapiens
uguaaauccuugccgccugcugaaacauggug

SEQ ID NO: 152959 - RNA, 32 nt, Homo Sapiens
acagggguauuugguauugagaaauagaccug

SEQ ID NO: 152960 - RNA, 32 nt, Homo Sapiens
aaaauggggguaggguggucuucuauucuaac

SEQ ID NO: 152961 - RNA, 32 nt, Homo Sapiens
caaagucccaugaacugagguguuaaaacaga

SEQ ID NO: 152962 - RNA, 32 nt, Homo Sapiens
uauuuuuaaaauuuaaaguauaauuaguuuuu

SEQ ID NO: 152963 - RNA, 32 nt, Homo Sapiens
caaaauaaguuaaaacgaaugaaaaugaccag

SEQ ID NO: 152964 - RNA, 32 nt, Homo Sapiens
caagacucaugugagacuucccucuggaugac

SEQ ID NO: 152965 - RNA, 32 nt, Homo Sapiens
aaccgcgccccccgcgcacggacccccauuac

SEQ ID NO: 152966 - RNA, 32 nt, Homo Sapiens
ugcuuugaaaagacaaaauugguaaaccucug

SEQ ID NO: 152967 - RNA, 32 nt, Homo Sapiens
gcacagccucaggggaggcccuggacagcgac

SEQ ID NO: 152968 - RNA, 32 nt, Homo Sapiens
aaaaguugcuuuuuuauucaauauguacugaa

SEQ ID NO: 152969 - RNA, 32 nt, Homo Sapiens
uacuccaucccauguuugguaugcaauuugag

SEQ ID NO: 152970 - RNA, 32 nt, Homo Sapiens
ccacugucaccaucuuggaauucuuagucauu

SEQ ID NO: 152971 - RNA, 32 nt, Homo Sapiens
ccuacuucgccuuuccuucuccggcugccaag

SEQ ID NO: 152972 - RNA, 32 nt, Homo Sapiens
aacccugaaaauuugaucacuggccagaguaa

SEQ ID NO: 152973 - RNA, 32 nt, Homo Sapiens
uccuagcaaguggcuauggccuuuuugcaaaa

SEQ ID NO: 152974 - RNA, 32 nt, Homo Sapiens
uaaagagaacacuuagcagccuaugauaguuu

SEQ ID NO: 152975 - RNA, 32 nt, Homo Sapiens
cccccaaccaccugcccuccccgccuucuugg

SEQ ID NO: 152976 - RNA, 32 nt, Homo Sapiens
aaagauaguuuauucugucaggguauaugaag

SEQ ID NO: 152977 - RNA, 32 nt, Homo Sapiens
auauuagagauuaccugggaccugacagugac

SEQ ID NO: 152978 - RNA, 32 nt, Homo Sapiens
ucaccauaccccugggcacccccugcaacuuc

SEQ ID NO: 152979 - RNA, 32 nt, Homo Sapiens
cucugcccagcuuuucauugcugugacaguga

SEQ ID NO: 152980 - RNA, 32 nt, Homo Sapiens
uuuuccgucaggugccaggucuuaguuaagau

SEQ ID NO: 152981 - RNA, 32 nt, Homo Sapiens
augaggcacugacugggagacuagaccugaaa

SEQ ID NO: 152982 - RNA, 32 nt, Homo Sapiens
agaaacauuucccagaaaauguuucccagaaa

SEQ ID NO: 152983 - RNA, 32 nt, Homo Sapiens
ccugagccgccagcucgccacaggggccaggg

SEQ ID NO: 152984 - RNA, 32 nt, Homo Sapiens
gaacuugaaagguugccuggacucgcuggagc

SEQ ID NO: 152985 - RNA, 32 nt, Homo Sapiens
gcuccugagcuugccuggauccagugcucugc

SEQ ID NO: 152986 - RNA, 32 nt, Homo Sapiens
uugacaccugccaaagcuuccagcacgggaaa

SEQ ID NO: 152987 - RNA, 32 nt, Homo Sapiens
cuuuagaauuggaaaagugagaccaggcacag

SEQ ID NO: 152988 - RNA, 32 nt, Homo Sapiens
aguuagaauauuuggaaccugcauuaguucca

SEQ ID NO: 152989 - RNA, 32 nt, Homo Sapiens
uggcucugcgacuuacuaucagcuguuugaga

SEQ ID NO: 152990 - RNA, 31 nt, Homo Sapiens
gaccauuuguggagaaagugcaaucugcauu

SEQ ID NO: 152991 - RNA, 32 nt, Homo Sapiens
gccaacccccaucagcggccaauggccucuag

SEQ ID NO: 152992 - RNA, 32 nt, Homo Sapiens
gacuccggggccuccccguccuccccuuuccc

SEQ ID NO: 152993 - RNA, 32 nt, Homo Sapiens
cucggagccccggcuuccccugcaccgggaaa

SEQ ID NO: 152994 - RNA, 31 nt, Homo Sapiens
aagguuucacaguaccacugaguuagauuuc

SEQ ID NO: 152995 - RNA, 32 nt, Homo Sapiens
auccucucccaucagccuuccaaauaucugag

SEQ ID NO: 152996 - RNA, 32 nt, Homo Sapiens
acugcagcacaggaaaaguaauucagauguua

SEQ ID NO: 152997 - RNA, 32 nt, Homo Sapiens
gaacuuuuugaaaauuuaauuuguggaccaau

SEQ ID NO: 152998 - RNA, 32 nt, Homo Sapiens
cagcccccauucucaauccacccuuuuccaag

SEQ ID NO: 152999 - RNA, 32 nt, Homo Sapiens
uacugcuuuuucugugggcauuaacuauauug

SEQ ID NO: 153000 - RNA, 32 nt, Homo Sapiens
uuuccaggcagaccugacagaaggugccuuug

SEQ ID NO: 153001 - RNA, 30 nt, Homo Sapiens
ggguggccgaggucggcggguccucggcga

SEQ ID NO: 153002 - RNA, 32 nt, Homo Sapiens
guguguuugcaccugucuuucauuugucauaa

SEQ ID NO: 153003 - RNA, 32 nt, Homo Sapiens
uggcucuccccacucaccucagcccucaggca

SEQ ID NO: 153004 - RNA, 32 nt, Homo Sapiens
aagggcaaaguuaaguagauagagacuuuauc

SEQ ID NO: 153005 - RNA, 32 nt, Homo Sapiens
cugucacugcugucaaacagaagguaaacagu

SEQ ID NO: 153006 - RNA, 32 nt, Homo Sapiens
uuggcgaggaguuuccuguuucccccgcagcg

SEQ ID NO: 153007 - RNA, 32 nt, Homo Sapiens
augcggggccccagcuccgggcgccggccgga

SEQ ID NO: 153008 - RNA, 32 nt, Homo Sapiens
augaugaucccaugguaggucuucucaccucg

SEQ ID NO: 153009 - RNA, 32 nt, Homo Sapiens
ugcaugcgccccugggguccgugguagggccc

SEQ ID NO: 153010 - RNA, 32 nt, Homo Sapiens
uagucccaacuaagauucagucaguauguuug

SEQ ID NO: 153011 - RNA, 32 nt, Homo Sapiens
gacucuccuugacaagggcugagcucucgggc

SEQ ID NO: 153012 - RNA, 32 nt, Homo Sapiens
agagcgagcgcccuuuagcggccugccaccac

SEQ ID NO: 153013 - RNA, 32 nt, Homo Sapiens
gggagccuguucguagggaagaugaggaggca

SEQ ID NO: 153014 - RNA, 32 nt, Homo Sapiens
aacucccacaacaaagaauuauccagcccaaa

SEQ ID NO: 153015 - RNA, 32 nt, Homo Sapiens
uugcauuuuuucuuuuuccccaauaaauuguu

SEQ ID NO: 153016 - RNA, 32 nt, Homo Sapiens
gugccgggaaagacaucacauaccuucagcac

SEQ ID NO: 153017 - RNA, 32 nt, Homo Sapiens
gagauaccuggaaaugaaagugccaagaaagg

SEQ ID NO: 153018 - RNA, 32 nt, Homo Sapiens
aguuuugguuucuuuugcgguuuucuaaccaa

SEQ ID NO: 153019 - RNA, 32 nt, Homo Sapiens
gaaaugagagagcaggggcaccccccuaggcc

SEQ ID NO: 153020 - RNA, 32 nt, Homo Sapiens
accacagcucacggccguccccaguugagucc

SEQ ID NO: 153021 - RNA, 32 nt, Homo Sapiens
cuuuuccagauuauugaugaaauauuuaagua

SEQ ID NO: 153022 - RNA, 32 nt, Homo Sapiens
ccaacagugggucccucaggccucgagcgcaa

SEQ ID NO: 153023 - RNA, 32 nt, Homo Sapiens
ccacacuuguuccagcucuuugaaauagucug

SEQ ID NO: 153024 - RNA, 32 nt, Homo Sapiens
ugccuauaaucccagcacuuugggaggccgag

SEQ ID NO: 153025 - RNA, 32 nt, Homo Sapiens
ugccuguaaucccagcacuuugggaggccaag

SEQ ID NO: 153026 - RNA, 32 nt, Homo Sapiens
uaccuguaaucccagcacuuugggaagccaag

SEQ ID NO: 153027 - RNA, 32 nt, Homo Sapiens
uccucaaccugggaauacuucagacaucucca

SEQ ID NO: 153028 - RNA, 32 nt, Homo Sapiens
cugcgcggcgggaagcggcggcggcggcucca

SEQ ID NO: 153029 - RNA, 32 nt, Homo Sapiens
auauauuuuuguauuaucucuuucuucuucuu

SEQ ID NO: 153030 - RNA, 32 nt, Homo Sapiens
ugucucgcuagugauguuuuuaugauaucccu

SEQ ID NO: 153031 - RNA, 32 nt, Homo Sapiens
caccuaaaaugagaaggaaguccuguuuucaa

SEQ ID NO: 153032 - RNA, 32 nt, Homo Sapiens
gaggcauuaacuauacugccaaugcauugaau

SEQ ID NO: 153033 - RNA, 32 nt, Homo Sapiens
acucucuguuguuuguaauauucucuuaaaag

SEQ ID NO: 153034 - RNA, 32 nt, Homo Sapiens
ugaaacaauguccuucauuugcuggcaagaag

SEQ ID NO: 153035 - RNA, 32 nt, Homo Sapiens
ucuguugguaggcaaugggaaggugcauucau

SEQ ID NO: 153036 - RNA, 32 nt, Homo Sapiens
guggccgggcucaacgcgcugcugcugcugcu

SEQ ID NO: 153037 - RNA, 30 nt, Homo Sapiens
gccacaggcgguggcggcgggaccauggag

SEQ ID NO: 153038 - RNA, 32 nt, Homo Sapiens
uuauuugauuuacuuucuuaauuuccauuucu

SEQ ID NO: 153039 - RNA, 32 nt, Homo Sapiens
ucaccacauuaggagcucuuucucucacucuu

SEQ ID NO: 153040 - RNA, 31 nt, Homo Sapiens
ccgagccugggaaccaccuggggcugagaga

SEQ ID NO: 153041 - RNA, 32 nt, Homo Sapiens
ccuaauccuagcugucuccucaucucauccua

SEQ ID NO: 153042 - RNA, 32 nt, Homo Sapiens
gaggggcuggugcccuggagaaaauaaagaga

SEQ ID NO: 153043 - RNA, 32 nt, Homo Sapiens
aucacuuuccuuuaaaauuuugagaucauugc

SEQ ID NO: 153044 - RNA, 32 nt, Homo Sapiens
aaagugccuguuccuguaaauuuuauuuuaaa

SEQ ID NO: 153045 - RNA, 32 nt, Homo Sapiens
uuggucugucaguucugccagcucugggccau

SEQ ID NO: 153046 - RNA, 32 nt, Homo Sapiens
ccuccggaagcagcccuacaacaaccugaagc

SEQ ID NO: 153047 - RNA, 32 nt, Homo Sapiens
ugggaaagacuacagacaauaggaaucuuuua

SEQ ID NO: 153048 - RNA, 32 nt, Homo Sapiens
cgauuacauuuuccucugaauuuuuuccuauc

SEQ ID NO: 153049 - RNA, 32 nt, Homo Sapiens
uuccuguguuuguaauuuaaugcugcuacaag

SEQ ID NO: 153050 - RNA, 32 nt, Homo Sapiens
gggagccagcaccagcaggauccgagggcgcc

SEQ ID NO: 153051 - RNA, 32 nt, Homo Sapiens
uucccaaaggagcagaacaaaaauaagaaaua

SEQ ID NO: 153052 - RNA, 32 nt, Homo Sapiens
aauuagccgggcguaguggcgggcgccuguag

SEQ ID NO: 153053 - RNA, 32 nt, Homo Sapiens
aauuagccgggcgugguggcgggcgccugugg

SEQ ID NO: 153054 - RNA, 32 nt, Homo Sapiens
auguuaucaaacaaaucaauucaccaauaaua

SEQ ID NO: 153055 - RNA, 32 nt, Homo Sapiens
ucuuccagcgcaaggggcugcccgaccaggag

SEQ ID NO: 153056 - RNA, 32 nt, Homo Sapiens
aucacagacgagcggccaccggaaucgcccaa

SEQ ID NO: 153057 - RNA, 32 nt, Homo Sapiens
agcagcgacgcgaggggcgcgcggagauggca

SEQ ID NO: 153058 - RNA, 32 nt, Homo Sapiens
ucugaguugcuguuuggucuggugaccucaga

SEQ ID NO: 153059 - RNA, 32 nt, Homo Sapiens
uguaaagaaagaugaguagacugguuuauccc

SEQ ID NO: 153060 - RNA, 32 nt, Homo Sapiens
cacccuguuguuauuaaggacucauuugcuug

SEQ ID NO: 153061 - RNA, 32 nt, Homo Sapiens
acuugagcuugugaauaggccuggacacugau

SEQ ID NO: 153062 - RNA, 32 nt, Homo Sapiens
acgcguucugaggguggcugcccgcuugggau

SEQ ID NO: 153063 - RNA, 32 nt, Homo Sapiens
cccuucggugugccggcagccuggcugaccgu

SEQ ID NO: 153064 - RNA, 32 nt, Homo Sapiens
cuguagugaacagaugcauuucuguggaauuc

SEQ ID NO: 153065 - RNA, 32 nt, Homo Sapiens
ggaaguccagaugcggguuaucuugaaagaaa

SEQ ID NO: 153066 - RNA, 32 nt, Homo Sapiens
aggagagagggaaacuauuuguagcuuguuuu

SEQ ID NO: 153067 - RNA, 31 nt, Homo Sapiens
uaugaaacaaauuggccgggugcgguggcuc

SEQ ID NO: 153068 - RNA, 32 nt, Homo Sapiens
cuggagagucaccagcagcucuugggaaggac

SEQ ID NO: 153069 - RNA, 32 nt, Homo Sapiens
accuagcauuuucaccaagaaguggacgugga

SEQ ID NO: 153070 - RNA, 32 nt, Homo Sapiens
ccggaaaggcuggcaggcaggggggcuggggc

SEQ ID NO: 153071 - RNA, 32 nt, Homo Sapiens
aaucuaauaugccaccaauuauaagauuuauu

SEQ ID NO: 153072 - RNA, 32 nt, Homo Sapiens
uauugcuggauuucaugaugcugacuggcguu

SEQ ID NO: 153073 - RNA, 32 nt, Homo Sapiens
guuuuugagaaacuguuccguuugucaucugu

SEQ ID NO: 153074 - RNA, 32 nt, Homo Sapiens
gacugcugcugauaauuuuguaauauaaguuu

SEQ ID NO: 153075 - RNA, 32 nt, Homo Sapiens
acaugauacccacugggaauuuuuugugucag

SEQ ID NO: 153076 - RNA, 29 nt, Homo Sapiens
uuuucuauugaacaauaccaucaauaaau

SEQ ID NO: 153077 - RNA, 32 nt, Homo Sapiens
acagugucucuuaaaggaugauacaauaauau

SEQ ID NO: 153078 - RNA, 29 nt, Homo Sapiens
auuguguggggacagaggccuggccugaa

SEQ ID NO: 153079 - RNA, 32 nt, Homo Sapiens
aaggcugcuggaugcugagauuccacauaaca

SEQ ID NO: 153080 - RNA, 32 nt, Homo Sapiens
cuccuugagccuaaaaaguaggcuuuauucau

SEQ ID NO: 153081 - RNA, 32 nt, Homo Sapiens
cagguuuggcuccagcagcugcuguugccacc

SEQ ID NO: 153082 - RNA, 32 nt, Homo Sapiens
cuggacacaacaccaaaaaggcuucuuauucg

SEQ ID NO: 153083 - RNA, 32 nt, Homo Sapiens
auaagaaggggagguuaggacacgcaggaaag

SEQ ID NO: 153084 - RNA, 32 nt, Homo Sapiens
augugugcaagcaguuuuuuuauuuugcuuuu

SEQ ID NO: 153085 - RNA, 32 nt, Homo Sapiens
gcgcccauaaauguucuuucugugguggagua

SEQ ID NO: 153086 - RNA, 32 nt, Homo Sapiens
ucauggcuccuugcugggccaagcccuccaga

SEQ ID NO: 153087 - RNA, 32 nt, Homo Sapiens
auguacgggaggauaaucgcaacaucaucaac

SEQ ID NO: 153088 - RNA, 32 nt, Homo Sapiens
accguccuccccaccccggggcgaugacagug

SEQ ID NO: 153089 - RNA, 32 nt, Homo Sapiens
ugcaccacagcaugcauaaauugcacauuuug

SEQ ID NO: 153090 - RNA, 32 nt, Homo Sapiens
ugugagauacuguguauauaaacuauauauaa

SEQ ID NO: 153091 - RNA, 32 nt, Homo Sapiens
ugcccugggucccagacuguguccuccaucac

SEQ ID NO: 153092 - RNA, 32 nt, Homo Sapiens
ugcaaccagaaaggagaauauguaugcgugaa

SEQ ID NO: 153093 - RNA, 32 nt, Homo Sapiens
gugacugaggggauggaauuauagauaggaga

SEQ ID NO: 153094 - RNA, 32 nt, Homo Sapiens
cuauagaaauucaaggaauguuagaaccagga

SEQ ID NO: 153095 - RNA, 32 nt, Homo Sapiens
agguggcuccuggaagacccucagccugccug

SEQ ID NO: 153096 - RNA, 32 nt, Homo Sapiens
gaauacuguuaaacagaaaauaauugcuuaua

SEQ ID NO: 153097 - RNA, 32 nt, Homo Sapiens
gugcugggggugguagaaaggaugcugcugag

SEQ ID NO: 153098 - RNA, 32 nt, Homo Sapiens
gaacuggagccacagagcuggugcugccgcug

SEQ ID NO: 153099 - RNA, 32 nt, Homo Sapiens
aauacuucuccucuuuccauuuucuacaaugc

SEQ ID NO: 153100 - RNA, 32 nt, Homo Sapiens
cucgcgucgccccgccccacccgccccugcuu

SEQ ID NO: 153101 - RNA, 32 nt, Homo Sapiens
acaucuccacuuuucucuguaccuguguguau

SEQ ID NO: 153102 - RNA, 32 nt, Homo Sapiens
aaaaucggcuuaccauuaaaguucucaaugca

SEQ ID NO: 153103 - RNA, 32 nt, Homo Sapiens
agcaaaggagucaggaauggcuuuuacucagu

SEQ ID NO: 153104 - RNA, 32 nt, Homo Sapiens
aggcccaggaggagagagagcugggcucagcu

SEQ ID NO: 153105 - RNA, 32 nt, Homo Sapiens
ugacgcggucggggcgcggggcuggucugugg

SEQ ID NO: 153106 - RNA, 28 nt, Homo Sapiens
ucagaugugagcaccaggauggcagggg

SEQ ID NO: 153107 - RNA, 32 nt, Homo Sapiens
uuaauaucuucaguguuuuuucccuuuuuaug

SEQ ID NO: 153108 - RNA, 32 nt, Homo Sapiens
ucccagaguccuccccacaguuccuaagggcc

SEQ ID NO: 153109 - RNA, 31 nt, Homo Sapiens
ccggccccgcuuccccugcccccgugugauu

SEQ ID NO: 153110 - RNA, 32 nt, Homo Sapiens
cuggcuucucuccucagacuucuauuuuuuaa

SEQ ID NO: 153111 - RNA, 32 nt, Homo Sapiens
gggccagugggcucagcccagguaggggcagg

SEQ ID NO: 153112 - RNA, 32 nt, Homo Sapiens
ucaagggggaugcuguggaaaccuggcuuauu

SEQ ID NO: 153113 - RNA, 32 nt, Homo Sapiens
gccgucccggaggccgcgcgcguguccgcuag

SEQ ID NO: 153114 - RNA, 32 nt, Homo Sapiens
accucuugucuccacuaugcagaugggaacuc

SEQ ID NO: 153115 - RNA, 32 nt, Homo Sapiens
augaaaaacuggaaacgaaaaguuauccucuu

SEQ ID NO: 153116 - RNA, 32 nt, Homo Sapiens
ucuccaaagaugcugcucccaagggcugccaa

SEQ ID NO: 153117 - RNA, 32 nt, Homo Sapiens
uuuaguguaugauaaaaguuguguugguucgu

SEQ ID NO: 153118 - RNA, 32 nt, Homo Sapiens
auagaagguuugggggcuguggggaaggagag

SEQ ID NO: 153119 - RNA, 32 nt, Homo Sapiens
ccuaaggccucucugccgcgcgcgcagagcca

SEQ ID NO: 153120 - RNA, 32 nt, Homo Sapiens
gugucgugaauguuucuucaguuucuuguuca

SEQ ID NO: 153121 - RNA, 32 nt, Homo Sapiens
ugugcaaaacaaauuccacaccacauguacug

SEQ ID NO: 153122 - RNA, 32 nt, Homo Sapiens
ucuaacacaaaauaaguguuuuauguuuggaa

SEQ ID NO: 153123 - RNA, 32 nt, Homo Sapiens
aaacauguuaauccuuguaucauacuuuaaua

SEQ ID NO: 153124 - RNA, 32 nt, Homo Sapiens
cuugaauuuaccaugauauuauuuaucacaga

SEQ ID NO: 153125 - RNA, 32 nt, Homo Sapiens
cagaacucuccacuuccccaacccuccccagg

SEQ ID NO: 153126 - RNA, 32 nt, Homo Sapiens
ccacucccccugccugcccccagcaucuggac

SEQ ID NO: 153127 - RNA, 32 nt, Homo Sapiens
gcccuaaacuccaugauuucauaggcuuuucu

SEQ ID NO: 153128 - RNA, 32 nt, Homo Sapiens
uucccagccucgcuccucuuuccuucuguccg

SEQ ID NO: 153129 - RNA, 32 nt, Homo Sapiens
gcgggcaaacgcgccaaggguucggcagaggg

SEQ ID NO: 153130 - RNA, 32 nt, Homo Sapiens
acuuaagaacuaaccgucucaucauucauggc

SEQ ID NO: 153131 - RNA, 32 nt, Homo Sapiens
cugaaaacuaaaaugaacaugcuauucuguca

SEQ ID NO: 153132 - RNA, 32 nt, Homo Sapiens
uaguaccuaccuuaguuuauuuugcaacuuac

SEQ ID NO: 153133 - RNA, 32 nt, Homo Sapiens
cgagcugagaauaucuaacauguuguuacuaa

SEQ ID NO: 153134 - RNA, 32 nt, Homo Sapiens
ugcauguccuaaauuuugaauuuagauauucc

SEQ ID NO: 153135 - RNA, 32 nt, Homo Sapiens
ccacccccucccagcccccuccccucugcuca

SEQ ID NO: 153136 - RNA, 32 nt, Homo Sapiens
aaucagcagaucuggugucuggggagacgggg

SEQ ID NO: 153137 - RNA, 32 nt, Homo Sapiens
ccaagccaaggacgaggucaucaucaagcuca

SEQ ID NO: 153138 - RNA, 32 nt, Homo Sapiens
acaaugccagcaugcagcggguucauggacag

SEQ ID NO: 153139 - RNA, 32 nt, Homo Sapiens
gacgcagcccggcuccuccccuccuccgcccc

SEQ ID NO: 153140 - RNA, 32 nt, Homo Sapiens
cacugggacacaaguucagagaagggcagagc

SEQ ID NO: 153141 - RNA, 32 nt, Homo Sapiens
ccugccuaucacgguccggaggacaccuugga

SEQ ID NO: 153142 - RNA, 32 nt, Homo Sapiens
ggauccggguaccaugggcggcggcaggccua

SEQ ID NO: 153143 - RNA, 32 nt, Homo Sapiens
agcauuuuuaaaaaauacaauaaauuuguaga

SEQ ID NO: 153144 - RNA, 32 nt, Homo Sapiens
ugcuaugggagacguguaaacacacuacuuau

SEQ ID NO: 153145 - RNA, 32 nt, Homo Sapiens
acagauacgauuaugauuucccauggaaauug

SEQ ID NO: 153146 - RNA, 32 nt, Homo Sapiens
uauuuucaaagcuuaaauuuguauauuaauuu

SEQ ID NO: 153147 - RNA, 32 nt, Homo Sapiens
cccucccuuuccuccgccuguccacagccccu

SEQ ID NO: 153148 - RNA, 32 nt, Homo Sapiens
aucggcuguggucgcugaggguugccuggagu

SEQ ID NO: 153149 - RNA, 32 nt, Homo Sapiens
ucuagccucauccccaggacccccuuggcuca

SEQ ID NO: 153150 - RNA, 32 nt, Homo Sapiens
cuaagaaauauguuuacauugagauaguuaau

SEQ ID NO: 153151 - RNA, 32 nt, Homo Sapiens
ccuggccugccagggaugggccccguggaacc

SEQ ID NO: 153152 - RNA, 32 nt, Homo Sapiens
gagaacccugacuuagccaaggugaugaaccu

SEQ ID NO: 153153 - RNA, 32 nt, Homo Sapiens
ugcugcugcugcugcugcugcuucucgaacug

SEQ ID NO: 153154 - RNA, 32 nt, Homo Sapiens
cccaccugguuuuugucaaggucuagacuccc

SEQ ID NO: 153155 - RNA, 32 nt, Homo Sapiens
aaacgucguuucccucucggaccucgggcgcc

SEQ ID NO: 153156 - RNA, 32 nt, Homo Sapiens
ggcuucuggcuggcagauggcuggcgguuccu

SEQ ID NO: 153157 - RNA, 32 nt, Homo Sapiens
ugaugucuuguccaaugcugguuuccaccuug

SEQ ID NO: 153158 - RNA, 32 nt, Homo Sapiens
auuagccaaaauaaagaauuuaugagucauua

SEQ ID NO: 153159 - RNA, 32 nt, Homo Sapiens
uuuacccuuuggccccacuuugaagggcaaga

SEQ ID NO: 153160 - RNA, 32 nt, Homo Sapiens
uauuucugaaaauaaauuuauuuuguugaaga

SEQ ID NO: 153161 - RNA, 32 nt, Homo Sapiens
cuggagacuuugucccuaccucauaaauccca

SEQ ID NO: 153162 - RNA, 32 nt, Homo Sapiens
gaauggcggugcccccugccccggggccuccc

SEQ ID NO: 153163 - RNA, 32 nt, Homo Sapiens
uuaccucaaaaauggaagauuuuaacauggag

SEQ ID NO: 153164 - RNA, 32 nt, Homo Sapiens
auccccaauuuucuucuguagggcgccaggag

SEQ ID NO: 153165 - RNA, 32 nt, Homo Sapiens
uugcaacuuaggauguuuuugagucccauggu

SEQ ID NO: 153166 - RNA, 32 nt, Homo Sapiens
aaaaccgccggcgaagaucuggagcgguaagg

SEQ ID NO: 153167 - RNA, 32 nt, Homo Sapiens
uuaggcacccagacauaauuuauggacgaaau

SEQ ID NO: 153168 - RNA, 32 nt, Homo Sapiens
augucuacguauuucauucccuguuccugccc

SEQ ID NO: 153169 - RNA, 32 nt, Homo Sapiens
ccccaaacccacccucgaucccacggccagga

SEQ ID NO: 153170 - RNA, 32 nt, Homo Sapiens
agguuuuuaaauauuucuuucucuaacccauc

SEQ ID NO: 153171 - RNA, 32 nt, Homo Sapiens
aguggguuaguagaaucucauaacauguauua

SEQ ID NO: 153172 - RNA, 32 nt, Homo Sapiens
gggccgccucuguggaacccaggcaucaccaa

SEQ ID NO: 153173 - RNA, 32 nt, Homo Sapiens
uggccugaccugggccucucccugccccucca

SEQ ID NO: 153174 - RNA, 30 nt, Homo Sapiens
ccggguggcaggcgcccgggggaaucccag

SEQ ID NO: 153175 - RNA, 32 nt, Homo Sapiens
cgcgggcucgcgcuucgguuuccccagaccug

SEQ ID NO: 153176 - RNA, 32 nt, Homo Sapiens
accagagguugaccacuguggaauguacugga

SEQ ID NO: 153177 - RNA, 32 nt, Homo Sapiens
ggugucguacacugugaaauguuccagguuau

SEQ ID NO: 153178 - RNA, 32 nt, Homo Sapiens
guguuugacgggaaacaaaacuagguaaaauc

SEQ ID NO: 153179 - RNA, 32 nt, Homo Sapiens
aaucauccaggguguucaucugcacagauggg

SEQ ID NO: 153180 - RNA, 31 nt, Homo Sapiens
ugcgguaccagguccgcgugagggguucggg

SEQ ID NO: 153181 - RNA, 32 nt, Homo Sapiens
cggggcacguuccagggcgcgcggggcaugaa

SEQ ID NO: 153182 - RNA, 32 nt, Homo Sapiens
uggagugcaccuguaaucccagcuacucugga

SEQ ID NO: 153183 - RNA, 32 nt, Homo Sapiens
gccuuucaucuucauucaucuugaguagacau

SEQ ID NO: 153184 - RNA, 32 nt, Homo Sapiens
auagcccgacccucagcccuguugaaggagau

SEQ ID NO: 153185 - RNA, 32 nt, Homo Sapiens
gcugcuuguuauuugcaugcauucuuguaauu

SEQ ID NO: 153186 - RNA, 32 nt, Homo Sapiens
ggugucaugaauagaaacuuccaaauguaacc

SEQ ID NO: 153187 - RNA, 32 nt, Homo Sapiens
gagaccuggggggaaauugagggagggucugg

SEQ ID NO: 153188 - RNA, 32 nt, Homo Sapiens
cuggcuggccauuuacuuccagcccuuaugag

SEQ ID NO: 153189 - RNA, 32 nt, Homo Sapiens
uugacagccgacggcagcgccuugcccagacc

SEQ ID NO: 153190 - RNA, 31 nt, Homo Sapiens
aucucuguuuucacucucaggcucugguaag

SEQ ID NO: 153191 - RNA, 32 nt, Homo Sapiens
ggaaggagccagaaaugccaucuucacccaga

SEQ ID NO: 153192 - RNA, 32 nt, Homo Sapiens
gacgacagcagcagcagcgcgucuccuucagg

SEQ ID NO: 153193 - RNA, 32 nt, Homo Sapiens
gugggccgcgggaccacccaccccgccagaaa

SEQ ID NO: 153194 - RNA, 31 nt, Homo Sapiens
aguucaucuucgacuuugccuguggauuaau

SEQ ID NO: 153195 - RNA, 32 nt, Homo Sapiens
aacaaauuuagaaacugggaucaugaguggaa

SEQ ID NO: 153196 - RNA, 32 nt, Homo Sapiens
auugcuuuuuauucucauuacuucucuuucag

SEQ ID NO: 153197 - RNA, 32 nt, Homo Sapiens
gugaucacuccagugcacucgagccuggguga

SEQ ID NO: 153198 - RNA, 32 nt, Homo Sapiens
cucuccuuucuuagucacaacaaaaucacaca

SEQ ID NO: 153199 - RNA, 32 nt, Homo Sapiens
uccagacccgccaccagccguacaccacucag

SEQ ID NO: 153200 - RNA, 32 nt, Homo Sapiens
gauaauuuuuaaagcuguuuaauuuugguaaa

SEQ ID NO: 153201 - RNA, 32 nt, Homo Sapiens
gaggugcugucucuaaaaaacaacaacaaaac

SEQ ID NO: 153202 - RNA, 32 nt, Homo Sapiens
gcagccaggaggaacagcugggccaugcggga

SEQ ID NO: 153203 - RNA, 32 nt, Homo Sapiens
agucuaagaggauacacagaaauuuuuaagug

SEQ ID NO: 153204 - RNA, 32 nt, Homo Sapiens
uugcuuuauagcauuuucuuuuacucaaauaa

SEQ ID NO: 153205 - RNA, 32 nt, Homo Sapiens
agaucgaucuuuaugcuguuauuacaggagaa

SEQ ID NO: 153206 - RNA, 29 nt, Homo Sapiens
ccuggguggccuuuccugcugacacucca

SEQ ID NO: 153207 - RNA, 32 nt, Homo Sapiens
agauggugguggcaauagucaggagaagguaa

SEQ ID NO: 153208 - RNA, 32 nt, Homo Sapiens
gugugaagucuuuauuuuaauguaauaaucuc

SEQ ID NO: 153209 - RNA, 32 nt, Homo Sapiens
aauaguguugauguagucagugccguugccuu

SEQ ID NO: 153210 - RNA, 30 nt, Homo Sapiens
ggaagaugaugaugaugucccugaacagca

SEQ ID NO: 153211 - RNA, 32 nt, Homo Sapiens
gccagccacuguuguucuuggugcuggggaca

SEQ ID NO: 153212 - RNA, 32 nt, Homo Sapiens
uaauuaaaaccagcuucauuuguugcuccgag

SEQ ID NO: 153213 - RNA, 32 nt, Homo Sapiens
caaagucugaaauaacuuuaaaaaauuaaaug

SEQ ID NO: 153214 - RNA, 32 nt, Homo Sapiens
uuacacagacugcacaccgccuggggaauaau

SEQ ID NO: 153215 - RNA, 32 nt, Homo Sapiens
caauacugagccauuuauaccuuugaaauauu

SEQ ID NO: 153216 - RNA, 32 nt, Homo Sapiens
gggacuacaggaagggcagagaauacugacgg

SEQ ID NO: 153217 - RNA, 32 nt, Homo Sapiens
agcuucccaagccgcgcgacuccaugcugggg

SEQ ID NO: 153218 - RNA, 32 nt, Homo Sapiens
acuauaucaagauaugguucaaauaggacuac

SEQ ID NO: 153219 - RNA, 32 nt, Homo Sapiens
ccuguccugcuugccgccccagcgccugcgac

SEQ ID NO: 153220 - RNA, 32 nt, Homo Sapiens
cagucccccguccggccagccgccccguccgg

SEQ ID NO: 153221 - RNA, 32 nt, Homo Sapiens
guagagcuguucgccggggcgccugcagagcc

SEQ ID NO: 153222 - RNA, 32 nt, Homo Sapiens
cuccauuuaaacagcacuggcuaaaacuaaac

SEQ ID NO: 153223 - RNA, 32 nt, Homo Sapiens
uucuuaaaaaaguucucaaagguaguuauauu

SEQ ID NO: 153224 - RNA, 32 nt, Homo Sapiens
cagccccugcaggacccuccccugcuccaugu

SEQ ID NO: 153225 - RNA, 32 nt, Homo Sapiens
cucugucggaagccuccgccgcaguaaggcuc

SEQ ID NO: 153226 - RNA, 32 nt, Homo Sapiens
ccuuuccgagucaaugguggguuacacugauc

SEQ ID NO: 153227 - RNA, 32 nt, Homo Sapiens
ucccaacuguggugguauauguguacacacau

SEQ ID NO: 153228 - RNA, 32 nt, Homo Sapiens
cuuucuuguuaaaauaaaaggugucacugugg

SEQ ID NO: 153229 - RNA, 31 nt, Homo Sapiens
cugacccacucaagaaagucaauugcaggcu

SEQ ID NO: 153230 - RNA, 32 nt, Homo Sapiens
ccgccccccucgcuaggcgcucgccacgccca

SEQ ID NO: 153231 - RNA, 32 nt, Homo Sapiens
ccccagaaacuuagugaguccuggacuggacu

SEQ ID NO: 153232 - RNA, 32 nt, Homo Sapiens
auggauccuaucuggaggacuggccagcaugg

SEQ ID NO: 153233 - RNA, 32 nt, Homo Sapiens
cuucaccucugccgacccggcgcgcucggcug

SEQ ID NO: 153234 - RNA, 32 nt, Homo Sapiens
gucucaggugugcccugaaaccccagggcuug

SEQ ID NO: 153235 - RNA, 32 nt, Homo Sapiens
auucagugccaaugcaucaacaaaaaagacaa

SEQ ID NO: 153236 - RNA, 32 nt, Homo Sapiens
uuagcacagaguaagaucucaaugcacauuug

SEQ ID NO: 153237 - RNA, 27 nt, Homo Sapiens
auggagaccuucuucuaccgccccugu

SEQ ID NO: 153238 - RNA, 32 nt, Homo Sapiens
ucuuucuccaugaggcucguggccagaacuug

SEQ ID NO: 153239 - RNA, 32 nt, Homo Sapiens
cccaggcccgcacccgcccagucccgagggcc

SEQ ID NO: 153240 - RNA, 32 nt, Homo Sapiens
cguguuuugcauguauuucucauuucauuuua

SEQ ID NO: 153241 - RNA, 32 nt, Homo Sapiens
ucggggugggaccccuguggcucccugcagcg

SEQ ID NO: 153242 - RNA, 32 nt, Homo Sapiens
uaguggagcuuuccucucuaagcucacccagc

SEQ ID NO: 153243 - RNA, 32 nt, Homo Sapiens
aaagaacgcugcagcuuuuuuaugucacucaa

SEQ ID NO: 153244 - RNA, 32 nt, Homo Sapiens
cuggcuuccuuccugccccacccucccgaccc

SEQ ID NO: 153245 - RNA, 32 nt, Homo Sapiens
uccucuccagcuuucccuccccagaguucuug

SEQ ID NO: 153246 - RNA, 32 nt, Homo Sapiens
cacgggaggagaaguugacuuugugaccccua

SEQ ID NO: 153247 - RNA, 32 nt, Homo Sapiens
ugcucugucacccaagcuggaauacaguggca

SEQ ID NO: 153248 - RNA, 32 nt, Homo Sapiens
cucagccgcucccuugggcuguggcagcagga

SEQ ID NO: 153249 - RNA, 32 nt, Homo Sapiens
ucuggcuucgaacauagcacaaguaacuugaa

SEQ ID NO: 153250 - RNA, 32 nt, Homo Sapiens
cccggcucacauucgucagugacuccaacccu

SEQ ID NO: 153251 - RNA, 32 nt, Homo Sapiens
ugcaaaguacuguaagaauaauuuauaguaau

SEQ ID NO: 153252 - RNA, 32 nt, Homo Sapiens
auuuuuucuuuugcuguuuuugaaguggugug

SEQ ID NO: 153253 - RNA, 32 nt, Homo Sapiens
aaucuuuuaaauuuuuuguagaggcagagguc

SEQ ID NO: 153254 - RNA, 32 nt, Homo Sapiens
gggauucugugaagaaagaaaaguggagugcu

SEQ ID NO: 153255 - RNA, 32 nt, Homo Sapiens
cauuaaaugaagcucacuaaaugaaguucuca

SEQ ID NO: 153256 - RNA, 32 nt, Homo Sapiens
aggaaccccggaggcauggcggguaugauguc

SEQ ID NO: 153257 - RNA, 32 nt, Homo Sapiens
gaaggacauggggcaaauguuuuuacugucaa

SEQ ID NO: 153258 - RNA, 32 nt, Homo Sapiens
uacauuuucuuuaucgagucuaucauugaugg

SEQ ID NO: 153259 - RNA, 32 nt, Homo Sapiens
ggccccaggaggaggaggaaacccuuccgaga

SEQ ID NO: 153260 - RNA, 32 nt, Homo Sapiens
gccccuuagugucuggaauguggccuuccacg

SEQ ID NO: 153261 - RNA, 32 nt, Homo Sapiens
uggagcugggcuccagggugcacggggauggg

SEQ ID NO: 153262 - RNA, 32 nt, Homo Sapiens
gggauaucuacuguggucugggcaccaccucu

SEQ ID NO: 153263 - RNA, 32 nt, Homo Sapiens
aaaugguauuauuggaaugaaacuauauuucc

SEQ ID NO: 153264 - RNA, 32 nt, Homo Sapiens
ugugagaggaucauaaugagguccugaauauu

SEQ ID NO: 153265 - RNA, 31 nt, Homo Sapiens
caagugcaauuuuuuaaagugcugucuuacu

SEQ ID NO: 153266 - RNA, 32 nt, Homo Sapiens
aauaaugguguaaagaaaauaguuucuugggu

SEQ ID NO: 153267 - RNA, 32 nt, Homo Sapiens
ggaaaacauggaauuucuuuuaggugcagugg

SEQ ID NO: 153268 - RNA, 32 nt, Homo Sapiens
gcaauguuguauuugcaggcuuuucugaauac

SEQ ID NO: 153269 - RNA, 32 nt, Homo Sapiens
auagaauuagagaauaaacuuuuuaauggggg

SEQ ID NO: 153270 - RNA, 32 nt, Homo Sapiens
gacucgguaagccccggccgcgcagggcgccg

SEQ ID NO: 153271 - RNA, 31 nt, Homo Sapiens
gaaaucauguccuugaaagugcuguugauaa

SEQ ID NO: 153272 - RNA, 31 nt, Homo Sapiens
ucccgagauggugucacagugcuguggaagg

SEQ ID NO: 153273 - RNA, 32 nt, Homo Sapiens
agcauuuguguuuguuugucuauuuguaaagc

SEQ ID NO: 153274 - RNA, 32 nt, Homo Sapiens
uuguuggaaccaugugcugaaguuccugugcu

SEQ ID NO: 153275 - RNA, 32 nt, Homo Sapiens
gagccuggugggaggcagcuggaucgugaggu

SEQ ID NO: 153276 - RNA, 32 nt, Homo Sapiens
uguaauagaagcuuuucuuauucuuuuauucu

SEQ ID NO: 153277 - RNA, 32 nt, Homo Sapiens
uguguaggaaaugugcauagaguuuguauuuu

SEQ ID NO: 153278 - RNA, 32 nt, Homo Sapiens
cccauacuacagagacucucccuauagcuuuc

SEQ ID NO: 153279 - RNA, 32 nt, Homo Sapiens
caaagccuauagugggggccgcagcaguucca

SEQ ID NO: 153280 - RNA, 32 nt, Homo Sapiens
auagucaauauuugguauuucaauaaaaguaa

SEQ ID NO: 153281 - RNA, 32 nt, Homo Sapiens
gccccagaagagccacaggaacaucauuccuc

SEQ ID NO: 153282 - RNA, 32 nt, Homo Sapiens
agacaaggaaacugaggcucagggaagccaag

SEQ ID NO: 153283 - RNA, 32 nt, Homo Sapiens
aacugaaauaugacuauaauucuuaugggacc

SEQ ID NO: 153284 - RNA, 32 nt, Homo Sapiens
ugacuggcagcucauuuuugguaugagcaacu

SEQ ID NO: 153285 - RNA, 32 nt, Homo Sapiens
ccuuguuuacuuuucagagcugacagauugcu

SEQ ID NO: 153286 - RNA, 32 nt, Homo Sapiens
gaauuauuuaccauuaaauuauaugguguggu

SEQ ID NO: 153287 - RNA, 32 nt, Homo Sapiens
caugauggacaaaggccuggcgucggccagag

SEQ ID NO: 153288 - RNA, 27 nt, Homo Sapiens
agaacugccuucuucauuuccacccac

SEQ ID NO: 153289 - RNA, 32 nt, Homo Sapiens
guggauagaucagacuccauacacccgaggag

SEQ ID NO: 153290 - RNA, 32 nt, Homo Sapiens
uaauguguuuaaaauaugauaaucccacuuua

SEQ ID NO: 153291 - RNA, 32 nt, Homo Sapiens
ggagaaccaagccccauggccucagaauuucc

SEQ ID NO: 153292 - RNA, 32 nt, Homo Sapiens
agauugcagucagcagaaaaacuaauguacau

SEQ ID NO: 153293 - RNA, 32 nt, Homo Sapiens
cuggauguuaagaugguguggagcuguggcaa

SEQ ID NO: 153294 - RNA, 32 nt, Homo Sapiens
ugcucccagaauaaaaucauagaguuggaaaa

SEQ ID NO: 153295 - RNA, 32 nt, Homo Sapiens
cagucauaagccaggaaaugaaacaaaggaaa

SEQ ID NO: 153296 - RNA, 32 nt, Homo Sapiens
guaaaguguggcccauuuucuaacauuuuuau

SEQ ID NO: 153297 - RNA, 29 nt, Homo Sapiens
acgggugagggacagaggcaucuggauga

SEQ ID NO: 153298 - RNA, 32 nt, Homo Sapiens
caugaugagccauaauuagaaguaaaaccacc

SEQ ID NO: 153299 - RNA, 32 nt, Homo Sapiens
agauacagggguacauuugcauguuuguuaua

SEQ ID NO: 153300 - RNA, 32 nt, Homo Sapiens
augaugcuaugguuugccauuauuuaauauau

SEQ ID NO: 153301 - RNA, 32 nt, Homo Sapiens
ucauuuauaguccaauuuuuuaucuuaaucau

SEQ ID NO: 153302 - RNA, 32 nt, Homo Sapiens
aggcagccugagagcuggcccagggguccccu

SEQ ID NO: 153303 - RNA, 32 nt, Homo Sapiens
uagacuucaaagccaguauuuguuuaggucau

SEQ ID NO: 153304 - RNA, 32 nt, Homo Sapiens
aauagccuggaaaacuuuuguguauucucagc

SEQ ID NO: 153305 - RNA, 32 nt, Homo Sapiens
ggcuggucucuaaccccugagcuccggugauu

SEQ ID NO: 153306 - RNA, 32 nt, Homo Sapiens
guugcuacuggggcagggagccagguacagag

SEQ ID NO: 153307 - RNA, 32 nt, Homo Sapiens
gcccacuuuccacucagcagagcuaugucuaa

SEQ ID NO: 153308 - RNA, 32 nt, Homo Sapiens
cugauucuuucugcuucuaagacuuugccaaa

SEQ ID NO: 153309 - RNA, 32 nt, Homo Sapiens
acaacaaacaugcugaucccauuuucaaugaa

SEQ ID NO: 153310 - RNA, 32 nt, Homo Sapiens
ucucauaacaaaaggaaaaaacauuggaauuu

SEQ ID NO: 153311 - RNA, 32 nt, Homo Sapiens
cugagcaggaggaagaggaggaggcccguugg

SEQ ID NO: 153312 - RNA, 32 nt, Homo Sapiens
aaacacuuaugagugccuggaguaugccgucc

SEQ ID NO: 153313 - RNA, 32 nt, Homo Sapiens
aaauauucaggaaacaaaaaucacucaaacgg

SEQ ID NO: 153314 - RNA, 32 nt, Homo Sapiens
ugugagguuuaccugauucucuaaugaaauaa

SEQ ID NO: 153315 - RNA, 32 nt, Homo Sapiens
aaaacucauaauguaauuuauauaagaaaagg

SEQ ID NO: 153316 - RNA, 32 nt, Homo Sapiens
gaaacggcucugccucccaugugaucugacca

SEQ ID NO: 153317 - RNA, 32 nt, Homo Sapiens
uuuaguuuuucuugugauacauuuuguuaacc

SEQ ID NO: 153318 - RNA, 32 nt, Homo Sapiens
augccccccucccccaggcagcuccaagaaag

SEQ ID NO: 153319 - RNA, 32 nt, Homo Sapiens
ugucuguucagccaggacaacaaauggcuucc

SEQ ID NO: 153320 - RNA, 32 nt, Homo Sapiens
accuccauuucccaaaguccucugcuccagca

SEQ ID NO: 153321 - RNA, 32 nt, Homo Sapiens
ccccccacucccucaccuaccuccuuagcauu

SEQ ID NO: 153322 - RNA, 32 nt, Homo Sapiens
aauaucaaaaauuuguguuauuucagcaguaa

SEQ ID NO: 153323 - RNA, 32 nt, Homo Sapiens
ggauccuuccuguguccccaccgucuuucauu

SEQ ID NO: 153324 - RNA, 32 nt, Homo Sapiens
gcuaccaugcuucucacucuccugcaucugca

SEQ ID NO: 153325 - RNA, 32 nt, Homo Sapiens
ccuuugcggucaugucugugucugaugagugu

SEQ ID NO: 153326 - RNA, 32 nt, Homo Sapiens
auauugguuuguguuaaaugcuguacuuacua

SEQ ID NO: 153327 - RNA, 32 nt, Homo Sapiens
gguucugacuucuuccuccccuugcuuccagg

SEQ ID NO: 153328 - RNA, 32 nt, Homo Sapiens
aaugucuuuaucauuggaucuuuugcaugcuu

SEQ ID NO: 153329 - RNA, 32 nt, Homo Sapiens
auugauuuuuaaaguguauuuuucguauucug

SEQ ID NO: 153330 - RNA, 32 nt, Homo Sapiens
caauuuuauguaaagcacuuagcagagacuuu

SEQ ID NO: 153331 - RNA, 32 nt, Homo Sapiens
ucagcugaauucucauggugaaaacaggggaa

SEQ ID NO: 153332 - RNA, 32 nt, Homo Sapiens
guuccagguccucccgcgccaguguucgcagu

SEQ ID NO: 153333 - RNA, 32 nt, Homo Sapiens
ugcugugugcggagcugcgaggaggcaguggg

SEQ ID NO: 153334 - RNA, 32 nt, Homo Sapiens
uuccugaccccuccuucucccucuccuggguc

SEQ ID NO: 153335 - RNA, 32 nt, Homo Sapiens
ggcccuuccucgccuggcagccccugagcggc

SEQ ID NO: 153336 - RNA, 32 nt, Homo Sapiens
uauuaacccgaacguucggcccggggcuggga

SEQ ID NO: 153337 - RNA, 32 nt, Homo Sapiens
auggguuauagcaccuuguuuuccagcuaguc

SEQ ID NO: 153338 - RNA, 32 nt, Homo Sapiens
uggacucagacaccuuuugcccuccccacagg

SEQ ID NO: 153339 - RNA, 32 nt, Homo Sapiens
cuuuuggugauuaugcacagguaaauaauucc

SEQ ID NO: 153340 - RNA, 32 nt, Homo Sapiens
caaagccccccuccccauacaccccaggccug

SEQ ID NO: 153341 - RNA, 32 nt, Homo Sapiens
ccuggcuggggcucugaccacaaacuccccuc

SEQ ID NO: 153342 - RNA, 32 nt, Homo Sapiens
cggaugcuucuccaugagacacaucuccucca

SEQ ID NO: 153343 - RNA, 32 nt, Homo Sapiens
gucccgaggagcuacaggcaugacgcugccuu

SEQ ID NO: 153344 - RNA, 32 nt, Homo Sapiens
ucugaccgugguuuccuggacucuucaugggc

SEQ ID NO: 153345 - RNA, 32 nt, Homo Sapiens
aauuuuuuccuccuuuugguuuuauuuuguug

SEQ ID NO: 153346 - RNA, 32 nt, Homo Sapiens
gggguguuucugauguuauuccagccuccugc

SEQ ID NO: 153347 - RNA, 32 nt, Homo Sapiens
ggcgucgggaugcagcgccccgggcccuucag

SEQ ID NO: 153348 - RNA, 32 nt, Homo Sapiens
uccgucucaaaauaaauaaauaauaaaggaag

SEQ ID NO: 153349 - RNA, 32 nt, Homo Sapiens
ccauccgugaaccccaggucccgggccgccgg

SEQ ID NO: 153350 - RNA, 32 nt, Homo Sapiens
cuuuucaaccaccaacaacuguucguacuguu

SEQ ID NO: 153351 - RNA, 32 nt, Homo Sapiens
aacacuugcacuuuaauuuuccuccaacuguc

SEQ ID NO: 153352 - RNA, 32 nt, Homo Sapiens
accuugccuccucuucccgucccaggcaccaa

SEQ ID NO: 153353 - RNA, 30 nt, Homo Sapiens
ccuggccaggacggagccugcaggccuggg

SEQ ID NO: 153354 - RNA, 32 nt, Homo Sapiens
aucccccagcccagcccagcccagccccaccg

SEQ ID NO: 153355 - RNA, 32 nt, Homo Sapiens
ggagaggcaggaagaggggccugagggcggaa

SEQ ID NO: 153356 - RNA, 32 nt, Homo Sapiens
uuuugagggcagaauuuccaucucugauuccc

SEQ ID NO: 153357 - RNA, 32 nt, Homo Sapiens
aucagaugccuaaggaacaauuaaacugauuu

SEQ ID NO: 153358 - RNA, 32 nt, Homo Sapiens
cuagcugacuauaaaaacaaaagugucaucau

SEQ ID NO: 153359 - RNA, 32 nt, Homo Sapiens
uuggcuuaaagcuguuucuguauguaacaacu

SEQ ID NO: 153360 - RNA, 32 nt, Homo Sapiens
ucugagaaaggucugaaauccagcaucuauac

SEQ ID NO: 153361 - RNA, 32 nt, Homo Sapiens
gcuucucucgcacccccagcaccucuguccca

SEQ ID NO: 153362 - RNA, 32 nt, Homo Sapiens
agaccccgccuggcccccgcuggcuucuggcu

SEQ ID NO: 153363 - RNA, 29 nt, Homo Sapiens
ccggcuucuaucccagguagcagagucuc

SEQ ID NO: 153364 - RNA, 32 nt, Homo Sapiens
ggguaguaacuugacuuaagaauaccacuuuu

SEQ ID NO: 153365 - RNA, 32 nt, Homo Sapiens
uuaaauauguuuucauaguuuauauuccuguu

SEQ ID NO: 153366 - RNA, 32 nt, Homo Sapiens
uuucaacucccgcuugccauucaacaucaugg

SEQ ID NO: 153367 - RNA, 32 nt, Homo Sapiens
aaaucaauguggcuguuuuuccguggaaagaa

SEQ ID NO: 153368 - RNA, 32 nt, Homo Sapiens
gcaagacugccggggaaacgacccuguggcug

SEQ ID NO: 153369 - RNA, 32 nt, Homo Sapiens
cauugccugaaacucagcaugacuucaccucc

SEQ ID NO: 153370 - RNA, 32 nt, Homo Sapiens
aucucauccagguuucccgauuuuuucagguc

SEQ ID NO: 153371 - RNA, 29 nt, Homo Sapiens
aagaugaaaauuauauauuuugcccaguu

SEQ ID NO: 153372 - RNA, 32 nt, Homo Sapiens
gggaggcgugcaugccccugcugcccgcggcg

SEQ ID NO: 153373 - RNA, 32 nt, Homo Sapiens
uuugcuccgauuuauaucuccuccuccaguaa

SEQ ID NO: 153374 - RNA, 32 nt, Homo Sapiens
aucauguagggagggacggggaggggagccag

SEQ ID NO: 153375 - RNA, 32 nt, Homo Sapiens
uuggagcagaaagccaggguccugaguggcug

SEQ ID NO: 153376 - RNA, 32 nt, Homo Sapiens
ccagcccgccccauucaccuguggauuugugc

SEQ ID NO: 153377 - RNA, 32 nt, Homo Sapiens
agauggauuaacaugagaagugcuucucugca

SEQ ID NO: 153378 - RNA, 32 nt, Homo Sapiens
ccagugcccuuaagacuggagaaagcugcaau

SEQ ID NO: 153379 - RNA, 32 nt, Homo Sapiens
uuuuucuguagugugaucacaaugaaaacuuu

SEQ ID NO: 153380 - RNA, 32 nt, Homo Sapiens
agcauuaaauuaaguguccucauuuuaaaguc

SEQ ID NO: 153381 - RNA, 32 nt, Homo Sapiens
gcccuccuccuggccuucugacgggcggcguu

SEQ ID NO: 153382 - RNA, 32 nt, Homo Sapiens
ggcagggcccacccugcggugucgcgcgccug

SEQ ID NO: 153383 - RNA, 32 nt, Homo Sapiens
uuaagcucaucccaccucauggauuuaaauau

SEQ ID NO: 153384 - RNA, 32 nt, Homo Sapiens
ggagggagacccagcucuccuuucugucccgu

SEQ ID NO: 153385 - RNA, 32 nt, Homo Sapiens
ucguuugucccuuuucggccaagcucaggacc

SEQ ID NO: 153386 - RNA, 32 nt, Homo Sapiens
guggcagugaggaagacgacagacaggcuccu

SEQ ID NO: 153387 - RNA, 32 nt, Homo Sapiens
gaaggaaauuauauuucuuuguuuaaaaauaa

SEQ ID NO: 153388 - RNA, 32 nt, Homo Sapiens
augggagcggugacuacacacacacacacaca

SEQ ID NO: 153389 - RNA, 32 nt, Homo Sapiens
gcacagcccagcuggggcuaggcccgguggga

SEQ ID NO: 153390 - RNA, 32 nt, Homo Sapiens
ccuucaugagccugcagaacugcuuuccuaug

SEQ ID NO: 153391 - RNA, 32 nt, Homo Sapiens
agucucgcguuuguuccccagcccucggcugc

SEQ ID NO: 153392 - RNA, 28 nt, Homo Sapiens
cacagcuugcaaggaccaagggaggcca

SEQ ID NO: 153393 - RNA, 32 nt, Homo Sapiens
ccauaauauugcaaauaacauaaaaucuuaaa

SEQ ID NO: 153394 - RNA, 32 nt, Homo Sapiens
gccggcauccucgggggccuggggaaguugug

SEQ ID NO: 153395 - RNA, 32 nt, Homo Sapiens
acccuaugccuggccgggcgcaguggcucacg

SEQ ID NO: 153396 - RNA, 32 nt, Homo Sapiens
ccaguuggggacgcacauacuccuucacaagu

SEQ ID NO: 153397 - RNA, 32 nt, Homo Sapiens
ugcugaguucccuuguucuagcuagcagcacg

SEQ ID NO: 153398 - RNA, 32 nt, Homo Sapiens
aggcugaaaaggacaguucuuuguggacucua

SEQ ID NO: 153399 - RNA, 32 nt, Homo Sapiens
gauuaguucuaaaaucuuauuccuccucuucu

SEQ ID NO: 153400 - RNA, 32 nt, Homo Sapiens
agggaggccaggcgggcauggcguggaggagg

SEQ ID NO: 153401 - RNA, 32 nt, Homo Sapiens
gaacucuugcuuuaaccuauuccuguacaaag

SEQ ID NO: 153402 - RNA, 32 nt, Homo Sapiens
auggagccaaggaaaguaacacuggggaugca

SEQ ID NO: 153403 - RNA, 32 nt, Homo Sapiens
cauggcuaaaagaagcagaagcaaguuucgaa

SEQ ID NO: 153404 - RNA, 32 nt, Homo Sapiens
uaauggguauacauuuuuguaaauagcauccc

SEQ ID NO: 153405 - RNA, 32 nt, Homo Sapiens
accgucgugugagugugguaugccugaucaca

SEQ ID NO: 153406 - RNA, 32 nt, Homo Sapiens
aauuuuucagacuacugaaaucccuguagcag

SEQ ID NO: 153407 - RNA, 32 nt, Homo Sapiens
uuuuccuuuuuuaagaauauuuuuguaagacc

SEQ ID NO: 153408 - RNA, 32 nt, Homo Sapiens
gaaaaguaaugggaaaguaaacccugcauaua

SEQ ID NO: 153409 - RNA, 32 nt, Homo Sapiens
aggaguuccacuucaacaaguaccugacgcgc

SEQ ID NO: 153410 - RNA, 32 nt, Homo Sapiens
ggugagaggccagcacugcugcugcccugagg

SEQ ID NO: 153411 - RNA, 32 nt, Homo Sapiens
aagcccccaacaucccaguccucaguccucag

SEQ ID NO: 153412 - RNA, 32 nt, Homo Sapiens
ccaccucuaaucuuggaggcuauuaucuuacc

SEQ ID NO: 153413 - RNA, 32 nt, Homo Sapiens
gagagaauggcuuuggucucuugcuuguggga

SEQ ID NO: 153414 - RNA, 32 nt, Homo Sapiens
ccugacacucaauaaacagucauuggaaagag

SEQ ID NO: 153415 - RNA, 32 nt, Homo Sapiens
acgucuguggacugaaugaauaaacccuccuc

SEQ ID NO: 153416 - RNA, 32 nt, Homo Sapiens
ugggagacagaugcgcaugggcgugggggcau

SEQ ID NO: 153417 - RNA, 32 nt, Homo Sapiens
ucaguagcuugaaaccacaauuuuaaaaaugu

SEQ ID NO: 153418 - RNA, 32 nt, Homo Sapiens
ugagagcucaggucugggcucagccaguccag

SEQ ID NO: 153419 - RNA, 32 nt, Homo Sapiens
ccuggggugaaccaggcccaccugcggguuuc

SEQ ID NO: 153420 - RNA, 32 nt, Homo Sapiens
cugcucauccuccugggccccauccacucagc

SEQ ID NO: 153421 - RNA, 32 nt, Homo Sapiens
ugcagcuugacauuauguuuuauuuaaaugcu

SEQ ID NO: 153422 - RNA, 32 nt, Homo Sapiens
gccggaaggagcuucaggugagcacugcucau

SEQ ID NO: 153423 - RNA, 32 nt, Homo Sapiens
ucucuaggagucuggggugaugccgggacauc

SEQ ID NO: 153424 - RNA, 32 nt, Homo Sapiens
acgauaguauauuuuuucaaauuuagaaugcc

SEQ ID NO: 153425 - RNA, 32 nt, Homo Sapiens
caagggggcuccuuuggagugguagggaggau

SEQ ID NO: 153426 - RNA, 32 nt, Homo Sapiens
cagaggaugguggugcugcugcugauccgggg

SEQ ID NO: 153427 - RNA, 32 nt, Homo Sapiens
ucuuucuccgcggcgaaggugaggagcugucu

SEQ ID NO: 153428 - RNA, 32 nt, Homo Sapiens
cgggacuccagccccaggcuguggcucugcag

SEQ ID NO: 153429 - RNA, 32 nt, Homo Sapiens
uguuguaguccuaugaugauguaaacuuggua

SEQ ID NO: 153430 - RNA, 32 nt, Homo Sapiens
auuauagacagagagaggcauuuagcugaucu

SEQ ID NO: 153431 - RNA, 32 nt, Homo Sapiens
aggucuguauggcuguauuugcuguugauuca

SEQ ID NO: 153432 - RNA, 32 nt, Homo Sapiens
caccucagucuggauucuaaccauuucacuaa

SEQ ID NO: 153433 - RNA, 32 nt, Homo Sapiens
ccccucaaaucguccuuuaagucuuccuucca

SEQ ID NO: 153434 - RNA, 32 nt, Homo Sapiens
agcucucagucacuagacuauuucauauuuuu

SEQ ID NO: 153435 - RNA, 30 nt, Homo Sapiens
ggaguugcugcacagggggaaagcgaaguu

SEQ ID NO: 153436 - RNA, 32 nt, Homo Sapiens
cacucagggauggagcugcugcugaagggacu

SEQ ID NO: 153437 - RNA, 29 nt, Homo Sapiens
uccuguauauguauguaguaguuugggug

SEQ ID NO: 153438 - RNA, 32 nt, Homo Sapiens
acacccccaacagauagcagcauguacauaga

SEQ ID NO: 153439 - RNA, 32 nt, Homo Sapiens
gcagcugaugugcuguauaugcuugagagggu

SEQ ID NO: 153440 - RNA, 32 nt, Homo Sapiens
gcggccgcccugcgcacggagccccgagggac

SEQ ID NO: 153441 - RNA, 32 nt, Homo Sapiens
uuuuucuugggguacucuugaugugaagauaa

SEQ ID NO: 153442 - RNA, 32 nt, Homo Sapiens
uuguggagaaaguggccggagccucccuggag

SEQ ID NO: 153443 - RNA, 32 nt, Homo Sapiens
cuccucgaaggcagaaccaucgucagucacag

SEQ ID NO: 153444 - RNA, 32 nt, Homo Sapiens
ggacugugagccggcucauuucugggcuccau

SEQ ID NO: 153445 - RNA, 32 nt, Homo Sapiens
ugucgaggggagggacaaaaccagaaacggug

SEQ ID NO: 153446 - RNA, 32 nt, Homo Sapiens
agcuucagauaaaguucugguaucugguuuga

SEQ ID NO: 153447 - RNA, 32 nt, Homo Sapiens
aggcgaccaugcgcggcgcgggggcgauccug

SEQ ID NO: 153448 - RNA, 32 nt, Homo Sapiens
caaguacauuuuauuuucuugcugaugaacug

SEQ ID NO: 153449 - RNA, 32 nt, Homo Sapiens
ccugaaaggaagacauaaguguugugauuagu

SEQ ID NO: 153450 - RNA, 32 nt, Homo Sapiens
gcucuuggcaugugguaggaugaaugcauggu

SEQ ID NO: 153451 - RNA, 32 nt, Homo Sapiens
gggaggcuggggcgagcggaucaugaggucaa

SEQ ID NO: 153452 - RNA, 32 nt, Homo Sapiens
ugccagcccaggugcucgcggccuggcuccau

SEQ ID NO: 153453 - RNA, 32 nt, Homo Sapiens
acguaaacuaugaccuagggguuuucuguugg

SEQ ID NO: 153454 - RNA, 32 nt, Homo Sapiens
aaaccaauuuuuaaaacaaaacugcggacacc

SEQ ID NO: 153455 - RNA, 32 nt, Homo Sapiens
gugugccugugcucccucaucaaaacggagag

SEQ ID NO: 153456 - RNA, 32 nt, Homo Sapiens
caugccugggggugcugccaucuucucucccc

SEQ ID NO: 153457 - RNA, 32 nt, Homo Sapiens
caaaaaaagaaagaauacuuuuuuauaccuca

SEQ ID NO: 153458 - RNA, 32 nt, Homo Sapiens
uauuaauuguuuaggggcuucuuucuuuguca

SEQ ID NO: 153459 - RNA, 32 nt, Homo Sapiens
ggacccugacagugagggugcguccagguuca

SEQ ID NO: 153460 - RNA, 32 nt, Homo Sapiens
cacugggaagucaaacagcaaaacugagugug

SEQ ID NO: 153461 - RNA, 32 nt, Homo Sapiens
ucauuguggcaaggaguuucuuucucuuuuuc

SEQ ID NO: 153462 - RNA, 32 nt, Homo Sapiens
uuugggguuugggcuuuuuuauacucuucuca

SEQ ID NO: 153463 - RNA, 32 nt, Homo Sapiens
aauguucagaauucucaccaccuucugguuaa

SEQ ID NO: 153464 - RNA, 32 nt, Homo Sapiens
cagcaaucaucaaccaaccaaccaaugggauc

SEQ ID NO: 153465 - RNA, 32 nt, Homo Sapiens
aaacacagcaaggcuggcccaggccgcccaca

SEQ ID NO: 153466 - RNA, 32 nt, Homo Sapiens
uccugagagucuuuuuuugcacuguugaaauu

SEQ ID NO: 153467 - RNA, 32 nt, Homo Sapiens
ggucucaaacuccugaccucgugauacgcccg

SEQ ID NO: 153468 - RNA, 32 nt, Homo Sapiens
ccuccccucccuccccuuaugaggucucaggc

SEQ ID NO: 153469 - RNA, 32 nt, Homo Sapiens
ccacccugcggugucgcgcgccugcagcacgc

SEQ ID NO: 153470 - RNA, 32 nt, Homo Sapiens
agaaacggcauaaagaugacaaauggccuauu

SEQ ID NO: 153471 - RNA, 32 nt, Homo Sapiens
aguuuguacaagcagcuuucguugaaguuuag

SEQ ID NO: 153472 - RNA, 32 nt, Homo Sapiens
ccagccuggugggccccggccccugaccccaa

SEQ ID NO: 153473 - RNA, 32 nt, Homo Sapiens
gugcaaauugguuaggaugccaccucaagaac

SEQ ID NO: 153474 - RNA, 32 nt, Homo Sapiens
agccaggcgugguggcacgugccuguaguccc

SEQ ID NO: 153475 - RNA, 32 nt, Homo Sapiens
aaacuaaaaacagaaaugauauucucaauuuu

SEQ ID NO: 153476 - RNA, 32 nt, Homo Sapiens
ugcugaucacucaaauaaugcuuuuaagcuau

SEQ ID NO: 153477 - RNA, 32 nt, Homo Sapiens
ucugcuaugugugguacuuugcagcugcuuuu

SEQ ID NO: 153478 - RNA, 32 nt, Homo Sapiens
uguccagacacguccugcaguuccuccugcuc

SEQ ID NO: 153479 - RNA, 32 nt, Homo Sapiens
ugaccuuaaccuccuaauuaaucuuccuaagc

SEQ ID NO: 153480 - RNA, 32 nt, Homo Sapiens
ggcacaagacuacauaauaaaugguaaaguaa

SEQ ID NO: 153481 - RNA, 32 nt, Homo Sapiens
augaucaugugucccccaacuccaccccucac

SEQ ID NO: 153482 - RNA, 32 nt, Homo Sapiens
ugccuaacagcuuuugguuuguucauagagaa

SEQ ID NO: 153483 - RNA, 32 nt, Homo Sapiens
ugcuguggagaauggaccggagggacaagagg

SEQ ID NO: 153484 - RNA, 32 nt, Homo Sapiens
gcuacugcuguggaaucuuguaaaaaccaugu

SEQ ID NO: 153485 - RNA, 32 nt, Homo Sapiens
uuccagccagccugcuggcucccaagagagag

SEQ ID NO: 153486 - RNA, 32 nt, Homo Sapiens
acagagccuuguauugugaacucuaauuguac

SEQ ID NO: 153487 - RNA, 32 nt, Homo Sapiens
auguuaauuucaggcagcauucccugugggaa

SEQ ID NO: 153488 - RNA, 32 nt, Homo Sapiens
uugucuguaaaauggaugaaaugaaaagaggu

SEQ ID NO: 153489 - RNA, 32 nt, Homo Sapiens
ugauuuuuaacccuaaaauaaaacaaacaacc

SEQ ID NO: 153490 - RNA, 32 nt, Homo Sapiens
gggccgacugcagcuggaagauggcggcgucc

SEQ ID NO: 153491 - RNA, 32 nt, Homo Sapiens
cgugccuuaaaauggugaacguuagaaaauua

SEQ ID NO: 153492 - RNA, 32 nt, Homo Sapiens
ucuccguccucaugcuccucaguguccacacu

SEQ ID NO: 153493 - RNA, 29 nt, Homo Sapiens
aaccuuggcaaaauaaacuuucuaaauug

SEQ ID NO: 153494 - RNA, 32 nt, Homo Sapiens
cuauuuugcuauuugcaaaugcuuguuaucuu

SEQ ID NO: 153495 - RNA, 32 nt, Homo Sapiens
uuucauuugauaauuuuuccuucucaaagcag

SEQ ID NO: 153496 - RNA, 32 nt, Homo Sapiens
ggaagcacaaauaguuuuugucgcuaacuuag

SEQ ID NO: 153497 - RNA, 32 nt, Homo Sapiens
gcccucggcccgcugccguagcgccgcuuccc

SEQ ID NO: 153498 - RNA, 32 nt, Homo Sapiens
aguguaagaggaaaagaagugugauggccaag

SEQ ID NO: 153499 - RNA, 32 nt, Homo Sapiens
uguuuaaugcaaaugauauauugaauuguuua

SEQ ID NO: 153500 - RNA, 32 nt, Homo Sapiens
augaaaugcuccaucuuuuuuaucuaauuugu

SEQ ID NO: 153501 - RNA, 32 nt, Homo Sapiens
aaguuguguuugauauccaaagcugaauacau

SEQ ID NO: 153502 - RNA, 32 nt, Homo Sapiens
aaaacaugaugauuaagugcacaccgugugcc

SEQ ID NO: 153503 - RNA, 32 nt, Homo Sapiens
ggggucgccccuccccagccggacaggaagcc

SEQ ID NO: 153504 - RNA, 32 nt, Homo Sapiens
aguuaaauauuuuuaauaaauguuucccuugu

SEQ ID NO: 153505 - RNA, 32 nt, Homo Sapiens
acuuaaaaggauuaaaguaauggagauauaca

SEQ ID NO: 153506 - RNA, 32 nt, Homo Sapiens
gagcugugccagcaggggggcugugccaaccu

SEQ ID NO: 153507 - RNA, 32 nt, Homo Sapiens
ucggcccaguugcagcaugucucgccacccau

SEQ ID NO: 153508 - RNA, 32 nt, Homo Sapiens
cucucccuggcccagggcugacuccgccucuc

SEQ ID NO: 153509 - RNA, 32 nt, Homo Sapiens
gaggcucuuauuuuuuuuuuaagggauccugu

SEQ ID NO: 153510 - RNA, 32 nt, Homo Sapiens
gccacgcgcccccgacgaccgcccgacgugca

SEQ ID NO: 153511 - RNA, 32 nt, Homo Sapiens
uuagucagugccaggcauggugcuggguuaca

SEQ ID NO: 153512 - RNA, 32 nt, Homo Sapiens
ggaaugcaaugugagcaaggccaggcacacuu

SEQ ID NO: 153513 - RNA, 32 nt, Homo Sapiens
agcuacuggauugccuuaauucuucucuuaca

SEQ ID NO: 153514 - RNA, 32 nt, Homo Sapiens
auagacugcuguuuuucuggucugaccaucgc

SEQ ID NO: 153515 - RNA, 32 nt, Homo Sapiens
cuugccucacuuuaacuuaccaaauauauaac

SEQ ID NO: 153516 - RNA, 32 nt, Homo Sapiens
agagaagaaaucauuaaacaccaggauucuac

SEQ ID NO: 153517 - RNA, 32 nt, Homo Sapiens
augccacuaauaaaaugaaucuaaacauugaa

SEQ ID NO: 153518 - RNA, 32 nt, Homo Sapiens
aguccuaaaaauuuucaggucuauuugaacag

SEQ ID NO: 153519 - RNA, 32 nt, Homo Sapiens
gagcugagggcaagucgcgcccgccccugaaa

SEQ ID NO: 153520 - RNA, 32 nt, Homo Sapiens
gggaugcagagccagggaaggcugguggagug

SEQ ID NO: 153521 - RNA, 32 nt, Homo Sapiens
gcauuugguacugaacauccacaguguugugu

SEQ ID NO: 153522 - RNA, 32 nt, Homo Sapiens
caggauugcuuuguccaucuccugcuuucauu

SEQ ID NO: 153523 - RNA, 32 nt, Homo Sapiens
acaugccauuuucuagcagcugccagugauaa

SEQ ID NO: 153524 - RNA, 32 nt, Homo Sapiens
cucccgaccguccggguccgcggccagcccgg

SEQ ID NO: 153525 - RNA, 32 nt, Homo Sapiens
uuaaagagcaccaggaccgaauggauuuucac

SEQ ID NO: 153526 - RNA, 32 nt, Homo Sapiens
ggaacgcuccgucuggaacggcgcagguccca

SEQ ID NO: 153527 - RNA, 32 nt, Homo Sapiens
guggcugcgcccauuccacacccgccgaaagc

SEQ ID NO: 153528 - RNA, 32 nt, Homo Sapiens
uaacagcaugcugaaugugaaauaucaacccu

SEQ ID NO: 153529 - RNA, 32 nt, Homo Sapiens
cucuuugauucuucuucagugugucuaaauua

SEQ ID NO: 153530 - RNA, 32 nt, Homo Sapiens
uauguauuuauagcaaguucugauguacauau

SEQ ID NO: 153531 - RNA, 32 nt, Homo Sapiens
uguuugaaagagaucauuaaauguauuuugca

SEQ ID NO: 153532 - RNA, 30 nt, Homo Sapiens
uugauugauaaaagggacaggcaguagugu

SEQ ID NO: 153533 - RNA, 32 nt, Homo Sapiens
gaaaacauuaggagaggcaaaaauauuguuaa

SEQ ID NO: 153534 - RNA, 32 nt, Homo Sapiens
agggaaagguaugagggaaagagagucugaga

SEQ ID NO: 153535 - RNA, 32 nt, Homo Sapiens
gaagauaaggcacacauuuauuuauaaaugga

SEQ ID NO: 153536 - RNA, 32 nt, Homo Sapiens
aacauggaguugcuccuuuggccacguauaug

SEQ ID NO: 153537 - RNA, 32 nt, Homo Sapiens
caccauucuguagccacccauccuuugccuua

SEQ ID NO: 153538 - RNA, 32 nt, Homo Sapiens
ugaucagaagauuugggaaagauggaaucugu

SEQ ID NO: 153539 - RNA, 32 nt, Homo Sapiens
agguuggcccccagcuccugcuucaggcugug

SEQ ID NO: 153540 - RNA, 32 nt, Homo Sapiens
auacuggaaaauuauaaagugcuauagaggaa

SEQ ID NO: 153541 - RNA, 32 nt, Homo Sapiens
gcuucauagaaaguugggcaaaacaggcuagc

SEQ ID NO: 153542 - RNA, 32 nt, Homo Sapiens
gguaauuucuucccuuuuuugauuaaguuggu

SEQ ID NO: 153543 - RNA, 32 nt, Homo Sapiens
uuuuccauauaaauaaaaugcuuuuucuacua

SEQ ID NO: 153544 - RNA, 32 nt, Homo Sapiens
augaagaucacguucagaagaauggaaggaaa

SEQ ID NO: 153545 - RNA, 32 nt, Homo Sapiens
uauguuuuuuauuaugcuguauuuucuuuuua

SEQ ID NO: 153546 - RNA, 32 nt, Homo Sapiens
gaagcugcuugcucugcccccaggacaggagc

SEQ ID NO: 153547 - RNA, 32 nt, Homo Sapiens
agacagcaagugucgcgcagccgugcgauguu

SEQ ID NO: 153548 - RNA, 32 nt, Homo Sapiens
gaggacucgccaugccucuccugcccccuccc

SEQ ID NO: 153549 - RNA, 32 nt, Homo Sapiens
acauggucagugggcuuuuaggcuaguggcau

SEQ ID NO: 153550 - RNA, 32 nt, Homo Sapiens
gacugcccuccuuccuggcccccucccgccau

SEQ ID NO: 153551 - RNA, 32 nt, Homo Sapiens
aaugcaucaauaaccuaagaaaaagcgacaua

SEQ ID NO: 153552 - RNA, 32 nt, Homo Sapiens
agcaaggccaagaggagacagccgugacggua

SEQ ID NO: 153553 - RNA, 32 nt, Homo Sapiens
ugcccucugaagacaugggccacuugacagac

SEQ ID NO: 153554 - RNA, 32 nt, Homo Sapiens
uuuaaugaaagcuagguaugacuugauuugca

SEQ ID NO: 153555 - RNA, 32 nt, Homo Sapiens
cuccggcggucugaggccauggaggugguugc

SEQ ID NO: 153556 - RNA, 32 nt, Homo Sapiens
cagcccugacgccccacuguccccucacagcc

SEQ ID NO: 153557 - RNA, 32 nt, Homo Sapiens
ccugccucaacucuggccccaggcccuguucu

SEQ ID NO: 153558 - RNA, 32 nt, Homo Sapiens
cuagacagcacuuggguaccccauuggggucu

SEQ ID NO: 153559 - RNA, 32 nt, Homo Sapiens
guccagcgcagccccgcagagcuccagggugg

SEQ ID NO: 153560 - RNA, 32 nt, Homo Sapiens
aaaacaaagcuacaauuugcccucauacacac

SEQ ID NO: 153561 - RNA, 32 nt, Homo Sapiens
agacccacuccagcuuucuggugucacaggcg

SEQ ID NO: 153562 - RNA, 32 nt, Homo Sapiens
acuucaguuuuuuguuuagcuacaugauugaa

SEQ ID NO: 153563 - RNA, 32 nt, Homo Sapiens
cacuauaaagaucuuggaacagcaaaugauua

SEQ ID NO: 153564 - RNA, 32 nt, Homo Sapiens
aggccaaacagaaacccaacuacccccuaaug

SEQ ID NO: 153565 - RNA, 32 nt, Homo Sapiens
acggggcagcgggcaugggucugugugggaga

SEQ ID NO: 153566 - RNA, 29 nt, Homo Sapiens
gagggguuuagcuuugauuuucuacauuu

SEQ ID NO: 153567 - RNA, 32 nt, Homo Sapiens
ucucaggcaccccucuuccccagcuguccugc

SEQ ID NO: 153568 - RNA, 32 nt, Homo Sapiens
agcgggguguuugggggcgcgcgugcgagugc

SEQ ID NO: 153569 - RNA, 32 nt, Homo Sapiens
cauggacgcauggacgcagggcgacaauaaac

SEQ ID NO: 153570 - RNA, 32 nt, Homo Sapiens
caacaguuuuccuaugcuuugaaacagaaaaa

SEQ ID NO: 153571 - RNA, 32 nt, Homo Sapiens
uucugggcggacacugauguucaguggccucc

SEQ ID NO: 153572 - RNA, 32 nt, Homo Sapiens
uuccuuugucuuucuuuuuccuuuuuuuuuaa

SEQ ID NO: 153573 - RNA, 32 nt, Homo Sapiens
acgugggcaucauuuuaacaggugccuuuuuu

SEQ ID NO: 153574 - RNA, 32 nt, Homo Sapiens
ugccugcaccucagcuucuucauggaagacga

SEQ ID NO: 153575 - RNA, 32 nt, Homo Sapiens
caugcaggagaaugagcggguggagaaacugg

SEQ ID NO: 153576 - RNA, 32 nt, Homo Sapiens
gcugucacuuggagccaacaguaacuugccac

SEQ ID NO: 153577 - RNA, 32 nt, Homo Sapiens
gauaguaaaaauuuuugguugugccuagaaug

SEQ ID NO: 153578 - RNA, 32 nt, Homo Sapiens
gcuguuacuugagcagaggccuuucuuuuccc

SEQ ID NO: 153579 - RNA, 32 nt, Homo Sapiens
accauagcugucuguccagugcucucuuccug

SEQ ID NO: 153580 - RNA, 32 nt, Homo Sapiens
caauugccgucugcuuccugugaaaguccuuu

SEQ ID NO: 153581 - RNA, 32 nt, Homo Sapiens
cuucugccuccucgccucuccuggacuggcuu

SEQ ID NO: 153582 - RNA, 32 nt, Homo Sapiens
ugcgucacuggugcgcgccgcgggucagggcg

SEQ ID NO: 153583 - RNA, 32 nt, Homo Sapiens
aggcauaauccuaaaacaaaugaagauuuuga

SEQ ID NO: 153584 - RNA, 32 nt, Homo Sapiens
cucggccccguccccagggccgcgaugagcuu

SEQ ID NO: 153585 - RNA, 32 nt, Homo Sapiens
gaacaagcccaacaguaaucugcaucauaagc

SEQ ID NO: 153586 - RNA, 32 nt, Homo Sapiens
uuguuauggauacauuucagaaucuaagaaau

SEQ ID NO: 153587 - RNA, 32 nt, Homo Sapiens
gucccaggccccagccucauggcccugccgag

SEQ ID NO: 153588 - RNA, 32 nt, Homo Sapiens
ccaagaagaauuugcuugaggcaaauuguggc

SEQ ID NO: 153589 - RNA, 32 nt, Homo Sapiens
uggggaaaacaguagacuuggaguucugaaac

SEQ ID NO: 153590 - RNA, 32 nt, Homo Sapiens
gaucugcgccuagaagacaacgucucaguugu

SEQ ID NO: 153591 - RNA, 32 nt, Homo Sapiens
gucauuuugucauuuagaguauucugauaaaa

SEQ ID NO: 153592 - RNA, 30 nt, Homo Sapiens
cuucuggagaagcugcugggaucggaccag

SEQ ID NO: 153593 - RNA, 32 nt, Homo Sapiens
gccacguggaccgcgcgcggggcgcucccugg

SEQ ID NO: 153594 - RNA, 32 nt, Homo Sapiens
aaccgaugaugagcccugaugaaagaaggaag

SEQ ID NO: 153595 - RNA, 32 nt, Homo Sapiens
uucacgugacccggcgucauuggcucgcucgc

SEQ ID NO: 153596 - RNA, 32 nt, Homo Sapiens
uggucggcuguuggguguggaguuucccagcg

SEQ ID NO: 153597 - RNA, 32 nt, Homo Sapiens
uuuggaugugcagcacauccaaggcacaccac

SEQ ID NO: 153598 - RNA, 32 nt, Homo Sapiens
cuuagagauaaggaaaauaacauuugccaaau

SEQ ID NO: 153599 - RNA, 32 nt, Homo Sapiens
uguucgaggcggaagacggggucugaucuuuc

SEQ ID NO: 153600 - RNA, 32 nt, Homo Sapiens
agccuggacccagcugugcagcuccuuguccu

SEQ ID NO: 153601 - RNA, 32 nt, Homo Sapiens
gaguucuagggcuuccccgcugccgggaacga

SEQ ID NO: 153602 - RNA, 32 nt, Homo Sapiens
cucagcugcauggagccuggaacugcaucagu

SEQ ID NO: 153603 - RNA, 32 nt, Homo Sapiens
aacuggauuauaaauaaauugaaaauaacuca

SEQ ID NO: 153604 - RNA, 32 nt, Homo Sapiens
uguuacugccccacccuaacugaucaauguac

SEQ ID NO: 153605 - RNA, 32 nt, Homo Sapiens
ccggcccggccgcgcugaaagcuccccagcgc

SEQ ID NO: 153606 - RNA, 32 nt, Homo Sapiens
agucacuuuagaacacauguugagauggugac

SEQ ID NO: 153607 - RNA, 32 nt, Homo Sapiens
gggcgccuuggcuggugcggcugcugguccag

SEQ ID NO: 153608 - RNA, 32 nt, Homo Sapiens
uuccacccuggugucacuccccggcucagcca

SEQ ID NO: 153609 - RNA, 32 nt, Homo Sapiens
cgcccgcaggucggcgcgcucgcccaccugag

SEQ ID NO: 153610 - RNA, 32 nt, Homo Sapiens
gagcucuguugggaacugcugcugcuuggaca

SEQ ID NO: 153611 - RNA, 32 nt, Homo Sapiens
agucgccuuuggaaauaaauggucauuaauuu

SEQ ID NO: 153612 - RNA, 32 nt, Homo Sapiens
aguuugucacauuagcaaaaccaguggggcca

SEQ ID NO: 153613 - RNA, 32 nt, Homo Sapiens
cccuguccucccuucacccccauugcguauga

SEQ ID NO: 153614 - RNA, 30 nt, Homo Sapiens
aguagcagcagcgccgggucccgugcggag

SEQ ID NO: 153615 - RNA, 32 nt, Homo Sapiens
ggugggggcagccuccaccuccuggauucaag

SEQ ID NO: 153616 - RNA, 32 nt, Homo Sapiens
cuguagggaaagggucuuaggaggaccucccc

SEQ ID NO: 153617 - RNA, 32 nt, Homo Sapiens
caagcaggaaugccucuugugggggagggcag

SEQ ID NO: 153618 - RNA, 32 nt, Homo Sapiens
agaagaaaugucaagaauaugaaaugagucug

SEQ ID NO: 153619 - RNA, 32 nt, Homo Sapiens
ggcauacuauccacaguguuuuaccagaguga

SEQ ID NO: 153620 - RNA, 32 nt, Homo Sapiens
accagacaccaauccugcuggcaccuugaucu

SEQ ID NO: 153621 - RNA, 32 nt, Homo Sapiens
acuucuuggccacagcacaucacagacacagu

SEQ ID NO: 153622 - RNA, 32 nt, Homo Sapiens
gaucuggaagagagauucugaucugcccaccu

SEQ ID NO: 153623 - RNA, 32 nt, Homo Sapiens
ggggucucugacagcccccaccccuccccacu

SEQ ID NO: 153624 - RNA, 32 nt, Homo Sapiens
aacuugcauucauaaaaauuaaaauuauucau

SEQ ID NO: 153625 - RNA, 32 nt, Homo Sapiens
cugcccacccucugagggccaagcugccuggc

SEQ ID NO: 153626 - RNA, 32 nt, Homo Sapiens
aauuucugcccuuuguaaauuauuuaagaaac

SEQ ID NO: 153627 - RNA, 32 nt, Homo Sapiens
cuucacauaguuugauaaaaagaucaauaaau

SEQ ID NO: 153628 - RNA, 30 nt, Homo Sapiens
cugaggcgcgcgcugagaaguugggcugau

SEQ ID NO: 153629 - RNA, 29 nt, Homo Sapiens
gugagugggggacagggaguggggcaggc

SEQ ID NO: 153630 - RNA, 32 nt, Homo Sapiens
uuuugcuuaggugauccacugccaugugaucc

SEQ ID NO: 153631 - RNA, 32 nt, Homo Sapiens
gacagggucugggucuuucacccaggcuggag

SEQ ID NO: 153632 - RNA, 32 nt, Homo Sapiens
caggcgcggaggagggggcaagcgugugugag

SEQ ID NO: 153633 - RNA, 32 nt, Homo Sapiens
aggcaccaggcaccccauaacacggcuuccug

SEQ ID NO: 153634 - RNA, 32 nt, Homo Sapiens
cauuucuacaaaaaauacaaaaauuagcuggg

SEQ ID NO: 153635 - RNA, 32 nt, Homo Sapiens
cguugcucauuaauucuagaaacuauaaccag

SEQ ID NO: 153636 - RNA, 32 nt, Homo Sapiens
auguugcccagcuggucucauacuccucaguu

SEQ ID NO: 153637 - RNA, 32 nt, Homo Sapiens
agaaaugggcccagccccacauggccugcaga

SEQ ID NO: 153638 - RNA, 32 nt, Homo Sapiens
cacgugggcagccuucugcuuaugacaauaau

SEQ ID NO: 153639 - RNA, 32 nt, Homo Sapiens
cugugagcugcagcuguggggcagagagaagc

SEQ ID NO: 153640 - RNA, 32 nt, Homo Sapiens
aguguucaguguaguggugcaaaccugagggc

SEQ ID NO: 153641 - RNA, 32 nt, Homo Sapiens
uuacaguagggaagagcauguggcaaggcaca

SEQ ID NO: 153642 - RNA, 32 nt, Homo Sapiens
gcugguuccucauagaccgagucaugauuuau

SEQ ID NO: 153643 - RNA, 32 nt, Homo Sapiens
cacuguguauuaggaagaauauuacagggugu

SEQ ID NO: 153644 - RNA, 32 nt, Homo Sapiens
acgcccguuccuugcccucccggacuuaucua

SEQ ID NO: 153645 - RNA, 32 nt, Homo Sapiens
uggacaucugguugcuuuggccugcugcccuc

SEQ ID NO: 153646 - RNA, 32 nt, Homo Sapiens
uuuauuugcauggcuuuuuuuuuuucuaaguc

SEQ ID NO: 153647 - RNA, 32 nt, Homo Sapiens
gggcugggcagaucaagcacaaaccugagauc

SEQ ID NO: 153648 - RNA, 32 nt, Homo Sapiens
cagcagcagcggcagcaguucgggggcccuca

SEQ ID NO: 153649 - RNA, 32 nt, Homo Sapiens
cugcgguggcggcggcgccggaggacgcggag

SEQ ID NO: 153650 - RNA, 32 nt, Homo Sapiens
gauucaggucucucaugauuauauuuggggau

SEQ ID NO: 153651 - RNA, 32 nt, Homo Sapiens
augcuauuuggggaaaggucuuuuuugcuuaa

SEQ ID NO: 153652 - RNA, 32 nt, Homo Sapiens
guguccaaggaccagcaugccagaaaagccac

SEQ ID NO: 153653 - RNA, 32 nt, Homo Sapiens
gacuauggugucugcccuuccaaucaccuccc

SEQ ID NO: 153654 - RNA, 32 nt, Homo Sapiens
uaugcugcucauccccaccugucuucaacagc

SEQ ID NO: 153655 - RNA, 32 nt, Homo Sapiens
cuugcaggcuggaagcaccagggaauuaauuc

SEQ ID NO: 153656 - RNA, 32 nt, Homo Sapiens
gagcuugcagugagccgagauugcaccacagc

SEQ ID NO: 153657 - RNA, 32 nt, Homo Sapiens
cguaccgcaagaacgccacgcgggacgccacg

SEQ ID NO: 153658 - RNA, 32 nt, Homo Sapiens
agaaugcuuauuuuuauugcacagaggucauu

SEQ ID NO: 153659 - RNA, 32 nt, Homo Sapiens
cugauuucuuuucuguucaugaugcuuuucau

SEQ ID NO: 153660 - RNA, 32 nt, Homo Sapiens
uaaucugucuucaaccuccuguuuccuuaucu

SEQ ID NO: 153661 - RNA, 32 nt, Homo Sapiens
ggggcacacaugccccaggggagcgaggagaa

SEQ ID NO: 153662 - RNA, 32 nt, Homo Sapiens
aucucagauuguaaguuuuauuuugaaguguc

SEQ ID NO: 153663 - RNA, 32 nt, Homo Sapiens
uucccuccucugaacuauuagagcaguuacug

SEQ ID NO: 153664 - RNA, 29 nt, Homo Sapiens
ccuauuucuaugucauaccacacaguagc

SEQ ID NO: 153665 - RNA, 32 nt, Homo Sapiens
aaugcauguauuaugcauuggaaagguauuuu

SEQ ID NO: 153666 - RNA, 32 nt, Homo Sapiens
acuucagcacaccauuacaaucgggagacuaa

SEQ ID NO: 153667 - RNA, 32 nt, Homo Sapiens
acuuucccagacugguggcaucugaguucccc

SEQ ID NO: 153668 - RNA, 32 nt, Homo Sapiens
cgcuagguccaucccggcccagccaccauguc

SEQ ID NO: 153669 - RNA, 32 nt, Homo Sapiens
uggacuagcgaugcuguuuguaaaaugaagau

SEQ ID NO: 153670 - RNA, 32 nt, Homo Sapiens
aaaaaagucaaagaaaaauuguauuugaggga

SEQ ID NO: 153671 - RNA, 32 nt, Homo Sapiens
gagacugccggggccagcagggaccagcugaa

SEQ ID NO: 153672 - RNA, 32 nt, Homo Sapiens
gaacaagaacaucagcucggauguuugucucu

SEQ ID NO: 153673 - RNA, 32 nt, Homo Sapiens
aaguccaaagauuuuuuauugcugcauuucac

SEQ ID NO: 153674 - RNA, 32 nt, Homo Sapiens
uccugacuagaaugugucugggcccccaaauu

SEQ ID NO: 153675 - RNA, 32 nt, Homo Sapiens
agacaggcucaucugggagaagagggaccccu

SEQ ID NO: 153676 - RNA, 32 nt, Homo Sapiens
guguaugcuuggauuaucuacugcaauguaau

SEQ ID NO: 153677 - RNA, 32 nt, Homo Sapiens
gcccaggccaggcuguggcagaugagccgucc

SEQ ID NO: 153678 - RNA, 32 nt, Homo Sapiens
cccacagcccgugccccacgccgccuggaggc

SEQ ID NO: 153679 - RNA, 32 nt, Homo Sapiens
gccucacaaaauauggaaguugaaagaaucac

SEQ ID NO: 153680 - RNA, 32 nt, Homo Sapiens
ccuccuuuucccuccaugcuccagguccaugc

SEQ ID NO: 153681 - RNA, 32 nt, Homo Sapiens
uuuugaagauuaaaugcacacuuuuuauauaa

SEQ ID NO: 153682 - RNA, 32 nt, Homo Sapiens
gaauccugcuccacuaagaauggugcuaaagu

SEQ ID NO: 153683 - RNA, 32 nt, Homo Sapiens
uaugcucgcccagcccucccccugcugcugag

SEQ ID NO: 153684 - RNA, 32 nt, Homo Sapiens
uaggaaaccucauuuuaaauauaacacucaaa

SEQ ID NO: 153685 - RNA, 32 nt, Homo Sapiens
gggagacucugcacauugguuuagaaccaugg

SEQ ID NO: 153686 - RNA, 32 nt, Homo Sapiens
cugaguagccucaaugaaaacaccugagaaaa

SEQ ID NO: 153687 - RNA, 32 nt, Homo Sapiens
ggcuuucuuucuuuuucuucaaauuuacaagg

SEQ ID NO: 153688 - RNA, 32 nt, Homo Sapiens
gcucagggacagcagucuccccgggccuccug

SEQ ID NO: 153689 - RNA, 32 nt, Homo Sapiens
aauauaauguuaguuuuuucugauccauaaga

SEQ ID NO: 153690 - RNA, 32 nt, Homo Sapiens
ucuacgcuggaaauuugcugccucaauguuua

SEQ ID NO: 153691 - RNA, 30 nt, Homo Sapiens
ggucugaggaagccauuugagucuggccac

SEQ ID NO: 153692 - RNA, 32 nt, Homo Sapiens
gagucagcuccgagacaccugaagagcccucc

SEQ ID NO: 153693 - RNA, 32 nt, Homo Sapiens
uggcacagccaaaggcacggagggagagacag

SEQ ID NO: 153694 - RNA, 32 nt, Homo Sapiens
gggucgagcgcagaucccuguuuauugggaag

SEQ ID NO: 153695 - RNA, 29 nt, Homo Sapiens
cagggcccauaugaguaaaucuauauucc

SEQ ID NO: 153696 - RNA, 32 nt, Homo Sapiens
uuauuucuaaaaugacuggcuuagaggcagca

SEQ ID NO: 153697 - RNA, 32 nt, Homo Sapiens
agacccaagcagcuggaggcucuguguguggg

SEQ ID NO: 153698 - RNA, 32 nt, Homo Sapiens
uagugucuuuacuuaucaaaaccaucaagucc

SEQ ID NO: 153699 - RNA, 32 nt, Homo Sapiens
ucgaccucgcaugcgcgccgcgucgccucugg

SEQ ID NO: 153700 - RNA, 32 nt, Homo Sapiens
aggagcggcaaggggauaggucaucgcagucg

SEQ ID NO: 153701 - RNA, 32 nt, Homo Sapiens
aggaaaugaaaacaaaugauggucauguugca

SEQ ID NO: 153702 - RNA, 32 nt, Homo Sapiens
gccgagaaauaccacagaugcuccaugaggaa

SEQ ID NO: 153703 - RNA, 32 nt, Homo Sapiens
augucaaacaaaugugacuuaugcuggugccc

SEQ ID NO: 153704 - RNA, 32 nt, Homo Sapiens
ugcccucaaccgccuccuggugacggacuacu

SEQ ID NO: 153705 - RNA, 32 nt, Homo Sapiens
gaauuuuagaucuggaaguguccgcgggacag

SEQ ID NO: 153706 - RNA, 32 nt, Homo Sapiens
uaauuaaucuguguuggcaaagaaugucugga

SEQ ID NO: 153707 - RNA, 31 nt, Homo Sapiens
acccguggagaauuggccagagccuguggcc

SEQ ID NO: 153708 - RNA, 32 nt, Homo Sapiens
auauuauguuauauuucacuuaaaauacuauu

SEQ ID NO: 153709 - RNA, 32 nt, Homo Sapiens
gcaggaggaagccgacugcugccuggucugca

SEQ ID NO: 153710 - RNA, 32 nt, Homo Sapiens
ccucucuuuuucuguuuaauucuuugcuacug

SEQ ID NO: 153711 - RNA, 32 nt, Homo Sapiens
ucacuauuuuuuucuuuuuuaucugguaaaua

SEQ ID NO: 153712 - RNA, 32 nt, Homo Sapiens
aaccacacaacacaucaaacaggaguccuugc

SEQ ID NO: 153713 - RNA, 32 nt, Homo Sapiens
uuuuauccugcccugauucaggagauccccau

SEQ ID NO: 153714 - RNA, 32 nt, Homo Sapiens
cugaagaagcuacuaccaugagccugugcaua

SEQ ID NO: 153715 - RNA, 28 nt, Homo Sapiens
cagaagaaagauuacuguucgaagggca

SEQ ID NO: 153716 - RNA, 32 nt, Homo Sapiens
uuccgcgccucccuguccacgugcuaacagau

SEQ ID NO: 153717 - RNA, 30 nt, Homo Sapiens
gcccuuaucugugcucaggacucagaagcc

SEQ ID NO: 153718 - RNA, 32 nt, Homo Sapiens
aaagcagauuuaaugucauguucagccaagau

SEQ ID NO: 153719 - RNA, 32 nt, Homo Sapiens
ucccccaaguucucaugauccuugcuucccuu

SEQ ID NO: 153720 - RNA, 32 nt, Homo Sapiens
agacucuuggcggagcagugccacuucugcug

SEQ ID NO: 153721 - RNA, 32 nt, Homo Sapiens
gaaagauuaauagaaacucuacauauguuaau

SEQ ID NO: 153722 - RNA, 32 nt, Homo Sapiens
cuguggucuauuuccacuguuuaauuuucuac

SEQ ID NO: 153723 - RNA, 32 nt, Homo Sapiens
aucugcacagaacucagaauaaaccaucaauu

SEQ ID NO: 153724 - RNA, 32 nt, Homo Sapiens
caaagccaagcccgcugcagcugccacauccc

SEQ ID NO: 153725 - RNA, 32 nt, Homo Sapiens
gcgcugcgaugugggccacgcugccgcugcuc

SEQ ID NO: 153726 - RNA, 32 nt, Homo Sapiens
gaccacugccagccucgcuuccugcauuuucu

SEQ ID NO: 153727 - RNA, 31 nt, Homo Sapiens
caaaugcaagcccuuuuuaauuuaguuugua

SEQ ID NO: 153728 - RNA, 32 nt, Homo Sapiens
gccauauguaaaaaagaaaaaugugauuugua

SEQ ID NO: 153729 - RNA, 32 nt, Homo Sapiens
agaucacccucguggaagacgucuuagccaag

SEQ ID NO: 153730 - RNA, 32 nt, Homo Sapiens
ggagguuggauaacaaaaauagagcaucagca

SEQ ID NO: 153731 - RNA, 32 nt, Homo Sapiens
ccuuccuccuuccccugcccacagaggcagag

SEQ ID NO: 153732 - RNA, 32 nt, Homo Sapiens
cauaccuguguaaucagcaucuagacccagac

SEQ ID NO: 153733 - RNA, 32 nt, Homo Sapiens
cugguuggagcgccgcgccgcgcccgagccuc

SEQ ID NO: 153734 - RNA, 32 nt, Homo Sapiens
gugguguuuuaaccuaauaaaguugaugagag

SEQ ID NO: 153735 - RNA, 32 nt, Homo Sapiens
agguguugggggacacuccuccccucccccac

SEQ ID NO: 153736 - RNA, 32 nt, Homo Sapiens
uuuagaaagauaaggaccuuugaaagaagaca

SEQ ID NO: 153737 - RNA, 32 nt, Homo Sapiens
gcagcaucucuuaaaauucaauaugaaaagaa

SEQ ID NO: 153738 - RNA, 32 nt, Homo Sapiens
aaggccaaaaccgaaacucccaggcagaaguc

SEQ ID NO: 153739 - RNA, 32 nt, Homo Sapiens
gacaucuauaaauauaaaagggccuguaccca

SEQ ID NO: 153740 - RNA, 32 nt, Homo Sapiens
ggagcuccggugcaccaugcaggccuuggaga

SEQ ID NO: 153741 - RNA, 32 nt, Homo Sapiens
agaaaagaaaaagaagaaguagcuggcucagg

SEQ ID NO: 153742 - RNA, 32 nt, Homo Sapiens
uggcaauccaaauagguuggauaagcuuauaa

SEQ ID NO: 153743 - RNA, 32 nt, Homo Sapiens
aauuagccgggcgugguggugggcgccuguag

SEQ ID NO: 153744 - RNA, 32 nt, Homo Sapiens
gcauggucuucacaguaauauuccuugucucu

SEQ ID NO: 153745 - RNA, 31 nt, Homo Sapiens
cuuccagagucaucuaccugaguccugaagc

SEQ ID NO: 153746 - RNA, 32 nt, Homo Sapiens
ucuuguguuugugaacgcaugugaugcugugg

SEQ ID NO: 153747 - RNA, 32 nt, Homo Sapiens
uuaauuuuucuuucuuuuuuuuuuuuccccca

SEQ ID NO: 153748 - RNA, 32 nt, Homo Sapiens
ucucagcucccuccuuccccaggaggucauga

SEQ ID NO: 153749 - RNA, 32 nt, Homo Sapiens
gaguccagcugagaaacuuaugcuagauucaa

SEQ ID NO: 153750 - RNA, 32 nt, Homo Sapiens
gagaagugccagcagcugggggucaagacguc

SEQ ID NO: 153751 - RNA, 32 nt, Homo Sapiens
ccgcugcccaggcuggccgccgccgugccgau

SEQ ID NO: 153752 - RNA, 32 nt, Homo Sapiens
uuccucccauucuuaccccuuucuagagauuc

SEQ ID NO: 153753 - RNA, 32 nt, Homo Sapiens
aagauuucuguggucagaaaaagcuguaaaug

SEQ ID NO: 153754 - RNA, 31 nt, Homo Sapiens
uugugucuugguaacaaaagauuuggacagg

SEQ ID NO: 153755 - RNA, 32 nt, Homo Sapiens
agcgccucgcggacccgggcccgccccccgcc

SEQ ID NO: 153756 - RNA, 32 nt, Homo Sapiens
guggcgcuuucugcaguuugcagguuaucauu

SEQ ID NO: 153757 - RNA, 32 nt, Homo Sapiens
ucauauccuggaauugcccuccagguauccuc

SEQ ID NO: 153758 - RNA, 32 nt, Homo Sapiens
agauauuaggucccaucaauucuuagaauauc

SEQ ID NO: 153759 - RNA, 32 nt, Homo Sapiens
auguauuuguguaauuuauagaaguaaaaucu

SEQ ID NO: 153760 - RNA, 32 nt, Homo Sapiens
aauaaagaugagaaaauggaggcugaggaggg

SEQ ID NO: 153761 - RNA, 32 nt, Homo Sapiens
uugggagucugcucaggacagugguggagcug

SEQ ID NO: 153762 - RNA, 32 nt, Homo Sapiens
gacccugggucccacacugaaauccccucuag

SEQ ID NO: 153763 - RNA, 32 nt, Homo Sapiens
uauuaauaacgauaggauacaaaccaucaccc

SEQ ID NO: 153764 - RNA, 32 nt, Homo Sapiens
ggugcugcucguggugggaggggcggcaggcc

SEQ ID NO: 153765 - RNA, 32 nt, Homo Sapiens
ucugcccgcucccguuucggcgcggugaccga

SEQ ID NO: 153766 - RNA, 32 nt, Homo Sapiens
uucacuucccccuauaggaauacaaggggcca

SEQ ID NO: 153767 - RNA, 32 nt, Homo Sapiens
ccccaacagcgcccaaaggacgcacugagcaa

SEQ ID NO: 153768 - RNA, 32 nt, Homo Sapiens
cacugcacuccagccuggcugacagugagaca

SEQ ID NO: 153769 - RNA, 32 nt, Homo Sapiens
ugccugugagcuaugugugaauguguauauag

SEQ ID NO: 153770 - RNA, 32 nt, Homo Sapiens
gcugaacaagguggagacuucugaccuuuugc

SEQ ID NO: 153771 - RNA, 32 nt, Homo Sapiens
aaagcaguuaauuuauauauuaaaaaaaaaaa

SEQ ID NO: 153772 - RNA, 32 nt, Homo Sapiens
gucagguuuuuggcauggcugaccuucuguug

SEQ ID NO: 153773 - RNA, 32 nt, Homo Sapiens
cagagaaaauuuguuucuuuuuaaaauuuuuu

SEQ ID NO: 153774 - RNA, 32 nt, Homo Sapiens
gugcuaagcacucuaugggaaucaccucaugc

SEQ ID NO: 153775 - RNA, 32 nt, Homo Sapiens
gaaccgucuccauggcaacccgcgcgcagccg

SEQ ID NO: 153776 - RNA, 32 nt, Homo Sapiens
gugcagagcuccaggaaaggguaucagagcug

SEQ ID NO: 153777 - RNA, 32 nt, Homo Sapiens
gucaauaucucacucuuggggauaugagcucu

SEQ ID NO: 153778 - RNA, 32 nt, Homo Sapiens
cuuucagccagugcggugguguguguagcccc

SEQ ID NO: 153779 - RNA, 32 nt, Homo Sapiens
guagcugcuccugcgcacaaccccgccgcgcc

SEQ ID NO: 153780 - RNA, 32 nt, Homo Sapiens
acgcgucucugaauguauccgccucgguuccc

SEQ ID NO: 153781 - RNA, 32 nt, Homo Sapiens
ccccaaacccuuuucuucuccuuuccuggcuu

SEQ ID NO: 153782 - RNA, 32 nt, Homo Sapiens
ggacauggcugagcugggcaugugcugagguu

SEQ ID NO: 153783 - RNA, 32 nt, Homo Sapiens
cucauccagggccacguucuccuggcccuugg

SEQ ID NO: 153784 - RNA, 32 nt, Homo Sapiens
uuagaaaauucccaaccauuaucccuuugaau

SEQ ID NO: 153785 - RNA, 32 nt, Homo Sapiens
cauuucugagaggaggcuccagccucaggaga

SEQ ID NO: 153786 - RNA, 32 nt, Homo Sapiens
gugcuaauaaacucaugacauguguuacuuaa

SEQ ID NO: 153787 - RNA, 32 nt, Homo Sapiens
auaguugcauucgguuaauuuuuacacauuag

SEQ ID NO: 153788 - RNA, 32 nt, Homo Sapiens
uucaggggucugaaacaaaugcuacgaccacc

SEQ ID NO: 153789 - RNA, 32 nt, Homo Sapiens
ccugaaguccccagcccaccgugcucaagagu

SEQ ID NO: 153790 - RNA, 32 nt, Homo Sapiens
guucugucacuacucuguaaauuaauccgaaa

SEQ ID NO: 153791 - RNA, 32 nt, Homo Sapiens
agcacugcacacucaguucugcucuaagaagc

SEQ ID NO: 153792 - RNA, 32 nt, Homo Sapiens
ugcucugugguuuauuucuuuuuucuauugcu

SEQ ID NO: 153793 - RNA, 32 nt, Homo Sapiens
caaggcgugcgugccagugcgcgggucucggg

SEQ ID NO: 153794 - RNA, 32 nt, Homo Sapiens
ucaggccccgucccugcaccccaccccugcgu

SEQ ID NO: 153795 - RNA, 32 nt, Homo Sapiens
gcugcgaugaauccaaugauaauuacauaaau

SEQ ID NO: 153796 - RNA, 32 nt, Homo Sapiens
aguuggaggggcggggugcuggcgguguggcg

SEQ ID NO: 153797 - RNA, 32 nt, Homo Sapiens
gguauuauuguuaaauauggggacuguucacc

SEQ ID NO: 153798 - RNA, 32 nt, Homo Sapiens
gcuuuguuuggagcagaaaacaacaaacugca

SEQ ID NO: 153799 - RNA, 32 nt, Homo Sapiens
agcuccugcacaguccuccccaccgcaaggcu

SEQ ID NO: 153800 - RNA, 32 nt, Homo Sapiens
cuuuauaauuuguauuuuuuuacuguauagac

SEQ ID NO: 153801 - RNA, 32 nt, Homo Sapiens
uggcuucuagggaaagcaaggaccucacaugc

SEQ ID NO: 153802 - RNA, 32 nt, Homo Sapiens
ugggaguuaggaaguauaaguaagccaagaga

SEQ ID NO: 153803 - RNA, 32 nt, Homo Sapiens
uuaauuuauaacagucccacucaccucuauuu

SEQ ID NO: 153804 - RNA, 32 nt, Homo Sapiens
gguuucgcuauguuggccaggcuggucuugaa

SEQ ID NO: 153805 - RNA, 32 nt, Homo Sapiens
gguuucaccauguuggucaggcuggucuugga

SEQ ID NO: 153806 - RNA, 32 nt, Homo Sapiens
acaggccuguccuggguccccgcaggucugcg

SEQ ID NO: 153807 - RNA, 32 nt, Homo Sapiens
gcggggaccgccgggagcgcgcggaugucggu

SEQ ID NO: 153808 - RNA, 32 nt, Homo Sapiens
gacacgguaucugcuccaacuaucaauaguca

SEQ ID NO: 153809 - RNA, 32 nt, Homo Sapiens
aucccuuucccugacauucucuaggaaggcag

SEQ ID NO: 153810 - RNA, 32 nt, Homo Sapiens
gggguagcgggggguucccgggaggccgaggg

SEQ ID NO: 153811 - RNA, 32 nt, Homo Sapiens
uuaucacuaacauagcgagauuuuaguuugga

SEQ ID NO: 153812 - RNA, 32 nt, Homo Sapiens
aaagguccaaaauaacuuguuuuuaaaguuug

SEQ ID NO: 153813 - RNA, 32 nt, Homo Sapiens
ccuggagggcuaguucguauuuuuguguuaaa

SEQ ID NO: 153814 - RNA, 32 nt, Homo Sapiens
agcugugcaugcgcagucugcuagugugugug

SEQ ID NO: 153815 - RNA, 32 nt, Homo Sapiens
aaccuaaugcacucugggucuggccagggcuu

SEQ ID NO: 153816 - RNA, 32 nt, Homo Sapiens
ggauuucauuucugcuuuuuacuagugcagcg

SEQ ID NO: 153817 - RNA, 32 nt, Homo Sapiens
uuuggguugugugaaaacuucuuugggccuca

SEQ ID NO: 153818 - RNA, 32 nt, Homo Sapiens
ucuuugaaggcacaagacucugcuuuugccac

SEQ ID NO: 153819 - RNA, 32 nt, Homo Sapiens
guggcgcaaucucagcuggcuggagccuugac

SEQ ID NO: 153820 - RNA, 32 nt, Homo Sapiens
gugggaugauucaacuuuuucuuucucacaau

SEQ ID NO: 153821 - RNA, 32 nt, Homo Sapiens
agccgagcgcagagcgcagagccgaguggcgc

SEQ ID NO: 153822 - RNA, 32 nt, Homo Sapiens
cuguggagccaccuucgcuuaagggaacacca

SEQ ID NO: 153823 - RNA, 32 nt, Homo Sapiens
gagccugugggaagucuccauggugaaguaua

SEQ ID NO: 153824 - RNA, 32 nt, Homo Sapiens
ggccuaucauagaucucuauguucuugacuuu

SEQ ID NO: 153825 - RNA, 32 nt, Homo Sapiens
uccaggccuuggaggaaagcagaggaugaucc

SEQ ID NO: 153826 - RNA, 32 nt, Homo Sapiens
aagagguaaacagauuuagggauugauugucu

SEQ ID NO: 153827 - RNA, 32 nt, Homo Sapiens
uuuuaucguuugcuuuuuguuuuauuuucuug

SEQ ID NO: 153828 - RNA, 32 nt, Homo Sapiens
aacgguuuuuucaugauucugugaaagcuuca

SEQ ID NO: 153829 - RNA, 32 nt, Homo Sapiens
cacagggccccucuccugccuggacggcucug

SEQ ID NO: 153830 - RNA, 32 nt, Homo Sapiens
gaaaucagcacagauauuucaaaaaaguccau

SEQ ID NO: 153831 - RNA, 32 nt, Homo Sapiens
uuuuucagggaagaagcauacaacuuuggaca

SEQ ID NO: 153832 - RNA, 32 nt, Homo Sapiens
cgguccccggggcuaccaggcaggcacgugca

SEQ ID NO: 153833 - RNA, 32 nt, Homo Sapiens
auuucuucaaagccgauggggguuuucuaucu

SEQ ID NO: 153834 - RNA, 32 nt, Homo Sapiens
cugucuggccagcugcccacgaccuacggugu

SEQ ID NO: 153835 - RNA, 32 nt, Homo Sapiens
uuucugccaaacuucuuuaacucccaggaagg

SEQ ID NO: 153836 - RNA, 32 nt, Homo Sapiens
cacgccgacccgcuccacgaccuguccuucga

SEQ ID NO: 153837 - RNA, 32 nt, Homo Sapiens
cagcgcucugagaggccugaaaaggaagagca

SEQ ID NO: 153838 - RNA, 32 nt, Homo Sapiens
ucauagggacuuugccuauuaagucuaccaaa

SEQ ID NO: 153839 - RNA, 32 nt, Homo Sapiens
ucaaaggcaagcgccagugguaggguagaaga

SEQ ID NO: 153840 - RNA, 32 nt, Homo Sapiens
ccucguugacuucacagugucagugcaguuug

SEQ ID NO: 153841 - RNA, 32 nt, Homo Sapiens
auggggacaaacgaaauaauagagauaagcac

SEQ ID NO: 153842 - RNA, 32 nt, Homo Sapiens
uccagggccuccccgccuuccuucuuccuuuu

SEQ ID NO: 153843 - RNA, 32 nt, Homo Sapiens
cgugcugagccuucugcugagguccuugcgug

SEQ ID NO: 153844 - RNA, 32 nt, Homo Sapiens
aacuuugagaaauuauuucugaguugaccaau

SEQ ID NO: 153845 - RNA, 32 nt, Homo Sapiens
uacagauauuuucagggauugcuucagaugaa

SEQ ID NO: 153846 - RNA, 32 nt, Homo Sapiens
gagggaauauauuugcagaaagucgcauaggg

SEQ ID NO: 153847 - RNA, 32 nt, Homo Sapiens
ugugagacuggauuuuccucauauacugugaa

SEQ ID NO: 153848 - RNA, 32 nt, Homo Sapiens
gauacuuuuguaaauaaauguaaauauguaca

SEQ ID NO: 153849 - RNA, 32 nt, Homo Sapiens
guuuucuugauuaggugucuuaucuuccauug

SEQ ID NO: 153850 - RNA, 32 nt, Homo Sapiens
agaccguguucgagcagcuggugcugguggac

SEQ ID NO: 153851 - RNA, 32 nt, Homo Sapiens
ucaaaaaaccaaacagaagcaagggaguauca

SEQ ID NO: 153852 - RNA, 32 nt, Homo Sapiens
auagguaguugauauuuuaaaaacuuuagauu

SEQ ID NO: 153853 - RNA, 32 nt, Homo Sapiens
agaacccugccagcugagcccugugcaucuac

SEQ ID NO: 153854 - RNA, 32 nt, Homo Sapiens
agagagcuguucuuguuucugguguugucacg

SEQ ID NO: 153855 - RNA, 32 nt, Homo Sapiens
auauaucuauauauuucucucacccuauuuug

SEQ ID NO: 153856 - RNA, 32 nt, Homo Sapiens
uguacaggaguggucaaaaaacaaagcugaau

SEQ ID NO: 153857 - RNA, 32 nt, Homo Sapiens
ccggagugcuuccagccaaaacaacaagggcc

SEQ ID NO: 153858 - RNA, 32 nt, Homo Sapiens
auggucaccccacuuugguucaauccuguucu

SEQ ID NO: 153859 - RNA, 32 nt, Homo Sapiens
ucuacagauaaugcauguuuuacaguacucca

SEQ ID NO: 153860 - RNA, 32 nt, Homo Sapiens
cuaugcccuuugcauguggugccagaauaggc

SEQ ID NO: 153861 - RNA, 32 nt, Homo Sapiens
gccaugagguuuuggaacagagugcuguuuua

SEQ ID NO: 153862 - RNA, 32 nt, Homo Sapiens
gacuucuuggaccuccucccccgccccaauuc

SEQ ID NO: 153863 - RNA, 32 nt, Homo Sapiens
cuugaugcaauaagccgcacacuuagggaagc

SEQ ID NO: 153864 - RNA, 32 nt, Homo Sapiens
aggaaguucaguuucuuucuucuuuaucucac

SEQ ID NO: 153865 - RNA, 32 nt, Homo Sapiens
uugaggucgggcguuugagaccagccugguca

SEQ ID NO: 153866 - RNA, 32 nt, Homo Sapiens
aguucucagaagcuagcagagaguugcugcuc

SEQ ID NO: 153867 - RNA, 32 nt, Homo Sapiens
aggaaguggggaggaguguuccgggaccaugg

SEQ ID NO: 153868 - RNA, 32 nt, Homo Sapiens
accgagcgggcggcgggcgcgcgcaccauggg

SEQ ID NO: 153869 - RNA, 32 nt, Homo Sapiens
ucauaagaacagagacuuuaaccuccaugaac

SEQ ID NO: 153870 - RNA, 32 nt, Homo Sapiens
ccgcuccugucugccagccagcagccagcucu

SEQ ID NO: 153871 - RNA, 32 nt, Homo Sapiens
uuuguuuccaucagaauaaccaaaagcauuua

SEQ ID NO: 153872 - RNA, 32 nt, Homo Sapiens
uucagucaccaugaagcugcugcugcugcacc

SEQ ID NO: 153873 - RNA, 32 nt, Homo Sapiens
gucggggagacggaacugcggcgaccauguau

SEQ ID NO: 153874 - RNA, 32 nt, Homo Sapiens
guuaguguuucuagcauuaucccaucccuuug

SEQ ID NO: 153875 - RNA, 32 nt, Homo Sapiens
gaguuuucugaaauuuauauuuuaaacuuuuc

SEQ ID NO: 153876 - RNA, 32 nt, Homo Sapiens
uccugaugacagaacacagaucucuuguucgc

SEQ ID NO: 153877 - RNA, 32 nt, Homo Sapiens
ugcuguauauauauuccgggcaauauaugagu

SEQ ID NO: 153878 - RNA, 32 nt, Homo Sapiens
uacuacauuauuaauggguuuuguguacugua

SEQ ID NO: 153879 - RNA, 32 nt, Homo Sapiens
uaaggugcucucggggccuccuuggacuuguc

SEQ ID NO: 153880 - RNA, 32 nt, Homo Sapiens
gcuucgagcacuuuucuaacuaaugagcucug

SEQ ID NO: 153881 - RNA, 32 nt, Homo Sapiens
ccagugaggugaugaagagguuugagcuuuag

SEQ ID NO: 153882 - RNA, 32 nt, Homo Sapiens
acaccugggcauugcaccccaggcuaugcagu

SEQ ID NO: 153883 - RNA, 32 nt, Homo Sapiens
ccccugccucacugccuauuugaggaacuuuc

SEQ ID NO: 153884 - RNA, 31 nt, Homo Sapiens
aucuggcagccccaggccugguccugggugc

SEQ ID NO: 153885 - RNA, 32 nt, Homo Sapiens
ccaaugugaaauguauuuuggauguaucuggu

SEQ ID NO: 153886 - RNA, 32 nt, Homo Sapiens
aaggcccgcagaugcuaagagggccuauuguc

SEQ ID NO: 153887 - RNA, 32 nt, Homo Sapiens
uaaauuuaaagacuugugcagcccuuaccaca

SEQ ID NO: 153888 - RNA, 32 nt, Homo Sapiens
ugcugucuuaugccugucacuguauguaugac

SEQ ID NO: 153889 - RNA, 32 nt, Homo Sapiens
aggccaauauauuuugaaauauugaugcagac

SEQ ID NO: 153890 - RNA, 32 nt, Homo Sapiens
cgcuauauguuguuuaucacuauaucuucagu

SEQ ID NO: 153891 - RNA, 32 nt, Homo Sapiens
gagggagacagggccagacauguucuagcaga

SEQ ID NO: 153892 - RNA, 32 nt, Homo Sapiens
ccugcuuuuccccauagcacagaccauaagaa

SEQ ID NO: 153893 - RNA, 32 nt, Homo Sapiens
cuaacuuugcacucuuugauaauaauguuuua

SEQ ID NO: 153894 - RNA, 32 nt, Homo Sapiens
augaauuauuuauucauuucucuccucugcca

SEQ ID NO: 153895 - RNA, 32 nt, Homo Sapiens
ugacagaggcucugaggccuguggcuggaccc

SEQ ID NO: 153896 - RNA, 32 nt, Homo Sapiens
agcaucaaucaaaacaaugaaaucaaugaaac

SEQ ID NO: 153897 - RNA, 32 nt, Homo Sapiens
cagucagcugggucucagccacguacaaccuc

SEQ ID NO: 153898 - RNA, 32 nt, Homo Sapiens
cuuugcacuccagcguggaagacagugagacu

SEQ ID NO: 153899 - RNA, 32 nt, Homo Sapiens
gccuacaccacuuuuaguaccaacacucuugg

SEQ ID NO: 153900 - RNA, 32 nt, Homo Sapiens
auguuuuuaacugaaugugaccucaggggaau

SEQ ID NO: 153901 - RNA, 32 nt, Homo Sapiens
uuguuccugcuguccccuccccuucaggcccc

SEQ ID NO: 153902 - RNA, 32 nt, Homo Sapiens
ugggcggccugcgggggcggcgcaguugcgaa

SEQ ID NO: 153903 - RNA, 32 nt, Homo Sapiens
uaaggaaucuuuuguucuuaauucugaguugc

SEQ ID NO: 153904 - RNA, 32 nt, Homo Sapiens
agucacauuugugaagaugugaggcugguucu

SEQ ID NO: 153905 - RNA, 32 nt, Homo Sapiens
gacaggccgguggcugacccaggauugcacca

SEQ ID NO: 153906 - RNA, 32 nt, Homo Sapiens
aagguagccaaguuuaacuauuuacacaacua

SEQ ID NO: 153907 - RNA, 32 nt, Homo Sapiens
cgcuccgccucccggguucacgccauucuccu

SEQ ID NO: 153908 - RNA, 32 nt, Homo Sapiens
gcgggccagggaggaaaaccagagcacacagu

SEQ ID NO: 153909 - RNA, 32 nt, Homo Sapiens
gagcuauaauuuccuuuucguguuauaucaug

SEQ ID NO: 153910 - RNA, 32 nt, Homo Sapiens
cuuauccagguacguggaccugggaugggagu

SEQ ID NO: 153911 - RNA, 32 nt, Homo Sapiens
gaugccgacagcuagugacagaugaagaugga

SEQ ID NO: 153912 - RNA, 28 nt, Homo Sapiens
agucauguuacaggccgagugcgguggc

SEQ ID NO: 153913 - RNA, 32 nt, Homo Sapiens
uaugccuggaagaaauuuuaccuagugugaca

SEQ ID NO: 153914 - RNA, 32 nt, Homo Sapiens
aaagggaggguggaaggauggguagcacauca

SEQ ID NO: 153915 - RNA, 32 nt, Homo Sapiens
agaggcagucuauugcaaggaccuucuuugcu

SEQ ID NO: 153916 - RNA, 31 nt, Homo Sapiens
caccccccacccuccuccaggacaccacuag

SEQ ID NO: 153917 - RNA, 32 nt, Homo Sapiens
cacugugggucaggggaaugggaccagcagga

SEQ ID NO: 153918 - RNA, 32 nt, Homo Sapiens
aaaaaacuaaaguuuaagugcacaucccgauc

SEQ ID NO: 153919 - RNA, 32 nt, Homo Sapiens
aaauggccaucuuuaagcauauuuauuuucug

SEQ ID NO: 153920 - RNA, 32 nt, Homo Sapiens
cagaugcgggacgagaaccaguagcccuguuc

SEQ ID NO: 153921 - RNA, 32 nt, Homo Sapiens
auggugagaugcuuguuaagacuuuauacuug

SEQ ID NO: 153922 - RNA, 32 nt, Homo Sapiens
gcccggauguacugaggaugcguuacaguuuc

SEQ ID NO: 153923 - RNA, 32 nt, Homo Sapiens
ccaaaacccagcugcaccccuuccugggcaca

SEQ ID NO: 153924 - RNA, 32 nt, Homo Sapiens
acggaucaaaccaaauaaucuaaaucaaguug

SEQ ID NO: 153925 - RNA, 32 nt, Homo Sapiens
gcguuuggaauagcugcugcaauguagucuug

SEQ ID NO: 153926 - RNA, 32 nt, Homo Sapiens
caauuggaggguggagagugaagagccggagc

SEQ ID NO: 153927 - RNA, 32 nt, Homo Sapiens
accauuuaguaaauaaauacauuacauuuuug

SEQ ID NO: 153928 - RNA, 32 nt, Homo Sapiens
uaucagacagauuauaaaaauggcuuuuaaug

SEQ ID NO: 153929 - RNA, 32 nt, Homo Sapiens
gaaaauuuuuaaaugcuaugguuucuuaauag

SEQ ID NO: 153930 - RNA, 32 nt, Homo Sapiens
caauguaaaauaauuaaaauggcauuuuauua

SEQ ID NO: 153931 - RNA, 32 nt, Homo Sapiens
uuguuauuugucaacuacaaauaaaaauugaa

SEQ ID NO: 153932 - RNA, 32 nt, Homo Sapiens
ugauggauucauuuuuaauuugcauuacaaaa

SEQ ID NO: 153933 - RNA, 32 nt, Homo Sapiens
agucaccucugagccacccaucaccgccaaag

SEQ ID NO: 153934 - RNA, 32 nt, Homo Sapiens
ccaggguugggggcgccacagcugcgagcccg

SEQ ID NO: 153935 - RNA, 32 nt, Homo Sapiens
augucuaccuuauaugcagagccuuggaaaga

SEQ ID NO: 153936 - RNA, 32 nt, Homo Sapiens
aggcauugacuucugaaaaaaugaucugaaaa

SEQ ID NO: 153937 - RNA, 32 nt, Homo Sapiens
aaaaauguauauauauuaagaggucacggggg

SEQ ID NO: 153938 - RNA, 32 nt, Homo Sapiens
aaccuucugccucccuaaugagacaccucuuu

SEQ ID NO: 153939 - RNA, 32 nt, Homo Sapiens
ucauagacaaaacauuuguuuuauagagucag

SEQ ID NO: 153940 - RNA, 32 nt, Homo Sapiens
uuggauuucaauugucccuacccagccuaaac

SEQ ID NO: 153941 - RNA, 32 nt, Homo Sapiens
uucuggcuuuucugcuguaaauagugaaggaa

SEQ ID NO: 153942 - RNA, 32 nt, Homo Sapiens
ccuaucuugugcucuucugucugcagugugca

SEQ ID NO: 153943 - RNA, 32 nt, Homo Sapiens
augaauauacaaaauauaacuuuaaaagcuau

SEQ ID NO: 153944 - RNA, 32 nt, Homo Sapiens
augggauagaaagauggucagcaguucuggaa

SEQ ID NO: 153945 - RNA, 31 nt, Homo Sapiens
agcggcgagcgcagccaugccccaggccgcc

SEQ ID NO: 153946 - RNA, 32 nt, Homo Sapiens
ugucgggcuuauaaaaaucugugccaucaugg

SEQ ID NO: 153947 - RNA, 32 nt, Homo Sapiens
ccugugcccaaccccgcgucugcaucuggaga

SEQ ID NO: 153948 - RNA, 32 nt, Homo Sapiens
uggaucccuagagguggcccccugcccgaucc

SEQ ID NO: 153949 - RNA, 32 nt, Homo Sapiens
ccacacuccaaaaacuaacaaagaauaaauaa

SEQ ID NO: 153950 - RNA, 32 nt, Homo Sapiens
uguaguuugcacuggacgcccgggcccucccu

SEQ ID NO: 153951 - RNA, 32 nt, Homo Sapiens
cacccucuauagaauauaaagacuaaaaauaa

SEQ ID NO: 153952 - RNA, 32 nt, Homo Sapiens
uccuuaucugcuccaaccuggacucauuuaga

SEQ ID NO: 153953 - RNA, 32 nt, Homo Sapiens
ggugggugguaagagggaaacucuggagagcc

SEQ ID NO: 153954 - RNA, 30 nt, Homo Sapiens
uugggucugcuaaaguuuggggggaaaugu

SEQ ID NO: 153955 - RNA, 32 nt, Homo Sapiens
uuagaaaguccuccucugucucuauguuucuu

SEQ ID NO: 153956 - RNA, 32 nt, Homo Sapiens
uagcuguguggccuugggcuugcugcuucauu

SEQ ID NO: 153957 - RNA, 32 nt, Homo Sapiens
auauguuuuuucucuguaaauuuguuauaaac

SEQ ID NO: 153958 - RNA, 32 nt, Homo Sapiens
ucauacuuaaaauugacuauuaaugaaccuua

SEQ ID NO: 153959 - RNA, 32 nt, Homo Sapiens
uccuccuccaauugguuuaaugcugaauuacu

SEQ ID NO: 153960 - RNA, 32 nt, Homo Sapiens
agggaggagggcggggggaggggaggguugcc

SEQ ID NO: 153961 - RNA, 32 nt, Homo Sapiens
guccuccugcccacccacacugacggcaucuu

SEQ ID NO: 153962 - RNA, 32 nt, Homo Sapiens
uaauuuacauauuuucuuucuguugaaauaac

SEQ ID NO: 153963 - RNA, 32 nt, Homo Sapiens
caacagggcugggauuaggaugaagugaguga

SEQ ID NO: 153964 - RNA, 32 nt, Homo Sapiens
ggugagaggaagcaaucaguauggaaauggag

SEQ ID NO: 153965 - RNA, 32 nt, Homo Sapiens
accgccucggccaguggccggaggcaggagcg

SEQ ID NO: 153966 - RNA, 32 nt, Homo Sapiens
gcagccagcccgcugcguccccuucccgggcu

SEQ ID NO: 153967 - RNA, 32 nt, Homo Sapiens
aaagaacugguguggugguguuuucuuuucuu

SEQ ID NO: 153968 - RNA, 32 nt, Homo Sapiens
gccaaggaccagcaucuguccgcauuucacua

SEQ ID NO: 153969 - RNA, 32 nt, Homo Sapiens
uaaccuuacugagggagggaaauacggaagcc

SEQ ID NO: 153970 - RNA, 32 nt, Homo Sapiens
ugugacauagacuugacagggauuguaugccu

SEQ ID NO: 153971 - RNA, 32 nt, Homo Sapiens
aauguuugcugaugaaguacaaguugaaaugu

SEQ ID NO: 153972 - RNA, 32 nt, Homo Sapiens
uguuuuugcccccaguucuguccacaccccuu

SEQ ID NO: 153973 - RNA, 32 nt, Homo Sapiens
gggaaagugacuuuuccaaagcugcacagcua

SEQ ID NO: 153974 - RNA, 32 nt, Homo Sapiens
gagcagagccccacccauccuuccucugcgcc

SEQ ID NO: 153975 - RNA, 32 nt, Homo Sapiens
cacgagaggaacuuaaacaucuguggaaccaa

SEQ ID NO: 153976 - RNA, 32 nt, Homo Sapiens
ggcuggaggaggagcuagaugccgguggacag

SEQ ID NO: 153977 - RNA, 32 nt, Homo Sapiens
aauacucaauuucugaggcuuaggagaauacu

SEQ ID NO: 153978 - RNA, 32 nt, Homo Sapiens
caaaaggagcccggugaugcugcgaaggcugu

SEQ ID NO: 153979 - RNA, 32 nt, Homo Sapiens
ugggugugguggcgcaugccuguaauccuagc

SEQ ID NO: 153980 - RNA, 32 nt, Homo Sapiens
cggauccagacgcugcguuugcuggcuuugau

SEQ ID NO: 153981 - RNA, 32 nt, Homo Sapiens
cguugcccacugcaaguucucuccaggugcaa

SEQ ID NO: 153982 - RNA, 32 nt, Homo Sapiens
ggucucacuauguugcugaggcuggucucaaa

SEQ ID NO: 153983 - RNA, 32 nt, Homo Sapiens
uccuagcauaugcuguuugguaugugaggguu

SEQ ID NO: 153984 - RNA, 32 nt, Homo Sapiens
uuguuaaaaaugugcaauaaaaauagauuaca

SEQ ID NO: 153985 - RNA, 32 nt, Homo Sapiens
ccacauuuacacauccacacacgcacacgggc

SEQ ID NO: 153986 - RNA, 30 nt, Homo Sapiens
ggccguggagguggugucugcugugcuuaa

SEQ ID NO: 153987 - RNA, 32 nt, Homo Sapiens
ccggaggccucggcccggccucaucgugccgg

SEQ ID NO: 153988 - RNA, 32 nt, Homo Sapiens
auacuguguuuccaguugucuugauauugaaa

SEQ ID NO: 153989 - RNA, 32 nt, Homo Sapiens
ugaccuaaugaaacugaucauggcuucccacu

SEQ ID NO: 153990 - RNA, 32 nt, Homo Sapiens
uugcagcugaaagugugccaaccccguacaag

SEQ ID NO: 153991 - RNA, 32 nt, Homo Sapiens
aauucucccucccccagcccuucccugacccc

SEQ ID NO: 153992 - RNA, 32 nt, Homo Sapiens
gcaaggcgaccugggcugcugcccgaagguuu

SEQ ID NO: 153993 - RNA, 32 nt, Homo Sapiens
acagaacuugguuuccuuugccgaucuuaugu

SEQ ID NO: 153994 - RNA, 32 nt, Homo Sapiens
augcuugcugaacacaugaaucgcugacuucc

SEQ ID NO: 153995 - RNA, 32 nt, Homo Sapiens
ucccaccgcgcccucgcuccuaccuccccaca

SEQ ID NO: 153996 - RNA, 32 nt, Homo Sapiens
agaauaacuguuccaaugauaauuauuacuuu

SEQ ID NO: 153997 - RNA, 32 nt, Homo Sapiens
uucgaaggcagacaugaggaaggccuuaguca

SEQ ID NO: 153998 - RNA, 32 nt, Homo Sapiens
acggaguuuugcucuuguuacccaggcaggag

SEQ ID NO: 153999 - RNA, 32 nt, Homo Sapiens
ugccaagcuaauuuauagcaagauauugauca

SEQ ID NO: 154000 - RNA, 32 nt, Homo Sapiens
uuuauaacuauaagaaugugccaguuaaagug

SEQ ID NO: 154001 - RNA, 32 nt, Homo Sapiens
gcuucucggccgcggagccacuuggggccuca

SEQ ID NO: 154002 - RNA, 29 nt, Homo Sapiens
guucuuuaauaaaaguauuugaaaggcaa

SEQ ID NO: 154003 - RNA, 32 nt, Homo Sapiens
aucucuaaugaaauuuuucuugaugucugugg

SEQ ID NO: 154004 - RNA, 32 nt, Homo Sapiens
guccucuucaccuggggguggggggugggggc

SEQ ID NO: 154005 - RNA, 32 nt, Homo Sapiens
gacagacggugcucagccuguguccuggggca

SEQ ID NO: 154006 - RNA, 32 nt, Homo Sapiens
ccgagcggccucgggcccgccacgcgccgcca

SEQ ID NO: 154007 - RNA, 32 nt, Homo Sapiens
agccgcugcccccagcgaaguccacauuccaa

SEQ ID NO: 154008 - RNA, 32 nt, Homo Sapiens
uuaaccaguauugccauagaaacugccucuuu

SEQ ID NO: 154009 - RNA, 32 nt, Homo Sapiens
uaucugggaaagauuugauaauaguuguuugu

SEQ ID NO: 154010 - RNA, 32 nt, Homo Sapiens
gacuaccccgcgcgccaggcaggcggagcggg

SEQ ID NO: 154011 - RNA, 32 nt, Homo Sapiens
gugcugguucacucugcccagcccugaaugug

SEQ ID NO: 154012 - RNA, 32 nt, Homo Sapiens
cgccaccccccgcccugcccccugccagccag

SEQ ID NO: 154013 - RNA, 32 nt, Homo Sapiens
ucagcggggaggaggagcugcugcaaggcccu

SEQ ID NO: 154014 - RNA, 32 nt, Homo Sapiens
ugcuuccggaagcuugcgaaacugcaaguagc

SEQ ID NO: 154015 - RNA, 32 nt, Homo Sapiens
ggcuauggcuuaagcuguaagaauaaugggcu

SEQ ID NO: 154016 - RNA, 32 nt, Homo Sapiens
aggggggcccccagccuuuaaccccguaacac

SEQ ID NO: 154017 - RNA, 32 nt, Homo Sapiens
uuaagagauauguuuggcuaauucuguaauuu

SEQ ID NO: 154018 - RNA, 32 nt, Homo Sapiens
caccaacccccagggccuccccgcagucccug

SEQ ID NO: 154019 - RNA, 32 nt, Homo Sapiens
cagggaaguggucuccccaauucuccccuccc

SEQ ID NO: 154020 - RNA, 32 nt, Homo Sapiens
uauucgcaaaaugcauuucaaaaaagaacacu

SEQ ID NO: 154021 - RNA, 32 nt, Homo Sapiens
ugcagccguggcgugcaggacucggguggcuc

SEQ ID NO: 154022 - RNA, 32 nt, Homo Sapiens
ggucccaccucagccgcaccuugcuggaugcu

SEQ ID NO: 154023 - RNA, 32 nt, Homo Sapiens
ggauggagucucacuauguugcccagacuggu

SEQ ID NO: 154024 - RNA, 32 nt, Homo Sapiens
agugagaggacaacagaagggacuucgcaaca

SEQ ID NO: 154025 - RNA, 32 nt, Homo Sapiens
ucagcuccacgcccgggccccuggaccacggg

SEQ ID NO: 154026 - RNA, 32 nt, Homo Sapiens
acugcugagugauucauaaacauaucaaccaa

SEQ ID NO: 154027 - RNA, 32 nt, Homo Sapiens
cgggugagccuggccugucccguucagccguu

SEQ ID NO: 154028 - RNA, 32 nt, Homo Sapiens
ucucgccugagagcggcugagggcugccucac

SEQ ID NO: 154029 - RNA, 32 nt, Homo Sapiens
cccucgcuugggcccuucucuaugccuuaguc

SEQ ID NO: 154030 - RNA, 32 nt, Homo Sapiens
ugggacucccaucaagucuccacacagcuagc

SEQ ID NO: 154031 - RNA, 32 nt, Homo Sapiens
aaacuggggguugugggaagugagcagccauc

SEQ ID NO: 154032 - RNA, 32 nt, Homo Sapiens
ugugggaggcugggcugcuuagugucuucuag

SEQ ID NO: 154033 - RNA, 32 nt, Homo Sapiens
uuaaccugaaauuuuaaauccacagauugaga

SEQ ID NO: 154034 - RNA, 32 nt, Homo Sapiens
gaggcugugucuguaugguggaugcuguuaaa

SEQ ID NO: 154035 - RNA, 32 nt, Homo Sapiens
aauaguuuaggaccacaagagauuuggccucc

SEQ ID NO: 154036 - RNA, 32 nt, Homo Sapiens
uacccuaccccaccacaccccaucccagaggc

SEQ ID NO: 154037 - RNA, 32 nt, Homo Sapiens
uuuucaugaguuuuuauuuugucucugagauu

SEQ ID NO: 154038 - RNA, 32 nt, Homo Sapiens
gggcgcagggggcuacuguuguuugaaggcug

SEQ ID NO: 154039 - RNA, 32 nt, Homo Sapiens
aggcgucgucuucucuuaaaauguaggucaag

SEQ ID NO: 154040 - RNA, 32 nt, Homo Sapiens
auauauaugugacaaguauuaacaucagugcc

SEQ ID NO: 154041 - RNA, 32 nt, Homo Sapiens
cgaggacggcccggcugggcggccccgagcuc

SEQ ID NO: 154042 - RNA, 32 nt, Homo Sapiens
acugggggaaaggcugccuguaccucucaagc

SEQ ID NO: 154043 - RNA, 32 nt, Homo Sapiens
ucagguggaaaaguacagugcugccugcccug

SEQ ID NO: 154044 - RNA, 30 nt, Homo Sapiens
ugugggaggaagcuugaguuugaugcaggg

SEQ ID NO: 154045 - RNA, 32 nt, Homo Sapiens
agcgcgucuccuuccgccggcgcgggcggggc

SEQ ID NO: 154046 - RNA, 32 nt, Homo Sapiens
uucaggcagagguggcuccacaguguuggaau

SEQ ID NO: 154047 - RNA, 32 nt, Homo Sapiens
cacucucuugggccagccccagcaccucaugc

SEQ ID NO: 154048 - RNA, 32 nt, Homo Sapiens
uuaacggucuuuuuaaagugcauuuaaauaca

SEQ ID NO: 154049 - RNA, 32 nt, Homo Sapiens
gacacauauuaggcacuggauaaguauuuauu

SEQ ID NO: 154050 - RNA, 32 nt, Homo Sapiens
aacauuuugugacgugaaaauuuuaugacauc

SEQ ID NO: 154051 - RNA, 32 nt, Homo Sapiens
caguguuguauauauaaauaugcaagaugugc

SEQ ID NO: 154052 - RNA, 32 nt, Homo Sapiens
gcacagacuugagcggcggcgccgcgggaggc

SEQ ID NO: 154053 - RNA, 32 nt, Homo Sapiens
uggauggguuugauuucuuuugcuauuucauu

SEQ ID NO: 154054 - RNA, 32 nt, Homo Sapiens
gucugguuacacaacugaaacaggagcaaguu

SEQ ID NO: 154055 - RNA, 32 nt, Homo Sapiens
agaaaauuuaaaaugccugggaguggcuauag

SEQ ID NO: 154056 - RNA, 32 nt, Homo Sapiens
gcaucuugcuggagccguuccaucccggagcu

SEQ ID NO: 154057 - RNA, 32 nt, Homo Sapiens
ugaugguuugguuuccucucugcucugccccu

SEQ ID NO: 154058 - RNA, 32 nt, Homo Sapiens
agagacugauccaaaaauuauaacggcaggga

SEQ ID NO: 154059 - RNA, 32 nt, Homo Sapiens
gucaaagguaggcaggauagggacccaggucu

SEQ ID NO: 154060 - RNA, 31 nt, Homo Sapiens
agggguggagccugccugcccgugggccuuu

SEQ ID NO: 154061 - RNA, 32 nt, Homo Sapiens
uuaagaacuuuaagaauaaauauuuuaacaca

SEQ ID NO: 154062 - RNA, 32 nt, Homo Sapiens
gcauccucaauccacagucuccaacaacaguu

SEQ ID NO: 154063 - RNA, 32 nt, Homo Sapiens
guagaucauuuaugggauuggugcugauugaa

SEQ ID NO: 154064 - RNA, 32 nt, Homo Sapiens
cuuucgguuucguuucccgccggcgucuccac

SEQ ID NO: 154065 - RNA, 32 nt, Homo Sapiens
ccgcccacuucuaccccguggaugccgucacc

SEQ ID NO: 154066 - RNA, 32 nt, Homo Sapiens
aaccggagcgcggggccgcggucgccccgacc

SEQ ID NO: 154067 - RNA, 32 nt, Homo Sapiens
auuuuuccacccaaaagucauuuggcaacauc

SEQ ID NO: 154068 - RNA, 32 nt, Homo Sapiens
cuaagaaaaaauaugauauacacacacauuau

SEQ ID NO: 154069 - RNA, 32 nt, Homo Sapiens
aucugggaaaugcaagucaaaacuacagugag

SEQ ID NO: 154070 - RNA, 32 nt, Homo Sapiens
cgggcacucuaaauauugaguguuauggagga

SEQ ID NO: 154071 - RNA, 32 nt, Homo Sapiens
uucugggggucccaccugagggaucuggugca

SEQ ID NO: 154072 - RNA, 32 nt, Homo Sapiens
uuucuucuggguggcaaaguuacuacuggaaa

SEQ ID NO: 154073 - RNA, 32 nt, Homo Sapiens
cuauuaguguuguauuuuuucauuuacauuaa

SEQ ID NO: 154074 - RNA, 32 nt, Homo Sapiens
cgcuaggccccggccgcacuguccucuuuggc

SEQ ID NO: 154075 - RNA, 32 nt, Homo Sapiens
uaccaaccccagguauuaauucucgcugguuu

SEQ ID NO: 154076 - RNA, 32 nt, Homo Sapiens
aacucaccaaagguaaauaucuguaucuauua

SEQ ID NO: 154077 - RNA, 32 nt, Homo Sapiens
agccaugaguccuggaggaggagaggaccccu

SEQ ID NO: 154078 - RNA, 32 nt, Homo Sapiens
agggggcgauauacuaaauguauuuuagacuu

SEQ ID NO: 154079 - RNA, 32 nt, Homo Sapiens
ugacuaauaaagguaccagaagaauauggcug

SEQ ID NO: 154080 - RNA, 32 nt, Homo Sapiens
acccacagccuauuccacuccuccccaucucc

SEQ ID NO: 154081 - RNA, 32 nt, Homo Sapiens
caaagccgcccggcucccggaagccgcaggug

SEQ ID NO: 154082 - RNA, 32 nt, Homo Sapiens
gaugagggcgagggcgcggggagggguggggg

SEQ ID NO: 154083 - RNA, 32 nt, Homo Sapiens
gucccacaugguccaacugacacacacguuuc

SEQ ID NO: 154084 - RNA, 32 nt, Homo Sapiens
agccuaaccaacauggugaaaccccgucucua

SEQ ID NO: 154085 - RNA, 32 nt, Homo Sapiens
acuuguguuuuaaaauaaggauuuuucucuua

SEQ ID NO: 154086 - RNA, 32 nt, Homo Sapiens
ugagcuuaauaaaugugcauuugguuuuuucc

SEQ ID NO: 154087 - RNA, 32 nt, Homo Sapiens
caaaguggcagggaccggcagagcucuacagg

SEQ ID NO: 154088 - RNA, 32 nt, Homo Sapiens
caugaaguucccucucgcugaacugaaaagag

SEQ ID NO: 154089 - RNA, 32 nt, Homo Sapiens
aacuaagcaagauugugaucccagaaauuggc

SEQ ID NO: 154090 - RNA, 32 nt, Homo Sapiens
gucagaggucaggagcagggcuggggucagga

SEQ ID NO: 154091 - RNA, 32 nt, Homo Sapiens
ugaagaucucaguucucaaaaaucacaaguug

SEQ ID NO: 154092 - RNA, 32 nt, Homo Sapiens
ugaauauauguauauauacauauauauacgca

SEQ ID NO: 154093 - RNA, 32 nt, Homo Sapiens
uccuaagccugccccauccccuccucacccca

SEQ ID NO: 154094 - RNA, 32 nt, Homo Sapiens
ucacaucugcccgugugccugucccugccacc

SEQ ID NO: 154095 - RNA, 28 nt, Homo Sapiens
aauuacauugacaacuaaaaaaaaaaaa

SEQ ID NO: 154096 - RNA, 32 nt, Homo Sapiens
ggugacagagcgagacuuauagauagauagau

SEQ ID NO: 154097 - RNA, 32 nt, Homo Sapiens
uggagucugcaccuccuggaaauccugccacc

SEQ ID NO: 154098 - RNA, 32 nt, Homo Sapiens
cacccacccacccaccacacuggacuuuucua

SEQ ID NO: 154099 - RNA, 32 nt, Homo Sapiens
aaucuggcuuacaugcacguccagucauagua

SEQ ID NO: 154100 - RNA, 32 nt, Homo Sapiens
cugccgcccgcaccugcagcuccgcaccugcg

SEQ ID NO: 154101 - RNA, 32 nt, Homo Sapiens
cagaaaucuaaagaucuuuguucuauaacugu

SEQ ID NO: 154102 - RNA, 32 nt, Homo Sapiens
auuauuuaucuuuugaaccagagcuaaauggu

SEQ ID NO: 154103 - RNA, 32 nt, Homo Sapiens
acaaauccaaguuaguauucuaauuggaauug

SEQ ID NO: 154104 - RNA, 32 nt, Homo Sapiens
aaaauucugagugauccaggguaugaccuagg

SEQ ID NO: 154105 - RNA, 32 nt, Homo Sapiens
ccuaugcacuuuucuuuuuuuuuuuugagaug

SEQ ID NO: 154106 - RNA, 32 nt, Homo Sapiens
agggcgcacggcccgcgaccgagcgugcggac

SEQ ID NO: 154107 - RNA, 32 nt, Homo Sapiens
ccaucugcgcccugacugacggcggccaguuc

SEQ ID NO: 154108 - RNA, 32 nt, Homo Sapiens
uugugcugaucuuaauuuucuaccuuaucauc

SEQ ID NO: 154109 - RNA, 32 nt, Homo Sapiens
cacaggccccacuugcuaagggcaaaugaacg

SEQ ID NO: 154110 - RNA, 32 nt, Homo Sapiens
gaaaacauguccauccuguggaggccaggcuc

SEQ ID NO: 154111 - RNA, 32 nt, Homo Sapiens
accucaccaauaucuacgcucccccauugccu

SEQ ID NO: 154112 - RNA, 32 nt, Homo Sapiens
gauggggcuguuuucccccaccucugaguagu

SEQ ID NO: 154113 - RNA, 32 nt, Homo Sapiens
ugccaguuggguggagaugucuaggggccagc

SEQ ID NO: 154114 - RNA, 32 nt, Homo Sapiens
gucugauggugagcaguaacugucccugcuuu

SEQ ID NO: 154115 - RNA, 31 nt, Homo Sapiens
aaauuccauguuaugugagugcuguuugagu

SEQ ID NO: 154116 - RNA, 31 nt, Homo Sapiens
cugcucuagcuucagaaccacagaaccaccg

SEQ ID NO: 154117 - RNA, 32 nt, Homo Sapiens
aggcacccuuacuggcuuaccuccucauggca

SEQ ID NO: 154118 - RNA, 32 nt, Homo Sapiens
gguuucacuauguuggccaggcugguuuucaa

SEQ ID NO: 154119 - RNA, 32 nt, Homo Sapiens
uguaaggagcugaguucuuaaagacugaagac

SEQ ID NO: 154120 - RNA, 32 nt, Homo Sapiens
aggaugcagaacuguucagugguauuacauga

SEQ ID NO: 154121 - RNA, 30 nt, Homo Sapiens
gccaugcgcgcgcugcccuaacgaugccgc

SEQ ID NO: 154122 - RNA, 32 nt, Homo Sapiens
auagagaugaauugugguguucucacaccuua

SEQ ID NO: 154123 - RNA, 32 nt, Homo Sapiens
guccuggaaucguagacuuuuacagucagaag

SEQ ID NO: 154124 - RNA, 32 nt, Homo Sapiens
acauguuguauauaaaauuaugagcacaaugc

SEQ ID NO: 154125 - RNA, 32 nt, Homo Sapiens
guuucccuuucuugguuuaugaugccagcaga

SEQ ID NO: 154126 - RNA, 32 nt, Homo Sapiens
ccaaagggagaauggagauaacagggguggca

SEQ ID NO: 154127 - RNA, 32 nt, Homo Sapiens
gaauucagauaaaauuuccuuauguucugcug

SEQ ID NO: 154128 - RNA, 32 nt, Homo Sapiens
gugggcuggguugggcugguggauguggggcc

SEQ ID NO: 154129 - RNA, 32 nt, Homo Sapiens
aucccuucucucucugccaccauuucggacac

SEQ ID NO: 154130 - RNA, 32 nt, Homo Sapiens
uacuacccuagccuugucuuuaccgagggaug

SEQ ID NO: 154131 - RNA, 32 nt, Homo Sapiens
cuuguuguagucuuuuugcaaacucugauucu

SEQ ID NO: 154132 - RNA, 32 nt, Homo Sapiens
auugucuuuucauuuuaauaaaguuauaauac

SEQ ID NO: 154133 - RNA, 32 nt, Homo Sapiens
agcccggguccugaccccggcccggcucccgc

SEQ ID NO: 154134 - RNA, 32 nt, Homo Sapiens
aaaugcaaaauauuuguacaauguaacuuuau

SEQ ID NO: 154135 - RNA, 32 nt, Homo Sapiens
gcagaguuggggccacaaccuuccucagaccu

SEQ ID NO: 154136 - RNA, 32 nt, Homo Sapiens
gcggcguggcgcucggccuccagggauccacu

SEQ ID NO: 154137 - RNA, 32 nt, Homo Sapiens
gaggagccugucaaaaaguagaaucauaagga

SEQ ID NO: 154138 - RNA, 32 nt, Homo Sapiens
uuccuuaacaaccacaaaaauccuuauuucug

SEQ ID NO: 154139 - RNA, 32 nt, Homo Sapiens
gauugccaacuuuaaaaaguaggcuguucaua

SEQ ID NO: 154140 - RNA, 32 nt, Homo Sapiens
ccccacgacaugucucccuuucuuagaauaua

SEQ ID NO: 154141 - RNA, 32 nt, Homo Sapiens
agggacacccuggauucacgugggagccccug

SEQ ID NO: 154142 - RNA, 32 nt, Homo Sapiens
guaguaagcuuggaaaaauaauuuaagaauac

SEQ ID NO: 154143 - RNA, 32 nt, Homo Sapiens
gaauguggaggcgccagaagcugcugaggagg

SEQ ID NO: 154144 - RNA, 32 nt, Homo Sapiens
cuucaggguugcccggccacacagcagggucc

SEQ ID NO: 154145 - RNA, 32 nt, Homo Sapiens
agggcggucuucugcuccaugcucuuccucgg

SEQ ID NO: 154146 - RNA, 32 nt, Homo Sapiens
cggagccgccagcaccuccuccccuccagauc

SEQ ID NO: 154147 - RNA, 32 nt, Homo Sapiens
ggacccugggccaccugcccgugauuagaagg

SEQ ID NO: 154148 - RNA, 32 nt, Homo Sapiens
aaugucauuguuuuauuaagcauuaugucaug

SEQ ID NO: 154149 - RNA, 32 nt, Homo Sapiens
guguuguguuguccauuguugcucuaguucug

SEQ ID NO: 154150 - RNA, 32 nt, Homo Sapiens
cgagguuauuuuaacuuuuuacuacuuuuugu

SEQ ID NO: 154151 - RNA, 32 nt, Homo Sapiens
gagcguggggggauccgccuucugcccccgag

SEQ ID NO: 154152 - RNA, 32 nt, Homo Sapiens
gacuuuucuaccagguaugaccuuuuaaguga

SEQ ID NO: 154153 - RNA, 32 nt, Homo Sapiens
aagauuguuguaacagaagagugacaaccaau

SEQ ID NO: 154154 - RNA, 32 nt, Homo Sapiens
cuccuacgcaccaaccgucaccauagugcccc

SEQ ID NO: 154155 - RNA, 32 nt, Homo Sapiens
uauucacuuuuuccuuuagguagagaugauuu

SEQ ID NO: 154156 - RNA, 32 nt, Homo Sapiens
aauguugacaacauucacaguaagccauuggc

SEQ ID NO: 154157 - RNA, 32 nt, Homo Sapiens
aucaucugaaauggggaaauauguaaauaaau

SEQ ID NO: 154158 - RNA, 32 nt, Homo Sapiens
gcgcuggcggcugcugaggccggagcggaggg

SEQ ID NO: 154159 - RNA, 32 nt, Homo Sapiens
agcgccuuuuaaaaguuguuaugugguuuucu

SEQ ID NO: 154160 - RNA, 32 nt, Homo Sapiens
auucugcuagaccuuggugcugauccaaauau

SEQ ID NO: 154161 - RNA, 32 nt, Homo Sapiens
aucgggguucccucuuucucucugccaggacc

SEQ ID NO: 154162 - RNA, 32 nt, Homo Sapiens
gugcaccagcugcuggaagcgcugcuuuugag

SEQ ID NO: 154163 - RNA, 32 nt, Homo Sapiens
ugaguuuaauguccguaguuaaagucaagcag

SEQ ID NO: 154164 - RNA, 32 nt, Homo Sapiens
gguaucuuuguaacuauaaauagugcaugcuc

SEQ ID NO: 154165 - RNA, 32 nt, Homo Sapiens
uuaaauagcauuagaauuauuuguuuguuaaa

SEQ ID NO: 154166 - RNA, 32 nt, Homo Sapiens
ucaggaguucgagagcauccuggccaacgugg

SEQ ID NO: 154167 - RNA, 32 nt, Homo Sapiens
agugccacuccagccucacccccugccagugc

SEQ ID NO: 154168 - RNA, 32 nt, Homo Sapiens
aggagcgccucugucuggccgccccgucuggg

SEQ ID NO: 154169 - RNA, 32 nt, Homo Sapiens
ucaguuauuucuguuuguuuguguuaagcauc

SEQ ID NO: 154170 - RNA, 32 nt, Homo Sapiens
uccuguacauagugggcaguggugugugguuu

SEQ ID NO: 154171 - RNA, 28 nt, Homo Sapiens
gcugagcggcggccgccgagcgucgagc

SEQ ID NO: 154172 - RNA, 32 nt, Homo Sapiens
agccagcauacuuccugaacauggagaguguu

SEQ ID NO: 154173 - RNA, 32 nt, Homo Sapiens
cagcggcagucgucgccccugccgccgcugcc

SEQ ID NO: 154174 - RNA, 32 nt, Homo Sapiens
ucugauuuucccuuuucaacauuccuuaccag

SEQ ID NO: 154175 - RNA, 32 nt, Homo Sapiens
auuacugaugaaauucuguuucuugucugcuc

SEQ ID NO: 154176 - RNA, 32 nt, Homo Sapiens
cauccaaccucuuuccucucuggccacucugc

SEQ ID NO: 154177 - RNA, 32 nt, Homo Sapiens
cugcgcgcgggcgggcgggcuauggcgcaggc

SEQ ID NO: 154178 - RNA, 32 nt, Homo Sapiens
guaaauagcaaccuaaaggcguauuuuggcac

SEQ ID NO: 154179 - RNA, 32 nt, Homo Sapiens
cuuuuuuuuuuuuuuuuuuuuaaaugguggaa

SEQ ID NO: 154180 - RNA, 32 nt, Homo Sapiens
ucugauuuuuauucucaauauauuuuugcuaa

SEQ ID NO: 154181 - RNA, 32 nt, Homo Sapiens
caccugggccgugcugcccccgcgagcaaggc

SEQ ID NO: 154182 - RNA, 32 nt, Homo Sapiens
uuugaaacgaucugcaggucuugccagugaac

SEQ ID NO: 154183 - RNA, 32 nt, Homo Sapiens
gcgccgcggccgcaugcaguucgucguggcgg

SEQ ID NO: 154184 - RNA, 32 nt, Homo Sapiens
gaguggguugguuggcccccuugcuggaguug

SEQ ID NO: 154185 - RNA, 32 nt, Homo Sapiens
aacgggaggugugagcccaaaggucuggaccc

SEQ ID NO: 154186 - RNA, 32 nt, Homo Sapiens
accuacugccucaggaaccgccucagagggac

SEQ ID NO: 154187 - RNA, 32 nt, Homo Sapiens
aauauuuuuuaaauguucuaucuuaacuaguu

SEQ ID NO: 154188 - RNA, 32 nt, Homo Sapiens
cccagccagcugccuccuguccugggaggagg

SEQ ID NO: 154189 - RNA, 32 nt, Homo Sapiens
ggaggagggcaucaccuucccagugggaaaag

SEQ ID NO: 154190 - RNA, 32 nt, Homo Sapiens
gcucugcccaagccgaggcugcggggccggcg

SEQ ID NO: 154191 - RNA, 32 nt, Homo Sapiens
caugcaaugaauugcugagcauuuaggaagca

SEQ ID NO: 154192 - RNA, 32 nt, Homo Sapiens
gcccggauaauuuuuguguguuuagcagagac

SEQ ID NO: 154193 - RNA, 32 nt, Homo Sapiens
uuccuuugaaagacugugcuguccuuuaacau

SEQ ID NO: 154194 - RNA, 32 nt, Homo Sapiens
acucgagccagacgcccucccugacuuggaca

SEQ ID NO: 154195 - RNA, 32 nt, Homo Sapiens
ucucacggggagagguaugggagggaagucgc

SEQ ID NO: 154196 - RNA, 32 nt, Homo Sapiens
agaggggcuuguugaggccaccggaggaagcu

SEQ ID NO: 154197 - RNA, 32 nt, Homo Sapiens
cuucuuugucaagccaggacccgcccacgguc

SEQ ID NO: 154198 - RNA, 32 nt, Homo Sapiens
gugggugcggcugugagacggcaggagacuuc

SEQ ID NO: 154199 - RNA, 32 nt, Homo Sapiens
uuuggcaccucaaagcugggagccaggcccug

SEQ ID NO: 154200 - RNA, 32 nt, Homo Sapiens
uuauggcccucccccaccgccucgcugccccc

SEQ ID NO: 154201 - RNA, 32 nt, Homo Sapiens
agagucccuccagccaacugccccuggugaga

SEQ ID NO: 154202 - RNA, 32 nt, Homo Sapiens
ucuacccucccaccuuuuuuuuuuuuuuuuua

SEQ ID NO: 154203 - RNA, 32 nt, Homo Sapiens
uucuuuuacuuuucuuuuuuuuuuuuuuuccu

SEQ ID NO: 154204 - RNA, 32 nt, Homo Sapiens
ugugacuguguaccugaccuucugggaucuuu

SEQ ID NO: 154205 - RNA, 32 nt, Homo Sapiens
aagggugcaugccaguccuucuccgacauggc

SEQ ID NO: 154206 - RNA, 32 nt, Homo Sapiens
guacgcugcugcgcugacguggcucccggaag

SEQ ID NO: 154207 - RNA, 32 nt, Homo Sapiens
acuuaagguuauugcuuggccgcggccuggua

SEQ ID NO: 154208 - RNA, 32 nt, Homo Sapiens
cauaagaggaguuuguaauuuaucuuaggaua

SEQ ID NO: 154209 - RNA, 32 nt, Homo Sapiens
cuguaucugccaugugaagagaauuaacaaua

SEQ ID NO: 154210 - RNA, 32 nt, Homo Sapiens
augcggcccuggugcuguaggcuacauccuga

SEQ ID NO: 154211 - RNA, 32 nt, Homo Sapiens
aggugaauggguauauuuggagcauuacuuca

SEQ ID NO: 154212 - RNA, 32 nt, Homo Sapiens
caccagaaaaggacccaguuggcaccugcuau

SEQ ID NO: 154213 - RNA, 32 nt, Homo Sapiens
gauagaacuguguuuaauguccuguuguaguc

SEQ ID NO: 154214 - RNA, 32 nt, Homo Sapiens
gagccagagugggggcagacuggccauuuuua

SEQ ID NO: 154215 - RNA, 32 nt, Homo Sapiens
cagccaugcaggauccagaaguuaugguggcc

SEQ ID NO: 154216 - RNA, 32 nt, Homo Sapiens
uccugcaaacaccaccgccuccccugccaccg

SEQ ID NO: 154217 - RNA, 32 nt, Homo Sapiens
gauuaaugucagaagaauaugaaaauaaacac

SEQ ID NO: 154218 - RNA, 32 nt, Homo Sapiens
cugauggcaaaagcggcugugugucgagguua

SEQ ID NO: 154219 - RNA, 32 nt, Homo Sapiens
ggacuuugcaacuggcagcuuucugagugcau

SEQ ID NO: 154220 - RNA, 32 nt, Homo Sapiens
ugauuggguaccccggccccucuggcccuucc

SEQ ID NO: 154221 - RNA, 32 nt, Homo Sapiens
uacugggcuuuuacugugauguguucaguuca

SEQ ID NO: 154222 - RNA, 32 nt, Homo Sapiens
ggcggggaggucucaggggucugucccgggcc

SEQ ID NO: 154223 - RNA, 32 nt, Homo Sapiens
gaacuucagacucccggcaccuaggucuccag

SEQ ID NO: 154224 - RNA, 32 nt, Homo Sapiens
auuuccuccaugauaaaaggauccaagugagg

SEQ ID NO: 154225 - RNA, 32 nt, Homo Sapiens
uuuaaaugugauuccuuuauggcauuagggua

SEQ ID NO: 154226 - RNA, 32 nt, Homo Sapiens
ggaggaguucccucccguaggcucgguucccc

SEQ ID NO: 154227 - RNA, 31 nt, Homo Sapiens
ccgcugcucgccucuccgccccgcguccagc

SEQ ID NO: 154228 - RNA, 32 nt, Homo Sapiens
auuaaagucacagaugaacaaacuucuacacu

SEQ ID NO: 154229 - RNA, 32 nt, Homo Sapiens
aauaugaacuuaauaaauaccauggauccauu

SEQ ID NO: 154230 - RNA, 32 nt, Homo Sapiens
cauucguuuaggaaacagagaucaaccugggc

SEQ ID NO: 154231 - RNA, 32 nt, Homo Sapiens
caugcuguuggguuuuaauucucuaauuauua

SEQ ID NO: 154232 - RNA, 32 nt, Homo Sapiens
uaguccgagucuuuucuccucccuucuccucc

SEQ ID NO: 154233 - RNA, 30 nt, Homo Sapiens
cuuugauuuuuugcugcagacucauccuuu

SEQ ID NO: 154234 - RNA, 32 nt, Homo Sapiens
ucaaagacugucaaauaggaaaaaagaaaaca

SEQ ID NO: 154235 - RNA, 32 nt, Homo Sapiens
ggcacgaggcggagggggcucaguccgcagcc

SEQ ID NO: 154236 - RNA, 32 nt, Homo Sapiens
ccacccugcauuuuccucuuguccuggcccuu

SEQ ID NO: 154237 - RNA, 32 nt, Homo Sapiens
ucgcuuugguauaauuucuggcacucaccagc

SEQ ID NO: 154238 - RNA, 32 nt, Homo Sapiens
gugcuggcuaaugucagcaucuagaacagcuu

SEQ ID NO: 154239 - RNA, 32 nt, Homo Sapiens
cuaauagucuuugccagucauucagcagcaaa

SEQ ID NO: 154240 - RNA, 32 nt, Homo Sapiens
aaguguguguucauguucaugcuggaggguag

SEQ ID NO: 154241 - RNA, 32 nt, Homo Sapiens
aacaauaauaaauuauuguaaacuuuguggcu

SEQ ID NO: 154242 - RNA, 32 nt, Homo Sapiens
gguuagaauucuauuucuuucaagguagagag

SEQ ID NO: 154243 - RNA, 32 nt, Homo Sapiens
aaaaugauauuuuugaaauaaauuuuucccag

SEQ ID NO: 154244 - RNA, 32 nt, Homo Sapiens
ggaggaugugggaaagggcuuuucucagcuag

SEQ ID NO: 154245 - RNA, 30 nt, Homo Sapiens
ggaccugagaucccugcccacucucucccc

SEQ ID NO: 154246 - RNA, 32 nt, Homo Sapiens
ggagcucagccucuccugccucugcaggccug

SEQ ID NO: 154247 - RNA, 32 nt, Homo Sapiens
cauuucuugccaauaggaaggcuggugcuucu

SEQ ID NO: 154248 - RNA, 32 nt, Homo Sapiens
ugagcucucacagaaagcuuaaucauagauau

SEQ ID NO: 154249 - RNA, 32 nt, Homo Sapiens
cuggggcccucccugucgccagugggcacuuu

SEQ ID NO: 154250 - RNA, 32 nt, Homo Sapiens
cgcaacauaaaccauagguguuauuagaagug

SEQ ID NO: 154251 - RNA, 32 nt, Homo Sapiens
gaaguauaccaaucaaugucacaugaacaaac

SEQ ID NO: 154252 - RNA, 32 nt, Homo Sapiens
aggucagcccggagcaggcugacuccuugacu

SEQ ID NO: 154253 - RNA, 32 nt, Homo Sapiens
gccucccccguccaaagcuccugccuuucggc

SEQ ID NO: 154254 - RNA, 32 nt, Homo Sapiens
ugccgccaccgccgcuucugcaaggucucagg

SEQ ID NO: 154255 - RNA, 32 nt, Homo Sapiens
gaaagggucuucugccaugcuguaucuuuaug

SEQ ID NO: 154256 - RNA, 32 nt, Homo Sapiens
gcaaagguacguauguuuaucuuacucuuccu

SEQ ID NO: 154257 - RNA, 32 nt, Homo Sapiens
gcaaguauagaagauuaggaugucuaaauuaa

SEQ ID NO: 154258 - RNA, 32 nt, Homo Sapiens
cauauaauaaagaauucccauuugauauucag

SEQ ID NO: 154259 - RNA, 32 nt, Homo Sapiens
augugggcggggguugugggggacggcaucgg

SEQ ID NO: 154260 - RNA, 32 nt, Homo Sapiens
uggccugcgaucucagugacaaugaucugcuu

SEQ ID NO: 154261 - RNA, 28 nt, Homo Sapiens
gucauggcguccccgucucggagacugc

SEQ ID NO: 154262 - RNA, 32 nt, Homo Sapiens
uccuucugucuccuccccaccuugcaaaacaa

SEQ ID NO: 154263 - RNA, 32 nt, Homo Sapiens
cccaaacacacacacacacacacacacacaca

SEQ ID NO: 154264 - RNA, 32 nt, Homo Sapiens
aaaacaaaacaaaacaaacaaacaaacaaaaa

SEQ ID NO: 154265 - RNA, 32 nt, Homo Sapiens
auguaaaauaaaucauuccuguguauaaagca

SEQ ID NO: 154266 - RNA, 32 nt, Homo Sapiens
caucaggguagcugaaggaaauccacacaccc

SEQ ID NO: 154267 - RNA, 32 nt, Homo Sapiens
agcagaggacaaagcucuugugaagaugggcu

SEQ ID NO: 154268 - RNA, 32 nt, Homo Sapiens
ggcgggagcugaggcgggagcggacaggcugg

SEQ ID NO: 154269 - RNA, 32 nt, Homo Sapiens
agcugcuauaguauuggcaguacucuaguuua

SEQ ID NO: 154270 - RNA, 32 nt, Homo Sapiens
uguacccacacagauagcauucaacaaaagcu

SEQ ID NO: 154271 - RNA, 32 nt, Homo Sapiens
uguucuuucccuuccuguaagugucgcuaguu

SEQ ID NO: 154272 - RNA, 32 nt, Homo Sapiens
aacccaguguuuuuuguuguuguuuuuuguug

SEQ ID NO: 154273 - RNA, 32 nt, Homo Sapiens
uuccaugugugauaguagacaccuggauucuc

SEQ ID NO: 154274 - RNA, 32 nt, Homo Sapiens
uggagaaggaggugcuggcugcgagucacgca

SEQ ID NO: 154275 - RNA, 32 nt, Homo Sapiens
uacaugccaguuuugcuugugaauucuugcuu

SEQ ID NO: 154276 - RNA, 32 nt, Homo Sapiens
auuagcagaaauguaucuauaaaaagaagugu

SEQ ID NO: 154277 - RNA, 32 nt, Homo Sapiens
gagugagaggggcaccugaaggagcugugacc

SEQ ID NO: 154278 - RNA, 32 nt, Homo Sapiens
aacuguaugugcugacugggugugccuucuag

SEQ ID NO: 154279 - RNA, 32 nt, Homo Sapiens
ugcugaugaaaaccccaggauguugugucacc

SEQ ID NO: 154280 - RNA, 32 nt, Homo Sapiens
uuacuggcugggcgcaguggcucacgcuugua

SEQ ID NO: 154281 - RNA, 29 nt, Homo Sapiens
aagcguuuguguuucaaguuaaaaaaaaa

SEQ ID NO: 154282 - RNA, 32 nt, Homo Sapiens
aaucuugggagaaaaaauaauauuaggaaaaa

SEQ ID NO: 154283 - RNA, 32 nt, Homo Sapiens
cacaggagcugucucccagcucauuuuuaaca

SEQ ID NO: 154284 - RNA, 32 nt, Homo Sapiens
gcguggaccccaggcccggcccgugguaccca

SEQ ID NO: 154285 - RNA, 32 nt, Homo Sapiens
ggagauggaggucaggcugcagugcgauggga

SEQ ID NO: 154286 - RNA, 32 nt, Homo Sapiens
ccauguuccggcucuuccccagccucagcauc

SEQ ID NO: 154287 - RNA, 32 nt, Homo Sapiens
uucagggcucugcuguaugggcacaugucucu

SEQ ID NO: 154288 - RNA, 32 nt, Homo Sapiens
aauacaguguauuuuccagcuuccugucuuua

SEQ ID NO: 154289 - RNA, 32 nt, Homo Sapiens
gccuguuuuuugggaaggcuguagguggagag

SEQ ID NO: 154290 - RNA, 32 nt, Homo Sapiens
auuuguaaugcaggauuagaagaagcagagcu

SEQ ID NO: 154291 - RNA, 32 nt, Homo Sapiens
cugcuucccccucccccuccugcugugcugga

SEQ ID NO: 154292 - RNA, 32 nt, Homo Sapiens
ggaaugguacaugucuuccauguaucuuuuga

SEQ ID NO: 154293 - RNA, 32 nt, Homo Sapiens
uuuuucauauuuuauacauuuauuuuccgaau

SEQ ID NO: 154294 - RNA, 32 nt, Homo Sapiens
uuugagaccccauugcuuucaggcugccccuu

SEQ ID NO: 154295 - RNA, 32 nt, Homo Sapiens
auccgcggcuuauuagagaacaaccugggaga

SEQ ID NO: 154296 - RNA, 31 nt, Homo Sapiens
gacgcgggaucgguuuuuauaccggggcaaa

SEQ ID NO: 154297 - RNA, 32 nt, Homo Sapiens
aagccccaaacacagcugcacugagcaaagaa

SEQ ID NO: 154298 - RNA, 32 nt, Homo Sapiens
gcauaaaauguuaaguugauggugaugaaaug

SEQ ID NO: 154299 - RNA, 30 nt, Homo Sapiens
ucaccugugcccgugcguggcguccccguc

SEQ ID NO: 154300 - RNA, 32 nt, Homo Sapiens
uauggcaagaaaguaagcagaacccugguaau

SEQ ID NO: 154301 - RNA, 32 nt, Homo Sapiens
gguucuuucuuuucuuuuuauuagguuaaguc

SEQ ID NO: 154302 - RNA, 32 nt, Homo Sapiens
agacauuucuuuucuuuuuacauaacugccuu

SEQ ID NO: 154303 - RNA, 32 nt, Homo Sapiens
ugcagcaggaggaguuacgagccgggccgcgc

SEQ ID NO: 154304 - RNA, 32 nt, Homo Sapiens
gguuucaccauauuggccaggcuggucuugaa

SEQ ID NO: 154305 - RNA, 32 nt, Homo Sapiens
uuccgaggggagaggacgggcuggcggggcug

SEQ ID NO: 154306 - RNA, 32 nt, Homo Sapiens
guuaccaugaggauuggugugaccuguuccau

SEQ ID NO: 154307 - RNA, 32 nt, Homo Sapiens
cugcucuccgcgggcugagccugucagcaucc

SEQ ID NO: 154308 - RNA, 32 nt, Homo Sapiens
cagcccagacaccccugcccagcccacagcug

SEQ ID NO: 154309 - RNA, 32 nt, Homo Sapiens
cucccccugucccuuccccauccacccaacug

SEQ ID NO: 154310 - RNA, 32 nt, Homo Sapiens
agggccugcggugugacucgcgggcucagcug

SEQ ID NO: 154311 - RNA, 32 nt, Homo Sapiens
guauuucucgggaggacccaaaaguuaagguc

SEQ ID NO: 154312 - RNA, 32 nt, Homo Sapiens
ucccccagcucuucccacacguguguuaggaa

SEQ ID NO: 154313 - RNA, 29 nt, Homo Sapiens
aggaggaugaagaguugggcuuguuuguc

SEQ ID NO: 154314 - RNA, 32 nt, Homo Sapiens
gacgcaccccuacucguuccuauagaacacag

SEQ ID NO: 154315 - RNA, 32 nt, Homo Sapiens
uuccuuccuggggcgccuccccggcccagggc

SEQ ID NO: 154316 - RNA, 32 nt, Homo Sapiens
auucuccucuguccacccacccacaccccuug

SEQ ID NO: 154317 - RNA, 32 nt, Homo Sapiens
auaaggucaggagauuaagaccauccuggcua

SEQ ID NO: 154318 - RNA, 32 nt, Homo Sapiens
cacgagcuggcuggcugcuugcacccacaucc

SEQ ID NO: 154319 - RNA, 32 nt, Homo Sapiens
cucccugccaccccucacgaccucugaugguc

SEQ ID NO: 154320 - RNA, 32 nt, Homo Sapiens
cucaggaaaaagaagggggaaaggacucuguc

SEQ ID NO: 154321 - RNA, 28 nt, Homo Sapiens
gcggucgcgugcuggccgagguggaggc

SEQ ID NO: 154322 - RNA, 32 nt, Homo Sapiens
cuucucucccuccucccgacccgcccccucgc

SEQ ID NO: 154323 - RNA, 32 nt, Homo Sapiens
ucaguuugauucaauuaaaaugcaucauuuga

SEQ ID NO: 154324 - RNA, 32 nt, Homo Sapiens
gcguuccucagccuccucuccuaggucccucc

SEQ ID NO: 154325 - RNA, 32 nt, Homo Sapiens
uccacuaguggcugcucugugugccccuuauc

SEQ ID NO: 154326 - RNA, 32 nt, Homo Sapiens
uugcagggugcagcuuggauguggugcuagaa

SEQ ID NO: 154327 - RNA, 32 nt, Homo Sapiens
uuguuuuugugauuauuugacuggaaugcuuc

SEQ ID NO: 154328 - RNA, 32 nt, Homo Sapiens
uccugggaggccggugguaaucauguaggcac

SEQ ID NO: 154329 - RNA, 32 nt, Homo Sapiens
auccuucaacugagcucaaaguagguuuuguu

SEQ ID NO: 154330 - RNA, 32 nt, Homo Sapiens
agggggcugucaugguccuuugcagagcugcu

SEQ ID NO: 154331 - RNA, 32 nt, Homo Sapiens
uguccggugccgugaguuaccugcucagcccu

SEQ ID NO: 154332 - RNA, 32 nt, Homo Sapiens
agaggaaggagauagggaaaaggggcuccuug

SEQ ID NO: 154333 - RNA, 31 nt, Homo Sapiens
gagagcuugagcccugcaggaguucgagacc

SEQ ID NO: 154334 - RNA, 29 nt, Homo Sapiens
gcgggggcaggggcggggcaggcggccgc

SEQ ID NO: 154335 - RNA, 32 nt, Homo Sapiens
uuuaauaaggauccuuaugaugacuuuuaggg

SEQ ID NO: 154336 - RNA, 32 nt, Homo Sapiens
uuagaucacaugcccugcuucagcugguaaug

SEQ ID NO: 154337 - RNA, 32 nt, Homo Sapiens
guucacaaugaaauuauauuuucuuuguaaag

SEQ ID NO: 154338 - RNA, 32 nt, Homo Sapiens
gcaaacccagacugcccaugagacccugaugg

SEQ ID NO: 154339 - RNA, 32 nt, Homo Sapiens
cugcguauucagcaucuucucuauucaugugg

SEQ ID NO: 154340 - RNA, 32 nt, Homo Sapiens
cgugggcgccccacagcugccccucagccgcu

SEQ ID NO: 154341 - RNA, 32 nt, Homo Sapiens
ccuggacagaucaggcuagcccugcccuccac

SEQ ID NO: 154342 - RNA, 32 nt, Homo Sapiens
cucugccacuccccacccccagccucugccgg

SEQ ID NO: 154343 - RNA, 30 nt, Homo Sapiens
agccgcgcgccccagcaccaugcggccgcc

SEQ ID NO: 154344 - RNA, 32 nt, Homo Sapiens
uuugauauaugauaauaauuaucuuugaagua

SEQ ID NO: 154345 - RNA, 32 nt, Homo Sapiens
gcaaggggaaaggucuccuugccccucucccu

SEQ ID NO: 154346 - RNA, 32 nt, Homo Sapiens
aauaguauacuucuccuucugucucuuggaaa

SEQ ID NO: 154347 - RNA, 32 nt, Homo Sapiens
agaaccccaaccaaagaaaucugaaauauaua

SEQ ID NO: 154348 - RNA, 32 nt, Homo Sapiens
uggauaggacccagccccgcucccagagacaa

SEQ ID NO: 154349 - RNA, 32 nt, Homo Sapiens
guagcucauuggcaugaaguagacuuaaaucu

SEQ ID NO: 154350 - RNA, 32 nt, Homo Sapiens
uuggaguacggggcgggggucggccgagggcg

SEQ ID NO: 154351 - RNA, 32 nt, Homo Sapiens
cuaaacagacuauuuaacuugaggguaauaaa

SEQ ID NO: 154352 - RNA, 32 nt, Homo Sapiens
gcugggggaacaaaaagaaggaggguuaucau

SEQ ID NO: 154353 - RNA, 32 nt, Homo Sapiens
uuaaagugaagcaaagaaacuguuguggauua

SEQ ID NO: 154354 - RNA, 32 nt, Homo Sapiens
uaugacugugcagcuguuugugcauagauguu

SEQ ID NO: 154355 - RNA, 32 nt, Homo Sapiens
aaaaaaucauugccauaagaaaaaguauaaau

SEQ ID NO: 154356 - RNA, 32 nt, Homo Sapiens
gcuuuuuuguacuguaaaaauaugugguucau

SEQ ID NO: 154357 - RNA, 32 nt, Homo Sapiens
cuggcuuauuuuuuaauuuaaaacgggguuuc

SEQ ID NO: 154358 - RNA, 32 nt, Homo Sapiens
agguggacggaucaccugaggucaggaguuug

SEQ ID NO: 154359 - RNA, 32 nt, Homo Sapiens
uagcaauugggcucccuuugcugcugaugggc

SEQ ID NO: 154360 - RNA, 32 nt, Homo Sapiens
cuucuauacuuauaauuuaaaggauugguguc

SEQ ID NO: 154361 - RNA, 32 nt, Homo Sapiens
uggaacugucccacaagaauucacaggucuca

SEQ ID NO: 154362 - RNA, 32 nt, Homo Sapiens
agccgagcccggcccgggaucccgagcagcga

SEQ ID NO: 154363 - RNA, 32 nt, Homo Sapiens
ucccgggcaccaugcgaaccgccccgagccuc

SEQ ID NO: 154364 - RNA, 32 nt, Homo Sapiens
cccaggcagggugagcagucccagugguccua

SEQ ID NO: 154365 - RNA, 32 nt, Homo Sapiens
aaauuauguacauuuuaaguauuuugcaauaa

SEQ ID NO: 154366 - RNA, 28 nt, Homo Sapiens
gaugguuacugaggaccaaagauacaug

SEQ ID NO: 154367 - RNA, 32 nt, Homo Sapiens
auacugaaggcaggaauaauugguuuauacug

SEQ ID NO: 154368 - RNA, 32 nt, Homo Sapiens
augccuaccuaagaaagcucaaggcugccagg

SEQ ID NO: 154369 - RNA, 32 nt, Homo Sapiens
aucucuucuuugcugcagucaucuacuuuuuu

SEQ ID NO: 154370 - RNA, 30 nt, Homo Sapiens
guccugaauauccuuguuaauuuucugucu

SEQ ID NO: 154371 - RNA, 32 nt, Homo Sapiens
auggaagaugcgaguguguuauacaguuauca

SEQ ID NO: 154372 - RNA, 32 nt, Homo Sapiens
uuuugccuaagucuuuccugugccuugaacca

SEQ ID NO: 154373 - RNA, 32 nt, Homo Sapiens
aaagagacaaguaacaauaacaauaucuguca

SEQ ID NO: 154374 - RNA, 32 nt, Homo Sapiens
cccccucccuccccaccuggcccucccaggac

SEQ ID NO: 154375 - RNA, 32 nt, Homo Sapiens
guauaaauaugguuuucagaaaacaucaagug

SEQ ID NO: 154376 - RNA, 32 nt, Homo Sapiens
cggcugcgggaguuacccuuuauucugugaua

SEQ ID NO: 154377 - RNA, 32 nt, Homo Sapiens
uccuuuccgggcgcgcgggggcgacagcggca

SEQ ID NO: 154378 - RNA, 32 nt, Homo Sapiens
aauaauuuuuauuaccaugucuuuuuauuuga

SEQ ID NO: 154379 - RNA, 32 nt, Homo Sapiens
caucuguaccccccuugugccacacauugcau

SEQ ID NO: 154380 - RNA, 32 nt, Homo Sapiens
ccgacuuccccggcugaggccgcugcgacccg

SEQ ID NO: 154381 - RNA, 32 nt, Homo Sapiens
ugugaagcgcucucggggucuuuccucagccu

SEQ ID NO: 154382 - RNA, 29 nt, Homo Sapiens
aaaggucaauuuauauauuuuucuauagg

SEQ ID NO: 154383 - RNA, 32 nt, Homo Sapiens
agacacauuaaacaggcuaaauggugcagucu

SEQ ID NO: 154384 - RNA, 32 nt, Homo Sapiens
gcucagucuuuauuuccaacacuagccguggu

SEQ ID NO: 154385 - RNA, 32 nt, Homo Sapiens
ccaacaggccuggcccuggcccagcuggggug

SEQ ID NO: 154386 - RNA, 32 nt, Homo Sapiens
gacuacacagaaaaucuggaaacaguugcagg

SEQ ID NO: 154387 - RNA, 31 nt, Homo Sapiens
cuuugguuguacaugaaaguugguuucacga

SEQ ID NO: 154388 - RNA, 32 nt, Homo Sapiens
uccucaucaagagacugcugcagugccuguca

SEQ ID NO: 154389 - RNA, 32 nt, Homo Sapiens
cugaauguacuauguuuaaaagacaaaccaaa

SEQ ID NO: 154390 - RNA, 28 nt, Homo Sapiens
auaaucuugugcaaaauguguuucagcc

SEQ ID NO: 154391 - RNA, 32 nt, Homo Sapiens
ugaugauggagaugaagugaaggucugaggga

SEQ ID NO: 154392 - RNA, 32 nt, Homo Sapiens
uucuuuuucaccccacagacaccaccauggca

SEQ ID NO: 154393 - RNA, 32 nt, Homo Sapiens
accaauuuaagugaacauuuauauccgauaag

SEQ ID NO: 154394 - RNA, 32 nt, Homo Sapiens
ucuuccuuuuccagaauuuuccaaauaggaaa

SEQ ID NO: 154395 - RNA, 25 nt, Homo Sapiens
augcgcugcucgccgggaggcgucu

SEQ ID NO: 154396 - RNA, 32 nt, Homo Sapiens
uuuguuguucuguuaacugaaugccacucugu

SEQ ID NO: 154397 - RNA, 32 nt, Homo Sapiens
ggaaggucggccugggauguggccugggacug

SEQ ID NO: 154398 - RNA, 32 nt, Homo Sapiens
agguucggcgcgcccgcccaccccugccccuc

SEQ ID NO: 154399 - RNA, 32 nt, Homo Sapiens
cuugguuuacguaauugaggucuuaaagaacu

SEQ ID NO: 154400 - RNA, 32 nt, Homo Sapiens
uugaguuucugccuugccauccaauuagcugu

SEQ ID NO: 154401 - RNA, 32 nt, Homo Sapiens
guagcuacaauaaaaacaaaauaccuaggaau

SEQ ID NO: 154402 - RNA, 32 nt, Homo Sapiens
gacaccuuucaucaucaugaaaacagaaacuu

SEQ ID NO: 154403 - RNA, 32 nt, Homo Sapiens
gaagcccucauccucaccaccucccccuucca

SEQ ID NO: 154404 - RNA, 32 nt, Homo Sapiens
uucaggugguuauaauuccguaugugcuuuuu

SEQ ID NO: 154405 - RNA, 32 nt, Homo Sapiens
uuacagcccacccugcucuccuccccuauaug

SEQ ID NO: 154406 - RNA, 32 nt, Homo Sapiens
cuccuuugacuucaugaucugcauccuaggca

SEQ ID NO: 154407 - RNA, 32 nt, Homo Sapiens
auauguguuugugaaacugggauaaaguuggc

SEQ ID NO: 154408 - RNA, 32 nt, Homo Sapiens
ggagcaggaaauccaccugacugugaugcccc

SEQ ID NO: 154409 - RNA, 32 nt, Homo Sapiens
cuccccugagccggggcugugcucuucuaagu

SEQ ID NO: 154410 - RNA, 32 nt, Homo Sapiens
uugucagcaggagugaggagcgccagucccua

SEQ ID NO: 154411 - RNA, 32 nt, Homo Sapiens
ucaacccccucauacgacuucagcuccucacu

SEQ ID NO: 154412 - RNA, 32 nt, Homo Sapiens
guaaaaaugugaaaagucaaaaauauuuucag

SEQ ID NO: 154413 - RNA, 32 nt, Homo Sapiens
agugagugaacagccauucuguuaauaagcua

SEQ ID NO: 154414 - RNA, 32 nt, Homo Sapiens
uguugcaagugagggaaauccaauuaaaacug

SEQ ID NO: 154415 - RNA, 32 nt, Homo Sapiens
agaagguucuugaguucauguaagaggacagu

SEQ ID NO: 154416 - RNA, 32 nt, Homo Sapiens
gagcgggacuccggaccuccaggagugcaagg

SEQ ID NO: 154417 - RNA, 32 nt, Homo Sapiens
cuuuuaauacucagguaaugcuacaaauauua

SEQ ID NO: 154418 - RNA, 32 nt, Homo Sapiens
cucuccauuuccugccucuccuuucaccaagc

SEQ ID NO: 154419 - RNA, 32 nt, Homo Sapiens
ccucggcuucucugggucuagugcgggugagg

SEQ ID NO: 154420 - RNA, 32 nt, Homo Sapiens
agguagcagacacaaacaccccuuggccaccu

SEQ ID NO: 154421 - RNA, 32 nt, Homo Sapiens
auauccucagaugccaaccauuccuagcuccc

SEQ ID NO: 154422 - RNA, 29 nt, Homo Sapiens
ucuguugggggacagaggaaccuggggag

SEQ ID NO: 154423 - RNA, 32 nt, Homo Sapiens
gcagccugaggagcuggcuggcugggagccuc

SEQ ID NO: 154424 - RNA, 32 nt, Homo Sapiens
cgccggcccccggcccugaaacccgggccucc

SEQ ID NO: 154425 - RNA, 32 nt, Homo Sapiens
gacucugccgugguaggcuccagggucacuga

SEQ ID NO: 154426 - RNA, 32 nt, Homo Sapiens
acgccuggcccgugagacuguacucugcacga

SEQ ID NO: 154427 - RNA, 32 nt, Homo Sapiens
guauagcuggaacauauauguguguauccaua

SEQ ID NO: 154428 - RNA, 32 nt, Homo Sapiens
augaaccgcggacaccccggccccgauggccc

SEQ ID NO: 154429 - RNA, 32 nt, Homo Sapiens
caaaagccuuuuuccauuguauggaagauagu

SEQ ID NO: 154430 - RNA, 32 nt, Homo Sapiens
cugaaggacagcaagaggcacucugucuucac

SEQ ID NO: 154431 - RNA, 32 nt, Homo Sapiens
uccggggcgccgcagagcucccggccucugga

SEQ ID NO: 154432 - RNA, 32 nt, Homo Sapiens
guggcgcaaccucguuccggugaccgaagcuu

SEQ ID NO: 154433 - RNA, 32 nt, Homo Sapiens
ccguugaaaaucaguaaagguugauuaccugg

SEQ ID NO: 154434 - RNA, 32 nt, Homo Sapiens
uuuccauuuucaucauaaugacauaaaaucca

SEQ ID NO: 154435 - RNA, 32 nt, Homo Sapiens
ugagaggaugucugggguguccgagccccuga

SEQ ID NO: 154436 - RNA, 32 nt, Homo Sapiens
aauucaaaaacucagaauaaaaaugaaaaagc

SEQ ID NO: 154437 - RNA, 32 nt, Homo Sapiens
aauauaauuuaaaaaucuauuggcuaguaagu

SEQ ID NO: 154438 - RNA, 32 nt, Homo Sapiens
auaugacaauuuuaaaugaauuaugaucuucg

SEQ ID NO: 154439 - RNA, 32 nt, Homo Sapiens
agccucgcgccuguccgccgcgccccgagccc

SEQ ID NO: 154440 - RNA, 32 nt, Homo Sapiens
uaacuccccagaagcuuaacuacuaauaaccu

SEQ ID NO: 154441 - RNA, 32 nt, Homo Sapiens
cacuucccuggcggccccaacucgggcucccg

SEQ ID NO: 154442 - RNA, 32 nt, Homo Sapiens
ggggaaaaaaagacaaaacaaaaaaccaacuc

SEQ ID NO: 154443 - RNA, 32 nt, Homo Sapiens
ucacugggcagcagguuuagugaggcagugag

SEQ ID NO: 154444 - RNA, 32 nt, Homo Sapiens
aucucaacuaacgccuacauuacauucuccuu

SEQ ID NO: 154445 - RNA, 30 nt, Homo Sapiens
augugugcgcccguguguaugugcauaugu

SEQ ID NO: 154446 - RNA, 32 nt, Homo Sapiens
ugcucuuaucuaggggggagggggguggcaca

SEQ ID NO: 154447 - RNA, 32 nt, Homo Sapiens
gauaacauuuuucauuaaagcaucugagaucu

SEQ ID NO: 154448 - RNA, 32 nt, Homo Sapiens
uagaaaaugaauacaccuucugauguaguuua

SEQ ID NO: 154449 - RNA, 31 nt, Homo Sapiens
uacuucccacccucuuggcaacuacagagca

SEQ ID NO: 154450 - RNA, 32 nt, Homo Sapiens
ggggagaaaaggaggggccugccuggcuagcc

SEQ ID NO: 154451 - RNA, 32 nt, Homo Sapiens
ggcaaagaagagugcugggcaagauguguugg

SEQ ID NO: 154452 - RNA, 32 nt, Homo Sapiens
gagaggggauaacauuuccuugcuucuuuugu

SEQ ID NO: 154453 - RNA, 32 nt, Homo Sapiens
aaucucuuucccuuccccuguggucuauuguc

SEQ ID NO: 154454 - RNA, 32 nt, Homo Sapiens
ucuacuuuaaaacaaaguugucugauuuuugc

SEQ ID NO: 154455 - RNA, 32 nt, Homo Sapiens
ccuccugccugcccuccuucccaccuaccuac

SEQ ID NO: 154456 - RNA, 32 nt, Homo Sapiens
uagcuucccagggcugcccccgacaggcuggc

SEQ ID NO: 154457 - RNA, 32 nt, Homo Sapiens
guuugcugccagcggcgugagcuucggccgcc

SEQ ID NO: 154458 - RNA, 32 nt, Homo Sapiens
agcagcuggggggacccggggaggcuggacag

SEQ ID NO: 154459 - RNA, 32 nt, Homo Sapiens
ccggggaugcgcgucccccggcccugcggcug

SEQ ID NO: 154460 - RNA, 32 nt, Homo Sapiens
auuuuuagccccacccagggagacuuuauacc

SEQ ID NO: 154461 - RNA, 32 nt, Homo Sapiens
ccaagccaagagggcuugggggugugcaggca

SEQ ID NO: 154462 - RNA, 32 nt, Homo Sapiens
gcggcauucuuggccuggcuuccuggcguagc

SEQ ID NO: 154463 - RNA, 32 nt, Homo Sapiens
ugaugccugacuuuaugggaucaaauucaagu

SEQ ID NO: 154464 - RNA, 32 nt, Homo Sapiens
aacucaaacuucuggcucccucuucuuucaga

SEQ ID NO: 154465 - RNA, 32 nt, Homo Sapiens
ggcgcagccgcggugguuagggucacucucaa

SEQ ID NO: 154466 - RNA, 32 nt, Homo Sapiens
ccaagaggggaagagguggaaucggaacucca

SEQ ID NO: 154467 - RNA, 32 nt, Homo Sapiens
caagguauuuaaaaucaaaacuaauaacuaca

SEQ ID NO: 154468 - RNA, 32 nt, Homo Sapiens
gcuaaauauaguguaauaauguuuacacuaau

SEQ ID NO: 154469 - RNA, 32 nt, Homo Sapiens
acaagagugugaccuaaaugcuuuugucuugu

SEQ ID NO: 154470 - RNA, 32 nt, Homo Sapiens
ugcagaaauguagaaacacuuccauuaucuaa

SEQ ID NO: 154471 - RNA, 32 nt, Homo Sapiens
guucucucucucucuuuuuuuuaauuuuauua

SEQ ID NO: 154472 - RNA, 32 nt, Homo Sapiens
gcuucugcauuacuauuaacucugcauagaca

SEQ ID NO: 154473 - RNA, 32 nt, Homo Sapiens
gugccuccaucccagugccccgaugaccaucu

SEQ ID NO: 154474 - RNA, 32 nt, Homo Sapiens
cugcacagaguagcacucauuauucuugguua

SEQ ID NO: 154475 - RNA, 32 nt, Homo Sapiens
agaccucaccuccccuucuccucaccuccugc

SEQ ID NO: 154476 - RNA, 32 nt, Homo Sapiens
uugguuauucucucuuuuuuuuugagacggag

SEQ ID NO: 154477 - RNA, 32 nt, Homo Sapiens
uacugcaaacuuaaaagauacauacaccaaau

SEQ ID NO: 154478 - RNA, 32 nt, Homo Sapiens
agucuggcaggcaggagaagggguguucauag

SEQ ID NO: 154479 - RNA, 32 nt, Homo Sapiens
gaagguacaucauguugucacauuaauuugga

SEQ ID NO: 154480 - RNA, 32 nt, Homo Sapiens
ucuacagccccggccggcgccuccucgagguu

SEQ ID NO: 154481 - RNA, 32 nt, Homo Sapiens
uaauauuucuucaugugucuaucuuuucccau

SEQ ID NO: 154482 - RNA, 32 nt, Homo Sapiens
cggggcgccaaggggcggggcugucucuuaaa

SEQ ID NO: 154483 - RNA, 32 nt, Homo Sapiens
ggauuggauuuauguauguccagcuugggaau

SEQ ID NO: 154484 - RNA, 32 nt, Homo Sapiens
ugggggcaucuggccuggccagugcccugauc

SEQ ID NO: 154485 - RNA, 32 nt, Homo Sapiens
uugaaguguaauccccaauguuagaggugggg

SEQ ID NO: 154486 - RNA, 32 nt, Homo Sapiens
gacugggcgccucagucccagcccuguagcug

SEQ ID NO: 154487 - RNA, 32 nt, Homo Sapiens
gggagggagagagauaaggcgcuaucugccuu

SEQ ID NO: 154488 - RNA, 32 nt, Homo Sapiens
uuaaugauaauaaugcaacauaaaaccuucag

SEQ ID NO: 154489 - RNA, 32 nt, Homo Sapiens
acuauuuuaaauaguuugcugaaaacuccuga

SEQ ID NO: 154490 - RNA, 32 nt, Homo Sapiens
uugugaugauuauucacagagaugaaccuaaa

SEQ ID NO: 154491 - RNA, 32 nt, Homo Sapiens
gccgcgguagugcuaggcaagcccacggaguc

SEQ ID NO: 154492 - RNA, 32 nt, Homo Sapiens
cacagagagcugauugugaaacaucuacuagc

SEQ ID NO: 154493 - RNA, 32 nt, Homo Sapiens
ugcacagugguuaacaguguuuuguuuggugu

SEQ ID NO: 154494 - RNA, 32 nt, Homo Sapiens
ucugcaggagggugaaugccgcagcuuggcag

SEQ ID NO: 154495 - RNA, 32 nt, Homo Sapiens
ucccccacagucagggacccccauaaaggaca

SEQ ID NO: 154496 - RNA, 32 nt, Homo Sapiens
cggaagauaggacuguauauaauuguaauaaa

SEQ ID NO: 154497 - RNA, 32 nt, Homo Sapiens
acuagggcccaucacuguucucuucugcuggg

SEQ ID NO: 154498 - RNA, 32 nt, Homo Sapiens
gcccucagaaaagaaguggacaugcugaagaa

SEQ ID NO: 154499 - RNA, 32 nt, Homo Sapiens
ugugggagauaaaagauguuuauugucuuuua

SEQ ID NO: 154500 - RNA, 32 nt, Homo Sapiens
auugcaugaugccuuacaguuuucaauaacuu

SEQ ID NO: 154501 - RNA, 32 nt, Homo Sapiens
auaaaucuauagaaagaauuuagcugcaagug

SEQ ID NO: 154502 - RNA, 32 nt, Homo Sapiens
ucuucuucaagccauuauuuuaacucaagaaa

SEQ ID NO: 154503 - RNA, 32 nt, Homo Sapiens
uuuguuguauucaaaugauaaugguagcauuu

SEQ ID NO: 154504 - RNA, 32 nt, Homo Sapiens
agggggaggguggaaggagaugugguuucucu

SEQ ID NO: 154505 - RNA, 32 nt, Homo Sapiens
agaaucaaagucaagaucuugugccagagagc

SEQ ID NO: 154506 - RNA, 29 nt, Homo Sapiens
cuuuuauaaaguuuguguuuguaaaauuu

SEQ ID NO: 154507 - RNA, 32 nt, Homo Sapiens
cagauaccagcauguacauagaacuuccaaau

SEQ ID NO: 154508 - RNA, 32 nt, Homo Sapiens
uagucuggucuguguccacuuuuucuaaagua

SEQ ID NO: 154509 - RNA, 32 nt, Homo Sapiens
acgcgcgggccgcagcggccaagcccgagggu

SEQ ID NO: 154510 - RNA, 32 nt, Homo Sapiens
gcgacucccagaagagauagccaggcguccgc

SEQ ID NO: 154511 - RNA, 32 nt, Homo Sapiens
ugguggcagaaagcugugcagccgcgggccca

SEQ ID NO: 154512 - RNA, 32 nt, Homo Sapiens
cugugcccuggccuccccucucuucaccuuua

SEQ ID NO: 154513 - RNA, 29 nt, Homo Sapiens
ucugcgaugaagauaaugaagauaaagac

SEQ ID NO: 154514 - RNA, 32 nt, Homo Sapiens
gcagcauuuacuaugcacaacagaguaacuau

SEQ ID NO: 154515 - RNA, 32 nt, Homo Sapiens
aggcugaggguccuugaacagacgucaucucc

SEQ ID NO: 154516 - RNA, 32 nt, Homo Sapiens
uaccugaggccaggagguccaggccgcaauga

SEQ ID NO: 154517 - RNA, 32 nt, Homo Sapiens
aaagucuuccagugacuuucggucuugguuau

SEQ ID NO: 154518 - RNA, 32 nt, Homo Sapiens
ucucgcgaggccgggcccgagcagaguguggc

SEQ ID NO: 154519 - RNA, 32 nt, Homo Sapiens
uuaaaaugucauuuuuauauagguauuauguu

SEQ ID NO: 154520 - RNA, 30 nt, Homo Sapiens
uggccuggguacugcauccguguguuuuga

SEQ ID NO: 154521 - RNA, 32 nt, Homo Sapiens
gucgcaagcuccagcugcagccuccgccuacg

SEQ ID NO: 154522 - RNA, 32 nt, Homo Sapiens
cgguggcaggagcgccccagccugcagcugac

SEQ ID NO: 154523 - RNA, 31 nt, Homo Sapiens
uaacuucuuuugacuuaaaugaauuuaaaau

SEQ ID NO: 154524 - RNA, 32 nt, Homo Sapiens
acugagaccaaggggagaaccugguugcagga

SEQ ID NO: 154525 - RNA, 32 nt, Homo Sapiens
aguucuuuguaauaacugaaaaagaauauugu

SEQ ID NO: 154526 - RNA, 32 nt, Homo Sapiens
uuauaaacccagggggaccacacacacacaca

SEQ ID NO: 154527 - RNA, 32 nt, Homo Sapiens
auggaguucaaugguccuaucauggcucauua

SEQ ID NO: 154528 - RNA, 32 nt, Homo Sapiens
gcauaauauauuuuuguugcuuuuauaaauca

SEQ ID NO: 154529 - RNA, 32 nt, Homo Sapiens
cacaccgcccugagcccucccacggcccaucg

SEQ ID NO: 154530 - RNA, 32 nt, Homo Sapiens
cucaaggccugacggggugcugcauguggccc

SEQ ID NO: 154531 - RNA, 32 nt, Homo Sapiens
gcugcaccugcuccuccagcugcugcaccugc

SEQ ID NO: 154532 - RNA, 32 nt, Homo Sapiens
agagugagauuugacuugauaauuaugugucu

SEQ ID NO: 154533 - RNA, 32 nt, Homo Sapiens
agagugagauuuuacuugauaauuauguuucu

SEQ ID NO: 154534 - RNA, 32 nt, Homo Sapiens
caguaugucgucuucaugugucuugcaaugaa

SEQ ID NO: 154535 - RNA, 32 nt, Homo Sapiens
ucccagggacuucaggaucaaguccuaguugu

SEQ ID NO: 154536 - RNA, 32 nt, Homo Sapiens
auauaugaaugcagaagggcugugcuggaccc

SEQ ID NO: 154537 - RNA, 32 nt, Homo Sapiens
uguaauacugaaaaaauagaaaaaugacuaag

SEQ ID NO: 154538 - RNA, 32 nt, Homo Sapiens
ggauuccaaugauucagaaaucgaaguaugug

SEQ ID NO: 154539 - RNA, 32 nt, Homo Sapiens
cuuaggcaggcgguggcgcggcuggagugccg

SEQ ID NO: 154540 - RNA, 32 nt, Homo Sapiens
gugaggaagaucucagaaccccgccccggccu

SEQ ID NO: 154541 - RNA, 32 nt, Homo Sapiens
cuguggaguagggauccuaucuggagaagugg

SEQ ID NO: 154542 - RNA, 32 nt, Homo Sapiens
aggguuuccuuccacuuccuugcuggguggcc

SEQ ID NO: 154543 - RNA, 32 nt, Homo Sapiens
gcccagcgggcucggugguuggguccgcggcg

SEQ ID NO: 154544 - RNA, 32 nt, Homo Sapiens
aaagucucuaacuggcaugauuugauuacuuu

SEQ ID NO: 154545 - RNA, 32 nt, Homo Sapiens
ugaccaucaaggaaauuuccauccacacagau

SEQ ID NO: 154546 - RNA, 32 nt, Homo Sapiens
cgccggggcacgcuuguugcaccgucccgcgg

SEQ ID NO: 154547 - RNA, 32 nt, Homo Sapiens
uggcuacagagagugcuggagaacaguguagc

SEQ ID NO: 154548 - RNA, 32 nt, Homo Sapiens
aaggaagucacagaucagacaaccaaccacac

SEQ ID NO: 154549 - RNA, 32 nt, Homo Sapiens
uucuugugugaacagaaauguuuaaugucugc

SEQ ID NO: 154550 - RNA, 32 nt, Homo Sapiens
gccugggcgggugcaggagaucgugggcgccc

SEQ ID NO: 154551 - RNA, 32 nt, Homo Sapiens
acaacgggggcggggucacagcagccccucgg

SEQ ID NO: 154552 - RNA, 32 nt, Homo Sapiens
cccgggagcuguccggccgccucggugcugau

SEQ ID NO: 154553 - RNA, 32 nt, Homo Sapiens
gcggccgcgacuauucgguaccugaaaacaac

SEQ ID NO: 154554 - RNA, 32 nt, Homo Sapiens
ugacggaggacucuggggguccuucuuaccgg

SEQ ID NO: 154555 - RNA, 32 nt, Homo Sapiens
uucuggggcagcuagggcugcccgccgcgcug

SEQ ID NO: 154556 - RNA, 32 nt, Homo Sapiens
gagagaaacaaugaaggccuaguuggcacuuu

SEQ ID NO: 154557 - RNA, 32 nt, Homo Sapiens
cauacacaggccuucaggaagagacgacaguu

SEQ ID NO: 154558 - RNA, 29 nt, Homo Sapiens
acggagccggagucgcggacgccgcgggg

SEQ ID NO: 154559 - RNA, 32 nt, Homo Sapiens
guggcuugggaugucacggagaugaacaccag

SEQ ID NO: 154560 - RNA, 32 nt, Homo Sapiens
uuaagguucaaaugcauggauaggguggucau

SEQ ID NO: 154561 - RNA, 32 nt, Homo Sapiens
cagaauaggaacagguguuugcucuccuaaga

SEQ ID NO: 154562 - RNA, 32 nt, Homo Sapiens
gcgagcuucucccggcgccgcccgcucggcuc

SEQ ID NO: 154563 - RNA, 32 nt, Homo Sapiens
uccauguuagaaaacagaauccagucaucagc

SEQ ID NO: 154564 - RNA, 29 nt, Homo Sapiens
uggcauggcgauuucagaggugaguccaa

SEQ ID NO: 154565 - RNA, 32 nt, Homo Sapiens
uacauuuuguccuuuuaaccuuacaaggagau

SEQ ID NO: 154566 - RNA, 32 nt, Homo Sapiens
uaccuucaaagaguacaccuagcugaaucccc

SEQ ID NO: 154567 - RNA, 32 nt, Homo Sapiens
cgagcccccuccccgcagccuccuugcuucuc

SEQ ID NO: 154568 - RNA, 32 nt, Homo Sapiens
gucaccaguguucucacccucuaggcccugug

SEQ ID NO: 154569 - RNA, 32 nt, Homo Sapiens
uggguuuauuuugaaguuacuaacuaugucuu

SEQ ID NO: 154570 - RNA, 32 nt, Homo Sapiens
gaccaaggagcugcagaagcugauugaagcug

SEQ ID NO: 154571 - RNA, 28 nt, Homo Sapiens
cugagccuuacaggacagguggacuuca

SEQ ID NO: 154572 - RNA, 32 nt, Homo Sapiens
acuauuggagggugggagagcccagccauuac

SEQ ID NO: 154573 - RNA, 32 nt, Homo Sapiens
ugaaaauccuucccuuugcccucccccagugg

SEQ ID NO: 154574 - RNA, 32 nt, Homo Sapiens
agcgcugccacccacccaccugggccagagcu

SEQ ID NO: 154575 - RNA, 32 nt, Homo Sapiens
acacuuuuucuuuacaaacaaaagcauucgga

SEQ ID NO: 154576 - RNA, 32 nt, Homo Sapiens
aaauuuaauuguagacuucaauaguccaaguu

SEQ ID NO: 154577 - RNA, 32 nt, Homo Sapiens
ggaauuuugaaacauuuuguaccuguugauuu

SEQ ID NO: 154578 - RNA, 32 nt, Homo Sapiens
auggagucaaaggagaucauuuuggagcuuug

SEQ ID NO: 154579 - RNA, 32 nt, Homo Sapiens
gugagauuccgucuucuucccugucucaagua

SEQ ID NO: 154580 - RNA, 32 nt, Homo Sapiens
gcagcugagaaugcccaaaaagugccagaagc

SEQ ID NO: 154581 - RNA, 32 nt, Homo Sapiens
guaaggucagugcagcagacagggccagacug

SEQ ID NO: 154582 - RNA, 32 nt, Homo Sapiens
acaggaugaggaggaagaauuggcaggcuaaa

SEQ ID NO: 154583 - RNA, 32 nt, Homo Sapiens
uuaaaacaacucauuaaauauuggauucauuu

SEQ ID NO: 154584 - RNA, 29 nt, Homo Sapiens
ccugugggaggguuauauuuucuaguaua

SEQ ID NO: 154585 - RNA, 32 nt, Homo Sapiens
cccugccgcgcgcccucgcgccuguucacauc

SEQ ID NO: 154586 - RNA, 32 nt, Homo Sapiens
augugcuccagaugaaaaugucucguuucugu

SEQ ID NO: 154587 - RNA, 32 nt, Homo Sapiens
cacgcgaacgcaggcgcacgcucuggcgcggg

SEQ ID NO: 154588 - RNA, 32 nt, Homo Sapiens
auacuuggaugugccuguccugcccgggccau

SEQ ID NO: 154589 - RNA, 32 nt, Homo Sapiens
uuaacaaguggaagaucugcuggguuucagga

SEQ ID NO: 154590 - RNA, 32 nt, Homo Sapiens
uaagacuuugaucacuuguugaggauguuucu

SEQ ID NO: 154591 - RNA, 32 nt, Homo Sapiens
ugcaauuuucugccaccacuccaaauacuccu

SEQ ID NO: 154592 - RNA, 28 nt, Homo Sapiens
uacacaguuacagagaucagucaaaucc

SEQ ID NO: 154593 - RNA, 32 nt, Homo Sapiens
accaaaaggcauauggguuuagguugguuuuu

SEQ ID NO: 154594 - RNA, 32 nt, Homo Sapiens
aaucaaaaguauuuaaugaaauacuaguucua

SEQ ID NO: 154595 - RNA, 32 nt, Homo Sapiens
acaaucugaugaugacaaguuccguggucuuc

SEQ ID NO: 154596 - RNA, 30 nt, Homo Sapiens
ccagcaugagcgacagaaugggaccuuguc

SEQ ID NO: 154597 - RNA, 32 nt, Homo Sapiens
ggagucugcccccaagauucaaucaccuccca

SEQ ID NO: 154598 - RNA, 32 nt, Homo Sapiens
cccucuucuucccccaccccuuuccaggagaa

SEQ ID NO: 154599 - RNA, 32 nt, Homo Sapiens
ggaccuaacucguuuuuuccuuguuuuauuac

SEQ ID NO: 154600 - RNA, 32 nt, Homo Sapiens
caagucuggcuuauuccucucucagcaggucc

SEQ ID NO: 154601 - RNA, 32 nt, Homo Sapiens
ucccccuucacuuuuuucagauaugucuacaa

SEQ ID NO: 154602 - RNA, 32 nt, Homo Sapiens
cugaggccccaaguggcuccgcggccgagaag

SEQ ID NO: 154603 - RNA, 32 nt, Homo Sapiens
caccuaucauucugcauagauaauuggguaau

SEQ ID NO: 154604 - RNA, 32 nt, Homo Sapiens
aggccuaggaucaguucuuagagcagccccgg

SEQ ID NO: 154605 - RNA, 32 nt, Homo Sapiens
cccuugcuagccacuacuggcuuacugagaga

SEQ ID NO: 154606 - RNA, 32 nt, Homo Sapiens
caugaccaggacuuaugggugggaggggagca

SEQ ID NO: 154607 - RNA, 32 nt, Homo Sapiens
cgagcggcgcccagcccagcgccucggccgaa

SEQ ID NO: 154608 - RNA, 32 nt, Homo Sapiens
cuuuguacauauauuuuaccuuuuauaccuau

SEQ ID NO: 154609 - RNA, 32 nt, Homo Sapiens
aagcucucaccugguucuuuuauggggacuuu

SEQ ID NO: 154610 - RNA, 32 nt, Homo Sapiens
gacaucucccuggggucuggcucacugccuua

SEQ ID NO: 154611 - RNA, 32 nt, Homo Sapiens
ugaguaagaugaugaaugagauguaaaugugc

SEQ ID NO: 154612 - RNA, 32 nt, Homo Sapiens
uauccauuuucugaugaauauuacauggaggg

SEQ ID NO: 154613 - RNA, 32 nt, Homo Sapiens
gacagggucucacucuguuacccaggcuggag

SEQ ID NO: 154614 - RNA, 32 nt, Homo Sapiens
ccggaccccugugacuggcccgggcuuccggg

SEQ ID NO: 154615 - RNA, 32 nt, Homo Sapiens
ccagugaggagaauucaggugaucucugugga

SEQ ID NO: 154616 - RNA, 32 nt, Homo Sapiens
uuccaguguguggccuauugaaguaguagugg

SEQ ID NO: 154617 - RNA, 32 nt, Homo Sapiens
gacagggucuuacucugucacccaggcuggag

SEQ ID NO: 154618 - RNA, 32 nt, Homo Sapiens
gugucuauaggagccuauaaacaaagccuaua

SEQ ID NO: 154619 - RNA, 32 nt, Homo Sapiens
uccauugcuaucuauugauaauuuagacauug

SEQ ID NO: 154620 - RNA, 32 nt, Homo Sapiens
acuggagucugcuuaaaggacuguggauaaug

SEQ ID NO: 154621 - RNA, 32 nt, Homo Sapiens
uguguggaagggucccuggauuuucccuaaca

SEQ ID NO: 154622 - RNA, 32 nt, Homo Sapiens
uuucuuugugugcagagcugcuguugcagcca

SEQ ID NO: 154623 - RNA, 32 nt, Homo Sapiens
aucaauaaaauucuauuuuuacgucauuuuau

SEQ ID NO: 154624 - RNA, 32 nt, Homo Sapiens
uauugccuaaucacuccaacccugccccuuuc

SEQ ID NO: 154625 - RNA, 32 nt, Homo Sapiens
uuaucaucgaggaacuuucucaacgcauugca

SEQ ID NO: 154626 - RNA, 32 nt, Homo Sapiens
ucuugagcagcuugcuuuagccugcucccacu

SEQ ID NO: 154627 - RNA, 32 nt, Homo Sapiens
acagccauccauauuucuuuuuuccuuugucu

SEQ ID NO: 154628 - RNA, 32 nt, Homo Sapiens
ggagcuugagagagggcgggagugggaaggcu

SEQ ID NO: 154629 - RNA, 32 nt, Homo Sapiens
ugacacccaucccucugcccuccaccucuacc

SEQ ID NO: 154630 - RNA, 32 nt, Homo Sapiens
agcuggcuuccaacuauaacauuuuacucuca

SEQ ID NO: 154631 - RNA, 32 nt, Homo Sapiens
augggggaggguggggagcagcucccagcacc

SEQ ID NO: 154632 - RNA, 32 nt, Homo Sapiens
uuucuugaauuucgcuguuuucuucugcuucc

SEQ ID NO: 154633 - RNA, 32 nt, Homo Sapiens
ucuggguaacaagugccauuucuuuguuguuu

SEQ ID NO: 154634 - RNA, 32 nt, Homo Sapiens
cccuaagucaggcucucccucaguuaccaggg

SEQ ID NO: 154635 - RNA, 32 nt, Homo Sapiens
augcagagaaagugggagaaacucggcugugc

SEQ ID NO: 154636 - RNA, 32 nt, Homo Sapiens
agcugcccuaaaaggaaugaggaagcgagagc

SEQ ID NO: 154637 - RNA, 32 nt, Homo Sapiens
accccggaauaaaaugauaucaguaucaagau

SEQ ID NO: 154638 - RNA, 32 nt, Homo Sapiens
ugauguuuaaagacauaaaggauaaaguuuac

SEQ ID NO: 154639 - RNA, 32 nt, Homo Sapiens
augagucuguuucuuguaauggcugaccagau

SEQ ID NO: 154640 - RNA, 32 nt, Homo Sapiens
guccagcggggaggaggcugcccguuccugcc

SEQ ID NO: 154641 - RNA, 32 nt, Homo Sapiens
uaagcuguuucauuuuuuauuauuuucuaugu

SEQ ID NO: 154642 - RNA, 32 nt, Homo Sapiens
caucgagggcagcgcccccggcgcggaucugc

SEQ ID NO: 154643 - RNA, 32 nt, Homo Sapiens
gauguguucuuuacaaaggcuagcucagucca

SEQ ID NO: 154644 - RNA, 32 nt, Homo Sapiens
gggagccgccgggagcggauggcggcggccgu

SEQ ID NO: 154645 - RNA, 32 nt, Homo Sapiens
gaaccaucacuuaugaaggauguccucaucac

SEQ ID NO: 154646 - RNA, 32 nt, Homo Sapiens
gcggggaggugaccccaggcccugcccuacug

SEQ ID NO: 154647 - RNA, 32 nt, Homo Sapiens
gcuuccucauuucucuucaccaaaaccaaaca

SEQ ID NO: 154648 - RNA, 32 nt, Homo Sapiens
agcuguauaaugugcuaagaccucuugaauau

SEQ ID NO: 154649 - RNA, 32 nt, Homo Sapiens
gugcccaccauacacacaggugucucauguga

SEQ ID NO: 154650 - RNA, 32 nt, Homo Sapiens
gugcugggacgccggcaccgugagauggcgcc

SEQ ID NO: 154651 - RNA, 32 nt, Homo Sapiens
aacccgcgcccucuccucucuuccugccaagg

SEQ ID NO: 154652 - RNA, 32 nt, Homo Sapiens
gcaaagcagaaucuguuguccuuaauuauauu

SEQ ID NO: 154653 - RNA, 32 nt, Homo Sapiens
agggagccacagaaagcagagugggacucggg

SEQ ID NO: 154654 - RNA, 32 nt, Homo Sapiens
cugauuuggauuuguuuuaucguauccuaaag

SEQ ID NO: 154655 - RNA, 32 nt, Homo Sapiens
uccuguucugccaagacuuccuccucuuuguu

SEQ ID NO: 154656 - RNA, 32 nt, Homo Sapiens
uuuguaggggaagaguccugaggggcaacaca

SEQ ID NO: 154657 - RNA, 32 nt, Homo Sapiens
uacgcggcgcgcgcccccggcgccccccgcuc

SEQ ID NO: 154658 - RNA, 32 nt, Homo Sapiens
gguccaagccccaaccaaggggauucuucgau

SEQ ID NO: 154659 - RNA, 32 nt, Homo Sapiens
acccgaaccaaaaacugcaaagguggcaggaa

SEQ ID NO: 154660 - RNA, 32 nt, Homo Sapiens
uccaggagaagcucggcguuacccccggcagc

SEQ ID NO: 154661 - RNA, 32 nt, Homo Sapiens
cagagcuggggcugcgcggggccgggcgagcg

SEQ ID NO: 154662 - RNA, 32 nt, Homo Sapiens
cugggccuggccuggggcguccccgcgaagcc

SEQ ID NO: 154663 - RNA, 32 nt, Homo Sapiens
ugcugaguaaaaggggaaauuucuaaaccuag

SEQ ID NO: 154664 - RNA, 32 nt, Homo Sapiens
ccuaaugcaguuuaacaaaugacuccaccuau

SEQ ID NO: 154665 - RNA, 32 nt, Homo Sapiens
uuuuuuaagucuuuuuuuuuuuuuuuuuuggu

SEQ ID NO: 154666 - RNA, 32 nt, Homo Sapiens
gggcggaccgcggcggcagcaugagcggcgca

SEQ ID NO: 154667 - RNA, 32 nt, Homo Sapiens
cagacuugaaaacuaggaucuuccucagaugu

SEQ ID NO: 154668 - RNA, 32 nt, Homo Sapiens
uugugacggaagcucccugggcggggcggggc

SEQ ID NO: 154669 - RNA, 32 nt, Homo Sapiens
caggacaaggacccuagaguccaagagaaucc

SEQ ID NO: 154670 - RNA, 32 nt, Homo Sapiens
ccgaacccgcggcgcgcagugucccgugaacu

SEQ ID NO: 154671 - RNA, 32 nt, Homo Sapiens
gacuuucuccccaccccuccccgacccccacg

SEQ ID NO: 154672 - RNA, 32 nt, Homo Sapiens
uacaggugugggccaccacaccuggcuaauuu

SEQ ID NO: 154673 - RNA, 32 nt, Homo Sapiens
agcuccaguggcggcggcggcggcggcagcgg

SEQ ID NO: 154674 - RNA, 32 nt, Homo Sapiens
auucccagcuuuccaagcugcccccaggcggc

SEQ ID NO: 154675 - RNA, 32 nt, Homo Sapiens
gcucaagccuccccgcuagcagccccacaggc

SEQ ID NO: 154676 - RNA, 32 nt, Homo Sapiens
agcacaaguaugcugguaguagccucuuuaaa

SEQ ID NO: 154677 - RNA, 32 nt, Homo Sapiens
cauaaagcagagcuaaaacuaaauuucuuuca

SEQ ID NO: 154678 - RNA, 32 nt, Homo Sapiens
ugggcuugcugagcuccggcgcccgcggagcu

SEQ ID NO: 154679 - RNA, 32 nt, Homo Sapiens
auuguagacaaaaauaaugaauuuaguauaca

SEQ ID NO: 154680 - RNA, 32 nt, Homo Sapiens
uucauaaaaugaaauuuuauuaugauguguaa

SEQ ID NO: 154681 - RNA, 32 nt, Homo Sapiens
acccugccccacuuugauuuaauccuuuggcu

SEQ ID NO: 154682 - RNA, 32 nt, Homo Sapiens
uuguuuuguacaaaaaguguuauugaaagaaa

SEQ ID NO: 154683 - RNA, 32 nt, Homo Sapiens
gcugcuggccuggcccuugaguggggcagccu

SEQ ID NO: 154684 - RNA, 30 nt, Homo Sapiens
caaagaucuggaaugggggccaccuuuaua

SEQ ID NO: 154685 - RNA, 32 nt, Homo Sapiens
ugagaaacaacaauuucuacuuugaagucaua

SEQ ID NO: 154686 - RNA, 32 nt, Homo Sapiens
cuaagagaagaaaacggggucuguggcgguac

SEQ ID NO: 154687 - RNA, 32 nt, Homo Sapiens
gagaaugagcaaauaccuuguguuacagcugc

SEQ ID NO: 154688 - RNA, 32 nt, Homo Sapiens
uccgaagcaaaacaacgaugacaacaacaaaa

SEQ ID NO: 154689 - RNA, 32 nt, Homo Sapiens
acaagagucucacucucacacccaggcuggag

SEQ ID NO: 154690 - RNA, 32 nt, Homo Sapiens
aaggguugggguggcgacacggccucccgagg

SEQ ID NO: 154691 - RNA, 32 nt, Homo Sapiens
acagaacuaugaaaaaguuaaggcuagacggg

SEQ ID NO: 154692 - RNA, 32 nt, Homo Sapiens
ggagccccugguguggaaagaggccccaaggu

SEQ ID NO: 154693 - RNA, 32 nt, Homo Sapiens
gaccagaagcaucugugcaucuggagggcaga

SEQ ID NO: 154694 - RNA, 32 nt, Homo Sapiens
aaaaacaacuuuuuuucuuaagaaucaaacuu

SEQ ID NO: 154695 - RNA, 32 nt, Homo Sapiens
cuauauuccgucugcuccaacacacaccuucc

SEQ ID NO: 154696 - RNA, 32 nt, Homo Sapiens
ccaaccccaguauaaacuucuggauuaaagag

SEQ ID NO: 154697 - RNA, 32 nt, Homo Sapiens
cauuuugccuugcaucguuucccucgucaugc

SEQ ID NO: 154698 - RNA, 32 nt, Homo Sapiens
uaauuuucacaauaaccuuguuuuuacuucua

SEQ ID NO: 154699 - RNA, 32 nt, Homo Sapiens
uauuuuauuuuuguuuauaccagucuuaaaga

SEQ ID NO: 154700 - RNA, 27 nt, Homo Sapiens
cgaugcggcugcugccccugcugcgga

SEQ ID NO: 154701 - RNA, 32 nt, Homo Sapiens
agagacugacugggcaacauguuguucagaaa

SEQ ID NO: 154702 - RNA, 32 nt, Homo Sapiens
ggagccuucuggagaagcugcugggaucggac

SEQ ID NO: 154703 - RNA, 32 nt, Homo Sapiens
ugaagcccaagcaggggcucugggcagaaggc

SEQ ID NO: 154704 - RNA, 32 nt, Homo Sapiens
guuuuguguguacauauuuugcucuuaaaguu

SEQ ID NO: 154705 - RNA, 32 nt, Homo Sapiens
auaacgacccucaacagcggcggagagggagc

SEQ ID NO: 154706 - RNA, 32 nt, Homo Sapiens
gcuccuguuuuacuguagaagggacaauuaac

SEQ ID NO: 154707 - RNA, 32 nt, Homo Sapiens
auauguuuuuauuucauuucaauaaacuucca

SEQ ID NO: 154708 - RNA, 32 nt, Homo Sapiens
auggugggaacaggcugugccuccccagggac

SEQ ID NO: 154709 - RNA, 32 nt, Homo Sapiens
gacuacccuaaaacccagcgacucucgugugc

SEQ ID NO: 154710 - RNA, 32 nt, Homo Sapiens
caacagagcaagauccugucuuuaaggaaaaa

SEQ ID NO: 154711 - RNA, 32 nt, Homo Sapiens
guugguucuagaaaauacaagguacaguuuuu

SEQ ID NO: 154712 - RNA, 32 nt, Homo Sapiens
auguuguggucaugcuggcugucuggggucug

SEQ ID NO: 154713 - RNA, 32 nt, Homo Sapiens
ccuuuuuaagaaacuuaauguuccagcucuug

SEQ ID NO: 154714 - RNA, 32 nt, Homo Sapiens
gcagcuguaggguggggaccggggagcaccug

SEQ ID NO: 154715 - RNA, 32 nt, Homo Sapiens
caaguuaaacuuauguaagcuuuccguggcau

SEQ ID NO: 154716 - RNA, 32 nt, Homo Sapiens
gcgggucuuuugcuggcucuuuccuggaauau

SEQ ID NO: 154717 - RNA, 32 nt, Homo Sapiens
auccuuugccagcuccuccuaucccgugggca

SEQ ID NO: 154718 - RNA, 32 nt, Homo Sapiens
ggugcccagaaaggcggcgacgcggcggauga

SEQ ID NO: 154719 - RNA, 32 nt, Homo Sapiens
uccuggcgcugcgcccuguccacagucaccuu

SEQ ID NO: 154720 - RNA, 32 nt, Homo Sapiens
cucacuaaaagcugguugcgcuuugagaucug

SEQ ID NO: 154721 - RNA, 32 nt, Homo Sapiens
aggaaauuuuuaacucuacuguagaugcaugu

SEQ ID NO: 154722 - RNA, 32 nt, Homo Sapiens
cugcuguaaugggggcagagaauaccaaaaag

SEQ ID NO: 154723 - RNA, 32 nt, Homo Sapiens
ggcagcggugcccgcuggcccgggguugagac

SEQ ID NO: 154724 - RNA, 32 nt, Homo Sapiens
uuggugguuuuguuuucauuuauuuuugcaag

SEQ ID NO: 154725 - RNA, 32 nt, Homo Sapiens
uucccaccuuggccuuucugaacuauuuccuu

SEQ ID NO: 154726 - RNA, 32 nt, Homo Sapiens
ugcaguuuuuaaaauccaugucaguaauauuu

SEQ ID NO: 154727 - RNA, 32 nt, Homo Sapiens
acugcagaaaucaugugacugucacgugcugg

SEQ ID NO: 154728 - RNA, 32 nt, Homo Sapiens
cugcauaaaaauuuucuaacuuggguucaaua

SEQ ID NO: 154729 - RNA, 30 nt, Homo Sapiens
caggagagaggcaaugaugagugaucaaga

SEQ ID NO: 154730 - RNA, 32 nt, Homo Sapiens
gaggaguugagagagugcaggcuggggucagg

SEQ ID NO: 154731 - RNA, 32 nt, Homo Sapiens
uauuuauuacagccaacagacuggccucuuuc

SEQ ID NO: 154732 - RNA, 32 nt, Homo Sapiens
cuacccagagggccuaggagaagugcuguaua

SEQ ID NO: 154733 - RNA, 32 nt, Homo Sapiens
augugcaaaacgcaguccaugaaaaccagaaa

SEQ ID NO: 154734 - RNA, 32 nt, Homo Sapiens
ggagaaaaauuugaacgaggcuagugcaaugu

SEQ ID NO: 154735 - RNA, 32 nt, Homo Sapiens
gcaaaaggaagccuaagaaguauuagacucua

SEQ ID NO: 154736 - RNA, 32 nt, Homo Sapiens
uguuucucuccacucugccucaucucuguacg

SEQ ID NO: 154737 - RNA, 32 nt, Homo Sapiens
cacacgcagacacacacacacacacacacacc

SEQ ID NO: 154738 - RNA, 32 nt, Homo Sapiens
cugaggcugcuucauguguuuucagggcaguu

SEQ ID NO: 154739 - RNA, 32 nt, Homo Sapiens
uaaugcaaagacuguauuauccucacaugacu

SEQ ID NO: 154740 - RNA, 29 nt, Homo Sapiens
ugaucguaucugaugucugugggacuaac

SEQ ID NO: 154741 - RNA, 32 nt, Homo Sapiens
caguugccccgagcuguuuuguguguaaugaa

SEQ ID NO: 154742 - RNA, 32 nt, Homo Sapiens
ccauuaggucacuuaagaaguaagcaacuagc

SEQ ID NO: 154743 - RNA, 32 nt, Homo Sapiens
cugcccugucaccucagcauucuuugcggcag

SEQ ID NO: 154744 - RNA, 32 nt, Homo Sapiens
agagaggaagagaggggagcgcgguggcgcug

SEQ ID NO: 154745 - RNA, 32 nt, Homo Sapiens
acaggacuuaaaaugacauucaguauauaaaa

SEQ ID NO: 154746 - RNA, 32 nt, Homo Sapiens
guccaccgagcuccggcgccugucguucuaau

SEQ ID NO: 154747 - RNA, 32 nt, Homo Sapiens
cggggcgugggaagagccuggccuaggcauuu

SEQ ID NO: 154748 - RNA, 32 nt, Homo Sapiens
auauguauuguuuuuaaaaaucaaaugcacac

SEQ ID NO: 154749 - RNA, 32 nt, Homo Sapiens
gcugccacucugggacggguggccagcugcca

SEQ ID NO: 154750 - RNA, 30 nt, Homo Sapiens
uggucaggcggcggcggcggagaaggaggc

SEQ ID NO: 154751 - RNA, 32 nt, Homo Sapiens
uuaugugugugugugagagacacacacaaaca

SEQ ID NO: 154752 - RNA, 32 nt, Homo Sapiens
aaguaucccaguucccaaaaaugccaaggaaa

SEQ ID NO: 154753 - RNA, 32 nt, Homo Sapiens
ggacuuuccauuuaaucugugauucagccaca

SEQ ID NO: 154754 - RNA, 32 nt, Homo Sapiens
ucagcucacugcaacauccgccucugggguuc

SEQ ID NO: 154755 - RNA, 27 nt, Homo Sapiens
aaauccuacuuuugcugguauacugug

SEQ ID NO: 154756 - RNA, 32 nt, Homo Sapiens
cuccaaauauuaacuaauuauuagauuauauu

SEQ ID NO: 154757 - RNA, 27 nt, Homo Sapiens
gcauagaccuucuucucccacccccuu

SEQ ID NO: 154758 - RNA, 32 nt, Homo Sapiens
aucugcccaucccucuucauucacacacaguu

SEQ ID NO: 154759 - RNA, 32 nt, Homo Sapiens
ccgccaggccgcgucccccuccccuccccucc

SEQ ID NO: 154760 - RNA, 32 nt, Homo Sapiens
gcagccgggaggagggggccgcagucgggaga

SEQ ID NO: 154761 - RNA, 32 nt, Homo Sapiens
gcaggggcucaggagagaagggagcagcuggc

SEQ ID NO: 154762 - RNA, 32 nt, Homo Sapiens
augaauuuacacaaaaaaaaaaaaaaaaaaaa

SEQ ID NO: 154763 - RNA, 32 nt, Homo Sapiens
guacauuuauaaaaacaggaucauauacugua

SEQ ID NO: 154764 - RNA, 32 nt, Homo Sapiens
uuuccaagauggaguuuugcucugucacccag

SEQ ID NO: 154765 - RNA, 32 nt, Homo Sapiens
aacuguucucagaggcuccaauuuauauucau

SEQ ID NO: 154766 - RNA, 32 nt, Homo Sapiens
gaaccgagggcuucaucaaagugagaggaaag

SEQ ID NO: 154767 - RNA, 32 nt, Homo Sapiens
ggguaucucuacaccuucgucuccuugagguu

SEQ ID NO: 154768 - RNA, 32 nt, Homo Sapiens
uuacauuguucuggcaauccacagaaagagaa

SEQ ID NO: 154769 - RNA, 32 nt, Homo Sapiens
gaaugaaauggacauuuuuucuuaauuuaugu

SEQ ID NO: 154770 - RNA, 32 nt, Homo Sapiens
cugcggaccguugggcgguuccgcggggcguu

SEQ ID NO: 154771 - RNA, 32 nt, Homo Sapiens
uacauguuaagagaaugcuuugaaagcuuauu

SEQ ID NO: 154772 - RNA, 32 nt, Homo Sapiens
gggcaugacccggcagaugcuugcccaguagu

SEQ ID NO: 154773 - RNA, 32 nt, Homo Sapiens
ccuggaagcugccuguccuucucccugugcuu

SEQ ID NO: 154774 - RNA, 32 nt, Homo Sapiens
uacugaaauuuaugucaaaauaacggcuagga

SEQ ID NO: 154775 - RNA, 32 nt, Homo Sapiens
gugaauccauauauuucuguauuuccuggaua

SEQ ID NO: 154776 - RNA, 32 nt, Homo Sapiens
gcgguggggccgagaggacgcgcagguggcgg

SEQ ID NO: 154777 - RNA, 32 nt, Homo Sapiens
uguauugaaauaaaacacaauaaaauuaaaaa

SEQ ID NO: 154778 - RNA, 32 nt, Homo Sapiens
ccgugacccagcuuccugaguccuccgugcag

SEQ ID NO: 154779 - RNA, 32 nt, Homo Sapiens
guauucccuuuuuaaaugagcuuucaggaagu

SEQ ID NO: 154780 - RNA, 32 nt, Homo Sapiens
cgcaccaggcuuucuuuuugaaauucgaggaa

SEQ ID NO: 154781 - RNA, 32 nt, Homo Sapiens
uacauaccuuuguguauagacaagcccaugcc

SEQ ID NO: 154782 - RNA, 32 nt, Homo Sapiens
cauguggccuaacuugauacaaaaauaaaagu

SEQ ID NO: 154783 - RNA, 32 nt, Homo Sapiens
aguauucacuuuaugaauauuuaauucauuuc

SEQ ID NO: 154784 - RNA, 32 nt, Homo Sapiens
guuuuucugaagaucaauuagacauuuugaaa

SEQ ID NO: 154785 - RNA, 32 nt, Homo Sapiens
auuuagauaugaaaaacuuaugugcuaguguu

SEQ ID NO: 154786 - RNA, 32 nt, Homo Sapiens
ugggcaucucuauauuuauuuugguggcauuc

SEQ ID NO: 154787 - RNA, 32 nt, Homo Sapiens
acuaucauuuuucacuuuucaaagaauuuaac

SEQ ID NO: 154788 - RNA, 32 nt, Homo Sapiens
gacaccaucguggccaaccccuggcaccccua

SEQ ID NO: 154789 - RNA, 32 nt, Homo Sapiens
gguggcauuuuucuuaacgagauuugcuucug

SEQ ID NO: 154790 - RNA, 32 nt, Homo Sapiens
gacaauucaauccuagaauuacuggauuaaau

SEQ ID NO: 154791 - RNA, 32 nt, Homo Sapiens
acacacacauaaaucagccaaaaucagagaaa

SEQ ID NO: 154792 - RNA, 32 nt, Homo Sapiens
uugagagaucauauguuuguucaauuacauuu

SEQ ID NO: 154793 - RNA, 32 nt, Homo Sapiens
cucacccucuccagucaccccuccucaguucc

SEQ ID NO: 154794 - RNA, 32 nt, Homo Sapiens
auggcuacagaauucagauuuguuuuguagga

SEQ ID NO: 154795 - RNA, 32 nt, Homo Sapiens
gugggaagugggaaaaugaguuugucaacgcc

SEQ ID NO: 154796 - RNA, 32 nt, Homo Sapiens
aauauguuauaaaagaaauaaaaacuaagaug

SEQ ID NO: 154797 - RNA, 32 nt, Homo Sapiens
aaauuuauaugaucuagguauguuuucaaucc

SEQ ID NO: 154798 - RNA, 32 nt, Homo Sapiens
aggagguccccugccccucccccugcucaaag

SEQ ID NO: 154799 - RNA, 32 nt, Homo Sapiens
agcucaccuuugaacagaucccggugacauuc

SEQ ID NO: 154800 - RNA, 32 nt, Homo Sapiens
caaauucauauucuuuuauuuguuauggcaga

SEQ ID NO: 154801 - RNA, 32 nt, Homo Sapiens
guuuguuuuuugcugcuuuccucccaucuugu

SEQ ID NO: 154802 - RNA, 32 nt, Homo Sapiens
cggcgggcggcgccuggcguuucgaggcugag

SEQ ID NO: 154803 - RNA, 32 nt, Homo Sapiens
uuuaugaaauauuuaaaguuucuaauguggua

SEQ ID NO: 154804 - RNA, 32 nt, Homo Sapiens
gaugcaaagcuacucgcuaccagcuuggaccu

SEQ ID NO: 154805 - RNA, 32 nt, Homo Sapiens
gcaauagcaaccauugagcuaaaauuaugcaa

SEQ ID NO: 154806 - RNA, 32 nt, Homo Sapiens
ccucucccaggccccaggccgcggagcuggca

SEQ ID NO: 154807 - RNA, 32 nt, Homo Sapiens
uuuucuguggcggggccaaaaaaggaaaccag

SEQ ID NO: 154808 - RNA, 32 nt, Homo Sapiens
gaaagagcacaaaagaggucugggaacuucuc

SEQ ID NO: 154809 - RNA, 32 nt, Homo Sapiens
ccuguccccguccuuggugccccccgagcugu

SEQ ID NO: 154810 - RNA, 32 nt, Homo Sapiens
gucgucccgcccaccucaaaccccgcaggugu

SEQ ID NO: 154811 - RNA, 32 nt, Homo Sapiens
caauguugucuuccaauacaugaauaugguac

SEQ ID NO: 154812 - RNA, 32 nt, Homo Sapiens
ccuacccaaccccacaccaccaggcucccugc

SEQ ID NO: 154813 - RNA, 32 nt, Homo Sapiens
acagauuccaugaaauaaaagucuauucuuuc

SEQ ID NO: 154814 - RNA, 32 nt, Homo Sapiens
uagccccgccccagcccucagucacccccacu

SEQ ID NO: 154815 - RNA, 32 nt, Homo Sapiens
uggcuuaauuuaauguauuaaucuguuugugc

SEQ ID NO: 154816 - RNA, 32 nt, Homo Sapiens
ugguuggggggcuucuuuugcugcuggccacg

SEQ ID NO: 154817 - RNA, 32 nt, Homo Sapiens
auuuuuuugaguugcucuuuuacuauggguug

SEQ ID NO: 154818 - RNA, 32 nt, Homo Sapiens
aaaaguggcuccuguuuguuugaugaugauug

SEQ ID NO: 154819 - RNA, 32 nt, Homo Sapiens
cgaggaguagccagguaggcgagacacaaaaa

SEQ ID NO: 154820 - RNA, 32 nt, Homo Sapiens
augaacuguauuuuaaauuuguuaggucugaa

SEQ ID NO: 154821 - RNA, 32 nt, Homo Sapiens
cagccccagagacagaugugggcacaggaagg

SEQ ID NO: 154822 - RNA, 32 nt, Homo Sapiens
acugugggaaggcuuuagcaauaaucaacauu

SEQ ID NO: 154823 - RNA, 32 nt, Homo Sapiens
acgggcccagggugggagcggccggcccaccu

SEQ ID NO: 154824 - RNA, 32 nt, Homo Sapiens
acgccgcugugacccggagguccucagggggc

SEQ ID NO: 154825 - RNA, 32 nt, Homo Sapiens
ccuggguaacagagcuagacuccaucucaaaa

SEQ ID NO: 154826 - RNA, 32 nt, Homo Sapiens
cagacucccagcugcuacccccucccuuccca

SEQ ID NO: 154827 - RNA, 32 nt, Homo Sapiens
ucuuccucccggcugcgucuccaggcccgacu

SEQ ID NO: 154828 - RNA, 32 nt, Homo Sapiens
gauggaguaaaacaacugcuacaguucagcac

SEQ ID NO: 154829 - RNA, 32 nt, Homo Sapiens
cuccagccucaccaggcuccccggcucgccgu

SEQ ID NO: 154830 - RNA, 32 nt, Homo Sapiens
acugagggagagacucugaggacauggagaga

SEQ ID NO: 154831 - RNA, 32 nt, Homo Sapiens
uggauggcagacauuaacugcgugccuggccc

SEQ ID NO: 154832 - RNA, 32 nt, Homo Sapiens
uagcagccacacaaaaucucuggcuaugaaag

SEQ ID NO: 154833 - RNA, 32 nt, Homo Sapiens
aaagcuauaguggcauagaaaaaguauaaagc

SEQ ID NO: 154834 - RNA, 32 nt, Homo Sapiens
gcuccaugguuggccugguggggguggaguuc

SEQ ID NO: 154835 - RNA, 32 nt, Homo Sapiens
uugauuucuuuuucuuuuuuuaaguuucauaa

SEQ ID NO: 154836 - RNA, 32 nt, Homo Sapiens
ccacguagggucugccuaucaggagaaccccc

SEQ ID NO: 154837 - RNA, 32 nt, Homo Sapiens
ugauggcuuuggaaauaacauaaauauaccuu

SEQ ID NO: 154838 - RNA, 32 nt, Homo Sapiens
aaugcuauucaacagcacuuuuauugcccaga

SEQ ID NO: 154839 - RNA, 32 nt, Homo Sapiens
cuugacaauccuguuucuggcucaucagaugu

SEQ ID NO: 154840 - RNA, 32 nt, Homo Sapiens
cuaaaaccaaaauacauguauuauuuauagaa

SEQ ID NO: 154841 - RNA, 32 nt, Homo Sapiens
aguccuaugguucacaucuuguuuccuauaga

SEQ ID NO: 154842 - RNA, 27 nt, Homo Sapiens
cagcuugguccccucagccccuccgac

SEQ ID NO: 154843 - RNA, 32 nt, Homo Sapiens
cguagcuuccaccauaaaacucuucuuuccaa

SEQ ID NO: 154844 - RNA, 32 nt, Homo Sapiens
cucuucccugcgccugugaugcugggcacuuc

SEQ ID NO: 154845 - RNA, 32 nt, Homo Sapiens
cccugcuuuuaaaaauucuaaucuauccccuc

SEQ ID NO: 154846 - RNA, 30 nt, Homo Sapiens
ggagcacuggacugcgaguccggaaagccu

SEQ ID NO: 154847 - RNA, 32 nt, Homo Sapiens
gagagggaaugggaugauccuaccaguugccu

SEQ ID NO: 154848 - RNA, 32 nt, Homo Sapiens
uggacauuuguuccacccgaccucugacugau

SEQ ID NO: 154849 - RNA, 32 nt, Homo Sapiens
agugugcuuagcaaaauugcucuaagugaagg

SEQ ID NO: 154850 - RNA, 32 nt, Homo Sapiens
ucauuggccaagggcacuguggauguuuugug

SEQ ID NO: 154851 - RNA, 32 nt, Homo Sapiens
uauaacugaguuaaauuauacuggagaagucu

SEQ ID NO: 154852 - RNA, 32 nt, Homo Sapiens
gguauucaauaagaacuguuucccucuugugg

SEQ ID NO: 154853 - RNA, 32 nt, Homo Sapiens
uccauuuuuuucugcccuuaccuuggggggau

SEQ ID NO: 154854 - RNA, 32 nt, Homo Sapiens
auauuuaaauauauuucacuuugacuuuagac

SEQ ID NO: 154855 - RNA, 32 nt, Homo Sapiens
gccucccguggaugggcccaccgcgcccacgg

SEQ ID NO: 154856 - RNA, 32 nt, Homo Sapiens
gcggcgggcagagaaaccccccggaguggucu

SEQ ID NO: 154857 - RNA, 32 nt, Homo Sapiens
gcaaugguuagauuaauuugugaggcagcucu

SEQ ID NO: 154858 - RNA, 29 nt, Homo Sapiens
cagcauggggagagaccagcgcgcggugg

SEQ ID NO: 154859 - RNA, 32 nt, Homo Sapiens
aaaacucauacagugguauugcuaguuuaaaa

SEQ ID NO: 154860 - RNA, 31 nt, Homo Sapiens
auauguacaaauuguaaagaauauguauaaa

SEQ ID NO: 154861 - RNA, 32 nt, Homo Sapiens
augucaaguaacuauuuguaaaaguuauacuc

SEQ ID NO: 154862 - RNA, 32 nt, Homo Sapiens
auacugccagcuuguguugccugaaccaagaa

SEQ ID NO: 154863 - RNA, 32 nt, Homo Sapiens
caauaaaguauauuuuuauuaagguaacacaa

SEQ ID NO: 154864 - RNA, 31 nt, Homo Sapiens
gacaguuauugagcacauaugauugcaccca

SEQ ID NO: 154865 - RNA, 32 nt, Homo Sapiens
ccaaccuuacuuucuucagccagaauacauuu

SEQ ID NO: 154866 - RNA, 29 nt, Homo Sapiens
aaacuuucuaaauuaacugagaccugucu

SEQ ID NO: 154867 - RNA, 32 nt, Homo Sapiens
gcugcaacauaccucaauccugucccaggccg

SEQ ID NO: 154868 - RNA, 32 nt, Homo Sapiens
cucauuuuucuuuucuuuuuacauauguacaa

SEQ ID NO: 154869 - RNA, 32 nt, Homo Sapiens
cacacuuucuuuauccagccuaucauucaugg

SEQ ID NO: 154870 - RNA, 32 nt, Homo Sapiens
caaucuugccuacauugauuauagaaccacua

SEQ ID NO: 154871 - RNA, 32 nt, Homo Sapiens
ugcuggauauuuuuguauuccucuagguauuc

SEQ ID NO: 154872 - RNA, 32 nt, Homo Sapiens
guagcgggccuggccagcggcucggggcuugc

SEQ ID NO: 154873 - RNA, 32 nt, Homo Sapiens
ggaauuuucagucaucucaugauacaggcggg

SEQ ID NO: 154874 - RNA, 32 nt, Homo Sapiens
cccugccugccccgacacccagcccagcuugc

SEQ ID NO: 154875 - RNA, 32 nt, Homo Sapiens
augucucaggguggggcuaugcguggucuaga

SEQ ID NO: 154876 - RNA, 32 nt, Homo Sapiens
uaacauaugcaaacauaaccaaaucacuuuca

SEQ ID NO: 154877 - RNA, 32 nt, Homo Sapiens
guaacuacagcuuuuauugauuucaguuacuu

SEQ ID NO: 154878 - RNA, 32 nt, Homo Sapiens
ggcacuucccagccacauugccaggcaacagg

SEQ ID NO: 154879 - RNA, 32 nt, Homo Sapiens
cccuuauccgaugauuuuucuacauuuacuug

SEQ ID NO: 154880 - RNA, 30 nt, Homo Sapiens
gaagcagcuccaggagcgccggcgccggcu

SEQ ID NO: 154881 - RNA, 32 nt, Homo Sapiens
augcucuauguccacuggcgucgggcaagccc

SEQ ID NO: 154882 - RNA, 32 nt, Homo Sapiens
uucaaaaaauguuuaauuaaaugcauguuaau

SEQ ID NO: 154883 - RNA, 32 nt, Homo Sapiens
ccacgcguccgcccacgcguccgcgccugcgc

SEQ ID NO: 154884 - RNA, 32 nt, Homo Sapiens
uccccagccguugccccuccccgcaccccgcc

SEQ ID NO: 154885 - RNA, 32 nt, Homo Sapiens
agcccugucuguuugccacacccaggugauuu

SEQ ID NO: 154886 - RNA, 29 nt, Homo Sapiens
cacucgggacgucuucauugaagauucac

SEQ ID NO: 154887 - RNA, 32 nt, Homo Sapiens
agauuuaacaaauaugguccaaaaaccaaggc

SEQ ID NO: 154888 - RNA, 32 nt, Homo Sapiens
ucuguaaacaacagccaagagagcagggguga

SEQ ID NO: 154889 - RNA, 32 nt, Homo Sapiens
auggauuuuugguaagaaugcuauagaagcaa

SEQ ID NO: 154890 - RNA, 32 nt, Homo Sapiens
caagccauaauguaaggacagaauaauacaau

SEQ ID NO: 154891 - RNA, 32 nt, Homo Sapiens
guaggagucccuguccacagguccuggcuacc

SEQ ID NO: 154892 - RNA, 32 nt, Homo Sapiens
gcugugggagcugcuagguggugcuggcaucc

SEQ ID NO: 154893 - RNA, 32 nt, Homo Sapiens
uuaaacaccaaaauaagauauaauaaaacauu

SEQ ID NO: 154894 - RNA, 32 nt, Homo Sapiens
auuuauccucccuccggccugggcugcuggau

SEQ ID NO: 154895 - RNA, 32 nt, Homo Sapiens
gacaacgggguccgacgagcaguugggcacgg

SEQ ID NO: 154896 - RNA, 32 nt, Homo Sapiens
uguuacaucgccauuuuccucuuucccaacuc

SEQ ID NO: 154897 - RNA, 32 nt, Homo Sapiens
augaaaacugaagaaaaaugccaaugugacgu

SEQ ID NO: 154898 - RNA, 32 nt, Homo Sapiens
aggggauuuuaaaaacuuagucuuuaaaauga

SEQ ID NO: 154899 - RNA, 32 nt, Homo Sapiens
aaaacagaccaucuuugaaaucucugaaaacu

SEQ ID NO: 154900 - RNA, 30 nt, Homo Sapiens
gagaguauuugugcugcagggagcgaagca

SEQ ID NO: 154901 - RNA, 32 nt, Homo Sapiens
ccaguuuccagacaaacuugucuuaaaaagug

SEQ ID NO: 154902 - RNA, 32 nt, Homo Sapiens
gcacacacaaaacuugauaaauaugagccccu

SEQ ID NO: 154903 - RNA, 32 nt, Homo Sapiens
acuguuucuaauaacugagaccaucuaacauu

SEQ ID NO: 154904 - RNA, 32 nt, Homo Sapiens
cugagccagugcuuuaauggcaugucagacag

SEQ ID NO: 154905 - RNA, 32 nt, Homo Sapiens
gccuguaaucccaacaacacuuugggaggccc

SEQ ID NO: 154906 - RNA, 31 nt, Homo Sapiens
cuuggcagacggucuuagccaagggcugugg

SEQ ID NO: 154907 - RNA, 32 nt, Homo Sapiens
cugggggcagguggagagggcgggcaggggag

SEQ ID NO: 154908 - RNA, 32 nt, Homo Sapiens
uuuuucuccuuuugccuucucugcuuauggga

SEQ ID NO: 154909 - RNA, 32 nt, Homo Sapiens
gauaccgcucuuugcuggccagagucuguccu

SEQ ID NO: 154910 - RNA, 32 nt, Homo Sapiens
ggguugagaugagggacagggauaucaggcug

SEQ ID NO: 154911 - RNA, 32 nt, Homo Sapiens
aaagcguugaggaaacaaaagucaggaaaacu

SEQ ID NO: 154912 - RNA, 32 nt, Homo Sapiens
ucugugguccucagcccuguaccuuaauaaau

SEQ ID NO: 154913 - RNA, 32 nt, Homo Sapiens
caggcauuuuuacagcacacacuuccauaugu

SEQ ID NO: 154914 - RNA, 32 nt, Homo Sapiens
guuuguaccuggcuugcagauaccuucuuugg

SEQ ID NO: 154915 - RNA, 32 nt, Homo Sapiens
cgccuguaaucccagcacuuugggaguccgag

SEQ ID NO: 154916 - RNA, 32 nt, Homo Sapiens
ugauaguggccauuuuaaucauugccaucgug

SEQ ID NO: 154917 - RNA, 32 nt, Homo Sapiens
ucagagauagcuuuguuaagauuugaaaucaa

SEQ ID NO: 154918 - RNA, 32 nt, Homo Sapiens
ucaguucagcugucacauuaugagaaguaaau

SEQ ID NO: 154919 - RNA, 32 nt, Homo Sapiens
gcucuuugcugauugcaaauaggcauuuaaaa

SEQ ID NO: 154920 - RNA, 32 nt, Homo Sapiens
auuauacuuccacugguuaucucccuggacuu

SEQ ID NO: 154921 - RNA, 32 nt, Homo Sapiens
uagaacugugcuauaacaaaaauaccagaaac

SEQ ID NO: 154922 - RNA, 29 nt, Homo Sapiens
aaaccagcucgucucagaggccagcaagc

SEQ ID NO: 154923 - RNA, 32 nt, Homo Sapiens
acgugugcuuggucagcuccagugugucgucc

SEQ ID NO: 154924 - RNA, 32 nt, Homo Sapiens
gggcccagcucuucuuccugguugcgucucca

SEQ ID NO: 154925 - RNA, 32 nt, Homo Sapiens
cagcuguguccaaaaccgccagcucuguucuu

SEQ ID NO: 154926 - RNA, 32 nt, Homo Sapiens
uggacauaaacaguuuauguaaaauuaguaau

SEQ ID NO: 154927 - RNA, 32 nt, Homo Sapiens
gaagaaaguuacuaucucugggauguuuacug

SEQ ID NO: 154928 - RNA, 32 nt, Homo Sapiens
cccccagcucucguguccuggaggaagagcua

SEQ ID NO: 154929 - RNA, 32 nt, Homo Sapiens
ggccccagucccagcccccaccuuuggcugag

SEQ ID NO: 154930 - RNA, 32 nt, Homo Sapiens
uaugaucuuguacagcacuuauagaaauaagc

SEQ ID NO: 154931 - RNA, 32 nt, Homo Sapiens
ccgccccgcccgccccacuaucuuuaaggaga

SEQ ID NO: 154932 - RNA, 32 nt, Homo Sapiens
uaucaccucuguuuccuccccaacaaaagagg

SEQ ID NO: 154933 - RNA, 32 nt, Homo Sapiens
acccuaccuaccucacagggcuguugugagga

SEQ ID NO: 154934 - RNA, 32 nt, Homo Sapiens
aaaucauguuucccuuaucagaucauuugcaa

SEQ ID NO: 154935 - RNA, 32 nt, Homo Sapiens
ggugauccgcacgcgacgcggcgacgggggcg

SEQ ID NO: 154936 - RNA, 32 nt, Homo Sapiens
ugcauggaugguuuuucuuuauuuuucaguga

SEQ ID NO: 154937 - RNA, 32 nt, Homo Sapiens
gccagucggauaggccgagucuggagaaggga

SEQ ID NO: 154938 - RNA, 32 nt, Homo Sapiens
gcgccggcggagcccugagcggcugugacagg

SEQ ID NO: 154939 - RNA, 32 nt, Homo Sapiens
gcugaggagggagcuuccuucugugcgggcuu

SEQ ID NO: 154940 - RNA, 32 nt, Homo Sapiens
uaacacuugagcaaauacuuaagaaggaauaa

SEQ ID NO: 154941 - RNA, 32 nt, Homo Sapiens
ucuaauuaaaauugugcauaaugcuuuggaaa

SEQ ID NO: 154942 - RNA, 32 nt, Homo Sapiens
cuccucggggagaggggaugcacacguucuga

SEQ ID NO: 154943 - RNA, 32 nt, Homo Sapiens
uaccaaaaccauccaucccuagaagagcacag

SEQ ID NO: 154944 - RNA, 30 nt, Homo Sapiens
ccugaugaucaccaccaaggguagccccag

SEQ ID NO: 154945 - RNA, 32 nt, Homo Sapiens
acaccauucuucccccaccccuggaaaaacuu

SEQ ID NO: 154946 - RNA, 32 nt, Homo Sapiens
cugaaauuuaaaauauguaaacuaaagugguu

SEQ ID NO: 154947 - RNA, 32 nt, Homo Sapiens
aggagaugaagaacaccagguggcuauggaga

SEQ ID NO: 154948 - RNA, 32 nt, Homo Sapiens
guuccucuacccucuuauguccaguuuugggg

SEQ ID NO: 154949 - RNA, 28 nt, Homo Sapiens
uuuaggaaagauuuaacuguuuaaaucu

SEQ ID NO: 154950 - RNA, 32 nt, Homo Sapiens
guugccauuuugaauaguauguucaagggugu

SEQ ID NO: 154951 - RNA, 32 nt, Homo Sapiens
gaaaucucaaaauaauuauggugagugaaaga

SEQ ID NO: 154952 - RNA, 32 nt, Homo Sapiens
cugugugcuguugaagggucaccuggaggcag

SEQ ID NO: 154953 - RNA, 32 nt, Homo Sapiens
cugggauugguagcucucuccaacugccugcu

SEQ ID NO: 154954 - RNA, 32 nt, Homo Sapiens
cuccaacaagcacaaugguucacgggaugacc

SEQ ID NO: 154955 - RNA, 32 nt, Homo Sapiens
gggacagugcuacuggcccauaaucaggcaac

SEQ ID NO: 154956 - RNA, 32 nt, Homo Sapiens
ggagaaaccaaaccugaagauaccuugaucuu

SEQ ID NO: 154957 - RNA, 30 nt, Homo Sapiens
auaggaauuuuuguuaccuaacucugugca

SEQ ID NO: 154958 - RNA, 32 nt, Homo Sapiens
agccucgcaccuccgcuccacagcagucccca

SEQ ID NO: 154959 - RNA, 32 nt, Homo Sapiens
acauagcuaugcaaguuuuuuauguuuguguu

SEQ ID NO: 154960 - RNA, 32 nt, Homo Sapiens
ccccugagcggccccccuccccugcccgggag

SEQ ID NO: 154961 - RNA, 32 nt, Homo Sapiens
auauguucccccacacuguuaaucaagaaaau

SEQ ID NO: 154962 - RNA, 32 nt, Homo Sapiens
gcuuucccaagccuggaagaacucgucaugcu

SEQ ID NO: 154963 - RNA, 32 nt, Homo Sapiens
uggggcaagacugcaaacuuuuuuauaucuuu

SEQ ID NO: 154964 - RNA, 32 nt, Homo Sapiens
cuguuuugugaaagaaacugugaauguaaugg

SEQ ID NO: 154965 - RNA, 32 nt, Homo Sapiens
uauuuucuugaauaaaauuacuucuaccuuca

SEQ ID NO: 154966 - RNA, 32 nt, Homo Sapiens
aguauaguuuucccaaacuucuucccaucaua

SEQ ID NO: 154967 - RNA, 32 nt, Homo Sapiens
gugugacuauacaaauuguaaaacagauacua

SEQ ID NO: 154968 - RNA, 32 nt, Homo Sapiens
ucaacagagccauguaaccgcccagagggcuc

SEQ ID NO: 154969 - RNA, 32 nt, Homo Sapiens
ucuaaacguggucaccuucgaguagagaggcc

SEQ ID NO: 154970 - RNA, 32 nt, Homo Sapiens
uccagcgcgcggcuaccuacgcuuggugcuug

SEQ ID NO: 154971 - RNA, 32 nt, Homo Sapiens
uaaauuuguaaauauggcugcaccauuuuugu

SEQ ID NO: 154972 - RNA, 32 nt, Homo Sapiens
ccucacucucugauuucauugaggaucuuggg

SEQ ID NO: 154973 - RNA, 32 nt, Homo Sapiens
aucagacacugaaggcugaacacacaagguug

SEQ ID NO: 154974 - RNA, 32 nt, Homo Sapiens
uuaauuccacuuuaacauuuuacugugcuguu

SEQ ID NO: 154975 - RNA, 32 nt, Homo Sapiens
uucuuuuuggagucuuuuuucuaucucuucug

SEQ ID NO: 154976 - RNA, 32 nt, Homo Sapiens
caaaggacuacauggagauguacaaugucauc

SEQ ID NO: 154977 - RNA, 32 nt, Homo Sapiens
uacaccuaaaauucaugcaggagagaaacacc

SEQ ID NO: 154978 - RNA, 32 nt, Homo Sapiens
uccguccaucccccuucuuccuccccucaaca

SEQ ID NO: 154979 - RNA, 32 nt, Homo Sapiens
accuacagacuaagaaggaaaagaagaagaga

SEQ ID NO: 154980 - RNA, 32 nt, Homo Sapiens
auaagggcauuuggaacagugcuaucagguga

SEQ ID NO: 154981 - RNA, 32 nt, Homo Sapiens
uguggccucgaaggaagcacaaacccuccauc

SEQ ID NO: 154982 - RNA, 32 nt, Homo Sapiens
gcaggcgggcaggcgggcgccauggagcugcu

SEQ ID NO: 154983 - RNA, 32 nt, Homo Sapiens
uucccgcgggcacgggggugggggguggucac

SEQ ID NO: 154984 - RNA, 32 nt, Homo Sapiens
cagcuccuccaagcagagcaacucccuggcug

SEQ ID NO: 154985 - RNA, 32 nt, Homo Sapiens
gcucugcucugcgggacagcgcggcgcccgga

SEQ ID NO: 154986 - RNA, 32 nt, Homo Sapiens
aucuugagcucuucauuuauuuugaccgugau

SEQ ID NO: 154987 - RNA, 32 nt, Homo Sapiens
uucuucuagugucaggagaauucagucacacc

SEQ ID NO: 154988 - RNA, 32 nt, Homo Sapiens
cuccgggccgcgucuguggggucgagacugcg

SEQ ID NO: 154989 - RNA, 32 nt, Homo Sapiens
ugcaccgguggguggggcgcccauagcacugc

SEQ ID NO: 154990 - RNA, 32 nt, Homo Sapiens
gggaugcagagagaccccuagcuccucgcgau

SEQ ID NO: 154991 - RNA, 32 nt, Homo Sapiens
uccuuuucguguuccuucucugauuucucuug

SEQ ID NO: 154992 - RNA, 32 nt, Homo Sapiens
ggcccaugucccacaaggcugcuuggccucag

SEQ ID NO: 154993 - RNA, 32 nt, Homo Sapiens
ccucuucccucugccucccacccaggccacuc

SEQ ID NO: 154994 - RNA, 32 nt, Homo Sapiens
ucugccccaucccuacccuagccuugcucuca

SEQ ID NO: 154995 - RNA, 32 nt, Homo Sapiens
gugggcagugauuguacagagccuguccauug

SEQ ID NO: 154996 - RNA, 32 nt, Homo Sapiens
ugugucaaagauuuuaccugggauaugacaag

SEQ ID NO: 154997 - RNA, 32 nt, Homo Sapiens
aaauauauucuauuuaacauaaacggaaaaaa

SEQ ID NO: 154998 - RNA, 32 nt, Homo Sapiens
cucagugucaaaccagaagagaaguaaaauuc

SEQ ID NO: 154999 - RNA, 32 nt, Homo Sapiens
acacagccaggcgccagagagccccggcugac

SEQ ID NO: 155000 - RNA, 31 nt, Homo Sapiens
cacugagccucucgccugcccccgccacucg

SEQ ID NO: 155001 - RNA, 32 nt, Homo Sapiens
ggcaagcggacgagccaguuaucccucagagc

SEQ ID NO: 155002 - RNA, 32 nt, Homo Sapiens
cauuaagcuagcuuccuaguuccgauuagacu

SEQ ID NO: 155003 - RNA, 32 nt, Homo Sapiens
ucccaguccuagguaagaaaaacacaaacaaa

SEQ ID NO: 155004 - RNA, 32 nt, Homo Sapiens
ccaacaacaaccccucccaagucccuaacucc

SEQ ID NO: 155005 - RNA, 32 nt, Homo Sapiens
aaguguuuguuggccaguggaccuccuacgcu

SEQ ID NO: 155006 - RNA, 32 nt, Homo Sapiens
gaaagaaugcacuuuaaagcucugcugaggag

SEQ ID NO: 155007 - RNA, 32 nt, Homo Sapiens
ucgcuguugggucuucugcuagggaggauguc

SEQ ID NO: 155008 - RNA, 32 nt, Homo Sapiens
cauguuaccccaaagcaaaaccauugugucag

SEQ ID NO: 155009 - RNA, 32 nt, Homo Sapiens
aguagaagggaagagggaaauggagagcaucc

SEQ ID NO: 155010 - RNA, 32 nt, Homo Sapiens
cccuaccggccgcgacuccgggcuuggccccg

SEQ ID NO: 155011 - RNA, 32 nt, Homo Sapiens
cucaggggccccggguuugagcagaacgggcc

SEQ ID NO: 155012 - RNA, 32 nt, Homo Sapiens
agaaagaagccacuuaaauaagcuuauacuuu

SEQ ID NO: 155013 - RNA, 32 nt, Homo Sapiens
gaaugccucagccagaugggaauacugucuug

SEQ ID NO: 155014 - RNA, 32 nt, Homo Sapiens
uucuuccuggagcgagcugugcucucugaagc

SEQ ID NO: 155015 - RNA, 32 nt, Homo Sapiens
gcugcuacuuggaggcuuaucuaccuguacau

SEQ ID NO: 155016 - RNA, 32 nt, Homo Sapiens
auuucuggugcacuccucuccugagaguguag

SEQ ID NO: 155017 - RNA, 32 nt, Homo Sapiens
gcuucuuugcugucgccgcccccacugaagca

SEQ ID NO: 155018 - RNA, 32 nt, Homo Sapiens
ggguggacacgcgucccggcgccccgggcucc

SEQ ID NO: 155019 - RNA, 30 nt, Homo Sapiens
ucuuugcugggcuacgcagaagccccggac

SEQ ID NO: 155020 - RNA, 32 nt, Homo Sapiens
ggccugcaccgagcuuccuugagggcuucaga

SEQ ID NO: 155021 - RNA, 32 nt, Homo Sapiens
ccaccgaaaaggacauuucuaccuaggcaauc

SEQ ID NO: 155022 - RNA, 32 nt, Homo Sapiens
gugagccguuuccaauucuaaaacagacucaa

SEQ ID NO: 155023 - RNA, 32 nt, Homo Sapiens
aucagccucucagcccccgacauccugccucu

SEQ ID NO: 155024 - RNA, 32 nt, Homo Sapiens
uugcuguacugaauacucuaagcaauuauaac

SEQ ID NO: 155025 - RNA, 32 nt, Homo Sapiens
guaaagaacuaaaaguaugaaaaugucucacu

SEQ ID NO: 155026 - RNA, 32 nt, Homo Sapiens
agaucaacagcaaccucuucaugagcuugaac

SEQ ID NO: 155027 - RNA, 32 nt, Homo Sapiens
ugggaggagacggggaggacagacuggaggcg

SEQ ID NO: 155028 - RNA, 32 nt, Homo Sapiens
gaaauacuguaucauggaaucuguauguauag

SEQ ID NO: 155029 - RNA, 32 nt, Homo Sapiens
cagcggcugcgcagacuggcgcgcgcggacgg

SEQ ID NO: 155030 - RNA, 32 nt, Homo Sapiens
ggaugaaaagccucagaaagcaacucaaagga

SEQ ID NO: 155031 - RNA, 32 nt, Homo Sapiens
uugggcugguuucuccucuuggcccuccccua

SEQ ID NO: 155032 - RNA, 32 nt, Homo Sapiens
gcguaagguucagucagccugcugcagcuuug

SEQ ID NO: 155033 - RNA, 32 nt, Homo Sapiens
uugcuuccggcugguggcaugccuuggggccg

SEQ ID NO: 155034 - RNA, 32 nt, Homo Sapiens
gcugcccuuucuacuucaaaccuuccucuagc

SEQ ID NO: 155035 - RNA, 32 nt, Homo Sapiens
aauucccggcucggggaccuccacgcaccgcg

SEQ ID NO: 155036 - RNA, 32 nt, Homo Sapiens
guccccugcccaaaccaauuauagcaucgaag

SEQ ID NO: 155037 - RNA, 32 nt, Homo Sapiens
agcccagaacagaguuaauuuugcccacugua

SEQ ID NO: 155038 - RNA, 32 nt, Homo Sapiens
cugucaaauccuuaauagcuacaggagcuacu

SEQ ID NO: 155039 - RNA, 32 nt, Homo Sapiens
ucuuccccaaagcagggaaaccacuggucucu

SEQ ID NO: 155040 - RNA, 30 nt, Homo Sapiens
acucugggcaggcgccugcauucucaacac

SEQ ID NO: 155041 - RNA, 29 nt, Homo Sapiens
auguuugcugacccucauggcaaguaggu

SEQ ID NO: 155042 - RNA, 32 nt, Homo Sapiens
caccgccucuuccccgaucccuggacuccgac

SEQ ID NO: 155043 - RNA, 32 nt, Homo Sapiens
ccgagccaaccucagcggggacccgggcucag

SEQ ID NO: 155044 - RNA, 32 nt, Homo Sapiens
gugcucccacugaagaagugccuuuugagugc

SEQ ID NO: 155045 - RNA, 32 nt, Homo Sapiens
gucccaaagcagcugggggccgccauuuugcc

SEQ ID NO: 155046 - RNA, 32 nt, Homo Sapiens
gcuuggggagcaaggcgaauguugacauuucu

SEQ ID NO: 155047 - RNA, 32 nt, Homo Sapiens
gccaaucccaggcuugcccccgagcccuccug

SEQ ID NO: 155048 - RNA, 32 nt, Homo Sapiens
acgacuacuuggagccauaaguaaccucagca

SEQ ID NO: 155049 - RNA, 32 nt, Homo Sapiens
ugagcucucggaacugcaugcugcuggacagu

SEQ ID NO: 155050 - RNA, 32 nt, Homo Sapiens
gagguggcagugagccgagauagcaccacugc

SEQ ID NO: 155051 - RNA, 32 nt, Homo Sapiens
aggacucugauccaguaccccacagagaaaca

SEQ ID NO: 155052 - RNA, 32 nt, Homo Sapiens
gcaauuauuaauuuuucuuuuauuuuuuuuua

SEQ ID NO: 155053 - RNA, 32 nt, Homo Sapiens
aaguagaaccucaguuugcuaacugaaguguu

SEQ ID NO: 155054 - RNA, 32 nt, Homo Sapiens
aucuuuugcauuguuuuaaaucuuguucuugc

SEQ ID NO: 155055 - RNA, 32 nt, Homo Sapiens
agagaauaccacaaagauaauccucaagaaga

SEQ ID NO: 155056 - RNA, 32 nt, Homo Sapiens
guuccgcugcccaguccugcugguacucacua

SEQ ID NO: 155057 - RNA, 32 nt, Homo Sapiens
aggaggaggaggaggaggccagguccuggugg

SEQ ID NO: 155058 - RNA, 32 nt, Homo Sapiens
uuuuagaacaguuacagucuaauugucuugga

SEQ ID NO: 155059 - RNA, 32 nt, Homo Sapiens
guuuguuuuuaaaaaguuuucucuguagaaaa

SEQ ID NO: 155060 - RNA, 32 nt, Homo Sapiens
gggacccgcccggaccgggcccgaagcagcuc

SEQ ID NO: 155061 - RNA, 31 nt, Homo Sapiens
accaugaaauaaaacccacagagguauuuga

SEQ ID NO: 155062 - RNA, 32 nt, Homo Sapiens
cauaauaaugaaaacuauuacaauuaugcuaa

SEQ ID NO: 155063 - RNA, 32 nt, Homo Sapiens
cuggagcuucugccgccuccuguggaagauaa

SEQ ID NO: 155064 - RNA, 29 nt, Homo Sapiens
cuuugcauauguaauuacuuaaggauaug

SEQ ID NO: 155065 - RNA, 32 nt, Homo Sapiens
ccguucccuccagccccuugcugguuaucuua

SEQ ID NO: 155066 - RNA, 32 nt, Homo Sapiens
gggccccaggacccccggggcccgggaugagu

SEQ ID NO: 155067 - RNA, 32 nt, Homo Sapiens
cuucucucuuccuugcuuucucuucuaaugga

SEQ ID NO: 155068 - RNA, 32 nt, Homo Sapiens
caaagccgcuauagccagacuaccucucuaga

SEQ ID NO: 155069 - RNA, 32 nt, Homo Sapiens
gaguuggcggagcugugcgcgcggcggggcga

SEQ ID NO: 155070 - RNA, 29 nt, Homo Sapiens
agccaaucguguuuaaggagaaacuaaca

SEQ ID NO: 155071 - RNA, 32 nt, Homo Sapiens
cacccaccuugacguuucuucuuucuagagca

SEQ ID NO: 155072 - RNA, 32 nt, Homo Sapiens
uaaguucccaugucugccauuauuuucuuucu

SEQ ID NO: 155073 - RNA, 32 nt, Homo Sapiens
uugccuaaagucugauccucuaucuuguccaa

SEQ ID NO: 155074 - RNA, 32 nt, Homo Sapiens
guugguuuaagaguaacauucaguaguaauac

SEQ ID NO: 155075 - RNA, 32 nt, Homo Sapiens
gagcuugcagugagccgagaucgcgccaucac

SEQ ID NO: 155076 - RNA, 32 nt, Homo Sapiens
cuggucucggaacuccugacugcaggugaucc

SEQ ID NO: 155077 - RNA, 32 nt, Homo Sapiens
caggcuggagaggacauggcacugcuucagag

SEQ ID NO: 155078 - RNA, 32 nt, Homo Sapiens
cuuguuuucuuaccacuuuauucuuucagagu

SEQ ID NO: 155079 - RNA, 32 nt, Homo Sapiens
cgaacagccaagggaggacuagucuggagcac

SEQ ID NO: 155080 - RNA, 32 nt, Homo Sapiens
uccuugcuuuugcuugcagagccgcucccgag

SEQ ID NO: 155081 - RNA, 32 nt, Homo Sapiens
acaugauauagaggcaucaagcaaguaaaauu

SEQ ID NO: 155082 - RNA, 31 nt, Homo Sapiens
ucuguuagacuugaguuacaagauugcagau

SEQ ID NO: 155083 - RNA, 32 nt, Homo Sapiens
gaagaaaaaugaauucaaaaguagauguguca

SEQ ID NO: 155084 - RNA, 32 nt, Homo Sapiens
gauguccaguucuugucagaggaggcuuguga

SEQ ID NO: 155085 - RNA, 32 nt, Homo Sapiens
uauucuaaaauauaaacuuauuugcauauauu

SEQ ID NO: 155086 - RNA, 27 nt, Homo Sapiens
gauggggccugccugcaccccggggcg

SEQ ID NO: 155087 - RNA, 32 nt, Homo Sapiens
ccggcucgcugucugaugcccgcgguagccaa

SEQ ID NO: 155088 - RNA, 32 nt, Homo Sapiens
gccagccagcauaugaaaaggugcucaacacc

SEQ ID NO: 155089 - RNA, 32 nt, Homo Sapiens
aguacuuguaaauaacuagaaauaacaugauu

SEQ ID NO: 155090 - RNA, 32 nt, Homo Sapiens
acuguggacaaaggaaaacacugaggcaaaag

SEQ ID NO: 155091 - RNA, 32 nt, Homo Sapiens
caaaaguguggccuuugggcucugccaucugg

SEQ ID NO: 155092 - RNA, 32 nt, Homo Sapiens
uuugagccccauggcagaacugucccauccgu

SEQ ID NO: 155093 - RNA, 32 nt, Homo Sapiens
aaguccauuucccucuggcuccuggcauaccc

SEQ ID NO: 155094 - RNA, 32 nt, Homo Sapiens
cuacuuuugaguuucucuguggaaauaaaaca

SEQ ID NO: 155095 - RNA, 30 nt, Homo Sapiens
acacagccuucugcugcagcagaggcucac

SEQ ID NO: 155096 - RNA, 32 nt, Homo Sapiens
cccugggccugcugcugagaaccuggccuuca

SEQ ID NO: 155097 - RNA, 32 nt, Homo Sapiens
gcuugcucugggccucaguuucccuauuccag

SEQ ID NO: 155098 - RNA, 32 nt, Homo Sapiens
gauaggguuugugacagggcggggguggcggc

SEQ ID NO: 155099 - RNA, 32 nt, Homo Sapiens
cuuucuaacaauauagucuuuggauuuguuuu

SEQ ID NO: 155100 - RNA, 28 nt, Homo Sapiens
cuuuugaaagauugaaauuuuuguuaca

SEQ ID NO: 155101 - RNA, 32 nt, Homo Sapiens
guguaguacagcuggaauauagagaagagcuu

SEQ ID NO: 155102 - RNA, 32 nt, Homo Sapiens
ccacacccgcggcaccgcgcugccggccgcag

SEQ ID NO: 155103 - RNA, 32 nt, Homo Sapiens
uuggaacaccuggcgaguccucggugucggug

SEQ ID NO: 155104 - RNA, 32 nt, Homo Sapiens
ggcucaugacaaguacauuauuugauucuacu

SEQ ID NO: 155105 - RNA, 32 nt, Homo Sapiens
ccuuuucgccuggcauccgggcccgcuacucg

SEQ ID NO: 155106 - RNA, 32 nt, Homo Sapiens
ucggacaggaccaucuuuaugaccugcuuucu

SEQ ID NO: 155107 - RNA, 32 nt, Homo Sapiens
ugugaggggcaaggcugcccccugccccaggg

SEQ ID NO: 155108 - RNA, 32 nt, Homo Sapiens
cuaaugaaacccugauaucaacuuuuuauaaa

SEQ ID NO: 155109 - RNA, 32 nt, Homo Sapiens
cggcgcccgcgucuuccacgggcacaggggca

SEQ ID NO: 155110 - RNA, 32 nt, Homo Sapiens
gcaagaugaauggcuaauauuuuggugcagug

SEQ ID NO: 155111 - RNA, 32 nt, Homo Sapiens
augcugguuuguuuuucuuuaaugaagaaauu

SEQ ID NO: 155112 - RNA, 32 nt, Homo Sapiens
accccagccaacagcugagcugccgggccucc

SEQ ID NO: 155113 - RNA, 32 nt, Homo Sapiens
aagcccgcugcagcugccacaucccugggcuu

SEQ ID NO: 155114 - RNA, 32 nt, Homo Sapiens
gagaugcugggcggggacgcggcguggcgagg

SEQ ID NO: 155115 - RNA, 32 nt, Homo Sapiens
acgagcccggaccacacccggucccggagguc

SEQ ID NO: 155116 - RNA, 32 nt, Homo Sapiens
uauguauguuauagauauguagauaacagauu

SEQ ID NO: 155117 - RNA, 32 nt, Homo Sapiens
cauucuuuuugaaaugucaaccccaaguuagu

SEQ ID NO: 155118 - RNA, 32 nt, Homo Sapiens
ccagauguuguaaugggcuauacaguccagca

SEQ ID NO: 155119 - RNA, 32 nt, Homo Sapiens
cauaccccacugaaaugguaguuucaauucaa

SEQ ID NO: 155120 - RNA, 32 nt, Homo Sapiens
uaauuuuuguaucuuuaguagagacgggguuu

SEQ ID NO: 155121 - RNA, 32 nt, Homo Sapiens
caauuuuuguaucuuuaguagagaugggguuu

SEQ ID NO: 155122 - RNA, 32 nt, Homo Sapiens
uuucuacuaaaauguccaaguagaauguuucc

SEQ ID NO: 155123 - RNA, 32 nt, Homo Sapiens
gcccgcccgcucagcguccgccgccgccaugg

SEQ ID NO: 155124 - RNA, 32 nt, Homo Sapiens
uguaaaaacuaacaugcuagauaauccagugu

SEQ ID NO: 155125 - RNA, 32 nt, Homo Sapiens
uccagagucucuuuuuacacuucaccuccuuc

SEQ ID NO: 155126 - RNA, 32 nt, Homo Sapiens
uucacacagcuggcacguuggugcuggcugcu

SEQ ID NO: 155127 - RNA, 32 nt, Homo Sapiens
uggccaagagacuugaggaaaauacagauuuu

SEQ ID NO: 155128 - RNA, 32 nt, Homo Sapiens
uaaggggauuagggagugucaguggccuaguc

SEQ ID NO: 155129 - RNA, 32 nt, Homo Sapiens
ggacaaaaccaucacagggaaauugaggcaaa

SEQ ID NO: 155130 - RNA, 32 nt, Homo Sapiens
ugagaaaaaaaauuauuuuaugcuccuuuuuu

SEQ ID NO: 155131 - RNA, 32 nt, Homo Sapiens
agggaggaggccggggcgggagugggggcugu

SEQ ID NO: 155132 - RNA, 32 nt, Homo Sapiens
gcuaagagaacaaaagggaggaugaacauugg

SEQ ID NO: 155133 - RNA, 32 nt, Homo Sapiens
uuacaugaaacacuuugggggucaugggagug

SEQ ID NO: 155134 - RNA, 32 nt, Homo Sapiens
ccaggagagcuaugaggccucacugggggcag

SEQ ID NO: 155135 - RNA, 30 nt, Homo Sapiens
gcggaguuucccgugccgacgccccggggc

SEQ ID NO: 155136 - RNA, 32 nt, Homo Sapiens
agcuuccucugcgcuccggaaagcugcggccc

SEQ ID NO: 155137 - RNA, 32 nt, Homo Sapiens
gguucuuggcugauguucuguaucuuaacaug

SEQ ID NO: 155138 - RNA, 32 nt, Homo Sapiens
uuacuucgucuucgcccucugaaauuaaagaa

SEQ ID NO: 155139 - RNA, 32 nt, Homo Sapiens
ugauuucuuuugcuauuuaauugcucuggcua

SEQ ID NO: 155140 - RNA, 32 nt, Homo Sapiens
aaggccuugagugcccucugcccaucggcuuc

SEQ ID NO: 155141 - RNA, 31 nt, Homo Sapiens
gcaccuccacgcugccugcgccccgcgccgc

SEQ ID NO: 155142 - RNA, 30 nt, Homo Sapiens
caggcggcgcccgggucuggcccuggccua

SEQ ID NO: 155143 - RNA, 32 nt, Homo Sapiens
agggcugaggauuuuugguccgcacgcuccug

SEQ ID NO: 155144 - RNA, 32 nt, Homo Sapiens
gcacggccaucauggcgacgcugcugcucuuc

SEQ ID NO: 155145 - RNA, 32 nt, Homo Sapiens
uccagucccggacgcaaccccggagccgucuc

SEQ ID NO: 155146 - RNA, 32 nt, Homo Sapiens
cagacgccucccgcccaccgcggccgcuucuc

SEQ ID NO: 155147 - RNA, 32 nt, Homo Sapiens
gcuuuauccaaauacaugaaucuaaagcugaa

SEQ ID NO: 155148 - RNA, 32 nt, Homo Sapiens
ccaccugcccaguacuggucagcuuuucaaca

SEQ ID NO: 155149 - RNA, 32 nt, Homo Sapiens
uuucucguauaaaacuuuuugauuugaaccaa

SEQ ID NO: 155150 - RNA, 32 nt, Homo Sapiens
agacaaauaaaugugguguuuacaauguaaaa

SEQ ID NO: 155151 - RNA, 32 nt, Homo Sapiens
aucuucucuguuuuauagacuacuucagcuuc

SEQ ID NO: 155152 - RNA, 32 nt, Homo Sapiens
uguuuccccucuacauugucccucccugaauu

SEQ ID NO: 155153 - RNA, 32 nt, Homo Sapiens
ugcaucugcccauacaucuucugagagaaccu

SEQ ID NO: 155154 - RNA, 32 nt, Homo Sapiens
ucacuacuucguaucaaggguuguauuuucuu

SEQ ID NO: 155155 - RNA, 32 nt, Homo Sapiens
aucuaccauuuucugguucuuguguuggcugu

SEQ ID NO: 155156 - RNA, 32 nt, Homo Sapiens
gauccuggcccagcugacuuugaaucugaggg

SEQ ID NO: 155157 - RNA, 32 nt, Homo Sapiens
cagagguguuuuuuuucuuuaggcuucucaug

SEQ ID NO: 155158 - RNA, 32 nt, Homo Sapiens
gguagcgggugugggggcgcgagcagcgcagg

SEQ ID NO: 155159 - RNA, 32 nt, Homo Sapiens
ucagaugacguggcuuugucuagacagcacgc

SEQ ID NO: 155160 - RNA, 31 nt, Homo Sapiens
gacugacagcgcagccccuccuggcaccaac

SEQ ID NO: 155161 - RNA, 32 nt, Homo Sapiens
ggagcccucgcggccccuccccggcugcuggc

SEQ ID NO: 155162 - RNA, 32 nt, Homo Sapiens
cuuggccacuggauguuuucacuaacuacacu

SEQ ID NO: 155163 - RNA, 32 nt, Homo Sapiens
uugacugggcauuuuucuuuuaaugaaauaug

SEQ ID NO: 155164 - RNA, 32 nt, Homo Sapiens
ccgccgcugccauggcggcagcuccgccgcuu

SEQ ID NO: 155165 - RNA, 32 nt, Homo Sapiens
guuagaaauuauguauaggauauuuuaaauca

SEQ ID NO: 155166 - RNA, 32 nt, Homo Sapiens
uaucaguaaguacaaauacaaugcagagcuca

SEQ ID NO: 155167 - RNA, 32 nt, Homo Sapiens
gcugcggugccgggagggcggcugggcaggcg

SEQ ID NO: 155168 - RNA, 32 nt, Homo Sapiens
agauauuacagacuauagaauaccaaaauaau

SEQ ID NO: 155169 - RNA, 32 nt, Homo Sapiens
uugcuaucggcagcugcuggcucaggggcauc

SEQ ID NO: 155170 - RNA, 32 nt, Homo Sapiens
gacagggcaugaggggcagagaauucaagaag

SEQ ID NO: 155171 - RNA, 32 nt, Homo Sapiens
gucaaaaucaucuuccgaagaaaaugauuucu

SEQ ID NO: 155172 - RNA, 32 nt, Homo Sapiens
guuaggaagccagacacugcccagaugacucu

SEQ ID NO: 155173 - RNA, 32 nt, Homo Sapiens
aagaaauuaugaaaaauguacaauuuaacauu

SEQ ID NO: 155174 - RNA, 32 nt, Homo Sapiens
ugaccccaaacguuauuguccaaacaugacug

SEQ ID NO: 155175 - RNA, 32 nt, Homo Sapiens
cugcuggcaaaccaccugcuacaggaccaccu

SEQ ID NO: 155176 - RNA, 32 nt, Homo Sapiens
cccucugugggugccaucucuaccucugacac

SEQ ID NO: 155177 - RNA, 32 nt, Homo Sapiens
aaagaguguaaaauauuuuaaaauaaacuuuc

SEQ ID NO: 155178 - RNA, 32 nt, Homo Sapiens
ccaggcauggagcacagccaggguggggaggg

SEQ ID NO: 155179 - RNA, 32 nt, Homo Sapiens
cccguuaugcugccuguacaaccuguauuguu

SEQ ID NO: 155180 - RNA, 32 nt, Homo Sapiens
cuagugggagaggcggcggcggcggccgagga

SEQ ID NO: 155181 - RNA, 32 nt, Homo Sapiens
uagcuuugcacuuuucuaaacuaggcuccuuc

SEQ ID NO: 155182 - RNA, 32 nt, Homo Sapiens
gccugugcgagcucagcccaggugugacagcg

SEQ ID NO: 155183 - RNA, 28 nt, Homo Sapiens
ccgguggggcggcggcgccagagcugcu

SEQ ID NO: 155184 - RNA, 32 nt, Homo Sapiens
ccaccacgccaaacuccgggccccacacccug

SEQ ID NO: 155185 - RNA, 32 nt, Homo Sapiens
cuuauuucaagaugaauuucuauacagacuag

SEQ ID NO: 155186 - RNA, 32 nt, Homo Sapiens
auuaguacuaagcaaugugucuugcauuuguu

SEQ ID NO: 155187 - RNA, 32 nt, Homo Sapiens
accuguuaauuuuuauacugacaauaaaaaug

SEQ ID NO: 155188 - RNA, 32 nt, Homo Sapiens
guggcugccgugcaguuggggguggggcgugg

SEQ ID NO: 155189 - RNA, 32 nt, Homo Sapiens
cucgccguccccacccccuccauuuggcagcu

SEQ ID NO: 155190 - RNA, 32 nt, Homo Sapiens
ucucagguugguuuuuuuuuuccauuauacuu

SEQ ID NO: 155191 - RNA, 32 nt, Homo Sapiens
gaagaaaauguaugguacuaagauuaugccuu

SEQ ID NO: 155192 - RNA, 32 nt, Homo Sapiens
caaaugcaauuucuucggcagugcuggauaaa

SEQ ID NO: 155193 - RNA, 32 nt, Homo Sapiens
uccugccaccccuuccuccccauacuccacuc

SEQ ID NO: 155194 - RNA, 32 nt, Homo Sapiens
ccagggcgagugcagagcacagcgggcggagg

SEQ ID NO: 155195 - RNA, 32 nt, Homo Sapiens
ucaaaaguggccuuuuauuguaaaacgacacg

SEQ ID NO: 155196 - RNA, 32 nt, Homo Sapiens
ucacuuacagcacccccaacccuggcacccag

SEQ ID NO: 155197 - RNA, 30 nt, Homo Sapiens
ugcggcuccaagccagcggguccugugaag

SEQ ID NO: 155198 - RNA, 32 nt, Homo Sapiens
ggguauucuugaauugcuuuuacaauaaacca

SEQ ID NO: 155199 - RNA, 32 nt, Homo Sapiens
uggaaagucaacauuuaauagauaccugauua

SEQ ID NO: 155200 - RNA, 32 nt, Homo Sapiens
ugcccaugcuuaaauuuuauagcuuuaauuug

SEQ ID NO: 155201 - RNA, 32 nt, Homo Sapiens
ccuguacuauuauuaauguuuauauuguaccu

SEQ ID NO: 155202 - RNA, 32 nt, Homo Sapiens
aagggaaggaggaggucccgaauagcggucgc

SEQ ID NO: 155203 - RNA, 32 nt, Homo Sapiens
aguggaccucuuugcaccuugcagccgggaga

SEQ ID NO: 155204 - RNA, 32 nt, Homo Sapiens
aaaggaacacaaguuuccaaucagaagacuug

SEQ ID NO: 155205 - RNA, 32 nt, Homo Sapiens
ugagcgugggcggggggcgcgcagagaacucc

SEQ ID NO: 155206 - RNA, 32 nt, Homo Sapiens
gugcaagugucugagagauacugcaucagccc

SEQ ID NO: 155207 - RNA, 32 nt, Homo Sapiens
aagaggcggagcaggaggcagaggagcagaug

SEQ ID NO: 155208 - RNA, 32 nt, Homo Sapiens
ugaccccucuucaggcacccaccacccugaug

SEQ ID NO: 155209 - RNA, 32 nt, Homo Sapiens
gaagcguggagccggcuuggaacagagccaag

SEQ ID NO: 155210 - RNA, 32 nt, Homo Sapiens
ucuccgcggaagucagggcggcuggauuccag

SEQ ID NO: 155211 - RNA, 32 nt, Homo Sapiens
gcuuuuuucuccuguacccauccaugggaggg

SEQ ID NO: 155212 - RNA, 32 nt, Homo Sapiens
cccaaacccagcugcagcuucucaucucacga

SEQ ID NO: 155213 - RNA, 32 nt, Homo Sapiens
cuggagaccccucccaaccccccuugcugugc

SEQ ID NO: 155214 - RNA, 32 nt, Homo Sapiens
ugaccaggauaaaacugagaaggauuuacaaa

SEQ ID NO: 155215 - RNA, 32 nt, Homo Sapiens
gauccgacagaugguccauaauaggccaccga

SEQ ID NO: 155216 - RNA, 32 nt, Homo Sapiens
cucgugaucugccugccuuggccucccaaagu

SEQ ID NO: 155217 - RNA, 32 nt, Homo Sapiens
cuugugaucugccugccuuggccuccuaaagu

SEQ ID NO: 155218 - RNA, 32 nt, Homo Sapiens
guauaguuaaacuaaagcaguacuucaguggg

SEQ ID NO: 155219 - RNA, 32 nt, Homo Sapiens
guucagauucaagauuauuccaagcgcagggc

SEQ ID NO: 155220 - RNA, 32 nt, Homo Sapiens
ccugaggucuccuggggccaggugggaacagu

SEQ ID NO: 155221 - RNA, 32 nt, Homo Sapiens
cccacccccuccccccuccgcaaguucucucu

SEQ ID NO: 155222 - RNA, 32 nt, Homo Sapiens
aaagaccccugagacucuaggacucgguuugc

SEQ ID NO: 155223 - RNA, 32 nt, Homo Sapiens
acgucccaccgccuucccacaucggaucgcag

SEQ ID NO: 155224 - RNA, 32 nt, Homo Sapiens
caaguuuaauaaauaagguuguacuuuucuua

SEQ ID NO: 155225 - RNA, 32 nt, Homo Sapiens
auggauauuuucacauauuuucguucagauac

SEQ ID NO: 155226 - RNA, 32 nt, Homo Sapiens
ccgcagugggguggagggggcagggcguggug

SEQ ID NO: 155227 - RNA, 32 nt, Homo Sapiens
cgaggggagaauuuaaaggccccggcuggcag

SEQ ID NO: 155228 - RNA, 32 nt, Homo Sapiens
ccacaaaauaugugaauuugcugcuucugaga

SEQ ID NO: 155229 - RNA, 32 nt, Homo Sapiens
uucccggugugagcugcaggcugugcuccaga

SEQ ID NO: 155230 - RNA, 32 nt, Homo Sapiens
gugacuuguggcgucuuauaaauaaugcacug

SEQ ID NO: 155231 - RNA, 32 nt, Homo Sapiens
ucucauucaucuccaaggacguggucuccaag

SEQ ID NO: 155232 - RNA, 32 nt, Homo Sapiens
cgaucuaauguuucuuguaauauugaugaucc

SEQ ID NO: 155233 - RNA, 32 nt, Homo Sapiens
gaaguaaaugcaguguucuacugccugaugug

SEQ ID NO: 155234 - RNA, 32 nt, Homo Sapiens
cccuuccgcaaucuccucccccagucucccaa

SEQ ID NO: 155235 - RNA, 32 nt, Homo Sapiens
gguuucacuauguuggccaggcuggucuggaa

SEQ ID NO: 155236 - RNA, 32 nt, Homo Sapiens
cuaaaauuaacaaagaauauaaaugcaaguau

SEQ ID NO: 155237 - RNA, 32 nt, Homo Sapiens
cauauugugaauguauacuaaaaaaacauuuu

SEQ ID NO: 155238 - RNA, 32 nt, Homo Sapiens
aaacaguuuaggaagcauaauuacgaacauuu

SEQ ID NO: 155239 - RNA, 32 nt, Homo Sapiens
gcagaggggacauugaauaaaccugaguauug

SEQ ID NO: 155240 - RNA, 32 nt, Homo Sapiens
uaagcaguucccucauugcucuuuggacuagg

SEQ ID NO: 155241 - RNA, 32 nt, Homo Sapiens
gaaaucaugcgugugaucggaacucagguuua

SEQ ID NO: 155242 - RNA, 32 nt, Homo Sapiens
cuuguucagggcugguggggcuggggcgcaag

SEQ ID NO: 155243 - RNA, 32 nt, Homo Sapiens
ugccuguaaucccagcacuuugggaagucuag

SEQ ID NO: 155244 - RNA, 32 nt, Homo Sapiens
aaauuacaccccucggugauaagauuacauac

SEQ ID NO: 155245 - RNA, 32 nt, Homo Sapiens
gcguaugccccgggauucuccuccgcuuccuu

SEQ ID NO: 155246 - RNA, 32 nt, Homo Sapiens
augauuuuuaccucuguaacaaacacaagaaa

SEQ ID NO: 155247 - RNA, 32 nt, Homo Sapiens
auuuuucuuuugagugcuggucucucucugug

SEQ ID NO: 155248 - RNA, 32 nt, Homo Sapiens
cgaucacauucuuuauuucucauuuuaaagaa

SEQ ID NO: 155249 - RNA, 32 nt, Homo Sapiens
acuugcuuuuaaaauccacuuuaucuugaaua

SEQ ID NO: 155250 - RNA, 32 nt, Homo Sapiens
ucaggcuguauccuucuaccuccuggcccagg

SEQ ID NO: 155251 - RNA, 32 nt, Homo Sapiens
gucccucucaugcggugccacgcccauggacc

SEQ ID NO: 155252 - RNA, 32 nt, Homo Sapiens
gugugcugugggagccccauggagcggcuacc

SEQ ID NO: 155253 - RNA, 32 nt, Homo Sapiens
ccucgggcccuccuguccacccucaaagcccu

SEQ ID NO: 155254 - RNA, 32 nt, Homo Sapiens
guucgagaccagccuggccaaaauagugaaac

SEQ ID NO: 155255 - RNA, 32 nt, Homo Sapiens
ucugcgcugccgcagggaggccgcccgggcca

SEQ ID NO: 155256 - RNA, 32 nt, Homo Sapiens
accucgccaccucagccacgggacgccaagac

SEQ ID NO: 155257 - RNA, 32 nt, Homo Sapiens
uaaaggagucaguggggaacuccacgcgcauu

SEQ ID NO: 155258 - RNA, 32 nt, Homo Sapiens
agcccaggcagaggaggcgccgagagcgagcg

SEQ ID NO: 155259 - RNA, 32 nt, Homo Sapiens
acugccuccuuuuugcagagaacgauccccac

SEQ ID NO: 155260 - RNA, 32 nt, Homo Sapiens
ggaaacaaaaugucuucaguaucuaaagacac

SEQ ID NO: 155261 - RNA, 32 nt, Homo Sapiens
cagaugauuucagugcaggugauucagagacc

SEQ ID NO: 155262 - RNA, 32 nt, Homo Sapiens
aauaacaaaaauauacccucaagcuaguucau

SEQ ID NO: 155263 - RNA, 32 nt, Homo Sapiens
cucauggaccagcucugaucccaugcaugugc

SEQ ID NO: 155264 - RNA, 32 nt, Homo Sapiens
ucuccuuuagccaucaccccaaccccccaaaa

SEQ ID NO: 155265 - RNA, 32 nt, Homo Sapiens
cccagcccgccuuccucccgccgcgcccuccg

SEQ ID NO: 155266 - RNA, 32 nt, Homo Sapiens
uacggacuaugggcgaauagcucugaccaccc

SEQ ID NO: 155267 - RNA, 32 nt, Homo Sapiens
agaagcaaagauuuucaaacaagcauacacga

SEQ ID NO: 155268 - RNA, 32 nt, Homo Sapiens
caugaccuggggaaauggucagaccuuguauu

SEQ ID NO: 155269 - RNA, 29 nt, Homo Sapiens
uuacucauauguaagccucaugguaagca

SEQ ID NO: 155270 - RNA, 32 nt, Homo Sapiens
ugcuuaagugugcauuuuuuuauucuaauauu

SEQ ID NO: 155271 - RNA, 32 nt, Homo Sapiens
uuccagacagaaaaaucaacaaagaaauguca

SEQ ID NO: 155272 - RNA, 32 nt, Homo Sapiens
gcuagcucaguccaacauuguguuuacauaca

SEQ ID NO: 155273 - RNA, 32 nt, Homo Sapiens
gaggcgugugagaggaaagguggaggaagaug

SEQ ID NO: 155274 - RNA, 32 nt, Homo Sapiens
cugaggugcagggcagucugagacaugguuag

SEQ ID NO: 155275 - RNA, 32 nt, Homo Sapiens
aaauauuuucuuugccuaaauacaugugagag

SEQ ID NO: 155276 - RNA, 32 nt, Homo Sapiens
uauuuuaaauguuuguguggguggucugugua

SEQ ID NO: 155277 - RNA, 32 nt, Homo Sapiens
ggcuggucucgagcucuugaccucaaguaauc

SEQ ID NO: 155278 - RNA, 32 nt, Homo Sapiens
ggcuggucucgaacucuugaccucaagugauc

SEQ ID NO: 155279 - RNA, 29 nt, Homo Sapiens
cagccugggggacagagcaagacccugcc

SEQ ID NO: 155280 - RNA, 28 nt, Homo Sapiens
gugacaucucuguauauguguuugugaa

SEQ ID NO: 155281 - RNA, 27 nt, Homo Sapiens
ucauggcagcgguggcgcccgcgggcc

SEQ ID NO: 155282 - RNA, 32 nt, Homo Sapiens
aaacauuuuuauuugcugcuuuuucccuuuga

SEQ ID NO: 155283 - RNA, 32 nt, Homo Sapiens
ucaaacagcuccgagggaauguccuucucaau

SEQ ID NO: 155284 - RNA, 32 nt, Homo Sapiens
acguucugccccaccaccccccuccugaccug

SEQ ID NO: 155285 - RNA, 32 nt, Homo Sapiens
uaauugucucaacgccucccccucccccauuc

SEQ ID NO: 155286 - RNA, 32 nt, Homo Sapiens
auuucaugaagauuuuagaucaagagagcuac

SEQ ID NO: 155287 - RNA, 32 nt, Homo Sapiens
gggaacuggacacccagaacacugcugugcug

SEQ ID NO: 155288 - RNA, 32 nt, Homo Sapiens
aaggugagagugcagccggggaggcugaggau

SEQ ID NO: 155289 - RNA, 32 nt, Homo Sapiens
caggggucucccuccgccaccuaggaaaggag

SEQ ID NO: 155290 - RNA, 32 nt, Homo Sapiens
ccaauuuuuccacauacuuucaugccuugccu

SEQ ID NO: 155291 - RNA, 32 nt, Homo Sapiens
ccccuaggagucauacaucuggcuacuuauuu

SEQ ID NO: 155292 - RNA, 32 nt, Homo Sapiens
gcacuguugucauuuccaaauuccuagaaaag

SEQ ID NO: 155293 - RNA, 32 nt, Homo Sapiens
cgugcgagguggcaaaugcaacaugcucucca

SEQ ID NO: 155294 - RNA, 32 nt, Homo Sapiens
ggguccuaacuguucucaagccugauccauca

SEQ ID NO: 155295 - RNA, 32 nt, Homo Sapiens
uuguaaguaaauuuauacauggaugucacuua

SEQ ID NO: 155296 - RNA, 32 nt, Homo Sapiens
gcagcuguggcugucucuaucaucgugacugu

SEQ ID NO: 155297 - RNA, 32 nt, Homo Sapiens
cugcuggaggcaacgacuaauuuaagcagagu

SEQ ID NO: 155298 - RNA, 32 nt, Homo Sapiens
ugcguuguggggugggggaggggguccaccug

SEQ ID NO: 155299 - RNA, 32 nt, Homo Sapiens
cucucucacucacacacacacacacacacaca

SEQ ID NO: 155300 - RNA, 29 nt, Homo Sapiens
agagccauauguaauguacuguaacaaag

SEQ ID NO: 155301 - RNA, 32 nt, Homo Sapiens
uaaaauuuacaugccuuagauuucauaaaauu

SEQ ID NO: 155302 - RNA, 32 nt, Homo Sapiens
ggcuggcgagggugggggugggcaagggaugc

SEQ ID NO: 155303 - RNA, 32 nt, Homo Sapiens
gcucaccaccucuggggaaggugugagaggag

SEQ ID NO: 155304 - RNA, 32 nt, Homo Sapiens
ggaaagagaaggguauuuguauacaaagcccu

SEQ ID NO: 155305 - RNA, 32 nt, Homo Sapiens
uuggaggcagaguugucaggcuuuucaagcua

SEQ ID NO: 155306 - RNA, 32 nt, Homo Sapiens
aacuuccuauguuaugguucuuucucugugaa

SEQ ID NO: 155307 - RNA, 32 nt, Homo Sapiens
auagaucacagauauuuucucaucucaacaca

SEQ ID NO: 155308 - RNA, 32 nt, Homo Sapiens
guuccccugagaggcuggaggcguuggugcug

SEQ ID NO: 155309 - RNA, 32 nt, Homo Sapiens
aagaaggucauccauagcauucauucuaagaa

SEQ ID NO: 155310 - RNA, 32 nt, Homo Sapiens
gacgcgccugcggcccggggagcagcagcagc

SEQ ID NO: 155311 - RNA, 32 nt, Homo Sapiens
ucgcagugcccucuacugggaauccuccucag

SEQ ID NO: 155312 - RNA, 32 nt, Homo Sapiens
cggggacuccgggcccggguauucgcgccgcc

SEQ ID NO: 155313 - RNA, 32 nt, Homo Sapiens
uacccgcuuuaugucauuacccauugggaaac

SEQ ID NO: 155314 - RNA, 32 nt, Homo Sapiens
agcuaccacaagagguugauauuuuuauagug

SEQ ID NO: 155315 - RNA, 32 nt, Homo Sapiens
cuagguauggaguuugauggacagggcugccu

SEQ ID NO: 155316 - RNA, 32 nt, Homo Sapiens
guauuuuccauccaacagcaguguguagagag

SEQ ID NO: 155317 - RNA, 32 nt, Homo Sapiens
gcccccagcucuucuccccagguguguugggg

SEQ ID NO: 155318 - RNA, 32 nt, Homo Sapiens
gagguggcaggggacagaugugcugcuguucc

SEQ ID NO: 155319 - RNA, 32 nt, Homo Sapiens
gaagauagaccaacuuuuuaugucgguuuggg

SEQ ID NO: 155320 - RNA, 32 nt, Homo Sapiens
gacuucucuuugauuuacucagaaggacugga

SEQ ID NO: 155321 - RNA, 32 nt, Homo Sapiens
uuguuucuuccaaagcacauugaaagagaacc

SEQ ID NO: 155322 - RNA, 32 nt, Homo Sapiens
gggaccucaagcccccaacaucccaguccuca

SEQ ID NO: 155323 - RNA, 32 nt, Homo Sapiens
cccuacucucccugccgaggcguccauagcau

SEQ ID NO: 155324 - RNA, 32 nt, Homo Sapiens
ugcucagauaaaaauauuguuuccucccauga

SEQ ID NO: 155325 - RNA, 32 nt, Homo Sapiens
ccugggcuggguaaaaaguuauauuaauauug

SEQ ID NO: 155326 - RNA, 32 nt, Homo Sapiens
uaauaggucuagagacucuaaaaacuaaccaa

SEQ ID NO: 155327 - RNA, 32 nt, Homo Sapiens
ccuggauuugaagagauggcaaaugaugagcc

SEQ ID NO: 155328 - RNA, 32 nt, Homo Sapiens
cagcaucccuggauuucagaguucuggaacuu

SEQ ID NO: 155329 - RNA, 32 nt, Homo Sapiens
cucagacagcaggaaggagagaaggaaggaag

SEQ ID NO: 155330 - RNA, 32 nt, Homo Sapiens
accgaggcugcuaggcccagguguauugugau

SEQ ID NO: 155331 - RNA, 32 nt, Homo Sapiens
caugugucuuggucuuuuuuacuaauauugau

SEQ ID NO: 155332 - RNA, 32 nt, Homo Sapiens
ggaaucaguauuuuauucuaagaucaaaggug

SEQ ID NO: 155333 - RNA, 32 nt, Homo Sapiens
ugcacgugucacugggguggccgugagugugu

SEQ ID NO: 155334 - RNA, 31 nt, Homo Sapiens
ggguugagggcgguggcucagucuccuggaa

SEQ ID NO: 155335 - RNA, 32 nt, Homo Sapiens
cucuaugggaaaggacugcaaaaacuaaauuu

SEQ ID NO: 155336 - RNA, 32 nt, Homo Sapiens
gcaggaugcugauuccauguuuugaaauucaa

SEQ ID NO: 155337 - RNA, 32 nt, Homo Sapiens
gagcauauguaauagauuuaauuauuaauuuc

SEQ ID NO: 155338 - RNA, 32 nt, Homo Sapiens
aagauaaauuuauuugcuguuccuugucuacu

SEQ ID NO: 155339 - RNA, 32 nt, Homo Sapiens
gcccugauaaccucgccuuuguuuuucggggg

SEQ ID NO: 155340 - RNA, 32 nt, Homo Sapiens
gguacccacugccggccuccgcgcuacccggc

SEQ ID NO: 155341 - RNA, 32 nt, Homo Sapiens
gucaggcccucccuaggccuguuuguguguga

SEQ ID NO: 155342 - RNA, 32 nt, Homo Sapiens
augaugaacuuaggguaaaccaacugagaagg

SEQ ID NO: 155343 - RNA, 32 nt, Homo Sapiens
aggucgagugggguauucucuuuguuuggcag

SEQ ID NO: 155344 - RNA, 32 nt, Homo Sapiens
ggcgaguaggagggggcgccgggcuauauaua

SEQ ID NO: 155345 - RNA, 32 nt, Homo Sapiens
acuuucugguauuucuuaccauuuuaucuucc

SEQ ID NO: 155346 - RNA, 32 nt, Homo Sapiens
aaauacagcugaacccugcgggcccuuagcag

SEQ ID NO: 155347 - RNA, 32 nt, Homo Sapiens
aauuccucaaaaggaaauuaugcuggucauca

SEQ ID NO: 155348 - RNA, 32 nt, Homo Sapiens
agcuuuuaaacacuggggacuggaucacagaa

SEQ ID NO: 155349 - RNA, 32 nt, Homo Sapiens
agcucugcguccucgagcgggacagauccaag

SEQ ID NO: 155350 - RNA, 32 nt, Homo Sapiens
acuuagccacaggcagaauagcuuucgaugac

SEQ ID NO: 155351 - RNA, 32 nt, Homo Sapiens
ucaaucuugaguugaucagagaaagggaaacu

SEQ ID NO: 155352 - RNA, 32 nt, Homo Sapiens
gaaacccugccagugugaugaguacggaaaag

SEQ ID NO: 155353 - RNA, 32 nt, Homo Sapiens
cacuucauuuuucuagucuauaaaauggagau

SEQ ID NO: 155354 - RNA, 32 nt, Homo Sapiens
ugacaucugaccaugagggcuggauggguggg

SEQ ID NO: 155355 - RNA, 32 nt, Homo Sapiens
ccuggcagcaccugcgcagugaacaggcuggc

SEQ ID NO: 155356 - RNA, 32 nt, Homo Sapiens
uguuuuguuuuucuuuccuugggcucagcaau

SEQ ID NO: 155357 - RNA, 32 nt, Homo Sapiens
cacccacuccaccagcacuggcacugagaccc

SEQ ID NO: 155358 - RNA, 32 nt, Homo Sapiens
agagcuauauauaugugccgacauguggcaga

SEQ ID NO: 155359 - RNA, 32 nt, Homo Sapiens
ggcgagccgggcgcaggagggggcgcgcuuuc

SEQ ID NO: 155360 - RNA, 32 nt, Homo Sapiens
guccucgaggcuggcccggccagggccagagc

SEQ ID NO: 155361 - RNA, 32 nt, Homo Sapiens
ccaaggcucuuugccccugcucagcaggcaca

SEQ ID NO: 155362 - RNA, 32 nt, Homo Sapiens
cuaaacccugaacucauuaucugagugucacu

SEQ ID NO: 155363 - RNA, 32 nt, Homo Sapiens
ggcggcuccgcgguucgcaggucguucgcuga

SEQ ID NO: 155364 - RNA, 32 nt, Homo Sapiens
ucaauagccagcuagacgaguuuucuaauccc

SEQ ID NO: 155365 - RNA, 32 nt, Homo Sapiens
uguuccuguccucaucccuuuugacuccuaga

SEQ ID NO: 155366 - RNA, 28 nt, Homo Sapiens
aaaguugcuuuuaauauguuaggguaua

SEQ ID NO: 155367 - RNA, 32 nt, Homo Sapiens
ugccccccaguucuccuccucagccuuuuccu

SEQ ID NO: 155368 - RNA, 32 nt, Homo Sapiens
gggcugggaaagggcugagugucaacaggccu

SEQ ID NO: 155369 - RNA, 32 nt, Homo Sapiens
agcuggggccauuugaggggagcccauggggc

SEQ ID NO: 155370 - RNA, 32 nt, Homo Sapiens
uuauuuuuacagauuuugcacuucugaauuca

SEQ ID NO: 155371 - RNA, 32 nt, Homo Sapiens
gaccuuuguuuuaagacuuccacacaccaagg

SEQ ID NO: 155372 - RNA, 32 nt, Homo Sapiens
cuugccuugggacuggauucucuuccugaagc

SEQ ID NO: 155373 - RNA, 32 nt, Homo Sapiens
ggcgccgcugcaggaggccgccggcagcuacc

SEQ ID NO: 155374 - RNA, 32 nt, Homo Sapiens
uuagguggugggaauucaaacacacaaagacc

SEQ ID NO: 155375 - RNA, 32 nt, Homo Sapiens
auagaggcagcuuuuguagauuuuaaaugggu

SEQ ID NO: 155376 - RNA, 32 nt, Homo Sapiens
ggcauucuuguacaguguauauugaaauuuau

SEQ ID NO: 155377 - RNA, 32 nt, Homo Sapiens
ugcccagccagcgcgccuacggcggccccaac

SEQ ID NO: 155378 - RNA, 32 nt, Homo Sapiens
gcuuugucauggcggcugcugcugcacgcugg

SEQ ID NO: 155379 - RNA, 29 nt, Homo Sapiens
agcgauggagguggcggcuaauugcuccc

SEQ ID NO: 155380 - RNA, 32 nt, Homo Sapiens
gacaugaggaccagcaaguuuauucuuuucau

SEQ ID NO: 155381 - RNA, 32 nt, Homo Sapiens
cugugaacaucuuagugaaauguuagguucag

SEQ ID NO: 155382 - RNA, 32 nt, Homo Sapiens
aucuaucuuuugcuguccuguccagucccauc

SEQ ID NO: 155383 - RNA, 32 nt, Homo Sapiens
gaagggcggcggccacauccccugccgucugc

SEQ ID NO: 155384 - RNA, 32 nt, Homo Sapiens
gggguggggcuuugggggugcuuucucuguac

SEQ ID NO: 155385 - RNA, 32 nt, Homo Sapiens
ccgucaucgugcggcccgacgcuaucucgcgc

SEQ ID NO: 155386 - RNA, 32 nt, Homo Sapiens
gccccauccucgucacuugggaccacgagccc

SEQ ID NO: 155387 - RNA, 32 nt, Homo Sapiens
agccuuggcuccaugguggcggguagacaagg

SEQ ID NO: 155388 - RNA, 32 nt, Homo Sapiens
gaaaccuguggucuagaaccacagcaagaaga

SEQ ID NO: 155389 - RNA, 32 nt, Homo Sapiens
ccauuuaauuucuccuuuccucuuguaggcuu

SEQ ID NO: 155390 - RNA, 32 nt, Homo Sapiens
cgggcggcgggggacgggcggagucaaaaguc

SEQ ID NO: 155391 - RNA, 32 nt, Homo Sapiens
uagcauuuucuuuguaaagaacuacaauauaa

SEQ ID NO: 155392 - RNA, 32 nt, Homo Sapiens
uucagauccaaccccugccccgcggccaccca

SEQ ID NO: 155393 - RNA, 32 nt, Homo Sapiens
gcgucaacaucaacaaaaaggacauccacaca

SEQ ID NO: 155394 - RNA, 32 nt, Homo Sapiens
gguauaaggugugacuauuagauucuugaacu

SEQ ID NO: 155395 - RNA, 32 nt, Homo Sapiens
uaccauugaccucagagcuguaccccacaucu

SEQ ID NO: 155396 - RNA, 32 nt, Homo Sapiens
ugcagguuaguaggucuucaaggacaaaucug

SEQ ID NO: 155397 - RNA, 32 nt, Homo Sapiens
ugauggaggacacgaucugcccagacgacuga

SEQ ID NO: 155398 - RNA, 32 nt, Homo Sapiens
auuuauugauuucuuuuuuuuauucaacugac

SEQ ID NO: 155399 - RNA, 32 nt, Homo Sapiens
uuuuuguccauucuaaaaguaagcaaacauga

SEQ ID NO: 155400 - RNA, 32 nt, Homo Sapiens
cuugaauuuucuuuuucuuuuuuuugagacag

SEQ ID NO: 155401 - RNA, 32 nt, Homo Sapiens
acacucuucuaaaacuaaaugggcacaagaga

SEQ ID NO: 155402 - RNA, 32 nt, Homo Sapiens
gcggagguucugugucccaguuguuuuccaau

SEQ ID NO: 155403 - RNA, 32 nt, Homo Sapiens
ugaaugacauaaauguggaagaaauaaauaua

SEQ ID NO: 155404 - RNA, 32 nt, Homo Sapiens
ccucggaaccugagcgcccuucugccuggaaa

SEQ ID NO: 155405 - RNA, 32 nt, Homo Sapiens
cucuggaggagacaauggaugcaaacagccca

SEQ ID NO: 155406 - RNA, 32 nt, Homo Sapiens
cuaaugguguacucauagcaacuauuacuggu

SEQ ID NO: 155407 - RNA, 32 nt, Homo Sapiens
guaaugggcauauugggacucguauguaggaa

SEQ ID NO: 155408 - RNA, 32 nt, Homo Sapiens
agaugagcucucacuaugucacccagguucgu

SEQ ID NO: 155409 - RNA, 32 nt, Homo Sapiens
aauuucuguauauauaauuuaauaacagaagc

SEQ ID NO: 155410 - RNA, 32 nt, Homo Sapiens
aaauacugggacuuaaguauacaauucaguca

SEQ ID NO: 155411 - RNA, 32 nt, Homo Sapiens
cccgccgcggcgcgcuccaugggggcgcgcuc

SEQ ID NO: 155412 - RNA, 32 nt, Homo Sapiens
aaggguaagggagagggagggagccgggagcc

SEQ ID NO: 155413 - RNA, 32 nt, Homo Sapiens
ugcucuggacucuggagaggagauugaaauau

SEQ ID NO: 155414 - RNA, 32 nt, Homo Sapiens
cauuuuugauaaauuauguuuguacuaguuga

SEQ ID NO: 155415 - RNA, 32 nt, Homo Sapiens
ugggagauaaaacucugugguuuuaaucuucu

SEQ ID NO: 155416 - RNA, 32 nt, Homo Sapiens
uguugaggggacgaagggaccccugccccugu

SEQ ID NO: 155417 - RNA, 32 nt, Homo Sapiens
ggggaccgcggcggcccgcuagacucuggucg

SEQ ID NO: 155418 - RNA, 32 nt, Homo Sapiens
gucuuccccgaucccacccccucccccagggc

SEQ ID NO: 155419 - RNA, 27 nt, Homo Sapiens
aacuucaccugaccagauuguuccuca

SEQ ID NO: 155420 - RNA, 32 nt, Homo Sapiens
ggugcuuauggaccagaucgccgucaccaucg

SEQ ID NO: 155421 - RNA, 32 nt, Homo Sapiens
gaaauuuaauuaugaucagggaguucuaaagg

SEQ ID NO: 155422 - RNA, 32 nt, Homo Sapiens
guaauuaaaaauuuuacuuugaaaauuaggca

SEQ ID NO: 155423 - RNA, 32 nt, Homo Sapiens
cuggguucuucacauggcaccaucauccagaa

SEQ ID NO: 155424 - RNA, 32 nt, Homo Sapiens
guaaugcuguaauaauacauaucauaguauau

SEQ ID NO: 155425 - RNA, 32 nt, Homo Sapiens
uauuggacacguaaccuggcucuaauuugggc

SEQ ID NO: 155426 - RNA, 27 nt, Homo Sapiens
ugaucuguccacuucagccguccaaag

SEQ ID NO: 155427 - RNA, 32 nt, Homo Sapiens
auucaucgcaaacaguauuagauggcacugau

SEQ ID NO: 155428 - RNA, 32 nt, Homo Sapiens
cugcugaugagagugagagagauacaaagguu

SEQ ID NO: 155429 - RNA, 32 nt, Homo Sapiens
ccaucaagguaguccccauaccccuguguccu

SEQ ID NO: 155430 - RNA, 32 nt, Homo Sapiens
uugggagaauggaaagcagaaagggaagccag

SEQ ID NO: 155431 - RNA, 32 nt, Homo Sapiens
gcucccccgcggccuggaguggugcgccccgg

SEQ ID NO: 155432 - RNA, 32 nt, Homo Sapiens
cgauguauuaaguaccuaccauguguuaccuc

SEQ ID NO: 155433 - RNA, 32 nt, Homo Sapiens
ccagucauuucugcauuggagagacuucucau

SEQ ID NO: 155434 - RNA, 32 nt, Homo Sapiens
uaaugucuuugaaaagggaaaaguauaaacug

SEQ ID NO: 155435 - RNA, 32 nt, Homo Sapiens
gguugcuuugaaaacuauacuuuaaugggaga

SEQ ID NO: 155436 - RNA, 32 nt, Homo Sapiens
cagaacuuuguguugugaaacgaugagaacag

SEQ ID NO: 155437 - RNA, 32 nt, Homo Sapiens
caaggugguggauaugguggcgguguuggagg

SEQ ID NO: 155438 - RNA, 32 nt, Homo Sapiens
cugggaggugagccagucuccuggcuuccagc

SEQ ID NO: 155439 - RNA, 32 nt, Homo Sapiens
ucgccccauaagacuccgccccgccccacgag

SEQ ID NO: 155440 - RNA, 32 nt, Homo Sapiens
aggauuaaacacacacaaaaugcucaaggaag

SEQ ID NO: 155441 - RNA, 32 nt, Homo Sapiens
ccagaaaggagcuuccccugccugccugaguc

SEQ ID NO: 155442 - RNA, 32 nt, Homo Sapiens
cagaauuuuuauauuuuuuucuuuguacagag

SEQ ID NO: 155443 - RNA, 32 nt, Homo Sapiens
ggcacccgugaccccucgcgcugccugcggcc

SEQ ID NO: 155444 - RNA, 32 nt, Homo Sapiens
uuaugaagaaaaauguaauuuacaauauucag

SEQ ID NO: 155445 - RNA, 32 nt, Homo Sapiens
uauuacucuuuccuuggcaaauaaaaaccaug

SEQ ID NO: 155446 - RNA, 32 nt, Homo Sapiens
ugaagguaaaagacuggaacgaagcacugagg

SEQ ID NO: 155447 - RNA, 32 nt, Homo Sapiens
ucuaggcggggacgacugcagccguuauggag

SEQ ID NO: 155448 - RNA, 32 nt, Homo Sapiens
ggugggggugggggcgggggccugcuuugauc

SEQ ID NO: 155449 - RNA, 32 nt, Homo Sapiens
agacaugguaaaccucaucaugaucaagaaug

SEQ ID NO: 155450 - RNA, 32 nt, Homo Sapiens
augcuuuucugcauuguguuaacauguuucaa

SEQ ID NO: 155451 - RNA, 32 nt, Homo Sapiens
auaaagcuauacaugcagaaaugaauacaaca

SEQ ID NO: 155452 - RNA, 32 nt, Homo Sapiens
cuagugugccagcacaggccagacauacuagu

SEQ ID NO: 155453 - RNA, 32 nt, Homo Sapiens
ucaacuagaugaaacuuuuaaaaaugauuuaa

SEQ ID NO: 155454 - RNA, 32 nt, Homo Sapiens
gcaggagacagaggccaggacgguccagaggu

SEQ ID NO: 155455 - RNA, 32 nt, Homo Sapiens
gaauguacagacagaaguaagccuggacauug

SEQ ID NO: 155456 - RNA, 32 nt, Homo Sapiens
gggcuggugcuucauggucuucguggacaugu

SEQ ID NO: 155457 - RNA, 32 nt, Homo Sapiens
ucauuuauagcacgucuccuugauuuuuggua

SEQ ID NO: 155458 - RNA, 32 nt, Homo Sapiens
gaagaacaaaacaaaauccguaauucauugaa

SEQ ID NO: 155459 - RNA, 32 nt, Homo Sapiens
gcuuucccucaucauaauguagauaaaaagaa

SEQ ID NO: 155460 - RNA, 32 nt, Homo Sapiens
guaauuacaaccuaccucuauuguaugucacu

SEQ ID NO: 155461 - RNA, 32 nt, Homo Sapiens
aggcuguuugccucuggcaaagucugggaucu

SEQ ID NO: 155462 - RNA, 32 nt, Homo Sapiens
gcaggucagucuccgugcaggaugugagcagc

SEQ ID NO: 155463 - RNA, 32 nt, Homo Sapiens
gacauugauuugaaagaaguuaaugaauucga

SEQ ID NO: 155464 - RNA, 32 nt, Homo Sapiens
gcgccuagcuccgcacgggggaccucggagcu

SEQ ID NO: 155465 - RNA, 31 nt, Homo Sapiens
ugcacucuugguaaugcacagaggaugguuc

SEQ ID NO: 155466 - RNA, 32 nt, Homo Sapiens
cugaggaaggcacauauuuagccuggccugag

SEQ ID NO: 155467 - RNA, 32 nt, Homo Sapiens
agacucacgcacccugggccacagggagccgg

SEQ ID NO: 155468 - RNA, 32 nt, Homo Sapiens
uuccuuuguggccuuaacccuucugcaucagg

SEQ ID NO: 155469 - RNA, 32 nt, Homo Sapiens
cuuccgggcguugcccuggcggauguccgagu

SEQ ID NO: 155470 - RNA, 32 nt, Homo Sapiens
uuauuuuuguuuucucuuuuucaaugaacacc

SEQ ID NO: 155471 - RNA, 32 nt, Homo Sapiens
uggaccccggcgggcaccgaagccucacccca

SEQ ID NO: 155472 - RNA, 31 nt, Homo Sapiens
caggcgugaaacacugugcccggccaagaau

SEQ ID NO: 155473 - RNA, 32 nt, Homo Sapiens
ccaaggaacugguuauguauguguguacaguu

SEQ ID NO: 155474 - RNA, 32 nt, Homo Sapiens
agaugcccugcggcugccccaggaagccgcgg

SEQ ID NO: 155475 - RNA, 32 nt, Homo Sapiens
caucgggccgcgcggggaaggcggcggccaag

SEQ ID NO: 155476 - RNA, 32 nt, Homo Sapiens
ucauaucaaaaauaucaucucugaauauaagu

SEQ ID NO: 155477 - RNA, 32 nt, Homo Sapiens
auguauguauaaauauuuuggugugcuacaaa

SEQ ID NO: 155478 - RNA, 30 nt, Homo Sapiens
uaccaggcgcccggcucgcuggcgcucuac

SEQ ID NO: 155479 - RNA, 32 nt, Homo Sapiens
uggccggcccaccuguuuaacucuguauuuau

SEQ ID NO: 155480 - RNA, 32 nt, Homo Sapiens
aggggacagguagagagaagggggcccaaugg

SEQ ID NO: 155481 - RNA, 31 nt, Homo Sapiens
acugagcccgcgggccagccccgcgccugcu

SEQ ID NO: 155482 - RNA, 32 nt, Homo Sapiens
uugcuacauacuuuuuucuaucaaauauguaa

SEQ ID NO: 155483 - RNA, 32 nt, Homo Sapiens
guccuccgauaugaaguccuggagcacugucc

SEQ ID NO: 155484 - RNA, 32 nt, Homo Sapiens
cuggaagauucaaaacuggaagcaaaaacuug

SEQ ID NO: 155485 - RNA, 32 nt, Homo Sapiens
agcaugcucugcagugggccuguuuuguggaa

SEQ ID NO: 155486 - RNA, 32 nt, Homo Sapiens
uggugcagcccugccagcccagcccaggcugg

SEQ ID NO: 155487 - RNA, 32 nt, Homo Sapiens
agcugcaucugugcccagagggguggggcucc

SEQ ID NO: 155488 - RNA, 32 nt, Homo Sapiens
augagacuagaacuucacuuuaugauauaaac

SEQ ID NO: 155489 - RNA, 32 nt, Homo Sapiens
ccgcccccucuggaggcugaagagggauucca

SEQ ID NO: 155490 - RNA, 32 nt, Homo Sapiens
ccugaguacuuugaaccucagaucaaagacau

SEQ ID NO: 155491 - RNA, 32 nt, Homo Sapiens
guuucgccuccugacucucaccagcguccucu

SEQ ID NO: 155492 - RNA, 32 nt, Homo Sapiens
uaccagggagaaccugggagguccuggagagg

SEQ ID NO: 155493 - RNA, 32 nt, Homo Sapiens
gcucucugaaggagcuuuggcuccugauauuu

SEQ ID NO: 155494 - RNA, 32 nt, Homo Sapiens
gaguuccuccaagucccagaaccccaagaaug

SEQ ID NO: 155495 - RNA, 32 nt, Homo Sapiens
auauuuuaaauauccacaguacucacuuuuuc

SEQ ID NO: 155496 - RNA, 32 nt, Homo Sapiens
uuuuauugacaaaguauagaaacggggaaaug

SEQ ID NO: 155497 - RNA, 32 nt, Homo Sapiens
agaagucuagauguuucacaaacuacaaagcu

SEQ ID NO: 155498 - RNA, 32 nt, Homo Sapiens
aaacauuccauccauagcacccgcucaugugc

SEQ ID NO: 155499 - RNA, 32 nt, Homo Sapiens
caggccagagucuccuuggagggccuggaacu

SEQ ID NO: 155500 - RNA, 32 nt, Homo Sapiens
guucagugagguaugaugugcugcugggaaug

SEQ ID NO: 155501 - RNA, 32 nt, Homo Sapiens
cucacugugggggccaguuucuccucggaaca

SEQ ID NO: 155502 - RNA, 32 nt, Homo Sapiens
uauauuauaauuuuugaguuaaccguaguaua

SEQ ID NO: 155503 - RNA, 32 nt, Homo Sapiens
uguuuuucuccauucuuccccagcaugcgcgc

SEQ ID NO: 155504 - RNA, 32 nt, Homo Sapiens
caaacccagaaaccaggggcagcgaugaggga

SEQ ID NO: 155505 - RNA, 32 nt, Homo Sapiens
uaauaacuaacuguuaaccauuuuaaaauucu

SEQ ID NO: 155506 - RNA, 32 nt, Homo Sapiens
ccuuucugcucagcugguggguaugggucccc

SEQ ID NO: 155507 - RNA, 32 nt, Homo Sapiens
uguuuuuacauuguuuuugggugucuccuucu

SEQ ID NO: 155508 - RNA, 32 nt, Homo Sapiens
accuugcucccucccuggcugccggcuuccuu

SEQ ID NO: 155509 - RNA, 32 nt, Homo Sapiens
acaggacauuguaucugcucuucccucuguaa

SEQ ID NO: 155510 - RNA, 32 nt, Homo Sapiens
gacagcccgggcggggccguccgcgagggguc

SEQ ID NO: 155511 - RNA, 32 nt, Homo Sapiens
caggcucccccucuccaccuccuggggcccau

SEQ ID NO: 155512 - RNA, 32 nt, Homo Sapiens
agcaugguuuguguggcuguguaugcuuggca

SEQ ID NO: 155513 - RNA, 32 nt, Homo Sapiens
cccugcacuuuucucugugccguuccccaugc

SEQ ID NO: 155514 - RNA, 32 nt, Homo Sapiens
ugguggugcccaggaggcugcugcugggccgc

SEQ ID NO: 155515 - RNA, 32 nt, Homo Sapiens
uuaguauuguggaaauuaaaucuuauaaaaug

SEQ ID NO: 155516 - RNA, 32 nt, Homo Sapiens
cagagcuccucuauccgaggccauuggagacc

SEQ ID NO: 155517 - RNA, 32 nt, Homo Sapiens
uuauggaaacgcuugcccuaauaaaaauccug

SEQ ID NO: 155518 - RNA, 32 nt, Homo Sapiens
gagcagaagcuacuauguccugcccuuugaac

SEQ ID NO: 155519 - RNA, 32 nt, Homo Sapiens
auugcuuuguauacauuuuguaaaaauauuua

SEQ ID NO: 155520 - RNA, 32 nt, Homo Sapiens
cugucuuacuugggguugauaagauuugagug

SEQ ID NO: 155521 - RNA, 32 nt, Homo Sapiens
aaauucuuuaucugaaauuuuaaaagacauug

SEQ ID NO: 155522 - RNA, 32 nt, Homo Sapiens
aacuggagcaucaagacaucucauggaagugg

SEQ ID NO: 155523 - RNA, 32 nt, Homo Sapiens
cucagaucuccgacaacccccauugcaaugag

SEQ ID NO: 155524 - RNA, 32 nt, Homo Sapiens
auccggccguggccgagcgcgcggccguaaga

SEQ ID NO: 155525 - RNA, 32 nt, Homo Sapiens
gaagccgauggcuggaggaugggcagagggga

SEQ ID NO: 155526 - RNA, 32 nt, Homo Sapiens
ucucauaaacuccccagugauguaaacguugc

SEQ ID NO: 155527 - RNA, 32 nt, Homo Sapiens
cuuguuuuggaccauugcacaaacccgggugc

SEQ ID NO: 155528 - RNA, 32 nt, Homo Sapiens
aauuguuugaguuugucuaaagaccugggauc

SEQ ID NO: 155529 - RNA, 32 nt, Homo Sapiens
gaguuucgccauggcccggggccccaagaagc

SEQ ID NO: 155530 - RNA, 32 nt, Homo Sapiens
aauuguauuucuucuuuuuauuuuuaauagau

SEQ ID NO: 155531 - RNA, 32 nt, Homo Sapiens
ccacaacucacucaccaagauguuuaacagua

SEQ ID NO: 155532 - RNA, 32 nt, Homo Sapiens
acacaguaacuggcaguguggggcagcugcaa

SEQ ID NO: 155533 - RNA, 32 nt, Homo Sapiens
ggacuggaagcaggagacagaacagugucugu

SEQ ID NO: 155534 - RNA, 32 nt, Homo Sapiens
guucaaaggacacacccuagaugagccauccc

SEQ ID NO: 155535 - RNA, 32 nt, Homo Sapiens
caguccuagcuacuugggugguugaggcagga

SEQ ID NO: 155536 - RNA, 32 nt, Homo Sapiens
ugcggccucacagcugggccugucccagcaca

SEQ ID NO: 155537 - RNA, 32 nt, Homo Sapiens
gccuccccuucacuggggacugggguuuucgc

SEQ ID NO: 155538 - RNA, 32 nt, Homo Sapiens
uaguguaauuagaaaaaguacaauauucuaau

SEQ ID NO: 155539 - RNA, 32 nt, Homo Sapiens
acucuggggcucaagcaguucucccaccagcc

SEQ ID NO: 155540 - RNA, 32 nt, Homo Sapiens
uuauaugggguuguugucucauuuuggucugu

SEQ ID NO: 155541 - RNA, 32 nt, Homo Sapiens
gaggcugguuuugcucccacucuuaguugcug

SEQ ID NO: 155542 - RNA, 28 nt, Homo Sapiens
aauuagaaagauuaaaaagagaugacag

SEQ ID NO: 155543 - RNA, 32 nt, Homo Sapiens
uccagccuaggggacaguuagaccucagaaga

SEQ ID NO: 155544 - RNA, 32 nt, Homo Sapiens
auggggguuugugccagaagagagguaaaacu

SEQ ID NO: 155545 - RNA, 32 nt, Homo Sapiens
uuacuuuuuucugcacuuauaacugauuuggu

SEQ ID NO: 155546 - RNA, 32 nt, Homo Sapiens
caaaaguauuuucauaacccauuugaaaccaa

SEQ ID NO: 155547 - RNA, 32 nt, Homo Sapiens
ugcugcuuacccagcccccucuggguucgagg

SEQ ID NO: 155548 - RNA, 31 nt, Homo Sapiens
ugccuuggccaggccucucagaauugaguga

SEQ ID NO: 155549 - RNA, 31 nt, Homo Sapiens
gaaagcgagcgcagcuccucuggacugcugg

SEQ ID NO: 155550 - RNA, 32 nt, Homo Sapiens
cgccgccgcccucaucuuccccgggggcuccg

SEQ ID NO: 155551 - RNA, 32 nt, Homo Sapiens
gcacauuuaccagaagaaucugggaauggauu

SEQ ID NO: 155552 - RNA, 32 nt, Homo Sapiens
cauguuggcaaugaggaacuagcugauauuua

SEQ ID NO: 155553 - RNA, 30 nt, Homo Sapiens
ugagaagagaagcuauuuuugucucugggu

SEQ ID NO: 155554 - RNA, 32 nt, Homo Sapiens
gggaaugaucucuggaggcagaaugagggagu

SEQ ID NO: 155555 - RNA, 32 nt, Homo Sapiens
gaggccagcugggaggggagggggccgugggg

SEQ ID NO: 155556 - RNA, 32 nt, Homo Sapiens
augaggugucauuuuuugauaaucuugaaugg

SEQ ID NO: 155557 - RNA, 32 nt, Homo Sapiens
agugauauucauuuggcagaacaucauaaaca

SEQ ID NO: 155558 - RNA, 32 nt, Homo Sapiens
uggccugcgguugggagggaauggggcguggg

SEQ ID NO: 155559 - RNA, 32 nt, Homo Sapiens
ccuugucucuaguggacauuugagaucagaga

SEQ ID NO: 155560 - RNA, 32 nt, Homo Sapiens
ucuugcaaacaaucguuuuuuacuucauuauc

SEQ ID NO: 155561 - RNA, 32 nt, Homo Sapiens
caaguaaacugcauguauuuaauuguauugaa

SEQ ID NO: 155562 - RNA, 32 nt, Homo Sapiens
ucaguuaugaaauuauuauaauucagccuuca

SEQ ID NO: 155563 - RNA, 32 nt, Homo Sapiens
acauacuuuuuuuuuucuucaaauaaaaaagu

SEQ ID NO: 155564 - RNA, 32 nt, Homo Sapiens
guucaaucucaauaagaccucgcauuauguau

SEQ ID NO: 155565 - RNA, 32 nt, Homo Sapiens
gguggggccauccacacccucuccuugucaca

SEQ ID NO: 155566 - RNA, 32 nt, Homo Sapiens
gcgcccagcgggcagggccggaggagguguag

SEQ ID NO: 155567 - RNA, 32 nt, Homo Sapiens
gggcugggcuccuggcugggaggcgccaaggu

SEQ ID NO: 155568 - RNA, 32 nt, Homo Sapiens
ggugggcggcggcguggaccggcgacgggugg

SEQ ID NO: 155569 - RNA, 32 nt, Homo Sapiens
auuuugcuacuacuccacacuacuuagacauc

SEQ ID NO: 155570 - RNA, 32 nt, Homo Sapiens
guaugaggcuggggcggggcuggagguggcgc

SEQ ID NO: 155571 - RNA, 32 nt, Homo Sapiens
gacgccugccccaccauguccacaucugugaa

SEQ ID NO: 155572 - RNA, 32 nt, Homo Sapiens
cucuccucucuccccagucucuagggcugccu

SEQ ID NO: 155573 - RNA, 32 nt, Homo Sapiens
gaaccauugcccgugccccuggucacugacuu

SEQ ID NO: 155574 - RNA, 32 nt, Homo Sapiens
caaguggaacuaccaucuuuuauucuuaauaa

SEQ ID NO: 155575 - RNA, 32 nt, Homo Sapiens
uuauuuuuccacuugccaucuuucucuauauc

SEQ ID NO: 155576 - RNA, 32 nt, Homo Sapiens
cacgagggcgaccggcgcgucgugcggggcug

SEQ ID NO: 155577 - RNA, 32 nt, Homo Sapiens
agugggagcagcuucuugggcugagugcagcc

SEQ ID NO: 155578 - RNA, 30 nt, Homo Sapiens
aggucucagcagaugggggagcugguaggc

SEQ ID NO: 155579 - RNA, 32 nt, Homo Sapiens
cgcggagggaguagggcggggaggagcucgcc

SEQ ID NO: 155580 - RNA, 31 nt, Homo Sapiens
cgcaaccucaaugacaccuuucugauggucu

SEQ ID NO: 155581 - RNA, 32 nt, Homo Sapiens
uccggccguggcggccgaggcgccggcugcuc

SEQ ID NO: 155582 - RNA, 32 nt, Homo Sapiens
gguggaguuaguauauagguccaagcuuuuuu

SEQ ID NO: 155583 - RNA, 32 nt, Homo Sapiens
ccgcggcagucgggaccgggagaaucggacag

SEQ ID NO: 155584 - RNA, 32 nt, Homo Sapiens
uuuaaaucaaggaaaggcucauuuaaaacagg

SEQ ID NO: 155585 - RNA, 32 nt, Homo Sapiens
uggauugggcagaacugaugagaugacguaau

SEQ ID NO: 155586 - RNA, 32 nt, Homo Sapiens
uaccaaaaugcaccucuuucauaagugaguua

SEQ ID NO: 155587 - RNA, 32 nt, Homo Sapiens
uccaguggauagacuuauauggcugcaaacau

SEQ ID NO: 155588 - RNA, 32 nt, Homo Sapiens
gacagcuuuuugcaugggauaggagcaugucu

SEQ ID NO: 155589 - RNA, 32 nt, Homo Sapiens
cuuguagcaaaauaaagaugugcccuuauuuu

SEQ ID NO: 155590 - RNA, 32 nt, Homo Sapiens
ucuguuuuuuaaauauauuuuccaaucuugaa

SEQ ID NO: 155591 - RNA, 32 nt, Homo Sapiens
caacuggcuggcccuccuccucuucccuggcc

SEQ ID NO: 155592 - RNA, 32 nt, Homo Sapiens
cauuaugaaaauauaaucugucggguuguuuu

SEQ ID NO: 155593 - RNA, 32 nt, Homo Sapiens
ucucuaucuucagaaacuucaguuacauguaa

SEQ ID NO: 155594 - RNA, 32 nt, Homo Sapiens
auagcucuggaauaaacuuuggauuuuuaauu

SEQ ID NO: 155595 - RNA, 32 nt, Homo Sapiens
gugaagaugucgguggacucuaugauguacuc

SEQ ID NO: 155596 - RNA, 32 nt, Homo Sapiens
ugcucacucuuugccuucuccuucucauccua

SEQ ID NO: 155597 - RNA, 32 nt, Homo Sapiens
ggaggauaauuucuuaaaccacauuguuuuaa

SEQ ID NO: 155598 - RNA, 32 nt, Homo Sapiens
cuccacguugucuuaagaaacucuauucugcu

SEQ ID NO: 155599 - RNA, 32 nt, Homo Sapiens
cauggagaaaucuggucaagacaucagagacu

SEQ ID NO: 155600 - RNA, 32 nt, Homo Sapiens
cugggaaaacuugggaauggcaaccaaccaaa

SEQ ID NO: 155601 - RNA, 32 nt, Homo Sapiens
auaacaacacagaaauaacaagggcagacuuu

SEQ ID NO: 155602 - RNA, 32 nt, Homo Sapiens
acgccgugccgugggccuggggucgggggagc

SEQ ID NO: 155603 - RNA, 32 nt, Homo Sapiens
ucccuaugugcguauuuucucuuucuuccugu

SEQ ID NO: 155604 - RNA, 32 nt, Homo Sapiens
cuacggcuuccagucccggcguguggagugug

SEQ ID NO: 155605 - RNA, 29 nt, Homo Sapiens
agccauggcgggcgcguuggugcggaaag

SEQ ID NO: 155606 - RNA, 32 nt, Homo Sapiens
cgagccagaaacccgaugccccgcccccuaac

SEQ ID NO: 155607 - RNA, 32 nt, Homo Sapiens
cacuaucaugggcugggggagcucccgccucg

SEQ ID NO: 155608 - RNA, 32 nt, Homo Sapiens
caaucguaaaugcuacuauuccuaagauaucu

SEQ ID NO: 155609 - RNA, 32 nt, Homo Sapiens
aaacaucucugccugccuuuauguucggaucu

SEQ ID NO: 155610 - RNA, 32 nt, Homo Sapiens
ggggaugggguggaaucugaggggugagccuu

SEQ ID NO: 155611 - RNA, 32 nt, Homo Sapiens
gaauucccgcagagccgaagaggugcaaggga

SEQ ID NO: 155612 - RNA, 32 nt, Homo Sapiens
augcccccuacacuccuccccaccucaaccag

SEQ ID NO: 155613 - RNA, 32 nt, Homo Sapiens
uggauuucagcucagugacacccauuucagac

SEQ ID NO: 155614 - RNA, 32 nt, Homo Sapiens
cuaauuguuuuugucuaggucaagaaugaaug

SEQ ID NO: 155615 - RNA, 32 nt, Homo Sapiens
aaguucuccccauuuuaguuuucuaggacuga

SEQ ID NO: 155616 - RNA, 32 nt, Homo Sapiens
ugggccgcgccgcgccgcagccccacacgcca

SEQ ID NO: 155617 - RNA, 32 nt, Homo Sapiens
uugagccgcgucgagcuccccugggaccugug

SEQ ID NO: 155618 - RNA, 32 nt, Homo Sapiens
aggccgcagcgggugcgggcgccgacgggcga

SEQ ID NO: 155619 - RNA, 32 nt, Homo Sapiens
uauuuuguuguccuuuaugguucuuuaggaaa

SEQ ID NO: 155620 - RNA, 32 nt, Homo Sapiens
uaaaauaaaguugguuuuguguucaggcuagu

SEQ ID NO: 155621 - RNA, 28 nt, Homo Sapiens
gaaguggggcggccgggugggcuacgag

SEQ ID NO: 155622 - RNA, 32 nt, Homo Sapiens
ucugcagaaaaagaaauugaggcaaggggcaa

SEQ ID NO: 155623 - RNA, 32 nt, Homo Sapiens
gacccagggaagcggaggagccuggcggccac

SEQ ID NO: 155624 - RNA, 32 nt, Homo Sapiens
cuugaagcuuguaucugauaucagcacuggau

SEQ ID NO: 155625 - RNA, 32 nt, Homo Sapiens
gcgaugcuguacaggucucuguaaaaaguccu

SEQ ID NO: 155626 - RNA, 30 nt, Homo Sapiens
acaauaugaagcauacguacaagcuuugga

SEQ ID NO: 155627 - RNA, 32 nt, Homo Sapiens
aggcuacacacacauauggagcaccccauccc

SEQ ID NO: 155628 - RNA, 32 nt, Homo Sapiens
aagugcuggcccagcccucugagcgcuccucg

SEQ ID NO: 155629 - RNA, 32 nt, Homo Sapiens
ccucgcacuggcacgcaagucucagcaauucc

SEQ ID NO: 155630 - RNA, 32 nt, Homo Sapiens
aggaccaaaugcucuuugucuauggaguuaua

SEQ ID NO: 155631 - RNA, 32 nt, Homo Sapiens
ugacagagaugaaugugccaagcaaaaccaca

SEQ ID NO: 155632 - RNA, 32 nt, Homo Sapiens
gaaaggaugagaagggagagguccuggucggg

SEQ ID NO: 155633 - RNA, 32 nt, Homo Sapiens
ccuucaaaaaaauuauuuuuuaaaacacagag

SEQ ID NO: 155634 - RNA, 32 nt, Homo Sapiens
ucaagugccucccagccucggcucagcacauc

SEQ ID NO: 155635 - RNA, 32 nt, Homo Sapiens
gaccagcuggaaccaccaucaagaugucccca

SEQ ID NO: 155636 - RNA, 32 nt, Homo Sapiens
gaaaccugccaugcugcucuuccuccucucug

SEQ ID NO: 155637 - RNA, 32 nt, Homo Sapiens
cucugcugguggugggguugcugcugacaacc

SEQ ID NO: 155638 - RNA, 32 nt, Homo Sapiens
gcugcaccugaacauuucuagugucacccucc

SEQ ID NO: 155639 - RNA, 32 nt, Homo Sapiens
aaauaaugauucaaugugaauuuuaaaaugca

SEQ ID NO: 155640 - RNA, 32 nt, Homo Sapiens
cccggccgcgcgcccugaccgcaagugaauuc

SEQ ID NO: 155641 - RNA, 32 nt, Homo Sapiens
aggaugcaacaaauguggccaagccuaucaaa

SEQ ID NO: 155642 - RNA, 32 nt, Homo Sapiens
auuguuggaaaacaucuucuguggauuaacuc

SEQ ID NO: 155643 - RNA, 32 nt, Homo Sapiens
ggacaggaaaauugcaaaguacaauuaacauu

SEQ ID NO: 155644 - RNA, 32 nt, Homo Sapiens
aguugccucuuuuuagccauuuucauggcugg

SEQ ID NO: 155645 - RNA, 32 nt, Homo Sapiens
acagcgacguggaacacacuucaguccagugc

SEQ ID NO: 155646 - RNA, 32 nt, Homo Sapiens
aggacuuggccaugacugucuccugucccugu

SEQ ID NO: 155647 - RNA, 32 nt, Homo Sapiens
ucauaugaaaauguauuuuuguacauaaagag

SEQ ID NO: 155648 - RNA, 32 nt, Homo Sapiens
guguuuaaggaugaacuaaauauuuuaauuga

SEQ ID NO: 155649 - RNA, 32 nt, Homo Sapiens
uggcacacagagcugacaccauauuccagggc

SEQ ID NO: 155650 - RNA, 30 nt, Homo Sapiens
cccucaggcaggcgccgguggcuucuguca

SEQ ID NO: 155651 - RNA, 32 nt, Homo Sapiens
ccuuuucuuugaccagaucuuucucuucccug

SEQ ID NO: 155652 - RNA, 32 nt, Homo Sapiens
cuggaagggucaacaucuuuuacauucugcaa

SEQ ID NO: 155653 - RNA, 32 nt, Homo Sapiens
caccagucccccaauuauuuuucuaaggaugu

SEQ ID NO: 155654 - RNA, 32 nt, Homo Sapiens
ugauagugagugaguucucaugagaucugguu

SEQ ID NO: 155655 - RNA, 32 nt, Homo Sapiens
aacuaacuccucaacagcaacaucucaucaga

SEQ ID NO: 155656 - RNA, 32 nt, Homo Sapiens
gggugaaaggcacuucugacaugcugguggca

SEQ ID NO: 155657 - RNA, 32 nt, Homo Sapiens
aaaccagugucuacgcaggcggagcugaacgg

SEQ ID NO: 155658 - RNA, 32 nt, Homo Sapiens
gcugacccacccaauaacugguuggaggagga

SEQ ID NO: 155659 - RNA, 32 nt, Homo Sapiens
auggacaguguguaucacuggaggaagacgug

SEQ ID NO: 155660 - RNA, 32 nt, Homo Sapiens
ucuaugucaauacaaaaauacaucacagccuu

SEQ ID NO: 155661 - RNA, 32 nt, Homo Sapiens
caucucugucuggggcuacagaauaggguggc

SEQ ID NO: 155662 - RNA, 32 nt, Homo Sapiens
agagggugguggccuuuggaaccgucgugaag

SEQ ID NO: 155663 - RNA, 32 nt, Homo Sapiens
caccugucauucguucguccucagugcagggc

SEQ ID NO: 155664 - RNA, 32 nt, Homo Sapiens
aaaucagauaaaaacuacuuggugaaaugacu

SEQ ID NO: 155665 - RNA, 32 nt, Homo Sapiens
uuuaguccauagugguacuauuuugaugauau

SEQ ID NO: 155666 - RNA, 32 nt, Homo Sapiens
cauccucuugcaacuucuuuuuucuucuuugu

SEQ ID NO: 155667 - RNA, 32 nt, Homo Sapiens
uuucacccaagagcuguccuggugaccaaaaa

SEQ ID NO: 155668 - RNA, 32 nt, Homo Sapiens
ccuggggaagcaggucucaauucugaauagcc

SEQ ID NO: 155669 - RNA, 32 nt, Homo Sapiens
aaagauuaaaauuggguaacauuucuuuuucc

SEQ ID NO: 155670 - RNA, 32 nt, Homo Sapiens
gcgguugccucgggacgguucucgccuccucc

SEQ ID NO: 155671 - RNA, 32 nt, Homo Sapiens
cuucuugauaucuaugauagauaauaaacaag

SEQ ID NO: 155672 - RNA, 32 nt, Homo Sapiens
uuuuucccacuuucuaauguuuaaaucccaua

SEQ ID NO: 155673 - RNA, 32 nt, Homo Sapiens
gcucugggaaaggucucuacgugacgccaagg

SEQ ID NO: 155674 - RNA, 32 nt, Homo Sapiens
guucagcccagcugaggccugucugcagaauc

SEQ ID NO: 155675 - RNA, 32 nt, Homo Sapiens
gacagggucuaauucucucacccaggugcaaa

SEQ ID NO: 155676 - RNA, 27 nt, Homo Sapiens
ccccgcucugccaucagccccugcugc

SEQ ID NO: 155677 - RNA, 32 nt, Homo Sapiens
uauacaucuguaaauaaauggaauguuuuuaa

SEQ ID NO: 155678 - RNA, 32 nt, Homo Sapiens
gccgcugcccagcagagcuggcuucugggucc

SEQ ID NO: 155679 - RNA, 32 nt, Homo Sapiens
uaaagguugaggaaacaagcccagagagguua

SEQ ID NO: 155680 - RNA, 32 nt, Homo Sapiens
uaggggcgcugugggcgccgcgcccgccgcug

SEQ ID NO: 155681 - RNA, 32 nt, Homo Sapiens
acgacaaggaggagccggaagaugcggacgag

SEQ ID NO: 155682 - RNA, 32 nt, Homo Sapiens
gcuuaugugcacacucugaaaccuccauguag

SEQ ID NO: 155683 - RNA, 32 nt, Homo Sapiens
ugucuugaaccacgugggcaacuguuucaggg

SEQ ID NO: 155684 - RNA, 32 nt, Homo Sapiens
aauauaagaaacaaagucaacugaaucuuuua

SEQ ID NO: 155685 - RNA, 32 nt, Homo Sapiens
uucccagguggccuuagaaagcaaagcuugua

SEQ ID NO: 155686 - RNA, 32 nt, Homo Sapiens
ggaacaggaagucggcacaucuccaggucucc

SEQ ID NO: 155687 - RNA, 32 nt, Homo Sapiens
aauagaucaaggagacugcauucccugcccug

SEQ ID NO: 155688 - RNA, 32 nt, Homo Sapiens
cugccagauuuggaugauaugauauucagagg

SEQ ID NO: 155689 - RNA, 32 nt, Homo Sapiens
ucuuccuggugauucuguuuugcugcuuuggc

SEQ ID NO: 155690 - RNA, 32 nt, Homo Sapiens
acaaacaaaauuuuuguauaaacuacuauucc

SEQ ID NO: 155691 - RNA, 32 nt, Homo Sapiens
cauugaggcaagcagcaacauuggagggggag

SEQ ID NO: 155692 - RNA, 32 nt, Homo Sapiens
uguucuuugagggauucugaugugcuaggcau

SEQ ID NO: 155693 - RNA, 32 nt, Homo Sapiens
ucgggcccgggcggaaagugccugcggggggc

SEQ ID NO: 155694 - RNA, 32 nt, Homo Sapiens
gaaaccacgucucuauuaaaaauagaaaaauu

SEQ ID NO: 155695 - RNA, 32 nt, Homo Sapiens
ucuccucagaacuccuucuccaacccuggagc

SEQ ID NO: 155696 - RNA, 32 nt, Homo Sapiens
gauucaguuggcggaauuuuacuagugugugu

SEQ ID NO: 155697 - RNA, 32 nt, Homo Sapiens
cgagccggccgcgcuccgaacggcgccucccg

SEQ ID NO: 155698 - RNA, 32 nt, Homo Sapiens
cucaaaaaaugcuauuauucucuuuuuacaga

SEQ ID NO: 155699 - RNA, 32 nt, Homo Sapiens
acuuaugcaauaagauaaagguacccuugccu

SEQ ID NO: 155700 - RNA, 32 nt, Homo Sapiens
ggggauccgccuucugcccccgagcccccagc

SEQ ID NO: 155701 - RNA, 32 nt, Homo Sapiens
auuccauagcucacugaggauuuuaaaauuau

SEQ ID NO: 155702 - RNA, 32 nt, Homo Sapiens
ccguggaacuuguauucgacaagcauuuggaa

SEQ ID NO: 155703 - RNA, 29 nt, Homo Sapiens
aaaagggauauaaaggcaccgagcugaug

SEQ ID NO: 155704 - RNA, 32 nt, Homo Sapiens
auuugcauacugaaaaaggaaugccaccugcc

SEQ ID NO: 155705 - RNA, 32 nt, Homo Sapiens
cugcagggacgccccugccuagcagccuucgc

SEQ ID NO: 155706 - RNA, 32 nt, Homo Sapiens
cgcccaaauagaaucauguuuauuuuuucagc

SEQ ID NO: 155707 - RNA, 32 nt, Homo Sapiens
cccacgcccucccuggcccccgccugggccuc

SEQ ID NO: 155708 - RNA, 30 nt, Homo Sapiens
ggagucgucccgcggccgccggcggcaagg

SEQ ID NO: 155709 - RNA, 32 nt, Homo Sapiens
aacaggaggaugaacuugcugaaaauaaaacu

SEQ ID NO: 155710 - RNA, 32 nt, Homo Sapiens
uggguuuauuuuuguaggacuuaauggcuaag

SEQ ID NO: 155711 - RNA, 32 nt, Homo Sapiens
uagacacccaaguggaaggugcuacaaccuga

SEQ ID NO: 155712 - RNA, 32 nt, Homo Sapiens
cugcagauacaugacuaacaaggauagcuggc

SEQ ID NO: 155713 - RNA, 32 nt, Homo Sapiens
ggagcucuuuugcuuggauucccaucauggcc

SEQ ID NO: 155714 - RNA, 32 nt, Homo Sapiens
agaauuugaggaacuggaugugacugucauug

SEQ ID NO: 155715 - RNA, 32 nt, Homo Sapiens
cagccccgggucauccucuccuauacuagggc

SEQ ID NO: 155716 - RNA, 32 nt, Homo Sapiens
cagaacacgcagcagcagcagcaguuagcgcu

SEQ ID NO: 155717 - RNA, 32 nt, Homo Sapiens
ggcgcuaccauggcguuuggcaagagucaccg

SEQ ID NO: 155718 - RNA, 32 nt, Homo Sapiens
gccgggggcagacgggcggggguuggggcgga

SEQ ID NO: 155719 - RNA, 32 nt, Homo Sapiens
guacucagcuggcccacuccacagccaggccu

SEQ ID NO: 155720 - RNA, 32 nt, Homo Sapiens
augcugcaguuucaaaauuuauauuaaauuau

SEQ ID NO: 155721 - RNA, 32 nt, Homo Sapiens
agcugggugcgguccgcgcagcugcaguaagg

SEQ ID NO: 155722 - RNA, 32 nt, Homo Sapiens
aguguuccuggccaucuuugcuacuuuccuag

SEQ ID NO: 155723 - RNA, 32 nt, Homo Sapiens
augcuuuggggcuccugaaacaccucguuuug

SEQ ID NO: 155724 - RNA, 31 nt, Homo Sapiens
acagaaaugguagcccugcugcuggaguucg

SEQ ID NO: 155725 - RNA, 32 nt, Homo Sapiens
auccggacaucauuuccaaccucaauaucuaa

SEQ ID NO: 155726 - RNA, 32 nt, Homo Sapiens
ucgcucucgggcggggcggcggcgacgcggac

SEQ ID NO: 155727 - RNA, 32 nt, Homo Sapiens
aagccaaugucugcgaucuuuuuuuggauauu

SEQ ID NO: 155728 - RNA, 32 nt, Homo Sapiens
aauggcggggacccggggcuugaugcugcuug

SEQ ID NO: 155729 - RNA, 32 nt, Homo Sapiens
aaccaacuccagguagagagccgcuccuuaca

SEQ ID NO: 155730 - RNA, 32 nt, Homo Sapiens
cgugaacaugaaaguacuucucauguguccuu

SEQ ID NO: 155731 - RNA, 32 nt, Homo Sapiens
uuagcuuugcuuccuuggguuuuugaaacaug

SEQ ID NO: 155732 - RNA, 32 nt, Homo Sapiens
gcuguuccuuggccccgcuccccgcccgcaaa

SEQ ID NO: 155733 - RNA, 32 nt, Homo Sapiens
aaguagcauaagugaagcaugauccaaaauac

SEQ ID NO: 155734 - RNA, 32 nt, Homo Sapiens
cagggggcagggagaggagggcggcgggagcu

SEQ ID NO: 155735 - RNA, 32 nt, Homo Sapiens
uuccagaagaaccaguggaagaauuuaaauuu

SEQ ID NO: 155736 - RNA, 32 nt, Homo Sapiens
auauucuuugaaaaaugaguaguauggaauau

SEQ ID NO: 155737 - RNA, 32 nt, Homo Sapiens
aucagggauguauacgcuuccuuggggcagac

SEQ ID NO: 155738 - RNA, 32 nt, Homo Sapiens
gcugcugguagccaggggaggggucugcacag

SEQ ID NO: 155739 - RNA, 32 nt, Homo Sapiens
cggacgcucgcgggucucggaacgcaucccgc

SEQ ID NO: 155740 - RNA, 32 nt, Homo Sapiens
ccuuuccuagcaugcacacaacauccucucuu

SEQ ID NO: 155741 - RNA, 32 nt, Homo Sapiens
ugagccacccucggagacccccgcgcugggga

SEQ ID NO: 155742 - RNA, 32 nt, Homo Sapiens
agugaggcagugagaugcugcugcuguggauu

SEQ ID NO: 155743 - RNA, 32 nt, Homo Sapiens
uacugccccaaaggcguucuccaggugacuug

SEQ ID NO: 155744 - RNA, 32 nt, Homo Sapiens
auccaggguucaccuaagcugcacaguuccug

SEQ ID NO: 155745 - RNA, 32 nt, Homo Sapiens
cacggccgagaacacaucuucgccgccgagcu

SEQ ID NO: 155746 - RNA, 32 nt, Homo Sapiens
gcagggacaggaccucaccuccccgaaagcau

SEQ ID NO: 155747 - RNA, 32 nt, Homo Sapiens
aggccugugaauggcagccugaggaaguuuug

SEQ ID NO: 155748 - RNA, 32 nt, Homo Sapiens
gcaguuguuuuaacuaguucucgaacuuuacu

SEQ ID NO: 155749 - RNA, 32 nt, Homo Sapiens
gaguccauuggguucagcuuugaaagaggaau

SEQ ID NO: 155750 - RNA, 32 nt, Homo Sapiens
ccagaccuucugcugacuaagaaccacccagc

SEQ ID NO: 155751 - RNA, 32 nt, Homo Sapiens
ccgagugauuuccaucucugguaaaguuacac

SEQ ID NO: 155752 - RNA, 32 nt, Homo Sapiens
cagucaggccccagcgugccuccaucccagug

SEQ ID NO: 155753 - RNA, 32 nt, Homo Sapiens
ggcuugcugaagccagcucugagucacagggu

SEQ ID NO: 155754 - RNA, 32 nt, Homo Sapiens
ccgcgccccgucccgccucucucccgcccagc

SEQ ID NO: 155755 - RNA, 32 nt, Homo Sapiens
ugccgcccugucgccaagaggacuggggaagg

SEQ ID NO: 155756 - RNA, 32 nt, Homo Sapiens
uccucagcccccgauccuggcuccuccucggc

SEQ ID NO: 155757 - RNA, 32 nt, Homo Sapiens
uaaaucuuaacaaagaauaacuucucaagaua

SEQ ID NO: 155758 - RNA, 32 nt, Homo Sapiens
ugcagcagaauuauauauauguauaggaaaaa

SEQ ID NO: 155759 - RNA, 32 nt, Homo Sapiens
uugguuuucuacuccuccucagccucauaaag

SEQ ID NO: 155760 - RNA, 32 nt, Homo Sapiens
aagaacagcccacagcagcacucgaguuugcu

SEQ ID NO: 155761 - RNA, 32 nt, Homo Sapiens
gugaaaaaguuuuuaauaaacaccuauuaccu

SEQ ID NO: 155762 - RNA, 32 nt, Homo Sapiens
gcauggaauuuguaaguuuaugucuaaagagc

SEQ ID NO: 155763 - RNA, 32 nt, Homo Sapiens
cugguuguacuaaauaaugaugaccucugcug

SEQ ID NO: 155764 - RNA, 32 nt, Homo Sapiens
gugggguuggagcccccacacagacuacucac

SEQ ID NO: 155765 - RNA, 32 nt, Homo Sapiens
gggaucguguaccggcggggcgggggccgugg

SEQ ID NO: 155766 - RNA, 32 nt, Homo Sapiens
ggagacuuggggucuuccuggcucacuaucuc

SEQ ID NO: 155767 - RNA, 32 nt, Homo Sapiens
caguuaagcagugccacacuacaggguagaua

SEQ ID NO: 155768 - RNA, 32 nt, Homo Sapiens
agucggggacagagacacaugugccccccacc

SEQ ID NO: 155769 - RNA, 32 nt, Homo Sapiens
uaugaaugugcaucuuuuuuuucuuuuuuuaa

SEQ ID NO: 155770 - RNA, 32 nt, Homo Sapiens
ucaucuuaauuucaaaaugagacucauauuuu

SEQ ID NO: 155771 - RNA, 31 nt, Homo Sapiens
gaaaugcagcgcagauccuuacggcugaugc

SEQ ID NO: 155772 - RNA, 32 nt, Homo Sapiens
gauauuaaagauuggaauguguuguaaguuuc

SEQ ID NO: 155773 - RNA, 32 nt, Homo Sapiens
aaaauaccaaauaacagaagaucgcauugcag

SEQ ID NO: 155774 - RNA, 32 nt, Homo Sapiens
agccacagcauuuggugacuagggggaagcca

SEQ ID NO: 155775 - RNA, 32 nt, Homo Sapiens
ccucugcgccugcgccgccgggaugcugggga

SEQ ID NO: 155776 - RNA, 32 nt, Homo Sapiens
ugcugggcugccuggcacugcccgcuugccgg

SEQ ID NO: 155777 - RNA, 32 nt, Homo Sapiens
gaauugaaugggguguguugccaggcacccgc

SEQ ID NO: 155778 - RNA, 32 nt, Homo Sapiens
aauauugacaagugucuuuuugaaauaaagaa

SEQ ID NO: 155779 - RNA, 32 nt, Homo Sapiens
ucucucagcuggaacuggcccgacagaagaaa

SEQ ID NO: 155780 - RNA, 32 nt, Homo Sapiens
cccaaccucaucugucagaaauccaugugggc

SEQ ID NO: 155781 - RNA, 32 nt, Homo Sapiens
ucgcuggccuaagcgucaggcuuguuuucaug

SEQ ID NO: 155782 - RNA, 32 nt, Homo Sapiens
ccauuuuucagauaaagaaacaaaaucuuagg

SEQ ID NO: 155783 - RNA, 32 nt, Homo Sapiens
uaaagcagcaaaugcaggaaggcugucucgcc

SEQ ID NO: 155784 - RNA, 32 nt, Homo Sapiens
ccacccucaccaucaguacucccuuccaaagu

SEQ ID NO: 155785 - RNA, 32 nt, Homo Sapiens
uaggacauuuuuccuacaguaacaaaacagga

SEQ ID NO: 155786 - RNA, 32 nt, Homo Sapiens
aaaguugaacaaagaugaacuaauguauuaca

SEQ ID NO: 155787 - RNA, 32 nt, Homo Sapiens
acucccagcugaggcucagccuggcagugcuu

SEQ ID NO: 155788 - RNA, 32 nt, Homo Sapiens
gguuccucuggagacauuuuugaaagcagcuc

SEQ ID NO: 155789 - RNA, 32 nt, Homo Sapiens
ugucucugagaucuuugugucugggaaugccu

SEQ ID NO: 155790 - RNA, 30 nt, Homo Sapiens
cuuacaggcaggcgccccgggcagauccgg

SEQ ID NO: 155791 - RNA, 32 nt, Homo Sapiens
cguuugauuuaaaaguaaauucuaguucuuaa

SEQ ID NO: 155792 - RNA, 32 nt, Homo Sapiens
ucuuaguuugaccaugaaaaugucuauagaau

SEQ ID NO: 155793 - RNA, 32 nt, Homo Sapiens
cugugcuguccugaugguugcugcugguguug

SEQ ID NO: 155794 - RNA, 32 nt, Homo Sapiens
agccauugcgcugaacaguauuugaguuacca

SEQ ID NO: 155795 - RNA, 32 nt, Homo Sapiens
gagcauauauuacuaucuuuaagcauuuaaaa

SEQ ID NO: 155796 - RNA, 32 nt, Homo Sapiens
cggacagaucggagccgagcggggccgggcgg

SEQ ID NO: 155797 - RNA, 32 nt, Homo Sapiens
cauacucaaugagcuuccagcgcaauguccga

SEQ ID NO: 155798 - RNA, 32 nt, Homo Sapiens
ugaauaucaaggaagacagccauagucucuua

SEQ ID NO: 155799 - RNA, 32 nt, Homo Sapiens
uuacuuauuacagcuagaggcaucauggaccg

SEQ ID NO: 155800 - RNA, 32 nt, Homo Sapiens
cgcgcagcgugcacgaggaguuuuggcgcccg

SEQ ID NO: 155801 - RNA, 32 nt, Homo Sapiens
ccaguuucugugccugcagagagacgaagccc

SEQ ID NO: 155802 - RNA, 32 nt, Homo Sapiens
uuuguuuuucuuuuuuaauuagauaaucacac

SEQ ID NO: 155803 - RNA, 32 nt, Homo Sapiens
ccagagaccaacucuuuuuuauuuuauuuuau

SEQ ID NO: 155804 - RNA, 32 nt, Homo Sapiens
ggaggccaaggcgggcggauugccugagcuca

SEQ ID NO: 155805 - RNA, 32 nt, Homo Sapiens
gggugacauuugggagacaugugacauuuaua

SEQ ID NO: 155806 - RNA, 32 nt, Homo Sapiens
ugugcaaaacaaauguaaauauuuucuugaga

SEQ ID NO: 155807 - RNA, 30 nt, Homo Sapiens
gacauggcgcccggugcccuaggagcccuc

SEQ ID NO: 155808 - RNA, 32 nt, Homo Sapiens
ucucucuugaguugcugauaggagaugugagu

SEQ ID NO: 155809 - RNA, 32 nt, Homo Sapiens
gaacucuuuucuacuuuuuuuuuuuuuuuuuu

SEQ ID NO: 155810 - RNA, 32 nt, Homo Sapiens
ucaucuagcauuagguauaucucccagugcua

SEQ ID NO: 155811 - RNA, 32 nt, Homo Sapiens
aacauuuauacuagauuuuuuauuuccacuua

SEQ ID NO: 155812 - RNA, 32 nt, Homo Sapiens
uuggcuuuccugucugucuauccugagcgggu

SEQ ID NO: 155813 - RNA, 32 nt, Homo Sapiens
gcaugaggcaggggaaggaaaagcagagcuua

SEQ ID NO: 155814 - RNA, 32 nt, Homo Sapiens
acugagggcgccuaacucuacagccaggcagc

SEQ ID NO: 155815 - RNA, 32 nt, Homo Sapiens
uuucauuuugguuuuucaccaaccuuccuuug

SEQ ID NO: 155816 - RNA, 32 nt, Homo Sapiens
gcucuguguacacugugacugccgugugugcu

SEQ ID NO: 155817 - RNA, 32 nt, Homo Sapiens
cgcauggcaggagucccggccucggagccaug

SEQ ID NO: 155818 - RNA, 32 nt, Homo Sapiens
ggcuauugugaaaaaugaugcuauaaaugugg

SEQ ID NO: 155819 - RNA, 32 nt, Homo Sapiens
gagcucuggcuaaggcacaguuuucuagaaau

SEQ ID NO: 155820 - RNA, 32 nt, Homo Sapiens
ccaucucgcccgcuccugacuuccucuacuug

SEQ ID NO: 155821 - RNA, 32 nt, Homo Sapiens
gagguguuggguuuuuuuuuuaaguuuuuauu

SEQ ID NO: 155822 - RNA, 32 nt, Homo Sapiens
uuggcgcugucauggcgggugugcugaagaag

SEQ ID NO: 155823 - RNA, 32 nt, Homo Sapiens
gacccucuggucuacccccacccccuaauuuu

SEQ ID NO: 155824 - RNA, 32 nt, Homo Sapiens
gaaucuuccuucccucccuuucugauacagug

SEQ ID NO: 155825 - RNA, 32 nt, Homo Sapiens
gaagggggcgucucgucagcuggucccugcua

SEQ ID NO: 155826 - RNA, 32 nt, Homo Sapiens
caggagggccuugcagaguccugcaccaggcc

SEQ ID NO: 155827 - RNA, 32 nt, Homo Sapiens
aaccuaggccccagguaucacugcacuuuaag

SEQ ID NO: 155828 - RNA, 32 nt, Homo Sapiens
uuccagcagaacuggacuaauucuguggaccc

SEQ ID NO: 155829 - RNA, 32 nt, Homo Sapiens
ucucagaaaaggaagauugaauuagcguguuu

SEQ ID NO: 155830 - RNA, 32 nt, Homo Sapiens
cuuaaccuuuuauuuccuguccuuccuugaaa

SEQ ID NO: 155831 - RNA, 32 nt, Homo Sapiens
aagagagagcgcacacgcacacacccgccgcg

SEQ ID NO: 155832 - RNA, 32 nt, Homo Sapiens
gggucccuguagauauuguguacaccaugccc

SEQ ID NO: 155833 - RNA, 32 nt, Homo Sapiens
cugcauccuccaagcuggauuccuaacaucuc

SEQ ID NO: 155834 - RNA, 32 nt, Homo Sapiens
ccuuucccuccacuuccuccugccaccugcug

SEQ ID NO: 155835 - RNA, 32 nt, Homo Sapiens
aaaucuugcuacuucucacucuuuggguccac

SEQ ID NO: 155836 - RNA, 32 nt, Homo Sapiens
cacugcuggucccgucccagcugcuggucacg

SEQ ID NO: 155837 - RNA, 32 nt, Homo Sapiens
gcauauaaaugugcuccgaggcguguugguuc

SEQ ID NO: 155838 - RNA, 32 nt, Homo Sapiens
uggaguuagugaggaagggcugagugaaaaug

SEQ ID NO: 155839 - RNA, 32 nt, Homo Sapiens
cacagaacccaccugcacccugacaggcacac

SEQ ID NO: 155840 - RNA, 32 nt, Homo Sapiens
gccugugcugugcauucccgggcccgcagcuc

SEQ ID NO: 155841 - RNA, 32 nt, Homo Sapiens
ugacacggaggaggcgaccacuccucaguuuc

SEQ ID NO: 155842 - RNA, 32 nt, Homo Sapiens
acaucuauaugaucugggauuuuguuuuuauu

SEQ ID NO: 155843 - RNA, 32 nt, Homo Sapiens
gcgguaccagugcgaaucaucgggcuauccag

SEQ ID NO: 155844 - RNA, 32 nt, Homo Sapiens
cucgggcugccagccuguggcacuguccucgg

SEQ ID NO: 155845 - RNA, 32 nt, Homo Sapiens
uaaaauacaccuggaucugucuagucaaucaa

SEQ ID NO: 155846 - RNA, 30 nt, Homo Sapiens
uccuuccauaucccugcccagccuguggug

SEQ ID NO: 155847 - RNA, 32 nt, Homo Sapiens
augaaugcccccagcuggcccgugacagacuc

SEQ ID NO: 155848 - RNA, 32 nt, Homo Sapiens
agcagugggguucgacggcgcggccgcgaggc

SEQ ID NO: 155849 - RNA, 32 nt, Homo Sapiens
aagcuggccuccuaggggcugugcacccccag

SEQ ID NO: 155850 - RNA, 32 nt, Homo Sapiens
ugccugcaaucccagcacuuugggaggccaag

SEQ ID NO: 155851 - RNA, 32 nt, Homo Sapiens
uugauaaacuaaaagcauaggcugcauaugag

SEQ ID NO: 155852 - RNA, 32 nt, Homo Sapiens
ccaucgcacaccugggggcaaguuuuagauga

SEQ ID NO: 155853 - RNA, 32 nt, Homo Sapiens
aggagcccuggcagcugucuccagaggaucaa

SEQ ID NO: 155854 - RNA, 32 nt, Homo Sapiens
aauuuaauuuaaauggauaggaccaauaaguu

SEQ ID NO: 155855 - RNA, 31 nt, Homo Sapiens
uugguaggaggagaagaaacacagggaaaga

SEQ ID NO: 155856 - RNA, 32 nt, Homo Sapiens
uuuaguaaauguugagaaaaugccuuuguugu

SEQ ID NO: 155857 - RNA, 32 nt, Homo Sapiens
auaagcaaaacuccaucucaaaaaagaaaaaa

SEQ ID NO: 155858 - RNA, 32 nt, Homo Sapiens
gacgcccccgccgaccccggagcuugcccuca

SEQ ID NO: 155859 - RNA, 32 nt, Homo Sapiens
auggaggccugcccagacuaggaggcagcggg

SEQ ID NO: 155860 - RNA, 32 nt, Homo Sapiens
ugccauuaugucacugcagagguaugaaaagg

SEQ ID NO: 155861 - RNA, 32 nt, Homo Sapiens
cuauuuguuuuaacauuguaaaauuuugaguc

SEQ ID NO: 155862 - RNA, 32 nt, Homo Sapiens
gguggggccggcagggggcgccaggcagccgu

SEQ ID NO: 155863 - RNA, 32 nt, Homo Sapiens
gccaggcucuggagggacccaggagcugccgc

SEQ ID NO: 155864 - RNA, 32 nt, Homo Sapiens
cccgccugucacugcagcugccccugcccugu

SEQ ID NO: 155865 - RNA, 32 nt, Homo Sapiens
cgcuggggccgcggcggacccucgcugcccua

SEQ ID NO: 155866 - RNA, 31 nt, Homo Sapiens
uuggggugaaacacccacauggcagccugcu

SEQ ID NO: 155867 - RNA, 32 nt, Homo Sapiens
gcacagcaacgaauaugaaugaaaauaucgcu

SEQ ID NO: 155868 - RNA, 32 nt, Homo Sapiens
acaagaccaaaaucaagaaauagucaaccuga

SEQ ID NO: 155869 - RNA, 32 nt, Homo Sapiens
uuugauacuacuuguaccuguaugucuuuuag

SEQ ID NO: 155870 - RNA, 32 nt, Homo Sapiens
cccuagcccuggugcaggccaagcauuuuaua

SEQ ID NO: 155871 - RNA, 32 nt, Homo Sapiens
cuggguuuucuuuccaagauccgacguuuaaa

SEQ ID NO: 155872 - RNA, 32 nt, Homo Sapiens
uacauuuuguaaaauaaagauuucuguguucu

SEQ ID NO: 155873 - RNA, 32 nt, Homo Sapiens
aucuuugaggagaagccauagauccagugacc

SEQ ID NO: 155874 - RNA, 32 nt, Homo Sapiens
ggaagggcgagggcgaguuguggcgucucuga

SEQ ID NO: 155875 - RNA, 32 nt, Homo Sapiens
aagguaagccucagccggugcugcaggcaguc

SEQ ID NO: 155876 - RNA, 32 nt, Homo Sapiens
gcucaacuuuuuucuuuuuuuuuuuuuaauug

SEQ ID NO: 155877 - RNA, 32 nt, Homo Sapiens
cugcccuccggcacccuggagccccgcuuucc

SEQ ID NO: 155878 - RNA, 32 nt, Homo Sapiens
ucaagauuaaaccaauuuaauuguauguuuuc

SEQ ID NO: 155879 - RNA, 32 nt, Homo Sapiens
ucauggaauuuaugcaaaaauaugaguaguac

SEQ ID NO: 155880 - RNA, 32 nt, Homo Sapiens
auugcuaaaaacaaacaaaaaaaacuguuauc

SEQ ID NO: 155881 - RNA, 32 nt, Homo Sapiens
cacacagacacacaagcagacacacacauaua

SEQ ID NO: 155882 - RNA, 32 nt, Homo Sapiens
gaccgauuuuauuugcacaagguacugagauu

SEQ ID NO: 155883 - RNA, 32 nt, Homo Sapiens
uuccuucuuuggugagaaccaccuggagguga

SEQ ID NO: 155884 - RNA, 32 nt, Homo Sapiens
gcaauuaaaaauaggcaaaggaccccaaugga

SEQ ID NO: 155885 - RNA, 32 nt, Homo Sapiens
auguguuaagacuuauacuaguguuguaacuu

SEQ ID NO: 155886 - RNA, 32 nt, Homo Sapiens
ggugguuggguuuuuuuuuuuaucuuagauau

SEQ ID NO: 155887 - RNA, 32 nt, Homo Sapiens
cuguucugcauauuacaaaaaauaacuugcaa

SEQ ID NO: 155888 - RNA, 32 nt, Homo Sapiens
aggacguacacaauauccugcugcugggaaaa

SEQ ID NO: 155889 - RNA, 32 nt, Homo Sapiens
ugaagaaaaacacuuuacuacugcagaaggaa

SEQ ID NO: 155890 - RNA, 32 nt, Homo Sapiens
gcccccggcgcgggcucuugacccgcucagcg

SEQ ID NO: 155891 - RNA, 32 nt, Homo Sapiens
acauguauuuuugaauccauacauuaaugcua

SEQ ID NO: 155892 - RNA, 32 nt, Homo Sapiens
aaauuguucccucuccacuucugaaaguauga

SEQ ID NO: 155893 - RNA, 32 nt, Homo Sapiens
ugcugcaggacgcagaaaggauguagggagag

SEQ ID NO: 155894 - RNA, 32 nt, Homo Sapiens
uaaaggagaaagugagccaaggagauauuuuu

SEQ ID NO: 155895 - RNA, 32 nt, Homo Sapiens
ugauaacauuuuaauaaauggguguuuuucuu

SEQ ID NO: 155896 - RNA, 32 nt, Homo Sapiens
cacacaccuccauucagcccaagccccgcccu

SEQ ID NO: 155897 - RNA, 32 nt, Homo Sapiens
cccacuguuaauuuuccaguuuauugauuucc

SEQ ID NO: 155898 - RNA, 32 nt, Homo Sapiens
aggaagaaagucaauaauauuuugugcaauaa

SEQ ID NO: 155899 - RNA, 32 nt, Homo Sapiens
cccgcagcuccgcgcccgcgggcaaccaagcc

SEQ ID NO: 155900 - RNA, 32 nt, Homo Sapiens
gugauggauaaggaugagucuuggaguugcgg

SEQ ID NO: 155901 - RNA, 32 nt, Homo Sapiens
acuucagguaagugaggugaaaugguagccag

SEQ ID NO: 155902 - RNA, 32 nt, Homo Sapiens
aauuaaaugcccuuaaauuucaccauuugucu

SEQ ID NO: 155903 - RNA, 32 nt, Homo Sapiens
ucagaugaggaugguaguugugaguuugggau

SEQ ID NO: 155904 - RNA, 32 nt, Homo Sapiens
uauuuccauugggauguuuucauuucaaaauu

SEQ ID NO: 155905 - RNA, 32 nt, Homo Sapiens
gaggagcaggacgcgccggggccgccuccucc

SEQ ID NO: 155906 - RNA, 32 nt, Homo Sapiens
aaauugaaauuggcagaaauggaggcuucagu

SEQ ID NO: 155907 - RNA, 31 nt, Homo Sapiens
aggaggguggggcacagaccauagacggacc

SEQ ID NO: 155908 - RNA, 32 nt, Homo Sapiens
aacgaucggugucaagggugccccugcugcug

SEQ ID NO: 155909 - RNA, 32 nt, Homo Sapiens
gcgguggucucggcccggcugcgccagagucc

SEQ ID NO: 155910 - RNA, 32 nt, Homo Sapiens
aguauuguuucuuuucucuuuguuaacugugu

SEQ ID NO: 155911 - RNA, 32 nt, Homo Sapiens
uccgcgcggcccggcgccugagcgccuccguu

SEQ ID NO: 155912 - RNA, 32 nt, Homo Sapiens
uguugacugacuaauaaacuauuaaguuauug

SEQ ID NO: 155913 - RNA, 32 nt, Homo Sapiens
guuaaucaaguauaauuuagccaggcuaugaa

SEQ ID NO: 155914 - RNA, 27 nt, Homo Sapiens
guaggaagaaaggugaugaaaacuccu

SEQ ID NO: 155915 - RNA, 32 nt, Homo Sapiens
aaggaccugacucuguguggacgcaaagauag

SEQ ID NO: 155916 - RNA, 32 nt, Homo Sapiens
caccccggucaggaucaggcgagggggaacca

SEQ ID NO: 155917 - RNA, 32 nt, Homo Sapiens
agcgugaaguggaagucuaacacaugaggaua

SEQ ID NO: 155918 - RNA, 32 nt, Homo Sapiens
aacugcauuguacagcucccucccugcguuuu

SEQ ID NO: 155919 - RNA, 32 nt, Homo Sapiens
gggguaugaugaugagacccucauuguucacu

SEQ ID NO: 155920 - RNA, 32 nt, Homo Sapiens
guacaaauuugaguaaaugcaaguuugguuug

SEQ ID NO: 155921 - RNA, 32 nt, Homo Sapiens
ucaagcgauccuccugccucagccuccugagu

SEQ ID NO: 155922 - RNA, 31 nt, Homo Sapiens
gggcugcagcgcagcagcacccaacgcaucu

SEQ ID NO: 155923 - RNA, 32 nt, Homo Sapiens
gaggaaaacaacagucaugaugcgggccagga

SEQ ID NO: 155924 - RNA, 32 nt, Homo Sapiens
ccccgcagugcugcggccgccgcggcaccaug

SEQ ID NO: 155925 - RNA, 32 nt, Homo Sapiens
gaaaauuuuugcaaucuacucaucugacaaag

SEQ ID NO: 155926 - RNA, 32 nt, Homo Sapiens
auuagccgggcgugggggcgggcaucuguagu

SEQ ID NO: 155927 - RNA, 32 nt, Homo Sapiens
gaggugguguccagcguggaaauauccuaaau

SEQ ID NO: 155928 - RNA, 32 nt, Homo Sapiens
ucccaguguugcccuccccuuaucagggagag

SEQ ID NO: 155929 - RNA, 32 nt, Homo Sapiens
guguucgcaggcgccgccgcgccgccgucgcu

SEQ ID NO: 155930 - RNA, 32 nt, Homo Sapiens
ugucgucgccgccgcggcucccggggcuggau

SEQ ID NO: 155931 - RNA, 32 nt, Homo Sapiens
cugcagaaccgugcgugcagcgcaugaugaau

SEQ ID NO: 155932 - RNA, 32 nt, Homo Sapiens
cugcuccccacuuuguagagccuagcaugagg

SEQ ID NO: 155933 - RNA, 32 nt, Homo Sapiens
aucuagaggggaaagaaaagacuuuguucugu

SEQ ID NO: 155934 - RNA, 32 nt, Homo Sapiens
cacaagcuccgguagcccauggagcccuggcc

SEQ ID NO: 155935 - RNA, 32 nt, Homo Sapiens
acucagaaguuccaugauacuauaacuggagu

SEQ ID NO: 155936 - RNA, 32 nt, Homo Sapiens
auccggcagggcggggcccggccauggcgacc

SEQ ID NO: 155937 - RNA, 32 nt, Homo Sapiens
uguguuucauucugaucuuucauucauauaua

SEQ ID NO: 155938 - RNA, 32 nt, Homo Sapiens
gcaaguuuugaaaccaggaacugugagucuuc

SEQ ID NO: 155939 - RNA, 32 nt, Homo Sapiens
uccccagagggucaggagcuacaacuggagag

SEQ ID NO: 155940 - RNA, 32 nt, Homo Sapiens
ugcaaccgccugggacgccgccgaguggucug

SEQ ID NO: 155941 - RNA, 32 nt, Homo Sapiens
uucccucaaaggaaaaguuauaauuagcuacu

SEQ ID NO: 155942 - RNA, 32 nt, Homo Sapiens
cccguugccgccucgggcgcuguacccagagc

SEQ ID NO: 155943 - RNA, 32 nt, Homo Sapiens
uacacagauauuuuugucauuguuauuuucag

SEQ ID NO: 155944 - RNA, 32 nt, Homo Sapiens
accccuugccuggccuggccugaggcucagca

SEQ ID NO: 155945 - RNA, 32 nt, Homo Sapiens
uugacacuccauauuucuuuuuuuuggaaaug

SEQ ID NO: 155946 - RNA, 32 nt, Homo Sapiens
aggccucggugauucagccacagccucugccu

SEQ ID NO: 155947 - RNA, 32 nt, Homo Sapiens
cagguugaauuaucuaucuggauauuacuaga

SEQ ID NO: 155948 - RNA, 32 nt, Homo Sapiens
gggguugcuguguaaguuauuuuuguacaugu

SEQ ID NO: 155949 - RNA, 32 nt, Homo Sapiens
cacuuccuuacuccugcugcucugccauugcc

SEQ ID NO: 155950 - RNA, 32 nt, Homo Sapiens
cagcuuucagagcagacagagaagacucagua

SEQ ID NO: 155951 - RNA, 29 nt, Homo Sapiens
cgcacucggguccggguccugugggucca

SEQ ID NO: 155952 - RNA, 32 nt, Homo Sapiens
uaaaguacuuuuuauauauguuauguaguaua

SEQ ID NO: 155953 - RNA, 32 nt, Homo Sapiens
gugaauaaacaugauuucuugccgggcaaaaa

SEQ ID NO: 155954 - RNA, 32 nt, Homo Sapiens
uccucuuuggaccggaguucuccggagaaacc

SEQ ID NO: 155955 - RNA, 30 nt, Homo Sapiens
acgggguuucaccguguuagccaggauggu

SEQ ID NO: 155956 - RNA, 31 nt, Homo Sapiens
gucacaauggugcgcaugaaugcccuggcag

SEQ ID NO: 155957 - RNA, 32 nt, Homo Sapiens
ccuccugcacagcggcugccgccccgcagccc

SEQ ID NO: 155958 - RNA, 32 nt, Homo Sapiens
gaccuuaauuccaggaaagcacagaggacaaa

SEQ ID NO: 155959 - RNA, 32 nt, Homo Sapiens
aguuucgaaggauuaaugacuuccucagcgcc

SEQ ID NO: 155960 - RNA, 32 nt, Homo Sapiens
uacauaaaccagagaugauaaaacagauacuu

SEQ ID NO: 155961 - RNA, 32 nt, Homo Sapiens
gcgggcccgcggccucccucccgcacacuccu

SEQ ID NO: 155962 - RNA, 32 nt, Homo Sapiens
cacccagauccugugcaggcugccgggccccu

SEQ ID NO: 155963 - RNA, 32 nt, Homo Sapiens
gcggggcugggcccagggcggcggcgggagaa

SEQ ID NO: 155964 - RNA, 32 nt, Homo Sapiens
uucucucccaggggcuggcuucaggagggagc

SEQ ID NO: 155965 - RNA, 32 nt, Homo Sapiens
gaacugggagagcggcccccgaggcggagccu

SEQ ID NO: 155966 - RNA, 32 nt, Homo Sapiens
ucccaucccuccuuccucuccuucuccaagug

SEQ ID NO: 155967 - RNA, 32 nt, Homo Sapiens
uccauguguuuguauccauguuuuuauccauu

SEQ ID NO: 155968 - RNA, 32 nt, Homo Sapiens
cccagcacucgaaagggaccgaaauggagagc

SEQ ID NO: 155969 - RNA, 32 nt, Homo Sapiens
gaucacuugagccccagggguggaggcugcaa

SEQ ID NO: 155970 - RNA, 32 nt, Homo Sapiens
uccaccauccucagccagugcaacccauuccc

SEQ ID NO: 155971 - RNA, 32 nt, Homo Sapiens
acggaaaaacuaccaucuccccugcccaccau

SEQ ID NO: 155972 - RNA, 28 nt, Homo Sapiens
gacauggcgcggccgcugcgugaguacc

SEQ ID NO: 155973 - RNA, 27 nt, Homo Sapiens
acauggccgagaggccggggccuccgg

SEQ ID NO: 155974 - RNA, 32 nt, Homo Sapiens
ggcagcgaggucggcagcggcgcgcgcugugc

SEQ ID NO: 155975 - RNA, 32 nt, Homo Sapiens
uaggucugaaucugcgaguagaugaaccugca

SEQ ID NO: 155976 - RNA, 32 nt, Homo Sapiens
ucugggagugucccucgcugccugcaaagcua

SEQ ID NO: 155977 - RNA, 32 nt, Homo Sapiens
uucaacguggaggaagguuggguguggagauu

SEQ ID NO: 155978 - RNA, 32 nt, Homo Sapiens
cuccgcggccccauccgcccggugcacccggg

SEQ ID NO: 155979 - RNA, 32 nt, Homo Sapiens
ucugucucuguaucucucuccuccuuugaacc

SEQ ID NO: 155980 - RNA, 32 nt, Homo Sapiens
gacagucuuccauuccuccccguuccuuucuc

SEQ ID NO: 155981 - RNA, 32 nt, Homo Sapiens
gaaauaaaauguaugguuuucuuaaaaggaag

SEQ ID NO: 155982 - RNA, 29 nt, Homo Sapiens
gcuaguuuguguuucagacuuccauauuu

SEQ ID NO: 155983 - RNA, 32 nt, Homo Sapiens
gcaauugauauguuuuuagaugagagagaaaa

SEQ ID NO: 155984 - RNA, 32 nt, Homo Sapiens
ucuaauuuauuaccaaauagggucuuuuaaaa

SEQ ID NO: 155985 - RNA, 32 nt, Homo Sapiens
agcacuuuuuaaaacaaacaaacaaacaaaac

SEQ ID NO: 155986 - RNA, 32 nt, Homo Sapiens
aaaaagcauuaucagacagucuugauauuaua

SEQ ID NO: 155987 - RNA, 32 nt, Homo Sapiens
acucugcccagcugcccuccccucgccccuug

SEQ ID NO: 155988 - RNA, 32 nt, Homo Sapiens
gaagaugggggaggaggcaguaauaaaaagau

SEQ ID NO: 155989 - RNA, 29 nt, Homo Sapiens
cagccuacagaguagcugggaauacaagu

SEQ ID NO: 155990 - RNA, 32 nt, Homo Sapiens
agagccgaucguccucucccccgccccacccc

SEQ ID NO: 155991 - RNA, 32 nt, Homo Sapiens
ccugccuauuuuccuuguguaacaaauggaaa

SEQ ID NO: 155992 - RNA, 32 nt, Homo Sapiens
aauuugaaaauauuuaauguugaaagacuuca

SEQ ID NO: 155993 - RNA, 32 nt, Homo Sapiens
caccgggccauggacuccuguacuggaggaag

SEQ ID NO: 155994 - RNA, 32 nt, Homo Sapiens
gccaccugugagccggcgcgggcccgggcucc

SEQ ID NO: 155995 - RNA, 32 nt, Homo Sapiens
caugcccacccgcuccuccacaagccuagucc

SEQ ID NO: 155996 - RNA, 32 nt, Homo Sapiens
ggcgaggccucgggaagcugaauuuuccuuga

SEQ ID NO: 155997 - RNA, 29 nt, Homo Sapiens
gcgcggcgacgucuccgcguggcgucacg

SEQ ID NO: 155998 - RNA, 32 nt, Homo Sapiens
ucacauccccuggccuggacccaggagaccca

SEQ ID NO: 155999 - RNA, 32 nt, Homo Sapiens
cagacaagcacgcacauagacacgugccucca

SEQ ID NO: 156000 - RNA, 32 nt, Homo Sapiens
ucggccauccaaacagaggaugcucagauuuc

SEQ ID NO: 156001 - RNA, 32 nt, Homo Sapiens
aacccccagaaagcgggcagcaggccccgaua

SEQ ID NO: 156002 - RNA, 32 nt, Homo Sapiens
gucgccagccccggcccgggcucgagaaucaa

SEQ ID NO: 156003 - RNA, 32 nt, Homo Sapiens
cagccccccgucccaggaccuuccuagucugc

SEQ ID NO: 156004 - RNA, 32 nt, Homo Sapiens
gugcagugaccccgcaggccagcccuccaacc

SEQ ID NO: 156005 - RNA, 32 nt, Homo Sapiens
aaguaacggaagcuaccuuguauaaagaccuc

SEQ ID NO: 156006 - RNA, 32 nt, Homo Sapiens
ggacaauucauaugggauaaaacuacaaaugc

SEQ ID NO: 156007 - RNA, 32 nt, Homo Sapiens
gggacuaucugaagcgcuuccauccuaaagcc

SEQ ID NO: 156008 - RNA, 32 nt, Homo Sapiens
cuuaaaaggccccuuuccaccagccgccaagc

SEQ ID NO: 156009 - RNA, 32 nt, Homo Sapiens
aucgagauauuuuuaugcuccuuacuuucucu

SEQ ID NO: 156010 - RNA, 32 nt, Homo Sapiens
uauugaguuggaaaaaaguaauucuaucaugu

SEQ ID NO: 156011 - RNA, 32 nt, Homo Sapiens
acagcggcggagagggagcagccaguuggugu

SEQ ID NO: 156012 - RNA, 32 nt, Homo Sapiens
uccccucaccugcacacccccuuucagagggc

SEQ ID NO: 156013 - RNA, 32 nt, Homo Sapiens
ucuggaggcaucacaugcuggugcugugucuu

SEQ ID NO: 156014 - RNA, 32 nt, Homo Sapiens
uguguugaaaauaaagaauaaaaaucacccag

SEQ ID NO: 156015 - RNA, 32 nt, Homo Sapiens
uaaauuuaaaagacgauaauuuaaaaaaaaag

SEQ ID NO: 156016 - RNA, 32 nt, Homo Sapiens
agaaggugguggucguacgcugcgagggcauc

SEQ ID NO: 156017 - RNA, 32 nt, Homo Sapiens
uuccuuuuuccucuccucuccugccgagagug

SEQ ID NO: 156018 - RNA, 32 nt, Homo Sapiens
agucaagaaguacaccucaucuccaggacagc

SEQ ID NO: 156019 - RNA, 32 nt, Homo Sapiens
gaacuuugaaagauuaaugaggcagcaggaag

SEQ ID NO: 156020 - RNA, 32 nt, Homo Sapiens
uuuguucuuuugcucuucacaauaaaucuugc

SEQ ID NO: 156021 - RNA, 32 nt, Homo Sapiens
acacccccggcccggcacccccggcccggcau

SEQ ID NO: 156022 - RNA, 32 nt, Homo Sapiens
agguacggacgcccuggacccugcgaacaggu

SEQ ID NO: 156023 - RNA, 32 nt, Homo Sapiens
ggcggaugacuucagcauuagauggucaggug

SEQ ID NO: 156024 - RNA, 31 nt, Homo Sapiens
ugcucgcuagaauaaacugcuuugcgcucuc

SEQ ID NO: 156025 - RNA, 32 nt, Homo Sapiens
aggugcgcgggaagcaggugcccaggagagag

SEQ ID NO: 156026 - RNA, 32 nt, Homo Sapiens
cuccagcccggccaugagcgcggccgcaugau

SEQ ID NO: 156027 - RNA, 32 nt, Homo Sapiens
caacccuaucaugggcugcucugaggacccuc

SEQ ID NO: 156028 - RNA, 32 nt, Homo Sapiens
ggggcgcgccauggaggcgccgggucgcgcca

SEQ ID NO: 156029 - RNA, 32 nt, Homo Sapiens
auuggaagagagaaaggaaauauuuuggucuu

SEQ ID NO: 156030 - RNA, 32 nt, Homo Sapiens
uuauuuaaugaugaaauuacugguccaggcgc

SEQ ID NO: 156031 - RNA, 32 nt, Homo Sapiens
guacgggcggggccacugcggucgccggggcg

SEQ ID NO: 156032 - RNA, 32 nt, Homo Sapiens
guaacuaugaugucuggguaaaaauagcucac

SEQ ID NO: 156033 - RNA, 32 nt, Homo Sapiens
ugaggucugucaccacccacagccacccuaca

SEQ ID NO: 156034 - RNA, 32 nt, Homo Sapiens
aguuauucucaaauaugacacccauguaaggc

SEQ ID NO: 156035 - RNA, 32 nt, Homo Sapiens
uuaaauucuguauauuugaugaagagguuuua

SEQ ID NO: 156036 - RNA, 32 nt, Homo Sapiens
caccaccucauccaaggggaucuugcagaagu

SEQ ID NO: 156037 - RNA, 32 nt, Homo Sapiens
cgccuggccuagccucgccaccagcuuuggug

SEQ ID NO: 156038 - RNA, 32 nt, Homo Sapiens
guggccggguguauguccccucagcgguccag

SEQ ID NO: 156039 - RNA, 32 nt, Homo Sapiens
ucacugguucuaaggaguuugugcuaggaguu

SEQ ID NO: 156040 - RNA, 32 nt, Homo Sapiens
augucagcugcuuagugauaaaacagagccaa

SEQ ID NO: 156041 - RNA, 32 nt, Homo Sapiens
gaacuaaaaugaaacaguuggugauguuucag

SEQ ID NO: 156042 - RNA, 32 nt, Homo Sapiens
cauaccuuucaauuuugcuacuugguugauuu

SEQ ID NO: 156043 - RNA, 32 nt, Homo Sapiens
gugaaauagugggaaggauucauguaggcauc

SEQ ID NO: 156044 - RNA, 32 nt, Homo Sapiens
ggagcaaggaccaguuggggcgacuccuuuga

SEQ ID NO: 156045 - RNA, 32 nt, Homo Sapiens
uaagacaaacugauagcaacauucuguuguuu

SEQ ID NO: 156046 - RNA, 32 nt, Homo Sapiens
gauugagacaaaaacugugauuuuaauacuua

SEQ ID NO: 156047 - RNA, 32 nt, Homo Sapiens
gcccgcagagcccgcaccccccggcccugccu

SEQ ID NO: 156048 - RNA, 32 nt, Homo Sapiens
cgcuauguuagcgcgcucgaggaagaagguag

SEQ ID NO: 156049 - RNA, 32 nt, Homo Sapiens
gucgccagcagcugggcuggggugcaggucau

SEQ ID NO: 156050 - RNA, 32 nt, Homo Sapiens
uguacuuguucuaccuggauugucaacaacug

SEQ ID NO: 156051 - RNA, 32 nt, Homo Sapiens
ugcacugcacuacuccaaugucuuccauggag

SEQ ID NO: 156052 - RNA, 32 nt, Homo Sapiens
gagacccacaguuauucuuaauuucugauauu

SEQ ID NO: 156053 - RNA, 32 nt, Homo Sapiens
ccggcacggcgguggucuugcgggaggcgugg

SEQ ID NO: 156054 - RNA, 32 nt, Homo Sapiens
uuaauaguccaaggcauucccucccccaccac

SEQ ID NO: 156055 - RNA, 32 nt, Homo Sapiens
guggcgcaguggcggcagcaccagcaccgacg

SEQ ID NO: 156056 - RNA, 32 nt, Homo Sapiens
cauggguggagcagaggggcucccucaccccg

SEQ ID NO: 156057 - RNA, 32 nt, Homo Sapiens
aagcaaaauuuugauugagauuuuuuacagca

SEQ ID NO: 156058 - RNA, 29 nt, Homo Sapiens
ggagcuugaaguuuauaucuaaaucauuc

SEQ ID NO: 156059 - RNA, 32 nt, Homo Sapiens
caggaacaggcaggagcccagcccuuuucaga

SEQ ID NO: 156060 - RNA, 32 nt, Homo Sapiens
ccagggcccucccugcccgccuuggggccaga

SEQ ID NO: 156061 - RNA, 32 nt, Homo Sapiens
gcuugauuacccaagaguucaaggcugcagug

SEQ ID NO: 156062 - RNA, 32 nt, Homo Sapiens
auugcccagugccuucuguuucccaggcagcu

SEQ ID NO: 156063 - RNA, 32 nt, Homo Sapiens
cgucgccagccagaucuggugcucucccgggc

SEQ ID NO: 156064 - RNA, 32 nt, Homo Sapiens
guauguguauaaaugaucaggucugugaggcu

SEQ ID NO: 156065 - RNA, 32 nt, Homo Sapiens
auggagcccuguaauuuuuuucuuauauaaaa

SEQ ID NO: 156066 - RNA, 32 nt, Homo Sapiens
cucccugagcggugggcgggccucgaccgcag

SEQ ID NO: 156067 - RNA, 32 nt, Homo Sapiens
uuguacugcuguguuauaugcuauguacaugu

SEQ ID NO: 156068 - RNA, 32 nt, Homo Sapiens
caaagggacuggcagucugcccugcagggagu

SEQ ID NO: 156069 - RNA, 32 nt, Homo Sapiens
auugugaaaggugaauuuaccuaauuagugaa

SEQ ID NO: 156070 - RNA, 32 nt, Homo Sapiens
gaaauaauuguuucagaaaauaaauaugcuaa

SEQ ID NO: 156071 - RNA, 32 nt, Homo Sapiens
ggucuucuuccaaugaugcuuacuacagaaag

SEQ ID NO: 156072 - RNA, 32 nt, Homo Sapiens
acagguuccuccuuugggcccagcggccggcg

SEQ ID NO: 156073 - RNA, 32 nt, Homo Sapiens
ucaacacuggaauaaacuuugccuuuucugaa

SEQ ID NO: 156074 - RNA, 32 nt, Homo Sapiens
cuuugccuuuugcaugacugauagcuguaacu

SEQ ID NO: 156075 - RNA, 32 nt, Homo Sapiens
acuggggaccagacgcagaugcccuggcuguc

SEQ ID NO: 156076 - RNA, 32 nt, Homo Sapiens
gucaagcgugcagcuuguucagcgguucuuuc

SEQ ID NO: 156077 - RNA, 32 nt, Homo Sapiens
gagcggggcaagccgcggagggggugggggag

SEQ ID NO: 156078 - RNA, 32 nt, Homo Sapiens
cguggagaauaaagagaccucaauaaacaaga

SEQ ID NO: 156079 - RNA, 32 nt, Homo Sapiens
uuacuuuuuggugucucauacccaggguaauc

SEQ ID NO: 156080 - RNA, 32 nt, Homo Sapiens
cguggagagagccgcuggaaugguguggaccc

SEQ ID NO: 156081 - RNA, 32 nt, Homo Sapiens
uacuugaaugacuuucccuuuuguuuuacugu

SEQ ID NO: 156082 - RNA, 32 nt, Homo Sapiens
cucagacaugaaauguacauggcguaccguac

SEQ ID NO: 156083 - RNA, 32 nt, Homo Sapiens
uggagcccucagggagcaaaacaucaucucca

SEQ ID NO: 156084 - RNA, 30 nt, Homo Sapiens
cucuaguggggcgaagggagcagagaugag

SEQ ID NO: 156085 - RNA, 32 nt, Homo Sapiens
uugugacccucccagaacacaauacucauugu

SEQ ID NO: 156086 - RNA, 32 nt, Homo Sapiens
aagaaaacaaauuuaccaaaagcaaaagcaua

SEQ ID NO: 156087 - RNA, 32 nt, Homo Sapiens
uucuccuucuuacugaaagagagaagcagagc

SEQ ID NO: 156088 - RNA, 32 nt, Homo Sapiens
ccugccacccucggccucuguccuggaagccc

SEQ ID NO: 156089 - RNA, 32 nt, Homo Sapiens
caaaauugaucacuccgccuucuccugggcuc

SEQ ID NO: 156090 - RNA, 32 nt, Homo Sapiens
ugccucaaucccauuuugauauucauuuuagu

SEQ ID NO: 156091 - RNA, 32 nt, Homo Sapiens
ccuuuuacugcguagaaccuauaucgagagug

SEQ ID NO: 156092 - RNA, 32 nt, Homo Sapiens
aaaccuccugugucaauaaccaagaaaaaauu

SEQ ID NO: 156093 - RNA, 31 nt, Homo Sapiens
auggaggucauuugccugccaggcgcccuuc

SEQ ID NO: 156094 - RNA, 32 nt, Homo Sapiens
uugcaguuguggucucugcccuugaagguauc

SEQ ID NO: 156095 - RNA, 32 nt, Homo Sapiens
ugagccucuggagaaugggagaguuuuagucc

SEQ ID NO: 156096 - RNA, 32 nt, Homo Sapiens
caaaaacuaaaauaaauuaaaacugcuuacac

SEQ ID NO: 156097 - RNA, 32 nt, Homo Sapiens
auccgguagucuuuaaacauucuuuuagugaa

SEQ ID NO: 156098 - RNA, 29 nt, Homo Sapiens
auccgucugguccgggacauuuuucgauu

SEQ ID NO: 156099 - RNA, 32 nt, Homo Sapiens
gaauauaauuugaguuacauauaauucuauau

SEQ ID NO: 156100 - RNA, 32 nt, Homo Sapiens
cuuggcacuaauuugcagguguucgcugcuga

SEQ ID NO: 156101 - RNA, 32 nt, Homo Sapiens
gaagcagcucuagcaggcuguuguguaaugga

SEQ ID NO: 156102 - RNA, 29 nt, Homo Sapiens
ccuuagguaagcugggcacugagcugagu

SEQ ID NO: 156103 - RNA, 32 nt, Homo Sapiens
aguuggaagacaaggaugugguccuggcucug

SEQ ID NO: 156104 - RNA, 32 nt, Homo Sapiens
uuucucuugggguacgugccugacaguguuua

SEQ ID NO: 156105 - RNA, 32 nt, Homo Sapiens
gugggagaaggggaucaauauuuugcacaccu

SEQ ID NO: 156106 - RNA, 32 nt, Homo Sapiens
gcagccacgccuacagccuguuuuuugggaag

SEQ ID NO: 156107 - RNA, 32 nt, Homo Sapiens
ccucucagucugggacaacaguucuccagcuu

SEQ ID NO: 156108 - RNA, 29 nt, Homo Sapiens
auuucugugacuuuuuucuggggucaaag

SEQ ID NO: 156109 - RNA, 32 nt, Homo Sapiens
caaauugaccugucaaugucaaccuaguaguc

SEQ ID NO: 156110 - RNA, 32 nt, Homo Sapiens
agcagacccggacaaugcugugagagaagcau

SEQ ID NO: 156111 - RNA, 32 nt, Homo Sapiens
aaaggagaaguucuauucaaaggcaguaguug

SEQ ID NO: 156112 - RNA, 32 nt, Homo Sapiens
aucuaccuagcaugcauuuuacacacauugga

SEQ ID NO: 156113 - RNA, 32 nt, Homo Sapiens
agcccaugcccggccccacucacaccaaccug

SEQ ID NO: 156114 - RNA, 32 nt, Homo Sapiens
cuuaucucauaaauaaauagauagauacucca

SEQ ID NO: 156115 - RNA, 32 nt, Homo Sapiens
auacuuucccgccccccuccccuguucccacu

SEQ ID NO: 156116 - RNA, 32 nt, Homo Sapiens
uaacucgagcggagccccggccuccccgacuc

SEQ ID NO: 156117 - RNA, 32 nt, Homo Sapiens
cuccuccuccccacccagggcccugauuaagg

SEQ ID NO: 156118 - RNA, 31 nt, Homo Sapiens
auugccauuccuacuaccugaguuuuuacuu

SEQ ID NO: 156119 - RNA, 32 nt, Homo Sapiens
gucuggcuuccacuuccuucacuucaccaaca

SEQ ID NO: 156120 - RNA, 32 nt, Homo Sapiens
ucuguguucuacggcaguuacacacacgcagu

SEQ ID NO: 156121 - RNA, 32 nt, Homo Sapiens
caucucugugggaaaaccuguuuuagaucauc

SEQ ID NO: 156122 - RNA, 32 nt, Homo Sapiens
uuuucguauaaaauaacacaaaaugauauaca

SEQ ID NO: 156123 - RNA, 32 nt, Homo Sapiens
cugugacguuugcggcagccaggccgucgacg

SEQ ID NO: 156124 - RNA, 32 nt, Homo Sapiens
aacagaaaaauauuuaaagaaaacuuaugcug

SEQ ID NO: 156125 - RNA, 32 nt, Homo Sapiens
ugguugaggguggaaccuccaggcaggaaccg

SEQ ID NO: 156126 - RNA, 32 nt, Homo Sapiens
ucuucugcagguccagcccuggcgagggcagg

SEQ ID NO: 156127 - RNA, 32 nt, Homo Sapiens
cuucuuuccuuuuaucuacucaauguuauuaa

SEQ ID NO: 156128 - RNA, 32 nt, Homo Sapiens
aaggacacgcaccaugguguaugagaggacac

SEQ ID NO: 156129 - RNA, 32 nt, Homo Sapiens
ggccgccaccccacccgcuacccuugggugcc

SEQ ID NO: 156130 - RNA, 32 nt, Homo Sapiens
ugcuaaaacuaaaaagcauuuugaaacauaca

SEQ ID NO: 156131 - RNA, 32 nt, Homo Sapiens
uggcugcuuccuggggacccagggcaccccgg

SEQ ID NO: 156132 - RNA, 32 nt, Homo Sapiens
ugagggcaaggcuaagaaaugucagccacgga

SEQ ID NO: 156133 - RNA, 32 nt, Homo Sapiens
acucaagagucuucguacaucauugaaaucuu

SEQ ID NO: 156134 - RNA, 32 nt, Homo Sapiens
ggacauguggguggagaagggaggguggccag

SEQ ID NO: 156135 - RNA, 32 nt, Homo Sapiens
aaggugguggccugggccgcuccaccucaccg

SEQ ID NO: 156136 - RNA, 32 nt, Homo Sapiens
ccuccuaccuccaaagcuucccacggccuuuc

SEQ ID NO: 156137 - RNA, 29 nt, Homo Sapiens
ucuuaugaugaaauauuaugaucuugcaa

SEQ ID NO: 156138 - RNA, 32 nt, Homo Sapiens
aggggacccagcuccucugagccauaccgacc

SEQ ID NO: 156139 - RNA, 32 nt, Homo Sapiens
uuaaauggugcugguuaaacaaacacgucugc

SEQ ID NO: 156140 - RNA, 32 nt, Homo Sapiens
cguaucccccggcuaccugggccgccccgcgg

SEQ ID NO: 156141 - RNA, 32 nt, Homo Sapiens
aaaaggggcauuguuuuuucacugcuuucuca

SEQ ID NO: 156142 - RNA, 32 nt, Homo Sapiens
gguuucuucccauuuuacucuguccugugucc

SEQ ID NO: 156143 - RNA, 32 nt, Homo Sapiens
caaaggaaguuccauuuagagcucuacagagg

SEQ ID NO: 156144 - RNA, 32 nt, Homo Sapiens
ggauauaagauugcguggguucugccuaaagc

SEQ ID NO: 156145 - RNA, 32 nt, Homo Sapiens
cuuuucggccccauguaucucaguaccccaug

SEQ ID NO: 156146 - RNA, 32 nt, Homo Sapiens
accucauccuccccaaacggcgguaugccggg

SEQ ID NO: 156147 - RNA, 32 nt, Homo Sapiens
cccaacaguauuuuuguguguuaauuaauuuu

SEQ ID NO: 156148 - RNA, 32 nt, Homo Sapiens
cgggaaguucugcaaguguucuccaggggcau

SEQ ID NO: 156149 - RNA, 32 nt, Homo Sapiens
ccacgcccagcuccccaccugcccugcacucu

SEQ ID NO: 156150 - RNA, 32 nt, Homo Sapiens
ccagugagauucaaaucacgcaucucuacucc

SEQ ID NO: 156151 - RNA, 32 nt, Homo Sapiens
uauggccuauaguuuaaaagcacaucuauguu

SEQ ID NO: 156152 - RNA, 32 nt, Homo Sapiens
agcccuagaagagugugaaaaggaauggcaau

SEQ ID NO: 156153 - RNA, 32 nt, Homo Sapiens
ggccccgccuucccuucccuccgcccaccucc

SEQ ID NO: 156154 - RNA, 32 nt, Homo Sapiens
gccugauuuugauauagguaaauaucacauaa

SEQ ID NO: 156155 - RNA, 32 nt, Homo Sapiens
agggauuguaaauacaccaaucagcacccugu

SEQ ID NO: 156156 - RNA, 32 nt, Homo Sapiens
cagucaguccccccggccccccucccaguccc

SEQ ID NO: 156157 - RNA, 32 nt, Homo Sapiens
auagaacccaggagccacggccugcuguugcu

SEQ ID NO: 156158 - RNA, 32 nt, Homo Sapiens
cuguagaauagauaaaaauuauuuugugauca

SEQ ID NO: 156159 - RNA, 32 nt, Homo Sapiens
uggaaugugaagaucugucgauucaucuccaa

SEQ ID NO: 156160 - RNA, 32 nt, Homo Sapiens
gcgcacucuccagccuuuuccuggcugaggag

SEQ ID NO: 156161 - RNA, 32 nt, Homo Sapiens
gauugcuugagcccaggcugugugguucacca

SEQ ID NO: 156162 - RNA, 32 nt, Homo Sapiens
gcuuuauauuugucugauuuuauuuuucaaag

SEQ ID NO: 156163 - RNA, 32 nt, Homo Sapiens
auccgaauucgcggccgcgucgacuggagagg

SEQ ID NO: 156164 - RNA, 32 nt, Homo Sapiens
gaaggaucauugauuuccuuguguauggauaa

SEQ ID NO: 156165 - RNA, 32 nt, Homo Sapiens
acugaugggagcagugggcauucuuuauccca

SEQ ID NO: 156166 - RNA, 32 nt, Homo Sapiens
gcccgccaggccagugccccagcccagggugc

SEQ ID NO: 156167 - RNA, 32 nt, Homo Sapiens
cuccuggcccgcggagagccccggccccggca

SEQ ID NO: 156168 - RNA, 32 nt, Homo Sapiens
ggccuccugcuucaugggccuggaugcagauc

SEQ ID NO: 156169 - RNA, 32 nt, Homo Sapiens
augcauaugauccauggcaggaguaaaucucu

SEQ ID NO: 156170 - RNA, 32 nt, Homo Sapiens
acagaaggaaaauaauauuauauaaagugaca

SEQ ID NO: 156171 - RNA, 32 nt, Homo Sapiens
guauguauauauaccuauggaaaacuaguugu

SEQ ID NO: 156172 - RNA, 32 nt, Homo Sapiens
auauauuaaaugguaaaugauuguacuuauuu

SEQ ID NO: 156173 - RNA, 30 nt, Homo Sapiens
gcagaaggcaggcuccuggguggaaaggug

SEQ ID NO: 156174 - RNA, 31 nt, Homo Sapiens
gccaacgcucccguggcuccaaggucggcag

SEQ ID NO: 156175 - RNA, 32 nt, Homo Sapiens
uuaccaaaucgauguaggccuaaucacuuccu

SEQ ID NO: 156176 - RNA, 32 nt, Homo Sapiens
guucgaauuuaaaaucagaaaaucaugucagu

SEQ ID NO: 156177 - RNA, 32 nt, Homo Sapiens
agacugugaacagcuugcugucacuucuucac

SEQ ID NO: 156178 - RNA, 32 nt, Homo Sapiens
uaagaaaguccucuuugcccugugugccuuga

SEQ ID NO: 156179 - RNA, 32 nt, Homo Sapiens
ugccagcaccaugguaugagcacuaacuugga

SEQ ID NO: 156180 - RNA, 32 nt, Homo Sapiens
ugccuguagucucagcacuuugggaggcugag

SEQ ID NO: 156181 - RNA, 32 nt, Homo Sapiens
gacgugucgcugcugcugcugcugcugccgcu

SEQ ID NO: 156182 - RNA, 32 nt, Homo Sapiens
cgggcagggcgcugcgcccaagagccacagac

SEQ ID NO: 156183 - RNA, 30 nt, Homo Sapiens
gacccggcgcccgcgccucgggacggauuu

SEQ ID NO: 156184 - RNA, 32 nt, Homo Sapiens
gcuuugcuaugagcuuccuggaagccaaugua

SEQ ID NO: 156185 - RNA, 32 nt, Homo Sapiens
uagaccuugacuaacaagcuccagguguagaa

SEQ ID NO: 156186 - RNA, 32 nt, Homo Sapiens
cucuggccaucuccuucccuccuuccagcccu

SEQ ID NO: 156187 - RNA, 32 nt, Homo Sapiens
uccuuuguuuuuucuuuuaacuggaauaauua

SEQ ID NO: 156188 - RNA, 32 nt, Homo Sapiens
cugaggcuuccacguugggguguuguuuuuug

SEQ ID NO: 156189 - RNA, 32 nt, Homo Sapiens
agaucuguuucuuuuuucagacauucaaaugu

SEQ ID NO: 156190 - RNA, 32 nt, Homo Sapiens
guguacgugcgcgcgugcgugaggcccugcca

SEQ ID NO: 156191 - RNA, 32 nt, Homo Sapiens
aggcguggguggcacagcgcugcucccagcuu

SEQ ID NO: 156192 - RNA, 32 nt, Homo Sapiens
ccuuuugcuucuccuuuugccauccucccuga

SEQ ID NO: 156193 - RNA, 32 nt, Homo Sapiens
gcucgguuccccccggcccuacagggugagac

SEQ ID NO: 156194 - RNA, 32 nt, Homo Sapiens
cuucccuuuccacagggugcaugcgucuccug

SEQ ID NO: 156195 - RNA, 32 nt, Homo Sapiens
guuaggggcuaccaugggaccagcucuggcca

SEQ ID NO: 156196 - RNA, 32 nt, Homo Sapiens
aauacgaugcagcccaccauuaacucauucau

SEQ ID NO: 156197 - RNA, 32 nt, Homo Sapiens
cauccucaucacaagcccuuguuugagugucu

SEQ ID NO: 156198 - RNA, 28 nt, Homo Sapiens
ugauucuaggguuaacauuggaaccauc

SEQ ID NO: 156199 - RNA, 32 nt, Homo Sapiens
ugcugguggagcucacagacggcggcuggugg

SEQ ID NO: 156200 - RNA, 32 nt, Homo Sapiens
ugagauagugggauuuaacauaaccaucuaug

SEQ ID NO: 156201 - RNA, 32 nt, Homo Sapiens
aaucauugcuaaaauacauauucuuaauauuu

SEQ ID NO: 156202 - RNA, 32 nt, Homo Sapiens
auuuuuucagguuuuucuagcuccuccauaac

SEQ ID NO: 156203 - RNA, 32 nt, Homo Sapiens
gcaaaauacagguuuuuuguuuuguuuuguuu

SEQ ID NO: 156204 - RNA, 32 nt, Homo Sapiens
gaagcgcccacccagcggauggacagcaccca

SEQ ID NO: 156205 - RNA, 32 nt, Homo Sapiens
gcuaugcugugauucugucucugagugacuug

SEQ ID NO: 156206 - RNA, 32 nt, Homo Sapiens
ugugauuccauuugcacuuaaucuuucuccau

SEQ ID NO: 156207 - RNA, 32 nt, Homo Sapiens
acuuucuggaaaaacaggauacgaugacugac

SEQ ID NO: 156208 - RNA, 32 nt, Homo Sapiens
uaggaauggaagaugguacaucugccuuggaa

SEQ ID NO: 156209 - RNA, 32 nt, Homo Sapiens
gaccauagcuucugugcccacccaggcagaga

SEQ ID NO: 156210 - RNA, 32 nt, Homo Sapiens
gacuggagugcaguggugugaucauagcucac

SEQ ID NO: 156211 - RNA, 32 nt, Homo Sapiens
uauuuuacuaaaucagagugcugaguauagaa

SEQ ID NO: 156212 - RNA, 32 nt, Homo Sapiens
gauggagucuagcucugucacccaggcuggag

SEQ ID NO: 156213 - RNA, 32 nt, Homo Sapiens
agggaguuacacaacuuuuaagugaaaaaaau

SEQ ID NO: 156214 - RNA, 32 nt, Homo Sapiens
gcgugccauuuagagcucucagagcagggcag

SEQ ID NO: 156215 - RNA, 32 nt, Homo Sapiens
ccuuggcccuguaauugagaauugggcuugca

SEQ ID NO: 156216 - RNA, 32 nt, Homo Sapiens
gccccacugccugucccuccccauccuguguc

SEQ ID NO: 156217 - RNA, 32 nt, Homo Sapiens
cucaaguauugucaagggaagcuuccugugaa

SEQ ID NO: 156218 - RNA, 32 nt, Homo Sapiens
ucucuggcggggugcagaacugagcccaggcc

SEQ ID NO: 156219 - RNA, 32 nt, Homo Sapiens
cgcccccugcuggcccgcggcggcgaggagca

SEQ ID NO: 156220 - RNA, 32 nt, Homo Sapiens
aucuuuauucuuucuuuuuaccuuuaaaaguc

SEQ ID NO: 156221 - RNA, 32 nt, Homo Sapiens
ugcuuauuguuuaacaccauuaauuuugagua

SEQ ID NO: 156222 - RNA, 32 nt, Homo Sapiens
guguggggaaagggguugcugguacuucaucu

SEQ ID NO: 156223 - RNA, 32 nt, Homo Sapiens
auauggaucuucuguuucuaugucuuuuuaaa

SEQ ID NO: 156224 - RNA, 32 nt, Homo Sapiens
auuucuaauuccuguuuguugaagggaaguug

SEQ ID NO: 156225 - RNA, 32 nt, Homo Sapiens
agcaggcaggggugggggccgggccugcaaga

SEQ ID NO: 156226 - RNA, 32 nt, Homo Sapiens
caccccgacccuccuccugucagcccccucac

SEQ ID NO: 156227 - RNA, 32 nt, Homo Sapiens
ucccagagguuaagagaauguuguguauuucu

SEQ ID NO: 156228 - RNA, 31 nt, Homo Sapiens
guaaccauggggaggaagcuggaccugucug

SEQ ID NO: 156229 - RNA, 32 nt, Homo Sapiens
uuucaaucuggaagaaaaaauaaaccuuaaua

SEQ ID NO: 156230 - RNA, 32 nt, Homo Sapiens
ggcacgaggggcggucggucggugaggcuuuc

SEQ ID NO: 156231 - RNA, 32 nt, Homo Sapiens
caugcauguacuuggguguuucccuccauccu

SEQ ID NO: 156232 - RNA, 32 nt, Homo Sapiens
cagcugcccucacuucugggguggaugaugug

SEQ ID NO: 156233 - RNA, 32 nt, Homo Sapiens
uauccacacaggucccggccccugcccgggcu

SEQ ID NO: 156234 - RNA, 32 nt, Homo Sapiens
ccgaacuuucucccugcgccuacuccaacaau

SEQ ID NO: 156235 - RNA, 32 nt, Homo Sapiens
cagcauguugcuguacugaauacucuaagcaa

SEQ ID NO: 156236 - RNA, 32 nt, Homo Sapiens
gacgcugcggagcgagcccacccgccccggga

SEQ ID NO: 156237 - RNA, 32 nt, Homo Sapiens
gcggggcuucccugaccugaaggcgucggggg

SEQ ID NO: 156238 - RNA, 32 nt, Homo Sapiens
ucuguggccucaaauguuuuaagcaaagcaca

SEQ ID NO: 156239 - RNA, 32 nt, Homo Sapiens
ggaaaauaaaaggaguucauguaguuuuuguc

SEQ ID NO: 156240 - RNA, 32 nt, Homo Sapiens
ugguguauuccugaauccaucagauguuggug

SEQ ID NO: 156241 - RNA, 32 nt, Homo Sapiens
ggaaggggaaagggcugggccucaccgcuccc

SEQ ID NO: 156242 - RNA, 32 nt, Homo Sapiens
gauuuuuggugccuuacuuuuaucuuaauuuu

SEQ ID NO: 156243 - RNA, 32 nt, Homo Sapiens
guguauugauggcagagcuguugcccacaagc

SEQ ID NO: 156244 - RNA, 32 nt, Homo Sapiens
ccccaggccccggccccacuccuggcucucau

SEQ ID NO: 156245 - RNA, 32 nt, Homo Sapiens
ucccccagacccccuccaccccccggccacac

SEQ ID NO: 156246 - RNA, 32 nt, Homo Sapiens
uggaagaaaggacuuuguuaaucuucuccccc

SEQ ID NO: 156247 - RNA, 32 nt, Homo Sapiens
uucuccaagguucuaaugucaaaaugguacau

SEQ ID NO: 156248 - RNA, 32 nt, Homo Sapiens
aaucaagcuggguaaucauggcagaaggugga

SEQ ID NO: 156249 - RNA, 32 nt, Homo Sapiens
auaagccauaaccaauccucaaggcuggcaca

SEQ ID NO: 156250 - RNA, 32 nt, Homo Sapiens
caaucuucccugcccaggacuggccauacugc

SEQ ID NO: 156251 - RNA, 32 nt, Homo Sapiens
ccgcgauggcucgagcucgggcgguggcggcg

SEQ ID NO: 156252 - RNA, 32 nt, Homo Sapiens
gaaagagcgcaugcguaaagcaacuccuuauc

SEQ ID NO: 156253 - RNA, 32 nt, Homo Sapiens
uacaauggccaaguacaguauaggcuggaaag

SEQ ID NO: 156254 - RNA, 32 nt, Homo Sapiens
gcccacccgucccccacccccaccccuuagac

SEQ ID NO: 156255 - RNA, 32 nt, Homo Sapiens
auucaucuuuugaggcuucuguuccucucuuu

SEQ ID NO: 156256 - RNA, 32 nt, Homo Sapiens
uuugcugccaugucugcacgcgggcggagagc

SEQ ID NO: 156257 - RNA, 32 nt, Homo Sapiens
uucaacgugaggccggagguggugcaggagau

SEQ ID NO: 156258 - RNA, 32 nt, Homo Sapiens
ucccguuugagaaaaaggacuuuguaggacug

SEQ ID NO: 156259 - RNA, 32 nt, Homo Sapiens
gugggggaagcaggaggugguagacuaaaaua

SEQ ID NO: 156260 - RNA, 32 nt, Homo Sapiens
ccccaccacugggacccuccccagccuggaga

SEQ ID NO: 156261 - RNA, 32 nt, Homo Sapiens
caguaaaauugugaccauacaacaguagauuu

SEQ ID NO: 156262 - RNA, 32 nt, Homo Sapiens
auucacacaaaacauggacaucaucugugagg

SEQ ID NO: 156263 - RNA, 32 nt, Homo Sapiens
gggcagggcaugugaguagagaaggacccagg

SEQ ID NO: 156264 - RNA, 32 nt, Homo Sapiens
uauaugaaucuuuguuauguccauuuguuugu

SEQ ID NO: 156265 - RNA, 32 nt, Homo Sapiens
aucuucugacagugcacucauguauaccugag

SEQ ID NO: 156266 - RNA, 32 nt, Homo Sapiens
ugugcgcuggacgcaagcaccaggcgcagccu

SEQ ID NO: 156267 - RNA, 32 nt, Homo Sapiens
gcaaccccacacccuugacauaaaagcaucuu

SEQ ID NO: 156268 - RNA, 32 nt, Homo Sapiens
aguaugcccaauucucucuacaugacauauug

SEQ ID NO: 156269 - RNA, 32 nt, Homo Sapiens
ccauggcccguugcuggaugacuguuacucuu

SEQ ID NO: 156270 - RNA, 32 nt, Homo Sapiens
gcagucacuugggaguagacaccugaaacuaa

SEQ ID NO: 156271 - RNA, 31 nt, Homo Sapiens
cccgggaugcggcccgcagccggcgcagcca

SEQ ID NO: 156272 - RNA, 32 nt, Homo Sapiens
gccucucgaaggccuacacgggcccagccucg

SEQ ID NO: 156273 - RNA, 32 nt, Homo Sapiens
gccucucgaaggccugcacgggcccagccuca

SEQ ID NO: 156274 - RNA, 29 nt, Homo Sapiens
uuuauuuggggacagggguugggaugggg

SEQ ID NO: 156275 - RNA, 32 nt, Homo Sapiens
guguggguuucccccagcucuucccacacgug

SEQ ID NO: 156276 - RNA, 32 nt, Homo Sapiens
uuuugaacagaaaacacaacaaugaccuauac

SEQ ID NO: 156277 - RNA, 29 nt, Homo Sapiens
ugagauguuugcuguuguuuucuucaucu

SEQ ID NO: 156278 - RNA, 32 nt, Homo Sapiens
guuuugcagggauagcugggaguauggccacc

SEQ ID NO: 156279 - RNA, 32 nt, Homo Sapiens
gacccccaaagccccagguauccugggugaag

SEQ ID NO: 156280 - RNA, 32 nt, Homo Sapiens
gauauuugcauaauuuauuuaauuuaagccuc

SEQ ID NO: 156281 - RNA, 32 nt, Homo Sapiens
caacauuuacuuugugaauauacauauuguaa

SEQ ID NO: 156282 - RNA, 32 nt, Homo Sapiens
aaggggccugcguuaaaaccuaauugcuaaug

SEQ ID NO: 156283 - RNA, 32 nt, Homo Sapiens
uucauaucgauaccagaugccuucuucaucau

SEQ ID NO: 156284 - RNA, 32 nt, Homo Sapiens
cggcgggcugacgcacgaggcacacaggaagg

SEQ ID NO: 156285 - RNA, 32 nt, Homo Sapiens
ggggacggcccgagacggagaagggagagagu

SEQ ID NO: 156286 - RNA, 32 nt, Homo Sapiens
aggcuaaggggagaggacauaaacagacuucu

SEQ ID NO: 156287 - RNA, 32 nt, Homo Sapiens
gcaugugcucugagcuugaauuuugauaccaa

SEQ ID NO: 156288 - RNA, 32 nt, Homo Sapiens
augucaagccaccgggcaaaccccgucaauac

SEQ ID NO: 156289 - RNA, 32 nt, Homo Sapiens
uguucauugcuagucuacaaaacuaggacauu

SEQ ID NO: 156290 - RNA, 32 nt, Homo Sapiens
aaaaacaagaagaaaacugaagaagaaaaugc

SEQ ID NO: 156291 - RNA, 32 nt, Homo Sapiens
cacagugcuguacgcaggccggccuccaccuc

SEQ ID NO: 156292 - RNA, 32 nt, Homo Sapiens
uaagcaacaauuuucagauuugcacaaaaaga

SEQ ID NO: 156293 - RNA, 28 nt, Homo Sapiens
gggagagugagaggaccaaguccaagug

SEQ ID NO: 156294 - RNA, 32 nt, Homo Sapiens
acaaugcaggaaagccaguuucccuuuuguug

SEQ ID NO: 156295 - RNA, 32 nt, Homo Sapiens
cugcucauaugaauuauugggauuguugauau

SEQ ID NO: 156296 - RNA, 32 nt, Homo Sapiens
cuugcuccacacaugcaguaaacuacauaaug

SEQ ID NO: 156297 - RNA, 32 nt, Homo Sapiens
gacaggggaaaugugacuuucuaauuaggcau

SEQ ID NO: 156298 - RNA, 32 nt, Homo Sapiens
gcagaggcgggugugggaccagugcggaucuc

SEQ ID NO: 156299 - RNA, 32 nt, Homo Sapiens
gaaagaauuuauucuccuccccuucuugucuc

SEQ ID NO: 156300 - RNA, 32 nt, Homo Sapiens
uugccucgaucuguagcaagcaaucuguuguu

SEQ ID NO: 156301 - RNA, 32 nt, Homo Sapiens
ccuuccccagaucugcuccuccccuuucacag

SEQ ID NO: 156302 - RNA, 32 nt, Homo Sapiens
uuaauaaaaguacagugaugagcaugccuaaa

SEQ ID NO: 156303 - RNA, 32 nt, Homo Sapiens
cuuugacuaugaaaauauagagaaaguuuuuu

SEQ ID NO: 156304 - RNA, 32 nt, Homo Sapiens
ucccagguucaagugauucuucugccucagcc

SEQ ID NO: 156305 - RNA, 32 nt, Homo Sapiens
acuuuauuacaauuuguauuacuuucucugua

SEQ ID NO: 156306 - RNA, 32 nt, Homo Sapiens
agacagauggugguaguuauuuuuguggcaug

SEQ ID NO: 156307 - RNA, 32 nt, Homo Sapiens
cagcugcacacaaccucuugcugaaauauaaa

SEQ ID NO: 156308 - RNA, 32 nt, Homo Sapiens
gucuccugggguggcauacaccccccuugugg

SEQ ID NO: 156309 - RNA, 32 nt, Homo Sapiens
gacccacuuugccguccugggguggcugcagu

SEQ ID NO: 156310 - RNA, 32 nt, Homo Sapiens
gauaugugaauggacuccauggacagaaaagc

SEQ ID NO: 156311 - RNA, 32 nt, Homo Sapiens
ugauuuuccuuccaaguguuucaguuguauga

SEQ ID NO: 156312 - RNA, 32 nt, Homo Sapiens
aauauuuccucuguuuauuccuccucucccuc

SEQ ID NO: 156313 - RNA, 32 nt, Homo Sapiens
ggauucugcagauuuuaaccacuguccccacu

SEQ ID NO: 156314 - RNA, 32 nt, Homo Sapiens
uguucauuuagcuguuuguaauuuuuguuaau

SEQ ID NO: 156315 - RNA, 32 nt, Homo Sapiens
acggaccagaggucaaguaacuuuacacugcu

SEQ ID NO: 156316 - RNA, 32 nt, Homo Sapiens
aguuuaucuuggaaaaauccaaaaaggcaaaa

SEQ ID NO: 156317 - RNA, 32 nt, Homo Sapiens
agggacucagggugggucagguaacuggaaag

SEQ ID NO: 156318 - RNA, 31 nt, Homo Sapiens
agccaggagccccguagccagggaugguccu

SEQ ID NO: 156319 - RNA, 32 nt, Homo Sapiens
guccugcgcgcccucggccuccauccccaagu

SEQ ID NO: 156320 - RNA, 32 nt, Homo Sapiens
ucggacacagagcggcguccagcugagcggcu

SEQ ID NO: 156321 - RNA, 32 nt, Homo Sapiens
uguaauaugauuuuugaacuagcugauaauaa

SEQ ID NO: 156322 - RNA, 32 nt, Homo Sapiens
cgccuggacggcggaggguggcugggaggggc

SEQ ID NO: 156323 - RNA, 32 nt, Homo Sapiens
gcggcucccgggaagcggggcuccucacuucc

SEQ ID NO: 156324 - RNA, 32 nt, Homo Sapiens
ugccuuucuuugcauggcuuggacccuaucug

SEQ ID NO: 156325 - RNA, 32 nt, Homo Sapiens
ggccugggaaguugaggucacuuuuuacaggg

SEQ ID NO: 156326 - RNA, 32 nt, Homo Sapiens
gaauuauuucuuuucacaaguuaauauaggga

SEQ ID NO: 156327 - RNA, 32 nt, Homo Sapiens
uccggaaagcugcggcccagcgcggacuagug

SEQ ID NO: 156328 - RNA, 32 nt, Homo Sapiens
gugggcuguucagcuuccugcugcuggggcca

SEQ ID NO: 156329 - RNA, 32 nt, Homo Sapiens
aguugggacucccagggcagccagucugcccc

SEQ ID NO: 156330 - RNA, 32 nt, Homo Sapiens
aauagacagaaccucuguuacucugugaccgg

SEQ ID NO: 156331 - RNA, 32 nt, Homo Sapiens
gaaggagaacuugggaucuuucugggaacccc

SEQ ID NO: 156332 - RNA, 32 nt, Homo Sapiens
ccuccaggcaaugagcaccagggcggguccag

SEQ ID NO: 156333 - RNA, 32 nt, Homo Sapiens
gacauugcuagccugcccugggaccccgccug

SEQ ID NO: 156334 - RNA, 32 nt, Homo Sapiens
ccacacauguuggauguuaaaaaggaaauguu

SEQ ID NO: 156335 - RNA, 32 nt, Homo Sapiens
aguuuucauuuuugagggguaaucaccuucaa

SEQ ID NO: 156336 - RNA, 32 nt, Homo Sapiens
uuucauuucucuuggggugcaguggggauuaa

SEQ ID NO: 156337 - RNA, 32 nt, Homo Sapiens
cugcuuuaacuccuggaagaaugacagaugac

SEQ ID NO: 156338 - RNA, 31 nt, Homo Sapiens
agugagaugaucacacucagagcccagugag

SEQ ID NO: 156339 - RNA, 32 nt, Homo Sapiens
uaacuuuuugugucuugucaugucagagaaua

SEQ ID NO: 156340 - RNA, 32 nt, Homo Sapiens
cuuuuugaaaauauagguaccuggguaucaca

SEQ ID NO: 156341 - RNA, 32 nt, Homo Sapiens
cuuuucaucuuaggaacaauuaggaagaaucu

SEQ ID NO: 156342 - RNA, 32 nt, Homo Sapiens
aaccacaagggauuguccugacaacuuguggg

SEQ ID NO: 156343 - RNA, 32 nt, Homo Sapiens
guguccaggcugaagucagggcccggccagca

SEQ ID NO: 156344 - RNA, 32 nt, Homo Sapiens
cacccucccucagccccuccccuccggcccgu

SEQ ID NO: 156345 - RNA, 32 nt, Homo Sapiens
cagccaggauugcugcugcugcugcuacuccu

SEQ ID NO: 156346 - RNA, 31 nt, Homo Sapiens
uuuggaacaaaauaaacagaucuaaaaauuu

SEQ ID NO: 156347 - RNA, 32 nt, Homo Sapiens
ccaggcugucucccaguacuuccuggacucua

SEQ ID NO: 156348 - RNA, 32 nt, Homo Sapiens
cuugcaaaauggagaccaaauucuauccugug

SEQ ID NO: 156349 - RNA, 32 nt, Homo Sapiens
uggugaaaaucacuuaaaauauccgucccuuc

SEQ ID NO: 156350 - RNA, 32 nt, Homo Sapiens
ccacacccgcaugcgcccggugcagccugcca

SEQ ID NO: 156351 - RNA, 32 nt, Homo Sapiens
agggaggcgaccgcggaggguggcgaggggcg

SEQ ID NO: 156352 - RNA, 32 nt, Homo Sapiens
gcuuacgggugaagcucagagaagggucggau

SEQ ID NO: 156353 - RNA, 32 nt, Homo Sapiens
gcaacauccuggcuccucccacuugcuuucag

SEQ ID NO: 156354 - RNA, 32 nt, Homo Sapiens
cuguuuugcacgucuuuaucauuuuccuuuau

SEQ ID NO: 156355 - RNA, 32 nt, Homo Sapiens
accagaaaacaaugauuuuauaauauuuaacc

SEQ ID NO: 156356 - RNA, 32 nt, Homo Sapiens
aauaaaugaagcugcuggccgggcgcgguggc

SEQ ID NO: 156357 - RNA, 32 nt, Homo Sapiens
accuggaguggaaggagcagaguugcaaauua

SEQ ID NO: 156358 - RNA, 31 nt, Homo Sapiens
ggcuuugcaaggucuuucagaauucaaggca

SEQ ID NO: 156359 - RNA, 32 nt, Homo Sapiens
gguccacguuccugauaccccauccuccugaa

SEQ ID NO: 156360 - RNA, 32 nt, Homo Sapiens
uggagguggcugcggcagcugauguggccuca

SEQ ID NO: 156361 - RNA, 32 nt, Homo Sapiens
uucaaucaauucuccuaccucaacuuccugag

SEQ ID NO: 156362 - RNA, 32 nt, Homo Sapiens
cucgcuguuacggagcgagaccugcugagaau

SEQ ID NO: 156363 - RNA, 32 nt, Homo Sapiens
gauccuagauuccaccugagucaauugugucc

SEQ ID NO: 156364 - RNA, 32 nt, Homo Sapiens
guauuuguauaaauaucacuuaugucuagcau

SEQ ID NO: 156365 - RNA, 32 nt, Homo Sapiens
uaaauguaaagucuuuaaaauaaacuauuaca

SEQ ID NO: 156366 - RNA, 32 nt, Homo Sapiens
accauauggaacaucccaaggcugucccauaa

SEQ ID NO: 156367 - RNA, 32 nt, Homo Sapiens
cuugaauuaaauuuauuucuuaagaaaaagca

SEQ ID NO: 156368 - RNA, 32 nt, Homo Sapiens
ccaauuggaagacaucauuggguucuuacuuu

SEQ ID NO: 156369 - RNA, 32 nt, Homo Sapiens
agguaacuccuagauaucaaacuaauuuguug

SEQ ID NO: 156370 - RNA, 32 nt, Homo Sapiens
aauugcacaauuuuuugcauuuuuaccugaug

SEQ ID NO: 156371 - RNA, 32 nt, Homo Sapiens
uauuaaugauaaaaauaaugcauuuguauugu

SEQ ID NO: 156372 - RNA, 32 nt, Homo Sapiens
gccucccucugacuucugggcgccagauccug

SEQ ID NO: 156373 - RNA, 32 nt, Homo Sapiens
gcggcggcggccugcccccucugcgggaagcg

SEQ ID NO: 156374 - RNA, 32 nt, Homo Sapiens
gucaaggacuuccuuuucccugccaaaauggu

SEQ ID NO: 156375 - RNA, 32 nt, Homo Sapiens
uuggacccuccucuucacggacccaacugugc

SEQ ID NO: 156376 - RNA, 32 nt, Homo Sapiens
aaggguagcagaauaugccaucuuuggcauaa

SEQ ID NO: 156377 - RNA, 32 nt, Homo Sapiens
ucggaaccugcacuucuuccccccagaguaug

SEQ ID NO: 156378 - RNA, 32 nt, Homo Sapiens
aaauuuaggagacaaugaugcaggcccaggaa

SEQ ID NO: 156379 - RNA, 32 nt, Homo Sapiens
ccucggcgccuggccuggccggugcugcacau

SEQ ID NO: 156380 - RNA, 32 nt, Homo Sapiens
acccaccccucgcugcuugcccugcgucgccu

SEQ ID NO: 156381 - RNA, 32 nt, Homo Sapiens
aguuaaaguuauucuuuuuuauuccaauaauu

SEQ ID NO: 156382 - RNA, 32 nt, Homo Sapiens
acuuaaaagaguuuuuucaaugcugcagugac

SEQ ID NO: 156383 - RNA, 31 nt, Homo Sapiens
auacuauugugaguucucagagcaugaacug

SEQ ID NO: 156384 - RNA, 32 nt, Homo Sapiens
gucacaacaggcaagggaaagaaaccagaacc

SEQ ID NO: 156385 - RNA, 32 nt, Homo Sapiens
gucuggcagcguggggagagggaccaaccgac

SEQ ID NO: 156386 - RNA, 32 nt, Homo Sapiens
aggauuaucuucugguguuguguccaucauaa

SEQ ID NO: 156387 - RNA, 32 nt, Homo Sapiens
agucucucucucucuuuuuuuuuuuuuacuua

SEQ ID NO: 156388 - RNA, 32 nt, Homo Sapiens
agucagaguggcugcuggcccugguagauuug

SEQ ID NO: 156389 - RNA, 32 nt, Homo Sapiens
ugaggagaauaaaucucagcauaaaggaacaa

SEQ ID NO: 156390 - RNA, 32 nt, Homo Sapiens
ggggacagugcugucccccaccccugcacaca

SEQ ID NO: 156391 - RNA, 32 nt, Homo Sapiens
ggggaggacaauccggccuucuugggacuguu

SEQ ID NO: 156392 - RNA, 32 nt, Homo Sapiens
cucuguucauauauuuuaaugcaaauuaccuu

SEQ ID NO: 156393 - RNA, 32 nt, Homo Sapiens
ugugucuucuaccugcauuuuggcaucagagc

SEQ ID NO: 156394 - RNA, 32 nt, Homo Sapiens
gaugugcucccucucuugaugcuuggccccug

SEQ ID NO: 156395 - RNA, 32 nt, Homo Sapiens
aaaaaagacuaaaagauauacagagaagacau

SEQ ID NO: 156396 - RNA, 32 nt, Homo Sapiens
cccacgcccucccucuccagugcaggaucauu

SEQ ID NO: 156397 - RNA, 32 nt, Homo Sapiens
augaucagugucuauuugaugugaugcagauc

SEQ ID NO: 156398 - RNA, 32 nt, Homo Sapiens
uucagaaccaguccuccuuucauuucaaaacc

SEQ ID NO: 156399 - RNA, 32 nt, Homo Sapiens
ccagggcagaggggcgagggagaggcuuuugc

SEQ ID NO: 156400 - RNA, 32 nt, Homo Sapiens
gcugcuugacuucaaaugauugugugauaagu

SEQ ID NO: 156401 - RNA, 32 nt, Homo Sapiens
ccccuuucacucaauucucaccaacucuuucu

SEQ ID NO: 156402 - RNA, 32 nt, Homo Sapiens
uugguuuauaugcuuccuguacauuuccucag

SEQ ID NO: 156403 - RNA, 32 nt, Homo Sapiens
ucaggcguuuaauuccuugcuccggagauauu

SEQ ID NO: 156404 - RNA, 32 nt, Homo Sapiens
uaagaguuuuucugccauuguuuuuuguauga

SEQ ID NO: 156405 - RNA, 32 nt, Homo Sapiens
cccucucuaccaaacaaacaaacaaacaaaca

SEQ ID NO: 156406 - RNA, 32 nt, Homo Sapiens
aaaucacgacagaguccauguuggaggugaua

SEQ ID NO: 156407 - RNA, 32 nt, Homo Sapiens
uuuguccuccuguuuaauccacuuccgugguu

SEQ ID NO: 156408 - RNA, 32 nt, Homo Sapiens
ucacgcacccucaagagugugggugagacaua

SEQ ID NO: 156409 - RNA, 32 nt, Homo Sapiens
auauuaaccccugaccaaaacuaccuguguua

SEQ ID NO: 156410 - RNA, 32 nt, Homo Sapiens
gccagugggggaagaggggcuggcucugagac

SEQ ID NO: 156411 - RNA, 30 nt, Homo Sapiens
cuguggauccucuugcuccaucuuaggggg

SEQ ID NO: 156412 - RNA, 32 nt, Homo Sapiens
cuagaugaugaaaucauacugguguuugcugu

SEQ ID NO: 156413 - RNA, 32 nt, Homo Sapiens
ggugcuccagacuugcucuccgucacuaacac

SEQ ID NO: 156414 - RNA, 32 nt, Homo Sapiens
cucagccaaacacagagcgggagugacgggag

SEQ ID NO: 156415 - RNA, 32 nt, Homo Sapiens
gucuguggccugugcccuccccacucccaggc

SEQ ID NO: 156416 - RNA, 32 nt, Homo Sapiens
cgaggaaaaacacaagaucuugacaacugcaa

SEQ ID NO: 156417 - RNA, 32 nt, Homo Sapiens
agcagcgcgcgugcgcacgacacgcgcugugc

SEQ ID NO: 156418 - RNA, 32 nt, Homo Sapiens
uccaagaaaaggaaaaucgguuccaaggacag

SEQ ID NO: 156419 - RNA, 32 nt, Homo Sapiens
ugaaguauuagcaaaagguuauacagccauau

SEQ ID NO: 156420 - RNA, 32 nt, Homo Sapiens
ccuggcagccauuucuccauggaguugcuaag

SEQ ID NO: 156421 - RNA, 32 nt, Homo Sapiens
caccaugugugauugucuucuguuaucauuug

SEQ ID NO: 156422 - RNA, 32 nt, Homo Sapiens
uguaucugcagcagaagcugcccacauucuga

SEQ ID NO: 156423 - RNA, 32 nt, Homo Sapiens
ucaucugagccgcccccuccccggccagcaug

SEQ ID NO: 156424 - RNA, 32 nt, Homo Sapiens
augaagugagcacaacugaaugugcagcuaug

SEQ ID NO: 156425 - RNA, 32 nt, Homo Sapiens
cuacacccaucccccuuccucuagcccucccu

SEQ ID NO: 156426 - RNA, 32 nt, Homo Sapiens
agcugcaggcucccugcccauaaaacagggug

SEQ ID NO: 156427 - RNA, 32 nt, Homo Sapiens
gccagaggcggggccugacuggagagcggccg

SEQ ID NO: 156428 - RNA, 32 nt, Homo Sapiens
aacugccuuucauaagcaaaucgacgcagugg

SEQ ID NO: 156429 - RNA, 32 nt, Homo Sapiens
gcuguggagagccagaagggccaggugcgccu

SEQ ID NO: 156430 - RNA, 31 nt, Homo Sapiens
augcccgucucuggaauguccacucccagag

SEQ ID NO: 156431 - RNA, 32 nt, Homo Sapiens
auauccuaaaauuucagcuugccuuuuugcgg

SEQ ID NO: 156432 - RNA, 32 nt, Homo Sapiens
acuaacacuuauaaaacucuuaucuugagucu

SEQ ID NO: 156433 - RNA, 31 nt, Homo Sapiens
gggcaggaaggcuccgcaggaccggaccccu

SEQ ID NO: 156434 - RNA, 32 nt, Homo Sapiens
acugccaugcuucgcccguccgcaugggcgcu

SEQ ID NO: 156435 - RNA, 32 nt, Homo Sapiens
gaaaaggaaaggaaacacaggagaaguuuuca

SEQ ID NO: 156436 - RNA, 32 nt, Homo Sapiens
uacacacuuuugugaagauuucaaggggaagg

SEQ ID NO: 156437 - RNA, 32 nt, Homo Sapiens
ggcacgaggccaccccggugcgcggguauggc

SEQ ID NO: 156438 - RNA, 32 nt, Homo Sapiens
cccuguaauauacuuaauaaaugacguccacc

SEQ ID NO: 156439 - RNA, 32 nt, Homo Sapiens
uguaauuccuuccucucccuuguucccaagua

SEQ ID NO: 156440 - RNA, 32 nt, Homo Sapiens
uuuuaaaacaaauguaaagggucuguuaauuc

SEQ ID NO: 156441 - RNA, 32 nt, Homo Sapiens
aguuucauuguuaacgggccuuauucugaucu

SEQ ID NO: 156442 - RNA, 32 nt, Homo Sapiens
acaguucccucaucuuugagaugcacugauca

SEQ ID NO: 156443 - RNA, 32 nt, Homo Sapiens
auaggaucucguuaaucaucaguuccuuugau

SEQ ID NO: 156444 - RNA, 32 nt, Homo Sapiens
agggcgcugaggugggggugcagaaaaggggu

SEQ ID NO: 156445 - RNA, 32 nt, Homo Sapiens
gcgggaaccugccucgugucucccaggagcca

SEQ ID NO: 156446 - RNA, 32 nt, Homo Sapiens
aaggauacuccagccggagaguccagagcccc

SEQ ID NO: 156447 - RNA, 32 nt, Homo Sapiens
agaacugcccaucaguuuuucuuguaaauuuu

SEQ ID NO: 156448 - RNA, 32 nt, Homo Sapiens
aagggucgccccacccggcuccgccugcggcc

SEQ ID NO: 156449 - RNA, 32 nt, Homo Sapiens
gacaucagcaccagugacaggcuggucagagg

SEQ ID NO: 156450 - RNA, 32 nt, Homo Sapiens
ggacgugggggaaaugucuaacguggagucca

SEQ ID NO: 156451 - RNA, 32 nt, Homo Sapiens
gcagcugccccgaggaaggagcccacagguga

SEQ ID NO: 156452 - RNA, 32 nt, Homo Sapiens
uuuucucauguuuucuucccuccaccuccacc

SEQ ID NO: 156453 - RNA, 31 nt, Homo Sapiens
caccuccgccccugccugcccgccugccggu

SEQ ID NO: 156454 - RNA, 32 nt, Homo Sapiens
aacggaugcggcccggcccgcagagcucagac

SEQ ID NO: 156455 - RNA, 32 nt, Homo Sapiens
ucuuuuauagcuuuuccaaacuuaauugcuaa

SEQ ID NO: 156456 - RNA, 32 nt, Homo Sapiens
uauagcugagcgguugaaaccacagugaucuc

SEQ ID NO: 156457 - RNA, 32 nt, Homo Sapiens
cucucuguuuauauagcaggugucacaacuaa

SEQ ID NO: 156458 - RNA, 32 nt, Homo Sapiens
cggaggcggaugggcgcggcucccucccccac

SEQ ID NO: 156459 - RNA, 32 nt, Homo Sapiens
ugcuguccuugacaagaagacuuacacccagu

SEQ ID NO: 156460 - RNA, 32 nt, Homo Sapiens
aagcaaggaaggagauaugagaaggaaguuuc

SEQ ID NO: 156461 - RNA, 32 nt, Homo Sapiens
cacccugugcuaucugaaaugaccucaauaca

SEQ ID NO: 156462 - RNA, 32 nt, Homo Sapiens
auuagaaggcuuuugccuuccauauccaucau

SEQ ID NO: 156463 - RNA, 32 nt, Homo Sapiens
cauucugaacccccuaagcacccaggccacag

SEQ ID NO: 156464 - RNA, 32 nt, Homo Sapiens
uauaacgauguacccaugcacuacggaauucu

SEQ ID NO: 156465 - RNA, 32 nt, Homo Sapiens
cuggaugcaggugccaagcucuccauguggug

SEQ ID NO: 156466 - RNA, 32 nt, Homo Sapiens
aacaucccaguccaccugaggaacugucucga

SEQ ID NO: 156467 - RNA, 32 nt, Homo Sapiens
cauuguauuuaccaccugagaaacucuguacu

SEQ ID NO: 156468 - RNA, 32 nt, Homo Sapiens
cauuuaacauaguuugugauauuucaguauag

SEQ ID NO: 156469 - RNA, 32 nt, Homo Sapiens
caaucacagccacugcaacuucaaggaagguu

SEQ ID NO: 156470 - RNA, 32 nt, Homo Sapiens
uccugagaaauguuucucuuagucuuuaaguu

SEQ ID NO: 156471 - RNA, 32 nt, Homo Sapiens
agcuccucucacucuucaguccuucuacuguc

SEQ ID NO: 156472 - RNA, 32 nt, Homo Sapiens
agcugaggggcuggggcugggguguugaaguu

SEQ ID NO: 156473 - RNA, 32 nt, Homo Sapiens
cgccagcgcucgccuuccuccuccuggacuuc

SEQ ID NO: 156474 - RNA, 32 nt, Homo Sapiens
uuuucuguguccuuggagugugggugggauuc

SEQ ID NO: 156475 - RNA, 31 nt, Homo Sapiens
ucccacacucacucuugcagagccugugucu

SEQ ID NO: 156476 - RNA, 32 nt, Homo Sapiens
ccaccaguaaaauuauccugaguagcuaaugc

SEQ ID NO: 156477 - RNA, 32 nt, Homo Sapiens
agggccaccucuugcuuggggagccccaccca

SEQ ID NO: 156478 - RNA, 32 nt, Homo Sapiens
uaggugaugggacuuuuaaagguuugaauuua

SEQ ID NO: 156479 - RNA, 32 nt, Homo Sapiens
uuccacaaauacuugauacaagauuuaauuuc

SEQ ID NO: 156480 - RNA, 32 nt, Homo Sapiens
cggcaccgcucccucaggagucgccuaggccg

SEQ ID NO: 156481 - RNA, 32 nt, Homo Sapiens
cagcucgcgccgggcccccgcggccaccauga

SEQ ID NO: 156482 - RNA, 32 nt, Homo Sapiens
cccuucuguaaaauaugaagaaaagugcucuu

SEQ ID NO: 156483 - RNA, 32 nt, Homo Sapiens
ugcucgcuucauuugccuuguuuacucauccu

SEQ ID NO: 156484 - RNA, 32 nt, Homo Sapiens
aaugucacccugccuccagcuagcuaugggcc

SEQ ID NO: 156485 - RNA, 32 nt, Homo Sapiens
aacgagcugagaaacuuuucaugguaaacuca

SEQ ID NO: 156486 - RNA, 32 nt, Homo Sapiens
gcagucaucgccauaugguauacucucucuag

SEQ ID NO: 156487 - RNA, 32 nt, Homo Sapiens
ugucucaaacuuggacccacgaacacacccca

SEQ ID NO: 156488 - RNA, 32 nt, Homo Sapiens
ugcuugaaguuccagaaucacuaagggcagaa

SEQ ID NO: 156489 - RNA, 32 nt, Homo Sapiens
aucggcuccgcgggcggugcuccagggacgcg

SEQ ID NO: 156490 - RNA, 32 nt, Homo Sapiens
agcaauacauaaauacuauagaaaauuuagca

SEQ ID NO: 156491 - RNA, 32 nt, Homo Sapiens
uucuacccaagaaugguauccuugcugggcca

SEQ ID NO: 156492 - RNA, 32 nt, Homo Sapiens
accaggccggccagcccuguucuuugcccgaa

SEQ ID NO: 156493 - RNA, 32 nt, Homo Sapiens
ccacuccugugcucucuucugagcaggaacug

SEQ ID NO: 156494 - RNA, 32 nt, Homo Sapiens
ggagguggaaugaaguuuuucauauuucugac

SEQ ID NO: 156495 - RNA, 32 nt, Homo Sapiens
uuuuguuucuuaccucuuacuguuuaaccugu

SEQ ID NO: 156496 - RNA, 32 nt, Homo Sapiens
uggugcugcgccauccuuugugugcccgggaa

SEQ ID NO: 156497 - RNA, 32 nt, Homo Sapiens
acaucaccacagagacccgcggccuccccgcc

SEQ ID NO: 156498 - RNA, 32 nt, Homo Sapiens
ugcaauguuauuauuggcuugcacuuugugag

SEQ ID NO: 156499 - RNA, 32 nt, Homo Sapiens
gccuuugcaugggccuggcccggcucacauuc

SEQ ID NO: 156500 - RNA, 32 nt, Homo Sapiens
gcagaaagggaagcucaggguaaggagaccug

SEQ ID NO: 156501 - RNA, 32 nt, Homo Sapiens
cccuagcauccccuccucccgcccaucugucu

SEQ ID NO: 156502 - RNA, 32 nt, Homo Sapiens
uaccagguagagagagggccagggcugaguuc

SEQ ID NO: 156503 - RNA, 32 nt, Homo Sapiens
accgguccucugcggagagggccccgcccucu

SEQ ID NO: 156504 - RNA, 32 nt, Homo Sapiens
caggaugacugaacaggagaaaaggaacuaau

SEQ ID NO: 156505 - RNA, 32 nt, Homo Sapiens
gauguccacuuucugcuuuucuuucuuucuuu

SEQ ID NO: 156506 - RNA, 32 nt, Homo Sapiens
cugccacaaccucaggcugggcaccaaacacc

SEQ ID NO: 156507 - RNA, 30 nt, Homo Sapiens
acccgggccaccccucccucuagguuuaca

SEQ ID NO: 156508 - RNA, 32 nt, Homo Sapiens
gaagccggguggcauggcagcgagcacggaca

SEQ ID NO: 156509 - RNA, 32 nt, Homo Sapiens
uauuuucuuaaacauauucauaaaaauuauuu

SEQ ID NO: 156510 - RNA, 32 nt, Homo Sapiens
ccccgagguucgcgccccuuguccuccuucgu

SEQ ID NO: 156511 - RNA, 32 nt, Homo Sapiens
gcgugaggacaaacuccgcaggggcugugaau

SEQ ID NO: 156512 - RNA, 32 nt, Homo Sapiens
auggguuucaagcacaagaauaugacuagauu

SEQ ID NO: 156513 - RNA, 32 nt, Homo Sapiens
aagucccuuuuggaaauacaagccauaacauu

SEQ ID NO: 156514 - RNA, 31 nt, Homo Sapiens
accacggucccaggcccaggaguccaauuau

SEQ ID NO: 156515 - RNA, 32 nt, Homo Sapiens
ccugcuccuuuuccggccgcccuuccucagcc

SEQ ID NO: 156516 - RNA, 32 nt, Homo Sapiens
gcgcagaaggcugcugccgccggacgccucca

SEQ ID NO: 156517 - RNA, 32 nt, Homo Sapiens
ccucaccuggaaagccauguccugcuggccuc

SEQ ID NO: 156518 - RNA, 32 nt, Homo Sapiens
ccucccuagaaaaaauggauucugauugguuc

SEQ ID NO: 156519 - RNA, 32 nt, Homo Sapiens
cgagugucagggccggccggggcggcgcuucu

SEQ ID NO: 156520 - RNA, 32 nt, Homo Sapiens
cgagcccugcgcgcucacggguggcggggccg

SEQ ID NO: 156521 - RNA, 32 nt, Homo Sapiens
cagguccgccagcagccgguucagccagaaua

SEQ ID NO: 156522 - RNA, 32 nt, Homo Sapiens
ccauacuaaugacaaaaccauaaaaaccuucc

SEQ ID NO: 156523 - RNA, 32 nt, Homo Sapiens
gaaagagcuauuuuaacagaagcaacucaaag

SEQ ID NO: 156524 - RNA, 32 nt, Homo Sapiens
acuaagggaguaccuuauuauccuacaucgca

SEQ ID NO: 156525 - RNA, 32 nt, Homo Sapiens
gagccaggcuggaagucaaguggcuucucccu

SEQ ID NO: 156526 - RNA, 32 nt, Homo Sapiens
uggcagguggcugagcaggagcucccaagugc

SEQ ID NO: 156527 - RNA, 32 nt, Homo Sapiens
uucuucaucaaaguacaaaaacgucuguggag

SEQ ID NO: 156528 - RNA, 32 nt, Homo Sapiens
uuuuuuggagacggagucucgcccugucgcca

SEQ ID NO: 156529 - RNA, 32 nt, Homo Sapiens
uuucuaauacccuugauaaaauguacaaagcu

SEQ ID NO: 156530 - RNA, 32 nt, Homo Sapiens
aaugauguuuucaggugucauggacuguugcc

SEQ ID NO: 156531 - RNA, 32 nt, Homo Sapiens
gagggcccccgguguggucacccggcgcgccc

SEQ ID NO: 156532 - RNA, 32 nt, Homo Sapiens
ccggagcgcgcagggcuugcugccgccaccgc

SEQ ID NO: 156533 - RNA, 32 nt, Homo Sapiens
uucuccgccacccacacccuucccacccugcu

SEQ ID NO: 156534 - RNA, 32 nt, Homo Sapiens
cauuuuguuucauaugaacuguggcuuugacc

SEQ ID NO: 156535 - RNA, 32 nt, Homo Sapiens
auuuaaacugugguauguaaauuuaauaguag

SEQ ID NO: 156536 - RNA, 29 nt, Homo Sapiens
uauggaauaaaguggacauuuuaaaacua

SEQ ID NO: 156537 - RNA, 32 nt, Homo Sapiens
uccuggagccugucgacguccauggcuuccca

SEQ ID NO: 156538 - RNA, 32 nt, Homo Sapiens
cguuaacuuccacugucuccgucuuggauuag

SEQ ID NO: 156539 - RNA, 32 nt, Homo Sapiens
uaguaccugccagcuuucgccacaggaggcug

SEQ ID NO: 156540 - RNA, 32 nt, Homo Sapiens
ggaacuuguauuacuuauggcguucaggagac

SEQ ID NO: 156541 - RNA, 28 nt, Homo Sapiens
aggguaguggacaccaggauccuuugga

SEQ ID NO: 156542 - RNA, 32 nt, Homo Sapiens
gaaggcugcccccaacucugcacccgcccccc

SEQ ID NO: 156543 - RNA, 32 nt, Homo Sapiens
gagacaguguuagggaucuuggaagcacagcc

SEQ ID NO: 156544 - RNA, 32 nt, Homo Sapiens
ucacuuuccuuccucgcugcacuccccgccac

SEQ ID NO: 156545 - RNA, 32 nt, Homo Sapiens
gagucacagagccgaguguagcaagaaaaggc

SEQ ID NO: 156546 - RNA, 32 nt, Homo Sapiens
auuugcucccugguacgggcucuucuuaacag

SEQ ID NO: 156547 - RNA, 32 nt, Homo Sapiens
auuuuugcuuuuucuuuuuguuuuuaaaacuu

SEQ ID NO: 156548 - RNA, 32 nt, Homo Sapiens
gaggaaaggggagaagagcaaagggcgcuuuu

SEQ ID NO: 156549 - RNA, 32 nt, Homo Sapiens
agauugggcacuguggaauuuaaaucacucaa

SEQ ID NO: 156550 - RNA, 32 nt, Homo Sapiens
cccguggcucugcugccgcccacucccugccu

SEQ ID NO: 156551 - RNA, 32 nt, Homo Sapiens
caauaaaagccaggaacagagaagagauuaca

SEQ ID NO: 156552 - RNA, 32 nt, Homo Sapiens
ggggaggggggcgggcggggugggaagugccu

SEQ ID NO: 156553 - RNA, 32 nt, Homo Sapiens
uuuugagaauaaaacuucauauaaaauugaaa

SEQ ID NO: 156554 - RNA, 32 nt, Homo Sapiens
aucuuguucagaccaggcugcuccaucuccgc

SEQ ID NO: 156555 - RNA, 32 nt, Homo Sapiens
agguaagggaaugggcagcuuuguuuuauuua

SEQ ID NO: 156556 - RNA, 32 nt, Homo Sapiens
acaacccagccucccgggucccaggaggacuu

SEQ ID NO: 156557 - RNA, 32 nt, Homo Sapiens
ugccagccugaagggagggcagccacccugga

SEQ ID NO: 156558 - RNA, 32 nt, Homo Sapiens
cucccacuucuaauuucucuuuauuguuauua

SEQ ID NO: 156559 - RNA, 32 nt, Homo Sapiens
uaauuugaacagaggcacccuauggccuaggg

SEQ ID NO: 156560 - RNA, 32 nt, Homo Sapiens
cauuuaauuuuuuaaguuauccugaagaagga

SEQ ID NO: 156561 - RNA, 32 nt, Homo Sapiens
accaucuccaucugcccuuaaaugcuguaugc

SEQ ID NO: 156562 - RNA, 32 nt, Homo Sapiens
cugguggugcuggucuuuuccuccccauuccu

SEQ ID NO: 156563 - RNA, 32 nt, Homo Sapiens
uggagguggugcaccuuggacacguggacaag

SEQ ID NO: 156564 - RNA, 32 nt, Homo Sapiens
guggaugggugcucuguggugaauggguggcc

SEQ ID NO: 156565 - RNA, 32 nt, Homo Sapiens
acugcccaagaugccugucccucccccuccag

SEQ ID NO: 156566 - RNA, 32 nt, Homo Sapiens
uucagauguaacaaagauccuaaugaccuaau

SEQ ID NO: 156567 - RNA, 32 nt, Homo Sapiens
ucaugaaguauuuuggauuacagguauauuaa

SEQ ID NO: 156568 - RNA, 32 nt, Homo Sapiens
acacguggcagagcuguaaguaaaugcucggc

SEQ ID NO: 156569 - RNA, 32 nt, Homo Sapiens
aggcuuuuguacaggcugucccucugaccgaa

SEQ ID NO: 156570 - RNA, 32 nt, Homo Sapiens
uacaauaaaaauuuuaaaaauacaaaaaaaaa

SEQ ID NO: 156571 - RNA, 32 nt, Homo Sapiens
agaugagaugaccuuucacaucugguauccuc

SEQ ID NO: 156572 - RNA, 32 nt, Homo Sapiens
gcagguaucauauuucauguccugcuauuuaa

SEQ ID NO: 156573 - RNA, 32 nt, Homo Sapiens
gcuuggccagaauggagcagccgaagggaguu

SEQ ID NO: 156574 - RNA, 32 nt, Homo Sapiens
ugcgagagccacggcgggggcuggggcgagug

SEQ ID NO: 156575 - RNA, 32 nt, Homo Sapiens
cuaugcauuuuauugguuuguuuggaaaaugu

SEQ ID NO: 156576 - RNA, 32 nt, Homo Sapiens
agcaaaucaaggaaagagucuacagaaccaag

SEQ ID NO: 156577 - RNA, 30 nt, Homo Sapiens
augaaguggaagcuugaccagugucugcuc

SEQ ID NO: 156578 - RNA, 32 nt, Homo Sapiens
aaauaugauacauauuuccauuuauuuaggau

SEQ ID NO: 156579 - RNA, 32 nt, Homo Sapiens
ccaccaauugagcaagaugcugauucauuauu

SEQ ID NO: 156580 - RNA, 32 nt, Homo Sapiens
cuuucuuuagcauugauuuaauuucagaacau

SEQ ID NO: 156581 - RNA, 32 nt, Homo Sapiens
guaaaugugaagaucaugauucuuguuuuucu

SEQ ID NO: 156582 - RNA, 32 nt, Homo Sapiens
guauuuuauaagaaagacaaucaaauaaaccu

SEQ ID NO: 156583 - RNA, 32 nt, Homo Sapiens
gacuaaacaaaauaaaauaacagugcaaaaga

SEQ ID NO: 156584 - RNA, 32 nt, Homo Sapiens
uucuuaaaacgaauaguaaaugauuucacagc

SEQ ID NO: 156585 - RNA, 32 nt, Homo Sapiens
ccaugucacauaguaacaacuaguaguaacaa

SEQ ID NO: 156586 - RNA, 32 nt, Homo Sapiens
cccucaccaaaggacucgcuuuguuuuucaaa

SEQ ID NO: 156587 - RNA, 32 nt, Homo Sapiens
aggcugggaaaugugguuugguuccugaccua

SEQ ID NO: 156588 - RNA, 32 nt, Homo Sapiens
auauauuuuuaaaaagaacuguugaguuuuau

SEQ ID NO: 156589 - RNA, 32 nt, Homo Sapiens
gaagagcccuguaguagggaguuuccaccuug

SEQ ID NO: 156590 - RNA, 32 nt, Homo Sapiens
caaguuuaaacacaaaauuuaucauaacaaaa

SEQ ID NO: 156591 - RNA, 29 nt, Homo Sapiens
ugggcugggggacagcugaggaugggccu

SEQ ID NO: 156592 - RNA, 32 nt, Homo Sapiens
aggccggcugacugcccucccuggguuacccu

SEQ ID NO: 156593 - RNA, 32 nt, Homo Sapiens
gaauuguacuggucuguccuuuuuuccuuugc

SEQ ID NO: 156594 - RNA, 32 nt, Homo Sapiens
ggggugggggguggaggggagcagguugaccu

SEQ ID NO: 156595 - RNA, 32 nt, Homo Sapiens
cuuagaugugaaaauaaauguuauuuguugau

SEQ ID NO: 156596 - RNA, 32 nt, Homo Sapiens
uguugaugauuaauggaaauguuuacagaucc

SEQ ID NO: 156597 - RNA, 32 nt, Homo Sapiens
gguucgugcccggcuggcgcggcgugguuuca

SEQ ID NO: 156598 - RNA, 32 nt, Homo Sapiens
aacaaaaacugggaauccauuaggaaacggau

SEQ ID NO: 156599 - RNA, 32 nt, Homo Sapiens
cccacacccacccacucacuuguaagcuccuu

SEQ ID NO: 156600 - RNA, 32 nt, Homo Sapiens
aaaacagcauugagugguuguuuucuguguaa

SEQ ID NO: 156601 - RNA, 32 nt, Homo Sapiens
uggggccaggguucaagaagugcugucagaaa

SEQ ID NO: 156602 - RNA, 32 nt, Homo Sapiens
cgcagccucccccgcgggggucgggcccgggc

SEQ ID NO: 156603 - RNA, 32 nt, Homo Sapiens
cucucucaccuucaggggcauucuucgggggu

SEQ ID NO: 156604 - RNA, 32 nt, Homo Sapiens
uuugggcugagacaguggcagcugcggccccg

SEQ ID NO: 156605 - RNA, 32 nt, Homo Sapiens
uccauagauuuauuuuacauuuagaguauuua

SEQ ID NO: 156606 - RNA, 32 nt, Homo Sapiens
caagauguugaagcgaggacgugguggguccu

SEQ ID NO: 156607 - RNA, 32 nt, Homo Sapiens
acacaggcacagaugcacacacacgcagacag

SEQ ID NO: 156608 - RNA, 32 nt, Homo Sapiens
ggcccggcggggccccugcugccucccugcag

SEQ ID NO: 156609 - RNA, 32 nt, Homo Sapiens
cagccccugccagucccccauggccccgugga

SEQ ID NO: 156610 - RNA, 32 nt, Homo Sapiens
auccagggaaagggcugcuaacuagucgcucc

SEQ ID NO: 156611 - RNA, 32 nt, Homo Sapiens
aauaucuagcagagaccucuuaaacccccauc

SEQ ID NO: 156612 - RNA, 30 nt, Homo Sapiens
gaggacagucuggcugcagagguggccugc

SEQ ID NO: 156613 - RNA, 32 nt, Homo Sapiens
gugguguggucucggcucaccacaaccucugc

SEQ ID NO: 156614 - RNA, 32 nt, Homo Sapiens
aggaacgguggcuuuuuuagaaacuaccuagg

SEQ ID NO: 156615 - RNA, 32 nt, Homo Sapiens
uccuaaguauuuuuauucugguguuuuaaaua

SEQ ID NO: 156616 - RNA, 32 nt, Homo Sapiens
ggagcuggugguucgggggcggugcuaggccc

SEQ ID NO: 156617 - RNA, 32 nt, Homo Sapiens
auauuuuugaugguaagacuguaauuaaguaa

SEQ ID NO: 156618 - RNA, 32 nt, Homo Sapiens
gugauacugaugcagaagcuaguagauugguu

SEQ ID NO: 156619 - RNA, 32 nt, Homo Sapiens
cccaacuggcagcgacagcugcagacgggcug

SEQ ID NO: 156620 - RNA, 32 nt, Homo Sapiens
gccaacaaauacaugaaaaaagagcucaacau

SEQ ID NO: 156621 - RNA, 32 nt, Homo Sapiens
uuuuaagaacuaaguggcaaauuccaugaaaa

SEQ ID NO: 156622 - RNA, 32 nt, Homo Sapiens
uggcaagucaaucuccuacagcuguucagcug

SEQ ID NO: 156623 - RNA, 32 nt, Homo Sapiens
uuucucuccgguuucucaucacuccaaccagc

SEQ ID NO: 156624 - RNA, 32 nt, Homo Sapiens
acugggucaccaucgagaucaauccuccuccc

SEQ ID NO: 156625 - RNA, 32 nt, Homo Sapiens
uaacauuuuacaguguuaccauuugaguaggg

SEQ ID NO: 156626 - RNA, 32 nt, Homo Sapiens
uaguauaagcuauauuuauuuuugauucauuu

SEQ ID NO: 156627 - RNA, 32 nt, Homo Sapiens
augccugaucagaugagaagcccgccaugaua

SEQ ID NO: 156628 - RNA, 32 nt, Homo Sapiens
agcgggacuaggcugcgccugcugccuccagc

SEQ ID NO: 156629 - RNA, 32 nt, Homo Sapiens
gcuuuaccaaaauacauguguaguugucacuu

SEQ ID NO: 156630 - RNA, 32 nt, Homo Sapiens
gaggggacccugcacucagccaucaaaguguu

SEQ ID NO: 156631 - RNA, 30 nt, Homo Sapiens
gauaaucuggacuggcccccgucuuugcuu

SEQ ID NO: 156632 - RNA, 31 nt, Homo Sapiens
gggaauggagccaccacauccaguuaaccug

SEQ ID NO: 156633 - RNA, 32 nt, Homo Sapiens
uugguuuuguuuucuuuuuuuaaugucagagg

SEQ ID NO: 156634 - RNA, 32 nt, Homo Sapiens
uugucuuugucaauaccucauuuguaaaacag

SEQ ID NO: 156635 - RNA, 32 nt, Homo Sapiens
gccaagagaaggaaaacccugucuuuagcacc

SEQ ID NO: 156636 - RNA, 32 nt, Homo Sapiens
guuuugaaggcacaugguucucugcuuuagau

SEQ ID NO: 156637 - RNA, 32 nt, Homo Sapiens
uuaaagcaacugagugucuagcccuaaauuaa

SEQ ID NO: 156638 - RNA, 32 nt, Homo Sapiens
uggggcacccucaaaauguggcucaacaaaaa

SEQ ID NO: 156639 - RNA, 32 nt, Homo Sapiens
gcgcugggcagggcucgugguggcaucagcag

SEQ ID NO: 156640 - RNA, 30 nt, Homo Sapiens
ggcggcuacuaaggcggcggcagugagggc

SEQ ID NO: 156641 - RNA, 32 nt, Homo Sapiens
ggacuccgcgcgccacagucgcugcaguucgc

SEQ ID NO: 156642 - RNA, 32 nt, Homo Sapiens
guacuugaucauuuuuaccauuauuuuuagga

SEQ ID NO: 156643 - RNA, 32 nt, Homo Sapiens
guccauccggcggguaguggcucugcgggacg

SEQ ID NO: 156644 - RNA, 32 nt, Homo Sapiens
cuugccuccacacccuugaggacccuggauga

SEQ ID NO: 156645 - RNA, 32 nt, Homo Sapiens
gcagcuguguucgcggacucagguggaaggaa

SEQ ID NO: 156646 - RNA, 32 nt, Homo Sapiens
ccauaaaccaagcaaaaguaaaugcaauaauu

SEQ ID NO: 156647 - RNA, 32 nt, Homo Sapiens
ucuuuccucaguucucacuaacaagaaagcac

SEQ ID NO: 156648 - RNA, 32 nt, Homo Sapiens
cucuuccucccacuauuuucucuucgcaggac

SEQ ID NO: 156649 - RNA, 32 nt, Homo Sapiens
uauagaacuauuuggauuuucucauuuuuagu

SEQ ID NO: 156650 - RNA, 32 nt, Homo Sapiens
ccccguugggacccacggcucucgucccucug

SEQ ID NO: 156651 - RNA, 32 nt, Homo Sapiens
cauccuacuguaauaaagaugauugugaaaua

SEQ ID NO: 156652 - RNA, 32 nt, Homo Sapiens
uguaaacccagcuuagaagcacuguuguaaaa

SEQ ID NO: 156653 - RNA, 32 nt, Homo Sapiens
gcccuggggagugagcuuggugcgguaggugc

SEQ ID NO: 156654 - RNA, 32 nt, Homo Sapiens
gauuuuccugauuuccucuucucuugcccagu

SEQ ID NO: 156655 - RNA, 32 nt, Homo Sapiens
ugucccauauuaugauauauucaugcccucac

SEQ ID NO: 156656 - RNA, 32 nt, Homo Sapiens
uuaggauuuuucccccuuuaaauaaaaauauu

SEQ ID NO: 156657 - RNA, 32 nt, Homo Sapiens
cgcccugccaccuaguuccacauggaaccaac

SEQ ID NO: 156658 - RNA, 32 nt, Homo Sapiens
ucauuugcaguguaauauuggauuguaugaga

SEQ ID NO: 156659 - RNA, 32 nt, Homo Sapiens
agccuccacccccauuaaaacugcucuggacu

SEQ ID NO: 156660 - RNA, 32 nt, Homo Sapiens
guucuuauucugggagaacauaaggccaauaa

SEQ ID NO: 156661 - RNA, 30 nt, Homo Sapiens
cuucgugucugugcuggagcugcagccugc

SEQ ID NO: 156662 - RNA, 32 nt, Homo Sapiens
aguauuauagcuuuguagcaaguuuugaaacc

SEQ ID NO: 156663 - RNA, 27 nt, Homo Sapiens
ugagauucguccuucagccccaucaug

SEQ ID NO: 156664 - RNA, 32 nt, Homo Sapiens
aaaaguuagguaagacacuuuuuuacugcuuu

SEQ ID NO: 156665 - RNA, 32 nt, Homo Sapiens
cugcaggggcucuggagagaaacaauaaagag

SEQ ID NO: 156666 - RNA, 32 nt, Homo Sapiens
uuggcgggaguuggaagcuggugugaggcucu

SEQ ID NO: 156667 - RNA, 32 nt, Homo Sapiens
aagucuguacuauuuggucaguuuguauggaa

SEQ ID NO: 156668 - RNA, 32 nt, Homo Sapiens
cucaguccaaaagcggcuuuugguucggcgca

SEQ ID NO: 156669 - RNA, 32 nt, Homo Sapiens
ggucaggaauguggaccacgggccaacucagg

SEQ ID NO: 156670 - RNA, 32 nt, Homo Sapiens
guagaucacagcagaguuaccacugauaagag

SEQ ID NO: 156671 - RNA, 32 nt, Homo Sapiens
ggcucacugcagccuucgccucccggguucaa

SEQ ID NO: 156672 - RNA, 32 nt, Homo Sapiens
caaauggacuaacgugaugaagggcuggcagu

SEQ ID NO: 156673 - RNA, 32 nt, Homo Sapiens
cagaguguaggcaauuauguccugcuuugaua

SEQ ID NO: 156674 - RNA, 32 nt, Homo Sapiens
gauacugaauauuaaaaaccagcacauucuga

SEQ ID NO: 156675 - RNA, 31 nt, Homo Sapiens
ccaggcacugaacugcucagagcuugagaug

SEQ ID NO: 156676 - RNA, 32 nt, Homo Sapiens
gucuucuauaacuuacuaauaauauucuauau

SEQ ID NO: 156677 - RNA, 32 nt, Homo Sapiens
aaaaaugagggugauccuuauucaaaaauaac

SEQ ID NO: 156678 - RNA, 32 nt, Homo Sapiens
cccucuuggcuugauuuugcuucuuucuuucu

SEQ ID NO: 156679 - RNA, 32 nt, Homo Sapiens
agaguguuauuuaaugcuaaguuuaacugcuu

SEQ ID NO: 156680 - RNA, 32 nt, Homo Sapiens
ggcguuguuggcgggggccccgguggaggccc

SEQ ID NO: 156681 - RNA, 31 nt, Homo Sapiens
cggccgcggcacuuccugacuauuggcuggg

SEQ ID NO: 156682 - RNA, 32 nt, Homo Sapiens
cugaaaacgaucuuuacaaagcaguucuauua

SEQ ID NO: 156683 - RNA, 32 nt, Homo Sapiens
gcgggcagccuggccggucccugccgcagggu

SEQ ID NO: 156684 - RNA, 32 nt, Homo Sapiens
auggggcucugcccugcccacccccaggcccg

SEQ ID NO: 156685 - RNA, 32 nt, Homo Sapiens
gcagaggcccacggucuccugggucccggcca

SEQ ID NO: 156686 - RNA, 30 nt, Homo Sapiens
uagugccagcaagugggggaaacuuucagu

SEQ ID NO: 156687 - RNA, 32 nt, Homo Sapiens
guuaagugacuauaugccaugggauauaugga

SEQ ID NO: 156688 - RNA, 32 nt, Homo Sapiens
ggcgccagcagcagcccgcgggccucggagcc

SEQ ID NO: 156689 - RNA, 32 nt, Homo Sapiens
ucaggcugcuucugcucugugucugcccaggc

SEQ ID NO: 156690 - RNA, 32 nt, Homo Sapiens
aaggaaauauugcacuuucuguucucaugacu

SEQ ID NO: 156691 - RNA, 32 nt, Homo Sapiens
ggccccugcaguucccagucucuucuguccug

SEQ ID NO: 156692 - RNA, 32 nt, Homo Sapiens
acccccuccuccccgagcuuuccugaaccuuc

SEQ ID NO: 156693 - RNA, 32 nt, Homo Sapiens
aucauaaauauuaaagucgguuuauccaggca

SEQ ID NO: 156694 - RNA, 32 nt, Homo Sapiens
aaugucuguugcucaccucugucccuccagaa

SEQ ID NO: 156695 - RNA, 32 nt, Homo Sapiens
ucuagcuuaggacagaaucggauuucggcaug

SEQ ID NO: 156696 - RNA, 32 nt, Homo Sapiens
cagcccagcuggaagggcgucuucugcggaga

SEQ ID NO: 156697 - RNA, 30 nt, Homo Sapiens
ccacugccccgcuugggggaagccgagcga

SEQ ID NO: 156698 - RNA, 32 nt, Homo Sapiens
cuccuccaauuccccucccccaucauucuggu

SEQ ID NO: 156699 - RNA, 32 nt, Homo Sapiens
aauaacugaaguaaaaauaacuaguuguucaa

SEQ ID NO: 156700 - RNA, 32 nt, Homo Sapiens
cuccagcugggcaauccaccacuuccucuucc

SEQ ID NO: 156701 - RNA, 32 nt, Homo Sapiens
ugucauguauaaaauaugaauaaaauguccac

SEQ ID NO: 156702 - RNA, 31 nt, Homo Sapiens
ugggcgccgcucgcuccgccccgcgaagccc

SEQ ID NO: 156703 - RNA, 32 nt, Homo Sapiens
uccauuaugugaguggaaauuggaggggggag

SEQ ID NO: 156704 - RNA, 32 nt, Homo Sapiens
cagguagucaccauacuguuaagcauuugaac

SEQ ID NO: 156705 - RNA, 28 nt, Homo Sapiens
gacagugauugaaaacauuugaaaagcc

SEQ ID NO: 156706 - RNA, 32 nt, Homo Sapiens
caggucuuacagggcugcuugaacccucauag

SEQ ID NO: 156707 - RNA, 32 nt, Homo Sapiens
uuaauuuuuccacuucaguuuuauucuagaaa

SEQ ID NO: 156708 - RNA, 32 nt, Homo Sapiens
cugcagccgucgucgcucacguucccggcgac

SEQ ID NO: 156709 - RNA, 32 nt, Homo Sapiens
gaagaaagaacaaaucauaaaaaauguuugaa

SEQ ID NO: 156710 - RNA, 32 nt, Homo Sapiens
ugaggcuagacccuaagaaguaauuaagucaa

SEQ ID NO: 156711 - RNA, 32 nt, Homo Sapiens
ccaaaacugucaguaaaacuacaauaauuaca

SEQ ID NO: 156712 - RNA, 32 nt, Homo Sapiens
uaaguuccuaguucacaguuauucccacaaaa

SEQ ID NO: 156713 - RNA, 32 nt, Homo Sapiens
ugccuggauuuacccugaaagaccccggucca

SEQ ID NO: 156714 - RNA, 32 nt, Homo Sapiens
cuguauuagaaggcugcggugauucaauuaga

SEQ ID NO: 156715 - RNA, 32 nt, Homo Sapiens
cccauuuccuuccuggcacccguuucuguccc

SEQ ID NO: 156716 - RNA, 32 nt, Homo Sapiens
guucucgccaggccccgauacaugaauaacaa

SEQ ID NO: 156717 - RNA, 32 nt, Homo Sapiens
gucagagugacggaagaaaauguauguaacaa

SEQ ID NO: 156718 - RNA, 32 nt, Homo Sapiens
aucaaccugccaguggagucaggcagugcacu

SEQ ID NO: 156719 - RNA, 32 nt, Homo Sapiens
agcugaacaacaaggcuuugggugugaaggga

SEQ ID NO: 156720 - RNA, 32 nt, Homo Sapiens
cauggcccgggagugccccaccacguggcuuu

SEQ ID NO: 156721 - RNA, 32 nt, Homo Sapiens
ccaggagggaggcaggggaggggugcggcggu

SEQ ID NO: 156722 - RNA, 32 nt, Homo Sapiens
gagaaguauuaccuugauguccugguuucaga

SEQ ID NO: 156723 - RNA, 32 nt, Homo Sapiens
ggcacacacacacacacacacacacacacaca

SEQ ID NO: 156724 - RNA, 32 nt, Homo Sapiens
auaauagaacccaagagucuguuucaauuuau

SEQ ID NO: 156725 - RNA, 32 nt, Homo Sapiens
gaaaaaauuuaaaaguaaaaugucuuuccaaa

SEQ ID NO: 156726 - RNA, 32 nt, Homo Sapiens
guacugcugugaaaaauaaaugucuuuguuuu

SEQ ID NO: 156727 - RNA, 32 nt, Homo Sapiens
cagcuggugucuugguugacugagagucuggg

SEQ ID NO: 156728 - RNA, 32 nt, Homo Sapiens
gcgaugcaaugcuuuucuaaucugcaguggcu

SEQ ID NO: 156729 - RNA, 32 nt, Homo Sapiens
ugagcuuagaaacucaucguacacuugaccuu

SEQ ID NO: 156730 - RNA, 32 nt, Homo Sapiens
cgcgccgcgccgcuugccgccgggcuagcacu

SEQ ID NO: 156731 - RNA, 32 nt, Homo Sapiens
guagcccgcuaggcgcgccguccccagccccg

SEQ ID NO: 156732 - RNA, 32 nt, Homo Sapiens
caacugugcaggguugccauuggucacuuucu

SEQ ID NO: 156733 - RNA, 32 nt, Homo Sapiens
ggaaagaggcggguguggggucggggggcggu

SEQ ID NO: 156734 - RNA, 32 nt, Homo Sapiens
ggggucaggacagggccugauuugagccuccu

SEQ ID NO: 156735 - RNA, 32 nt, Homo Sapiens
guccaggcaauuuuucuauuuuauauuaagac

SEQ ID NO: 156736 - RNA, 32 nt, Homo Sapiens
gcccuuuccucccacuuuuccucccccauagc

SEQ ID NO: 156737 - RNA, 32 nt, Homo Sapiens
auuccuaucucacuccugacuaggcuauaaac

SEQ ID NO: 156738 - RNA, 32 nt, Homo Sapiens
aucagacauguucgaggacuagcugagggaga

SEQ ID NO: 156739 - RNA, 32 nt, Homo Sapiens
ugcuuuauagacuguaagaagagaacaucuca

SEQ ID NO: 156740 - RNA, 32 nt, Homo Sapiens
gaauccuuuuaaaaauauauauuccuaaaaua

SEQ ID NO: 156741 - RNA, 32 nt, Homo Sapiens
ggaagacggcggaggugcagguccuggugcuc

SEQ ID NO: 156742 - RNA, 27 nt, Homo Sapiens
aucuauuccuucuuccauucuugcuac

SEQ ID NO: 156743 - RNA, 32 nt, Homo Sapiens
ugggcgugguggcacaugcuuguaaucccagc

SEQ ID NO: 156744 - RNA, 27 nt, Homo Sapiens
aggacuuucuucuucaucuucaaacuc

SEQ ID NO: 156745 - RNA, 32 nt, Homo Sapiens
ugguguagcuccuucggagacaucugucuggc

SEQ ID NO: 156746 - RNA, 32 nt, Homo Sapiens
aggcuuuucuugccuuucccugaagcccugua

SEQ ID NO: 156747 - RNA, 32 nt, Homo Sapiens
agaggccuggcugcaccugagggccuggcuuc

SEQ ID NO: 156748 - RNA, 29 nt, Homo Sapiens
aagaggacaaguuugagaggcaacacuua

SEQ ID NO: 156749 - RNA, 32 nt, Homo Sapiens
ccggcuggggcuugggagcagcugcuguguca

SEQ ID NO: 156750 - RNA, 32 nt, Homo Sapiens
gagagcauaaaauaaaccugacuguaugaagu

SEQ ID NO: 156751 - RNA, 32 nt, Homo Sapiens
ggguuccauguuuuccuuguucccucccaugc

SEQ ID NO: 156752 - RNA, 29 nt, Homo Sapiens
agguuugcauguaugugcaugggugugug

SEQ ID NO: 156753 - RNA, 32 nt, Homo Sapiens
gggagagcgggaagccugagggggcggggccg

SEQ ID NO: 156754 - RNA, 32 nt, Homo Sapiens
agaaugaggccaaaugcagagaugaggcuaag

SEQ ID NO: 156755 - RNA, 32 nt, Homo Sapiens
uggguggagguguggcugggcugggggccauu

SEQ ID NO: 156756 - RNA, 32 nt, Homo Sapiens
gcucauccgagggcuuccugaugugacggacu

SEQ ID NO: 156757 - RNA, 32 nt, Homo Sapiens
ugaaguacaaauacuuagcaccauagauugua

SEQ ID NO: 156758 - RNA, 32 nt, Homo Sapiens
ccaaacauggauaaagauuaagcuucucaaag

SEQ ID NO: 156759 - RNA, 32 nt, Homo Sapiens
cacguguuuaggaaacaaaguaugcgcuacug

SEQ ID NO: 156760 - RNA, 32 nt, Homo Sapiens
ugggaauccagaacugccacccugcccagcag

SEQ ID NO: 156761 - RNA, 32 nt, Homo Sapiens
ccauugugggaagagaagaaaaguuccucagg

SEQ ID NO: 156762 - RNA, 32 nt, Homo Sapiens
guggguuucucugugcucugaaugggagccag

SEQ ID NO: 156763 - RNA, 32 nt, Homo Sapiens
uucuucgugcgcgguagccgccccacuugcgg

SEQ ID NO: 156764 - RNA, 32 nt, Homo Sapiens
uccgcccggccgcucaacccccgccaggacuc

SEQ ID NO: 156765 - RNA, 31 nt, Homo Sapiens
cuauggguuuugucaaauauaugauaaccug

SEQ ID NO: 156766 - RNA, 32 nt, Homo Sapiens
gaauugcagccgcggggcgggcggcggcggcg

SEQ ID NO: 156767 - RNA, 32 nt, Homo Sapiens
ugguccuccugggucugagcuaccauuuccag

SEQ ID NO: 156768 - RNA, 32 nt, Homo Sapiens
acaacacccagcuuuauguaaauauucugcag

SEQ ID NO: 156769 - RNA, 32 nt, Homo Sapiens
gguguuggguacccgagagacccggcgguggg

SEQ ID NO: 156770 - RNA, 32 nt, Homo Sapiens
cgcggagagacgcgggaagcaggggcugggcg

SEQ ID NO: 156771 - RNA, 32 nt, Homo Sapiens
gagcugguucuccagggcugcagucucuccag

SEQ ID NO: 156772 - RNA, 32 nt, Homo Sapiens
ccacccagggcucgcggggucccggugggugc

SEQ ID NO: 156773 - RNA, 32 nt, Homo Sapiens
guucuuccauaaggaaggcugguuauggauau

SEQ ID NO: 156774 - RNA, 32 nt, Homo Sapiens
aagauguggaaaucuuagccugccuuagccag

SEQ ID NO: 156775 - RNA, 32 nt, Homo Sapiens
uguggaugugggagcccaggccaggcagggag

SEQ ID NO: 156776 - RNA, 32 nt, Homo Sapiens
agccagcuccccagcaccgcgcggcggggacg

SEQ ID NO: 156777 - RNA, 32 nt, Homo Sapiens
uaguguagaccuguagccaccugucagaaggu

SEQ ID NO: 156778 - RNA, 32 nt, Homo Sapiens
gauguagacaccuuucaguaagccaaucauuu

SEQ ID NO: 156779 - RNA, 32 nt, Homo Sapiens
ggccucccacccauguagaacugugaguccau

SEQ ID NO: 156780 - RNA, 32 nt, Homo Sapiens
gacuuugauauauaaaugguuuucugagauga

SEQ ID NO: 156781 - RNA, 32 nt, Homo Sapiens
uuuagaguguguuuauucuucucuacuugauu

SEQ ID NO: 156782 - RNA, 32 nt, Homo Sapiens
uggguuuugugcuuacuguauguuggcgacuu

SEQ ID NO: 156783 - RNA, 32 nt, Homo Sapiens
uuaaagucuauuucuuuaaaguuuuguuuaau

SEQ ID NO: 156784 - RNA, 32 nt, Homo Sapiens
cccccagccuggccuggcauuucuuugaguuc

SEQ ID NO: 156785 - RNA, 32 nt, Homo Sapiens
gccccugggccgguccugccccgggaggucuc

SEQ ID NO: 156786 - RNA, 32 nt, Homo Sapiens
uugcacacaauuuuugguaguauacagaaaua

SEQ ID NO: 156787 - RNA, 32 nt, Homo Sapiens
gacagauguuuccguauuaccauuuuucuuuc

SEQ ID NO: 156788 - RNA, 32 nt, Homo Sapiens
caaaaaucaaaauaaaucucugugacuguuau

SEQ ID NO: 156789 - RNA, 32 nt, Homo Sapiens
ggggcccaccccuucccagcagcccucugagc

SEQ ID NO: 156790 - RNA, 32 nt, Homo Sapiens
cucaacucuggccccaggcccuguucuguuau

SEQ ID NO: 156791 - RNA, 32 nt, Homo Sapiens
aaaagaauuguaauaaguaauacuuggccaau

SEQ ID NO: 156792 - RNA, 32 nt, Homo Sapiens
uaugcauugugaccgaccccacuuccucagaa

SEQ ID NO: 156793 - RNA, 32 nt, Homo Sapiens
aaaccauauuuugacaaguuuauuuaauccag

SEQ ID NO: 156794 - RNA, 32 nt, Homo Sapiens
cagacacuccagacaugggagaaggacuuucu

SEQ ID NO: 156795 - RNA, 32 nt, Homo Sapiens
aaaauaagauacacaauaaucauugcuuuuug

SEQ ID NO: 156796 - RNA, 32 nt, Homo Sapiens
uugacaucucuuuugagcuaaucuucauuucu

SEQ ID NO: 156797 - RNA, 32 nt, Homo Sapiens
aggguaucugacaaugcugagguuaugaacaa

SEQ ID NO: 156798 - RNA, 32 nt, Homo Sapiens
uucuaaugugugcaagauuaacucacaaauuc

SEQ ID NO: 156799 - RNA, 32 nt, Homo Sapiens
agauaaggagggagggcgggugccagcaugcu

SEQ ID NO: 156800 - RNA, 32 nt, Homo Sapiens
accccucccugggaacccuggcccagaggaac

SEQ ID NO: 156801 - RNA, 32 nt, Homo Sapiens
acaugauaauuucucuagucuagagcuggaug

SEQ ID NO: 156802 - RNA, 32 nt, Homo Sapiens
guggcuggccgggcugggggcuccucacuucc

SEQ ID NO: 156803 - RNA, 32 nt, Homo Sapiens
gcccuggcccgcucccugcccgcggauaccuu

SEQ ID NO: 156804 - RNA, 32 nt, Homo Sapiens
ucacaugagagagaacaaauggcuguggguac

SEQ ID NO: 156805 - RNA, 31 nt, Homo Sapiens
aggugggguacuggcaucagagccuggugcg

SEQ ID NO: 156806 - RNA, 32 nt, Homo Sapiens
uguucagcucgcguccugcagcuguccgaggu

SEQ ID NO: 156807 - RNA, 32 nt, Homo Sapiens
agaccugaggcuuaucuuugcacauguuaaag

SEQ ID NO: 156808 - RNA, 32 nt, Homo Sapiens
cccagagccuucuuguuuaugaucagcuccag

SEQ ID NO: 156809 - RNA, 32 nt, Homo Sapiens
caccucacucuuaaaguggguuagaugaaauc

SEQ ID NO: 156810 - RNA, 32 nt, Homo Sapiens
aauacuaaaacaaacaaacaaacaaaaaacca

SEQ ID NO: 156811 - RNA, 32 nt, Homo Sapiens
cgcgugcgcacggguugcugcggccgcgccgg

SEQ ID NO: 156812 - RNA, 32 nt, Homo Sapiens
uguacguuuauuucuaaguauuucuuuaaguu

SEQ ID NO: 156813 - RNA, 32 nt, Homo Sapiens
ugcggcccgcggccccugggacccgagaaccc

SEQ ID NO: 156814 - RNA, 32 nt, Homo Sapiens
ugacuccgcccggaugcagagugggggucugu

SEQ ID NO: 156815 - RNA, 32 nt, Homo Sapiens
uccuggugggagagggaggagugagcucccug

SEQ ID NO: 156816 - RNA, 32 nt, Homo Sapiens
gcucaccuggcagcugccgucucugcccccug

SEQ ID NO: 156817 - RNA, 32 nt, Homo Sapiens
gggacaucaaggaacuacugcccccaguguuu

SEQ ID NO: 156818 - RNA, 32 nt, Homo Sapiens
cagaauguaaauaugaucugaccuuucccuga

SEQ ID NO: 156819 - RNA, 32 nt, Homo Sapiens
gggggccccgacccgugggucccggccaccag

SEQ ID NO: 156820 - RNA, 32 nt, Homo Sapiens
ccacaccccccgcuuuccuuuaucuccaggga

SEQ ID NO: 156821 - RNA, 32 nt, Homo Sapiens
agcugauagaaagugaacaggaagcaaacagg

SEQ ID NO: 156822 - RNA, 32 nt, Homo Sapiens
cucccgcgcccugugcuggccggagcagcguu

SEQ ID NO: 156823 - RNA, 32 nt, Homo Sapiens
ugcuagugcugcuuuacaaaugcagaccauuc

SEQ ID NO: 156824 - RNA, 32 nt, Homo Sapiens
cuuggagcccugcauccacgucuuguaacuaa

SEQ ID NO: 156825 - RNA, 32 nt, Homo Sapiens
gucuggguaaaaauagcucacauuuuugcuua

SEQ ID NO: 156826 - RNA, 32 nt, Homo Sapiens
ucugucuaacugugauaaaaacaagcucagga

SEQ ID NO: 156827 - RNA, 32 nt, Homo Sapiens
aagugugugcuaaggcacauggaagaccgauu

SEQ ID NO: 156828 - RNA, 32 nt, Homo Sapiens
uuucucuguacuuuucauucucuuuuaaugag

SEQ ID NO: 156829 - RNA, 32 nt, Homo Sapiens
uugcuuguaggauaguaaauggucaguauuga

SEQ ID NO: 156830 - RNA, 32 nt, Homo Sapiens
agaaaaauggcauuccucucugucucucccug

SEQ ID NO: 156831 - RNA, 32 nt, Homo Sapiens
gagaccgcgggcccgcgccagccucccacaca

SEQ ID NO: 156832 - RNA, 32 nt, Homo Sapiens
cucuaaguuauguacguauauauaagcugaaa

SEQ ID NO: 156833 - RNA, 32 nt, Homo Sapiens
ugacuugggucuugcuggccccugggugugcc

SEQ ID NO: 156834 - RNA, 32 nt, Homo Sapiens
ucuacacagcuauuaguggccgauguagcuau

SEQ ID NO: 156835 - RNA, 32 nt, Homo Sapiens
aguaaggcucccggucucgcugcugucucuuu

SEQ ID NO: 156836 - RNA, 28 nt, Homo Sapiens
ggcuggaauuaggacauuauagaacaaa

SEQ ID NO: 156837 - RNA, 32 nt, Homo Sapiens
uuccugaaaguguuuuuaaauaaagaacaauu

SEQ ID NO: 156838 - RNA, 32 nt, Homo Sapiens
aaauuuuaucuaggauggaaaaucaggauaga

SEQ ID NO: 156839 - RNA, 32 nt, Homo Sapiens
gaacuguuauaauauuacaacuugcuuuuuag

SEQ ID NO: 156840 - RNA, 32 nt, Homo Sapiens
ggagacagcaaccagaaguuaaaccaugugac

SEQ ID NO: 156841 - RNA, 32 nt, Homo Sapiens
cugaaccugaccaaaagccauggcuguugcuc

SEQ ID NO: 156842 - RNA, 32 nt, Homo Sapiens
gcacuuuucaccauaauuuaauuuaguggaaa

SEQ ID NO: 156843 - RNA, 32 nt, Homo Sapiens
cguaugcauguguguuuauaugagugcaugug

SEQ ID NO: 156844 - RNA, 32 nt, Homo Sapiens
augugaaaacaucaaacacugcacaugacagg

SEQ ID NO: 156845 - RNA, 32 nt, Homo Sapiens
ugauuuuuuuuuaaguuuucuaagcaauauuu

SEQ ID NO: 156846 - RNA, 32 nt, Homo Sapiens
gggcacagagacaugagaagggcugugugugg

SEQ ID NO: 156847 - RNA, 32 nt, Homo Sapiens
cuuauuggggacggccacucucacaguuuggu

SEQ ID NO: 156848 - RNA, 32 nt, Homo Sapiens
ccaagcugcugggauugggaaggaguuucacc

SEQ ID NO: 156849 - RNA, 32 nt, Homo Sapiens
auuagcagcugaaaugccuuugguuuuggcuu

SEQ ID NO: 156850 - RNA, 32 nt, Homo Sapiens
uaggggaaaaagaaagcuuaaguuaaaacugc

SEQ ID NO: 156851 - RNA, 32 nt, Homo Sapiens
cgggucccgcaugagccccggcgguggcggca

SEQ ID NO: 156852 - RNA, 32 nt, Homo Sapiens
gguauaugucgugggacuggggugugggugac

SEQ ID NO: 156853 - RNA, 32 nt, Homo Sapiens
ggacaaucuugggccuccauggagaugaggug

SEQ ID NO: 156854 - RNA, 29 nt, Homo Sapiens
uuuuccauauguauauauuauggucucaa

SEQ ID NO: 156855 - RNA, 32 nt, Homo Sapiens
cgaguugguuuaucuuuguguacaugacuaua

SEQ ID NO: 156856 - RNA, 32 nt, Homo Sapiens
aguuugccaaacuucaggauuaucgacaagca

SEQ ID NO: 156857 - RNA, 32 nt, Homo Sapiens
auaucaaguauuuucuuaaagauauagauauu

SEQ ID NO: 156858 - RNA, 32 nt, Homo Sapiens
gccggggcgugcggcccguggcaugagguugu

SEQ ID NO: 156859 - RNA, 32 nt, Homo Sapiens
auuagaagcuuuuuuccaaaacuagaaacccu

SEQ ID NO: 156860 - RNA, 32 nt, Homo Sapiens
guacuauguaugcauuggugguaaauggaugu

SEQ ID NO: 156861 - RNA, 32 nt, Homo Sapiens
augaggacgugcgaccccggcgcggagaagcc

SEQ ID NO: 156862 - RNA, 32 nt, Homo Sapiens
ugaacaaucauacuuaacaaaacuacugaugg

SEQ ID NO: 156863 - RNA, 32 nt, Homo Sapiens
uauuuggccaacacugaggaugugguucaugg

SEQ ID NO: 156864 - RNA, 28 nt, Homo Sapiens
cagggaguuacaggagaccccgagacac

SEQ ID NO: 156865 - RNA, 32 nt, Homo Sapiens
cuuugagccugccuuccggugggagcagaaaa

SEQ ID NO: 156866 - RNA, 32 nt, Homo Sapiens
gguuucauuuuucucuucuguuaauacuuaga

SEQ ID NO: 156867 - RNA, 32 nt, Homo Sapiens
caagauuguaaauugucucaaagaccacguga

SEQ ID NO: 156868 - RNA, 32 nt, Homo Sapiens
ccuucuguuuguacacuugucuauuuucucuu

SEQ ID NO: 156869 - RNA, 32 nt, Homo Sapiens
ccacgaggcugugcugaacaugcugaaggaag

SEQ ID NO: 156870 - RNA, 32 nt, Homo Sapiens
ugaagugaagcauucuaugaaugugagcugaa

SEQ ID NO: 156871 - RNA, 32 nt, Homo Sapiens
agcaacaacaaaaugcuguauuugaguuucug

SEQ ID NO: 156872 - RNA, 32 nt, Homo Sapiens
ccggggacucugcggcggcgacccacgagcuc

SEQ ID NO: 156873 - RNA, 32 nt, Homo Sapiens
uggguuugcuuugcuuugggguucuucuauuu

SEQ ID NO: 156874 - RNA, 32 nt, Homo Sapiens
aacagugguagagagaauugcauauugccauu

SEQ ID NO: 156875 - RNA, 32 nt, Homo Sapiens
guuuccacuuuggguucguggagaccucgacc

SEQ ID NO: 156876 - RNA, 32 nt, Homo Sapiens
ucugcucugguaggacugucagacgcacacgc

SEQ ID NO: 156877 - RNA, 32 nt, Homo Sapiens
uaagggaugcaaaaccaagagaaucauucaug

SEQ ID NO: 156878 - RNA, 32 nt, Homo Sapiens
gccuaacugaagaucacaaggguuucuucugu

SEQ ID NO: 156879 - RNA, 32 nt, Homo Sapiens
guuuuguuuuguuuuauuauuuucauaucacc

SEQ ID NO: 156880 - RNA, 32 nt, Homo Sapiens
gaggauuaagugaaauguguuaaaugccuacu

SEQ ID NO: 156881 - RNA, 32 nt, Homo Sapiens
uaaucucacccucuccuccagugugggcuuga

SEQ ID NO: 156882 - RNA, 32 nt, Homo Sapiens
uacuaagaugcuucauggauacaagaguuaaa

SEQ ID NO: 156883 - RNA, 32 nt, Homo Sapiens
augcuggguuuuuuaauaccuuuauauaucau

SEQ ID NO: 156884 - RNA, 32 nt, Homo Sapiens
agcagagaacaaaaacaaaauaauccagugag

SEQ ID NO: 156885 - RNA, 32 nt, Homo Sapiens
cacuacucacagucucuuuaaucuucaguuuu

SEQ ID NO: 156886 - RNA, 32 nt, Homo Sapiens
ucuaguagugcugcaaacacuaacccagcagu

SEQ ID NO: 156887 - RNA, 32 nt, Homo Sapiens
guuucuggccccaggccacugguguuuucccu

SEQ ID NO: 156888 - RNA, 32 nt, Homo Sapiens
uacccgcuuccauggucuugcacuauaaacug

SEQ ID NO: 156889 - RNA, 32 nt, Homo Sapiens
cuuugcacacaguaacauccacagaacuaguc

SEQ ID NO: 156890 - RNA, 32 nt, Homo Sapiens
ccgugaugcccggcccugcuccugacagccuc

SEQ ID NO: 156891 - RNA, 32 nt, Homo Sapiens
gugcgcuggaggaggaggaggggggcccggag

SEQ ID NO: 156892 - RNA, 32 nt, Homo Sapiens
guuugaaaauuugacaagcacacuguccucuc

SEQ ID NO: 156893 - RNA, 32 nt, Homo Sapiens
gauauauuuguugucuucucaaguauuuaucc

SEQ ID NO: 156894 - RNA, 32 nt, Homo Sapiens
uuaagcauuuugcugcacugcccagugaaauc

SEQ ID NO: 156895 - RNA, 32 nt, Homo Sapiens
ccugcccggccugcggcccagcccuugcgccg

SEQ ID NO: 156896 - RNA, 32 nt, Homo Sapiens
ugcaggucuucuggccggagccccacaaggac

SEQ ID NO: 156897 - RNA, 32 nt, Homo Sapiens
ucauauuguucuacaccuguuuuguuauguaa

SEQ ID NO: 156898 - RNA, 32 nt, Homo Sapiens
gucugacuaugaugaauaaaucuuaaaugcuu

SEQ ID NO: 156899 - RNA, 32 nt, Homo Sapiens
cuggggagucccugccucuccucccugggaca

SEQ ID NO: 156900 - RNA, 32 nt, Homo Sapiens
uguacauggaaaugagcagucuuacuuuugua

SEQ ID NO: 156901 - RNA, 32 nt, Homo Sapiens
cugaaguuaugaaacauauaaugaaaacaauu

SEQ ID NO: 156902 - RNA, 32 nt, Homo Sapiens
uuggcuaugacaauuuguauggaggguacgau

SEQ ID NO: 156903 - RNA, 32 nt, Homo Sapiens
ugccaacacugguuuucuuagguuucuccauu

SEQ ID NO: 156904 - RNA, 32 nt, Homo Sapiens
acgaccgucucgccgccgcugcagagacgccc

SEQ ID NO: 156905 - RNA, 32 nt, Homo Sapiens
uuaacuuauuuuuucuaguuaaaauuuugcua

SEQ ID NO: 156906 - RNA, 32 nt, Homo Sapiens
ugccauuguaaauacaaguaucaaaauauucu

SEQ ID NO: 156907 - RNA, 32 nt, Homo Sapiens
acuuccccucauaaguuuguuuaaacacuuau

SEQ ID NO: 156908 - RNA, 32 nt, Homo Sapiens
accaccaaccaccuucuuccucucaacucugu

SEQ ID NO: 156909 - RNA, 32 nt, Homo Sapiens
auguaacauugaugaaccuugaaaauaugcua

SEQ ID NO: 156910 - RNA, 32 nt, Homo Sapiens
gcugaggcgucgccgcgcccggcagcgugagc

SEQ ID NO: 156911 - RNA, 32 nt, Homo Sapiens
auccacccacccaugaggggaaacguggggaa

SEQ ID NO: 156912 - RNA, 32 nt, Homo Sapiens
uagacaucagcuugcuuuuuaucuccuuuuuu

SEQ ID NO: 156913 - RNA, 32 nt, Homo Sapiens
uacuugaguucuuguccuucuaccaucaucac

SEQ ID NO: 156914 - RNA, 32 nt, Homo Sapiens
uuccccuuuucucuuguuucaauugggucuuu

SEQ ID NO: 156915 - RNA, 32 nt, Homo Sapiens
agcccaaauaccaugacauauugagcaucuuu

SEQ ID NO: 156916 - RNA, 32 nt, Homo Sapiens
gccagaucagugcgagugugacugaaaaugcc

SEQ ID NO: 156917 - RNA, 32 nt, Homo Sapiens
gucuguacugacgcgcccucgcuucuuccucu

SEQ ID NO: 156918 - RNA, 32 nt, Homo Sapiens
gccaguggaagacaaaggagcgugccgccucc

SEQ ID NO: 156919 - RNA, 32 nt, Homo Sapiens
aguaauguuucguugcacuuugaaagaucugc

SEQ ID NO: 156920 - RNA, 32 nt, Homo Sapiens
cuggugcccuccccuccacccucacaaggagc

SEQ ID NO: 156921 - RNA, 32 nt, Homo Sapiens
uaaggugauugggaaaauucuguugcaagaac

SEQ ID NO: 156922 - RNA, 32 nt, Homo Sapiens
cugggcugccagcagacacggggccuaaagcc

SEQ ID NO: 156923 - RNA, 31 nt, Homo Sapiens
gucccuggggcuaccaccugguugaucuauc

SEQ ID NO: 156924 - RNA, 32 nt, Homo Sapiens
aucaaacuggacagacuuaauacuguugccag

SEQ ID NO: 156925 - RNA, 32 nt, Homo Sapiens
caugccuagcuaauuuuuguauuuuuaguaga

SEQ ID NO: 156926 - RNA, 32 nt, Homo Sapiens
ggggccugcgggcagagcucgacaagcccagc

SEQ ID NO: 156927 - RNA, 32 nt, Homo Sapiens
auaguagguaauuccuuagagauacaguauac

SEQ ID NO: 156928 - RNA, 32 nt, Homo Sapiens
caaaauaguuuaggaaaaugagaggagaacag

SEQ ID NO: 156929 - RNA, 32 nt, Homo Sapiens
gggagagaacagaaagcugucccuggcugcgc

SEQ ID NO: 156930 - RNA, 32 nt, Homo Sapiens
ccaggcaagggccagugcgccugcuccugacc

SEQ ID NO: 156931 - RNA, 32 nt, Homo Sapiens
cgcuguuggccaucccuuccccagccacaggu

SEQ ID NO: 156932 - RNA, 32 nt, Homo Sapiens
auaauauuacaauaggacuuugagugugcauu

SEQ ID NO: 156933 - RNA, 32 nt, Homo Sapiens
cuucaagucaggcuaguggccauggugaaggu

SEQ ID NO: 156934 - RNA, 32 nt, Homo Sapiens
gccaucuuuggagagauuauggagauaaucuc

SEQ ID NO: 156935 - RNA, 32 nt, Homo Sapiens
caccgccugccaguucacaaccgcuccgagcg

SEQ ID NO: 156936 - RNA, 32 nt, Homo Sapiens
uaacuugauguuucauuuucuguugaggaacc

SEQ ID NO: 156937 - RNA, 32 nt, Homo Sapiens
cagaaugucuuguauuaaauguuuccucugua

SEQ ID NO: 156938 - RNA, 32 nt, Homo Sapiens
aucugacauaaugaaaaguaaucacuugaaga

SEQ ID NO: 156939 - RNA, 32 nt, Homo Sapiens
ccuacuaugaugaaaauugaagugggucaaaa

SEQ ID NO: 156940 - RNA, 32 nt, Homo Sapiens
caucacagcucuuaucagugagagcuguuuuu

SEQ ID NO: 156941 - RNA, 32 nt, Homo Sapiens
aaaugguccuugugcccuccccacucaucccu

SEQ ID NO: 156942 - RNA, 32 nt, Homo Sapiens
ucucuuuuaaaaguauagcauuaucuuguaua

SEQ ID NO: 156943 - RNA, 25 nt, Homo Sapiens
augaaugcgggccccggcugugaac

SEQ ID NO: 156944 - RNA, 32 nt, Homo Sapiens
gucucggccccgggaccccgccuccccgccag

SEQ ID NO: 156945 - RNA, 32 nt, Homo Sapiens
cacacacacauaauuucuuuagccauuccuca

SEQ ID NO: 156946 - RNA, 32 nt, Homo Sapiens
caagccaaagugggccccacccugcccccguc

SEQ ID NO: 156947 - RNA, 32 nt, Homo Sapiens
uaaugcuacgcucuuaacagugccaaaaaucc

SEQ ID NO: 156948 - RNA, 32 nt, Homo Sapiens
ugaggcugccgacuuuggacuccaggaagacg

SEQ ID NO: 156949 - RNA, 32 nt, Homo Sapiens
aggcugaccugccccaugcccucugagggugc

SEQ ID NO: 156950 - RNA, 32 nt, Homo Sapiens
gaguuuggacuggguuuuggaccuccaggggc

SEQ ID NO: 156951 - RNA, 32 nt, Homo Sapiens
acccaguguuucgcggacugaggucuccgcca

SEQ ID NO: 156952 - RNA, 32 nt, Homo Sapiens
agccacuugacuguccucgacggccuguucca

SEQ ID NO: 156953 - RNA, 32 nt, Homo Sapiens
ccagccucccccguccauccagcccuggggcu

SEQ ID NO: 156954 - RNA, 32 nt, Homo Sapiens
ggcccggguccaggaccacugagugagccagc

SEQ ID NO: 156955 - RNA, 32 nt, Homo Sapiens
agccaacagucaaaacagagaugugauaagga

SEQ ID NO: 156956 - RNA, 32 nt, Homo Sapiens
ccugugguucugcggccgcgcaguacaggcug

SEQ ID NO: 156957 - RNA, 32 nt, Homo Sapiens
ugccucugcgaagaaccuugugugacaaauga

SEQ ID NO: 156958 - RNA, 32 nt, Homo Sapiens
agccuucuccguccuguccccagcccacgugc

SEQ ID NO: 156959 - RNA, 32 nt, Homo Sapiens
agagggaguguugggugucuuccuggggaccu

SEQ ID NO: 156960 - RNA, 28 nt, Homo Sapiens
ccaguguuagaggauccaagcgaccuaa

SEQ ID NO: 156961 - RNA, 32 nt, Homo Sapiens
gcugaggaggcggcggcggagaucuggaaaca

SEQ ID NO: 156962 - RNA, 32 nt, Homo Sapiens
cuuagaucuguaucuucauaauaaaaaauuuu

SEQ ID NO: 156963 - RNA, 32 nt, Homo Sapiens
gacccaggaguccaggccccagccccuccucc

SEQ ID NO: 156964 - RNA, 32 nt, Homo Sapiens
aaauauguaucucuuuuucagagucugguuaa

SEQ ID NO: 156965 - RNA, 32 nt, Homo Sapiens
ugcacguggaucccgcgccgcugcgguucuca

SEQ ID NO: 156966 - RNA, 32 nt, Homo Sapiens
ucauuuugacauuaucaauaggagaaaagaaa

SEQ ID NO: 156967 - RNA, 32 nt, Homo Sapiens
ccacagcuaccaugaugucaugucuagcaauu

SEQ ID NO: 156968 - RNA, 32 nt, Homo Sapiens
ucuugucucaauaaguuuuaaguaacauuuaa

SEQ ID NO: 156969 - RNA, 32 nt, Homo Sapiens
ccuuagcccagcugugccaccugcaggaguuc

SEQ ID NO: 156970 - RNA, 32 nt, Homo Sapiens
ggacaagauaccuggugauuuaaaauauuauu

SEQ ID NO: 156971 - RNA, 32 nt, Homo Sapiens
gagggccacacagauaccccacguucuauaua

SEQ ID NO: 156972 - RNA, 32 nt, Homo Sapiens
aaacggcucugccucccaugugaucugaccau

SEQ ID NO: 156973 - RNA, 27 nt, Homo Sapiens
ugauucucuuucuucagccacugacug

SEQ ID NO: 156974 - RNA, 32 nt, Homo Sapiens
gagcguccaaaaacccugagugugauucuggg

SEQ ID NO: 156975 - RNA, 32 nt, Homo Sapiens
auguuauauggacuuuaaugacacaauguuua

SEQ ID NO: 156976 - RNA, 32 nt, Homo Sapiens
cucacacacacacacacacacacacacacacg

SEQ ID NO: 156977 - RNA, 32 nt, Homo Sapiens
caccugcuugcuaggggcaggaucucauucag

SEQ ID NO: 156978 - RNA, 32 nt, Homo Sapiens
agaaggagaaaguggaguccuguucaugacac

SEQ ID NO: 156979 - RNA, 32 nt, Homo Sapiens
guccaccaccaaaacuaaguucuuagauuuug

SEQ ID NO: 156980 - RNA, 32 nt, Homo Sapiens
aauaaaccaaaauaguccuaaucaguauaugc

SEQ ID NO: 156981 - RNA, 32 nt, Homo Sapiens
cuuuuggucauuauuucagugugcauaaguuc

SEQ ID NO: 156982 - RNA, 32 nt, Homo Sapiens
aagauuaucuucugccuuaccaauaucccgcc

SEQ ID NO: 156983 - RNA, 32 nt, Homo Sapiens
uaacggaagggagaauaugacagauaccuagc

SEQ ID NO: 156984 - RNA, 32 nt, Homo Sapiens
ggggccccaucccacucgcuacccuguccgau

SEQ ID NO: 156985 - RNA, 32 nt, Homo Sapiens
ggcgaggaggguccggccggaguugaaggauu

SEQ ID NO: 156986 - RNA, 32 nt, Homo Sapiens
gcuugaaaaaauaggggagauuaaauauuauu

SEQ ID NO: 156987 - RNA, 32 nt, Homo Sapiens
cugcccaccugccucccugcccccugugacgg

SEQ ID NO: 156988 - RNA, 32 nt, Homo Sapiens
aaagaaaaaaaauuaaaaauaaaagaacaagg

SEQ ID NO: 156989 - RNA, 32 nt, Homo Sapiens
uuuuuuggaccauagcuagccagucauuucuu

SEQ ID NO: 156990 - RNA, 32 nt, Homo Sapiens
cuagcacaacuuccuugcccacuguuucuucc

SEQ ID NO: 156991 - RNA, 32 nt, Homo Sapiens
cugccacugccagcugaaauaauacaauggca

SEQ ID NO: 156992 - RNA, 32 nt, Homo Sapiens
aacagaugaggaugagcguaccacugaagucu

SEQ ID NO: 156993 - RNA, 32 nt, Homo Sapiens
ucagccccugaugagcacaucaucaaauauuu

SEQ ID NO: 156994 - RNA, 32 nt, Homo Sapiens
gcuccauggggucugggagagcagccaucccc

SEQ ID NO: 156995 - RNA, 30 nt, Homo Sapiens
uucuuggcuuaaaggguguguuguugacuc

SEQ ID NO: 156996 - RNA, 31 nt, Homo Sapiens
acacuugggcacugccagcccuuuugcuccu

SEQ ID NO: 156997 - RNA, 32 nt, Homo Sapiens
agcuccuugacaauuuggcaauaaguucucgc

SEQ ID NO: 156998 - RNA, 32 nt, Homo Sapiens
uucuuguuuuuagaauuauuccuggacuauuc

SEQ ID NO: 156999 - RNA, 32 nt, Homo Sapiens
gaggcugcagugagccgagauugcaccacugc

SEQ ID NO: 157000 - RNA, 32 nt, Homo Sapiens
gagaugugggucuugaagagaauagccauaac

SEQ ID NO: 157001 - RNA, 32 nt, Homo Sapiens
gcuggccccucugcugcccccggagcgggcca

SEQ ID NO: 157002 - RNA, 32 nt, Homo Sapiens
uaaaauuagagguaguaaaaugacacauuuug

SEQ ID NO: 157003 - RNA, 32 nt, Homo Sapiens
ccguggugguggccgccaugcugggagccugg

SEQ ID NO: 157004 - RNA, 32 nt, Homo Sapiens
ccggacgccggggcgccugggaguuugaagca

SEQ ID NO: 157005 - RNA, 32 nt, Homo Sapiens
cugaccucugaagagguugggaagugaccauu

SEQ ID NO: 157006 - RNA, 32 nt, Homo Sapiens
ggcccugccgugggcaaggauacccgguggcu

SEQ ID NO: 157007 - RNA, 32 nt, Homo Sapiens
aucugcagaagcucgucuuuccucuccgccuc

SEQ ID NO: 157008 - RNA, 32 nt, Homo Sapiens
cuggaccgcucacccuccuccuccccucucac

SEQ ID NO: 157009 - RNA, 32 nt, Homo Sapiens
gcuugccuuaaauuauuuuuauaugacuguug

SEQ ID NO: 157010 - RNA, 32 nt, Homo Sapiens
aauauuuugcugagaacuucggcggcccagaa

SEQ ID NO: 157011 - RNA, 32 nt, Homo Sapiens
uuaguggaguuucgaauguacacacacccuga

SEQ ID NO: 157012 - RNA, 32 nt, Homo Sapiens
ugacggcgaccacugcucccgggccgugcuuc

SEQ ID NO: 157013 - RNA, 32 nt, Homo Sapiens
uuuuguaguuuggcaauugagagagcaauauu

SEQ ID NO: 157014 - RNA, 32 nt, Homo Sapiens
ccuauaucgcagagacucaucccucugacccc

SEQ ID NO: 157015 - RNA, 32 nt, Homo Sapiens
gugucucaggguggaccacucugugucugucu

SEQ ID NO: 157016 - RNA, 32 nt, Homo Sapiens
ugggcgacccccgggcggggccagccauuaaa

SEQ ID NO: 157017 - RNA, 32 nt, Homo Sapiens
ccuacaagaguguaagaaaaccacuggauagg

SEQ ID NO: 157018 - RNA, 32 nt, Homo Sapiens
aaauauuuuuaagguaaucuauauucacauug

SEQ ID NO: 157019 - RNA, 32 nt, Homo Sapiens
cuggagccccacuuauugaggccagcagaaua

SEQ ID NO: 157020 - RNA, 32 nt, Homo Sapiens
guaguaauuuaaagaugaguaccugaagaauu

SEQ ID NO: 157021 - RNA, 32 nt, Homo Sapiens
gguauccucugcaacacuugcagaacaaaggu

SEQ ID NO: 157022 - RNA, 32 nt, Homo Sapiens
uuuuaaaaaggugaaaucaugcuuaaaauauu

SEQ ID NO: 157023 - RNA, 32 nt, Homo Sapiens
ugaugguuugugauauccaugcuuguagaagu

SEQ ID NO: 157024 - RNA, 32 nt, Homo Sapiens
cggugcgacccggagcuccagcgcccgagucu

SEQ ID NO: 157025 - RNA, 32 nt, Homo Sapiens
guccuccggccgccaugaggcuccgggcgcca

SEQ ID NO: 157026 - RNA, 32 nt, Homo Sapiens
accgucaauauuuaucagcuuucagcacuggu

SEQ ID NO: 157027 - RNA, 32 nt, Homo Sapiens
cucaggucauccuuuuaaucuuugcugacggu

SEQ ID NO: 157028 - RNA, 32 nt, Homo Sapiens
cuucucuggcccggcgugggggcagggcauug

SEQ ID NO: 157029 - RNA, 32 nt, Homo Sapiens
aaacugcuauugaacuuaagcaucucuagcag

SEQ ID NO: 157030 - RNA, 32 nt, Homo Sapiens
uuaaaaaacaauuucugaugucuuuuucuguc

SEQ ID NO: 157031 - RNA, 32 nt, Homo Sapiens
aaacacacaacacaauuaacuguuuuggccgu

SEQ ID NO: 157032 - RNA, 32 nt, Homo Sapiens
aaggggcauuacugggaagacaauggccauug

SEQ ID NO: 157033 - RNA, 32 nt, Homo Sapiens
ucacucaguaaaugcagagauucaguguuggg

SEQ ID NO: 157034 - RNA, 32 nt, Homo Sapiens
uaccuaaucacgcucuguuccuugcuuuugcc

SEQ ID NO: 157035 - RNA, 29 nt, Homo Sapiens
guaugauuguguuucagaaccaauuuaaa

SEQ ID NO: 157036 - RNA, 32 nt, Homo Sapiens
gaguaguacaagcgaggaaaaaauacggagga

SEQ ID NO: 157037 - RNA, 32 nt, Homo Sapiens
ccacaccaaacaagaauugauuauauugcuuc

SEQ ID NO: 157038 - RNA, 32 nt, Homo Sapiens
ggccacaucuucugccccuucucagccucccu

SEQ ID NO: 157039 - RNA, 32 nt, Homo Sapiens
gggaauacacggugugguuguucaacuauuug

SEQ ID NO: 157040 - RNA, 32 nt, Homo Sapiens
cucgagggacuccgcccucccagccucaacac

SEQ ID NO: 157041 - RNA, 32 nt, Homo Sapiens
agaguugcugggagcugaaaaaucacauccug

SEQ ID NO: 157042 - RNA, 32 nt, Homo Sapiens
accccugcccugggccuuaacacacauccgac

SEQ ID NO: 157043 - RNA, 32 nt, Homo Sapiens
auuugaggcuuguggaggaaaggacccaagug

SEQ ID NO: 157044 - RNA, 32 nt, Homo Sapiens
uuuucaauguuguagaagaugcagcugcuuaa

SEQ ID NO: 157045 - RNA, 32 nt, Homo Sapiens
uaaauccacagugaguuggggcgacugugaaa

SEQ ID NO: 157046 - RNA, 30 nt, Homo Sapiens
gccugggcagcgugugcggguccguggcaa

SEQ ID NO: 157047 - RNA, 32 nt, Homo Sapiens
uaaagaggagaaaaaacagaagaacuuuauga

SEQ ID NO: 157048 - RNA, 32 nt, Homo Sapiens
ucuccgcaggcuuuccucuuccccaguggccc

SEQ ID NO: 157049 - RNA, 32 nt, Homo Sapiens
uaacuucauuugucauaagguuuggauauuaa

SEQ ID NO: 157050 - RNA, 32 nt, Homo Sapiens
aaauuucacaguguuguccucacuguguuggu

SEQ ID NO: 157051 - RNA, 32 nt, Homo Sapiens
cuggugguuucugucuccuccucccgcugaac

SEQ ID NO: 157052 - RNA, 32 nt, Homo Sapiens
cuuugguugugauuuaaacuuaugcuauaaac

SEQ ID NO: 157053 - RNA, 30 nt, Homo Sapiens
cucucugcugacugcaucuauugcugugag

SEQ ID NO: 157054 - RNA, 32 nt, Homo Sapiens
uuggauuaaaaauaaacuuuuacuuuuuugca

SEQ ID NO: 157055 - RNA, 32 nt, Homo Sapiens
cucaggaggcggaguuugcagugagcugaggu

SEQ ID NO: 157056 - RNA, 32 nt, Homo Sapiens
gcagccaggaggagaggaaaggacauggguag

SEQ ID NO: 157057 - RNA, 32 nt, Homo Sapiens
ggucgggcuggaagggcggggaugagggaugg

SEQ ID NO: 157058 - RNA, 32 nt, Homo Sapiens
aucccugggaugcaaggcugguucagcauacg

SEQ ID NO: 157059 - RNA, 32 nt, Homo Sapiens
uauauaccagucauuaucuguuugguccuuau

SEQ ID NO: 157060 - RNA, 32 nt, Homo Sapiens
gggaaaucugcgucacaugggcgacagaaggu

SEQ ID NO: 157061 - RNA, 32 nt, Homo Sapiens
cuuuagagaaagcaccacagggaacaaaccaa

SEQ ID NO: 157062 - RNA, 32 nt, Homo Sapiens
aggcgcagcucuugcccccacggcggccuccc

SEQ ID NO: 157063 - RNA, 32 nt, Homo Sapiens
cggccccucuuucccugucgccugcagccacc

SEQ ID NO: 157064 - RNA, 32 nt, Homo Sapiens
uggggucaaagucaguuuuucuuuuaaaauug

SEQ ID NO: 157065 - RNA, 32 nt, Homo Sapiens
gaggugggguaugcggccaccaggcacucuag

SEQ ID NO: 157066 - RNA, 32 nt, Homo Sapiens
aucauccuggccugccgagacauggagaagug

SEQ ID NO: 157067 - RNA, 32 nt, Homo Sapiens
uggcguuuguguucugggcaccaccgugaccc

SEQ ID NO: 157068 - RNA, 32 nt, Homo Sapiens
acagcaagccagugcugugugcucugaguucc

SEQ ID NO: 157069 - RNA, 32 nt, Homo Sapiens
acagcagcccucgggggugucacugcuuccug

SEQ ID NO: 157070 - RNA, 32 nt, Homo Sapiens
ugcaggaguccauuuuacacagguacagcgca

SEQ ID NO: 157071 - RNA, 32 nt, Homo Sapiens
augaaccagacuuuucccguccaggaaauagc

SEQ ID NO: 157072 - RNA, 32 nt, Homo Sapiens
aauucucuugagacuagaugggacauacauau

SEQ ID NO: 157073 - RNA, 32 nt, Homo Sapiens
caucgucccgagcccccuccccgcagccuccu

SEQ ID NO: 157074 - RNA, 32 nt, Homo Sapiens
ucuagccuagcgggcucugaccuccuuccugu

SEQ ID NO: 157075 - RNA, 32 nt, Homo Sapiens
cuggugcagccuuuucucuccccuccugauag

SEQ ID NO: 157076 - RNA, 32 nt, Homo Sapiens
cuggccacauggagcugcuuucuggggaacag

SEQ ID NO: 157077 - RNA, 30 nt, Homo Sapiens
ucucgcacugcagacggggaaacugaggcc

SEQ ID NO: 157078 - RNA, 32 nt, Homo Sapiens
auuccgggucagcaauggacugcaggccagcc

SEQ ID NO: 157079 - RNA, 32 nt, Homo Sapiens
auaaaauguaacacugaugauagguuaauaaa

SEQ ID NO: 157080 - RNA, 28 nt, Homo Sapiens
gggauggagagccgaaaggacaugguug

SEQ ID NO: 157081 - RNA, 32 nt, Homo Sapiens
gaaguggggaugcauuauuucugacacccaca

SEQ ID NO: 157082 - RNA, 32 nt, Homo Sapiens
cuuacugcaagagauauuucauuuucagcaca

SEQ ID NO: 157083 - RNA, 32 nt, Homo Sapiens
ggaucaagugagccaguuccuggaaccugaau

SEQ ID NO: 157084 - RNA, 29 nt, Homo Sapiens
uaaaugucaugguggucuauaacuccaaa

SEQ ID NO: 157085 - RNA, 32 nt, Homo Sapiens
cuugcaggcuggagggcggcuggagagcggcg

SEQ ID NO: 157086 - RNA, 32 nt, Homo Sapiens
auaaaaaauaaauauguuugucaugagucagg

SEQ ID NO: 157087 - RNA, 32 nt, Homo Sapiens
gcugagccagugcgagacugaacuugugcagc

SEQ ID NO: 157088 - RNA, 32 nt, Homo Sapiens
aguucggccugcugaccuaaccagagucauca

SEQ ID NO: 157089 - RNA, 32 nt, Homo Sapiens
uccuguuagcguuacuucuccuguggucagua

SEQ ID NO: 157090 - RNA, 32 nt, Homo Sapiens
ggaugagaugacugauguguguguugcccugc

SEQ ID NO: 157091 - RNA, 32 nt, Homo Sapiens
acacacccgccgcgcgcacucgcgcacggacc

SEQ ID NO: 157092 - RNA, 29 nt, Homo Sapiens
guucaauaaaguugauucuuuguaaaaaa

SEQ ID NO: 157093 - RNA, 32 nt, Homo Sapiens
gaccaaagaacaaaucugaaaaucaccauuuu

SEQ ID NO: 157094 - RNA, 32 nt, Homo Sapiens
ugaaaauacugaaacugcuuugaaaauuugga

SEQ ID NO: 157095 - RNA, 32 nt, Homo Sapiens
uuuuaagcuaacaaagaucauaauuuucaaug

SEQ ID NO: 157096 - RNA, 29 nt, Homo Sapiens
gugcuuacauaugaguuacaguugcuaau

SEQ ID NO: 157097 - RNA, 32 nt, Homo Sapiens
ccguaugaguuucaagcuguguuuccuaauga

SEQ ID NO: 157098 - RNA, 32 nt, Homo Sapiens
uccaggagggaucggaggggcgaugggguggu

SEQ ID NO: 157099 - RNA, 32 nt, Homo Sapiens
cccaagccuggguaucacagcugugucagugc

SEQ ID NO: 157100 - RNA, 32 nt, Homo Sapiens
cugaucgccgcaccaccuucccucaucggcuu

SEQ ID NO: 157101 - RNA, 32 nt, Homo Sapiens
ggauccccggguggaaacuccucccgggagua

SEQ ID NO: 157102 - RNA, 32 nt, Homo Sapiens
auaaccgacuugcccagcugcccgguggugcc

SEQ ID NO: 157103 - RNA, 32 nt, Homo Sapiens
aauuaaagugggggagauggcagacgcuuucu

SEQ ID NO: 157104 - RNA, 32 nt, Homo Sapiens
gauaauauuaucuauuuguaaauugcuacuuu

SEQ ID NO: 157105 - RNA, 32 nt, Homo Sapiens
ccugugucaguaaagaaaguggacacauuagu

SEQ ID NO: 157106 - RNA, 32 nt, Homo Sapiens
uggguucuggucccacuuuuuaucacuuacua

SEQ ID NO: 157107 - RNA, 32 nt, Homo Sapiens
cagcuuccccaggagcaagaccucugagcccg

SEQ ID NO: 157108 - RNA, 32 nt, Homo Sapiens
auagauucuuauaauauuauuuaaaugacugc

SEQ ID NO: 157109 - RNA, 32 nt, Homo Sapiens
uagcggcgccacccugccccagccugaggagg

SEQ ID NO: 157110 - RNA, 32 nt, Homo Sapiens
agcuagaagaagcggaacagggcuccuccacc

SEQ ID NO: 157111 - RNA, 32 nt, Homo Sapiens
ucucaguagcaucucuaccagcccuuaacuca

SEQ ID NO: 157112 - RNA, 32 nt, Homo Sapiens
ugcugcugccccacuacaggccccacaccugc

SEQ ID NO: 157113 - RNA, 32 nt, Homo Sapiens
cugugagucugccuaugccagaaggauuaagg

SEQ ID NO: 157114 - RNA, 32 nt, Homo Sapiens
uaagucaaugugaagcagcagcuccagccccg

SEQ ID NO: 157115 - RNA, 32 nt, Homo Sapiens
gagccggagcgacggcggggcuggggccggag

SEQ ID NO: 157116 - RNA, 32 nt, Homo Sapiens
gggugggcagacagacagauggaccggcccac

SEQ ID NO: 157117 - RNA, 32 nt, Homo Sapiens
ccuuuuugucuuucuuuuuuauuuuuuaagua

SEQ ID NO: 157118 - RNA, 32 nt, Homo Sapiens
cugugagcagugcuggaggcugugugcgcgug

SEQ ID NO: 157119 - RNA, 32 nt, Homo Sapiens
gucuggcuggaacacgcauuggcagcgggagc

SEQ ID NO: 157120 - RNA, 32 nt, Homo Sapiens
cgaaagucccgcgcgagcgccacggccuccgg

SEQ ID NO: 157121 - RNA, 30 nt, Homo Sapiens
agauaugucuguguuacuauggcuucaugg

SEQ ID NO: 157122 - RNA, 32 nt, Homo Sapiens
uaaccuugcuaaggaaggaugcagaguucccu

SEQ ID NO: 157123 - RNA, 32 nt, Homo Sapiens
cagcugcagccacuucccgccuugccuccuuc

SEQ ID NO: 157124 - RNA, 32 nt, Homo Sapiens
caagugaucugccugccuuggccucccaaagu

SEQ ID NO: 157125 - RNA, 32 nt, Homo Sapiens
ucguguucaugcuggccaugcaugucaucuau

SEQ ID NO: 157126 - RNA, 32 nt, Homo Sapiens
caugaggggaaagggagaagggugguaaauau

SEQ ID NO: 157127 - RNA, 32 nt, Homo Sapiens
gcggcgggcgggcaggcuuuggagcggcaguu

SEQ ID NO: 157128 - RNA, 32 nt, Homo Sapiens
agaagcgcuccaguaucuccaaggguaccuuc

SEQ ID NO: 157129 - RNA, 32 nt, Homo Sapiens
cacugcacuccagccugggugacaagagugag

SEQ ID NO: 157130 - RNA, 32 nt, Homo Sapiens
ugcaaaacugccccgcuuccuuuacagcucuu

SEQ ID NO: 157131 - RNA, 32 nt, Homo Sapiens
ggaaacaggucuuuuuacauucucucucauca

SEQ ID NO: 157132 - RNA, 32 nt, Homo Sapiens
ugguauuuuuaaauuguuacaguaucuagcau

SEQ ID NO: 157133 - RNA, 32 nt, Homo Sapiens
gguuuagcaaggaaaguacaaaauaguuuaug

SEQ ID NO: 157134 - RNA, 32 nt, Homo Sapiens
gagagagggaggcagaagaggaagucagagcg

SEQ ID NO: 157135 - RNA, 32 nt, Homo Sapiens
cuuuuauaccuuucuugguuugacgugcaaua

SEQ ID NO: 157136 - RNA, 32 nt, Homo Sapiens
cccuucguuaauuaguccaucgcauuucaagu

SEQ ID NO: 157137 - RNA, 32 nt, Homo Sapiens
ugccaaaaauuuguacauguucaauuaaaaau

SEQ ID NO: 157138 - RNA, 32 nt, Homo Sapiens
agcgcugcaaggacaaccggcugggguccuug

SEQ ID NO: 157139 - RNA, 32 nt, Homo Sapiens
gaguugucaccauuaugucuuaagcuguuagu

SEQ ID NO: 157140 - RNA, 32 nt, Homo Sapiens
gggcagacucagcuaccacguucacugccuuc

SEQ ID NO: 157141 - RNA, 32 nt, Homo Sapiens
gggcugaguacaguccuggggguaaggggaug

SEQ ID NO: 157142 - RNA, 32 nt, Homo Sapiens
cuguaggugagaagcaacgaaaagaggacaau

SEQ ID NO: 157143 - RNA, 32 nt, Homo Sapiens
acuacucugugcuaauuguucugccaguaugg

SEQ ID NO: 157144 - RNA, 32 nt, Homo Sapiens
caacgacgcgcccgcuggccccugggccgguc

SEQ ID NO: 157145 - RNA, 32 nt, Homo Sapiens
ccagagccaggggacagguuggggcugugggc

SEQ ID NO: 157146 - RNA, 32 nt, Homo Sapiens
ugggacauugaacaggcaaagagaggcuaaaa

SEQ ID NO: 157147 - RNA, 32 nt, Homo Sapiens
accagcgagcgcgggcacugcggcggggagga

SEQ ID NO: 157148 - RNA, 32 nt, Homo Sapiens
ggguuuguagcggaggaggagcgggcgccaug

SEQ ID NO: 157149 - RNA, 32 nt, Homo Sapiens
gguccgacuguuagcaacaugagcggccugga

SEQ ID NO: 157150 - RNA, 32 nt, Homo Sapiens
cccacccuagagaucuguggaacuuugaacuu

SEQ ID NO: 157151 - RNA, 32 nt, Homo Sapiens
gccaaacaggucagugucaucaucgucgucau

SEQ ID NO: 157152 - RNA, 32 nt, Homo Sapiens
ggguccccaaccccauccggaccccgccgccc

SEQ ID NO: 157153 - RNA, 32 nt, Homo Sapiens
ucuauaacaacaacuuuggauuuuuauauaua

SEQ ID NO: 157154 - RNA, 30 nt, Homo Sapiens
cuggaacaacgcgccagacgugugaguuuc

SEQ ID NO: 157155 - RNA, 32 nt, Homo Sapiens
uccaugggacaaaagagggaauaugaaauauu

SEQ ID NO: 157156 - RNA, 32 nt, Homo Sapiens
guuaagauuaugccuuuacaaaaguuaauuua

SEQ ID NO: 157157 - RNA, 32 nt, Homo Sapiens
cacuuuccugucauuaguggcagccccagauc

SEQ ID NO: 157158 - RNA, 32 nt, Homo Sapiens
agccggagagcgugcugcuggugcauggcgag

SEQ ID NO: 157159 - RNA, 32 nt, Homo Sapiens
gaccacugggaggucuuaauguuuuguuuuau

SEQ ID NO: 157160 - RNA, 32 nt, Homo Sapiens
auuuggaaacaucaaauaaaaauggaaaaaau

SEQ ID NO: 157161 - RNA, 32 nt, Homo Sapiens
cuaaaucagccaguuaaugugauucaguugug

SEQ ID NO: 157162 - RNA, 32 nt, Homo Sapiens
ccgagucuaaaauaaaaauuuuuuaaaaaaga

SEQ ID NO: 157163 - RNA, 32 nt, Homo Sapiens
ggcgccugccaccuccuccucaucuccggugg

SEQ ID NO: 157164 - RNA, 32 nt, Homo Sapiens
aaaggcuaguaugagcgagaaaaggagagagc

SEQ ID NO: 157165 - RNA, 32 nt, Homo Sapiens
ucagggcggaacggaggcaacuuuccggaguc

SEQ ID NO: 157166 - RNA, 32 nt, Homo Sapiens
ggaggagggccccggcggccgaccccggucug

SEQ ID NO: 157167 - RNA, 32 nt, Homo Sapiens
gccccggguccccgcgcccaccccauggcgac

SEQ ID NO: 157168 - RNA, 31 nt, Homo Sapiens
auagguugaaauuuuuaaagagccugcauca

SEQ ID NO: 157169 - RNA, 30 nt, Homo Sapiens
ggauagccacuugcagcacauuaucagcag

SEQ ID NO: 157170 - RNA, 32 nt, Homo Sapiens
cugcgggagcuucagggcugcgccacccaccc

SEQ ID NO: 157171 - RNA, 32 nt, Homo Sapiens
uuggguaguauuguuuugaugaucuuagagga

SEQ ID NO: 157172 - RNA, 32 nt, Homo Sapiens
gaggaugaauuaacaaacucacauugugcagu

SEQ ID NO: 157173 - RNA, 32 nt, Homo Sapiens
gacaccaaaagugagagaaguaguaguugaau

SEQ ID NO: 157174 - RNA, 32 nt, Homo Sapiens
ggucggaggaggagcuccugccugcgguuuug

SEQ ID NO: 157175 - RNA, 32 nt, Homo Sapiens
gugcgggggaggaggaggaggacgccgcggug

SEQ ID NO: 157176 - RNA, 32 nt, Homo Sapiens
cugagguuuccauucccgggggccuuuaaauc

SEQ ID NO: 157177 - RNA, 32 nt, Homo Sapiens
ccugcucaggaagucucuggcugucuucaugu

SEQ ID NO: 157178 - RNA, 32 nt, Homo Sapiens
uggaauggagagcgggagucugauguggucca

SEQ ID NO: 157179 - RNA, 32 nt, Homo Sapiens
cacauuuauuuuuuauguugugaaacuggacu

SEQ ID NO: 157180 - RNA, 31 nt, Homo Sapiens
agcugggaccgcagccagccaggugaccccu

SEQ ID NO: 157181 - RNA, 32 nt, Homo Sapiens
cccuucaaagauuuuuuuuuuauuaaaugguu

SEQ ID NO: 157182 - RNA, 32 nt, Homo Sapiens
ucaagaacuccagucuguuucuguggauguua

SEQ ID NO: 157183 - RNA, 32 nt, Homo Sapiens
cccucggcacccccggccccggagcugccugg

SEQ ID NO: 157184 - RNA, 32 nt, Homo Sapiens
auguaaggucacauuuaguaaaugcugaaaua

SEQ ID NO: 157185 - RNA, 32 nt, Homo Sapiens
uggagguaacaaguauuuacuaguucuugugu

SEQ ID NO: 157186 - RNA, 32 nt, Homo Sapiens
acuucuguauggauugcaguuacucuggugau

SEQ ID NO: 157187 - RNA, 32 nt, Homo Sapiens
caggauucaaagcuagguuuggcugucuguga

SEQ ID NO: 157188 - RNA, 32 nt, Homo Sapiens
uagacaucucugcaucuuuguaccugcaagug

SEQ ID NO: 157189 - RNA, 32 nt, Homo Sapiens
agcggacugaccggcgggagggcuagcgagcc

SEQ ID NO: 157190 - RNA, 31 nt, Homo Sapiens
cuuuugagggcggugacggcgccgggccggc

SEQ ID NO: 157191 - RNA, 32 nt, Homo Sapiens
gcacuuaaaaauuccuacagugauuguuacuu

SEQ ID NO: 157192 - RNA, 32 nt, Homo Sapiens
cagagccguugaccaugguugcaacuggcagu

SEQ ID NO: 157193 - RNA, 32 nt, Homo Sapiens
cacauuuuuuaaaacuuucuaacaauauaguc

SEQ ID NO: 157194 - RNA, 32 nt, Homo Sapiens
aaagagaaccuuaugcaaccugacaaaccauu

SEQ ID NO: 157195 - RNA, 32 nt, Homo Sapiens
cagucccccugccccagggcucccggcuaugg

SEQ ID NO: 157196 - RNA, 32 nt, Homo Sapiens
guccuggggagcuucuguccaccuguccugca

SEQ ID NO: 157197 - RNA, 32 nt, Homo Sapiens
cagcagagucugcagcagcagcagccggcgag

SEQ ID NO: 157198 - RNA, 32 nt, Homo Sapiens
uccauuugauucaaggugcugguccaacagag

SEQ ID NO: 157199 - RNA, 32 nt, Homo Sapiens
aacacuugguaguuuuuccagccuccaaguca

SEQ ID NO: 157200 - RNA, 32 nt, Homo Sapiens
acacccgcugggccagcagcucccaacggcga

SEQ ID NO: 157201 - RNA, 32 nt, Homo Sapiens
uucagcugcccagugcgccguggggaguguuu

SEQ ID NO: 157202 - RNA, 32 nt, Homo Sapiens
guaugacuaaaauaaagaugaaccagcaaaag

SEQ ID NO: 157203 - RNA, 32 nt, Homo Sapiens
ggucucaggcaccgcugggggcgaagccacgc

SEQ ID NO: 157204 - RNA, 32 nt, Homo Sapiens
ugcccaagucugugucccaucagacuugcagc

SEQ ID NO: 157205 - RNA, 32 nt, Homo Sapiens
uaacucucuucuccucccuagugcgagguuaa

SEQ ID NO: 157206 - RNA, 32 nt, Homo Sapiens
agugugugguuuuggcaugucuguuucaggug

SEQ ID NO: 157207 - RNA, 31 nt, Homo Sapiens
uucuugcugccgguccuaacgucccgcaguc

SEQ ID NO: 157208 - RNA, 32 nt, Homo Sapiens
aucucuugugauguguaacuuuuacaugugaa

SEQ ID NO: 157209 - RNA, 32 nt, Homo Sapiens
aaguuuaauuuucagguuagaaaaugugaucu

SEQ ID NO: 157210 - RNA, 32 nt, Homo Sapiens
acgacuuugcagugaccaccccugcaggcauc

SEQ ID NO: 157211 - RNA, 32 nt, Homo Sapiens
cccuugcuaccucggcaggcuuugaucccuuc

SEQ ID NO: 157212 - RNA, 30 nt, Homo Sapiens
gcuaaggccgcgcagcccuagugaccgaac

SEQ ID NO: 157213 - RNA, 32 nt, Homo Sapiens
cauaauauucuauuuaagaaugcgugggagaa

SEQ ID NO: 157214 - RNA, 32 nt, Homo Sapiens
uuucuacagugauucuacuucugaggagucuu

SEQ ID NO: 157215 - RNA, 32 nt, Homo Sapiens
aguaacugcaugguuuuuuguuuaauguaaua

SEQ ID NO: 157216 - RNA, 32 nt, Homo Sapiens
cagccgugcugagcacacaacaggcugugugu

SEQ ID NO: 157217 - RNA, 32 nt, Homo Sapiens
cugcugggauuacaggcacgcgccaccacgcc

SEQ ID NO: 157218 - RNA, 32 nt, Homo Sapiens
acgucagcauucagguucaauggggacaccag

SEQ ID NO: 157219 - RNA, 32 nt, Homo Sapiens
gucuuaaaauuuguuuuaaauaagauccucua

SEQ ID NO: 157220 - RNA, 32 nt, Homo Sapiens
cgccgggcugggcaagcgcagaugaauuuaca

SEQ ID NO: 157221 - RNA, 32 nt, Homo Sapiens
uuccauacagauuuccuucucauuucucugug

SEQ ID NO: 157222 - RNA, 32 nt, Homo Sapiens
uggacgugccuucauggucugguuaugcuuca

SEQ ID NO: 157223 - RNA, 32 nt, Homo Sapiens
ucccccaaguuauaaaacuauaaugcaaaaaa

SEQ ID NO: 157224 - RNA, 32 nt, Homo Sapiens
ggauugugcagcaggcuuuaauuuaauguaga

SEQ ID NO: 157225 - RNA, 32 nt, Homo Sapiens
caaaagaggagaauauuuccucuugugcuuuu

SEQ ID NO: 157226 - RNA, 32 nt, Homo Sapiens
aggaagggaccccggguccacgagcugcccac

SEQ ID NO: 157227 - RNA, 32 nt, Homo Sapiens
ccccccuugcggcucccucgggcccggcggag

SEQ ID NO: 157228 - RNA, 32 nt, Homo Sapiens
aggagacuuccacuccaugugaccuuagagau

SEQ ID NO: 157229 - RNA, 32 nt, Homo Sapiens
ccugacugggcuccuccccgggcccgccccga

SEQ ID NO: 157230 - RNA, 32 nt, Homo Sapiens
cauccucgguccccuugcucguugcucgcagc

SEQ ID NO: 157231 - RNA, 32 nt, Homo Sapiens
agguggcaugacagaacacaugugugaugcuu

SEQ ID NO: 157232 - RNA, 32 nt, Homo Sapiens
guccaggaaugggagacaaggagcugucauuc

SEQ ID NO: 157233 - RNA, 32 nt, Homo Sapiens
aucuuacaaaaauggaauauuuuaguaugaau

SEQ ID NO: 157234 - RNA, 32 nt, Homo Sapiens
gucuugggugcacuggacuuggagcacuaccu

SEQ ID NO: 157235 - RNA, 32 nt, Homo Sapiens
agagugacaucuccuccccuccccugacgaga

SEQ ID NO: 157236 - RNA, 29 nt, Homo Sapiens
auggaucagaugacgaggacgaggagugg

SEQ ID NO: 157237 - RNA, 32 nt, Homo Sapiens
auaugaaugcuguucuuguaaaaaucaaucuu

SEQ ID NO: 157238 - RNA, 32 nt, Homo Sapiens
aagggaauguguacugaauguuagaguguaca

SEQ ID NO: 157239 - RNA, 32 nt, Homo Sapiens
cauuuugccuccucuuuuuugguuuugcuggu

SEQ ID NO: 157240 - RNA, 32 nt, Homo Sapiens
gggucugagccugcugggcccaccacauggaa

SEQ ID NO: 157241 - RNA, 32 nt, Homo Sapiens
ucuaacuuguuuacacaaaaacgaguaugauu

SEQ ID NO: 157242 - RNA, 32 nt, Homo Sapiens
uucuagcucccucucacuccugcccuuucuag

SEQ ID NO: 157243 - RNA, 32 nt, Homo Sapiens
ucuaacucugcacuuuucauguuaaacugcaa

SEQ ID NO: 157244 - RNA, 32 nt, Homo Sapiens
ccacauugccuggcccuggggauccagcccug

SEQ ID NO: 157245 - RNA, 32 nt, Homo Sapiens
uagcuuuauugaagucuucuuaucuaaaccca

SEQ ID NO: 157246 - RNA, 32 nt, Homo Sapiens
ccucccagccccacccuacucucucccccagc

SEQ ID NO: 157247 - RNA, 32 nt, Homo Sapiens
gugccacgucauccauaguuuauuguuaguau

SEQ ID NO: 157248 - RNA, 32 nt, Homo Sapiens
ucaccauccccaugguacugaugcuugcugga

SEQ ID NO: 157249 - RNA, 32 nt, Homo Sapiens
aagccuguucucuggaggaaauaaagaaaaua

SEQ ID NO: 157250 - RNA, 32 nt, Homo Sapiens
aggcuaugacuuaaauuugaagaugaaguaca

SEQ ID NO: 157251 - RNA, 32 nt, Homo Sapiens
uggggaaaggacacacacaggauaugggagcc

SEQ ID NO: 157252 - RNA, 32 nt, Homo Sapiens
cuacagagaaacuugaaauauaaagaagaaga

SEQ ID NO: 157253 - RNA, 32 nt, Homo Sapiens
cccaugacagugggaagaaauccaacauguua

SEQ ID NO: 157254 - RNA, 32 nt, Homo Sapiens
agaagcgaacucaucagcaaagggcggccugu

SEQ ID NO: 157255 - RNA, 32 nt, Homo Sapiens
gugugucuuuuuguuuuuuuuaagauagcacu

SEQ ID NO: 157256 - RNA, 32 nt, Homo Sapiens
guggcuggggagagcggcgagaggguuuggca

SEQ ID NO: 157257 - RNA, 32 nt, Homo Sapiens
ccuuacacugcauucauuaacaucucaaucuc

SEQ ID NO: 157258 - RNA, 32 nt, Homo Sapiens
cuguuuugaaagauaacacagagggaaaggga

SEQ ID NO: 157259 - RNA, 32 nt, Homo Sapiens
gaugaagacagcccgauccuccccuggacucc

SEQ ID NO: 157260 - RNA, 32 nt, Homo Sapiens
agaacuuaaggaaugcggcaaaaacugcucug

SEQ ID NO: 157261 - RNA, 32 nt, Homo Sapiens
gggauuaguaacuauuugaaauauguggugau

SEQ ID NO: 157262 - RNA, 32 nt, Homo Sapiens
cgggagccgggcgcggcucuguguggacucgg

SEQ ID NO: 157263 - RNA, 32 nt, Homo Sapiens
auugcaagccccagaaggcaagacuaacucgg

SEQ ID NO: 157264 - RNA, 32 nt, Homo Sapiens
gaugaaaaugaagaaaaucaacaaagaccgag

SEQ ID NO: 157265 - RNA, 32 nt, Homo Sapiens
auuuuacuuuuggaagacaagauuauuagaau

SEQ ID NO: 157266 - RNA, 32 nt, Homo Sapiens
cuaccuccccagaagccuuccuccccaggugg

SEQ ID NO: 157267 - RNA, 32 nt, Homo Sapiens
cugugagucaacauauauacugagguccuacu

SEQ ID NO: 157268 - RNA, 32 nt, Homo Sapiens
ugagccaccgcgccuggcaucugcuguuucuu

SEQ ID NO: 157269 - RNA, 32 nt, Homo Sapiens
uacugaaaaaucaaaaacuauuuuauuaugaa

SEQ ID NO: 157270 - RNA, 32 nt, Homo Sapiens
augcccguucucuugaucucucucuucucgcg

SEQ ID NO: 157271 - RNA, 32 nt, Homo Sapiens
gccugggcucugccagaggcugaggugcccag

SEQ ID NO: 157272 - RNA, 32 nt, Homo Sapiens
uuggugauauuuauuucuuugccuuuuuuuuu

SEQ ID NO: 157273 - RNA, 32 nt, Homo Sapiens
uaagguaaaaauuuggacccuuaucaugcaua

SEQ ID NO: 157274 - RNA, 32 nt, Homo Sapiens
uguggauggagacaguggcagcucccacagug

SEQ ID NO: 157275 - RNA, 32 nt, Homo Sapiens
guaggacuucccgguccucaccacccucugcc

SEQ ID NO: 157276 - RNA, 32 nt, Homo Sapiens
auguuuuucucuucuuggaucuugucuuucug

SEQ ID NO: 157277 - RNA, 32 nt, Homo Sapiens
gucccccuccuggcagaaugucugggcuuugc

SEQ ID NO: 157278 - RNA, 32 nt, Homo Sapiens
uggcugccuccccuccacggccuccagggcgg

SEQ ID NO: 157279 - RNA, 32 nt, Homo Sapiens
uaauaaaauauuagagaaugguaggauccaug

SEQ ID NO: 157280 - RNA, 32 nt, Homo Sapiens
cccagcuacuugugaggcugaggugggaggau

SEQ ID NO: 157281 - RNA, 32 nt, Homo Sapiens
uacagagugguggaagaggacacacacacauc

SEQ ID NO: 157282 - RNA, 32 nt, Homo Sapiens
auacugaucaaucccaguucucccccuaaaaa

SEQ ID NO: 157283 - RNA, 32 nt, Homo Sapiens
ugugaacggaugaauaaaguucaacugcaacu

SEQ ID NO: 157284 - RNA, 32 nt, Homo Sapiens
ggacuggcaucuucccucagacuugcaguuga

SEQ ID NO: 157285 - RNA, 32 nt, Homo Sapiens
uggguuugcaguuuucugaguaggugaguuuu

SEQ ID NO: 157286 - RNA, 32 nt, Homo Sapiens
uuucucucuccuguuuugugauuuggggagag

SEQ ID NO: 157287 - RNA, 32 nt, Homo Sapiens
caccuccagacaccacgcucuccuuucggagc

SEQ ID NO: 157288 - RNA, 32 nt, Homo Sapiens
acccugagcuccugggguuuucuugucucacu

SEQ ID NO: 157289 - RNA, 32 nt, Homo Sapiens
gggcacgcgggaaccgagcggcugagcgcgcu

SEQ ID NO: 157290 - RNA, 32 nt, Homo Sapiens
ucaaacccacccuuggagagccaugugggcug

SEQ ID NO: 157291 - RNA, 32 nt, Homo Sapiens
ugagcucugacugcgcuccccucccccaccag

SEQ ID NO: 157292 - RNA, 32 nt, Homo Sapiens
acccaggagguggaggaugcagugaacugaga

SEQ ID NO: 157293 - RNA, 32 nt, Homo Sapiens
aguaauuggcuuuagaauuuguaaucuuuccc

SEQ ID NO: 157294 - RNA, 31 nt, Homo Sapiens
aaaaagaaauaaaugauauguuauuauccca

SEQ ID NO: 157295 - RNA, 32 nt, Homo Sapiens
ucggccgggucccagcgacagggucucuuauc

SEQ ID NO: 157296 - RNA, 32 nt, Homo Sapiens
agaaguuuucacaacuauuuaugcugguaaaa

SEQ ID NO: 157297 - RNA, 32 nt, Homo Sapiens
caucugccggaaguaguucuguaaagagucag

SEQ ID NO: 157298 - RNA, 29 nt, Homo Sapiens
acugcugugacuuccuccugccaggggau

SEQ ID NO: 157299 - RNA, 32 nt, Homo Sapiens
gguaagaaauuuaauagcuuaaaauaugaauu

SEQ ID NO: 157300 - RNA, 32 nt, Homo Sapiens
cgcagugggaagcucgcagcagcuggggagga

SEQ ID NO: 157301 - RNA, 32 nt, Homo Sapiens
gcugcuuccuuccgucuuuccccaaggacuau

SEQ ID NO: 157302 - RNA, 32 nt, Homo Sapiens
ccuccgcgccgcggccguuagucaugucggau

SEQ ID NO: 157303 - RNA, 32 nt, Homo Sapiens
cacuguuugccagcuguguggccuuggucaua

SEQ ID NO: 157304 - RNA, 32 nt, Homo Sapiens
cccgccgccgucgccaucgccgcggccaccau

SEQ ID NO: 157305 - RNA, 32 nt, Homo Sapiens
gcagcuucucgccgccgagccgagggccggcg

SEQ ID NO: 157306 - RNA, 32 nt, Homo Sapiens
aaauacuauaguuauauagauaaagagauacg

SEQ ID NO: 157307 - RNA, 32 nt, Homo Sapiens
guguggcuaugugugaccgugugaagggagca

SEQ ID NO: 157308 - RNA, 32 nt, Homo Sapiens
cuaaaacaaaacaaaacaaaaaccaugcuggu

SEQ ID NO: 157309 - RNA, 32 nt, Homo Sapiens
gcacggcugcacccaacagucuccaugucaag

SEQ ID NO: 157310 - RNA, 32 nt, Homo Sapiens
agaaguauugcagcuuccuucucuggcucaag

SEQ ID NO: 157311 - RNA, 32 nt, Homo Sapiens
cuguggucgugggaggguguggugaggccgug

SEQ ID NO: 157312 - RNA, 32 nt, Homo Sapiens
aaauagagguuguuuacagcacucaguuuggc

SEQ ID NO: 157313 - RNA, 32 nt, Homo Sapiens
ugguucuuccucguggaaagccaggcccggac

SEQ ID NO: 157314 - RNA, 31 nt, Homo Sapiens
aguuggaaauaaauaaaagcauaaucacuaa

SEQ ID NO: 157315 - RNA, 32 nt, Homo Sapiens
uaacaugauuuuucuuuuuuaaaacagccuga

SEQ ID NO: 157316 - RNA, 32 nt, Homo Sapiens
caccugagcucccugauugacaucagucccua

SEQ ID NO: 157317 - RNA, 32 nt, Homo Sapiens
ugugaugcuguaaauauuugguuugaaacagc

SEQ ID NO: 157318 - RNA, 32 nt, Homo Sapiens
uccgccuacggcccggcccccacgcgcccugc

SEQ ID NO: 157319 - RNA, 32 nt, Homo Sapiens
aacucagagggagaggaaagggcuagagacac

SEQ ID NO: 157320 - RNA, 32 nt, Homo Sapiens
agguggaaaguuucugguucugaaacaacaag

SEQ ID NO: 157321 - RNA, 32 nt, Homo Sapiens
gcccauaaaaauuguugacaagaauuaaugaa

SEQ ID NO: 157322 - RNA, 32 nt, Homo Sapiens
aacugacauaggaagaugaaagagacugacuu

SEQ ID NO: 157323 - RNA, 32 nt, Homo Sapiens
gcaaaauggaagacugauuuuugacucuauua

SEQ ID NO: 157324 - RNA, 32 nt, Homo Sapiens
ugagcuccaugcccgugagcugcuauggggug

SEQ ID NO: 157325 - RNA, 32 nt, Homo Sapiens
auguaggagcagcuuuucuucuaguuugauau

SEQ ID NO: 157326 - RNA, 32 nt, Homo Sapiens
cccguuucaaagcuaugaaaugugcuauuuau

SEQ ID NO: 157327 - RNA, 32 nt, Homo Sapiens
cauuguagcugauguugaaacugcuugagcau

SEQ ID NO: 157328 - RNA, 32 nt, Homo Sapiens
ugaggcucugccgaggggacuggcugugaagg

SEQ ID NO: 157329 - RNA, 32 nt, Homo Sapiens
uauuuuugugucugugaaagugccaagaaccc

SEQ ID NO: 157330 - RNA, 32 nt, Homo Sapiens
ucauuguuuaggugcuguauuuauugggugug

SEQ ID NO: 157331 - RNA, 32 nt, Homo Sapiens
ccguggcucaggucuccccuaucccggccucc

SEQ ID NO: 157332 - RNA, 32 nt, Homo Sapiens
ucagucacugucagccccucaucuccccccac

SEQ ID NO: 157333 - RNA, 32 nt, Homo Sapiens
uuaaaggcgcgaggugucuuuauuuaaucugc

SEQ ID NO: 157334 - RNA, 32 nt, Homo Sapiens
aauuuugacuguuuugucaaguacauauuuca

SEQ ID NO: 157335 - RNA, 32 nt, Homo Sapiens
ucuauauucuaaaagcuucugcuccuuccuuc

SEQ ID NO: 157336 - RNA, 32 nt, Homo Sapiens
uauaucacaauuuaucuauucuacacuugggu

SEQ ID NO: 157337 - RNA, 32 nt, Homo Sapiens
cuaccgcucccucugcugaacuauuccggaug

SEQ ID NO: 157338 - RNA, 32 nt, Homo Sapiens
auacuuugccagcacugccuuugccagcaucc

SEQ ID NO: 157339 - RNA, 32 nt, Homo Sapiens
cucaggaggcugaggugagagaucuuuugagc

SEQ ID NO: 157340 - RNA, 32 nt, Homo Sapiens
agccugguacugaguucaugauaccauggugg

SEQ ID NO: 157341 - RNA, 32 nt, Homo Sapiens
ggcaccucagccuggcccauggaggcauguuc

SEQ ID NO: 157342 - RNA, 32 nt, Homo Sapiens
ugcgcacgaaacaguaucuguuugaggcauaa

SEQ ID NO: 157343 - RNA, 32 nt, Homo Sapiens
gccgcggcggccuggggaaguguuuggauugu

SEQ ID NO: 157344 - RNA, 32 nt, Homo Sapiens
gcuucaccggcucagccccuguaugaggaugg

SEQ ID NO: 157345 - RNA, 32 nt, Homo Sapiens
cuauuuaguuuauuuuguuuacuuuacagguu

SEQ ID NO: 157346 - RNA, 32 nt, Homo Sapiens
ugagaggaaugggaccaguucugcugccuaag

SEQ ID NO: 157347 - RNA, 32 nt, Homo Sapiens
aucacuacuguuaccuguuauagaaaauagug

SEQ ID NO: 157348 - RNA, 32 nt, Homo Sapiens
cuggggcagaauuuaaagcugcaacacagcug

SEQ ID NO: 157349 - RNA, 32 nt, Homo Sapiens
ggcugggcgcgguggcgcaugccuguaauccc

SEQ ID NO: 157350 - RNA, 32 nt, Homo Sapiens
ggccccggccccacuccuggcucucauuauuu

SEQ ID NO: 157351 - RNA, 32 nt, Homo Sapiens
gcagagcuaccauguccucuuggagcagacag

SEQ ID NO: 157352 - RNA, 32 nt, Homo Sapiens
agcugcgaugguccuuuccaggcgcuguccac

SEQ ID NO: 157353 - RNA, 32 nt, Homo Sapiens
aggagcccacagccuucuucccaacucauucu

SEQ ID NO: 157354 - RNA, 32 nt, Homo Sapiens
cguccugaccugugaucacacaugacagugag

SEQ ID NO: 157355 - RNA, 32 nt, Homo Sapiens
guuuaucguuuuuguugcugcaauaaauggac

SEQ ID NO: 157356 - RNA, 32 nt, Homo Sapiens
ugguuauguagagacuccauguccugguguga

SEQ ID NO: 157357 - RNA, 32 nt, Homo Sapiens
ucaauuauauauacucauauaugaauauuuug

SEQ ID NO: 157358 - RNA, 32 nt, Homo Sapiens
cguuguggguggucuuuuuuuuuuuuggagac

SEQ ID NO: 157359 - RNA, 32 nt, Homo Sapiens
aaggcuuuaauuaguucucaucccuuacuaaa

SEQ ID NO: 157360 - RNA, 32 nt, Homo Sapiens
uacuaaaaauuugaaauuagccaggcauggug

SEQ ID NO: 157361 - RNA, 32 nt, Homo Sapiens
guugcuauuuaaaaaucagggagaggagggca

SEQ ID NO: 157362 - RNA, 32 nt, Homo Sapiens
guucaaauugguuucacaggcucuucagauaa

SEQ ID NO: 157363 - RNA, 32 nt, Homo Sapiens
ugcgagugcgugaauauugggggcccggacgc

SEQ ID NO: 157364 - RNA, 32 nt, Homo Sapiens
gccagaugcagcaggggauguggcucugaggg

SEQ ID NO: 157365 - RNA, 30 nt, Homo Sapiens
accuaccauguugccucccaucuucugaaa

SEQ ID NO: 157366 - RNA, 32 nt, Homo Sapiens
caggagccccacugcugaugacgaacuaucuc

SEQ ID NO: 157367 - RNA, 32 nt, Homo Sapiens
cggagggcggccccgcucccucugcuggccau

SEQ ID NO: 157368 - RNA, 32 nt, Homo Sapiens
gcaaaauguaaagcacuuuaauuuauagcuau

SEQ ID NO: 157369 - RNA, 32 nt, Homo Sapiens
guaauuauagaacuacauaauuauuuuuauag

SEQ ID NO: 157370 - RNA, 32 nt, Homo Sapiens
ucgucgaagauaaacaauaguuggccggcgag

SEQ ID NO: 157371 - RNA, 32 nt, Homo Sapiens
gccaggccuccuugcuggccgccagguagguc

SEQ ID NO: 157372 - RNA, 32 nt, Homo Sapiens
acagagaaaaaccacacgcuguuuagacccaa

SEQ ID NO: 157373 - RNA, 32 nt, Homo Sapiens
gucuguacaggcugaagcccccugcucuccca

SEQ ID NO: 157374 - RNA, 32 nt, Homo Sapiens
uauucucaaacacaguuacacuugugcacccu

SEQ ID NO: 157375 - RNA, 32 nt, Homo Sapiens
ggcgcgacgcugccccgcgaggaggcaggacu

SEQ ID NO: 157376 - RNA, 32 nt, Homo Sapiens
aaucaucucuuuagaucuuauaaggccagcau

SEQ ID NO: 157377 - RNA, 32 nt, Homo Sapiens
acgcgggccggcggggguggggggaacguggg

SEQ ID NO: 157378 - RNA, 32 nt, Homo Sapiens
guguucucccuguggguccuuggaccuuuagc

SEQ ID NO: 157379 - RNA, 32 nt, Homo Sapiens
aguauuuuucaugguauaugugagacccauua

SEQ ID NO: 157380 - RNA, 31 nt, Homo Sapiens
gccagcugccggucuuucgggggcuccguaa

SEQ ID NO: 157381 - RNA, 32 nt, Homo Sapiens
agccuccggaggaggaggcggaggccgaggac

SEQ ID NO: 157382 - RNA, 32 nt, Homo Sapiens
ccgcacggguugauacguuuugguugguuuuu

SEQ ID NO: 157383 - RNA, 32 nt, Homo Sapiens
auggagcuggaaagauccagguggagcuugac

SEQ ID NO: 157384 - RNA, 32 nt, Homo Sapiens
ggaaccuucuucgaggcccuggccagccaucu

SEQ ID NO: 157385 - RNA, 32 nt, Homo Sapiens
uacagggguuuguuuugcacaauuuuaauagu

SEQ ID NO: 157386 - RNA, 32 nt, Homo Sapiens
agcgacgccccggcccgccccgcuccuccucc

SEQ ID NO: 157387 - RNA, 32 nt, Homo Sapiens
agccuggacucccguggacccccgugggcagg

SEQ ID NO: 157388 - RNA, 32 nt, Homo Sapiens
uaggaagaauaaagugccuucugagcaagcag

SEQ ID NO: 157389 - RNA, 32 nt, Homo Sapiens
ugcauuucuuuuuauauuaaauaugugaguga

SEQ ID NO: 157390 - RNA, 32 nt, Homo Sapiens
cuugagugacuguguccacaguucauuuuuuu

SEQ ID NO: 157391 - RNA, 32 nt, Homo Sapiens
cagaggucugggcauuauuaauuuauaaaaau

SEQ ID NO: 157392 - RNA, 32 nt, Homo Sapiens
aauagagcaaauguagcaaaacauuaacaauu

SEQ ID NO: 157393 - RNA, 32 nt, Homo Sapiens
uuccuucugaaagcgggacgcgggaggggugg

SEQ ID NO: 157394 - RNA, 32 nt, Homo Sapiens
cagguguggguagcgcacauccccacagauca

SEQ ID NO: 157395 - RNA, 32 nt, Homo Sapiens
cuuguguugaagaggguaucuuggggaaugag

SEQ ID NO: 157396 - RNA, 32 nt, Homo Sapiens
auaugguaugacauauuucuuaaaagcuuauc

SEQ ID NO: 157397 - RNA, 32 nt, Homo Sapiens
cuauuaucacgccgcugcacuccagcuugaau

SEQ ID NO: 157398 - RNA, 30 nt, Homo Sapiens
acggaggcccccgugccugucagcgugcag

SEQ ID NO: 157399 - RNA, 30 nt, Homo Sapiens
uggcagccagguggcauugaggaugguauu

SEQ ID NO: 157400 - RNA, 32 nt, Homo Sapiens
gacccugaaaacagugaaacugaguuagaaag

SEQ ID NO: 157401 - RNA, 32 nt, Homo Sapiens
gggggugggcuuuggucuuagcacuuuccuuc

SEQ ID NO: 157402 - RNA, 31 nt, Homo Sapiens
cuuuuuuguugcucaaguucuaggagucccu

SEQ ID NO: 157403 - RNA, 32 nt, Homo Sapiens
ccaaggauucuuccaccuuaaucuuguuuuca

SEQ ID NO: 157404 - RNA, 32 nt, Homo Sapiens
cuucaucaaccuccuuuuuuuuuaauuuuuau

SEQ ID NO: 157405 - RNA, 32 nt, Homo Sapiens
ccaucugccucccaggucugcgucccauaacc

SEQ ID NO: 157406 - RNA, 32 nt, Homo Sapiens
aaauuacaguuuuauuguuaaaacagagucuu

SEQ ID NO: 157407 - RNA, 32 nt, Homo Sapiens
uggccccaugaccccuucuccuguccccagcu

SEQ ID NO: 157408 - RNA, 32 nt, Homo Sapiens
cuugggagcuaugauccacaaaaacaacuuau

SEQ ID NO: 157409 - RNA, 32 nt, Homo Sapiens
uuugaaccaccugcaucccagcccuucaggaa

SEQ ID NO: 157410 - RNA, 32 nt, Homo Sapiens
acaccaucuaaucagcugccagcaaauaaaag

SEQ ID NO: 157411 - RNA, 32 nt, Homo Sapiens
aucccaucuauaagaacacaaucuuccagcau

SEQ ID NO: 157412 - RNA, 32 nt, Homo Sapiens
guagauacuauuuuuaccaaguuucuuuuucu

SEQ ID NO: 157413 - RNA, 32 nt, Homo Sapiens
gucucccguggaaucuuguugccugagagccc

SEQ ID NO: 157414 - RNA, 32 nt, Homo Sapiens
ucaguagacacucuaggcucggaggcugccac

SEQ ID NO: 157415 - RNA, 32 nt, Homo Sapiens
cuauuuaguauuguugguaucuccagcccccc

SEQ ID NO: 157416 - RNA, 32 nt, Homo Sapiens
uggugucacuccccggcucagccaggccagga

SEQ ID NO: 157417 - RNA, 32 nt, Homo Sapiens
ucaggaaaccucacccaccucagcccuuauua

SEQ ID NO: 157418 - RNA, 32 nt, Homo Sapiens
gcaggaaugaugcuuugauacucuggaggaga

SEQ ID NO: 157419 - RNA, 32 nt, Homo Sapiens
ggcugggcagcagcaccgacgacgacucggag

SEQ ID NO: 157420 - RNA, 32 nt, Homo Sapiens
aucuuuucugucaucaggaagucuccuggaag

SEQ ID NO: 157421 - RNA, 32 nt, Homo Sapiens
gggcacugggaagggaggccagugccuagagu

SEQ ID NO: 157422 - RNA, 32 nt, Homo Sapiens
caacugucuagggcucagacaccaccagccaa

SEQ ID NO: 157423 - RNA, 32 nt, Homo Sapiens
uccuuguuugcaaagguuucugcagccccacc

SEQ ID NO: 157424 - RNA, 32 nt, Homo Sapiens
uuugcuuuaaugagaauagaaacguaaacuau

SEQ ID NO: 157425 - RNA, 29 nt, Homo Sapiens
ccuccaguguugcggagaggcaagagcag

SEQ ID NO: 157426 - RNA, 32 nt, Homo Sapiens
auaagcuccgucugcaguuccaggccagccag

SEQ ID NO: 157427 - RNA, 32 nt, Homo Sapiens
uagcuucuguccuuauuaguacacuuaacauu

SEQ ID NO: 157428 - RNA, 29 nt, Homo Sapiens
guucugucauauguuaagcagcuaaauuu

SEQ ID NO: 157429 - RNA, 32 nt, Homo Sapiens
acuaaauuuuugguaauuuguuauggcagcac

SEQ ID NO: 157430 - RNA, 32 nt, Homo Sapiens
ccgcggccagcccuucccucccagucggccuc

SEQ ID NO: 157431 - RNA, 32 nt, Homo Sapiens
ggaaaacgcucgcgacccagggccgccggcgg

SEQ ID NO: 157432 - RNA, 32 nt, Homo Sapiens
ugggagguggagguggcagugagccgagauag

SEQ ID NO: 157433 - RNA, 32 nt, Homo Sapiens
cagcaggcccagugcuucauaaaccaaguuau

SEQ ID NO: 157434 - RNA, 32 nt, Homo Sapiens
ugcaauuugacugugcuugagaggugaauaca

SEQ ID NO: 157435 - RNA, 32 nt, Homo Sapiens
cauugcgagaguagcuauuuugaaagaauaau

SEQ ID NO: 157436 - RNA, 32 nt, Homo Sapiens
acauugaagggagauuggcacccaggcuggga

SEQ ID NO: 157437 - RNA, 32 nt, Homo Sapiens
gagugcaggagcacgugcuguuuuuuauuugg

SEQ ID NO: 157438 - RNA, 32 nt, Homo Sapiens
guuuuuaaauguuuuacuuuugguacaguuga

SEQ ID NO: 157439 - RNA, 32 nt, Homo Sapiens
ggcacuuuccaggcuaugggugucugaugucu

SEQ ID NO: 157440 - RNA, 32 nt, Homo Sapiens
cacaugcggggacggucucaaaugcgugauca

SEQ ID NO: 157441 - RNA, 32 nt, Homo Sapiens
aaaaucaaaaauguauguuaagagaauuuuuu

SEQ ID NO: 157442 - RNA, 32 nt, Homo Sapiens
gucuuucauagcuguucauguacugcauuuau

SEQ ID NO: 157443 - RNA, 32 nt, Homo Sapiens
uuucccuccaggcaucucugggaaaggaccug

SEQ ID NO: 157444 - RNA, 32 nt, Homo Sapiens
auaguggcagugcagcaaccagagcacuguau

SEQ ID NO: 157445 - RNA, 32 nt, Homo Sapiens
cgcaggcgagcaccgcgccggcccugagccuc

SEQ ID NO: 157446 - RNA, 32 nt, Homo Sapiens
uuaaaaguuuaucuaccucguuuuaggcaauc

SEQ ID NO: 157447 - RNA, 32 nt, Homo Sapiens
ggcuguuaaaagacauaaucugacuaaaagau

SEQ ID NO: 157448 - RNA, 29 nt, Homo Sapiens
gcuccuguaacaaaauaccacaaacuggu

SEQ ID NO: 157449 - RNA, 32 nt, Homo Sapiens
gguaguauaugaugaagagaagauuacagucu

SEQ ID NO: 157450 - RNA, 32 nt, Homo Sapiens
uccugcuuucuugggucccaccagugucacuu

SEQ ID NO: 157451 - RNA, 32 nt, Homo Sapiens
cugccucccgguuucaagugauucuccugccu

SEQ ID NO: 157452 - RNA, 32 nt, Homo Sapiens
gcggcaaggcccggcuccuguucgaccgcccg

SEQ ID NO: 157453 - RNA, 32 nt, Homo Sapiens
uauauccuucaguuuguuuuuauuuuuaauuu

SEQ ID NO: 157454 - RNA, 32 nt, Homo Sapiens
aagagaugacuuugaggauaaaaggaccaaag

SEQ ID NO: 157455 - RNA, 32 nt, Homo Sapiens
ucgaaggcaucaagacaaauugaaagaaagca

SEQ ID NO: 157456 - RNA, 32 nt, Homo Sapiens
ggcugccagcgggggcuccucgcccuuugcuu

SEQ ID NO: 157457 - RNA, 32 nt, Homo Sapiens
ucauaacuaaauauuauaucaauauguuuuga

SEQ ID NO: 157458 - RNA, 32 nt, Homo Sapiens
augguaucuucagguguacuuugggaugcuuu

SEQ ID NO: 157459 - RNA, 32 nt, Homo Sapiens
uuaaagauauuaucaaggguuuuggacaaaca

SEQ ID NO: 157460 - RNA, 32 nt, Homo Sapiens
uuugauucccacuuagcaguaugcuccaauca

SEQ ID NO: 157461 - RNA, 32 nt, Homo Sapiens
cugacuucgaugcaaauauucuggccagagaa

SEQ ID NO: 157462 - RNA, 32 nt, Homo Sapiens
ccggcgggagaggcggccggccuggacuggcc

SEQ ID NO: 157463 - RNA, 32 nt, Homo Sapiens
ugugagaagauaauacagaugaaccaaagaug

SEQ ID NO: 157464 - RNA, 32 nt, Homo Sapiens
cggcggugcuggagguugcggcggcggcugcg

SEQ ID NO: 157465 - RNA, 30 nt, Homo Sapiens
uuggggauauucccugcccaaaaaauuccu

SEQ ID NO: 157466 - RNA, 32 nt, Homo Sapiens
gccauuuucccauuuuaggcgauggcaacgca

SEQ ID NO: 157467 - RNA, 32 nt, Homo Sapiens
guuugugagcccucccaccuccacaacuucag

SEQ ID NO: 157468 - RNA, 32 nt, Homo Sapiens
guauuuauacuucauuuugugacuuuguaaau

SEQ ID NO: 157469 - RNA, 32 nt, Homo Sapiens
ggcuagugugacugagaaacugaauuuuuaau

SEQ ID NO: 157470 - RNA, 32 nt, Homo Sapiens
uaucuguauggugaauuucccgaaugcuguuu

SEQ ID NO: 157471 - RNA, 32 nt, Homo Sapiens
ccuucuuggccagcgggaaguccccaaggacg

SEQ ID NO: 157472 - RNA, 32 nt, Homo Sapiens
auugcuuuuuauauuucuuucuuuuuuaaugu

SEQ ID NO: 157473 - RNA, 32 nt, Homo Sapiens
ggugccuccucuaucuacagguuccugcucca

SEQ ID NO: 157474 - RNA, 30 nt, Homo Sapiens
aguuucuuuugcugugcagaagcucuuuag

SEQ ID NO: 157475 - RNA, 30 nt, Homo Sapiens
uuuuuggauaaaagaugauguuuuaaguuc

SEQ ID NO: 157476 - RNA, 32 nt, Homo Sapiens
uggcagugucucuggggacagcagcugcgaau

SEQ ID NO: 157477 - RNA, 32 nt, Homo Sapiens
uuaaaugacaauuuauguggauuuugcaugua

SEQ ID NO: 157478 - RNA, 32 nt, Homo Sapiens
gcuuucuggcuccuuccgcgcggcgagcucag

SEQ ID NO: 157479 - RNA, 32 nt, Homo Sapiens
guaauuacauauauauauauaauuuauuauuu

SEQ ID NO: 157480 - RNA, 32 nt, Homo Sapiens
gagcuggggccgcaaggcuggugccggccgac

SEQ ID NO: 157481 - RNA, 32 nt, Homo Sapiens
uuuccucuuugcuguuuguaguagagacauuu

SEQ ID NO: 157482 - RNA, 32 nt, Homo Sapiens
ggcccguccccaacuucuauuuuguuuucgcc

SEQ ID NO: 157483 - RNA, 32 nt, Homo Sapiens
acaguaacuaaaaugcacuaugcugaguggaa

SEQ ID NO: 157484 - RNA, 32 nt, Homo Sapiens
ugcggccccacuccccucccccgcucccauuu

SEQ ID NO: 157485 - RNA, 32 nt, Homo Sapiens
auauuuuuugaaaaccaauguguuauugaaac

SEQ ID NO: 157486 - RNA, 32 nt, Homo Sapiens
gccauccccguccccugccgcuccgguuccga

SEQ ID NO: 157487 - RNA, 32 nt, Homo Sapiens
ccggagggcggguggcgcgggaggaagcggcg

SEQ ID NO: 157488 - RNA, 30 nt, Homo Sapiens
cccagccccaccucagcccaucuugacaaa

SEQ ID NO: 157489 - RNA, 32 nt, Homo Sapiens
cuuauaacauagugcacagcaagagcuacauc

SEQ ID NO: 157490 - RNA, 32 nt, Homo Sapiens
gagguucugaagaucagcuuugaaaggaaagu

SEQ ID NO: 157491 - RNA, 32 nt, Homo Sapiens
caauagcucuaauuuuaacauuucuacccaau

SEQ ID NO: 157492 - RNA, 32 nt, Homo Sapiens
augucacaugauuccaguaacaauacgaaaag

SEQ ID NO: 157493 - RNA, 32 nt, Homo Sapiens
aucccuauauauuauaucuauauugcaaaauu

SEQ ID NO: 157494 - RNA, 28 nt, Homo Sapiens
agccuaagacagagacauuugaacaggg

SEQ ID NO: 157495 - RNA, 32 nt, Homo Sapiens
auguacggagacccucacgcgccgcggccgau

SEQ ID NO: 157496 - RNA, 32 nt, Homo Sapiens
uagagaugacaguuuuguguccuguuagagcu

SEQ ID NO: 157497 - RNA, 32 nt, Homo Sapiens
cucaucuucauguuuucugcaucuauugaagu

SEQ ID NO: 157498 - RNA, 32 nt, Homo Sapiens
uucauaaacaaacucugcauuuagauaacuau

SEQ ID NO: 157499 - RNA, 32 nt, Homo Sapiens
gaagcauaccccucuccaccagcccuacuccu

SEQ ID NO: 157500 - RNA, 32 nt, Homo Sapiens
agaacaaauaaucagacauauacuuuaauguu

SEQ ID NO: 157501 - RNA, 32 nt, Homo Sapiens
guauggguucccucaaccucuuagcuagagac

SEQ ID NO: 157502 - RNA, 32 nt, Homo Sapiens
ucccucaauguuaacagcacuguuccaccgca

SEQ ID NO: 157503 - RNA, 32 nt, Homo Sapiens
gcgucccucugccugcccacucaguggcaaca

SEQ ID NO: 157504 - RNA, 32 nt, Homo Sapiens
ucagcuggcccuccaggcccccgcccccaucc

SEQ ID NO: 157505 - RNA, 32 nt, Homo Sapiens
cuccggaggacaggaggaaacugcacacccuc

SEQ ID NO: 157506 - RNA, 32 nt, Homo Sapiens
acucacuucuaauguaacaaucuuucaagaag

SEQ ID NO: 157507 - RNA, 32 nt, Homo Sapiens
guauuaaaauuuggucagauaguauuaauaga

SEQ ID NO: 157508 - RNA, 32 nt, Homo Sapiens
cuuuccccauucagugacauguccucucugcu

SEQ ID NO: 157509 - RNA, 31 nt, Homo Sapiens
cauaguugcuuucuugugccaagggcuacuu

SEQ ID NO: 157510 - RNA, 32 nt, Homo Sapiens
ucuacauaaauaauaaaugagcacuaaugaaa

SEQ ID NO: 157511 - RNA, 32 nt, Homo Sapiens
cagaaaauggguuuuucuuuucuauugcauag

SEQ ID NO: 157512 - RNA, 32 nt, Homo Sapiens
gauugccacagugugaaggaaaugcagugugg

SEQ ID NO: 157513 - RNA, 32 nt, Homo Sapiens
ccugcacugccuucagggccacagcaguccuc

SEQ ID NO: 157514 - RNA, 32 nt, Homo Sapiens
acuucccaaaauuucuccuccuccugugcccu

SEQ ID NO: 157515 - RNA, 32 nt, Homo Sapiens
cacauuccaagugcuuaauugccguguguggc

SEQ ID NO: 157516 - RNA, 32 nt, Homo Sapiens
auuuuaaguauuuugcaauaaagaaauucaug

SEQ ID NO: 157517 - RNA, 32 nt, Homo Sapiens
acacauuaaugagcccaagaaauacacgcaac

SEQ ID NO: 157518 - RNA, 32 nt, Homo Sapiens
agcccccuuucugugcagggagggcgcaaagc

SEQ ID NO: 157519 - RNA, 32 nt, Homo Sapiens
gggacuggcucucccuccccagccacgaguau

SEQ ID NO: 157520 - RNA, 32 nt, Homo Sapiens
uagagggggucucagaaacugcgaggccaguu

SEQ ID NO: 157521 - RNA, 32 nt, Homo Sapiens
ggacaggagaucugggaugccuggcugcugga

SEQ ID NO: 157522 - RNA, 32 nt, Homo Sapiens
caccuuggcucauggucuuccaggguuuuuau

SEQ ID NO: 157523 - RNA, 32 nt, Homo Sapiens
ccacacuguccucauucccagauggaaagacc

SEQ ID NO: 157524 - RNA, 32 nt, Homo Sapiens
aaugagauacuggcaggacagggcuagcagau

SEQ ID NO: 157525 - RNA, 32 nt, Homo Sapiens
ggcuuucguccucauuagguguuggccucagc

SEQ ID NO: 157526 - RNA, 32 nt, Homo Sapiens
gacgggaccugccacucgcaucugggcaaugu

SEQ ID NO: 157527 - RNA, 32 nt, Homo Sapiens
auacagauauuguggaugaagcaucuauuacu

SEQ ID NO: 157528 - RNA, 32 nt, Homo Sapiens
gacacuucucaagauuugacuggaucagaguu

SEQ ID NO: 157529 - RNA, 32 nt, Homo Sapiens
ucuguccagugagagauucauccaccaaggau

SEQ ID NO: 157530 - RNA, 32 nt, Homo Sapiens
cuguuaguuaguauuauuuauguguaucggga

SEQ ID NO: 157531 - RNA, 32 nt, Homo Sapiens
cuguguuagccauuagauuuuuucagccauua

SEQ ID NO: 157532 - RNA, 32 nt, Homo Sapiens
aaggauuguggcaaccaucagaagcuuggaag

SEQ ID NO: 157533 - RNA, 32 nt, Homo Sapiens
gacuccugcaugcuccuccccuugggcucuca

SEQ ID NO: 157534 - RNA, 32 nt, Homo Sapiens
gacaacuccuccuccuccuccuccucuccugc

SEQ ID NO: 157535 - RNA, 32 nt, Homo Sapiens
acaaguaauaguccuuuuuuuguuuguuuguu

SEQ ID NO: 157536 - RNA, 32 nt, Homo Sapiens
guggaaggcugggaaacacugaauuaugaaau

SEQ ID NO: 157537 - RNA, 32 nt, Homo Sapiens
agauggaagugugucaaaaacaacauuccaua

SEQ ID NO: 157538 - RNA, 32 nt, Homo Sapiens
auggcuuccagaauuuuauccucuuugagguc

SEQ ID NO: 157539 - RNA, 32 nt, Homo Sapiens
guuggagagaggugggaagcagauaggauaac

SEQ ID NO: 157540 - RNA, 32 nt, Homo Sapiens
uccaacggguggcgcuagaggccauggaggca

SEQ ID NO: 157541 - RNA, 32 nt, Homo Sapiens
gcugggcggucggcccggucccaccgaacugc

SEQ ID NO: 157542 - RNA, 32 nt, Homo Sapiens
ggagggaaagaucauuacauuugucaggagca

SEQ ID NO: 157543 - RNA, 32 nt, Homo Sapiens
gugcuaaugagccccaguucugguuccacugg

SEQ ID NO: 157544 - RNA, 32 nt, Homo Sapiens
auggcggugcugccuccacccuccugagccug

SEQ ID NO: 157545 - RNA, 32 nt, Homo Sapiens
acccagcaggccuggguuccgugagcgcgaac

SEQ ID NO: 157546 - RNA, 32 nt, Homo Sapiens
ggaggcaggaggaggcugagcguagucgugga

SEQ ID NO: 157547 - RNA, 32 nt, Homo Sapiens
ucuuaguuacuuuggaacacuacucuuacaug

SEQ ID NO: 157548 - RNA, 32 nt, Homo Sapiens
gcggaauuucccagcucuguguuugucuguug

SEQ ID NO: 157549 - RNA, 32 nt, Homo Sapiens
uuaauacuuuuuuaaaggguccaaauaaaaua

SEQ ID NO: 157550 - RNA, 32 nt, Homo Sapiens
ccucagaagauaaaaagaaaugagucucauau

SEQ ID NO: 157551 - RNA, 32 nt, Homo Sapiens
agacacuuucuuucuucacucugaaguagcug

SEQ ID NO: 157552 - RNA, 32 nt, Homo Sapiens
ucagcuuuaaaauaugaaagugcuagauucug

SEQ ID NO: 157553 - RNA, 32 nt, Homo Sapiens
aagcacugcuggcgauuucucauggcaguaaa

SEQ ID NO: 157554 - RNA, 32 nt, Homo Sapiens
uuuuguuuuuguuuuugagauguaauauugcu

SEQ ID NO: 157555 - RNA, 32 nt, Homo Sapiens
cagcggcgcgcccugcagagggaccagagcuu

SEQ ID NO: 157556 - RNA, 31 nt, Homo Sapiens
gugucagaauaaaaaagguguauuucacugc

SEQ ID NO: 157557 - RNA, 32 nt, Homo Sapiens
ucucaguuuaaugugggauuaagagccaagaa

SEQ ID NO: 157558 - RNA, 32 nt, Homo Sapiens
ugcuggcccucuaauaaauauuuucaauauaa

SEQ ID NO: 157559 - RNA, 32 nt, Homo Sapiens
agaaagauucuauuguucgaauuguaugauua

SEQ ID NO: 157560 - RNA, 32 nt, Homo Sapiens
ggaaacucaaauaugcuccccucccccaaaaa

SEQ ID NO: 157561 - RNA, 32 nt, Homo Sapiens
cugcccauagccagcccuccgccgccucuccu

SEQ ID NO: 157562 - RNA, 32 nt, Homo Sapiens
aaaauuaaccuuuagaucuacuauuuauuuuu

SEQ ID NO: 157563 - RNA, 32 nt, Homo Sapiens
augacuaccaaaacugaucaucugagucgauu

SEQ ID NO: 157564 - RNA, 32 nt, Homo Sapiens
cggcgacuggcaauguuuggccucaaaagaaa

SEQ ID NO: 157565 - RNA, 32 nt, Homo Sapiens
ccaguuguguucagacacacacaucacagcuu

SEQ ID NO: 157566 - RNA, 32 nt, Homo Sapiens
uugcuuaaaaagaaacaaaacaaaucacauac

SEQ ID NO: 157567 - RNA, 32 nt, Homo Sapiens
gguaacugugcccugcaccccucgguagccgc

SEQ ID NO: 157568 - RNA, 32 nt, Homo Sapiens
ugugacaacuguuuccucccugaccccagagg

SEQ ID NO: 157569 - RNA, 32 nt, Homo Sapiens
ccugagagcgcggaccccggcgagcagcccag

SEQ ID NO: 157570 - RNA, 32 nt, Homo Sapiens
guaaaacucauaugaaaccaaaaaagagcuca

SEQ ID NO: 157571 - RNA, 32 nt, Homo Sapiens
aagcagaauccggagaaggaucaggucaacac

SEQ ID NO: 157572 - RNA, 32 nt, Homo Sapiens
caaaacuucuauuauccagagucaugggagag

SEQ ID NO: 157573 - RNA, 32 nt, Homo Sapiens
ucuguugauuuauguuuaaucauuucaguagu

SEQ ID NO: 157574 - RNA, 32 nt, Homo Sapiens
cggcgguggcugccccgauuuccuccagcugc

SEQ ID NO: 157575 - RNA, 32 nt, Homo Sapiens
ccgcgucugcuggacgcgggagacgccagcga

SEQ ID NO: 157576 - RNA, 32 nt, Homo Sapiens
agcccucugcuguguguccguggugaguucug

SEQ ID NO: 157577 - RNA, 32 nt, Homo Sapiens
uucugccucaauggggaauuuuuugauccugu

SEQ ID NO: 157578 - RNA, 32 nt, Homo Sapiens
ugcgcauaucauauauauguauuuauggucca

SEQ ID NO: 157579 - RNA, 32 nt, Homo Sapiens
ggggacgcaaacaaaaaaauggcuuucauauu

SEQ ID NO: 157580 - RNA, 32 nt, Homo Sapiens
ccucgccagcgcugcugcaagaaggaccccgg

SEQ ID NO: 157581 - RNA, 32 nt, Homo Sapiens
uuaugugggguucauugggcuaggguaguggu

SEQ ID NO: 157582 - RNA, 30 nt, Homo Sapiens
caagagaauauccgaacuuuaauuucagga

SEQ ID NO: 157583 - RNA, 32 nt, Homo Sapiens
aaaacaaaaauauuuucuaacuuguaaguucu

SEQ ID NO: 157584 - RNA, 32 nt, Homo Sapiens
acuauuaucaaagcuuguuuuugucuucucag

SEQ ID NO: 157585 - RNA, 32 nt, Homo Sapiens
cuguguagcugcuuuuggcagcuccucaucuc

SEQ ID NO: 157586 - RNA, 32 nt, Homo Sapiens
gaaggguuuguggaccagaacuuugaccuugu

SEQ ID NO: 157587 - RNA, 32 nt, Homo Sapiens
gcugcagccugccuggggcagaauaaaggaac

SEQ ID NO: 157588 - RNA, 32 nt, Homo Sapiens
gucuaaaauuuggauaugauucuuauguuuuu

SEQ ID NO: 157589 - RNA, 31 nt, Homo Sapiens
guauaggagccccaggcagggcuaguaacag

SEQ ID NO: 157590 - RNA, 32 nt, Homo Sapiens
gucucccagccccuccuucucugucucuaccu

SEQ ID NO: 157591 - RNA, 32 nt, Homo Sapiens
ucuauuuuaaucuugcuacuaccguuauacac

SEQ ID NO: 157592 - RNA, 32 nt, Homo Sapiens
cagaucuuuaaagaagcgagagaggaggcccc

SEQ ID NO: 157593 - RNA, 32 nt, Homo Sapiens
uguccuagacauugaggggcccagauaagacc

SEQ ID NO: 157594 - RNA, 32 nt, Homo Sapiens
uuagagccauuuugaguuuguguuguuuagga

SEQ ID NO: 157595 - RNA, 32 nt, Homo Sapiens
aagaccauguauaaaacugauggaaauaauag

SEQ ID NO: 157596 - RNA, 32 nt, Homo Sapiens
accuccgccucccggguucgagcaauucuccu

SEQ ID NO: 157597 - RNA, 32 nt, Homo Sapiens
ugagaugugcuuuuuuccuguguuaguucaaa

SEQ ID NO: 157598 - RNA, 31 nt, Homo Sapiens
aggagaccggccuguuccugaguuugagugc

SEQ ID NO: 157599 - RNA, 32 nt, Homo Sapiens
acaucaauucuauagauucugacuuuuucuaa

SEQ ID NO: 157600 - RNA, 32 nt, Homo Sapiens
uguacugggcagcugguggcggugcagaaaag

SEQ ID NO: 157601 - RNA, 32 nt, Homo Sapiens
aauuguccccaguuugcagaaaagcaccugcc

SEQ ID NO: 157602 - RNA, 32 nt, Homo Sapiens
aguaagcaagcacuucacuguuucacaaagcu

SEQ ID NO: 157603 - RNA, 32 nt, Homo Sapiens
caaugucccuucuucaaaagugccaaaaggaa

SEQ ID NO: 157604 - RNA, 32 nt, Homo Sapiens
agccuguagaugggguaagugcuguggaucug

SEQ ID NO: 157605 - RNA, 32 nt, Homo Sapiens
agguugggggcagaggcccaucuggccugaac

SEQ ID NO: 157606 - RNA, 32 nt, Homo Sapiens
ucuuauuggccauaucccccacucauauugua

SEQ ID NO: 157607 - RNA, 32 nt, Homo Sapiens
guguccaugguguccuccuccuccucaccgug

SEQ ID NO: 157608 - RNA, 32 nt, Homo Sapiens
ucuccucuccccaacccuuccacacguuugau

SEQ ID NO: 157609 - RNA, 32 nt, Homo Sapiens
cuuuggagaaaguagauauuuccaucaaagcc

SEQ ID NO: 157610 - RNA, 32 nt, Homo Sapiens
gggcgcggccccagggcccugcgcccacuuug

SEQ ID NO: 157611 - RNA, 32 nt, Homo Sapiens
auauuucuagaaucuggaacugucaccaugau

SEQ ID NO: 157612 - RNA, 32 nt, Homo Sapiens
ccucugagcccaagccaagccaucgcaacccc

SEQ ID NO: 157613 - RNA, 32 nt, Homo Sapiens
ugugagauauaaauauaaauauauaaagcuau

SEQ ID NO: 157614 - RNA, 31 nt, Homo Sapiens
gaggggcagcgcagaccucugcggcccgggc

SEQ ID NO: 157615 - RNA, 32 nt, Homo Sapiens
ccagagcaaauccuuccuucagaugggauagu

SEQ ID NO: 157616 - RNA, 32 nt, Homo Sapiens
cuauguauauauaagaaccauauuuuccacaa

SEQ ID NO: 157617 - RNA, 32 nt, Homo Sapiens
aagcaaaaacaaaaacaaaaacaccuaaaaaa

SEQ ID NO: 157618 - RNA, 32 nt, Homo Sapiens
uauccauacuuagcaaccaacaaacaaauuga

SEQ ID NO: 157619 - RNA, 32 nt, Homo Sapiens
aauuuauuccacuggaaaggucucaggacucc

SEQ ID NO: 157620 - RNA, 32 nt, Homo Sapiens
gcgagcggaggcggagaaagggcgcgggagug

SEQ ID NO: 157621 - RNA, 32 nt, Homo Sapiens
ucauguuuuguugcuauugugaauuauaaaaa

SEQ ID NO: 157622 - RNA, 32 nt, Homo Sapiens
ucuucaaaaaacaaaaacaagccccagaauca

SEQ ID NO: 157623 - RNA, 32 nt, Homo Sapiens
aaugggaauauuaacugugccaggaaaaucua

SEQ ID NO: 157624 - RNA, 32 nt, Homo Sapiens
caggcaauacuagccccucuggagcacggagc

SEQ ID NO: 157625 - RNA, 32 nt, Homo Sapiens
acagaagcugggucuuacccgcagcacgagug

SEQ ID NO: 157626 - RNA, 32 nt, Homo Sapiens
cugcggagggaucuccguggggcggugaacgc

SEQ ID NO: 157627 - RNA, 32 nt, Homo Sapiens
aaucaauaugaccucacuuaaaacagaaacuc

SEQ ID NO: 157628 - RNA, 32 nt, Homo Sapiens
uggucaacacugggcccggccauaucccccau

SEQ ID NO: 157629 - RNA, 32 nt, Homo Sapiens
ccauguccuaauuauuuauagcuuccugccug

SEQ ID NO: 157630 - RNA, 32 nt, Homo Sapiens
gaucgcgcuccuuccccgaggaauugcaauuu

SEQ ID NO: 157631 - RNA, 32 nt, Homo Sapiens
gcuccucugccagccugugggcauggcaguca

SEQ ID NO: 157632 - RNA, 32 nt, Homo Sapiens
aauuacauuuuucccauucucagaacaaagac

SEQ ID NO: 157633 - RNA, 32 nt, Homo Sapiens
cauuccauagccaugugcuugucccugugcuc

SEQ ID NO: 157634 - RNA, 32 nt, Homo Sapiens
ccuggcccuuuauaaauuauguuauaauuuca

SEQ ID NO: 157635 - RNA, 32 nt, Homo Sapiens
cgaggcgccccuaccggccccccuccccgguu

SEQ ID NO: 157636 - RNA, 32 nt, Homo Sapiens
ggaugcuagagcaguucuguaaugcuuugaga

SEQ ID NO: 157637 - RNA, 32 nt, Homo Sapiens
guuagggacaagggcugcugugggcagcgagg

SEQ ID NO: 157638 - RNA, 32 nt, Homo Sapiens
cacuggaggaagacguggagcugugcgugccu

SEQ ID NO: 157639 - RNA, 32 nt, Homo Sapiens
uucgaggucucuuugagaaguacgugcagcga

SEQ ID NO: 157640 - RNA, 32 nt, Homo Sapiens
cugucugacaaaugccaggcucacuucaagga

SEQ ID NO: 157641 - RNA, 32 nt, Homo Sapiens
acaccaggcgacaggcaccacccccucugaua

SEQ ID NO: 157642 - RNA, 32 nt, Homo Sapiens
aagcccuuucuuccucuagucgccagcucauc

SEQ ID NO: 157643 - RNA, 32 nt, Homo Sapiens
uguagaaggggccgugggguccccuccagcau

SEQ ID NO: 157644 - RNA, 32 nt, Homo Sapiens
ucucauaauauauuuaauuaaauccccuuuaa

SEQ ID NO: 157645 - RNA, 32 nt, Homo Sapiens
ggaggcaaggagugaaguaagaaggacacuuc

SEQ ID NO: 157646 - RNA, 32 nt, Homo Sapiens
cucucucucaccaugugacacacuggcucccc

SEQ ID NO: 157647 - RNA, 32 nt, Homo Sapiens
uuugacacagaaaaccucaguugaaaaugcaa

SEQ ID NO: 157648 - RNA, 32 nt, Homo Sapiens
ucccuuugacuucuacagaaaucugggccuga

SEQ ID NO: 157649 - RNA, 32 nt, Homo Sapiens
aauugaugcaacaggggauauuagcuguaguu

SEQ ID NO: 157650 - RNA, 32 nt, Homo Sapiens
uccccuuccaccucucuuugccuguaggaugu

SEQ ID NO: 157651 - RNA, 32 nt, Homo Sapiens
gagcauuagugucaguguaauuuuagagugac

SEQ ID NO: 157652 - RNA, 32 nt, Homo Sapiens
uauucuugugccuaguacuuuaccacaaauac

SEQ ID NO: 157653 - RNA, 32 nt, Homo Sapiens
gccucugcugaaugcagggaaugcaauccuuc

SEQ ID NO: 157654 - RNA, 32 nt, Homo Sapiens
gcagcccugagcucagcugcaggaaggacauc

SEQ ID NO: 157655 - RNA, 32 nt, Homo Sapiens
ggcugagacuugaauggaaaagagauucccau

SEQ ID NO: 157656 - RNA, 32 nt, Homo Sapiens
cgugcuuuuccacagaagguuagacccugaaa

SEQ ID NO: 157657 - RNA, 32 nt, Homo Sapiens
cugaugaaauaccugcaaagugcucuaaaaau

SEQ ID NO: 157658 - RNA, 32 nt, Homo Sapiens
uggucccagaacuuggaaaaguuguagggauu

SEQ ID NO: 157659 - RNA, 32 nt, Homo Sapiens
ucucuccccccaccacccacccccacacacgu

SEQ ID NO: 157660 - RNA, 32 nt, Homo Sapiens
ccggaggcugacgaggcuggacuuccucgagu

SEQ ID NO: 157661 - RNA, 32 nt, Homo Sapiens
aaucaggcuccaaaggccuccuuggugaggua

SEQ ID NO: 157662 - RNA, 32 nt, Homo Sapiens
ugcuaaagaaauuaguuuuucuuuuucuuuuu

SEQ ID NO: 157663 - RNA, 32 nt, Homo Sapiens
ccagugugugacucacuguagagccauguuua

SEQ ID NO: 157664 - RNA, 32 nt, Homo Sapiens
ucagggagcugcagaagcagggggcugguggg

SEQ ID NO: 157665 - RNA, 32 nt, Homo Sapiens
gcuucucugggcccuccucuccuccucacagc

SEQ ID NO: 157666 - RNA, 32 nt, Homo Sapiens
gaccccgcucuuggcucugcagcccucugggg

SEQ ID NO: 157667 - RNA, 32 nt, Homo Sapiens
gcaaugacuaacauuuaauuuguuuacaaaaa

SEQ ID NO: 157668 - RNA, 32 nt, Homo Sapiens
gugggcgcagagcccuccugcucacacagcug

SEQ ID NO: 157669 - RNA, 32 nt, Homo Sapiens
ucugggcugcggaguccacgggccugaaacgc

SEQ ID NO: 157670 - RNA, 32 nt, Homo Sapiens
cuccaccugugcuacccgguccagaccuccca

SEQ ID NO: 157671 - RNA, 32 nt, Homo Sapiens
aggggcuggggcugggguguugaaguuggcuu

SEQ ID NO: 157672 - RNA, 32 nt, Homo Sapiens
aagcuugaguuuuuauuuuuuauuuauuuauu

SEQ ID NO: 157673 - RNA, 32 nt, Homo Sapiens
guguuguuaguagaggcgggguuucaucaugu

SEQ ID NO: 157674 - RNA, 32 nt, Homo Sapiens
gguagugcagccuucugugaccccgcuguggu

SEQ ID NO: 157675 - RNA, 32 nt, Homo Sapiens
caccugcaugaagccguucuggcugccagagc

SEQ ID NO: 157676 - RNA, 32 nt, Homo Sapiens
cagauuacauucuccugggauucuuuaaaccc

SEQ ID NO: 157677 - RNA, 32 nt, Homo Sapiens
uucuucccauuuuuuccaacauuuggcaucau

SEQ ID NO: 157678 - RNA, 32 nt, Homo Sapiens
ccagcccaggagccugagggggugucuaggug

SEQ ID NO: 157679 - RNA, 32 nt, Homo Sapiens
ugggggaaaggcagggcccacccgggccagcc

SEQ ID NO: 157680 - RNA, 32 nt, Homo Sapiens
gguacgcugucuuuuuaaaaucauguauuuaa

SEQ ID NO: 157681 - RNA, 32 nt, Homo Sapiens
augggggacaccuucauccgucacaucgcccu

SEQ ID NO: 157682 - RNA, 32 nt, Homo Sapiens
uguuuaaaacaaagagcaauugauggauaaau

SEQ ID NO: 157683 - RNA, 32 nt, Homo Sapiens
gaagcucagaucugcugggaggagacuacauu

SEQ ID NO: 157684 - RNA, 32 nt, Homo Sapiens
gccuagcuggcgggaccguuagcucgaggcgg

SEQ ID NO: 157685 - RNA, 32 nt, Homo Sapiens
ggugaggagagccggguccagguucuuaagaa

SEQ ID NO: 157686 - RNA, 32 nt, Homo Sapiens
gcaccugcuugaaagaaauuaaaaaccaacag

SEQ ID NO: 157687 - RNA, 32 nt, Homo Sapiens
ccuccggcgcuuccuccaccccgggauacaca

SEQ ID NO: 157688 - RNA, 32 nt, Homo Sapiens
ggccgguugccacucuccuccccucccucaga

SEQ ID NO: 157689 - RNA, 32 nt, Homo Sapiens
ggagccugagcccggcucuccucacucaccuc

SEQ ID NO: 157690 - RNA, 32 nt, Homo Sapiens
acacaagaaaucagccugaauaauggaaugac

SEQ ID NO: 157691 - RNA, 32 nt, Homo Sapiens
aauuaagguuuuagaaagcuuaaugaauuaaa

SEQ ID NO: 157692 - RNA, 32 nt, Homo Sapiens
aggggcugcggcgggggcugucgcgcuggaag

SEQ ID NO: 157693 - RNA, 32 nt, Homo Sapiens
uaaagagguagaaauguuuucuauugguuuua

SEQ ID NO: 157694 - RNA, 32 nt, Homo Sapiens
ggaaaacugcugauuuuacauuuuauggcuga

SEQ ID NO: 157695 - RNA, 32 nt, Homo Sapiens
uaacgcuaaagauuuuaccaugccuggaaauu

SEQ ID NO: 157696 - RNA, 32 nt, Homo Sapiens
gcucugggaccccucuagguguccuccagacc

SEQ ID NO: 157697 - RNA, 32 nt, Homo Sapiens
acugauaugcugauuugcucuuucucauugua

SEQ ID NO: 157698 - RNA, 32 nt, Homo Sapiens
caaagccccacccaggcccccaucugggauga

SEQ ID NO: 157699 - RNA, 32 nt, Homo Sapiens
ccugggguuugugguaaaaugucgguaaagua

SEQ ID NO: 157700 - RNA, 32 nt, Homo Sapiens
guguagacuucugaauaagaugauagacgaga

SEQ ID NO: 157701 - RNA, 32 nt, Homo Sapiens
cacucaguacccgccacccccaccccgggagu

SEQ ID NO: 157702 - RNA, 32 nt, Homo Sapiens
cgcguuggcucugugggcccaggccgccugag

SEQ ID NO: 157703 - RNA, 32 nt, Homo Sapiens
caucugucuuggaauuguuuucugggauggau

SEQ ID NO: 157704 - RNA, 32 nt, Homo Sapiens
ccaggugagaggaggaagaggggucuggaaag

SEQ ID NO: 157705 - RNA, 32 nt, Homo Sapiens
acuuggaguuucauuucuuuucauuguaauca

SEQ ID NO: 157706 - RNA, 32 nt, Homo Sapiens
ugggggcagcuaggcgcugaggcccggguccu

SEQ ID NO: 157707 - RNA, 32 nt, Homo Sapiens
acaagccauuugaaauucugacccucagcuuu

SEQ ID NO: 157708 - RNA, 32 nt, Homo Sapiens
gccggguccccuccccucgcgccccggaugga

SEQ ID NO: 157709 - RNA, 32 nt, Homo Sapiens
uaguaacuucuccacagaagugccaauauggc

SEQ ID NO: 157710 - RNA, 32 nt, Homo Sapiens
agcaaauguggugccugauuauagaaauuugu

SEQ ID NO: 157711 - RNA, 32 nt, Homo Sapiens
cgcugcaggagcuuugcgggcagcuggagcgc

SEQ ID NO: 157712 - RNA, 32 nt, Homo Sapiens
gaagcagaugcuggcaccacucuucuuaugcu

SEQ ID NO: 157713 - RNA, 32 nt, Homo Sapiens
gcuacaguuugaagaauguaaauaugcaccug

SEQ ID NO: 157714 - RNA, 29 nt, Homo Sapiens
cuaucucuauauagauaccacaaaaggag

SEQ ID NO: 157715 - RNA, 32 nt, Homo Sapiens
ggcuccgcuuccucaggcccugccgggucccu

SEQ ID NO: 157716 - RNA, 32 nt, Homo Sapiens
caauuugucugagugggaaacauccuggauuu

SEQ ID NO: 157717 - RNA, 32 nt, Homo Sapiens
gauuuuuuaaauauucacaucuagccuggaau

SEQ ID NO: 157718 - RNA, 32 nt, Homo Sapiens
cucaggcaccuuccaaaccaaaucugacaagu

SEQ ID NO: 157719 - RNA, 32 nt, Homo Sapiens
auaugaucaaggaaaauagcuuccagaaugug

SEQ ID NO: 157720 - RNA, 32 nt, Homo Sapiens
uggcuuagaauaaugccuggcauguagcaagu

SEQ ID NO: 157721 - RNA, 32 nt, Homo Sapiens
gggcuggcugccagcucaguucugggagcgcu

SEQ ID NO: 157722 - RNA, 32 nt, Homo Sapiens
uagcgggcaggagagcgacaucuuccugagcu

SEQ ID NO: 157723 - RNA, 32 nt, Homo Sapiens
uaagcuuguaaaauacacuguggugauaaaau

SEQ ID NO: 157724 - RNA, 32 nt, Homo Sapiens
aaagauaauuuucuuuucauuuuuaagagaca

SEQ ID NO: 157725 - RNA, 32 nt, Homo Sapiens
ggggaacagggaggcaguagguccuggaaaag

SEQ ID NO: 157726 - RNA, 32 nt, Homo Sapiens
gccccgcccgcccugcccuccccucccgaucc

SEQ ID NO: 157727 - RNA, 32 nt, Homo Sapiens
cucaaaaagggaggggacagauggggagcuuu

SEQ ID NO: 157728 - RNA, 32 nt, Homo Sapiens
uuacucagaaguguucuggucuggaggauaaa

SEQ ID NO: 157729 - RNA, 32 nt, Homo Sapiens
cauaaaaugaauuaauggaaacauauccacac

SEQ ID NO: 157730 - RNA, 32 nt, Homo Sapiens
cuaaggcugguauucuagaacacgccuuucac

SEQ ID NO: 157731 - RNA, 32 nt, Homo Sapiens
auauacuagaaguggaauugcuggaucauaug

SEQ ID NO: 157732 - RNA, 32 nt, Homo Sapiens
acacauuuauuugaucauaguuuuacauaaca

SEQ ID NO: 157733 - RNA, 32 nt, Homo Sapiens
uauaaucuaacuagagauuaauaguaaaugug

SEQ ID NO: 157734 - RNA, 29 nt, Homo Sapiens
aucuaagugucuguguucuuguaagccug

SEQ ID NO: 157735 - RNA, 32 nt, Homo Sapiens
ugagacuuucccuugagaaacuuauacuaaaa

SEQ ID NO: 157736 - RNA, 32 nt, Homo Sapiens
uuccucucucugaagccuauugucacaugggu

SEQ ID NO: 157737 - RNA, 32 nt, Homo Sapiens
gauucgagggcuuguuuggucagaaggggggc

SEQ ID NO: 157738 - RNA, 32 nt, Homo Sapiens
aguuuuacagcuuuuggauuuaaauuuagguc

SEQ ID NO: 157739 - RNA, 32 nt, Homo Sapiens
uucaagagcaucuggaacaacagauggcugcg

SEQ ID NO: 157740 - RNA, 32 nt, Homo Sapiens
aggagggaagcuucugugcugcugcccugagc

SEQ ID NO: 157741 - RNA, 32 nt, Homo Sapiens
cauguuucuaguuuuuauugcuggauauucuu

SEQ ID NO: 157742 - RNA, 32 nt, Homo Sapiens
uugacugggagcuucuuuuuguuuacauauau

SEQ ID NO: 157743 - RNA, 32 nt, Homo Sapiens
gaguccagacaggaagcagagaaggcguccuu

SEQ ID NO: 157744 - RNA, 32 nt, Homo Sapiens
uucaggauggugcgucaggauaucuggcagug

SEQ ID NO: 157745 - RNA, 32 nt, Homo Sapiens
cugcuuucuuucccuuuuuucugcacugccau

SEQ ID NO: 157746 - RNA, 32 nt, Homo Sapiens
gaggugcuugguagcgcgccguagcugcuucc

SEQ ID NO: 157747 - RNA, 32 nt, Homo Sapiens
aacuuaaaaguaagaaguagugguucauccau

SEQ ID NO: 157748 - RNA, 32 nt, Homo Sapiens
gaauguugcccuggucgccgccgcgguggggc

SEQ ID NO: 157749 - RNA, 32 nt, Homo Sapiens
accucccaggacuguguucuuucuggaguuuu

SEQ ID NO: 157750 - RNA, 32 nt, Homo Sapiens
uguggaugaugauaugcuuuugugagcaagca

SEQ ID NO: 157751 - RNA, 32 nt, Homo Sapiens
gaaccaggagaguuuuagaacaacaauuauag

SEQ ID NO: 157752 - RNA, 32 nt, Homo Sapiens
uucgagaccagccuaggcaacauggagaaacc

SEQ ID NO: 157753 - RNA, 32 nt, Homo Sapiens
auauaaucauugaggcuugauugucccuugcc

SEQ ID NO: 157754 - RNA, 32 nt, Homo Sapiens
uuacugcagugggaaacaaccgcacccgcggc

SEQ ID NO: 157755 - RNA, 32 nt, Homo Sapiens
acgcaugggcucugaugggaagagggaggugg

SEQ ID NO: 157756 - RNA, 32 nt, Homo Sapiens
cauuuuccuucuucuuuuuuuuuuuuuuuuuu

SEQ ID NO: 157757 - RNA, 30 nt, Homo Sapiens
gagcagcuggacuggggccuuuggcacagc

SEQ ID NO: 157758 - RNA, 32 nt, Homo Sapiens
cacgaccuuuuuauuuuuuuuauuuuuguauc

SEQ ID NO: 157759 - RNA, 32 nt, Homo Sapiens
ccccgcgcugcagccgcagaggccccccaggg

SEQ ID NO: 157760 - RNA, 32 nt, Homo Sapiens
uccuucaucuggauguucugugaagauagcca

SEQ ID NO: 157761 - RNA, 32 nt, Homo Sapiens
ucagggaggguggggcuuagggacagggccca

SEQ ID NO: 157762 - RNA, 32 nt, Homo Sapiens
cccggaggcagacgccauuggagagacagcgc

SEQ ID NO: 157763 - RNA, 32 nt, Homo Sapiens
guuuuggaaauacuucuauuaccucgcugcua

SEQ ID NO: 157764 - RNA, 32 nt, Homo Sapiens
caacuaccugcccuaccccauccaccaagugc

SEQ ID NO: 157765 - RNA, 32 nt, Homo Sapiens
cggcgcggccgcgaggccgccauggccgcuca

SEQ ID NO: 157766 - RNA, 32 nt, Homo Sapiens
cguccugggcuggccuggaccauggugcugcu

SEQ ID NO: 157767 - RNA, 32 nt, Homo Sapiens
auuuguugaagaaauaaaugaauggaaagaca

SEQ ID NO: 157768 - RNA, 32 nt, Homo Sapiens
cacacacacacacacacacacacacaccacuc

SEQ ID NO: 157769 - RNA, 32 nt, Homo Sapiens
caguucuuggagugucaauguuuuauaccagu

SEQ ID NO: 157770 - RNA, 32 nt, Homo Sapiens
uauucacugcagacugaauccagauucuacac

SEQ ID NO: 157771 - RNA, 32 nt, Homo Sapiens
cgaaaauacuaaaugaaaaauuucagaaauaa

SEQ ID NO: 157772 - RNA, 32 nt, Homo Sapiens
aauuucaugcuucauaaguagcauuuauauuu

SEQ ID NO: 157773 - RNA, 32 nt, Homo Sapiens
agcuaauuuguuccucuuucugaaacuauuaa

SEQ ID NO: 157774 - RNA, 32 nt, Homo Sapiens
ucucuucuguggcuuauuguggcacucaagca

SEQ ID NO: 157775 - RNA, 32 nt, Homo Sapiens
ccacacccugcguccacaccacuuccaaccuc

SEQ ID NO: 157776 - RNA, 32 nt, Homo Sapiens
aggaucuggggguggggaacugggccuagcug

SEQ ID NO: 157777 - RNA, 32 nt, Homo Sapiens
gaccagcccgcccuucccuacuggugcccccu

SEQ ID NO: 157778 - RNA, 32 nt, Homo Sapiens
uuuuuuaaacauucauagcuggucuuauuugu

SEQ ID NO: 157779 - RNA, 32 nt, Homo Sapiens
gauucuuuucucuucuugacugugauaggugg

SEQ ID NO: 157780 - RNA, 32 nt, Homo Sapiens
agcugugcaauaaccuuccuaguaccugagug

SEQ ID NO: 157781 - RNA, 30 nt, Homo Sapiens
gucaccacugcuuugggggaaauggcuggg

SEQ ID NO: 157782 - RNA, 32 nt, Homo Sapiens
gcucccccucuucauggucgcgggcaaacuuc

SEQ ID NO: 157783 - RNA, 32 nt, Homo Sapiens
gcucuagugccagcccaaauauuuauacacca

SEQ ID NO: 157784 - RNA, 32 nt, Homo Sapiens
agcuuuugacugaguucuuggacaagauacua

SEQ ID NO: 157785 - RNA, 32 nt, Homo Sapiens
caaaucuucccuccucaccagcuagucugggg

SEQ ID NO: 157786 - RNA, 32 nt, Homo Sapiens
ugacccuguuucaaaacaggaauagaacugca

SEQ ID NO: 157787 - RNA, 32 nt, Homo Sapiens
uuaguagagcugauuuauuccaguaacuucuu

SEQ ID NO: 157788 - RNA, 29 nt, Homo Sapiens
cugugcauauguauuuucacuaugugcuc

SEQ ID NO: 157789 - RNA, 32 nt, Homo Sapiens
aggggccccguccaggcagccucaguccaggc

SEQ ID NO: 157790 - RNA, 32 nt, Homo Sapiens
cucacucuguuguguccggaaaugguggguuc

SEQ ID NO: 157791 - RNA, 32 nt, Homo Sapiens
cagaagcuaugaaagggaauaaagagaaaaga

SEQ ID NO: 157792 - RNA, 32 nt, Homo Sapiens
guaguuccccaggcugcccucgguggugagga

SEQ ID NO: 157793 - RNA, 32 nt, Homo Sapiens
gugccccugcccuccgccccaccacagcacuc

SEQ ID NO: 157794 - RNA, 32 nt, Homo Sapiens
uuguaagacuuuacaaaucacuuugccaucug

SEQ ID NO: 157795 - RNA, 32 nt, Homo Sapiens
gagccugucauccguccuuggcucaggauuug

SEQ ID NO: 157796 - RNA, 32 nt, Homo Sapiens
ccucaggguggcccggccuccuccugccacuc

SEQ ID NO: 157797 - RNA, 32 nt, Homo Sapiens
aguuucagauggagaacacacaaguccggaga

SEQ ID NO: 157798 - RNA, 32 nt, Homo Sapiens
uggcuggccggcugggucuccucccgggcuca

SEQ ID NO: 157799 - RNA, 32 nt, Homo Sapiens
gccucgcugaugucugauaaguauugucagug

SEQ ID NO: 157800 - RNA, 32 nt, Homo Sapiens
ugcuuucucguggguccuuuggcaggccuccc

SEQ ID NO: 157801 - RNA, 32 nt, Homo Sapiens
uaggaguaaggcacaagaaguauuuucuguag

SEQ ID NO: 157802 - RNA, 32 nt, Homo Sapiens
aaggagagggguucucgugcagacacagacuu

SEQ ID NO: 157803 - RNA, 32 nt, Homo Sapiens
caggggccaagcaggcacucuggggcuggcac

SEQ ID NO: 157804 - RNA, 32 nt, Homo Sapiens
gaccuuccugaacauucccuucugucuuugcc

SEQ ID NO: 157805 - RNA, 32 nt, Homo Sapiens
ucccuuuuuucuucuuucucguccucaucucu

SEQ ID NO: 157806 - RNA, 32 nt, Homo Sapiens
cugguguacagcuuggacuuuggugggcaucu

SEQ ID NO: 157807 - RNA, 32 nt, Homo Sapiens
cuccagaggagcuuccuccuccaggccucagc

SEQ ID NO: 157808 - RNA, 32 nt, Homo Sapiens
cuccauucaggacuacacgaggcgcugcggcu

SEQ ID NO: 157809 - RNA, 32 nt, Homo Sapiens
ccagggcgcgcccugccucuguggcucugccu

SEQ ID NO: 157810 - RNA, 32 nt, Homo Sapiens
gacauaguucccuucuuuuuuggguaaugaag

SEQ ID NO: 157811 - RNA, 32 nt, Homo Sapiens
gaggaugagagcggcgccccccugguccaggg

SEQ ID NO: 157812 - RNA, 32 nt, Homo Sapiens
cuuaggcacuucagacauuucaucucacucau

SEQ ID NO: 157813 - RNA, 32 nt, Homo Sapiens
ugcccuacugggaagauacaaaacagacuauc

SEQ ID NO: 157814 - RNA, 32 nt, Homo Sapiens
ugccaugcauacgaccgggagguccaccugcg

SEQ ID NO: 157815 - RNA, 32 nt, Homo Sapiens
ugaaacaaaaauuuuuauuuagaaauuuagcu

SEQ ID NO: 157816 - RNA, 32 nt, Homo Sapiens
uuaaauaucaaaccucugcaucucugaucccu

SEQ ID NO: 157817 - RNA, 32 nt, Homo Sapiens
agcaaguacuuucaaaagaacucuguacauuu

SEQ ID NO: 157818 - RNA, 32 nt, Homo Sapiens
uucugagguauuaaaauaucuggacugaguuu

SEQ ID NO: 157819 - RNA, 32 nt, Homo Sapiens
uuuuaggugucuuuaagccaauguggagucug

SEQ ID NO: 157820 - RNA, 32 nt, Homo Sapiens
ugauggagcuguguuauaaauuccuuauguca

SEQ ID NO: 157821 - RNA, 32 nt, Homo Sapiens
auuuucuaaggguagaauuuggucucaccaac

SEQ ID NO: 157822 - RNA, 32 nt, Homo Sapiens
cuaguaguuguagaagaaaauuuaauuauuug

SEQ ID NO: 157823 - RNA, 32 nt, Homo Sapiens
gggcaccugccaggcuggagguguggccuguc

SEQ ID NO: 157824 - RNA, 32 nt, Homo Sapiens
ucagcucaggugguccucuuuuacaauccuaa

SEQ ID NO: 157825 - RNA, 32 nt, Homo Sapiens
uaccaaggagaugcgugucuaauguuuuucuu

SEQ ID NO: 157826 - RNA, 32 nt, Homo Sapiens
uaagaauguacaaugcauuuguguaauuuaua

SEQ ID NO: 157827 - RNA, 32 nt, Homo Sapiens
ggcccgucaccaagcccucucccgacccaggc

SEQ ID NO: 157828 - RNA, 31 nt, Homo Sapiens
cccauggagccccagcccccuuugggcccag

SEQ ID NO: 157829 - RNA, 32 nt, Homo Sapiens
uacauuuccucugugaaaucuaccucagaguu

SEQ ID NO: 157830 - RNA, 31 nt, Homo Sapiens
uauggcuauugagcauuuaagauguaauuaa

SEQ ID NO: 157831 - RNA, 32 nt, Homo Sapiens
gggugguuugguuuuuguugcuuuuuuagauu

SEQ ID NO: 157832 - RNA, 32 nt, Homo Sapiens
auauuuuuguaaagauucucauuuuuuaugcu

SEQ ID NO: 157833 - RNA, 32 nt, Homo Sapiens
gaauuaccaaaaugugaugcagacacgaaaug

SEQ ID NO: 157834 - RNA, 32 nt, Homo Sapiens
uguccuuuuuauuugcaguuuuuucuguugca

SEQ ID NO: 157835 - RNA, 32 nt, Homo Sapiens
gcccuccgcccgggggcuccccacgugugauu

SEQ ID NO: 157836 - RNA, 32 nt, Homo Sapiens
ugauccuuugaaaaaugacaagaauugaugaa

SEQ ID NO: 157837 - RNA, 32 nt, Homo Sapiens
uuaaaaucuauuuccuauauuguauuucuaau

SEQ ID NO: 157838 - RNA, 32 nt, Homo Sapiens
uagucuuccuuccuuauuccucgaacaugcag

SEQ ID NO: 157839 - RNA, 32 nt, Homo Sapiens
agaaauuuacacaacuaguuagaacuuguuac

SEQ ID NO: 157840 - RNA, 29 nt, Homo Sapiens
ccgaguccggucccagguguggagcagag

SEQ ID NO: 157841 - RNA, 32 nt, Homo Sapiens
gcagcacgagaccccauccuccccuccggguu

SEQ ID NO: 157842 - RNA, 32 nt, Homo Sapiens
cuuggggcucucagcccuccuccuggauccug

SEQ ID NO: 157843 - RNA, 32 nt, Homo Sapiens
uagaaaaaguaaaagagugagucgagguuuuu

SEQ ID NO: 157844 - RNA, 32 nt, Homo Sapiens
uauuucuauccugacugccucuuggguuguca

SEQ ID NO: 157845 - RNA, 32 nt, Homo Sapiens
cggcggagggggugaggugggaggcgucucac

SEQ ID NO: 157846 - RNA, 32 nt, Homo Sapiens
cgaaacgcaguaacggauuuccggguggaccu

SEQ ID NO: 157847 - RNA, 32 nt, Homo Sapiens
gggaugccugugcguggugccugggucuaggg

SEQ ID NO: 157848 - RNA, 28 nt, Homo Sapiens
accaugcugagugggcggcugguccugg

SEQ ID NO: 157849 - RNA, 32 nt, Homo Sapiens
ccugggagcaacugggaggcagagcaccaagu

SEQ ID NO: 157850 - RNA, 32 nt, Homo Sapiens
cgggaucgaccggcccggggcgccgacgagga

SEQ ID NO: 157851 - RNA, 32 nt, Homo Sapiens
aaagacaccaaaauuugcauuuuccacagaaa

SEQ ID NO: 157852 - RNA, 32 nt, Homo Sapiens
gucggcaaacucccuaaguacccgcuacaauu

SEQ ID NO: 157853 - RNA, 30 nt, Homo Sapiens
agcagugucugugcugccagguccugguga

SEQ ID NO: 157854 - RNA, 32 nt, Homo Sapiens
cgacggcgauucucgacgcgggcccccaggau

SEQ ID NO: 157855 - RNA, 32 nt, Homo Sapiens
uaacagaaaccucagcacugggaaaagcugcc

SEQ ID NO: 157856 - RNA, 32 nt, Homo Sapiens
uuugucacagcacuucagaaaauacacaacag

SEQ ID NO: 157857 - RNA, 32 nt, Homo Sapiens
ucaagcuccuaagaguucuuaauuuauaacua

SEQ ID NO: 157858 - RNA, 32 nt, Homo Sapiens
cauucucccccuccaguaguagcugggugaga

SEQ ID NO: 157859 - RNA, 32 nt, Homo Sapiens
uaaauuauuaaacgaguuuuugagcaaauuag

SEQ ID NO: 157860 - RNA, 32 nt, Homo Sapiens
ugauuagaucacaucuuaaauucauuucuaga

SEQ ID NO: 157861 - RNA, 32 nt, Homo Sapiens
aggacucauggcggcuagcugcaccucccauu

SEQ ID NO: 157862 - RNA, 32 nt, Homo Sapiens
uaggcgcuggccgcugacauguugaggacuac

SEQ ID NO: 157863 - RNA, 32 nt, Homo Sapiens
ugcucucccguccagagcccugcugaugggga

SEQ ID NO: 157864 - RNA, 32 nt, Homo Sapiens
aauaaauaacuuaagcacaaaauacauagaaa

SEQ ID NO: 157865 - RNA, 29 nt, Homo Sapiens
cuaaagugaaggguauauuuucuucuguu

SEQ ID NO: 157866 - RNA, 32 nt, Homo Sapiens
uuuuuaauugguuuaguucuuaacugcuggcc

SEQ ID NO: 157867 - RNA, 32 nt, Homo Sapiens
uggugaauuugcugcccuucuuuuuucugugg

SEQ ID NO: 157868 - RNA, 32 nt, Homo Sapiens
cucggcggcuccugggguuugaagagcaaacg

SEQ ID NO: 157869 - RNA, 32 nt, Homo Sapiens
cacagccgcccggggguucccuaggggaagca

SEQ ID NO: 157870 - RNA, 32 nt, Homo Sapiens
acuguauuuguggauuuauuuauuuuuccuuu

SEQ ID NO: 157871 - RNA, 32 nt, Homo Sapiens
gccaaagcugcccccacccccaccccugcccc

SEQ ID NO: 157872 - RNA, 32 nt, Homo Sapiens
cccuugugacuucagggguugugccuaucucu

SEQ ID NO: 157873 - RNA, 32 nt, Homo Sapiens
acuugcuguagaugaaugguuaacacgagcua

SEQ ID NO: 157874 - RNA, 32 nt, Homo Sapiens
cuuaacucauuucagcauuaauucaaaagccc

SEQ ID NO: 157875 - RNA, 32 nt, Homo Sapiens
cgcucacaccgggucaucugauugugacauca

SEQ ID NO: 157876 - RNA, 32 nt, Homo Sapiens
auaacagaaugugucuuaauuuucuacucgag

SEQ ID NO: 157877 - RNA, 32 nt, Homo Sapiens
ccaugaguauacucuguaaauagcuuaaaaga

SEQ ID NO: 157878 - RNA, 31 nt, Homo Sapiens
cagccaugggaccugcuccaggcaaggcccu

SEQ ID NO: 157879 - RNA, 32 nt, Homo Sapiens
cuccucgcgccccaccucccccgagagcuggc

SEQ ID NO: 157880 - RNA, 32 nt, Homo Sapiens
gaagggugcagggcugcuggugucagagcaag

SEQ ID NO: 157881 - RNA, 32 nt, Homo Sapiens
uagccgggugugcuggugggcgccuguaaucc

SEQ ID NO: 157882 - RNA, 32 nt, Homo Sapiens
gcgcagguuaggcucacugucuaggccaggcc

SEQ ID NO: 157883 - RNA, 32 nt, Homo Sapiens
uggccagagggagaggcagcagggaacguggg

SEQ ID NO: 157884 - RNA, 32 nt, Homo Sapiens
uauguguguuugucuucuuccagcugcaaaca

SEQ ID NO: 157885 - RNA, 32 nt, Homo Sapiens
uuugucacaggguguuggaagaugcauccaug

SEQ ID NO: 157886 - RNA, 32 nt, Homo Sapiens
ucucagguucaaggcuacaacaaaaaucacca

SEQ ID NO: 157887 - RNA, 32 nt, Homo Sapiens
uguagauuggacugaaaaucaaaaaguaccac

SEQ ID NO: 157888 - RNA, 32 nt, Homo Sapiens
ggagcgaggcgcccagccugugucugaauccu

SEQ ID NO: 157889 - RNA, 32 nt, Homo Sapiens
auaaucauacaaucggauacugcauaauaaua

SEQ ID NO: 157890 - RNA, 32 nt, Homo Sapiens
cguuuucaugaacaucacuguucacuaaaauc

SEQ ID NO: 157891 - RNA, 32 nt, Homo Sapiens
aacaaucccccucccuuggggugguguagggg

SEQ ID NO: 157892 - RNA, 32 nt, Homo Sapiens
gaauugagggaagagagagaccuucuuauauu

SEQ ID NO: 157893 - RNA, 32 nt, Homo Sapiens
ggaaugccugggguucuucgauccggaaaauc

SEQ ID NO: 157894 - RNA, 32 nt, Homo Sapiens
uguguuuuauuauaucuuauuaucaccuuuua

SEQ ID NO: 157895 - RNA, 32 nt, Homo Sapiens
ccauuccaguagcugcaucuccagguuuugag

SEQ ID NO: 157896 - RNA, 32 nt, Homo Sapiens
cauagcuagcuaaaaaguugggucucugagau

SEQ ID NO: 157897 - RNA, 32 nt, Homo Sapiens
ucuacacagaggggcugcuggcgccugacgga

SEQ ID NO: 157898 - RNA, 32 nt, Homo Sapiens
ccaagaacccaccaauuccaggcacaauaguu

SEQ ID NO: 157899 - RNA, 32 nt, Homo Sapiens
uccauggacccuggggaccccgucaggagcag

SEQ ID NO: 157900 - RNA, 32 nt, Homo Sapiens
cagcuguggcuggacagguuggaccagcaggc

SEQ ID NO: 157901 - RNA, 32 nt, Homo Sapiens
ccaggacaagcugucccggcgcgugggccguc

SEQ ID NO: 157902 - RNA, 32 nt, Homo Sapiens
gcccugaagguucuugaggaucuaguuucaug

SEQ ID NO: 157903 - RNA, 32 nt, Homo Sapiens
ggccaggcagccgggaggagcggcgcgcgcuc

SEQ ID NO: 157904 - RNA, 32 nt, Homo Sapiens
auaggaagaaucaacaucgugaaaauggccau

SEQ ID NO: 157905 - RNA, 32 nt, Homo Sapiens
gcacggacaaccccagccccccgccuucacug

SEQ ID NO: 157906 - RNA, 32 nt, Homo Sapiens
ccucuggcccaggcgccgcgcggacccggcag

SEQ ID NO: 157907 - RNA, 32 nt, Homo Sapiens
cuguauuuuuaaaacuguuuuacagaaaucuc

SEQ ID NO: 157908 - RNA, 32 nt, Homo Sapiens
acugcagucugcucaagugucaccuuauuugc

SEQ ID NO: 157909 - RNA, 31 nt, Homo Sapiens
ccagcccagcccagggccugaguuagacuau

SEQ ID NO: 157910 - RNA, 32 nt, Homo Sapiens
cgaggcguguggauugguuuccacccggaaca

SEQ ID NO: 157911 - RNA, 32 nt, Homo Sapiens
uggaggguccgcacacccgcccggccgcgccg

SEQ ID NO: 157912 - RNA, 32 nt, Homo Sapiens
cguaugcucccaugcugguuuuccacugccug

SEQ ID NO: 157913 - RNA, 32 nt, Homo Sapiens
cagagccugccagggagggcuggccucaccac

SEQ ID NO: 157914 - RNA, 32 nt, Homo Sapiens
cuuugagaugagagaaaggaaaucuaguggaa

SEQ ID NO: 157915 - RNA, 32 nt, Homo Sapiens
uauauuguaauauauuuuauuauauuagccac

SEQ ID NO: 157916 - RNA, 32 nt, Homo Sapiens
gcagccuugcuaaauuuuaaaagcauuuuuaa

SEQ ID NO: 157917 - RNA, 30 nt, Homo Sapiens
ggucuauagauuucccccuaacucuccauu

SEQ ID NO: 157918 - RNA, 32 nt, Homo Sapiens
gagcgcugccagcggaggcagcgccuucccga

SEQ ID NO: 157919 - RNA, 32 nt, Homo Sapiens
ccucugaccuucuugugggugaggguggccau

SEQ ID NO: 157920 - RNA, 32 nt, Homo Sapiens
acagccacaacacuuggauuccuguugauuaa

SEQ ID NO: 157921 - RNA, 32 nt, Homo Sapiens
aacucaggagauggagguuucagugagccaag

SEQ ID NO: 157922 - RNA, 32 nt, Homo Sapiens
cuccacuagaagaucgagcaucugaaguggga

SEQ ID NO: 157923 - RNA, 32 nt, Homo Sapiens
gggcccaagucggagcucggagggggcugccu

SEQ ID NO: 157924 - RNA, 32 nt, Homo Sapiens
uuggcccagcuguaggagccacggccaugguu

SEQ ID NO: 157925 - RNA, 32 nt, Homo Sapiens
uuugugggggacacaauuuagaacuaugcaca

SEQ ID NO: 157926 - RNA, 32 nt, Homo Sapiens
uugcucaaccaucaagacugcaggucucccuu

SEQ ID NO: 157927 - RNA, 32 nt, Homo Sapiens
ucauuuuucuucauuaucauuauacaucugua

SEQ ID NO: 157928 - RNA, 30 nt, Homo Sapiens
ugaggcgcccgggagccgccggucaccguu

SEQ ID NO: 157929 - RNA, 32 nt, Homo Sapiens
ccuuccaucuuggaaugugucuaaaaaagcau

SEQ ID NO: 157930 - RNA, 32 nt, Homo Sapiens
ucgcucuccgcuccccucccccgcauccgcga

SEQ ID NO: 157931 - RNA, 32 nt, Homo Sapiens
agcggcuccccuccgcuucucaucccaaccuc

SEQ ID NO: 157932 - RNA, 32 nt, Homo Sapiens
cccucugccuggcggcagucacggccaagaga

SEQ ID NO: 157933 - RNA, 32 nt, Homo Sapiens
gugcuaauuauguauucuucuaauacauauua

SEQ ID NO: 157934 - RNA, 32 nt, Homo Sapiens
ucuauaaaaaauaccaaaauuaguuagucaug

SEQ ID NO: 157935 - RNA, 32 nt, Homo Sapiens
acuagcauuuaucuucuuuuccuuccaugcca

SEQ ID NO: 157936 - RNA, 32 nt, Homo Sapiens
aggcucccaggagcuuccacucucagaccuug

SEQ ID NO: 157937 - RNA, 32 nt, Homo Sapiens
uucucucggccgcggaaggacaagggguuauc

SEQ ID NO: 157938 - RNA, 28 nt, Homo Sapiens
ggggagagcauggcgccgaggugccccu

SEQ ID NO: 157939 - RNA, 32 nt, Homo Sapiens
aauguaaauaaaauagcaaaacaauguaauau

SEQ ID NO: 157940 - RNA, 32 nt, Homo Sapiens
caagggauaagagcuuccguacuuugcuuauu

SEQ ID NO: 157941 - RNA, 32 nt, Homo Sapiens
auaucugguuuaucuggguauuacaugcguuu

SEQ ID NO: 157942 - RNA, 32 nt, Homo Sapiens
uguaauuuuaccauuucccauccccauucccc

SEQ ID NO: 157943 - RNA, 32 nt, Homo Sapiens
ucccuucgccccagcuagcuugagcuucugcc

SEQ ID NO: 157944 - RNA, 27 nt, Homo Sapiens
ucaugagggaauacaagguaguggugu

SEQ ID NO: 157945 - RNA, 32 nt, Homo Sapiens
gcacccaggggcgggcgggcacgguagggcca

SEQ ID NO: 157946 - RNA, 32 nt, Homo Sapiens
gccccgcuccacaggccaccagaugggcuccu

SEQ ID NO: 157947 - RNA, 32 nt, Homo Sapiens
uauguggcacuagcaccgacaaaggucaccaa

SEQ ID NO: 157948 - RNA, 32 nt, Homo Sapiens
cuacugguuuuagagcaguuccucugccuccc

SEQ ID NO: 157949 - RNA, 32 nt, Homo Sapiens
uuguuuuugcauauuucuuaggacaugcaucu

SEQ ID NO: 157950 - RNA, 32 nt, Homo Sapiens
ucauucuaagaccagauucucuaauguuucug

SEQ ID NO: 157951 - RNA, 32 nt, Homo Sapiens
accucuuugaaguugcagaaugcuuugaaauu

SEQ ID NO: 157952 - RNA, 32 nt, Homo Sapiens
uugggcccugcccugagcugccaccgggaagc

SEQ ID NO: 157953 - RNA, 32 nt, Homo Sapiens
auuggaguauaaaauauuacccaaguuucuuc

SEQ ID NO: 157954 - RNA, 32 nt, Homo Sapiens
ggagauugagaccuuccuggcuaacaugguga

SEQ ID NO: 157955 - RNA, 32 nt, Homo Sapiens
uuauaauguuucagggcucaacuuuuuaaaau

SEQ ID NO: 157956 - RNA, 32 nt, Homo Sapiens
uuacuuauuuuuucuuuuuggguucucggugu

SEQ ID NO: 157957 - RNA, 32 nt, Homo Sapiens
ucagcuaauguuuucuuuuaaaaauuuacuug

SEQ ID NO: 157958 - RNA, 32 nt, Homo Sapiens
aggucgcccucccggggcccgauugucucggu

SEQ ID NO: 157959 - RNA, 32 nt, Homo Sapiens
aaaaagauuuuuuuauuuuauguagccaacau

SEQ ID NO: 157960 - RNA, 29 nt, Homo Sapiens
agccaugucguccauccugccuuucacuc

SEQ ID NO: 157961 - RNA, 32 nt, Homo Sapiens
gaccagccgugcaaaucucuagaagaugacgg

SEQ ID NO: 157962 - RNA, 32 nt, Homo Sapiens
auauuaagguaaccagguugaaucuuccaauu

SEQ ID NO: 157963 - RNA, 32 nt, Homo Sapiens
aaaccccugccagugaucuggugaugaucuga

SEQ ID NO: 157964 - RNA, 31 nt, Homo Sapiens
cgagcccagcgcagcagccucggacccggau

SEQ ID NO: 157965 - RNA, 32 nt, Homo Sapiens
ucccagagcugaugcuauuguacuugcacauu

SEQ ID NO: 157966 - RNA, 32 nt, Homo Sapiens
uagcgauucuucugcuucagccucccgaguaa

SEQ ID NO: 157967 - RNA, 32 nt, Homo Sapiens
acaggcauugugagaagagauguucuggccag

SEQ ID NO: 157968 - RNA, 26 nt, Homo Sapiens
cauggcuucagcgucugcucguggaa

SEQ ID NO: 157969 - RNA, 32 nt, Homo Sapiens
auuuauugggcaucggugaugugucaggcaca

SEQ ID NO: 157970 - RNA, 32 nt, Homo Sapiens
cuuuguaugacagugaagcagcaccgugaaug

SEQ ID NO: 157971 - RNA, 32 nt, Homo Sapiens
ggaaugugcuuaaaaauagagagcugugaaca

SEQ ID NO: 157972 - RNA, 32 nt, Homo Sapiens
gcaugggaugcgcaggggaggcguggggaucc

SEQ ID NO: 157973 - RNA, 32 nt, Homo Sapiens
guaauuuuuguaaauaaauuuguuuguacauu

SEQ ID NO: 157974 - RNA, 32 nt, Homo Sapiens
ucuucauuguaaucugcaaaauguagaaauaa

SEQ ID NO: 157975 - RNA, 32 nt, Homo Sapiens
uaagacauccauggaugucagcaagaaauuca

SEQ ID NO: 157976 - RNA, 32 nt, Homo Sapiens
uggggaugaaaugucauuguguauggaaggcg

SEQ ID NO: 157977 - RNA, 32 nt, Homo Sapiens
uuuguuggcucuucauuuccaguguuucuaca

SEQ ID NO: 157978 - RNA, 32 nt, Homo Sapiens
ccucugcuucccuccucucuccagugcugucc

SEQ ID NO: 157979 - RNA, 32 nt, Homo Sapiens
uucuuuccuucuaugauggaaucuguucuuuu

SEQ ID NO: 157980 - RNA, 32 nt, Homo Sapiens
gggucucagggucaggucgcggcuggucacug

SEQ ID NO: 157981 - RNA, 32 nt, Homo Sapiens
uacagcuguggucugaauguguguguuuucuc

SEQ ID NO: 157982 - RNA, 32 nt, Homo Sapiens
uucacgguaccaaaugcugaccaguguugcuc

SEQ ID NO: 157983 - RNA, 32 nt, Homo Sapiens
uauuauuuuaauuucuucuuuggaagcguucg

SEQ ID NO: 157984 - RNA, 32 nt, Homo Sapiens
uuuacuuugcauuugauugcugugaagaugaa

SEQ ID NO: 157985 - RNA, 32 nt, Homo Sapiens
uucaggcccaguuucucacuuuagccaauucg

SEQ ID NO: 157986 - RNA, 32 nt, Homo Sapiens
uuaacagaaacgaacauccucuugcaacuucu

SEQ ID NO: 157987 - RNA, 32 nt, Homo Sapiens
gcgagcccggcggggcugcagguuccgcccug

SEQ ID NO: 157988 - RNA, 32 nt, Homo Sapiens
ggucauucaccaggugcaccacugccgucauu

SEQ ID NO: 157989 - RNA, 32 nt, Homo Sapiens
ccuuaaaaagugcauaugucgaaugaccaaau

SEQ ID NO: 157990 - RNA, 32 nt, Homo Sapiens
cauacucaucuccauguucuguaaauuagcaa

SEQ ID NO: 157991 - RNA, 32 nt, Homo Sapiens
guguuugcuguaaauuggauugaauuauuuuu

SEQ ID NO: 157992 - RNA, 32 nt, Homo Sapiens
cuuccgucugaccccuccgacuuccgguaaag

SEQ ID NO: 157993 - RNA, 32 nt, Homo Sapiens
gaaggccgagcuggguggcuggaccgggugcu

SEQ ID NO: 157994 - RNA, 32 nt, Homo Sapiens
gaccuaaaaucauuuuaaccauugcuacugga

SEQ ID NO: 157995 - RNA, 32 nt, Homo Sapiens
uaccaagcugugcuugaauaacgauauguuuu

SEQ ID NO: 157996 - RNA, 30 nt, Homo Sapiens
gccugaggcaggcugcgcgggaggccaaag

SEQ ID NO: 157997 - RNA, 32 nt, Homo Sapiens
agaccagccuggguaacauagcaagacucugu

SEQ ID NO: 157998 - RNA, 32 nt, Homo Sapiens
cccuuugcuguuuuauuuauuaaacuugauuu

SEQ ID NO: 157999 - RNA, 32 nt, Homo Sapiens
uauuuuuggugaucuaaauaaagccugucuug

SEQ ID NO: 158000 - RNA, 32 nt, Homo Sapiens
gagccugcugcuuucuugcuacugcuucggcu

SEQ ID NO: 158001 - RNA, 32 nt, Homo Sapiens
gagacgggauuccgggaagcggggaguauggu

SEQ ID NO: 158002 - RNA, 32 nt, Homo Sapiens
gcauguggaguucggaggaaaagggcucagau

SEQ ID NO: 158003 - RNA, 32 nt, Homo Sapiens
gagggaauggaccgacacggguauuguaccgc

SEQ ID NO: 158004 - RNA, 32 nt, Homo Sapiens
uuucuguuggcuccaccuccagccuccgagac

SEQ ID NO: 158005 - RNA, 32 nt, Homo Sapiens
augccccguugguggggggcgggacgggccca

SEQ ID NO: 158006 - RNA, 32 nt, Homo Sapiens
accgugccgggagagcgcgcggugcuggagcc

SEQ ID NO: 158007 - RNA, 32 nt, Homo Sapiens
augaugauggaucaaugcaacaaaaucaaggu

SEQ ID NO: 158008 - RNA, 32 nt, Homo Sapiens
uagaagugcuaagaagcaggccgaggguggug

SEQ ID NO: 158009 - RNA, 32 nt, Homo Sapiens
acacuacaauaaguauauggaaagugugauga

SEQ ID NO: 158010 - RNA, 32 nt, Homo Sapiens
aaaacuccuugacuagaacuaucuccuuuugu

SEQ ID NO: 158011 - RNA, 32 nt, Homo Sapiens
uuuguaugcggccuuccacacuuccagagaau

SEQ ID NO: 158012 - RNA, 32 nt, Homo Sapiens
caacgggaggaacagcagcagaggcagcagga

SEQ ID NO: 158013 - RNA, 25 nt, Homo Sapiens
auggacggguccggggagcgcagcc

SEQ ID NO: 158014 - RNA, 32 nt, Homo Sapiens
aacaggugcuuggaggucaucaugaucagccc

SEQ ID NO: 158015 - RNA, 32 nt, Homo Sapiens
uugauuaaaaauuuauaaaagaaauaaaucau

SEQ ID NO: 158016 - RNA, 32 nt, Homo Sapiens
uaguggaacagucaguuuaacuuuuuaacaga

SEQ ID NO: 158017 - RNA, 32 nt, Homo Sapiens
aauaucucgcagcacugcagcuaacaucacag

SEQ ID NO: 158018 - RNA, 32 nt, Homo Sapiens
uuucacagcaaggguaccuauuucauggcaaa

SEQ ID NO: 158019 - RNA, 32 nt, Homo Sapiens
gaccucugccuccccacugcagcccucgaacu

SEQ ID NO: 158020 - RNA, 32 nt, Homo Sapiens
ggaaggcggagggcggcggggacaagaugggu

SEQ ID NO: 158021 - RNA, 32 nt, Homo Sapiens
uuacuuuguuuuccuuguguuuuguuucggug

SEQ ID NO: 158022 - RNA, 32 nt, Homo Sapiens
uccugaugcuuugcuagccucagacacuuguc

SEQ ID NO: 158023 - RNA, 32 nt, Homo Sapiens
ggccugaaaggucugccucacacaggccuucc

SEQ ID NO: 158024 - RNA, 32 nt, Homo Sapiens
ccuggggccccggggccugacccacaccacgc

SEQ ID NO: 158025 - RNA, 32 nt, Homo Sapiens
aagccgcuuucuccgcgccgcccgcccaggga

SEQ ID NO: 158026 - RNA, 32 nt, Homo Sapiens
cuauucuagucuuuuuuuauugaguccuccuc

SEQ ID NO: 158027 - RNA, 32 nt, Homo Sapiens
agacaaaaaugaaggaaucaaacugacaagaa

SEQ ID NO: 158028 - RNA, 32 nt, Homo Sapiens
cccgccgcguccuugcgaggcgccucccauuc

SEQ ID NO: 158029 - RNA, 32 nt, Homo Sapiens
gcuuggccgaugucugauugggaccaggaggg

SEQ ID NO: 158030 - RNA, 32 nt, Homo Sapiens
ucaugagaggggugaggucucuguggaaggac

SEQ ID NO: 158031 - RNA, 32 nt, Homo Sapiens
uuguauuuuguaaacaaaaaucaaauaaugca

SEQ ID NO: 158032 - RNA, 32 nt, Homo Sapiens
cacaucuccgcggagcagaagcggcgcuucaa

SEQ ID NO: 158033 - RNA, 32 nt, Homo Sapiens
cuuuggaucagguucuucugguaaugaagccu

SEQ ID NO: 158034 - RNA, 32 nt, Homo Sapiens
aggaguuacccacugcaguucuccucugagcu

SEQ ID NO: 158035 - RNA, 32 nt, Homo Sapiens
cugacccgggccugggcgcgccugcggaggcc

SEQ ID NO: 158036 - RNA, 32 nt, Homo Sapiens
augacuggcgugaugccuggaaccaaggugcu

SEQ ID NO: 158037 - RNA, 32 nt, Homo Sapiens
ugagcgccggcggcgacgacggcagcggcggc

SEQ ID NO: 158038 - RNA, 32 nt, Homo Sapiens
ccaaacuaaugcacaaugcaucugauagugag

SEQ ID NO: 158039 - RNA, 32 nt, Homo Sapiens
uagcacagcuauugaugagauuuuaagcugcu

SEQ ID NO: 158040 - RNA, 32 nt, Homo Sapiens
gcgcccccgcggcuggaggguggucgccacug

SEQ ID NO: 158041 - RNA, 32 nt, Homo Sapiens
uguccagaggcugaggauggagguggaaggcu

SEQ ID NO: 158042 - RNA, 32 nt, Homo Sapiens
cauuuguuugccugucuuuucauuuuguacau

SEQ ID NO: 158043 - RNA, 32 nt, Homo Sapiens
cuguaauuguaaaauaaaaacuucaaauggga

SEQ ID NO: 158044 - RNA, 32 nt, Homo Sapiens
cugguucggccacggccucggcuuccaauccg

SEQ ID NO: 158045 - RNA, 32 nt, Homo Sapiens
aacacccucacagaaacaccuagaauaauguu

SEQ ID NO: 158046 - RNA, 32 nt, Homo Sapiens
ggagaagccccgcucugguccuacccuucagu

SEQ ID NO: 158047 - RNA, 32 nt, Homo Sapiens
aaagaugcaauaaguuccuagguagucuaccc

SEQ ID NO: 158048 - RNA, 32 nt, Homo Sapiens
cuagaagaacuucaaaaguacaauauaaaucu

SEQ ID NO: 158049 - RNA, 32 nt, Homo Sapiens
uuuaaaugauuaaauuacauuuuaucaauggc

SEQ ID NO: 158050 - RNA, 32 nt, Homo Sapiens
cagcuagggcgccuuucgcagcccuuccauuu

SEQ ID NO: 158051 - RNA, 32 nt, Homo Sapiens
accuuccccaggauagagagcacaccucccuc

SEQ ID NO: 158052 - RNA, 32 nt, Homo Sapiens
cauaauuuagaaaaacaaaacaaaggcuguuu

SEQ ID NO: 158053 - RNA, 32 nt, Homo Sapiens
cauucagugaauggagcugauguuugccuguc

SEQ ID NO: 158054 - RNA, 32 nt, Homo Sapiens
gaguaacucuuacgacuuacaaggcugagggc

SEQ ID NO: 158055 - RNA, 32 nt, Homo Sapiens
agagcagggauguaguggggcugggcagggau

SEQ ID NO: 158056 - RNA, 32 nt, Homo Sapiens
ccagcggugcuccugcaccccggaggguguga

SEQ ID NO: 158057 - RNA, 32 nt, Homo Sapiens
ggaagguaaugagccgcagagccccggggucu

SEQ ID NO: 158058 - RNA, 32 nt, Homo Sapiens
aggugauguggccuuugaguaugcagauuccu

SEQ ID NO: 158059 - RNA, 32 nt, Homo Sapiens
ccuauggauucuuuucucaguguuuacuuaau

SEQ ID NO: 158060 - RNA, 32 nt, Homo Sapiens
uccuuugcugccuuccuucucuuucaggcacc

SEQ ID NO: 158061 - RNA, 32 nt, Homo Sapiens
gguucugccugccuaugggaagagggggccag

SEQ ID NO: 158062 - RNA, 32 nt, Homo Sapiens
cauccauaccagcucgcaccccccuguucuaa

SEQ ID NO: 158063 - RNA, 32 nt, Homo Sapiens
gugucucugaccugugugaugugcaggagggu

SEQ ID NO: 158064 - RNA, 32 nt, Homo Sapiens
cuauaugcucuucuugugaacagcguggggag

SEQ ID NO: 158065 - RNA, 32 nt, Homo Sapiens
aaaacaaaacaaaauuagcugagcaugguggu

SEQ ID NO: 158066 - RNA, 32 nt, Homo Sapiens
guagcccguucgcuccgcgccggcggccuguc

SEQ ID NO: 158067 - RNA, 32 nt, Homo Sapiens
ucagugggauuugguaauguguuuuagaguaa

SEQ ID NO: 158068 - RNA, 32 nt, Homo Sapiens
cugugacucugcuuggaaaauucaucaguuac

SEQ ID NO: 158069 - RNA, 32 nt, Homo Sapiens
gcaguucuuaguuuuggugccaucaaccaggc

SEQ ID NO: 158070 - RNA, 32 nt, Homo Sapiens
gcuuuacaaaauaaaaucaugcuuggaaaacu

SEQ ID NO: 158071 - RNA, 32 nt, Homo Sapiens
ggaaaacuggggugggggugggggugggacuu

SEQ ID NO: 158072 - RNA, 32 nt, Homo Sapiens
gaagcugcagugagccgagaucaggccauugc

SEQ ID NO: 158073 - RNA, 32 nt, Homo Sapiens
cccgccugugaacaccuuccccggcccccuac

SEQ ID NO: 158074 - RNA, 32 nt, Homo Sapiens
uaaggggagaaaaaggggucagacagaguaau

SEQ ID NO: 158075 - RNA, 32 nt, Homo Sapiens
gaggucuuccagcagcagcaggucuggagggc

SEQ ID NO: 158076 - RNA, 32 nt, Homo Sapiens
uuguccugccccagccucacggacagccugug

SEQ ID NO: 158077 - RNA, 32 nt, Homo Sapiens
gauuuauagcuguuugagaugauaaaagugaa

SEQ ID NO: 158078 - RNA, 32 nt, Homo Sapiens
aacuaggagagcaugccgucuugauguuuaaa

SEQ ID NO: 158079 - RNA, 32 nt, Homo Sapiens
aaaucgcuguggaaacaaacgcaaaugaaaag

SEQ ID NO: 158080 - RNA, 32 nt, Homo Sapiens
cccugccagcgggauggggggcggcgggucgg

SEQ ID NO: 158081 - RNA, 32 nt, Homo Sapiens
uugaaagccacaaaaucaauuaaugacaugau

SEQ ID NO: 158082 - RNA, 32 nt, Homo Sapiens
ugaacucacuucuggaggugcagagccacaaa

SEQ ID NO: 158083 - RNA, 32 nt, Homo Sapiens
aaauuagcugggugugguggcaggagccugua

SEQ ID NO: 158084 - RNA, 32 nt, Homo Sapiens
gguguucugcaccuugcagccugcacacugca

SEQ ID NO: 158085 - RNA, 32 nt, Homo Sapiens
ccacagcugcugccuccgccacuggccaccgc

SEQ ID NO: 158086 - RNA, 32 nt, Homo Sapiens
ggugagggcuucugccuuugguccuggggccg

SEQ ID NO: 158087 - RNA, 32 nt, Homo Sapiens
cucauuuuuguuucuaaauauguaucaacagg

SEQ ID NO: 158088 - RNA, 32 nt, Homo Sapiens
gcguccccgcggugccugacaguuccuuccuc

SEQ ID NO: 158089 - RNA, 29 nt, Homo Sapiens
aacacuauauguauguacuuuaucacaaa

SEQ ID NO: 158090 - RNA, 32 nt, Homo Sapiens
uuuugauacuagugaugaugguaucuccuugu

SEQ ID NO: 158091 - RNA, 32 nt, Homo Sapiens
caaguagaaacacuuaaaaucaucuuucuuuu

SEQ ID NO: 158092 - RNA, 32 nt, Homo Sapiens
cuggugggggcagaggagugucugcagggaaa

SEQ ID NO: 158093 - RNA, 32 nt, Homo Sapiens
ugcaggcccggguggagccauucuucaucuac

SEQ ID NO: 158094 - RNA, 31 nt, Homo Sapiens
accgcgcugccggagccccaggugaccagcg

SEQ ID NO: 158095 - RNA, 32 nt, Homo Sapiens
guaagaagaaugcuucgaggccgaucccucuc

SEQ ID NO: 158096 - RNA, 32 nt, Homo Sapiens
cgcgccuggccgaggccucgcugcugcuggug

SEQ ID NO: 158097 - RNA, 32 nt, Homo Sapiens
uggagcucaccuggcgcccgggccccgcgccg

SEQ ID NO: 158098 - RNA, 32 nt, Homo Sapiens
ucaccugcuccccaaucauccagccgccugca

SEQ ID NO: 158099 - RNA, 32 nt, Homo Sapiens
cuugggagcagugggggugucuguggagugca

SEQ ID NO: 158100 - RNA, 32 nt, Homo Sapiens
ucauucuuguguuggaguuauagaauucuaca

SEQ ID NO: 158101 - RNA, 32 nt, Homo Sapiens
uggcacuacagaauccuucucuuucuuaaggc

SEQ ID NO: 158102 - RNA, 32 nt, Homo Sapiens
gacaaguuugcuuccccuuccacaaugauugu

SEQ ID NO: 158103 - RNA, 32 nt, Homo Sapiens
cccugcaccuucguuggagccccugcaucccc

SEQ ID NO: 158104 - RNA, 32 nt, Homo Sapiens
acauucagcugcucuguccucuccaugccugg

SEQ ID NO: 158105 - RNA, 32 nt, Homo Sapiens
uuuagaaaaguacauauaugcauaaaacuccu

SEQ ID NO: 158106 - RNA, 30 nt, Homo Sapiens
ggcuggggcugugcugcaggcuccgagcug

SEQ ID NO: 158107 - RNA, 32 nt, Homo Sapiens
acuuaguuaucuggauaauacauauuguggac

SEQ ID NO: 158108 - RNA, 32 nt, Homo Sapiens
uauaucacaaagacaucuuguaggcauguucc

SEQ ID NO: 158109 - RNA, 32 nt, Homo Sapiens
aagugagucugcucugucgagugagucuucua

SEQ ID NO: 158110 - RNA, 32 nt, Homo Sapiens
gggcacccaccgucuccaucccggccccagcc

SEQ ID NO: 158111 - RNA, 32 nt, Homo Sapiens
aaugugacaggacaugagacacauggaaaagu

SEQ ID NO: 158112 - RNA, 32 nt, Homo Sapiens
accacugcaccucggaggccagcccuguccac

SEQ ID NO: 158113 - RNA, 32 nt, Homo Sapiens
uggggcuccugccuggugugggagugccagcc

SEQ ID NO: 158114 - RNA, 32 nt, Homo Sapiens
agggagccgagacccuggauggggcuuccagc

SEQ ID NO: 158115 - RNA, 32 nt, Homo Sapiens
acuuauugagcacuuuuaguagugauaacugu

SEQ ID NO: 158116 - RNA, 32 nt, Homo Sapiens
guuaacgcccacgggcucgcgcggcgccgccu

SEQ ID NO: 158117 - RNA, 32 nt, Homo Sapiens
augguguguuccugucuucucuagucuugucc

SEQ ID NO: 158118 - RNA, 32 nt, Homo Sapiens
ugguggggccuggagauggcggugcugccucc

SEQ ID NO: 158119 - RNA, 32 nt, Homo Sapiens
cacuuuauugcacuuucaauucuuauaaagca

SEQ ID NO: 158120 - RNA, 32 nt, Homo Sapiens
caucaccacugucccguggaugccuguguacc

SEQ ID NO: 158121 - RNA, 32 nt, Homo Sapiens
cauaaguaaccucagcaaaaacgaggccucug

SEQ ID NO: 158122 - RNA, 32 nt, Homo Sapiens
uguuuuauaugcuuuuaagaauguagauugua

SEQ ID NO: 158123 - RNA, 32 nt, Homo Sapiens
cgggagcgcgguggggcuaggcguggggcgcu

SEQ ID NO: 158124 - RNA, 32 nt, Homo Sapiens
ccaaucuagggaaacaguacugcuggagcacc

SEQ ID NO: 158125 - RNA, 32 nt, Homo Sapiens
gguuucaaugguuuuuuauauucagauguaua

SEQ ID NO: 158126 - RNA, 32 nt, Homo Sapiens
acuggggugggcgggggguggggcuggcaggg

SEQ ID NO: 158127 - RNA, 32 nt, Homo Sapiens
uaaaaucaagacaccuuccagcccuaccauca

SEQ ID NO: 158128 - RNA, 32 nt, Homo Sapiens
agcgcaccgccgcuaggauccaggcggagaag

SEQ ID NO: 158129 - RNA, 32 nt, Homo Sapiens
agauuuucaucuugaaauccaaguaagaugga

SEQ ID NO: 158130 - RNA, 32 nt, Homo Sapiens
gauagggaucugucagggcccgcggccggguc

SEQ ID NO: 158131 - RNA, 32 nt, Homo Sapiens
auuuuaaaaaauaccuuaaaaacucugaaauu

SEQ ID NO: 158132 - RNA, 32 nt, Homo Sapiens
ccgaugugagcaccccaccuccugccagagag

SEQ ID NO: 158133 - RNA, 32 nt, Homo Sapiens
aucccauggaccuuauacaaggccuccaccgc

SEQ ID NO: 158134 - RNA, 29 nt, Homo Sapiens
ucuaaauaaaguuugauucuggauuuucc

SEQ ID NO: 158135 - RNA, 32 nt, Homo Sapiens
cucagguuuacuggacaaaaucaauaacuaca

SEQ ID NO: 158136 - RNA, 32 nt, Homo Sapiens
agcaugaaaaauaaagaugcugguuaucuuca

SEQ ID NO: 158137 - RNA, 32 nt, Homo Sapiens
auuugcacaaacaaaacaaaauguuaugauaa

SEQ ID NO: 158138 - RNA, 31 nt, Homo Sapiens
gaccacuggugacugaaccaggcagguccug

SEQ ID NO: 158139 - RNA, 32 nt, Homo Sapiens
agauaguuuuacagcaaauugaucuaaaagcc

SEQ ID NO: 158140 - RNA, 32 nt, Homo Sapiens
aaaaccauccaacagcagcaggauaacuuauc

SEQ ID NO: 158141 - RNA, 32 nt, Homo Sapiens
aagccucucucuguaauacucccuuugggcga

SEQ ID NO: 158142 - RNA, 32 nt, Homo Sapiens
ccccucauuuccccugcuguuugccccucagu

SEQ ID NO: 158143 - RNA, 32 nt, Homo Sapiens
auaaaguugguagaaacuuauuuuugcuuugu

SEQ ID NO: 158144 - RNA, 32 nt, Homo Sapiens
uaucagguguggaacuguucuacugugcgugu

SEQ ID NO: 158145 - RNA, 32 nt, Homo Sapiens
accugggaugccugcagccagcccucccucgu

SEQ ID NO: 158146 - RNA, 32 nt, Homo Sapiens
cuccagucguauuuuuauccaaaagaaggacc

SEQ ID NO: 158147 - RNA, 32 nt, Homo Sapiens
ccuaccacucgugccgccgccggcgcugggcg

SEQ ID NO: 158148 - RNA, 32 nt, Homo Sapiens
auacauggucucccacuguucugagcaggugg

SEQ ID NO: 158149 - RNA, 32 nt, Homo Sapiens
ccuugagcucuuuuguaagugacagauaagcu

SEQ ID NO: 158150 - RNA, 32 nt, Homo Sapiens
cguuguuaagggucacgcaucuguacaguuga

SEQ ID NO: 158151 - RNA, 32 nt, Homo Sapiens
gcggccccacugaggaggaggcucggggacag

SEQ ID NO: 158152 - RNA, 32 nt, Homo Sapiens
ucgcgcagcaccgcccccggcgugaccugcug

SEQ ID NO: 158153 - RNA, 32 nt, Homo Sapiens
ugcuuuuaaugucucaacucucucuuuucugu

SEQ ID NO: 158154 - RNA, 32 nt, Homo Sapiens
aaaacuccauauauauugagaaaagcauaugu

SEQ ID NO: 158155 - RNA, 32 nt, Homo Sapiens
ccaguguguuuacuuguaaauaaagccucugg

SEQ ID NO: 158156 - RNA, 32 nt, Homo Sapiens
agaagauuacuuugggcuggugggacaugcug

SEQ ID NO: 158157 - RNA, 32 nt, Homo Sapiens
uagacauuuuuuuuuucuuaaauaugaucaag

SEQ ID NO: 158158 - RNA, 32 nt, Homo Sapiens
ucuggugcugaagcagccgagagacccaagcc

SEQ ID NO: 158159 - RNA, 32 nt, Homo Sapiens
cccaccuuggcuaucaucacccgaugaggcaa

SEQ ID NO: 158160 - RNA, 32 nt, Homo Sapiens
gcuuucggggguacauguuaaaggcuuuuuau

SEQ ID NO: 158161 - RNA, 32 nt, Homo Sapiens
gggaccaucuucuuauucccucuuuucucauu

SEQ ID NO: 158162 - RNA, 32 nt, Homo Sapiens
ggccauacagaaaaaagagcuaccaaagcagu

SEQ ID NO: 158163 - RNA, 32 nt, Homo Sapiens
accugcuccuccaugaaccugccaagagcuga

SEQ ID NO: 158164 - RNA, 32 nt, Homo Sapiens
uaccuguaguauuucuagucugcacaauaaca

SEQ ID NO: 158165 - RNA, 32 nt, Homo Sapiens
cagugguaacuguggaccuacugcgugccacg

SEQ ID NO: 158166 - RNA, 32 nt, Homo Sapiens
ccaaggggacagagacuucacucgggagccag

SEQ ID NO: 158167 - RNA, 32 nt, Homo Sapiens
acauaauucuggugauugaaauuuuuauuugc

SEQ ID NO: 158168 - RNA, 32 nt, Homo Sapiens
guaggaccuccuucuccucccccucccccucc

SEQ ID NO: 158169 - RNA, 32 nt, Homo Sapiens
uugucaguuucauuuuaacgaguguaacuagu

SEQ ID NO: 158170 - RNA, 32 nt, Homo Sapiens
uguuuuuaaaagacaaaaaaaaaaaaaaaacc

SEQ ID NO: 158171 - RNA, 32 nt, Homo Sapiens
cgcggacgccgggaagccggaccuggagccgg

SEQ ID NO: 158172 - RNA, 31 nt, Homo Sapiens
ggucagccucacugccugcuuauugccucuu

SEQ ID NO: 158173 - RNA, 32 nt, Homo Sapiens
cuggagagauaaaggaaaaagagaaucuguac

SEQ ID NO: 158174 - RNA, 32 nt, Homo Sapiens
acucggaccaggagccagaggaccccagcgca

SEQ ID NO: 158175 - RNA, 32 nt, Homo Sapiens
ccaugccagguuuuccucuucuggguccggag

SEQ ID NO: 158176 - RNA, 27 nt, Homo Sapiens
aaaugcugccagcgccacucccgguuu

SEQ ID NO: 158177 - RNA, 32 nt, Homo Sapiens
ucccugugugacucaguucuuuccaucuguuu

SEQ ID NO: 158178 - RNA, 32 nt, Homo Sapiens
gugagguguacuuacauuucuaggauaacuca

SEQ ID NO: 158179 - RNA, 32 nt, Homo Sapiens
aacuguggcagaugucucaucuucuuuauaug

SEQ ID NO: 158180 - RNA, 32 nt, Homo Sapiens
cacagucauuggcagaggucugggcauuauua

SEQ ID NO: 158181 - RNA, 32 nt, Homo Sapiens
acccagcaaccugggccugcauuccauccgcu

SEQ ID NO: 158182 - RNA, 32 nt, Homo Sapiens
agggcaguagaggucagaagggcuggccugga

SEQ ID NO: 158183 - RNA, 32 nt, Homo Sapiens
agaaagaaggccagacauggugucucacacgu

SEQ ID NO: 158184 - RNA, 32 nt, Homo Sapiens
cugcagcugauagagcagcauuuuaaaaaugu

SEQ ID NO: 158185 - RNA, 32 nt, Homo Sapiens
uauuuguuagucuguaucuggagcuuuuuaaa

SEQ ID NO: 158186 - RNA, 32 nt, Homo Sapiens
cauuaccucuacacugcagaagaagcaaaacu

SEQ ID NO: 158187 - RNA, 32 nt, Homo Sapiens
uuugaggggcuuuguuugggccacugccagca

SEQ ID NO: 158188 - RNA, 32 nt, Homo Sapiens
gugaucuguccccucuccccucauggagaaac

SEQ ID NO: 158189 - RNA, 32 nt, Homo Sapiens
ccuugggacccggacccggcgcccgcgccucg

SEQ ID NO: 158190 - RNA, 32 nt, Homo Sapiens
guuagauauuuuucuuuuuuuuuuuuaauuua

SEQ ID NO: 158191 - RNA, 32 nt, Homo Sapiens
ggcuggcgcauguugggaggcugcuggcugca

SEQ ID NO: 158192 - RNA, 32 nt, Homo Sapiens
gcugaucgcaguccggaggugaggcggaacuc

SEQ ID NO: 158193 - RNA, 32 nt, Homo Sapiens
cccggagaggacaggcugaggacccucaacag

SEQ ID NO: 158194 - RNA, 32 nt, Homo Sapiens
uuuaaucugccagcagauaccaucuacacuaa

SEQ ID NO: 158195 - RNA, 32 nt, Homo Sapiens
cuuuacuaccugcagaccugcacuauaagaaa

SEQ ID NO: 158196 - RNA, 32 nt, Homo Sapiens
uuauuuaaaaauuuuuaaauuaugggauguuu

SEQ ID NO: 158197 - RNA, 32 nt, Homo Sapiens
uaagauucuggcauauaguuacaguauggauu

SEQ ID NO: 158198 - RNA, 32 nt, Homo Sapiens
auuuuuuuuuuuuuuuggauagaaacuggugg

SEQ ID NO: 158199 - RNA, 32 nt, Homo Sapiens
gccuguccugucaucaucauggccagcuggag

SEQ ID NO: 158200 - RNA, 32 nt, Homo Sapiens
ccggccccgaggggcucuccccggaggcucag

SEQ ID NO: 158201 - RNA, 32 nt, Homo Sapiens
acuaagggggcagcccugccccugccuacgcc

SEQ ID NO: 158202 - RNA, 32 nt, Homo Sapiens
uuuuuaucuccauggugugggugggaccacca

SEQ ID NO: 158203 - RNA, 32 nt, Homo Sapiens
auguggccaagagacuccaggauuauggauuu

SEQ ID NO: 158204 - RNA, 32 nt, Homo Sapiens
uguguaagccugugugaguuguguguauguuc

SEQ ID NO: 158205 - RNA, 32 nt, Homo Sapiens
uaggaaaaaagaugaaaacagauucuucaaaa

SEQ ID NO: 158206 - RNA, 32 nt, Homo Sapiens
ggcugugcccggcggcagcagcaagcguggcc

SEQ ID NO: 158207 - RNA, 32 nt, Homo Sapiens
gaguucuguuaugguacuguaccuguccaguc

SEQ ID NO: 158208 - RNA, 32 nt, Homo Sapiens
cuguacauacugugucccuuccucuucccauc

SEQ ID NO: 158209 - RNA, 32 nt, Homo Sapiens
cugaagaguugacaaauuguguacuagauuga

SEQ ID NO: 158210 - RNA, 32 nt, Homo Sapiens
gucugagaggcacuucugucuucuccuuacuu

SEQ ID NO: 158211 - RNA, 32 nt, Homo Sapiens
gguugugguuuggggucaguuuuuaaaugaaa

SEQ ID NO: 158212 - RNA, 32 nt, Homo Sapiens
cuccauuguugaccacugauguaacucaacgu

SEQ ID NO: 158213 - RNA, 32 nt, Homo Sapiens
uuuaaagaaaacaaaauuggaguugaagaaua

SEQ ID NO: 158214 - RNA, 32 nt, Homo Sapiens
gacuggaauuugugaaaaugugacagugacac

SEQ ID NO: 158215 - RNA, 32 nt, Homo Sapiens
gggccacugcagggaagcccccugcuuugcca

SEQ ID NO: 158216 - RNA, 32 nt, Homo Sapiens
cgcccagcacugggcuucagccaggugcucga

SEQ ID NO: 158217 - RNA, 32 nt, Homo Sapiens
auuauucuuucauuugcugauccuuguaugug

SEQ ID NO: 158218 - RNA, 32 nt, Homo Sapiens
uuauuggagacgggguuucacuguguuagcca

SEQ ID NO: 158219 - RNA, 32 nt, Homo Sapiens
gucccaauuacaucucccuuuauucuauccca

SEQ ID NO: 158220 - RNA, 32 nt, Homo Sapiens
gaaagcagucaucuucagcguuuuccagcccu

SEQ ID NO: 158221 - RNA, 32 nt, Homo Sapiens
augugcacugaauaaauuguacagccggcaaa

SEQ ID NO: 158222 - RNA, 32 nt, Homo Sapiens
agcaugagcuggaugcccuuuugaaggaucug

SEQ ID NO: 158223 - RNA, 32 nt, Homo Sapiens
gcgcggcccgcccuccccggcgccgggcuccu

SEQ ID NO: 158224 - RNA, 32 nt, Homo Sapiens
cuucaauggggagaaauaauuagaaugagcaa

SEQ ID NO: 158225 - RNA, 32 nt, Homo Sapiens
ucccgccgccaccuccuccccugccgcccucc

SEQ ID NO: 158226 - RNA, 32 nt, Homo Sapiens
uaauuuuaaaguaaaaggcacugcacauaauu

SEQ ID NO: 158227 - RNA, 32 nt, Homo Sapiens
uuucuacuuuuagguauuuguuacagcagcac

SEQ ID NO: 158228 - RNA, 32 nt, Homo Sapiens
aaacuaaaacaaaacagaacaaaagcaaagga

SEQ ID NO: 158229 - RNA, 32 nt, Homo Sapiens
uagaagaaaugaauauucaagaggaagauaaa

SEQ ID NO: 158230 - RNA, 32 nt, Homo Sapiens
uugucucugaugcaaaaagguagaguaacaca

SEQ ID NO: 158231 - RNA, 32 nt, Homo Sapiens
ccuuauucccccagcccacaaaggcacccugg

SEQ ID NO: 158232 - RNA, 32 nt, Homo Sapiens
cacuuucuaauguuuaaaucccauaaagcuaa

SEQ ID NO: 158233 - RNA, 32 nt, Homo Sapiens
uucuacacuugacuuugaccuuguggguuauu

SEQ ID NO: 158234 - RNA, 32 nt, Homo Sapiens
uccuauguauaaauuaaaugagguggcuucag

SEQ ID NO: 158235 - RNA, 32 nt, Homo Sapiens
aaaccggaccucuguggggagcuugcagggac

SEQ ID NO: 158236 - RNA, 32 nt, Homo Sapiens
uuuucacagguuccauuaauuaacucaggucu

SEQ ID NO: 158237 - RNA, 32 nt, Homo Sapiens
aggugggaagagcauuuguagguccagaagag

SEQ ID NO: 158238 - RNA, 32 nt, Homo Sapiens
cagagauuguuggggagggaaauguuaucaac

SEQ ID NO: 158239 - RNA, 32 nt, Homo Sapiens
caaguggucccugaugugcagugucucauuag

SEQ ID NO: 158240 - RNA, 32 nt, Homo Sapiens
ccuccgguggagaggaaagaagccgccgcccu

SEQ ID NO: 158241 - RNA, 32 nt, Homo Sapiens
ccacccccggccccgaagcuccgccacccgcc

SEQ ID NO: 158242 - RNA, 32 nt, Homo Sapiens
aaaauuuagccgggcguaguggcaugcaccug

SEQ ID NO: 158243 - RNA, 32 nt, Homo Sapiens
aucugucugucauggagggccauguggucacc

SEQ ID NO: 158244 - RNA, 32 nt, Homo Sapiens
auccuggggcuuugcaaaaacaacagguuaau

SEQ ID NO: 158245 - RNA, 32 nt, Homo Sapiens
gguggcugguggcaaggaggggcaggggauau

SEQ ID NO: 158246 - RNA, 32 nt, Homo Sapiens
cuauggcgcccaggccgcaaccccgcggcggc

SEQ ID NO: 158247 - RNA, 32 nt, Homo Sapiens
gauguccccgcugcccucgaggcucccucuuc

SEQ ID NO: 158248 - RNA, 32 nt, Homo Sapiens
aucagguccuguaaaaggguauguaaaaguug

SEQ ID NO: 158249 - RNA, 32 nt, Homo Sapiens
cuguuggccauaucuuuccaccgacggacuug

SEQ ID NO: 158250 - RNA, 32 nt, Homo Sapiens
acuggagugguacuuacugaagaaacucucug

SEQ ID NO: 158251 - RNA, 32 nt, Homo Sapiens
auaacacaccucacaguguuaagauuuauauu

SEQ ID NO: 158252 - RNA, 32 nt, Homo Sapiens
cugugcuugacaaaggacgauuucuccuuuau

SEQ ID NO: 158253 - RNA, 32 nt, Homo Sapiens
aaagugucagaaaaaggugacggcaaggacau

SEQ ID NO: 158254 - RNA, 32 nt, Homo Sapiens
caaugcguccaucauguguccacucaacccag

SEQ ID NO: 158255 - RNA, 32 nt, Homo Sapiens
cucggccccagccuguccccagccccucaauc

SEQ ID NO: 158256 - RNA, 32 nt, Homo Sapiens
ggaugcuggacgagggcagccucugaccccgg

SEQ ID NO: 158257 - RNA, 32 nt, Homo Sapiens
ccucagcauugcagaaaauaacauuguaauag

SEQ ID NO: 158258 - RNA, 32 nt, Homo Sapiens
aagaaagucaacaugaugcugcaggaaaugga

SEQ ID NO: 158259 - RNA, 32 nt, Homo Sapiens
gccuucacuccagcccucugcucccgcacgcc

SEQ ID NO: 158260 - RNA, 32 nt, Homo Sapiens
agggguauaagccccagcccugcucauuccca

SEQ ID NO: 158261 - RNA, 32 nt, Homo Sapiens
ccugguggggacggggagggagucucaauacu

SEQ ID NO: 158262 - RNA, 31 nt, Homo Sapiens
cuuaagcaaagcagccaaucaaagcagcuag

SEQ ID NO: 158263 - RNA, 32 nt, Homo Sapiens
uuacugcuauaaauagguuuauauuauugauu

SEQ ID NO: 158264 - RNA, 32 nt, Homo Sapiens
auauuuuaaguacauuuauuuuugguguuuua

SEQ ID NO: 158265 - RNA, 32 nt, Homo Sapiens
uguucuuuuuaaacaaguauaaucauaucguc

SEQ ID NO: 158266 - RNA, 32 nt, Homo Sapiens
agaggaacuugcaguccaaaguagcaaaaggu

SEQ ID NO: 158267 - RNA, 32 nt, Homo Sapiens
cccagccccuccccuggcugagcagcccugug

SEQ ID NO: 158268 - RNA, 32 nt, Homo Sapiens
aggagcucagcuggucacacacagcaacgaau

SEQ ID NO: 158269 - RNA, 32 nt, Homo Sapiens
cugcccccgccagagcccaccggccagcaugu

SEQ ID NO: 158270 - RNA, 32 nt, Homo Sapiens
uauuuaaauucauaugugcacuguauaagaga

SEQ ID NO: 158271 - RNA, 32 nt, Homo Sapiens
ggucuggugaccucagacacacuaauuugaau

SEQ ID NO: 158272 - RNA, 32 nt, Homo Sapiens
ggcagccagcaggggcggcggcugguccucua

SEQ ID NO: 158273 - RNA, 32 nt, Homo Sapiens
cuuuuaguauccacaggauauuaaacguguaa

SEQ ID NO: 158274 - RNA, 32 nt, Homo Sapiens
uuauuuauuaauuuauaagcagaacaggccag

SEQ ID NO: 158275 - RNA, 32 nt, Homo Sapiens
guugcugucgguaaacuuugccuguaggagga

SEQ ID NO: 158276 - RNA, 32 nt, Homo Sapiens
ugugggaaacggggcuugccagagacacucac

SEQ ID NO: 158277 - RNA, 32 nt, Homo Sapiens
cacccugcagcggccccuccccuccccucccc

SEQ ID NO: 158278 - RNA, 32 nt, Homo Sapiens
acgaugaguguguguccccccuucuccgagac

SEQ ID NO: 158279 - RNA, 32 nt, Homo Sapiens
ccaggaugaggcugaggccagcauggaggcgc

SEQ ID NO: 158280 - RNA, 32 nt, Homo Sapiens
gagcuaaguggaagguucaacaugugggaaua

SEQ ID NO: 158281 - RNA, 32 nt, Homo Sapiens
ccucccagcccucuccucauucucugaaccca

SEQ ID NO: 158282 - RNA, 30 nt, Homo Sapiens
cgccagggagcaccuggugagucugccggc

SEQ ID NO: 158283 - RNA, 32 nt, Homo Sapiens
uuugcugacuuuauauggauauuauuuucucc

SEQ ID NO: 158284 - RNA, 32 nt, Homo Sapiens
agcugugcuuuuugcaaaagggcuugccuaag

SEQ ID NO: 158285 - RNA, 32 nt, Homo Sapiens
gguguggagggagaggcgcggugggaaccagg

SEQ ID NO: 158286 - RNA, 32 nt, Homo Sapiens
guguuucauagccccaguccagggcugucuaa

SEQ ID NO: 158287 - RNA, 32 nt, Homo Sapiens
ggcucaaugcuguguggaagauucugagaaag

SEQ ID NO: 158288 - RNA, 32 nt, Homo Sapiens
ucagccuucaaagcacuugacaucagggaccc

SEQ ID NO: 158289 - RNA, 32 nt, Homo Sapiens
aggcgauuucagggugagaaaagggagcuagg

SEQ ID NO: 158290 - RNA, 32 nt, Homo Sapiens
auacugugcuggagagugagaaugggggugag

SEQ ID NO: 158291 - RNA, 32 nt, Homo Sapiens
ggccgggccucgcggcgcuagggcgggcuggc

SEQ ID NO: 158292 - RNA, 32 nt, Homo Sapiens
cagcugcugcucaucagcugcccgcuagcaug

SEQ ID NO: 158293 - RNA, 32 nt, Homo Sapiens
uccaguccugugacuuucuacuuuuaguagag

SEQ ID NO: 158294 - RNA, 32 nt, Homo Sapiens
ugcauggcggccugcugcagaucuucccugag

SEQ ID NO: 158295 - RNA, 32 nt, Homo Sapiens
gagugccggccgcggggcccucgcagcuugcc

SEQ ID NO: 158296 - RNA, 32 nt, Homo Sapiens
uaacugaaagauuuuuucaaaaaucccagauu

SEQ ID NO: 158297 - RNA, 32 nt, Homo Sapiens
cacacccgaggggcccuccuccugucaauuga

SEQ ID NO: 158298 - RNA, 32 nt, Homo Sapiens
cugucuugauucaggaacuacugcucuuucca

SEQ ID NO: 158299 - RNA, 32 nt, Homo Sapiens
ccaucugcguguaugucaaggaagugagaugc

SEQ ID NO: 158300 - RNA, 32 nt, Homo Sapiens
aauguagagcaaccaauguuauuuucaaaaua

SEQ ID NO: 158301 - RNA, 32 nt, Homo Sapiens
aaagaccugaccgucccccagcccgacaccug

SEQ ID NO: 158302 - RNA, 32 nt, Homo Sapiens
uaacuaaucauauuuaaauauauuucacuuug

SEQ ID NO: 158303 - RNA, 32 nt, Homo Sapiens
uugaauguuauuauauauuaccuguaugaugg

SEQ ID NO: 158304 - RNA, 32 nt, Homo Sapiens
uaacgugaaggaggcagacaugagcuguacua

SEQ ID NO: 158305 - RNA, 32 nt, Homo Sapiens
cagccgggaccugcggcugugccuggacugaa

SEQ ID NO: 158306 - RNA, 32 nt, Homo Sapiens
uaagcuaucugaaaaauaaaauguacaagucc

SEQ ID NO: 158307 - RNA, 32 nt, Homo Sapiens
agcuguucaaugaaauugugaauuagaaacau

SEQ ID NO: 158308 - RNA, 32 nt, Homo Sapiens
cgccucgcgggggucuggcccggaguggaggg

SEQ ID NO: 158309 - RNA, 32 nt, Homo Sapiens
gcccuccccuccccggcccuccacagcugcug

SEQ ID NO: 158310 - RNA, 32 nt, Homo Sapiens
uuuuguguugccauguuaagcauggagaggga

SEQ ID NO: 158311 - RNA, 32 nt, Homo Sapiens
gagucggggaguggggcgggggagcgaggugg

SEQ ID NO: 158312 - RNA, 32 nt, Homo Sapiens
uuauuuuuauagagauggggguuuugccaugu

SEQ ID NO: 158313 - RNA, 32 nt, Homo Sapiens
uccagucuggaugacagagagagacccugucu

SEQ ID NO: 158314 - RNA, 32 nt, Homo Sapiens
agcaauaaguucugugacuaugugucagcaac

SEQ ID NO: 158315 - RNA, 32 nt, Homo Sapiens
agacggacgcgggcacccgucaugcuuuugcu

SEQ ID NO: 158316 - RNA, 32 nt, Homo Sapiens
cuuccucugccaaaaaggaacugguggccuug

SEQ ID NO: 158317 - RNA, 32 nt, Homo Sapiens
ggccuacggggcgggggcggggcggcagugag

SEQ ID NO: 158318 - RNA, 32 nt, Homo Sapiens
uauuccucuuuguaauaggaaacuauauggga

SEQ ID NO: 158319 - RNA, 32 nt, Homo Sapiens
cuucaguaguggggaacaggauguauuguucc

SEQ ID NO: 158320 - RNA, 32 nt, Homo Sapiens
gacugggccagugcagaauggggguucaggca

SEQ ID NO: 158321 - RNA, 32 nt, Homo Sapiens
ggucuaagcugauaugaaaguuucuaugugug

SEQ ID NO: 158322 - RNA, 32 nt, Homo Sapiens
ccucugccuccuccccugccagcccuagcgug

SEQ ID NO: 158323 - RNA, 32 nt, Homo Sapiens
gguccgggucgcaggaccaucccggccggcgc

SEQ ID NO: 158324 - RNA, 32 nt, Homo Sapiens
gaacuaagaauguuuuaaauucuguaaugaac

SEQ ID NO: 158325 - RNA, 32 nt, Homo Sapiens
cucgcgcgccgcccgcgccaugaagcacaucc

SEQ ID NO: 158326 - RNA, 32 nt, Homo Sapiens
gccgggcucccgccgcgcgcgcugucccugga

SEQ ID NO: 158327 - RNA, 32 nt, Homo Sapiens
gccagugccccugccagcugcacgggcagcuc

SEQ ID NO: 158328 - RNA, 32 nt, Homo Sapiens
acuccuguucuucccagcauggccacuauuuu

SEQ ID NO: 158329 - RNA, 32 nt, Homo Sapiens
uccgcacgcuggaagccugcccggccugaagu

SEQ ID NO: 158330 - RNA, 32 nt, Homo Sapiens
agcugcuucguggaagaccaugugcuccgaug

SEQ ID NO: 158331 - RNA, 32 nt, Homo Sapiens
accaggccgggagaggcagcuggcaugcgggc

SEQ ID NO: 158332 - RNA, 32 nt, Homo Sapiens
ccuguccugccaguugacgucagugugggguu

SEQ ID NO: 158333 - RNA, 32 nt, Homo Sapiens
ccgggacuaugggcaagggcccggggcgggga

SEQ ID NO: 158334 - RNA, 32 nt, Homo Sapiens
gauuuaauuacauuguucgauguuuguacagg

SEQ ID NO: 158335 - RNA, 30 nt, Homo Sapiens
agaucuucacuugccacaggacuugggggg

SEQ ID NO: 158336 - RNA, 32 nt, Homo Sapiens
cuaagagugugaagguaguacuuuuuagagug

SEQ ID NO: 158337 - RNA, 32 nt, Homo Sapiens
acguagaaucguucuguaaacuguaaagaauu

SEQ ID NO: 158338 - RNA, 32 nt, Homo Sapiens
gccucagccucccaagcuuucaccaucaugga

SEQ ID NO: 158339 - RNA, 32 nt, Homo Sapiens
ggaccuugccgcggccgccuggcuccuuuccg

SEQ ID NO: 158340 - RNA, 32 nt, Homo Sapiens
cuacagccacuacugaccauugcugccaccau

SEQ ID NO: 158341 - RNA, 32 nt, Homo Sapiens
cugccacccgcaccccccgccagccuacgccc

SEQ ID NO: 158342 - RNA, 32 nt, Homo Sapiens
ccugagaagcagaaccacagggaaaccucuug

SEQ ID NO: 158343 - RNA, 32 nt, Homo Sapiens
ccaccagagccuccugcccagcccuggccagu

SEQ ID NO: 158344 - RNA, 32 nt, Homo Sapiens
auaaagauauuuuuauucaccuguuccgugcu

SEQ ID NO: 158345 - RNA, 32 nt, Homo Sapiens
uugacuuggggagaccucuacugccuuggaca

SEQ ID NO: 158346 - RNA, 32 nt, Homo Sapiens
gcgacccucggcugggcccgccgcccgcuucc

SEQ ID NO: 158347 - RNA, 32 nt, Homo Sapiens
uuuuauuuuuuaaauuuuuaguagacacagag

SEQ ID NO: 158348 - RNA, 32 nt, Homo Sapiens
uggugacucaugccuguaaucccagcacugug

SEQ ID NO: 158349 - RNA, 32 nt, Homo Sapiens
uacauaacugguuuuccacaggcaucuucagu

SEQ ID NO: 158350 - RNA, 32 nt, Homo Sapiens
ucacauucucagagaguuggagggauuaugcg

SEQ ID NO: 158351 - RNA, 32 nt, Homo Sapiens
uucauauuuuuagaauuuguccucggaaaccu

SEQ ID NO: 158352 - RNA, 32 nt, Homo Sapiens
cuaccuuuuuagauuuuuuuuauuauauauca

SEQ ID NO: 158353 - RNA, 32 nt, Homo Sapiens
gacuccuucugacuccacgcggccccagcucc

SEQ ID NO: 158354 - RNA, 32 nt, Homo Sapiens
ccugccgcccccagcuuugccuggacacugac

SEQ ID NO: 158355 - RNA, 32 nt, Homo Sapiens
cucucuuccaucucuuuccccaaggcuccgug

SEQ ID NO: 158356 - RNA, 32 nt, Homo Sapiens
aauuaaggaaaugaccaaguucuuugacaucg

SEQ ID NO: 158357 - RNA, 32 nt, Homo Sapiens
gggccaccgggcgggaguggggaagggugggc

SEQ ID NO: 158358 - RNA, 32 nt, Homo Sapiens
aaaucuauguaaauaauauagucuacaacaua

SEQ ID NO: 158359 - RNA, 32 nt, Homo Sapiens
ggaagugugacucaaucuugccugccuucugg

SEQ ID NO: 158360 - RNA, 32 nt, Homo Sapiens
uacuccuugaguuuuccugcugcgaugcaaug

SEQ ID NO: 158361 - RNA, 32 nt, Homo Sapiens
agcgucccauccagcccucuuucaccaagucc

SEQ ID NO: 158362 - RNA, 32 nt, Homo Sapiens
uccuguucuucaucaaaauuccacucacucau

SEQ ID NO: 158363 - RNA, 32 nt, Homo Sapiens
ugaauugaaugaugaaauguuguauguguguu

SEQ ID NO: 158364 - RNA, 30 nt, Homo Sapiens
aggccaggcaggcgccgccugcggagagca

SEQ ID NO: 158365 - RNA, 32 nt, Homo Sapiens
gcuguuuauuuacuuauuuaagagaccgccau

SEQ ID NO: 158366 - RNA, 32 nt, Homo Sapiens
ucagcugccuacugggaggcuggggagaaugg

SEQ ID NO: 158367 - RNA, 32 nt, Homo Sapiens
gguuggguguggugagggaggggacauauccu

SEQ ID NO: 158368 - RNA, 30 nt, Homo Sapiens
gucuucuucugugcuggagauguuuuagag

SEQ ID NO: 158369 - RNA, 32 nt, Homo Sapiens
cccggcagacaccccacccccaucuuguuccc

SEQ ID NO: 158370 - RNA, 32 nt, Homo Sapiens
acuggaaauggcagcaguuucugaugcugagg

SEQ ID NO: 158371 - RNA, 32 nt, Homo Sapiens
uaccuccgccccaccccaucaucuguggacac

SEQ ID NO: 158372 - RNA, 32 nt, Homo Sapiens
gagcccucggcgggcugcgagcgacuccccgg

SEQ ID NO: 158373 - RNA, 32 nt, Homo Sapiens
gggcugguucuucccaccacuucccaggcucu

SEQ ID NO: 158374 - RNA, 32 nt, Homo Sapiens
cgcuagucccaggagcucggaauguucgugga

SEQ ID NO: 158375 - RNA, 32 nt, Homo Sapiens
uacucucagcagcagccaaagcacagcuagca

SEQ ID NO: 158376 - RNA, 32 nt, Homo Sapiens
gagagaauaagcaaccuaaacaguaucacaca

SEQ ID NO: 158377 - RNA, 32 nt, Homo Sapiens
ggagcgguugaucgacaagaccaaggugacau

SEQ ID NO: 158378 - RNA, 32 nt, Homo Sapiens
aacucugcccggaggcgacgggcugcggcgga

SEQ ID NO: 158379 - RNA, 32 nt, Homo Sapiens
uggcggugcggacugauguggagaugugacag

SEQ ID NO: 158380 - RNA, 32 nt, Homo Sapiens
aacaacacaacacuugagcuccuagccaaugu

SEQ ID NO: 158381 - RNA, 32 nt, Homo Sapiens
ggcugucuuuugcuccuccaaaugagcccagu

SEQ ID NO: 158382 - RNA, 32 nt, Homo Sapiens
cucuccuuucccuuuguuaguguccuggguuc

SEQ ID NO: 158383 - RNA, 32 nt, Homo Sapiens
guaauaucucaaagaaaugaacuuguagauua

SEQ ID NO: 158384 - RNA, 32 nt, Homo Sapiens
ggaaauagagcagacagagagauacagcaaca

SEQ ID NO: 158385 - RNA, 32 nt, Homo Sapiens
guuuggcuucucccacccacuuuccaccacca

SEQ ID NO: 158386 - RNA, 32 nt, Homo Sapiens
guguauuuuuaaaauccagcugugauggguua

SEQ ID NO: 158387 - RNA, 32 nt, Homo Sapiens
ucucucagucaacuucuuucuguuccuuuguu

SEQ ID NO: 158388 - RNA, 32 nt, Homo Sapiens
ggucgccugagccgccuccgcggccgccgagg

SEQ ID NO: 158389 - RNA, 32 nt, Homo Sapiens
agauauaccucauuuuaaccaauagauauucu

SEQ ID NO: 158390 - RNA, 32 nt, Homo Sapiens
acccagcuccgacgcagcuccucugcgcccuu

SEQ ID NO: 158391 - RNA, 32 nt, Homo Sapiens
agcagugccucuguaggaggggugcugggcuc

SEQ ID NO: 158392 - RNA, 32 nt, Homo Sapiens
cuggggcuggggggcggggcuggaggggaagg

SEQ ID NO: 158393 - RNA, 32 nt, Homo Sapiens
caagagauggauccuggggcaguuggcaucug

SEQ ID NO: 158394 - RNA, 32 nt, Homo Sapiens
uucuugagagguggggaccuaauuauuaccag

SEQ ID NO: 158395 - RNA, 32 nt, Homo Sapiens
ccaagcuuuugaugaaggugcuauuaaucuag

SEQ ID NO: 158396 - RNA, 32 nt, Homo Sapiens
aaaauuuccuuccgcauccaccaguuuugaau

SEQ ID NO: 158397 - RNA, 32 nt, Homo Sapiens
uugagaacaggaacuguaaaucuguugcccaa

SEQ ID NO: 158398 - RNA, 32 nt, Homo Sapiens
uaggaccggcggagaggucggcaccgccccag

SEQ ID NO: 158399 - RNA, 32 nt, Homo Sapiens
ggcaaccccagccccagccucagcccugcccc

SEQ ID NO: 158400 - RNA, 32 nt, Homo Sapiens
ggggcgaguccggaggacuccucggacugcgc

SEQ ID NO: 158401 - RNA, 32 nt, Homo Sapiens
gccugaagggaagcaggcaggaguccuagcuu

SEQ ID NO: 158402 - RNA, 32 nt, Homo Sapiens
uugacuuaugugcaauuugggacgcuggaguu

SEQ ID NO: 158403 - RNA, 32 nt, Homo Sapiens
accaguuuuuagaagguugugaauuggcuuuu

SEQ ID NO: 158404 - RNA, 32 nt, Homo Sapiens
auuauuuuugucacggaaaacauccucuccaa

SEQ ID NO: 158405 - RNA, 32 nt, Homo Sapiens
aauuuguuuuugauucugaaaaacucugcuuc

SEQ ID NO: 158406 - RNA, 32 nt, Homo Sapiens
ccguauauguaguagcacuuuucaaagaagga

SEQ ID NO: 158407 - RNA, 32 nt, Homo Sapiens
gcaggcggcgaguccuccgagccccgggcccg

SEQ ID NO: 158408 - RNA, 32 nt, Homo Sapiens
acugacuguacccuggcccacccagagcucuc

SEQ ID NO: 158409 - RNA, 32 nt, Homo Sapiens
ccagacaaggcggaaaaggccuuuuguaaugg

SEQ ID NO: 158410 - RNA, 32 nt, Homo Sapiens
ugugcccuugggguaagccagagccuggggug

SEQ ID NO: 158411 - RNA, 32 nt, Homo Sapiens
ucaauggaaucauuuuaauuguuacuucauuu

SEQ ID NO: 158412 - RNA, 32 nt, Homo Sapiens
aagcugcggcgucguccaccggccggaacggg

SEQ ID NO: 158413 - RNA, 32 nt, Homo Sapiens
gaauacaggaugcacaauguugucaauccugg

SEQ ID NO: 158414 - RNA, 32 nt, Homo Sapiens
gagaaacagauggucaaguagaugucuguuag

SEQ ID NO: 158415 - RNA, 32 nt, Homo Sapiens
gccccccaccucccucccggauggggcagcug

SEQ ID NO: 158416 - RNA, 32 nt, Homo Sapiens
ccgggccggcgcgcccgcaggcggcuagagca

SEQ ID NO: 158417 - RNA, 30 nt, Homo Sapiens
cuauuggcucucccugccucugagcucugg

SEQ ID NO: 158418 - RNA, 32 nt, Homo Sapiens
gcugccggugaagaugaucacuuuuuaauucg

SEQ ID NO: 158419 - RNA, 32 nt, Homo Sapiens
cgaacuuccccggcagcggacuguagcccagg

SEQ ID NO: 158420 - RNA, 32 nt, Homo Sapiens
agaaauccaaaaagucuuccacauucaaguuc

SEQ ID NO: 158421 - RNA, 32 nt, Homo Sapiens
uguaagguguccccagcccccgggccacaaac

SEQ ID NO: 158422 - RNA, 32 nt, Homo Sapiens
uuccaagacgggagggaucgggcgcgcuccag

SEQ ID NO: 158423 - RNA, 32 nt, Homo Sapiens
agacugaucuucuguccaaggaacaucaucug

SEQ ID NO: 158424 - RNA, 32 nt, Homo Sapiens
ucuccucccugccccaggacuucaucggagca

SEQ ID NO: 158425 - RNA, 32 nt, Homo Sapiens
accgaguguuucgaugaguaaauauacagcuu

SEQ ID NO: 158426 - RNA, 32 nt, Homo Sapiens
ucccaccucacagacagccaagcagugaggga

SEQ ID NO: 158427 - RNA, 32 nt, Homo Sapiens
cccuuaaggggaggaggacggauugauuccac

SEQ ID NO: 158428 - RNA, 31 nt, Homo Sapiens
cugcuuuugugcuacgagucagcguccgugc

SEQ ID NO: 158429 - RNA, 32 nt, Homo Sapiens
cggccucagggcgcucagacggcggccaggca

SEQ ID NO: 158430 - RNA, 32 nt, Homo Sapiens
guuuaaagcuuccucuagauucuuauuccuau

SEQ ID NO: 158431 - RNA, 32 nt, Homo Sapiens
cuaggcgcugaggcccggguccucacaccccu

SEQ ID NO: 158432 - RNA, 32 nt, Homo Sapiens
aguugagaugacuuugaagcuaaaaugaguag

SEQ ID NO: 158433 - RNA, 30 nt, Homo Sapiens
ccugagggacaggcccugggucccgggaug

SEQ ID NO: 158434 - RNA, 32 nt, Homo Sapiens
aagcauuaaggaccaggugcgguggcucacac

SEQ ID NO: 158435 - RNA, 32 nt, Homo Sapiens
uuuggucaucuugguucugccauccucuugcc

SEQ ID NO: 158436 - RNA, 32 nt, Homo Sapiens
aggagaaggcucuggaggacuugaggcaugcu

SEQ ID NO: 158437 - RNA, 32 nt, Homo Sapiens
uagaacacggcuuccccgacaagcacacauac

SEQ ID NO: 158438 - RNA, 32 nt, Homo Sapiens
auguggaacaaauggagugaucuguuaucccc

SEQ ID NO: 158439 - RNA, 32 nt, Homo Sapiens
ccugggcacacgcugcucugccccagcuuggg

SEQ ID NO: 158440 - RNA, 30 nt, Homo Sapiens
uggccacugggugccacccagccugugugc

SEQ ID NO: 158441 - RNA, 32 nt, Homo Sapiens
agcuggaucucgccuucccggcguggggcgca

SEQ ID NO: 158442 - RNA, 32 nt, Homo Sapiens
ggggggacggaagccgcggccgggccaacucc

SEQ ID NO: 158443 - RNA, 32 nt, Homo Sapiens
uauaagcgaugaugggaaaggcuauuuagcca

SEQ ID NO: 158444 - RNA, 32 nt, Homo Sapiens
uuuccagugguguggccugaaaacaaagaaua

SEQ ID NO: 158445 - RNA, 32 nt, Homo Sapiens
uauugcacaucauauucuauuguuuacuauaa

SEQ ID NO: 158446 - RNA, 32 nt, Homo Sapiens
ucuuuguucuuuacaaaauuaucuuaauaagu

SEQ ID NO: 158447 - RNA, 32 nt, Homo Sapiens
auauccuuugguccuggugcugccgagggcug

SEQ ID NO: 158448 - RNA, 32 nt, Homo Sapiens
cccuccggaugugagcaguccuggacagagca

SEQ ID NO: 158449 - RNA, 32 nt, Homo Sapiens
acaacucagaguuaaacugugcauccgaguug

SEQ ID NO: 158450 - RNA, 32 nt, Homo Sapiens
gccaggugcggggaccuccuccccuccugggg

SEQ ID NO: 158451 - RNA, 32 nt, Homo Sapiens
cguagucggggaagacucuacugaauaagacg

SEQ ID NO: 158452 - RNA, 32 nt, Homo Sapiens
cagcucgggugggcugcccaggaugcggugcg

SEQ ID NO: 158453 - RNA, 32 nt, Homo Sapiens
accacagccaagggacaggcuuggcggaacug

SEQ ID NO: 158454 - RNA, 32 nt, Homo Sapiens
cccuugaugagaagcagaacguggugaccuuu

SEQ ID NO: 158455 - RNA, 32 nt, Homo Sapiens
ggcccugcccaccgcgcgcgaguaguagcggg

SEQ ID NO: 158456 - RNA, 32 nt, Homo Sapiens
caaaaaguagccaggcaugguggugcaugccu

SEQ ID NO: 158457 - RNA, 32 nt, Homo Sapiens
acauuuaauuuaauaagaauagugucuuuaag

SEQ ID NO: 158458 - RNA, 32 nt, Homo Sapiens
acauugccauccaugauuuaacagacuguaga

SEQ ID NO: 158459 - RNA, 32 nt, Homo Sapiens
caauuuucuuuuuaaaaauacuucuacaugac

SEQ ID NO: 158460 - RNA, 30 nt, Homo Sapiens
cugucgacuauugccacccugcuucuccaa

SEQ ID NO: 158461 - RNA, 32 nt, Homo Sapiens
ccuuuguagccucaacuaucagaacauucaga

SEQ ID NO: 158462 - RNA, 32 nt, Homo Sapiens
ggaccccugcccaguuccuucuccgggaugga

SEQ ID NO: 158463 - RNA, 32 nt, Homo Sapiens
caagaagccaaauaaacauuuuggaggauaau

SEQ ID NO: 158464 - RNA, 32 nt, Homo Sapiens
acaccucccgcacucgcgcaggccucucagaa

SEQ ID NO: 158465 - RNA, 32 nt, Homo Sapiens
aggaagcucucagauagcagacuucagacaga

SEQ ID NO: 158466 - RNA, 32 nt, Homo Sapiens
uuaaacacauaaauacuagugugauuauaucu

SEQ ID NO: 158467 - RNA, 32 nt, Homo Sapiens
ucuacuaaaaauacaaaaauuagucaggcaug

SEQ ID NO: 158468 - RNA, 32 nt, Homo Sapiens
aguuugugugucugcugcucugguuuugaaac

SEQ ID NO: 158469 - RNA, 32 nt, Homo Sapiens
auuccgggcggcccgcggcccacggggauggg

SEQ ID NO: 158470 - RNA, 32 nt, Homo Sapiens
agauuagacccuccaagaccgccccagggguu

SEQ ID NO: 158471 - RNA, 32 nt, Homo Sapiens
uauugccauuuucucccccuauuuauugcuuc

SEQ ID NO: 158472 - RNA, 32 nt, Homo Sapiens
ggugcuuucugcauuugguguuuauuuguaaa

SEQ ID NO: 158473 - RNA, 32 nt, Homo Sapiens
cccuugugaguuccccauuaaucugcugguug

SEQ ID NO: 158474 - RNA, 32 nt, Homo Sapiens
ugcagguaaaauguguuaaaccauaagaguug

SEQ ID NO: 158475 - RNA, 32 nt, Homo Sapiens
ccaggcgcgcaaccucgggcgccggggcaagg

SEQ ID NO: 158476 - RNA, 32 nt, Homo Sapiens
auggccuuuuaaaaauaaaauaaagugauacc

SEQ ID NO: 158477 - RNA, 32 nt, Homo Sapiens
gcucgggacgaaggcccggccggcggcagucu

SEQ ID NO: 158478 - RNA, 32 nt, Homo Sapiens
caccacuguuuccucagcccugccaggcucug

SEQ ID NO: 158479 - RNA, 32 nt, Homo Sapiens
gaauaaaaaauauuauacucuugaacuuuugu

SEQ ID NO: 158480 - RNA, 32 nt, Homo Sapiens
ucacccaaacuccugcucacucaagcaaaagc

SEQ ID NO: 158481 - RNA, 32 nt, Homo Sapiens
cuccgggccccggccuccagagccgcagccac

SEQ ID NO: 158482 - RNA, 32 nt, Homo Sapiens
uguuuacccgacagaggcuuuauuugugcugu

SEQ ID NO: 158483 - RNA, 32 nt, Homo Sapiens
ggugcuggagguucaggacgccguccaguaug

SEQ ID NO: 158484 - RNA, 32 nt, Homo Sapiens
auauuucuaaaaggauacaaucucuagaagau

SEQ ID NO: 158485 - RNA, 32 nt, Homo Sapiens
cccccacuuccccagcacuuugaagaagaaac

SEQ ID NO: 158486 - RNA, 32 nt, Homo Sapiens
cucgcgugcaggugguugguuuucaauguucu

SEQ ID NO: 158487 - RNA, 32 nt, Homo Sapiens
ucucuuauuuucugcccauugauaaaccucuc

SEQ ID NO: 158488 - RNA, 32 nt, Homo Sapiens
aggccuggacccugugcugagcuggugacuca

SEQ ID NO: 158489 - RNA, 32 nt, Homo Sapiens
ugcagauuuuauucuuuuuuccccauuuguuu

SEQ ID NO: 158490 - RNA, 32 nt, Homo Sapiens
gccauaugaugaugaauguuucacccccauau

SEQ ID NO: 158491 - RNA, 32 nt, Homo Sapiens
gcccuagaggggccugucucugcccugaguga

SEQ ID NO: 158492 - RNA, 32 nt, Homo Sapiens
cuuaugcagaacugugacuaaucaugaucuuu

SEQ ID NO: 158493 - RNA, 32 nt, Homo Sapiens
aaccaaaagucuuuuucuggaccaucuaauuu

SEQ ID NO: 158494 - RNA, 32 nt, Homo Sapiens
uuguuuguuagccuugacugugaggcaggacu

SEQ ID NO: 158495 - RNA, 32 nt, Homo Sapiens
ucacaggcuggugaaccccggugggaacagag

SEQ ID NO: 158496 - RNA, 32 nt, Homo Sapiens
cugaagugucauuguaauugugugccuucuca

SEQ ID NO: 158497 - RNA, 32 nt, Homo Sapiens
gccuucuguuuaauaaaguacauuuucuucag

SEQ ID NO: 158498 - RNA, 32 nt, Homo Sapiens
agggaauacuuauuauccagcggguaacagug

SEQ ID NO: 158499 - RNA, 32 nt, Homo Sapiens
uauugaggcgacuuuuuauaaaacacaauuuu

SEQ ID NO: 158500 - RNA, 32 nt, Homo Sapiens
uuggaggcuuugugucagcugcaaauccuacc

SEQ ID NO: 158501 - RNA, 32 nt, Homo Sapiens
acucucccagcgcgagagacccugccccgccc

SEQ ID NO: 158502 - RNA, 32 nt, Homo Sapiens
ccacgcgugacccccuggacacgugcagggcc

SEQ ID NO: 158503 - RNA, 32 nt, Homo Sapiens
uaagagcuguaacacucacggcgaaggucugc

SEQ ID NO: 158504 - RNA, 32 nt, Homo Sapiens
ucauaagcuccagagagcugccuuccacaaga

SEQ ID NO: 158505 - RNA, 29 nt, Homo Sapiens
ucuaggaaauaaaaccaguugauuaaagc

SEQ ID NO: 158506 - RNA, 32 nt, Homo Sapiens
uccagcugucaugguauguuacaaggguuuca

SEQ ID NO: 158507 - RNA, 32 nt, Homo Sapiens
caaacuuucuucaguguuuuucauuucuuacg

SEQ ID NO: 158508 - RNA, 32 nt, Homo Sapiens
gccuaauaacuuaucauuuguaaaaugacuua

SEQ ID NO: 158509 - RNA, 30 nt, Homo Sapiens
uuaauauaugcucgcuuuuggaauguguua

SEQ ID NO: 158510 - RNA, 32 nt, Homo Sapiens
uuaaauuuuuaaaauauguaugauagaucuca

SEQ ID NO: 158511 - RNA, 32 nt, Homo Sapiens
uuuaugugguggccuuuaaccaccugagggaa

SEQ ID NO: 158512 - RNA, 32 nt, Homo Sapiens
acaccuguaugaaaaugugaugauugaacucc

SEQ ID NO: 158513 - RNA, 32 nt, Homo Sapiens
auggaccagccccgaagagacaucugugguga

SEQ ID NO: 158514 - RNA, 32 nt, Homo Sapiens
cguagcuguuuuaucaucuguagcuucauccu

SEQ ID NO: 158515 - RNA, 30 nt, Homo Sapiens
ugaucauggcacugcuauucuugaagcacu

SEQ ID NO: 158516 - RNA, 31 nt, Homo Sapiens
uaggcggagccccgaggcgggggaggcgggg

SEQ ID NO: 158517 - RNA, 32 nt, Homo Sapiens
auauaucagucuuuuuccauuauuuccucauu

SEQ ID NO: 158518 - RNA, 32 nt, Homo Sapiens
uccucaacaaccccagauauggcggccccggc

SEQ ID NO: 158519 - RNA, 32 nt, Homo Sapiens
agcagcccaggaagaaagcaucaggggaacug

SEQ ID NO: 158520 - RNA, 32 nt, Homo Sapiens
ugauuuuagacuauuuacaucguggguuacaa

SEQ ID NO: 158521 - RNA, 29 nt, Homo Sapiens
gacaguauauguauguuuucauuccuguu

SEQ ID NO: 158522 - RNA, 32 nt, Homo Sapiens
cuaagcauauuaaaaugugaaauuuugcguaa

SEQ ID NO: 158523 - RNA, 32 nt, Homo Sapiens
gugaguuccgugcccaggcccgcgacucggcc

SEQ ID NO: 158524 - RNA, 32 nt, Homo Sapiens
uuauugauaaccucagacguucccaccacuga

SEQ ID NO: 158525 - RNA, 32 nt, Homo Sapiens
gccucugugggaaaaugguagaauaauucuua

SEQ ID NO: 158526 - RNA, 32 nt, Homo Sapiens
aacuccuuguaggucugcagauguguguccca

SEQ ID NO: 158527 - RNA, 32 nt, Homo Sapiens
ucccugcggggccagcagcagcuccagccacc

SEQ ID NO: 158528 - RNA, 32 nt, Homo Sapiens
uuucuucuaaucugaggcuaugaucaguccca

SEQ ID NO: 158529 - RNA, 31 nt, Homo Sapiens
gugcagcuaagcagccaacugcagaaacguc

SEQ ID NO: 158530 - RNA, 32 nt, Homo Sapiens
uuacucuaacuguuaccauuuuacaaaugauu

SEQ ID NO: 158531 - RNA, 32 nt, Homo Sapiens
agaugaagaaaaaguuuaaaagaaauucugac

SEQ ID NO: 158532 - RNA, 32 nt, Homo Sapiens
uguuagccauaguggacaagguuccauucaca

SEQ ID NO: 158533 - RNA, 32 nt, Homo Sapiens
auaguguccuccaugaugucaaccucaaugaa

SEQ ID NO: 158534 - RNA, 32 nt, Homo Sapiens
ggaagaaaaugaaugucagucaaggaaaggcc

SEQ ID NO: 158535 - RNA, 31 nt, Homo Sapiens
gaugugacucacacucucaggagucaccccc

SEQ ID NO: 158536 - RNA, 32 nt, Homo Sapiens
cugccagccaagggaaaggcccagagcccugu

SEQ ID NO: 158537 - RNA, 32 nt, Homo Sapiens
uauaaaucccuacaauuaggauauuuauuuaa

SEQ ID NO: 158538 - RNA, 32 nt, Homo Sapiens
uaaagauggcgcacccggcagccccccagugu

SEQ ID NO: 158539 - RNA, 32 nt, Homo Sapiens
aagaaguuccugagaauggguuacagauguca

SEQ ID NO: 158540 - RNA, 32 nt, Homo Sapiens
cugagaucaaugccuguggcagccugugggga

SEQ ID NO: 158541 - RNA, 32 nt, Homo Sapiens
acugauaaugaaaugacagugcaacaucuuaa

SEQ ID NO: 158542 - RNA, 32 nt, Homo Sapiens
cugccgccacugcugcugcugcugcugcugcc

SEQ ID NO: 158543 - RNA, 32 nt, Homo Sapiens
aggaccugagaaagauuaagcugcaggcuccc

SEQ ID NO: 158544 - RNA, 32 nt, Homo Sapiens
uagagccgucccuccucuuccuccccucccga

SEQ ID NO: 158545 - RNA, 32 nt, Homo Sapiens
gcgccucucgccccgcucccccgggacuccac

SEQ ID NO: 158546 - RNA, 32 nt, Homo Sapiens
auaugacagucuuuuugauacuuuuauaaagu

SEQ ID NO: 158547 - RNA, 32 nt, Homo Sapiens
uaccacauccugcuaugcucccgggccugggu

SEQ ID NO: 158548 - RNA, 32 nt, Homo Sapiens
aaggggaaauggaauaaaacuucguuuuguaa

SEQ ID NO: 158549 - RNA, 32 nt, Homo Sapiens
gggccuugcagaggggcagagaaggcaggacc

SEQ ID NO: 158550 - RNA, 32 nt, Homo Sapiens
acuaccucagaauguagucaagaauucaccca

SEQ ID NO: 158551 - RNA, 32 nt, Homo Sapiens
ugcugcugguggugcugcugcugcuucugagg

SEQ ID NO: 158552 - RNA, 32 nt, Homo Sapiens
auaaugcguuuuccuuacgugucugucaaucc

SEQ ID NO: 158553 - RNA, 32 nt, Homo Sapiens
agaacaagucagaucugaucccugcccucaug

SEQ ID NO: 158554 - RNA, 32 nt, Homo Sapiens
ggcucaugagugaugggagagaucugggcagg

SEQ ID NO: 158555 - RNA, 32 nt, Homo Sapiens
cuggggcacugaccuuugccagcuaccugggg

SEQ ID NO: 158556 - RNA, 30 nt, Homo Sapiens
acuuucuggggcgaggugacauggcgagag

SEQ ID NO: 158557 - RNA, 32 nt, Homo Sapiens
aaccauuugcaccucuaaguguugugaaacug

SEQ ID NO: 158558 - RNA, 32 nt, Homo Sapiens
ccggacucgcgaucuuccuuccggagccaugu

SEQ ID NO: 158559 - RNA, 32 nt, Homo Sapiens
uggcugcccaggcggagcugccucuucucccg

SEQ ID NO: 158560 - RNA, 32 nt, Homo Sapiens
uaaaagauaaagacauaaaugggacaauuguu

SEQ ID NO: 158561 - RNA, 32 nt, Homo Sapiens
ggcaaaggggagaccagagggucuguguucuc

SEQ ID NO: 158562 - RNA, 32 nt, Homo Sapiens
ggugccguuauuuuccuccccucuugcucaga

SEQ ID NO: 158563 - RNA, 32 nt, Homo Sapiens
uccaacuauggagacccaaaugucucagaaug

SEQ ID NO: 158564 - RNA, 32 nt, Homo Sapiens
ccaaggggauacuguaaucagguuauguacac

SEQ ID NO: 158565 - RNA, 32 nt, Homo Sapiens
uucaaaguguaaacuguacaguaaucagccuu

SEQ ID NO: 158566 - RNA, 32 nt, Homo Sapiens
gacgggaagacuagcucuguugcuacuaagca

SEQ ID NO: 158567 - RNA, 32 nt, Homo Sapiens
aggaaacagcuuugaaguguggagcgggaaag

SEQ ID NO: 158568 - RNA, 32 nt, Homo Sapiens
agcaggguggacuucauguuuccaaugagccc

SEQ ID NO: 158569 - RNA, 32 nt, Homo Sapiens
cauaagcagaagaucaaaaugcuaaaacauga

SEQ ID NO: 158570 - RNA, 32 nt, Homo Sapiens
gcaggagaagauggcugcuuucacuucccccc

SEQ ID NO: 158571 - RNA, 32 nt, Homo Sapiens
uggacuuuuuugcugaugguaaucaacuuuuu

SEQ ID NO: 158572 - RNA, 32 nt, Homo Sapiens
cgccccccgguuccggccgcggaccccacucu

SEQ ID NO: 158573 - RNA, 32 nt, Homo Sapiens
gagagcugggcauggcgguucaugccuguaau

SEQ ID NO: 158574 - RNA, 32 nt, Homo Sapiens
uggcacaugagcaucacccgcugaugguggcc

SEQ ID NO: 158575 - RNA, 32 nt, Homo Sapiens
uuucuugaaaauauuaauaagaaagucugcua

SEQ ID NO: 158576 - RNA, 32 nt, Homo Sapiens
uuccgaggcuacauccaggcucauggaaggag

SEQ ID NO: 158577 - RNA, 32 nt, Homo Sapiens
ccuagaggccaagccuauguguccuugugucc

SEQ ID NO: 158578 - RNA, 32 nt, Homo Sapiens
ccaacuccaguaagcccuccucagccucaccu

SEQ ID NO: 158579 - RNA, 28 nt, Homo Sapiens
uucaggaggcggccgucagggucgggga

SEQ ID NO: 158580 - RNA, 32 nt, Homo Sapiens
gccagaaauaccauguaaaaauuggcaguuca

SEQ ID NO: 158581 - RNA, 32 nt, Homo Sapiens
augucuggcuucugccugugcuccuccugcca

SEQ ID NO: 158582 - RNA, 32 nt, Homo Sapiens
acagcacugcauuagaauauuuucauacugcu

SEQ ID NO: 158583 - RNA, 32 nt, Homo Sapiens
gcugaauguaaagauugaaccucaagucacug

SEQ ID NO: 158584 - RNA, 32 nt, Homo Sapiens
gggucuccuuucuccuuauuuauucuuguggc

SEQ ID NO: 158585 - RNA, 32 nt, Homo Sapiens
aaugucaaaauuuuuuauuaccauaguccaug

SEQ ID NO: 158586 - RNA, 32 nt, Homo Sapiens
gcuugcaccgacacguuugugguggagcuucu

SEQ ID NO: 158587 - RNA, 32 nt, Homo Sapiens
uuuuucaaaacucuugguccuuuuacuucuuu

SEQ ID NO: 158588 - RNA, 32 nt, Homo Sapiens
cacacggcacuuucuugggucacauucgguug

SEQ ID NO: 158589 - RNA, 32 nt, Homo Sapiens
ucucgcaucuucugcuccuaccuucuccucug

SEQ ID NO: 158590 - RNA, 31 nt, Homo Sapiens
ugaaaucauauuuaaucuccaaauaaaggaa

SEQ ID NO: 158591 - RNA, 32 nt, Homo Sapiens
uuugcugcgccgcgacagcgccggaacacgcc

SEQ ID NO: 158592 - RNA, 32 nt, Homo Sapiens
ggggugagcgggaguucccuccccuccacauc

SEQ ID NO: 158593 - RNA, 30 nt, Homo Sapiens
accaccuccucuuggaccuaugcuuggcca

SEQ ID NO: 158594 - RNA, 32 nt, Homo Sapiens
uucuauauguucagcacacucaucucuuucua

SEQ ID NO: 158595 - RNA, 32 nt, Homo Sapiens
uggcccugcaccuuaugggaagccauuaaggg

SEQ ID NO: 158596 - RNA, 32 nt, Homo Sapiens
gcgagccuccagcccucuccuacuuugaucac

SEQ ID NO: 158597 - RNA, 32 nt, Homo Sapiens
gcguauuaaaacauaaacauggcucuuccccc

SEQ ID NO: 158598 - RNA, 32 nt, Homo Sapiens
caaggagagaaaacuaaguacuuuuauauaau

SEQ ID NO: 158599 - RNA, 32 nt, Homo Sapiens
aaccccacuguacagcagaucgugcagcuguc

SEQ ID NO: 158600 - RNA, 32 nt, Homo Sapiens
ucgcaggcaccucgagaagcaggccccgaccg

SEQ ID NO: 158601 - RNA, 32 nt, Homo Sapiens
uauaaaagugacuucaugcuuacuuguggauc

SEQ ID NO: 158602 - RNA, 32 nt, Homo Sapiens
ccccaccucccauuucuguugcuggaggggcu

SEQ ID NO: 158603 - RNA, 32 nt, Homo Sapiens
uaggaagcccucgcuucucucaacaguucagc

SEQ ID NO: 158604 - RNA, 32 nt, Homo Sapiens
uaaguugcugcuucuuuuuguuuuuguuuuga

SEQ ID NO: 158605 - RNA, 32 nt, Homo Sapiens
uuccuuauuucuggauucuuucaaggguaaaa

SEQ ID NO: 158606 - RNA, 32 nt, Homo Sapiens
caggaucaagcaugcaaaggcaagucuccaca

SEQ ID NO: 158607 - RNA, 32 nt, Homo Sapiens
ggcucgggcaggcucugccacucagaucacca

SEQ ID NO: 158608 - RNA, 32 nt, Homo Sapiens
gggggugccugagcacacauaccgcucccgaa

SEQ ID NO: 158609 - RNA, 32 nt, Homo Sapiens
auaugcaagacucaguagccaagccuccacug

SEQ ID NO: 158610 - RNA, 32 nt, Homo Sapiens
aggucaucuaaaacuugaaguuucacaaagug

SEQ ID NO: 158611 - RNA, 32 nt, Homo Sapiens
uauuguauauaaauaaugaaaugcauuaagaa

SEQ ID NO: 158612 - RNA, 32 nt, Homo Sapiens
guuaauaauggcaacacggcuccagaagacuc

SEQ ID NO: 158613 - RNA, 32 nt, Homo Sapiens
uaagaaauucuguuuucuuaguucucugguua

SEQ ID NO: 158614 - RNA, 32 nt, Homo Sapiens
gcagcagcgggaagcucgguggcaagcccuug

SEQ ID NO: 158615 - RNA, 32 nt, Homo Sapiens
auacccuaagcagauagcaaagaagauaaugg

SEQ ID NO: 158616 - RNA, 32 nt, Homo Sapiens
agucuuguuuuuuauucagauugggaaauccg

SEQ ID NO: 158617 - RNA, 32 nt, Homo Sapiens
gcagggaggggggagggcaggggauuaccuaa

SEQ ID NO: 158618 - RNA, 32 nt, Homo Sapiens
acucuaauaaauguauuuuugagaauuuggug

SEQ ID NO: 158619 - RNA, 32 nt, Homo Sapiens
gaaccucaaaauuuaaacugauguggauggga

SEQ ID NO: 158620 - RNA, 32 nt, Homo Sapiens
auggacccuuuuuguuaugaugguuuuaaacu

SEQ ID NO: 158621 - RNA, 32 nt, Homo Sapiens
acccuaaagaaauaaacuuccaguggauaaaa

SEQ ID NO: 158622 - RNA, 32 nt, Homo Sapiens
uuuuguaaacucucuggauaucaucgagcuga

SEQ ID NO: 158623 - RNA, 32 nt, Homo Sapiens
cagauguguacagauaguucauauuuauguau

SEQ ID NO: 158624 - RNA, 32 nt, Homo Sapiens
uucuguuuuuuaaaugcugcuuucucugggag

SEQ ID NO: 158625 - RNA, 32 nt, Homo Sapiens
uauauuuuucccuuguugagaucuucuuuugu

SEQ ID NO: 158626 - RNA, 32 nt, Homo Sapiens
guauguacaaccuggaagagguguggggccac

SEQ ID NO: 158627 - RNA, 32 nt, Homo Sapiens
ggcauuguggccagcucugccucucuaaaacu

SEQ ID NO: 158628 - RNA, 32 nt, Homo Sapiens
uuaaggaagauaagcugaaacaacacaaacug

SEQ ID NO: 158629 - RNA, 32 nt, Homo Sapiens
uguuaagcacauugcagauuguucuuggagaa

SEQ ID NO: 158630 - RNA, 32 nt, Homo Sapiens
auguuuucuguaaggaauaauaaaauaauugu

SEQ ID NO: 158631 - RNA, 31 nt, Homo Sapiens
gaacucaugacucagguugaccaagaggaua

SEQ ID NO: 158632 - RNA, 32 nt, Homo Sapiens
gccacugugcccggagggaggcggcgguggcc

SEQ ID NO: 158633 - RNA, 32 nt, Homo Sapiens
aacuagggcaagucuuaaauguguacauguag

SEQ ID NO: 158634 - RNA, 32 nt, Homo Sapiens
ccacuugucccccuccucccccuaguuaccuc

SEQ ID NO: 158635 - RNA, 32 nt, Homo Sapiens
agaguuaacagcagccagauuuuaaggauuuu

SEQ ID NO: 158636 - RNA, 32 nt, Homo Sapiens
aaggucacagaaacaaaacccacaggggcuga

SEQ ID NO: 158637 - RNA, 31 nt, Homo Sapiens
cccagccucaaugguucccgcccuggaccuc

SEQ ID NO: 158638 - RNA, 32 nt, Homo Sapiens
gucugaccacauucuuuuuguauccaaauagu

SEQ ID NO: 158639 - RNA, 32 nt, Homo Sapiens
agcuuguguuccaggaugagacaucuggaggu

SEQ ID NO: 158640 - RNA, 32 nt, Homo Sapiens
cugcugcugcugccaccgcugauuccaucccu

SEQ ID NO: 158641 - RNA, 32 nt, Homo Sapiens
uuauaaaaggacacagaagagacaagcucagu

SEQ ID NO: 158642 - RNA, 32 nt, Homo Sapiens
aucaguguuaggaugccucagccugaacucuu

SEQ ID NO: 158643 - RNA, 32 nt, Homo Sapiens
agauuuaagccugccauuuuaccagcauuauu

SEQ ID NO: 158644 - RNA, 32 nt, Homo Sapiens
caagcaucagcaccagcaccaaugcaagugcc

SEQ ID NO: 158645 - RNA, 32 nt, Homo Sapiens
guucaugcugguuuccuuccugccuuuaguag

SEQ ID NO: 158646 - RNA, 32 nt, Homo Sapiens
caugcaaguggaagagagaauaguugaaaaug

SEQ ID NO: 158647 - RNA, 32 nt, Homo Sapiens
ugcaggcgagcugccgggcgcuuuucucuccu

SEQ ID NO: 158648 - RNA, 32 nt, Homo Sapiens
uacugguugcugucgauuguuggaagacaaag

SEQ ID NO: 158649 - RNA, 32 nt, Homo Sapiens
auucucugcauagcccucuggggauccugcca

SEQ ID NO: 158650 - RNA, 32 nt, Homo Sapiens
guuuucaugugucugacucccuugcuuggcuu

SEQ ID NO: 158651 - RNA, 32 nt, Homo Sapiens
cauggcuccaggcucccuccccugccuagggg

SEQ ID NO: 158652 - RNA, 32 nt, Homo Sapiens
acagcaguggugccgccgggugaaugaauugg

SEQ ID NO: 158653 - RNA, 30 nt, Homo Sapiens
uuguauguuuggauugcagaagaauuugua

SEQ ID NO: 158654 - RNA, 32 nt, Homo Sapiens
cccuuuucuuauaaagucaguuagaaggacuu

SEQ ID NO: 158655 - RNA, 32 nt, Homo Sapiens
ugacauaaccucagcccugcacacagguuagg

SEQ ID NO: 158656 - RNA, 32 nt, Homo Sapiens
aaugcaaaaacaguaauccuugugaaauuacg

SEQ ID NO: 158657 - RNA, 32 nt, Homo Sapiens
aacccagccgcagguguagaaacugaggcaca

SEQ ID NO: 158658 - RNA, 32 nt, Homo Sapiens
uacugagcuucucugugaacgauuuagaaaga

SEQ ID NO: 158659 - RNA, 32 nt, Homo Sapiens
uaaacauucaaaagcaauuaaugaucagacau

SEQ ID NO: 158660 - RNA, 32 nt, Homo Sapiens
uuggauuucaggaaggagacuccaucacagcc

SEQ ID NO: 158661 - RNA, 30 nt, Homo Sapiens
gcgccaugcaaucccggcuucuacuccucg

SEQ ID NO: 158662 - RNA, 32 nt, Homo Sapiens
auauauuuaaaauuauuucauaauaaaguuaa

SEQ ID NO: 158663 - RNA, 32 nt, Homo Sapiens
aggggggaggggcugcugcggcagcugcaggg

SEQ ID NO: 158664 - RNA, 32 nt, Homo Sapiens
uggaacauuugaacaugaaugcuguuuguggu

SEQ ID NO: 158665 - RNA, 32 nt, Homo Sapiens
gcaacaaaaugguuuacuuaacaguugguugg

SEQ ID NO: 158666 - RNA, 32 nt, Homo Sapiens
aaggccuccuucccugccgccugcuucagcug

SEQ ID NO: 158667 - RNA, 32 nt, Homo Sapiens
uuaguuuucuaucuuuuauuuauuuuucuuuc

SEQ ID NO: 158668 - RNA, 32 nt, Homo Sapiens
aaaaaaugauagcagaagaucauuaaaaacuu

SEQ ID NO: 158669 - RNA, 32 nt, Homo Sapiens
uggcuggcggccucguuccaguggcggcacgu

SEQ ID NO: 158670 - RNA, 32 nt, Homo Sapiens
cugugugugaauguacguguaucagucugugu

SEQ ID NO: 158671 - RNA, 32 nt, Homo Sapiens
auuuauuaacaauucuuaaaaguuuuaccuga

SEQ ID NO: 158672 - RNA, 32 nt, Homo Sapiens
ccugaagccauacccucccccaucugggggcc

SEQ ID NO: 158673 - RNA, 32 nt, Homo Sapiens
guaguuaaauuaauacuagauagaauuagaaa

SEQ ID NO: 158674 - RNA, 32 nt, Homo Sapiens
cggccgugccuccgcguccgccccgcgccuca

SEQ ID NO: 158675 - RNA, 29 nt, Homo Sapiens
agaccagccuggcaacauggcaagacccu

SEQ ID NO: 158676 - RNA, 32 nt, Homo Sapiens
gugugaggaccagugucuucugucucagggcu

SEQ ID NO: 158677 - RNA, 31 nt, Homo Sapiens
acacccucacggaggaggagcugcugcugga

SEQ ID NO: 158678 - RNA, 32 nt, Homo Sapiens
uguugagggaaugaauaaguauuuccgucaag

SEQ ID NO: 158679 - RNA, 32 nt, Homo Sapiens
uaacucuuuguugaacuagaguauuuuugcaa

SEQ ID NO: 158680 - RNA, 32 nt, Homo Sapiens
uugaggucaggaguuugagaccagccuggccg

SEQ ID NO: 158681 - RNA, 32 nt, Homo Sapiens
uagaaggaaaagaucccugggguuuguuaaug

SEQ ID NO: 158682 - RNA, 32 nt, Homo Sapiens
uugaggucaggaguuugagaccaaccuggcca

SEQ ID NO: 158683 - RNA, 32 nt, Homo Sapiens
cauccuuuuucuuuuucccugguaaggacauc

SEQ ID NO: 158684 - RNA, 32 nt, Homo Sapiens
ggaucccugaagugacucagccaggcagacau

SEQ ID NO: 158685 - RNA, 32 nt, Homo Sapiens
aacgaaaggaaguggaagaaacgcggaaccau

SEQ ID NO: 158686 - RNA, 32 nt, Homo Sapiens
ggucugagccuugccuggggccccgcacugca

SEQ ID NO: 158687 - RNA, 32 nt, Homo Sapiens
aucaaauuuuaaaauaauaauaauuuggcccc

SEQ ID NO: 158688 - RNA, 32 nt, Homo Sapiens
aucgcgaauguugccaaguuuaaaagagcacg

SEQ ID NO: 158689 - RNA, 31 nt, Homo Sapiens
uaaaaaacuaagcagauaugaguuaaauuua

SEQ ID NO: 158690 - RNA, 32 nt, Homo Sapiens
ggguggaacuuucuuuuuuauuuuauagggau

SEQ ID NO: 158691 - RNA, 32 nt, Homo Sapiens
aacuguguucuuccucuucugaagacaucagu

SEQ ID NO: 158692 - RNA, 32 nt, Homo Sapiens
agccuuuuuaaaauucuuucugauuuuaaaua

SEQ ID NO: 158693 - RNA, 32 nt, Homo Sapiens
aggccugggcuggccuggcaguugaacagagg

SEQ ID NO: 158694 - RNA, 32 nt, Homo Sapiens
agauuuauuucugaauuauuuuauauacauga

SEQ ID NO: 158695 - RNA, 32 nt, Homo Sapiens
accagccugggcaacauagugagacuccuguc

SEQ ID NO: 158696 - RNA, 32 nt, Homo Sapiens
aguuucugcucgggaucuggcucucuuccccu

SEQ ID NO: 158697 - RNA, 32 nt, Homo Sapiens
uuugguguugaguuauuuuacuuuucuaaccc

SEQ ID NO: 158698 - RNA, 32 nt, Homo Sapiens
aaacuggggaucugaugucaguagcaaauggg

SEQ ID NO: 158699 - RNA, 32 nt, Homo Sapiens
ucuggucaaugagaggcucuaguuuuggggaa

SEQ ID NO: 158700 - RNA, 32 nt, Homo Sapiens
aaugauugaugacaccaguuuuggcuuaugaa

SEQ ID NO: 158701 - RNA, 32 nt, Homo Sapiens
ccgaagcugggguggggguguccgucaguuau

SEQ ID NO: 158702 - RNA, 31 nt, Homo Sapiens
agggauagcugagguagagugcuguugaaaa

SEQ ID NO: 158703 - RNA, 32 nt, Homo Sapiens
gcggagccaagcccuagagaagcugggccgcc

SEQ ID NO: 158704 - RNA, 32 nt, Homo Sapiens
uuagaaguaauuuuaauguaucuaagaaguga

SEQ ID NO: 158705 - RNA, 32 nt, Homo Sapiens
agucacauuuuucuacuauuugaccaaaagga

SEQ ID NO: 158706 - RNA, 32 nt, Homo Sapiens
gggcaccgggcgagcaggccgcgucgcgcuca

SEQ ID NO: 158707 - RNA, 32 nt, Homo Sapiens
gugcccagucccagcccauccuggagcugucg

SEQ ID NO: 158708 - RNA, 32 nt, Homo Sapiens
ccauugcacuccagccuugggcgacaaaaacg

SEQ ID NO: 158709 - RNA, 32 nt, Homo Sapiens
caagagaauuuggggcuuccaaguuguucggg

SEQ ID NO: 158710 - RNA, 32 nt, Homo Sapiens
cauguaagugcccacuuccucauguuuucaca

SEQ ID NO: 158711 - RNA, 32 nt, Homo Sapiens
cuuucugcccauggacgccgccgaagaagcau

SEQ ID NO: 158712 - RNA, 32 nt, Homo Sapiens
ccucccugcccccguggcccuccaucaccuuc

SEQ ID NO: 158713 - RNA, 32 nt, Homo Sapiens
ggugagguuggcagagaauauacgauggggag

SEQ ID NO: 158714 - RNA, 32 nt, Homo Sapiens
gaaauucaaagaaugugguaaaacuuacaauc

SEQ ID NO: 158715 - RNA, 32 nt, Homo Sapiens
cccacucgcucccucacccccaugcugacagc

SEQ ID NO: 158716 - RNA, 32 nt, Homo Sapiens
ucacugcuucauugccuucucugauugccuuu

SEQ ID NO: 158717 - RNA, 32 nt, Homo Sapiens
cucauugccugccuuccauucauauuacacuu

SEQ ID NO: 158718 - RNA, 32 nt, Homo Sapiens
gcggcggcgggaugcuggcgcugcuggccgcc

SEQ ID NO: 158719 - RNA, 32 nt, Homo Sapiens
uauauuuuucuuuacuaaucauuguggauuuu

SEQ ID NO: 158720 - RNA, 32 nt, Homo Sapiens
ugguagcuauaagucaaucaaaguauaacaau

SEQ ID NO: 158721 - RNA, 32 nt, Homo Sapiens
cgcgugggccgcgccggacccuuccuuccuag

SEQ ID NO: 158722 - RNA, 32 nt, Homo Sapiens
cuguucucuaccaagcuauccuggcucuuugg

SEQ ID NO: 158723 - RNA, 32 nt, Homo Sapiens
agacacugcgccccgccugaccugggggagcc

SEQ ID NO: 158724 - RNA, 32 nt, Homo Sapiens
caauaaaagauaagugcagucacagagaacuc

SEQ ID NO: 158725 - RNA, 32 nt, Homo Sapiens
ccgugucuguguuuuugucucgcagaauuaga

SEQ ID NO: 158726 - RNA, 32 nt, Homo Sapiens
uagggauuggcuaggaguugcugggguccacu

SEQ ID NO: 158727 - RNA, 32 nt, Homo Sapiens
cgugacaaggcuuucgggcaugacucacaccu

SEQ ID NO: 158728 - RNA, 32 nt, Homo Sapiens
cccggccguggcgcucugugcgcuaggcagac

SEQ ID NO: 158729 - RNA, 32 nt, Homo Sapiens
uccggcgcgggcccuucggcgcccccgauguc

SEQ ID NO: 158730 - RNA, 32 nt, Homo Sapiens
gaugaaguugaagugauguuugaaagauuaau

SEQ ID NO: 158731 - RNA, 32 nt, Homo Sapiens
uuucagcaggcccggaaagguacgcaggugac

SEQ ID NO: 158732 - RNA, 32 nt, Homo Sapiens
agggacuggaagagaggacgcggucgaguagg

SEQ ID NO: 158733 - RNA, 32 nt, Homo Sapiens
uuuuaaugccagugcuuaauucgaaugagggg

SEQ ID NO: 158734 - RNA, 32 nt, Homo Sapiens
gauucagaaccaguugacuguccccuuaggug

SEQ ID NO: 158735 - RNA, 32 nt, Homo Sapiens
cuaaaggguaguuguuuuacaaugaagacuaa

SEQ ID NO: 158736 - RNA, 32 nt, Homo Sapiens
ugcaggaggaggagcugggcagggccugcacc

SEQ ID NO: 158737 - RNA, 32 nt, Homo Sapiens
ucugccucucgcuggaggccaggccgugcagc

SEQ ID NO: 158738 - RNA, 32 nt, Homo Sapiens
cagcagacacaguguucauaacaaagaaaggu

SEQ ID NO: 158739 - RNA, 32 nt, Homo Sapiens
acaccaguccacacuucuaugacuucugccau

SEQ ID NO: 158740 - RNA, 32 nt, Homo Sapiens
gcgguucugaccacagagcuccacagcaaguu

SEQ ID NO: 158741 - RNA, 32 nt, Homo Sapiens
ggcuucaccauguuggccaggcuggucucgaa

SEQ ID NO: 158742 - RNA, 32 nt, Homo Sapiens
gguuucaccauguuggccaggcugguuucgaa

SEQ ID NO: 158743 - RNA, 32 nt, Homo Sapiens
ucaccccuccaggaaugaucucuucuuuuggc

SEQ ID NO: 158744 - RNA, 32 nt, Homo Sapiens
gggcguuuguggauucugaaagagaaagccgu

SEQ ID NO: 158745 - RNA, 31 nt, Homo Sapiens
ucccugcauuaaauggucaauaaaccuccuu

SEQ ID NO: 158746 - RNA, 32 nt, Homo Sapiens
ccaagcugaggaugugagcagcugccuuggug

SEQ ID NO: 158747 - RNA, 32 nt, Homo Sapiens
agcuguacaaauauaagaauaaaauguugaaa

SEQ ID NO: 158748 - RNA, 32 nt, Homo Sapiens
agggaugcuggggcuccagggucuaaucccca

SEQ ID NO: 158749 - RNA, 32 nt, Homo Sapiens
uuauacuagugauaguuugaguuagguaagca

SEQ ID NO: 158750 - RNA, 32 nt, Homo Sapiens
aaccaagccacuuuuccucucuugagggaaga

SEQ ID NO: 158751 - RNA, 32 nt, Homo Sapiens
uggauuggucugaggggucugaacgucuccua

SEQ ID NO: 158752 - RNA, 32 nt, Homo Sapiens
cccagcuccccgcuccuguuagccccaugggg

SEQ ID NO: 158753 - RNA, 32 nt, Homo Sapiens
gcucuggguccgguugagacgcacucccaccc

SEQ ID NO: 158754 - RNA, 32 nt, Homo Sapiens
auggcgaaacccugugucuaauaaaaauacaa

SEQ ID NO: 158755 - RNA, 32 nt, Homo Sapiens
uugauaucuugauuaggcgccaggaguuggcg

SEQ ID NO: 158756 - RNA, 32 nt, Homo Sapiens
cucccaccccuccaagacccauucugcacagu

SEQ ID NO: 158757 - RNA, 32 nt, Homo Sapiens
cauaaauuaacuccaauggggauugugugucu

SEQ ID NO: 158758 - RNA, 32 nt, Homo Sapiens
ucuaaucucuaugauccucaguuucuugauug

SEQ ID NO: 158759 - RNA, 32 nt, Homo Sapiens
uauauguaccacauuuuucucaugcaaucugu

SEQ ID NO: 158760 - RNA, 32 nt, Homo Sapiens
aaaauguaaagguuuuugucuaugaauaugau

SEQ ID NO: 158761 - RNA, 32 nt, Homo Sapiens
auccagcuccccgggggcguuggggggcuccg

SEQ ID NO: 158762 - RNA, 32 nt, Homo Sapiens
agaccagccugggcaauauagcaagaccccuc

SEQ ID NO: 158763 - RNA, 32 nt, Homo Sapiens
uuuugcuuuaggaugguguuggaaguugcucg

SEQ ID NO: 158764 - RNA, 32 nt, Homo Sapiens
acuuuggaaugggagcguggaaccaccuguac

SEQ ID NO: 158765 - RNA, 32 nt, Homo Sapiens
cagcagcggcagccccggcagccucgggcgac

SEQ ID NO: 158766 - RNA, 32 nt, Homo Sapiens
uuguguucugucugaaaauuuguagauggguc

SEQ ID NO: 158767 - RNA, 32 nt, Homo Sapiens
guguauuuaauccuaaagguggcuguaaucau

SEQ ID NO: 158768 - RNA, 32 nt, Homo Sapiens
aagaguggggcaugggaagggcugguccaggg

SEQ ID NO: 158769 - RNA, 31 nt, Homo Sapiens
ccuccccaaagccaucccugaguuggcuuug

SEQ ID NO: 158770 - RNA, 32 nt, Homo Sapiens
ugacuagaaaaaucauuccuuuauaauuucuu

SEQ ID NO: 158771 - RNA, 32 nt, Homo Sapiens
ggaagcucauugaguugugugcggguggcugu

SEQ ID NO: 158772 - RNA, 32 nt, Homo Sapiens
cacaccccuuggccucagccugcccuguaccc

SEQ ID NO: 158773 - RNA, 32 nt, Homo Sapiens
cuucaaacaacaaccaggaggaaaguaacuaa

SEQ ID NO: 158774 - RNA, 32 nt, Homo Sapiens
ccccuauagaauguauuguuugaaaguguagu

SEQ ID NO: 158775 - RNA, 31 nt, Homo Sapiens
ugcaagauguccgugcgccgcggccggcggc

SEQ ID NO: 158776 - RNA, 32 nt, Homo Sapiens
cccuccuuccucuccuucuccaagugccuuca

SEQ ID NO: 158777 - RNA, 29 nt, Homo Sapiens
uauuuuggugguguuacuauaaaauugaa

SEQ ID NO: 158778 - RNA, 32 nt, Homo Sapiens
uggauuauuuuuauaugauuuguacaaauuuu

SEQ ID NO: 158779 - RNA, 32 nt, Homo Sapiens
ggcaggggucaggccagccuucugccaugaug

SEQ ID NO: 158780 - RNA, 32 nt, Homo Sapiens
gcuccuguucuggugauaccaaaccugcccac

SEQ ID NO: 158781 - RNA, 32 nt, Homo Sapiens
agagcaggggagagcuggaaggggcuagaaag

SEQ ID NO: 158782 - RNA, 32 nt, Homo Sapiens
gccacaguagcgccgggcuugcagcuuucacg

SEQ ID NO: 158783 - RNA, 32 nt, Homo Sapiens
ucugugacagagcugcagaccccugccuugag

SEQ ID NO: 158784 - RNA, 32 nt, Homo Sapiens
auggcaggggccggagugagggggcugcuggc

SEQ ID NO: 158785 - RNA, 32 nt, Homo Sapiens
gacuacuuugcaugugaauauuccagccaggc

SEQ ID NO: 158786 - RNA, 32 nt, Homo Sapiens
gucagaaugaguaagacagagaagaaaucauu

SEQ ID NO: 158787 - RNA, 32 nt, Homo Sapiens
uccugucaauuucacugcacacugacauggga

SEQ ID NO: 158788 - RNA, 32 nt, Homo Sapiens
guccaaguugucuggcggcuucagguggaccc

SEQ ID NO: 158789 - RNA, 32 nt, Homo Sapiens
uuccagguaauaaaaggaacuuguuuuguugg

SEQ ID NO: 158790 - RNA, 32 nt, Homo Sapiens
uuuugucucauuuuaacgacugcaucuucuug

SEQ ID NO: 158791 - RNA, 32 nt, Homo Sapiens
ucaggggaccuguauuuccaugucaaauguuu

SEQ ID NO: 158792 - RNA, 32 nt, Homo Sapiens
ccugcccggccccugagcugccuccuccagcc

SEQ ID NO: 158793 - RNA, 32 nt, Homo Sapiens
ggcgggcagaaccuagcccgccgaaagggcgg

SEQ ID NO: 158794 - RNA, 32 nt, Homo Sapiens
cuuucagggcuuuaaguuaguauuacucaaga

SEQ ID NO: 158795 - RNA, 32 nt, Homo Sapiens
cauuguguagcucagugaauggucaacucgcu

SEQ ID NO: 158796 - RNA, 32 nt, Homo Sapiens
uccauagaggagaggaaaagguauaggcuugc

SEQ ID NO: 158797 - RNA, 32 nt, Homo Sapiens
ucugaguguuccucucagcaccucugaguaag

SEQ ID NO: 158798 - RNA, 32 nt, Homo Sapiens
uuuauuuuuaacuugucccucaucucuguuuu

SEQ ID NO: 158799 - RNA, 31 nt, Homo Sapiens
gccagugccugcagccugcccugccucucuc

SEQ ID NO: 158800 - RNA, 32 nt, Homo Sapiens
ccgcccagccccagcacggcccggucccgcau

SEQ ID NO: 158801 - RNA, 32 nt, Homo Sapiens
uguuacagaaagggguggcucuggagacacca

SEQ ID NO: 158802 - RNA, 32 nt, Homo Sapiens
uggcuaacaccgugaaacuccgucucuacuaa

SEQ ID NO: 158803 - RNA, 32 nt, Homo Sapiens
uccaaaagaaaugcugucaucuggagauaccu

SEQ ID NO: 158804 - RNA, 32 nt, Homo Sapiens
auuauauauuuuccuuccuaguagaaguguua

SEQ ID NO: 158805 - RNA, 32 nt, Homo Sapiens
acuuacagucccccuucgcauuuaguugguac

SEQ ID NO: 158806 - RNA, 32 nt, Homo Sapiens
cacacgcccucucagccaggcuccucaaaaaa

SEQ ID NO: 158807 - RNA, 32 nt, Homo Sapiens
ugguuaggcagcugaggccucacuuuucugca

SEQ ID NO: 158808 - RNA, 32 nt, Homo Sapiens
aaggcggcgcagaggcagcugugugggcugca

SEQ ID NO: 158809 - RNA, 32 nt, Homo Sapiens
gguggguggcucucagaaaauacuugcugcug

SEQ ID NO: 158810 - RNA, 32 nt, Homo Sapiens
agauagagacacaggggagaaugccacaugaa

SEQ ID NO: 158811 - RNA, 32 nt, Homo Sapiens
ggaaacuggagaaaaacuuauguuuccaaaug

SEQ ID NO: 158812 - RNA, 32 nt, Homo Sapiens
acucuaugguauuuuucuuauucuuguuugau

SEQ ID NO: 158813 - RNA, 32 nt, Homo Sapiens
ccccacccauccccacagccccugcaauaccc

SEQ ID NO: 158814 - RNA, 27 nt, Homo Sapiens
aacuucuuccucuucagcccgcugagu

SEQ ID NO: 158815 - RNA, 31 nt, Homo Sapiens
agcugcugcgcuuggauaacaaguauucaac

SEQ ID NO: 158816 - RNA, 32 nt, Homo Sapiens
aacugggccuaaguucuguuuccuuuauggau

SEQ ID NO: 158817 - RNA, 32 nt, Homo Sapiens
cuggaaacaccuguaggcagaggcugccgaga

SEQ ID NO: 158818 - RNA, 32 nt, Homo Sapiens
gguggcaauguguacauccucacgggcaaggu

SEQ ID NO: 158819 - RNA, 32 nt, Homo Sapiens
agaauguaacaaaguauuuaaaugguugucac

SEQ ID NO: 158820 - RNA, 32 nt, Homo Sapiens
caaguugaaugucuugcugaaugugucuaggg

SEQ ID NO: 158821 - RNA, 30 nt, Homo Sapiens
ucucgucaggcuuucgcgccggcgcuccag

SEQ ID NO: 158822 - RNA, 32 nt, Homo Sapiens
ucaucaaccagcugccuuuguuucauuucacc

SEQ ID NO: 158823 - RNA, 32 nt, Homo Sapiens
gauugaagaaauuuauaccacauaucgcauau

SEQ ID NO: 158824 - RNA, 32 nt, Homo Sapiens
cucgcgacugacggagcugcgguggcgucucc

SEQ ID NO: 158825 - RNA, 32 nt, Homo Sapiens
cucuggucuccuugccucuccuuuuucucagu

SEQ ID NO: 158826 - RNA, 32 nt, Homo Sapiens
ggauuuacugaauaagguguugaccaaaucca

SEQ ID NO: 158827 - RNA, 32 nt, Homo Sapiens
cuguauaguuguagaauuuuuugagagaauga

SEQ ID NO: 158828 - RNA, 32 nt, Homo Sapiens
cccuggcaccagcccagggugacuuugauguc

SEQ ID NO: 158829 - RNA, 32 nt, Homo Sapiens
cacguggccccggcggccgccauggcggacag

SEQ ID NO: 158830 - RNA, 32 nt, Homo Sapiens
cccuccaccaaaccccacuuccccucauaagu

SEQ ID NO: 158831 - RNA, 32 nt, Homo Sapiens
aaucacccugagagggcgguggagguggugag

SEQ ID NO: 158832 - RNA, 32 nt, Homo Sapiens
uguggcuggacgcugucugagccccggcugug

SEQ ID NO: 158833 - RNA, 32 nt, Homo Sapiens
ggucaucccuccccgggccuggggcgcucugc

SEQ ID NO: 158834 - RNA, 32 nt, Homo Sapiens
uccgcccggcggcgcagcugcccagcgcaacc

SEQ ID NO: 158835 - RNA, 32 nt, Homo Sapiens
agggguugccucaggaguccuuggggagauga

SEQ ID NO: 158836 - RNA, 32 nt, Homo Sapiens
uaaauggcaguacuuuaggacacacacaaaca

SEQ ID NO: 158837 - RNA, 32 nt, Homo Sapiens
gggggcuguggcggccgcggcgggcgacaugg

SEQ ID NO: 158838 - RNA, 32 nt, Homo Sapiens
uccgcccgcgcgccucccgccuagccacacag

SEQ ID NO: 158839 - RNA, 32 nt, Homo Sapiens
cggcgcccauggcguucgcgcugcugcggccc

SEQ ID NO: 158840 - RNA, 32 nt, Homo Sapiens
augauaaguauguuuugauauuugacuuauuc

SEQ ID NO: 158841 - RNA, 32 nt, Homo Sapiens
cauugaaaagacagaaucauggccaagaauca

SEQ ID NO: 158842 - RNA, 25 nt, Homo Sapiens
auggggccgggcggccguguggcgc

SEQ ID NO: 158843 - RNA, 32 nt, Homo Sapiens
gguucuggggugcacagcgccagguuaacgcu

SEQ ID NO: 158844 - RNA, 32 nt, Homo Sapiens
gcaguaucccugagacagccacuuccgguggu

SEQ ID NO: 158845 - RNA, 32 nt, Homo Sapiens
aauauuuuuacaaaaacggaaaucuguaaggg

SEQ ID NO: 158846 - RNA, 32 nt, Homo Sapiens
auaguguuugcaacaaauucgacccaggugau

SEQ ID NO: 158847 - RNA, 32 nt, Homo Sapiens
acccuuucccccaaauacacugcguccugguu

SEQ ID NO: 158848 - RNA, 32 nt, Homo Sapiens
ugcuuuuuuccuuuuucuuaccuaucaaauag

SEQ ID NO: 158849 - RNA, 32 nt, Homo Sapiens
aaggaccuucucacuauagugggauaucuagc

SEQ ID NO: 158850 - RNA, 32 nt, Homo Sapiens
ggaacgacucacuuaauaaccagggaaccagc

SEQ ID NO: 158851 - RNA, 32 nt, Homo Sapiens
gcagccuucuggaagcuccaggcggucuuucu

SEQ ID NO: 158852 - RNA, 32 nt, Homo Sapiens
ucacggaggaaauugucuucuccuuagcccgu

SEQ ID NO: 158853 - RNA, 32 nt, Homo Sapiens
acccauuauagcacaaaaucagccaaagcaga

SEQ ID NO: 158854 - RNA, 32 nt, Homo Sapiens
ccaagagugucuaugagaacuuccgacucugg

SEQ ID NO: 158855 - RNA, 32 nt, Homo Sapiens
uuaugaaacugggaaagucugaaggaauaugg

SEQ ID NO: 158856 - RNA, 32 nt, Homo Sapiens
agggggcccugcgucgggacuugcucucuggg

SEQ ID NO: 158857 - RNA, 32 nt, Homo Sapiens
uuuuauuccacauuuccauauuuacauauaaa

SEQ ID NO: 158858 - RNA, 32 nt, Homo Sapiens
uuuacaggaccacaguuguuucccuucuugau

SEQ ID NO: 158859 - RNA, 32 nt, Homo Sapiens
caugcggucagagugcagaaacccggucagcg

SEQ ID NO: 158860 - RNA, 32 nt, Homo Sapiens
ggcuuacuaauuuuugugauauuuucauguuc

SEQ ID NO: 158861 - RNA, 32 nt, Homo Sapiens
cugccucccccggccccagcccgugccucagc

SEQ ID NO: 158862 - RNA, 32 nt, Homo Sapiens
ggggauccggccaggccccucuguccagaagg

SEQ ID NO: 158863 - RNA, 32 nt, Homo Sapiens
aaaaucguugcaaauugaauaauuacagaaaa

SEQ ID NO: 158864 - RNA, 32 nt, Homo Sapiens
aggaguucgggaccagccugggaaauauagug

SEQ ID NO: 158865 - RNA, 32 nt, Homo Sapiens
gagcgccacugcggaucucaccaccacacaag

SEQ ID NO: 158866 - RNA, 32 nt, Homo Sapiens
cagccgcuggggucgggggcccgggccuuacu

SEQ ID NO: 158867 - RNA, 32 nt, Homo Sapiens
gauuuuuccucuucuguuccagcccucucuug

SEQ ID NO: 158868 - RNA, 32 nt, Homo Sapiens
uauagcuuaucagauagcauaguuggaucagu

SEQ ID NO: 158869 - RNA, 32 nt, Homo Sapiens
gaguugaagaucuuugacauagguucuucuau

SEQ ID NO: 158870 - RNA, 32 nt, Homo Sapiens
uggaaagaaauucugugugcucccaggauucc

SEQ ID NO: 158871 - RNA, 32 nt, Homo Sapiens
aauggaaguccuccgcugauuccuagaaggcu

SEQ ID NO: 158872 - RNA, 32 nt, Homo Sapiens
ccuggcugcugcccucccauucucccccucca

SEQ ID NO: 158873 - RNA, 32 nt, Homo Sapiens
aguccgacuagccccaggcccgcccuccuggc

SEQ ID NO: 158874 - RNA, 32 nt, Homo Sapiens
uuccaugacaccuaguugggauguggaugugc

SEQ ID NO: 158875 - RNA, 32 nt, Homo Sapiens
agucaccccgucugcgccgcugugcuguuguc

SEQ ID NO: 158876 - RNA, 32 nt, Homo Sapiens
gaucaucugaccaacucuuaaaaaucacggcc

SEQ ID NO: 158877 - RNA, 32 nt, Homo Sapiens
gccagaagcugauguugaguccguuuugggug

SEQ ID NO: 158878 - RNA, 32 nt, Homo Sapiens
gagagucauucauuuagcacaagcagcuggag

SEQ ID NO: 158879 - RNA, 32 nt, Homo Sapiens
cuuggucacuacaguggucgcacauguuccuc

SEQ ID NO: 158880 - RNA, 32 nt, Homo Sapiens
acccuggagcagcuacugcagcccaucaugcu

SEQ ID NO: 158881 - RNA, 32 nt, Homo Sapiens
gggacagggguggggugagcucugccccauca

SEQ ID NO: 158882 - RNA, 32 nt, Homo Sapiens
uuagaacacuagaggagaggggucgccgcgaa

SEQ ID NO: 158883 - RNA, 32 nt, Homo Sapiens
gccgaguuccgucucucgcgucuuuuccuggu

SEQ ID NO: 158884 - RNA, 28 nt, Homo Sapiens
ucugugugguggccuacugcaagaccaa

SEQ ID NO: 158885 - RNA, 32 nt, Homo Sapiens
gauucauauucuccuagggcucaaacuacucu

SEQ ID NO: 158886 - RNA, 32 nt, Homo Sapiens
uugaacauucagaacaaggauauuauuuucag

SEQ ID NO: 158887 - RNA, 32 nt, Homo Sapiens
gcugggauuuaaagccuuuagagccagcccau

SEQ ID NO: 158888 - RNA, 32 nt, Homo Sapiens
guuacugcugucuagacgccuuccauucauug

SEQ ID NO: 158889 - RNA, 32 nt, Homo Sapiens
uggaggccaccgggacagaccuggacacuagg

SEQ ID NO: 158890 - RNA, 32 nt, Homo Sapiens
cguggcaugcggggcgcgcacccacguccccg

SEQ ID NO: 158891 - RNA, 32 nt, Homo Sapiens
cugggcccgccggcugccacucaggugaggug

SEQ ID NO: 158892 - RNA, 32 nt, Homo Sapiens
accugucgcccuauccuccccuccacuccagc

SEQ ID NO: 158893 - RNA, 32 nt, Homo Sapiens
gaguguuuacuuuuaguucaguugauauguau

SEQ ID NO: 158894 - RNA, 32 nt, Homo Sapiens
uuguacauucagcaauagcauuugagcaaguu

SEQ ID NO: 158895 - RNA, 32 nt, Homo Sapiens
aaagggaggaagacugguagcggggagggggc

SEQ ID NO: 158896 - RNA, 32 nt, Homo Sapiens
gcagguuccuucccccagggccccggcagggc

SEQ ID NO: 158897 - RNA, 32 nt, Homo Sapiens
uuagcaccagccagcucucuguacauuugcua

SEQ ID NO: 158898 - RNA, 32 nt, Homo Sapiens
ucccaugaagucucaccuuguugacuuccacc

SEQ ID NO: 158899 - RNA, 32 nt, Homo Sapiens
aaccaaaagcaguaauaaaauaaguaagaugu

SEQ ID NO: 158900 - RNA, 32 nt, Homo Sapiens
gcauggcgcgcgcguccaccucgccguucccc

SEQ ID NO: 158901 - RNA, 32 nt, Homo Sapiens
uggggcuucagcugcuggcccaaggccaggag

SEQ ID NO: 158902 - RNA, 32 nt, Homo Sapiens
acacacacaacacauacacacacacacacaca

SEQ ID NO: 158903 - RNA, 32 nt, Homo Sapiens
auguaaucuucaaguagucacuuuuuguuaag

SEQ ID NO: 158904 - RNA, 32 nt, Homo Sapiens
cuggaagaggccgcccugcagagcgaggcgac

SEQ ID NO: 158905 - RNA, 32 nt, Homo Sapiens
uagaaaaaaugaaguuugguuggugaugcaug

SEQ ID NO: 158906 - RNA, 32 nt, Homo Sapiens
aggaugaugcucaguuugguucuuuacaacau

SEQ ID NO: 158907 - RNA, 32 nt, Homo Sapiens
ccugcagaugcuccugaauccagagugcgacc

SEQ ID NO: 158908 - RNA, 32 nt, Homo Sapiens
aagacuguggaggggaacaaugugauucacca

SEQ ID NO: 158909 - RNA, 32 nt, Homo Sapiens
agcgcuggccgcgugccgccuccggagccggc

SEQ ID NO: 158910 - RNA, 32 nt, Homo Sapiens
ugggcuggcugaggcaggacucugccaaaagu

SEQ ID NO: 158911 - RNA, 32 nt, Homo Sapiens
gucuuccccccucuccucccagcugcuuuacu

SEQ ID NO: 158912 - RNA, 32 nt, Homo Sapiens
cccuagauaaaacguuucaauggcuucccaug

SEQ ID NO: 158913 - RNA, 32 nt, Homo Sapiens
aauucugcaugguccagcgcuccagcuagcug

SEQ ID NO: 158914 - RNA, 32 nt, Homo Sapiens
uugagguuaaaauauucagaaacuacuuuuau

SEQ ID NO: 158915 - RNA, 32 nt, Homo Sapiens
gcgggcgcccuucuaccggccucuggcuccgg

SEQ ID NO: 158916 - RNA, 32 nt, Homo Sapiens
aaucaaaacuaaaagaaaccucugggagacug

SEQ ID NO: 158917 - RNA, 32 nt, Homo Sapiens
aagccacacauccuccucccaucccuugcucc

SEQ ID NO: 158918 - RNA, 32 nt, Homo Sapiens
ccauugcaaccucacugggcuccccagacucu

SEQ ID NO: 158919 - RNA, 32 nt, Homo Sapiens
agaugcaggaccagugcgcucgccgcggacac

SEQ ID NO: 158920 - RNA, 32 nt, Homo Sapiens
ccaagaacccaccaauuccggacacauuuugg

SEQ ID NO: 158921 - RNA, 32 nt, Homo Sapiens
cuaagcaucagaauuuaugaacaaagaauaug

SEQ ID NO: 158922 - RNA, 32 nt, Homo Sapiens
ugugcuuugaggcagccaacauuucucugcuc

SEQ ID NO: 158923 - RNA, 32 nt, Homo Sapiens
aaaaaacacuuccaaaaagauacacagaagag

SEQ ID NO: 158924 - RNA, 32 nt, Homo Sapiens
accugccugcucuugugucaccauaaccacuc

SEQ ID NO: 158925 - RNA, 32 nt, Homo Sapiens
cgggugacagcacuaaccagaccuccagccac

SEQ ID NO: 158926 - RNA, 32 nt, Homo Sapiens
aauaagccacuaccgucaccaaccccaucucg

SEQ ID NO: 158927 - RNA, 32 nt, Homo Sapiens
caguagguaauggcuccggcccggguguucgc

SEQ ID NO: 158928 - RNA, 29 nt, Homo Sapiens
ugcaauugaagccuccauuuucuaugaag

SEQ ID NO: 158929 - RNA, 32 nt, Homo Sapiens
cucuguaccaugugaccucacaauccuggcca

SEQ ID NO: 158930 - RNA, 32 nt, Homo Sapiens
agcggucacagcacaauguccacauccaacga

SEQ ID NO: 158931 - RNA, 32 nt, Homo Sapiens
cuuuuacguuaaaauuacuuugaaagaugaaa

SEQ ID NO: 158932 - RNA, 32 nt, Homo Sapiens
ccaccccgcgcgcccgagcagggcgacuguca

SEQ ID NO: 158933 - RNA, 32 nt, Homo Sapiens
ugggcuacucuguuuaaaucugccacuuucug

SEQ ID NO: 158934 - RNA, 32 nt, Homo Sapiens
gucccaauuguuuuguaaccacuuuuuauuua

SEQ ID NO: 158935 - RNA, 32 nt, Homo Sapiens
gccagcgcccgggcgcgccgcgccauugccug

SEQ ID NO: 158936 - RNA, 32 nt, Homo Sapiens
ucugagcagggggacaggauugaugaggcuug

SEQ ID NO: 158937 - RNA, 31 nt, Homo Sapiens
cucaccacuuguuuugguccaagggcagaaa

SEQ ID NO: 158938 - RNA, 32 nt, Homo Sapiens
uuaaagcuuuaaaaguuuaacagucuaaaaca

SEQ ID NO: 158939 - RNA, 32 nt, Homo Sapiens
aauggagcaguuccuuauauaauaacaauugu

SEQ ID NO: 158940 - RNA, 32 nt, Homo Sapiens
uucccuagaucuuucuauuccaaagugccacu

SEQ ID NO: 158941 - RNA, 32 nt, Homo Sapiens
guccacacucccauauuuaacgcaaccccauu

SEQ ID NO: 158942 - RNA, 32 nt, Homo Sapiens
aacggcuuacaaaauauacagaucuugguaga

SEQ ID NO: 158943 - RNA, 29 nt, Homo Sapiens
aaaggaucuagacuucggacggcuacucg

SEQ ID NO: 158944 - RNA, 32 nt, Homo Sapiens
agaccuggagggcccaaggaagucagugacac

SEQ ID NO: 158945 - RNA, 32 nt, Homo Sapiens
gcgcgagugcgcgcgcacacaccccagugugu

SEQ ID NO: 158946 - RNA, 32 nt, Homo Sapiens
aaacugaccaacauggagaaaccccgucucua

SEQ ID NO: 158947 - RNA, 32 nt, Homo Sapiens
aaauuacaaagugauccaguucaaaguuugcu

SEQ ID NO: 158948 - RNA, 30 nt, Homo Sapiens
ccaccucuggacucccuccccuguauguaa

SEQ ID NO: 158949 - RNA, 32 nt, Homo Sapiens
gagacccgcucccggagacgccgccucgcgau

SEQ ID NO: 158950 - RNA, 32 nt, Homo Sapiens
gcccugagccccagcaugcccuuggcaccauc

SEQ ID NO: 158951 - RNA, 32 nt, Homo Sapiens
gcccuuuugugaaccuuguuuggggcacagua

SEQ ID NO: 158952 - RNA, 32 nt, Homo Sapiens
cucucaaaagcuagcagccugaugacaauagg

SEQ ID NO: 158953 - RNA, 32 nt, Homo Sapiens
uuuguggugugaugcacacuuuugcaagcgug

SEQ ID NO: 158954 - RNA, 32 nt, Homo Sapiens
ccucacaggaggaguuggcggggagccuuggg

SEQ ID NO: 158955 - RNA, 32 nt, Homo Sapiens
cuggguuccuucccuugcccaugaauuugcca

SEQ ID NO: 158956 - RNA, 32 nt, Homo Sapiens
guaggggagccauacucccacccccuugcgua

SEQ ID NO: 158957 - RNA, 32 nt, Homo Sapiens
auaaugaaaguugggaucacaaugaaaugaga

SEQ ID NO: 158958 - RNA, 32 nt, Homo Sapiens
aaaacccuucccgcccucgggaaaguagaugu

SEQ ID NO: 158959 - RNA, 32 nt, Homo Sapiens
ugccguucaugcuuccuccccagccuucugca

SEQ ID NO: 158960 - RNA, 32 nt, Homo Sapiens
uuugaagcauguuaauaaaugucacugauuaa

SEQ ID NO: 158961 - RNA, 32 nt, Homo Sapiens
gaauguaccguggggcgggggcggcggcccgg

SEQ ID NO: 158962 - RNA, 32 nt, Homo Sapiens
gggauggggagcagcugggcacugggccggca

SEQ ID NO: 158963 - RNA, 32 nt, Homo Sapiens
cucauuugcuaaaugcaaaaaauaaucaccuu

SEQ ID NO: 158964 - RNA, 32 nt, Homo Sapiens
cuguggggcggggagcccucccccgcugcagc

SEQ ID NO: 158965 - RNA, 32 nt, Homo Sapiens
gugcuccgagggugggccucccaugccccacc

SEQ ID NO: 158966 - RNA, 32 nt, Homo Sapiens
cccuagauagaguacaggggauccacaucccu

SEQ ID NO: 158967 - RNA, 32 nt, Homo Sapiens
cccaagugucauuggaauuuauauuuuaggaa

SEQ ID NO: 158968 - RNA, 32 nt, Homo Sapiens
caucuguuggggagacgagauuuuaagacacu

SEQ ID NO: 158969 - RNA, 30 nt, Homo Sapiens
gccaaagauccugugucgccggcggaaagc

SEQ ID NO: 158970 - RNA, 32 nt, Homo Sapiens
caguccccuuaacguggcuuuccaacuuccug

SEQ ID NO: 158971 - RNA, 32 nt, Homo Sapiens
ucuuguuccgggacugguuuggcugggacaaa

SEQ ID NO: 158972 - RNA, 32 nt, Homo Sapiens
gugguucugugcaugccugggugugguuaagg

SEQ ID NO: 158973 - RNA, 32 nt, Homo Sapiens
ccuuuccccccucacacaugcacuuuugggcc

SEQ ID NO: 158974 - RNA, 32 nt, Homo Sapiens
ggccaauguaggcccaaaacuuccucaaguca

SEQ ID NO: 158975 - RNA, 32 nt, Homo Sapiens
ucacauuuaacccugugguacuuuuaagaagc

SEQ ID NO: 158976 - RNA, 32 nt, Homo Sapiens
accaccccagguuuggauccugcacaagaaac

SEQ ID NO: 158977 - RNA, 32 nt, Homo Sapiens
cucgccacuuucuugcugcucccuuuaaaugg

SEQ ID NO: 158978 - RNA, 32 nt, Homo Sapiens
aauguucuggacaugcaccaccagccgguggu

SEQ ID NO: 158979 - RNA, 32 nt, Homo Sapiens
ccugccugagagaagucgucgcggccgacccc

SEQ ID NO: 158980 - RNA, 32 nt, Homo Sapiens
guuagagaacauugcaucucacuugaaacauc

SEQ ID NO: 158981 - RNA, 27 nt, Homo Sapiens
gugauuaaauuugaccugaaucaaaag

SEQ ID NO: 158982 - RNA, 32 nt, Homo Sapiens
gagcucugagaggcccuggaucagcguggccu

SEQ ID NO: 158983 - RNA, 32 nt, Homo Sapiens
uuuugagggaggcuccuucucucccuuugcug

SEQ ID NO: 158984 - RNA, 32 nt, Homo Sapiens
gcagaucauuuacauguccuuauuuuccaccu

SEQ ID NO: 158985 - RNA, 32 nt, Homo Sapiens
cacauuucuauaucaagcuucuuggcccgguu

SEQ ID NO: 158986 - RNA, 32 nt, Homo Sapiens
agaugaucugaagaugaugcuaauccccaaau

SEQ ID NO: 158987 - RNA, 32 nt, Homo Sapiens
guaugcuuuaguuuuucuuuaaauauuuuguu

SEQ ID NO: 158988 - RNA, 32 nt, Homo Sapiens
aucacuucauacaaggaaaacuucgacauuua

SEQ ID NO: 158989 - RNA, 32 nt, Homo Sapiens
ugcauguagauuuguuaaauguguguguauag

SEQ ID NO: 158990 - RNA, 32 nt, Homo Sapiens
aguggggguuggugcuggccccggggccguga

SEQ ID NO: 158991 - RNA, 32 nt, Homo Sapiens
gcacgguacccgugcugcagucgggcacgccg

SEQ ID NO: 158992 - RNA, 32 nt, Homo Sapiens
aggcuguggaccauggaguggcagcccagcca

SEQ ID NO: 158993 - RNA, 32 nt, Homo Sapiens
uauauauguguauaaauucuacaccuagauuc

SEQ ID NO: 158994 - RNA, 32 nt, Homo Sapiens
ccagccuccggcggggacccagggagugguuu

SEQ ID NO: 158995 - RNA, 32 nt, Homo Sapiens
ggauugagauguuuuucuaaaucuuagaacua

SEQ ID NO: 158996 - RNA, 32 nt, Homo Sapiens
uauguuugauaucaauuuuuugaaauguuuua

SEQ ID NO: 158997 - RNA, 32 nt, Homo Sapiens
aaaaagauuacaucagucaugauucaugaacc

SEQ ID NO: 158998 - RNA, 32 nt, Homo Sapiens
cuugcuguucuuucaggguuugcaauuauaga

SEQ ID NO: 158999 - RNA, 32 nt, Homo Sapiens
gcccccgcgagcgcagggaggggccggaaagu

SEQ ID NO: 159000 - RNA, 32 nt, Homo Sapiens
caguaagauaccuuuaauccacuguuaaguau

SEQ ID NO: 159001 - RNA, 32 nt, Homo Sapiens
uugaaucccucauugcuuucccauuucugccc

SEQ ID NO: 159002 - RNA, 32 nt, Homo Sapiens
cauauggugcuguucucuauguguuugcagua

SEQ ID NO: 159003 - RNA, 32 nt, Homo Sapiens
uuucccuuguagcuccuccccuggagggggaa

SEQ ID NO: 159004 - RNA, 32 nt, Homo Sapiens
cacauacccucuucuuuuuuucuagucaaacu

SEQ ID NO: 159005 - RNA, 29 nt, Homo Sapiens
cgacauguugcuuuucguggagguagcau

SEQ ID NO: 159006 - RNA, 32 nt, Homo Sapiens
aaguuugauaaaaguaccuuuucaugugguga

SEQ ID NO: 159007 - RNA, 32 nt, Homo Sapiens
gugcaauucuguaauuucccaaggcauaagua

SEQ ID NO: 159008 - RNA, 32 nt, Homo Sapiens
ccggccauuugcugcccuccccaccccugccc

SEQ ID NO: 159009 - RNA, 32 nt, Homo Sapiens
gccgucccgccagaacgaucgccgcggccgga

SEQ ID NO: 159010 - RNA, 32 nt, Homo Sapiens
cgcgcacgcauacacacacacacacacacacu

SEQ ID NO: 159011 - RNA, 32 nt, Homo Sapiens
aacaauuagggugacaugugugcauugaguaa

SEQ ID NO: 159012 - RNA, 32 nt, Homo Sapiens
aguucuucauucugacuguugaggggagguuu

SEQ ID NO: 159013 - RNA, 32 nt, Homo Sapiens
ggagggaguugcuggcuguuuccuccuuugac

SEQ ID NO: 159014 - RNA, 32 nt, Homo Sapiens
caggccccacccagcagacugaggggcagagg

SEQ ID NO: 159015 - RNA, 32 nt, Homo Sapiens
ggcgugacggagagcuggggcucugagagugg

SEQ ID NO: 159016 - RNA, 32 nt, Homo Sapiens
aucuuggcuagaaauguuuuugugauuuaugc

SEQ ID NO: 159017 - RNA, 32 nt, Homo Sapiens
augacagcuaaggggcaaaugauucaaguaua

SEQ ID NO: 159018 - RNA, 31 nt, Homo Sapiens
ucagggccuccuucccugccccggcgcgggg

SEQ ID NO: 159019 - RNA, 32 nt, Homo Sapiens
gucacggaggccggccaccugcagagccucua

SEQ ID NO: 159020 - RNA, 32 nt, Homo Sapiens
auucuuccauucaaaugaggugaggcuuggug

SEQ ID NO: 159021 - RNA, 32 nt, Homo Sapiens
uuacucugacucuggucugccgagauccauuu

SEQ ID NO: 159022 - RNA, 32 nt, Homo Sapiens
ugcuuuauucagucuaccaucgaugggcauuu

SEQ ID NO: 159023 - RNA, 32 nt, Homo Sapiens
ggguuggccccggcccaggcuucugucccaag

SEQ ID NO: 159024 - RNA, 32 nt, Homo Sapiens
uggcauugcacuuuuuaaccuugcugacaucc

SEQ ID NO: 159025 - RNA, 32 nt, Homo Sapiens
auuaguuuuucuuuuucuuuuuucuuuuucuu

SEQ ID NO: 159026 - RNA, 29 nt, Homo Sapiens
ugaguuuaggaucuguauuuucuaagucc

SEQ ID NO: 159027 - RNA, 32 nt, Homo Sapiens
agugaaaaugaugaagcugaaaaaaugacgga

SEQ ID NO: 159028 - RNA, 32 nt, Homo Sapiens
auggugagagggcuucuguuucuuggaauguu

SEQ ID NO: 159029 - RNA, 32 nt, Homo Sapiens
auucugccacugcaaagcugguguagccaugc

SEQ ID NO: 159030 - RNA, 32 nt, Homo Sapiens
ggugggcggggggaggaggcggcccuagcgcc

SEQ ID NO: 159031 - RNA, 32 nt, Homo Sapiens
cuuccaguucccucgugccccguggguuccgc

SEQ ID NO: 159032 - RNA, 32 nt, Homo Sapiens
cugggcccgcggcagggccuggccugccucuc

SEQ ID NO: 159033 - RNA, 32 nt, Homo Sapiens
cuggaggaaggggccaggccucacauucgugg

SEQ ID NO: 159034 - RNA, 32 nt, Homo Sapiens
ccccuggggucucaggugugugggcccugacc

SEQ ID NO: 159035 - RNA, 32 nt, Homo Sapiens
gagcaggagcagcaaaaaaucucugguucucc

SEQ ID NO: 159036 - RNA, 27 nt, Homo Sapiens
gucggauccuucuuauccuuccagccu

SEQ ID NO: 159037 - RNA, 32 nt, Homo Sapiens
cagcccaggcuuggaccugaagaagcuggcaa

SEQ ID NO: 159038 - RNA, 32 nt, Homo Sapiens
ccgauuucuccuccugccccagccuccugucu

SEQ ID NO: 159039 - RNA, 32 nt, Homo Sapiens
agguuuuuucuuuccaaguuuauuuucuugug

SEQ ID NO: 159040 - RNA, 32 nt, Homo Sapiens
cccgccgccagucccggcagcgcccucaguug

SEQ ID NO: 159041 - RNA, 32 nt, Homo Sapiens
agacacgagcccccucccccagcccgucaccc

SEQ ID NO: 159042 - RNA, 32 nt, Homo Sapiens
aucacuuguuuggagugugcuauucuaaaaga

SEQ ID NO: 159043 - RNA, 32 nt, Homo Sapiens
agcuccggggguacagcccuugcacuccuacu

SEQ ID NO: 159044 - RNA, 32 nt, Homo Sapiens
acaauuucugguguucaaccuuggucucaaau

SEQ ID NO: 159045 - RNA, 32 nt, Homo Sapiens
cacagccggcccccggcccacguuuucggugg

SEQ ID NO: 159046 - RNA, 32 nt, Homo Sapiens
agaggucgacagagguugaggcagggccagga

SEQ ID NO: 159047 - RNA, 32 nt, Homo Sapiens
agcaaaaaccaucuuuacaggcuccuagaagc

SEQ ID NO: 159048 - RNA, 32 nt, Homo Sapiens
gucuuuaaacauuggacgcuauuuacucagcu

SEQ ID NO: 159049 - RNA, 32 nt, Homo Sapiens
ugucugucugucugguuuuuuaucuucuccau

SEQ ID NO: 159050 - RNA, 32 nt, Homo Sapiens
ggcgaaucuuccgugaacuccauggccaugcg

SEQ ID NO: 159051 - RNA, 32 nt, Homo Sapiens
uccuggaagaaggaacucuacauacaaaggca

SEQ ID NO: 159052 - RNA, 32 nt, Homo Sapiens
ggcggcgggaggagggcggggaggagcgcucu

SEQ ID NO: 159053 - RNA, 32 nt, Homo Sapiens
auauacauuauaagaguacugugccggaucca

SEQ ID NO: 159054 - RNA, 32 nt, Homo Sapiens
ggaagaagugacuguaugccaguuccaagccu

SEQ ID NO: 159055 - RNA, 32 nt, Homo Sapiens
acaauuauauuguaaaauuauaacugggcaag

SEQ ID NO: 159056 - RNA, 32 nt, Homo Sapiens
ggagcaggaaauguacacacagauuccugucc

SEQ ID NO: 159057 - RNA, 32 nt, Homo Sapiens
uuuguugaugacaguugaaaucaauaaauucu

SEQ ID NO: 159058 - RNA, 32 nt, Homo Sapiens
cgcagucggcggugggggaugggcaggcagug

SEQ ID NO: 159059 - RNA, 32 nt, Homo Sapiens
aaaguggauaaaacuuucauuggacuggaaug

SEQ ID NO: 159060 - RNA, 32 nt, Homo Sapiens
aguuggacauuguagaagguauguaaaucauc

SEQ ID NO: 159061 - RNA, 32 nt, Homo Sapiens
ggcuagcaguucaugagaaguuugugcaccca

SEQ ID NO: 159062 - RNA, 31 nt, Homo Sapiens
gcggggcagcgcagccaggccggcuaugguc

SEQ ID NO: 159063 - RNA, 32 nt, Homo Sapiens
uuacaaacuaaaucagugugcugcuagagggu

SEQ ID NO: 159064 - RNA, 32 nt, Homo Sapiens
ggcucacuccaccuccaccucccagguucaag

SEQ ID NO: 159065 - RNA, 32 nt, Homo Sapiens
auaucaaggacaugaaggagaacuggugaccc

SEQ ID NO: 159066 - RNA, 32 nt, Homo Sapiens
aagcuauguaauuguucagcgucacuuuucua

SEQ ID NO: 159067 - RNA, 32 nt, Homo Sapiens
aggcuugaguaggcaguuuuccccucacagug

SEQ ID NO: 159068 - RNA, 32 nt, Homo Sapiens
ccagaaaagcuaccauuagugcguagaaggag

SEQ ID NO: 159069 - RNA, 32 nt, Homo Sapiens
aacccccguagccuagagcagugucacaagcu

SEQ ID NO: 159070 - RNA, 32 nt, Homo Sapiens
ccuagaaacccuggcuuuugggagugcuaugg

SEQ ID NO: 159071 - RNA, 32 nt, Homo Sapiens
aagacauaacaaguuuuuccaaauauuuuuua

SEQ ID NO: 159072 - RNA, 32 nt, Homo Sapiens
guucauggcccuuuccccuccuccccccucag

SEQ ID NO: 159073 - RNA, 32 nt, Homo Sapiens
uaaccugcagacuaaauuucuuucucaauuau

SEQ ID NO: 159074 - RNA, 32 nt, Homo Sapiens
aauuguuaaaaauuaagcuuuuagguauuaga

SEQ ID NO: 159075 - RNA, 32 nt, Homo Sapiens
uuuaaaagaagaaacacugccuugauuauacg

SEQ ID NO: 159076 - RNA, 32 nt, Homo Sapiens
gagcaaggcagacagugaccuccacccccgca

SEQ ID NO: 159077 - RNA, 32 nt, Homo Sapiens
acaaaaugaguuuggaucuccuucaaugcccc

SEQ ID NO: 159078 - RNA, 32 nt, Homo Sapiens
gagcgcgaguccaacggccgcggccgcaccaa

SEQ ID NO: 159079 - RNA, 32 nt, Homo Sapiens
auaaagugcauaugaaguguuugaucauaaga

SEQ ID NO: 159080 - RNA, 32 nt, Homo Sapiens
gcucugccaagagccugugggacuggaagucg

SEQ ID NO: 159081 - RNA, 32 nt, Homo Sapiens
auggaaguuguuucucucugguaaaacaaguc

SEQ ID NO: 159082 - RNA, 32 nt, Homo Sapiens
cagugggcucugccugugacuguaucucuaag

SEQ ID NO: 159083 - RNA, 32 nt, Homo Sapiens
aaaaaugcuuugcuuugucuggaagaaagaua

SEQ ID NO: 159084 - RNA, 32 nt, Homo Sapiens
uccccgagcucauaucuacagagcagcaaguc

SEQ ID NO: 159085 - RNA, 32 nt, Homo Sapiens
ggggagagggccccgcugggcuggcccugcag

SEQ ID NO: 159086 - RNA, 32 nt, Homo Sapiens
uuuauuacucagaaaacaaaagugguuuuuua

SEQ ID NO: 159087 - RNA, 32 nt, Homo Sapiens
ggcuggcagggcugcauguuuccauccuguuu

SEQ ID NO: 159088 - RNA, 32 nt, Homo Sapiens
agucuguggucagucacuucucuucugauucu

SEQ ID NO: 159089 - RNA, 32 nt, Homo Sapiens
gcccuggggccgggggcugggguguggggcag

SEQ ID NO: 159090 - RNA, 32 nt, Homo Sapiens
cuaccuuuuuuuucuuuuuuucuuaaaaaaau

SEQ ID NO: 159091 - RNA, 32 nt, Homo Sapiens
cugaagcagggccaaacccucuuccuugucuc

SEQ ID NO: 159092 - RNA, 32 nt, Homo Sapiens
cgaggcuggggcuggggguggcugggagggga

SEQ ID NO: 159093 - RNA, 31 nt, Homo Sapiens
ggguuggagcacugcccccgcgcacaguccc

SEQ ID NO: 159094 - RNA, 32 nt, Homo Sapiens
ucaacccgccucaaaaccuguagagggaccuc

SEQ ID NO: 159095 - RNA, 32 nt, Homo Sapiens
uaaauagacgaguaauggaaaaucacaauaag

SEQ ID NO: 159096 - RNA, 32 nt, Homo Sapiens
gggaugaagugggucccggcacggugggcauu

SEQ ID NO: 159097 - RNA, 32 nt, Homo Sapiens
cggguucagggccagggccuccuuggaauaaa

SEQ ID NO: 159098 - RNA, 32 nt, Homo Sapiens
agcuuauuucuucaacauuccauccuuucccg

SEQ ID NO: 159099 - RNA, 32 nt, Homo Sapiens
cccccucuucuucugaagaucagaacauucag

SEQ ID NO: 159100 - RNA, 32 nt, Homo Sapiens
agcaaggcgggugagggucuggagagugggca

SEQ ID NO: 159101 - RNA, 32 nt, Homo Sapiens
ucuuuguuuuuuucuuuuuuuuuuuuuuugag

SEQ ID NO: 159102 - RNA, 32 nt, Homo Sapiens
uaacuguuucuuuuaugcagauaaaauuauuu

SEQ ID NO: 159103 - RNA, 32 nt, Homo Sapiens
ucgccagccgggguacacccugcacaaugcug

SEQ ID NO: 159104 - RNA, 32 nt, Homo Sapiens
aguucaauuuguaaagggacugugccaucuuu

SEQ ID NO: 159105 - RNA, 32 nt, Homo Sapiens
cugaccucauuucucuuccccgaaggcucagc

SEQ ID NO: 159106 - RNA, 32 nt, Homo Sapiens
gcucugcucccgccuguuuucuuucugacucu

SEQ ID NO: 159107 - RNA, 32 nt, Homo Sapiens
gguccuucauaaaaauauauuuacuuugccaa

SEQ ID NO: 159108 - RNA, 32 nt, Homo Sapiens
gaggcugcagugagccgagaucgcgccacuac

SEQ ID NO: 159109 - RNA, 32 nt, Homo Sapiens
cgcuccaccgccguagcgcccgagugucgggg

SEQ ID NO: 159110 - RNA, 32 nt, Homo Sapiens
ccccgaauccgugugcacacgugugaucucgu

SEQ ID NO: 159111 - RNA, 32 nt, Homo Sapiens
gcuggcggagacauuuuucacaaaagagcccu

SEQ ID NO: 159112 - RNA, 32 nt, Homo Sapiens
cugacgauagacaucuaccuauauuguuaaga

SEQ ID NO: 159113 - RNA, 32 nt, Homo Sapiens
cacuuguaaacacacacacacacacacacccc

SEQ ID NO: 159114 - RNA, 32 nt, Homo Sapiens
caagaugaaggaggaggacuggcugccuccau

SEQ ID NO: 159115 - RNA, 32 nt, Homo Sapiens
aggagcgggaggagggacgagcuggucgggag

SEQ ID NO: 159116 - RNA, 32 nt, Homo Sapiens
agcagugccugguuccucccccuuggcucagg

SEQ ID NO: 159117 - RNA, 32 nt, Homo Sapiens
uuuucagggguuuagacuacauuugaaaucca

SEQ ID NO: 159118 - RNA, 32 nt, Homo Sapiens
ugcacucccccgccacgcccagcccaagaggg

SEQ ID NO: 159119 - RNA, 32 nt, Homo Sapiens
ggccggugcagguccuuggugugcugagugcc

SEQ ID NO: 159120 - RNA, 32 nt, Homo Sapiens
cagcucacaccuguaaacccagcacuuuggga

SEQ ID NO: 159121 - RNA, 32 nt, Homo Sapiens
ccuccgggccugggaccgggcggccgcuuucg

SEQ ID NO: 159122 - RNA, 32 nt, Homo Sapiens
aaggucaugagcauucgagcuaagauaacaga

SEQ ID NO: 159123 - RNA, 32 nt, Homo Sapiens
cgcggacggcccggaggcggcggcucugagcu

SEQ ID NO: 159124 - RNA, 32 nt, Homo Sapiens
ugggagugagaaugccgggccccucagggcug

SEQ ID NO: 159125 - RNA, 32 nt, Homo Sapiens
caaggcaugccacguccgcagccccggccugg

SEQ ID NO: 159126 - RNA, 30 nt, Homo Sapiens
gagcguggucguggcggcggcggugagaag

SEQ ID NO: 159127 - RNA, 31 nt, Homo Sapiens
augagagagaugccaaguucaguguggauuu

SEQ ID NO: 159128 - RNA, 32 nt, Homo Sapiens
uccugacagcgaggggggagggguugguguaa

SEQ ID NO: 159129 - RNA, 32 nt, Homo Sapiens
gaagaaaaacuagcauaacauaaguacucauu

SEQ ID NO: 159130 - RNA, 32 nt, Homo Sapiens
aagcagagguuucucaugggaauaugcuuauu

SEQ ID NO: 159131 - RNA, 32 nt, Homo Sapiens
uaaaauuuuuaaaaucagcuugucuuguucca

SEQ ID NO: 159132 - RNA, 32 nt, Homo Sapiens
agucugggucuggguuuggaucuccaauugcc

SEQ ID NO: 159133 - RNA, 32 nt, Homo Sapiens
cuuauaaccuuguuguuauugaaacagcacuu

SEQ ID NO: 159134 - RNA, 32 nt, Homo Sapiens
ugcaguuuuuaaaaaccuguaucugacccacu

SEQ ID NO: 159135 - RNA, 32 nt, Homo Sapiens
uugcuuguacauucuauggguuuugucaaaua

SEQ ID NO: 159136 - RNA, 32 nt, Homo Sapiens
acccucuuucacaaagaucccuuucucaagcu

SEQ ID NO: 159137 - RNA, 32 nt, Homo Sapiens
caggcccucgccauccuccccauccuuguucc

SEQ ID NO: 159138 - RNA, 32 nt, Homo Sapiens
acuucccacaguuuuccaaaaaugacucacau

SEQ ID NO: 159139 - RNA, 32 nt, Homo Sapiens
ccauaauaaucccagcacuuugggaggccgag

SEQ ID NO: 159140 - RNA, 32 nt, Homo Sapiens
gcaucucucaggugugagagccaaaaggagac

SEQ ID NO: 159141 - RNA, 32 nt, Homo Sapiens
uuuauuuuaaaauuauuuaauguuaauguaug

SEQ ID NO: 159142 - RNA, 32 nt, Homo Sapiens
uuuaaauugacuccuuuaaauaagcuuauuuu

SEQ ID NO: 159143 - RNA, 32 nt, Homo Sapiens
acacacuaccuccucccaguacaauuaaucaa

SEQ ID NO: 159144 - RNA, 32 nt, Homo Sapiens
ugcccucccugcugccguggcuuucaagcgcu

SEQ ID NO: 159145 - RNA, 31 nt, Homo Sapiens
uuaaucagaaagaaaaaauuuuauugaugca

SEQ ID NO: 159146 - RNA, 32 nt, Homo Sapiens
ccuguccggcccagcccugccucacagcugug

SEQ ID NO: 159147 - RNA, 32 nt, Homo Sapiens
guccagacgcagggaaagguggccgugggaac

SEQ ID NO: 159148 - RNA, 32 nt, Homo Sapiens
cggcagcgccucccagccugccgcccggcuau

SEQ ID NO: 159149 - RNA, 32 nt, Homo Sapiens
auugcacagaauuuguauguauuuucaguuac

SEQ ID NO: 159150 - RNA, 32 nt, Homo Sapiens
gaaauucccagcugagagaacuuagcuguggg

SEQ ID NO: 159151 - RNA, 32 nt, Homo Sapiens
uuuuaagccugccaucucuuugaaagugagcc

SEQ ID NO: 159152 - RNA, 32 nt, Homo Sapiens
aggcuccgccuucuuuucuucuccgcggggug

SEQ ID NO: 159153 - RNA, 32 nt, Homo Sapiens
uuggaagauguuaaaaugcuaauuugagagaa

SEQ ID NO: 159154 - RNA, 32 nt, Homo Sapiens
uaacuguguaaagaaagaaaaagggaaguacc

SEQ ID NO: 159155 - RNA, 31 nt, Homo Sapiens
uaaaaauaaaagcagaauguauaucauccca

SEQ ID NO: 159156 - RNA, 32 nt, Homo Sapiens
cuguggacccagcccagguuuuugggcagcca

SEQ ID NO: 159157 - RNA, 32 nt, Homo Sapiens
acagaagaccucuggcuaagagcaggcuucaa

SEQ ID NO: 159158 - RNA, 32 nt, Homo Sapiens
guucugugccugaaaauggccuuaaagaaaca

SEQ ID NO: 159159 - RNA, 32 nt, Homo Sapiens
ggcacagguugcaccugggugugagcacuuaa

SEQ ID NO: 159160 - RNA, 32 nt, Homo Sapiens
uauuuuaucuuuuaucuagaauccacauaugu

SEQ ID NO: 159161 - RNA, 32 nt, Homo Sapiens
cacuccagugauuuugaguuugcaguuucaca

SEQ ID NO: 159162 - RNA, 32 nt, Homo Sapiens
agcagauuuugaaguagaaauaaaaugaauug

SEQ ID NO: 159163 - RNA, 32 nt, Homo Sapiens
gggagcaaguugcccacaugcccgccagccag

SEQ ID NO: 159164 - RNA, 32 nt, Homo Sapiens
cccggggaagcagcuccaacuggggugauuaa

SEQ ID NO: 159165 - RNA, 32 nt, Homo Sapiens
caaagaaaauaaguuguuaugcacuuugggau

SEQ ID NO: 159166 - RNA, 32 nt, Homo Sapiens
aacguaccuucaccccagccacaugccccagc

SEQ ID NO: 159167 - RNA, 32 nt, Homo Sapiens
aaaaagguauuuuuauauguucuuuuuaacaa

SEQ ID NO: 159168 - RNA, 32 nt, Homo Sapiens
gaggcugcuggcucaccuccgagccaccucug

SEQ ID NO: 159169 - RNA, 32 nt, Homo Sapiens
cuccgcuaagcugcuucucaccccagcuggga

SEQ ID NO: 159170 - RNA, 32 nt, Homo Sapiens
gucaccccugcugcaccuugaggagcuguguc

SEQ ID NO: 159171 - RNA, 32 nt, Homo Sapiens
gacagagucucccucugucacccaggcuagag

SEQ ID NO: 159172 - RNA, 32 nt, Homo Sapiens
gggagcaggucugaagggcauucuagaauuag

SEQ ID NO: 159173 - RNA, 32 nt, Homo Sapiens
uaauucacugaggaucuagaaacuacaggaug

SEQ ID NO: 159174 - RNA, 32 nt, Homo Sapiens
cagcaaagccuggagaaaugggaccagagagu

SEQ ID NO: 159175 - RNA, 32 nt, Homo Sapiens
agcccagauugugccacugcacucuagccucg

SEQ ID NO: 159176 - RNA, 32 nt, Homo Sapiens
uuuaaugaagagcaugagaccuggguuuaugc

SEQ ID NO: 159177 - RNA, 32 nt, Homo Sapiens
ugcuaacagauucagaaaagugucucaaagca

SEQ ID NO: 159178 - RNA, 32 nt, Homo Sapiens
acuaaaacaaccaaauaugcaaaaaucaagug

SEQ ID NO: 159179 - RNA, 32 nt, Homo Sapiens
cccuugcaaccuggcgcugcauccgggccacu

SEQ ID NO: 159180 - RNA, 32 nt, Homo Sapiens
cagaggcuguaccaugagcagcugcgagauuu

SEQ ID NO: 159181 - RNA, 32 nt, Homo Sapiens
gagacugcauguaaacugggaugugugaaagc

SEQ ID NO: 159182 - RNA, 32 nt, Homo Sapiens
augucauuugaaaacaguuucaucgggauaua

SEQ ID NO: 159183 - RNA, 32 nt, Homo Sapiens
ucucuggaucagagacccugccucuguuugac

SEQ ID NO: 159184 - RNA, 32 nt, Homo Sapiens
ccguggugacuuggcgccgcuuccucacaucu

SEQ ID NO: 159185 - RNA, 32 nt, Homo Sapiens
gggcccucugucacauuuuucuucauccagcu

SEQ ID NO: 159186 - RNA, 32 nt, Homo Sapiens
auaagagcuuccguacuuugcuuauuugaaga

SEQ ID NO: 159187 - RNA, 32 nt, Homo Sapiens
acaaaccugaagaugugacaaugauuuucaca

SEQ ID NO: 159188 - RNA, 32 nt, Homo Sapiens
cugcuacuuaauuccuuucucaucccacgcac

SEQ ID NO: 159189 - RNA, 32 nt, Homo Sapiens
caccuuuugucaacggcaaaggcagccuuuuu

SEQ ID NO: 159190 - RNA, 32 nt, Homo Sapiens
guacccccaccucagcugggaccccaaaccuc

SEQ ID NO: 159191 - RNA, 32 nt, Homo Sapiens
acuacauuuacuacuuucagaguguucaugaa

SEQ ID NO: 159192 - RNA, 32 nt, Homo Sapiens
ucuuuccuggaaaauccugucucuguuuuugg

SEQ ID NO: 159193 - RNA, 32 nt, Homo Sapiens
aaaccucuauguguagauauuaacucagaacu

SEQ ID NO: 159194 - RNA, 32 nt, Homo Sapiens
aauauuucaaaauaaacuggggaguuauaaaa

SEQ ID NO: 159195 - RNA, 32 nt, Homo Sapiens
cguggggggcggugcucgagcugagcgcgaga

SEQ ID NO: 159196 - RNA, 32 nt, Homo Sapiens
uaauguuaauaugccagaaagcauacaucuaa

SEQ ID NO: 159197 - RNA, 32 nt, Homo Sapiens
uaacugaaggacuuaaaauacuuguuccauuc

SEQ ID NO: 159198 - RNA, 32 nt, Homo Sapiens
aauauugaauguuuaaaauauuaauacagaug

SEQ ID NO: 159199 - RNA, 32 nt, Homo Sapiens
acauuuaguaaaccauagauuuuuuaaaaacu

SEQ ID NO: 159200 - RNA, 32 nt, Homo Sapiens
uucuggggcuaaaggccugggguguguggccu

SEQ ID NO: 159201 - RNA, 32 nt, Homo Sapiens
cgggugugcgucgagugagcgucccgaggcca

SEQ ID NO: 159202 - RNA, 32 nt, Homo Sapiens
ucggccggcgcguccuccugcucuccuccgca

SEQ ID NO: 159203 - RNA, 32 nt, Homo Sapiens
ggguuccuagugggaaauaaaagggaaaaguc

SEQ ID NO: 159204 - RNA, 32 nt, Homo Sapiens
ucuuaggaacaggacaggaucugggcuccugc

SEQ ID NO: 159205 - RNA, 32 nt, Homo Sapiens
gcuggaagguuccauaacuggccagcugcccc

SEQ ID NO: 159206 - RNA, 31 nt, Homo Sapiens
ccuaccccacccucuuugaaaagacaaagcu

SEQ ID NO: 159207 - RNA, 32 nt, Homo Sapiens
guuauacuucuugguucacauuuuggaaauca

SEQ ID NO: 159208 - RNA, 32 nt, Homo Sapiens
guguguaugugauuuucaaaauucaugacuug

SEQ ID NO: 159209 - RNA, 31 nt, Homo Sapiens
gacgugagcgauaauggcggauauggaggau

SEQ ID NO: 159210 - RNA, 32 nt, Homo Sapiens
acacacaguuccccauuuacuacauuaaugcc

SEQ ID NO: 159211 - RNA, 32 nt, Homo Sapiens
gcguuccuuggcggccgccgguucccgggaag

SEQ ID NO: 159212 - RNA, 32 nt, Homo Sapiens
cacuuuuguacaaauaaauguuugguguuugu

SEQ ID NO: 159213 - RNA, 32 nt, Homo Sapiens
augacuccucauuccuggcccagaggguuguc

SEQ ID NO: 159214 - RNA, 32 nt, Homo Sapiens
aaucguccugaagucggccucuccaggcccag

SEQ ID NO: 159215 - RNA, 32 nt, Homo Sapiens
agacugaggagaagagauccuuugagccagau

SEQ ID NO: 159216 - RNA, 32 nt, Homo Sapiens
gccaugcacugacuucagcuucaucugaguca

SEQ ID NO: 159217 - RNA, 32 nt, Homo Sapiens
caaaggaaggguggagagaagguucgggaaga

SEQ ID NO: 159218 - RNA, 32 nt, Homo Sapiens
cucagccuaaggaaacaaguacacuccacaca

SEQ ID NO: 159219 - RNA, 32 nt, Homo Sapiens
auaauuuuuuauuggaaaaaugugcugauuuu

SEQ ID NO: 159220 - RNA, 32 nt, Homo Sapiens
cccgcucgacccccacuuccuuucuugugcuu

SEQ ID NO: 159221 - RNA, 32 nt, Homo Sapiens
ucaaauuaaaagacaauaaauggaacagaagg

SEQ ID NO: 159222 - RNA, 32 nt, Homo Sapiens
uugcuuuaggggguggggggaugcuaucuguu

SEQ ID NO: 159223 - RNA, 32 nt, Homo Sapiens
aucugaaaugcucuauuuauguuauuauuccu

SEQ ID NO: 159224 - RNA, 32 nt, Homo Sapiens
caaagaagcugauaaacaugguucuugccucu

SEQ ID NO: 159225 - RNA, 32 nt, Homo Sapiens
uaaacuuugucaacauuuuuaccuccccaguu

SEQ ID NO: 159226 - RNA, 32 nt, Homo Sapiens
aacauucucaucgauacuuccuggacauauuu

SEQ ID NO: 159227 - RNA, 32 nt, Homo Sapiens
ggcuaaggggguauguugugcagaugcuacug

SEQ ID NO: 159228 - RNA, 32 nt, Homo Sapiens
aacaaagaaaaguagucggagaaggagcggcg

SEQ ID NO: 159229 - RNA, 32 nt, Homo Sapiens
aacucguuccuugauauuauauggaaaucguu

SEQ ID NO: 159230 - RNA, 32 nt, Homo Sapiens
auagaaaagguacaguaaaaauacuguauaag

SEQ ID NO: 159231 - RNA, 32 nt, Homo Sapiens
aaacuggagcgcggcccggagcgcggcgcugg

SEQ ID NO: 159232 - RNA, 32 nt, Homo Sapiens
caccaucugaagauuaagaaaucuggccaggu

SEQ ID NO: 159233 - RNA, 30 nt, Homo Sapiens
ugagccuaugucccugccuaacgcuggugu

SEQ ID NO: 159234 - RNA, 32 nt, Homo Sapiens
ugaggucagggguucaagacuagccuggccaa

SEQ ID NO: 159235 - RNA, 32 nt, Homo Sapiens
cgccccuguacuccccgcgccgcuccucgggg

SEQ ID NO: 159236 - RNA, 32 nt, Homo Sapiens
accccggcccucaucacccaccggcacugauc

SEQ ID NO: 159237 - RNA, 32 nt, Homo Sapiens
cccagagucacggggcugagggggcgggagcu

SEQ ID NO: 159238 - RNA, 32 nt, Homo Sapiens
gcuccucaggcucggcguccccggccguggcu

SEQ ID NO: 159239 - RNA, 32 nt, Homo Sapiens
ccagagagaagauuuuugucaugauuuuaaau

SEQ ID NO: 159240 - RNA, 32 nt, Homo Sapiens
caaaggaugaauuggacauugucgaagagagg

SEQ ID NO: 159241 - RNA, 29 nt, Homo Sapiens
augcuugugcuuuucagaguaaagggcuu

SEQ ID NO: 159242 - RNA, 31 nt, Homo Sapiens
aauaugaaauaaaauccagugagauucaaca

SEQ ID NO: 159243 - RNA, 32 nt, Homo Sapiens
auaaaacaaaacaccuguauggcugccauucu

SEQ ID NO: 159244 - RNA, 29 nt, Homo Sapiens
gucauaaggauaauauauuuuccccauca

SEQ ID NO: 159245 - RNA, 32 nt, Homo Sapiens
uauugauagccuaaagacaaauucauguagua

SEQ ID NO: 159246 - RNA, 32 nt, Homo Sapiens
ucuuagaggauacauuaaugucucagugauug

SEQ ID NO: 159247 - RNA, 32 nt, Homo Sapiens
caagcccaggucccggcccugggugcucagcc

SEQ ID NO: 159248 - RNA, 32 nt, Homo Sapiens
ugugcuuggccacaggcagguccagucacugc

SEQ ID NO: 159249 - RNA, 32 nt, Homo Sapiens
cggggcgagggagaggggcggccgcgcggauc

SEQ ID NO: 159250 - RNA, 32 nt, Homo Sapiens
cgaggacgcccgccgcgcuccgccggcccuuu

SEQ ID NO: 159251 - RNA, 32 nt, Homo Sapiens
uucuagcccgguuuccuccgccccagguuagg

SEQ ID NO: 159252 - RNA, 32 nt, Homo Sapiens
gaacaaauuuguccuugcauugaaagacccua

SEQ ID NO: 159253 - RNA, 28 nt, Homo Sapiens
aagaagaaagauuggacuugaugacuau

SEQ ID NO: 159254 - RNA, 32 nt, Homo Sapiens
gaaucaauuugauaggauuaaucuccagugaa

SEQ ID NO: 159255 - RNA, 32 nt, Homo Sapiens
acagagaaauuaaagucugccuuauuuguuac

SEQ ID NO: 159256 - RNA, 32 nt, Homo Sapiens
cagggcuccagaggcgcaccccuggcuugacg

SEQ ID NO: 159257 - RNA, 32 nt, Homo Sapiens
ggaaugcccucccaaacccaaggccagcagga

SEQ ID NO: 159258 - RNA, 32 nt, Homo Sapiens
guauucagcaaacacucacuaggugacagcgg

SEQ ID NO: 159259 - RNA, 32 nt, Homo Sapiens
cuggucauaaacgaucuuccaguuggggacgc

SEQ ID NO: 159260 - RNA, 32 nt, Homo Sapiens
ggccucucggugcugcugacggcggccacagu

SEQ ID NO: 159261 - RNA, 32 nt, Homo Sapiens
gcagggacagagcauugggguggggguaaggu

SEQ ID NO: 159262 - RNA, 32 nt, Homo Sapiens
acagcccaaacacaucaaacuugcuaagcggc

SEQ ID NO: 159263 - RNA, 32 nt, Homo Sapiens
ccacugcccucccccuugccaguguuuagaac

SEQ ID NO: 159264 - RNA, 32 nt, Homo Sapiens
gcacccaccaacuuccugcacacacuggcaga

SEQ ID NO: 159265 - RNA, 32 nt, Homo Sapiens
caucaaaggaaaacagaaguugugaguucuuc

SEQ ID NO: 159266 - RNA, 32 nt, Homo Sapiens
ucacugaagccacugggguggggggugggggg

SEQ ID NO: 159267 - RNA, 32 nt, Homo Sapiens
gcagccuccugcggcucuggucgcccgaccag

SEQ ID NO: 159268 - RNA, 32 nt, Homo Sapiens
cacagccaggcuggagucagugucugccccug

SEQ ID NO: 159269 - RNA, 32 nt, Homo Sapiens
gagcacgcgaggcucgggggcggcacggggcg

SEQ ID NO: 159270 - RNA, 32 nt, Homo Sapiens
cacgggugcucuccuuuugggcugcaugcuau

SEQ ID NO: 159271 - RNA, 32 nt, Homo Sapiens
gggauugguggccacuguuuguauguucuuga

SEQ ID NO: 159272 - RNA, 32 nt, Homo Sapiens
ucuaagcauuagugauggguagcugaugucag

SEQ ID NO: 159273 - RNA, 32 nt, Homo Sapiens
aaaguuuucaacuuuuucagcuuuagaauuug

SEQ ID NO: 159274 - RNA, 32 nt, Homo Sapiens
caaaaauaauugauuugcuuuacaaucaucca

SEQ ID NO: 159275 - RNA, 32 nt, Homo Sapiens
aggggguacuuuugagguucacuuauuuuacu

SEQ ID NO: 159276 - RNA, 32 nt, Homo Sapiens
cgacgcgggacgcggcgguggaggcgguugcu

SEQ ID NO: 159277 - RNA, 32 nt, Homo Sapiens
aaguucuggugccacauaguggucagaaaugg

SEQ ID NO: 159278 - RNA, 32 nt, Homo Sapiens
ccacggcugccccuuccacaccccaucuugcu

SEQ ID NO: 159279 - RNA, 32 nt, Homo Sapiens
guucacuguuuucucuuucuaugguauugggu

SEQ ID NO: 159280 - RNA, 32 nt, Homo Sapiens
auggcaggauuccacauuucauagaauacagg

SEQ ID NO: 159281 - RNA, 32 nt, Homo Sapiens
gacaaaacuccagcugaugcugggaaugggga

SEQ ID NO: 159282 - RNA, 32 nt, Homo Sapiens
ugguuuacaccuguaaucccagcacuuuggga

SEQ ID NO: 159283 - RNA, 32 nt, Homo Sapiens
gaguucuggaucaugucccauccaguccagug

SEQ ID NO: 159284 - RNA, 32 nt, Homo Sapiens
aauccccgcaggcgcugggucugcagauggcg

SEQ ID NO: 159285 - RNA, 32 nt, Homo Sapiens
aguaaaaugcaguuuucuucuaccuacucggu

SEQ ID NO: 159286 - RNA, 32 nt, Homo Sapiens
cgcccuguggcccuuccucaguaggcacaacu

SEQ ID NO: 159287 - RNA, 32 nt, Homo Sapiens
gucuaugaugcuggcuuuuggccccuggcccc

SEQ ID NO: 159288 - RNA, 32 nt, Homo Sapiens
aguaugaauccuauguucaauuaggguuuugg

SEQ ID NO: 159289 - RNA, 32 nt, Homo Sapiens
uauggauacauuggagcuuuugaaagaauugu

SEQ ID NO: 159290 - RNA, 32 nt, Homo Sapiens
gccccuccucccggcgucagcccgccagaggc

SEQ ID NO: 159291 - RNA, 32 nt, Homo Sapiens
cuggguuuaagugauucuucuucugccucagc

SEQ ID NO: 159292 - RNA, 32 nt, Homo Sapiens
augagcugaugauggacuggauguuggaacag

SEQ ID NO: 159293 - RNA, 32 nt, Homo Sapiens
cggugguuuucaauguuucuucauguuaaagg

SEQ ID NO: 159294 - RNA, 32 nt, Homo Sapiens
ucaaggucuacaguuuucaaugacgguacuau

SEQ ID NO: 159295 - RNA, 32 nt, Homo Sapiens
ccaaaaucucuuaaauacacguaggugggcca

SEQ ID NO: 159296 - RNA, 32 nt, Homo Sapiens
ucguaaugagagauuuuauaaggaucaacuaa

SEQ ID NO: 159297 - RNA, 32 nt, Homo Sapiens
ccggggcagagcggccgguucgucccgagucu

SEQ ID NO: 159298 - RNA, 32 nt, Homo Sapiens
agccuucagggugggcuccuaucaggcugggu

SEQ ID NO: 159299 - RNA, 32 nt, Homo Sapiens
acugcuaugccgagcaggugguggcucgugug

SEQ ID NO: 159300 - RNA, 32 nt, Homo Sapiens
uuauaaaacuggguuccgaaugcugaauaaga

SEQ ID NO: 159301 - RNA, 32 nt, Homo Sapiens
uccccagaggggcccuagugccucuguuccug

SEQ ID NO: 159302 - RNA, 32 nt, Homo Sapiens
aagucccagcuuucccagccccagcguuuugg

SEQ ID NO: 159303 - RNA, 32 nt, Homo Sapiens
cuacccaaugcgccagcagcauagggaaaaug

SEQ ID NO: 159304 - RNA, 32 nt, Homo Sapiens
uccuuucugugccucaucaugcaaggaucuuu

SEQ ID NO: 159305 - RNA, 32 nt, Homo Sapiens
cucaacgaguucaaaucaguuguccuuuuuag

SEQ ID NO: 159306 - RNA, 32 nt, Homo Sapiens
gcuuuaguaaaaucucuuucuuauccuaacaa

SEQ ID NO: 159307 - RNA, 32 nt, Homo Sapiens
guucgugggauauguuccaaaggacugacaga

SEQ ID NO: 159308 - RNA, 32 nt, Homo Sapiens
acuuaacaugaaaaauucacucuuuuauuuug

SEQ ID NO: 159309 - RNA, 32 nt, Homo Sapiens
gcuugggagcugccuccgggugggcggccucu

SEQ ID NO: 159310 - RNA, 32 nt, Homo Sapiens
agaacuuggcuauauugaauguguauuuuucu

SEQ ID NO: 159311 - RNA, 32 nt, Homo Sapiens
caacuaccgugcugagcugaucgagcacccgc

SEQ ID NO: 159312 - RNA, 32 nt, Homo Sapiens
ggcaaugguucaguggccuggcuguuggcagg

SEQ ID NO: 159313 - RNA, 32 nt, Homo Sapiens
gggcagccugcagcuguguccaggcccaggcc

SEQ ID NO: 159314 - RNA, 32 nt, Homo Sapiens
uuaucccaacuuuguuuggaagcuuauuauga

SEQ ID NO: 159315 - RNA, 32 nt, Homo Sapiens
cagcacuuuggaaaauuuguguaacauguuuu

SEQ ID NO: 159316 - RNA, 32 nt, Homo Sapiens
uugccaaaugaaauagcuucaaucuguuuaau

SEQ ID NO: 159317 - RNA, 32 nt, Homo Sapiens
gcaaaaccuucuuguaggaaaagagagcucuc

SEQ ID NO: 159318 - RNA, 32 nt, Homo Sapiens
aucugcccgcggcggcccguguuguguuuugu

SEQ ID NO: 159319 - RNA, 32 nt, Homo Sapiens
caauuuaguguccuuccaccugugagccaagc

SEQ ID NO: 159320 - RNA, 32 nt, Homo Sapiens
uuuucuuucuucacagucaaagcauuuauauu

SEQ ID NO: 159321 - RNA, 32 nt, Homo Sapiens
auauguacuucaauugcuuugcacuuuuccgu

SEQ ID NO: 159322 - RNA, 32 nt, Homo Sapiens
uguaagcuggaaaaaagguagggaguuuuggg

SEQ ID NO: 159323 - RNA, 32 nt, Homo Sapiens
cgaagaacggagguccuuauguuucuuuucuu

SEQ ID NO: 159324 - RNA, 32 nt, Homo Sapiens
gcggacgggcgcgggcgggaggauggagcuga

SEQ ID NO: 159325 - RNA, 32 nt, Homo Sapiens
uucuaguuuuucuuguucucauuugaaaggag

SEQ ID NO: 159326 - RNA, 32 nt, Homo Sapiens
uuauacuuguuuaucuuguugcugcaaugaga

SEQ ID NO: 159327 - RNA, 32 nt, Homo Sapiens
uguggccgccccacuugccuguuggugccacu

SEQ ID NO: 159328 - RNA, 32 nt, Homo Sapiens
acacauggucuccccaccugguuucagcuagu

SEQ ID NO: 159329 - RNA, 32 nt, Homo Sapiens
aacuuuuuucuuuuaaauuauuaaagugucuu

SEQ ID NO: 159330 - RNA, 29 nt, Homo Sapiens
cagaugagacugccauccaccggcagaag

SEQ ID NO: 159331 - RNA, 32 nt, Homo Sapiens
aucaugaagcggcagaauaaggagcagguccc

SEQ ID NO: 159332 - RNA, 32 nt, Homo Sapiens
gcaggccccucccccuggccucaggcaggccc

SEQ ID NO: 159333 - RNA, 32 nt, Homo Sapiens
agaauaagaaaauuauugaguaugaguguguu

SEQ ID NO: 159334 - RNA, 32 nt, Homo Sapiens
ccccaaggucacuuccuauuccuuccauggga

SEQ ID NO: 159335 - RNA, 32 nt, Homo Sapiens
auuuggguguacacaugagugcaguggcaugg

SEQ ID NO: 159336 - RNA, 32 nt, Homo Sapiens
gagaggcacuguaugacaauuaccaggugcuc

SEQ ID NO: 159337 - RNA, 32 nt, Homo Sapiens
uauuugaagaaacaaacugaagaaaaaaugcu

SEQ ID NO: 159338 - RNA, 32 nt, Homo Sapiens
cuaggagcugucuuagaaaugacuucaaacug

SEQ ID NO: 159339 - RNA, 32 nt, Homo Sapiens
agaacacaguuuuuauacuaaggauuuguguu

SEQ ID NO: 159340 - RNA, 32 nt, Homo Sapiens
gcuguuuugacuguuccacagcuacuucccag

SEQ ID NO: 159341 - RNA, 32 nt, Homo Sapiens
gccaaaggagucgggccugacgguggaagaug

SEQ ID NO: 159342 - RNA, 32 nt, Homo Sapiens
cagcacccaagagcuuugggaggaaaugcuca

SEQ ID NO: 159343 - RNA, 32 nt, Homo Sapiens
acuggagcuuucuguuccauuaagucuuuugu

SEQ ID NO: 159344 - RNA, 32 nt, Homo Sapiens
uuuuuacaagauaccguucgggaaaggcuuuu

SEQ ID NO: 159345 - RNA, 32 nt, Homo Sapiens
cgcgcggcucccuuucagcagcugcgggagca

SEQ ID NO: 159346 - RNA, 32 nt, Homo Sapiens
accaccggaucuucacuucucagugggauuuu

SEQ ID NO: 159347 - RNA, 32 nt, Homo Sapiens
uagguuuuuuaaaauaaaauguucauuguauu

SEQ ID NO: 159348 - RNA, 31 nt, Homo Sapiens
ccuggcaugggagccuccuucuggccaauca

SEQ ID NO: 159349 - RNA, 32 nt, Homo Sapiens
uugccuguccugcugguaacugcuacggggua

SEQ ID NO: 159350 - RNA, 32 nt, Homo Sapiens
gcuuuagcuucuucucugccaagcccucaaua

SEQ ID NO: 159351 - RNA, 32 nt, Homo Sapiens
uccauccccauggcacccuccccccuccccau

SEQ ID NO: 159352 - RNA, 32 nt, Homo Sapiens
aucauucuauuauggacucgugggcacuaagc

SEQ ID NO: 159353 - RNA, 32 nt, Homo Sapiens
aaaaaauacacauauacacaaacaacauguac

SEQ ID NO: 159354 - RNA, 32 nt, Homo Sapiens
agaccuugugcaugcauguagaaaauuguaaa

SEQ ID NO: 159355 - RNA, 32 nt, Homo Sapiens
auuuuuaauuuaauucaucauuucacauguuu

SEQ ID NO: 159356 - RNA, 32 nt, Homo Sapiens
cuuuuuguuaugucucuuucggguuuugguau

SEQ ID NO: 159357 - RNA, 32 nt, Homo Sapiens
gugacuggcguccguccacagaagcccucuca

SEQ ID NO: 159358 - RNA, 32 nt, Homo Sapiens
uagggaggaaaacaacucugcugucaaauuug

SEQ ID NO: 159359 - RNA, 32 nt, Homo Sapiens
acuuuuuaacuuuucuguagagguggagucuu

SEQ ID NO: 159360 - RNA, 32 nt, Homo Sapiens
cugucugccugcgguccuuccuccggccagag

SEQ ID NO: 159361 - RNA, 32 nt, Homo Sapiens
cagggccuggccugccucuccugugcuguggg

SEQ ID NO: 159362 - RNA, 32 nt, Homo Sapiens
uugugaaaauuuagucgauugauauaauuaua

SEQ ID NO: 159363 - RNA, 32 nt, Homo Sapiens
guauagcuaauuguauauaccuuugaggaaug

SEQ ID NO: 159364 - RNA, 32 nt, Homo Sapiens
gcugccgccgccgccaccgccggcugguccuc

SEQ ID NO: 159365 - RNA, 32 nt, Homo Sapiens
cacauuaauauuugcugacagcugaccuuugu

SEQ ID NO: 159366 - RNA, 32 nt, Homo Sapiens
agauauaaaaauugucaugagauucugaacac

SEQ ID NO: 159367 - RNA, 32 nt, Homo Sapiens
agguggacaaaguggugugggaccugccguaa

SEQ ID NO: 159368 - RNA, 32 nt, Homo Sapiens
aggcugcucagagggggugcugccgggacugc

SEQ ID NO: 159369 - RNA, 32 nt, Homo Sapiens
gcaggagacccucuccuuccugcagcugggcc

SEQ ID NO: 159370 - RNA, 32 nt, Homo Sapiens
uggcugggaggccgcgggagggaggccaggag

SEQ ID NO: 159371 - RNA, 32 nt, Homo Sapiens
gugcccgcuccccuccagcaguggccgcccgc

SEQ ID NO: 159372 - RNA, 32 nt, Homo Sapiens
auaaacauucuauuugauuuuaagcaaaaugu

SEQ ID NO: 159373 - RNA, 32 nt, Homo Sapiens
ggaaucucagauuguaccuuugaaagcuacga

SEQ ID NO: 159374 - RNA, 32 nt, Homo Sapiens
aacaucauuuaaaauauauaugguaucugagu

SEQ ID NO: 159375 - RNA, 32 nt, Homo Sapiens
gcuuuuagaguuugccuuuguaccuuagagau

SEQ ID NO: 159376 - RNA, 32 nt, Homo Sapiens
ucagaauaaaaugaaauuucauaacuguggcu

SEQ ID NO: 159377 - RNA, 32 nt, Homo Sapiens
acgacucuuuuuauauuuuuuauacuugaaau

SEQ ID NO: 159378 - RNA, 32 nt, Homo Sapiens
guccgacaugcugcgccgcgcucugcugugcc

SEQ ID NO: 159379 - RNA, 32 nt, Homo Sapiens
uucugcccagccacagcccuccccucacaguu

SEQ ID NO: 159380 - RNA, 32 nt, Homo Sapiens
ggcugcugcccccagcccagagugcacuuccg

SEQ ID NO: 159381 - RNA, 32 nt, Homo Sapiens
caugcuagccagcaggcuccugucugggugcc

SEQ ID NO: 159382 - RNA, 32 nt, Homo Sapiens
agaaggcccccgcucccucuggcccuucucug

SEQ ID NO: 159383 - RNA, 32 nt, Homo Sapiens
ggaggugccuucuggguaucucuguguuggug

SEQ ID NO: 159384 - RNA, 32 nt, Homo Sapiens
gaaauucuuuuuauaucuauaccuguugugua

SEQ ID NO: 159385 - RNA, 32 nt, Homo Sapiens
gugaaucauaugaugccuggauauuucagguu

SEQ ID NO: 159386 - RNA, 32 nt, Homo Sapiens
auuggcuaucuuucuucuuuuaauauuuaaag

SEQ ID NO: 159387 - RNA, 32 nt, Homo Sapiens
auuuuuuuaaaauaaauuuuaaauaaaauaga

SEQ ID NO: 159388 - RNA, 32 nt, Homo Sapiens
cuccaaagugugccaccuccagugagccuccu

SEQ ID NO: 159389 - RNA, 32 nt, Homo Sapiens
agggugucucaaagcauaucuuucuguagagc

SEQ ID NO: 159390 - RNA, 32 nt, Homo Sapiens
gccgcucugaagagcaccgugcacaugugggu

SEQ ID NO: 159391 - RNA, 32 nt, Homo Sapiens
aagcugcgucgaauugcuuccaccauggccaa

SEQ ID NO: 159392 - RNA, 32 nt, Homo Sapiens
agugcccuggaguccuaucugaucuccggguu

SEQ ID NO: 159393 - RNA, 32 nt, Homo Sapiens
cguggccuuugcacuugcggcagcaacgugua

SEQ ID NO: 159394 - RNA, 32 nt, Homo Sapiens
ccacagugcaggugcuccuuccccaaaucccu

SEQ ID NO: 159395 - RNA, 32 nt, Homo Sapiens
cuuuuaaaaguacuuaauuaacauauguuguu

SEQ ID NO: 159396 - RNA, 30 nt, Homo Sapiens
cucggcgggucggugccgccgggucccagg

SEQ ID NO: 159397 - RNA, 32 nt, Homo Sapiens
ggcacgagaugacaccaagcaaagccuacuua

SEQ ID NO: 159398 - RNA, 32 nt, Homo Sapiens
ucaaacaggaccaggccuccucuucccaccug

SEQ ID NO: 159399 - RNA, 32 nt, Homo Sapiens
uuaauucaagcuugugauacuaacauacaaag

SEQ ID NO: 159400 - RNA, 32 nt, Homo Sapiens
cagugauacuaaaauuuuaucauuuaauuuuc

SEQ ID NO: 159401 - RNA, 32 nt, Homo Sapiens
uuuucguauguacacaaugcaagugugauuau

SEQ ID NO: 159402 - RNA, 32 nt, Homo Sapiens
ucuucuguuuuggagaguuuauuauuaaaaac

SEQ ID NO: 159403 - RNA, 32 nt, Homo Sapiens
uauauaucuguauaaauagacacacauauaau

SEQ ID NO: 159404 - RNA, 32 nt, Homo Sapiens
cggguucuggagccuucggggcccgugcgccc

SEQ ID NO: 159405 - RNA, 32 nt, Homo Sapiens
cccugagccccggccacgggucccgcguccgg

SEQ ID NO: 159406 - RNA, 32 nt, Homo Sapiens
cugguuuaaauaauuagcacaaauuggccuaa

SEQ ID NO: 159407 - RNA, 32 nt, Homo Sapiens
uucacucaaugaucuuuucucauuucagggcu

SEQ ID NO: 159408 - RNA, 32 nt, Homo Sapiens
ugccccggcuccagcuccagccccacagcccg

SEQ ID NO: 159409 - RNA, 32 nt, Homo Sapiens
uuucgugaucucuccuucuccaucaucucauc

SEQ ID NO: 159410 - RNA, 32 nt, Homo Sapiens
uuucacuugcugagauuuccuguacauugcaa

SEQ ID NO: 159411 - RNA, 32 nt, Homo Sapiens
ugugcuuuuuaaaauaaugacuacuguuuuua

SEQ ID NO: 159412 - RNA, 32 nt, Homo Sapiens
auuugcagggauuguuuguuacugaaguugac

SEQ ID NO: 159413 - RNA, 32 nt, Homo Sapiens
guucccucuccugcuccaggaccuccggguag

SEQ ID NO: 159414 - RNA, 32 nt, Homo Sapiens
gacauccucucccugcgggaccgcggccucag

SEQ ID NO: 159415 - RNA, 32 nt, Homo Sapiens
cugacuuuuuaaaccauuguggacuaguggcu

SEQ ID NO: 159416 - RNA, 32 nt, Homo Sapiens
gggaggaagacacgugaaguuauuuaacauuu

SEQ ID NO: 159417 - RNA, 32 nt, Homo Sapiens
gugacauguauuauuuucacauuugaacaucu

SEQ ID NO: 159418 - RNA, 31 nt, Homo Sapiens
uuuggcaucuguuuaaaguagauuagaucuu

SEQ ID NO: 159419 - RNA, 32 nt, Homo Sapiens
aaauuaaacaauuuauuaauuuuccuucugug

SEQ ID NO: 159420 - RNA, 32 nt, Homo Sapiens
ucuccaaagauuuuauugauuguuauaucaaa

SEQ ID NO: 159421 - RNA, 32 nt, Homo Sapiens
caugcccugcggucacugcgguugccgccccu

SEQ ID NO: 159422 - RNA, 32 nt, Homo Sapiens
ugcugucagggagaggauggcagauggaggca

SEQ ID NO: 159423 - RNA, 32 nt, Homo Sapiens
gagagagacagagacagagaaauaagcauuag

SEQ ID NO: 159424 - RNA, 32 nt, Homo Sapiens
gccugacccacacacuuuuuacuuguauagau

SEQ ID NO: 159425 - RNA, 32 nt, Homo Sapiens
aguuuguuagagcuaccagaacuuuggagaau

SEQ ID NO: 159426 - RNA, 32 nt, Homo Sapiens
uaagcuauaauuuuaaaggaauuuagauuaaa

SEQ ID NO: 159427 - RNA, 32 nt, Homo Sapiens
cggcuccgcgcgcaguacggugcagcugaacg

SEQ ID NO: 159428 - RNA, 32 nt, Homo Sapiens
cugaggauucaggggcugggggugcuggaugg

SEQ ID NO: 159429 - RNA, 32 nt, Homo Sapiens
uuuuugagccucugcuuagugaaacacaaagg

SEQ ID NO: 159430 - RNA, 32 nt, Homo Sapiens
gaaaucaaaaauaaagaaaacgcuaaagaaaa

SEQ ID NO: 159431 - RNA, 32 nt, Homo Sapiens
ucucuugcuuguccccaaaucaccuaacccuc

SEQ ID NO: 159432 - RNA, 32 nt, Homo Sapiens
acaaaaauccuaaaagugauucuugucauuca

SEQ ID NO: 159433 - RNA, 32 nt, Homo Sapiens
aauaccugaguacccaugggaauaauagacac

SEQ ID NO: 159434 - RNA, 32 nt, Homo Sapiens
guauguuagagaaaaacuuuaugaggaugaaa

SEQ ID NO: 159435 - RNA, 32 nt, Homo Sapiens
acagcgucccccuccgccccucggguccuggc

SEQ ID NO: 159436 - RNA, 32 nt, Homo Sapiens
ucccagcaccuccuccaggagccccgccaccu

SEQ ID NO: 159437 - RNA, 32 nt, Homo Sapiens
aggcugcauaacuuguucgugaagauauaaca

SEQ ID NO: 159438 - RNA, 32 nt, Homo Sapiens
guguuguacaguuuauguaugauccuuuuuag

SEQ ID NO: 159439 - RNA, 32 nt, Homo Sapiens
gcaggaacauauauuauuuauuuaagcaauua

SEQ ID NO: 159440 - RNA, 32 nt, Homo Sapiens
uucuuguuuuuggaauuauuccuggacuauuc

SEQ ID NO: 159441 - RNA, 32 nt, Homo Sapiens
cggcucacugcagccuccuucuccugggucca

SEQ ID NO: 159442 - RNA, 32 nt, Homo Sapiens
auuugcugcugucuccagcgagucauugcuuc

SEQ ID NO: 159443 - RNA, 32 nt, Homo Sapiens
ugggccacuccagccagcccgccuccggggcg

SEQ ID NO: 159444 - RNA, 32 nt, Homo Sapiens
auggaaauucaugaaacauaaaugguaucaag

SEQ ID NO: 159445 - RNA, 28 nt, Homo Sapiens
auuuggaaggcucaacauuuggaauugc

SEQ ID NO: 159446 - RNA, 32 nt, Homo Sapiens
gccacugcacucaagucugggcgacaggguga

SEQ ID NO: 159447 - RNA, 32 nt, Homo Sapiens
cagcgacuccagcagcagcacacagguguuug

SEQ ID NO: 159448 - RNA, 32 nt, Homo Sapiens
auaugugaggaacuauucauggucauucgcau

SEQ ID NO: 159449 - RNA, 32 nt, Homo Sapiens
gcuugggagaggacgaggguagucuuaauggc

SEQ ID NO: 159450 - RNA, 32 nt, Homo Sapiens
uuuuguuuuguuuuucugagacaaggucuuac

SEQ ID NO: 159451 - RNA, 32 nt, Homo Sapiens
cugcgggcccuaugacccuuucuggggcccug

SEQ ID NO: 159452 - RNA, 32 nt, Homo Sapiens
uucccuaaaucccacagccucaaggccccugu

SEQ ID NO: 159453 - RNA, 32 nt, Homo Sapiens
ugucaggcucugcgcgccccgcggaggucggc

SEQ ID NO: 159454 - RNA, 31 nt, Homo Sapiens
aagccugcaagguugaggggugaaggggagg

SEQ ID NO: 159455 - RNA, 32 nt, Homo Sapiens
augcgcaggggaggcguggggauccgcaggag

SEQ ID NO: 159456 - RNA, 32 nt, Homo Sapiens
gccuugugaugaugaugagugagucuccccuu

SEQ ID NO: 159457 - RNA, 32 nt, Homo Sapiens
guugacaggugggcccagugaacuuuuccagu

SEQ ID NO: 159458 - RNA, 32 nt, Homo Sapiens
ggaaagaugcugauaaaauuuuguccacuacc

SEQ ID NO: 159459 - RNA, 32 nt, Homo Sapiens
gaaggccaaaggaauaaaauucuuuuauauaa

SEQ ID NO: 159460 - RNA, 32 nt, Homo Sapiens
uuuucacaccaaugaaguauuauagaugccaa

SEQ ID NO: 159461 - RNA, 29 nt, Homo Sapiens
ugagauggcgggggcgccgcgcggcggag

SEQ ID NO: 159462 - RNA, 32 nt, Homo Sapiens
acuuugucccgcuuauucuccucccuguuauc

SEQ ID NO: 159463 - RNA, 32 nt, Homo Sapiens
auauagagguaacaacgcuaagcuuuuuugag

SEQ ID NO: 159464 - RNA, 32 nt, Homo Sapiens
uauuuaaagagaaaaaauauguguauaucaug

SEQ ID NO: 159465 - RNA, 32 nt, Homo Sapiens
gucauccaccccaccccaaaucccuggauagg

SEQ ID NO: 159466 - RNA, 32 nt, Homo Sapiens
cgcacccgaggcucagccugaggggugugugc

SEQ ID NO: 159467 - RNA, 32 nt, Homo Sapiens
gccagaaagaaagagcaauaauaauuaauuca

SEQ ID NO: 159468 - RNA, 32 nt, Homo Sapiens
cuaugaugauguaugacugauaaauuaugaug

SEQ ID NO: 159469 - RNA, 32 nt, Homo Sapiens
uuccccucacuggucucuccaguguccugauu

SEQ ID NO: 159470 - RNA, 32 nt, Homo Sapiens
accugugugcgcgccccgcucugccacgcucc

SEQ ID NO: 159471 - RNA, 32 nt, Homo Sapiens
uuggccaaaaauuuuuuuaaaaaucauauuau

SEQ ID NO: 159472 - RNA, 32 nt, Homo Sapiens
guucagcaccucagcccccuacugagaaguua

SEQ ID NO: 159473 - RNA, 32 nt, Homo Sapiens
accagagacaaaauuacuaaguauaaauuagu

SEQ ID NO: 159474 - RNA, 32 nt, Homo Sapiens
acgcaucugugccagcaucccaagagugaggc

SEQ ID NO: 159475 - RNA, 32 nt, Homo Sapiens
agacaaagaggccugggauauuaggacuuugg

SEQ ID NO: 159476 - RNA, 32 nt, Homo Sapiens
uguucuguuguugacccuuguuugggguuccu

SEQ ID NO: 159477 - RNA, 32 nt, Homo Sapiens
uguccagggggugggcugucacugcuugaggg

SEQ ID NO: 159478 - RNA, 32 nt, Homo Sapiens
aaguaaaacaaaugaccagaauuucuguacug

SEQ ID NO: 159479 - RNA, 32 nt, Homo Sapiens
uggguccuuucugugcacuaugaacgcuucuu

SEQ ID NO: 159480 - RNA, 32 nt, Homo Sapiens
acugguuccgcauccccuccccgccggccgaa

SEQ ID NO: 159481 - RNA, 32 nt, Homo Sapiens
ucuaaaugucauuaaauuuauuuguacucaga

SEQ ID NO: 159482 - RNA, 32 nt, Homo Sapiens
cagcuguuccguaggcugaggcacgagauuca

SEQ ID NO: 159483 - RNA, 32 nt, Homo Sapiens
uguucccauucccccaugucuccucccauccc

SEQ ID NO: 159484 - RNA, 32 nt, Homo Sapiens
acaugagagaauaaagcucuuuuuuguuuaga

SEQ ID NO: 159485 - RNA, 32 nt, Homo Sapiens
caagguugacauuuauuguguugugucuaagu

SEQ ID NO: 159486 - RNA, 32 nt, Homo Sapiens
ccagauuucuucauucaauucuguuaucucug

SEQ ID NO: 159487 - RNA, 32 nt, Homo Sapiens
uuuaaaucccauauuuuuuuuaucaugucgua

SEQ ID NO: 159488 - RNA, 32 nt, Homo Sapiens
aauauuuucaggaaguuuuucucaaccuacaa

SEQ ID NO: 159489 - RNA, 32 nt, Homo Sapiens
gccagcgaggaggccccugagaaggaggaacu

SEQ ID NO: 159490 - RNA, 32 nt, Homo Sapiens
aggcaguggcccugcaugggccccagcugaga

SEQ ID NO: 159491 - RNA, 32 nt, Homo Sapiens
cuuuaaacagagccacgaacgguuccagggug

SEQ ID NO: 159492 - RNA, 32 nt, Homo Sapiens
cgcccaccccccacccaccgcaagcuuugagu

SEQ ID NO: 159493 - RNA, 32 nt, Homo Sapiens
ggagacggcagcagcucccgacgcugcuggga

SEQ ID NO: 159494 - RNA, 32 nt, Homo Sapiens
cgggcuccguggcuaccaugcugagagugagc

SEQ ID NO: 159495 - RNA, 32 nt, Homo Sapiens
uccagaaaaguuuacuuuaagaucaucaauag

SEQ ID NO: 159496 - RNA, 32 nt, Homo Sapiens
uucccauccucuucuuuuuuuuuuuuuuuuuu

SEQ ID NO: 159497 - RNA, 32 nt, Homo Sapiens
aguugugcccucaagugguccuaaguagaagu

SEQ ID NO: 159498 - RNA, 32 nt, Homo Sapiens
caugcguccccucccuccccccgccaagugcu

SEQ ID NO: 159499 - RNA, 32 nt, Homo Sapiens
acaugggcaucaggggcuggccccacagagac

SEQ ID NO: 159500 - RNA, 32 nt, Homo Sapiens
cugggcugguggagcccaugggugcugcccug

SEQ ID NO: 159501 - RNA, 32 nt, Homo Sapiens
cacuucccauagagauucuguuuguucaucug

SEQ ID NO: 159502 - RNA, 32 nt, Homo Sapiens
uuaucccuuaacagaagugucuggaguaguuu

SEQ ID NO: 159503 - RNA, 32 nt, Homo Sapiens
uuaaaggaacugugucuuuguucuuccucucu

SEQ ID NO: 159504 - RNA, 32 nt, Homo Sapiens
ggacuugcacuuguuccuuguuuccucugggu

SEQ ID NO: 159505 - RNA, 32 nt, Homo Sapiens
ccgcaagucgaguuuggugaggucucuggcca

SEQ ID NO: 159506 - RNA, 32 nt, Homo Sapiens
uacuuguugcugucacaauuauuaccaucucu

SEQ ID NO: 159507 - RNA, 32 nt, Homo Sapiens
gaaguuuuggaaagaguucaagugucuguaua

SEQ ID NO: 159508 - RNA, 32 nt, Homo Sapiens
uuuccaaguuacaaaaucauuaucauuuagag

SEQ ID NO: 159509 - RNA, 32 nt, Homo Sapiens
gccuccucugggccucgucuccccuucaagcc

SEQ ID NO: 159510 - RNA, 32 nt, Homo Sapiens
cugacccccuggcccuccccagcccggccccu

SEQ ID NO: 159511 - RNA, 32 nt, Homo Sapiens
cacuuagcugaauuaaggacguguucuuaaaa

SEQ ID NO: 159512 - RNA, 32 nt, Homo Sapiens
gaugaaaggggaguugauagucucauaaaacu

SEQ ID NO: 159513 - RNA, 32 nt, Homo Sapiens
guccuuccguuucuaaggucuucucaaucuca

SEQ ID NO: 159514 - RNA, 31 nt, Homo Sapiens
cgcccagcggcuugccugccugcucgcuccc

SEQ ID NO: 159515 - RNA, 32 nt, Homo Sapiens
aaaucauauaggaauguaaauaaaaucuauac

SEQ ID NO: 159516 - RNA, 32 nt, Homo Sapiens
gagcagguaaccugcggcccaagcccgccuag

SEQ ID NO: 159517 - RNA, 32 nt, Homo Sapiens
ucaagucaccaccgugaacaagggacccuaaa

SEQ ID NO: 159518 - RNA, 32 nt, Homo Sapiens
gccgggugucucccacucccccggccucggga

SEQ ID NO: 159519 - RNA, 32 nt, Homo Sapiens
cuuauugcuggaagaggaggccugggaguuga

SEQ ID NO: 159520 - RNA, 32 nt, Homo Sapiens
caccccccgccaguccagggagacccuguggg

SEQ ID NO: 159521 - RNA, 31 nt, Homo Sapiens
gacccacggccgaauaccgugagccggaauc

SEQ ID NO: 159522 - RNA, 32 nt, Homo Sapiens
ccaugggcacuagcucaucuuucagguggaaa

SEQ ID NO: 159523 - RNA, 32 nt, Homo Sapiens
aaaauacaaaaauuugccgggugugguggugc

SEQ ID NO: 159524 - RNA, 32 nt, Homo Sapiens
gugacgacucuugcgcgcacacacacauacaa

SEQ ID NO: 159525 - RNA, 32 nt, Homo Sapiens
uaugacagcaaccauugugagaaacuaguugg

SEQ ID NO: 159526 - RNA, 32 nt, Homo Sapiens
gcugcugaccccaggaucccagcccgugggag

SEQ ID NO: 159527 - RNA, 32 nt, Homo Sapiens
ccgaaggcuuccuggaggagguggagcugcag

SEQ ID NO: 159528 - RNA, 32 nt, Homo Sapiens
uuuaggggugucuacaacacuucuuccaguca

SEQ ID NO: 159529 - RNA, 32 nt, Homo Sapiens
gagcuggaccugccuuccuuaccugggagcaa

SEQ ID NO: 159530 - RNA, 32 nt, Homo Sapiens
gccaaccuggccugggugugcagggagggguu

SEQ ID NO: 159531 - RNA, 32 nt, Homo Sapiens
auguuaucagugaaauagaacuguaguaacuc

SEQ ID NO: 159532 - RNA, 32 nt, Homo Sapiens
gucccggcucggaccccggcgcccagcccgga

SEQ ID NO: 159533 - RNA, 32 nt, Homo Sapiens
uucuuacauaugggagccuuggauagagaaac

SEQ ID NO: 159534 - RNA, 32 nt, Homo Sapiens
uucacuguaaaauuauuuauuggauuccuuug

SEQ ID NO: 159535 - RNA, 32 nt, Homo Sapiens
uccaagagggauuuaagcagcccagagcucca

SEQ ID NO: 159536 - RNA, 32 nt, Homo Sapiens
accuaauaaaauuuaugauaugaauauaaagg

SEQ ID NO: 159537 - RNA, 32 nt, Homo Sapiens
caggcccccucgcuccucagcgugguggccgu

SEQ ID NO: 159538 - RNA, 32 nt, Homo Sapiens
ugcugggaggacugagugaagauucuuucagc

SEQ ID NO: 159539 - RNA, 32 nt, Homo Sapiens
cucuccaacuuuaugucucaccacccccacuc

SEQ ID NO: 159540 - RNA, 32 nt, Homo Sapiens
cagaacaguacuuuucuuuuaguguuucauua

SEQ ID NO: 159541 - RNA, 31 nt, Homo Sapiens
agaccugcagugggcucaggagucugcauuu

SEQ ID NO: 159542 - RNA, 30 nt, Homo Sapiens
caggggagaggggcuuggauaugccauguc

SEQ ID NO: 159543 - RNA, 32 nt, Homo Sapiens
cagcccaucccuccggccccugugccucugcg

SEQ ID NO: 159544 - RNA, 32 nt, Homo Sapiens
caucaaauccgaagucauuuaacaaaaaaaau

SEQ ID NO: 159545 - RNA, 32 nt, Homo Sapiens
gcggccuguccuacugccgccggcgccgcggc

SEQ ID NO: 159546 - RNA, 32 nt, Homo Sapiens
gauucauagaaaguauguaagguucaaagugg

SEQ ID NO: 159547 - RNA, 32 nt, Homo Sapiens
ucuguuuucugaaaacaaaauugugauucacc

SEQ ID NO: 159548 - RNA, 32 nt, Homo Sapiens
ccuaguccgugggcacaggcccggggguggag

SEQ ID NO: 159549 - RNA, 32 nt, Homo Sapiens
cuuggaaaguagagagcaacagacacaucucc

SEQ ID NO: 159550 - RNA, 32 nt, Homo Sapiens
ugcaucgugaccauccuggaagcacugcgggu

SEQ ID NO: 159551 - RNA, 32 nt, Homo Sapiens
ggaaaauagacgagaaaauguaaauaaggcuu

SEQ ID NO: 159552 - RNA, 32 nt, Homo Sapiens
cacucuucguguucuccucacucugugcacuu

SEQ ID NO: 159553 - RNA, 32 nt, Homo Sapiens
uucaugccuauaauuccaacccuuugggaggc

SEQ ID NO: 159554 - RNA, 32 nt, Homo Sapiens
uagauacaucuuuuaaaauaaaacagagagga

SEQ ID NO: 159555 - RNA, 32 nt, Homo Sapiens
gccagugagcauuacuuuuaaauaggaccuuc

SEQ ID NO: 159556 - RNA, 32 nt, Homo Sapiens
gggacacaugcagacaugauaauuggcuguag

SEQ ID NO: 159557 - RNA, 32 nt, Homo Sapiens
acuagccuggaaagacugcagagcugccagcu

SEQ ID NO: 159558 - RNA, 32 nt, Homo Sapiens
caauuuugauaaaaaguuuuagaauggguaua

SEQ ID NO: 159559 - RNA, 32 nt, Homo Sapiens
uucgaagcagaacaggcaaugugcagcccuca

SEQ ID NO: 159560 - RNA, 32 nt, Homo Sapiens
cugcgcccuccuguuucucccuugccuggaag

SEQ ID NO: 159561 - RNA, 32 nt, Homo Sapiens
uuuaagauuuuaaaguuugcuaacauauuaaa

SEQ ID NO: 159562 - RNA, 32 nt, Homo Sapiens
cccauguaaccaaaaaccaccuguuccacaga

SEQ ID NO: 159563 - RNA, 32 nt, Homo Sapiens
cuagggugaugaacuuuccugcaggaggacag

SEQ ID NO: 159564 - RNA, 32 nt, Homo Sapiens
ccgggugcccauggccggggccgccauggccg

SEQ ID NO: 159565 - RNA, 32 nt, Homo Sapiens
acgcacccccaccuucucuccucgcuucuucc

SEQ ID NO: 159566 - RNA, 30 nt, Homo Sapiens
cuccuggauucgagugauucucgagccuua

SEQ ID NO: 159567 - RNA, 32 nt, Homo Sapiens
ugccauugcauauguuuaagugguauaaagaa

SEQ ID NO: 159568 - RNA, 32 nt, Homo Sapiens
gaacgagccagcagcagcuggugcugggggac

SEQ ID NO: 159569 - RNA, 32 nt, Homo Sapiens
uacucggggcgacugcgauggacgccuuagaa

SEQ ID NO: 159570 - RNA, 32 nt, Homo Sapiens
gaggauguggguagguuauaugcaaauacugc

SEQ ID NO: 159571 - RNA, 32 nt, Homo Sapiens
auucuauguauauaucauuuacaggugguaua

SEQ ID NO: 159572 - RNA, 32 nt, Homo Sapiens
ccuccccccuccccacuuucauucugugcugc

SEQ ID NO: 159573 - RNA, 32 nt, Homo Sapiens
cuacguuccgagucaggcugucacuccuacua

SEQ ID NO: 159574 - RNA, 32 nt, Homo Sapiens
accauaucaucccacgccuuuccaugggauaa

SEQ ID NO: 159575 - RNA, 32 nt, Homo Sapiens
gcuaugaaaagaaaaaucaugauauuaaauuu

SEQ ID NO: 159576 - RNA, 30 nt, Homo Sapiens
agaaagugacagagcaggcggguggugaag

SEQ ID NO: 159577 - RNA, 32 nt, Homo Sapiens
aggagguugggaauucuugcuguuaaaaauaa

SEQ ID NO: 159578 - RNA, 32 nt, Homo Sapiens
ucccggacagcuggacccagacacacggaucc

SEQ ID NO: 159579 - RNA, 32 nt, Homo Sapiens
aacaacaagcuggcagacgccgggcugccgga

SEQ ID NO: 159580 - RNA, 32 nt, Homo Sapiens
gccuggcgcuggcgccgagacgccgcuuagcg

SEQ ID NO: 159581 - RNA, 32 nt, Homo Sapiens
gagugaacauuuuuaauaaaucuuucagaaaa

SEQ ID NO: 159582 - RNA, 32 nt, Homo Sapiens
uuuaagguuuggacaagaaguaccugaggagu

SEQ ID NO: 159583 - RNA, 32 nt, Homo Sapiens
aagcaaauuaguuuuccaacucaugucuggcu

SEQ ID NO: 159584 - RNA, 32 nt, Homo Sapiens
ccacggagcgggcuugaacagggaccaccccu

SEQ ID NO: 159585 - RNA, 32 nt, Homo Sapiens
aaaaugugcuauuugcaaacuuacuuaauauc

SEQ ID NO: 159586 - RNA, 32 nt, Homo Sapiens
cucgggcgacucccgcuuuguuuucugauagg

SEQ ID NO: 159587 - RNA, 32 nt, Homo Sapiens
agccaguaccaaucaauuuggcacucaugaug

SEQ ID NO: 159588 - RNA, 32 nt, Homo Sapiens
auuuucuaccgggucuuggcuucuguucccgc

SEQ ID NO: 159589 - RNA, 32 nt, Homo Sapiens
aauauacaauaguagagaggcaucaugucucc

SEQ ID NO: 159590 - RNA, 32 nt, Homo Sapiens
uuuaaaaaauuaacagccaagucacaaaggua

SEQ ID NO: 159591 - RNA, 32 nt, Homo Sapiens
ggagaccucggcuccuccugcuccugaaccag

SEQ ID NO: 159592 - RNA, 32 nt, Homo Sapiens
aagggagguguugggcucccuuccccauugcu

SEQ ID NO: 159593 - RNA, 32 nt, Homo Sapiens
aauauuagcccugguccuuucacacccacugc

SEQ ID NO: 159594 - RNA, 32 nt, Homo Sapiens
uaaaagaaacagauucuuaacuauugacucuu

SEQ ID NO: 159595 - RNA, 32 nt, Homo Sapiens
gccaucagcuccuuccuccccuguucauucug

SEQ ID NO: 159596 - RNA, 32 nt, Homo Sapiens
caaaguguauagaacaaaguacguacaacucu

SEQ ID NO: 159597 - RNA, 32 nt, Homo Sapiens
uucagaaaucugcaacauaauuuuauaaauau

SEQ ID NO: 159598 - RNA, 32 nt, Homo Sapiens
uguggagucuggcucucuggcuccugugcauu

SEQ ID NO: 159599 - RNA, 32 nt, Homo Sapiens
cuggaacuugaacugauucacaucucauuuuu

SEQ ID NO: 159600 - RNA, 32 nt, Homo Sapiens
auaaauguaaaaaugaaggaauuacauuuuau

SEQ ID NO: 159601 - RNA, 32 nt, Homo Sapiens
uccugcagacugcucuuagcccccuggcuuug

SEQ ID NO: 159602 - RNA, 32 nt, Homo Sapiens
cugccuuaucccagggcugucaccuagagagg

SEQ ID NO: 159603 - RNA, 32 nt, Homo Sapiens
agcaguucuuuuucaguucucauccucuccau

SEQ ID NO: 159604 - RNA, 32 nt, Homo Sapiens
aacgguaaaaauugcuguuuaucuccauuuug

SEQ ID NO: 159605 - RNA, 32 nt, Homo Sapiens
agccaaaaggauuaaaugagaauaaaaugauu

SEQ ID NO: 159606 - RNA, 32 nt, Homo Sapiens
accauacauucuaggaaagaaaacaugccugu

SEQ ID NO: 159607 - RNA, 32 nt, Homo Sapiens
uuuaaacgaaacaaagacaauuuauaauuuga

SEQ ID NO: 159608 - RNA, 32 nt, Homo Sapiens
augcaguuacacaagaacacaucauuagguug

SEQ ID NO: 159609 - RNA, 32 nt, Homo Sapiens
cccugcacucccuccuggagcucugugggucu

SEQ ID NO: 159610 - RNA, 30 nt, Homo Sapiens
gacuggcgagccuugccgccgcccagcccc

SEQ ID NO: 159611 - RNA, 32 nt, Homo Sapiens
ccauuguuuggccgcuuucucuuuuccucuac

SEQ ID NO: 159612 - RNA, 32 nt, Homo Sapiens
aauguuucauggcuuauaccccauugguuuau

SEQ ID NO: 159613 - RNA, 32 nt, Homo Sapiens
cuuugccacccucuccgcuugccugguccccu

SEQ ID NO: 159614 - RNA, 32 nt, Homo Sapiens
uauuuuaguuuuauuuugauuuuuauuuaaua

SEQ ID NO: 159615 - RNA, 32 nt, Homo Sapiens
cuuuuuuauaugcuuauugggcacuuggguau

SEQ ID NO: 159616 - RNA, 32 nt, Homo Sapiens
cccgcuagcugauuuuaacuuuaggaauaaaa

SEQ ID NO: 159617 - RNA, 32 nt, Homo Sapiens
uuguuauuuuaaaaucacaaucuggcuugaau

SEQ ID NO: 159618 - RNA, 32 nt, Homo Sapiens
gcacucccugguuuuuauuugucagugaaauc

SEQ ID NO: 159619 - RNA, 32 nt, Homo Sapiens
guagcugggauuacaggcacccgccaccacgc

SEQ ID NO: 159620 - RNA, 32 nt, Homo Sapiens
aacaucugaccgccuaguaguguccauugguc

SEQ ID NO: 159621 - RNA, 32 nt, Homo Sapiens
gacaagauccuuuucaaaacccgccccaagcc

SEQ ID NO: 159622 - RNA, 32 nt, Homo Sapiens
gacagacaccauuuggggaguauccacagagu

SEQ ID NO: 159623 - RNA, 32 nt, Homo Sapiens
ccacggaguacccucccuccccacccccagcg

SEQ ID NO: 159624 - RNA, 32 nt, Homo Sapiens
ugaccagccccuccccccaggcucagguggga

SEQ ID NO: 159625 - RNA, 32 nt, Homo Sapiens
caaaaacucuucaggucaguucugauagaucc

SEQ ID NO: 159626 - RNA, 32 nt, Homo Sapiens
aaaaauauuuaaaacaaauuuaaaggaucugu

SEQ ID NO: 159627 - RNA, 32 nt, Homo Sapiens
cgugcucggaagcauuccgcgccgggccugcc

SEQ ID NO: 159628 - RNA, 32 nt, Homo Sapiens
gaggagacgccgggacccccugcccgaucgcg

SEQ ID NO: 159629 - RNA, 32 nt, Homo Sapiens
guugcuugacuucuuaaauauggcauugauga

SEQ ID NO: 159630 - RNA, 32 nt, Homo Sapiens
ccccacccaucccugcaaagccauuuuucaga

SEQ ID NO: 159631 - RNA, 32 nt, Homo Sapiens
cuagaugugggcagauuugaaaacaccacuaa

SEQ ID NO: 159632 - RNA, 32 nt, Homo Sapiens
aauaaugcagaaaaaacuuaugaaaacauuca

SEQ ID NO: 159633 - RNA, 28 nt, Homo Sapiens
agucucaaagauuagaaaauugagucau

SEQ ID NO: 159634 - RNA, 32 nt, Homo Sapiens
gucggacgccuggccucccagcccugcccggc

SEQ ID NO: 159635 - RNA, 32 nt, Homo Sapiens
agcucuuugggguuguaauuacccuuaauccu

SEQ ID NO: 159636 - RNA, 32 nt, Homo Sapiens
auaucaauauuuuaaauucaucuuugcuuuuu

SEQ ID NO: 159637 - RNA, 32 nt, Homo Sapiens
aauaccauauaccuuuuaaaacacaguggcag

SEQ ID NO: 159638 - RNA, 32 nt, Homo Sapiens
gauguccggggcacuccugggcagcuuuugcu

SEQ ID NO: 159639 - RNA, 32 nt, Homo Sapiens
gcugugcccaacccugcgacuagcaaggcucg

SEQ ID NO: 159640 - RNA, 32 nt, Homo Sapiens
cagugaaguggaagcauguguuuuguuguuuu

SEQ ID NO: 159641 - RNA, 32 nt, Homo Sapiens
uuggggaaauaaauuuauaagagacuuuauuu

SEQ ID NO: 159642 - RNA, 32 nt, Homo Sapiens
gcugcgccccacccccacucccgccccggccg

SEQ ID NO: 159643 - RNA, 30 nt, Homo Sapiens
gcugaggcagcugagaucgcccugcaggag

SEQ ID NO: 159644 - RNA, 32 nt, Homo Sapiens
cugcaccauggcggcccggcuugucagccgau

SEQ ID NO: 159645 - RNA, 32 nt, Homo Sapiens
cgaugugccuuugauuuaauuugggacacuuu

SEQ ID NO: 159646 - RNA, 32 nt, Homo Sapiens
uuauucaucauucuugaaaaaagaaauaauuc

SEQ ID NO: 159647 - RNA, 32 nt, Homo Sapiens
auuuggugaacauaaugaauguacagaugccc

SEQ ID NO: 159648 - RNA, 32 nt, Homo Sapiens
uugggaaacacuuugaggacauuuaugaugca

SEQ ID NO: 159649 - RNA, 32 nt, Homo Sapiens
augugaccgcgcuccagacccuugcuucucuc

SEQ ID NO: 159650 - RNA, 32 nt, Homo Sapiens
uuccaucccuucccuaccaucaaaagcauacc

SEQ ID NO: 159651 - RNA, 32 nt, Homo Sapiens
gugagggugggaggcagaaaagaggcacaggu

SEQ ID NO: 159652 - RNA, 32 nt, Homo Sapiens
ucgagaccauccuggccaacguggugaagccc

SEQ ID NO: 159653 - RNA, 28 nt, Homo Sapiens
auaaagugaauuaaagccuauuacuguc

SEQ ID NO: 159654 - RNA, 32 nt, Homo Sapiens
cuuuccuuucucucuucaguuccuccagguaa

SEQ ID NO: 159655 - RNA, 32 nt, Homo Sapiens
aaaaugaaacaaaagaaacaauuuaaguauuu

SEQ ID NO: 159656 - RNA, 32 nt, Homo Sapiens
agcugcugugggccuggcagggcuggcaggau

SEQ ID NO: 159657 - RNA, 32 nt, Homo Sapiens
ucauuaaaucucuguuuucucaucuggagauu

SEQ ID NO: 159658 - RNA, 32 nt, Homo Sapiens
uuuagccuugcuucuacuuucagaugcagugc

SEQ ID NO: 159659 - RNA, 27 nt, Homo Sapiens
cccaaguccuucuucuuuucccauuaa

SEQ ID NO: 159660 - RNA, 32 nt, Homo Sapiens
uauauuucacuuucucuuugacuuuagaccuu

SEQ ID NO: 159661 - RNA, 32 nt, Homo Sapiens
aaagaacaauagaacuggucuuccauuuugcc

SEQ ID NO: 159662 - RNA, 32 nt, Homo Sapiens
ucucuacuaaaaaaacaaaacuagcugggggu

SEQ ID NO: 159663 - RNA, 32 nt, Homo Sapiens
gaccugaaagaaaaaaguagggagaacauaau

SEQ ID NO: 159664 - RNA, 32 nt, Homo Sapiens
agaagcuggugcccuuccucacagaguuaaau

SEQ ID NO: 159665 - RNA, 32 nt, Homo Sapiens
guuccauguuccgguuccauccaaauacacuu

SEQ ID NO: 159666 - RNA, 32 nt, Homo Sapiens
uagagcuuccaaaugugucagaauaggaaaac

SEQ ID NO: 159667 - RNA, 32 nt, Homo Sapiens
ucuccccauuguagucccacuugcucuuuccu

SEQ ID NO: 159668 - RNA, 32 nt, Homo Sapiens
cagacauugccagcagcgucagauccuuauau

SEQ ID NO: 159669 - RNA, 31 nt, Homo Sapiens
agacggagggcggagccggcuucgggacugc

SEQ ID NO: 159670 - RNA, 32 nt, Homo Sapiens
ugagggcgccgcuggccggcccucccagcccu

SEQ ID NO: 159671 - RNA, 32 nt, Homo Sapiens
augggaaucaagggguaagggcccgugggcgc

SEQ ID NO: 159672 - RNA, 32 nt, Homo Sapiens
cgacgggcugggcugugcgccugcgcagugug

SEQ ID NO: 159673 - RNA, 32 nt, Homo Sapiens
ggagagaugucgagugacaucuaugugaagag

SEQ ID NO: 159674 - RNA, 32 nt, Homo Sapiens
guuccggugacccauuuccccagccgugucgu

SEQ ID NO: 159675 - RNA, 32 nt, Homo Sapiens
gaugagugguuuucuuuuuccuuuuuuuuuuu

SEQ ID NO: 159676 - RNA, 32 nt, Homo Sapiens
gccgugggcuuaggagagagggaccagcgccc

SEQ ID NO: 159677 - RNA, 32 nt, Homo Sapiens
ucucacgcaaccccaaacucccuguacagaag

SEQ ID NO: 159678 - RNA, 32 nt, Homo Sapiens
ggcagcccugccugcccuccccaucccccgcu

SEQ ID NO: 159679 - RNA, 32 nt, Homo Sapiens
uucugaacaacaaugacaagaaggaaugccua

SEQ ID NO: 159680 - RNA, 32 nt, Homo Sapiens
uagugguuugaaaauaauaauguacugacuac

SEQ ID NO: 159681 - RNA, 32 nt, Homo Sapiens
gcucguaaaaauuuaggcgcugaauaagaauu

SEQ ID NO: 159682 - RNA, 32 nt, Homo Sapiens
uacuucucacuucgcccggcaaggcuggccag

SEQ ID NO: 159683 - RNA, 32 nt, Homo Sapiens
guacaccuucuuuguuaaaaauguacuugcua

SEQ ID NO: 159684 - RNA, 32 nt, Homo Sapiens
gaacuaaggaaauagaaaaucuggagagaagu

SEQ ID NO: 159685 - RNA, 32 nt, Homo Sapiens
cucaaugacaccuuucugauggucuuuacaca

SEQ ID NO: 159686 - RNA, 32 nt, Homo Sapiens
uuggggguccucagagauuaaugauucaucaa

SEQ ID NO: 159687 - RNA, 32 nt, Homo Sapiens
ucuacagagcaugcuuaguaauaaaaacgugg

SEQ ID NO: 159688 - RNA, 32 nt, Homo Sapiens
gcagacacaacacucaguuuuguauuaagagc

SEQ ID NO: 159689 - RNA, 32 nt, Homo Sapiens
acccucccaucccagcugaucccagucacugc

SEQ ID NO: 159690 - RNA, 32 nt, Homo Sapiens
gguaacucgcgucccucgcgcuucuccggcgc

SEQ ID NO: 159691 - RNA, 32 nt, Homo Sapiens
aaacucccgagcucuccuccgcguucgcagcc

SEQ ID NO: 159692 - RNA, 32 nt, Homo Sapiens
gcaugagccaccaugccuggccccacauaaag

SEQ ID NO: 159693 - RNA, 32 nt, Homo Sapiens
accuccccgccagcuggacuccagccauccuc

SEQ ID NO: 159694 - RNA, 32 nt, Homo Sapiens
ccguucucaagggagucagaucaggggaacua

SEQ ID NO: 159695 - RNA, 32 nt, Homo Sapiens
cugcccuccccuccccagcaggaggcaggcau

SEQ ID NO: 159696 - RNA, 32 nt, Homo Sapiens
uucuucaugggacaguagcaaaaacaauuugg

SEQ ID NO: 159697 - RNA, 32 nt, Homo Sapiens
gaauugagcuggccuaucuagagcagcugcau

SEQ ID NO: 159698 - RNA, 32 nt, Homo Sapiens
cuggauacucccucagaaucugucguccagcc

SEQ ID NO: 159699 - RNA, 32 nt, Homo Sapiens
gucuguguuuuuaaguuuuucuuuauucugcu

SEQ ID NO: 159700 - RNA, 32 nt, Homo Sapiens
augccucacuacugccuggagaagggagagau

SEQ ID NO: 159701 - RNA, 32 nt, Homo Sapiens
cuauacuugugcuuauaaaugugcagauucua

SEQ ID NO: 159702 - RNA, 32 nt, Homo Sapiens
cugcccuuucccugcauaugcuucugauggug

SEQ ID NO: 159703 - RNA, 32 nt, Homo Sapiens
uuugcucuauagaauaaaguccugagcuuguu

SEQ ID NO: 159704 - RNA, 32 nt, Homo Sapiens
auuucuucuuuuauguucacaccaccacauuc

SEQ ID NO: 159705 - RNA, 32 nt, Homo Sapiens
gcucuccgggaccgcugcccucacgcgccgca

SEQ ID NO: 159706 - RNA, 32 nt, Homo Sapiens
uacagcuucuucauugacacuguaucucuuga

SEQ ID NO: 159707 - RNA, 32 nt, Homo Sapiens
aaaacguugggucauuuuccugacucuagcug

SEQ ID NO: 159708 - RNA, 32 nt, Homo Sapiens
acugaggcucugcgugugguccguauggaaaa

SEQ ID NO: 159709 - RNA, 32 nt, Homo Sapiens
aaagucucagaaucauacaagcacaacacugu

SEQ ID NO: 159710 - RNA, 32 nt, Homo Sapiens
gccgggaugugucaucgugccaaauaccacau

SEQ ID NO: 159711 - RNA, 32 nt, Homo Sapiens
ugcucccuuuuggacaacuacaaaaaauuuua

SEQ ID NO: 159712 - RNA, 32 nt, Homo Sapiens
cauauaccaaaaagaagcugucuuggauuuaa

SEQ ID NO: 159713 - RNA, 32 nt, Homo Sapiens
aucccaggggguggagggggagaggagagaga

SEQ ID NO: 159714 - RNA, 32 nt, Homo Sapiens
uuggagccggauccggccccggaaacccgacc

SEQ ID NO: 159715 - RNA, 32 nt, Homo Sapiens
cuggggaggcugcaggcaucagagacacuggu

SEQ ID NO: 159716 - RNA, 32 nt, Homo Sapiens
ccuguggugcaaaagcagaaaauacagcugga

SEQ ID NO: 159717 - RNA, 32 nt, Homo Sapiens
agcagcagcagcagcaacaacaacaacuacug

SEQ ID NO: 159718 - RNA, 32 nt, Homo Sapiens
gaggagcugcaaggcucgccccugcccggcgu

SEQ ID NO: 159719 - RNA, 32 nt, Homo Sapiens
cauccucuaauuaaaauuuaauguagaggaac

SEQ ID NO: 159720 - RNA, 32 nt, Homo Sapiens
caaguccugcgaugcuaagugcuuuucuccuc

SEQ ID NO: 159721 - RNA, 32 nt, Homo Sapiens
gaaacauucuuucgaguuuguuuuugucauuu

SEQ ID NO: 159722 - RNA, 32 nt, Homo Sapiens
caaccuuuccacagaguccacacaucacuuca

SEQ ID NO: 159723 - RNA, 32 nt, Homo Sapiens
gcugcauauuuuuuauuuuguuucucuagugu

SEQ ID NO: 159724 - RNA, 32 nt, Homo Sapiens
cuguaggcagugccauuugaccacaccgauca

SEQ ID NO: 159725 - RNA, 32 nt, Homo Sapiens
acuacaggugcaccaccacaccuggcuaauuu

SEQ ID NO: 159726 - RNA, 32 nt, Homo Sapiens
gaggucaggaagcagggguggggggugcaggu

SEQ ID NO: 159727 - RNA, 32 nt, Homo Sapiens
aucugcauuccccaagcuuucuucucccugag

SEQ ID NO: 159728 - RNA, 32 nt, Homo Sapiens
ggaaguaaccaaacaagaagaccucaugagag

SEQ ID NO: 159729 - RNA, 30 nt, Homo Sapiens
ucuaccucagaauuaaaacuuuaaggaagg

SEQ ID NO: 159730 - RNA, 32 nt, Homo Sapiens
aguauuuaauaaaaguuccaaauuucaaaaaa

SEQ ID NO: 159731 - RNA, 32 nt, Homo Sapiens
uaaauuaaaacaaagaaacaaacaaaaaaaaa

SEQ ID NO: 159732 - RNA, 32 nt, Homo Sapiens
ucaggcauaagguuuucucaugcugaaaaaua

SEQ ID NO: 159733 - RNA, 32 nt, Homo Sapiens
acgugacguuggcucuauuacuuucuguuccc

SEQ ID NO: 159734 - RNA, 32 nt, Homo Sapiens
uagcugaaacaaaaaugccagaaggauaauau

SEQ ID NO: 159735 - RNA, 30 nt, Homo Sapiens
ccgcgaugccuggggggugcucccggggcc

SEQ ID NO: 159736 - RNA, 32 nt, Homo Sapiens
agaaaaaggggaggguuaaggaaucauuucag

SEQ ID NO: 159737 - RNA, 32 nt, Homo Sapiens
gucuuuagaaaagaucugaaggaugguaaagc

SEQ ID NO: 159738 - RNA, 32 nt, Homo Sapiens
gcugggacugucagcucauuuaaauguggguc

SEQ ID NO: 159739 - RNA, 32 nt, Homo Sapiens
aacacgugggaauucugggagauacaauucaa

SEQ ID NO: 159740 - RNA, 32 nt, Homo Sapiens
ucuagcagaaaguuaaggggacccuccaugcu

SEQ ID NO: 159741 - RNA, 32 nt, Homo Sapiens
uuacauggaaaugugacuguguugcuuuuucc

SEQ ID NO: 159742 - RNA, 32 nt, Homo Sapiens
aagccuuagauuauuacauuacggguuggaac

SEQ ID NO: 159743 - RNA, 32 nt, Homo Sapiens
gcgggggguggcggcgcggcugccgggaaccc

SEQ ID NO: 159744 - RNA, 32 nt, Homo Sapiens
aaaggccauuuucuguaugcuaugaacuguua

SEQ ID NO: 159745 - RNA, 32 nt, Homo Sapiens
auguuucuuuuuucauuuuugccagucuguua

SEQ ID NO: 159746 - RNA, 32 nt, Homo Sapiens
ucucccugccuuuucaauguccugcggggcgg

SEQ ID NO: 159747 - RNA, 32 nt, Homo Sapiens
cucccuuacaagcauguguaccuaucaaaaga

SEQ ID NO: 159748 - RNA, 32 nt, Homo Sapiens
gccgcuccuccaggccuggccgugcccgcuca

SEQ ID NO: 159749 - RNA, 32 nt, Homo Sapiens
ccuggauggcccggccccggggcccguacaca

SEQ ID NO: 159750 - RNA, 32 nt, Homo Sapiens
cuuggagccucaggcggggcuccggagauaga

SEQ ID NO: 159751 - RNA, 32 nt, Homo Sapiens
acggcuggacagcacgcgcgggcugcugugcu

SEQ ID NO: 159752 - RNA, 32 nt, Homo Sapiens
aucuccccagcuugcugcuccugccucauccc

SEQ ID NO: 159753 - RNA, 32 nt, Homo Sapiens
ggaauguaaaucuuuuauuaaaacaguugucu

SEQ ID NO: 159754 - RNA, 32 nt, Homo Sapiens
ggggagugucggcugugaaaucugcaaaaaga

SEQ ID NO: 159755 - RNA, 32 nt, Homo Sapiens
gccugggaacgaacaaggaccagucucugagc

SEQ ID NO: 159756 - RNA, 32 nt, Homo Sapiens
auagcaaagcaucauagauugcugauuuaaac

SEQ ID NO: 159757 - RNA, 32 nt, Homo Sapiens
aaagugggcgguuugucuuuugaucuuucccu

SEQ ID NO: 159758 - RNA, 32 nt, Homo Sapiens
aaaucuugugauuauuaaaauaaaguaccauu

SEQ ID NO: 159759 - RNA, 32 nt, Homo Sapiens
ccagacuccuagccccgaggugcugauggaga

SEQ ID NO: 159760 - RNA, 32 nt, Homo Sapiens
cagagccgaggcgggcgggggugagaacauca

SEQ ID NO: 159761 - RNA, 32 nt, Homo Sapiens
uucuuucuugaaaacuaaacguuuaacguaua

SEQ ID NO: 159762 - RNA, 32 nt, Homo Sapiens
ucuggccuuuugcuguaacaugccugugucac

SEQ ID NO: 159763 - RNA, 32 nt, Homo Sapiens
ggugaaugacuggugugccuucuguggccugg

SEQ ID NO: 159764 - RNA, 31 nt, Homo Sapiens
guuuuacagaagaaaaaaugugauaaagcga

SEQ ID NO: 159765 - RNA, 32 nt, Homo Sapiens
agccaaggaaaauacucaugcaaccagccuga

SEQ ID NO: 159766 - RNA, 32 nt, Homo Sapiens
aagaguauuacuuuuccuacaacagaaccugg

SEQ ID NO: 159767 - RNA, 30 nt, Homo Sapiens
gcgcgggcgcccgccauccgccgccuacuu

SEQ ID NO: 159768 - RNA, 32 nt, Homo Sapiens
ugccccccaaccccacuccaacuccuucucca

SEQ ID NO: 159769 - RNA, 32 nt, Homo Sapiens
uguauuauagaaaaaauaaaaacuacaaucau

SEQ ID NO: 159770 - RNA, 32 nt, Homo Sapiens
uaccaccaacuuucugacuaagcuaaaaauga

SEQ ID NO: 159771 - RNA, 32 nt, Homo Sapiens
ccaggguccggccugcgccuucccgccaggcc

SEQ ID NO: 159772 - RNA, 32 nt, Homo Sapiens
gugaggcgccgcuggacccgggacgaccugcc

SEQ ID NO: 159773 - RNA, 32 nt, Homo Sapiens
uaggaggaggucggggaagcccucccuaagca

SEQ ID NO: 159774 - RNA, 32 nt, Homo Sapiens
cgaggcagagacuguaggaauaauguucacua

SEQ ID NO: 159775 - RNA, 32 nt, Homo Sapiens
ucgccuuuuuauuuuuaauuuuuguuuuuguu

SEQ ID NO: 159776 - RNA, 32 nt, Homo Sapiens
acaaacuuauacugaaaagauacgagaaaugu

SEQ ID NO: 159777 - RNA, 32 nt, Homo Sapiens
agaguagucuuccuuuuccccacguucagugu

SEQ ID NO: 159778 - RNA, 32 nt, Homo Sapiens
ccggcaggcgcgacaugagccuggucuggcau

SEQ ID NO: 159779 - RNA, 32 nt, Homo Sapiens
ugcccaugcacccacaccuaugcucaugcaca

SEQ ID NO: 159780 - RNA, 32 nt, Homo Sapiens
gagugcgagguucuuaggggccgugcccacca

SEQ ID NO: 159781 - RNA, 32 nt, Homo Sapiens
cugcauggggaaggaguguucccagcuugcaa

SEQ ID NO: 159782 - RNA, 32 nt, Homo Sapiens
ucuugcucccuucagcccccagccccuccccc

SEQ ID NO: 159783 - RNA, 32 nt, Homo Sapiens
gcagcgcgacucgggagccccgggccacagcc

SEQ ID NO: 159784 - RNA, 32 nt, Homo Sapiens
ucuguguuuaucauuagccuuguacaaaugua

SEQ ID NO: 159785 - RNA, 32 nt, Homo Sapiens
ugcacugccccggcucccccgcggcccccacg

SEQ ID NO: 159786 - RNA, 32 nt, Homo Sapiens
agccaucauuggcuucuaaugaugagccugag

SEQ ID NO: 159787 - RNA, 32 nt, Homo Sapiens
uuccuucagggugaugccaaguucuauuugga

SEQ ID NO: 159788 - RNA, 32 nt, Homo Sapiens
aaguaacaucaacacugucccauccucagccc

SEQ ID NO: 159789 - RNA, 30 nt, Homo Sapiens
gcugcagccacccuucucaucuggaucggg

SEQ ID NO: 159790 - RNA, 32 nt, Homo Sapiens
ucugcuguuuuuuuuuuuuuuaauugcaacug

SEQ ID NO: 159791 - RNA, 32 nt, Homo Sapiens
acuccugagguccuaucuccaggcugcgguga

SEQ ID NO: 159792 - RNA, 32 nt, Homo Sapiens
guggcgucucugugcgcagccggcgcugccuc

SEQ ID NO: 159793 - RNA, 32 nt, Homo Sapiens
uugcuaaaaugaaaaucauuuaaauuaugauu

SEQ ID NO: 159794 - RNA, 32 nt, Homo Sapiens
aaacccagggggaccacacacacacacacaca

SEQ ID NO: 159795 - RNA, 32 nt, Homo Sapiens
uuucuuagguauuagcaaucuugcuuauaaaa

SEQ ID NO: 159796 - RNA, 32 nt, Homo Sapiens
aauuugaagaaccuggaauuaguagaauucua

SEQ ID NO: 159797 - RNA, 32 nt, Homo Sapiens
cacagaaaacaucagggucuuggaacaccaga

SEQ ID NO: 159798 - RNA, 32 nt, Homo Sapiens
aaagccagccucagccccuucuccauuaacaa

SEQ ID NO: 159799 - RNA, 32 nt, Homo Sapiens
cugcagaggcggauuucccugacugaagacca

SEQ ID NO: 159800 - RNA, 32 nt, Homo Sapiens
gagcgccccaccccacaucucccggccucggg

SEQ ID NO: 159801 - RNA, 32 nt, Homo Sapiens
agggccgcgaguucgaguuccucaugcgccag

SEQ ID NO: 159802 - RNA, 32 nt, Homo Sapiens
aguauuguaaaauaaacaugagaacaaauaau

SEQ ID NO: 159803 - RNA, 32 nt, Homo Sapiens
ccucccggccccagccuccugccugccucucc

SEQ ID NO: 159804 - RNA, 32 nt, Homo Sapiens
gcagaaagaaaaaucaagaggacccaagggga

SEQ ID NO: 159805 - RNA, 32 nt, Homo Sapiens
aggcuggcguaguggggcagcugcugaccaaa

SEQ ID NO: 159806 - RNA, 32 nt, Homo Sapiens
cagaauuuuggcguucaguauaagagaauggu

SEQ ID NO: 159807 - RNA, 32 nt, Homo Sapiens
uuucuccaucuccuugaauauggguaauggau

SEQ ID NO: 159808 - RNA, 32 nt, Homo Sapiens
gcugugguguguguccucuccucuccgcaucc

SEQ ID NO: 159809 - RNA, 32 nt, Homo Sapiens
gucguggcgcccaucccuccccuguucugcug

SEQ ID NO: 159810 - RNA, 32 nt, Homo Sapiens
uuguguuuuuaaauuauuuucuuuaucuuguu

SEQ ID NO: 159811 - RNA, 32 nt, Homo Sapiens
gugcagagccugggggcgcccaaagcguuaag

SEQ ID NO: 159812 - RNA, 32 nt, Homo Sapiens
uaaaacaggaggagggagggauuuguggugac

SEQ ID NO: 159813 - RNA, 32 nt, Homo Sapiens
gaaagguuaaagagaaaugacuuuuuaggaac

SEQ ID NO: 159814 - RNA, 32 nt, Homo Sapiens
gaguagggacagggcugcaucugaaucggaag

SEQ ID NO: 159815 - RNA, 32 nt, Homo Sapiens
uguauguuuucauaaacacuuuucucacacag

SEQ ID NO: 159816 - RNA, 28 nt, Homo Sapiens
guaaugguggcuacccaugaggcaauau

SEQ ID NO: 159817 - RNA, 32 nt, Homo Sapiens
acaauaaguggcaaccaauuaucuuaacauug

SEQ ID NO: 159818 - RNA, 32 nt, Homo Sapiens
ugguaagaguuccauaccgggcuacaauucuu

SEQ ID NO: 159819 - RNA, 32 nt, Homo Sapiens
gaaaaaagaaauuuauugcugaucacaaggac

SEQ ID NO: 159820 - RNA, 32 nt, Homo Sapiens
cauuuuaaccggaaacaaucccugaacccaca

SEQ ID NO: 159821 - RNA, 32 nt, Homo Sapiens
cuuggucuugcauaaggcaguuccuggagacc

SEQ ID NO: 159822 - RNA, 32 nt, Homo Sapiens
ccucgguaacccagccgcuggcaccaugaacc

SEQ ID NO: 159823 - RNA, 32 nt, Homo Sapiens
gaaacaccgucuccacuaaaaauagaaaaauu

SEQ ID NO: 159824 - RNA, 32 nt, Homo Sapiens
ugugcuaauuaggauuugagggugugggaccc

SEQ ID NO: 159825 - RNA, 32 nt, Homo Sapiens
gauuuuaaaaacaugagaaaugugaacuguga

SEQ ID NO: 159826 - RNA, 32 nt, Homo Sapiens
auuucuccacaaguggaccccacacagucgag

SEQ ID NO: 159827 - RNA, 32 nt, Homo Sapiens
aaaauuuuaugaaaaugaacauguuuuuauga

SEQ ID NO: 159828 - RNA, 32 nt, Homo Sapiens
uuucagguggauuuuuaccuuuguuccuuuug

SEQ ID NO: 159829 - RNA, 32 nt, Homo Sapiens
uugcuucuauagagcaucagcccucauguuuc

SEQ ID NO: 159830 - RNA, 32 nt, Homo Sapiens
uuaguagauugugacuguguugaucuuugugc

SEQ ID NO: 159831 - RNA, 32 nt, Homo Sapiens
ccgcgggcgucccucgcgucucuucacugcac

SEQ ID NO: 159832 - RNA, 31 nt, Homo Sapiens
cgcaggagggcggucuuccccggcucgccaa

SEQ ID NO: 159833 - RNA, 32 nt, Homo Sapiens
aggcggcucccucccugcgcagcccggagccc

SEQ ID NO: 159834 - RNA, 30 nt, Homo Sapiens
uuguucucacucccgccccaucuuaaugua

SEQ ID NO: 159835 - RNA, 32 nt, Homo Sapiens
aaacaaaacaaccuuguaaaucaaaugagcau

SEQ ID NO: 159836 - RNA, 32 nt, Homo Sapiens
uugcuuuuugcagacacugucaucucucaagu

SEQ ID NO: 159837 - RNA, 32 nt, Homo Sapiens
accagggagaagaacgaggccuugcuggggga

SEQ ID NO: 159838 - RNA, 32 nt, Homo Sapiens
acgcccggguacccgccagagccccgacgccg

SEQ ID NO: 159839 - RNA, 32 nt, Homo Sapiens
uuuaacauuucugagguuuggagauuaagcgg

SEQ ID NO: 159840 - RNA, 32 nt, Homo Sapiens
uuaaugguggccuggguugugucuuccccugg

SEQ ID NO: 159841 - RNA, 32 nt, Homo Sapiens
cacgugccaaacugugguaaauuuuuaucaau

SEQ ID NO: 159842 - RNA, 32 nt, Homo Sapiens
uuugaugcccucaaaagaaguugucggaugug

SEQ ID NO: 159843 - RNA, 32 nt, Homo Sapiens
ugcuaagauuguguuggucgcucucugaagca

SEQ ID NO: 159844 - RNA, 32 nt, Homo Sapiens
cgucccuuugaaaggggaaugagagccaggau

SEQ ID NO: 159845 - RNA, 31 nt, Homo Sapiens
cugaggugggcggaucgcucgagcccagaag

SEQ ID NO: 159846 - RNA, 32 nt, Homo Sapiens
auguacauuuauauugaaaaacaaaugagaug

SEQ ID NO: 159847 - RNA, 32 nt, Homo Sapiens
uuuaaaaacaacaacaaagaaggcagagccag

SEQ ID NO: 159848 - RNA, 32 nt, Homo Sapiens
cgccuuguggcgcgcccggcccagccgguggc

SEQ ID NO: 159849 - RNA, 32 nt, Homo Sapiens
guggagcagcuggagguaaggcugggcccugg

SEQ ID NO: 159850 - RNA, 32 nt, Homo Sapiens
ccuggggaagagcagcagcagcagcggcggcc

SEQ ID NO: 159851 - RNA, 32 nt, Homo Sapiens
uuuuuauuaaccauuacagauuuuacaaacag

SEQ ID NO: 159852 - RNA, 32 nt, Homo Sapiens
agcucacugcaaacaacuggaauugagguugc

SEQ ID NO: 159853 - RNA, 32 nt, Homo Sapiens
cuguacuucaggguugaugcuggccauuuggu

SEQ ID NO: 159854 - RNA, 29 nt, Homo Sapiens
auuugcauauguaugauagugugcaugug

SEQ ID NO: 159855 - RNA, 32 nt, Homo Sapiens
uagaaauugacaaagaaggugugauugaacca

SEQ ID NO: 159856 - RNA, 32 nt, Homo Sapiens
gaccauggugucacuuguagcaugucaaucac

SEQ ID NO: 159857 - RNA, 32 nt, Homo Sapiens
cuaaauacuuuuuucuauuuuguuagauuuug

SEQ ID NO: 159858 - RNA, 32 nt, Homo Sapiens
uucauagcaauuuuugacaaguaagauugcaa

SEQ ID NO: 159859 - RNA, 32 nt, Homo Sapiens
cccucucagguggaaggcagggcggucucacu

SEQ ID NO: 159860 - RNA, 32 nt, Homo Sapiens
cagggguggccaggagauagugagcagcuccc

SEQ ID NO: 159861 - RNA, 32 nt, Homo Sapiens
uugcugucagggcagcaguuccaguucuguaa

SEQ ID NO: 159862 - RNA, 32 nt, Homo Sapiens
guggcggggaggaggaggaggacaaggacucc

SEQ ID NO: 159863 - RNA, 32 nt, Homo Sapiens
uaccuguaacugugucuguuuuaccaagcugg

SEQ ID NO: 159864 - RNA, 32 nt, Homo Sapiens
uaaggacacuucuccuuccccuccucgaagcu

SEQ ID NO: 159865 - RNA, 29 nt, Homo Sapiens
ugaacugugacuuugagcugccagguugu

SEQ ID NO: 159866 - RNA, 32 nt, Homo Sapiens
uuuuuacccaagucaagcugcacaucuauuau

SEQ ID NO: 159867 - RNA, 32 nt, Homo Sapiens
caguccaaagauguaaguuaucuuacacauaa

SEQ ID NO: 159868 - RNA, 32 nt, Homo Sapiens
cucugcccuccggccaggccgccccgcugucc

SEQ ID NO: 159869 - RNA, 30 nt, Homo Sapiens
ucaagaggcaggcgcagcggcuaaucgagg

SEQ ID NO: 159870 - RNA, 32 nt, Homo Sapiens
ccucagccgggcccgggcgcagcgcugcggag

SEQ ID NO: 159871 - RNA, 32 nt, Homo Sapiens
cuuugaugucuucauggacuuaggguaauauu

SEQ ID NO: 159872 - RNA, 32 nt, Homo Sapiens
aggucgaggcugcagugagcugugauuaccuc

SEQ ID NO: 159873 - RNA, 31 nt, Homo Sapiens
caauuuuguaacaugaugcaagugucuggca

SEQ ID NO: 159874 - RNA, 32 nt, Homo Sapiens
ggucugaugcaccagcagccagaugaagacag

SEQ ID NO: 159875 - RNA, 32 nt, Homo Sapiens
ucugauaugugacuuugaggccaaugagucau

SEQ ID NO: 159876 - RNA, 32 nt, Homo Sapiens
ugcuuccccgucugacuguccuugacuucuag

SEQ ID NO: 159877 - RNA, 32 nt, Homo Sapiens
gacuugaccugcgucugaugcuauggggccuc

SEQ ID NO: 159878 - RNA, 32 nt, Homo Sapiens
aggugggcgagggacuaggggaccgcgugagg

SEQ ID NO: 159879 - RNA, 32 nt, Homo Sapiens
cucuacuccaacaaacugugucuuuaaggauc

SEQ ID NO: 159880 - RNA, 32 nt, Homo Sapiens
gugcgguggugaggaguggcaauggcgcaugu

SEQ ID NO: 159881 - RNA, 32 nt, Homo Sapiens
auuguuguuuuaaugaucuguuuuuagcugga

SEQ ID NO: 159882 - RNA, 32 nt, Homo Sapiens
ucaagcaauucuccugccccagccuccugagu

SEQ ID NO: 159883 - RNA, 32 nt, Homo Sapiens
gcgcucgcaccucucccggcgcccgggcgcuc

SEQ ID NO: 159884 - RNA, 32 nt, Homo Sapiens
auauuuuuguuucaaagaaacaucucaauaca

SEQ ID NO: 159885 - RNA, 32 nt, Homo Sapiens
gaaggcuccguggucggacuucugggcuguuc

SEQ ID NO: 159886 - RNA, 32 nt, Homo Sapiens
agccccgcccucugcgucccccggcccucagg

SEQ ID NO: 159887 - RNA, 32 nt, Homo Sapiens
aaauugcugaccugggucagugcaugugcuuu

SEQ ID NO: 159888 - RNA, 32 nt, Homo Sapiens
cuaucaccauuacuuuuuuuuaagucacaauu

SEQ ID NO: 159889 - RNA, 32 nt, Homo Sapiens
acacaguugcugucauaagaaugaauaauaau

SEQ ID NO: 159890 - RNA, 32 nt, Homo Sapiens
acaguaguauguucuuuuuuuggaacagggua

SEQ ID NO: 159891 - RNA, 32 nt, Homo Sapiens
uucuguugucagugacuuugagcugagugcug

SEQ ID NO: 159892 - RNA, 32 nt, Homo Sapiens
agcaugugaaaauuauauaaaauucaaauuuu

SEQ ID NO: 159893 - RNA, 32 nt, Homo Sapiens
ucacggggccaggccugcagccaggucuccua

SEQ ID NO: 159894 - RNA, 32 nt, Homo Sapiens
caaaucccgcucuccgcccgccgcccgcggaa

SEQ ID NO: 159895 - RNA, 31 nt, Homo Sapiens
gauugucucguuuuccugccaaauaaacagg

SEQ ID NO: 159896 - RNA, 32 nt, Homo Sapiens
agcggaggaggugcuuggcgcuucucaggcuc

SEQ ID NO: 159897 - RNA, 32 nt, Homo Sapiens
cgggcagccccggcgggcucugggacuugcug

SEQ ID NO: 159898 - RNA, 32 nt, Homo Sapiens
uauuauauuauuuaauuguccuguucuaaaac

SEQ ID NO: 159899 - RNA, 32 nt, Homo Sapiens
gccagguuacgcaacaggcauucugucauguu

SEQ ID NO: 159900 - RNA, 32 nt, Homo Sapiens
agcgcagccaggccagcucuggggucucggca

SEQ ID NO: 159901 - RNA, 32 nt, Homo Sapiens
aguaugagagcagagguuuaucaguguuaugc

SEQ ID NO: 159902 - RNA, 32 nt, Homo Sapiens
aggcaucugcccgcgccagucaggcccagugg

SEQ ID NO: 159903 - RNA, 32 nt, Homo Sapiens
cuuuguuuauccuuccuauuaagagccucuga

SEQ ID NO: 159904 - RNA, 32 nt, Homo Sapiens
uccgaauccucuucccacccagcccgcgccuu

SEQ ID NO: 159905 - RNA, 32 nt, Homo Sapiens
cucagcagggugggggucuuccuccuuacucu

SEQ ID NO: 159906 - RNA, 32 nt, Homo Sapiens
cggccggcggcauggcccugucguccgaaccc

SEQ ID NO: 159907 - RNA, 32 nt, Homo Sapiens
gaacugaaguaaaucauuucagcuuauaguuc

SEQ ID NO: 159908 - RNA, 32 nt, Homo Sapiens
ucgugucgccauggggcagaucgagugggcca

SEQ ID NO: 159909 - RNA, 32 nt, Homo Sapiens
uuacaaauguaaucgaugugggaagugcuuua

SEQ ID NO: 159910 - RNA, 32 nt, Homo Sapiens
auauacaccauguuuuuuccuggcacaucacu

SEQ ID NO: 159911 - RNA, 32 nt, Homo Sapiens
gcuaccccugucaguuuccccgugucaguuuc

SEQ ID NO: 159912 - RNA, 32 nt, Homo Sapiens
ccacaaaggaugccuccacaccuaccacuacc

SEQ ID NO: 159913 - RNA, 32 nt, Homo Sapiens
uccaugcugucauggaugcuguuuaugggaug

SEQ ID NO: 159914 - RNA, 32 nt, Homo Sapiens
uauguaauaauuguauuaaaaagcauauuuga

SEQ ID NO: 159915 - RNA, 32 nt, Homo Sapiens
aaauguuuuuauuuugguaauuuugucaugcu

SEQ ID NO: 159916 - RNA, 32 nt, Homo Sapiens
gaggacauuauuuuuauuuugagcuuuaaaaa

SEQ ID NO: 159917 - RNA, 32 nt, Homo Sapiens
aaaagguuuuuugcccucccccuuguguauau

SEQ ID NO: 159918 - RNA, 32 nt, Homo Sapiens
accucugccucccagguucaagcgguucuccu

SEQ ID NO: 159919 - RNA, 32 nt, Homo Sapiens
gaacgcaggcgcacgcucuggcgcgggaggcg

SEQ ID NO: 159920 - RNA, 32 nt, Homo Sapiens
uacagagagauauuuuugcaacuauuuccacc

SEQ ID NO: 159921 - RNA, 32 nt, Homo Sapiens
gcugaaucaguucucuaauauuuuaccucauu

SEQ ID NO: 159922 - RNA, 32 nt, Homo Sapiens
uuagguaucuaagaucuuugaacaccuggacc

SEQ ID NO: 159923 - RNA, 32 nt, Homo Sapiens
ugguauagaaauugauuuuucuugguguagaa

SEQ ID NO: 159924 - RNA, 32 nt, Homo Sapiens
uaauaugcugaauaauaauacagcgaauauua

SEQ ID NO: 159925 - RNA, 32 nt, Homo Sapiens
gcccagggagcccccagaggacuuuauucgga

SEQ ID NO: 159926 - RNA, 30 nt, Homo Sapiens
cuccacagacagaugggggaggccuggguc

SEQ ID NO: 159927 - RNA, 32 nt, Homo Sapiens
ccaagacugucaauuugauguccuugaguuuc

SEQ ID NO: 159928 - RNA, 32 nt, Homo Sapiens
cuccuccgaggcucugggcugcacccacaggu

SEQ ID NO: 159929 - RNA, 32 nt, Homo Sapiens
auaugucugaucuaucucugcucgcuguucuc

SEQ ID NO: 159930 - RNA, 32 nt, Homo Sapiens
gaaccaccuucugcacuuaaagaagucuaaca

SEQ ID NO: 159931 - RNA, 32 nt, Homo Sapiens
cgggucggccccagccaggcccccuucgaacc

SEQ ID NO: 159932 - RNA, 32 nt, Homo Sapiens
ggcuauacuccagcuggccaaggcuggaaacc

SEQ ID NO: 159933 - RNA, 32 nt, Homo Sapiens
aaucagcucccucuuugcuccucuggggcagc

SEQ ID NO: 159934 - RNA, 32 nt, Homo Sapiens
aggccauccgcaucuuuucuuaaggcagcggg

SEQ ID NO: 159935 - RNA, 32 nt, Homo Sapiens
acauacauauauauaguugacacuugaaaaau

SEQ ID NO: 159936 - RNA, 32 nt, Homo Sapiens
aacaaccaaggguggggauaccagucagguac

SEQ ID NO: 159937 - RNA, 32 nt, Homo Sapiens
aauuaucuggauuuagugguguguaccuguag

SEQ ID NO: 159938 - RNA, 32 nt, Homo Sapiens
gcagcuacaccuggagcaaggucucuucccgg

SEQ ID NO: 159939 - RNA, 32 nt, Homo Sapiens
agcagcggaggcgggcggcgcgcaggccugcc

SEQ ID NO: 159940 - RNA, 32 nt, Homo Sapiens
cgcaaccucgcgguuccuggggugcuugugcc

SEQ ID NO: 159941 - RNA, 32 nt, Homo Sapiens
uuacaggugugagccacugcgcccagccuaua

SEQ ID NO: 159942 - RNA, 32 nt, Homo Sapiens
cuuuucuugacaauuagauaccuauccuguag

SEQ ID NO: 159943 - RNA, 32 nt, Homo Sapiens
ggcagcugugcugggugagcucuuccaggagc

SEQ ID NO: 159944 - RNA, 32 nt, Homo Sapiens
cacagaugaagauggaacuaagccgaguaaga

SEQ ID NO: 159945 - RNA, 32 nt, Homo Sapiens
ucacuugucacccaagcuccaaccacagagag

SEQ ID NO: 159946 - RNA, 32 nt, Homo Sapiens
uuauaguuuauugcuucauauuuaaguuuagu

SEQ ID NO: 159947 - RNA, 32 nt, Homo Sapiens
aacaaagcuuuuuaaacuuaugcacagagaaa

SEQ ID NO: 159948 - RNA, 32 nt, Homo Sapiens
aguguggauuaucuuugcuaccuguguuaaag

SEQ ID NO: 159949 - RNA, 32 nt, Homo Sapiens
ucugagauugggacugugauguugggaccuga

SEQ ID NO: 159950 - RNA, 32 nt, Homo Sapiens
cuucuuacgacauuaaauuugguggaccaagc

SEQ ID NO: 159951 - RNA, 32 nt, Homo Sapiens
uugugggaccugcggcagcuggggacggaguc

SEQ ID NO: 159952 - RNA, 32 nt, Homo Sapiens
ugguggucugggggguuggaaggggcgggaag

SEQ ID NO: 159953 - RNA, 32 nt, Homo Sapiens
caucuuggaaucguggagguguuguaaaggaa

SEQ ID NO: 159954 - RNA, 32 nt, Homo Sapiens
uguguaccugcccuuccaaaccucacaggaga

SEQ ID NO: 159955 - RNA, 32 nt, Homo Sapiens
gggacuccgaccucagccucccggugaagguc

SEQ ID NO: 159956 - RNA, 32 nt, Homo Sapiens
ugucuuguguuguguaggagcugggcuuuaaa

SEQ ID NO: 159957 - RNA, 32 nt, Homo Sapiens
gggggugugggcccaggcagggcuggggugug

SEQ ID NO: 159958 - RNA, 32 nt, Homo Sapiens
agaccagccugggaaaaauagcaagaccuugc

SEQ ID NO: 159959 - RNA, 32 nt, Homo Sapiens
cuuucacugauuuuuguauuuauaaaugaauu

SEQ ID NO: 159960 - RNA, 32 nt, Homo Sapiens
uggugucgaucgccggccuccucuacgcgcug

SEQ ID NO: 159961 - RNA, 32 nt, Homo Sapiens
gugugcaaggcacucccauggcaccguauuua

SEQ ID NO: 159962 - RNA, 32 nt, Homo Sapiens
ucuucucggcuccuugguggguuguuucugga

SEQ ID NO: 159963 - RNA, 32 nt, Homo Sapiens
acaaguuauuuucaacucaauuuuaugacuug

SEQ ID NO: 159964 - RNA, 32 nt, Homo Sapiens
cuucauucccccuccuguggugagggcuaggu

SEQ ID NO: 159965 - RNA, 32 nt, Homo Sapiens
aaauuaaaauggaugccuugaauaauaagcag

SEQ ID NO: 159966 - RNA, 32 nt, Homo Sapiens
accuccccccuucucccccuucccacugugau

SEQ ID NO: 159967 - RNA, 32 nt, Homo Sapiens
aaaggggcggccccauccugcugacgucaggc

SEQ ID NO: 159968 - RNA, 32 nt, Homo Sapiens
accuccgcuuugcacggaagaaucuggaugcu

SEQ ID NO: 159969 - RNA, 32 nt, Homo Sapiens
cuucagagcgccaccuccagaucagaugggga

SEQ ID NO: 159970 - RNA, 32 nt, Homo Sapiens
aggucugcacacauaacacacaucaguccacc

SEQ ID NO: 159971 - RNA, 32 nt, Homo Sapiens
guuuuucuucccuuugucagucuucgcaucca

SEQ ID NO: 159972 - RNA, 32 nt, Homo Sapiens
gaugucugacugcaagcugacaaugccacucu

SEQ ID NO: 159973 - RNA, 32 nt, Homo Sapiens
uugguucagaggagauuuuaaauauugaauga

SEQ ID NO: 159974 - RNA, 32 nt, Homo Sapiens
cuucccgggccucgucugucuggguccuuugg

SEQ ID NO: 159975 - RNA, 32 nt, Homo Sapiens
uacaguauaacugaugauccuucuuucauugu

SEQ ID NO: 159976 - RNA, 32 nt, Homo Sapiens
uuaugaaaaaauaugaaccuauuuucauuugu

SEQ ID NO: 159977 - RNA, 32 nt, Homo Sapiens
gugcacagacacacggguggacaggaggcaga

SEQ ID NO: 159978 - RNA, 32 nt, Homo Sapiens
ucuacagaaauauuuaaggcuggaguuuggaa

SEQ ID NO: 159979 - RNA, 32 nt, Homo Sapiens
guuucaacaaaacuucgaaacaaaauggaaga

SEQ ID NO: 159980 - RNA, 32 nt, Homo Sapiens
cagauaacaaagucaggagauugagaccgucc

SEQ ID NO: 159981 - RNA, 32 nt, Homo Sapiens
uaaaauucaccauuuuaauuauaauaaaaaua

SEQ ID NO: 159982 - RNA, 32 nt, Homo Sapiens
gagcacccugaagagagagugguaacagcgcc

SEQ ID NO: 159983 - RNA, 32 nt, Homo Sapiens
cagacgcaaggcuuucugugggcccccaagug

SEQ ID NO: 159984 - RNA, 32 nt, Homo Sapiens
ugcccgagagcgagcucuggccucccaggcgc

SEQ ID NO: 159985 - RNA, 32 nt, Homo Sapiens
ccgggcgcggugacucaagccuguaucccagc

SEQ ID NO: 159986 - RNA, 32 nt, Homo Sapiens
gguaagggggaaggagugugcgugggacgggg

SEQ ID NO: 159987 - RNA, 32 nt, Homo Sapiens
gaacaaagaaacaaauaaagccuuuaacacag

SEQ ID NO: 159988 - RNA, 32 nt, Homo Sapiens
agauuugaucagaaauucucuugcuugagaga

SEQ ID NO: 159989 - RNA, 32 nt, Homo Sapiens
acaaacauauuuguuaaauauuuacauaugaa

SEQ ID NO: 159990 - RNA, 32 nt, Homo Sapiens
cucaucucgccuggccucccccugagucagug

SEQ ID NO: 159991 - RNA, 31 nt, Homo Sapiens
guguggaaauaaaaauguauuguacuuuugg

SEQ ID NO: 159992 - RNA, 30 nt, Homo Sapiens
gaaguucaccaugucuauucucaagaucca

SEQ ID NO: 159993 - RNA, 32 nt, Homo Sapiens
uuuguauuuuuagaacaggugugguuucacca

SEQ ID NO: 159994 - RNA, 32 nt, Homo Sapiens
cugagcccugucacccuuccaggacacccacc

SEQ ID NO: 159995 - RNA, 32 nt, Homo Sapiens
aggguccugaugcaacggagggggcgcuaggg

SEQ ID NO: 159996 - RNA, 32 nt, Homo Sapiens
gauugccggcgcaucagggccgagggcugggg

SEQ ID NO: 159997 - RNA, 32 nt, Homo Sapiens
ccgccucaacgcacuucgcggaccucagcccu

SEQ ID NO: 159998 - RNA, 32 nt, Homo Sapiens
uuuauaaucaacaaauaguuauggaaaauucg

SEQ ID NO: 159999 - RNA, 32 nt, Homo Sapiens
uuugauguuucuggacaguaaauauuugaaau

SEQ ID NO: 160000 - RNA, 32 nt, Homo Sapiens
aaauccuggcucuaccacuugucaguggugua

SEQ ID NO: 160001 - RNA, 32 nt, Homo Sapiens
ccagggcaaggccaagugggggugggcuuugg

SEQ ID NO: 160002 - RNA, 32 nt, Homo Sapiens
gccuugccuugcgccuuaggugagaagcauaa

SEQ ID NO: 160003 - RNA, 32 nt, Homo Sapiens
cuuccggaacauguucuucaccaccuuuugga

SEQ ID NO: 160004 - RNA, 32 nt, Homo Sapiens
ccccuccagggcuccugcagccucgccgcgau

SEQ ID NO: 160005 - RNA, 32 nt, Homo Sapiens
agcccagcaggcgcuggccguccccgcggaaa

SEQ ID NO: 160006 - RNA, 32 nt, Homo Sapiens
ggauucguugugaaauggaacugucccauuua

SEQ ID NO: 160007 - RNA, 32 nt, Homo Sapiens
agcaacaaagcucagcuggggaacgagaguaa

SEQ ID NO: 160008 - RNA, 32 nt, Homo Sapiens
acaaauauguguaucucugaaauaaugaaaua

SEQ ID NO: 160009 - RNA, 32 nt, Homo Sapiens
aauuuuuaguaguaauuauuuaccaaacuuaa

SEQ ID NO: 160010 - RNA, 32 nt, Homo Sapiens
ugauuuggagggcugauguggacuuggcaccu

SEQ ID NO: 160011 - RNA, 32 nt, Homo Sapiens
gggagcucaacauggacuugugcgaggaggug

SEQ ID NO: 160012 - RNA, 32 nt, Homo Sapiens
auaauaccaaaaugaguuguuauguuuaauuu

SEQ ID NO: 160013 - RNA, 32 nt, Homo Sapiens
ccaagaucgugucacugcacuccagccuggug

SEQ ID NO: 160014 - RNA, 32 nt, Homo Sapiens
gaagccgcaccucccgcauggccccuccggcc

SEQ ID NO: 160015 - RNA, 32 nt, Homo Sapiens
ucccaccccaaccugcucuccucuucuacuca

SEQ ID NO: 160016 - RNA, 32 nt, Homo Sapiens
ccagcucuuaggauguaaacuagcuuugugga

SEQ ID NO: 160017 - RNA, 32 nt, Homo Sapiens
aauccguacuguauccaauucuguacugcauu

SEQ ID NO: 160018 - RNA, 32 nt, Homo Sapiens
agccccgcgggaagaaaacgagggcguucagc

SEQ ID NO: 160019 - RNA, 32 nt, Homo Sapiens
gugggcgugggauuggcgggccccacacucug

SEQ ID NO: 160020 - RNA, 32 nt, Homo Sapiens
gagcaauugucccaaugccacuugcuuccuuu

SEQ ID NO: 160021 - RNA, 32 nt, Homo Sapiens
cgcuccgaggucccgcgccgggucgcgccgca

SEQ ID NO: 160022 - RNA, 32 nt, Homo Sapiens
ugcagacaggugcaauggaaacaguccuugcg

SEQ ID NO: 160023 - RNA, 32 nt, Homo Sapiens
agguuucacagggcucaggguuaugcucccgc

SEQ ID NO: 160024 - RNA, 32 nt, Homo Sapiens
acagaaacaaaauaaucaauauagguaauaac

SEQ ID NO: 160025 - RNA, 30 nt, Homo Sapiens
cccgggucuccuggcggcggcggagugagg

SEQ ID NO: 160026 - RNA, 32 nt, Homo Sapiens
gaugagaaauaccagaaacauacccuaagucc

SEQ ID NO: 160027 - RNA, 32 nt, Homo Sapiens
ugcuucugcccaccugcucuccuuccauggca

SEQ ID NO: 160028 - RNA, 32 nt, Homo Sapiens
aauucuauaaguucuuguuuucuguuuccuau

SEQ ID NO: 160029 - RNA, 32 nt, Homo Sapiens
cacaaucugaguuuugacaaguuuacuucugg

SEQ ID NO: 160030 - RNA, 32 nt, Homo Sapiens
agcgggccgaaagcggcuugggcucgacggag

SEQ ID NO: 160031 - RNA, 32 nt, Homo Sapiens
gugggcgccccuuccccagccucgcugccgcc

SEQ ID NO: 160032 - RNA, 28 nt, Homo Sapiens
aauacgggccagccgccgaggccgccag

SEQ ID NO: 160033 - RNA, 32 nt, Homo Sapiens
cagaggucgcccuucuccuggaccucagggag

SEQ ID NO: 160034 - RNA, 32 nt, Homo Sapiens
gcgcggggacaaagcucuccguggcuguggca

SEQ ID NO: 160035 - RNA, 32 nt, Homo Sapiens
aggagcgugaggagggaggcgaggcauguggc

SEQ ID NO: 160036 - RNA, 32 nt, Homo Sapiens
ugcagacuucggggugcucugcacgacgccug

SEQ ID NO: 160037 - RNA, 32 nt, Homo Sapiens
caggugguguugcggcagaggcggcuggagga

SEQ ID NO: 160038 - RNA, 32 nt, Homo Sapiens
augaacucaauccagcauuuguagcagguuuu

SEQ ID NO: 160039 - RNA, 32 nt, Homo Sapiens
cggagcuuggggugggggccaggccucgcacu

SEQ ID NO: 160040 - RNA, 32 nt, Homo Sapiens
cacuuccggaccgcggauagcacuggcgaccc

SEQ ID NO: 160041 - RNA, 32 nt, Homo Sapiens
auuugggaagcagagcacagcagcccaaauuu

SEQ ID NO: 160042 - RNA, 30 nt, Homo Sapiens
ccaccugcgccgccgaucgcccggguaucg

SEQ ID NO: 160043 - RNA, 32 nt, Homo Sapiens
caucuguagcagcugguuaguaaaccucaugu

SEQ ID NO: 160044 - RNA, 32 nt, Homo Sapiens
acuguuugguauuugaugcagaugagagagca

SEQ ID NO: 160045 - RNA, 32 nt, Homo Sapiens
aacauguuuuccuuuuucuccaaaggaaaucg

SEQ ID NO: 160046 - RNA, 32 nt, Homo Sapiens
cggcagugguggcucucccggcuggguuguca

SEQ ID NO: 160047 - RNA, 32 nt, Homo Sapiens
cagggugcuacuagcaccaucagcgcacuccc

SEQ ID NO: 160048 - RNA, 32 nt, Homo Sapiens
gaacuugagagaauuuggggcaaccaaauaga

SEQ ID NO: 160049 - RNA, 32 nt, Homo Sapiens
ccuccccucaagaguucucaccagccuuaguu

SEQ ID NO: 160050 - RNA, 32 nt, Homo Sapiens
ccuccaucaaggaaaaaugucuguuaaaugaa

SEQ ID NO: 160051 - RNA, 32 nt, Homo Sapiens
cgucccucucagcccugcuccuccugccuccu

SEQ ID NO: 160052 - RNA, 32 nt, Homo Sapiens
gccugcagaagcagcccugugcucggcugagg

SEQ ID NO: 160053 - RNA, 28 nt, Homo Sapiens
cuguggugacgguggccgagguggaggg

SEQ ID NO: 160054 - RNA, 32 nt, Homo Sapiens
acggggcggaaaggcgcagagaagcugagggc

SEQ ID NO: 160055 - RNA, 32 nt, Homo Sapiens
gcucaacacacaggcuguggcucuggacaucc

SEQ ID NO: 160056 - RNA, 32 nt, Homo Sapiens
cucagccgccuccucugccaccagcugcucgc

SEQ ID NO: 160057 - RNA, 32 nt, Homo Sapiens
gaggucacagggaagucagagaacaguaauac

SEQ ID NO: 160058 - RNA, 32 nt, Homo Sapiens
cccauguugaacaaaauggugacaauugugcc

SEQ ID NO: 160059 - RNA, 30 nt, Homo Sapiens
ugcaaggggaggcgcgcgaggcggcgcggg

SEQ ID NO: 160060 - RNA, 32 nt, Homo Sapiens
uacuuuuucuucccuuuuauucaccacuugac

SEQ ID NO: 160061 - RNA, 32 nt, Homo Sapiens
cuaaaccaacuuuuuccaaagugcgcuaugca

SEQ ID NO: 160062 - RNA, 32 nt, Homo Sapiens
gccaccagcccagcuuccuucucuggaaaagc

SEQ ID NO: 160063 - RNA, 32 nt, Homo Sapiens
aguugggagaaggcagggugggggguguggaa

SEQ ID NO: 160064 - RNA, 32 nt, Homo Sapiens
acugucggccccacagccugcccgcccccugc

SEQ ID NO: 160065 - RNA, 32 nt, Homo Sapiens
ggggguaggggaggggugugugugcgcgacau

SEQ ID NO: 160066 - RNA, 32 nt, Homo Sapiens
guauccuaccugggcucuggccuccucucugu

SEQ ID NO: 160067 - RNA, 32 nt, Homo Sapiens
gugcagaggccggccucgcugcuucauguggc

SEQ ID NO: 160068 - RNA, 32 nt, Homo Sapiens
aaaacuuccuaguaagcaucuacuucaggcca

SEQ ID NO: 160069 - RNA, 32 nt, Homo Sapiens
uuauguauguugucgaaaaauaaaaugcauuu

SEQ ID NO: 160070 - RNA, 32 nt, Homo Sapiens
acauguuuuuucccuuugccccauaaucagua

SEQ ID NO: 160071 - RNA, 32 nt, Homo Sapiens
uucauacuuugaauggcaaacgcuauuuaugc

SEQ ID NO: 160072 - RNA, 32 nt, Homo Sapiens
aucccagcugcucggguccuagcuggaauucu

SEQ ID NO: 160073 - RNA, 32 nt, Homo Sapiens
auacacuuuuguauuuuuauucuuauauaagg

SEQ ID NO: 160074 - RNA, 32 nt, Homo Sapiens
ggaggcagugauugcagugagcugagauagca

SEQ ID NO: 160075 - RNA, 32 nt, Homo Sapiens
acuguacugcgggacaggaugccuugggcuau

SEQ ID NO: 160076 - RNA, 32 nt, Homo Sapiens
ugggaggagugagcaggccccgggggaggggg

SEQ ID NO: 160077 - RNA, 32 nt, Homo Sapiens
guaagcaagcaaguuggcaugcaugagauaua

SEQ ID NO: 160078 - RNA, 32 nt, Homo Sapiens
gugaccccuggggccucagaccucugaguggg

SEQ ID NO: 160079 - RNA, 32 nt, Homo Sapiens
ggucgccuugugcgcuugcgcgcguccaggcg

SEQ ID NO: 160080 - RNA, 32 nt, Homo Sapiens
uggaguucagugcgcaaagaaacuacccugac

SEQ ID NO: 160081 - RNA, 32 nt, Homo Sapiens
cccugacaaccacuaaucaacauucugucugg

SEQ ID NO: 160082 - RNA, 32 nt, Homo Sapiens
gggaauuccaggggcaacugagcauccacccc

SEQ ID NO: 160083 - RNA, 32 nt, Homo Sapiens
gggcucucaaggaaaagguuuucaugauaacu

SEQ ID NO: 160084 - RNA, 32 nt, Homo Sapiens
aacuugccuccagucagccucuccaggcccgg

SEQ ID NO: 160085 - RNA, 32 nt, Homo Sapiens
cuuacuguauaaaauuaguuggaagccaugua

SEQ ID NO: 160086 - RNA, 32 nt, Homo Sapiens
aaggauggugccuagugguggcccuguguucu

SEQ ID NO: 160087 - RNA, 32 nt, Homo Sapiens
accggagcggcugaggacggggcagagcugag

SEQ ID NO: 160088 - RNA, 32 nt, Homo Sapiens
aggcugcuuugaaaauggcuguuuuaccuuau

SEQ ID NO: 160089 - RNA, 32 nt, Homo Sapiens
cugccugccacccuccucucccacucaggcac

SEQ ID NO: 160090 - RNA, 32 nt, Homo Sapiens
uggccagugggagcuggugucugugggugcca

SEQ ID NO: 160091 - RNA, 32 nt, Homo Sapiens
cuucuugaaaauaaaaguuacaaaauccaaca

SEQ ID NO: 160092 - RNA, 32 nt, Homo Sapiens
caguacugcagcgccccgaagccaggcucugu

SEQ ID NO: 160093 - RNA, 32 nt, Homo Sapiens
aaacaugccaaagccuauucuaucuuaaacaa

SEQ ID NO: 160094 - RNA, 32 nt, Homo Sapiens
agacuguagaaucuugaauaaucuauaucacu

SEQ ID NO: 160095 - RNA, 32 nt, Homo Sapiens
uuuauuguugaacuaacaaauauuugggagag

SEQ ID NO: 160096 - RNA, 32 nt, Homo Sapiens
aaacggucuaucauuuugaacucuggaaaagu

SEQ ID NO: 160097 - RNA, 32 nt, Homo Sapiens
uuccacgggaccagcccagagcuaugccaugg

SEQ ID NO: 160098 - RNA, 32 nt, Homo Sapiens
ggccucucagaauucacuugagguucaauuaa

SEQ ID NO: 160099 - RNA, 32 nt, Homo Sapiens
gaucaggcauuguggaauauaagcucaaaggg

SEQ ID NO: 160100 - RNA, 32 nt, Homo Sapiens
cauauaauuaacauuauguacuguauauauca

SEQ ID NO: 160101 - RNA, 32 nt, Homo Sapiens
uugagacaagguguugcauucucacccaggcu

SEQ ID NO: 160102 - RNA, 32 nt, Homo Sapiens
agcccacuucuguggcaccagauuccacccug

SEQ ID NO: 160103 - RNA, 32 nt, Homo Sapiens
gccugcaaaaauaaaaugcagaacguacucua

SEQ ID NO: 160104 - RNA, 32 nt, Homo Sapiens
uuuaucuuuuaacauuuauaauuauaugagga

SEQ ID NO: 160105 - RNA, 32 nt, Homo Sapiens
cgugagccaccgcgcccggccggcuuggaauu

SEQ ID NO: 160106 - RNA, 32 nt, Homo Sapiens
aagccauuuacuacuuucugguagacuaccau

SEQ ID NO: 160107 - RNA, 32 nt, Homo Sapiens
accuggcccacccagggcggaaaaccgcuuaa

SEQ ID NO: 160108 - RNA, 32 nt, Homo Sapiens
ugacucaacuccaaauaggagcauuucaagag

SEQ ID NO: 160109 - RNA, 32 nt, Homo Sapiens
gauaaaagugagggcagaaguagcugugggaa

SEQ ID NO: 160110 - RNA, 32 nt, Homo Sapiens
gguagguaacaaggagcaaauggcuuuugggu

SEQ ID NO: 160111 - RNA, 32 nt, Homo Sapiens
auuaugaaaaauuuuuaaaagauauauauauc

SEQ ID NO: 160112 - RNA, 32 nt, Homo Sapiens
ggauauuauuuuuaccuuauguuaaucaguga

SEQ ID NO: 160113 - RNA, 32 nt, Homo Sapiens
uagcuaucuaacaacuaauuacuaauuuuuaa

SEQ ID NO: 160114 - RNA, 32 nt, Homo Sapiens
cguugucccgaagagcgagaucgagcuuggcc

SEQ ID NO: 160115 - RNA, 32 nt, Homo Sapiens
cccuggggcuacuacguguccacacaugcucc

SEQ ID NO: 160116 - RNA, 32 nt, Homo Sapiens
gucucaaaaaaauuaaaauuaaaauuaaaaac

SEQ ID NO: 160117 - RNA, 32 nt, Homo Sapiens
agaccuggcgcucggcggggcccucgccaccc

SEQ ID NO: 160118 - RNA, 32 nt, Homo Sapiens
ccaaaagacaccgucgugaccggagccauuag

SEQ ID NO: 160119 - RNA, 32 nt, Homo Sapiens
cggccgggauggagacuaugcgagcgcagcgg

SEQ ID NO: 160120 - RNA, 32 nt, Homo Sapiens
cacaguggaucuuuuccucuaaaaugaucuuu

SEQ ID NO: 160121 - RNA, 32 nt, Homo Sapiens
ccaccacuaucagauuccauggccguauaaag

SEQ ID NO: 160122 - RNA, 32 nt, Homo Sapiens
accugagcuuacagguaccaauaaagaggcuu

SEQ ID NO: 160123 - RNA, 32 nt, Homo Sapiens
ggcuucagcucccugcccagcgcacgggcugc

SEQ ID NO: 160124 - RNA, 32 nt, Homo Sapiens
uggaacugggaggcuggagaaagggaagugga

SEQ ID NO: 160125 - RNA, 32 nt, Homo Sapiens
gggcugggcagacaccugugggagccggaagc

SEQ ID NO: 160126 - RNA, 31 nt, Homo Sapiens
gcaaaauaagagguuuuggauucagcguagg

SEQ ID NO: 160127 - RNA, 32 nt, Homo Sapiens
ugggcccaccugcugcugcugcuguugcuggg

SEQ ID NO: 160128 - RNA, 32 nt, Homo Sapiens
ucacuuucucaucccauguguacaaaaaccaa

SEQ ID NO: 160129 - RNA, 32 nt, Homo Sapiens
auuuuuuauucaccauugucugcacaaauccu

SEQ ID NO: 160130 - RNA, 32 nt, Homo Sapiens
uguauauguuccaggaaaaucuggcuuaaaaa

SEQ ID NO: 160131 - RNA, 32 nt, Homo Sapiens
gcgaggaggggagggggcggcauggauacgcg

SEQ ID NO: 160132 - RNA, 32 nt, Homo Sapiens
uaggucuccuguguuucagccaucccagccca

SEQ ID NO: 160133 - RNA, 32 nt, Homo Sapiens
cccugcccgcggcggcaccaugcgcgccgagc

SEQ ID NO: 160134 - RNA, 32 nt, Homo Sapiens
uguugagauggagucugccacccaggcuggag

SEQ ID NO: 160135 - RNA, 32 nt, Homo Sapiens
uaguauuauuuuuguauugauuuguguggauc

SEQ ID NO: 160136 - RNA, 32 nt, Homo Sapiens
cgagucugcccgcuccuugaucuugaccucug

SEQ ID NO: 160137 - RNA, 32 nt, Homo Sapiens
aucccgggcuaggggagcgcggcggccgcgau

SEQ ID NO: 160138 - RNA, 32 nt, Homo Sapiens
agccucaaacucccaaaugaugcaccugacuc

SEQ ID NO: 160139 - RNA, 32 nt, Homo Sapiens
cuuucacguguuguguccauagcuuuagucuu

SEQ ID NO: 160140 - RNA, 30 nt, Homo Sapiens
gaagaugacgaggaugaagaccuuuacaau

SEQ ID NO: 160141 - RNA, 32 nt, Homo Sapiens
ggucuguggugacuggggugccaggcagggag

SEQ ID NO: 160142 - RNA, 32 nt, Homo Sapiens
acaccuuuccagaaaaaagucaauuguucagg

SEQ ID NO: 160143 - RNA, 32 nt, Homo Sapiens
ugaaccacuggccccaaccaacccacuggugg

SEQ ID NO: 160144 - RNA, 32 nt, Homo Sapiens
agcaggaggacacguggagacagaggcagacu

SEQ ID NO: 160145 - RNA, 32 nt, Homo Sapiens
cuauguacugaauauaaaccagugcauuuaaa

SEQ ID NO: 160146 - RNA, 32 nt, Homo Sapiens
gcuguauuugagguuuuuuagagugccaagag

SEQ ID NO: 160147 - RNA, 32 nt, Homo Sapiens
gucaguuccugcaagcagccuacuucaguaug

SEQ ID NO: 160148 - RNA, 32 nt, Homo Sapiens
cagguucggccgguccccggcccgccugccgg

SEQ ID NO: 160149 - RNA, 32 nt, Homo Sapiens
ccagugucauucaaagauguggcuguggauuu

SEQ ID NO: 160150 - RNA, 32 nt, Homo Sapiens
uccgucagggaggucgcuucccggugcucagc

SEQ ID NO: 160151 - RNA, 32 nt, Homo Sapiens
acacgccccucuacugcuauguggcuucaacc

SEQ ID NO: 160152 - RNA, 32 nt, Homo Sapiens
agugagcauccaccacucaucacuguguggag

SEQ ID NO: 160153 - RNA, 32 nt, Homo Sapiens
ucagguguccacuccugacugcaaguucccag

SEQ ID NO: 160154 - RNA, 32 nt, Homo Sapiens
cuugaguuggcaacucagcugcugcugcuucc

SEQ ID NO: 160155 - RNA, 32 nt, Homo Sapiens
caucauccuugacagugauguuuuucaggccc

SEQ ID NO: 160156 - RNA, 32 nt, Homo Sapiens
uggcuggaggggcuacuuugcucagaagacac

SEQ ID NO: 160157 - RNA, 32 nt, Homo Sapiens
ugggcggcgccggcggcaugugcgagggcccg

SEQ ID NO: 160158 - RNA, 32 nt, Homo Sapiens
ucaugaaacacacagacacacacacacacaaa

SEQ ID NO: 160159 - RNA, 32 nt, Homo Sapiens
ggggaaagagacugagguuguaaacguuauaa

SEQ ID NO: 160160 - RNA, 32 nt, Homo Sapiens
ugaugauuuguggaaaagaaauagaagucaug

SEQ ID NO: 160161 - RNA, 32 nt, Homo Sapiens
agucagcucccucuguccucugucagccuggc

SEQ ID NO: 160162 - RNA, 32 nt, Homo Sapiens
accuccuggcaccucccuccccuggggccgcc

SEQ ID NO: 160163 - RNA, 32 nt, Homo Sapiens
gcgccggaggucgccauggcuaccgagcccga

SEQ ID NO: 160164 - RNA, 32 nt, Homo Sapiens
gguaugaguauuuuuaguaguggaucacugug

SEQ ID NO: 160165 - RNA, 31 nt, Homo Sapiens
gccccggagcgcagcagccacccuccgacca

SEQ ID NO: 160166 - RNA, 32 nt, Homo Sapiens
gugcacgugugcuugugucugugcgggcgcgu

SEQ ID NO: 160167 - RNA, 32 nt, Homo Sapiens
uuuaaauuaugaaaauguucauuauggaagaa

SEQ ID NO: 160168 - RNA, 32 nt, Homo Sapiens
gacgugggacgcgggcgcaggcgggguccgcg

SEQ ID NO: 160169 - RNA, 32 nt, Homo Sapiens
aacaguucacaggggucaaauuccuuuauucc

SEQ ID NO: 160170 - RNA, 32 nt, Homo Sapiens
gauuugggccagacuccuguguccuugcuugg

SEQ ID NO: 160171 - RNA, 32 nt, Homo Sapiens
cuggacagcgcguggccggcgccgcugugggg

SEQ ID NO: 160172 - RNA, 32 nt, Homo Sapiens
gacuuuaauaucuauacuguaaauauuugguu

SEQ ID NO: 160173 - RNA, 32 nt, Homo Sapiens
ugcucugcggggagggagcgggcccgcccgcg

SEQ ID NO: 160174 - RNA, 32 nt, Homo Sapiens
acguagcuggaacuuagggcgugagccaccgc

SEQ ID NO: 160175 - RNA, 32 nt, Homo Sapiens
ggcugauucugucuccuccccucccuccuucu

SEQ ID NO: 160176 - RNA, 32 nt, Homo Sapiens
ucuguaucacugugucccagacaauauuuaga

SEQ ID NO: 160177 - RNA, 32 nt, Homo Sapiens
cugcguaacaaaucuacuuuguguaugugucu

SEQ ID NO: 160178 - RNA, 32 nt, Homo Sapiens
aaaucuucaaagcuggggaaguggaaauaaag

SEQ ID NO: 160179 - RNA, 32 nt, Homo Sapiens
caguuuaaaaauuuugauuguuaaugcccuau

SEQ ID NO: 160180 - RNA, 32 nt, Homo Sapiens
uuuccacuuuucuauguccuccuuccacccca

SEQ ID NO: 160181 - RNA, 32 nt, Homo Sapiens
cccuuaugagaaaaaacaacgaagagcuuguu

SEQ ID NO: 160182 - RNA, 32 nt, Homo Sapiens
uucaaaaggggagggagugugcaaauaggugu

SEQ ID NO: 160183 - RNA, 32 nt, Homo Sapiens
caaggcaacugggaauugcuggagaaggauaa

SEQ ID NO: 160184 - RNA, 32 nt, Homo Sapiens
uuugguguccucagauaucuuucacacaguag

SEQ ID NO: 160185 - RNA, 32 nt, Homo Sapiens
guuuuaacaugauuuuaacaaacugcacuuau

SEQ ID NO: 160186 - RNA, 32 nt, Homo Sapiens
cucuguuggucccagggaaagcaaggaaauuu

SEQ ID NO: 160187 - RNA, 32 nt, Homo Sapiens
aaaaaguaaaauuuauuuuuuauauucauuaa

SEQ ID NO: 160188 - RNA, 31 nt, Homo Sapiens
ucggaccugugcgccccgccccgcgcuggac

SEQ ID NO: 160189 - RNA, 32 nt, Homo Sapiens
auauucaaugugaaaauuauuuccuuguguac

SEQ ID NO: 160190 - RNA, 27 nt, Homo Sapiens
ccauggaggagccgcagucagauccua

SEQ ID NO: 160191 - RNA, 32 nt, Homo Sapiens
cccauugcagugccguuucuugacuguguugc

SEQ ID NO: 160192 - RNA, 27 nt, Homo Sapiens
uguccucucuucuucaagucccccuug

SEQ ID NO: 160193 - RNA, 32 nt, Homo Sapiens
cuggcguccgggccgcuggugaucuccgguag

SEQ ID NO: 160194 - RNA, 30 nt, Homo Sapiens
gcugcugucacaaauacccaucuuaggauc

SEQ ID NO: 160195 - RNA, 32 nt, Homo Sapiens
caggcgcagggcucagggggcguuaggaaggg

SEQ ID NO: 160196 - RNA, 32 nt, Homo Sapiens
cugacugacucguucagcugcccccaagcugg

SEQ ID NO: 160197 - RNA, 32 nt, Homo Sapiens
cgcccugaggcaaggggacgccggcgggccga

SEQ ID NO: 160198 - RNA, 32 nt, Homo Sapiens
ggugagagugaacacauugucucugcuguggc

SEQ ID NO: 160199 - RNA, 32 nt, Homo Sapiens
auauuuuugaguuaaaauauuucccuauuuua

SEQ ID NO: 160200 - RNA, 32 nt, Homo Sapiens
cuuggcucgccucggccggcccgggaugcacu

SEQ ID NO: 160201 - RNA, 32 nt, Homo Sapiens
gaauuugaaucuucuuuuauuucuaggcugua

SEQ ID NO: 160202 - RNA, 32 nt, Homo Sapiens
acggagcggcggugcgcgcggcagggcccgga

SEQ ID NO: 160203 - RNA, 32 nt, Homo Sapiens
auccuucuuagugccucaaacuagaucuaguu

SEQ ID NO: 160204 - RNA, 32 nt, Homo Sapiens
uuacaggugugagccaccgcgcccggccgaga

SEQ ID NO: 160205 - RNA, 32 nt, Homo Sapiens
ugucacguccucagccucccagcauucaaucg

SEQ ID NO: 160206 - RNA, 32 nt, Homo Sapiens
cugcagggauauuugaggacagggagugcuga

SEQ ID NO: 160207 - RNA, 32 nt, Homo Sapiens
ucagucauucuuuucaaacaaguguuugugua

SEQ ID NO: 160208 - RNA, 32 nt, Homo Sapiens
ccuaaugaaaggaugaaguaaauacuacucag

SEQ ID NO: 160209 - RNA, 32 nt, Homo Sapiens
uuucucaaacaacuguaucacaauauaaauua

SEQ ID NO: 160210 - RNA, 32 nt, Homo Sapiens
aguaucauuguuaagugacacuuuugucucuc

SEQ ID NO: 160211 - RNA, 32 nt, Homo Sapiens
ggagaucgagaccauccuggcuaacaugguaa

SEQ ID NO: 160212 - RNA, 32 nt, Homo Sapiens
ccuuccucugcuguguuuuucuugaguccuug

SEQ ID NO: 160213 - RNA, 32 nt, Homo Sapiens
cugcaagaugaaauauaaaaguggaaugcaag

SEQ ID NO: 160214 - RNA, 32 nt, Homo Sapiens
agcgagguguggaaucauggguuucccuugga

SEQ ID NO: 160215 - RNA, 32 nt, Homo Sapiens
agccgggcgugguggcucacgccuguaaucuc

SEQ ID NO: 160216 - RNA, 32 nt, Homo Sapiens
cacaccuucuggaggagcccugauugaguauu

SEQ ID NO: 160217 - RNA, 32 nt, Homo Sapiens
acugcucaugcaagucggggcuggcuacccgu

SEQ ID NO: 160218 - RNA, 32 nt, Homo Sapiens
uguacaccauuguguguuuguaaaauguguau

SEQ ID NO: 160219 - RNA, 32 nt, Homo Sapiens
uccacccuguaaauacucuuaaguauacauuu

SEQ ID NO: 160220 - RNA, 32 nt, Homo Sapiens
agcaggaggccgaggagaaggcgcugaacgag

SEQ ID NO: 160221 - RNA, 32 nt, Homo Sapiens
cuuuguuaugaguugcagguuauuuggaagca

SEQ ID NO: 160222 - RNA, 31 nt, Homo Sapiens
ugggauaugacuuagaaccagguggcugguc

SEQ ID NO: 160223 - RNA, 32 nt, Homo Sapiens
ucgcccugcccccuacccaccaugccagaucc

SEQ ID NO: 160224 - RNA, 32 nt, Homo Sapiens
gauacagaaaccgacaggggccaggcgcccgg

SEQ ID NO: 160225 - RNA, 32 nt, Homo Sapiens
gagcccuccugcccuccuuccgcgggggcuuu

SEQ ID NO: 160226 - RNA, 32 nt, Homo Sapiens
cagcaagagcagcagucugcagacaagcccgc

SEQ ID NO: 160227 - RNA, 32 nt, Homo Sapiens
uauaauagaaauuuauaaguugcuagaaaguc

SEQ ID NO: 160228 - RNA, 32 nt, Homo Sapiens
uugauguuaaaggaugaaauccaauuauauuc

SEQ ID NO: 160229 - RNA, 32 nt, Homo Sapiens
ccgccugcgccuagugacaggugcuggaaggg

SEQ ID NO: 160230 - RNA, 32 nt, Homo Sapiens
aacuuggggcuuugugaauaaaauuuagcugc

SEQ ID NO: 160231 - RNA, 32 nt, Homo Sapiens
uggauuuacugauaaugaucagucuuuagucu

SEQ ID NO: 160232 - RNA, 32 nt, Homo Sapiens
gccagcccugacgccccacuguccccucacag

SEQ ID NO: 160233 - RNA, 32 nt, Homo Sapiens
gccgcgagcuccuggaggcggcgggauggagg

SEQ ID NO: 160234 - RNA, 32 nt, Homo Sapiens
gacgcucaggacuuaaguaauucacugggcuu

SEQ ID NO: 160235 - RNA, 32 nt, Homo Sapiens
gcaacggaggagcagucugcucugccaacccu

SEQ ID NO: 160236 - RNA, 32 nt, Homo Sapiens
aauuagagaacaaacggugauaauauaugcua

SEQ ID NO: 160237 - RNA, 32 nt, Homo Sapiens
uugccauaaugguaaaggacugauugauauau

SEQ ID NO: 160238 - RNA, 32 nt, Homo Sapiens
acuuuuguugcaugcaaaaauuuuuucucauu

SEQ ID NO: 160239 - RNA, 32 nt, Homo Sapiens
ugcggcuguucuaccccucccccuccccgcgg

SEQ ID NO: 160240 - RNA, 32 nt, Homo Sapiens
guuccacaugaaauaaauguuguuaagccugu

SEQ ID NO: 160241 - RNA, 32 nt, Homo Sapiens
uuguacagagaagcacacuggaccucauacuc

SEQ ID NO: 160242 - RNA, 32 nt, Homo Sapiens
gcgccccacuccccggcgccugccuuccgcgg

SEQ ID NO: 160243 - RNA, 32 nt, Homo Sapiens
cgggucagugcgccgcgcugcgcugggcgcca

SEQ ID NO: 160244 - RNA, 32 nt, Homo Sapiens
gccugccucagccucccaaaauguuggguaca

SEQ ID NO: 160245 - RNA, 32 nt, Homo Sapiens
gcuacguucucgggccccugcacuaugugagg

SEQ ID NO: 160246 - RNA, 32 nt, Homo Sapiens
gugcuuggaggggcaggaaaagaacugagcau

SEQ ID NO: 160247 - RNA, 30 nt, Homo Sapiens
agggucugcggaaggggcggcaggugccau

SEQ ID NO: 160248 - RNA, 32 nt, Homo Sapiens
ucuaguuuggguuguguuuucuuuucccuuuu

SEQ ID NO: 160249 - RNA, 32 nt, Homo Sapiens
auacucuugggagagagcacaaaugguauucu

SEQ ID NO: 160250 - RNA, 32 nt, Homo Sapiens
gaguacuuccgucguccugccagccgccaugc

SEQ ID NO: 160251 - RNA, 32 nt, Homo Sapiens
aauacaaaaaucagccagacaugguggcaugc

SEQ ID NO: 160252 - RNA, 32 nt, Homo Sapiens
uuaugauaaaaggaugauucuauauauucuuu

SEQ ID NO: 160253 - RNA, 32 nt, Homo Sapiens
cagccucuguggcccuguggccugcagguauu

SEQ ID NO: 160254 - RNA, 32 nt, Homo Sapiens
cuggguaugugcugauuaaggggguggacuua

SEQ ID NO: 160255 - RNA, 32 nt, Homo Sapiens
ccaguugauguuuuuugucaugugacuguucu

SEQ ID NO: 160256 - RNA, 32 nt, Homo Sapiens
agcaggcagcaggcgggcgcgcuguggcuccg

SEQ ID NO: 160257 - RNA, 32 nt, Homo Sapiens
guuaaaggcccccaaaacaugcacacaugaaa

SEQ ID NO: 160258 - RNA, 32 nt, Homo Sapiens
ucucauaaaucuuuuuacuuuggcuacaaaua

SEQ ID NO: 160259 - RNA, 32 nt, Homo Sapiens
aauuguuauaacuucacaccuuuuugaaaucu

SEQ ID NO: 160260 - RNA, 32 nt, Homo Sapiens
ugaucgaaagcuguuaaugugcucucuguaua

SEQ ID NO: 160261 - RNA, 32 nt, Homo Sapiens
aauuagugagauuaaaaaucuaaaaauuuugc

SEQ ID NO: 160262 - RNA, 29 nt, Homo Sapiens
aagaauaaaaauugagugaguugaauuga

SEQ ID NO: 160263 - RNA, 32 nt, Homo Sapiens
ccaacaggauuuuaucguuugacuccaauacc

SEQ ID NO: 160264 - RNA, 32 nt, Homo Sapiens
ggcgggaaggguccgcgcgccauggcuggccg

SEQ ID NO: 160265 - RNA, 32 nt, Homo Sapiens
uuaggacugcagccuuugcuucuguguauuuu

SEQ ID NO: 160266 - RNA, 32 nt, Homo Sapiens
acaggccacaauaugcagcuagcugaagugcu

SEQ ID NO: 160267 - RNA, 32 nt, Homo Sapiens
ggccucggccccaggccauccagcccugugga

SEQ ID NO: 160268 - RNA, 32 nt, Homo Sapiens
auucaguucuuugcuggcucucagcuggaggc

SEQ ID NO: 160269 - RNA, 32 nt, Homo Sapiens
ccaaggaguacauuaagaaguacaugcagaag

SEQ ID NO: 160270 - RNA, 32 nt, Homo Sapiens
uuuuuuggugguuuuuguuuguuuuuuuuuuu

SEQ ID NO: 160271 - RNA, 32 nt, Homo Sapiens
uugcugggugcugagugcagggggugccuuca

SEQ ID NO: 160272 - RNA, 32 nt, Homo Sapiens
ccucuagcugaauucuucaugggucuucaggc

SEQ ID NO: 160273 - RNA, 32 nt, Homo Sapiens
caguauuacaaauauauagcacaucaccuggg

SEQ ID NO: 160274 - RNA, 32 nt, Homo Sapiens
uccacgagggccccaacaccugugcuccugac

SEQ ID NO: 160275 - RNA, 32 nt, Homo Sapiens
cccaauccuuccaaaaauauugauggugauuu

SEQ ID NO: 160276 - RNA, 32 nt, Homo Sapiens
cauuguuggcuacgucuuuucuuuugccuuga

SEQ ID NO: 160277 - RNA, 32 nt, Homo Sapiens
gaaggcacugaaagaaacacggcggaaucucu

SEQ ID NO: 160278 - RNA, 32 nt, Homo Sapiens
ugaaauauguagcaugucuuuaacucagacga

SEQ ID NO: 160279 - RNA, 32 nt, Homo Sapiens
agaaagagaaaagaaacagggguuugacuuug

SEQ ID NO: 160280 - RNA, 32 nt, Homo Sapiens
cuaguguggggccccaggucccgugccucccc

SEQ ID NO: 160281 - RNA, 32 nt, Homo Sapiens
gcccagggagggaacgcuggcuggggacgauc

SEQ ID NO: 160282 - RNA, 32 nt, Homo Sapiens
gggacgcgcgcccugcggcccggccucuaguc

SEQ ID NO: 160283 - RNA, 32 nt, Homo Sapiens
gagaauccaaggguugagagccaguggcgggu

SEQ ID NO: 160284 - RNA, 32 nt, Homo Sapiens
guuaaucgaaacuacauugcaagucaacauua

SEQ ID NO: 160285 - RNA, 32 nt, Homo Sapiens
accuaguuuggaaaagcugguugugaaauaca

SEQ ID NO: 160286 - RNA, 32 nt, Homo Sapiens
gcgugucacucagccgcacccgugugcacugu

SEQ ID NO: 160287 - RNA, 32 nt, Homo Sapiens
uggccuuuaccuauuucuucaguaauauaccu

SEQ ID NO: 160288 - RNA, 32 nt, Homo Sapiens
uguuacuugcugccuccaggccaggggagcag

SEQ ID NO: 160289 - RNA, 32 nt, Homo Sapiens
auacuagagaaaauaauaaaauuucugaaugg

SEQ ID NO: 160290 - RNA, 32 nt, Homo Sapiens
acaaaucuuaccuugacuaguuucacaauuuu

SEQ ID NO: 160291 - RNA, 32 nt, Homo Sapiens
gugauuagugcuaaaugauaaacucuagaucu

SEQ ID NO: 160292 - RNA, 32 nt, Homo Sapiens
uagaugaugggauaugaauauuauuagacagu

SEQ ID NO: 160293 - RNA, 32 nt, Homo Sapiens
cuuuauauuaaauucuuuuaguauuauagguu

SEQ ID NO: 160294 - RNA, 32 nt, Homo Sapiens
agucagagcuggaaguguauggagagcccagc

SEQ ID NO: 160295 - RNA, 32 nt, Homo Sapiens
aggagcgguggaggcgaggccggcgccgcaca

SEQ ID NO: 160296 - RNA, 32 nt, Homo Sapiens
agugagccgagaucaugcuacugcacuccagc

SEQ ID NO: 160297 - RNA, 32 nt, Homo Sapiens
cgccuguaaucccagcacuuugggaggcuagg

SEQ ID NO: 160298 - RNA, 32 nt, Homo Sapiens
cggcccagccgcgucccggagccgucgggcau

SEQ ID NO: 160299 - RNA, 32 nt, Homo Sapiens
ccuggauucugguuuucuuacuauucagcuuc

SEQ ID NO: 160300 - RNA, 32 nt, Homo Sapiens
cagugaaacaaguuggugccaaugcauuccag

SEQ ID NO: 160301 - RNA, 32 nt, Homo Sapiens
guaaccaggaggaguggcugaggcagggcaug

SEQ ID NO: 160302 - RNA, 32 nt, Homo Sapiens
ccucacuacuuuauuucuuuuuucauccaggu

SEQ ID NO: 160303 - RNA, 32 nt, Homo Sapiens
aauuucucauugauaaggaauguggauguuug

SEQ ID NO: 160304 - RNA, 32 nt, Homo Sapiens
caacuuuaaguggcaagccggaggaacucugu

SEQ ID NO: 160305 - RNA, 32 nt, Homo Sapiens
agaaauauauauacauauguagacuauauaca

SEQ ID NO: 160306 - RNA, 32 nt, Homo Sapiens
gccaggaggcugaggagggaagccagggcuca

SEQ ID NO: 160307 - RNA, 32 nt, Homo Sapiens
acugacuuuaucgaguggaauugggauauauu

SEQ ID NO: 160308 - RNA, 32 nt, Homo Sapiens
ugccgggacaaggccgccgcuggugccggguc

SEQ ID NO: 160309 - RNA, 32 nt, Homo Sapiens
ugaagaugaugaugaugacuuugaugaugagg

SEQ ID NO: 160310 - RNA, 32 nt, Homo Sapiens
agagccucacucuccuggauaccuguuacuuc

SEQ ID NO: 160311 - RNA, 32 nt, Homo Sapiens
gcagagacagaggaagcagagccaggugccga

SEQ ID NO: 160312 - RNA, 32 nt, Homo Sapiens
guccccgucaagccacguaugucagaugacuu

SEQ ID NO: 160313 - RNA, 31 nt, Homo Sapiens
gucagcggggagagccugcccggagccgggg

SEQ ID NO: 160314 - RNA, 32 nt, Homo Sapiens
auauucuagagcaacuuugacuacuuccuguc

SEQ ID NO: 160315 - RNA, 32 nt, Homo Sapiens
guaaucugagagaaaaaauguauaguaaaucu

SEQ ID NO: 160316 - RNA, 32 nt, Homo Sapiens
aaauaauuauagcagcugaucuguaaaugacu

SEQ ID NO: 160317 - RNA, 32 nt, Homo Sapiens
gagcugcuggugcugcugcugcugcugcugcc

SEQ ID NO: 160318 - RNA, 32 nt, Homo Sapiens
cuucuguugggaaucauuaauuauugguuccu

SEQ ID NO: 160319 - RNA, 32 nt, Homo Sapiens
agguaaugggggaauggacagaggaauccuga

SEQ ID NO: 160320 - RNA, 32 nt, Homo Sapiens
cugaaggaggugcagcacacuccaccugggug

SEQ ID NO: 160321 - RNA, 32 nt, Homo Sapiens
uacagagcuacguuaucuccacaccuuuugag

SEQ ID NO: 160322 - RNA, 32 nt, Homo Sapiens
uucccuaugagaagcuggcucuucugagucca

SEQ ID NO: 160323 - RNA, 32 nt, Homo Sapiens
cauuaguuuuaaaauagcucugugauuuuacu

SEQ ID NO: 160324 - RNA, 32 nt, Homo Sapiens
cucccaagccccaagagguguaccuuuucaga

SEQ ID NO: 160325 - RNA, 32 nt, Homo Sapiens
guggccgaaggggauguccuguuuucaccaga

SEQ ID NO: 160326 - RNA, 32 nt, Homo Sapiens
ucuugcccccacauauuucuccaggucuccuc

SEQ ID NO: 160327 - RNA, 32 nt, Homo Sapiens
ccccagaggcuuccucauggcucacaggcacu

SEQ ID NO: 160328 - RNA, 32 nt, Homo Sapiens
ugcagaaauccagaagcauccuuaaugcuucu

SEQ ID NO: 160329 - RNA, 32 nt, Homo Sapiens
ugaccucggcccgggaugccccucggcucacc

SEQ ID NO: 160330 - RNA, 32 nt, Homo Sapiens
caaagauguccagauguccaugugcuagucuc

SEQ ID NO: 160331 - RNA, 32 nt, Homo Sapiens
aauauacuauauuuaugggaaccccuucaucc

SEQ ID NO: 160332 - RNA, 32 nt, Homo Sapiens
auguggaaagagaaaagaaucauauuaaguac

SEQ ID NO: 160333 - RNA, 32 nt, Homo Sapiens
uguggggaaggucuuacugccauggugcuuuu

SEQ ID NO: 160334 - RNA, 32 nt, Homo Sapiens
gaggaggaggaggaggccagguccugguggag

SEQ ID NO: 160335 - RNA, 32 nt, Homo Sapiens
ugggugccgugugagggccgggacgcuaacac

SEQ ID NO: 160336 - RNA, 32 nt, Homo Sapiens
gcgggguguuugggggcgcgcgugcgagugcc

SEQ ID NO: 160337 - RNA, 28 nt, Homo Sapiens
ucaucaguuacagcaugagacggaauuc

SEQ ID NO: 160338 - RNA, 32 nt, Homo Sapiens
auaggcuccgcggggccccacgugguucagcc

SEQ ID NO: 160339 - RNA, 32 nt, Homo Sapiens
augugcucaccgugaggagucccucagccacc

SEQ ID NO: 160340 - RNA, 32 nt, Homo Sapiens
ggccgcgcucccgcccagggaggaugcgccga

SEQ ID NO: 160341 - RNA, 32 nt, Homo Sapiens
uguagguaagaauccauacugaagaaaacucc

SEQ ID NO: 160342 - RNA, 32 nt, Homo Sapiens
gcuuuucuccaagucagcacccaaaggucaau

SEQ ID NO: 160343 - RNA, 32 nt, Homo Sapiens
gggccugggacuucugccucugccgccuccag

SEQ ID NO: 160344 - RNA, 32 nt, Homo Sapiens
aggugaaacugggaaaagucuuuaauaaagcu

SEQ ID NO: 160345 - RNA, 32 nt, Homo Sapiens
aauuuucagugagaaugacacuaaguuucaga

SEQ ID NO: 160346 - RNA, 32 nt, Homo Sapiens
acauugcugccccuuccgcugcggcuuuaaaa

SEQ ID NO: 160347 - RNA, 32 nt, Homo Sapiens
caccagucuccaugaagguugagcuccgaugg

SEQ ID NO: 160348 - RNA, 32 nt, Homo Sapiens
gugggagcaaccaaaguuauuuuuacagggac

SEQ ID NO: 160349 - RNA, 32 nt, Homo Sapiens
uucuccucaauccguugcaugaaauaauuacu

SEQ ID NO: 160350 - RNA, 28 nt, Homo Sapiens
cagaacaggugacucaggaugacuaaga

SEQ ID NO: 160351 - RNA, 32 nt, Homo Sapiens
ccuacccuuucgcgacugcugcugcugcugcc

SEQ ID NO: 160352 - RNA, 32 nt, Homo Sapiens
aacauagugucugccucgcuuccuggagauag

SEQ ID NO: 160353 - RNA, 32 nt, Homo Sapiens
gaggugguggcucccuccugcucucuguggug

SEQ ID NO: 160354 - RNA, 32 nt, Homo Sapiens
gaaauagaccaagguggaauuuccaagggaaa

SEQ ID NO: 160355 - RNA, 32 nt, Homo Sapiens
ggugacaggugaaaugagaacgcacugaagac

SEQ ID NO: 160356 - RNA, 32 nt, Homo Sapiens
gaguagaggagaaaucuuggcucauaucugcc

SEQ ID NO: 160357 - RNA, 32 nt, Homo Sapiens
caggggagggugggcccugcucacagccagac

SEQ ID NO: 160358 - RNA, 32 nt, Homo Sapiens
cguggaccgacggcugcaccgacucuggggga

SEQ ID NO: 160359 - RNA, 32 nt, Homo Sapiens
guugccaggaggaggcgggagcggggaggcgc

SEQ ID NO: 160360 - RNA, 32 nt, Homo Sapiens
gcccaccccucgccugcccucagugucuuugg

SEQ ID NO: 160361 - RNA, 32 nt, Homo Sapiens
caauuccugugcuguguugacuugcaguagua

SEQ ID NO: 160362 - RNA, 32 nt, Homo Sapiens
cccuccugccaagaagacccaggaaaagccug

SEQ ID NO: 160363 - RNA, 32 nt, Homo Sapiens
ugagguugugugugggaaguagucuuuggcuu

SEQ ID NO: 160364 - RNA, 28 nt, Homo Sapiens
guauuuucuacaggaccacuugaguggg

SEQ ID NO: 160365 - RNA, 32 nt, Homo Sapiens
gaacagaguuugugauuugguaguuauuuuau

SEQ ID NO: 160366 - RNA, 32 nt, Homo Sapiens
ggcuuucauaaaucauguuguuguguguauau

SEQ ID NO: 160367 - RNA, 32 nt, Homo Sapiens
ucugggaucuguaucaggauagaucugccagc

SEQ ID NO: 160368 - RNA, 31 nt, Homo Sapiens
ggcucauagacgcuucacagagccugcaggg

SEQ ID NO: 160369 - RNA, 32 nt, Homo Sapiens
gcgaggggcugcugggguguuugucgcagcgg

SEQ ID NO: 160370 - RNA, 32 nt, Homo Sapiens
cagccccgggccccagcccgcggcacuaacga

SEQ ID NO: 160371 - RNA, 32 nt, Homo Sapiens
ccaccugcuuugggucaacaguuccuuugcca

SEQ ID NO: 160372 - RNA, 32 nt, Homo Sapiens
cggcuguggccgguacuggacccggcgggaug

SEQ ID NO: 160373 - RNA, 32 nt, Homo Sapiens
uuuccagagaauauuauaaagugcuuuaggua

SEQ ID NO: 160374 - RNA, 32 nt, Homo Sapiens
aaaucaugacagucuaaagugcaaaccauuuu

SEQ ID NO: 160375 - RNA, 32 nt, Homo Sapiens
cguguuuguuuacgguuucccgcuguccaaaa

SEQ ID NO: 160376 - RNA, 32 nt, Homo Sapiens
gcccagcccagcuggagagaucagcccugcgg

SEQ ID NO: 160377 - RNA, 32 nt, Homo Sapiens
acuccgcugcccgugaccgccggugggugugu

SEQ ID NO: 160378 - RNA, 32 nt, Homo Sapiens
cagggcccgcggccgcggguucgcgagcaccg

SEQ ID NO: 160379 - RNA, 32 nt, Homo Sapiens
guccgugccucccagggcacccguuccagggc

SEQ ID NO: 160380 - RNA, 32 nt, Homo Sapiens
uugggccagccaaacugggaaccuaggugucu

SEQ ID NO: 160381 - RNA, 32 nt, Homo Sapiens
cugaaacuuuuguauaguuugcaaauuuucua

SEQ ID NO: 160382 - RNA, 32 nt, Homo Sapiens
cagccaggugucauggggcacagacccacagu

SEQ ID NO: 160383 - RNA, 32 nt, Homo Sapiens
acucuagcugggcaccuuggaccuccagcugg

SEQ ID NO: 160384 - RNA, 32 nt, Homo Sapiens
ggcagcggagagcuccgugcgcgggcugcaga

SEQ ID NO: 160385 - RNA, 32 nt, Homo Sapiens
ucauccucuucuuuuucuucauuuuugcuuuu

SEQ ID NO: 160386 - RNA, 32 nt, Homo Sapiens
ggacuaauguggggugacugcugcugaacaga

SEQ ID NO: 160387 - RNA, 32 nt, Homo Sapiens
cucuacuaaaagacagaaacaauacacugcca

SEQ ID NO: 160388 - RNA, 32 nt, Homo Sapiens
cggacaggaggacggaggagcaacugccuucu

SEQ ID NO: 160389 - RNA, 32 nt, Homo Sapiens
uuuuuguuuuuguuuuuuuuuauauuaugaag

SEQ ID NO: 160390 - RNA, 32 nt, Homo Sapiens
acaugauaaaauuuaggcgaaguaguuaagaa

SEQ ID NO: 160391 - RNA, 32 nt, Homo Sapiens
gguauuugucuccuuagccaucagguacaguu

SEQ ID NO: 160392 - RNA, 32 nt, Homo Sapiens
agcggaggccgcggaggcuccucgguccuuca

SEQ ID NO: 160393 - RNA, 32 nt, Homo Sapiens
aaaaucauaccauaucagaugccucgcagagc

SEQ ID NO: 160394 - RNA, 32 nt, Homo Sapiens
ucuuuucuaaucuucaaauggaauuauagaaa

SEQ ID NO: 160395 - RNA, 32 nt, Homo Sapiens
ucagcuguggcuuucagaagaaugggaaugcu

SEQ ID NO: 160396 - RNA, 32 nt, Homo Sapiens
cucacugccuccagcuuccagacuuuucuguc

SEQ ID NO: 160397 - RNA, 32 nt, Homo Sapiens
ugcacugagggagugauggggguguguucugg

SEQ ID NO: 160398 - RNA, 32 nt, Homo Sapiens
gaaaccugcagcggagugcggcggcggcgaca

SEQ ID NO: 160399 - RNA, 32 nt, Homo Sapiens
aaauagacaaaacacaucuucuuaacggaugg

SEQ ID NO: 160400 - RNA, 29 nt, Homo Sapiens
augacaucagugaugucaguauguauaga

SEQ ID NO: 160401 - RNA, 32 nt, Homo Sapiens
cucacguggucccagguucuggaguucuuguc

SEQ ID NO: 160402 - RNA, 32 nt, Homo Sapiens
aauuucccaaaauaaaauccuuuuuuguauga

SEQ ID NO: 160403 - RNA, 32 nt, Homo Sapiens
uuuggguaaacugagcagaaggugauacacag

SEQ ID NO: 160404 - RNA, 32 nt, Homo Sapiens
gcugcaaauucaucauaauuuuucucaacauu

SEQ ID NO: 160405 - RNA, 32 nt, Homo Sapiens
ggcccugugucugcagggagccagggcugcgg

SEQ ID NO: 160406 - RNA, 32 nt, Homo Sapiens
acucuccagggucgcugauccuccccggccca

SEQ ID NO: 160407 - RNA, 32 nt, Homo Sapiens
aagcgcuuuugcaauugaucccgggcaacaag

SEQ ID NO: 160408 - RNA, 32 nt, Homo Sapiens
cuaagccuuaagucuuuuuuuuuuccuaaaaa

SEQ ID NO: 160409 - RNA, 32 nt, Homo Sapiens
ggccugucuccuccacucuccuccucacccuc

SEQ ID NO: 160410 - RNA, 32 nt, Homo Sapiens
cuagaaguguguggugggucucuuccaaauac

SEQ ID NO: 160411 - RNA, 32 nt, Homo Sapiens
ccuucccccgguucugacuccagaucccuggc

SEQ ID NO: 160412 - RNA, 32 nt, Homo Sapiens
uauuguuuuacuuuuuuuuuuauuucaauaua

SEQ ID NO: 160413 - RNA, 31 nt, Homo Sapiens
ccggcgaugcgggaccccggcgcggccgcuc

SEQ ID NO: 160414 - RNA, 32 nt, Homo Sapiens
gucuugcuuuaaaauuuuuaccuccuagcugg

SEQ ID NO: 160415 - RNA, 32 nt, Homo Sapiens
gguucucaaggauauguacaguuuucauuuuc

SEQ ID NO: 160416 - RNA, 32 nt, Homo Sapiens
cuguuaaagcagcugggagggagucuguaccc

SEQ ID NO: 160417 - RNA, 32 nt, Homo Sapiens
cuccagcacagagaaccaaacacacaucugga

SEQ ID NO: 160418 - RNA, 32 nt, Homo Sapiens
uggacggccccgggaggccgcagaccgccggg

SEQ ID NO: 160419 - RNA, 32 nt, Homo Sapiens
ccucccugccuggccuagccagggcucccaag

SEQ ID NO: 160420 - RNA, 32 nt, Homo Sapiens
aguguuagugauugggugauuugagcuacauc

SEQ ID NO: 160421 - RNA, 32 nt, Homo Sapiens
guugaaaaugaaaucauuucaaugagaugaca

SEQ ID NO: 160422 - RNA, 32 nt, Homo Sapiens
guaauugacaaaauaucugauaaucauguugu

SEQ ID NO: 160423 - RNA, 32 nt, Homo Sapiens
cucugggcuuucccagcuccgaagucaauacu

SEQ ID NO: 160424 - RNA, 32 nt, Homo Sapiens
ccucacaggacagaagcagagugggugguggu

SEQ ID NO: 160425 - RNA, 32 nt, Homo Sapiens
acuuggguccgaaagugaacuuuugcugaagc

SEQ ID NO: 160426 - RNA, 32 nt, Homo Sapiens
gcuccgcgucuccagcagcggggcagggaccc

SEQ ID NO: 160427 - RNA, 32 nt, Homo Sapiens
ucggucagcaccguggugugggcccccggagg

SEQ ID NO: 160428 - RNA, 32 nt, Homo Sapiens
ccagccaugcagaacuaacauuuggauaccac

SEQ ID NO: 160429 - RNA, 32 nt, Homo Sapiens
uuuuucuaauaaucuguaaaauuaugcuaacu

SEQ ID NO: 160430 - RNA, 32 nt, Homo Sapiens
auguuuguuguagccuuguuaaaggcuauuuu

SEQ ID NO: 160431 - RNA, 32 nt, Homo Sapiens
guuucauguauuagccuugcacaugcggcuuu

SEQ ID NO: 160432 - RNA, 32 nt, Homo Sapiens
uaaggguggguuuaauaacauauuaugaaagu

SEQ ID NO: 160433 - RNA, 32 nt, Homo Sapiens
cacguuccuuagcuccgccgcggccguccucc

SEQ ID NO: 160434 - RNA, 32 nt, Homo Sapiens
ccagaagccucuccgagaaacugggcgucucu

SEQ ID NO: 160435 - RNA, 32 nt, Homo Sapiens
auauuuuaaaacuauguauauuuaaauuuagu

SEQ ID NO: 160436 - RNA, 32 nt, Homo Sapiens
ggaaaagggucuuuuuugucuucauucacuuu

SEQ ID NO: 160437 - RNA, 32 nt, Homo Sapiens
uuucuuugcaucaagguauaugcaaaacauug

SEQ ID NO: 160438 - RNA, 32 nt, Homo Sapiens
gagauucauccaaggcaaagccaggcagagcc

SEQ ID NO: 160439 - RNA, 32 nt, Homo Sapiens
uaaacagguaguguuaggagcuaauccaugaa

SEQ ID NO: 160440 - RNA, 32 nt, Homo Sapiens
aaaagugaugaaauauaagugcuguucuaucu

SEQ ID NO: 160441 - RNA, 32 nt, Homo Sapiens
cacugugacaacacuaagauaauaaaccaaaa

SEQ ID NO: 160442 - RNA, 32 nt, Homo Sapiens
ggaaggugggucuuaaaacagaccaaaccccg

SEQ ID NO: 160443 - RNA, 32 nt, Homo Sapiens
ucggccacuccaguuccucacguggugagcac

SEQ ID NO: 160444 - RNA, 32 nt, Homo Sapiens
aagagagaaucagagcaccaagcaaaaaggaa

SEQ ID NO: 160445 - RNA, 32 nt, Homo Sapiens
aucuuggacuucccaugcuccagaacugugag

SEQ ID NO: 160446 - RNA, 32 nt, Homo Sapiens
aauauuggcuugaaccuuuucccuucaguaau

SEQ ID NO: 160447 - RNA, 32 nt, Homo Sapiens
ccugacuucuuugccugcuagcagccaggcug

SEQ ID NO: 160448 - RNA, 32 nt, Homo Sapiens
cuuacaaugaauuguccugcagaacucccucu

SEQ ID NO: 160449 - RNA, 32 nt, Homo Sapiens
gacauccauaacuacuauucuuuuuucacugu

SEQ ID NO: 160450 - RNA, 32 nt, Homo Sapiens
aaccuguaaucccagcacuuugggaggccgag

SEQ ID NO: 160451 - RNA, 32 nt, Homo Sapiens
aaccuauaaucccagcacuuugggaggccaag

SEQ ID NO: 160452 - RNA, 32 nt, Homo Sapiens
caccuuccccgcagacagcaugcugcuagacc

SEQ ID NO: 160453 - RNA, 25 nt, Homo Sapiens
augggaacagaaaagcaaagcccuu

SEQ ID NO: 160454 - RNA, 32 nt, Homo Sapiens
uauuucuguggaagaguaaaaguuguauguau

SEQ ID NO: 160455 - RNA, 32 nt, Homo Sapiens
uacaacuacuuugagguggccaaauguaaacu

SEQ ID NO: 160456 - RNA, 32 nt, Homo Sapiens
uuuccuuugcuuugauuggguauauauuucaa

SEQ ID NO: 160457 - RNA, 32 nt, Homo Sapiens
uaaguuaguuacauuucuuuuagcuuggaaac

SEQ ID NO: 160458 - RNA, 32 nt, Homo Sapiens
uauugcuggcacauuucuuuuucuuuuucuuu

SEQ ID NO: 160459 - RNA, 32 nt, Homo Sapiens
uugcuuuuucuuuuuguuuuuaaaacuuauuc

SEQ ID NO: 160460 - RNA, 32 nt, Homo Sapiens
uggcucaccacaggcccuccccagcucaaccc

SEQ ID NO: 160461 - RNA, 31 nt, Homo Sapiens
uggcccucagccaccaccuugucgcccgagu

SEQ ID NO: 160462 - RNA, 32 nt, Homo Sapiens
ucacuguggaggaguuaauuauagaauggguu

SEQ ID NO: 160463 - RNA, 32 nt, Homo Sapiens
gauuaacuguguugccuauuuaugcaggguaa

SEQ ID NO: 160464 - RNA, 32 nt, Homo Sapiens
gggagaacaggcacauuagccuugaagcugaa

SEQ ID NO: 160465 - RNA, 30 nt, Homo Sapiens
uccuuaaccugugcuguaaaguucacccuu

SEQ ID NO: 160466 - RNA, 32 nt, Homo Sapiens
gggcggggagcggcaggcggccccacccugca

SEQ ID NO: 160467 - RNA, 32 nt, Homo Sapiens
uuuuuuaauaaaauggcauauuuugcaucuac

SEQ ID NO: 160468 - RNA, 32 nt, Homo Sapiens
ucgaggcucuggaagcucaagggggcucuggc

SEQ ID NO: 160469 - RNA, 32 nt, Homo Sapiens
uggcggcggcgguggcggcgacgguccagacc

SEQ ID NO: 160470 - RNA, 32 nt, Homo Sapiens
agcgggaggggaggguaugcgucagaaaagaa

SEQ ID NO: 160471 - RNA, 32 nt, Homo Sapiens
acauccugaaagauggaauuaugacgaaaaag

SEQ ID NO: 160472 - RNA, 32 nt, Homo Sapiens
aaaugcaucagagagccaaaacauucaguauu

SEQ ID NO: 160473 - RNA, 32 nt, Homo Sapiens
uuaauagcaccaagcgcucugacucaggggug

SEQ ID NO: 160474 - RNA, 32 nt, Homo Sapiens
uaaaucugcauaaaaauuuuucugaaacaugg

SEQ ID NO: 160475 - RNA, 32 nt, Homo Sapiens
gccuccccuccugucucaccccccugucaccc

SEQ ID NO: 160476 - RNA, 32 nt, Homo Sapiens
uuaaagagcuccucaucugaucuugcagcuag

SEQ ID NO: 160477 - RNA, 32 nt, Homo Sapiens
uaggaaauaacauguauacucuaguaaauaag

SEQ ID NO: 160478 - RNA, 32 nt, Homo Sapiens
ucagggagccccaagggggauuuugugggacc

SEQ ID NO: 160479 - RNA, 32 nt, Homo Sapiens
agaacccagccggccaucuccauggugccaau

SEQ ID NO: 160480 - RNA, 32 nt, Homo Sapiens
caugagauucauuuuucuuaaauuuuggacuu

SEQ ID NO: 160481 - RNA, 32 nt, Homo Sapiens
cccgccuccccucccucagaaagguagugccc

SEQ ID NO: 160482 - RNA, 28 nt, Homo Sapiens
uuggguguuacaggaacaguguggccuc

SEQ ID NO: 160483 - RNA, 32 nt, Homo Sapiens
cucguccccucgcggagccgcuccugccgccg

SEQ ID NO: 160484 - RNA, 32 nt, Homo Sapiens
uguuccacguauguagucuuagaccaauagcu

SEQ ID NO: 160485 - RNA, 26 nt, Homo Sapiens
ggaauuuuuacugacaaaaaauacaa

SEQ ID NO: 160486 - RNA, 32 nt, Homo Sapiens
aauguucggcccggcgcggugccucaugccug

SEQ ID NO: 160487 - RNA, 32 nt, Homo Sapiens
agaagccaugaauuauuuuauuuuacuucaac

SEQ ID NO: 160488 - RNA, 32 nt, Homo Sapiens
aggagaguuuaaaagaauguugaaaccaagaa

SEQ ID NO: 160489 - RNA, 32 nt, Homo Sapiens
uuuccacagugucaugcuuuggcacuuuagcu

SEQ ID NO: 160490 - RNA, 32 nt, Homo Sapiens
gcccacuccuccuggggaggcugccguggagg

SEQ ID NO: 160491 - RNA, 32 nt, Homo Sapiens
aggcagcggagcagaggcucaggcacaaugaa

SEQ ID NO: 160492 - RNA, 32 nt, Homo Sapiens
ccuggauugcaucugagcugccgccauggaac

SEQ ID NO: 160493 - RNA, 32 nt, Homo Sapiens
ccaggucacggggcaccaaauuugagacaaau

SEQ ID NO: 160494 - RNA, 32 nt, Homo Sapiens
uauuuagagcagauuugcaauuagauucuugu

SEQ ID NO: 160495 - RNA, 32 nt, Homo Sapiens
ccuggugcauggcugccuccuaaucccauagu

SEQ ID NO: 160496 - RNA, 32 nt, Homo Sapiens
gaauagcagccaaguaucagaucgauccuaaa

SEQ ID NO: 160497 - RNA, 32 nt, Homo Sapiens
cccgccccgcccaugcucccaaggcugggcag

SEQ ID NO: 160498 - RNA, 32 nt, Homo Sapiens
aguuuuuuuaaucuauggauaaauggaaaccu

SEQ ID NO: 160499 - RNA, 32 nt, Homo Sapiens
acaggccugugcuagagggcuggauagugugg

SEQ ID NO: 160500 - RNA, 32 nt, Homo Sapiens
gaggagguguugcuguccagguaaaugcugcg

SEQ ID NO: 160501 - RNA, 32 nt, Homo Sapiens
guggauggccccagcacagcuugaccugaggc

SEQ ID NO: 160502 - RNA, 32 nt, Homo Sapiens
ugaaaggaggccuggguuguugggagggugac

SEQ ID NO: 160503 - RNA, 32 nt, Homo Sapiens
acugcauuuuguagccucucuuuguuuuucuu

SEQ ID NO: 160504 - RNA, 32 nt, Homo Sapiens
gugcccuuugucuaccucucccaggccugacu

SEQ ID NO: 160505 - RNA, 32 nt, Homo Sapiens
ggaugaucaucuaccucacugauaagaggcau

SEQ ID NO: 160506 - RNA, 32 nt, Homo Sapiens
ugguguaaauucucccagcagugucccauguc

SEQ ID NO: 160507 - RNA, 32 nt, Homo Sapiens
gaaacuaauuuacccaugauauuuuaaagaga

SEQ ID NO: 160508 - RNA, 32 nt, Homo Sapiens
uucuuggugcccugcccccaauaaaggaacug

SEQ ID NO: 160509 - RNA, 32 nt, Homo Sapiens
ggagcagacaacauggcacuggccaaguggaa

SEQ ID NO: 160510 - RNA, 32 nt, Homo Sapiens
cgcaggcccgcggcggccugcaagucuggaag

SEQ ID NO: 160511 - RNA, 32 nt, Homo Sapiens
ugagcuaggucaaagacgcccgggccaggugc

SEQ ID NO: 160512 - RNA, 32 nt, Homo Sapiens
aaccugccuccuuaccucccacuuccugagcc

SEQ ID NO: 160513 - RNA, 32 nt, Homo Sapiens
uuauaaaauuuaaucaugcuucuuuugucugg

SEQ ID NO: 160514 - RNA, 32 nt, Homo Sapiens
auuguuucagagucacaguucccuuuauuuca

SEQ ID NO: 160515 - RNA, 32 nt, Homo Sapiens
uggugccucugugguuccagcuccucaguagg

SEQ ID NO: 160516 - RNA, 32 nt, Homo Sapiens
agccaggcgcgccucaggauccaggcucauuu

SEQ ID NO: 160517 - RNA, 32 nt, Homo Sapiens
gccaguggagacggaaucugccgcuuugucug

SEQ ID NO: 160518 - RNA, 30 nt, Homo Sapiens
agugugaguaucccugccaccaagagagca

SEQ ID NO: 160519 - RNA, 32 nt, Homo Sapiens
agcuccugaagcggcgggcgcgcagcgggagu

SEQ ID NO: 160520 - RNA, 32 nt, Homo Sapiens
cagaggcugagcagggagagggggccagggcc

SEQ ID NO: 160521 - RNA, 32 nt, Homo Sapiens
auagggauagaagaguugaaaagggaaagcaa

SEQ ID NO: 160522 - RNA, 32 nt, Homo Sapiens
ccugaaacauaaugccaaauguacaguuuaua

SEQ ID NO: 160523 - RNA, 32 nt, Homo Sapiens
ugcaugaucugucccucccucuucccaccccu

SEQ ID NO: 160524 - RNA, 32 nt, Homo Sapiens
ugaaagaaacagauauuuuaaauugccagaaa

SEQ ID NO: 160525 - RNA, 32 nt, Homo Sapiens
ccuccugugugguauaucuugcucuuauccuu

SEQ ID NO: 160526 - RNA, 32 nt, Homo Sapiens
cucacagaaaccuccgccucccagguucaagc

SEQ ID NO: 160527 - RNA, 32 nt, Homo Sapiens
cauccugcggcuggucugggguggggucuguu

SEQ ID NO: 160528 - RNA, 32 nt, Homo Sapiens
cuuauuugcccauuuuaaaauauguagcaaug

SEQ ID NO: 160529 - RNA, 32 nt, Homo Sapiens
agcugccgacccgagccgaucgucagggucgc

SEQ ID NO: 160530 - RNA, 30 nt, Homo Sapiens
acuggccuggacuguuuucucucggcuccc

SEQ ID NO: 160531 - RNA, 32 nt, Homo Sapiens
ggagccaucacuguuuucuccuaugaaggaca

SEQ ID NO: 160532 - RNA, 32 nt, Homo Sapiens
gaaucucuauagacagcaucaaugcagcauca

SEQ ID NO: 160533 - RNA, 32 nt, Homo Sapiens
ugcaucauaucguuagcauuuauuugguggca

SEQ ID NO: 160534 - RNA, 32 nt, Homo Sapiens
cagagagcagccaggagcuuccugucaguaac

SEQ ID NO: 160535 - RNA, 32 nt, Homo Sapiens
ccugcccucuccccagcccucaucucacucuc

SEQ ID NO: 160536 - RNA, 32 nt, Homo Sapiens
aacacuuuaguuuuucaugggcaugauuccaa

SEQ ID NO: 160537 - RNA, 32 nt, Homo Sapiens
gucugaggcagacggugaggguggcccaggag

SEQ ID NO: 160538 - RNA, 32 nt, Homo Sapiens
ccaggaacgcgguuguacggacuucgugagga

SEQ ID NO: 160539 - RNA, 32 nt, Homo Sapiens
cacaugaugucaccaugaugcuauaugaaaug

SEQ ID NO: 160540 - RNA, 32 nt, Homo Sapiens
gggggcaguccugggggugcugcggcuacacc

SEQ ID NO: 160541 - RNA, 32 nt, Homo Sapiens
ccugaagcucuuugucagggacaaagguagga

SEQ ID NO: 160542 - RNA, 32 nt, Homo Sapiens
acacugaacugaucaaguacuuugaaaaugac

SEQ ID NO: 160543 - RNA, 32 nt, Homo Sapiens
auaaauaaugaaacuuaguuauauugagguua

SEQ ID NO: 160544 - RNA, 32 nt, Homo Sapiens
ccugagaaagaugcccagaacaagacagaaca

SEQ ID NO: 160545 - RNA, 32 nt, Homo Sapiens
ugccauauacgaaaggaaaaagggcagggggu

SEQ ID NO: 160546 - RNA, 32 nt, Homo Sapiens
ccgcggcggcgguggcacagcagcgggcagcg

SEQ ID NO: 160547 - RNA, 30 nt, Homo Sapiens
uucccagguuugcgcgcgggggccauccag

SEQ ID NO: 160548 - RNA, 32 nt, Homo Sapiens
ucuucccaugucuuccauguccugcuucucaa

SEQ ID NO: 160549 - RNA, 32 nt, Homo Sapiens
guaugaccgcgagacaaagacccggcggcggg

SEQ ID NO: 160550 - RNA, 32 nt, Homo Sapiens
cuccuccuggcuauguucugcagccucccaga

SEQ ID NO: 160551 - RNA, 32 nt, Homo Sapiens
cuacccauaugugugaagaaaagggggaaaug

SEQ ID NO: 160552 - RNA, 32 nt, Homo Sapiens
ccccuguaaucccagcacuuugggaggccaag

SEQ ID NO: 160553 - RNA, 32 nt, Homo Sapiens
acaaaaguacuguacucacacacauaagguau

SEQ ID NO: 160554 - RNA, 32 nt, Homo Sapiens
gggauacugauucagaaauccuguacguguaa

SEQ ID NO: 160555 - RNA, 32 nt, Homo Sapiens
uaaggauguuuggcuuuuuucuuuaauuuuuu

SEQ ID NO: 160556 - RNA, 32 nt, Homo Sapiens
cuuuuaaaaaaauuauauauauauauuaaauu

SEQ ID NO: 160557 - RNA, 32 nt, Homo Sapiens
cauggagccagaccggguggaggggcuucugg

SEQ ID NO: 160558 - RNA, 32 nt, Homo Sapiens
agccagcucccucuuuugucuguggcuagauu

SEQ ID NO: 160559 - RNA, 32 nt, Homo Sapiens
ggcgcgccugaaguugcgagcggcgagcggcg

SEQ ID NO: 160560 - RNA, 32 nt, Homo Sapiens
gaguuggaaauuaugcacuuugaaaaacauuc

SEQ ID NO: 160561 - RNA, 32 nt, Homo Sapiens
uuuauguuagauauauuucucuagguuacugu

SEQ ID NO: 160562 - RNA, 32 nt, Homo Sapiens
aaaauacaaaaauuagcuaggcguggugguga

SEQ ID NO: 160563 - RNA, 32 nt, Homo Sapiens
cuccugucucagccuccuggguagcugggauu

SEQ ID NO: 160564 - RNA, 32 nt, Homo Sapiens
agcauguagaugggauauugggaugaggaaag

SEQ ID NO: 160565 - RNA, 32 nt, Homo Sapiens
ggcuacaacuauuuuuucucagggggugcaga

SEQ ID NO: 160566 - RNA, 32 nt, Homo Sapiens
gugcauuuacuuugacauugauauagcuugua

SEQ ID NO: 160567 - RNA, 30 nt, Homo Sapiens
ucgggguccggggggccgccggcgcucaac

SEQ ID NO: 160568 - RNA, 32 nt, Homo Sapiens
uggguaauugaauaaugaaaauaagccaggua

SEQ ID NO: 160569 - RNA, 32 nt, Homo Sapiens
caaagacaucuuccuacuuuuguuguguuuca

SEQ ID NO: 160570 - RNA, 32 nt, Homo Sapiens
aguugcauagcaauuggucauuauuauuacca

SEQ ID NO: 160571 - RNA, 32 nt, Homo Sapiens
uuugauuauugcuuauuugaaaacaguauucc

SEQ ID NO: 160572 - RNA, 32 nt, Homo Sapiens
cugccucuacugugucucacaucaccauguag

SEQ ID NO: 160573 - RNA, 32 nt, Homo Sapiens
cuccguucuucuaaagauuaguccaucaucau

SEQ ID NO: 160574 - RNA, 32 nt, Homo Sapiens
ccucgccagccuauaccaagcugcuucccugg

SEQ ID NO: 160575 - RNA, 32 nt, Homo Sapiens
gacauuaagaaaccgcacgugaugucgcuaug

SEQ ID NO: 160576 - RNA, 32 nt, Homo Sapiens
augagcuggaacuguuucuacuuucagucuuc

SEQ ID NO: 160577 - RNA, 32 nt, Homo Sapiens
caacccagcuccacccagcaguguccugggga

SEQ ID NO: 160578 - RNA, 32 nt, Homo Sapiens
cugccucagcuggcagaggggcaacaagcccc

SEQ ID NO: 160579 - RNA, 32 nt, Homo Sapiens
uccaaaucuauuaugauguuuauuaaacacuu

SEQ ID NO: 160580 - RNA, 27 nt, Homo Sapiens
agaugaagaaacaaaauguaggcaaug

SEQ ID NO: 160581 - RNA, 32 nt, Homo Sapiens
uuggucuggggacaauccccuuggcugcucuu

SEQ ID NO: 160582 - RNA, 32 nt, Homo Sapiens
gcuuccgcgggccgccgccggcccugaaacgu

SEQ ID NO: 160583 - RNA, 32 nt, Homo Sapiens
ugguguuuuuguguuuucucuuuauaaggcaa

SEQ ID NO: 160584 - RNA, 32 nt, Homo Sapiens
gaaaaauuaauauauacaguauuaguacacga

SEQ ID NO: 160585 - RNA, 32 nt, Homo Sapiens
guuauaccucgguauuugguaaauccuuuucu

SEQ ID NO: 160586 - RNA, 32 nt, Homo Sapiens
cuuauuuuucagauauuuucugauguggagau

SEQ ID NO: 160587 - RNA, 32 nt, Homo Sapiens
gugagccaccaugcccggcuccacggccccua

SEQ ID NO: 160588 - RNA, 32 nt, Homo Sapiens
aagacaagcaaaacugaugugcacuuuauggc

SEQ ID NO: 160589 - RNA, 29 nt, Homo Sapiens
cuggccuggggacagcugcugcucugaug

SEQ ID NO: 160590 - RNA, 32 nt, Homo Sapiens
ugucuuuuuaaaaauuuuuugagauacggucu

SEQ ID NO: 160591 - RNA, 32 nt, Homo Sapiens
aaggaccgucuggguguccuucugggaugagg

SEQ ID NO: 160592 - RNA, 32 nt, Homo Sapiens
caagagcuaacagcacgagaagccaguugggg

SEQ ID NO: 160593 - RNA, 32 nt, Homo Sapiens
aaaguagaaaucaccuacaccagagagcuauu

SEQ ID NO: 160594 - RNA, 32 nt, Homo Sapiens
aagcuuuuauuuacuuuuuuuuuaacuguuau

SEQ ID NO: 160595 - RNA, 32 nt, Homo Sapiens
ucaggcagagggcagaugcagcuccucgggug

SEQ ID NO: 160596 - RNA, 32 nt, Homo Sapiens
aagauacagaaaccauaauaugaugucagaau

SEQ ID NO: 160597 - RNA, 32 nt, Homo Sapiens
cuaucugaacuaauucauuuauuaaguauauu

SEQ ID NO: 160598 - RNA, 32 nt, Homo Sapiens
aaaacucccugccuauggcugaaacuauaaau

SEQ ID NO: 160599 - RNA, 32 nt, Homo Sapiens
cuugcacgucaucauagaacucauacuggaga

SEQ ID NO: 160600 - RNA, 32 nt, Homo Sapiens
uugcugcuggagaucaaugaagccgagugaau

SEQ ID NO: 160601 - RNA, 32 nt, Homo Sapiens
agggacccccguggugaguccugacggccucc

SEQ ID NO: 160602 - RNA, 32 nt, Homo Sapiens
uuugcaaauaccauggaugauaugcugcuucu

SEQ ID NO: 160603 - RNA, 32 nt, Homo Sapiens
aaacugguuuguagcaguuuugaaagaauaga

SEQ ID NO: 160604 - RNA, 32 nt, Homo Sapiens
gacuccccagaacaggcacugagcugaggaaa

SEQ ID NO: 160605 - RNA, 32 nt, Homo Sapiens
aauaacaaaaagagugaaaauauuuuaauuag

SEQ ID NO: 160606 - RNA, 32 nt, Homo Sapiens
ugaaccaaugguuuuugaugguugccguaaca

SEQ ID NO: 160607 - RNA, 32 nt, Homo Sapiens
cauguucacuucccuuuucaaguugaagaggu

SEQ ID NO: 160608 - RNA, 32 nt, Homo Sapiens
ugcaguguugaaacagaauggaaaugacaaga

SEQ ID NO: 160609 - RNA, 32 nt, Homo Sapiens
auaaacugucacucuaggaagaagacaaauga

SEQ ID NO: 160610 - RNA, 32 nt, Homo Sapiens
uauuuacaaaaaugauagccuauuuaaaauua

SEQ ID NO: 160611 - RNA, 32 nt, Homo Sapiens
cuggugcgggacucacccggccgccagacugc

SEQ ID NO: 160612 - RNA, 32 nt, Homo Sapiens
auuguccccucccccaccacacaccuuccuuc

SEQ ID NO: 160613 - RNA, 32 nt, Homo Sapiens
uggggucuuucaaagcacuuuguaaaccgagg

SEQ ID NO: 160614 - RNA, 32 nt, Homo Sapiens
gggagccuagcugugcuugaugcugaaugccu

SEQ ID NO: 160615 - RNA, 32 nt, Homo Sapiens
gugucugccaaccccaggaucccagggcuccc

SEQ ID NO: 160616 - RNA, 32 nt, Homo Sapiens
cccucagcaaggggcugcuucuggggcucccu

SEQ ID NO: 160617 - RNA, 32 nt, Homo Sapiens
acugaaaacucuuuugcauuaagggaucauug

SEQ ID NO: 160618 - RNA, 30 nt, Homo Sapiens
uuuguauuuuuaauggggguagcagcugga

SEQ ID NO: 160619 - RNA, 32 nt, Homo Sapiens
gauccuccuuugcaugcgacuguagcugcauu

SEQ ID NO: 160620 - RNA, 32 nt, Homo Sapiens
cacuuacgucauuguauauuguuugugacccu

SEQ ID NO: 160621 - RNA, 30 nt, Homo Sapiens
ccgcaaggcaggcuggaggugccggugggc

SEQ ID NO: 160622 - RNA, 32 nt, Homo Sapiens
accuagucuuuuuuuuuuuucuuaacaaucau

SEQ ID NO: 160623 - RNA, 32 nt, Homo Sapiens
uagauuugugacaugaauauuucagugcugcu

SEQ ID NO: 160624 - RNA, 32 nt, Homo Sapiens
gauguauucuccaauaccaccaucgcucccac

SEQ ID NO: 160625 - RNA, 32 nt, Homo Sapiens
ugacccaacaauuuaacauccagauuuuuauc

SEQ ID NO: 160626 - RNA, 32 nt, Homo Sapiens
uggcgaggaggcgugugcugcagcuacgggcc

SEQ ID NO: 160627 - RNA, 32 nt, Homo Sapiens
aacaaaaaaaccacauaacauaaauuuaucau

SEQ ID NO: 160628 - RNA, 32 nt, Homo Sapiens
auuuagaguauugguuacauauaccuaauguu

SEQ ID NO: 160629 - RNA, 32 nt, Homo Sapiens
agugccuugcugaagcccauagcaauccgcuu

SEQ ID NO: 160630 - RNA, 32 nt, Homo Sapiens
cuugaguacaauaaaaagucugagucaaaaaa

SEQ ID NO: 160631 - RNA, 32 nt, Homo Sapiens
aaauguaaaaauuuguagggguucuggugaug

SEQ ID NO: 160632 - RNA, 32 nt, Homo Sapiens
uuccugccgggcgcuggcaagccgcgcgcugc

SEQ ID NO: 160633 - RNA, 32 nt, Homo Sapiens
aauuguugcagguccacauuuuugccaaagau

SEQ ID NO: 160634 - RNA, 32 nt, Homo Sapiens
agagaagauuucaguaauaaacaggaaagagg

SEQ ID NO: 160635 - RNA, 32 nt, Homo Sapiens
cauugugucuguaucuaauuuaaacagauguu

SEQ ID NO: 160636 - RNA, 32 nt, Homo Sapiens
gcgagucuccuccuucagucuccugguagcug

SEQ ID NO: 160637 - RNA, 32 nt, Homo Sapiens
uugggcugugccugggccuagcacggacaugg

SEQ ID NO: 160638 - RNA, 32 nt, Homo Sapiens
gcacaguagagagcuuccagggcuggcuggcg

SEQ ID NO: 160639 - RNA, 32 nt, Homo Sapiens
gaggggcgccgggaacuggcgugugggacucc

SEQ ID NO: 160640 - RNA, 31 nt, Homo Sapiens
agcaugaggguccucauucagaagcugugug

SEQ ID NO: 160641 - RNA, 32 nt, Homo Sapiens
ccggccuggugacaccaccucccaugcagaug

SEQ ID NO: 160642 - RNA, 32 nt, Homo Sapiens
uacaaauguggaaaaauguuuaaauuguagga

SEQ ID NO: 160643 - RNA, 32 nt, Homo Sapiens
uggagcagggugaggggaauguuauggguaac

SEQ ID NO: 160644 - RNA, 32 nt, Homo Sapiens
uuuauuagccagugaaacacuugcuugccaac

SEQ ID NO: 160645 - RNA, 32 nt, Homo Sapiens
guuguauucacuuuauauguccuuccaaaaau

SEQ ID NO: 160646 - RNA, 32 nt, Homo Sapiens
augaauuacccaggauucauggagcgggauca

SEQ ID NO: 160647 - RNA, 32 nt, Homo Sapiens
aaaaauuagcccggcguggcggcaugugccug

SEQ ID NO: 160648 - RNA, 32 nt, Homo Sapiens
gcucgcgucgcgcgcgcacgcugcgccagggc

SEQ ID NO: 160649 - RNA, 32 nt, Homo Sapiens
gagccggcgaaccgcgauggagccggggccca

SEQ ID NO: 160650 - RNA, 32 nt, Homo Sapiens
ucccgggcgaggggccuacgcugcggcccggc

SEQ ID NO: 160651 - RNA, 32 nt, Homo Sapiens
acuggaauuucaccaaccaacaaggggaaagu

SEQ ID NO: 160652 - RNA, 32 nt, Homo Sapiens
agagggggcuaaggggcuggauccaccaaggc

SEQ ID NO: 160653 - RNA, 32 nt, Homo Sapiens
caccauuccagaaccucucuuuucuaagaugc

SEQ ID NO: 160654 - RNA, 32 nt, Homo Sapiens
caccccuccagcuccugcuccuccuccgcucc

SEQ ID NO: 160655 - RNA, 32 nt, Homo Sapiens
gcagaaaggaagcccacgcagaaaggaagcgg

SEQ ID NO: 160656 - RNA, 31 nt, Homo Sapiens
aggccccaagccacacuucacaugaguuauu

SEQ ID NO: 160657 - RNA, 32 nt, Homo Sapiens
acacccugcagcucagcaaguguagcggaggc

SEQ ID NO: 160658 - RNA, 32 nt, Homo Sapiens
uuguaagaaauauauuugauaaaguuucuuaa

SEQ ID NO: 160659 - RNA, 32 nt, Homo Sapiens
gccccucccaguacaguccaucuuucaauguu

SEQ ID NO: 160660 - RNA, 32 nt, Homo Sapiens
augaaagaaaagaucaagaacaaugacuauca

SEQ ID NO: 160661 - RNA, 32 nt, Homo Sapiens
gcuuuagaaaucaaacaaaccagggacauugu

SEQ ID NO: 160662 - RNA, 32 nt, Homo Sapiens
uguuuguuucuuagugugguuuauugacaauc

SEQ ID NO: 160663 - RNA, 32 nt, Homo Sapiens
cuuucucccucgcguuaggcaggugacagcag

SEQ ID NO: 160664 - RNA, 32 nt, Homo Sapiens
cucucguuuccccuuuagcucccuuucaccau

SEQ ID NO: 160665 - RNA, 32 nt, Homo Sapiens
gcaguccccuccauguuccccagcgccacuac

SEQ ID NO: 160666 - RNA, 32 nt, Homo Sapiens
guaccuaaacgaaugaguguggccauguucca

SEQ ID NO: 160667 - RNA, 32 nt, Homo Sapiens
uuccuagaucucuuucuuuaauuuuaaauuaa

SEQ ID NO: 160668 - RNA, 32 nt, Homo Sapiens
aguacauauagucuuaagaucauaccuuaccu

SEQ ID NO: 160669 - RNA, 32 nt, Homo Sapiens
uucccuuccucaguuaaggacacacaccccag

SEQ ID NO: 160670 - RNA, 32 nt, Homo Sapiens
aucugcaaucuggguguuuucucugcaguucu

SEQ ID NO: 160671 - RNA, 32 nt, Homo Sapiens
cugcuguccuucccagccgccucugcuccucg

SEQ ID NO: 160672 - RNA, 30 nt, Homo Sapiens
ucuuaucucugugcuguuuugguuuuguac

SEQ ID NO: 160673 - RNA, 32 nt, Homo Sapiens
auggggaggcagcgggucugcggccgccgaga

SEQ ID NO: 160674 - RNA, 32 nt, Homo Sapiens
ccucuccuuucugagcuguggacugcagcuuc

SEQ ID NO: 160675 - RNA, 32 nt, Homo Sapiens
gaucagcccuccccuccccaccuucccguccc

SEQ ID NO: 160676 - RNA, 32 nt, Homo Sapiens
aagggucccccuccccauccuacacaggaaug

SEQ ID NO: 160677 - RNA, 32 nt, Homo Sapiens
gacagggccccggcagagcaggucccgcggag

SEQ ID NO: 160678 - RNA, 32 nt, Homo Sapiens
gugugacugucaugcaggccugucugugugau

SEQ ID NO: 160679 - RNA, 32 nt, Homo Sapiens
ggccggcagggugcccugcagcuuacauaaag

SEQ ID NO: 160680 - RNA, 32 nt, Homo Sapiens
ugccuggaggauggcggacgccggcauucgcc

SEQ ID NO: 160681 - RNA, 32 nt, Homo Sapiens
guccccucacuacucucugguguccccucacc

SEQ ID NO: 160682 - RNA, 32 nt, Homo Sapiens
uguguggagaggagcugcuugugggcagugag

SEQ ID NO: 160683 - RNA, 32 nt, Homo Sapiens
gaugagaggagaagucuuggcuucacuuuugg

SEQ ID NO: 160684 - RNA, 32 nt, Homo Sapiens
cuagagaacagauucauuugcuuaauuuucaa

SEQ ID NO: 160685 - RNA, 32 nt, Homo Sapiens
gcagagcuggucccugacacgcacuuuuauca

SEQ ID NO: 160686 - RNA, 32 nt, Homo Sapiens
cuggcggcugggugauccugggcccccagggc

SEQ ID NO: 160687 - RNA, 32 nt, Homo Sapiens
cacauaacucagcagggaggccaggcauuggu

SEQ ID NO: 160688 - RNA, 32 nt, Homo Sapiens
cagccuugacagggaccccccggcccuaacac

SEQ ID NO: 160689 - RNA, 32 nt, Homo Sapiens
ccccuggcccccagccccucugccucggccuu

SEQ ID NO: 160690 - RNA, 32 nt, Homo Sapiens
ugaagaccauuuuggaggaagaaaagcacccu

SEQ ID NO: 160691 - RNA, 32 nt, Homo Sapiens
gaagauggugucggcugaaaagaagagcaaug

SEQ ID NO: 160692 - RNA, 32 nt, Homo Sapiens
uuuaaaauugguuuaccucaggaugacgugca

SEQ ID NO: 160693 - RNA, 32 nt, Homo Sapiens
ugcccucucccccacuuccccccggcccaugg

SEQ ID NO: 160694 - RNA, 32 nt, Homo Sapiens
cuuuaaaaaaauaauguguuagcugauucaca

SEQ ID NO: 160695 - RNA, 32 nt, Homo Sapiens
cuaaaacaaaaauaaaugucaguuuauauuuu

SEQ ID NO: 160696 - RNA, 32 nt, Homo Sapiens
uucuauuuuuauuuuucuuuuuaugaguaacg

SEQ ID NO: 160697 - RNA, 31 nt, Homo Sapiens
aacugcucucagagaaaguagcuuugugaca

SEQ ID NO: 160698 - RNA, 32 nt, Homo Sapiens
gccagccagccagcugcagggccucuugcugc

SEQ ID NO: 160699 - RNA, 32 nt, Homo Sapiens
aucugugugucugcauuuucuaauccuuuuug

SEQ ID NO: 160700 - RNA, 32 nt, Homo Sapiens
ucuuccacuucguuuucugcugucccaaggcc

SEQ ID NO: 160701 - RNA, 32 nt, Homo Sapiens
guggugucuuccgcugacguggcucuugcccu

SEQ ID NO: 160702 - RNA, 32 nt, Homo Sapiens
auuguucuucauuuauuccuuaauuuucuaaa

SEQ ID NO: 160703 - RNA, 32 nt, Homo Sapiens
aggacaauccaggcauccaguuaugccugauc

SEQ ID NO: 160704 - RNA, 32 nt, Homo Sapiens
auacauagaagaauuagauauuugaucuuugu

SEQ ID NO: 160705 - RNA, 32 nt, Homo Sapiens
ccgcggcuccccagcccuuugcugcgccgcga

SEQ ID NO: 160706 - RNA, 32 nt, Homo Sapiens
uuuuuaagaauuuugauacauguugccaacca

SEQ ID NO: 160707 - RNA, 32 nt, Homo Sapiens
ugccugugaucccagcacuuugggaggccagg

SEQ ID NO: 160708 - RNA, 32 nt, Homo Sapiens
uggaagcgcgggggcggcgccgagaacgaaac

SEQ ID NO: 160709 - RNA, 32 nt, Homo Sapiens
gcaaggggagcaaggaugggacaacuccaucu

SEQ ID NO: 160710 - RNA, 32 nt, Homo Sapiens
aauaaaggacagcucucuucucuccuggcuaa

SEQ ID NO: 160711 - RNA, 32 nt, Homo Sapiens
ccagugaaagcuuuugggguuuggauggaugg

SEQ ID NO: 160712 - RNA, 32 nt, Homo Sapiens
auuucaaagagauuuaaaugaauuuguuuuau

SEQ ID NO: 160713 - RNA, 30 nt, Homo Sapiens
caugcaagagguggcaggggacagaugugc

SEQ ID NO: 160714 - RNA, 32 nt, Homo Sapiens
gguguaggaguacaugacuuccccucaccugg

SEQ ID NO: 160715 - RNA, 32 nt, Homo Sapiens
ccaguaggcuacagcuuuugccccacacccuu

SEQ ID NO: 160716 - RNA, 32 nt, Homo Sapiens
gagcacuugaucucagaaaagcuccauugucu

SEQ ID NO: 160717 - RNA, 32 nt, Homo Sapiens
ggguccuaauggcagcagaaccacugacagag

SEQ ID NO: 160718 - RNA, 32 nt, Homo Sapiens
cgcggugccccggcgggugaugccaaauacag

SEQ ID NO: 160719 - RNA, 32 nt, Homo Sapiens
gccgagacaggacaaauauuugagcucuggag

SEQ ID NO: 160720 - RNA, 32 nt, Homo Sapiens
ccacggggaccacaaugcugcauuugucugug

SEQ ID NO: 160721 - RNA, 32 nt, Homo Sapiens
agaggacgaccaaucuuagggaauuuccagac

SEQ ID NO: 160722 - RNA, 32 nt, Homo Sapiens
gauggaguuuugcucugucacccaggcuggag

SEQ ID NO: 160723 - RNA, 32 nt, Homo Sapiens
gacagaguuucacucugucacccaggcuggag

SEQ ID NO: 160724 - RNA, 28 nt, Homo Sapiens
aggcggcggcggccgagcgaguggcgag

SEQ ID NO: 160725 - RNA, 32 nt, Homo Sapiens
acgaccccacgcugcagcacgggcuuccggcu

SEQ ID NO: 160726 - RNA, 32 nt, Homo Sapiens
uaaaugacuguauaaaacuuguugacaaugca

SEQ ID NO: 160727 - RNA, 32 nt, Homo Sapiens
acugucuccugccugccccugggaacugaaug

SEQ ID NO: 160728 - RNA, 32 nt, Homo Sapiens
aauuugcccagcugcccgcgcuuuaugaaaug

SEQ ID NO: 160729 - RNA, 32 nt, Homo Sapiens
gguagaugagagacagggcagggaaucugcgu

SEQ ID NO: 160730 - RNA, 32 nt, Homo Sapiens
uuagcagucaacagagggcacgugaggguccu

SEQ ID NO: 160731 - RNA, 32 nt, Homo Sapiens
gugaauuuucaggacaauauugccucacaacc

SEQ ID NO: 160732 - RNA, 32 nt, Homo Sapiens
uauaacaaauguaccacucugguggugaaugu

SEQ ID NO: 160733 - RNA, 32 nt, Homo Sapiens
gcagggagcacaccccaggacccucacuuuuc

SEQ ID NO: 160734 - RNA, 32 nt, Homo Sapiens
uauagacaaacacauagacacauguagacaca

SEQ ID NO: 160735 - RNA, 32 nt, Homo Sapiens
acucaauaaaaauaacacuuauuaaauucuag

SEQ ID NO: 160736 - RNA, 32 nt, Homo Sapiens
gccgcucgcucccgacacggcucacgaugcgc

SEQ ID NO: 160737 - RNA, 32 nt, Homo Sapiens
uagagaucaaggagauccauugaaacucagcc

SEQ ID NO: 160738 - RNA, 32 nt, Homo Sapiens
ugaagggacugaguuucuuaacccucuaauca

SEQ ID NO: 160739 - RNA, 32 nt, Homo Sapiens
uaagagcaagcacuucccucauuacagaaaga

SEQ ID NO: 160740 - RNA, 32 nt, Homo Sapiens
agcuaggaacaucagccuggugcccuguuaac

SEQ ID NO: 160741 - RNA, 31 nt, Homo Sapiens
ugaacauggcacugcccuccucuggcacuca

SEQ ID NO: 160742 - RNA, 32 nt, Homo Sapiens
gcugucacugucagaguggaauuuccauuggu

SEQ ID NO: 160743 - RNA, 32 nt, Homo Sapiens
cuucuaugagagagaugaauuggggagaauug

SEQ ID NO: 160744 - RNA, 32 nt, Homo Sapiens
caacuggcuuaaacuggagcugucccagcgaa

SEQ ID NO: 160745 - RNA, 30 nt, Homo Sapiens
gguaauuguguuuugggggaaaguggggaa

SEQ ID NO: 160746 - RNA, 32 nt, Homo Sapiens
cgagucauuuccccuucauugaccucauuuuc

SEQ ID NO: 160747 - RNA, 32 nt, Homo Sapiens
augucagacacacgagcagagaggaacacaaa

SEQ ID NO: 160748 - RNA, 32 nt, Homo Sapiens
uuauugauuaaugcuuguuaacuuuuuucaua

SEQ ID NO: 160749 - RNA, 31 nt, Homo Sapiens
accggcucuccgacagcucaaacacagacag

SEQ ID NO: 160750 - RNA, 32 nt, Homo Sapiens
gugccagcugggugggaggagcagccgaguga

SEQ ID NO: 160751 - RNA, 32 nt, Homo Sapiens
cauauugcaucuaucucuguguagaacauuug

SEQ ID NO: 160752 - RNA, 32 nt, Homo Sapiens
acgugaaaucauaacaacauguucucuugugu

SEQ ID NO: 160753 - RNA, 32 nt, Homo Sapiens
uguuggugugagaugccaaaucugugaaaacc

SEQ ID NO: 160754 - RNA, 32 nt, Homo Sapiens
uuuggaaguucaucuguguuuuauuucucccu

SEQ ID NO: 160755 - RNA, 32 nt, Homo Sapiens
gcaaggcaguugcagggaagccagcugcgcau

SEQ ID NO: 160756 - RNA, 28 nt, Homo Sapiens
acucgaguuacagacaaagcguggugga

SEQ ID NO: 160757 - RNA, 32 nt, Homo Sapiens
cggggccuguaggcgccgcgaguuccggcugu

SEQ ID NO: 160758 - RNA, 28 nt, Homo Sapiens
guuagaauggcgaucauuaaaaagucag

SEQ ID NO: 160759 - RNA, 32 nt, Homo Sapiens
gucuaguuucagcacauagaaaaccagcagug

SEQ ID NO: 160760 - RNA, 32 nt, Homo Sapiens
ucccuucgaccccuuugcccacguggugaccg

SEQ ID NO: 160761 - RNA, 32 nt, Homo Sapiens
ugucuugacccccaagucuucaaccagauauc

SEQ ID NO: 160762 - RNA, 32 nt, Homo Sapiens
uacuguuugacuguguggcacaggggggcauu

SEQ ID NO: 160763 - RNA, 32 nt, Homo Sapiens
cuuucccugucugccuucuccauuuucucagu

SEQ ID NO: 160764 - RNA, 32 nt, Homo Sapiens
gaugacugggagagcaggcugaaugcgacgga

SEQ ID NO: 160765 - RNA, 32 nt, Homo Sapiens
uucuuacugucacuucuaaauagaaaaugaca

SEQ ID NO: 160766 - RNA, 32 nt, Homo Sapiens
cuauguguauauauuuucaaacuuuguuuccu

SEQ ID NO: 160767 - RNA, 32 nt, Homo Sapiens
uuuacuuuuauuucuauuucuuuaaguucucu

SEQ ID NO: 160768 - RNA, 32 nt, Homo Sapiens
aacugugaacuauggcuuaauacuguuaaaga

SEQ ID NO: 160769 - RNA, 32 nt, Homo Sapiens
guggcuucuuccccggccugaucugcgcagcc

SEQ ID NO: 160770 - RNA, 32 nt, Homo Sapiens
uccuguuucagguuugcuucccuucucaguga

SEQ ID NO: 160771 - RNA, 32 nt, Homo Sapiens
agauagacgccccggcggccccggguccugga

SEQ ID NO: 160772 - RNA, 32 nt, Homo Sapiens
agugaccaucuucauaauuugcuggagaagug

SEQ ID NO: 160773 - RNA, 32 nt, Homo Sapiens
cccugaaguuguguccacgaagagggagcuga

SEQ ID NO: 160774 - RNA, 32 nt, Homo Sapiens
gucauuaaagagaaaggaguagcuuugacauu

SEQ ID NO: 160775 - RNA, 32 nt, Homo Sapiens
cagcgggggcaugggcaggaccacgugggccg

SEQ ID NO: 160776 - RNA, 32 nt, Homo Sapiens
caucauuucuucauucugcauauucuuucccu

SEQ ID NO: 160777 - RNA, 32 nt, Homo Sapiens
gaagugguucggcaagcccacccagcagcgug

SEQ ID NO: 160778 - RNA, 32 nt, Homo Sapiens
aaacaauauucucuuuuugaaaauaguauaaa

SEQ ID NO: 160779 - RNA, 32 nt, Homo Sapiens
ucuggagaucacauguuuuucuucuaagguua

SEQ ID NO: 160780 - RNA, 32 nt, Homo Sapiens
gugccaggaagccuggcccagcccaccucccc

SEQ ID NO: 160781 - RNA, 31 nt, Homo Sapiens
auuguccagccccagcuccaccuaagugacu

SEQ ID NO: 160782 - RNA, 32 nt, Homo Sapiens
gaaugugcuucccucccuggggucucacacgc

SEQ ID NO: 160783 - RNA, 32 nt, Homo Sapiens
agaagcugccgccgccucugcccgcccggcgc

SEQ ID NO: 160784 - RNA, 32 nt, Homo Sapiens
cggugucaacgcgcuagagaggccgucucacc

SEQ ID NO: 160785 - RNA, 32 nt, Homo Sapiens
gcccagugccagcaaguccuuaggcuacugua

SEQ ID NO: 160786 - RNA, 32 nt, Homo Sapiens
uaucuaugagcaugcauggcuauaaacgcauu

SEQ ID NO: 160787 - RNA, 32 nt, Homo Sapiens
agaagcagccucucguccccuugucagugcug

SEQ ID NO: 160788 - RNA, 32 nt, Homo Sapiens
gagucuggauuugaacccuuggaccaggcauu

SEQ ID NO: 160789 - RNA, 32 nt, Homo Sapiens
augaggaggaaagucuuccaugugucuuuaug

SEQ ID NO: 160790 - RNA, 32 nt, Homo Sapiens
ccucggcccccucuccuccauuucugagcccc

SEQ ID NO: 160791 - RNA, 32 nt, Homo Sapiens
cuccucauuaaaaacaaauacuucuacuguuu

SEQ ID NO: 160792 - RNA, 32 nt, Homo Sapiens
cacacacacacacacacacacacacacacccc

SEQ ID NO: 160793 - RNA, 32 nt, Homo Sapiens
gccgaagcaugcagaagcucaucaugggauuc

SEQ ID NO: 160794 - RNA, 32 nt, Homo Sapiens
uugugcucuguuuuaccuuacucuguuuagaa

SEQ ID NO: 160795 - RNA, 32 nt, Homo Sapiens
gacuaucucacaggugaucuggacuggagcag

SEQ ID NO: 160796 - RNA, 32 nt, Homo Sapiens
ucacgcaucccauugacuggcaaguacucccc

SEQ ID NO: 160797 - RNA, 32 nt, Homo Sapiens
gaucuugcuaaaaaauacauauguacuuacau

SEQ ID NO: 160798 - RNA, 32 nt, Homo Sapiens
aauccugccuucuuugugggggaggggggaga

SEQ ID NO: 160799 - RNA, 30 nt, Homo Sapiens
guccaggcgcccgcuagcuucggcggcgac

SEQ ID NO: 160800 - RNA, 32 nt, Homo Sapiens
gucccauccccuucccuccccccugcccuaag

SEQ ID NO: 160801 - RNA, 32 nt, Homo Sapiens
cucauaacuaguucacauccaagcauuugggu

SEQ ID NO: 160802 - RNA, 32 nt, Homo Sapiens
acuugggugauggggauuaauuuuauagcauu

SEQ ID NO: 160803 - RNA, 32 nt, Homo Sapiens
gucacagugagggcagcgucagccucagacuc

SEQ ID NO: 160804 - RNA, 32 nt, Homo Sapiens
cauuuuuaaaaauacauauuugggacucuuau

SEQ ID NO: 160805 - RNA, 32 nt, Homo Sapiens
uauauacuacacuggagaaaacaaaacaaacc

SEQ ID NO: 160806 - RNA, 32 nt, Homo Sapiens
ggugaaggcgagggacugcagagccuggaaau

SEQ ID NO: 160807 - RNA, 32 nt, Homo Sapiens
agaagcacuccaggccgcuagcagaugggacu

SEQ ID NO: 160808 - RNA, 32 nt, Homo Sapiens
ccaaccuucccucccccaacccuggggccgcc

SEQ ID NO: 160809 - RNA, 32 nt, Homo Sapiens
ugcggagugguguguacuauucaucagcuugg

SEQ ID NO: 160810 - RNA, 32 nt, Homo Sapiens
ggugcccggcagcucggcgccacggcuugcug

SEQ ID NO: 160811 - RNA, 32 nt, Homo Sapiens
uaugauauacagauacauccacaggguaucua

SEQ ID NO: 160812 - RNA, 32 nt, Homo Sapiens
ccggaguugcuggccauggggcagaugcugaa

SEQ ID NO: 160813 - RNA, 32 nt, Homo Sapiens
ucuuucucuaaagcuuguuugaugaaacuggu

SEQ ID NO: 160814 - RNA, 32 nt, Homo Sapiens
ggauuccuggggaggcgguggcgccagguaag

SEQ ID NO: 160815 - RNA, 32 nt, Homo Sapiens
gccuguugauucaagaacuuucuaaaguauuu

SEQ ID NO: 160816 - RNA, 32 nt, Homo Sapiens
auauuccauuuuccuuuccuugugguugaaac

SEQ ID NO: 160817 - RNA, 32 nt, Homo Sapiens
guacgaaccuacaguuuuaacuguggauauug

SEQ ID NO: 160818 - RNA, 32 nt, Homo Sapiens
ucauuacuuaggaugcacuuauaggaucugaa

SEQ ID NO: 160819 - RNA, 32 nt, Homo Sapiens
ccuggugugggaagaggaguccuggauaccuu

SEQ ID NO: 160820 - RNA, 32 nt, Homo Sapiens
ccugugcauuuuugcccuucuuucugccucuc

SEQ ID NO: 160821 - RNA, 32 nt, Homo Sapiens
ucggcgcgaaccggcagcccagccccgggucc

SEQ ID NO: 160822 - RNA, 32 nt, Homo Sapiens
cugcagagggauccuguggcuggaagcgagga

SEQ ID NO: 160823 - RNA, 32 nt, Homo Sapiens
ucugcagccugccuuccuagaguuggguuguc

SEQ ID NO: 160824 - RNA, 32 nt, Homo Sapiens
cccauucucuucuguuugucugagucucaucu

SEQ ID NO: 160825 - RNA, 32 nt, Homo Sapiens
ccuuguauucuaaauuucaugcacuucuccca

SEQ ID NO: 160826 - RNA, 32 nt, Homo Sapiens
aaauaugcaagaauaacuuuuacacuuuuucc

SEQ ID NO: 160827 - RNA, 32 nt, Homo Sapiens
gcaccgaggucuucaccugcaagugggccagg

SEQ ID NO: 160828 - RNA, 32 nt, Homo Sapiens
cuaaacaaacaaaacaaacaaacaaguaaauu

SEQ ID NO: 160829 - RNA, 32 nt, Homo Sapiens
caagaaaugcaaacagaccguucaccaccauc

SEQ ID NO: 160830 - RNA, 32 nt, Homo Sapiens
aaaaaguuuuagaagaaaaagauguaacuaaa

SEQ ID NO: 160831 - RNA, 32 nt, Homo Sapiens
cacucaccagcuucugguccucuucuuccacc

SEQ ID NO: 160832 - RNA, 32 nt, Homo Sapiens
cgacuuugagagcgaggcaucagacacacagu

SEQ ID NO: 160833 - RNA, 32 nt, Homo Sapiens
cgggaggaaggggaggcugcugcauugugggu

SEQ ID NO: 160834 - RNA, 32 nt, Homo Sapiens
acaacaaaacaaacacaaaaccacugaucugu

SEQ ID NO: 160835 - RNA, 32 nt, Homo Sapiens
aaguuuuauagcaaccuauuacuaaagauauu

SEQ ID NO: 160836 - RNA, 32 nt, Homo Sapiens
agaagggucggaucugagagaauggggaggcc

SEQ ID NO: 160837 - RNA, 32 nt, Homo Sapiens
agaccccaggcuaccgaggagggcgccaggcc

SEQ ID NO: 160838 - RNA, 32 nt, Homo Sapiens
gacgagcggggcagcaugcagagccucggcag

SEQ ID NO: 160839 - RNA, 32 nt, Homo Sapiens
gcugugaguccuuucugggcgguguccagggg

SEQ ID NO: 160840 - RNA, 32 nt, Homo Sapiens
cauauauuuggucuucaacagguuuccaggca

SEQ ID NO: 160841 - RNA, 32 nt, Homo Sapiens
ccacagaguuaaaacuugggauuccccuggcc

SEQ ID NO: 160842 - RNA, 32 nt, Homo Sapiens
gagaacaguuugugugccauuaaaacagagau

SEQ ID NO: 160843 - RNA, 31 nt, Homo Sapiens
ucagccaagcugccccugccccgcuccucug

SEQ ID NO: 160844 - RNA, 32 nt, Homo Sapiens
cagcucggguguuguuuuguuuuacaccuacc

SEQ ID NO: 160845 - RNA, 32 nt, Homo Sapiens
ccgugcccggugccagcccaggugcucgcggc

SEQ ID NO: 160846 - RNA, 32 nt, Homo Sapiens
aguuucucaauaaaguuguuuggaaaauauuu

SEQ ID NO: 160847 - RNA, 32 nt, Homo Sapiens
aauacacuuccacccuuuuuucuaaguguucg

SEQ ID NO: 160848 - RNA, 32 nt, Homo Sapiens
accaaacaacauguaaucuacaguauaaaaaa

SEQ ID NO: 160849 - RNA, 26 nt, Homo Sapiens
gaugacugaugaugaguccgagagcg

SEQ ID NO: 160850 - RNA, 32 nt, Homo Sapiens
uucucaugacaugaaauugcauggucgaggga

SEQ ID NO: 160851 - RNA, 32 nt, Homo Sapiens
auacauuugaccauuuuauaauuauugaauaa

SEQ ID NO: 160852 - RNA, 32 nt, Homo Sapiens
gagcagcucacuuuuccaaaguaccccaaaag

SEQ ID NO: 160853 - RNA, 32 nt, Homo Sapiens
cuucugaugcaugaaaaaugugugauggugca

SEQ ID NO: 160854 - RNA, 32 nt, Homo Sapiens
uaagguaauaauaauucaugcuuuguuaaaac

SEQ ID NO: 160855 - RNA, 32 nt, Homo Sapiens
cagauagacucuuuuuaaggaucuuggcugcu

SEQ ID NO: 160856 - RNA, 32 nt, Homo Sapiens
ucaacccugaaaguuugcuuguccuuuaagau

SEQ ID NO: 160857 - RNA, 32 nt, Homo Sapiens
gcccuggauggucuggcccaccuccagccuca

SEQ ID NO: 160858 - RNA, 32 nt, Homo Sapiens
gcggccaaaucuuccguccucccguggaucuc

SEQ ID NO: 160859 - RNA, 32 nt, Homo Sapiens
accauucccccggacucccacccagcaggcag

SEQ ID NO: 160860 - RNA, 32 nt, Homo Sapiens
acgaggucaggaguucgagaccagccuggcca

SEQ ID NO: 160861 - RNA, 32 nt, Homo Sapiens
uggcauaagaauuuauagauaaauucuuguaa

SEQ ID NO: 160862 - RNA, 32 nt, Homo Sapiens
agagaaccuauuuuugugucuaaaguuuacaa

SEQ ID NO: 160863 - RNA, 32 nt, Homo Sapiens
guuuuggguugggauuacuaugggaagauaaa

SEQ ID NO: 160864 - RNA, 32 nt, Homo Sapiens
ugaggccaagagauguuuccugucccagagga

SEQ ID NO: 160865 - RNA, 32 nt, Homo Sapiens
cgacuggccccggcccucuccgcacaccugcc

SEQ ID NO: 160866 - RNA, 32 nt, Homo Sapiens
caggugagaagcugcccccggagggaggggcc

SEQ ID NO: 160867 - RNA, 32 nt, Homo Sapiens
gucucacccucccuccucccguaauugacaug

SEQ ID NO: 160868 - RNA, 29 nt, Homo Sapiens
ggagaugcguaugagugccaagcugacaa

SEQ ID NO: 160869 - RNA, 32 nt, Homo Sapiens
uuuauccugaacaacaccauuugagaaagagg

SEQ ID NO: 160870 - RNA, 32 nt, Homo Sapiens
ccugcccagcaccaccaccuccuaugcuccug

SEQ ID NO: 160871 - RNA, 32 nt, Homo Sapiens
cggggucaggagcgcccccuccccucaccucc

SEQ ID NO: 160872 - RNA, 32 nt, Homo Sapiens
cugcugcugaagauccagaaccauggcaagaa

SEQ ID NO: 160873 - RNA, 32 nt, Homo Sapiens
auucccguucagguagaugaugaccggcccca

SEQ ID NO: 160874 - RNA, 32 nt, Homo Sapiens
guugcuaauaauuuauacuggaaucuggcauu

SEQ ID NO: 160875 - RNA, 32 nt, Homo Sapiens
cugcuagccucccaguaaaaucucuaaaccua

SEQ ID NO: 160876 - RNA, 32 nt, Homo Sapiens
gcccccuucucccacacugcuaggugggccag

SEQ ID NO: 160877 - RNA, 32 nt, Homo Sapiens
gauguuauuucugccauauuucaaaaugguag

SEQ ID NO: 160878 - RNA, 32 nt, Homo Sapiens
cccugaagccugagugagacacaugaagaaaa

SEQ ID NO: 160879 - RNA, 32 nt, Homo Sapiens
aauguaugcuaaucaaaauguauuuauauguu

SEQ ID NO: 160880 - RNA, 32 nt, Homo Sapiens
agggaauauuuuacuuauuuuuauacuuuaua

SEQ ID NO: 160881 - RNA, 32 nt, Homo Sapiens
gccaccuccgcggacccugagcgcaagagcca

SEQ ID NO: 160882 - RNA, 32 nt, Homo Sapiens
ccuagaaaggauguugcagauaucagaaagca

SEQ ID NO: 160883 - RNA, 32 nt, Homo Sapiens
gugggaucuuuuucaccuaagaguuuccuagc

SEQ ID NO: 160884 - RNA, 32 nt, Homo Sapiens
uucccugaggaccugcgcaaagggcgggccug

SEQ ID NO: 160885 - RNA, 32 nt, Homo Sapiens
ccugacacgggcugugcuuggccacagaacca

SEQ ID NO: 160886 - RNA, 32 nt, Homo Sapiens
cuaugaccaucuauacauacuccaccuucaaa

SEQ ID NO: 160887 - RNA, 32 nt, Homo Sapiens
gcaaauuucuaaaacuccaaguugcugcagcu

SEQ ID NO: 160888 - RNA, 32 nt, Homo Sapiens
ccugugucaugaccucaggaaauaaacguccu

SEQ ID NO: 160889 - RNA, 32 nt, Homo Sapiens
gauggugccccggccuggauccucccaagugu

SEQ ID NO: 160890 - RNA, 32 nt, Homo Sapiens
agcaguuguaaaaauugucauguuguaauuca

SEQ ID NO: 160891 - RNA, 32 nt, Homo Sapiens
gugcucgagaacagauggggccaggcaccaug

SEQ ID NO: 160892 - RNA, 32 nt, Homo Sapiens
aggauuuaauaaaaauugugaaagcuuaaaaa

SEQ ID NO: 160893 - RNA, 32 nt, Homo Sapiens
uagcuggggccagggaggggugcuacuguuuu

SEQ ID NO: 160894 - RNA, 32 nt, Homo Sapiens
uauauucuagagcagguucuaaaaguugguca

SEQ ID NO: 160895 - RNA, 32 nt, Homo Sapiens
gagaugaugcuguucguauguuaaucucagag

SEQ ID NO: 160896 - RNA, 32 nt, Homo Sapiens
ccccccauauuuguauuccuuuucauaacuuu

SEQ ID NO: 160897 - RNA, 32 nt, Homo Sapiens
cagcugacauuaccauuuauuuuauauuauga

SEQ ID NO: 160898 - RNA, 32 nt, Homo Sapiens
ccggggggcuucuaacucgucuggccagggag

SEQ ID NO: 160899 - RNA, 32 nt, Homo Sapiens
uccccaaacaauuugguucauucagacugaaa

SEQ ID NO: 160900 - RNA, 32 nt, Homo Sapiens
acucagaggcaaaggcgggcgaguaaugccug

SEQ ID NO: 160901 - RNA, 32 nt, Homo Sapiens
cugugacuagcgggccggcccgggccaggaca

SEQ ID NO: 160902 - RNA, 32 nt, Homo Sapiens
aucagaugaaauuuauagugaaugaauguaug

SEQ ID NO: 160903 - RNA, 32 nt, Homo Sapiens
caauuuaaauuuuauagaugcacuaagaauuc

SEQ ID NO: 160904 - RNA, 32 nt, Homo Sapiens
uccuacucugagacaaaagaaaaaauauuaaa

SEQ ID NO: 160905 - RNA, 32 nt, Homo Sapiens
uucaaaaauauguuaaauuuaggcucagcaca

SEQ ID NO: 160906 - RNA, 28 nt, Homo Sapiens
cguggaguuacagaagccauugaaaagu

SEQ ID NO: 160907 - RNA, 32 nt, Homo Sapiens
agauagguuuaccugcugaacuugaaaauaag

SEQ ID NO: 160908 - RNA, 32 nt, Homo Sapiens
caagaaagguguagauccugcagacugcgugg

SEQ ID NO: 160909 - RNA, 32 nt, Homo Sapiens
guuugcgaggccuggcggggccgcggggccca

SEQ ID NO: 160910 - RNA, 32 nt, Homo Sapiens
cacacucugguccaugaggcagcaaggccagu

SEQ ID NO: 160911 - RNA, 32 nt, Homo Sapiens
ugaaaugcaauaaagaaaugauaccagcagcu

SEQ ID NO: 160912 - RNA, 32 nt, Homo Sapiens
uuacaauaaaagcucuacacauuuucaaggag

SEQ ID NO: 160913 - RNA, 32 nt, Homo Sapiens
ggcgagaaguaggggagggcggugcuccgccg

SEQ ID NO: 160914 - RNA, 30 nt, Homo Sapiens
cuucuguccugugcugcauggguauuuaga

SEQ ID NO: 160915 - RNA, 32 nt, Homo Sapiens
ugagagaaagacuuagaauguacacagaucca

SEQ ID NO: 160916 - RNA, 32 nt, Homo Sapiens
gucucuaaugaaaacacuuuaaaacagauugg

SEQ ID NO: 160917 - RNA, 32 nt, Homo Sapiens
ucugguagggggaaaauguguauuuuauuaca

SEQ ID NO: 160918 - RNA, 32 nt, Homo Sapiens
uuguuaauaucugugaaaaauaaaugaguuca

SEQ ID NO: 160919 - RNA, 32 nt, Homo Sapiens
ucccaugaugguuuuuucuauuuuuuauuuuu

SEQ ID NO: 160920 - RNA, 32 nt, Homo Sapiens
uaaauucacuguugaaugccugucccagucca

SEQ ID NO: 160921 - RNA, 32 nt, Homo Sapiens
aaggcaaagggagagcugguggauugcagggu

SEQ ID NO: 160922 - RNA, 32 nt, Homo Sapiens
cauauuaaggauuuuucuugacugcaaauuac

SEQ ID NO: 160923 - RNA, 32 nt, Homo Sapiens
aaccuguucguaauaaaucaugugccacaucu

SEQ ID NO: 160924 - RNA, 32 nt, Homo Sapiens
cuaaugauugagaaucaaguuuuuaguuuugc

SEQ ID NO: 160925 - RNA, 32 nt, Homo Sapiens
uuuucuauuuguaagaucugacauuucgaggc

SEQ ID NO: 160926 - RNA, 32 nt, Homo Sapiens
caaggccucucaccccacuucccaucuccagg

SEQ ID NO: 160927 - RNA, 32 nt, Homo Sapiens
ugacuucuucccccggcccugccccggccuuc

SEQ ID NO: 160928 - RNA, 32 nt, Homo Sapiens
ugccuccccgguucaagugauucuccugccuc

SEQ ID NO: 160929 - RNA, 32 nt, Homo Sapiens
gguccgcucugugccaagggcucuggggcccu

SEQ ID NO: 160930 - RNA, 32 nt, Homo Sapiens
uaccacugcacuccagccuggucaauggagug

SEQ ID NO: 160931 - RNA, 32 nt, Homo Sapiens
auuauuauuauuauuuuugauccuuuuccuua

SEQ ID NO: 160932 - RNA, 32 nt, Homo Sapiens
auucccaagcuccauaugccaauuaaagaaga

SEQ ID NO: 160933 - RNA, 32 nt, Homo Sapiens
cucuguccuugcuccuucucccugcagccuac

SEQ ID NO: 160934 - RNA, 32 nt, Homo Sapiens
gaucgaaucaccugaauguucuauguaaugua

SEQ ID NO: 160935 - RNA, 32 nt, Homo Sapiens
aguguuguuucuuauuggaaucuugcacugau

SEQ ID NO: 160936 - RNA, 32 nt, Homo Sapiens
uuuuuuuucuuuuuuucuucaguggugacuuc

SEQ ID NO: 160937 - RNA, 32 nt, Homo Sapiens
gacuugcucuccccugcuggaagugcuuuucc

SEQ ID NO: 160938 - RNA, 32 nt, Homo Sapiens
auuccucucccggcugccccuccggagcucaa

SEQ ID NO: 160939 - RNA, 32 nt, Homo Sapiens
cauauagucacuucaauugaugcugaaaaagc

SEQ ID NO: 160940 - RNA, 32 nt, Homo Sapiens
agaagggaccucuggcaggccagaguuuuaaa

SEQ ID NO: 160941 - RNA, 32 nt, Homo Sapiens
gcaacauccgccucugggguucaagugauucu

SEQ ID NO: 160942 - RNA, 32 nt, Homo Sapiens
uccauuuuuguuucuuuguuucguuuccucug

SEQ ID NO: 160943 - RNA, 29 nt, Homo Sapiens
guaaugaguaucugguaccccaguauccu

SEQ ID NO: 160944 - RNA, 32 nt, Homo Sapiens
ugcauugaaauuauauguaauuguauaaaugg

SEQ ID NO: 160945 - RNA, 32 nt, Homo Sapiens
cguggagaggcagugcugcugcucccgcccga

SEQ ID NO: 160946 - RNA, 32 nt, Homo Sapiens
ggugcgcggagcagucagggcgcaggugggca

SEQ ID NO: 160947 - RNA, 32 nt, Homo Sapiens
uuagacaaaaaauuauuauuuuaauuaaacug

SEQ ID NO: 160948 - RNA, 32 nt, Homo Sapiens
acuuuagaaaguuucucaucugaugggagggc

SEQ ID NO: 160949 - RNA, 32 nt, Homo Sapiens
ccagagguguggugaaucagcaugucacauuc

SEQ ID NO: 160950 - RNA, 32 nt, Homo Sapiens
acaaagcccuuucaucugaggacuuucaucug

SEQ ID NO: 160951 - RNA, 32 nt, Homo Sapiens
acgcaagccccccggggugcugccugcaccgu

SEQ ID NO: 160952 - RNA, 32 nt, Homo Sapiens
ccuggaugaacgccucuuuccgaggucuccua

SEQ ID NO: 160953 - RNA, 32 nt, Homo Sapiens
uguuuucacccuccugucuccucccaggagcu

SEQ ID NO: 160954 - RNA, 32 nt, Homo Sapiens
ggaugggcagaggcucucucccugcccacucu

SEQ ID NO: 160955 - RNA, 32 nt, Homo Sapiens
augaaggcuugucaaagagauuuaguuaaugg

SEQ ID NO: 160956 - RNA, 32 nt, Homo Sapiens
ccuuuuucauuugagacugccaucaccugugc

SEQ ID NO: 160957 - RNA, 32 nt, Homo Sapiens
cggguaaacuaaaaaaugcaaagagcugagag

SEQ ID NO: 160958 - RNA, 32 nt, Homo Sapiens
aaguuacucauccccaccuggauuuuacccca

SEQ ID NO: 160959 - RNA, 32 nt, Homo Sapiens
aaguguaauaauaacaguuaagauuucaugau

SEQ ID NO: 160960 - RNA, 32 nt, Homo Sapiens
aguaaaccuucaacaccggauuuuuucuuuua

SEQ ID NO: 160961 - RNA, 32 nt, Homo Sapiens
gcccacagccccugcuugggcugccuggcacc

SEQ ID NO: 160962 - RNA, 32 nt, Homo Sapiens
cuggaggcgccggcagcgcccgccagacccgc

SEQ ID NO: 160963 - RNA, 32 nt, Homo Sapiens
ucagguguguugcagugucugcuggagacauu

SEQ ID NO: 160964 - RNA, 32 nt, Homo Sapiens
ccaaauaccauguacauaauucuugcuaugaa

SEQ ID NO: 160965 - RNA, 31 nt, Homo Sapiens
uuggcauguguuggugugucaguguauuuca

SEQ ID NO: 160966 - RNA, 32 nt, Homo Sapiens
uuaagauggaaucuugcucugucgcccacguu

SEQ ID NO: 160967 - RNA, 32 nt, Homo Sapiens
ccugccaggggcgggggguggggcagcugugg

SEQ ID NO: 160968 - RNA, 32 nt, Homo Sapiens
ugcccacugcagugccaagacggcagcaggac

SEQ ID NO: 160969 - RNA, 32 nt, Homo Sapiens
cugccccuauuuccuuguaaagagggagcaca

SEQ ID NO: 160970 - RNA, 32 nt, Homo Sapiens
uuucuuuucuuuucuuuuuuuuuuuuuugaga

SEQ ID NO: 160971 - RNA, 32 nt, Homo Sapiens
gucaaaugcaggccugccuguccccaaagucc

SEQ ID NO: 160972 - RNA, 32 nt, Homo Sapiens
gagcgagugucauggcggccggcgucgaguug

SEQ ID NO: 160973 - RNA, 32 nt, Homo Sapiens
aauaaaaacaaaugcucccagagagcugcaug

SEQ ID NO: 160974 - RNA, 32 nt, Homo Sapiens
aaggagacaugaaugucugcaaugauacuucc

SEQ ID NO: 160975 - RNA, 32 nt, Homo Sapiens
guuaacaaacuuuuuucuuuuuaaaaugugag

SEQ ID NO: 160976 - RNA, 32 nt, Homo Sapiens
ucaaacaacaagagaggauauuugagcacauu

SEQ ID NO: 160977 - RNA, 32 nt, Homo Sapiens
gagauagagucuuggccauggcuuuccugcaa

SEQ ID NO: 160978 - RNA, 32 nt, Homo Sapiens
ccccacagagcuaaucuaaaucuugugcuaga

SEQ ID NO: 160979 - RNA, 32 nt, Homo Sapiens
ggcgugcgcgcccccuccccguagccucgcgg

SEQ ID NO: 160980 - RNA, 32 nt, Homo Sapiens
aauuucuauuucaacgucaacucuguaucuau

SEQ ID NO: 160981 - RNA, 32 nt, Homo Sapiens
gcccacugagauuaaccuuucucaccagugcu

SEQ ID NO: 160982 - RNA, 32 nt, Homo Sapiens
acuggaaggguggaaggagagaguggccagaa

SEQ ID NO: 160983 - RNA, 32 nt, Homo Sapiens
cauugcacuccagccugggugacagagugaaa

SEQ ID NO: 160984 - RNA, 32 nt, Homo Sapiens
ucaagcuauguggcacuguagcuuugccguga

SEQ ID NO: 160985 - RNA, 32 nt, Homo Sapiens
agaccccuuccuuuccucugcagcacuuuaac

SEQ ID NO: 160986 - RNA, 32 nt, Homo Sapiens
auuuuaaguuugcaugagauagccuaauaaau

SEQ ID NO: 160987 - RNA, 32 nt, Homo Sapiens
cacaccaucccauaauguccuguugccccccu

SEQ ID NO: 160988 - RNA, 32 nt, Homo Sapiens
ggcuacaccacccugcccugacccugggauug

SEQ ID NO: 160989 - RNA, 32 nt, Homo Sapiens
cagcaaacgcagugaguaucaaccugauuguu

SEQ ID NO: 160990 - RNA, 32 nt, Homo Sapiens
gguuuuuccccgcuccugcacccguggauccu

SEQ ID NO: 160991 - RNA, 32 nt, Homo Sapiens
gaacuagucucgaggucgacgcggccgcgaau

SEQ ID NO: 160992 - RNA, 32 nt, Homo Sapiens
uuauuuuucuucagaauauuuauuacucuuua

SEQ ID NO: 160993 - RNA, 32 nt, Homo Sapiens
ggggcucuagugaacagcggagccggacgggg

SEQ ID NO: 160994 - RNA, 32 nt, Homo Sapiens
cgggcgggccgcgggggucccggacggacaca

SEQ ID NO: 160995 - RNA, 32 nt, Homo Sapiens
cucuuguaugugguggaccugcuucugucagg

SEQ ID NO: 160996 - RNA, 32 nt, Homo Sapiens
ccugugcauuaagagaaagcaauguugcccuu

SEQ ID NO: 160997 - RNA, 32 nt, Homo Sapiens
caaagggauugugagaaucaagucacucucgu

SEQ ID NO: 160998 - RNA, 32 nt, Homo Sapiens
ucggcuccggugcgcgccgaggccaugcagcg

SEQ ID NO: 160999 - RNA, 32 nt, Homo Sapiens
aguugagccacauuuuuuaaaaaaagaaaaug

SEQ ID NO: 161000 - RNA, 29 nt, Homo Sapiens
ccuccucagguccgggcgggucccuggcc

SEQ ID NO: 161001 - RNA, 32 nt, Homo Sapiens
cggggggcccaguccagccaccccccagcacu

SEQ ID NO: 161002 - RNA, 32 nt, Homo Sapiens
gugaaccuggcuccuucuucacuaccucagau

SEQ ID NO: 161003 - RNA, 32 nt, Homo Sapiens
cccuuggcucugccuuggcccuuccccucacc

SEQ ID NO: 161004 - RNA, 32 nt, Homo Sapiens
auauuacucccuccccuacaccagggacuugc

SEQ ID NO: 161005 - RNA, 32 nt, Homo Sapiens
ccuugcagacuaaaaggagauacaugagagag

SEQ ID NO: 161006 - RNA, 32 nt, Homo Sapiens
guuuauuccugccugcuccggccaggacugaa

SEQ ID NO: 161007 - RNA, 32 nt, Homo Sapiens
agucccuuuccacuuuaaccuucuacaaaucu

SEQ ID NO: 161008 - RNA, 32 nt, Homo Sapiens
ccacagccgcgugcgugccauugccagccggg

SEQ ID NO: 161009 - RNA, 32 nt, Homo Sapiens
agaguaguagauuguuuuuuccuauaugcaua

SEQ ID NO: 161010 - RNA, 32 nt, Homo Sapiens
ggugggggacagagccagauucagaguaaucu

SEQ ID NO: 161011 - RNA, 32 nt, Homo Sapiens
auuuggagugaacagcccggauuguuacagaa

SEQ ID NO: 161012 - RNA, 32 nt, Homo Sapiens
ugaaaaacuucucuucaacaguucagugcgcc

SEQ ID NO: 161013 - RNA, 32 nt, Homo Sapiens
cuuuaaugcauuuucuuaauucuuacaauggu

SEQ ID NO: 161014 - RNA, 32 nt, Homo Sapiens
gcaaaaagauuuucaugcuaaucuucaaaggu

SEQ ID NO: 161015 - RNA, 30 nt, Homo Sapiens
ggagcccaggccgugccgcgcggcgccaug

SEQ ID NO: 161016 - RNA, 32 nt, Homo Sapiens
uccauggaauaauauguaauucuuguuuuccu

SEQ ID NO: 161017 - RNA, 32 nt, Homo Sapiens
aaacguucuuucgucucuuuucuuuguuccuu

SEQ ID NO: 161018 - RNA, 29 nt, Homo Sapiens
cucgguacaggauguucuauaaaauggcc

SEQ ID NO: 161019 - RNA, 32 nt, Homo Sapiens
cugucacuggccaagggcuggcagcucuuccu

SEQ ID NO: 161020 - RNA, 32 nt, Homo Sapiens
aaaugugaaugggaaaagagauggccugagaa

SEQ ID NO: 161021 - RNA, 32 nt, Homo Sapiens
gggaggguuuuuuuuuuuaauuguuucuuuga

SEQ ID NO: 161022 - RNA, 32 nt, Homo Sapiens
ugaggaauggaguggcccacggcggccuuggg

SEQ ID NO: 161023 - RNA, 31 nt, Homo Sapiens
uguuucugugaaauucucagaguguuuaauu

SEQ ID NO: 161024 - RNA, 32 nt, Homo Sapiens
accccaaaccaugcggagaauuagaguucagc

SEQ ID NO: 161025 - RNA, 32 nt, Homo Sapiens
auagaagaaaagacacaggacugugaaagaaa

SEQ ID NO: 161026 - RNA, 29 nt, Homo Sapiens
guauggcacagcuucagaggcaaggguga

SEQ ID NO: 161027 - RNA, 32 nt, Homo Sapiens
uuuuggauuuucaccagucauguguuaauuua

SEQ ID NO: 161028 - RNA, 32 nt, Homo Sapiens
uauguaaauuccaggacaacagugaaguuaaa

SEQ ID NO: 161029 - RNA, 32 nt, Homo Sapiens
cgaggagcccgcgagcucuccucucuccucug

SEQ ID NO: 161030 - RNA, 32 nt, Homo Sapiens
uuacacaccagacacacaaacacacacacaca

SEQ ID NO: 161031 - RNA, 32 nt, Homo Sapiens
gauccuacuucucugucgcccgcgguucgccg

SEQ ID NO: 161032 - RNA, 32 nt, Homo Sapiens
gcguccgccuccuucacagcgacggcugccgg

SEQ ID NO: 161033 - RNA, 32 nt, Homo Sapiens
gcuaggguuuguguuggaggcuuucgguccag

SEQ ID NO: 161034 - RNA, 32 nt, Homo Sapiens
guuaugggcugcuuuacugaaaacagaaugga

SEQ ID NO: 161035 - RNA, 32 nt, Homo Sapiens
uggauguccugcucagacacuccacuuagaag

SEQ ID NO: 161036 - RNA, 32 nt, Homo Sapiens
ucugggcccucuccuucgucugggaaggcacc

SEQ ID NO: 161037 - RNA, 32 nt, Homo Sapiens
ucacccuccagaucuaagaauggcuucaggcu

SEQ ID NO: 161038 - RNA, 32 nt, Homo Sapiens
gagguagcgcugggcuucuggggccaggacaa

SEQ ID NO: 161039 - RNA, 32 nt, Homo Sapiens
augagacacaucuccuaacaaauagaaauuca

SEQ ID NO: 161040 - RNA, 32 nt, Homo Sapiens
auauaugcagauguuauacagauuuucuuagc

SEQ ID NO: 161041 - RNA, 32 nt, Homo Sapiens
gcaugauuugaaaaaagcaugguauaauugaa

SEQ ID NO: 161042 - RNA, 32 nt, Homo Sapiens
gcugaguugccggcgccggcugagccagcgga

SEQ ID NO: 161043 - RNA, 32 nt, Homo Sapiens
uggggaccgggcgggggguggaggaagaggcc

SEQ ID NO: 161044 - RNA, 32 nt, Homo Sapiens
aaaauuccaccccacacccacugagcuaaucu

SEQ ID NO: 161045 - RNA, 32 nt, Homo Sapiens
ucggcaaaggauuucuggccagccgcuacccu

SEQ ID NO: 161046 - RNA, 32 nt, Homo Sapiens
ugcacauauuauuugcaaauaccauggaugau

SEQ ID NO: 161047 - RNA, 32 nt, Homo Sapiens
uguaacuaaaaauuauuugaaaaaauuaugcc

SEQ ID NO: 161048 - RNA, 32 nt, Homo Sapiens
acuuuggaauguguuuaaauuuaaauuugaaa

SEQ ID NO: 161049 - RNA, 32 nt, Homo Sapiens
aacuugcagugccuuuuagguuuuccaaauaa

SEQ ID NO: 161050 - RNA, 30 nt, Homo Sapiens
ucacgccaucuccauccccaucuugagucc

SEQ ID NO: 161051 - RNA, 30 nt, Homo Sapiens
ugggaugcccuugccacccgugguuggauc

SEQ ID NO: 161052 - RNA, 32 nt, Homo Sapiens
cacagguacaagccacaggaccccaagaauga

SEQ ID NO: 161053 - RNA, 32 nt, Homo Sapiens
uagggagcucugcggugaugagcacggccauu

SEQ ID NO: 161054 - RNA, 32 nt, Homo Sapiens
ugccucccaaggugcuggauuacagguguaag

SEQ ID NO: 161055 - RNA, 32 nt, Homo Sapiens
auuguagguaagguaagaggaaucaaguucug

SEQ ID NO: 161056 - RNA, 32 nt, Homo Sapiens
cccgacugggcaggcgggggagccccuacuuc

SEQ ID NO: 161057 - RNA, 32 nt, Homo Sapiens
cucugugucgcccccugccccggaggguggga

SEQ ID NO: 161058 - RNA, 32 nt, Homo Sapiens
gucucagaaggggagaaucuccugucaccacc

SEQ ID NO: 161059 - RNA, 32 nt, Homo Sapiens
guggcuccagaucuggagguguguccauggcg

SEQ ID NO: 161060 - RNA, 32 nt, Homo Sapiens
agccugcucccuccuacccuggccucaaggaa

SEQ ID NO: 161061 - RNA, 32 nt, Homo Sapiens
cccacgcuccaacacacacacacacacacaca

SEQ ID NO: 161062 - RNA, 32 nt, Homo Sapiens
ucuaaguaauuucccggggcaagcauuguuuc

SEQ ID NO: 161063 - RNA, 28 nt, Homo Sapiens
gccuuggcuggucccaggaugagcgacg

SEQ ID NO: 161064 - RNA, 29 nt, Homo Sapiens
aggaagaaugucauguaccauguggauca

SEQ ID NO: 161065 - RNA, 32 nt, Homo Sapiens
auccguuaugacgccaguggcucccacgcuga

SEQ ID NO: 161066 - RNA, 32 nt, Homo Sapiens
uauuaauuauuugguuguuuuguuuucauuuu

SEQ ID NO: 161067 - RNA, 32 nt, Homo Sapiens
uugaucauuucccaagauacuuucccaaaauc

SEQ ID NO: 161068 - RNA, 32 nt, Homo Sapiens
cgugcugggcgcgggcauccggcuggugaccc

SEQ ID NO: 161069 - RNA, 32 nt, Homo Sapiens
agaguuugggccuuuuagauugcaucaaauaa

SEQ ID NO: 161070 - RNA, 32 nt, Homo Sapiens
agucauguuuguccucuuuucuuucuuuauag

SEQ ID NO: 161071 - RNA, 32 nt, Homo Sapiens
cuccuucccgggcgcgcacacgcgcuuccucu

SEQ ID NO: 161072 - RNA, 32 nt, Homo Sapiens
ggcggcucggcgggcgucuucuccacuccucu

SEQ ID NO: 161073 - RNA, 32 nt, Homo Sapiens
ugaguaaaacaauggagaugacaaaaauauug

SEQ ID NO: 161074 - RNA, 32 nt, Homo Sapiens
aagccacccgcggagagcgcagcggcgcccug

SEQ ID NO: 161075 - RNA, 32 nt, Homo Sapiens
uucguuuguuugucacuccaauuuuagcugug

SEQ ID NO: 161076 - RNA, 32 nt, Homo Sapiens
ggcuggcccagcugcucaggagccgggcuggg

SEQ ID NO: 161077 - RNA, 32 nt, Homo Sapiens
ccgccccaggcugggugggcgcggcgaggccu

SEQ ID NO: 161078 - RNA, 32 nt, Homo Sapiens
gcccgcacgguccaauggccggggaggcggag

SEQ ID NO: 161079 - RNA, 32 nt, Homo Sapiens
ccuaugccgaaggcuuugcuuacuaguuucug

SEQ ID NO: 161080 - RNA, 32 nt, Homo Sapiens
aguaauuaaaaauuuuacuuugaaaauuaggc

SEQ ID NO: 161081 - RNA, 32 nt, Homo Sapiens
ggugggggucggggccugggggacugggagcc

SEQ ID NO: 161082 - RNA, 32 nt, Homo Sapiens
gauuuggcacuagccaaagcgaggcacccuua

SEQ ID NO: 161083 - RNA, 32 nt, Homo Sapiens
aauaauguucuucccacaaauaaucacgcuuu

SEQ ID NO: 161084 - RNA, 32 nt, Homo Sapiens
cagugcuucuguuuucuugucuauucugcaua

SEQ ID NO: 161085 - RNA, 32 nt, Homo Sapiens
gucacccucccagcugaccugcccguagccaa

SEQ ID NO: 161086 - RNA, 32 nt, Homo Sapiens
ucaaaggcuacgcguggccgccgggaccugcc

SEQ ID NO: 161087 - RNA, 32 nt, Homo Sapiens
auguuuucguuaauaaagggcaacuuagccaa

SEQ ID NO: 161088 - RNA, 32 nt, Homo Sapiens
ggagugucuaagaacaaaagcgacccauucag

SEQ ID NO: 161089 - RNA, 32 nt, Homo Sapiens
gacucagcgggccagagagcgcggcgggccac

SEQ ID NO: 161090 - RNA, 32 nt, Homo Sapiens
aagguuuggcucaacucuggcuccuuuccauc

SEQ ID NO: 161091 - RNA, 32 nt, Homo Sapiens
aucguggagcugcggcggcugcacccaggcca

SEQ ID NO: 161092 - RNA, 32 nt, Homo Sapiens
cagacuuuaccggcuuuccccaguccauaaag

SEQ ID NO: 161093 - RNA, 32 nt, Homo Sapiens
aagaaggaaggggagcgugucugcuuccugaa

SEQ ID NO: 161094 - RNA, 29 nt, Homo Sapiens
gaacauggggcuguaugcugcagcugcag

SEQ ID NO: 161095 - RNA, 32 nt, Homo Sapiens
ucgaccugauaaaaagcaacguaugguaaaua

SEQ ID NO: 161096 - RNA, 32 nt, Homo Sapiens
uacagagcucuguguuggggucauggaugagc

SEQ ID NO: 161097 - RNA, 32 nt, Homo Sapiens
ucaugccauucuccugccccagcuucccgagu

SEQ ID NO: 161098 - RNA, 32 nt, Homo Sapiens
aaugcggaggacuauacagagaaggcagguuu

SEQ ID NO: 161099 - RNA, 32 nt, Homo Sapiens
ugaggaagacuuccacugggccugcuuuuccu

SEQ ID NO: 161100 - RNA, 32 nt, Homo Sapiens
cugcaggcuccgagcuggccuucgugcaggag

SEQ ID NO: 161101 - RNA, 32 nt, Homo Sapiens
uuuugguugaaagugcaacauuacuguacuua

SEQ ID NO: 161102 - RNA, 32 nt, Homo Sapiens
guuggguccccacugcucucgggggcgccaug

SEQ ID NO: 161103 - RNA, 32 nt, Homo Sapiens
auuuuccuugaauccaaacacacacacucucu

SEQ ID NO: 161104 - RNA, 32 nt, Homo Sapiens
gagaauuugaaccuucaccauccaccacucua

SEQ ID NO: 161105 - RNA, 32 nt, Homo Sapiens
gugguugcagaaaaaauaagaacagcgaaaga

SEQ ID NO: 161106 - RNA, 32 nt, Homo Sapiens
cucgcaaguggaaggggucgucgcgguuaagc

SEQ ID NO: 161107 - RNA, 27 nt, Homo Sapiens
ucauggacuccauugggucuucagggu

SEQ ID NO: 161108 - RNA, 32 nt, Homo Sapiens
uggauuauauuuucaguaaaauguauggaucu

SEQ ID NO: 161109 - RNA, 32 nt, Homo Sapiens
aggucuuucugcuccaucguccccaaggaaua

SEQ ID NO: 161110 - RNA, 32 nt, Homo Sapiens
aggacaaccugccccuccccagcccuuugcag

SEQ ID NO: 161111 - RNA, 32 nt, Homo Sapiens
gacaaacccagcugcagaucaugcuuuucuag

SEQ ID NO: 161112 - RNA, 32 nt, Homo Sapiens
acuggggaaggggagggugggugcucucccag

SEQ ID NO: 161113 - RNA, 32 nt, Homo Sapiens
aguccuaggcugggagcagagagggaggggac

SEQ ID NO: 161114 - RNA, 32 nt, Homo Sapiens
uucaaagucuuuuuccuucucuccuuccuaug

SEQ ID NO: 161115 - RNA, 32 nt, Homo Sapiens
gguggccgggggugggggccugcuguggguca

SEQ ID NO: 161116 - RNA, 32 nt, Homo Sapiens
uagcaaucaugagugaaguacccacgaugugc

SEQ ID NO: 161117 - RNA, 28 nt, Homo Sapiens
cuuuugguggcuaccaugcaggauuuga

SEQ ID NO: 161118 - RNA, 32 nt, Homo Sapiens
ggcuucaagaacagcugcacaugugccgcuaa

SEQ ID NO: 161119 - RNA, 32 nt, Homo Sapiens
aauguguucauuuucuccacuaacacccaagg

SEQ ID NO: 161120 - RNA, 32 nt, Homo Sapiens
uguugcauuuguuuuucuggcuuaguaaucua

SEQ ID NO: 161121 - RNA, 32 nt, Homo Sapiens
ucaggccucccucucucuucugcuccacccuu

SEQ ID NO: 161122 - RNA, 32 nt, Homo Sapiens
uacuugcuauuuuucaugacuuucucuaauaa

SEQ ID NO: 161123 - RNA, 32 nt, Homo Sapiens
gcugugaucccggcagugacugccugugcccg

SEQ ID NO: 161124 - RNA, 32 nt, Homo Sapiens
gcccugagcccucuccuccaagagguccccuc

SEQ ID NO: 161125 - RNA, 32 nt, Homo Sapiens
guggcgucuagcccgcuuuguucaguucggau

SEQ ID NO: 161126 - RNA, 32 nt, Homo Sapiens
gugcgcguccugcucgaugcccggcccugggc

SEQ ID NO: 161127 - RNA, 32 nt, Homo Sapiens
ggguuacaaaauuuagagaccaguaugauuaa

SEQ ID NO: 161128 - RNA, 32 nt, Homo Sapiens
cgaaagcucacagauugcagaaauuagcuuuu

SEQ ID NO: 161129 - RNA, 32 nt, Homo Sapiens
gugcuggccccggugccggccccguugcccag

SEQ ID NO: 161130 - RNA, 32 nt, Homo Sapiens
uccccugcggaucacucugcucucccuaacca

SEQ ID NO: 161131 - RNA, 32 nt, Homo Sapiens
aucugugugaaugguuaagaugaauguuaaau

SEQ ID NO: 161132 - RNA, 32 nt, Homo Sapiens
guuaguuucauucaaacuauauuuuguuuuuu

SEQ ID NO: 161133 - RNA, 32 nt, Homo Sapiens
aagcaggccaaguccacccgggccccucugcu

SEQ ID NO: 161134 - RNA, 32 nt, Homo Sapiens
ccccuguggaggggcugcugugggcccugacc

SEQ ID NO: 161135 - RNA, 32 nt, Homo Sapiens
aacacaggccuguuuuaccaucucugaguaca

SEQ ID NO: 161136 - RNA, 32 nt, Homo Sapiens
uucuccccgcugugccucccccaguuacccac

SEQ ID NO: 161137 - RNA, 32 nt, Homo Sapiens
agcugcaaaaauguauuugcuauaaaaugaga

SEQ ID NO: 161138 - RNA, 32 nt, Homo Sapiens
cgcgcggucuccugggugacgggaacgcggua

SEQ ID NO: 161139 - RNA, 32 nt, Homo Sapiens
caggugugggcccuucccgugccuuugcucag

SEQ ID NO: 161140 - RNA, 32 nt, Homo Sapiens
gguagaagaggcaaaacacuuuuuucacccuu

SEQ ID NO: 161141 - RNA, 32 nt, Homo Sapiens
gguuauauaugaugaaugcuaugcagauguug

SEQ ID NO: 161142 - RNA, 32 nt, Homo Sapiens
cugggccgugcccgucgccgcgcagcaggaag

SEQ ID NO: 161143 - RNA, 32 nt, Homo Sapiens
aauucuaaacaucaucuagaaaguucuugucu

SEQ ID NO: 161144 - RNA, 32 nt, Homo Sapiens
ugaaggccaaaauaaugacuucagcaagagug

SEQ ID NO: 161145 - RNA, 32 nt, Homo Sapiens
auacucacauauauacuaucuauauauuaaag

SEQ ID NO: 161146 - RNA, 32 nt, Homo Sapiens
aaucuccuauuauuuuuaucuuauguuuugua

SEQ ID NO: 161147 - RNA, 32 nt, Homo Sapiens
ugcugcauuucccccacccuaacaggucaccu

SEQ ID NO: 161148 - RNA, 30 nt, Homo Sapiens
accauggccgggcagcaccucccgguaccc

SEQ ID NO: 161149 - RNA, 32 nt, Homo Sapiens
aaaaaagaaaaaagacaauauacugacagucu

SEQ ID NO: 161150 - RNA, 32 nt, Homo Sapiens
ucuaccaccuacuagccauuaagcaaguuauu

SEQ ID NO: 161151 - RNA, 32 nt, Homo Sapiens
acauacaaaugaaucaguaucaauuagggccu

SEQ ID NO: 161152 - RNA, 32 nt, Homo Sapiens
ccucugugcccccagcuuccggcucccucuuc

SEQ ID NO: 161153 - RNA, 32 nt, Homo Sapiens
acuagcauacguuuuucuuaauuguuaucagc

SEQ ID NO: 161154 - RNA, 32 nt, Homo Sapiens
gaaagacccagggucuggacacuuccuccaac

SEQ ID NO: 161155 - RNA, 32 nt, Homo Sapiens
auauuuugauuucuuuauauggugguguguuu

SEQ ID NO: 161156 - RNA, 32 nt, Homo Sapiens
gcucucuugggaagagagagggacagggacaa

SEQ ID NO: 161157 - RNA, 32 nt, Homo Sapiens
gccaucugcacuuuucccaaggcccuaagucu

SEQ ID NO: 161158 - RNA, 32 nt, Homo Sapiens
gagaaugguauuucuucaguuuuauuuuagga

SEQ ID NO: 161159 - RNA, 32 nt, Homo Sapiens
uucaccuucaccugcuaugcgccccgcagcgc

SEQ ID NO: 161160 - RNA, 32 nt, Homo Sapiens
ugugaucacucuggaggcuggucagucuacgc

SEQ ID NO: 161161 - RNA, 32 nt, Homo Sapiens
ucugccagccccagcuucagccccggcucagg

SEQ ID NO: 161162 - RNA, 32 nt, Homo Sapiens
acucucaaaaauaaucuuaaauacugcaaaua

SEQ ID NO: 161163 - RNA, 32 nt, Homo Sapiens
aaacccagagcagaagcagggagaagggagug

SEQ ID NO: 161164 - RNA, 32 nt, Homo Sapiens
cgggggaggaggagacggcggcggcgaucucc

SEQ ID NO: 161165 - RNA, 32 nt, Homo Sapiens
gaauggcgcuccguugaguagagcaacgcaca

SEQ ID NO: 161166 - RNA, 32 nt, Homo Sapiens
uuauugguugaauguguaucuauuugagucug

SEQ ID NO: 161167 - RNA, 32 nt, Homo Sapiens
ucccuacccccgcucccucuuuccagugcucu

SEQ ID NO: 161168 - RNA, 32 nt, Homo Sapiens
uacauacuguaagguugguuuguaaauuauuc

SEQ ID NO: 161169 - RNA, 32 nt, Homo Sapiens
auuauuauuauuaauuuagaaauggggucuug

SEQ ID NO: 161170 - RNA, 32 nt, Homo Sapiens
uuuuuucccacuuucuaauguuuaaaucccau

SEQ ID NO: 161171 - RNA, 32 nt, Homo Sapiens
acagggaagaacuugcaaaacaacacagcuuu

SEQ ID NO: 161172 - RNA, 32 nt, Homo Sapiens
aguaccagauagguagcagagaccaaggcgca

SEQ ID NO: 161173 - RNA, 32 nt, Homo Sapiens
caauccuuuuugcaccaaagugccggacaacc

SEQ ID NO: 161174 - RNA, 32 nt, Homo Sapiens
uuuccuauagguuuaacuuuuacugcauagaa

SEQ ID NO: 161175 - RNA, 32 nt, Homo Sapiens
cccgggagccuccgcaagcaucuuuagaaauc

SEQ ID NO: 161176 - RNA, 32 nt, Homo Sapiens
agaauugcaaaguguguuucaauauaaauuaa

SEQ ID NO: 161177 - RNA, 32 nt, Homo Sapiens
gucccccggccgccgcccugcugcugacccag

SEQ ID NO: 161178 - RNA, 32 nt, Homo Sapiens
ugaggggcgggggacgggcgccaggcauuguc

SEQ ID NO: 161179 - RNA, 32 nt, Homo Sapiens
ucugagcuccugcuccucccugccuugccuug

SEQ ID NO: 161180 - RNA, 32 nt, Homo Sapiens
aaauuagcuggguguggugacgcuugccugua

SEQ ID NO: 161181 - RNA, 32 nt, Homo Sapiens
gccccgggugauuguuucaucuccguggcccg

SEQ ID NO: 161182 - RNA, 32 nt, Homo Sapiens
gaaaggaagauaagaaggauaccacucggcau

SEQ ID NO: 161183 - RNA, 32 nt, Homo Sapiens
gaagaaaaacaucauugcagugaaauaaaaaa

SEQ ID NO: 161184 - RNA, 32 nt, Homo Sapiens
uguugguuugacuuacuaagacacaggaauca

SEQ ID NO: 161185 - RNA, 32 nt, Homo Sapiens
auaaaagugcaacagaagaauuugauuagucu

SEQ ID NO: 161186 - RNA, 32 nt, Homo Sapiens
ucagacucaccauccaggugcagcuccagagg

SEQ ID NO: 161187 - RNA, 32 nt, Homo Sapiens
ggagcagaggcugcgucaggcucuuaaaguca

SEQ ID NO: 161188 - RNA, 32 nt, Homo Sapiens
acccaaggccccacuggcagcuuuccacagaa

SEQ ID NO: 161189 - RNA, 32 nt, Homo Sapiens
acaagaauuuccccauugucuucuucaauaaa

SEQ ID NO: 161190 - RNA, 32 nt, Homo Sapiens
cggcggagaaaguugcuccgagaagaggcugg

SEQ ID NO: 161191 - RNA, 32 nt, Homo Sapiens
gcagugcucccucuguucucuaugaaaugacg

SEQ ID NO: 161192 - RNA, 32 nt, Homo Sapiens
cacccucccugcugugucaccggagcaguuca

SEQ ID NO: 161193 - RNA, 32 nt, Homo Sapiens
gucuaggaaagauuuuccuucucuuggaaugu

SEQ ID NO: 161194 - RNA, 32 nt, Homo Sapiens
uacuauuaagggaaaggaaaagaacacuagcu

SEQ ID NO: 161195 - RNA, 32 nt, Homo Sapiens
aguguuucuuauuauuauuuuauauugaguug

SEQ ID NO: 161196 - RNA, 32 nt, Homo Sapiens
acaccccuuugauaguguucuuaauauucagg

SEQ ID NO: 161197 - RNA, 32 nt, Homo Sapiens
ugaaaagaacuuaugugugucuaccuucuucu

SEQ ID NO: 161198 - RNA, 32 nt, Homo Sapiens
caggugggcaaagggaggagacguggagaaau

SEQ ID NO: 161199 - RNA, 32 nt, Homo Sapiens
gggugcucugcacuccacggcccuucucagcc

SEQ ID NO: 161200 - RNA, 32 nt, Homo Sapiens
gugcagcccagacgugagacaccugagcuuca

SEQ ID NO: 161201 - RNA, 32 nt, Homo Sapiens
ccacagcccuccccagcugcccaggaagagcc

SEQ ID NO: 161202 - RNA, 32 nt, Homo Sapiens
ccugaccagauguggcucggaggggaauccag

SEQ ID NO: 161203 - RNA, 32 nt, Homo Sapiens
auacaacccagcugguauuuuuggcuauucau

SEQ ID NO: 161204 - RNA, 32 nt, Homo Sapiens
ccucccugccccccgcuucagucucuaccaua

SEQ ID NO: 161205 - RNA, 32 nt, Homo Sapiens
cagaggaugauuauuccagucuauucucagag

SEQ ID NO: 161206 - RNA, 32 nt, Homo Sapiens
uccugccagaguuuccucucauuggccaaacc

SEQ ID NO: 161207 - RNA, 32 nt, Homo Sapiens
gagagccaauugugagucagucucaguagcca

SEQ ID NO: 161208 - RNA, 32 nt, Homo Sapiens
aaccagaaauaccauuugaccuagcaauccca

SEQ ID NO: 161209 - RNA, 32 nt, Homo Sapiens
uggggcugagccacgcucucguuuugucaggc

SEQ ID NO: 161210 - RNA, 32 nt, Homo Sapiens
ccucuggggaguggacuggaccacugaauguc

SEQ ID NO: 161211 - RNA, 32 nt, Homo Sapiens
acaucuggccaguggcucuggugcuagaugcc

SEQ ID NO: 161212 - RNA, 32 nt, Homo Sapiens
ggcgaggugcuggagaacaugcugaaggcguc

SEQ ID NO: 161213 - RNA, 32 nt, Homo Sapiens
cgcacacucgcgcgcgcauccucccgccagcc

SEQ ID NO: 161214 - RNA, 32 nt, Homo Sapiens
ccucgaacccgccgcgguaccagagcaucggg

SEQ ID NO: 161215 - RNA, 32 nt, Homo Sapiens
uauauccaaugaaaaaucacauguucaguauu

SEQ ID NO: 161216 - RNA, 32 nt, Homo Sapiens
gccucccgcccucgccaucccggagcugaguc

SEQ ID NO: 161217 - RNA, 32 nt, Homo Sapiens
ccaguaucuuacacuuuagaaaacagaggcug

SEQ ID NO: 161218 - RNA, 32 nt, Homo Sapiens
guguuaauuucugcacggucaacaaacaucaa

SEQ ID NO: 161219 - RNA, 32 nt, Homo Sapiens
auaauagaucaucaaugaacuuacacauacua

SEQ ID NO: 161220 - RNA, 32 nt, Homo Sapiens
cuucaacaaaugaauuggggugaggcaaggca

SEQ ID NO: 161221 - RNA, 32 nt, Homo Sapiens
cgagcuccugcuugcuugccucuuucuuuguc

SEQ ID NO: 161222 - RNA, 32 nt, Homo Sapiens
uccucaaaaaauuuucuuaugcuccauaaaau

SEQ ID NO: 161223 - RNA, 32 nt, Homo Sapiens
cuggaacauaaaacuuuauucaguguaauuua

SEQ ID NO: 161224 - RNA, 32 nt, Homo Sapiens
agcacugugaaaauaaacuuuuauuaagcuga

SEQ ID NO: 161225 - RNA, 32 nt, Homo Sapiens
aucuuuuguuaucagaguaccauuccaaucuc

SEQ ID NO: 161226 - RNA, 32 nt, Homo Sapiens
cacguucccuccccuuuccccagcgcacuguu

SEQ ID NO: 161227 - RNA, 32 nt, Homo Sapiens
aguugagugagucacucgcgcgcacggagcga

SEQ ID NO: 161228 - RNA, 32 nt, Homo Sapiens
ccgcccggaggagaggcacagccagggcgugu

SEQ ID NO: 161229 - RNA, 32 nt, Homo Sapiens
uacaauaagcacuuguguuuuaugacaugaua

SEQ ID NO: 161230 - RNA, 32 nt, Homo Sapiens
gcuuugcucugauuauaauuugaaagacugua

SEQ ID NO: 161231 - RNA, 32 nt, Homo Sapiens
cuccggucaaggccuggccgggagcgccacga

SEQ ID NO: 161232 - RNA, 32 nt, Homo Sapiens
acaaaauugucuacaauaaaucuuuugguauu

SEQ ID NO: 161233 - RNA, 32 nt, Homo Sapiens
gguuucaccguguuggucaggcuggucucaaa

SEQ ID NO: 161234 - RNA, 32 nt, Homo Sapiens
ccacagccagcccuuccucugcaccugccucc

SEQ ID NO: 161235 - RNA, 32 nt, Homo Sapiens
aucaccaauccccuacuguuaaucagagaugu

SEQ ID NO: 161236 - RNA, 32 nt, Homo Sapiens
ccggggaguuccuggggagccgggcuucucuu

SEQ ID NO: 161237 - RNA, 32 nt, Homo Sapiens
agcccccugagcucagcccucugccuggaggg

SEQ ID NO: 161238 - RNA, 32 nt, Homo Sapiens
cucuacuuuuucuucuucuugcuggugauggu

SEQ ID NO: 161239 - RNA, 32 nt, Homo Sapiens
ccuugcaaccaauguucagagcuuacagagcu

SEQ ID NO: 161240 - RNA, 31 nt, Homo Sapiens
uggaaucuuaucagaaaguccauuaacaucu

SEQ ID NO: 161241 - RNA, 32 nt, Homo Sapiens
guguggcuccagcccuuauuucugccagugua

SEQ ID NO: 161242 - RNA, 32 nt, Homo Sapiens
caacgagacagagcggagggagaacgucgaua

SEQ ID NO: 161243 - RNA, 32 nt, Homo Sapiens
cuguaucaguccaguguguuccugucauaguu

SEQ ID NO: 161244 - RNA, 32 nt, Homo Sapiens
agauugugaugaagugaaaaacugcucccuau

SEQ ID NO: 161245 - RNA, 32 nt, Homo Sapiens
aagaagcgggccuguuggaggcugggaacccc

SEQ ID NO: 161246 - RNA, 32 nt, Homo Sapiens
gacccugccccuggcugggagcuccccugggg

SEQ ID NO: 161247 - RNA, 32 nt, Homo Sapiens
uuuaggucugcuuuuucuuauuuggccuuauu

SEQ ID NO: 161248 - RNA, 32 nt, Homo Sapiens
uuaaaagugccauuaacaaauguaucacuagc

SEQ ID NO: 161249 - RNA, 32 nt, Homo Sapiens
uuggugggaaucaaccugauccuggcccuuuc

SEQ ID NO: 161250 - RNA, 32 nt, Homo Sapiens
acuuguugcucauuuguuguaacucaauaaag

SEQ ID NO: 161251 - RNA, 32 nt, Homo Sapiens
uuaaaucauuggccauuggugauugaacucaa

SEQ ID NO: 161252 - RNA, 32 nt, Homo Sapiens
ucugccucugacaagcucccaggugaugcuga

SEQ ID NO: 161253 - RNA, 32 nt, Homo Sapiens
gcuuggacuuccuggaggacaaggaggggucu

SEQ ID NO: 161254 - RNA, 32 nt, Homo Sapiens
uuuauucuuuugcauauggauauccaaucuuc

SEQ ID NO: 161255 - RNA, 32 nt, Homo Sapiens
aucauuuucuccccuuggcagugucccagggc

SEQ ID NO: 161256 - RNA, 32 nt, Homo Sapiens
ggggagauagagugacuaaagugaugugaguc

SEQ ID NO: 161257 - RNA, 32 nt, Homo Sapiens
cagacccugccagacgugggccugcuucuugg

SEQ ID NO: 161258 - RNA, 32 nt, Homo Sapiens
aauguuguuucaucuguuuuugauccuuggca

SEQ ID NO: 161259 - RNA, 32 nt, Homo Sapiens
uguuugcuggauaccaaacaaacaaaaaguca

SEQ ID NO: 161260 - RNA, 32 nt, Homo Sapiens
auuuuuaugaauacuaagaauuuuacagucag

SEQ ID NO: 161261 - RNA, 32 nt, Homo Sapiens
aaauaaugaugauauaaaggcuggauuuggag

SEQ ID NO: 161262 - RNA, 32 nt, Homo Sapiens
gcccccggcggcuacccgcuggaccggccacu

SEQ ID NO: 161263 - RNA, 32 nt, Homo Sapiens
gccaugaugaauuggugacucagacgcuuugu

SEQ ID NO: 161264 - RNA, 31 nt, Homo Sapiens
gcuuagaaauaaacagguuucacguggacuc

SEQ ID NO: 161265 - RNA, 32 nt, Homo Sapiens
aaaaaaucaaaauaauauucugugacaaugac

SEQ ID NO: 161266 - RNA, 32 nt, Homo Sapiens
gcuacagauaauuucauaaacaucucauugua

SEQ ID NO: 161267 - RNA, 32 nt, Homo Sapiens
cugcgcagcgccccgcgugccgacaugggaaa

SEQ ID NO: 161268 - RNA, 32 nt, Homo Sapiens
gcucgacuuccaccucuaagacucccacgaaa

SEQ ID NO: 161269 - RNA, 32 nt, Homo Sapiens
guaaauccacccaaagauacuguucuacaaaa

SEQ ID NO: 161270 - RNA, 32 nt, Homo Sapiens
ccuaccuuccccagggcaggcaucaugucggc

SEQ ID NO: 161271 - RNA, 32 nt, Homo Sapiens
uuggggcaaaagacaaaaaucuggaaagcuua

SEQ ID NO: 161272 - RNA, 32 nt, Homo Sapiens
gaagacaagcuguugggaccugacgcuuuuau

SEQ ID NO: 161273 - RNA, 32 nt, Homo Sapiens
acuuuagaagauugauacugaugcacugcauc

SEQ ID NO: 161274 - RNA, 32 nt, Homo Sapiens
ugggccugguacccccaguccgcugccuguuu

SEQ ID NO: 161275 - RNA, 32 nt, Homo Sapiens
ucaaaaaacaaaugcuuguagcagguauuuuu

SEQ ID NO: 161276 - RNA, 32 nt, Homo Sapiens
cacagauggcaccuguggccagagcaccucag

SEQ ID NO: 161277 - RNA, 32 nt, Homo Sapiens
guggccaggggugcuccugugcucacccucuc

SEQ ID NO: 161278 - RNA, 32 nt, Homo Sapiens
uccuuuugacuucuagauccuucuucccuaau

SEQ ID NO: 161279 - RNA, 32 nt, Homo Sapiens
uauguuuaaaagacaaaccaaaaauuaaccca

SEQ ID NO: 161280 - RNA, 32 nt, Homo Sapiens
cuccuccucucuucuuccucuucucucucacu

SEQ ID NO: 161281 - RNA, 32 nt, Homo Sapiens
uugcccagcgcgcgcuacuucucggacgagca

SEQ ID NO: 161282 - RNA, 32 nt, Homo Sapiens
gagcuucaugauaauaacauuauucuuuccaa

SEQ ID NO: 161283 - RNA, 32 nt, Homo Sapiens
ccacagccgcggcucacgccccaccgcaacau

SEQ ID NO: 161284 - RNA, 32 nt, Homo Sapiens
agguuuuauuuuucuuucucacauuggaaaaa

SEQ ID NO: 161285 - RNA, 32 nt, Homo Sapiens
uauggucaugcugcaauuuguuagaauaauag

SEQ ID NO: 161286 - RNA, 27 nt, Homo Sapiens
guucaguccuucuuagugaccaaacuu

SEQ ID NO: 161287 - RNA, 32 nt, Homo Sapiens
cuggagcaguuacacaucaaagugcuucacug

SEQ ID NO: 161288 - RNA, 32 nt, Homo Sapiens
augugguuuauuccuucaaucauuucaaacau

SEQ ID NO: 161289 - RNA, 32 nt, Homo Sapiens
uuuuaaaauuuauuuuugacucuuuuaucaca

SEQ ID NO: 161290 - RNA, 29 nt, Homo Sapiens
auuugugugacuuuuauuugaaaaaaugu

SEQ ID NO: 161291 - RNA, 32 nt, Homo Sapiens
uuacugcaguugcucaggaacugcuuuugauu

SEQ ID NO: 161292 - RNA, 27 nt, Homo Sapiens
gauguauguggagaagggucggggccg

SEQ ID NO: 161293 - RNA, 32 nt, Homo Sapiens
ucagauuaaacacaaaacaacuggacaauugc

SEQ ID NO: 161294 - RNA, 32 nt, Homo Sapiens
agugggagaaaguuccagugcacacuucccau

SEQ ID NO: 161295 - RNA, 32 nt, Homo Sapiens
agaguuuucggguucauucagaugaagacaac

SEQ ID NO: 161296 - RNA, 32 nt, Homo Sapiens
ccggacggcgguggagaagcugagccgggcug

SEQ ID NO: 161297 - RNA, 32 nt, Homo Sapiens
ggggaguggcgugagcccgggaggcggagcuu

SEQ ID NO: 161298 - RNA, 32 nt, Homo Sapiens
ugccgcgaacuggguucuuuggaagcagcccc

SEQ ID NO: 161299 - RNA, 32 nt, Homo Sapiens
ucucugcuggccccgcgccugugggcaggauu

SEQ ID NO: 161300 - RNA, 32 nt, Homo Sapiens
guggcagaacugccucaagcagauaaggugga

SEQ ID NO: 161301 - RNA, 32 nt, Homo Sapiens
uuuauucaagagaaggaaaaacaaugaucaca

SEQ ID NO: 161302 - RNA, 32 nt, Homo Sapiens
aggugggcagauugcuuggccuaggaguucaa

SEQ ID NO: 161303 - RNA, 32 nt, Homo Sapiens
ccgacggacgaccccuguguggccgccugccc

SEQ ID NO: 161304 - RNA, 32 nt, Homo Sapiens
acugaaaauaauauuucuauggcaguuggggg

SEQ ID NO: 161305 - RNA, 30 nt, Homo Sapiens
auaaagggcagcccggcgggucccagcauc

SEQ ID NO: 161306 - RNA, 32 nt, Homo Sapiens
ggcccagcucacgguggagcgccaagagcaga

SEQ ID NO: 161307 - RNA, 32 nt, Homo Sapiens
aguggcauauuguaaauaucagaucuauaauu

SEQ ID NO: 161308 - RNA, 32 nt, Homo Sapiens
caaacgccuguaaucccaacuacuugggaggc

SEQ ID NO: 161309 - RNA, 32 nt, Homo Sapiens
uuuccuuuuuaaaaaagccuguuucuaacuau

SEQ ID NO: 161310 - RNA, 32 nt, Homo Sapiens
gaaaaauauuccagugcaagguuuuuggcuug

SEQ ID NO: 161311 - RNA, 32 nt, Homo Sapiens
aagaaauagacuugcaccuuaugucauguaaa

SEQ ID NO: 161312 - RNA, 32 nt, Homo Sapiens
ugaaaguguuagcuguucuuuaccagaauaaa

SEQ ID NO: 161313 - RNA, 32 nt, Homo Sapiens
guguggcaaagacaguguucgccaaacaucca

SEQ ID NO: 161314 - RNA, 32 nt, Homo Sapiens
accucccuccucugcaccaugacuaccugcag

SEQ ID NO: 161315 - RNA, 32 nt, Homo Sapiens
caggaaauagaugaaaaaauuaaugaaaugaa

SEQ ID NO: 161316 - RNA, 32 nt, Homo Sapiens
guguaugaaaagcaccugaugaaaauauuugu

SEQ ID NO: 161317 - RNA, 32 nt, Homo Sapiens
gcagccugggaguuggacguggcucaggcagu

SEQ ID NO: 161318 - RNA, 29 nt, Homo Sapiens
auaaauaaagcuauuaauuuucuaaccug

SEQ ID NO: 161319 - RNA, 32 nt, Homo Sapiens
uuguuacagacaccuuccucuguguaagucuc

SEQ ID NO: 161320 - RNA, 32 nt, Homo Sapiens
accauuguuauuaagaaaauuagacuuacuga

SEQ ID NO: 161321 - RNA, 32 nt, Homo Sapiens
augcccuucuauuaauaaaacuacauuucuca

SEQ ID NO: 161322 - RNA, 32 nt, Homo Sapiens
gugcucugaguaaacgcauguugugugcaaag

SEQ ID NO: 161323 - RNA, 32 nt, Homo Sapiens
uauuucuaaaagacagacauaaugccagugac

SEQ ID NO: 161324 - RNA, 32 nt, Homo Sapiens
caagguuccgggcugaggcauuugcuuggcug

SEQ ID NO: 161325 - RNA, 32 nt, Homo Sapiens
ccucucgcugccguccaggugcaccgccugcc

SEQ ID NO: 161326 - RNA, 32 nt, Homo Sapiens
ccgccucccucgccgcgaccccggauggaugc

SEQ ID NO: 161327 - RNA, 28 nt, Homo Sapiens
aauaaacaaccugguuuuaagacaaugu

SEQ ID NO: 161328 - RNA, 32 nt, Homo Sapiens
uugaucaugacaaagaagauuaaaauuucauu

SEQ ID NO: 161329 - RNA, 32 nt, Homo Sapiens
cauuccuagcagaagaacccacuuccugcuua

SEQ ID NO: 161330 - RNA, 32 nt, Homo Sapiens
cgucacaaaggugcugcuuuuacagggaagcu

SEQ ID NO: 161331 - RNA, 32 nt, Homo Sapiens
cuucggcagcggcggcagcgcacagccguugc

SEQ ID NO: 161332 - RNA, 32 nt, Homo Sapiens
uuugucuuucuucucuuaauuuuuaaaugccu

SEQ ID NO: 161333 - RNA, 32 nt, Homo Sapiens
gucugguguuuccagcuuuuauuggcucuugu

SEQ ID NO: 161334 - RNA, 32 nt, Homo Sapiens
aacuccgggugucuuuuaaaauguagagaaaa

SEQ ID NO: 161335 - RNA, 32 nt, Homo Sapiens
cugcccccaucccgucucccaccccaucgcca

SEQ ID NO: 161336 - RNA, 32 nt, Homo Sapiens
auugcauauugccauuugauaacaauaucaua

SEQ ID NO: 161337 - RNA, 32 nt, Homo Sapiens
uuaucugugauggagugugaauguguaacggg

SEQ ID NO: 161338 - RNA, 32 nt, Homo Sapiens
uuuuuuaaaaauuuaauuuguaauuuuaaguu

SEQ ID NO: 161339 - RNA, 32 nt, Homo Sapiens
aauuuuaaauuaaugggcaccuuucaacauca

SEQ ID NO: 161340 - RNA, 32 nt, Homo Sapiens
gagauaagcccccauauuguguggcaaagggg

SEQ ID NO: 161341 - RNA, 32 nt, Homo Sapiens
ugcugaaauggcuguuggcaguucuuauuaug

SEQ ID NO: 161342 - RNA, 32 nt, Homo Sapiens
ggcccagcgagcccccaccugcauugaccuua

SEQ ID NO: 161343 - RNA, 32 nt, Homo Sapiens
guugccaccugccuguucucugguuggcuuuu

SEQ ID NO: 161344 - RNA, 30 nt, Homo Sapiens
gugcuggugugugugcaccagugggaguag

SEQ ID NO: 161345 - RNA, 28 nt, Homo Sapiens
acucuaucgggcaccaggauaacaucuc

SEQ ID NO: 161346 - RNA, 32 nt, Homo Sapiens
gagcugcaguuuccucaucugucacaucgcua

SEQ ID NO: 161347 - RNA, 32 nt, Homo Sapiens
gagcagguggcagccucuacucccagcaacaa

SEQ ID NO: 161348 - RNA, 31 nt, Homo Sapiens
ugcaagaaauaaagauaaauguguacaauuc

SEQ ID NO: 161349 - RNA, 32 nt, Homo Sapiens
uauuuguguuuguuguuuagagucuauuugca

SEQ ID NO: 161350 - RNA, 32 nt, Homo Sapiens
cgggagcaggcggcuccugugcuguaaagaaa

SEQ ID NO: 161351 - RNA, 32 nt, Homo Sapiens
cugaaguggcaccaacagaaguuuggcuugaa

SEQ ID NO: 161352 - RNA, 32 nt, Homo Sapiens
uuaaaaaaguuaauuuuguaaaggacuuagaa

SEQ ID NO: 161353 - RNA, 32 nt, Homo Sapiens
uaccaugugcuaaaagagcuccagguguuguc

SEQ ID NO: 161354 - RNA, 32 nt, Homo Sapiens
gggagaaauauaucugggaauagaaucgagaa

SEQ ID NO: 161355 - RNA, 32 nt, Homo Sapiens
uuaaacaacgauuucuccauuaaacuucuacu

SEQ ID NO: 161356 - RNA, 32 nt, Homo Sapiens
agccuggccaacauggcaaaaccccgucugua

SEQ ID NO: 161357 - RNA, 32 nt, Homo Sapiens
uuuuaucgguucugaaaaauucuuagauauua

SEQ ID NO: 161358 - RNA, 32 nt, Homo Sapiens
cuguguuucguuagcaucuggcuccaggacag

SEQ ID NO: 161359 - RNA, 32 nt, Homo Sapiens
ccacuccccccuccaugcugggguuggauccu

SEQ ID NO: 161360 - RNA, 32 nt, Homo Sapiens
cuccucugacugcgcgggaggcgaagcaaauu

SEQ ID NO: 161361 - RNA, 32 nt, Homo Sapiens
aggaggaagaagagggcuguggucauacacac

SEQ ID NO: 161362 - RNA, 32 nt, Homo Sapiens
uuuugucccucuauauauugauuuauauuaug

SEQ ID NO: 161363 - RNA, 32 nt, Homo Sapiens
aucuuggagcagccuugugcaguggcagccag

SEQ ID NO: 161364 - RNA, 32 nt, Homo Sapiens
ccccuccccaguguccucuccucucaggcagg

SEQ ID NO: 161365 - RNA, 25 nt, Homo Sapiens
augcugcuauccgugccgcugcugc

SEQ ID NO: 161366 - RNA, 32 nt, Homo Sapiens
agugcuuggcugugcuaccugauuccugagau

SEQ ID NO: 161367 - RNA, 32 nt, Homo Sapiens
ccaggagaugcaugucuuuguauuggagauau

SEQ ID NO: 161368 - RNA, 32 nt, Homo Sapiens
acauuuaggggacccaaaggcuuuauguucuc

SEQ ID NO: 161369 - RNA, 32 nt, Homo Sapiens
uuguucauaauggcucauguauuauuauuauu

SEQ ID NO: 161370 - RNA, 32 nt, Homo Sapiens
uuuccagccucauggguauggcacucuuaauu

SEQ ID NO: 161371 - RNA, 32 nt, Homo Sapiens
ccccagcauucgcucuccuccucucacggaaa

SEQ ID NO: 161372 - RNA, 32 nt, Homo Sapiens
uggcuccacagccccaggacagcggggucuga

SEQ ID NO: 161373 - RNA, 32 nt, Homo Sapiens
cccgacaugcugggcuuuccugcugggacccc

SEQ ID NO: 161374 - RNA, 32 nt, Homo Sapiens
gggggcagcuggaguggugcucugggugagcu

SEQ ID NO: 161375 - RNA, 32 nt, Homo Sapiens
ggucagucaaggaaagcgcuguggcugaagau

SEQ ID NO: 161376 - RNA, 32 nt, Homo Sapiens
accucauuucccuuuuauuucugaauggcuug

SEQ ID NO: 161377 - RNA, 32 nt, Homo Sapiens
gaccagagacacgcgaccauguuggggcucuu

SEQ ID NO: 161378 - RNA, 32 nt, Homo Sapiens
gacucucauguucucucgucucacauuugcac

SEQ ID NO: 161379 - RNA, 32 nt, Homo Sapiens
cuagaccugccaggagcacuuggccugcaggg

SEQ ID NO: 161380 - RNA, 28 nt, Homo Sapiens
ugacgcugguggccgccgcggucuccua

SEQ ID NO: 161381 - RNA, 32 nt, Homo Sapiens
uaccacaugcagauaaaaccaauagagugcag

SEQ ID NO: 161382 - RNA, 32 nt, Homo Sapiens
ucacgggccuggcgcgcugaugcucaagugcg

SEQ ID NO: 161383 - RNA, 32 nt, Homo Sapiens
aguggugcgaucucagcucacugcauccucug

SEQ ID NO: 161384 - RNA, 32 nt, Homo Sapiens
cgagaggcacgcggcgggaggggaccggaauc

SEQ ID NO: 161385 - RNA, 32 nt, Homo Sapiens
ccaaagcggccgccagcuucggaauguucuag

SEQ ID NO: 161386 - RNA, 32 nt, Homo Sapiens
gugcuuagaaauguacauaauguuuauauaca

SEQ ID NO: 161387 - RNA, 32 nt, Homo Sapiens
uugaaaugagagacucaaaagaagauggaacg

SEQ ID NO: 161388 - RNA, 32 nt, Homo Sapiens
ugccagagcaaccuauaaccugacauaccaug

SEQ ID NO: 161389 - RNA, 31 nt, Homo Sapiens
uaaagcacugcauuuccaccauagacuuguu

SEQ ID NO: 161390 - RNA, 32 nt, Homo Sapiens
aaacaguaaauauuuuagacuuugugagccau

SEQ ID NO: 161391 - RNA, 32 nt, Homo Sapiens
augaaugccguggauugcacguggccucuuga

SEQ ID NO: 161392 - RNA, 32 nt, Homo Sapiens
ccugagggccggagcccgcaccgacgggagcg

SEQ ID NO: 161393 - RNA, 32 nt, Homo Sapiens
aacaugucagucuuuuccuuuaugaucugugc

SEQ ID NO: 161394 - RNA, 32 nt, Homo Sapiens
acauuuaaacacaaaccaaauacuccaggguu

SEQ ID NO: 161395 - RNA, 32 nt, Homo Sapiens
ccagauaggaacaugcacaaagcaguuaauua

SEQ ID NO: 161396 - RNA, 32 nt, Homo Sapiens
aagggugcauguccccugcuugaacacugaag

SEQ ID NO: 161397 - RNA, 32 nt, Homo Sapiens
cuccacacauaaaucauuuugaaaguagaaua

SEQ ID NO: 161398 - RNA, 32 nt, Homo Sapiens
cucauacuaaaauuauuuguguaucugaaauu

SEQ ID NO: 161399 - RNA, 32 nt, Homo Sapiens
ggucccaggcccggcccggagcgaguccccca

SEQ ID NO: 161400 - RNA, 32 nt, Homo Sapiens
acagaucauuucauuauuuucuuaauuuuggu

SEQ ID NO: 161401 - RNA, 32 nt, Homo Sapiens
cuguauaccugcuuucccacaacagcaaggaa

SEQ ID NO: 161402 - RNA, 32 nt, Homo Sapiens
ugauuuuucagaagcugaaaaagcuggagugc

SEQ ID NO: 161403 - RNA, 30 nt, Homo Sapiens
ccaccaccacuugccaaugccucucuuaaa

SEQ ID NO: 161404 - RNA, 32 nt, Homo Sapiens
caauaguaaaauuuacaaucagaugaagaaua

SEQ ID NO: 161405 - RNA, 32 nt, Homo Sapiens
ugugauuuuuaaaaauaagacuuccuugauuc

SEQ ID NO: 161406 - RNA, 32 nt, Homo Sapiens
ccagccuggugccucugcaaaggaaaggggag

SEQ ID NO: 161407 - RNA, 32 nt, Homo Sapiens
agccugggcggucggcggggccuggggccugg

SEQ ID NO: 161408 - RNA, 32 nt, Homo Sapiens
ccucucuccacuggccgccagccucccuagca

SEQ ID NO: 161409 - RNA, 32 nt, Homo Sapiens
gaggaggcuguggcaggcaggggugguaguag

SEQ ID NO: 161410 - RNA, 32 nt, Homo Sapiens
ucuuuauucaugugucacuggauuaauuuauc

SEQ ID NO: 161411 - RNA, 32 nt, Homo Sapiens
cucauuugcugauaaauuuucuuauuaaguaa

SEQ ID NO: 161412 - RNA, 32 nt, Homo Sapiens
cgggccccaagcacgggccgggcauagauuuc

SEQ ID NO: 161413 - RNA, 32 nt, Homo Sapiens
uaaagaccgcaauaaacuuucuacagaggaac

SEQ ID NO: 161414 - RNA, 32 nt, Homo Sapiens
uuggaacacccuuuguccuucucggcgggggc

SEQ ID NO: 161415 - RNA, 32 nt, Homo Sapiens
agcccuggccugcaugauggguugccugugcg

SEQ ID NO: 161416 - RNA, 32 nt, Homo Sapiens
ucagacagucauuugcugcugcugcugcugcu

SEQ ID NO: 161417 - RNA, 30 nt, Homo Sapiens
aucgcgggcggcggcggcgaugagcgacau

SEQ ID NO: 161418 - RNA, 32 nt, Homo Sapiens
ucucucuuugcacuucgcuggaggaagaaauu

SEQ ID NO: 161419 - RNA, 32 nt, Homo Sapiens
cucucucucacucacacacacacacacacaca

SEQ ID NO: 161420 - RNA, 32 nt, Homo Sapiens
agcagcuggaggcuccaguucucaucugcuca

SEQ ID NO: 161421 - RNA, 32 nt, Homo Sapiens
cacacucuuugcagagcugugcaugcgcaguc

SEQ ID NO: 161422 - RNA, 32 nt, Homo Sapiens
auuaugucaaugaacgaaagucagagcaacau

SEQ ID NO: 161423 - RNA, 32 nt, Homo Sapiens
uucagacugggggcuuccugaggacagagacu

SEQ ID NO: 161424 - RNA, 31 nt, Homo Sapiens
ucugauaauaguaacaagguauauuauacuu

SEQ ID NO: 161425 - RNA, 32 nt, Homo Sapiens
ucagccuucccugcugccccagugauugauug

SEQ ID NO: 161426 - RNA, 32 nt, Homo Sapiens
uaugcccugcgccauggggccuugaagcuggg

SEQ ID NO: 161427 - RNA, 32 nt, Homo Sapiens
aggccugauagcuuuaagaauuaggguggguu

SEQ ID NO: 161428 - RNA, 32 nt, Homo Sapiens
aggaacugaaaucauuaaaauuuuauuugaau

SEQ ID NO: 161429 - RNA, 32 nt, Homo Sapiens
cuccucucugcuucucccuccuccucaguaau

SEQ ID NO: 161430 - RNA, 32 nt, Homo Sapiens
ggaaaaacugaauacaagauaccaaaaaugaa

SEQ ID NO: 161431 - RNA, 32 nt, Homo Sapiens
agaugcagcuuucuccuucgucuggucuccug

SEQ ID NO: 161432 - RNA, 31 nt, Homo Sapiens
acuuuuuacccauuagcucaaaccaaauacc

SEQ ID NO: 161433 - RNA, 32 nt, Homo Sapiens
ucgggcugaagcagggucacuggccagccgug

SEQ ID NO: 161434 - RNA, 32 nt, Homo Sapiens
cgccagcgccgcggccccgugcggugucccug

SEQ ID NO: 161435 - RNA, 32 nt, Homo Sapiens
gaauuaaaguaauuuuuccuuaucuuugaacu

SEQ ID NO: 161436 - RNA, 32 nt, Homo Sapiens
ugcgccggcccaugaugugucagucagaggcg

SEQ ID NO: 161437 - RNA, 32 nt, Homo Sapiens
uaaccaucuauuucauccuaucuucuggccuc

SEQ ID NO: 161438 - RNA, 32 nt, Homo Sapiens
uggagucccccuccccgggucugggugguggc

SEQ ID NO: 161439 - RNA, 32 nt, Homo Sapiens
aaaaagaaagguuagggcagguccuggaggac

SEQ ID NO: 161440 - RNA, 32 nt, Homo Sapiens
ugcggcgcccucgggccgccugcgagccccuc

SEQ ID NO: 161441 - RNA, 32 nt, Homo Sapiens
uaucucucuccccgcuccccagccucgggcga

SEQ ID NO: 161442 - RNA, 32 nt, Homo Sapiens
guaacauaguaauuuaacaauaaaaacuuacc

SEQ ID NO: 161443 - RNA, 32 nt, Homo Sapiens
gcagagcacaaccucauccucccagugguucc

SEQ ID NO: 161444 - RNA, 32 nt, Homo Sapiens
aaggcaagauugugucccauucccccagugcg

SEQ ID NO: 161445 - RNA, 32 nt, Homo Sapiens
ucuauauggaaagaaguagaugcugaauaccu

SEQ ID NO: 161446 - RNA, 32 nt, Homo Sapiens
cagcauccuguuauuucaguuuauuaagagug

SEQ ID NO: 161447 - RNA, 32 nt, Homo Sapiens
cuuccaugaagauaacaaggcucaaggaaguu

SEQ ID NO: 161448 - RNA, 32 nt, Homo Sapiens
accuggagaucuaauucuguuuagacauuuuu

SEQ ID NO: 161449 - RNA, 32 nt, Homo Sapiens
ugguugggaaggggaucauuuuuuacugguca

SEQ ID NO: 161450 - RNA, 32 nt, Homo Sapiens
agagagagcuggggugcuggggugcggggaag

SEQ ID NO: 161451 - RNA, 32 nt, Homo Sapiens
gauaaccacagugucccugcagaugggggcag

SEQ ID NO: 161452 - RNA, 32 nt, Homo Sapiens
uuuauugugaugccuuggucagggccccucua

SEQ ID NO: 161453 - RNA, 32 nt, Homo Sapiens
cucuucuguuugcgguaucuacuugaaaucuu

SEQ ID NO: 161454 - RNA, 32 nt, Homo Sapiens
agauuauaucuuacuccuaaauaaaaagucaa

SEQ ID NO: 161455 - RNA, 32 nt, Homo Sapiens
uguguguuuaaaaaugugaauuacuguuauug

SEQ ID NO: 161456 - RNA, 32 nt, Homo Sapiens
uuuuauguaaaauaaaucuauugugaauugaa

SEQ ID NO: 161457 - RNA, 32 nt, Homo Sapiens
cgcaguuuguuuaguuuuuucuuacuuuuaaa

SEQ ID NO: 161458 - RNA, 32 nt, Homo Sapiens
acauucagauacugcacugagaaggagcuggc

SEQ ID NO: 161459 - RNA, 32 nt, Homo Sapiens
cuguaaucuuguugauaaaaauacugacucca

SEQ ID NO: 161460 - RNA, 32 nt, Homo Sapiens
uacaggguaacuuggguccacagucacucuuu

SEQ ID NO: 161461 - RNA, 32 nt, Homo Sapiens
cgcgcgcggacgcuugcugucgggccgagcag

SEQ ID NO: 161462 - RNA, 32 nt, Homo Sapiens
cugagcgccccggccccucccuccgccgccuc

SEQ ID NO: 161463 - RNA, 32 nt, Homo Sapiens
uuuuguuuuuaaaaauauuucuuaaacaugcu

SEQ ID NO: 161464 - RNA, 32 nt, Homo Sapiens
cugcccccuccccacaccaaucagccaggcug

SEQ ID NO: 161465 - RNA, 32 nt, Homo Sapiens
gacuuugaugauauuucuguuauauuaauguc

SEQ ID NO: 161466 - RNA, 32 nt, Homo Sapiens
cuuuaacuuccacuuuguauaaauuuuuaagu

SEQ ID NO: 161467 - RNA, 32 nt, Homo Sapiens
cucccaaugcuaucccuccccccuccccccac

SEQ ID NO: 161468 - RNA, 32 nt, Homo Sapiens
gcccaaacccaccaguuuaaaacggugugugu

SEQ ID NO: 161469 - RNA, 32 nt, Homo Sapiens
gaggucacaaaguuuugagguauuuguuaaua

SEQ ID NO: 161470 - RNA, 32 nt, Homo Sapiens
augggcacugguuuuaaaaaauuuauuaguuu

SEQ ID NO: 161471 - RNA, 32 nt, Homo Sapiens
uaauuauaauaguuuaggcagaugaacaugac

SEQ ID NO: 161472 - RNA, 32 nt, Homo Sapiens
gguggugguagggggagaaggaggagcuggag

SEQ ID NO: 161473 - RNA, 32 nt, Homo Sapiens
acacagugagaaaaaaugaauguauuccuguu

SEQ ID NO: 161474 - RNA, 32 nt, Homo Sapiens
ccggucacucacccucucuggaccucaucugu

SEQ ID NO: 161475 - RNA, 32 nt, Homo Sapiens
uguagggcauuuuguauguagagcaguugaaa

SEQ ID NO: 161476 - RNA, 32 nt, Homo Sapiens
uggagauuacaauauuauuuaucucagacagc

SEQ ID NO: 161477 - RNA, 32 nt, Homo Sapiens
acccagggucaggggugaggggaccaggaaga

SEQ ID NO: 161478 - RNA, 32 nt, Homo Sapiens
uauacaggacaaacuagacggccguagaaaag

SEQ ID NO: 161479 - RNA, 32 nt, Homo Sapiens
caacuucucagggauuuucacaguguuuaaau

SEQ ID NO: 161480 - RNA, 30 nt, Homo Sapiens
ggguggaccgcauuuccccaucuuccccgc

SEQ ID NO: 161481 - RNA, 29 nt, Homo Sapiens
gugucugugacuugacuccuggagccugc

SEQ ID NO: 161482 - RNA, 32 nt, Homo Sapiens
gaaaaacaucuuccuucugaucuuuugcauag

SEQ ID NO: 161483 - RNA, 32 nt, Homo Sapiens
cucuacuacugccugcucuucauuuugggcca

SEQ ID NO: 161484 - RNA, 30 nt, Homo Sapiens
cccgcugaagagaucggggaaaccgaagaa

SEQ ID NO: 161485 - RNA, 32 nt, Homo Sapiens
gggugcaaggggcuacuguuaguccucuuguu

SEQ ID NO: 161486 - RNA, 32 nt, Homo Sapiens
gaaacuuuucaacuuggagccugccauucagc

SEQ ID NO: 161487 - RNA, 32 nt, Homo Sapiens
ggauucugauaaaauuaaagaaauugcuuccu

SEQ ID NO: 161488 - RNA, 32 nt, Homo Sapiens
agagaccugugcuuauuggauggagugagaaa

SEQ ID NO: 161489 - RNA, 32 nt, Homo Sapiens
uuuagguuaacacuagggacugcguccaugua

SEQ ID NO: 161490 - RNA, 32 nt, Homo Sapiens
acaaauauacuucucuuuggcuuuucgacaua

SEQ ID NO: 161491 - RNA, 32 nt, Homo Sapiens
aaaauuaaccaagggugguagcauacaccugu

SEQ ID NO: 161492 - RNA, 32 nt, Homo Sapiens
uuuuuaaagacguagaagauuuauuuaauuug

SEQ ID NO: 161493 - RNA, 32 nt, Homo Sapiens
uucagucccuucccugcuucucgcugucuuuc

SEQ ID NO: 161494 - RNA, 32 nt, Homo Sapiens
ugguggcacauaucgaaugccuagggcagaaa

SEQ ID NO: 161495 - RNA, 32 nt, Homo Sapiens
guccuuuuuuucccuuuuuuuuuuuuuuugag

SEQ ID NO: 161496 - RNA, 32 nt, Homo Sapiens
gaacaggguuccgggaguguaugagcucaacc

SEQ ID NO: 161497 - RNA, 32 nt, Homo Sapiens
gagagaguuguuuuaauaacuuaucuauaaac

SEQ ID NO: 161498 - RNA, 32 nt, Homo Sapiens
ggccaucgugguggggugggacaggaguauag

SEQ ID NO: 161499 - RNA, 32 nt, Homo Sapiens
cacauuggacuuccuugguuuggacacagugc

SEQ ID NO: 161500 - RNA, 32 nt, Homo Sapiens
ccaaugcccagccccagaucuggcggaagaag

SEQ ID NO: 161501 - RNA, 32 nt, Homo Sapiens
ugcugggguggggaagggaggggagcgcggga

SEQ ID NO: 161502 - RNA, 32 nt, Homo Sapiens
ugucuucccccucccacaggacgcccccacac

SEQ ID NO: 161503 - RNA, 32 nt, Homo Sapiens
aucagcacuggcaagagaaaugucuguguugu

SEQ ID NO: 161504 - RNA, 32 nt, Homo Sapiens
ugagggcacugacgcugaauggugcagugaga

SEQ ID NO: 161505 - RNA, 31 nt, Homo Sapiens
ugguaaacaaauuugagguauggauaaaucu

SEQ ID NO: 161506 - RNA, 32 nt, Homo Sapiens
uggaaggucggaggaguguuacaggaguaccu

SEQ ID NO: 161507 - RNA, 32 nt, Homo Sapiens
ucaguucccucuauuuucacccauuuugcuca

SEQ ID NO: 161508 - RNA, 32 nt, Homo Sapiens
ccucaccccucccccuggccucaccuugcucc

SEQ ID NO: 161509 - RNA, 32 nt, Homo Sapiens
ccaagaucgugucacugcacuccagccggggc

SEQ ID NO: 161510 - RNA, 32 nt, Homo Sapiens
ggcggccccgguucucccuucucggcaauaaa

SEQ ID NO: 161511 - RNA, 32 nt, Homo Sapiens
aacacaaaaaggcagagagagaaggauuaaau

SEQ ID NO: 161512 - RNA, 32 nt, Homo Sapiens
uucccgcagcaucccacccccaaaccaccgac

SEQ ID NO: 161513 - RNA, 32 nt, Homo Sapiens
gggcgugguuggaagguggguucugcgugucc

SEQ ID NO: 161514 - RNA, 32 nt, Homo Sapiens
uugucauacagaaugagaaggggcaacucgug

SEQ ID NO: 161515 - RNA, 32 nt, Homo Sapiens
aaggggcugcugcucgugggccugcucugcac

SEQ ID NO: 161516 - RNA, 32 nt, Homo Sapiens
gugguuacuguccgaacggcgugguguggucg

SEQ ID NO: 161517 - RNA, 32 nt, Homo Sapiens
uucucacccccaccacccccacggccccgccc

SEQ ID NO: 161518 - RNA, 32 nt, Homo Sapiens
ccaggguucccucucauuucucucggcugccu

SEQ ID NO: 161519 - RNA, 32 nt, Homo Sapiens
cgcaggggucuucaccugucuacgaauacacg

SEQ ID NO: 161520 - RNA, 32 nt, Homo Sapiens
uggugaaaaugguguuuguuguaacaucuugg

SEQ ID NO: 161521 - RNA, 32 nt, Homo Sapiens
ggcauguuuggcaguaaauuggcaccguguca

SEQ ID NO: 161522 - RNA, 32 nt, Homo Sapiens
acuccgggccccacacccuggaugccacuccg

SEQ ID NO: 161523 - RNA, 32 nt, Homo Sapiens
gugcugccagugccgagacucacccgugcccu

SEQ ID NO: 161524 - RNA, 32 nt, Homo Sapiens
cauaggaauauuauuucaaagaaauauuacaa

SEQ ID NO: 161525 - RNA, 32 nt, Homo Sapiens
gguuguuccucauagguagguggccuuggccu

SEQ ID NO: 161526 - RNA, 32 nt, Homo Sapiens
gccaucaggaggcggcugcugcugaccggagu

SEQ ID NO: 161527 - RNA, 32 nt, Homo Sapiens
agcaguguaucugcuuccugucugggguguga

SEQ ID NO: 161528 - RNA, 32 nt, Homo Sapiens
gucuuuuauaaaauguagccaaaguguuucau

SEQ ID NO: 161529 - RNA, 32 nt, Homo Sapiens
ccuguuuguuauucuuuuuucuuccaggcuag

SEQ ID NO: 161530 - RNA, 32 nt, Homo Sapiens
cccagcacugaaagcuggcccuuggccccagg

SEQ ID NO: 161531 - RNA, 32 nt, Homo Sapiens
aggugccugccagcacaccuggcuaauuuuug

SEQ ID NO: 161532 - RNA, 32 nt, Homo Sapiens
uucaaauuuuucccucuaauaggaaacaguau

SEQ ID NO: 161533 - RNA, 32 nt, Homo Sapiens
gaggagcugaggggcuggggcugggguguuga

SEQ ID NO: 161534 - RNA, 32 nt, Homo Sapiens
auaauaugagagggccuuguuccaaggucaag

SEQ ID NO: 161535 - RNA, 32 nt, Homo Sapiens
cauucaucaaggaaaggaccugaagaagugga

SEQ ID NO: 161536 - RNA, 32 nt, Homo Sapiens
uggaugcagggccagcucaaccugaacaaucc

SEQ ID NO: 161537 - RNA, 32 nt, Homo Sapiens
gcggggaaggaggagcgcuaggucgguguacg

SEQ ID NO: 161538 - RNA, 32 nt, Homo Sapiens
auucuuuuuguacagaucuaauuaguacaaca

SEQ ID NO: 161539 - RNA, 32 nt, Homo Sapiens
cuccaacucaguaacugaaaaccagccucaag

SEQ ID NO: 161540 - RNA, 32 nt, Homo Sapiens
caggcuucgcggcugcgcccccggcccgcgca

SEQ ID NO: 161541 - RNA, 32 nt, Homo Sapiens
cuugggcccgcggcggcggcaagggcgggagg

SEQ ID NO: 161542 - RNA, 32 nt, Homo Sapiens
gguccccgacccaaaaacaaccccucccaagu

SEQ ID NO: 161543 - RNA, 30 nt, Homo Sapiens
ccaagacucugugcucccuagguuugcaac

SEQ ID NO: 161544 - RNA, 31 nt, Homo Sapiens
gcgcagccccaggcgccuccaagggaagcag

SEQ ID NO: 161545 - RNA, 32 nt, Homo Sapiens
gaaaauuucaguaaaaugugugaauguuucuu

SEQ ID NO: 161546 - RNA, 32 nt, Homo Sapiens
ggcuuugaugguuuuuuucuuaauuauuggcu

SEQ ID NO: 161547 - RNA, 32 nt, Homo Sapiens
gaccagucauuuuacugagcugcggugaggaa

SEQ ID NO: 161548 - RNA, 32 nt, Homo Sapiens
cgcagcuaucagacagagacccugcccaugau

SEQ ID NO: 161549 - RNA, 32 nt, Homo Sapiens
cugauggagcucucaagaacaagcauuguuua

SEQ ID NO: 161550 - RNA, 32 nt, Homo Sapiens
aguugaggaaguggaggcugguaaagagcagg

SEQ ID NO: 161551 - RNA, 32 nt, Homo Sapiens
caucugcuggaacaggcgccauggggccugcc

SEQ ID NO: 161552 - RNA, 32 nt, Homo Sapiens
gcugugaugcuguuaagggcugaaaugugucu

SEQ ID NO: 161553 - RNA, 32 nt, Homo Sapiens
cccuaggacagccugagaguaacuggaccugg

SEQ ID NO: 161554 - RNA, 32 nt, Homo Sapiens
uuccuugccccuuuagcugguaccucaguggg

SEQ ID NO: 161555 - RNA, 32 nt, Homo Sapiens
ucccagaggcagaaauaaaaauacugaauauc

SEQ ID NO: 161556 - RNA, 32 nt, Homo Sapiens
uuauuuaauagcaugaugauuaugaccaaaga

SEQ ID NO: 161557 - RNA, 32 nt, Homo Sapiens
ccuacuuaauauuugcaucaguauaauauaua

SEQ ID NO: 161558 - RNA, 32 nt, Homo Sapiens
uggucuucaaccauaaacuuugugauuccaaa

SEQ ID NO: 161559 - RNA, 32 nt, Homo Sapiens
ccugcgccucucccuccacaccucccggcgag

SEQ ID NO: 161560 - RNA, 32 nt, Homo Sapiens
cugggauucauggcuuuguauccaacugcauc

SEQ ID NO: 161561 - RNA, 32 nt, Homo Sapiens
cugacugacaucaauuugucuaaucuuguagc

SEQ ID NO: 161562 - RNA, 32 nt, Homo Sapiens
auuucucugguauuauauuauauccuucuuaa

SEQ ID NO: 161563 - RNA, 32 nt, Homo Sapiens
gagcaaccacugacuggucuuagcuguucuug

SEQ ID NO: 161564 - RNA, 32 nt, Homo Sapiens
agcuacucugguugguaauacucugugcacac

SEQ ID NO: 161565 - RNA, 32 nt, Homo Sapiens
uagauucagagguaaggagaauuuuggggcua

SEQ ID NO: 161566 - RNA, 32 nt, Homo Sapiens
uuugugccuugauguugagagcgccucucuuu

SEQ ID NO: 161567 - RNA, 30 nt, Homo Sapiens
gcggugugcugugcuggagagcacagcccc

SEQ ID NO: 161568 - RNA, 32 nt, Homo Sapiens
cuguugucuuuuucuuuuuacuuuuuuaauuu

SEQ ID NO: 161569 - RNA, 32 nt, Homo Sapiens
ugucgucccccgcucccgccacuuccgggguc

SEQ ID NO: 161570 - RNA, 32 nt, Homo Sapiens
cacugugacucgggcauguuucccugaaguua

SEQ ID NO: 161571 - RNA, 32 nt, Homo Sapiens
caaaaaggacaaaaaugggcuggccuggaaug

SEQ ID NO: 161572 - RNA, 32 nt, Homo Sapiens
gucacgaggcugggggcggccggcggcgaagg

SEQ ID NO: 161573 - RNA, 32 nt, Homo Sapiens
caugaauacuauacugaaaucugugccacacc

SEQ ID NO: 161574 - RNA, 32 nt, Homo Sapiens
ucuuuuauuuuuucauuuucuaacauaccuug

SEQ ID NO: 161575 - RNA, 32 nt, Homo Sapiens
uuuuaagguuauucuaaauuauaguagccuca

SEQ ID NO: 161576 - RNA, 32 nt, Homo Sapiens
uuccauccgccagcugccaugagcgagcgccu

SEQ ID NO: 161577 - RNA, 32 nt, Homo Sapiens
cucugguuuguugcauccaaagguacugucuu

SEQ ID NO: 161578 - RNA, 32 nt, Homo Sapiens
cacuguugaaauuuauacacacacacacacac

SEQ ID NO: 161579 - RNA, 32 nt, Homo Sapiens
cacccugcgggcccggggucuggcagaguggu

SEQ ID NO: 161580 - RNA, 30 nt, Homo Sapiens
guucgcggcaggcggguguagucucggcgg

SEQ ID NO: 161581 - RNA, 32 nt, Homo Sapiens
gcugagcgguccgaaucagggucuggguugcu

SEQ ID NO: 161582 - RNA, 32 nt, Homo Sapiens
accugcacacagagacucccuccugggcuccu

SEQ ID NO: 161583 - RNA, 32 nt, Homo Sapiens
cagagucuuuggggggaugcaguguugggguc

SEQ ID NO: 161584 - RNA, 32 nt, Homo Sapiens
ggcccauccaaguuuguucugccaccacugga

SEQ ID NO: 161585 - RNA, 32 nt, Homo Sapiens
gcucuuucuuugacuucuauagacuaaaguug

SEQ ID NO: 161586 - RNA, 32 nt, Homo Sapiens
caggguguugguuaaaguuguaccucccaagu

SEQ ID NO: 161587 - RNA, 32 nt, Homo Sapiens
augcuuugcauucucaguccucugcauaaagc

SEQ ID NO: 161588 - RNA, 32 nt, Homo Sapiens
aaaguggcggguguggcgcggggcugguagcg

SEQ ID NO: 161589 - RNA, 32 nt, Homo Sapiens
accccggcccggcccccgccccgcccccgccc

SEQ ID NO: 161590 - RNA, 32 nt, Homo Sapiens
aguccagugucuauauuuaaacuuguucuuuu

SEQ ID NO: 161591 - RNA, 32 nt, Homo Sapiens
gccucacccuccugggguggccccguguuccu

SEQ ID NO: 161592 - RNA, 32 nt, Homo Sapiens
ccgggaacccugggcugcuggcgccugcgcag

SEQ ID NO: 161593 - RNA, 31 nt, Homo Sapiens
uaagggagggcggcguggcccggccugguag

SEQ ID NO: 161594 - RNA, 32 nt, Homo Sapiens
uaaacugaaggaauuuuuguacacuuguacca

SEQ ID NO: 161595 - RNA, 32 nt, Homo Sapiens
gggaacaaacuccuggguuggcagcaugcacu

SEQ ID NO: 161596 - RNA, 32 nt, Homo Sapiens
uggugcccuccuuuuuuuuuuauccuagucau

SEQ ID NO: 161597 - RNA, 32 nt, Homo Sapiens
aaaaucgacagcugccaccucccucaccacaa

SEQ ID NO: 161598 - RNA, 32 nt, Homo Sapiens
uauccaacucaaaacaguucuaaugggaauca

SEQ ID NO: 161599 - RNA, 32 nt, Homo Sapiens
uggaaggaauccaggcaacauucuucaccaca

SEQ ID NO: 161600 - RNA, 32 nt, Homo Sapiens
ggguuggccugccuggcuggggaggucaguaa

SEQ ID NO: 161601 - RNA, 32 nt, Homo Sapiens
uguuuauuuuuauauucagucuucccaauauu

SEQ ID NO: 161602 - RNA, 32 nt, Homo Sapiens
cuuuaaauugguuaaugugugagaugugcuca

SEQ ID NO: 161603 - RNA, 32 nt, Homo Sapiens
cuaggaaagcugccuuauucucuuuuugcagu

SEQ ID NO: 161604 - RNA, 32 nt, Homo Sapiens
ugaguuuaaguuaugaaagaugguggcuuuca

SEQ ID NO: 161605 - RNA, 32 nt, Homo Sapiens
ccaugucacgccauccaaugacaccagcuggu

SEQ ID NO: 161606 - RNA, 32 nt, Homo Sapiens
ggacggcggcgucggugggucaugcuccggca

SEQ ID NO: 161607 - RNA, 32 nt, Homo Sapiens
acaugcuaaauuucuuuuuuuuuuuuuuugag

SEQ ID NO: 161608 - RNA, 32 nt, Homo Sapiens
caucagcauuauaaaaagugucaaauaaaaaa

SEQ ID NO: 161609 - RNA, 32 nt, Homo Sapiens
ggcuuuaaaaauuaaaaauggauggaucuucu

SEQ ID NO: 161610 - RNA, 32 nt, Homo Sapiens
aggccagauccuuuuccaauacuuaugcaaaa

SEQ ID NO: 161611 - RNA, 32 nt, Homo Sapiens
uaaaggugcuuauguuuuugugaguuuuaagu

SEQ ID NO: 161612 - RNA, 29 nt, Homo Sapiens
auguuuuauuuuuuauaccacaugcaaaa

SEQ ID NO: 161613 - RNA, 32 nt, Homo Sapiens
cuguccaucagugaagacgugccucggccucc

SEQ ID NO: 161614 - RNA, 32 nt, Homo Sapiens
gacaaauuuacauuuucuuaacagagacauuu

SEQ ID NO: 161615 - RNA, 32 nt, Homo Sapiens
ggcccacugugccucuccccucagugucccuu

SEQ ID NO: 161616 - RNA, 31 nt, Homo Sapiens
ucuagaugagcaaaacucagagccuguggag

SEQ ID NO: 161617 - RNA, 32 nt, Homo Sapiens
gauaagggaugcuuccugugacaacuugaauc

SEQ ID NO: 161618 - RNA, 32 nt, Homo Sapiens
uguguaaccauguggaaauaaaaauugacgac

SEQ ID NO: 161619 - RNA, 32 nt, Homo Sapiens
ucccguugggcugugacuuuuccuccugcccu

SEQ ID NO: 161620 - RNA, 32 nt, Homo Sapiens
uuaacuacaccugacaguagcaauugucugau

SEQ ID NO: 161621 - RNA, 32 nt, Homo Sapiens
uccagccccuugcccucuccucacacguagau

SEQ ID NO: 161622 - RNA, 32 nt, Homo Sapiens
uaccaggaagcagauacauaugaguguggaag

SEQ ID NO: 161623 - RNA, 32 nt, Homo Sapiens
caggaagccggagagggcgcggcggccaggau

SEQ ID NO: 161624 - RNA, 32 nt, Homo Sapiens
aaagaaaaggaaaaacagaaauguaaaaguug

SEQ ID NO: 161625 - RNA, 32 nt, Homo Sapiens
uccccgccgggcgcauggggcgcuucgagccg

SEQ ID NO: 161626 - RNA, 32 nt, Homo Sapiens
accugcaaaaaauacuuuuucuaaugaggaga

SEQ ID NO: 161627 - RNA, 32 nt, Homo Sapiens
aguuucaccacguuggucaggcuggucucgaa

SEQ ID NO: 161628 - RNA, 32 nt, Homo Sapiens
aaggagaguccuguuucccagcggauggggug

SEQ ID NO: 161629 - RNA, 32 nt, Homo Sapiens
acgucaccccagacucacggaccccgacaugg

SEQ ID NO: 161630 - RNA, 32 nt, Homo Sapiens
cauuucugggaagaggaagggaacuacuguga

SEQ ID NO: 161631 - RNA, 32 nt, Homo Sapiens
acuguuuguaaaagauaauucagauuguuugu

SEQ ID NO: 161632 - RNA, 32 nt, Homo Sapiens
ccucugcagcucgaggcaaggccuggggugcc

SEQ ID NO: 161633 - RNA, 32 nt, Homo Sapiens
cgacgccugcccagcccuccuccccuuccggc

SEQ ID NO: 161634 - RNA, 32 nt, Homo Sapiens
gggaagagcuuuacagacauucaccaacuauu

SEQ ID NO: 161635 - RNA, 32 nt, Homo Sapiens
gcggggguccgcggacauggugcggggcgccg

SEQ ID NO: 161636 - RNA, 32 nt, Homo Sapiens
uccaccugcuucuccuuugcaaccgacagcaa

SEQ ID NO: 161637 - RNA, 32 nt, Homo Sapiens
uuggggagcacagggccaggcuggggugagga

SEQ ID NO: 161638 - RNA, 32 nt, Homo Sapiens
cauuuaguugggcguuguguuuuacacaaaac

SEQ ID NO: 161639 - RNA, 32 nt, Homo Sapiens
aagucaccaacccgcagcuugucaugugggua

SEQ ID NO: 161640 - RNA, 32 nt, Homo Sapiens
cccuuuuauaaaaauaaaugcuugggguaggg

SEQ ID NO: 161641 - RNA, 32 nt, Homo Sapiens
ccaagccccuguaaaucagggaaaaugcgcaa

SEQ ID NO: 161642 - RNA, 32 nt, Homo Sapiens
cuugggcuucuuccuccuccaucaccugaaac

SEQ ID NO: 161643 - RNA, 32 nt, Homo Sapiens
guuccgagagcgugccccggaccgccagcuca

SEQ ID NO: 161644 - RNA, 32 nt, Homo Sapiens
uacaagacauauaaaguauauauuauuuuuuc

SEQ ID NO: 161645 - RNA, 32 nt, Homo Sapiens
gacucagcugucuccuggcccugacuuuucua

SEQ ID NO: 161646 - RNA, 32 nt, Homo Sapiens
augaauuucuuccucccucucgcaaccgacca

SEQ ID NO: 161647 - RNA, 32 nt, Homo Sapiens
cugagcucggggggcucugccuucucaggccc

SEQ ID NO: 161648 - RNA, 32 nt, Homo Sapiens
ucaggcaggggaugcugguggcugggaaacau

SEQ ID NO: 161649 - RNA, 32 nt, Homo Sapiens
uagaauuauggaugacgauaauaaucgaaccc

SEQ ID NO: 161650 - RNA, 32 nt, Homo Sapiens
uuucucuuucgucuucaugguggcuucguaga

SEQ ID NO: 161651 - RNA, 32 nt, Homo Sapiens
cagggcuuuaggauguucuggaugcuuuuuaa

SEQ ID NO: 161652 - RNA, 32 nt, Homo Sapiens
uguuuccuguaguucucccucuucccacaaag

SEQ ID NO: 161653 - RNA, 32 nt, Homo Sapiens
ccuuacugcauaaacucaacugcucucacuga

SEQ ID NO: 161654 - RNA, 32 nt, Homo Sapiens
cacacauacauacauaugcacacacacguaca

SEQ ID NO: 161655 - RNA, 32 nt, Homo Sapiens
uguguacacacacacacacacacacacacaca

SEQ ID NO: 161656 - RNA, 32 nt, Homo Sapiens
ccaguguguuaugaggaaaaccccaagagcau

SEQ ID NO: 161657 - RNA, 32 nt, Homo Sapiens
gggguccugucagcccggcagugucuucucag

SEQ ID NO: 161658 - RNA, 32 nt, Homo Sapiens
agguggugauuuccucucccuuggguguauac

SEQ ID NO: 161659 - RNA, 32 nt, Homo Sapiens
cgucacagcccgacgcgccacccagcuguuuu

SEQ ID NO: 161660 - RNA, 32 nt, Homo Sapiens
uugugucaucagcuaauagaucugaaagugau

SEQ ID NO: 161661 - RNA, 30 nt, Homo Sapiens
ucgcuaugcugcaagggccccgggccuugg

SEQ ID NO: 161662 - RNA, 32 nt, Homo Sapiens
aauacguuuuuguaccucucauuuucagucag

SEQ ID NO: 161663 - RNA, 32 nt, Homo Sapiens
uuuuaaacaagaaaagcugugcucuuuuaugu

SEQ ID NO: 161664 - RNA, 32 nt, Homo Sapiens
cgaccucugccacguggaccgcgcgcggggcg

SEQ ID NO: 161665 - RNA, 32 nt, Homo Sapiens
guauaauuaaaauaaaauauauuuuguucugg

SEQ ID NO: 161666 - RNA, 32 nt, Homo Sapiens
aggguggauggauaaggauauucacugcaaca

SEQ ID NO: 161667 - RNA, 32 nt, Homo Sapiens
cccccaacucccagcccugccuguggcccguu

SEQ ID NO: 161668 - RNA, 32 nt, Homo Sapiens
gugggauuugaacagcacauaugcucugguuu

SEQ ID NO: 161669 - RNA, 32 nt, Homo Sapiens
cuugcacacaucauuacuucugcauccuucuu

SEQ ID NO: 161670 - RNA, 32 nt, Homo Sapiens
cugggucgccuggauuaacaggaaggcugagg

SEQ ID NO: 161671 - RNA, 32 nt, Homo Sapiens
aggaggaggaggaggaggaggacgcgggccug

SEQ ID NO: 161672 - RNA, 32 nt, Homo Sapiens
gccagccaggccccagucccagccccaacccc

SEQ ID NO: 161673 - RNA, 32 nt, Homo Sapiens
auugcuuugcuaaggagggaaggaaguuacaa

SEQ ID NO: 161674 - RNA, 32 nt, Homo Sapiens
caugcuguccugcaccaguugcuggaacuggc

SEQ ID NO: 161675 - RNA, 32 nt, Homo Sapiens
ugaauuaguuuuaaaaugauauuguuauauac

SEQ ID NO: 161676 - RNA, 32 nt, Homo Sapiens
uugguaauccucggugucaaggaacuuggaaa

SEQ ID NO: 161677 - RNA, 32 nt, Homo Sapiens
ugguagaaggugcacauuuuaagcaaaaauaa

SEQ ID NO: 161678 - RNA, 32 nt, Homo Sapiens
gcacugcccggccaagccccagccucagccug

SEQ ID NO: 161679 - RNA, 32 nt, Homo Sapiens
cgcccacgagaugcugaugacgagcaggcaga

SEQ ID NO: 161680 - RNA, 32 nt, Homo Sapiens
acggagagaaccgggaccccccugcggggacc

SEQ ID NO: 161681 - RNA, 32 nt, Homo Sapiens
gccccgaaucuugguggccgcugcuggagcgc

SEQ ID NO: 161682 - RNA, 32 nt, Homo Sapiens
uguuuguguuuguagacaaaaggcaaagguau

SEQ ID NO: 161683 - RNA, 32 nt, Homo Sapiens
cuggggauguggagaagccaccccccaccccg

SEQ ID NO: 161684 - RNA, 32 nt, Homo Sapiens
aggcucaggaccaagucccucuccuuccacca

SEQ ID NO: 161685 - RNA, 32 nt, Homo Sapiens
aucucauugcuguuuugggagaggaacgggaa

SEQ ID NO: 161686 - RNA, 32 nt, Homo Sapiens
aaaaaaaacaaaaaacaaaaccaauaacucag

SEQ ID NO: 161687 - RNA, 30 nt, Homo Sapiens
ucuagguggggcgggcgacgcgguagacgg

SEQ ID NO: 161688 - RNA, 32 nt, Homo Sapiens
gauaccaacauuagcuuuucuucuugguuaua

SEQ ID NO: 161689 - RNA, 32 nt, Homo Sapiens
cauuauuauuuuuugaucuucaguuguauuuu

SEQ ID NO: 161690 - RNA, 32 nt, Homo Sapiens
ugaugagugagcugacgcuggugcuggaaccu

SEQ ID NO: 161691 - RNA, 32 nt, Homo Sapiens
gccguccucugcccaccugagguccuggcucc

SEQ ID NO: 161692 - RNA, 32 nt, Homo Sapiens
aaaccccagacacuccucuccuugccugcagg

SEQ ID NO: 161693 - RNA, 32 nt, Homo Sapiens
gaauuuucuuuuucuuuuuuuugagacagccu

SEQ ID NO: 161694 - RNA, 32 nt, Homo Sapiens
aaccccaucucuacuaaaaauacgaaaauuag

SEQ ID NO: 161695 - RNA, 32 nt, Homo Sapiens
uucuugagagaguucaguuaaaaaagaaaaaa

SEQ ID NO: 161696 - RNA, 32 nt, Homo Sapiens
ccucggcuugugggcuggugccccacagcuac

SEQ ID NO: 161697 - RNA, 32 nt, Homo Sapiens
uggaugcuaaguugacacaucccuuuaugcaa

SEQ ID NO: 161698 - RNA, 32 nt, Homo Sapiens
gugaauaauuuaauuuaaaugacaaaacccua

SEQ ID NO: 161699 - RNA, 27 nt, Homo Sapiens
ccguccgccguuuccagcccccagucu

SEQ ID NO: 161700 - RNA, 32 nt, Homo Sapiens
uaaugcaugaauauaaaucuauauuauuugcu

SEQ ID NO: 161701 - RNA, 32 nt, Homo Sapiens
ggcuagucucaaacuccugaccucaggugcuc

SEQ ID NO: 161702 - RNA, 32 nt, Homo Sapiens
ggcuggucucaaacuccugaccucagguacuc

SEQ ID NO: 161703 - RNA, 32 nt, Homo Sapiens
ugauauauauuuuuguauuaucucuuucuucu

SEQ ID NO: 161704 - RNA, 32 nt, Homo Sapiens
uggaagaauauguuuuuaacccugagaucaag

SEQ ID NO: 161705 - RNA, 32 nt, Homo Sapiens
ggagcaagagugggaggcgcgcgcggaggccg

SEQ ID NO: 161706 - RNA, 32 nt, Homo Sapiens
aauccaaaauuuguuugucacugccaaaguau

SEQ ID NO: 161707 - RNA, 32 nt, Homo Sapiens
aguuguuuuuauuuuagucaaucuuuuaggua

SEQ ID NO: 161708 - RNA, 32 nt, Homo Sapiens
accacagccugcccagcuuucaguccagcaac

SEQ ID NO: 161709 - RNA, 32 nt, Homo Sapiens
cacaucgaugguucuuucuacuuguuauaaac

SEQ ID NO: 161710 - RNA, 32 nt, Homo Sapiens
uauguuuuacuuucauuuaauaauguucaacu

SEQ ID NO: 161711 - RNA, 32 nt, Homo Sapiens
gaccuuuaauuuuucggggagagcagcugagg

SEQ ID NO: 161712 - RNA, 32 nt, Homo Sapiens
cccugguccugaccugugauguguccgggguc

SEQ ID NO: 161713 - RNA, 32 nt, Homo Sapiens
aaaagcugaguuagugcgcccgggacgccagg

SEQ ID NO: 161714 - RNA, 32 nt, Homo Sapiens
acaaccgcaggaccccaccccuggcucugaau

SEQ ID NO: 161715 - RNA, 32 nt, Homo Sapiens
auacucagacugcagcuggaccggcaagcugg

SEQ ID NO: 161716 - RNA, 32 nt, Homo Sapiens
uuguuuuuucccuucuaguuaagggacuauuu

SEQ ID NO: 161717 - RNA, 32 nt, Homo Sapiens
aaagcagacaccuuugccuuguuccugagcuu

SEQ ID NO: 161718 - RNA, 32 nt, Homo Sapiens
ugggguggggacgcaccggcucuccgacagcu

SEQ ID NO: 161719 - RNA, 32 nt, Homo Sapiens
gcucagggcuccuggggggagcaggcugaagg

SEQ ID NO: 161720 - RNA, 32 nt, Homo Sapiens
uggauaagaaagaucaaguguaucugaacucu

SEQ ID NO: 161721 - RNA, 32 nt, Homo Sapiens
ugggauuuuuguguucccucaccacccaugua

SEQ ID NO: 161722 - RNA, 32 nt, Homo Sapiens
uuauuuccugcagcugacagauagacucagau

SEQ ID NO: 161723 - RNA, 32 nt, Homo Sapiens
gcagacuaucuuccuuuuuucuucuucaaccu

SEQ ID NO: 161724 - RNA, 32 nt, Homo Sapiens
caugcaaaggcuguggcagagccccugggcac

SEQ ID NO: 161725 - RNA, 32 nt, Homo Sapiens
cuccaguugcaaacagcaauggauuaggauau

SEQ ID NO: 161726 - RNA, 32 nt, Homo Sapiens
ccgagccuccgcagccgcgacccggcuucucu

SEQ ID NO: 161727 - RNA, 32 nt, Homo Sapiens
gcuccggccccgggccaugagccccuccgcga

SEQ ID NO: 161728 - RNA, 32 nt, Homo Sapiens
acgcugcuaggauaguuaguuuggaaauggua

SEQ ID NO: 161729 - RNA, 32 nt, Homo Sapiens
uggaugaauggguuagugaauguucuacuauu

SEQ ID NO: 161730 - RNA, 31 nt, Homo Sapiens
uauaugugaaacauuuuuucuucugaagauu

SEQ ID NO: 161731 - RNA, 32 nt, Homo Sapiens
ucacgacuucccuccugccugcagccugggcc

SEQ ID NO: 161732 - RNA, 32 nt, Homo Sapiens
uucuuuauauugacucuuuguauuucaauaaa

SEQ ID NO: 161733 - RNA, 32 nt, Homo Sapiens
ucuuguuuuuauuuucaacuuuucaaauagaa

SEQ ID NO: 161734 - RNA, 32 nt, Homo Sapiens
gggugggcagugccagccccuccucaccacuc

SEQ ID NO: 161735 - RNA, 32 nt, Homo Sapiens
ccugaucaaugagggcggggccuggcgucuga

SEQ ID NO: 161736 - RNA, 32 nt, Homo Sapiens
aaggcaggcagggcugcggggaggcugggcca

SEQ ID NO: 161737 - RNA, 32 nt, Homo Sapiens
agguaaugagagauggcaagaaagaagcugaa

SEQ ID NO: 161738 - RNA, 32 nt, Homo Sapiens
acaguaggagauucuuuuucuucucuuuugag

SEQ ID NO: 161739 - RNA, 32 nt, Homo Sapiens
cggagggagcgcgacccucggaccccgccugg

SEQ ID NO: 161740 - RNA, 32 nt, Homo Sapiens
acugccagauuaauguuggguuuuaauuuagc

SEQ ID NO: 161741 - RNA, 32 nt, Homo Sapiens
cuuuuucaaaaagaaccaaaaaauaauuaaaa

SEQ ID NO: 161742 - RNA, 32 nt, Homo Sapiens
agagucuauaggcaaacaauauagggugugcu

SEQ ID NO: 161743 - RNA, 32 nt, Homo Sapiens
uccccagcccuugaagucacccggccccgaug

SEQ ID NO: 161744 - RNA, 32 nt, Homo Sapiens
uuaagggaggcggcggcagcgcggcggugggg

SEQ ID NO: 161745 - RNA, 32 nt, Homo Sapiens
gcuugccagccgcgagcugcugcugcaggaca

SEQ ID NO: 161746 - RNA, 32 nt, Homo Sapiens
ggccaggcgugguggcucacgccuguaguccc

SEQ ID NO: 161747 - RNA, 32 nt, Homo Sapiens
uaugcccaaaaggagcuuaugucucaacugag

SEQ ID NO: 161748 - RNA, 32 nt, Homo Sapiens
uucccaaaggauuucaccuccucccacuguug

SEQ ID NO: 161749 - RNA, 32 nt, Homo Sapiens
aauugacauuaauaaagcauauuuuaaaagau

SEQ ID NO: 161750 - RNA, 32 nt, Homo Sapiens
gaccacacagccuacacccagccccgagugug

SEQ ID NO: 161751 - RNA, 32 nt, Homo Sapiens
guuacauaaaaugacuuucuguguauaaauua

SEQ ID NO: 161752 - RNA, 32 nt, Homo Sapiens
uuccccacuacucauucuuuuacaaaugacag

SEQ ID NO: 161753 - RNA, 32 nt, Homo Sapiens
aucauuccaaccuuugcaaaucuuauagacua

SEQ ID NO: 161754 - RNA, 32 nt, Homo Sapiens
gaagcucugugagaccucuccucaucugugca

SEQ ID NO: 161755 - RNA, 30 nt, Homo Sapiens
cuucuggccaggcgcgguggcucaugccug

SEQ ID NO: 161756 - RNA, 32 nt, Homo Sapiens
ucuaaacaucauuccaaccuuugcaaaucuua

SEQ ID NO: 161757 - RNA, 32 nt, Homo Sapiens
uacguuccacuuugccucccccaaucacugcg

SEQ ID NO: 161758 - RNA, 32 nt, Homo Sapiens
guuacagagugaacacucuacuacaugugacu

SEQ ID NO: 161759 - RNA, 32 nt, Homo Sapiens
accgcgaaguugcauucucaccuucgagucac

SEQ ID NO: 161760 - RNA, 32 nt, Homo Sapiens
agcgaaagaaaagagaagugacagaaacaacu

SEQ ID NO: 161761 - RNA, 25 nt, Homo Sapiens
acugcccgguuugagcguagccaaa

SEQ ID NO: 161762 - RNA, 32 nt, Homo Sapiens
ggaauuagacaagccaaucagcacuaacccug

SEQ ID NO: 161763 - RNA, 32 nt, Homo Sapiens
gagugauuccaagugggaugguuguggcauua

SEQ ID NO: 161764 - RNA, 32 nt, Homo Sapiens
guaaaauaaagauuucuguguucuacauguau

SEQ ID NO: 161765 - RNA, 32 nt, Homo Sapiens
ccacuguauuccagccugggugacagagugag

SEQ ID NO: 161766 - RNA, 32 nt, Homo Sapiens
augaguugauaguuugaauuauaggauuuuug

SEQ ID NO: 161767 - RNA, 32 nt, Homo Sapiens
guuaccuggggaaagggcuagcaagaggugaa

SEQ ID NO: 161768 - RNA, 32 nt, Homo Sapiens
gcaagugccccuguggcuuguccccaaccccc

SEQ ID NO: 161769 - RNA, 32 nt, Homo Sapiens
ucaccacccgcaccccugacccuccuggucca

SEQ ID NO: 161770 - RNA, 32 nt, Homo Sapiens
uuauauauuauuucaccuuuguagccugaggg

SEQ ID NO: 161771 - RNA, 32 nt, Homo Sapiens
ucaacuguuuuaagcuguauauuucuuuaauu

SEQ ID NO: 161772 - RNA, 32 nt, Homo Sapiens
uacuauagggacuuaaauuaguuuuguucaua

SEQ ID NO: 161773 - RNA, 32 nt, Homo Sapiens
ucuaggccaggcauugucccccugcuuccugg

SEQ ID NO: 161774 - RNA, 32 nt, Homo Sapiens
ggccuggcagagcuaagauucagacccagggc

SEQ ID NO: 161775 - RNA, 32 nt, Homo Sapiens
gucaugaauggcaaguggucccugaugugcag

SEQ ID NO: 161776 - RNA, 32 nt, Homo Sapiens
ugcugacuuccacagccagccuucccuccacc

SEQ ID NO: 161777 - RNA, 32 nt, Homo Sapiens
gcagaauuaaaauuauauuguagaaggaaaca

SEQ ID NO: 161778 - RNA, 32 nt, Homo Sapiens
ggaguguggcuuuggguuucauccuuccccag

SEQ ID NO: 161779 - RNA, 32 nt, Homo Sapiens
aaaacuuguaaauaaaggaaccauaaucaauu

SEQ ID NO: 161780 - RNA, 32 nt, Homo Sapiens
gacaucugcaaugccuguguccugcuugugaa

SEQ ID NO: 161781 - RNA, 32 nt, Homo Sapiens
cccccagugccuggauuacgggcccccuuucc

SEQ ID NO: 161782 - RNA, 32 nt, Homo Sapiens
uucuauaaacacaacuuuauuaagcagaauac

SEQ ID NO: 161783 - RNA, 31 nt, Homo Sapiens
aagcuuuaagaaacuuuuugaguuaauuaua

SEQ ID NO: 161784 - RNA, 32 nt, Homo Sapiens
ggccucugagccccggccucggaccgcccacu

SEQ ID NO: 161785 - RNA, 32 nt, Homo Sapiens
aggagugagaugaaucaaaaccagugaacuuu

SEQ ID NO: 161786 - RNA, 32 nt, Homo Sapiens
cugcccaccacccacagccccuggacagcuuc

SEQ ID NO: 161787 - RNA, 32 nt, Homo Sapiens
caugagcuccuaucaagaagugaucaacguga

SEQ ID NO: 161788 - RNA, 32 nt, Homo Sapiens
uuugcuuccucuucuucuuuucuauuuuuuau

SEQ ID NO: 161789 - RNA, 32 nt, Homo Sapiens
ggcccuacccuagaccaguaaaacagauucuc

SEQ ID NO: 161790 - RNA, 32 nt, Homo Sapiens
aagagcuuggggauucaguaguccagaucucu

SEQ ID NO: 161791 - RNA, 32 nt, Homo Sapiens
ccucuacggggccagcuccugccuugcagugg

SEQ ID NO: 161792 - RNA, 32 nt, Homo Sapiens
gcggccgccuuugcgcucucgggucaccccgc

SEQ ID NO: 161793 - RNA, 32 nt, Homo Sapiens
uauggaaaacaaagaaacagacacaaugcaca

SEQ ID NO: 161794 - RNA, 32 nt, Homo Sapiens
uuuucaauagcuacuuuuuuuagcagacacca

SEQ ID NO: 161795 - RNA, 32 nt, Homo Sapiens
gaaguguucuuuguguauuucuagcagaaaac

SEQ ID NO: 161796 - RNA, 32 nt, Homo Sapiens
acggcuggagucaucauagcccaggucuuuau

SEQ ID NO: 161797 - RNA, 32 nt, Homo Sapiens
cagaaccugaaauuauuauagauuuuauucgg

SEQ ID NO: 161798 - RNA, 32 nt, Homo Sapiens
cccaggccugaggggccaggaacuugcugggu

SEQ ID NO: 161799 - RNA, 32 nt, Homo Sapiens
cacccaugguaguugcugcucgugguucuguc

SEQ ID NO: 161800 - RNA, 32 nt, Homo Sapiens
ggaaaguuuagcaaaaucacagugguacugau

SEQ ID NO: 161801 - RNA, 32 nt, Homo Sapiens
ugcccugcacuaccaaggccgaccacuagagg

SEQ ID NO: 161802 - RNA, 32 nt, Homo Sapiens
cuaccaucuucaguugugcgaccuugggcaug

SEQ ID NO: 161803 - RNA, 32 nt, Homo Sapiens
ccugaaccggagcccgagccugcugcagagug

SEQ ID NO: 161804 - RNA, 32 nt, Homo Sapiens
cgcagcagcaccggcgacagauuuuuuaaaaa

SEQ ID NO: 161805 - RNA, 32 nt, Homo Sapiens
ugacccuccuaggaccuaagaauagagagaug

SEQ ID NO: 161806 - RNA, 32 nt, Homo Sapiens
cacgcugcaaguguaauuuacagugaggcaua

SEQ ID NO: 161807 - RNA, 32 nt, Homo Sapiens
guuuuucuguauuuuucuuuucuggaacagug

SEQ ID NO: 161808 - RNA, 32 nt, Homo Sapiens
cuggaaugaagauagaaacaagugguuauaac

SEQ ID NO: 161809 - RNA, 32 nt, Homo Sapiens
ucugaagucugcuuguggagcaguguuuuaug

SEQ ID NO: 161810 - RNA, 32 nt, Homo Sapiens
ggaaccagugauuuuaauuaugcuacuuuuuc

SEQ ID NO: 161811 - RNA, 32 nt, Homo Sapiens
agauuauccaguggguaaaugagagucgacug

SEQ ID NO: 161812 - RNA, 32 nt, Homo Sapiens
uaggaagucucgcuugaauguaugcgauacau

SEQ ID NO: 161813 - RNA, 32 nt, Homo Sapiens
gccaagacuuuaguuccagugggauaagaagg

SEQ ID NO: 161814 - RNA, 32 nt, Homo Sapiens
agacaucccccuccuugccgcugggagagcca

SEQ ID NO: 161815 - RNA, 32 nt, Homo Sapiens
ccaugauggugaggugacuggggggugggggg

SEQ ID NO: 161816 - RNA, 32 nt, Homo Sapiens
uuaugguuuuggggaaaggcugauggugaagc

SEQ ID NO: 161817 - RNA, 32 nt, Homo Sapiens
ccacugaauuguacaccuuaaaagggcucaaa

SEQ ID NO: 161818 - RNA, 32 nt, Homo Sapiens
cagagcaagaucugggcaagcagagagugccu

SEQ ID NO: 161819 - RNA, 32 nt, Homo Sapiens
guacuccgccaugccacccauccuccagcgcc

SEQ ID NO: 161820 - RNA, 32 nt, Homo Sapiens
uuguuauuugauguauaucuuuuaaauuuacu

SEQ ID NO: 161821 - RNA, 32 nt, Homo Sapiens
aggcagccaaccccagcuccguggugugugag

SEQ ID NO: 161822 - RNA, 32 nt, Homo Sapiens
ugcuagccaaaauauuuuuguccugaguagug

SEQ ID NO: 161823 - RNA, 32 nt, Homo Sapiens
ggcuuuuuaaaaaucugacaaacaaaaucuca

SEQ ID NO: 161824 - RNA, 31 nt, Homo Sapiens
gcucuguacccagugcaccucccuccggagc

SEQ ID NO: 161825 - RNA, 32 nt, Homo Sapiens
gcauaacggauauuuuuuaacuuggcgagaug

SEQ ID NO: 161826 - RNA, 32 nt, Homo Sapiens
cugcaguugggucgcccccaggccaacgcucc

SEQ ID NO: 161827 - RNA, 32 nt, Homo Sapiens
auccaccaccagcuccuccucuaggcucucca

SEQ ID NO: 161828 - RNA, 32 nt, Homo Sapiens
auuucccugcagaugguacagauguuccugcc

SEQ ID NO: 161829 - RNA, 32 nt, Homo Sapiens
uuacauccauuuuagaaaucugcacaaauuaa

SEQ ID NO: 161830 - RNA, 32 nt, Homo Sapiens
cuucuauuuauuauaaagaaauuuuucauggg

SEQ ID NO: 161831 - RNA, 32 nt, Homo Sapiens
gucauaauauuuuucuuuccuuaccucuuaua

SEQ ID NO: 161832 - RNA, 32 nt, Homo Sapiens
acagggcugcgcagguuucccccgucugcgaa

SEQ ID NO: 161833 - RNA, 32 nt, Homo Sapiens
auucaagugaugcucaugauccuguuacugug

SEQ ID NO: 161834 - RNA, 32 nt, Homo Sapiens
augaauugagaguuuaacaugccaagagaugu

SEQ ID NO: 161835 - RNA, 32 nt, Homo Sapiens
gugucagaaugggaaugucuaucuaugucugu

SEQ ID NO: 161836 - RNA, 32 nt, Homo Sapiens
cauggagagcuaacuuuagaaaacuagcugga

SEQ ID NO: 161837 - RNA, 32 nt, Homo Sapiens
cuucacugauucccaacacucacuuucucuuc

SEQ ID NO: 161838 - RNA, 32 nt, Homo Sapiens
gggggccgcucgccagcgucgcccgcuguguu

SEQ ID NO: 161839 - RNA, 32 nt, Homo Sapiens
gucagcaagggucuggagaaaagggaauuuuu

SEQ ID NO: 161840 - RNA, 32 nt, Homo Sapiens
guaguuaauuuaauuugcaguuugugcggcag

SEQ ID NO: 161841 - RNA, 32 nt, Homo Sapiens
uacgugcuugcgguggccucccgggaaaaggg

SEQ ID NO: 161842 - RNA, 32 nt, Homo Sapiens
gacacaggccccacccagcagacugaggggca

SEQ ID NO: 161843 - RNA, 32 nt, Homo Sapiens
gaggggcaaccugggacaagacacccagaggg

SEQ ID NO: 161844 - RNA, 32 nt, Homo Sapiens
ugcucggugcugcgcggggcucccuccuuacc

SEQ ID NO: 161845 - RNA, 32 nt, Homo Sapiens
agaaacugcccccugaugcguucccccauuag

SEQ ID NO: 161846 - RNA, 32 nt, Homo Sapiens
guccacccaaccccgagagcccuagcgugcag

SEQ ID NO: 161847 - RNA, 31 nt, Homo Sapiens
aaggguugggguggcgacacggccucccgag

SEQ ID NO: 161848 - RNA, 32 nt, Homo Sapiens
cacugcccagcagccuucuccguccugucccc

SEQ ID NO: 161849 - RNA, 32 nt, Homo Sapiens
uuauuaggaaucuaaaucaugucuuugaacau

SEQ ID NO: 161850 - RNA, 32 nt, Homo Sapiens
agggguugggccucaggcagggaggggggugg

SEQ ID NO: 161851 - RNA, 32 nt, Homo Sapiens
cugcagagucucgugccgcugcugcugcgccu

SEQ ID NO: 161852 - RNA, 32 nt, Homo Sapiens
ggagcucuccuuuccaaaggcagagcuuacug

SEQ ID NO: 161853 - RNA, 32 nt, Homo Sapiens
ggugggggccggggcgggauggcugcagcggc

SEQ ID NO: 161854 - RNA, 32 nt, Homo Sapiens
gguguaauguggauuuaacaucaauaaauauu

SEQ ID NO: 161855 - RNA, 32 nt, Homo Sapiens
ugccggccauggugcuguggcgcgcccgcgcc

SEQ ID NO: 161856 - RNA, 32 nt, Homo Sapiens
gcgcuccuccggucgcggucuccgcacuaaac

SEQ ID NO: 161857 - RNA, 30 nt, Homo Sapiens
auauuugauaaaagucuuguaaccagauac

SEQ ID NO: 161858 - RNA, 32 nt, Homo Sapiens
agcgaccagagcauucuuaauucccgccgcag

SEQ ID NO: 161859 - RNA, 32 nt, Homo Sapiens
cacauuuggaaagugaucaaccacuguuccuu

SEQ ID NO: 161860 - RNA, 32 nt, Homo Sapiens
cccaccagcgcgcgcagcuggggccccuuccu

SEQ ID NO: 161861 - RNA, 32 nt, Homo Sapiens
auuugcugauuuuggagcuuugaaauauaggu

SEQ ID NO: 161862 - RNA, 32 nt, Homo Sapiens
gagugcucgggccagcugguccuuuucccauc

SEQ ID NO: 161863 - RNA, 32 nt, Homo Sapiens
uaucaccaacuuuucuuuaaaaguguuccuuu

SEQ ID NO: 161864 - RNA, 32 nt, Homo Sapiens
uuggaggagagagccaggggcuggggcccggu

SEQ ID NO: 161865 - RNA, 32 nt, Homo Sapiens
auggaucucuacuuguuggguguuaugaauuc

SEQ ID NO: 161866 - RNA, 32 nt, Homo Sapiens
auucaccaugaugcuuccugaggguguucuag

SEQ ID NO: 161867 - RNA, 32 nt, Homo Sapiens
auuugcuguauauaaguugccugcuuuguauu

SEQ ID NO: 161868 - RNA, 32 nt, Homo Sapiens
agcaguggccgcggcggcucccuccggggugc

SEQ ID NO: 161869 - RNA, 32 nt, Homo Sapiens
cguauuugugcggcgccagcuggccccgcagc

SEQ ID NO: 161870 - RNA, 32 nt, Homo Sapiens
ggaaggcuccuggcccccacagcccucuucgg

SEQ ID NO: 161871 - RNA, 32 nt, Homo Sapiens
cagcucacugcaaccuccaucuccagguuuca

SEQ ID NO: 161872 - RNA, 32 nt, Homo Sapiens
uggaggccgaccaguagcugcagaccagggac

SEQ ID NO: 161873 - RNA, 32 nt, Homo Sapiens
ccgcgggacggagggaggacucgggacaggga

SEQ ID NO: 161874 - RNA, 32 nt, Homo Sapiens
acuuccaaaaacaaaaucauacuuauuagaag

SEQ ID NO: 161875 - RNA, 32 nt, Homo Sapiens
aaguuacuguagcuuaaaagguuuugugagca

SEQ ID NO: 161876 - RNA, 32 nt, Homo Sapiens
ugacuccucacuggcuuugugucuagugccac

SEQ ID NO: 161877 - RNA, 32 nt, Homo Sapiens
agaaaaaguacaauauucuaauguucuaacug

SEQ ID NO: 161878 - RNA, 32 nt, Homo Sapiens
ggcaaaaagagauaaauuuuacaagaagguuu

SEQ ID NO: 161879 - RNA, 32 nt, Homo Sapiens
auagaaggacuggugcgaccccugccccgacc

SEQ ID NO: 161880 - RNA, 32 nt, Homo Sapiens
guggguuccaugccacaggcagggagagcagg

SEQ ID NO: 161881 - RNA, 32 nt, Homo Sapiens
uacauauuuaaauaaacauauucauuuacccg

SEQ ID NO: 161882 - RNA, 32 nt, Homo Sapiens
ccucuccccuccccacuggcucugucugcucu

SEQ ID NO: 161883 - RNA, 32 nt, Homo Sapiens
aucuggaguugcuguuauuguccuuguugucu

SEQ ID NO: 161884 - RNA, 32 nt, Homo Sapiens
ugucggcagggccagggccuccuacaagacca

SEQ ID NO: 161885 - RNA, 32 nt, Homo Sapiens
auugcaauauggauguuucuuuguauuauaaa

SEQ ID NO: 161886 - RNA, 32 nt, Homo Sapiens
uucuccaauucugcccaaaaauaugguugaua

SEQ ID NO: 161887 - RNA, 32 nt, Homo Sapiens
agagcgaaacucuugucugaaaaaauaaaguu

SEQ ID NO: 161888 - RNA, 32 nt, Homo Sapiens
aguccaaaauacaaauuggacagaagaucuau

SEQ ID NO: 161889 - RNA, 32 nt, Homo Sapiens
ucggugcccucccgccagugcccgcacucggg

SEQ ID NO: 161890 - RNA, 32 nt, Homo Sapiens
augcggauucagaaagggcucccucaucagag

SEQ ID NO: 161891 - RNA, 32 nt, Homo Sapiens
aucauguaaacuaaguauguuuuuaaacaauu

SEQ ID NO: 161892 - RNA, 32 nt, Homo Sapiens
cuuccucugggagcucugugccacugagguau

SEQ ID NO: 161893 - RNA, 32 nt, Homo Sapiens
gcagggccugcgugcgcucccucccccgaaau

SEQ ID NO: 161894 - RNA, 32 nt, Homo Sapiens
uaauuauacauuucaucauaauguagaaucag

SEQ ID NO: 161895 - RNA, 32 nt, Homo Sapiens
gcguccaacugcgcugcugccggagcgcucag

SEQ ID NO: 161896 - RNA, 32 nt, Homo Sapiens
guuucaauaaaugccgcugcaaugcaaaaaaa

SEQ ID NO: 161897 - RNA, 32 nt, Homo Sapiens
gacagcaugugcccuccugagggaggaccugg

SEQ ID NO: 161898 - RNA, 32 nt, Homo Sapiens
gaagcaauugauuuccaggaaauauccaucca

SEQ ID NO: 161899 - RNA, 32 nt, Homo Sapiens
cucaucgugucuguccugagaggcuccacaau

SEQ ID NO: 161900 - RNA, 32 nt, Homo Sapiens
caugaugcacugcuuucaacacugcaugacug

SEQ ID NO: 161901 - RNA, 32 nt, Homo Sapiens
ugguugagggugggguguggggcgagggggac

SEQ ID NO: 161902 - RNA, 32 nt, Homo Sapiens
agcgccgucugcccggccccgcccucuuucgg

SEQ ID NO: 161903 - RNA, 32 nt, Homo Sapiens
uuucuuuuucuuuugcaagucuaaauguuaga

SEQ ID NO: 161904 - RNA, 32 nt, Homo Sapiens
ggcaguugucagccauucuuccaauucacugu

SEQ ID NO: 161905 - RNA, 32 nt, Homo Sapiens
cagccauguguuccuuuuuuuuuucuuucuuu

SEQ ID NO: 161906 - RNA, 32 nt, Homo Sapiens
cuagaacuuucccccaucaguucacaacuuuc

SEQ ID NO: 161907 - RNA, 32 nt, Homo Sapiens
gcaccaaaucuggccugggggcccgagaagcu

SEQ ID NO: 161908 - RNA, 32 nt, Homo Sapiens
cuuuguucuuuggguccccugaugccauagga

SEQ ID NO: 161909 - RNA, 32 nt, Homo Sapiens
gcgcgccaguggcugggcggccucgcuggggc

SEQ ID NO: 161910 - RNA, 32 nt, Homo Sapiens
ccgcccuauauguugcccgccgcggccucugg

SEQ ID NO: 161911 - RNA, 32 nt, Homo Sapiens
cugggggcagugccagccugauucuuccgacc

SEQ ID NO: 161912 - RNA, 32 nt, Homo Sapiens
agcugccugcugucacgugacacugagggaug

SEQ ID NO: 161913 - RNA, 32 nt, Homo Sapiens
cucaauccuguucuuuguuuaagagcaauacu

SEQ ID NO: 161914 - RNA, 32 nt, Homo Sapiens
cgggacccgccucccugggcgccggagucaug

SEQ ID NO: 161915 - RNA, 32 nt, Homo Sapiens
ugcgucaggacggcgccgccggggccccgcga

SEQ ID NO: 161916 - RNA, 32 nt, Homo Sapiens
ggcggguccccggccucgggagcacggcggug

SEQ ID NO: 161917 - RNA, 32 nt, Homo Sapiens
gcuagagacagagggagguaacacggaguccc

SEQ ID NO: 161918 - RNA, 32 nt, Homo Sapiens
ucgcacccaagcugcguggagacccaggagcc

SEQ ID NO: 161919 - RNA, 32 nt, Homo Sapiens
cgccuggugaagggggcgcccagggcgcaugg

SEQ ID NO: 161920 - RNA, 32 nt, Homo Sapiens
cacccccagcugccuuugggggugcugagugc

SEQ ID NO: 161921 - RNA, 32 nt, Homo Sapiens
augcuauuacaauguaaauauuucuuacacag

SEQ ID NO: 161922 - RNA, 31 nt, Homo Sapiens
cuguaccucaaugauguugcccugagauucu

SEQ ID NO: 161923 - RNA, 32 nt, Homo Sapiens
uauaggaaaaagaaaauguaaaagugcuaaca

SEQ ID NO: 161924 - RNA, 32 nt, Homo Sapiens
ggagcuaugaaaugacuaaauuccuccuugca

SEQ ID NO: 161925 - RNA, 32 nt, Homo Sapiens
aucaugauauagaagaagaucaguacaaagau

SEQ ID NO: 161926 - RNA, 32 nt, Homo Sapiens
uauacacuuggaaaaauauaaaauuguagauc

SEQ ID NO: 161927 - RNA, 32 nt, Homo Sapiens
ucgagaccagccuggccaacguggugaaacgc

SEQ ID NO: 161928 - RNA, 32 nt, Homo Sapiens
ggagcugagucacaaggcaacuuucaaguuuu

SEQ ID NO: 161929 - RNA, 32 nt, Homo Sapiens
agagcaaaacaucaauuauggaugacaaaagu

SEQ ID NO: 161930 - RNA, 32 nt, Homo Sapiens
ccuccgccaagccccagcgcccgcucccaucg

SEQ ID NO: 161931 - RNA, 32 nt, Homo Sapiens
ugccacuagcuucuucugccaauaucaaaaua

SEQ ID NO: 161932 - RNA, 32 nt, Homo Sapiens
gagaugggaagcugcaguuggaagacccugga

SEQ ID NO: 161933 - RNA, 32 nt, Homo Sapiens
uuggaaauaggaucauuacagauggaauuagu

SEQ ID NO: 161934 - RNA, 32 nt, Homo Sapiens
cagaugaacaagcacacgcagaacugaauugg

SEQ ID NO: 161935 - RNA, 32 nt, Homo Sapiens
uuacaaauaaugguguccacuccaggggcccu

SEQ ID NO: 161936 - RNA, 32 nt, Homo Sapiens
aauugucuaaaaugucaguguuugggaaauua

SEQ ID NO: 161937 - RNA, 32 nt, Homo Sapiens
uccuaaguuugucucuaaaaucuuagcggugg

SEQ ID NO: 161938 - RNA, 32 nt, Homo Sapiens
auuguuggugggaagcacuuauaaggcaguag

SEQ ID NO: 161939 - RNA, 32 nt, Homo Sapiens
uugaggaacagcaggguaauauuaaugaagcc

SEQ ID NO: 161940 - RNA, 32 nt, Homo Sapiens
aagagccaguguucuagcgggugggagauggg

SEQ ID NO: 161941 - RNA, 32 nt, Homo Sapiens
agagauagacuucaggauggccagucauugaa

SEQ ID NO: 161942 - RNA, 32 nt, Homo Sapiens
aaaagggcaggguggcucaggcuuuaggccca

SEQ ID NO: 161943 - RNA, 32 nt, Homo Sapiens
gagcugaauccucccccaagcuguuccaggcc

SEQ ID NO: 161944 - RNA, 32 nt, Homo Sapiens
agaacugugagaaauaaaugucuguugucuac

SEQ ID NO: 161945 - RNA, 32 nt, Homo Sapiens
uaggcucgguguguguaacacacacaccccua

SEQ ID NO: 161946 - RNA, 32 nt, Homo Sapiens
uguggaugagagacauagacgagagagugaga

SEQ ID NO: 161947 - RNA, 32 nt, Homo Sapiens
ggccgccccaugucggccgcccccgccuacag

SEQ ID NO: 161948 - RNA, 32 nt, Homo Sapiens
cugcaggaaaacugaggcccuugggcaccucg

SEQ ID NO: 161949 - RNA, 32 nt, Homo Sapiens
cuucgcuaauuuccucuucgcucuauuuuagc

SEQ ID NO: 161950 - RNA, 32 nt, Homo Sapiens
cucugggccccgggcccgacucccaccccugc

SEQ ID NO: 161951 - RNA, 32 nt, Homo Sapiens
cagaagcaagacaaaaucaguggcucuuagag

SEQ ID NO: 161952 - RNA, 32 nt, Homo Sapiens
gggaccaggaaaccucuugcuugagugcugga

SEQ ID NO: 161953 - RNA, 32 nt, Homo Sapiens
aggagcccggcgcaccucgcgcggcggccgcu

SEQ ID NO: 161954 - RNA, 32 nt, Homo Sapiens
cagauuccucaaaccaccuuugaaaagccaca

SEQ ID NO: 161955 - RNA, 32 nt, Homo Sapiens
aauacuuuuuaccagucuggaacuugggaaaa

SEQ ID NO: 161956 - RNA, 32 nt, Homo Sapiens
cuguuucuuuuuccgugugggugguuaauaau

SEQ ID NO: 161957 - RNA, 32 nt, Homo Sapiens
ccaagcucagccucucggauuccccgggaccc

SEQ ID NO: 161958 - RNA, 32 nt, Homo Sapiens
agacaccgcgggcggccccuccgcggaaggcg

SEQ ID NO: 161959 - RNA, 32 nt, Homo Sapiens
agcuccugucuccagcagcuuucccuguugau

SEQ ID NO: 161960 - RNA, 32 nt, Homo Sapiens
uacgacagcuggaagggcugggagggagagcc

SEQ ID NO: 161961 - RNA, 32 nt, Homo Sapiens
uggugcccuggccaccuucuccaccuguucug

SEQ ID NO: 161962 - RNA, 32 nt, Homo Sapiens
gugcaauuuuuuucuucaaaauguuuucucca

SEQ ID NO: 161963 - RNA, 31 nt, Homo Sapiens
ccuccucggcgcagccauccucuuggcugcc

SEQ ID NO: 161964 - RNA, 32 nt, Homo Sapiens
ccacccccgcaugcgucuguccacuuggcuaa

SEQ ID NO: 161965 - RNA, 32 nt, Homo Sapiens
guccguuggggcagaaccauggaggaaaagcc

SEQ ID NO: 161966 - RNA, 32 nt, Homo Sapiens
ugcauguauaauaucaggaaaauuaagcaucc

SEQ ID NO: 161967 - RNA, 32 nt, Homo Sapiens
uuuucacuaaugagcagauuuuagaaaauucu

SEQ ID NO: 161968 - RNA, 32 nt, Homo Sapiens
aagagcgaaacuccaucugaaaaaauauauau

SEQ ID NO: 161969 - RNA, 32 nt, Homo Sapiens
gugaucacauaaaaugaacaguagacagcaaa

SEQ ID NO: 161970 - RNA, 32 nt, Homo Sapiens
gaggagccuuaguguguccacaaagggacucc

SEQ ID NO: 161971 - RNA, 32 nt, Homo Sapiens
uuuacuuuuugccaaaaucaacauauaaugaa

SEQ ID NO: 161972 - RNA, 32 nt, Homo Sapiens
ccgcuccccccgcauccccucgaccugcaguu

SEQ ID NO: 161973 - RNA, 32 nt, Homo Sapiens
ccaauauagucccagggaccugggucucuggg

SEQ ID NO: 161974 - RNA, 32 nt, Homo Sapiens
agcugagauuagaauccagauuccuagucuag

SEQ ID NO: 161975 - RNA, 32 nt, Homo Sapiens
gugcaagcggccugggggcguggcggggagga

SEQ ID NO: 161976 - RNA, 32 nt, Homo Sapiens
uuuauauuauuuugauuucacaugagcucaaa

SEQ ID NO: 161977 - RNA, 32 nt, Homo Sapiens
ugcccaagguaugaagcagaugagggaccagc

SEQ ID NO: 161978 - RNA, 32 nt, Homo Sapiens
gcucaggugaugccggccaccagcaaugccug

SEQ ID NO: 161979 - RNA, 32 nt, Homo Sapiens
cgacaggaaugggagaaaggugugcaggugcc

SEQ ID NO: 161980 - RNA, 32 nt, Homo Sapiens
gagaggcuggagaggaagaguccggccuggga

SEQ ID NO: 161981 - RNA, 32 nt, Homo Sapiens
uuucaacaucaugugccuguuuccugucucgc

SEQ ID NO: 161982 - RNA, 32 nt, Homo Sapiens
cugacuggagacggugcacgucuggauacgag

SEQ ID NO: 161983 - RNA, 32 nt, Homo Sapiens
guuacauaaugaauuuacuuaaaaaauaugac

SEQ ID NO: 161984 - RNA, 32 nt, Homo Sapiens
augaagaaaaagaucuagaaacugaguugugg

SEQ ID NO: 161985 - RNA, 32 nt, Homo Sapiens
gaggcuaucaacaaagaaugggcuugaaacau

SEQ ID NO: 161986 - RNA, 32 nt, Homo Sapiens
acuuaauuuuuccugcuguauccagaagaaau

SEQ ID NO: 161987 - RNA, 32 nt, Homo Sapiens
uauaugaauuguagaguauuuaucuacuccug

SEQ ID NO: 161988 - RNA, 32 nt, Homo Sapiens
caauauaaaaauuguuuuaauggcauuuguug

SEQ ID NO: 161989 - RNA, 32 nt, Homo Sapiens
aaaagaacaacugccaagaauaaagaagugcg

SEQ ID NO: 161990 - RNA, 32 nt, Homo Sapiens
cgaacgcggugcgggcggggcgcccgccgcaa

SEQ ID NO: 161991 - RNA, 30 nt, Homo Sapiens
ccggggccaagucuugaugaaucuucuuaa

SEQ ID NO: 161992 - RNA, 32 nt, Homo Sapiens
ccucauaaacauuugaguuuuguugaaaagau

SEQ ID NO: 161993 - RNA, 32 nt, Homo Sapiens
cuguacuuuuuggcauaacauaaaucugugaa

SEQ ID NO: 161994 - RNA, 30 nt, Homo Sapiens
cuggcaggucccgugccccggggcagcucc

SEQ ID NO: 161995 - RNA, 32 nt, Homo Sapiens
gugcuggguguuuuucauguauuaucuugcaa

SEQ ID NO: 161996 - RNA, 32 nt, Homo Sapiens
uuuuucccacccagcaguugguggauaauggg

SEQ ID NO: 161997 - RNA, 32 nt, Homo Sapiens
aguuuuucuugauaucuaguuaaugaagauac

SEQ ID NO: 161998 - RNA, 32 nt, Homo Sapiens
gcccgcuggacuuguaacacuaccucccgccc

SEQ ID NO: 161999 - RNA, 32 nt, Homo Sapiens
ccauucccaggcuggucugagcuccggggccg

SEQ ID NO: 162000 - RNA, 32 nt, Homo Sapiens
uuuuagugcuucaagacugcugaaagcaaucc

SEQ ID NO: 162001 - RNA, 31 nt, Homo Sapiens
uugcggagggcgguggccaccgcccaauccg

SEQ ID NO: 162002 - RNA, 32 nt, Homo Sapiens
uugucuccuugacauagugcugguuucugucu

SEQ ID NO: 162003 - RNA, 32 nt, Homo Sapiens
gugccaacacugggcuugccacagccccagga

SEQ ID NO: 162004 - RNA, 32 nt, Homo Sapiens
ggccaugucgugucggggaagguaaugagccg

SEQ ID NO: 162005 - RNA, 32 nt, Homo Sapiens
uguccuauuucugauuauuaagacuaguauaa

SEQ ID NO: 162006 - RNA, 32 nt, Homo Sapiens
uccggaaauauuuguauccccuuacacugcca

SEQ ID NO: 162007 - RNA, 32 nt, Homo Sapiens
gggaguugggaggaagauccccugccuugggu

SEQ ID NO: 162008 - RNA, 32 nt, Homo Sapiens
ugcaggaagaacucuagagaauuugggaagaa

SEQ ID NO: 162009 - RNA, 32 nt, Homo Sapiens
ccucacggggaggggccagcgcggcggccugg

SEQ ID NO: 162010 - RNA, 32 nt, Homo Sapiens
ggcagcaggaggucugggggcuggagucuggu

SEQ ID NO: 162011 - RNA, 32 nt, Homo Sapiens
caguuuuguaaaauuaguauugaguucuauug

SEQ ID NO: 162012 - RNA, 32 nt, Homo Sapiens
cagcgccaaaccgcggcuccagcccucuccag

SEQ ID NO: 162013 - RNA, 32 nt, Homo Sapiens
ggcgcagcgccucggcggccaggcuugcuccc

SEQ ID NO: 162014 - RNA, 32 nt, Homo Sapiens
uuuuuguuaccaaucacugugcucucugccgc

SEQ ID NO: 162015 - RNA, 32 nt, Homo Sapiens
ccaagcugcgguucggcugcugccgagaacug

SEQ ID NO: 162016 - RNA, 32 nt, Homo Sapiens
ugcguguauuguauguuauuuaguguauuuua

SEQ ID NO: 162017 - RNA, 32 nt, Homo Sapiens
accacccccacccaaaggcagugaggagugug

SEQ ID NO: 162018 - RNA, 32 nt, Homo Sapiens
ggacacacuccaguugccguaccaguggcacu

SEQ ID NO: 162019 - RNA, 32 nt, Homo Sapiens
guuuggccaaaauaaguucuaugugugugauu

SEQ ID NO: 162020 - RNA, 32 nt, Homo Sapiens
caguucuugccccagggcuggccugcuagcgc

SEQ ID NO: 162021 - RNA, 32 nt, Homo Sapiens
cucuugcaaauuggagaagagaaggacaaacu

SEQ ID NO: 162022 - RNA, 32 nt, Homo Sapiens
cuucaaaauaagauuguguuaucaccauuuug

SEQ ID NO: 162023 - RNA, 32 nt, Homo Sapiens
uguuccucuggggcuucuaugccuagaccaac

SEQ ID NO: 162024 - RNA, 32 nt, Homo Sapiens
cucugugcuugugccaagggggcaauggcggc

SEQ ID NO: 162025 - RNA, 32 nt, Homo Sapiens
ccuguuggaaaacuggcaguaucuaccaaaag

SEQ ID NO: 162026 - RNA, 32 nt, Homo Sapiens
ugauaugacaaugugagguauauguuaccugg

SEQ ID NO: 162027 - RNA, 32 nt, Homo Sapiens
uuagagccccgucuucaacagacugcucacug

SEQ ID NO: 162028 - RNA, 32 nt, Homo Sapiens
agaaaaagcauuaaaaauaagccaaaauaaga

SEQ ID NO: 162029 - RNA, 32 nt, Homo Sapiens
aggagucgcugggccgggaggggcggacguga

SEQ ID NO: 162030 - RNA, 32 nt, Homo Sapiens
gauucagacgcaaaagacuugcauaagagacg

SEQ ID NO: 162031 - RNA, 32 nt, Homo Sapiens
ugcuccgcgggacuuuguuuguuuccuccucg

SEQ ID NO: 162032 - RNA, 32 nt, Homo Sapiens
agauauuuagguuaaacuuauuuucauaauug

SEQ ID NO: 162033 - RNA, 32 nt, Homo Sapiens
auggaacccugggaacugcccucccccuuagc

SEQ ID NO: 162034 - RNA, 32 nt, Homo Sapiens
ggcgaagaauacugggggaggguguggugggu

SEQ ID NO: 162035 - RNA, 32 nt, Homo Sapiens
ucacggggcuguuuccuccuccucccccagau

SEQ ID NO: 162036 - RNA, 32 nt, Homo Sapiens
accaccucaaucccuuucuucccucagccauc

SEQ ID NO: 162037 - RNA, 32 nt, Homo Sapiens
cuauccacagucaaaaaucccccaaggaggaa

SEQ ID NO: 162038 - RNA, 32 nt, Homo Sapiens
caucucgguuggaggaaucccuuuucugcuca

SEQ ID NO: 162039 - RNA, 32 nt, Homo Sapiens
aggaggaaggcgagggcggggugacuucuggu

SEQ ID NO: 162040 - RNA, 32 nt, Homo Sapiens
cugagucacccaugccagcaucagcuucagcc

SEQ ID NO: 162041 - RNA, 32 nt, Homo Sapiens
cucuucccacccagaggaugcagggaaagcac

SEQ ID NO: 162042 - RNA, 32 nt, Homo Sapiens
uguaugacauagugcuggcacugauauuaucc

SEQ ID NO: 162043 - RNA, 32 nt, Homo Sapiens
auauguguggcuauuucuuaauuuaaaacaaa

SEQ ID NO: 162044 - RNA, 32 nt, Homo Sapiens
accgggacaccugcggcccaugaacaccagcg

SEQ ID NO: 162045 - RNA, 30 nt, Homo Sapiens
uggccaucuuguggcggcggcgcgggcggc

SEQ ID NO: 162046 - RNA, 30 nt, Homo Sapiens
gcgagaggggacugcaagcauccgggucgg

SEQ ID NO: 162047 - RNA, 32 nt, Homo Sapiens
uugaaauuguacauauuuguggaauaauguaa

SEQ ID NO: 162048 - RNA, 32 nt, Homo Sapiens
aggacacaggaaaacacacacacacacacaca

SEQ ID NO: 162049 - RNA, 29 nt, Homo Sapiens
ucaaacuuuguucaauaccaggaaauuua

SEQ ID NO: 162050 - RNA, 32 nt, Homo Sapiens
gccagccgcgcccugcgccaccuacccggggu

SEQ ID NO: 162051 - RNA, 32 nt, Homo Sapiens
uuggcuucucagacagggagaucacuggaaua

SEQ ID NO: 162052 - RNA, 32 nt, Homo Sapiens
uuagaaacauuacagaauaaaaaagcccagac

SEQ ID NO: 162053 - RNA, 32 nt, Homo Sapiens
accagcaucaucuggaggcuggagcaggguca

SEQ ID NO: 162054 - RNA, 32 nt, Homo Sapiens
agagguuccauauuuguaauagcaaaugggcc

SEQ ID NO: 162055 - RNA, 32 nt, Homo Sapiens
caucuccuuuuaaauuucaaucucagcaccug

SEQ ID NO: 162056 - RNA, 32 nt, Homo Sapiens
ucaacgcaaccucagcgucugccggaacccgu

SEQ ID NO: 162057 - RNA, 32 nt, Homo Sapiens
uccaaaauacugguaucaguacucuuauuuau

SEQ ID NO: 162058 - RNA, 32 nt, Homo Sapiens
aguuacuggggguggggggaaggaacaaagga

SEQ ID NO: 162059 - RNA, 32 nt, Homo Sapiens
ugggcauguguauagcuucccaaguucuuuua

SEQ ID NO: 162060 - RNA, 32 nt, Homo Sapiens
uuguuucuucauucauucaacaaaauuuggcu

SEQ ID NO: 162061 - RNA, 32 nt, Homo Sapiens
aggaaacccuuaaaacacacaugggauucucu

SEQ ID NO: 162062 - RNA, 32 nt, Homo Sapiens
aguugagucuuugaaagaauuaaugauauacc

SEQ ID NO: 162063 - RNA, 30 nt, Homo Sapiens
cacagcugugaacuuggggaaacacauuuu

SEQ ID NO: 162064 - RNA, 32 nt, Homo Sapiens
ugaaauugucucugguuucagaaacuuuuccu

SEQ ID NO: 162065 - RNA, 32 nt, Homo Sapiens
ugcuggagaaaacuggcuaucaucuuucagaa

SEQ ID NO: 162066 - RNA, 32 nt, Homo Sapiens
gucauggggaugcaagcagcuguggccaucaa

SEQ ID NO: 162067 - RNA, 32 nt, Homo Sapiens
uuagcaucuauuacacucauguaaauauggag

SEQ ID NO: 162068 - RNA, 32 nt, Homo Sapiens
cugaguguccugcagcagcauuucaucccaaa

SEQ ID NO: 162069 - RNA, 32 nt, Homo Sapiens
uagguuuagcuaucuguguuuauuuucuaaaa

SEQ ID NO: 162070 - RNA, 32 nt, Homo Sapiens
ucgagguggggacaugggacgcagcggucgga

SEQ ID NO: 162071 - RNA, 32 nt, Homo Sapiens
cuucaucacaguguugauguuggacacauaga

SEQ ID NO: 162072 - RNA, 32 nt, Homo Sapiens
auauacacaaguauguaccccuuagaaaugag

SEQ ID NO: 162073 - RNA, 31 nt, Homo Sapiens
cuguggaaauaaaaacuaagguaacuucuca

SEQ ID NO: 162074 - RNA, 32 nt, Homo Sapiens
accauuuccaugaacuugaggccaucauucug

SEQ ID NO: 162075 - RNA, 32 nt, Homo Sapiens
cucccuucggacucacagccuuugcagaguca

SEQ ID NO: 162076 - RNA, 32 nt, Homo Sapiens
gccucagaaucauuuggagaaacuauauuuua

SEQ ID NO: 162077 - RNA, 32 nt, Homo Sapiens
acucuuuagucuuuucugaauuaaagaauaag

SEQ ID NO: 162078 - RNA, 32 nt, Homo Sapiens
guauuuuuucuaaaugugagaucaaggaauua

SEQ ID NO: 162079 - RNA, 32 nt, Homo Sapiens
uuguuuggauccaugaaaaauguauucagugg

SEQ ID NO: 162080 - RNA, 32 nt, Homo Sapiens
agggugaugacugugggagcaaaacugaccgg

SEQ ID NO: 162081 - RNA, 32 nt, Homo Sapiens
gcaugcccaggaggccgcucuccuucaguaaa

SEQ ID NO: 162082 - RNA, 32 nt, Homo Sapiens
gcacagucugcaacuuccugaguccuguucug

SEQ ID NO: 162083 - RNA, 32 nt, Homo Sapiens
ggacccucggagcccagaugcagcuggagcca

SEQ ID NO: 162084 - RNA, 32 nt, Homo Sapiens
gugcgagagccacggcgggggcuggggcgagu

SEQ ID NO: 162085 - RNA, 32 nt, Homo Sapiens
ggagaaugagagaccacaugaagcagaaacau

SEQ ID NO: 162086 - RNA, 32 nt, Homo Sapiens
caggcuagagugcaguggcuauucacaggugc

SEQ ID NO: 162087 - RNA, 32 nt, Homo Sapiens
uuuauuuauuuuuauacaauuccauuggcaug

SEQ ID NO: 162088 - RNA, 32 nt, Homo Sapiens
ugaggccuaccccacaccugggcucuccacag

SEQ ID NO: 162089 - RNA, 32 nt, Homo Sapiens
gcagcugagggggcagcuccgcggcggcgucc

SEQ ID NO: 162090 - RNA, 32 nt, Homo Sapiens
gcaccagggaagcucaggccgauucaaugcau

SEQ ID NO: 162091 - RNA, 32 nt, Homo Sapiens
ccggcuccaagcccagccagucccucuagccu

SEQ ID NO: 162092 - RNA, 32 nt, Homo Sapiens
cuggcuaaguggggcccggccccagcuggauc

SEQ ID NO: 162093 - RNA, 32 nt, Homo Sapiens
cacucuuggcauggauacagccaggcccagag

SEQ ID NO: 162094 - RNA, 32 nt, Homo Sapiens
cgaaggucuccauggcguuagaagucuugaug

SEQ ID NO: 162095 - RNA, 32 nt, Homo Sapiens
cauuguuaggcuguuagaauuuuuugguuguu

SEQ ID NO: 162096 - RNA, 32 nt, Homo Sapiens
uggcccauggaugggggugggugcuggugcca

SEQ ID NO: 162097 - RNA, 32 nt, Homo Sapiens
aaguuaaaaugguguggcaggucauuaggauu

SEQ ID NO: 162098 - RNA, 32 nt, Homo Sapiens
caucucuucucccuggccccagccauccugac

SEQ ID NO: 162099 - RNA, 32 nt, Homo Sapiens
uugauccauuucuuacacacacugccagagau

SEQ ID NO: 162100 - RNA, 32 nt, Homo Sapiens
gaggguggccagcagccgccagcugaccucac

SEQ ID NO: 162101 - RNA, 32 nt, Homo Sapiens
guaagaauccuucucauagugaagcacuguug

SEQ ID NO: 162102 - RNA, 32 nt, Homo Sapiens
gcgaggccgggcgggggcccuggcacuggccu

SEQ ID NO: 162103 - RNA, 32 nt, Homo Sapiens
cacacucugcuguucuggaaucuuaugcccag

SEQ ID NO: 162104 - RNA, 32 nt, Homo Sapiens
ggccagaaaaagaagaaggagcucaacuaaaa

SEQ ID NO: 162105 - RNA, 32 nt, Homo Sapiens
uuguggacaaacuauuugaaagucucuauacu

SEQ ID NO: 162106 - RNA, 32 nt, Homo Sapiens
cgcgguguguguccacuucuccccucacuuuc

SEQ ID NO: 162107 - RNA, 32 nt, Homo Sapiens
guacagagagguuuuucugaauauuuauuuua

SEQ ID NO: 162108 - RNA, 32 nt, Homo Sapiens
gguuuggaccagcuucucacacucacaccuuc

SEQ ID NO: 162109 - RNA, 32 nt, Homo Sapiens
acuacaagcaacuuuuuaggaauaccucuuua

SEQ ID NO: 162110 - RNA, 32 nt, Homo Sapiens
gagugcccacccaaugucagagcagcccgagg

SEQ ID NO: 162111 - RNA, 32 nt, Homo Sapiens
aaauacaaauguuggccccagauucuuuuaac

SEQ ID NO: 162112 - RNA, 32 nt, Homo Sapiens
uuguuuuguuuuaggaguuacagauguucaaa

SEQ ID NO: 162113 - RNA, 27 nt, Homo Sapiens
ucuccgccgcgcuucagccucccgcuc

SEQ ID NO: 162114 - RNA, 32 nt, Homo Sapiens
agguacccuaaaauugaagucaggauaaggag

SEQ ID NO: 162115 - RNA, 32 nt, Homo Sapiens
uccccauaucuucuccucuccccuugugaaga

SEQ ID NO: 162116 - RNA, 32 nt, Homo Sapiens
uccuuuggaccaugcagucagaggggcagcuu

SEQ ID NO: 162117 - RNA, 32 nt, Homo Sapiens
gccucaccuguuccccugaggaccccgccgga

SEQ ID NO: 162118 - RNA, 28 nt, Homo Sapiens
aauuuguugucuagugguugugggugaa

SEQ ID NO: 162119 - RNA, 32 nt, Homo Sapiens
aguccggggacccgcgaucagccccggaggac

SEQ ID NO: 162120 - RNA, 32 nt, Homo Sapiens
caucaucugcauuuggcgguaccugucccccc

SEQ ID NO: 162121 - RNA, 32 nt, Homo Sapiens
cgugguuucuugccuugauguacuggagcaau

SEQ ID NO: 162122 - RNA, 32 nt, Homo Sapiens
cauaggcccagugagaugcauucuugguuggc

SEQ ID NO: 162123 - RNA, 32 nt, Homo Sapiens
aauuguaugaaacuuuuauauccuaauuuaaa

SEQ ID NO: 162124 - RNA, 31 nt, Homo Sapiens
gcugggucuauggucgcuccgcggccgcucc

SEQ ID NO: 162125 - RNA, 32 nt, Homo Sapiens
gggagucgagccagcgucgccgcgaugguguu

SEQ ID NO: 162126 - RNA, 32 nt, Homo Sapiens
gugaguauuuuauauuuagucuacacuuccau

SEQ ID NO: 162127 - RNA, 32 nt, Homo Sapiens
ccagguaugggccagcaguuuccugccagaua

SEQ ID NO: 162128 - RNA, 32 nt, Homo Sapiens
agcugugggugccccagccgccgcccaggacc

SEQ ID NO: 162129 - RNA, 32 nt, Homo Sapiens
ccgggccccggcccgcgcucaacgggcgcgau

SEQ ID NO: 162130 - RNA, 32 nt, Homo Sapiens
gaaugaugucauuuccuuaagugguuuguaac

SEQ ID NO: 162131 - RNA, 32 nt, Homo Sapiens
uccucauuugcaaggugaacacuuccuucuag

SEQ ID NO: 162132 - RNA, 32 nt, Homo Sapiens
auauucgauuuuuauaaagaugguaguaaguc

SEQ ID NO: 162133 - RNA, 32 nt, Homo Sapiens
cgcucgguuuucaccucgaggacccggacuug

SEQ ID NO: 162134 - RNA, 32 nt, Homo Sapiens
uaauuuuccaguuauacagucuucuauaacuu

SEQ ID NO: 162135 - RNA, 32 nt, Homo Sapiens
ccccuuccucugcggccaugacuccgccgccg

SEQ ID NO: 162136 - RNA, 31 nt, Homo Sapiens
ggcacgagggcggggaagauggcggaugaca

SEQ ID NO: 162137 - RNA, 32 nt, Homo Sapiens
cuaccccgaggcugcguaggccgcgcgaaggg

SEQ ID NO: 162138 - RNA, 32 nt, Homo Sapiens
cguggcgucgguccccgggccgagccgggggu

SEQ ID NO: 162139 - RNA, 32 nt, Homo Sapiens
auauagagacagaaguuuuuuguuguuguugu

SEQ ID NO: 162140 - RNA, 32 nt, Homo Sapiens
caacuucagaaagcagccaucccgcgugucgu

SEQ ID NO: 162141 - RNA, 32 nt, Homo Sapiens
ugcuguuccccugcagucccagccccgcgugg

SEQ ID NO: 162142 - RNA, 32 nt, Homo Sapiens
aacugcuuuuucuuuuccugcugaguacugcu

SEQ ID NO: 162143 - RNA, 32 nt, Homo Sapiens
cgcaggcaccccagcccuccaccucucucuac

SEQ ID NO: 162144 - RNA, 32 nt, Homo Sapiens
agucuuaugguucacaucuuguuuccuauaga

SEQ ID NO: 162145 - RNA, 32 nt, Homo Sapiens
gucuuuguuuucauaagaaaauuaaauuccag

SEQ ID NO: 162146 - RNA, 32 nt, Homo Sapiens
ccagaaaaggaagcuuuggagagaugggggaa

SEQ ID NO: 162147 - RNA, 32 nt, Homo Sapiens
agucacugcuaagagacagagcacauuuucag

SEQ ID NO: 162148 - RNA, 32 nt, Homo Sapiens
cauguuggugaugaaauucccagugguguuuc

SEQ ID NO: 162149 - RNA, 32 nt, Homo Sapiens
ucagcauuagcauuucugaggaccauuauuaa

SEQ ID NO: 162150 - RNA, 32 nt, Homo Sapiens
cugaugccugugugucauucucuucuuuucuu

SEQ ID NO: 162151 - RNA, 32 nt, Homo Sapiens
auucuugaucucucccaccccaucccucuccc

SEQ ID NO: 162152 - RNA, 32 nt, Homo Sapiens
gugccuggcaugugguaggagcucaguacaug

SEQ ID NO: 162153 - RNA, 32 nt, Homo Sapiens
augggaauuccauuuuaagaauuacuacaauu

SEQ ID NO: 162154 - RNA, 32 nt, Homo Sapiens
aaaaccuggaaauaauaagauaauaagaaaag

SEQ ID NO: 162155 - RNA, 32 nt, Homo Sapiens
gccaaggacugacuuugccaaaaauacaacac

SEQ ID NO: 162156 - RNA, 32 nt, Homo Sapiens
acgccuagcuaauuucuuuguauuuuugguag

SEQ ID NO: 162157 - RNA, 32 nt, Homo Sapiens
gccccagugucugaagaaaagaggcaguguac

SEQ ID NO: 162158 - RNA, 32 nt, Homo Sapiens
uaaauauggugauauauuuacaaguaaucugu

SEQ ID NO: 162159 - RNA, 32 nt, Homo Sapiens
aacuggcagaacuucugaaguuuagaauugga

SEQ ID NO: 162160 - RNA, 32 nt, Homo Sapiens
ucaagaguauucuaguguucucucuuuguuug

SEQ ID NO: 162161 - RNA, 32 nt, Homo Sapiens
gguuucugcccauuuuuuucauauccucugac

SEQ ID NO: 162162 - RNA, 32 nt, Homo Sapiens
agggugcagcgggcgcgucugcggcugguguu

SEQ ID NO: 162163 - RNA, 30 nt, Homo Sapiens
gagacaucacuugccaauguacauaccuug

SEQ ID NO: 162164 - RNA, 32 nt, Homo Sapiens
cccaggauauucggggacccgcaccggacagg

SEQ ID NO: 162165 - RNA, 32 nt, Homo Sapiens
ggauucugcgcggcgaggcaagaugcucaagu

SEQ ID NO: 162166 - RNA, 32 nt, Homo Sapiens
acuguuccccaugcgcacacacauacacacac

SEQ ID NO: 162167 - RNA, 32 nt, Homo Sapiens
caugccuuggagauugguuuuccaaucaacug

SEQ ID NO: 162168 - RNA, 32 nt, Homo Sapiens
aggagaggagaugccagggcugagugugagug

SEQ ID NO: 162169 - RNA, 32 nt, Homo Sapiens
cagcagggucccagcccacggccacacaugcu

SEQ ID NO: 162170 - RNA, 30 nt, Homo Sapiens
ggcaacuacggcggcggcgccggggcgaug

SEQ ID NO: 162171 - RNA, 32 nt, Homo Sapiens
guguuuaaugaaaucuugaaccccaggaauag

SEQ ID NO: 162172 - RNA, 32 nt, Homo Sapiens
ugcauugaugggcuguuggcugauugggguau

SEQ ID NO: 162173 - RNA, 31 nt, Homo Sapiens
ccucaggagccccagagcgcggagggcgcgg

SEQ ID NO: 162174 - RNA, 29 nt, Homo Sapiens
aggaugaugacaguuuauuuucuacacuu

SEQ ID NO: 162175 - RNA, 32 nt, Homo Sapiens
cagcaugccccucccgcccccaaauacgagau

SEQ ID NO: 162176 - RNA, 32 nt, Homo Sapiens
gacccggauuggcccugccccucccccuaccg

SEQ ID NO: 162177 - RNA, 32 nt, Homo Sapiens
aaaacaugucauucauuaaauguuguuuuuau

SEQ ID NO: 162178 - RNA, 32 nt, Homo Sapiens
ugaggacucccucucaggcccuggcuguuuac

SEQ ID NO: 162179 - RNA, 32 nt, Homo Sapiens
ugagcccagaaagcugaaggucuggugauagc

SEQ ID NO: 162180 - RNA, 32 nt, Homo Sapiens
uugugaaucuuuuaccugacaccacaaaaugg

SEQ ID NO: 162181 - RNA, 32 nt, Homo Sapiens
uauccaaaaugaaauaaacagaaggaccaaaa

SEQ ID NO: 162182 - RNA, 32 nt, Homo Sapiens
ucuguggcagcagcguuggcccggccccggga

SEQ ID NO: 162183 - RNA, 32 nt, Homo Sapiens
guuguuuggacuucuuccugugccagguccaa

SEQ ID NO: 162184 - RNA, 32 nt, Homo Sapiens
ggaaguguucuuccugccuuucugcuaggugu

SEQ ID NO: 162185 - RNA, 32 nt, Homo Sapiens
cucugaggauugggcacccuccccucaucuaa

SEQ ID NO: 162186 - RNA, 32 nt, Homo Sapiens
uuacagaggauacaucuauuuuuaucauuauu

SEQ ID NO: 162187 - RNA, 32 nt, Homo Sapiens
uaucaugucaaguaucaguuuaccacauauua

SEQ ID NO: 162188 - RNA, 32 nt, Homo Sapiens
gaccuucucuugaugaaauuuacaugguuucc

SEQ ID NO: 162189 - RNA, 32 nt, Homo Sapiens
ggcuagucucgaacgccugaccucaggugauc

SEQ ID NO: 162190 - RNA, 32 nt, Homo Sapiens
gaccuaaggccucucugccgcgcgcgcaggua

SEQ ID NO: 162191 - RNA, 32 nt, Homo Sapiens
ccacccuucacagauaaaauaugaugcuggca

SEQ ID NO: 162192 - RNA, 32 nt, Homo Sapiens
aacagauguauuacacuaacuguaaaaguagu

SEQ ID NO: 162193 - RNA, 32 nt, Homo Sapiens
uucuaggacaccuggauuggcuccaucacauc

SEQ ID NO: 162194 - RNA, 32 nt, Homo Sapiens
aaauauccaggacuuuuagaacuaggcuuuca

SEQ ID NO: 162195 - RNA, 32 nt, Homo Sapiens
acugucucgugcgggcagcugcgggcgcaccu

SEQ ID NO: 162196 - RNA, 32 nt, Homo Sapiens
uucaguggccucuggcuguagguuuuaaauuu

SEQ ID NO: 162197 - RNA, 29 nt, Homo Sapiens
aaucaugaguauuacagaggcaagccccc

SEQ ID NO: 162198 - RNA, 32 nt, Homo Sapiens
cccugcacuucacucugcuccuccccugccug

SEQ ID NO: 162199 - RNA, 32 nt, Homo Sapiens
gcggcgggcgcggggcgggcuguuuugcauua

SEQ ID NO: 162200 - RNA, 32 nt, Homo Sapiens
ggaggcagauaauuuuaaaauaaaguaaauaa

SEQ ID NO: 162201 - RNA, 32 nt, Homo Sapiens
gcuccaguggcuucuccuuucugucaagacuu

SEQ ID NO: 162202 - RNA, 32 nt, Homo Sapiens
ggcaugacugaaaucuaaucacuggaaaccau

SEQ ID NO: 162203 - RNA, 32 nt, Homo Sapiens
aacuuggcuccagccauugcggugguuucuag

SEQ ID NO: 162204 - RNA, 32 nt, Homo Sapiens
gagggcugcauuggggucuucugccuagggga

SEQ ID NO: 162205 - RNA, 32 nt, Homo Sapiens
ucuggaccuuuacagaagacguuugcugaccc

SEQ ID NO: 162206 - RNA, 32 nt, Homo Sapiens
aaauaaccacgcucagaagcucugcuaggacu

SEQ ID NO: 162207 - RNA, 32 nt, Homo Sapiens
uggcucagcucgcgcgcagccccugcucuuau

SEQ ID NO: 162208 - RNA, 32 nt, Homo Sapiens
ugccaucaugucacugcagagguaugaaaagg

SEQ ID NO: 162209 - RNA, 32 nt, Homo Sapiens
cugcucagccccacgcaggugcccaccggccu

SEQ ID NO: 162210 - RNA, 32 nt, Homo Sapiens
uaauauuuuuaaaaucuucauuauaaggcuau

SEQ ID NO: 162211 - RNA, 32 nt, Homo Sapiens
aauuuuauuuuuguuuguaagaagucaucuac

SEQ ID NO: 162212 - RNA, 32 nt, Homo Sapiens
gguaauaaaaauacauaaaaucuuaugauaga

SEQ ID NO: 162213 - RNA, 32 nt, Homo Sapiens
agaaaaucucuuagaagcaggugcuuggggaa

SEQ ID NO: 162214 - RNA, 32 nt, Homo Sapiens
guacagauguucuguacagaguaaugagaugu

SEQ ID NO: 162215 - RNA, 32 nt, Homo Sapiens
gguacugacuccagcccuuccagcccaaaucu

SEQ ID NO: 162216 - RNA, 32 nt, Homo Sapiens
cugaaaaguggaaucggagcuguuguauugcc

SEQ ID NO: 162217 - RNA, 32 nt, Homo Sapiens
acauaaccaauuuguaaugauuuuggaacugu

SEQ ID NO: 162218 - RNA, 28 nt, Homo Sapiens
agcagaguggcuagaaugaugucaccag

SEQ ID NO: 162219 - RNA, 32 nt, Homo Sapiens
augaaggccuagacgcaggaucuuuaauggaa

SEQ ID NO: 162220 - RNA, 32 nt, Homo Sapiens
gauuacgcuaguuuuucuuuguauuuuuaucu

SEQ ID NO: 162221 - RNA, 32 nt, Homo Sapiens
acacccugggguggcgcuggccaggcagcaga

SEQ ID NO: 162222 - RNA, 32 nt, Homo Sapiens
acauuaggaauucuccaauuaagggagaaaaa

SEQ ID NO: 162223 - RNA, 32 nt, Homo Sapiens
ggaauaauacaacaaaaagauaccagauuuau

SEQ ID NO: 162224 - RNA, 32 nt, Homo Sapiens
gggaggccggggagcggcaggggcauguggau

SEQ ID NO: 162225 - RNA, 32 nt, Homo Sapiens
uuuuccagaugaauagaaaacaucccacccac

SEQ ID NO: 162226 - RNA, 32 nt, Homo Sapiens
gucacugguguuccucacccaccagcuguaac

SEQ ID NO: 162227 - RNA, 30 nt, Homo Sapiens
guagaugucuguguccucggaggcugagcu

SEQ ID NO: 162228 - RNA, 32 nt, Homo Sapiens
acugcccacgggggcgugggagccaguguggg

SEQ ID NO: 162229 - RNA, 32 nt, Homo Sapiens
cgccucccgucccgucgccgcccuaggccugc

SEQ ID NO: 162230 - RNA, 32 nt, Homo Sapiens
gcagagcagggccaucauggucagcccuugug

SEQ ID NO: 162231 - RNA, 32 nt, Homo Sapiens
uagcaaagggaccaaacugaaaaggugacaau

SEQ ID NO: 162232 - RNA, 32 nt, Homo Sapiens
ggucaccggcgcccgacccgagcgcgcccaga

SEQ ID NO: 162233 - RNA, 32 nt, Homo Sapiens
aaauuuucuaacuuguuuuuauuuugaagacu

SEQ ID NO: 162234 - RNA, 31 nt, Homo Sapiens
aucucuuuugugcuggguucaguggcucuuc

SEQ ID NO: 162235 - RNA, 32 nt, Homo Sapiens
gaaauuuuucuuuuucagaagacagaacacag

SEQ ID NO: 162236 - RNA, 32 nt, Homo Sapiens
uaaauguaaaauuaaggcaacucaugaauauu

SEQ ID NO: 162237 - RNA, 32 nt, Homo Sapiens
gguagggguguguagauggagaaaauguaccu

SEQ ID NO: 162238 - RNA, 32 nt, Homo Sapiens
ucacuuggaaugauucuuaauacaaaacaaug

SEQ ID NO: 162239 - RNA, 32 nt, Homo Sapiens
uuaagucccugggcugccccuuggggugcccc

SEQ ID NO: 162240 - RNA, 32 nt, Homo Sapiens
agaggccagagcccaggcaggauacagcaccg

SEQ ID NO: 162241 - RNA, 32 nt, Homo Sapiens
uuuagucgccuuuauugcuuucugggguaggg

SEQ ID NO: 162242 - RNA, 32 nt, Homo Sapiens
ccccggcccgcaccauggcacgguucggcuug

SEQ ID NO: 162243 - RNA, 32 nt, Homo Sapiens
cgguccgcgccggcgucagucugggauuggcc

SEQ ID NO: 162244 - RNA, 32 nt, Homo Sapiens
gauguuucaugggcccggggccccccagggaa

SEQ ID NO: 162245 - RNA, 32 nt, Homo Sapiens
uccacccucuucccuucgcagcugugaauccu

SEQ ID NO: 162246 - RNA, 31 nt, Homo Sapiens
guuauggggaugaugagccgcacagaccuca

SEQ ID NO: 162247 - RNA, 32 nt, Homo Sapiens
ggcagcgacaacaccgacacugagggcuccua

SEQ ID NO: 162248 - RNA, 32 nt, Homo Sapiens
ggggaaacggguuggaauuuguagccauggaa

SEQ ID NO: 162249 - RNA, 30 nt, Homo Sapiens
gagaugugugcagagugagaccucuggccu

SEQ ID NO: 162250 - RNA, 32 nt, Homo Sapiens
uuucuuguauaaauaaaaucuuguugggucug

SEQ ID NO: 162251 - RNA, 32 nt, Homo Sapiens
ucuggcgugcuuucuuuuucucuucgccgucu

SEQ ID NO: 162252 - RNA, 31 nt, Homo Sapiens
uauaggagggcggggugaccccucacccgcu

SEQ ID NO: 162253 - RNA, 32 nt, Homo Sapiens
ugguaacaugggcuucugucauuuucugaaca

SEQ ID NO: 162254 - RNA, 32 nt, Homo Sapiens
gaugugaccuaggaugauggaccgccggacuc

SEQ ID NO: 162255 - RNA, 32 nt, Homo Sapiens
ugcugcgcgggccccgccagccacccaagaug

SEQ ID NO: 162256 - RNA, 30 nt, Homo Sapiens
ccaugaggcaggcaggagccgcguaucugg

SEQ ID NO: 162257 - RNA, 32 nt, Homo Sapiens
ccccacuuuggcauagagacaagcagcacugu

SEQ ID NO: 162258 - RNA, 32 nt, Homo Sapiens
cuuagagauggggcgagggggaggccaguguc

SEQ ID NO: 162259 - RNA, 32 nt, Homo Sapiens
cugagcugucuaaaaauauauuauacaaacua

SEQ ID NO: 162260 - RNA, 32 nt, Homo Sapiens
agacaucuagggaguccauacacaucagugag

SEQ ID NO: 162261 - RNA, 32 nt, Homo Sapiens
cauaacauuuuuccuguaugguaagacguauu

SEQ ID NO: 162262 - RNA, 32 nt, Homo Sapiens
uccaguccugaccaggccccagccggcaacuu

SEQ ID NO: 162263 - RNA, 32 nt, Homo Sapiens
agcuuaaacaccuuugcccuggcucugcauug

SEQ ID NO: 162264 - RNA, 32 nt, Homo Sapiens
aggaggaggaggagguuuaggucaagaagaag

SEQ ID NO: 162265 - RNA, 32 nt, Homo Sapiens
uggagucgucccgcggccgccggcggcaaggu

SEQ ID NO: 162266 - RNA, 32 nt, Homo Sapiens
cgacggcggcccgggacccgcgggcugugaac

SEQ ID NO: 162267 - RNA, 32 nt, Homo Sapiens
aauuagacauuaccaguaauuucaugucuacu

SEQ ID NO: 162268 - RNA, 32 nt, Homo Sapiens
cucugcuccugggagagcugcaucgccucagc

SEQ ID NO: 162269 - RNA, 32 nt, Homo Sapiens
uugagacuccagugagacgcuguuuucacccc

SEQ ID NO: 162270 - RNA, 32 nt, Homo Sapiens
cacuuauucuugcaucuuauuaauuuucuaug

SEQ ID NO: 162271 - RNA, 32 nt, Homo Sapiens
acugcccagagccccagagcacggcagugggc

SEQ ID NO: 162272 - RNA, 32 nt, Homo Sapiens
uucuacuuggacaacuaacacccacaguccuc

SEQ ID NO: 162273 - RNA, 32 nt, Homo Sapiens
cagugcaaagauugcaaagaguacaaaaccag

SEQ ID NO: 162274 - RNA, 32 nt, Homo Sapiens
gcucgucucggaacuccugaccucaggugauc

SEQ ID NO: 162275 - RNA, 32 nt, Homo Sapiens
uuuuuuuuuuuuuuuucuuuuuugguuaauuc

SEQ ID NO: 162276 - RNA, 32 nt, Homo Sapiens
aagauguuuucucagauaagcauucuaaguca

SEQ ID NO: 162277 - RNA, 32 nt, Homo Sapiens
aucaagaauuuaaugauuaaaauagcaugccu

SEQ ID NO: 162278 - RNA, 32 nt, Homo Sapiens
ggcuccuuacacgcauccucauuuuuggcuuc

SEQ ID NO: 162279 - RNA, 32 nt, Homo Sapiens
acucuggaggcacaagcuggcugccaugcuga

SEQ ID NO: 162280 - RNA, 32 nt, Homo Sapiens
ggagccgcaggagcugcagcucugccagcuug

SEQ ID NO: 162281 - RNA, 32 nt, Homo Sapiens
auuuuucauggauauguuuuuaucauuucaaa

SEQ ID NO: 162282 - RNA, 32 nt, Homo Sapiens
ggccuugguguuucuuuuuccacccugucuag

SEQ ID NO: 162283 - RNA, 32 nt, Homo Sapiens
uuucggguaguggaaaaccagcagccucccgc

SEQ ID NO: 162284 - RNA, 32 nt, Homo Sapiens
ggcgcgcggagcccgcgccggacugcgccucu

SEQ ID NO: 162285 - RNA, 32 nt, Homo Sapiens
uaucagagaaucuggaacacaaaugggagacg

SEQ ID NO: 162286 - RNA, 32 nt, Homo Sapiens
aacuugcaggugcacaaaauaagagggccaca

SEQ ID NO: 162287 - RNA, 32 nt, Homo Sapiens
cuacccaaggacuuguuugcaaugcagaauca

SEQ ID NO: 162288 - RNA, 32 nt, Homo Sapiens
cguccuguccugccagcucugcugccaccucu

SEQ ID NO: 162289 - RNA, 32 nt, Homo Sapiens
gaugacucugcuuuaaagcgugucucucaucu

SEQ ID NO: 162290 - RNA, 32 nt, Homo Sapiens
uugucucacaaauuuuaacccauaucagaguu

SEQ ID NO: 162291 - RNA, 32 nt, Homo Sapiens
gucaagaagauaaguaauaaaagaggaaguca

SEQ ID NO: 162292 - RNA, 32 nt, Homo Sapiens
uccauuagacaggggucuugucuugcuacccu

SEQ ID NO: 162293 - RNA, 32 nt, Homo Sapiens
agcagcggaguuuuaaacuuuaaauagacagg

SEQ ID NO: 162294 - RNA, 32 nt, Homo Sapiens
ugggggaggugaaucacaaaaaaguuacgagg

SEQ ID NO: 162295 - RNA, 32 nt, Homo Sapiens
uuuaagguauuguaguuauuuacaaucagucu

SEQ ID NO: 162296 - RNA, 32 nt, Homo Sapiens
accaggcucccucccucccugugacauggccu

SEQ ID NO: 162297 - RNA, 32 nt, Homo Sapiens
gaggcugaagggaguggaucagagcacugccu

SEQ ID NO: 162298 - RNA, 32 nt, Homo Sapiens
agcccggcgaggggccucggggaggacgagga

SEQ ID NO: 162299 - RNA, 32 nt, Homo Sapiens
aaaaaugcuggguaauguaccugguaacaagc

SEQ ID NO: 162300 - RNA, 32 nt, Homo Sapiens
aggauuuagugucuuaggaaauuuuuuuaauu

SEQ ID NO: 162301 - RNA, 32 nt, Homo Sapiens
ggugccgugugagggccgggacgcuaacacag

SEQ ID NO: 162302 - RNA, 32 nt, Homo Sapiens
aagcaaccaacagguugccagccccggcgcca

SEQ ID NO: 162303 - RNA, 32 nt, Homo Sapiens
ugucuauggugcugcaccuugcuguuguacuu

SEQ ID NO: 162304 - RNA, 32 nt, Homo Sapiens
agcuucaguuugucuuuuuuuuuuuaaacuaa

SEQ ID NO: 162305 - RNA, 32 nt, Homo Sapiens
gaguuuaaaaauuuguguauguuacaucgcca

SEQ ID NO: 162306 - RNA, 32 nt, Homo Sapiens
aacaagacaaauaaaaagagaaauaaucaucu

SEQ ID NO: 162307 - RNA, 32 nt, Homo Sapiens
ccauagggaugggugaagccugccuggccugu

SEQ ID NO: 162308 - RNA, 32 nt, Homo Sapiens
uucuaaucccugcucugucacuaacaagcugc

SEQ ID NO: 162309 - RNA, 32 nt, Homo Sapiens
uuaaaaacuuauuucagauuuuucucaucugu

SEQ ID NO: 162310 - RNA, 32 nt, Homo Sapiens
guaggguuaguagguaggguucguagguaggg

SEQ ID NO: 162311 - RNA, 32 nt, Homo Sapiens
uguugauggaaauacacuguuaucuucacuuu

SEQ ID NO: 162312 - RNA, 32 nt, Homo Sapiens
uauuguguuccauuuuaacugggauaaauguu

SEQ ID NO: 162313 - RNA, 32 nt, Homo Sapiens
guggggagggcagcaccggaugccccacuggg

SEQ ID NO: 162314 - RNA, 32 nt, Homo Sapiens
ugagaacuggaaacgaguuuguacagaaguca

SEQ ID NO: 162315 - RNA, 32 nt, Homo Sapiens
uuucauugugaaauaucaugcucuuauuucag

SEQ ID NO: 162316 - RNA, 32 nt, Homo Sapiens
cacggcacuccagccugggugacagugagacu

SEQ ID NO: 162317 - RNA, 32 nt, Homo Sapiens
ggguuccagcccuccuaauaccucauauuccc

SEQ ID NO: 162318 - RNA, 32 nt, Homo Sapiens
cuaguuacagucagcaugggucuggcucaggu

SEQ ID NO: 162319 - RNA, 32 nt, Homo Sapiens
ggcuucacuucucugaccccagccucggccgu

SEQ ID NO: 162320 - RNA, 32 nt, Homo Sapiens
agaacccaguuaacaucuccaacaccaaacaa

SEQ ID NO: 162321 - RNA, 32 nt, Homo Sapiens
gcuuauaugcacuuuuuaaauauauacuauuu

SEQ ID NO: 162322 - RNA, 32 nt, Homo Sapiens
ugcucuguaccuccaacccccauuacccaccu

SEQ ID NO: 162323 - RNA, 32 nt, Homo Sapiens
ggcacgugggacuuauggaggacauaucagag

SEQ ID NO: 162324 - RNA, 32 nt, Homo Sapiens
uccugaggacagagacugcucuaccaauagau

SEQ ID NO: 162325 - RNA, 32 nt, Homo Sapiens
auaaauaaaaauuuauauuaagauguucaaaa

SEQ ID NO: 162326 - RNA, 32 nt, Homo Sapiens
cuacgagggccugguccacacgcuggccauug

SEQ ID NO: 162327 - RNA, 32 nt, Homo Sapiens
uguuguuuuuaaaauuuucaaucgaugcacau

SEQ ID NO: 162328 - RNA, 32 nt, Homo Sapiens
gauaacaaaguaccuaguaaaaacacugcauc

SEQ ID NO: 162329 - RNA, 32 nt, Homo Sapiens
ucuauugauaguuucauuuacaauuucaaaag

SEQ ID NO: 162330 - RNA, 32 nt, Homo Sapiens
gagcccugggacugggagugucugcuccucug

SEQ ID NO: 162331 - RNA, 32 nt, Homo Sapiens
auggugcaugcaucauucaaaauacacaggaa

SEQ ID NO: 162332 - RNA, 32 nt, Homo Sapiens
uggauuuggggauggggaaacaugcacaaaau

SEQ ID NO: 162333 - RNA, 32 nt, Homo Sapiens
cugaaguagaugguugagauaugaguucuucg

SEQ ID NO: 162334 - RNA, 32 nt, Homo Sapiens
uccuguuuccauaggaaggggcgacaccuucc

SEQ ID NO: 162335 - RNA, 32 nt, Homo Sapiens
gaaacuuguucuauuuuguggcagugacaaua

SEQ ID NO: 162336 - RNA, 32 nt, Homo Sapiens
acacggcuccgucgggcgccgcgcucuuccgg

SEQ ID NO: 162337 - RNA, 32 nt, Homo Sapiens
acacucagagccggcuggcccgggagcuccuu

SEQ ID NO: 162338 - RNA, 32 nt, Homo Sapiens
ucauuagauuuauguagguuggaacuuuguuc

SEQ ID NO: 162339 - RNA, 32 nt, Homo Sapiens
uucaaauaucccguguuaccuuucucuauuac

SEQ ID NO: 162340 - RNA, 32 nt, Homo Sapiens
uuacuguucaacauuuuuaacaaaaaacuaug

SEQ ID NO: 162341 - RNA, 32 nt, Homo Sapiens
uacacucaugucaaaaaucagagaggagagag

SEQ ID NO: 162342 - RNA, 32 nt, Homo Sapiens
cagauuuaaucagagaaaaauguacugauugg

SEQ ID NO: 162343 - RNA, 32 nt, Homo Sapiens
cuguagaccccaugagaaaagaugucuuaauc

SEQ ID NO: 162344 - RNA, 32 nt, Homo Sapiens
ggggugaggggaggcaucucccaccagcucua

SEQ ID NO: 162345 - RNA, 32 nt, Homo Sapiens
acaccagucuugccugagucuuucuccagcau

SEQ ID NO: 162346 - RNA, 32 nt, Homo Sapiens
cagggaggagcuucaagguaccccaagucccu

SEQ ID NO: 162347 - RNA, 32 nt, Homo Sapiens
uuuugguguaacaucuucaacaugucacacug

SEQ ID NO: 162348 - RNA, 32 nt, Homo Sapiens
gacaugggccagguuuuucaaaaggaauauaa

SEQ ID NO: 162349 - RNA, 32 nt, Homo Sapiens
guagucgaugaauugcuuuuuugacuuagaag

SEQ ID NO: 162350 - RNA, 32 nt, Homo Sapiens
aaaacaaacauaggaaaugugaaaauauuugu

SEQ ID NO: 162351 - RNA, 32 nt, Homo Sapiens
ugcaguccccuccauguuccccggcgccacua

SEQ ID NO: 162352 - RNA, 32 nt, Homo Sapiens
cguggaacugaggcagcuguauggaggccaau

SEQ ID NO: 162353 - RNA, 30 nt, Homo Sapiens
acucaaggaggugggggcagggaggaucac

SEQ ID NO: 162354 - RNA, 32 nt, Homo Sapiens
acacgccugccagaagcuggaggggugcugga

SEQ ID NO: 162355 - RNA, 32 nt, Homo Sapiens
gugauccgagcgagcggccgcggcccccgaug

SEQ ID NO: 162356 - RNA, 30 nt, Homo Sapiens
ucucaugucuuugcugcagaacugaagaga

SEQ ID NO: 162357 - RNA, 32 nt, Homo Sapiens
ccugcccccuggcccacccccacuuuccaggg

SEQ ID NO: 162358 - RNA, 32 nt, Homo Sapiens
ucuguguuuuaagggucuuucaauguuucuag

SEQ ID NO: 162359 - RNA, 27 nt, Homo Sapiens
auuauucucuucaucagccccucugca

SEQ ID NO: 162360 - RNA, 32 nt, Homo Sapiens
cgucuucuguguuuccuucauguguuagauau

SEQ ID NO: 162361 - RNA, 32 nt, Homo Sapiens
guucccccaaaauauauggugaagucuuaacc

SEQ ID NO: 162362 - RNA, 32 nt, Homo Sapiens
gagagggcugggaggaaaaguaguucaucuag

SEQ ID NO: 162363 - RNA, 32 nt, Homo Sapiens
aaagaccugaccgucccccagcccgacacccg

SEQ ID NO: 162364 - RNA, 32 nt, Homo Sapiens
aguagccaugccgaggccggggcccccacccc

SEQ ID NO: 162365 - RNA, 32 nt, Homo Sapiens
cuaugacaacauuuuuuuuucuuaaugguucc

SEQ ID NO: 162366 - RNA, 28 nt, Homo Sapiens
ucaauguuguuugcaauguguuuucugg

SEQ ID NO: 162367 - RNA, 32 nt, Homo Sapiens
aguacagauaaaggcugccauaaagaauggga

SEQ ID NO: 162368 - RNA, 32 nt, Homo Sapiens
uggguuugacagucccuuuguacacacugcua

SEQ ID NO: 162369 - RNA, 32 nt, Homo Sapiens
uccagcgcuugggccacggcggcggcccuggg

SEQ ID NO: 162370 - RNA, 32 nt, Homo Sapiens
guucaccagcccuccccuccccagggucauag

SEQ ID NO: 162371 - RNA, 28 nt, Homo Sapiens
cgccauuugcugccgccgagcguggacg

SEQ ID NO: 162372 - RNA, 32 nt, Homo Sapiens
ccacagugcugcuccccacaccuagccuuugu

SEQ ID NO: 162373 - RNA, 32 nt, Homo Sapiens
accgggaaggguggaggcagguuagaaaaaua

SEQ ID NO: 162374 - RNA, 32 nt, Homo Sapiens
gaaaaaaagcaguuaaauuugauggcauauca

SEQ ID NO: 162375 - RNA, 32 nt, Homo Sapiens
acaaaauaauuuuaauguauuaacucauacug

SEQ ID NO: 162376 - RNA, 32 nt, Homo Sapiens
ucgcccauacccaugacaguggcugagaaggg

SEQ ID NO: 162377 - RNA, 32 nt, Homo Sapiens
cacuaauggcagacuaggacaagcauuaccca

SEQ ID NO: 162378 - RNA, 32 nt, Homo Sapiens
gaggcugggacccaccugggggaguggcugcu

SEQ ID NO: 162379 - RNA, 32 nt, Homo Sapiens
accauuauuaaccugauguggucugcuuaaaa

SEQ ID NO: 162380 - RNA, 32 nt, Homo Sapiens
agucacagagggcaaauacgccaggcggccgc

SEQ ID NO: 162381 - RNA, 32 nt, Homo Sapiens
ccgccucucgcgggcucugggcucuuucucac

SEQ ID NO: 162382 - RNA, 32 nt, Homo Sapiens
uugcuccuuucugcccguggacgccgccgaag

SEQ ID NO: 162383 - RNA, 32 nt, Homo Sapiens
augaucugucuccagccccuuccuucugccca

SEQ ID NO: 162384 - RNA, 32 nt, Homo Sapiens
accccugaccucaucaccugugcagccaugga

SEQ ID NO: 162385 - RNA, 32 nt, Homo Sapiens
gacagccagcucccccucccaaggcugugcgu

SEQ ID NO: 162386 - RNA, 30 nt, Homo Sapiens
gccacacgcgguggcaugcauggaggacuc

SEQ ID NO: 162387 - RNA, 32 nt, Homo Sapiens
auucuuagcucacaggccauggagaagcuggu

SEQ ID NO: 162388 - RNA, 32 nt, Homo Sapiens
ccccacugucacuguguugaaaacagagacuu

SEQ ID NO: 162389 - RNA, 32 nt, Homo Sapiens
agacacaagcuucagcagcaucggaaauuucc

SEQ ID NO: 162390 - RNA, 32 nt, Homo Sapiens
cgagcuccgagcugucuccgcggccucgcgcc

SEQ ID NO: 162391 - RNA, 32 nt, Homo Sapiens
gcacaccauggcggccccugcccagcagacua

SEQ ID NO: 162392 - RNA, 32 nt, Homo Sapiens
agcaacaugauaauuuauguaacugauagcuu

SEQ ID NO: 162393 - RNA, 32 nt, Homo Sapiens
aggcugcaaggauguggguucuuccaggugug

SEQ ID NO: 162394 - RNA, 32 nt, Homo Sapiens
uuagaagagcuaccuuuuuuuuuuuuuuuccc

SEQ ID NO: 162395 - RNA, 32 nt, Homo Sapiens
ggaaaccacauggcuucaccuguccccgaaac

SEQ ID NO: 162396 - RNA, 32 nt, Homo Sapiens
ggugugggauugaguucucugcuuuguuuuuu

SEQ ID NO: 162397 - RNA, 32 nt, Homo Sapiens
ugagggaauagucuugcacauuuuuucauuuc

SEQ ID NO: 162398 - RNA, 32 nt, Homo Sapiens
aaccacuccagcccagcuccaccucagccuug

SEQ ID NO: 162399 - RNA, 32 nt, Homo Sapiens
uugggaaguauuugucaaaauggucauccugg

SEQ ID NO: 162400 - RNA, 32 nt, Homo Sapiens
aacagugcccaggaggcuggcuccucaagcua

SEQ ID NO: 162401 - RNA, 32 nt, Homo Sapiens
aguuacaauuccaauccuguuguuuucaagga

SEQ ID NO: 162402 - RNA, 32 nt, Homo Sapiens
uuggcccucggagcgcagcacccggcggacaa

SEQ ID NO: 162403 - RNA, 32 nt, Homo Sapiens
gcuccacagcuucccaccuccuccccaccaaa

SEQ ID NO: 162404 - RNA, 32 nt, Homo Sapiens
aaaccaaauggcagcuguugagaaucucaaua

SEQ ID NO: 162405 - RNA, 32 nt, Homo Sapiens
uguggugggagaauggcugagaacagugaucu

SEQ ID NO: 162406 - RNA, 32 nt, Homo Sapiens
gcccacacaacacuuaaggacaggucugaccc

SEQ ID NO: 162407 - RNA, 32 nt, Homo Sapiens
gcucucaucucccccauuccugugccuacuuu

SEQ ID NO: 162408 - RNA, 32 nt, Homo Sapiens
uuuuaaaucuucugucucccuguuuuucuaau

SEQ ID NO: 162409 - RNA, 32 nt, Homo Sapiens
gaaggaaagggaggggcccuggaggagaggcu

SEQ ID NO: 162410 - RNA, 32 nt, Homo Sapiens
gagcagccgccagcugggagcacuggugugaa

SEQ ID NO: 162411 - RNA, 32 nt, Homo Sapiens
guauuuuuguuuagaagaacuauuucaugcgc

SEQ ID NO: 162412 - RNA, 32 nt, Homo Sapiens
gguuccugccuuucccagacgaccgugcugag

SEQ ID NO: 162413 - RNA, 32 nt, Homo Sapiens
cuugguuaaggggaaaucauggcuuguucucu

SEQ ID NO: 162414 - RNA, 32 nt, Homo Sapiens
ucucgagaacagauucuccccuccaguauggg

SEQ ID NO: 162415 - RNA, 32 nt, Homo Sapiens
cacauagccuuauuagcaaaaguuuuaagaaa

SEQ ID NO: 162416 - RNA, 32 nt, Homo Sapiens
acuguuugcagagagucagggaggcggaaaag

SEQ ID NO: 162417 - RNA, 32 nt, Homo Sapiens
guuuuuaaauuaauaaagugugucaccauuag

SEQ ID NO: 162418 - RNA, 32 nt, Homo Sapiens
gacuguguuucuccauuuccacagccaaaugg

SEQ ID NO: 162419 - RNA, 32 nt, Homo Sapiens
acagucccaaccccauuuccucucccuguugu

SEQ ID NO: 162420 - RNA, 32 nt, Homo Sapiens
gagcugcgcgccuacgcgggaccuguguccga

SEQ ID NO: 162421 - RNA, 32 nt, Homo Sapiens
aagucuuauugaccauaacucugugcacuugg

SEQ ID NO: 162422 - RNA, 32 nt, Homo Sapiens
cugccccuuucccuccucuccgcccaugaaaa

SEQ ID NO: 162423 - RNA, 32 nt, Homo Sapiens
aggacucugaagaugcacucucuguucaguuu

SEQ ID NO: 162424 - RNA, 32 nt, Homo Sapiens
gaaaauaguguuuuuaauauuccucuucagaa

SEQ ID NO: 162425 - RNA, 32 nt, Homo Sapiens
ccuugcuggacgggagggcucucuagcuccug

SEQ ID NO: 162426 - RNA, 32 nt, Homo Sapiens
aaaagauuggcuaaacaaaauuuuuuuuuuuu

SEQ ID NO: 162427 - RNA, 32 nt, Homo Sapiens
cugaccacauaaaagaaggcaaauucagacgu

SEQ ID NO: 162428 - RNA, 32 nt, Homo Sapiens
cagaaacugucaaauguaccauauuuguauua

SEQ ID NO: 162429 - RNA, 32 nt, Homo Sapiens
ugcugaucucuuaaaaucaugauccuuguguu

SEQ ID NO: 162430 - RNA, 32 nt, Homo Sapiens
gccgcgccgcuggccugcucauggggcugcgu

SEQ ID NO: 162431 - RNA, 32 nt, Homo Sapiens
agccugaccaacauggugaaaccccgucucua

SEQ ID NO: 162432 - RNA, 32 nt, Homo Sapiens
agccuggccaacauagugaaaccccgucucua

SEQ ID NO: 162433 - RNA, 32 nt, Homo Sapiens
uggcauaaagagcuucuguuuucuuuggcaaa

SEQ ID NO: 162434 - RNA, 32 nt, Homo Sapiens
acccgucugcaccuugcucugucccaccugcc

SEQ ID NO: 162435 - RNA, 32 nt, Homo Sapiens
aggggacgccgagacuccgugggagaagcuca

SEQ ID NO: 162436 - RNA, 32 nt, Homo Sapiens
cgcccugccuucuggggcaaagcggagagugg

SEQ ID NO: 162437 - RNA, 32 nt, Homo Sapiens
gaagcuguggagggccacgguggcguggcucu

SEQ ID NO: 162438 - RNA, 32 nt, Homo Sapiens
guuugcuguuuagccuucaguuugcuccgcug

SEQ ID NO: 162439 - RNA, 32 nt, Homo Sapiens
aggagccgggacgagagaggcugggguggugg

SEQ ID NO: 162440 - RNA, 32 nt, Homo Sapiens
gggauggaggacucaagggauguaagggauau

SEQ ID NO: 162441 - RNA, 32 nt, Homo Sapiens
ugaggauaaaaaggaaggagagaugaccccua

SEQ ID NO: 162442 - RNA, 32 nt, Homo Sapiens
ccacuuuugacugucauccauggaagagcucc

SEQ ID NO: 162443 - RNA, 32 nt, Homo Sapiens
gauuuucauauggcuuuuuuuucucuaaguuu

SEQ ID NO: 162444 - RNA, 32 nt, Homo Sapiens
guaguagaugcucaguaaauggucaaugaaag

SEQ ID NO: 162445 - RNA, 32 nt, Homo Sapiens
cucucgcuucaaguaggcgccaccccgggaug

SEQ ID NO: 162446 - RNA, 32 nt, Homo Sapiens
gccucagcaucgucugugccaugauaucuaua

SEQ ID NO: 162447 - RNA, 31 nt, Homo Sapiens
uaugcuacgugcucaaugaagugugacuuuu

SEQ ID NO: 162448 - RNA, 32 nt, Homo Sapiens
ggggcgggggguguuuccuggaccccaguccu

SEQ ID NO: 162449 - RNA, 32 nt, Homo Sapiens
ccacaggaggcugggggugcuacaggagguaa

SEQ ID NO: 162450 - RNA, 32 nt, Homo Sapiens
caggcagaggccaggaggagcaguaugugcac

SEQ ID NO: 162451 - RNA, 32 nt, Homo Sapiens
uuuggguuuucuucuuucuccuuuaagcacuu

SEQ ID NO: 162452 - RNA, 32 nt, Homo Sapiens
gcuucagugugucaagaagaccugaaagaucc

SEQ ID NO: 162453 - RNA, 32 nt, Homo Sapiens
ccuugauucuucuauauacauuuuauaauaaa

SEQ ID NO: 162454 - RNA, 32 nt, Homo Sapiens
cgaggcaccucccagacaccaaaugccucauc

SEQ ID NO: 162455 - RNA, 32 nt, Homo Sapiens
uucuacuggcugugaugaagugccagaauguc

SEQ ID NO: 162456 - RNA, 32 nt, Homo Sapiens
ugucuucucuacgugaugugacuaaauucugu

SEQ ID NO: 162457 - RNA, 32 nt, Homo Sapiens
uccuggguucucaaccucuuuggaaucuucuu

SEQ ID NO: 162458 - RNA, 31 nt, Homo Sapiens
cuguuauuugcauucuuuagaaacuugacua

SEQ ID NO: 162459 - RNA, 32 nt, Homo Sapiens
aagggaagagcguguagaacuguggccauacu

SEQ ID NO: 162460 - RNA, 32 nt, Homo Sapiens
ccaggggcugagcguuccuaggcgguuucggg

SEQ ID NO: 162461 - RNA, 32 nt, Homo Sapiens
cagugcuuuuuuguuucuuuuguuauuuuugg

SEQ ID NO: 162462 - RNA, 32 nt, Homo Sapiens
aauauuuauuuuauuuuuuuuuugggugucug

SEQ ID NO: 162463 - RNA, 32 nt, Homo Sapiens
ugggacacaacacagauaauuuuuucuuaagu

SEQ ID NO: 162464 - RNA, 32 nt, Homo Sapiens
agucugggcugagaccaguccuggccagggca

SEQ ID NO: 162465 - RNA, 32 nt, Homo Sapiens
gguccccgcgcgccauccgccacccuacugga

SEQ ID NO: 162466 - RNA, 32 nt, Homo Sapiens
gucuuucaggaaaaauaauuauagcagcugau

SEQ ID NO: 162467 - RNA, 32 nt, Homo Sapiens
gcaacugaggccuccuaccaacagccaacaag

SEQ ID NO: 162468 - RNA, 32 nt, Homo Sapiens
uuggcuaaaagcuuuuauuguuugauguugug

SEQ ID NO: 162469 - RNA, 32 nt, Homo Sapiens
ugggccuucagcgcggguccuggugcugcggc

SEQ ID NO: 162470 - RNA, 32 nt, Homo Sapiens
cgccggacgccggggggcgccucgcugcaacu

SEQ ID NO: 162471 - RNA, 32 nt, Homo Sapiens
aaaccuaaauggaaaauaaauuccuaaaucug

SEQ ID NO: 162472 - RNA, 32 nt, Homo Sapiens
cuaauuuauagcauguauccuuucaucaaggg

SEQ ID NO: 162473 - RNA, 32 nt, Homo Sapiens
aaaauuugauucauauaauggcaacggccuag

SEQ ID NO: 162474 - RNA, 32 nt, Homo Sapiens
agaugguccgaacaaucaccccugccccaugc

SEQ ID NO: 162475 - RNA, 32 nt, Homo Sapiens
gaguuucgcuguugucacccaggcuggagugc

SEQ ID NO: 162476 - RNA, 29 nt, Homo Sapiens
gaacagucauaugagaaggaacuuuguca

SEQ ID NO: 162477 - RNA, 32 nt, Homo Sapiens
auuugugauccggaauuuugugagaaggauua

SEQ ID NO: 162478 - RNA, 32 nt, Homo Sapiens
acuccagucuggaugacagagagagacccugu

SEQ ID NO: 162479 - RNA, 32 nt, Homo Sapiens
ccguuuccugugccugcaccagcccugccccc

SEQ ID NO: 162480 - RNA, 32 nt, Homo Sapiens
acaaugaugaguccagggcagcagccaucaca

SEQ ID NO: 162481 - RNA, 32 nt, Homo Sapiens
aggcaugucccauccccaugcacaugugguaa

SEQ ID NO: 162482 - RNA, 32 nt, Homo Sapiens
cccugcgcggccccgcugagccucggugcggc

SEQ ID NO: 162483 - RNA, 32 nt, Homo Sapiens
ggcccggugcuuguccucccccucccaccucu

SEQ ID NO: 162484 - RNA, 32 nt, Homo Sapiens
cagcaggacaccuucuuuccacgcuuuccagc

SEQ ID NO: 162485 - RNA, 27 nt, Homo Sapiens
cauuucuccuucuuacaguuuccuugu

SEQ ID NO: 162486 - RNA, 32 nt, Homo Sapiens
ucgguaaagcucgugggaccccauugggggaa

SEQ ID NO: 162487 - RNA, 31 nt, Homo Sapiens
cuuaccccgccaggcgccggaguccacgcuc

SEQ ID NO: 162488 - RNA, 32 nt, Homo Sapiens
gucauggagcgauguagaagcaugcaaaagga

SEQ ID NO: 162489 - RNA, 32 nt, Homo Sapiens
gcggguccuggugguuucuguuuucugaagga

SEQ ID NO: 162490 - RNA, 32 nt, Homo Sapiens
guuuucgggaggaggcggagggcgcaaagcga

SEQ ID NO: 162491 - RNA, 32 nt, Homo Sapiens
cagauucugaccagccaggcccuaagaaaaaa

SEQ ID NO: 162492 - RNA, 32 nt, Homo Sapiens
gucuuccgagaccaccuggggccauccagcca

SEQ ID NO: 162493 - RNA, 32 nt, Homo Sapiens
accccagacaugcugcugcugcugcugccccu

SEQ ID NO: 162494 - RNA, 32 nt, Homo Sapiens
auucucucugagugccugcaaaacgaauuuaa

SEQ ID NO: 162495 - RNA, 32 nt, Homo Sapiens
ccagucauggagcuaagaagugagucagagag

SEQ ID NO: 162496 - RNA, 32 nt, Homo Sapiens
ggggcacgagagcaccagggggguagugcgcu

SEQ ID NO: 162497 - RNA, 32 nt, Homo Sapiens
uccuuguuagaacuuugugcugcugaccacca

SEQ ID NO: 162498 - RNA, 32 nt, Homo Sapiens
auguugaaaaggaaagccucgguuugucuuga

SEQ ID NO: 162499 - RNA, 32 nt, Homo Sapiens
agccuccgcauccacacccccuuucugucccu

SEQ ID NO: 162500 - RNA, 32 nt, Homo Sapiens
ugagccaccaugcccagaugcuuuauaguaag

SEQ ID NO: 162501 - RNA, 32 nt, Homo Sapiens
gcucuuuuuuauucuuaauucuccaugaucac

SEQ ID NO: 162502 - RNA, 32 nt, Homo Sapiens
ucccuggaucucugaauauaugcaaaaagaag

SEQ ID NO: 162503 - RNA, 30 nt, Homo Sapiens
gguaaagaaaucauuagcaagaguaggaau

SEQ ID NO: 162504 - RNA, 32 nt, Homo Sapiens
ggguuguggugccucgggccaccuggacucga

SEQ ID NO: 162505 - RNA, 32 nt, Homo Sapiens
agcucauuuuugguaugaccaacucuauucau

SEQ ID NO: 162506 - RNA, 32 nt, Homo Sapiens
ugauuuucacuuugucuuaucuuucuuauagg

SEQ ID NO: 162507 - RNA, 32 nt, Homo Sapiens
ggaagcauuugacuaucuggaacuugugugug

SEQ ID NO: 162508 - RNA, 32 nt, Homo Sapiens
uaaaauggaaaguuaccaaauguagcacuaga

SEQ ID NO: 162509 - RNA, 32 nt, Homo Sapiens
ucagacauauccuaaaaagaggcagcugcccg

SEQ ID NO: 162510 - RNA, 28 nt, Homo Sapiens
gagguuguggggccgccgccgcggagca

SEQ ID NO: 162511 - RNA, 32 nt, Homo Sapiens
agacuaugcugaaacuaucgcucacauucuuu

SEQ ID NO: 162512 - RNA, 32 nt, Homo Sapiens
aaaugguaaaaugaacaugugcaguguuaaag

SEQ ID NO: 162513 - RNA, 32 nt, Homo Sapiens
uuagaucucguuagucugcauuccacagcuuc

SEQ ID NO: 162514 - RNA, 32 nt, Homo Sapiens
uuuaauaaaaacaauacaguggcuggaaagga

SEQ ID NO: 162515 - RNA, 32 nt, Homo Sapiens
ugggccucggccuugcaccgggacgccgaguu

SEQ ID NO: 162516 - RNA, 32 nt, Homo Sapiens
aacugacaggacagcucuguauuucauauuua

SEQ ID NO: 162517 - RNA, 32 nt, Homo Sapiens
aagcuggagagccacggagggggugggaaaga

SEQ ID NO: 162518 - RNA, 32 nt, Homo Sapiens
caugccccaucccaugcuguccauccauucuc

SEQ ID NO: 162519 - RNA, 32 nt, Homo Sapiens
ugggcucaugcaaaccagugcuugugggggug

SEQ ID NO: 162520 - RNA, 32 nt, Homo Sapiens
cugccaugaugauggaccgaagugaggcuuuu

SEQ ID NO: 162521 - RNA, 30 nt, Homo Sapiens
ccaggaugcgcugagccgccggggggcuga

SEQ ID NO: 162522 - RNA, 32 nt, Homo Sapiens
aagcacauaaaacuauacuaagcagugaguca

SEQ ID NO: 162523 - RNA, 32 nt, Homo Sapiens
gggagugcggagaggcgccggucgccacccgc

SEQ ID NO: 162524 - RNA, 32 nt, Homo Sapiens
cauuaagguuuguuguugaaucaacaguacuc

SEQ ID NO: 162525 - RNA, 32 nt, Homo Sapiens
cauaguuguuauuuuuaacaacuggucauccu

SEQ ID NO: 162526 - RNA, 30 nt, Homo Sapiens
aaauaaauaagugauucuaaugcugaaaaa

SEQ ID NO: 162527 - RNA, 32 nt, Homo Sapiens
ucaacugugaggaaacccuuauuuuucuuucu

SEQ ID NO: 162528 - RNA, 32 nt, Homo Sapiens
aucuccgccugccuaaggcucugagcaggucc

SEQ ID NO: 162529 - RNA, 32 nt, Homo Sapiens
agaagaggaggaggugggggcuggaggugcug

SEQ ID NO: 162530 - RNA, 32 nt, Homo Sapiens
guacuucugagaacuugcaccaugaaugggca

SEQ ID NO: 162531 - RNA, 32 nt, Homo Sapiens
uauucucacaugcauuuuaggcacuuuugaua

SEQ ID NO: 162532 - RNA, 31 nt, Homo Sapiens
cacacucuagggaauaauuccacuccagaga

SEQ ID NO: 162533 - RNA, 30 nt, Homo Sapiens
uucugcggcaggcggacagauccucggcgc

SEQ ID NO: 162534 - RNA, 32 nt, Homo Sapiens
aguugcgugucugcaagagagcauccuaucug

SEQ ID NO: 162535 - RNA, 32 nt, Homo Sapiens
acgggggcugggcaccaccagugugugggcag

SEQ ID NO: 162536 - RNA, 31 nt, Homo Sapiens
uccuuuuauauuucuuuucaagauuggauca

SEQ ID NO: 162537 - RNA, 32 nt, Homo Sapiens
acugggagccccacccccgccucuggauggac

SEQ ID NO: 162538 - RNA, 32 nt, Homo Sapiens
cuagaaccugaaaggcuuggaacuugcacccu

SEQ ID NO: 162539 - RNA, 32 nt, Homo Sapiens
aagauuuuaaguggucucuacacccaaauagu

SEQ ID NO: 162540 - RNA, 32 nt, Homo Sapiens
caaugguaagugugcccuuucauuuuaucacu

SEQ ID NO: 162541 - RNA, 32 nt, Homo Sapiens
augguuuaugugaauaggauuuucucaguugu

SEQ ID NO: 162542 - RNA, 32 nt, Homo Sapiens
uguaauuauuuuucagucuuuuucaaagauac

SEQ ID NO: 162543 - RNA, 32 nt, Homo Sapiens
gacaauguauuguaguccaucaucacucaaac

SEQ ID NO: 162544 - RNA, 32 nt, Homo Sapiens
ucuguccugugcugcauggguauuuagacugu

SEQ ID NO: 162545 - RNA, 32 nt, Homo Sapiens
acccuucugaaguuuugguuugaaauauuaua

SEQ ID NO: 162546 - RNA, 32 nt, Homo Sapiens
agccucccuauaauuuucuucaucucuugcua

SEQ ID NO: 162547 - RNA, 32 nt, Homo Sapiens
ucucuguucaucuauuuauuuaaauauuuauu

SEQ ID NO: 162548 - RNA, 32 nt, Homo Sapiens
cacuccgcuuccggccgcucucgcugcggccg

SEQ ID NO: 162549 - RNA, 32 nt, Homo Sapiens
gaggguggaggggcuguaaaucuugaagauua

SEQ ID NO: 162550 - RNA, 32 nt, Homo Sapiens
gcgccuccuuccugggcauccuggacaucgcg

SEQ ID NO: 162551 - RNA, 32 nt, Homo Sapiens
ugcauaguuaauggucauagacuuuauuccaa

SEQ ID NO: 162552 - RNA, 31 nt, Homo Sapiens
aauuuuauaaauaaaaucauguaguuugugg

SEQ ID NO: 162553 - RNA, 32 nt, Homo Sapiens
gagaggagugacugagcuucccucccgugugu

SEQ ID NO: 162554 - RNA, 32 nt, Homo Sapiens
ggcuaagccagcagauuguucuguugccgggc

SEQ ID NO: 162555 - RNA, 30 nt, Homo Sapiens
guuagagagaagcgagcugcucugucugac

SEQ ID NO: 162556 - RNA, 32 nt, Homo Sapiens
gaguccccgagccgccgcggcuucucgccuuu

SEQ ID NO: 162557 - RNA, 32 nt, Homo Sapiens
cagagcccccgcggcucuccucuucuucaucu

SEQ ID NO: 162558 - RNA, 32 nt, Homo Sapiens
caauucucacuuuguuuagauaccagaggggc

SEQ ID NO: 162559 - RNA, 31 nt, Homo Sapiens
ccggggcugucggucgcuacauauccaccuu

SEQ ID NO: 162560 - RNA, 32 nt, Homo Sapiens
gcaggcagggcucuccuggucuucccaucccc

SEQ ID NO: 162561 - RNA, 32 nt, Homo Sapiens
cucccaggggcuccauccucagcccucugccc

SEQ ID NO: 162562 - RNA, 32 nt, Homo Sapiens
cgccgccacccccuccccgcagcccucacccc

SEQ ID NO: 162563 - RNA, 32 nt, Homo Sapiens
uuaaagggaacaaauaauguuucauccuaugg

SEQ ID NO: 162564 - RNA, 32 nt, Homo Sapiens
aggagggugugagucagcucugucugaguggg

SEQ ID NO: 162565 - RNA, 32 nt, Homo Sapiens
ugacggggaaacaaaauuauucucugagaggg

SEQ ID NO: 162566 - RNA, 32 nt, Homo Sapiens
ccagcuggggcaaucugcuugggugcccuucc

SEQ ID NO: 162567 - RNA, 30 nt, Homo Sapiens
uaauucagcagucgcgcgggggccgguugc

SEQ ID NO: 162568 - RNA, 32 nt, Homo Sapiens
auagcgacuuugcgccccccagcccucgccuc

SEQ ID NO: 162569 - RNA, 32 nt, Homo Sapiens
cccuacagagaauggaauugagaguggagaca

SEQ ID NO: 162570 - RNA, 32 nt, Homo Sapiens
gggaagacagcggcgaguuuucugaagagaug

SEQ ID NO: 162571 - RNA, 32 nt, Homo Sapiens
gcaccaccacacuccagccugggugacagagu

SEQ ID NO: 162572 - RNA, 32 nt, Homo Sapiens
ugccagcagccugccuauggcuccagcugugc

SEQ ID NO: 162573 - RNA, 32 nt, Homo Sapiens
uuucccauuuuuaaaaauaacaauaaaguuuu

SEQ ID NO: 162574 - RNA, 32 nt, Homo Sapiens
cccccuguucggggcuggggcccccaggaacg

SEQ ID NO: 162575 - RNA, 30 nt, Homo Sapiens
uacgguucgcgccagcggccggcgcuaugg

SEQ ID NO: 162576 - RNA, 32 nt, Homo Sapiens
ugaagcacugugauucuguuucuacuggaaag

SEQ ID NO: 162577 - RNA, 32 nt, Homo Sapiens
gcgccccggaccugaccaccgcccccgccacc

SEQ ID NO: 162578 - RNA, 32 nt, Homo Sapiens
caggcccuggggagcuuuugcccacacacuuu

SEQ ID NO: 162579 - RNA, 32 nt, Homo Sapiens
cucuucaggacaacacugcacaauggcaucca

SEQ ID NO: 162580 - RNA, 32 nt, Homo Sapiens
cgcgcucauuuucugccgccagcagggcuucu

SEQ ID NO: 162581 - RNA, 32 nt, Homo Sapiens
uugcucaaagaaaauuauuuauuguuacagau

SEQ ID NO: 162582 - RNA, 31 nt, Homo Sapiens
cuccagcugccgggauuugggggucugggcc

SEQ ID NO: 162583 - RNA, 32 nt, Homo Sapiens
uggcgauggaggggcgggugaggcggcagcgg

SEQ ID NO: 162584 - RNA, 32 nt, Homo Sapiens
uuaaaucagagguggacacacggaggcaaggc

SEQ ID NO: 162585 - RNA, 32 nt, Homo Sapiens
uuuuuucaguuaguacuuuuugaaagggauau

SEQ ID NO: 162586 - RNA, 32 nt, Homo Sapiens
gggcagagccgccaagcuuuggggugcugagg

SEQ ID NO: 162587 - RNA, 32 nt, Homo Sapiens
agagaaaaaugaacauuccuauugcacaauga

SEQ ID NO: 162588 - RNA, 32 nt, Homo Sapiens
ggaguuuauugugacaacuaaauagcugagaa

SEQ ID NO: 162589 - RNA, 32 nt, Homo Sapiens
ugaggucugugaguggggagggggagauuuau

SEQ ID NO: 162590 - RNA, 32 nt, Homo Sapiens
ccggcugugcaguccuggguccuccuuucuga

SEQ ID NO: 162591 - RNA, 32 nt, Homo Sapiens
uaaguuucagaauuaauacauuuaacugaaua

SEQ ID NO: 162592 - RNA, 32 nt, Homo Sapiens
ggagauggcguucagaugcagauucuuguucc

SEQ ID NO: 162593 - RNA, 32 nt, Homo Sapiens
cugagccaggcucucgaggucccggcccucgc

SEQ ID NO: 162594 - RNA, 32 nt, Homo Sapiens
cgcgcucggccgcggaguccuggcagcagcgg

SEQ ID NO: 162595 - RNA, 32 nt, Homo Sapiens
guccacugcugagacagcggcucggggcuuuc

SEQ ID NO: 162596 - RNA, 32 nt, Homo Sapiens
cggugagggcgguggcgcccgcgggaccugcg

SEQ ID NO: 162597 - RNA, 32 nt, Homo Sapiens
ugccuuaguuuauuuaguguugcuauaaggaa

SEQ ID NO: 162598 - RNA, 32 nt, Homo Sapiens
guguaauauauguuuuuguaucaaaaacacuc

SEQ ID NO: 162599 - RNA, 32 nt, Homo Sapiens
uagcuauuuguccuggugcucucccucccacu

SEQ ID NO: 162600 - RNA, 32 nt, Homo Sapiens
cuuugccuaccuuuuacugccuuauccuggaa

SEQ ID NO: 162601 - RNA, 32 nt, Homo Sapiens
cugaacaagugaggcucuggguuccucauucc

SEQ ID NO: 162602 - RNA, 32 nt, Homo Sapiens
cguuaccggggcaaccgcggcgccuccuccgu

SEQ ID NO: 162603 - RNA, 32 nt, Homo Sapiens
cgugagccuuggugcuggcccaguguaccaca

SEQ ID NO: 162604 - RNA, 32 nt, Homo Sapiens
uggggucugaagaucagggucaguguggcuau

SEQ ID NO: 162605 - RNA, 32 nt, Homo Sapiens
auguuuuuauuuuuauugcuuuguauuuuugu

SEQ ID NO: 162606 - RNA, 32 nt, Homo Sapiens
auguacccuccuccccucuccuacugucauuc

SEQ ID NO: 162607 - RNA, 32 nt, Homo Sapiens
ggcaugaacccgggagguggaacuugcaguga

SEQ ID NO: 162608 - RNA, 29 nt, Homo Sapiens
uggaugaagauauuuuggaugauugcugu

SEQ ID NO: 162609 - RNA, 32 nt, Homo Sapiens
cugaaauuuuucccucacagucaguagcuuug

SEQ ID NO: 162610 - RNA, 32 nt, Homo Sapiens
ggaugaaggcuugucagcacuuccaguuuaga

SEQ ID NO: 162611 - RNA, 30 nt, Homo Sapiens
ucucuggcaacccugggggaaagaagcgaa

SEQ ID NO: 162612 - RNA, 32 nt, Homo Sapiens
ggaggaaaauuugauaagcaugagagaagacc

SEQ ID NO: 162613 - RNA, 32 nt, Homo Sapiens
cucauuuuauuaaaacagaaauuaaucuuaca

SEQ ID NO: 162614 - RNA, 32 nt, Homo Sapiens
uguuagaacaaaaauucuaauuaaaauaguua

SEQ ID NO: 162615 - RNA, 32 nt, Homo Sapiens
guccaguuugcuauggaaauaaaaggcauuga

SEQ ID NO: 162616 - RNA, 32 nt, Homo Sapiens
uaacagcagaaucauugcauuugguuuacuua

SEQ ID NO: 162617 - RNA, 32 nt, Homo Sapiens
ugcuuuuucccuaagcuguuugaaaguuacgc

SEQ ID NO: 162618 - RNA, 29 nt, Homo Sapiens
uaaauuggacauuuaacuugaucuccaaa

SEQ ID NO: 162619 - RNA, 32 nt, Homo Sapiens
uccccgacggccgcaccgcgggcuccucuggc

SEQ ID NO: 162620 - RNA, 32 nt, Homo Sapiens
cggggugcccauugcgcagagcguggccugga

SEQ ID NO: 162621 - RNA, 32 nt, Homo Sapiens
ugguuagauugugcagucagcacucuccagug

SEQ ID NO: 162622 - RNA, 32 nt, Homo Sapiens
agcugggcuauccugcccuugggagcacagac

SEQ ID NO: 162623 - RNA, 32 nt, Homo Sapiens
ccugugccugacgcuaugcuagaugcuggggu

SEQ ID NO: 162624 - RNA, 32 nt, Homo Sapiens
gucaccgugucugacaaaguguaacuuuaaaa

SEQ ID NO: 162625 - RNA, 32 nt, Homo Sapiens
ggccucugcacccuggagaugcggcugccucc

SEQ ID NO: 162626 - RNA, 32 nt, Homo Sapiens
gaagagugagagauggaacccgaagaagaaag

SEQ ID NO: 162627 - RNA, 32 nt, Homo Sapiens
acuugccugccagccuucagcaucaggaaagg

SEQ ID NO: 162628 - RNA, 32 nt, Homo Sapiens
agggaagaaaucaaguuaauguacuuucauuc

SEQ ID NO: 162629 - RNA, 32 nt, Homo Sapiens
gaguuucgcucuuguugcccaggcggaguaca

SEQ ID NO: 162630 - RNA, 31 nt, Homo Sapiens
gacugggcggccagccugcccuugcugucgc

SEQ ID NO: 162631 - RNA, 32 nt, Homo Sapiens
uuaacgaauuuuauuucuuuuuuaucugauca

SEQ ID NO: 162632 - RNA, 32 nt, Homo Sapiens
aaaugcccacuuuccaguuuggccuuaugcuu

SEQ ID NO: 162633 - RNA, 32 nt, Homo Sapiens
aggacagaggccugggucuccaggagaagcug

SEQ ID NO: 162634 - RNA, 32 nt, Homo Sapiens
cggugagccaaggucgcgccacugcacuccag

SEQ ID NO: 162635 - RNA, 32 nt, Homo Sapiens
ccaaagaccacucagaucauggcagugucugc

SEQ ID NO: 162636 - RNA, 32 nt, Homo Sapiens
gguuuugcuguaaaaaauguuucaaacugugc

SEQ ID NO: 162637 - RNA, 32 nt, Homo Sapiens
aaauguauauauaggcaaggaaagaaauacag

SEQ ID NO: 162638 - RNA, 32 nt, Homo Sapiens
caggcuuucucaagcccuccaucggccccacc

SEQ ID NO: 162639 - RNA, 32 nt, Homo Sapiens
uuguuuacauagggaacaauguuuauagucgu

SEQ ID NO: 162640 - RNA, 32 nt, Homo Sapiens
acccaggcccaccguggugcacgcaaaccacu

SEQ ID NO: 162641 - RNA, 32 nt, Homo Sapiens
uauuuuauaucacuuuuuuuuaaacaucccca

SEQ ID NO: 162642 - RNA, 32 nt, Homo Sapiens
ccaaaacuuguuuuacaggauuacaauuuuaa

SEQ ID NO: 162643 - RNA, 32 nt, Homo Sapiens
agaaaaguaugacuuuuauaugaaccccuucu

SEQ ID NO: 162644 - RNA, 32 nt, Homo Sapiens
acccaccccccgcuccacuccuguguuaaaga

SEQ ID NO: 162645 - RNA, 32 nt, Homo Sapiens
guggcaguaucugggcuuuuuccuccugucug

SEQ ID NO: 162646 - RNA, 32 nt, Homo Sapiens
caccauugccuuuguguagagaaauauuucuu

SEQ ID NO: 162647 - RNA, 32 nt, Homo Sapiens
cgucaugcugcugugccugcucugccaacucc

SEQ ID NO: 162648 - RNA, 32 nt, Homo Sapiens
uguauagcaucauuauuuuuagccuuuccugu

SEQ ID NO: 162649 - RNA, 32 nt, Homo Sapiens
uccaaggauggcucuucuaaccagaggcuggc

SEQ ID NO: 162650 - RNA, 32 nt, Homo Sapiens
ggagccccgcauggaccgcggcuuccgccggg

SEQ ID NO: 162651 - RNA, 32 nt, Homo Sapiens
gagaacacauucagaugcaagugaugaugagg

SEQ ID NO: 162652 - RNA, 30 nt, Homo Sapiens
gacagccuggcugcugcaggagcugggagc

SEQ ID NO: 162653 - RNA, 32 nt, Homo Sapiens
aaccagacugaccccuuacuauucacacagcc

SEQ ID NO: 162654 - RNA, 32 nt, Homo Sapiens
uggagcuagggucaagcccugagcagcuucac

SEQ ID NO: 162655 - RNA, 32 nt, Homo Sapiens
cucuuaggaaaugucuagaccuccauucuugg

SEQ ID NO: 162656 - RNA, 32 nt, Homo Sapiens
cgggggcagggagaggcuagaggggcaggaca

SEQ ID NO: 162657 - RNA, 32 nt, Homo Sapiens
gccccagcgcccagcccugcucuccgcgcucg

SEQ ID NO: 162658 - RNA, 32 nt, Homo Sapiens
ugagaggagccggcuguggagccccgcccgcc

SEQ ID NO: 162659 - RNA, 32 nt, Homo Sapiens
caugacucgccccucaccuggcguggagcugc

SEQ ID NO: 162660 - RNA, 32 nt, Homo Sapiens
guccauccugaccaaggagcggcggccagagg

SEQ ID NO: 162661 - RNA, 32 nt, Homo Sapiens
auaugugguuuuugugauucacccagaucugu

SEQ ID NO: 162662 - RNA, 32 nt, Homo Sapiens
ccuggggcuguucaaucuucugcauuugugag

SEQ ID NO: 162663 - RNA, 32 nt, Homo Sapiens
uuauuagucugcuguuucucugaaaaauuuua

SEQ ID NO: 162664 - RNA, 32 nt, Homo Sapiens
ugaagaaaaaguacaaugaacugcuuuuccuc

SEQ ID NO: 162665 - RNA, 32 nt, Homo Sapiens
uuugugaauauuuauuuuaauuuuaugaccaa

SEQ ID NO: 162666 - RNA, 32 nt, Homo Sapiens
uccccagaucugcuccuccccuuucacaggug

SEQ ID NO: 162667 - RNA, 32 nt, Homo Sapiens
gcgggagguggccacgcgcgccgucucauccu

SEQ ID NO: 162668 - RNA, 32 nt, Homo Sapiens
accauuuugcugccacaaaauuuucaucauca

SEQ ID NO: 162669 - RNA, 32 nt, Homo Sapiens
guucauugcacugacucugggaucucagcccu

SEQ ID NO: 162670 - RNA, 32 nt, Homo Sapiens
gaccgcccaagcagugccauguauccagcagc

SEQ ID NO: 162671 - RNA, 32 nt, Homo Sapiens
uagaauuuuuaaaagccacuuugauuuaguuu

SEQ ID NO: 162672 - RNA, 32 nt, Homo Sapiens
ugagccucacauuuuccaaauauugcuuaagc

SEQ ID NO: 162673 - RNA, 32 nt, Homo Sapiens
caaauuauaugguuauuuuuuauauuaccaca

SEQ ID NO: 162674 - RNA, 32 nt, Homo Sapiens
auagaagcccucuacagccugacuuucucucc

SEQ ID NO: 162675 - RNA, 32 nt, Homo Sapiens
gagcuaggaugaaaagugauuucauccuggua

SEQ ID NO: 162676 - RNA, 32 nt, Homo Sapiens
guggaaaacaaauauagauuuuaucugaaaaa

SEQ ID NO: 162677 - RNA, 32 nt, Homo Sapiens
gcacuguacaucuaaaaauauuacaguagaau

SEQ ID NO: 162678 - RNA, 32 nt, Homo Sapiens
uucauuuucugaaagcacuuuaaugauucccc

SEQ ID NO: 162679 - RNA, 32 nt, Homo Sapiens
gcuugucgcgcgcggcggcuguacgugagcuu

SEQ ID NO: 162680 - RNA, 32 nt, Homo Sapiens
guugguucacccuggcuuuaccucugguuaau

SEQ ID NO: 162681 - RNA, 32 nt, Homo Sapiens
cgcugcaaggacaaccggcugggguccuugcg

SEQ ID NO: 162682 - RNA, 32 nt, Homo Sapiens
agaagcagauccuggcccucccgcccccaccc

SEQ ID NO: 162683 - RNA, 32 nt, Homo Sapiens
cagaggaggucuuggcagagguccgcggggag

SEQ ID NO: 162684 - RNA, 32 nt, Homo Sapiens
cuguguucuguuccagcgaauugggaagucuc

SEQ ID NO: 162685 - RNA, 32 nt, Homo Sapiens
ugugaggaccucuggugagaggccagugcccu

SEQ ID NO: 162686 - RNA, 30 nt, Homo Sapiens
ggucugucuggauguggagaagcucugugu

SEQ ID NO: 162687 - RNA, 32 nt, Homo Sapiens
gcugaguucauggcuuuuuuuuguagccaguc

SEQ ID NO: 162688 - RNA, 32 nt, Homo Sapiens
gaaaaccuuucaucagaagucagcucuaauug

SEQ ID NO: 162689 - RNA, 32 nt, Homo Sapiens
cauagggaucagagggccuuguccuugaacac

SEQ ID NO: 162690 - RNA, 32 nt, Homo Sapiens
gcccaacaaaaauuuuuaaaaauuugaugauc

SEQ ID NO: 162691 - RNA, 32 nt, Homo Sapiens
cucccuggccacacgccuguucccagcaagug

SEQ ID NO: 162692 - RNA, 32 nt, Homo Sapiens
uugacugcuguaaagauauauauuuuuggguc

SEQ ID NO: 162693 - RNA, 28 nt, Homo Sapiens
ccgauguggaagaccccgagguggagug

SEQ ID NO: 162694 - RNA, 32 nt, Homo Sapiens
gagaacuaaauuaccaguuucuaaucauagau

SEQ ID NO: 162695 - RNA, 32 nt, Homo Sapiens
agagccaaagacugaugggaaccaccaggucc

SEQ ID NO: 162696 - RNA, 32 nt, Homo Sapiens
ccaacugcaggaaggucugugcucuggagcca

SEQ ID NO: 162697 - RNA, 32 nt, Homo Sapiens
uugcuaagauauauuugccuguaagauagcug

SEQ ID NO: 162698 - RNA, 32 nt, Homo Sapiens
ggcgcaucucaaaccgagcuggcagcuccagg

SEQ ID NO: 162699 - RNA, 32 nt, Homo Sapiens
ggcugugaggggcgggagcgcugcuggaaccc

SEQ ID NO: 162700 - RNA, 32 nt, Homo Sapiens
gagcaccucugaccucccuccacacagguuuu

SEQ ID NO: 162701 - RNA, 32 nt, Homo Sapiens
gccucaggcacgcccuugccuuguuuuggucu

SEQ ID NO: 162702 - RNA, 32 nt, Homo Sapiens
cgcgcaccuugaugugauaacgcacagcaggg

SEQ ID NO: 162703 - RNA, 32 nt, Homo Sapiens
gccccgcgcgccccuggccaugucuuuaaugc

SEQ ID NO: 162704 - RNA, 32 nt, Homo Sapiens
gagugcagcuaacaugaguaucaucagacuag

SEQ ID NO: 162705 - RNA, 32 nt, Homo Sapiens
guggggaccagggauacuaaacaucaucuagu

SEQ ID NO: 162706 - RNA, 30 nt, Homo Sapiens
uccaacuuacuucauauccaucuuaagugu

SEQ ID NO: 162707 - RNA, 32 nt, Homo Sapiens
uaauaugucaacuggcaauaauugaugcgaag

SEQ ID NO: 162708 - RNA, 32 nt, Homo Sapiens
aagguuuuauuuuucuuucucacauuggaaaa

SEQ ID NO: 162709 - RNA, 32 nt, Homo Sapiens
gcuucagccuggcacugcccagcccuccagcc

SEQ ID NO: 162710 - RNA, 32 nt, Homo Sapiens
gggcuaggugaccccuggggccucagaccucu

SEQ ID NO: 162711 - RNA, 32 nt, Homo Sapiens
ccggccccggggggugcgggccccauggagcu

SEQ ID NO: 162712 - RNA, 32 nt, Homo Sapiens
auuaaugcauauauuuccccugcuuguuguac

SEQ ID NO: 162713 - RNA, 32 nt, Homo Sapiens
cccuuggggcccaucucuggcuccuugcuuuu

SEQ ID NO: 162714 - RNA, 32 nt, Homo Sapiens
cgggucuggaggcacaaugcggggcugcagag

SEQ ID NO: 162715 - RNA, 32 nt, Homo Sapiens
ucugucuccagucuaccacuuccaccaaagac

SEQ ID NO: 162716 - RNA, 32 nt, Homo Sapiens
acucuagagcaucuugaccaaguugagaaggg

SEQ ID NO: 162717 - RNA, 32 nt, Homo Sapiens
ucaaacaugcuucuuuauuacucuguuaugac

SEQ ID NO: 162718 - RNA, 32 nt, Homo Sapiens
cauuuccaaaaauaccccaguguuucagaaca

SEQ ID NO: 162719 - RNA, 32 nt, Homo Sapiens
cuacggcgucaugggugagauccugcggcagg

SEQ ID NO: 162720 - RNA, 32 nt, Homo Sapiens
cuggccugcggagcugcaggggcaggcgaggc

SEQ ID NO: 162721 - RNA, 32 nt, Homo Sapiens
gccuggccagauuuuucuuuuauucuucuuuc

SEQ ID NO: 162722 - RNA, 32 nt, Homo Sapiens
gagccggccgcggcgcccucucuccguguggc

SEQ ID NO: 162723 - RNA, 32 nt, Homo Sapiens
uuuaccacaauuuuuaaaaaguuugaauagaa

SEQ ID NO: 162724 - RNA, 32 nt, Homo Sapiens
cuaaucucauuucacaugaaagaagaaguaua

SEQ ID NO: 162725 - RNA, 32 nt, Homo Sapiens
aauugugacaacauuaugugaauguuuuauua

SEQ ID NO: 162726 - RNA, 32 nt, Homo Sapiens
uggaucuaaugcgcagaggagguuggcccaga

SEQ ID NO: 162727 - RNA, 31 nt, Homo Sapiens
ggcagccucaaugggacguuugugaaugaca

SEQ ID NO: 162728 - RNA, 32 nt, Homo Sapiens
ugucuuuguccuuuuucuugcacuauaaaauu

SEQ ID NO: 162729 - RNA, 32 nt, Homo Sapiens
aacuacaucccauuuuauauuuccaauuguua

SEQ ID NO: 162730 - RNA, 32 nt, Homo Sapiens
cgccccugccagccgcccuggcccuggucacu

SEQ ID NO: 162731 - RNA, 32 nt, Homo Sapiens
cccuguaacucuaaauaaaauaaugaugugaa

SEQ ID NO: 162732 - RNA, 32 nt, Homo Sapiens
ggggguuccgauuugaagaccuugcuucucau

SEQ ID NO: 162733 - RNA, 32 nt, Homo Sapiens
uaauguuccucuccccgcgggugggggcgggg

SEQ ID NO: 162734 - RNA, 32 nt, Homo Sapiens
auaucguuuuuguuaaacugaauagaauugua

SEQ ID NO: 162735 - RNA, 32 nt, Homo Sapiens
aaggcaauauccucuugcccauggcuaugaug

SEQ ID NO: 162736 - RNA, 32 nt, Homo Sapiens
ugcuugcggaggacgcuuccuuccucagaugc

SEQ ID NO: 162737 - RNA, 32 nt, Homo Sapiens
auaaauaaauaaauaauacaaaaauuagccgg

SEQ ID NO: 162738 - RNA, 31 nt, Homo Sapiens
gggagccucugccaccugccccguguauccu

SEQ ID NO: 162739 - RNA, 31 nt, Homo Sapiens
aggacccggcacuccgaaccccgcgcagccu

SEQ ID NO: 162740 - RNA, 32 nt, Homo Sapiens
ggcucugcaguggcugggaggaccccggcgcu

SEQ ID NO: 162741 - RNA, 32 nt, Homo Sapiens
ggugugggcaucgcuacguguuuugggggcag

SEQ ID NO: 162742 - RNA, 32 nt, Homo Sapiens
ugacuccggcgugcacacacguacacacccac

SEQ ID NO: 162743 - RNA, 32 nt, Homo Sapiens
gugccgagggucuggagggagaagaauugacu

SEQ ID NO: 162744 - RNA, 32 nt, Homo Sapiens
ugacaccuaacaugagacguggcaugugagau

SEQ ID NO: 162745 - RNA, 32 nt, Homo Sapiens
ccagugcugcagugugcguggcgugggcaucc

SEQ ID NO: 162746 - RNA, 32 nt, Homo Sapiens
acguagacugaguuccccaucuagugacaccc

SEQ ID NO: 162747 - RNA, 32 nt, Homo Sapiens
guguaaaaucauacccauuccauuauguauug

SEQ ID NO: 162748 - RNA, 32 nt, Homo Sapiens
uuagcuggaaaacaagacuuucccagcuugua

SEQ ID NO: 162749 - RNA, 32 nt, Homo Sapiens
cacagccuccccacccaggaugaccccugggc

SEQ ID NO: 162750 - RNA, 32 nt, Homo Sapiens
aauggaaagggcuucuuagaccuugauggcug

SEQ ID NO: 162751 - RNA, 32 nt, Homo Sapiens
cuuaaucuuaaugucugguguuugucauggug

SEQ ID NO: 162752 - RNA, 32 nt, Homo Sapiens
uuucgcacuccagcggcugcuccuggcggcuc

SEQ ID NO: 162753 - RNA, 32 nt, Homo Sapiens
cuucagacccaggcagcccagcccuuuccaug

SEQ ID NO: 162754 - RNA, 32 nt, Homo Sapiens
gcgccaccggucccaccuccccgccccccgcu

SEQ ID NO: 162755 - RNA, 32 nt, Homo Sapiens
ugcagcucagguuucggggugcuugaggaggc

SEQ ID NO: 162756 - RNA, 32 nt, Homo Sapiens
ugccuuucuaaaaacccaaaauguaguucucu

SEQ ID NO: 162757 - RNA, 32 nt, Homo Sapiens
ggggugcaaaugcuaaugucaaacuugaguca

SEQ ID NO: 162758 - RNA, 32 nt, Homo Sapiens
gacgaaagcugauaugcaauggucuugggcaa

SEQ ID NO: 162759 - RNA, 32 nt, Homo Sapiens
uuuguaggauauuuggggauuccauaguguga

SEQ ID NO: 162760 - RNA, 32 nt, Homo Sapiens
aauugaucagugagacuaugaagagcacugac

SEQ ID NO: 162761 - RNA, 32 nt, Homo Sapiens
ccacgcccggcuaacuuuuuuauuuuuaacag

SEQ ID NO: 162762 - RNA, 32 nt, Homo Sapiens
guaaugugcagcauuaugguccaaucagauac

SEQ ID NO: 162763 - RNA, 31 nt, Homo Sapiens
cgcgccucuccccagaaccuaaaaggcaagc

SEQ ID NO: 162764 - RNA, 28 nt, Homo Sapiens
gucuggguggcuacuggagggccuugca

SEQ ID NO: 162765 - RNA, 32 nt, Homo Sapiens
cacggccaugaccccuccgaggcucuucuggg

SEQ ID NO: 162766 - RNA, 32 nt, Homo Sapiens
ucuauugcgucaguagcaacacugcccagagg

SEQ ID NO: 162767 - RNA, 32 nt, Homo Sapiens
gcaaugaaaaccagucugcgguuuagggguca

SEQ ID NO: 162768 - RNA, 32 nt, Homo Sapiens
auacaugcugccauuaaauaauaaaaaauuaa

SEQ ID NO: 162769 - RNA, 32 nt, Homo Sapiens
gccgccaacagggugucggugucgcagcggcg

SEQ ID NO: 162770 - RNA, 32 nt, Homo Sapiens
auuaugcuuuuguauauauauuuuguaugaug

SEQ ID NO: 162771 - RNA, 32 nt, Homo Sapiens
cccagaggagggcagcagaagggggugguguc

SEQ ID NO: 162772 - RNA, 32 nt, Homo Sapiens
cugaaagugauagagggaaacugagagaagua

SEQ ID NO: 162773 - RNA, 32 nt, Homo Sapiens
ggaaaaaugaauuauugacccaacaaagguug

SEQ ID NO: 162774 - RNA, 32 nt, Homo Sapiens
cucuuuaaugcauuuucuuaauucuuacaaug

SEQ ID NO: 162775 - RNA, 32 nt, Homo Sapiens
aggcacccagauuggcugaaaacuucuguguc

SEQ ID NO: 162776 - RNA, 32 nt, Homo Sapiens
ugcccaggaaguggccugcugcuugcugugcu

SEQ ID NO: 162777 - RNA, 32 nt, Homo Sapiens
uauucauucauccccuucuccuuuuggcagaa

SEQ ID NO: 162778 - RNA, 32 nt, Homo Sapiens
accucaguggcuuuucccuuaggcaggguugg

SEQ ID NO: 162779 - RNA, 32 nt, Homo Sapiens
cagauucaggcauuuucccccuuggcucucaa

SEQ ID NO: 162780 - RNA, 32 nt, Homo Sapiens
uuugggaggguggagggaggcaguguccuucc

SEQ ID NO: 162781 - RNA, 32 nt, Homo Sapiens
gauggcaagugggacguguuauggggccgcag

SEQ ID NO: 162782 - RNA, 32 nt, Homo Sapiens
augcauacuuuaacuucuauaguuuucuccuu

SEQ ID NO: 162783 - RNA, 32 nt, Homo Sapiens
uauauuuuuuaaagcauauuuuuucuugagca

SEQ ID NO: 162784 - RNA, 32 nt, Homo Sapiens
caggcccuggaggggcugcugcuccucaguug

SEQ ID NO: 162785 - RNA, 32 nt, Homo Sapiens
ugaccaagauaaaaagaaguauguaacccacu

SEQ ID NO: 162786 - RNA, 32 nt, Homo Sapiens
agccccugaccccaugucuccuggacucaggg

SEQ ID NO: 162787 - RNA, 32 nt, Homo Sapiens
gugcuagcgaggguucugggggugggucuugg

SEQ ID NO: 162788 - RNA, 32 nt, Homo Sapiens
agcacagggucucugcaggacugcgggagcca

SEQ ID NO: 162789 - RNA, 32 nt, Homo Sapiens
guauaagcauauaagugaaaagucuuauaagu

SEQ ID NO: 162790 - RNA, 32 nt, Homo Sapiens
cggaggacgcuccccgcacccggaggccgggg

SEQ ID NO: 162791 - RNA, 32 nt, Homo Sapiens
gaguagggagagcgaguuugggagcugggacu

SEQ ID NO: 162792 - RNA, 32 nt, Homo Sapiens
gcaggggggcugugccaaccuguucuuagagu

SEQ ID NO: 162793 - RNA, 32 nt, Homo Sapiens
aguccuguuuuuuauucagauugggaaaucca

SEQ ID NO: 162794 - RNA, 32 nt, Homo Sapiens
uccaagcggcccggaacccgcggcuucccugg

SEQ ID NO: 162795 - RNA, 32 nt, Homo Sapiens
uccuuaccccccagccccugcccaccuucagc

SEQ ID NO: 162796 - RNA, 32 nt, Homo Sapiens
ggucccgagugcuccgccgcccgccccgaccc

SEQ ID NO: 162797 - RNA, 32 nt, Homo Sapiens
uuuuauccccggagcgcuagggcccgccccuc

SEQ ID NO: 162798 - RNA, 32 nt, Homo Sapiens
uuacuagacugcuauggauaauaacaucuuga

SEQ ID NO: 162799 - RNA, 32 nt, Homo Sapiens
gcugauuggcuuacuuuuagauuuaaaguuac

SEQ ID NO: 162800 - RNA, 32 nt, Homo Sapiens
accccauccccucccaucccccggcgcgugug

SEQ ID NO: 162801 - RNA, 32 nt, Homo Sapiens
caagugagcuucgguacuccuggugcccgccc

SEQ ID NO: 162802 - RNA, 32 nt, Homo Sapiens
ucgccuucgcccgccuuucccgcggcugauuu

SEQ ID NO: 162803 - RNA, 32 nt, Homo Sapiens
ccugggucaggaguucgggaccaaucuggcca

SEQ ID NO: 162804 - RNA, 32 nt, Homo Sapiens
uuucgccguugaagaggaagggcaaaaccacu

SEQ ID NO: 162805 - RNA, 32 nt, Homo Sapiens
aggacuucuucugggaggcccuggacaugcug

SEQ ID NO: 162806 - RNA, 32 nt, Homo Sapiens
agaucucugcggcugcugauugguaaaggaag

SEQ ID NO: 162807 - RNA, 32 nt, Homo Sapiens
ucagaagaaauucuguguggcuucaagagacu

SEQ ID NO: 162808 - RNA, 32 nt, Homo Sapiens
uaaauuuuaaacaauauuacuaauugcccaaa

SEQ ID NO: 162809 - RNA, 32 nt, Homo Sapiens
ggcaagcuguaccagcagcuccuggggacgug

SEQ ID NO: 162810 - RNA, 32 nt, Homo Sapiens
cacccucaccugcacccuaggaccucacuggc

SEQ ID NO: 162811 - RNA, 32 nt, Homo Sapiens
gaaugaggggcaucagcccaccccaggcaccu

SEQ ID NO: 162812 - RNA, 32 nt, Homo Sapiens
acguucugauuguagauagccggcgccuuccu

SEQ ID NO: 162813 - RNA, 32 nt, Homo Sapiens
ggaucccggcgcccuaagaccccacgaccccg

SEQ ID NO: 162814 - RNA, 32 nt, Homo Sapiens
gauggggcccuguucugggggaccagcacugu

SEQ ID NO: 162815 - RNA, 32 nt, Homo Sapiens
agaugcuucuaaacccaucaccugcugucuuc

SEQ ID NO: 162816 - RNA, 32 nt, Homo Sapiens
aaagaaacacaagaaauuguuuccugguuuug

SEQ ID NO: 162817 - RNA, 32 nt, Homo Sapiens
agucuuguuuuugucuaacuugugugaugagu

SEQ ID NO: 162818 - RNA, 32 nt, Homo Sapiens
uaggauauagggcaguggcuauucacagaugu

SEQ ID NO: 162819 - RNA, 32 nt, Homo Sapiens
cagccuggguggcagagugagacccugucuca

SEQ ID NO: 162820 - RNA, 32 nt, Homo Sapiens
aaguccucaccucagcccccagcccccuuuug

SEQ ID NO: 162821 - RNA, 32 nt, Homo Sapiens
gaagacagaauuuggauuuggaaggcuugcaa

SEQ ID NO: 162822 - RNA, 30 nt, Homo Sapiens
gagucugucccugggggcggcaggacagca

SEQ ID NO: 162823 - RNA, 32 nt, Homo Sapiens
gacacuucacuacuccaggucucacuuucccc

SEQ ID NO: 162824 - RNA, 32 nt, Homo Sapiens
agcuuaaagcuaaagaagcuuguaagcagcuc

SEQ ID NO: 162825 - RNA, 32 nt, Homo Sapiens
gguuucuuggcugacauaguggauugagccaa

SEQ ID NO: 162826 - RNA, 32 nt, Homo Sapiens
uuccuuuauauuuuuauuuuuaucuccagugc

SEQ ID NO: 162827 - RNA, 32 nt, Homo Sapiens
gaggacgcgggagggugaaauguuuccagaga

SEQ ID NO: 162828 - RNA, 32 nt, Homo Sapiens
ucgccaaaugguuuuucuaucuuuucuucuuu

SEQ ID NO: 162829 - RNA, 32 nt, Homo Sapiens
uuguacacaccagagacccaucugaggucauc

SEQ ID NO: 162830 - RNA, 32 nt, Homo Sapiens
guagucggauuugaacaugugcaagagauuag

SEQ ID NO: 162831 - RNA, 32 nt, Homo Sapiens
uauuuuaccuuuuugauauaaaaucaagauau

SEQ ID NO: 162832 - RNA, 32 nt, Homo Sapiens
guggguucauuuccuuucuuuuuaagaacagg

SEQ ID NO: 162833 - RNA, 32 nt, Homo Sapiens
cugcucuuaggccccagguccaaugggcuagg

SEQ ID NO: 162834 - RNA, 32 nt, Homo Sapiens
cuugaccccuggacauuugcacugacuuuauc

SEQ ID NO: 162835 - RNA, 32 nt, Homo Sapiens
uuuuaugauuggugcuuuuuuaugcuucuccu

SEQ ID NO: 162836 - RNA, 32 nt, Homo Sapiens
aguguaaugguauaaugcccuuccaucacaca

SEQ ID NO: 162837 - RNA, 32 nt, Homo Sapiens
guguuuugaaauaaaacuuauauagcaauugu

SEQ ID NO: 162838 - RNA, 32 nt, Homo Sapiens
cucaguuaucuaaugucuuagaucaguggucc

SEQ ID NO: 162839 - RNA, 32 nt, Homo Sapiens
caaacccucugcuuguuucucuaacaugcacu

SEQ ID NO: 162840 - RNA, 32 nt, Homo Sapiens
cuguaaauaagagcuuuuguacuagcccagua

SEQ ID NO: 162841 - RNA, 32 nt, Homo Sapiens
uaacagcaggaaggacuuaagguguauaagaa

SEQ ID NO: 162842 - RNA, 32 nt, Homo Sapiens
auagaaguuggaauagugguuacuucugggug

SEQ ID NO: 162843 - RNA, 32 nt, Homo Sapiens
aaguugaggcugcagugagcugugauugugcc

SEQ ID NO: 162844 - RNA, 32 nt, Homo Sapiens
gagugagagaguucaggagaguagcaacaaaa

SEQ ID NO: 162845 - RNA, 32 nt, Homo Sapiens
gcaggacgucugggcuuuacgguucuagggac

SEQ ID NO: 162846 - RNA, 32 nt, Homo Sapiens
gcugaaauauaaaaauagcccaggcagguuug

SEQ ID NO: 162847 - RNA, 32 nt, Homo Sapiens
ggccgguaucuccggcagcuggcacgccaucg

SEQ ID NO: 162848 - RNA, 32 nt, Homo Sapiens
aggcuccagcugagcagagauuuuaaucagcu

SEQ ID NO: 162849 - RNA, 32 nt, Homo Sapiens
ggcaaugaaacacuuaauaaacucucaauaac

SEQ ID NO: 162850 - RNA, 32 nt, Homo Sapiens
auuucaaaaguacuacauugaaaauaaaccgg

SEQ ID NO: 162851 - RNA, 32 nt, Homo Sapiens
uuaggaccuuugcauuugauaaaaaaaaauau

SEQ ID NO: 162852 - RNA, 32 nt, Homo Sapiens
acagccuucagucuaauaaccuugaagugguu

SEQ ID NO: 162853 - RNA, 32 nt, Homo Sapiens
ggaggcagguggccacgacgaggucccgccgc

SEQ ID NO: 162854 - RNA, 32 nt, Homo Sapiens
gggaaggaacagaggcccugggcccuuccuau

SEQ ID NO: 162855 - RNA, 31 nt, Homo Sapiens
ggucgcugcugcagccaacccaguagccccc

SEQ ID NO: 162856 - RNA, 30 nt, Homo Sapiens
aacugggcgcccguccccagccccacgcac

SEQ ID NO: 162857 - RNA, 32 nt, Homo Sapiens
ugggcugggagugcuucuguccugcugacacc

SEQ ID NO: 162858 - RNA, 30 nt, Homo Sapiens
cccugguccugagcaggcggcagugaacag

SEQ ID NO: 162859 - RNA, 32 nt, Homo Sapiens
ggaacuggcggggcgcgugacccggcgaggcc

SEQ ID NO: 162860 - RNA, 32 nt, Homo Sapiens
acucccggggccaccaaacgggccccucucuc

SEQ ID NO: 162861 - RNA, 32 nt, Homo Sapiens
uauauauauaucuaucugguagaucacaugua

SEQ ID NO: 162862 - RNA, 32 nt, Homo Sapiens
agaaccccgcggggucugagcagcccagcgug

SEQ ID NO: 162863 - RNA, 32 nt, Homo Sapiens
uucucuccagcauccucggcaucagcaccaca

SEQ ID NO: 162864 - RNA, 32 nt, Homo Sapiens
acccaggaggcagagguugcagugcaccaaga

SEQ ID NO: 162865 - RNA, 32 nt, Homo Sapiens
accgcgugggucugacaagauguaccaggucc

SEQ ID NO: 162866 - RNA, 32 nt, Homo Sapiens
ucaccuugauucagaaccauuucagcuguuuc

SEQ ID NO: 162867 - RNA, 32 nt, Homo Sapiens
ucucuuggugccugcuggguugcaggggcagg

SEQ ID NO: 162868 - RNA, 32 nt, Homo Sapiens
aaaacuaaaacuuggaacuaagauagagaaga

SEQ ID NO: 162869 - RNA, 32 nt, Homo Sapiens
aucgucuccagagcuggauggugcuggguccc

SEQ ID NO: 162870 - RNA, 32 nt, Homo Sapiens
uguaacuccugucucccuaaaauguauaaaag

SEQ ID NO: 162871 - RNA, 32 nt, Homo Sapiens
cacuugcuaaaauuauuuauuuuguaaggaga

SEQ ID NO: 162872 - RNA, 32 nt, Homo Sapiens
cagucaacacagcaggcuccccggccccgggg

SEQ ID NO: 162873 - RNA, 32 nt, Homo Sapiens
ccaggagggggauggagaagggccuacauuuc

SEQ ID NO: 162874 - RNA, 30 nt, Homo Sapiens
caggcagguggaggcaggggucccgcuuuc

SEQ ID NO: 162875 - RNA, 32 nt, Homo Sapiens
caauuauugaggaggagguggcaccuagacuu

SEQ ID NO: 162876 - RNA, 32 nt, Homo Sapiens
ugagagagcccaggccacaggacaugcugcca

SEQ ID NO: 162877 - RNA, 32 nt, Homo Sapiens
agcauccccaugccgacgugcucaucucuagc

SEQ ID NO: 162878 - RNA, 32 nt, Homo Sapiens
uucuaaaugcaaacuuuaguuauuugaaguca

SEQ ID NO: 162879 - RNA, 32 nt, Homo Sapiens
uuucgccaaaaauuuauucaaauaauuacucc

SEQ ID NO: 162880 - RNA, 32 nt, Homo Sapiens
aaauuaauccgaaacuuuuaagguaacuggga

SEQ ID NO: 162881 - RNA, 32 nt, Homo Sapiens
acccuuauuauuauuauuuuaaacccugcucu

SEQ ID NO: 162882 - RNA, 32 nt, Homo Sapiens
gauccccgugcgcuccucaccccucuacagac

SEQ ID NO: 162883 - RNA, 32 nt, Homo Sapiens
agcgcuggucccaccuccuuccuuccaaacug

SEQ ID NO: 162884 - RNA, 32 nt, Homo Sapiens
uggacccugggguugccaccacgcuaagccaa

SEQ ID NO: 162885 - RNA, 32 nt, Homo Sapiens
cuccugugcagccgagggagaccugagugugg

SEQ ID NO: 162886 - RNA, 32 nt, Homo Sapiens
gauacugugauuccaaaauaaaucucauccaa

SEQ ID NO: 162887 - RNA, 32 nt, Homo Sapiens
gcuggggagugggaggcuccccugcccuccuu

SEQ ID NO: 162888 - RNA, 32 nt, Homo Sapiens
cgcacgcucaacuccugcuccuccucuucgca

SEQ ID NO: 162889 - RNA, 32 nt, Homo Sapiens
ucaagguguacuuauuucuccauuuuauagag

SEQ ID NO: 162890 - RNA, 32 nt, Homo Sapiens
gggggccggcccagcucucucaggauucagca

SEQ ID NO: 162891 - RNA, 32 nt, Homo Sapiens
ccaccaaggucccagggauccuccucugaggc

SEQ ID NO: 162892 - RNA, 32 nt, Homo Sapiens
augaaaagaaaacacaaccugccuggccgggc

SEQ ID NO: 162893 - RNA, 32 nt, Homo Sapiens
cgacagccccagcaggaucugcaucgucaucg

SEQ ID NO: 162894 - RNA, 32 nt, Homo Sapiens
gugucugaacucugcaucuauggacggugcuu

SEQ ID NO: 162895 - RNA, 30 nt, Homo Sapiens
guuccaggcgggcgcgcggcuuucucccca

SEQ ID NO: 162896 - RNA, 32 nt, Homo Sapiens
gauguguucaucuuggagggcgcgcggguacu

SEQ ID NO: 162897 - RNA, 32 nt, Homo Sapiens
gacagaagcaacuaccacaggggcuucagaag

SEQ ID NO: 162898 - RNA, 32 nt, Homo Sapiens
agcaaguuggcaugcaugagauauagaaaaaa

SEQ ID NO: 162899 - RNA, 32 nt, Homo Sapiens
ugauuugcuccuuaagcaagagauucacugcc

SEQ ID NO: 162900 - RNA, 32 nt, Homo Sapiens
aaaaaugcauuuugagauaguuuaauguaaau

SEQ ID NO: 162901 - RNA, 32 nt, Homo Sapiens
ggaaaaaagaucauuuuuauagcuuugcauuc

SEQ ID NO: 162902 - RNA, 32 nt, Homo Sapiens
ccaucccuucaaaaauacacuuguaaccaggu

SEQ ID NO: 162903 - RNA, 32 nt, Homo Sapiens
gcgcucggccccaccccgcccguaccugcacu

SEQ ID NO: 162904 - RNA, 32 nt, Homo Sapiens
gcgguugucggguuuggggcuggaggugaagc

SEQ ID NO: 162905 - RNA, 32 nt, Homo Sapiens
cagcgccgccuuuugugcugcggccgcggagc

SEQ ID NO: 162906 - RNA, 32 nt, Homo Sapiens
acuccuguuuuacaacaaacauguaaauacaa

SEQ ID NO: 162907 - RNA, 32 nt, Homo Sapiens
uagauccuaagagcuucuuggggauguagaac

SEQ ID NO: 162908 - RNA, 32 nt, Homo Sapiens
ucaacgugagaacccugggccagcggcaucag

SEQ ID NO: 162909 - RNA, 32 nt, Homo Sapiens
cgaagggagaugggacuacccaaacauuugcu

SEQ ID NO: 162910 - RNA, 32 nt, Homo Sapiens
gaggaaagcuggaaguccuggagggacagggu

SEQ ID NO: 162911 - RNA, 32 nt, Homo Sapiens
acgcggccucacaccgacuccucgguggacag

SEQ ID NO: 162912 - RNA, 32 nt, Homo Sapiens
uggagccgcacacggccccggcgcgccuggua

SEQ ID NO: 162913 - RNA, 32 nt, Homo Sapiens
cuuuugaacguuuuuucuuaucucugaggccu

SEQ ID NO: 162914 - RNA, 32 nt, Homo Sapiens
gaaggaaaaaauaauaauaaacugcuguucac

SEQ ID NO: 162915 - RNA, 32 nt, Homo Sapiens
uggcuggcuggaaggggaggggcgagagggcu

SEQ ID NO: 162916 - RNA, 32 nt, Homo Sapiens
uuuucuuuacacaaacagguaaucaaagagau

SEQ ID NO: 162917 - RNA, 32 nt, Homo Sapiens
gcagggcuggggcucaucuucagacacuccua

SEQ ID NO: 162918 - RNA, 32 nt, Homo Sapiens
cgcugagauggcgggggcgccgcgcggcggag

SEQ ID NO: 162919 - RNA, 32 nt, Homo Sapiens
ugucuuagauuuuuuucuuaaucaaguuuuuc

SEQ ID NO: 162920 - RNA, 32 nt, Homo Sapiens
ccgcgcccaucccccgccccagccccugacac

SEQ ID NO: 162921 - RNA, 32 nt, Homo Sapiens
gaagaugccaugauugugaauaaggccucuug

SEQ ID NO: 162922 - RNA, 32 nt, Homo Sapiens
acagauuaauaaaauauuugaaaaagaagcgu

SEQ ID NO: 162923 - RNA, 32 nt, Homo Sapiens
aaggcugugcuaauaaagugcuguaaaccaaa

SEQ ID NO: 162924 - RNA, 32 nt, Homo Sapiens
gcaaugccugggccuccugcuccagcucccau

SEQ ID NO: 162925 - RNA, 32 nt, Homo Sapiens
auagaaaugguauguauuaauaacugaucaua

SEQ ID NO: 162926 - RNA, 32 nt, Homo Sapiens
ucaggcccggcuuucgggcgcuugccgugcag

SEQ ID NO: 162927 - RNA, 32 nt, Homo Sapiens
ggcggagcucccagucgcauggagcgguguuc

SEQ ID NO: 162928 - RNA, 32 nt, Homo Sapiens
cuucaagcuggguuuguguagacaacucuguu

SEQ ID NO: 162929 - RNA, 32 nt, Homo Sapiens
accacugcccucuccuucuuucuccuucaagg

SEQ ID NO: 162930 - RNA, 32 nt, Homo Sapiens
caugcuucaauccugaacgucacugacuugcu

SEQ ID NO: 162931 - RNA, 32 nt, Homo Sapiens
uaugguaacucacguagugcuccaccuacacg

SEQ ID NO: 162932 - RNA, 32 nt, Homo Sapiens
cucuuucccuggagucggcggaccacagcuca

SEQ ID NO: 162933 - RNA, 32 nt, Homo Sapiens
uuuuuucuugaaguuauuuuccaauuguuuuc

SEQ ID NO: 162934 - RNA, 32 nt, Homo Sapiens
ccgccaccggcccaugagccccggccucaaag

SEQ ID NO: 162935 - RNA, 32 nt, Homo Sapiens
ugauaauggaccaaccucucaaggcuguugug

SEQ ID NO: 162936 - RNA, 32 nt, Homo Sapiens
uccuuguaugcaaaguuuuuguugaaagcugu

SEQ ID NO: 162937 - RNA, 32 nt, Homo Sapiens
uuuagagauaaugggcuuuguuagcacuuuca

SEQ ID NO: 162938 - RNA, 32 nt, Homo Sapiens
aaucuggcuuagagacacguccagucauagua

SEQ ID NO: 162939 - RNA, 32 nt, Homo Sapiens
uuaaguuuauaaguaacaucagguguuaugaa

SEQ ID NO: 162940 - RNA, 32 nt, Homo Sapiens
caguucuaacuguguugaauuguuuaaacagu

SEQ ID NO: 162941 - RNA, 32 nt, Homo Sapiens
cgggcacccagccccaggggggcgggcuggag

SEQ ID NO: 162942 - RNA, 32 nt, Homo Sapiens
ugucuaaggauuuaaauuacuaacuuaugaac

SEQ ID NO: 162943 - RNA, 32 nt, Homo Sapiens
aucaaagaugagaaagaaccagugcaaaaaac

SEQ ID NO: 162944 - RNA, 32 nt, Homo Sapiens
gccggcuuccuggaaaaccuccagguuucgca

SEQ ID NO: 162945 - RNA, 32 nt, Homo Sapiens
accugccggugacaucgucuccuucugagguc

SEQ ID NO: 162946 - RNA, 32 nt, Homo Sapiens
ucuucggucuccugccgcccccgggaagcgcg

SEQ ID NO: 162947 - RNA, 31 nt, Homo Sapiens
aaccucacaaagagaaauagaauguuugaaa

SEQ ID NO: 162948 - RNA, 32 nt, Homo Sapiens
acauauugacauuuccuggaguugguuuuguc

SEQ ID NO: 162949 - RNA, 32 nt, Homo Sapiens
ggugagcauuuccuuugcagcauuccaagagg

SEQ ID NO: 162950 - RNA, 31 nt, Homo Sapiens
gaggcggagccccgcgacugcccagcucacu

SEQ ID NO: 162951 - RNA, 32 nt, Homo Sapiens
ggugguuccuccaaaaauaauuggaccuguaa

SEQ ID NO: 162952 - RNA, 32 nt, Homo Sapiens
uuaauuuuaauuucuuuuuucuaagacagagu

SEQ ID NO: 162953 - RNA, 32 nt, Homo Sapiens
agacccugcaggccagaguccaaauauuuaac

SEQ ID NO: 162954 - RNA, 32 nt, Homo Sapiens
aagaugauccugaagaaaaaggugacaagaau

SEQ ID NO: 162955 - RNA, 32 nt, Homo Sapiens
gcucaguguacuuaaaauuuuacaguuauauu

SEQ ID NO: 162956 - RNA, 32 nt, Homo Sapiens
auaucugucuccgugggagaaaauagucagca

SEQ ID NO: 162957 - RNA, 32 nt, Homo Sapiens
acuuccaagaaauggggcuuuuuuacuauccc

SEQ ID NO: 162958 - RNA, 32 nt, Homo Sapiens
gaaauguggucucuuuccuacugagcacauau

SEQ ID NO: 162959 - RNA, 32 nt, Homo Sapiens
uuaaaaaaaaaaaaacaaaacaaaaccagcau

SEQ ID NO: 162960 - RNA, 32 nt, Homo Sapiens
agaauucagcuuaucugaauuauuuuccaaag

SEQ ID NO: 162961 - RNA, 32 nt, Homo Sapiens
agaugccuggcaggaugagccgcggcccccgg

SEQ ID NO: 162962 - RNA, 30 nt, Homo Sapiens
augugaugccagauacuaauagcacaauca

SEQ ID NO: 162963 - RNA, 32 nt, Homo Sapiens
uggacugggaggagggggagggugaugcauua

SEQ ID NO: 162964 - RNA, 32 nt, Homo Sapiens
guuuauuuucauauuucuuuacuguguuauuu

SEQ ID NO: 162965 - RNA, 32 nt, Homo Sapiens
ucgcucccagcacaccacggcccgcgaccuca

SEQ ID NO: 162966 - RNA, 32 nt, Homo Sapiens
cuuuauacaaauacuuuauauggcuauuuuug

SEQ ID NO: 162967 - RNA, 32 nt, Homo Sapiens
uuuucauagucuucuuuguauuuugcugcuga

SEQ ID NO: 162968 - RNA, 32 nt, Homo Sapiens
ccccggguguaucggccacgucguccuccgcg

SEQ ID NO: 162969 - RNA, 30 nt, Homo Sapiens
agcaaagaaagaaaucauguuacuucuucc

SEQ ID NO: 162970 - RNA, 32 nt, Homo Sapiens
uuuugggcauccuucuaucagcccuuauccca

SEQ ID NO: 162971 - RNA, 32 nt, Homo Sapiens
aaagacgucuauuguucaaaguuucuuucucc

SEQ ID NO: 162972 - RNA, 32 nt, Homo Sapiens
gacucgaauaaaacccuuggugcccggauggu

SEQ ID NO: 162973 - RNA, 32 nt, Homo Sapiens
ugaugcgcacaaaugucuucugccucucucuc

SEQ ID NO: 162974 - RNA, 32 nt, Homo Sapiens
caucaccuaccccgagggcgccaugcagcggc

SEQ ID NO: 162975 - RNA, 32 nt, Homo Sapiens
ccccgcaucccucuccucccucgcgccuggcc

SEQ ID NO: 162976 - RNA, 32 nt, Homo Sapiens
uuuucaguauauauuuuguaucuuauacacug

SEQ ID NO: 162977 - RNA, 32 nt, Homo Sapiens
aaauaauccugccugucauaaaacagugauuc

SEQ ID NO: 162978 - RNA, 32 nt, Homo Sapiens
uccccauccacccacacacuauggauugggcu

SEQ ID NO: 162979 - RNA, 32 nt, Homo Sapiens
cagugcaggaccacggcucauugcaucuuuga

SEQ ID NO: 162980 - RNA, 32 nt, Homo Sapiens
ugaccagcugucugggaccggaaaccagcuuu

SEQ ID NO: 162981 - RNA, 32 nt, Homo Sapiens
uacuaaaaucuguuaauauaugaugaaaucaa

SEQ ID NO: 162982 - RNA, 32 nt, Homo Sapiens
auaagagaggaugguguugcaauuggcucuuu

SEQ ID NO: 162983 - RNA, 32 nt, Homo Sapiens
gagauucuauagaauguucuagaaugugcaca

SEQ ID NO: 162984 - RNA, 32 nt, Homo Sapiens
ggggcuugcagagccggcgccggaggagacgc

SEQ ID NO: 162985 - RNA, 32 nt, Homo Sapiens
auacuaacagaaaaccaagacugaagagacag

SEQ ID NO: 162986 - RNA, 32 nt, Homo Sapiens
auuggguucuuacuuuaagacaucuccuggaa

SEQ ID NO: 162987 - RNA, 32 nt, Homo Sapiens
aggacuggaugaugugcugccacgugugacuc

SEQ ID NO: 162988 - RNA, 32 nt, Homo Sapiens
gcggcccacgccagcuggcccaguggguagug

SEQ ID NO: 162989 - RNA, 32 nt, Homo Sapiens
cuugagggacucccaaacuguuuuccaaugug

SEQ ID NO: 162990 - RNA, 32 nt, Homo Sapiens
cuaugaaguuggaugggggaaaaauugacauc

SEQ ID NO: 162991 - RNA, 32 nt, Homo Sapiens
uucauacugaaauuauuuucuccaaauaaaaa

SEQ ID NO: 162992 - RNA, 32 nt, Homo Sapiens
acaguuccaaaguuaugggaggcacaguaaag

SEQ ID NO: 162993 - RNA, 32 nt, Homo Sapiens
uaauauuucaguguaaccacucagcggaagaa

SEQ ID NO: 162994 - RNA, 32 nt, Homo Sapiens
gaagccagaaaagaaagcgcaaaagaauggug

SEQ ID NO: 162995 - RNA, 32 nt, Homo Sapiens
ccccaucgacugcgucaagacccggaugcaga

SEQ ID NO: 162996 - RNA, 32 nt, Homo Sapiens
uucaaaaaaaauuuuuuuuuagaaauguuauu

SEQ ID NO: 162997 - RNA, 32 nt, Homo Sapiens
gucgguggaugggaaacugccucccccuggga

SEQ ID NO: 162998 - RNA, 32 nt, Homo Sapiens
ccugucucuacuaaggauacaaaauuagccgg

SEQ ID NO: 162999 - RNA, 32 nt, Homo Sapiens
gcauuuguguaauuuauagaaguaaaaucuag

SEQ ID NO: 163000 - RNA, 32 nt, Homo Sapiens
augguaagaauaguacaaacaccuuagcacau

SEQ ID NO: 163001 - RNA, 32 nt, Homo Sapiens
gaguguuuccacucaaaauaugucaacuuaaa

SEQ ID NO: 163002 - RNA, 32 nt, Homo Sapiens
gcagcccccagcuggguggcuccuccccugcu

SEQ ID NO: 163003 - RNA, 32 nt, Homo Sapiens
acaaucuaucuuuuccacaaauaugaguggga

SEQ ID NO: 163004 - RNA, 32 nt, Homo Sapiens
ggugccuuugugggcccagcuacaaggaggac

SEQ ID NO: 163005 - RNA, 32 nt, Homo Sapiens
gugaccuauaucuauuuguguuuguuguuuag

SEQ ID NO: 163006 - RNA, 32 nt, Homo Sapiens
ggauccuguauauagaaaauccuaaggcacuc

SEQ ID NO: 163007 - RNA, 32 nt, Homo Sapiens
ugccacacccuggacaccugcacuagagaacc

SEQ ID NO: 163008 - RNA, 32 nt, Homo Sapiens
uuauggaauuuauucagaaaaagaauugaaaa

SEQ ID NO: 163009 - RNA, 32 nt, Homo Sapiens
cucagccgagccccggccggcggagaggaccg

SEQ ID NO: 163010 - RNA, 32 nt, Homo Sapiens
ccacuauagaauucuuuuuuuauuuaaaacau

SEQ ID NO: 163011 - RNA, 32 nt, Homo Sapiens
guuuuuuaaaauaaaauguucauuguauuuga

SEQ ID NO: 163012 - RNA, 32 nt, Homo Sapiens
uuuccuuccuucuuccucucuuagaccagcuu

SEQ ID NO: 163013 - RNA, 32 nt, Homo Sapiens
caaugagagcgaaagcacagagaaaaagaaac

SEQ ID NO: 163014 - RNA, 32 nt, Homo Sapiens
ccuuucccaagccuucgggcgucugugugcgc

SEQ ID NO: 163015 - RNA, 32 nt, Homo Sapiens
cccauacuguuuccacgccgggacaccauguu

SEQ ID NO: 163016 - RNA, 32 nt, Homo Sapiens
ugguguggagggcgccaucuaugguguggaug

SEQ ID NO: 163017 - RNA, 32 nt, Homo Sapiens
gggcugccuccugccauccccccgucuccucc

SEQ ID NO: 163018 - RNA, 32 nt, Homo Sapiens
agccaaggagucacugagaccaaggcuuucuc

SEQ ID NO: 163019 - RNA, 32 nt, Homo Sapiens
cucaaggcucaauucuacaccaaaaaacuagg

SEQ ID NO: 163020 - RNA, 32 nt, Homo Sapiens
ggauuaaaauguuuuuacauuguuuuugggug

SEQ ID NO: 163021 - RNA, 32 nt, Homo Sapiens
acgccugugcaugaaaauacaugugugugucu

SEQ ID NO: 163022 - RNA, 32 nt, Homo Sapiens
caguaccugggcguucgcguccugcugcgcuu

SEQ ID NO: 163023 - RNA, 32 nt, Homo Sapiens
aggaagacaaauaaauaacaaacaaacagcca

SEQ ID NO: 163024 - RNA, 32 nt, Homo Sapiens
uucugaauuaacguuauuuaaaaggaaaugua

SEQ ID NO: 163025 - RNA, 32 nt, Homo Sapiens
ucaucuagcauuagguguaucucccaaugcua

SEQ ID NO: 163026 - RNA, 32 nt, Homo Sapiens
ccaggcucggaggagaguuugcugggacuggu

SEQ ID NO: 163027 - RNA, 32 nt, Homo Sapiens
gggagccgagccccgcuucucgcugcggugag

SEQ ID NO: 163028 - RNA, 32 nt, Homo Sapiens
cacuauccaucccagccucugguaaccauccu

SEQ ID NO: 163029 - RNA, 32 nt, Homo Sapiens
uccugggaggacucugaugcagggcgucuguu

SEQ ID NO: 163030 - RNA, 32 nt, Homo Sapiens
uggucauucuuugccauagcuuacucuaguca

SEQ ID NO: 163031 - RNA, 32 nt, Homo Sapiens
acugauuuuguguaauuuaacaauagauauga

SEQ ID NO: 163032 - RNA, 32 nt, Homo Sapiens
ggagcagggagguccgggagggugcggcugug

SEQ ID NO: 163033 - RNA, 32 nt, Homo Sapiens
aguugugcaaagugaacauuguaacuacacca

SEQ ID NO: 163034 - RNA, 32 nt, Homo Sapiens
cuuuuucccaaaccucaaaaacgucuuggaaa

SEQ ID NO: 163035 - RNA, 32 nt, Homo Sapiens
cugaaguugaguuugagaggcgacacggcggc

SEQ ID NO: 163036 - RNA, 32 nt, Homo Sapiens
auuaguaacugauacauagaaccaaggagcac

SEQ ID NO: 163037 - RNA, 32 nt, Homo Sapiens
gcugaccuggggauuguuaagugcugccuuag

SEQ ID NO: 163038 - RNA, 32 nt, Homo Sapiens
gcuguucuaaauuuaucaacugucaaauaugu

SEQ ID NO: 163039 - RNA, 32 nt, Homo Sapiens
cggggccgcgcgcaccuuccccgcacugacug

SEQ ID NO: 163040 - RNA, 32 nt, Homo Sapiens
gugcuaaugauauauauuacauuuacucuugg

SEQ ID NO: 163041 - RNA, 32 nt, Homo Sapiens
gucggccgggcuugaggccgggccccagacgu

SEQ ID NO: 163042 - RNA, 32 nt, Homo Sapiens
gacgugaggaccagcccucuccggggaccccu

SEQ ID NO: 163043 - RNA, 31 nt, Homo Sapiens
agaagcuaaagcacuuccagagccugcugag

SEQ ID NO: 163044 - RNA, 32 nt, Homo Sapiens
agggccccacacucacaaaggcuccaggccuc

SEQ ID NO: 163045 - RNA, 32 nt, Homo Sapiens
auucccugcgcccccuuccucuccggaagccc

SEQ ID NO: 163046 - RNA, 32 nt, Homo Sapiens
cgcucaggaaguaucugugaaaugugaaugug

SEQ ID NO: 163047 - RNA, 32 nt, Homo Sapiens
aaguugccaugacaauaaaggucauagaaccu

SEQ ID NO: 163048 - RNA, 32 nt, Homo Sapiens
uggaaaaagugucuuuacaaauguaauuuaca

SEQ ID NO: 163049 - RNA, 32 nt, Homo Sapiens
aguucugaaaaauuauaugaccgugacaauag

SEQ ID NO: 163050 - RNA, 31 nt, Homo Sapiens
auuuagcucaaugaugcguuuguaagaaaua

SEQ ID NO: 163051 - RNA, 32 nt, Homo Sapiens
gcgccuucaacucaagaucuaucaucauuuag

SEQ ID NO: 163052 - RNA, 32 nt, Homo Sapiens
uuucaccaccagcuccucuccacuucccaagg

SEQ ID NO: 163053 - RNA, 32 nt, Homo Sapiens
ccgggacuggggcugggcgcgcugcccgggag

SEQ ID NO: 163054 - RNA, 32 nt, Homo Sapiens
agcagccuggcuccggacucucgucugccacc

SEQ ID NO: 163055 - RNA, 32 nt, Homo Sapiens
ugccauacuagauauguuugucaauaaacuua

SEQ ID NO: 163056 - RNA, 32 nt, Homo Sapiens
agucaguggugccgggaccccagggcagccuc

SEQ ID NO: 163057 - RNA, 32 nt, Homo Sapiens
gucuccucuugccccuggcccaggggucucuu

SEQ ID NO: 163058 - RNA, 32 nt, Homo Sapiens
uacuggagccccacauaauagauuucauuuca

SEQ ID NO: 163059 - RNA, 32 nt, Homo Sapiens
cgucuccaugguuuuuccuacacaugaaugcg

SEQ ID NO: 163060 - RNA, 32 nt, Homo Sapiens
caguccuaucacaagcucauggccuuggacag

SEQ ID NO: 163061 - RNA, 32 nt, Homo Sapiens
cccagcuacucaggagacugaggugggaggau

SEQ ID NO: 163062 - RNA, 32 nt, Homo Sapiens
uucgccgcacgcugcagaaccucgcccagcgc

SEQ ID NO: 163063 - RNA, 32 nt, Homo Sapiens
ugcuguuuucccuuugcuucuaauauuacagu

SEQ ID NO: 163064 - RNA, 32 nt, Homo Sapiens
auuuuaacauguaguacuuuuacaguguauag

SEQ ID NO: 163065 - RNA, 32 nt, Homo Sapiens
accugccgccacuagcacuaagagggaugcgc

SEQ ID NO: 163066 - RNA, 32 nt, Homo Sapiens
gcaccauuuguaauaaugaugucaauuucaug

SEQ ID NO: 163067 - RNA, 32 nt, Homo Sapiens
aaagggagugcaugugcgcgcgugcaugugug

SEQ ID NO: 163068 - RNA, 32 nt, Homo Sapiens
ucagcugacccggccucucugccccacccaag

SEQ ID NO: 163069 - RNA, 32 nt, Homo Sapiens
aggcggggagagauguguacauagguuuuaaa

SEQ ID NO: 163070 - RNA, 32 nt, Homo Sapiens
cuaaaguccucauuuucuuuuaaaauugaaua

SEQ ID NO: 163071 - RNA, 32 nt, Homo Sapiens
aaguugguguugcccaaaucgcaguuugacau

SEQ ID NO: 163072 - RNA, 32 nt, Homo Sapiens
cucucuguaauaaguuaguaaauauuaaacaa

SEQ ID NO: 163073 - RNA, 32 nt, Homo Sapiens
cuuuguggcugaaaauauauagaucucugaga

SEQ ID NO: 163074 - RNA, 32 nt, Homo Sapiens
uguggcggggagccggccgggccuuccugcuc

SEQ ID NO: 163075 - RNA, 32 nt, Homo Sapiens
gcuacuaaaaauuucuauuaaaauuauugggu

SEQ ID NO: 163076 - RNA, 32 nt, Homo Sapiens
gagccacugcgcccggccuguuguacaguuau

SEQ ID NO: 163077 - RNA, 32 nt, Homo Sapiens
ugccaucaauagaacagcagccacaacaaaag

SEQ ID NO: 163078 - RNA, 32 nt, Homo Sapiens
guaagcuaaauaacccaaauuacauuucuuua

SEQ ID NO: 163079 - RNA, 32 nt, Homo Sapiens
acaucacauggcauccagggccaggcaggcag

SEQ ID NO: 163080 - RNA, 32 nt, Homo Sapiens
ugaguucugcuacaaagcacaaaugaauuugu

SEQ ID NO: 163081 - RNA, 30 nt, Homo Sapiens
acuggaccccgcgagcaccagagucggcgu

SEQ ID NO: 163082 - RNA, 32 nt, Homo Sapiens
cgcccacgcggcagaucgggcgcugcggccug

SEQ ID NO: 163083 - RNA, 32 nt, Homo Sapiens
cucuuguugguuuccuucucagacuugccacc

SEQ ID NO: 163084 - RNA, 32 nt, Homo Sapiens
uccucuccacaaauccacuugggccugugcaa

SEQ ID NO: 163085 - RNA, 30 nt, Homo Sapiens
ugagcauggauccaaccaccccggccuggg

SEQ ID NO: 163086 - RNA, 32 nt, Homo Sapiens
agcgccucgccagcgguccgcggggcuggaga

SEQ ID NO: 163087 - RNA, 32 nt, Homo Sapiens
cugcccuggugccucuucccuggggcugaauc

SEQ ID NO: 163088 - RNA, 32 nt, Homo Sapiens
ccucuccuuguggccugggccuccucacaaca

SEQ ID NO: 163089 - RNA, 32 nt, Homo Sapiens
guuugcuuuugaacguaugugcucuuauaaag

SEQ ID NO: 163090 - RNA, 32 nt, Homo Sapiens
ugaaaauagcacgucuuuuucuuucuuugugu

SEQ ID NO: 163091 - RNA, 32 nt, Homo Sapiens
cuuaaggaaggaauuaagaaaagggaaaaagc

SEQ ID NO: 163092 - RNA, 32 nt, Homo Sapiens
uuuauuucagguuaaacuauaaacuagauucc

SEQ ID NO: 163093 - RNA, 31 nt, Homo Sapiens
gggcgccuuggccaggcccaggcaagccgcu

SEQ ID NO: 163094 - RNA, 31 nt, Homo Sapiens
aauaaaaaaugguuaaggguauaucaccacu

SEQ ID NO: 163095 - RNA, 32 nt, Homo Sapiens
acugcuggggacggcgccugagcucucagggg

SEQ ID NO: 163096 - RNA, 32 nt, Homo Sapiens
guccaguguugucaugucaucaugcccccuca

SEQ ID NO: 163097 - RNA, 32 nt, Homo Sapiens
cuauugacagagauuauauguauguaaaaugu

SEQ ID NO: 163098 - RNA, 32 nt, Homo Sapiens
ucuuaacuuuugaugauaaaagaaauuaaauu

SEQ ID NO: 163099 - RNA, 32 nt, Homo Sapiens
gaacccgggagguggaggucgcggugagccga

SEQ ID NO: 163100 - RNA, 32 nt, Homo Sapiens
cuccuagaacaucagcccgacugucgcugggu

SEQ ID NO: 163101 - RNA, 32 nt, Homo Sapiens
ugguagccucuggccaucuggaccucaauccc

SEQ ID NO: 163102 - RNA, 32 nt, Homo Sapiens
guucauuaaugagaaaauugacaucugacaag

SEQ ID NO: 163103 - RNA, 30 nt, Homo Sapiens
uugggccaugcucaugucuuggaugagguu

SEQ ID NO: 163104 - RNA, 32 nt, Homo Sapiens
agcgccggcccccgcuccugcugcugacggcg

SEQ ID NO: 163105 - RNA, 32 nt, Homo Sapiens
ugcugggcuggcgucccgcacugggguguccu

SEQ ID NO: 163106 - RNA, 32 nt, Homo Sapiens
uuuuggguaaccucagugauucccauuggugu

SEQ ID NO: 163107 - RNA, 32 nt, Homo Sapiens
cagaacugucuuagucauaccauccaucccug

SEQ ID NO: 163108 - RNA, 32 nt, Homo Sapiens
auaauaaaaugguuguuguuuuaagccacgaa

SEQ ID NO: 163109 - RNA, 30 nt, Homo Sapiens
acauuauccauuacagucuaacucuuucau

SEQ ID NO: 163110 - RNA, 32 nt, Homo Sapiens
uacguguaagcuuuuucuugaguguuaagucu

SEQ ID NO: 163111 - RNA, 32 nt, Homo Sapiens
cagaaaauauuuuagguccccgucccucucug

SEQ ID NO: 163112 - RNA, 32 nt, Homo Sapiens
gcagccggccccagucuccaucaccgcaacca

SEQ ID NO: 163113 - RNA, 32 nt, Homo Sapiens
ugccuauacaacuaaauuuaugcuggguuuuu

SEQ ID NO: 163114 - RNA, 32 nt, Homo Sapiens
gaaacuuuggucucacauccguagcugauuau

SEQ ID NO: 163115 - RNA, 32 nt, Homo Sapiens
cgccuuccuauuucuuuuuuuuuuuuuuaaac

SEQ ID NO: 163116 - RNA, 32 nt, Homo Sapiens
ccuuuggguuuuaugucugcuugcuuggagcu

SEQ ID NO: 163117 - RNA, 32 nt, Homo Sapiens
uggccaguagccaggcaagucauagaauugau

SEQ ID NO: 163118 - RNA, 32 nt, Homo Sapiens
augggucgcccggcugucagagggaagcaggg

SEQ ID NO: 163119 - RNA, 32 nt, Homo Sapiens
cucgcggcucaggcugcccccgacgugcccgg

SEQ ID NO: 163120 - RNA, 32 nt, Homo Sapiens
ccaacguguggcggcucgcgacccccggcaac

SEQ ID NO: 163121 - RNA, 32 nt, Homo Sapiens
agcccagcucuguggugcaggcauggcugcug

SEQ ID NO: 163122 - RNA, 32 nt, Homo Sapiens
cggccccgcccggugcgcuggaggucgaagcu

SEQ ID NO: 163123 - RNA, 32 nt, Homo Sapiens
gacggcauuuccaucccuccccugcccgggaa

SEQ ID NO: 163124 - RNA, 32 nt, Homo Sapiens
acagaagcagaucugauguguuuccuauacau

SEQ ID NO: 163125 - RNA, 32 nt, Homo Sapiens
uuuuacuuuuauuugcaacauuuacaguccuu

SEQ ID NO: 163126 - RNA, 32 nt, Homo Sapiens
ccagggcccccgcugucuccuuccuucggugg

SEQ ID NO: 163127 - RNA, 32 nt, Homo Sapiens
aaagcccauaauguauuuagaaacaggaaucc

SEQ ID NO: 163128 - RNA, 32 nt, Homo Sapiens
cgcugugcuuuuguuguaguguagaaguuuuu

SEQ ID NO: 163129 - RNA, 32 nt, Homo Sapiens
agcgcuuggccucuccuucucuuccuucacuu

SEQ ID NO: 163130 - RNA, 32 nt, Homo Sapiens
uuauucacugaauugaagaaauacgguuuaca

SEQ ID NO: 163131 - RNA, 31 nt, Homo Sapiens
uguuaacaagugguuuuuaguacauucuggg

SEQ ID NO: 163132 - RNA, 32 nt, Homo Sapiens
uauauauguauauaaucuugcuucccgccugu

SEQ ID NO: 163133 - RNA, 32 nt, Homo Sapiens
uuggaaagcucuucuagcugaaucugaaauau

SEQ ID NO: 163134 - RNA, 32 nt, Homo Sapiens
aggcguggcucccucccgggccagugagcccu

SEQ ID NO: 163135 - RNA, 32 nt, Homo Sapiens
gugauauggaaccagaaggcugucugaacuuu

SEQ ID NO: 163136 - RNA, 32 nt, Homo Sapiens
ggagccuggugcccuucuagaugggcgacgga

SEQ ID NO: 163137 - RNA, 32 nt, Homo Sapiens
ggggcguguuccauuccagcugaggcuuuaga

SEQ ID NO: 163138 - RNA, 32 nt, Homo Sapiens
gguagaacaaauggaaauuugguuucagaaug

SEQ ID NO: 163139 - RNA, 32 nt, Homo Sapiens
agaaaagagacaacuuuaugaguuguuuucaa

SEQ ID NO: 163140 - RNA, 32 nt, Homo Sapiens
ugacgaccccuacugcgaaguuggugucauca

SEQ ID NO: 163141 - RNA, 32 nt, Homo Sapiens
uugaaguauaauuuacacaauaaaaugcacac

SEQ ID NO: 163142 - RNA, 32 nt, Homo Sapiens
caccuaacaguuacuuuacaauuaaacucaaa

SEQ ID NO: 163143 - RNA, 32 nt, Homo Sapiens
cuguuagcauacugccuauacacacagacaca

SEQ ID NO: 163144 - RNA, 32 nt, Homo Sapiens
cuuuugguuguuggguuucugucaguuucugg

SEQ ID NO: 163145 - RNA, 32 nt, Homo Sapiens
ccgcagcucucgucggccgccgcuggugacca

SEQ ID NO: 163146 - RNA, 32 nt, Homo Sapiens
ggcaccaagaggcggggguggagcagggagcu

SEQ ID NO: 163147 - RNA, 32 nt, Homo Sapiens
gcaauuugauaaaauauacuuuugugaacaaa

SEQ ID NO: 163148 - RNA, 32 nt, Homo Sapiens
guuuaaaguagauaaaaccuugucauuuuacc

SEQ ID NO: 163149 - RNA, 32 nt, Homo Sapiens
gaggcucaggccugggucuaaggggcacgugg

SEQ ID NO: 163150 - RNA, 32 nt, Homo Sapiens
gagacaguacaugaauauaacuuaaacccuau

SEQ ID NO: 163151 - RNA, 32 nt, Homo Sapiens
cuggccauaaacaaaaucucugcagcacugug

SEQ ID NO: 163152 - RNA, 32 nt, Homo Sapiens
uauaaaaauuaucaaaaagauaaugugcaggg

SEQ ID NO: 163153 - RNA, 32 nt, Homo Sapiens
agagggaaggaaaagugccaugucaaccccca

SEQ ID NO: 163154 - RNA, 32 nt, Homo Sapiens
ggccggcccuccccagcccagagcgggcagcc

SEQ ID NO: 163155 - RNA, 32 nt, Homo Sapiens
uucuuucuauucguuucuuuucguuuggugag

SEQ ID NO: 163156 - RNA, 32 nt, Homo Sapiens
aagcugaccccaucuggaguauuaauguuugg

SEQ ID NO: 163157 - RNA, 31 nt, Homo Sapiens
uuuauuauagcgucauuuuuguggucauaau

SEQ ID NO: 163158 - RNA, 32 nt, Homo Sapiens
cauaccugcuuuuuaugggagcugucaagcau

SEQ ID NO: 163159 - RNA, 32 nt, Homo Sapiens
ugauauuguggaagauugaaauccacagauaa

SEQ ID NO: 163160 - RNA, 32 nt, Homo Sapiens
aacaccuguauaugcgugcauauacaaccaag

SEQ ID NO: 163161 - RNA, 32 nt, Homo Sapiens
uccugugccugccacucaauaaacagugucug

SEQ ID NO: 163162 - RNA, 32 nt, Homo Sapiens
auacuaaucuuguuaaaagcaauagaccucaa

SEQ ID NO: 163163 - RNA, 32 nt, Homo Sapiens
uuacauacuguaauuuaaauaaacugcauuua

SEQ ID NO: 163164 - RNA, 32 nt, Homo Sapiens
ggcccuccgggaagauggcggccgugcaggcg

SEQ ID NO: 163165 - RNA, 31 nt, Homo Sapiens
caugcaugggccgagaaccagguuuggcaua

SEQ ID NO: 163166 - RNA, 32 nt, Homo Sapiens
agaagucagggcccccucgaggagcacccgcu

SEQ ID NO: 163167 - RNA, 32 nt, Homo Sapiens
ucacuggaacagagucuuaugugcugcaccgg

SEQ ID NO: 163168 - RNA, 32 nt, Homo Sapiens
gaggccaagcgcggggccggagcggccuuccc

SEQ ID NO: 163169 - RNA, 32 nt, Homo Sapiens
cgcccuuuuauguggcagaaaucagcuggggc

SEQ ID NO: 163170 - RNA, 32 nt, Homo Sapiens
uggcuggaaugggagggggcauaccuggaaug

SEQ ID NO: 163171 - RNA, 32 nt, Homo Sapiens
uaagguucaucaggcccuuccagcuccccagg

SEQ ID NO: 163172 - RNA, 32 nt, Homo Sapiens
caugaacgaacguggcuguauuccaauaaaac

SEQ ID NO: 163173 - RNA, 32 nt, Homo Sapiens
gcucuaauaaaguucccauccuuaaugacuca

SEQ ID NO: 163174 - RNA, 32 nt, Homo Sapiens
uuacuucuuccagcugauguuccacuuguuuc

SEQ ID NO: 163175 - RNA, 32 nt, Homo Sapiens
agaaucuggcaauagacgagaaaccgaaagaa

SEQ ID NO: 163176 - RNA, 32 nt, Homo Sapiens
ccuuuuuucacuuuuccuccuccaaagagcaa

SEQ ID NO: 163177 - RNA, 32 nt, Homo Sapiens
gauuagaggaauucuuuuuuaguaugaaaauu

SEQ ID NO: 163178 - RNA, 32 nt, Homo Sapiens
cgggacccugacccggacccccugcgccucgu

SEQ ID NO: 163179 - RNA, 32 nt, Homo Sapiens
aaccaaagaugaagacauucauguacagucug

SEQ ID NO: 163180 - RNA, 32 nt, Homo Sapiens
ucuuggucuccgaaaacucagcugugacugcu

SEQ ID NO: 163181 - RNA, 32 nt, Homo Sapiens
ucaauuauuucuguuauuaaugguuguagaaa

SEQ ID NO: 163182 - RNA, 32 nt, Homo Sapiens
aggagaggagcuuuuaauuuacacuuaccacc

SEQ ID NO: 163183 - RNA, 32 nt, Homo Sapiens
uuuugugaguaggagagcugauaccucacauu

SEQ ID NO: 163184 - RNA, 32 nt, Homo Sapiens
caaccaucuucacuggcuuccaucagugguaa

SEQ ID NO: 163185 - RNA, 32 nt, Homo Sapiens
cuuauaucaauuuaaaauuugcuagugguuug

SEQ ID NO: 163186 - RNA, 32 nt, Homo Sapiens
caguggccucuuucggcccagcccaguucaug

SEQ ID NO: 163187 - RNA, 32 nt, Homo Sapiens
ugcuuuguacuuccucacccugcuuucguaca

SEQ ID NO: 163188 - RNA, 32 nt, Homo Sapiens
uuguccuagaugcacuacuuuauuuaaaaaau

SEQ ID NO: 163189 - RNA, 32 nt, Homo Sapiens
ugaugaacaacaguaugaaugaaaauaauuau

SEQ ID NO: 163190 - RNA, 32 nt, Homo Sapiens
cgugccgccucccuguucucagucgcaggcug

SEQ ID NO: 163191 - RNA, 32 nt, Homo Sapiens
ggccccuccacccucucccccagccgcacggg

SEQ ID NO: 163192 - RNA, 32 nt, Homo Sapiens
ggcugggcgcgguggcucacgccuguaaccuc

SEQ ID NO: 163193 - RNA, 32 nt, Homo Sapiens
auuccagcccacaucuucuccuuuccugauua

SEQ ID NO: 163194 - RNA, 32 nt, Homo Sapiens
uguaacacucaccgugaggguccguggcuuca

SEQ ID NO: 163195 - RNA, 32 nt, Homo Sapiens
cacuuauaaaaugauuugaacaaauaaaacua

SEQ ID NO: 163196 - RNA, 32 nt, Homo Sapiens
auugaucucuaaucuuuuuuaauuccuugggc

SEQ ID NO: 163197 - RNA, 32 nt, Homo Sapiens
aggaggcccucucuccuucaguucaucacggc

SEQ ID NO: 163198 - RNA, 32 nt, Homo Sapiens
cuggggaagggagagagugagacugggagaaa

SEQ ID NO: 163199 - RNA, 32 nt, Homo Sapiens
cuagggcguccguagucgccccggccuccgug

SEQ ID NO: 163200 - RNA, 32 nt, Homo Sapiens
aaauguuuuaggauguauguuacuucuuagag

SEQ ID NO: 163201 - RNA, 32 nt, Homo Sapiens
uagggacuuguacaacauuguggauguguaaa

SEQ ID NO: 163202 - RNA, 32 nt, Homo Sapiens
augaaauugaaaagauugacuauugagaaaga

SEQ ID NO: 163203 - RNA, 32 nt, Homo Sapiens
auagggccucauuuuguuuucuuauugacaaa

SEQ ID NO: 163204 - RNA, 32 nt, Homo Sapiens
guccuuggaaaacuaccuaaccuuucugagcc

SEQ ID NO: 163205 - RNA, 32 nt, Homo Sapiens
guaauaauuuaauguuuuuacccauuaaauua

SEQ ID NO: 163206 - RNA, 32 nt, Homo Sapiens
uaaaagaagggagagagguuuagacauauggc

SEQ ID NO: 163207 - RNA, 32 nt, Homo Sapiens
gucauccuucauggaugcccaggccugcucca

SEQ ID NO: 163208 - RNA, 32 nt, Homo Sapiens
gcucaagugauccucucgccuuggccucccaa

SEQ ID NO: 163209 - RNA, 32 nt, Homo Sapiens
ugcuuugucaugccauuaagcucacaauaagg

SEQ ID NO: 163210 - RNA, 32 nt, Homo Sapiens
gccacugcacccacccaagacaagugauuuuc

SEQ ID NO: 163211 - RNA, 32 nt, Homo Sapiens
ugguuguucuuuguccuaagugagcucuguuc

SEQ ID NO: 163212 - RNA, 32 nt, Homo Sapiens
uugggggugggggguugggggaggcagggaaa

SEQ ID NO: 163213 - RNA, 32 nt, Homo Sapiens
uacauguccuuauuuuccaccucccccaguca

SEQ ID NO: 163214 - RNA, 32 nt, Homo Sapiens
gaagggacacauggcuauguauguacuuggug

SEQ ID NO: 163215 - RNA, 32 nt, Homo Sapiens
uccgggugauuuuuuucuuacuuuuuccuaau

SEQ ID NO: 163216 - RNA, 32 nt, Homo Sapiens
ucauagcauaucuauucuaaguagaggaaugc

SEQ ID NO: 163217 - RNA, 32 nt, Homo Sapiens
gagcaggaaugggaaggaugaagggcccgaga

SEQ ID NO: 163218 - RNA, 32 nt, Homo Sapiens
gucgcaggcggggcuccugggaggcugggguc

SEQ ID NO: 163219 - RNA, 32 nt, Homo Sapiens
caggucaggaggaccuggaguggacuagaauc

SEQ ID NO: 163220 - RNA, 32 nt, Homo Sapiens
gaaguggggcggggcgggggccgaaaagacca

SEQ ID NO: 163221 - RNA, 30 nt, Homo Sapiens
acaggagagaagcuggucuagacuguuugc

SEQ ID NO: 163222 - RNA, 32 nt, Homo Sapiens
uacccccugccagagggcagcauugagggugu

SEQ ID NO: 163223 - RNA, 32 nt, Homo Sapiens
ccagccuggcacucagcccuucgagggugggc

SEQ ID NO: 163224 - RNA, 32 nt, Homo Sapiens
aggugaaaucagagauaccagcuccucuuuua

SEQ ID NO: 163225 - RNA, 32 nt, Homo Sapiens
uaaagaaacuggggaaggauuuaugaauacac

SEQ ID NO: 163226 - RNA, 32 nt, Homo Sapiens
uccagcuguauaugucugguuuucuuaccccu

SEQ ID NO: 163227 - RNA, 32 nt, Homo Sapiens
uggggagcugucugcauccgccacccccucca

SEQ ID NO: 163228 - RNA, 27 nt, Homo Sapiens
gggccucauuucuacagcccccaacau

SEQ ID NO: 163229 - RNA, 32 nt, Homo Sapiens
acuccuaggauguguguucauggcauuauagc

SEQ ID NO: 163230 - RNA, 32 nt, Homo Sapiens
agaccuuugucuucuucaucuggcgccgguac

SEQ ID NO: 163231 - RNA, 32 nt, Homo Sapiens
guaaaccucagugccugagacuuuucuaccaa

SEQ ID NO: 163232 - RNA, 32 nt, Homo Sapiens
gcuccggagcccacaugcauugauucgacaag

SEQ ID NO: 163233 - RNA, 32 nt, Homo Sapiens
agcucuaaauguuuaaaguaacuaccaccuaa

SEQ ID NO: 163234 - RNA, 32 nt, Homo Sapiens
uaugcaugucacugcaugauaauugaguuuuc

SEQ ID NO: 163235 - RNA, 32 nt, Homo Sapiens
ugaagagagcuaaguuuuuaugcugaagagga

SEQ ID NO: 163236 - RNA, 32 nt, Homo Sapiens
cuaugacugugcuacguauauauagguaauaa

SEQ ID NO: 163237 - RNA, 32 nt, Homo Sapiens
ccgugagagugugcggguggcugggggcagca

SEQ ID NO: 163238 - RNA, 32 nt, Homo Sapiens
caauacuagcauacguuuuucuuaauuguuau

SEQ ID NO: 163239 - RNA, 32 nt, Homo Sapiens
ggccaggcgcgguggcucacgucuguaauccc

SEQ ID NO: 163240 - RNA, 32 nt, Homo Sapiens
guacuaccaaaaucacagaagccugaaguucc

SEQ ID NO: 163241 - RNA, 32 nt, Homo Sapiens
aaauuucaagucauacauuugauaaaagauuu

SEQ ID NO: 163242 - RNA, 32 nt, Homo Sapiens
gcuccccgccccaccccacgccuuagcugcag

SEQ ID NO: 163243 - RNA, 32 nt, Homo Sapiens
cuauaaccagggcucugggauaguaagagagg

SEQ ID NO: 163244 - RNA, 29 nt, Homo Sapiens
aagccuuggggacaggaaaagcaugacca

SEQ ID NO: 163245 - RNA, 32 nt, Homo Sapiens
uuguuaauuccguucaggaucccggcuacaua

SEQ ID NO: 163246 - RNA, 32 nt, Homo Sapiens
gccacugcccauaccuccuccucccuucuuuc

SEQ ID NO: 163247 - RNA, 32 nt, Homo Sapiens
guauuuuggggaacuguuguuugauguguaug

SEQ ID NO: 163248 - RNA, 32 nt, Homo Sapiens
guccauauuuaguugucauguuacaagaggcu

SEQ ID NO: 163249 - RNA, 32 nt, Homo Sapiens
uuagugacaggaagaaaggagggaagagcuga

SEQ ID NO: 163250 - RNA, 32 nt, Homo Sapiens
uauauaaucuucaccauaaucuaguauuagaa

SEQ ID NO: 163251 - RNA, 32 nt, Homo Sapiens
uccaugucccuacaaaggacaugaacucaucc

SEQ ID NO: 163252 - RNA, 32 nt, Homo Sapiens
ucgaacuccugaacucaagugauucacccacc

SEQ ID NO: 163253 - RNA, 32 nt, Homo Sapiens
ucauuucccgggaaugcugugcaggcaaaagg

SEQ ID NO: 163254 - RNA, 32 nt, Homo Sapiens
uuucaaaaucaucaaagucuaaauuuagaauc

SEQ ID NO: 163255 - RNA, 28 nt, Homo Sapiens
gcuaugaccaccaaagauuauccaucau

SEQ ID NO: 163256 - RNA, 32 nt, Homo Sapiens
ugaaagcaagguggcccaguguggggucauag

SEQ ID NO: 163257 - RNA, 32 nt, Homo Sapiens
ggagaaaguacuucuuuuuuuuuauuuuuaga

SEQ ID NO: 163258 - RNA, 32 nt, Homo Sapiens
uaauuauugcuuugcuuaaguuuuaacuaugc

SEQ ID NO: 163259 - RNA, 32 nt, Homo Sapiens
gacuggcugcagccgcagucuugguggaggag

SEQ ID NO: 163260 - RNA, 32 nt, Homo Sapiens
guaucuggugauuuaaaguguucaguaacuau

SEQ ID NO: 163261 - RNA, 32 nt, Homo Sapiens
gaagucugaagcucagagagccugggccaaug

SEQ ID NO: 163262 - RNA, 32 nt, Homo Sapiens
uaccuggaacaaagugcagauuagugcccacg

SEQ ID NO: 163263 - RNA, 32 nt, Homo Sapiens
cccuccacaccuguggacacgcccccacugau

SEQ ID NO: 163264 - RNA, 32 nt, Homo Sapiens
acagaugccauaugcuggccccguggccacac

SEQ ID NO: 163265 - RNA, 32 nt, Homo Sapiens
gcgugcauggggccuguucuguccuugguuug

SEQ ID NO: 163266 - RNA, 32 nt, Homo Sapiens
uaaaguggucugaacugcuugcuaccaaucug

SEQ ID NO: 163267 - RNA, 32 nt, Homo Sapiens
ccugaaggaaaugaaacucaccuaucuuucua

SEQ ID NO: 163268 - RNA, 32 nt, Homo Sapiens
gccgcggccccuucccguugccugcggccacc

SEQ ID NO: 163269 - RNA, 32 nt, Homo Sapiens
gccauaucugucaugcuuccccggggccacuc

SEQ ID NO: 163270 - RNA, 32 nt, Homo Sapiens
augucuaggggccagcuggucuccuggcaacu

SEQ ID NO: 163271 - RNA, 32 nt, Homo Sapiens
gcuuuuauuucuggaccaaguaagaugggucc

SEQ ID NO: 163272 - RNA, 32 nt, Homo Sapiens
caacucugccagcccccaccugccaggacguu

SEQ ID NO: 163273 - RNA, 32 nt, Homo Sapiens
ccgugcugucccagcccaaggagggccccgug

SEQ ID NO: 163274 - RNA, 32 nt, Homo Sapiens
gaugaaguuagaucucuuccucacaucauaca

SEQ ID NO: 163275 - RNA, 32 nt, Homo Sapiens
cugacaucgcuggcugccccuuugggcggaga

SEQ ID NO: 163276 - RNA, 32 nt, Homo Sapiens
ccccacacaaaaccuucaggcuugaauuuuaa

SEQ ID NO: 163277 - RNA, 32 nt, Homo Sapiens
ugacagcaccucagcuaccagguggggagugg

SEQ ID NO: 163278 - RNA, 32 nt, Homo Sapiens
gaaauaugauaaaauauaauacuuuaaagucc

SEQ ID NO: 163279 - RNA, 32 nt, Homo Sapiens
aaauuaaguauuuaaaauguuccaauaaagug

SEQ ID NO: 163280 - RNA, 32 nt, Homo Sapiens
gugcuuaucccuucuuuuucuuuuuuucuuug

SEQ ID NO: 163281 - RNA, 32 nt, Homo Sapiens
aaaugagcacgcugccauguacugguuugagc

SEQ ID NO: 163282 - RNA, 32 nt, Homo Sapiens
cuggccggugcugcacauccaccggggcacaa

SEQ ID NO: 163283 - RNA, 32 nt, Homo Sapiens
aauaaauuauuugaagaaguauguaaauaaca

SEQ ID NO: 163284 - RNA, 32 nt, Homo Sapiens
ccccucagcugcccagccauucccucuccagc

SEQ ID NO: 163285 - RNA, 32 nt, Homo Sapiens
uauuuacagugggacccacagaugaaccuuag

SEQ ID NO: 163286 - RNA, 32 nt, Homo Sapiens
cauccuauucauaaguccauggaccaaaaugu

SEQ ID NO: 163287 - RNA, 32 nt, Homo Sapiens
cugccuugggagagggcggcccggacggguau

SEQ ID NO: 163288 - RNA, 32 nt, Homo Sapiens
uuaauuuacuacaaguuuuuguauaaaaugaa

SEQ ID NO: 163289 - RNA, 32 nt, Homo Sapiens
caccugcccuggcuagcaugcugcugggccac

SEQ ID NO: 163290 - RNA, 32 nt, Homo Sapiens
uuuuguagucucucuggaggacuuccagaaaa

SEQ ID NO: 163291 - RNA, 32 nt, Homo Sapiens
cuucuccuagcacauggaucuuucucaaggac

SEQ ID NO: 163292 - RNA, 32 nt, Homo Sapiens
cucggaaaaccucagggaaagaugccaauucu

SEQ ID NO: 163293 - RNA, 32 nt, Homo Sapiens
aacagaauacuuuuuucuuuuuuuuggccuuu

SEQ ID NO: 163294 - RNA, 32 nt, Homo Sapiens
gcuugggagagccccuggggccuagacucugu

SEQ ID NO: 163295 - RNA, 32 nt, Homo Sapiens
gugacccuucucaacucccccaucuugcaugu

SEQ ID NO: 163296 - RNA, 32 nt, Homo Sapiens
cccaugugcuucccugcccccgaccuggagug

SEQ ID NO: 163297 - RNA, 32 nt, Homo Sapiens
gcugggcucggcggcagccgggcucggagugg

SEQ ID NO: 163298 - RNA, 32 nt, Homo Sapiens
uuguaggaacaaguacccuuauuuucagagca

SEQ ID NO: 163299 - RNA, 32 nt, Homo Sapiens
ucucagcccgccccguguggccgcccgggugu

SEQ ID NO: 163300 - RNA, 32 nt, Homo Sapiens
ugcaauaucaaaauauaaaauguggaagaaaa

SEQ ID NO: 163301 - RNA, 30 nt, Homo Sapiens
ggcuccgcgcugcugccgccgccaccgcca

SEQ ID NO: 163302 - RNA, 32 nt, Homo Sapiens
ugaauucaugauaguuuggucguucuaaguau

SEQ ID NO: 163303 - RNA, 32 nt, Homo Sapiens
uggcuugaaauuuuuccacuuugguuaucuau

SEQ ID NO: 163304 - RNA, 32 nt, Homo Sapiens
ggagaaacaggagaggagaggccaggagauca

SEQ ID NO: 163305 - RNA, 32 nt, Homo Sapiens
uauaaaccuucccccacagauuuuuccauccu

SEQ ID NO: 163306 - RNA, 32 nt, Homo Sapiens
uuaccuuuuuaaagugcucuuauauuuucaug

SEQ ID NO: 163307 - RNA, 32 nt, Homo Sapiens
auuaguuauacucauuuuccugccuugaucuu

SEQ ID NO: 163308 - RNA, 32 nt, Homo Sapiens
ugauccagccucucauggcuucccuccaaagu

SEQ ID NO: 163309 - RNA, 32 nt, Homo Sapiens
uuuugggucaacauugcuacggagccagcagu

SEQ ID NO: 163310 - RNA, 31 nt, Homo Sapiens
uaaccuuaauaaaaaugggucuaucagacaa

SEQ ID NO: 163311 - RNA, 32 nt, Homo Sapiens
uguuuucuuuugccuuguacuaucuuguauaa

SEQ ID NO: 163312 - RNA, 32 nt, Homo Sapiens
cccaagcacuguaguucugagcauguuuuugg

SEQ ID NO: 163313 - RNA, 32 nt, Homo Sapiens
ucguauaccuuauuaacaaaauagaauauaua

SEQ ID NO: 163314 - RNA, 32 nt, Homo Sapiens
aguuaacuggcuuuuucuuaauuucauuccuu

SEQ ID NO: 163315 - RNA, 32 nt, Homo Sapiens
ggucuaauauccagcaucuauaaagaacuuaa

SEQ ID NO: 163316 - RNA, 32 nt, Homo Sapiens
gcuucuuucuccaggccuggcuccuuauucac

SEQ ID NO: 163317 - RNA, 32 nt, Homo Sapiens
gcuucagcugugacucaagggcccaggauccu

SEQ ID NO: 163318 - RNA, 32 nt, Homo Sapiens
gugccuccugcgcguccccccggaggggaaag

SEQ ID NO: 163319 - RNA, 32 nt, Homo Sapiens
aagggauuaaucuuuuaaaaauaaaugcuaua

SEQ ID NO: 163320 - RNA, 32 nt, Homo Sapiens
uuauauaaaaacaaugauaaagaugugaacug

SEQ ID NO: 163321 - RNA, 32 nt, Homo Sapiens
auaagaaguuaaaguauguaaaguauaacuuc

SEQ ID NO: 163322 - RNA, 32 nt, Homo Sapiens
agucaggaaaauuuuauguaacuagugauagu

SEQ ID NO: 163323 - RNA, 32 nt, Homo Sapiens
ucggagguguugcgccaugcccgggguggcca

SEQ ID NO: 163324 - RNA, 32 nt, Homo Sapiens
auugucacugccaccucggucggugcuuacuu

SEQ ID NO: 163325 - RNA, 32 nt, Homo Sapiens
cccacccugcccccgucgugcuccauccuucc

SEQ ID NO: 163326 - RNA, 32 nt, Homo Sapiens
cgccgccucggcgggggguguacagcugcucc

SEQ ID NO: 163327 - RNA, 32 nt, Homo Sapiens
agagugcagaucugugcucaucggagacugcc

SEQ ID NO: 163328 - RNA, 32 nt, Homo Sapiens
aucacaugagacaauuuugcuucacuuugccu

SEQ ID NO: 163329 - RNA, 32 nt, Homo Sapiens
ccgcggcggggagagggcaagcgggaccggua

SEQ ID NO: 163330 - RNA, 32 nt, Homo Sapiens
accuucgcccugggagguucuggccaggugcc

SEQ ID NO: 163331 - RNA, 32 nt, Homo Sapiens
cucucucgugcuuaauuaauagcuuuaucuuu

SEQ ID NO: 163332 - RNA, 32 nt, Homo Sapiens
cagccccgcagcguagggagcagccggcccgg

SEQ ID NO: 163333 - RNA, 32 nt, Homo Sapiens
gcugcagaaaucaacaaucacuuggcaguguc

SEQ ID NO: 163334 - RNA, 30 nt, Homo Sapiens
caacaggucugugcccaugcagagugagca

SEQ ID NO: 163335 - RNA, 27 nt, Homo Sapiens
guuuccaccuucuucuccaaccucuac

SEQ ID NO: 163336 - RNA, 32 nt, Homo Sapiens
uagaaauuaugcacuaaauaaaaauuaccaga

SEQ ID NO: 163337 - RNA, 32 nt, Homo Sapiens
uauaaagcauauaauaaaauaaucgugcuacu

SEQ ID NO: 163338 - RNA, 32 nt, Homo Sapiens
ucuuugccugaagaaacaaggcauugaaucuc

SEQ ID NO: 163339 - RNA, 32 nt, Homo Sapiens
cacaaaauuugcagccugacaaugcaauagaa

SEQ ID NO: 163340 - RNA, 32 nt, Homo Sapiens
gggacagaacaaaaaucaaaacaaagaaccug

SEQ ID NO: 163341 - RNA, 32 nt, Homo Sapiens
guagcaaucugugcaggaggagacccaguugc

SEQ ID NO: 163342 - RNA, 32 nt, Homo Sapiens
agguuuucauuuuuauucuuccuuccaacgug

SEQ ID NO: 163343 - RNA, 31 nt, Homo Sapiens
cuuguggagcacugccuggccaaggccucau

SEQ ID NO: 163344 - RNA, 32 nt, Homo Sapiens
accacccccgucccgggccucagccccucugc

SEQ ID NO: 163345 - RNA, 32 nt, Homo Sapiens
cccagggaaaaguccccauuguccuugaugaa

SEQ ID NO: 163346 - RNA, 32 nt, Homo Sapiens
gucuuguagucuuuuuauuuugugcauccuua

SEQ ID NO: 163347 - RNA, 32 nt, Homo Sapiens
ucugcuaaaaauacaaaaacuagccaggcaug

SEQ ID NO: 163348 - RNA, 32 nt, Homo Sapiens
cagagaucaguuccaguugugaugcagugggu

SEQ ID NO: 163349 - RNA, 32 nt, Homo Sapiens
accccccgccccacuccagccaguguagggag

SEQ ID NO: 163350 - RNA, 32 nt, Homo Sapiens
uuacuaaucaaagaguuuuuuaucuuuuaacu

SEQ ID NO: 163351 - RNA, 32 nt, Homo Sapiens
uagaaguagaaauaaauuuucuuaaauaauga

SEQ ID NO: 163352 - RNA, 32 nt, Homo Sapiens
ucuuccgcagaaaaaugugcauguucuuuuag

SEQ ID NO: 163353 - RNA, 32 nt, Homo Sapiens
gggugguggggggacacaaacacaucagacac

SEQ ID NO: 163354 - RNA, 32 nt, Homo Sapiens
gugacaaugaccuguuuugcauccccucuuuc

SEQ ID NO: 163355 - RNA, 32 nt, Homo Sapiens
uguuuaucaguucaaaaaugcucugcacuguu

SEQ ID NO: 163356 - RNA, 32 nt, Homo Sapiens
aagucagauagucuucugcugcugguaccugg

SEQ ID NO: 163357 - RNA, 32 nt, Homo Sapiens
auuuuuagacucugaggagcaguuggagcuaa

SEQ ID NO: 163358 - RNA, 32 nt, Homo Sapiens
gaguggguucaggcccucugugguuaaagacu

SEQ ID NO: 163359 - RNA, 32 nt, Homo Sapiens
cgcuauuccuucccaccccacucagcugggcu

SEQ ID NO: 163360 - RNA, 32 nt, Homo Sapiens
acaagagaugacuuugaggauaaaaggaccaa

SEQ ID NO: 163361 - RNA, 32 nt, Homo Sapiens
uggaggacgcugagggcggaggcgggagaggc

SEQ ID NO: 163362 - RNA, 32 nt, Homo Sapiens
ccccucccaagccuggccuuggccuuggcaca

SEQ ID NO: 163363 - RNA, 32 nt, Homo Sapiens
gaaauuaugucaaaaugaaaacuguuuguuuc

SEQ ID NO: 163364 - RNA, 32 nt, Homo Sapiens
guauuucaaaccaaauuaaaaaaccucauaaa

SEQ ID NO: 163365 - RNA, 32 nt, Homo Sapiens
ccauugauccuucuaacaugcuguugacauca

SEQ ID NO: 163366 - RNA, 32 nt, Homo Sapiens
ucuaagauaaugggcucucagaauaaucucuc

SEQ ID NO: 163367 - RNA, 32 nt, Homo Sapiens
agugccaguggguuggugaacaugccaucagu

SEQ ID NO: 163368 - RNA, 31 nt, Homo Sapiens
ggagcuagaggaaccuccagagccuuccugc

SEQ ID NO: 163369 - RNA, 32 nt, Homo Sapiens
cccagaacagagcagagccaccuccuauagac

SEQ ID NO: 163370 - RNA, 32 nt, Homo Sapiens
cugaagaaaaaguuuguaaguacuguggaguc

SEQ ID NO: 163371 - RNA, 32 nt, Homo Sapiens
ccuaaauuaguagaucuaugugauaguauauu

SEQ ID NO: 163372 - RNA, 32 nt, Homo Sapiens
gcgugggggcugccuccccggcucccggugca

SEQ ID NO: 163373 - RNA, 32 nt, Homo Sapiens
auuguguucugagugaauccacuguuuguccu

SEQ ID NO: 163374 - RNA, 32 nt, Homo Sapiens
aacaaaaaauaauagcaaaaaauaacacugua

SEQ ID NO: 163375 - RNA, 32 nt, Homo Sapiens
gacuugccaccauauccacuaggugucacuac

SEQ ID NO: 163376 - RNA, 32 nt, Homo Sapiens
auggaucugcuguugguauuccuuggggugaa

SEQ ID NO: 163377 - RNA, 32 nt, Homo Sapiens
acaggucuccgugcgugaaccaggucugcuua

SEQ ID NO: 163378 - RNA, 32 nt, Homo Sapiens
gccucccgccccaacccaccccucagagaagg

SEQ ID NO: 163379 - RNA, 32 nt, Homo Sapiens
cacgcucggacgggccaggggcggcgaccccu

SEQ ID NO: 163380 - RNA, 32 nt, Homo Sapiens
agcagagguggcggccugggggucccgggagg

SEQ ID NO: 163381 - RNA, 32 nt, Homo Sapiens
guccuaagaacaaaaugaaagaaaaccaaaua

SEQ ID NO: 163382 - RNA, 32 nt, Homo Sapiens
ggaaaggaaagacauuaaaccauuaauuaagu

SEQ ID NO: 163383 - RNA, 32 nt, Homo Sapiens
ucugucaguuuagccgcgccggaccgugucaa

SEQ ID NO: 163384 - RNA, 32 nt, Homo Sapiens
cagagagggaggccagugucagggucggagug

SEQ ID NO: 163385 - RNA, 32 nt, Homo Sapiens
ucugggcuauggugcugggacgggugagaguu

SEQ ID NO: 163386 - RNA, 32 nt, Homo Sapiens
uucuugcacacgcugucacuuccucucacucg

SEQ ID NO: 163387 - RNA, 32 nt, Homo Sapiens
gggagagggaccuccuugugucuggcagagac

SEQ ID NO: 163388 - RNA, 32 nt, Homo Sapiens
guaauucuccaaguuuaguaauuuuauauuga

SEQ ID NO: 163389 - RNA, 32 nt, Homo Sapiens
aaagugaagauaagaaaauacucuuaaagcug

SEQ ID NO: 163390 - RNA, 32 nt, Homo Sapiens
aucugaaggcaucagucugcaucuuaggggau

SEQ ID NO: 163391 - RNA, 32 nt, Homo Sapiens
acugaagagcccccuguaaaucuuuauguggc

SEQ ID NO: 163392 - RNA, 32 nt, Homo Sapiens
cgccaccaccgcugccaacccuccccccacgc

SEQ ID NO: 163393 - RNA, 32 nt, Homo Sapiens
uggguucucgcaccugcucagcccugugucgg

SEQ ID NO: 163394 - RNA, 32 nt, Homo Sapiens
gacagccuucaggccuucuccucgcucagccc

SEQ ID NO: 163395 - RNA, 32 nt, Homo Sapiens
acugccaagaacuuaaaugacugguuuuuguu

SEQ ID NO: 163396 - RNA, 32 nt, Homo Sapiens
ugggcugacaggugcugcugccucugagcccu

SEQ ID NO: 163397 - RNA, 32 nt, Homo Sapiens
gcugaggauggcaaccuagugagccuggagga

SEQ ID NO: 163398 - RNA, 32 nt, Homo Sapiens
cgagucaccccuggguucugcagagcuggagc

SEQ ID NO: 163399 - RNA, 32 nt, Homo Sapiens
gucccaggaucaagaugggaccaucuaguugc

SEQ ID NO: 163400 - RNA, 32 nt, Homo Sapiens
ucacuccgcccggccccagcccuagcgcuggc

SEQ ID NO: 163401 - RNA, 32 nt, Homo Sapiens
uuaaagacuccaaggcuccacucuguagccag

SEQ ID NO: 163402 - RNA, 32 nt, Homo Sapiens
auaggacugacggaauugacuccauggcaaua

SEQ ID NO: 163403 - RNA, 32 nt, Homo Sapiens
uuauugcccccuugcucccacuccaugcugcu

SEQ ID NO: 163404 - RNA, 32 nt, Homo Sapiens
auguuuucugcgagaaucaauuggucauauac

SEQ ID NO: 163405 - RNA, 32 nt, Homo Sapiens
ccagacuuuuucugcccuuaggguaguacagc

SEQ ID NO: 163406 - RNA, 32 nt, Homo Sapiens
cacaguguucccucgcagcaccacaaccucag

SEQ ID NO: 163407 - RNA, 32 nt, Homo Sapiens
gcagcggaacaugucauuucucuauuucugug

SEQ ID NO: 163408 - RNA, 32 nt, Homo Sapiens
acugaaauuucuucuuguuuuggcugaugguu

SEQ ID NO: 163409 - RNA, 32 nt, Homo Sapiens
augcagguaaauauauauacuuacguguauau

SEQ ID NO: 163410 - RNA, 32 nt, Homo Sapiens
aggccugaccccaccccaucagucccucuccc

SEQ ID NO: 163411 - RNA, 32 nt, Homo Sapiens
aauguaaauauguauuaauccuuguaucuuuu

SEQ ID NO: 163412 - RNA, 31 nt, Homo Sapiens
guggaacagcgcagccgcuucgaguacccgc

SEQ ID NO: 163413 - RNA, 32 nt, Homo Sapiens
auuuugcaaucuauggaaauagaguagcaauu

SEQ ID NO: 163414 - RNA, 32 nt, Homo Sapiens
cucugcuuuuugcugcuguaagaccaccaaaa

SEQ ID NO: 163415 - RNA, 32 nt, Homo Sapiens
caauaccuuucuguacccguggugagacaaga

SEQ ID NO: 163416 - RNA, 32 nt, Homo Sapiens
cuccccgaggacaccucgcaccggaggaggag

SEQ ID NO: 163417 - RNA, 32 nt, Homo Sapiens
agcccuguguuccauucuggcuccuccacuaa

SEQ ID NO: 163418 - RNA, 32 nt, Homo Sapiens
gggcgccagggcggggacgcgccuacugagga

SEQ ID NO: 163419 - RNA, 32 nt, Homo Sapiens
agccuuggaaaaggcugugugaugaaagcuga

SEQ ID NO: 163420 - RNA, 32 nt, Homo Sapiens
cucgaacugguuguagugggaagucccgcgaa

SEQ ID NO: 163421 - RNA, 32 nt, Homo Sapiens
cugcccgugaauuucuguaugugugugcuguu

SEQ ID NO: 163422 - RNA, 32 nt, Homo Sapiens
agccuucucuacaggaaucucuuauguucccc

SEQ ID NO: 163423 - RNA, 32 nt, Homo Sapiens
cuggagagaaagugugugauuucucucccacc

SEQ ID NO: 163424 - RNA, 32 nt, Homo Sapiens
cauuccacccaauauaauaaaaccuguuaaga

SEQ ID NO: 163425 - RNA, 32 nt, Homo Sapiens
guuugagugaauuauuugauauauuacuuugu

SEQ ID NO: 163426 - RNA, 32 nt, Homo Sapiens
gugggaucauugcauuuccagaaaucugccuc

SEQ ID NO: 163427 - RNA, 32 nt, Homo Sapiens
gcaagcuuuuucuguaaagggcuagccagcaa

SEQ ID NO: 163428 - RNA, 32 nt, Homo Sapiens
gcucuaugaauuuaaccuugcugagccuuaac

SEQ ID NO: 163429 - RNA, 32 nt, Homo Sapiens
aacucuuccuugccgacagccaugcaguucuc

SEQ ID NO: 163430 - RNA, 32 nt, Homo Sapiens
cuuccccacaaggccuuugagguugugacugu

SEQ ID NO: 163431 - RNA, 32 nt, Homo Sapiens
aguuccggguccgggcagcagagaaaggaagu

SEQ ID NO: 163432 - RNA, 32 nt, Homo Sapiens
auuucucaacugagguucuugggauacagauc

SEQ ID NO: 163433 - RNA, 32 nt, Homo Sapiens
cgugucugucccccggccuccagggcuccucu

SEQ ID NO: 163434 - RNA, 32 nt, Homo Sapiens
gcccuccaaaguuccagucuccaggugcuguu

SEQ ID NO: 163435 - RNA, 32 nt, Homo Sapiens
cugcauccggacccucuccccaucccagccuc

SEQ ID NO: 163436 - RNA, 32 nt, Homo Sapiens
uguuggagccccacccugggcugccucucuag

SEQ ID NO: 163437 - RNA, 32 nt, Homo Sapiens
uggccucuacgagagguccucaucuccaucug

SEQ ID NO: 163438 - RNA, 32 nt, Homo Sapiens
ugcuacuuuaaaaucuaagggauugaaaaaug

SEQ ID NO: 163439 - RNA, 32 nt, Homo Sapiens
gcuuuucucugagaauggucuagguuuuuaau

SEQ ID NO: 163440 - RNA, 32 nt, Homo Sapiens
uucgaagaauuggcagaaucaguugcaauaaa

SEQ ID NO: 163441 - RNA, 32 nt, Homo Sapiens
aaaucuauuuuugcuaccagaugauagcuauu

SEQ ID NO: 163442 - RNA, 32 nt, Homo Sapiens
cggcggcgaacgagaggacggacucuggcggc

SEQ ID NO: 163443 - RNA, 32 nt, Homo Sapiens
cgggagccucugcgggcccagcuccugccucc

SEQ ID NO: 163444 - RNA, 32 nt, Homo Sapiens
gggaauuauggaugaugcugcagagugcuuug

SEQ ID NO: 163445 - RNA, 32 nt, Homo Sapiens
agggugggucugccucucccagcccacugacu

SEQ ID NO: 163446 - RNA, 32 nt, Homo Sapiens
caagcuauguacuuauuuucuauauuugggug

SEQ ID NO: 163447 - RNA, 32 nt, Homo Sapiens
gcuaccugggagaggagggaaucgcuggagaa

SEQ ID NO: 163448 - RNA, 32 nt, Homo Sapiens
cccccgcacggugaauguguucccuccgcugg

SEQ ID NO: 163449 - RNA, 32 nt, Homo Sapiens
ggcuggucucaaacuucugaccucaagugauc

SEQ ID NO: 163450 - RNA, 32 nt, Homo Sapiens
gcaguaaacaaaucuaugaugcuuguugaaua

SEQ ID NO: 163451 - RNA, 32 nt, Homo Sapiens
cugcuuuggugggacaugaggccucagugggu

SEQ ID NO: 163452 - RNA, 32 nt, Homo Sapiens
gaaucacugauccggccugcaagcauuuugca

SEQ ID NO: 163453 - RNA, 32 nt, Homo Sapiens
cuuuucuagaaaagaugaugggauccacuaga

SEQ ID NO: 163454 - RNA, 32 nt, Homo Sapiens
cagggcuaaugccaccaucuccccucaaaauu

SEQ ID NO: 163455 - RNA, 32 nt, Homo Sapiens
uccugagaagcuggaccccuugguaaaagaca

SEQ ID NO: 163456 - RNA, 32 nt, Homo Sapiens
cugaguggggcagaggcccagaagugccagcc

SEQ ID NO: 163457 - RNA, 32 nt, Homo Sapiens
ucccggacgaggaugaugaccuguggaaugaa

SEQ ID NO: 163458 - RNA, 32 nt, Homo Sapiens
gauuccccaauacuucccguuuccagccucca

SEQ ID NO: 163459 - RNA, 31 nt, Homo Sapiens
ccccggacgcacugccuccccgccggcguga

SEQ ID NO: 163460 - RNA, 32 nt, Homo Sapiens
aaaacaaccugaaagaggcgauugaaaccauu

SEQ ID NO: 163461 - RNA, 32 nt, Homo Sapiens
agccccugacauggcccucccaaggcuuggca

SEQ ID NO: 163462 - RNA, 32 nt, Homo Sapiens
gcccagcgccuggccuggggggcggggagagg

SEQ ID NO: 163463 - RNA, 32 nt, Homo Sapiens
cccuuggggcagagaccccaggccaguuaccu

SEQ ID NO: 163464 - RNA, 32 nt, Homo Sapiens
gguuucccuuuucucuuagccacaugcuaacc

SEQ ID NO: 163465 - RNA, 32 nt, Homo Sapiens
uccgucaagggugccgcgggaugugugucagu

SEQ ID NO: 163466 - RNA, 32 nt, Homo Sapiens
gaggccugcggcaccugccgcuccacaguaga

SEQ ID NO: 163467 - RNA, 32 nt, Homo Sapiens
ccagugguucuucagcccaugacagaugagaa

SEQ ID NO: 163468 - RNA, 32 nt, Homo Sapiens
gcccgcggcccuagcgccggcgcgaggagggg

SEQ ID NO: 163469 - RNA, 32 nt, Homo Sapiens
ggaggaaaggggucuguaaagcgggagaacaa

SEQ ID NO: 163470 - RNA, 32 nt, Homo Sapiens
gcuggggcgcgucuuucccaccacgaggccac

SEQ ID NO: 163471 - RNA, 32 nt, Homo Sapiens
cgagauuucgggggcggggcggggggcgggcc

SEQ ID NO: 163472 - RNA, 32 nt, Homo Sapiens
uggccccggacgcgcgagccugaggauucugc

SEQ ID NO: 163473 - RNA, 32 nt, Homo Sapiens
uuaccuuuguagcagccacaucagaaagcaga

SEQ ID NO: 163474 - RNA, 32 nt, Homo Sapiens
caaagggucaaagggaugcagagagagucgga

SEQ ID NO: 163475 - RNA, 32 nt, Homo Sapiens
uuuggggaaaagggcuggcucggagucuagac

SEQ ID NO: 163476 - RNA, 32 nt, Homo Sapiens
guguguagagggauggacaggaugcuguuuau

SEQ ID NO: 163477 - RNA, 28 nt, Homo Sapiens
aauaaaagggcucccauuauaaaugcca

SEQ ID NO: 163478 - RNA, 32 nt, Homo Sapiens
augguuaagcacacucuugaaaacuggagcuu

SEQ ID NO: 163479 - RNA, 32 nt, Homo Sapiens
ggucucuucuaccugcauucuaaaacauucaa

SEQ ID NO: 163480 - RNA, 32 nt, Homo Sapiens
cccuuguacuuuggagacagaagguacuggca

SEQ ID NO: 163481 - RNA, 30 nt, Homo Sapiens
uugcagcccugcucagguggcacagacugc

SEQ ID NO: 163482 - RNA, 32 nt, Homo Sapiens
ggagggauuuuucagguuucagcaugaacaug

SEQ ID NO: 163483 - RNA, 32 nt, Homo Sapiens
cgcuucagaaaagagugggacagggacaagca

SEQ ID NO: 163484 - RNA, 32 nt, Homo Sapiens
gcaaauauucaaagugauacaguaauaaacau

SEQ ID NO: 163485 - RNA, 32 nt, Homo Sapiens
acuggucaugcaagguccugggccugcccuug

SEQ ID NO: 163486 - RNA, 32 nt, Homo Sapiens
ucuacuugcuuugguuuucucauuucuaccau

SEQ ID NO: 163487 - RNA, 32 nt, Homo Sapiens
guucugguggcaguaacaugcaacaaaaaugu

SEQ ID NO: 163488 - RNA, 32 nt, Homo Sapiens
guaguuuacaaaacagaaaauacuuaacuagg

SEQ ID NO: 163489 - RNA, 32 nt, Homo Sapiens
acuauaaggguuauaguaaaaaauauucauua

SEQ ID NO: 163490 - RNA, 32 nt, Homo Sapiens
gaagacauccuacauaauacaaacacuaucca

SEQ ID NO: 163491 - RNA, 32 nt, Homo Sapiens
cgggccuugccgcggcagccauguccaugggc

SEQ ID NO: 163492 - RNA, 32 nt, Homo Sapiens
ucaaauuagagcauuuugaccaacugaaacau

SEQ ID NO: 163493 - RNA, 32 nt, Homo Sapiens
uggggggccccggcucuccccacgccccugcc

SEQ ID NO: 163494 - RNA, 32 nt, Homo Sapiens
cucaaggccggggcucugcguggcuugcuggg

SEQ ID NO: 163495 - RNA, 32 nt, Homo Sapiens
uauuuuuuaggaccaguuuauauauuucugca

SEQ ID NO: 163496 - RNA, 32 nt, Homo Sapiens
gaagcguuguccucagccccgcguggaacucg

SEQ ID NO: 163497 - RNA, 32 nt, Homo Sapiens
guggugcuggaucuccuucaggucuuucucac

SEQ ID NO: 163498 - RNA, 32 nt, Homo Sapiens
ugugcccaaauacauaguuuucauauuaaaaa

SEQ ID NO: 163499 - RNA, 32 nt, Homo Sapiens
cacagaugggaagacagaagcgccccugagug

SEQ ID NO: 163500 - RNA, 32 nt, Homo Sapiens
caaauuagauagucaauaaaacaucuugaaaa

SEQ ID NO: 163501 - RNA, 32 nt, Homo Sapiens
gcuggggucagaccugggguccucacugcagc

SEQ ID NO: 163502 - RNA, 32 nt, Homo Sapiens
auacaggaaaacuacauuuauuauuccucagu

SEQ ID NO: 163503 - RNA, 32 nt, Homo Sapiens
aggcacaggacagaaggaauuggaagggggcg

SEQ ID NO: 163504 - RNA, 32 nt, Homo Sapiens
ugaggaaggacaauucgacaaaagaauggaug

SEQ ID NO: 163505 - RNA, 32 nt, Homo Sapiens
aacucaucaaggaucuagucucucgacuccau

SEQ ID NO: 163506 - RNA, 32 nt, Homo Sapiens
uccuacccuggaaaaugaguaaugucucauuc

SEQ ID NO: 163507 - RNA, 30 nt, Homo Sapiens
gacacccgggccgugccgccagcguccguc

SEQ ID NO: 163508 - RNA, 32 nt, Homo Sapiens
uauaucugcaauuauucauacucuguaacacu

SEQ ID NO: 163509 - RNA, 32 nt, Homo Sapiens
cauccccaccuuccaaggaaaagcagaaguuc

SEQ ID NO: 163510 - RNA, 31 nt, Homo Sapiens
agaaggcggugcagccugcccgggcgagcca

SEQ ID NO: 163511 - RNA, 32 nt, Homo Sapiens
gguuuuauuuugauauacauaauuuuauggcc

SEQ ID NO: 163512 - RNA, 32 nt, Homo Sapiens
cacuggggggcaguguuggccaugguguuggu

SEQ ID NO: 163513 - RNA, 32 nt, Homo Sapiens
ccuaagccauuuccagaaugguaaaagguuua

SEQ ID NO: 163514 - RNA, 32 nt, Homo Sapiens
auccagggucauaaggauuuaucacuauguuu

SEQ ID NO: 163515 - RNA, 32 nt, Homo Sapiens
gagcuaaaucaccgugauugcuaaauauacuc

SEQ ID NO: 163516 - RNA, 32 nt, Homo Sapiens
uuugaauguauauuucuauuuaugauaccaau

SEQ ID NO: 163517 - RNA, 32 nt, Homo Sapiens
uuuaggauaauuaaauuaguuauauguaaagc

SEQ ID NO: 163518 - RNA, 32 nt, Homo Sapiens
aaggcacauaaauuauuuucccacuggaaacc

SEQ ID NO: 163519 - RNA, 32 nt, Homo Sapiens
ggccgcagccccagcgccccucgccuaaccuc

SEQ ID NO: 163520 - RNA, 32 nt, Homo Sapiens
acaucggcucuggccuggcacugcuaggcaug

SEQ ID NO: 163521 - RNA, 32 nt, Homo Sapiens
ccacucccgaucgcuccucccuggacacccgg

SEQ ID NO: 163522 - RNA, 32 nt, Homo Sapiens
cagcccucucacccgaggaucccuacccccug

SEQ ID NO: 163523 - RNA, 32 nt, Homo Sapiens
auuaagagaaaacauaauguuacuggguuuuu

SEQ ID NO: 163524 - RNA, 32 nt, Homo Sapiens
agaaagcccuccccugucuguccacacugacc

SEQ ID NO: 163525 - RNA, 32 nt, Homo Sapiens
cagguagaaguuggcagccugagcucuggagc

SEQ ID NO: 163526 - RNA, 32 nt, Homo Sapiens
uuuaugguuggacuuugaaauucugaccuuug

SEQ ID NO: 163527 - RNA, 32 nt, Homo Sapiens
augaggggacgccuggugaaaaugguguuugu

SEQ ID NO: 163528 - RNA, 32 nt, Homo Sapiens
ccagguuugcacaaucacuucuggcaaauuaa

SEQ ID NO: 163529 - RNA, 32 nt, Homo Sapiens
ugcuugcagagugcggcggggaggcgcggccc

SEQ ID NO: 163530 - RNA, 32 nt, Homo Sapiens
gagggcggguggcgcgggaggaagcggcggcg

SEQ ID NO: 163531 - RNA, 32 nt, Homo Sapiens
aaaauaaaaguguguuugaaaaauauuaucuu

SEQ ID NO: 163532 - RNA, 32 nt, Homo Sapiens
gggcagaugcugccacauagggguaauuccua

SEQ ID NO: 163533 - RNA, 30 nt, Homo Sapiens
agcagaggcaggcccucgggagcuguuccu

SEQ ID NO: 163534 - RNA, 32 nt, Homo Sapiens
gugugccuguguagcacccccaucggcccuca

SEQ ID NO: 163535 - RNA, 32 nt, Homo Sapiens
aggaaaguucccuuugguccacagggccauuu

SEQ ID NO: 163536 - RNA, 32 nt, Homo Sapiens
auaauuuauaacaaucucuggugaaaccucag

SEQ ID NO: 163537 - RNA, 28 nt, Homo Sapiens
cacgaggggcggccggugagggggaagc

SEQ ID NO: 163538 - RNA, 32 nt, Homo Sapiens
cagcagaaggcacagaacaguagcgggacugc

SEQ ID NO: 163539 - RNA, 32 nt, Homo Sapiens
uuuauaucgaucucuuauuuuacaauaaaacu

SEQ ID NO: 163540 - RNA, 32 nt, Homo Sapiens
aaauggugaaauuuaauguuuuuuaaacuagu

SEQ ID NO: 163541 - RNA, 32 nt, Homo Sapiens
uucuguggaaaacauacauucuguguuccucg

SEQ ID NO: 163542 - RNA, 32 nt, Homo Sapiens
cauaaagaaugggaaggcuuuuauugaugcca

SEQ ID NO: 163543 - RNA, 32 nt, Homo Sapiens
gggugggcuccuuagucagaugccuaaaacau

SEQ ID NO: 163544 - RNA, 32 nt, Homo Sapiens
uguggaaguuuauccuacaaaaauauuaauau

SEQ ID NO: 163545 - RNA, 32 nt, Homo Sapiens
gggguuucaucauauuggucaggguggucuca

SEQ ID NO: 163546 - RNA, 32 nt, Homo Sapiens
ccuaucagcugacuucuuccagugucuugcag

SEQ ID NO: 163547 - RNA, 32 nt, Homo Sapiens
uucagaauccagagaccaaacccugacccacc

SEQ ID NO: 163548 - RNA, 32 nt, Homo Sapiens
auuagaugaucaacuaaaaauagcuggaagac

SEQ ID NO: 163549 - RNA, 32 nt, Homo Sapiens
cagcauauucuuuucaacaaauggugcuggca

SEQ ID NO: 163550 - RNA, 32 nt, Homo Sapiens
gaagcacccagcuguuguuuacccuccaggac

SEQ ID NO: 163551 - RNA, 32 nt, Homo Sapiens
cguggugcagcucgucuuucugguggacucca

SEQ ID NO: 163552 - RNA, 32 nt, Homo Sapiens
agguuccugugcuguacaguggccagcagugu

SEQ ID NO: 163553 - RNA, 32 nt, Homo Sapiens
ugggacugugacugaggucuuaaagacugaaa

SEQ ID NO: 163554 - RNA, 32 nt, Homo Sapiens
acaccuugucugucuuugauaauaaagaugac

SEQ ID NO: 163555 - RNA, 32 nt, Homo Sapiens
uccuacccgagccccagcuguauuggaaaccc

SEQ ID NO: 163556 - RNA, 32 nt, Homo Sapiens
uuuuaaaaagcagggugauucuccuccaaggc

SEQ ID NO: 163557 - RNA, 32 nt, Homo Sapiens
uguauucaguagcaauacaagagauauguaga

SEQ ID NO: 163558 - RNA, 32 nt, Homo Sapiens
cggagcuccgcggcgggagcggaggcugcugc

SEQ ID NO: 163559 - RNA, 32 nt, Homo Sapiens
aggugggggaugcugaggagggggaggacgga

SEQ ID NO: 163560 - RNA, 32 nt, Homo Sapiens
guuguguauuacugagucuuggagucaucucu

SEQ ID NO: 163561 - RNA, 32 nt, Homo Sapiens
accagcaccacguuuacagaggaugaaaacac

SEQ ID NO: 163562 - RNA, 32 nt, Homo Sapiens
auagaugagccauuacagcaaggaauuuuaca

SEQ ID NO: 163563 - RNA, 32 nt, Homo Sapiens
gacuucaucucauugcucagcgcggaccuaga

SEQ ID NO: 163564 - RNA, 32 nt, Homo Sapiens
agcuaggaaguuuugagaaguaccuuuuaugu

SEQ ID NO: 163565 - RNA, 32 nt, Homo Sapiens
ucuuucugcuccaucguccccaaggaauaagu

SEQ ID NO: 163566 - RNA, 32 nt, Homo Sapiens
caaaaacgauuuuuuccaacuuaaaucagacu

SEQ ID NO: 163567 - RNA, 32 nt, Homo Sapiens
aaucauggcuauauuguuuuuauuuucuagau

SEQ ID NO: 163568 - RNA, 32 nt, Homo Sapiens
accccucggugccugggcccagccccgugccc

SEQ ID NO: 163569 - RNA, 32 nt, Homo Sapiens
guauucccauaucaaaagacacaggggacacc

SEQ ID NO: 163570 - RNA, 29 nt, Homo Sapiens
aaagaugcuuuuuaucuuuaacuuuuugu

SEQ ID NO: 163571 - RNA, 32 nt, Homo Sapiens
uuuugacucuuggaauucugugcuguuauaaa

SEQ ID NO: 163572 - RNA, 32 nt, Homo Sapiens
acaaccugaaauuuauucacauauaucaaagu

SEQ ID NO: 163573 - RNA, 32 nt, Homo Sapiens
guaguagcuaaugaaauugagaagggaaaucu

SEQ ID NO: 163574 - RNA, 32 nt, Homo Sapiens
guggccauccgcaaucguccuccccgcacgag

SEQ ID NO: 163575 - RNA, 32 nt, Homo Sapiens
cccugacggcccauuguccgcgggcccagccc

SEQ ID NO: 163576 - RNA, 32 nt, Homo Sapiens
cggacugggcugcccggggccaccgcagcucc

SEQ ID NO: 163577 - RNA, 32 nt, Homo Sapiens
ucaggaggucccagcccgggacugcccgcccc

SEQ ID NO: 163578 - RNA, 32 nt, Homo Sapiens
aaccacccccucaacugggaaaacaguaacug

SEQ ID NO: 163579 - RNA, 32 nt, Homo Sapiens
uuuugggaagguggcauuugucucauucccug

SEQ ID NO: 163580 - RNA, 32 nt, Homo Sapiens
gcccaguccacgccggccgugcccggcggccu

SEQ ID NO: 163581 - RNA, 32 nt, Homo Sapiens
cuccucagaccccaggacaaggcuggccucuc

SEQ ID NO: 163582 - RNA, 32 nt, Homo Sapiens
gccaagccucagccccagucccagccacaugu

SEQ ID NO: 163583 - RNA, 32 nt, Homo Sapiens
gggccgcggcugccgagacaagccggugcgca

SEQ ID NO: 163584 - RNA, 32 nt, Homo Sapiens
gaaauaaacugguuaaaacuacaugaugacag

SEQ ID NO: 163585 - RNA, 32 nt, Homo Sapiens
aagggccuauuuaacuccuaauaaaaaacugg

SEQ ID NO: 163586 - RNA, 32 nt, Homo Sapiens
auuuuuaaaaauacuuguauugacuaugaguu

SEQ ID NO: 163587 - RNA, 30 nt, Homo Sapiens
cggacauggcucccagcgugccagcggcag

SEQ ID NO: 163588 - RNA, 32 nt, Homo Sapiens
uucguuuuaaacaguuacucaguacuaggaug

SEQ ID NO: 163589 - RNA, 32 nt, Homo Sapiens
gcaaagauaauccauauuguagugcaagagga

SEQ ID NO: 163590 - RNA, 32 nt, Homo Sapiens
gauguguuuauuuauagaguguacuuaacuau

SEQ ID NO: 163591 - RNA, 32 nt, Homo Sapiens
cccagaagugccuuggcuccagcccuguaccc

SEQ ID NO: 163592 - RNA, 32 nt, Homo Sapiens
cucugcccacccagcgucagcccccagaaaaa

SEQ ID NO: 163593 - RNA, 32 nt, Homo Sapiens
uuaaaggaggcugccguggagcacggauacag

SEQ ID NO: 163594 - RNA, 32 nt, Homo Sapiens
cugcugcccagagcgugucccagacaucacag

SEQ ID NO: 163595 - RNA, 32 nt, Homo Sapiens
aguggcgaaaauuuuuucaugucagagaccga

SEQ ID NO: 163596 - RNA, 32 nt, Homo Sapiens
ccaccccgccccacccagauaaacuauaucua

SEQ ID NO: 163597 - RNA, 32 nt, Homo Sapiens
cagugccgccaucugucuucugugucugccuc

SEQ ID NO: 163598 - RNA, 32 nt, Homo Sapiens
guucacaggccuuuauaucuuccgauacagaa

SEQ ID NO: 163599 - RNA, 32 nt, Homo Sapiens
gugcugcccuccacccaaggccucagcuagag

SEQ ID NO: 163600 - RNA, 32 nt, Homo Sapiens
caggaccacaugaagcaaaaucucuaagcuaa

SEQ ID NO: 163601 - RNA, 32 nt, Homo Sapiens
ugaccaagaacaaaaaaggagcucaaguaaaa

SEQ ID NO: 163602 - RNA, 32 nt, Homo Sapiens
cacagaaaaaauacacuuuucaaccuacuguc

SEQ ID NO: 163603 - RNA, 32 nt, Homo Sapiens
ucuggaauuacagugucauacauauuuguucu

SEQ ID NO: 163604 - RNA, 32 nt, Homo Sapiens
aacgguaugugcucuccuucagcccucuccuu

SEQ ID NO: 163605 - RNA, 30 nt, Homo Sapiens
ucauggaaucuugcugcaggcccucccucu

SEQ ID NO: 163606 - RNA, 32 nt, Homo Sapiens
acggagugggugcugggcaagcagagccccca

SEQ ID NO: 163607 - RNA, 32 nt, Homo Sapiens
gcccgcacacccucacucugccagggcagugc

SEQ ID NO: 163608 - RNA, 32 nt, Homo Sapiens
ggggcagccgcgcccgcggaguuuuccgcccg

SEQ ID NO: 163609 - RNA, 32 nt, Homo Sapiens
accugauucaugcacagcguuugacacacaug

SEQ ID NO: 163610 - RNA, 32 nt, Homo Sapiens
ccugggguugcugagggaacgguuggaguggg

SEQ ID NO: 163611 - RNA, 32 nt, Homo Sapiens
aaacaaaaagcacuuuuuucuuaaugguagca

SEQ ID NO: 163612 - RNA, 32 nt, Homo Sapiens
acuccuuuucuccucuuggcuacauuaaaauu

SEQ ID NO: 163613 - RNA, 32 nt, Homo Sapiens
acuacucagggugacacccuugcccuaaagca

SEQ ID NO: 163614 - RNA, 32 nt, Homo Sapiens
ugaugucuuucagggaagcaguguuugaaaua

SEQ ID NO: 163615 - RNA, 32 nt, Homo Sapiens
aggaaauaaacuaauuguuaacuugcauagau

SEQ ID NO: 163616 - RNA, 32 nt, Homo Sapiens
uuuacucuuuugcauuggauaagacaaucaca

SEQ ID NO: 163617 - RNA, 32 nt, Homo Sapiens
gaagaggcccucagcccucccccggucucaga

SEQ ID NO: 163618 - RNA, 32 nt, Homo Sapiens
caaucaagauaaaaggugaucuauccauccaa

SEQ ID NO: 163619 - RNA, 32 nt, Homo Sapiens
cggcuugcugggagauguauucuuauaaacac

SEQ ID NO: 163620 - RNA, 32 nt, Homo Sapiens
gugcccaccuaggaccuuuccuggacaugagu

SEQ ID NO: 163621 - RNA, 32 nt, Homo Sapiens
cuccuccuccaccugcucuccucccuacccag

SEQ ID NO: 163622 - RNA, 32 nt, Homo Sapiens
caucucucccugcccuacuccgagggcuccuc

SEQ ID NO: 163623 - RNA, 32 nt, Homo Sapiens
cucacagagggagagaaagauguguacaaagg

SEQ ID NO: 163624 - RNA, 32 nt, Homo Sapiens
ccugauggucccugccuccauuucuagaaacu

SEQ ID NO: 163625 - RNA, 32 nt, Homo Sapiens
acaaaggauuuuaaaaucugagcacuuaggug

SEQ ID NO: 163626 - RNA, 32 nt, Homo Sapiens
uaucuaaggcuguuucucuccuccacuucaua

SEQ ID NO: 163627 - RNA, 32 nt, Homo Sapiens
uaccgaccugcgagcugacgggcccggaccau

SEQ ID NO: 163628 - RNA, 32 nt, Homo Sapiens
uauuucagauauccaaagcuuaccacuuuagg

SEQ ID NO: 163629 - RNA, 32 nt, Homo Sapiens
ggcuucauaguucuuuguaauauguugaaguu

SEQ ID NO: 163630 - RNA, 32 nt, Homo Sapiens
aggaccgcggugcuugcaaacaacacuuuaaa

SEQ ID NO: 163631 - RNA, 29 nt, Homo Sapiens
agccauggaacaccagcuccugugcugcg

SEQ ID NO: 163632 - RNA, 32 nt, Homo Sapiens
auauauaguuuaauguaaucaugcucauauuu

SEQ ID NO: 163633 - RNA, 32 nt, Homo Sapiens
gcggcgucuccauccacgcuaguuccccaugc

SEQ ID NO: 163634 - RNA, 32 nt, Homo Sapiens
gguugaaugauuccucuaaaucuuaucuuagc

SEQ ID NO: 163635 - RNA, 32 nt, Homo Sapiens
ggaaggugcucuuccccauggggacuguacca

SEQ ID NO: 163636 - RNA, 32 nt, Homo Sapiens
ugagguucagauacacauaccauggaaaaauc

SEQ ID NO: 163637 - RNA, 32 nt, Homo Sapiens
uuuuuauauuuggguuaugaugucaaacgauc

SEQ ID NO: 163638 - RNA, 32 nt, Homo Sapiens
guacagcccucccuguucuaccaccuuggugu

SEQ ID NO: 163639 - RNA, 32 nt, Homo Sapiens
cgcucuucaaccaucuguagaacacuuccccg

SEQ ID NO: 163640 - RNA, 32 nt, Homo Sapiens
uuccuuuuuaaagcuauauccuuggcuggaaa

SEQ ID NO: 163641 - RNA, 32 nt, Homo Sapiens
ccuguagcagagaaccaauucuggagaacagc

SEQ ID NO: 163642 - RNA, 32 nt, Homo Sapiens
cagugcagcgcggagugggcggugccagcgug

SEQ ID NO: 163643 - RNA, 32 nt, Homo Sapiens
ccaugauuugucugcuaagaagacggguuccu

SEQ ID NO: 163644 - RNA, 32 nt, Homo Sapiens
ccagaccggaggugcgucauucaccggcgacg

SEQ ID NO: 163645 - RNA, 32 nt, Homo Sapiens
cucauugaggacaaagaaaacugcacaauaaa

SEQ ID NO: 163646 - RNA, 32 nt, Homo Sapiens
ugaggaauguggaaaaucauaauugccgucug

SEQ ID NO: 163647 - RNA, 32 nt, Homo Sapiens
uaagagaaucuaaucuaauuguuuuuauaaaa

SEQ ID NO: 163648 - RNA, 32 nt, Homo Sapiens
guccuggagucuuugaggagcaacgauuugaa

SEQ ID NO: 163649 - RNA, 32 nt, Homo Sapiens
uguuuccgcaugcggagccacagcuaccuccg

SEQ ID NO: 163650 - RNA, 32 nt, Homo Sapiens
agaacaccaacccacacccugacugaagggcu

SEQ ID NO: 163651 - RNA, 32 nt, Homo Sapiens
aggaggggcugccgugaugcaacuugcccgug

SEQ ID NO: 163652 - RNA, 32 nt, Homo Sapiens
agcuugucaccauuggacagucucccugaugg

SEQ ID NO: 163653 - RNA, 32 nt, Homo Sapiens
ccucugccucccagguucaagccuccugagua

SEQ ID NO: 163654 - RNA, 32 nt, Homo Sapiens
aaaggcccuggcagggacuggaugcuggguac

SEQ ID NO: 163655 - RNA, 32 nt, Homo Sapiens
cccucgguugacaauggucuccaggauggucu

SEQ ID NO: 163656 - RNA, 32 nt, Homo Sapiens
ugagcaggggagacagggaucccgggcugcug

SEQ ID NO: 163657 - RNA, 32 nt, Homo Sapiens
guaaaauggaugaaaugaaaagagguucaauu

SEQ ID NO: 163658 - RNA, 32 nt, Homo Sapiens
cccguuucuggugauacuuggugcagagggua

SEQ ID NO: 163659 - RNA, 32 nt, Homo Sapiens
gcccugcccggggagcugcagagcagcagcac

SEQ ID NO: 163660 - RNA, 32 nt, Homo Sapiens
acauucuauacaaaacugugcugugaccuugc

SEQ ID NO: 163661 - RNA, 32 nt, Homo Sapiens
guucccauggaggguaguucccucguguggag

SEQ ID NO: 163662 - RNA, 32 nt, Homo Sapiens
agccgccgggagcggauggcggcggccguagc

SEQ ID NO: 163663 - RNA, 32 nt, Homo Sapiens
uacacauguaaaauauguaaaacuauggguua

SEQ ID NO: 163664 - RNA, 32 nt, Homo Sapiens
cugguuuccuggccagaugcuucucauccaca

SEQ ID NO: 163665 - RNA, 32 nt, Homo Sapiens
cguggcuguggagucagugugauucaugauug

SEQ ID NO: 163666 - RNA, 32 nt, Homo Sapiens
agccuggccaacaugaugaaaccccgucucua

SEQ ID NO: 163667 - RNA, 32 nt, Homo Sapiens
uugaaacaaccugaucauugaagccaacuuug

SEQ ID NO: 163668 - RNA, 32 nt, Homo Sapiens
uauacucaucagauaauacuuuucuuacauaa

SEQ ID NO: 163669 - RNA, 32 nt, Homo Sapiens
cggucggaagggcgucgcgcggccucggguga

SEQ ID NO: 163670 - RNA, 32 nt, Homo Sapiens
gggacugguggcaacugguaacguuuucagug

SEQ ID NO: 163671 - RNA, 32 nt, Homo Sapiens
ucucucgccccaggugcccgcgcgcgugguga

SEQ ID NO: 163672 - RNA, 32 nt, Homo Sapiens
aaauuaucuaauguaauaaagucagacaaaau

SEQ ID NO: 163673 - RNA, 32 nt, Homo Sapiens
ucccauauguauauauaaaauaauguguuuua

SEQ ID NO: 163674 - RNA, 32 nt, Homo Sapiens
gaaagcagagugccagggagugagauugcauc

SEQ ID NO: 163675 - RNA, 32 nt, Homo Sapiens
cucauuucguccucuuuccccagaacccccca

SEQ ID NO: 163676 - RNA, 32 nt, Homo Sapiens
caaaccuguacgcuuuuccugccucccaaggc

SEQ ID NO: 163677 - RNA, 31 nt, Homo Sapiens
ccuuuuaugacggcccuugggauuaaggcua

SEQ ID NO: 163678 - RNA, 32 nt, Homo Sapiens
aucguucccacggaccaugcuccggagucuca

SEQ ID NO: 163679 - RNA, 32 nt, Homo Sapiens
uuugugaauaaaauuaucaccugguauucuua

SEQ ID NO: 163680 - RNA, 32 nt, Homo Sapiens
aggaagagcauugaggaauauuauuaucguuc

SEQ ID NO: 163681 - RNA, 32 nt, Homo Sapiens
cagucuuuguuguuugcuucuucccuacggau

SEQ ID NO: 163682 - RNA, 30 nt, Homo Sapiens
uuccuggccuacugcauccuugugggaguc

SEQ ID NO: 163683 - RNA, 32 nt, Homo Sapiens
cucuaccaucuuaauguaguaacuuuagaauu

SEQ ID NO: 163684 - RNA, 32 nt, Homo Sapiens
aauacaguauaccgcaguggcucuagguggag

SEQ ID NO: 163685 - RNA, 32 nt, Homo Sapiens
ucaguguuuaguauguuguucuaaccagucca

SEQ ID NO: 163686 - RNA, 32 nt, Homo Sapiens
cuuggugucagggagcccccaggccgcaggug

SEQ ID NO: 163687 - RNA, 32 nt, Homo Sapiens
aggaaugcaauaaagaguaaauauacuugaaa

SEQ ID NO: 163688 - RNA, 32 nt, Homo Sapiens
agaggaggcaauacagugggacaguuaggaau

SEQ ID NO: 163689 - RNA, 32 nt, Homo Sapiens
gcaaacaaacaaaauucaaaccagcccccuau

SEQ ID NO: 163690 - RNA, 27 nt, Homo Sapiens
gucccuccccucuucagcacucagcgc

SEQ ID NO: 163691 - RNA, 32 nt, Homo Sapiens
ggacgccagagcugcuucagcggugaccaccu

SEQ ID NO: 163692 - RNA, 32 nt, Homo Sapiens
guccccgcgcccagcccucggugcugccuccg

SEQ ID NO: 163693 - RNA, 32 nt, Homo Sapiens
cguaggcggcggggcgccccccaugcugcugc

SEQ ID NO: 163694 - RNA, 32 nt, Homo Sapiens
auauaaucauauccaguuuaaucuucacaaua

SEQ ID NO: 163695 - RNA, 32 nt, Homo Sapiens
uuaaauugccaaacaugggaacagccuugaau

SEQ ID NO: 163696 - RNA, 32 nt, Homo Sapiens
ucaauuggccagucuucugaucuuuaguaucu

SEQ ID NO: 163697 - RNA, 32 nt, Homo Sapiens
ucugaagauuuaauguguuuauucaaaugugg

SEQ ID NO: 163698 - RNA, 32 nt, Homo Sapiens
ugacugcugucauggcgugcccucuggagaag

SEQ ID NO: 163699 - RNA, 32 nt, Homo Sapiens
cagaacugcccggcuuuuuuggaaacugagga

SEQ ID NO: 163700 - RNA, 32 nt, Homo Sapiens
auccaguggguggaggccaggggggugggggg

SEQ ID NO: 163701 - RNA, 32 nt, Homo Sapiens
cgcaugcccuguacagacuuuuggggaacugg

SEQ ID NO: 163702 - RNA, 32 nt, Homo Sapiens
auaucucacagcacaaaguucaaauguaugcc

SEQ ID NO: 163703 - RNA, 30 nt, Homo Sapiens
acccgcggcgcgcagugucccgugaacugu

SEQ ID NO: 163704 - RNA, 32 nt, Homo Sapiens
aaagcauaacuagauuuuucuaucuucugugg

SEQ ID NO: 163705 - RNA, 32 nt, Homo Sapiens
gccuuuguggguggaaauaugucuccaguuac

SEQ ID NO: 163706 - RNA, 30 nt, Homo Sapiens
uccccgcgcaggcgcgcucgggcugccgcu

SEQ ID NO: 163707 - RNA, 32 nt, Homo Sapiens
ugugauuuggugaagaggcauuccuuguaaua

SEQ ID NO: 163708 - RNA, 32 nt, Homo Sapiens
accuuccuuucuggaguuugcagaguucagca

SEQ ID NO: 163709 - RNA, 32 nt, Homo Sapiens
ucgucugcccaucacucuggugugguacccag

SEQ ID NO: 163710 - RNA, 32 nt, Homo Sapiens
uccuuuaaaaacuacaucuuuccuaugcaaga

SEQ ID NO: 163711 - RNA, 32 nt, Homo Sapiens
ccucauaaacauugacaaauugcucugccccg

SEQ ID NO: 163712 - RNA, 32 nt, Homo Sapiens
uuggccgcuggcggagcgcuggggcagcauga

SEQ ID NO: 163713 - RNA, 32 nt, Homo Sapiens
agcugaugaacgugaagcuggcccuggacauc

SEQ ID NO: 163714 - RNA, 32 nt, Homo Sapiens
aggcacaugcgugccuggcucccucugguuuc

SEQ ID NO: 163715 - RNA, 32 nt, Homo Sapiens
cuaauuuauaguuuaaauuuauuuguguuucu

SEQ ID NO: 163716 - RNA, 32 nt, Homo Sapiens
cgagguuagggcccgcguugcgacguggugca

SEQ ID NO: 163717 - RNA, 32 nt, Homo Sapiens
ccggaacugcaguugcugcugcagcugaggua

SEQ ID NO: 163718 - RNA, 32 nt, Homo Sapiens
uuccacguucuucuuucccaacauauaaccac

SEQ ID NO: 163719 - RNA, 32 nt, Homo Sapiens
agccggcgcccugccuggcccggcggccuccu

SEQ ID NO: 163720 - RNA, 32 nt, Homo Sapiens
agauugggccauccuuacuuuaugauaggcau

SEQ ID NO: 163721 - RNA, 32 nt, Homo Sapiens
acacaagcuggagauaaauuuggugaacauaa

SEQ ID NO: 163722 - RNA, 32 nt, Homo Sapiens
ccaccagaugcuggacacccucuucccaucug

SEQ ID NO: 163723 - RNA, 32 nt, Homo Sapiens
auuuguuuuuaaaacuacuuagguaugauuca

SEQ ID NO: 163724 - RNA, 32 nt, Homo Sapiens
aauauuuuuauuugcagauuucguuuccguca

SEQ ID NO: 163725 - RNA, 32 nt, Homo Sapiens
aaguuggucuucaccuaauuaccuguuugguu

SEQ ID NO: 163726 - RNA, 32 nt, Homo Sapiens
auuguggaguggcaagugcugcugccagagac

SEQ ID NO: 163727 - RNA, 32 nt, Homo Sapiens
ccaaaaaccaagcucuaccccauccccauccc

SEQ ID NO: 163728 - RNA, 32 nt, Homo Sapiens
cugaauggcuccaccccucccccagcccugcu

SEQ ID NO: 163729 - RNA, 32 nt, Homo Sapiens
ggcucggcgcggugguuggccagugggaaauu

SEQ ID NO: 163730 - RNA, 32 nt, Homo Sapiens
gccuuccgcguuccgccgcggccccaccugga

SEQ ID NO: 163731 - RNA, 32 nt, Homo Sapiens
gaaaucuaaucaugccuauuaaggauguaaga

SEQ ID NO: 163732 - RNA, 32 nt, Homo Sapiens
accuaugccacuuuucucuucaaugccuuuga

SEQ ID NO: 163733 - RNA, 32 nt, Homo Sapiens
ccugcagcugcuucuccacaccccugcccacc

SEQ ID NO: 163734 - RNA, 32 nt, Homo Sapiens
gaguacccuguuuccugcacccuaacacuagg

SEQ ID NO: 163735 - RNA, 32 nt, Homo Sapiens
acgacuugcagagcggcuggcgcagucauggc

SEQ ID NO: 163736 - RNA, 32 nt, Homo Sapiens
augaauuagcaauucuuaguaucaagauucuc

SEQ ID NO: 163737 - RNA, 32 nt, Homo Sapiens
cuauucuugaguucuuaaguacagaagauaga

SEQ ID NO: 163738 - RNA, 32 nt, Homo Sapiens
uguucuuccccuccccgcuccuaaugguacgu

SEQ ID NO: 163739 - RNA, 32 nt, Homo Sapiens
uucccugucuucuuucagauuaucucauuucu

SEQ ID NO: 163740 - RNA, 32 nt, Homo Sapiens
cucaaauuacaauaaacauacuaagacaaugg

SEQ ID NO: 163741 - RNA, 32 nt, Homo Sapiens
gcaacaccagucuguuuuuaacagguucuauu

SEQ ID NO: 163742 - RNA, 32 nt, Homo Sapiens
aaacagagcuugucucaccauguauuucucaa

SEQ ID NO: 163743 - RNA, 32 nt, Homo Sapiens
aaagaaagaaaguuuagaagcugagacacaaa

SEQ ID NO: 163744 - RNA, 32 nt, Homo Sapiens
cugcauguuuauuaugauacuuucucuccaaa

SEQ ID NO: 163745 - RNA, 32 nt, Homo Sapiens
gauuuagccauguuuuugcaugugucaauagu

SEQ ID NO: 163746 - RNA, 32 nt, Homo Sapiens
guguccaggcuaucagcagagaaagacaggug

SEQ ID NO: 163747 - RNA, 27 nt, Homo Sapiens
gcacuuuguuacuucagccucucacua

SEQ ID NO: 163748 - RNA, 32 nt, Homo Sapiens
augcagccaagaagaggagaccgucggcaacg

SEQ ID NO: 163749 - RNA, 32 nt, Homo Sapiens
ccuagaggguauaaaaucaucucugcucagau

SEQ ID NO: 163750 - RNA, 32 nt, Homo Sapiens
aggggugcucauucucuuagggugcuguauua

SEQ ID NO: 163751 - RNA, 32 nt, Homo Sapiens
uguauguauaaugguagguguuugugugugau

SEQ ID NO: 163752 - RNA, 32 nt, Homo Sapiens
uucuucuuaucuuguuauuacgguuuuauuaa

SEQ ID NO: 163753 - RNA, 32 nt, Homo Sapiens
cagacuucuccacgcgcuggcuccauaaaggc

SEQ ID NO: 163754 - RNA, 28 nt, Homo Sapiens
uauaaaguaauauucaggaugaugauaa

SEQ ID NO: 163755 - RNA, 32 nt, Homo Sapiens
ugaauaaaccugugccuauuuuggaguucaca

SEQ ID NO: 163756 - RNA, 32 nt, Homo Sapiens
cucuuuuauuuuuuauuuuuucgcaucaguau

SEQ ID NO: 163757 - RNA, 32 nt, Homo Sapiens
gugauccuuaguauguuaauucuuaagaaacc

SEQ ID NO: 163758 - RNA, 32 nt, Homo Sapiens
gggcacccaagcccuggcuuguccuucccaga

SEQ ID NO: 163759 - RNA, 28 nt, Homo Sapiens
ugaugaugaugaugaugaugaugucgac

SEQ ID NO: 163760 - RNA, 32 nt, Homo Sapiens
ggucugcagaaucucauagugauuccaaucua

SEQ ID NO: 163761 - RNA, 30 nt, Homo Sapiens
ucaaggggcaggcggugagccugggaggcc

SEQ ID NO: 163762 - RNA, 32 nt, Homo Sapiens
aggaggcaccugaguucucugcuguuauccug

SEQ ID NO: 163763 - RNA, 32 nt, Homo Sapiens
cgagcuucccggcugcuuuguuuaccuaauca

SEQ ID NO: 163764 - RNA, 32 nt, Homo Sapiens
gggccagagcagcagagcuggcccaacaggcu

SEQ ID NO: 163765 - RNA, 32 nt, Homo Sapiens
aggaacaccuuauuagccauauuuucaaaugg

SEQ ID NO: 163766 - RNA, 32 nt, Homo Sapiens
uuugggaauauuugaaucuugucucaaugcuc

SEQ ID NO: 163767 - RNA, 32 nt, Homo Sapiens
guccuagaauaagaagcaaugaugugcugcuu

SEQ ID NO: 163768 - RNA, 32 nt, Homo Sapiens
cucucacuguagaacugccucuguggagaagc

SEQ ID NO: 163769 - RNA, 32 nt, Homo Sapiens
ccaccauucuuuccuuuaugaaccgauggugc

SEQ ID NO: 163770 - RNA, 32 nt, Homo Sapiens
gcggugccggguugacuuggcugggguggugg

SEQ ID NO: 163771 - RNA, 31 nt, Homo Sapiens
gccagcugacccucaguuccugaaacacaga

SEQ ID NO: 163772 - RNA, 29 nt, Homo Sapiens
acgcguccgguccgugaggcgcgggcggc

SEQ ID NO: 163773 - RNA, 32 nt, Homo Sapiens
uuguacuuauuuacaaaacagucuuguucaga

SEQ ID NO: 163774 - RNA, 32 nt, Homo Sapiens
aaaacuauaaugguuuucauuuuuuacuuaau

SEQ ID NO: 163775 - RNA, 32 nt, Homo Sapiens
cggccgggcggggucccggcugagagaggccg

SEQ ID NO: 163776 - RNA, 32 nt, Homo Sapiens
cgcauccugggugaugaagucagacacgcagc

SEQ ID NO: 163777 - RNA, 32 nt, Homo Sapiens
guucuccccuccuggcagucaggccgcguccc

SEQ ID NO: 163778 - RNA, 32 nt, Homo Sapiens
ugaaauaaacuuaugaaauguuuucucucuua

SEQ ID NO: 163779 - RNA, 32 nt, Homo Sapiens
cuuaggaucuuuucuuuuuauacaaggaaagc

SEQ ID NO: 163780 - RNA, 32 nt, Homo Sapiens
aacgugauucccuccccuuauuucuucaggcc

SEQ ID NO: 163781 - RNA, 32 nt, Homo Sapiens
caggggcgucagggauccugcugccggcaccc

SEQ ID NO: 163782 - RNA, 32 nt, Homo Sapiens
gaaggccauuggcagccgggagcauauauaca

SEQ ID NO: 163783 - RNA, 32 nt, Homo Sapiens
cucgugcaugcccgaccucgcuccucacggcu

SEQ ID NO: 163784 - RNA, 32 nt, Homo Sapiens
ggguugggguggggcgggaggccacgggggag

SEQ ID NO: 163785 - RNA, 32 nt, Homo Sapiens
gguuuccuccucugcaggguuuugcuaguaau

SEQ ID NO: 163786 - RNA, 32 nt, Homo Sapiens
cugucgcuggggcugcggcugcugagccguuc

SEQ ID NO: 163787 - RNA, 32 nt, Homo Sapiens
cugaugcccaagcugaagacguagcuccuccg

SEQ ID NO: 163788 - RNA, 32 nt, Homo Sapiens
acagaaucaaauauugaagauuuuauaaaauc

SEQ ID NO: 163789 - RNA, 32 nt, Homo Sapiens
gucacaacuuguacuuuuuuuauauacuucaa

SEQ ID NO: 163790 - RNA, 32 nt, Homo Sapiens
cuagggucugugaacgaggccugucucuuccc

SEQ ID NO: 163791 - RNA, 32 nt, Homo Sapiens
cacgcgcacacacacacacacacacacagagc

SEQ ID NO: 163792 - RNA, 32 nt, Homo Sapiens
cuggugaccugccuggucccugacucugcaag

SEQ ID NO: 163793 - RNA, 32 nt, Homo Sapiens
cgcuuuuguaagaaucagauggcauuaugcuu

SEQ ID NO: 163794 - RNA, 31 nt, Homo Sapiens
gccugccucaaugccaucucucacucuccuu

SEQ ID NO: 163795 - RNA, 32 nt, Homo Sapiens
uggaugagcuacugauccuuucugggguguuu

SEQ ID NO: 163796 - RNA, 32 nt, Homo Sapiens
cccugugcccucugucuucccccucccacagg

SEQ ID NO: 163797 - RNA, 32 nt, Homo Sapiens
uuuuuuagaaauuuauaauuuuauaguucuuu

SEQ ID NO: 163798 - RNA, 32 nt, Homo Sapiens
ucccagcccuccucagccccagcccugccugc

SEQ ID NO: 163799 - RNA, 32 nt, Homo Sapiens
gacgcuucuucucagccuccagucuccaguuc

SEQ ID NO: 163800 - RNA, 32 nt, Homo Sapiens
gugaaauagcuaaccucuguuucaagaaugca

SEQ ID NO: 163801 - RNA, 32 nt, Homo Sapiens
caaccagacacauccaugggugucacagcuca

SEQ ID NO: 163802 - RNA, 32 nt, Homo Sapiens
guuguuacauacauaucuaaguaaaucaaagu

SEQ ID NO: 163803 - RNA, 32 nt, Homo Sapiens
ggcuuccucacuccuucucuagcucgagacgc

SEQ ID NO: 163804 - RNA, 32 nt, Homo Sapiens
caaagaaaucgaucuuuuuuuucuaaaaaaaa

SEQ ID NO: 163805 - RNA, 32 nt, Homo Sapiens
caccuauggucuuuuuaaaugucgaguuucaa

SEQ ID NO: 163806 - RNA, 32 nt, Homo Sapiens
uuggaaagaggucauauuaauuuuaucacauu

SEQ ID NO: 163807 - RNA, 32 nt, Homo Sapiens
cguuuuaugagguugauaucggugcuaugugu

SEQ ID NO: 163808 - RNA, 32 nt, Homo Sapiens
cugcagcggagugacagcaaccccagagauga

SEQ ID NO: 163809 - RNA, 32 nt, Homo Sapiens
cacaagucaaggaacccagggccagcuggaag

SEQ ID NO: 163810 - RNA, 32 nt, Homo Sapiens
uaagaacaaaaauugccaaaaauuucuaccac

SEQ ID NO: 163811 - RNA, 32 nt, Homo Sapiens
uuggcugcuguaacaaauuaccaccaauaaua

SEQ ID NO: 163812 - RNA, 32 nt, Homo Sapiens
agcagaaauuuaucuuucaaagagguauauuu

SEQ ID NO: 163813 - RNA, 32 nt, Homo Sapiens
ccagggucaguuccugaaguucacucagaggg

SEQ ID NO: 163814 - RNA, 32 nt, Homo Sapiens
agugcaagacugaauuaaugagaagauauauu

SEQ ID NO: 163815 - RNA, 32 nt, Homo Sapiens
gaggcucuggguggggccugcuccucaucccc

SEQ ID NO: 163816 - RNA, 32 nt, Homo Sapiens
augcggucaggaguucgagaccagccuggcca

SEQ ID NO: 163817 - RNA, 32 nt, Homo Sapiens
gauggaauugguuagaucucucacugucucag

SEQ ID NO: 163818 - RNA, 32 nt, Homo Sapiens
aaucucuuuuugauuuucaaggaaacuagguu

SEQ ID NO: 163819 - RNA, 32 nt, Homo Sapiens
caguggaagauacuuggaccgaguagaggcau

SEQ ID NO: 163820 - RNA, 32 nt, Homo Sapiens
gccuggugggagaggacggcggagggcagagc

SEQ ID NO: 163821 - RNA, 32 nt, Homo Sapiens
aacagaauccuuuuccucuuuuccuuccuccu

SEQ ID NO: 163822 - RNA, 32 nt, Homo Sapiens
uaaaacucuuucuggggaauccaauuauaguu

SEQ ID NO: 163823 - RNA, 32 nt, Homo Sapiens
cucccauugccuuccuggcccgggauagaaga

SEQ ID NO: 163824 - RNA, 32 nt, Homo Sapiens
gaguuuacaguaaaaauaagauuagggauaaa

SEQ ID NO: 163825 - RNA, 32 nt, Homo Sapiens
uggggagcauuuuuguugauaauuuuacugau

SEQ ID NO: 163826 - RNA, 32 nt, Homo Sapiens
uguguaaagggacuaaauauuuuugcaacagc

SEQ ID NO: 163827 - RNA, 32 nt, Homo Sapiens
ggaaacucagcccagacaccccugcccagccc

SEQ ID NO: 163828 - RNA, 32 nt, Homo Sapiens
ucaagcaguccucccaccccagccucugagua

SEQ ID NO: 163829 - RNA, 32 nt, Homo Sapiens
gauacuguuuuaaagaacaggugugaaagucu

SEQ ID NO: 163830 - RNA, 32 nt, Homo Sapiens
gugccaaacuggcuacugcugcuuccuguggc

SEQ ID NO: 163831 - RNA, 32 nt, Homo Sapiens
auguucagauaauugaauaaguaccuuugugu

SEQ ID NO: 163832 - RNA, 32 nt, Homo Sapiens
ucuccuguguauauuucuuuuccacaguuggc

SEQ ID NO: 163833 - RNA, 32 nt, Homo Sapiens
aucauaagcugauuugauaccauggcacugac

SEQ ID NO: 163834 - RNA, 32 nt, Homo Sapiens
cucccuuggguauacaauuugcuguguaguga

SEQ ID NO: 163835 - RNA, 31 nt, Homo Sapiens
uggaggccuuccugccugccuuccagcgugg

SEQ ID NO: 163836 - RNA, 30 nt, Homo Sapiens
gaagauuuuccgucgccgccggggcgacuc

SEQ ID NO: 163837 - RNA, 32 nt, Homo Sapiens
caaaauugcuaaaagaugagauuuuaaauguu

SEQ ID NO: 163838 - RNA, 32 nt, Homo Sapiens
cuuuagccgggcggggacagacagagccggaa

SEQ ID NO: 163839 - RNA, 32 nt, Homo Sapiens
cuagucuuaaaacaaagaaagaacgaaugaau

SEQ ID NO: 163840 - RNA, 32 nt, Homo Sapiens
gggcaagguacauuuaaucaguaaaucaguuu

SEQ ID NO: 163841 - RNA, 32 nt, Homo Sapiens
cuccccacacugccucaccuggaaagccgugu

SEQ ID NO: 163842 - RNA, 32 nt, Homo Sapiens
ggcuuugaaaacuacuucuauuaaguuauuga

SEQ ID NO: 163843 - RNA, 32 nt, Homo Sapiens
acgugcgcggggagcgcggggagcgcggggag

SEQ ID NO: 163844 - RNA, 32 nt, Homo Sapiens
gcccucugcugucaccacuuggucagaaacuu

SEQ ID NO: 163845 - RNA, 32 nt, Homo Sapiens
cuccccuuacuggcagagcgcgcugcgggcgg

SEQ ID NO: 163846 - RNA, 32 nt, Homo Sapiens
cagaucuccagcuuugaucuguuuccuuuacu

SEQ ID NO: 163847 - RNA, 32 nt, Homo Sapiens
ccaggacacagaggggcagagcaagucagcau

SEQ ID NO: 163848 - RNA, 32 nt, Homo Sapiens
acgggcuccccucgagggagacuugcaaaugc

SEQ ID NO: 163849 - RNA, 32 nt, Homo Sapiens
acucuucgcagugaacaaaacccagacuucag

SEQ ID NO: 163850 - RNA, 31 nt, Homo Sapiens
ccugggcacccaggccugcccugccugcugg

SEQ ID NO: 163851 - RNA, 32 nt, Homo Sapiens
augucuuaaugauuggugcugcuaacuugcgu

SEQ ID NO: 163852 - RNA, 32 nt, Homo Sapiens
cugugccaagcacuuuccucuuuuacagcugg

SEQ ID NO: 163853 - RNA, 32 nt, Homo Sapiens
cugcuggggaggggcgggaggcgcgcgcggga

SEQ ID NO: 163854 - RNA, 32 nt, Homo Sapiens
gaggcuggggaugcagcuaggugcugguuccu

SEQ ID NO: 163855 - RNA, 32 nt, Homo Sapiens
agacccaccccgagcccccuccccuccccucc

SEQ ID NO: 163856 - RNA, 32 nt, Homo Sapiens
ugugucccgcgggaacccgcauuggcagcggg

SEQ ID NO: 163857 - RNA, 32 nt, Homo Sapiens
uggaagaaaguaaguauagacagagagaaagg

SEQ ID NO: 163858 - RNA, 32 nt, Homo Sapiens
ugcccucucccauuuucuguuuugaguuauuu

SEQ ID NO: 163859 - RNA, 32 nt, Homo Sapiens
uuuuaaauuuaaaucacuguguuugguauuuu

SEQ ID NO: 163860 - RNA, 32 nt, Homo Sapiens
ccuacauuucucuuuccagcugcuguuuugua

SEQ ID NO: 163861 - RNA, 32 nt, Homo Sapiens
aauaaauaaaaugucaucuguuaggaagccau

SEQ ID NO: 163862 - RNA, 32 nt, Homo Sapiens
aucacauuuguguuuuauuuuauuuuacuuua

SEQ ID NO: 163863 - RNA, 32 nt, Homo Sapiens
gcuaaacuaauuugaaccuaccuaguauauua

SEQ ID NO: 163864 - RNA, 32 nt, Homo Sapiens
uuguggguuaguaugucucuuacuucaauuaa

SEQ ID NO: 163865 - RNA, 32 nt, Homo Sapiens
gccgcagugauguugacgcggcugguccucag

SEQ ID NO: 163866 - RNA, 32 nt, Homo Sapiens
ugccuggccguggggcggccagagcccacggu

SEQ ID NO: 163867 - RNA, 32 nt, Homo Sapiens
gggccgugauagaauuaagugauuugaugucc

SEQ ID NO: 163868 - RNA, 32 nt, Homo Sapiens
guuuucuaaaauuuuuuccugcaucaguucuu

SEQ ID NO: 163869 - RNA, 32 nt, Homo Sapiens
gagcgccggccgcggugcccaggcacucccuu

SEQ ID NO: 163870 - RNA, 32 nt, Homo Sapiens
gggagccccaacacacgguccacagcucauca

SEQ ID NO: 163871 - RNA, 32 nt, Homo Sapiens
cuugucucucaaagcuauuauauauugcuuug

SEQ ID NO: 163872 - RNA, 32 nt, Homo Sapiens
guagcuuuuuggucuaucuacucguggucaac

SEQ ID NO: 163873 - RNA, 32 nt, Homo Sapiens
guuaugaaaaggcagaauacuggcaagaaaug

SEQ ID NO: 163874 - RNA, 30 nt, Homo Sapiens
ucgaggggcugugcugcaggccuccccucg

SEQ ID NO: 163875 - RNA, 32 nt, Homo Sapiens
cauccuagcccgcccccuccccggcucuggac

SEQ ID NO: 163876 - RNA, 32 nt, Homo Sapiens
gacuguguuguacagcuagaaaaggccuucuu

SEQ ID NO: 163877 - RNA, 32 nt, Homo Sapiens
ccaugucgccucccccgaugccugcagggcag

SEQ ID NO: 163878 - RNA, 32 nt, Homo Sapiens
cgccgccccuccccggacuccccacaagagcc

SEQ ID NO: 163879 - RNA, 32 nt, Homo Sapiens
ggaaggccaugaccuccuccuuuggggagguc

SEQ ID NO: 163880 - RNA, 32 nt, Homo Sapiens
aaaggcuguggccaccugaugacccuuucccu

SEQ ID NO: 163881 - RNA, 32 nt, Homo Sapiens
ucccacuccacuccucugauguuuccuacacu

SEQ ID NO: 163882 - RNA, 32 nt, Homo Sapiens
uaaaacuuguuggaauuuuuacggcuuuugug

SEQ ID NO: 163883 - RNA, 32 nt, Homo Sapiens
ugagccgccggggccccccugcugccagccuc

SEQ ID NO: 163884 - RNA, 32 nt, Homo Sapiens
ugaaccccagggugggaccccagcacagaggc

SEQ ID NO: 163885 - RNA, 32 nt, Homo Sapiens
ggcacgaggaaguggagggggugaaagugagg

SEQ ID NO: 163886 - RNA, 32 nt, Homo Sapiens
ucagaaaacaacaugagauuggcauggcuuua

SEQ ID NO: 163887 - RNA, 32 nt, Homo Sapiens
cuuggggcagcuugggucuucuugggcaccuc

SEQ ID NO: 163888 - RNA, 32 nt, Homo Sapiens
accucuuucuucugcuuuuuccugaucuucaa

SEQ ID NO: 163889 - RNA, 32 nt, Homo Sapiens
acggugggaaggaggcauggcagacgcucacc

SEQ ID NO: 163890 - RNA, 32 nt, Homo Sapiens
auucuggccaacauagugaaaccccgucucua

SEQ ID NO: 163891 - RNA, 32 nt, Homo Sapiens
gaaaguuugcuuaaauucugauacaugccuuc

SEQ ID NO: 163892 - RNA, 32 nt, Homo Sapiens
agugggcccagagaggggaggggaggggguuc

SEQ ID NO: 163893 - RNA, 32 nt, Homo Sapiens
ucucaccugccagaagagaggcggggccgcgu

SEQ ID NO: 163894 - RNA, 32 nt, Homo Sapiens
gaagggcaggucuggcggcuccauccguggcu

SEQ ID NO: 163895 - RNA, 32 nt, Homo Sapiens
ucaagauccagauaaacuuuccugucaugugu

SEQ ID NO: 163896 - RNA, 30 nt, Homo Sapiens
augggguuucaccaaguuagccaggauggu

SEQ ID NO: 163897 - RNA, 32 nt, Homo Sapiens
agccauggaaaaccucauuggcuccucacugg

SEQ ID NO: 163898 - RNA, 32 nt, Homo Sapiens
aaaagcaaaaagaugugugaugcuguuaauaa

SEQ ID NO: 163899 - RNA, 32 nt, Homo Sapiens
cuuaggauguggcaaugaaaugauggugcaag

SEQ ID NO: 163900 - RNA, 32 nt, Homo Sapiens
auucugugaguccuucuuucuaccuuugcuug

SEQ ID NO: 163901 - RNA, 32 nt, Homo Sapiens
ucagggagccccagcuucuuacccacccagga

SEQ ID NO: 163902 - RNA, 32 nt, Homo Sapiens
acaggagugggucuuguccuguugcaggcaca

SEQ ID NO: 163903 - RNA, 32 nt, Homo Sapiens
ucuacuaaaaauacaaaaaauuagcugggugu

SEQ ID NO: 163904 - RNA, 32 nt, Homo Sapiens
ucuuagguuugcuuaugcccaguagcuccugc

SEQ ID NO: 163905 - RNA, 32 nt, Homo Sapiens
ccucagcagcccuggggugcccggggcggccc

SEQ ID NO: 163906 - RNA, 32 nt, Homo Sapiens
caccucaacaaccgaagaagaaauaaauuuag

SEQ ID NO: 163907 - RNA, 32 nt, Homo Sapiens
cugcaugggcccggccucggccucacagcgga

SEQ ID NO: 163908 - RNA, 32 nt, Homo Sapiens
cuaauuuuuaugucgauuacuucuuuuucuug

SEQ ID NO: 163909 - RNA, 32 nt, Homo Sapiens
aaauuagcggggcacaguggcaugcgccugua

SEQ ID NO: 163910 - RNA, 32 nt, Homo Sapiens
aaauuagcugggugugcuggugcaugccugua

SEQ ID NO: 163911 - RNA, 32 nt, Homo Sapiens
cucaucaaauauauuucuucuugaaccugcaa

SEQ ID NO: 163912 - RNA, 32 nt, Homo Sapiens
cuccucgucccgggcuggcccuugcccccacc

SEQ ID NO: 163913 - RNA, 32 nt, Homo Sapiens
gggagaagcuaggaaaaaaugucuuugagcug

SEQ ID NO: 163914 - RNA, 32 nt, Homo Sapiens
cacgcucugcccguggagcugccugggaugag

SEQ ID NO: 163915 - RNA, 32 nt, Homo Sapiens
cugaauuuauggguucuaugcaugcauuuuug

SEQ ID NO: 163916 - RNA, 32 nt, Homo Sapiens
cuguugguaugggaaauguuauuaauuucuau

SEQ ID NO: 163917 - RNA, 32 nt, Homo Sapiens
ggaaacaaacaaaaacaggacaaaaugaccaa

SEQ ID NO: 163918 - RNA, 32 nt, Homo Sapiens
auacagugaacagggacauucccgccacucgg

SEQ ID NO: 163919 - RNA, 32 nt, Homo Sapiens
agcauuugcuauagcuuuguuaucucaagugg

SEQ ID NO: 163920 - RNA, 32 nt, Homo Sapiens
guagcacuauauaaaaagugaaagcgacaaau

SEQ ID NO: 163921 - RNA, 32 nt, Homo Sapiens
ugaaaaccaccuggucugcauguaugcccgaa

SEQ ID NO: 163922 - RNA, 32 nt, Homo Sapiens
cugcgauggcaagggucuucuauaucaccaga

SEQ ID NO: 163923 - RNA, 32 nt, Homo Sapiens
uguccauaaaauacaaauauauuguucauaaa

SEQ ID NO: 163924 - RNA, 32 nt, Homo Sapiens
gugucaccccgcaggaccgcgggccugcccca

SEQ ID NO: 163925 - RNA, 32 nt, Homo Sapiens
agcguguccagggcggcuguggagguguucgg

SEQ ID NO: 163926 - RNA, 32 nt, Homo Sapiens
ccaaauucugcugagguuuucuuaauguugua

SEQ ID NO: 163927 - RNA, 32 nt, Homo Sapiens
auucuaaggagagcaugagagaaggcuggcau

SEQ ID NO: 163928 - RNA, 32 nt, Homo Sapiens
aauuuauacuaaaauguggacuauuuugaaau

SEQ ID NO: 163929 - RNA, 32 nt, Homo Sapiens
uccaggccugcgccuggggggccacuggagac

SEQ ID NO: 163930 - RNA, 32 nt, Homo Sapiens
cuuuuguuuuuaaaauguacaaaccuauaagu

SEQ ID NO: 163931 - RNA, 30 nt, Homo Sapiens
gcaagucuguggguggcagaagcaagcuag

SEQ ID NO: 163932 - RNA, 32 nt, Homo Sapiens
augcauuauccuguauucuccuccaacaucac

SEQ ID NO: 163933 - RNA, 32 nt, Homo Sapiens
ugaacugaaauugugccacugcacuuuucagc

SEQ ID NO: 163934 - RNA, 32 nt, Homo Sapiens
gaaaaaucaaggggacucaucucucgccugaa

SEQ ID NO: 163935 - RNA, 32 nt, Homo Sapiens
guuuucauauguaucaauauauauacuccuca

SEQ ID NO: 163936 - RNA, 32 nt, Homo Sapiens
acgucgcugaacucucugaaauguagagagcc

SEQ ID NO: 163937 - RNA, 32 nt, Homo Sapiens
accauucccaauuuuucuuagucucaaacauu

SEQ ID NO: 163938 - RNA, 32 nt, Homo Sapiens
ggggggccaucgggaguguggcugggggugaa

SEQ ID NO: 163939 - RNA, 32 nt, Homo Sapiens
gucagaggucacaagacagagaagacaacaug

SEQ ID NO: 163940 - RNA, 32 nt, Homo Sapiens
cugcauuccugugcccaccuacggcaugccuc

SEQ ID NO: 163941 - RNA, 32 nt, Homo Sapiens
uuuuucccuucccuccuuuguuuacuuauaua

SEQ ID NO: 163942 - RNA, 30 nt, Homo Sapiens
auucuagagaagcucugagccuuugaaacu

SEQ ID NO: 163943 - RNA, 32 nt, Homo Sapiens
cgucaacuuuuuuuuuuuuuuaaauaaacuuu

SEQ ID NO: 163944 - RNA, 32 nt, Homo Sapiens
ggaggccgacgcgggcggaccggcgggugcug

SEQ ID NO: 163945 - RNA, 30 nt, Homo Sapiens
uaccguauuuucuaggacaagaguucucag

SEQ ID NO: 163946 - RNA, 32 nt, Homo Sapiens
uccaagccauuuaaaaaauauuuauauauaca

SEQ ID NO: 163947 - RNA, 32 nt, Homo Sapiens
gauuccacgucuuugcuguuacucaacaaaau

SEQ ID NO: 163948 - RNA, 30 nt, Homo Sapiens
gcagagcuggacuggggcaggcugggcuuc

SEQ ID NO: 163949 - RNA, 32 nt, Homo Sapiens
gauggcacaaugaauguauauuuuguguuauu

SEQ ID NO: 163950 - RNA, 32 nt, Homo Sapiens
cugucuuggucacagagcugggugcugccggu

SEQ ID NO: 163951 - RNA, 32 nt, Homo Sapiens
gucugcuggaaugcaggaaguagaacagaauc

SEQ ID NO: 163952 - RNA, 32 nt, Homo Sapiens
gcccaggaagggggcaguuucugucgcggguc

SEQ ID NO: 163953 - RNA, 32 nt, Homo Sapiens
accccucgcagcugcuuccuucugccugggau

SEQ ID NO: 163954 - RNA, 32 nt, Homo Sapiens
auugccggcgccaggugcugggggcgacucgg

SEQ ID NO: 163955 - RNA, 32 nt, Homo Sapiens
gugugagcgacgucuccucaccacagugcugu

SEQ ID NO: 163956 - RNA, 32 nt, Homo Sapiens
cccuuuaaaaauacccugcuaguguuuuguuu

SEQ ID NO: 163957 - RNA, 32 nt, Homo Sapiens
auauagagagagaauaagccacuuuuauauuu

SEQ ID NO: 163958 - RNA, 32 nt, Homo Sapiens
uuaauguggauuuccuccuuccuuccaaguuc

SEQ ID NO: 163959 - RNA, 32 nt, Homo Sapiens
acguacgagagccgggacgcccggguucagag

SEQ ID NO: 163960 - RNA, 32 nt, Homo Sapiens
cguauuugacauuuuuaauacaauuucugcua

SEQ ID NO: 163961 - RNA, 32 nt, Homo Sapiens
uaccuuauuggauauuugauauuugguuauuu

SEQ ID NO: 163962 - RNA, 32 nt, Homo Sapiens
aaaccaaaggcacagauuuguguacaauauac

SEQ ID NO: 163963 - RNA, 32 nt, Homo Sapiens
uuuauuuuuuauuuccuucccucauaccuugc

SEQ ID NO: 163964 - RNA, 32 nt, Homo Sapiens
cagugugugcgcgcaccgugcgcgagccgaag

SEQ ID NO: 163965 - RNA, 32 nt, Homo Sapiens
uuauucauaaaauaaauuauaguuaauuauac

SEQ ID NO: 163966 - RNA, 32 nt, Homo Sapiens
aauggauuagaugaauguacuucuuuuuguga

SEQ ID NO: 163967 - RNA, 32 nt, Homo Sapiens
ggcucacugcagccuugaacaccuggacucaa

SEQ ID NO: 163968 - RNA, 32 nt, Homo Sapiens
cacuaagaaaaauaaacuuuuauauuuuuaua

SEQ ID NO: 163969 - RNA, 32 nt, Homo Sapiens
cauguacaaaaauuguacaagauaaguuccac

SEQ ID NO: 163970 - RNA, 32 nt, Homo Sapiens
cccuacccaucccucuuuucuuccaacaauug

SEQ ID NO: 163971 - RNA, 32 nt, Homo Sapiens
uaauuuuuuuauuauccuccucucuucuuagu

SEQ ID NO: 163972 - RNA, 32 nt, Homo Sapiens
ucuuaauuauaucuguauccuggaacaauauu

SEQ ID NO: 163973 - RNA, 32 nt, Homo Sapiens
aagccagugucugaagugcucagcauccuccu

SEQ ID NO: 163974 - RNA, 32 nt, Homo Sapiens
aagcagggugaccccugauguugcccuagaaa

SEQ ID NO: 163975 - RNA, 29 nt, Homo Sapiens
ccaccuucuaucccaaaucccagcauucc

SEQ ID NO: 163976 - RNA, 32 nt, Homo Sapiens
agccaggcaacgcuaagcucugagaacucccu

SEQ ID NO: 163977 - RNA, 27 nt, Homo Sapiens
aguuugaguuuguucugguauguucug

SEQ ID NO: 163978 - RNA, 32 nt, Homo Sapiens
acccccaaacagggcucugcuuccuuaggagg

SEQ ID NO: 163979 - RNA, 32 nt, Homo Sapiens
caaaaaacagaaaaggggugauguaggagaug

SEQ ID NO: 163980 - RNA, 32 nt, Homo Sapiens
gcccuuccccucggcuuugccuggacagcucc

SEQ ID NO: 163981 - RNA, 32 nt, Homo Sapiens
caccucugggggccugucagccugcugguccc

SEQ ID NO: 163982 - RNA, 32 nt, Homo Sapiens
aggcuuccauuaugaaagaaaacuacaaaaau

SEQ ID NO: 163983 - RNA, 32 nt, Homo Sapiens
guuuugauuuuuauguugaggcacauucucaa

SEQ ID NO: 163984 - RNA, 32 nt, Homo Sapiens
ugccggacaacauguucaacggcuccagcaac

SEQ ID NO: 163985 - RNA, 30 nt, Homo Sapiens
gagccauggcgggcgccgcguccccuugcg

SEQ ID NO: 163986 - RNA, 32 nt, Homo Sapiens
gcagccccuagugaaaucaugugaugugagac

SEQ ID NO: 163987 - RNA, 32 nt, Homo Sapiens
auccaaaagcauuuaauguuuuguuuuuguuc

SEQ ID NO: 163988 - RNA, 32 nt, Homo Sapiens
ugacgauugcucucuugcacucauggacauuu

SEQ ID NO: 163989 - RNA, 32 nt, Homo Sapiens
gucugagccucgccgcgggcgccuucggcuca

SEQ ID NO: 163990 - RNA, 32 nt, Homo Sapiens
auuugccuugucccuuuguguacaaccaugca

SEQ ID NO: 163991 - RNA, 32 nt, Homo Sapiens
ucaggaagagagacaaggaauauuuuaacaga

SEQ ID NO: 163992 - RNA, 32 nt, Homo Sapiens
gaaagggcggcuggaggcucccggagcgggcu

SEQ ID NO: 163993 - RNA, 32 nt, Homo Sapiens
uauugaaaauuuaagguucaguauaauaucaa

SEQ ID NO: 163994 - RNA, 32 nt, Homo Sapiens
uccaggcagccggagcugggagagcuggcuac

SEQ ID NO: 163995 - RNA, 32 nt, Homo Sapiens
cuccuuuaaacugcagcgucagaaucguguug

SEQ ID NO: 163996 - RNA, 32 nt, Homo Sapiens
ccacccucuagccccagggcagccccggagga

SEQ ID NO: 163997 - RNA, 32 nt, Homo Sapiens
uacaccugugcagcuugggucugaguuuugau

SEQ ID NO: 163998 - RNA, 32 nt, Homo Sapiens
uuugaaaacaauucaguggucuuauuuuuggg

SEQ ID NO: 163999 - RNA, 32 nt, Homo Sapiens
auaaauguauaaaauauaaggauuacuuuugu

SEQ ID NO: 164000 - RNA, 32 nt, Homo Sapiens
agaucaaggcgguagucacuuccgcucugcag

SEQ ID NO: 164001 - RNA, 32 nt, Homo Sapiens
ugguugugguaguccuguuuuccuaauaacuu

SEQ ID NO: 164002 - RNA, 32 nt, Homo Sapiens
gagaaaggguacugaggcacucuagaaucugc

SEQ ID NO: 164003 - RNA, 32 nt, Homo Sapiens
gacaaaggucacuuucuguuugccuggaccaa

SEQ ID NO: 164004 - RNA, 32 nt, Homo Sapiens
aggcuggagaaugggguaugauggcugacugc

SEQ ID NO: 164005 - RNA, 32 nt, Homo Sapiens
aguucuuccagauuuuaacuguguuaauaguu

SEQ ID NO: 164006 - RNA, 32 nt, Homo Sapiens
aagauauaucucuaccuucucauuugaauauc

SEQ ID NO: 164007 - RNA, 32 nt, Homo Sapiens
uuaucccuugaggacuucugugcugcugcuuc

SEQ ID NO: 164008 - RNA, 32 nt, Homo Sapiens
gccggccgcccggaggcccaaguggcggggac

SEQ ID NO: 164009 - RNA, 31 nt, Homo Sapiens
gacacucagacacccucacaaacacaguagu

SEQ ID NO: 164010 - RNA, 32 nt, Homo Sapiens
gcaaauaaaaauuuauuuugaagaaaaaaaaa

SEQ ID NO: 164011 - RNA, 32 nt, Homo Sapiens
aggucaugccaaaagcucucugguuguaaccu

SEQ ID NO: 164012 - RNA, 32 nt, Homo Sapiens
ggacccccgcggccuccgcagguucugcgcuc

SEQ ID NO: 164013 - RNA, 32 nt, Homo Sapiens
augaguguaaugaucuuaaauaaaauauuagu

SEQ ID NO: 164014 - RNA, 32 nt, Homo Sapiens
ugaucauuuuccccccacucuccccacacuaa

SEQ ID NO: 164015 - RNA, 32 nt, Homo Sapiens
cauugcccaccagggggcuggugcaccugcug

SEQ ID NO: 164016 - RNA, 32 nt, Homo Sapiens
cggagcucgagccccagcggcugagggcgggc

SEQ ID NO: 164017 - RNA, 32 nt, Homo Sapiens
guccacugggugaggagagaugugugggcuga

SEQ ID NO: 164018 - RNA, 32 nt, Homo Sapiens
gucccaggggagagggaaauaagcacaggccu

SEQ ID NO: 164019 - RNA, 32 nt, Homo Sapiens
uccuccgccucccggguucaagugauucucau

SEQ ID NO: 164020 - RNA, 32 nt, Homo Sapiens
aucccccauguucgucaucucaucucagucag

SEQ ID NO: 164021 - RNA, 32 nt, Homo Sapiens
gugcacaccuacuccgccauggagcgccccga

SEQ ID NO: 164022 - RNA, 32 nt, Homo Sapiens
uuucugcugcaguauugcuuugccaucuucug

SEQ ID NO: 164023 - RNA, 32 nt, Homo Sapiens
aagggggagacgggugggggucgcugacuaua

SEQ ID NO: 164024 - RNA, 32 nt, Homo Sapiens
auacucaaaaauauuuaaaacuguauugauac

SEQ ID NO: 164025 - RNA, 32 nt, Homo Sapiens
gauugcauuuuuccuguuuuaacaacggcugu

SEQ ID NO: 164026 - RNA, 32 nt, Homo Sapiens
ggauagaauauguuucauuuguuccggugcca

SEQ ID NO: 164027 - RNA, 32 nt, Homo Sapiens
ccagcgccgcggcugccgccucugcugggguc

SEQ ID NO: 164028 - RNA, 32 nt, Homo Sapiens
gggacuccucuccgucucccuggaccgcugug

SEQ ID NO: 164029 - RNA, 32 nt, Homo Sapiens
acaggagagagggaaggcugccaggcacugcu

SEQ ID NO: 164030 - RNA, 32 nt, Homo Sapiens
acucuuugcgaggaccccggcggcuggcccgg

SEQ ID NO: 164031 - RNA, 32 nt, Homo Sapiens
ggagagggccuuccccucccagcccugagggg

SEQ ID NO: 164032 - RNA, 32 nt, Homo Sapiens
uaguacccauuaguuacgucuuucuucuccca

SEQ ID NO: 164033 - RNA, 32 nt, Homo Sapiens
uacucugcauuugggauuggggaugcugggug

SEQ ID NO: 164034 - RNA, 32 nt, Homo Sapiens
augcagcgugacugacucuguugcuaccuguc

SEQ ID NO: 164035 - RNA, 30 nt, Homo Sapiens
aagcagggcgcgcagcagcgcugagugccc

SEQ ID NO: 164036 - RNA, 32 nt, Homo Sapiens
gccacuuugaauggaacacgguacugagaagc

SEQ ID NO: 164037 - RNA, 32 nt, Homo Sapiens
ugaguggacugauacauaagagagguuaagua

SEQ ID NO: 164038 - RNA, 32 nt, Homo Sapiens
guauucuccacccacuuauacggcguguggga

SEQ ID NO: 164039 - RNA, 32 nt, Homo Sapiens
uguccaaaagaagcaaaaaaugcugaaggcua

SEQ ID NO: 164040 - RNA, 32 nt, Homo Sapiens
ggagauacagaaaaaguuaacgacuggauucu

SEQ ID NO: 164041 - RNA, 32 nt, Homo Sapiens
ugcaucauuucuagcacagagcuggagggaau

SEQ ID NO: 164042 - RNA, 32 nt, Homo Sapiens
acagggcuugggccgcgccggaggccacacgg

SEQ ID NO: 164043 - RNA, 32 nt, Homo Sapiens
uggcugcccacccaccaacguccugcccacgc

SEQ ID NO: 164044 - RNA, 32 nt, Homo Sapiens
uuuccaguggccaguaugucuuucauugcuuu

SEQ ID NO: 164045 - RNA, 32 nt, Homo Sapiens
ugaaauauuauguaucuagcccauaguauugu

SEQ ID NO: 164046 - RNA, 32 nt, Homo Sapiens
aggcgggcggcacugcgccuaagcugggccac

SEQ ID NO: 164047 - RNA, 32 nt, Homo Sapiens
cugcccccauucuuacuuugucccaggcaugc

SEQ ID NO: 164048 - RNA, 32 nt, Homo Sapiens
ccgcagcccuggaggcugggaauguggaggcu

SEQ ID NO: 164049 - RNA, 32 nt, Homo Sapiens
gguuggugcccagagugggcgguggccugucu

SEQ ID NO: 164050 - RNA, 32 nt, Homo Sapiens
aaauugcacuguauggcaaauaugucuauaau

SEQ ID NO: 164051 - RNA, 30 nt, Homo Sapiens
gcgggaugcuggcgcugcuggccgccagcg

SEQ ID NO: 164052 - RNA, 32 nt, Homo Sapiens
ccggcuccgcagugguccacuccgguugccgg

SEQ ID NO: 164053 - RNA, 32 nt, Homo Sapiens
ccaccccgccccaccgcauccuucucggagcu

SEQ ID NO: 164054 - RNA, 32 nt, Homo Sapiens
cuccagaacaaaccucuauauguugcugaaac

SEQ ID NO: 164055 - RNA, 32 nt, Homo Sapiens
cccagcuucuuuagccucuugguaccucacac

SEQ ID NO: 164056 - RNA, 32 nt, Homo Sapiens
agcagcuaucaaccgacuuuguucuuccaagu

SEQ ID NO: 164057 - RNA, 30 nt, Homo Sapiens
ggcacugucucugcugcagcggccacacug

SEQ ID NO: 164058 - RNA, 32 nt, Homo Sapiens
cgguguguggcccgcucucacccaggcacagc

SEQ ID NO: 164059 - RNA, 32 nt, Homo Sapiens
aauugcuuaaaaccucuuuuuggaauuuuuaa

SEQ ID NO: 164060 - RNA, 28 nt, Homo Sapiens
cccaggcugcggccgcaaggugcgcagu

SEQ ID NO: 164061 - RNA, 32 nt, Homo Sapiens
gcaccgugggcuggggggccuguuuuggagca

SEQ ID NO: 164062 - RNA, 32 nt, Homo Sapiens
ggugcuauuucuguauuuaaauaacuuucuuu

SEQ ID NO: 164063 - RNA, 32 nt, Homo Sapiens
aaggaagucggguuggaccuuaacaucugcau

SEQ ID NO: 164064 - RNA, 32 nt, Homo Sapiens
ggcugcgcugcggcccggggcagugcggagcc

SEQ ID NO: 164065 - RNA, 32 nt, Homo Sapiens
ccauaaugaaauguauuguuuauauaauuaaa

SEQ ID NO: 164066 - RNA, 32 nt, Homo Sapiens
ucccuucaauuucaaggaacccuuaguucuga

SEQ ID NO: 164067 - RNA, 32 nt, Homo Sapiens
aucgguguucuucuucccaguucuugaccccu

SEQ ID NO: 164068 - RNA, 32 nt, Homo Sapiens
agagcccuccagcccuucuuuuugaaaccucc

SEQ ID NO: 164069 - RNA, 32 nt, Homo Sapiens
gaagcaucagacgccacccagcccugggggga

SEQ ID NO: 164070 - RNA, 32 nt, Homo Sapiens
ggugguucccccuguaaggggaggaccgagcc

SEQ ID NO: 164071 - RNA, 32 nt, Homo Sapiens
uugguucagcuauggugcuauucaguagguau

SEQ ID NO: 164072 - RNA, 32 nt, Homo Sapiens
aaauucuguuuuuggacaaaaccaagagccau

SEQ ID NO: 164073 - RNA, 32 nt, Homo Sapiens
cccaugugaaccuggagagaccauccugcugu

SEQ ID NO: 164074 - RNA, 32 nt, Homo Sapiens
gaaacugauuuaacccaaguaaugcagcuuug

SEQ ID NO: 164075 - RNA, 32 nt, Homo Sapiens
gcguguugccaagcuccgucuccagcuucagc

SEQ ID NO: 164076 - RNA, 32 nt, Homo Sapiens
ggcuccucagggccccggggcaggcucucucu

SEQ ID NO: 164077 - RNA, 32 nt, Homo Sapiens
augguagcuggagcagcaaacaacugcuuagg

SEQ ID NO: 164078 - RNA, 32 nt, Homo Sapiens
uccacuaaaaauacaaaaauuaguugggcaug

SEQ ID NO: 164079 - RNA, 32 nt, Homo Sapiens
caccgggcaggcguucccaugaugccaggcua

SEQ ID NO: 164080 - RNA, 32 nt, Homo Sapiens
guaauaucuauuuuuguuuuugucuuuuuccu

SEQ ID NO: 164081 - RNA, 32 nt, Homo Sapiens
caguacuacacauggugcagagguggacaucu

SEQ ID NO: 164082 - RNA, 32 nt, Homo Sapiens
cuuucccuuacaagcuguacauccucuuuacc

SEQ ID NO: 164083 - RNA, 32 nt, Homo Sapiens
cuuuuucuuuuuucuuuuuuuuuuuagacagg

SEQ ID NO: 164084 - RNA, 32 nt, Homo Sapiens
agguggcuuuccugggggaaugccugguaauu

SEQ ID NO: 164085 - RNA, 32 nt, Homo Sapiens
cgccucucagcuugcgucuccuccccuguggg

SEQ ID NO: 164086 - RNA, 32 nt, Homo Sapiens
uaggcaaugaaaacagaaguuuuugaaaaagg

SEQ ID NO: 164087 - RNA, 32 nt, Homo Sapiens
aaauuuugucuuucuguaaauguuauuaaaau

SEQ ID NO: 164088 - RNA, 32 nt, Homo Sapiens
uccgcgaggguggaggcggcggcugugugcgc

SEQ ID NO: 164089 - RNA, 32 nt, Homo Sapiens
cagcucagccauuuaaaauauuuucuuccuau

SEQ ID NO: 164090 - RNA, 32 nt, Homo Sapiens
gcaaagcugcccgccgcgggacaggcgucuag

SEQ ID NO: 164091 - RNA, 32 nt, Homo Sapiens
cuccugcgcuccugccgccgggacccucgacc

SEQ ID NO: 164092 - RNA, 32 nt, Homo Sapiens
aauuucaaauuagauguuaaauuuaugcauag

SEQ ID NO: 164093 - RNA, 32 nt, Homo Sapiens
agagcuugagguagcaugugugccgcuuccag

SEQ ID NO: 164094 - RNA, 32 nt, Homo Sapiens
auggaaccaaaauguauaaauguuauguuugc

SEQ ID NO: 164095 - RNA, 32 nt, Homo Sapiens
uggugcauuuuuccuuuuggauaagggaaaac

SEQ ID NO: 164096 - RNA, 32 nt, Homo Sapiens
ucuacagccucuuuccucuucucaugcuugag

SEQ ID NO: 164097 - RNA, 32 nt, Homo Sapiens
aacaucuaaacaugcuucucauuuccagccau

SEQ ID NO: 164098 - RNA, 32 nt, Homo Sapiens
auuccuuuacgcaugguugaugucaacauuga

SEQ ID NO: 164099 - RNA, 32 nt, Homo Sapiens
uguuccacauauauuuccacuucuucauucuc

SEQ ID NO: 164100 - RNA, 32 nt, Homo Sapiens
aggagaauuaagucagcugcagaacaaugggg

SEQ ID NO: 164101 - RNA, 32 nt, Homo Sapiens
agagaggcagccccggccugaccggccccccg

SEQ ID NO: 164102 - RNA, 32 nt, Homo Sapiens
gugcugggggugggggcggggacagaggaagg

SEQ ID NO: 164103 - RNA, 32 nt, Homo Sapiens
uuuccgguaauaaaucuguguuggccccugug

SEQ ID NO: 164104 - RNA, 32 nt, Homo Sapiens
cucccccuuuaugcucgcccagcccucccccu

SEQ ID NO: 164105 - RNA, 32 nt, Homo Sapiens
gagccucccagcucagccacgugggaugugac

SEQ ID NO: 164106 - RNA, 32 nt, Homo Sapiens
ggcuuauuugaaaaguaaauaaugaugaaauu

SEQ ID NO: 164107 - RNA, 32 nt, Homo Sapiens
ccuuugacccaucacaccccauuuccuccucu

SEQ ID NO: 164108 - RNA, 32 nt, Homo Sapiens
aacucuuaauaaaguuauuuugguaacuaaug

SEQ ID NO: 164109 - RNA, 32 nt, Homo Sapiens
aauacauuugaaaacuuguuugggagacucug

SEQ ID NO: 164110 - RNA, 32 nt, Homo Sapiens
ccgccccacccuccccacccggggaagccauc

SEQ ID NO: 164111 - RNA, 32 nt, Homo Sapiens
ugcacguggaaaucuccguuauuuuccagcac

SEQ ID NO: 164112 - RNA, 32 nt, Homo Sapiens
guaugcccacuccuccuucucucacucccuuu

SEQ ID NO: 164113 - RNA, 32 nt, Homo Sapiens
agugaacgagggugaggacuggagagcaccag

SEQ ID NO: 164114 - RNA, 32 nt, Homo Sapiens
aggcagaacgaggguguguggagcacugcggg

SEQ ID NO: 164115 - RNA, 32 nt, Homo Sapiens
cccuccuccugccauacccgcacaugacaaug

SEQ ID NO: 164116 - RNA, 32 nt, Homo Sapiens
cggcucaaccccgacguccgcgccccggccgc

SEQ ID NO: 164117 - RNA, 32 nt, Homo Sapiens
cguucagagccgugcccgccccggggcuucgc

SEQ ID NO: 164118 - RNA, 32 nt, Homo Sapiens
ccgcccguucccucccggacauggaggacgug

SEQ ID NO: 164119 - RNA, 32 nt, Homo Sapiens
uguauguccauaagugaaaauaaaaugucaua

SEQ ID NO: 164120 - RNA, 32 nt, Homo Sapiens
uccagccuggcaucuggccgcggcggucuccc

SEQ ID NO: 164121 - RNA, 32 nt, Homo Sapiens
uggggagaggcguggcccgagcggugcuggaa

SEQ ID NO: 164122 - RNA, 32 nt, Homo Sapiens
accccuuuuccaguugcuguggaccaaugcau

SEQ ID NO: 164123 - RNA, 32 nt, Homo Sapiens
ugcuccuagcuaaugcuuggaguagucugugg

SEQ ID NO: 164124 - RNA, 28 nt, Homo Sapiens
aggaugaggaagaccaggcucugggggc

SEQ ID NO: 164125 - RNA, 32 nt, Homo Sapiens
gcuaaaaugcaaaugucaguacugaauuccug

SEQ ID NO: 164126 - RNA, 32 nt, Homo Sapiens
gaucccguggugcuccgcggcgcggccuugcu

SEQ ID NO: 164127 - RNA, 32 nt, Homo Sapiens
ccccuccucccggcuggacuggagccuggcuc

SEQ ID NO: 164128 - RNA, 32 nt, Homo Sapiens
auugaguagggccagagggggcucugcucggc

SEQ ID NO: 164129 - RNA, 32 nt, Homo Sapiens
uuccuucucuguaaccagacuuugaaaaauug

SEQ ID NO: 164130 - RNA, 32 nt, Homo Sapiens
uaugacuuaauuuuuucuucaauuuuuaagua

SEQ ID NO: 164131 - RNA, 32 nt, Homo Sapiens
auuaaguuaauaaguugauguuuucuaaggcc

SEQ ID NO: 164132 - RNA, 32 nt, Homo Sapiens
caaacggagaggcccaugagaggggagcucag

SEQ ID NO: 164133 - RNA, 32 nt, Homo Sapiens
ccaucauggugauagaguggcugggguccuac

SEQ ID NO: 164134 - RNA, 32 nt, Homo Sapiens
cagugguacagucucagcucacagcaaccacu

SEQ ID NO: 164135 - RNA, 32 nt, Homo Sapiens
ucaaaccaauuucaaauuauuuugcaaaaguu

SEQ ID NO: 164136 - RNA, 31 nt, Homo Sapiens
cucccgccggcgaguucuccccgcgcgccgu

SEQ ID NO: 164137 - RNA, 32 nt, Homo Sapiens
gagugggcucugggaguggagacgccaggugg

SEQ ID NO: 164138 - RNA, 32 nt, Homo Sapiens
auggugaauaaacuuuuauguuuccauuucaa

SEQ ID NO: 164139 - RNA, 29 nt, Homo Sapiens
uuuacucagaguuuauauuuuccuucagu

SEQ ID NO: 164140 - RNA, 32 nt, Homo Sapiens
gguuauccaaaaaugaaaauucaaaauaaacu

SEQ ID NO: 164141 - RNA, 32 nt, Homo Sapiens
cuggucuggauggggcugcugcuugagugcag

SEQ ID NO: 164142 - RNA, 32 nt, Homo Sapiens
ggcucgcuucccucccucguuuccagcuccug

SEQ ID NO: 164143 - RNA, 32 nt, Homo Sapiens
acgugccggccgccagcuccaggccgagcccc

SEQ ID NO: 164144 - RNA, 32 nt, Homo Sapiens
gccauuaucccccuucuuucuguagaugggga

SEQ ID NO: 164145 - RNA, 32 nt, Homo Sapiens
cggccucuguggaugcagaaaucugcccuaca

SEQ ID NO: 164146 - RNA, 32 nt, Homo Sapiens
caugagcaacaguggaaucaaauaaaugcuuc

SEQ ID NO: 164147 - RNA, 32 nt, Homo Sapiens
uaaggguaaaaaguacaacucugacucugguu

SEQ ID NO: 164148 - RNA, 32 nt, Homo Sapiens
ucuccucacaugcgucuagugaagcaggaaac

SEQ ID NO: 164149 - RNA, 32 nt, Homo Sapiens
gguccccgcccggcugggcgggcagcaagggc

SEQ ID NO: 164150 - RNA, 32 nt, Homo Sapiens
ucagaaccgcggcucccgggacugguccagga

SEQ ID NO: 164151 - RNA, 32 nt, Homo Sapiens
ggaagagggugcuggguccaggcaggcugagu

SEQ ID NO: 164152 - RNA, 32 nt, Homo Sapiens
cuucacuuacauggaagaaacuucuaaaacuc

SEQ ID NO: 164153 - RNA, 32 nt, Homo Sapiens
acauacucaguaaaauguuuaaugaaggggaa

SEQ ID NO: 164154 - RNA, 32 nt, Homo Sapiens
uuuggaggaaguagugggguugccaggaaaac

SEQ ID NO: 164155 - RNA, 32 nt, Homo Sapiens
gugugcccucgccaggccccagccccagugcu

SEQ ID NO: 164156 - RNA, 32 nt, Homo Sapiens
gcacucuauaaugauuuuuaaauuaagaauuu

SEQ ID NO: 164157 - RNA, 32 nt, Homo Sapiens
gcgucauuggaacacagaaaacaugcugguuc

SEQ ID NO: 164158 - RNA, 32 nt, Homo Sapiens
aauaaaacauauauuuacuaaaauguguuuaa

SEQ ID NO: 164159 - RNA, 32 nt, Homo Sapiens
uaccggcccagccccucuuccuccuccagcug

SEQ ID NO: 164160 - RNA, 32 nt, Homo Sapiens
uagucaaaaaucaaggugagccuucuuggccc

SEQ ID NO: 164161 - RNA, 32 nt, Homo Sapiens
ccgcgccagguuccggccgcggccacccuccg

SEQ ID NO: 164162 - RNA, 32 nt, Homo Sapiens
ugaaggcagcccgcauucugcagaccugccag

SEQ ID NO: 164163 - RNA, 32 nt, Homo Sapiens
aaaccuguugugcagagcucuuccccggagac

SEQ ID NO: 164164 - RNA, 32 nt, Homo Sapiens
auuguuuugggguuugguuuugucuaggcagc

SEQ ID NO: 164165 - RNA, 32 nt, Homo Sapiens
agcacgauuucucuuuugauaaugcccuuuag

SEQ ID NO: 164166 - RNA, 29 nt, Homo Sapiens
ucuauguaaaguuuauauaacuauacuug

SEQ ID NO: 164167 - RNA, 32 nt, Homo Sapiens
gugcacagcaagcuucacuagauucagccacu

SEQ ID NO: 164168 - RNA, 32 nt, Homo Sapiens
cuugaguuaggaaugagaaguagccacaguau

SEQ ID NO: 164169 - RNA, 32 nt, Homo Sapiens
gacuccaccaucacccaaucuguugauucucc

SEQ ID NO: 164170 - RNA, 32 nt, Homo Sapiens
auucggggagacggaggccacgcucagcagga

SEQ ID NO: 164171 - RNA, 32 nt, Homo Sapiens
ggggcucuccagaccccucucuaggaccaagu

SEQ ID NO: 164172 - RNA, 32 nt, Homo Sapiens
ucucguuccuuccaguuccagucauagugugu

SEQ ID NO: 164173 - RNA, 32 nt, Homo Sapiens
uaaaacuucuauuuaaaagaaguccaaaaaca

SEQ ID NO: 164174 - RNA, 32 nt, Homo Sapiens
uaaagcuucuuacuggugaaacagcccaguug

SEQ ID NO: 164175 - RNA, 32 nt, Homo Sapiens
cuucgggugcaggagcaggagauggaacuggu

SEQ ID NO: 164176 - RNA, 32 nt, Homo Sapiens
cggucggccugguccuuuugcugcuggggauc

SEQ ID NO: 164177 - RNA, 32 nt, Homo Sapiens
uuucuuagaaaguugaggguauuucacguaag

SEQ ID NO: 164178 - RNA, 32 nt, Homo Sapiens
ucuuugcagguaucuuuuuacucuucaaauaa

SEQ ID NO: 164179 - RNA, 32 nt, Homo Sapiens
ccaaaaugcuucgauugcaggcaugagccacu

SEQ ID NO: 164180 - RNA, 31 nt, Homo Sapiens
augguaugggcgguguuggccucugggcagc

SEQ ID NO: 164181 - RNA, 32 nt, Homo Sapiens
cucaguguucuuaucuguagaauggggauaau

SEQ ID NO: 164182 - RNA, 31 nt, Homo Sapiens
cccuguugagaaaggauucaagauggauugg

SEQ ID NO: 164183 - RNA, 32 nt, Homo Sapiens
ccauugcuucaaacaaugggugauuaccgugc

SEQ ID NO: 164184 - RNA, 32 nt, Homo Sapiens
uuaucaaagguacugcaaaaauacuguauaga

SEQ ID NO: 164185 - RNA, 32 nt, Homo Sapiens
ggaguguggugggacauccggcugggguaagg

SEQ ID NO: 164186 - RNA, 32 nt, Homo Sapiens
gagccucacaugaaacacacguugagauucca

SEQ ID NO: 164187 - RNA, 32 nt, Homo Sapiens
uaaaaauaaaauguauagcuuaagaucaaaac

SEQ ID NO: 164188 - RNA, 32 nt, Homo Sapiens
caugguuauggcaaccagaaucuucagaaagg

SEQ ID NO: 164189 - RNA, 32 nt, Homo Sapiens
uguagugauuaacagaguugugauguuaguua

SEQ ID NO: 164190 - RNA, 32 nt, Homo Sapiens
caguugaaacaaaauucuaucaacauauaauu

SEQ ID NO: 164191 - RNA, 32 nt, Homo Sapiens
aguuaagaaaauuguuucuauguacuguauau

SEQ ID NO: 164192 - RNA, 32 nt, Homo Sapiens
ucugccccugggcccagucucuccucggaggc

SEQ ID NO: 164193 - RNA, 32 nt, Homo Sapiens
uugaccaggcugccucccuuguggcagcaacg

SEQ ID NO: 164194 - RNA, 32 nt, Homo Sapiens
gcccauaaagaaaaaauaccggagagguucug

SEQ ID NO: 164195 - RNA, 32 nt, Homo Sapiens
ucugucuccuucccagcccaccccuagcaggu

SEQ ID NO: 164196 - RNA, 32 nt, Homo Sapiens
cucaaggaucugcauucaggccugcuccacaa

SEQ ID NO: 164197 - RNA, 32 nt, Homo Sapiens
cacggagccagcauuugaaccuuguauaauua

SEQ ID NO: 164198 - RNA, 32 nt, Homo Sapiens
uuuaccaaucacuguguaauucuucugguagu

SEQ ID NO: 164199 - RNA, 31 nt, Homo Sapiens
gccacggagcugcugcacagagccugguguc

SEQ ID NO: 164200 - RNA, 32 nt, Homo Sapiens
agggguagcaaugaccuguccacuucaaacac

SEQ ID NO: 164201 - RNA, 32 nt, Homo Sapiens
uuuugccuuuauaaguuuucuaaucaaaaguu

SEQ ID NO: 164202 - RNA, 32 nt, Homo Sapiens
aaucaccccugauauauuuuuauuuuuauaua

SEQ ID NO: 164203 - RNA, 32 nt, Homo Sapiens
acauucuccaugacugaacgauugccacccau

SEQ ID NO: 164204 - RNA, 32 nt, Homo Sapiens
gguuuagaaaggagacucuacuuugaaaaugg

SEQ ID NO: 164205 - RNA, 32 nt, Homo Sapiens
cgucagggccgcggagaugucgucgucgucgc

SEQ ID NO: 164206 - RNA, 32 nt, Homo Sapiens
ggacucccuaugcccaggccugcccggugccc

SEQ ID NO: 164207 - RNA, 32 nt, Homo Sapiens
ucugugaggaauuaauggacuuugaaauugcu

SEQ ID NO: 164208 - RNA, 32 nt, Homo Sapiens
ccgcauuccaggcuccucccucccucugccgg

SEQ ID NO: 164209 - RNA, 32 nt, Homo Sapiens
uaauaaauaaaauuauaugaaauuuucaacuu

SEQ ID NO: 164210 - RNA, 32 nt, Homo Sapiens
accguaugaugaugaucaugaucuuacuggug

SEQ ID NO: 164211 - RNA, 32 nt, Homo Sapiens
gcauguauuuuuggcucgaaguuucucuagug

SEQ ID NO: 164212 - RNA, 32 nt, Homo Sapiens
cuccagauucacgacauuccugucccauguag

SEQ ID NO: 164213 - RNA, 32 nt, Homo Sapiens
gcucgagucuccuguugaagaaugggaacacu

SEQ ID NO: 164214 - RNA, 32 nt, Homo Sapiens
gaggauguaauauauacagacacacacauguu

SEQ ID NO: 164215 - RNA, 32 nt, Homo Sapiens
gaauaaaauggaccucuauacacacaccuguc

SEQ ID NO: 164216 - RNA, 32 nt, Homo Sapiens
acauaaugcaaaaaacaaaauaaaauaaucuu

SEQ ID NO: 164217 - RNA, 32 nt, Homo Sapiens
uuuuucuuccccaaaaugagaauaguagaaau

SEQ ID NO: 164218 - RNA, 32 nt, Homo Sapiens
agacucggaggggccagggcgagggcgcgcuc

SEQ ID NO: 164219 - RNA, 32 nt, Homo Sapiens
uccgcgcgcgcccccugcuggaagccgcuugc

SEQ ID NO: 164220 - RNA, 32 nt, Homo Sapiens
cucuccuugccagcuuucuccucagggucugu

SEQ ID NO: 164221 - RNA, 32 nt, Homo Sapiens
cuagagaggccgccaggagacccggcgcuuuc

SEQ ID NO: 164222 - RNA, 32 nt, Homo Sapiens
cguauccaguguuuugucgcagagaguuuucg

SEQ ID NO: 164223 - RNA, 32 nt, Homo Sapiens
cugcagagaaaguugagaauagugaugacucu

SEQ ID NO: 164224 - RNA, 32 nt, Homo Sapiens
uuuuucuugaaaugggaugggaucucacucug

SEQ ID NO: 164225 - RNA, 32 nt, Homo Sapiens
gagggcgugugagcgccgagcgcuaagggccg

SEQ ID NO: 164226 - RNA, 32 nt, Homo Sapiens
ccugcaggccagcccugagcugccgguggguu

SEQ ID NO: 164227 - RNA, 32 nt, Homo Sapiens
uauuuuugacagcagaauagaagaaugauuca

SEQ ID NO: 164228 - RNA, 32 nt, Homo Sapiens
uguacucaaugguaucauuacaauuuucugua

SEQ ID NO: 164229 - RNA, 32 nt, Homo Sapiens
gccgagcgggccgcaccgccggccgugcgacu

SEQ ID NO: 164230 - RNA, 32 nt, Homo Sapiens
caucauauaugauucuguguuccugagaucug

SEQ ID NO: 164231 - RNA, 32 nt, Homo Sapiens
uguguguugaagcagugucuguugcaagaaaa

SEQ ID NO: 164232 - RNA, 32 nt, Homo Sapiens
guuuguuauaguaagauagcggcuacagcuua

SEQ ID NO: 164233 - RNA, 32 nt, Homo Sapiens
cucccgcaggccuucacccagccaaccacagg

SEQ ID NO: 164234 - RNA, 32 nt, Homo Sapiens
aucggggccugcugcuccugcuggccuggaag

SEQ ID NO: 164235 - RNA, 32 nt, Homo Sapiens
aaagaguaaaauguuacaaugauaaaaggguc

SEQ ID NO: 164236 - RNA, 32 nt, Homo Sapiens
gacuuggcugggcgcaguggcucacaccugua

SEQ ID NO: 164237 - RNA, 32 nt, Homo Sapiens
ucaaagucaauaccagcagauucaugaaagua

SEQ ID NO: 164238 - RNA, 32 nt, Homo Sapiens
cugcccucugguguccugucaccacccucuga

SEQ ID NO: 164239 - RNA, 32 nt, Homo Sapiens
cuggccaaaaauuacaccagagagacagaguc

SEQ ID NO: 164240 - RNA, 32 nt, Homo Sapiens
uuccugguuuggcacaguaugguuucaugaaa

SEQ ID NO: 164241 - RNA, 32 nt, Homo Sapiens
uccaucccauugcugcagagccagccugaccc

SEQ ID NO: 164242 - RNA, 32 nt, Homo Sapiens
gaugggggccaaggagccccccuguuuugcau

SEQ ID NO: 164243 - RNA, 32 nt, Homo Sapiens
cugcccugccagcagccccgggccuggcuccc

SEQ ID NO: 164244 - RNA, 32 nt, Homo Sapiens
ggggugagccaccgcgcccagcccucucucuu

SEQ ID NO: 164245 - RNA, 32 nt, Homo Sapiens
ugcuccauuacugaggcugugacgauccuggg

SEQ ID NO: 164246 - RNA, 32 nt, Homo Sapiens
aacccgcgccucgucgggccuuuauuucucgu

SEQ ID NO: 164247 - RNA, 32 nt, Homo Sapiens
augggggugggaagggcagggaaguggagcau

SEQ ID NO: 164248 - RNA, 32 nt, Homo Sapiens
uuauuuuguaaaauauaaauggauuauuugcc

SEQ ID NO: 164249 - RNA, 32 nt, Homo Sapiens
gggcccagcgcccuuccccucaaccaaagagc

SEQ ID NO: 164250 - RNA, 32 nt, Homo Sapiens
gacuugaacuuucugaaauaaaacaaaaauac

SEQ ID NO: 164251 - RNA, 32 nt, Homo Sapiens
uucaaggagacgggggcgacgcggcugagggc

SEQ ID NO: 164252 - RNA, 32 nt, Homo Sapiens
augaugaugcacuuuaaaaugauagugucacu

SEQ ID NO: 164253 - RNA, 32 nt, Homo Sapiens
ucucucagggugguaucaccuccucccuccuc

SEQ ID NO: 164254 - RNA, 32 nt, Homo Sapiens
cccacauaaaaaguuucccagauucuaagaau

SEQ ID NO: 164255 - RNA, 32 nt, Homo Sapiens
aaaaaagaacaccuuauuuuuaucuucuucag

SEQ ID NO: 164256 - RNA, 32 nt, Homo Sapiens
agcgacuguggcggccgcagucuagcaggaaa

SEQ ID NO: 164257 - RNA, 32 nt, Homo Sapiens
agcuccguucccucaggaccccacugggugcc

SEQ ID NO: 164258 - RNA, 32 nt, Homo Sapiens
gauggaguuucgcucuugucccccaggcugga

SEQ ID NO: 164259 - RNA, 32 nt, Homo Sapiens
ucuggccuugguggaccuggcucccucccuag

SEQ ID NO: 164260 - RNA, 32 nt, Homo Sapiens
ccacccugaggguggugaugguaguuucuacc

SEQ ID NO: 164261 - RNA, 32 nt, Homo Sapiens
aaucaaccaauauuuauggaguaucuacaaug

SEQ ID NO: 164262 - RNA, 32 nt, Homo Sapiens
ucgggcagccccaccucugugcugccccaucc

SEQ ID NO: 164263 - RNA, 32 nt, Homo Sapiens
uguaggaggcggaggggccgcagcugggaaga

SEQ ID NO: 164264 - RNA, 32 nt, Homo Sapiens
cucaaauuucaaaagaaauagcaugauugaag

SEQ ID NO: 164265 - RNA, 32 nt, Homo Sapiens
ucuuuguuuuuagagacaggguccugcuauuu

SEQ ID NO: 164266 - RNA, 32 nt, Homo Sapiens
uggcauuucuucacugcaauugccauuugccu

SEQ ID NO: 164267 - RNA, 32 nt, Homo Sapiens
guuuugcaugaggaacacugacuuuauuaagc

SEQ ID NO: 164268 - RNA, 32 nt, Homo Sapiens
gccugagguuuuucgcgcuccucccuuuccuc

SEQ ID NO: 164269 - RNA, 32 nt, Homo Sapiens
caauagagaacuucaaaauaaaacagguguga

SEQ ID NO: 164270 - RNA, 32 nt, Homo Sapiens
aagaaggaagaugauuguaaagaaauaucucc

SEQ ID NO: 164271 - RNA, 32 nt, Homo Sapiens
cauuaaaauuuuagauuacuguaauuuacaug

SEQ ID NO: 164272 - RNA, 32 nt, Homo Sapiens
gccugaggagggguagggggcgguggccccgg

SEQ ID NO: 164273 - RNA, 32 nt, Homo Sapiens
guuuuagaagcaaguaaaucauccucuuuuca

SEQ ID NO: 164274 - RNA, 32 nt, Homo Sapiens
caggcuggagugcaguggugugaucuuggcuc

SEQ ID NO: 164275 - RNA, 32 nt, Homo Sapiens
guuagcccagggugggucccgccaggacagua

SEQ ID NO: 164276 - RNA, 30 nt, Homo Sapiens
gagguggugguauugggggaaagugacuuc

SEQ ID NO: 164277 - RNA, 32 nt, Homo Sapiens
uggaggugauuccacauccccuggcauuaugc

SEQ ID NO: 164278 - RNA, 32 nt, Homo Sapiens
gguggcgggaagaggaggcgcgagaauggagg

SEQ ID NO: 164279 - RNA, 32 nt, Homo Sapiens
uguggguggaggaacugggcacugggagcgug

SEQ ID NO: 164280 - RNA, 32 nt, Homo Sapiens
aaacucaagagcuucgagagccaguguuguca

SEQ ID NO: 164281 - RNA, 32 nt, Homo Sapiens
ggcugggcgagguggcucacgccuguaauccc

SEQ ID NO: 164282 - RNA, 32 nt, Homo Sapiens
augggacguuuuauuugugugcucucccuuga

SEQ ID NO: 164283 - RNA, 32 nt, Homo Sapiens
ggagugugggacccaucuccaagggagcgacu

SEQ ID NO: 164284 - RNA, 30 nt, Homo Sapiens
gcucuguuacguaccaugcaaaaucaaggu

SEQ ID NO: 164285 - RNA, 32 nt, Homo Sapiens
ugauggcuaugaugaagaguaugauugcccca

SEQ ID NO: 164286 - RNA, 32 nt, Homo Sapiens
ucguguggagcaggugccggcuccucacacac

SEQ ID NO: 164287 - RNA, 32 nt, Homo Sapiens
aaucuaccaacgaaagacgugauucaauucaa

SEQ ID NO: 164288 - RNA, 32 nt, Homo Sapiens
gcacauggaacacuuagauuuggcuggugcuu

SEQ ID NO: 164289 - RNA, 32 nt, Homo Sapiens
cuuuauuuucccuuuguauucauuuuaagcau

SEQ ID NO: 164290 - RNA, 32 nt, Homo Sapiens
uugcggggaaccgaggggccaaggcugcccca

SEQ ID NO: 164291 - RNA, 32 nt, Homo Sapiens
agaggagccgcggcggucaguaccuucgagga

SEQ ID NO: 164292 - RNA, 32 nt, Homo Sapiens
cugaggcgggacgagggccucacccagaaccu

SEQ ID NO: 164293 - RNA, 27 nt, Homo Sapiens
ucagcuuucugcuucagccuaagccag

SEQ ID NO: 164294 - RNA, 32 nt, Homo Sapiens
ccaagaccaaucucgugcuacugugaaaaauc

SEQ ID NO: 164295 - RNA, 29 nt, Homo Sapiens
ugcuuggcaagacagaggaugcuaugggc

SEQ ID NO: 164296 - RNA, 32 nt, Homo Sapiens
uauauggaaauagggaacaacaacaacaacaa

SEQ ID NO: 164297 - RNA, 32 nt, Homo Sapiens
gcuuccccuugggugaaaauagucucuucucc

SEQ ID NO: 164298 - RNA, 32 nt, Homo Sapiens
guuaguucaauccugauucauauuuaauuuga

SEQ ID NO: 164299 - RNA, 32 nt, Homo Sapiens
aggaaaaugacugggccuuucuuucuuuucuu

SEQ ID NO: 164300 - RNA, 32 nt, Homo Sapiens
uaaaagaggggagggguagaagcagaauaaua

SEQ ID NO: 164301 - RNA, 32 nt, Homo Sapiens
cgacaggaggggcuccagcagcuccagcccag

SEQ ID NO: 164302 - RNA, 32 nt, Homo Sapiens
gccugcgccgccuuccggcccgaguucuggag

SEQ ID NO: 164303 - RNA, 32 nt, Homo Sapiens
cucuaggcccucugcuggugcuguggaggcca

SEQ ID NO: 164304 - RNA, 32 nt, Homo Sapiens
ccgugucgugcuaaagcagaucacucgcaagg

SEQ ID NO: 164305 - RNA, 32 nt, Homo Sapiens
cugucauaaaauggccuugacauuuaaucaca

SEQ ID NO: 164306 - RNA, 32 nt, Homo Sapiens
agcugccgcuucucuuuuuuaucaccacagag

SEQ ID NO: 164307 - RNA, 32 nt, Homo Sapiens
uguuaccguaauucugcuuuuucaugggaguu

SEQ ID NO: 164308 - RNA, 32 nt, Homo Sapiens
cauguuacacuggcugguguugaacuccuaac

SEQ ID NO: 164309 - RNA, 32 nt, Homo Sapiens
gcccagcagaccugcuggccagcgcccuccag

SEQ ID NO: 164310 - RNA, 32 nt, Homo Sapiens
auggccacgcugaccuacgagacgccacaggg

SEQ ID NO: 164311 - RNA, 32 nt, Homo Sapiens
ccuagguucaagugauucuacucucucagccu

SEQ ID NO: 164312 - RNA, 32 nt, Homo Sapiens
uuuugaaaguguuuuucucauucuccauaccu

SEQ ID NO: 164313 - RNA, 32 nt, Homo Sapiens
ugcaagucaccauucugccuuccuaaggcagg

SEQ ID NO: 164314 - RNA, 32 nt, Homo Sapiens
uuauucccugcccccacccccacccucacccu

SEQ ID NO: 164315 - RNA, 32 nt, Homo Sapiens
aggcaagagcagugagauccacugcuaugguc

SEQ ID NO: 164316 - RNA, 32 nt, Homo Sapiens
acaauauugugaaaaugauugcauucucauug

SEQ ID NO: 164317 - RNA, 32 nt, Homo Sapiens
uaauggguaagguucuaauaggccauguuuau

SEQ ID NO: 164318 - RNA, 32 nt, Homo Sapiens
uuuuucugggugugggagagaaugggguggga

SEQ ID NO: 164319 - RNA, 32 nt, Homo Sapiens
gcacgugggggaggcgggaguggggagcgggc

SEQ ID NO: 164320 - RNA, 32 nt, Homo Sapiens
cagggcgcgacgcuuuucuguuacccacagag

SEQ ID NO: 164321 - RNA, 30 nt, Homo Sapiens
ugagcgcagcugcugccgccgccgcugcug

SEQ ID NO: 164322 - RNA, 30 nt, Homo Sapiens
gcuagggacgcaugcgcgggucccuuaguu

SEQ ID NO: 164323 - RNA, 32 nt, Homo Sapiens
gguggaaaauuagaagucauugugaaaaugau

SEQ ID NO: 164324 - RNA, 32 nt, Homo Sapiens
gcgagcaucauucggcuguuaccaaaacaaac

SEQ ID NO: 164325 - RNA, 32 nt, Homo Sapiens
ggcuacugcuaaggccuggaguuuuugcagaa

SEQ ID NO: 164326 - RNA, 32 nt, Homo Sapiens
auaaaaauauuuuuaacauggguuuccuuauu

SEQ ID NO: 164327 - RNA, 32 nt, Homo Sapiens
caucaaucuaggcaucuuucuggauaauuuca

SEQ ID NO: 164328 - RNA, 32 nt, Homo Sapiens
gcaaagcaugccacaagaggcuccucaaaagc

SEQ ID NO: 164329 - RNA, 31 nt, Homo Sapiens
ggcggaccgcccuucccuccccgcgcggguu

SEQ ID NO: 164330 - RNA, 32 nt, Homo Sapiens
uuuaccaucauucaggaaaacaaagcaaucug

SEQ ID NO: 164331 - RNA, 32 nt, Homo Sapiens
guuucucaggcacaaagccugcugcagcuggc

SEQ ID NO: 164332 - RNA, 30 nt, Homo Sapiens
gcugauuuauuuaagggggaaaaaguguca

SEQ ID NO: 164333 - RNA, 32 nt, Homo Sapiens
cccucacauuuuaauguuuaugcuagggauga

SEQ ID NO: 164334 - RNA, 32 nt, Homo Sapiens
uuuuucaacuauaugcagaaauugccuagcca

SEQ ID NO: 164335 - RNA, 32 nt, Homo Sapiens
uacagaagccccacccugccucacccacccuu

SEQ ID NO: 164336 - RNA, 32 nt, Homo Sapiens
agccuccuggggaauuggaggauuaagacaug

SEQ ID NO: 164337 - RNA, 32 nt, Homo Sapiens
ggccuguguggagggcugcuucugccccgagg

SEQ ID NO: 164338 - RNA, 32 nt, Homo Sapiens
uuuucagugucuauuuacaaauuuuuucuuuu

SEQ ID NO: 164339 - RNA, 32 nt, Homo Sapiens
aaacccaggaggagaguguggaguccagagcg

SEQ ID NO: 164340 - RNA, 32 nt, Homo Sapiens
aggaaacugaugcacacuacauggucaguggg

SEQ ID NO: 164341 - RNA, 32 nt, Homo Sapiens
acaguuccaaaaacggugcuuguucaacuauc

SEQ ID NO: 164342 - RNA, 32 nt, Homo Sapiens
agcaaaaauaaauaaaaguaaaaugcaaauga

SEQ ID NO: 164343 - RNA, 32 nt, Homo Sapiens
ggucccggauccugggguggggcagaaauauu

SEQ ID NO: 164344 - RNA, 31 nt, Homo Sapiens
aaguaacuagagguuuggagucugguuaaau

SEQ ID NO: 164345 - RNA, 32 nt, Homo Sapiens
ccagcgccacuacuccccuuccuaaggccacu

SEQ ID NO: 164346 - RNA, 32 nt, Homo Sapiens
uuguugcuccguuguaccugcuggggaauuca

SEQ ID NO: 164347 - RNA, 32 nt, Homo Sapiens
cgcccaggaguaaccuaaggcuuuuggccuga

SEQ ID NO: 164348 - RNA, 32 nt, Homo Sapiens
ggcaguugcuggagcauaacugcuucaauaaa

SEQ ID NO: 164349 - RNA, 32 nt, Homo Sapiens
gauuuuguauaucuacauaaaauaucaguaca

SEQ ID NO: 164350 - RNA, 32 nt, Homo Sapiens
ugaugugcuauccagacacauaugaucagaaa

SEQ ID NO: 164351 - RNA, 32 nt, Homo Sapiens
cugcaagagcuuuuaagcaaaugcaggacuug

SEQ ID NO: 164352 - RNA, 32 nt, Homo Sapiens
uuuccaccuuuauguuuuaauauccuaggcau

SEQ ID NO: 164353 - RNA, 32 nt, Homo Sapiens
uacauccucuuucaagaugagcuuauaugaca

SEQ ID NO: 164354 - RNA, 32 nt, Homo Sapiens
ucaauccccuccccggcugauuugcgcaucag

SEQ ID NO: 164355 - RNA, 32 nt, Homo Sapiens
gcggcccccagcugccccaugcucugcaccug

SEQ ID NO: 164356 - RNA, 32 nt, Homo Sapiens
cuuaguuugcaaaagcacuuugaaauuauggc

SEQ ID NO: 164357 - RNA, 32 nt, Homo Sapiens
ccucuagagucuuucaacccucacauucagga

SEQ ID NO: 164358 - RNA, 32 nt, Homo Sapiens
gugccaagccccaagaggauuacgcuuccagg

SEQ ID NO: 164359 - RNA, 32 nt, Homo Sapiens
agauuuuaacuccgagacaggagucuuucagu

SEQ ID NO: 164360 - RNA, 32 nt, Homo Sapiens
cugacauuuugucugcuucuggcuuuauucaa

SEQ ID NO: 164361 - RNA, 30 nt, Homo Sapiens
agaacaggaggugguagagggcauggauau

SEQ ID NO: 164362 - RNA, 32 nt, Homo Sapiens
ucuguuguauaaauguguaucuaggcacuuug

SEQ ID NO: 164363 - RNA, 32 nt, Homo Sapiens
cccauugaauuuuuaaauggcuguucaguuca

SEQ ID NO: 164364 - RNA, 32 nt, Homo Sapiens
ccugagacacgcggugcggacccugcgcgccc

SEQ ID NO: 164365 - RNA, 32 nt, Homo Sapiens
ugaaaguacuuuuuacuuuuuaugauacucag

SEQ ID NO: 164366 - RNA, 32 nt, Homo Sapiens
ggagagugagaaugggggugagcaggcgaaca

SEQ ID NO: 164367 - RNA, 32 nt, Homo Sapiens
gcaauacaggagaggaugaagggaggagcucc

SEQ ID NO: 164368 - RNA, 32 nt, Homo Sapiens
gcuauagagaucuauuugaagcuucaugacaa

SEQ ID NO: 164369 - RNA, 32 nt, Homo Sapiens
ggaagcccaagcccguucucccggccaaagug

SEQ ID NO: 164370 - RNA, 32 nt, Homo Sapiens
ggaagcuugaauagaauuauauuguugaagcc

SEQ ID NO: 164371 - RNA, 32 nt, Homo Sapiens
gaacuuaaagugagacaaaaccaauguccacg

SEQ ID NO: 164372 - RNA, 32 nt, Homo Sapiens
gugacugcgcggcccgcgcccggggcggugac

SEQ ID NO: 164373 - RNA, 32 nt, Homo Sapiens
uggguaucucaaaucugcuuucauccagccac

SEQ ID NO: 164374 - RNA, 32 nt, Homo Sapiens
acccaccaugcagcugcaguuccggagcugga

SEQ ID NO: 164375 - RNA, 32 nt, Homo Sapiens
cuuaauuuggaaacuaauaaaauauuuucugu

SEQ ID NO: 164376 - RNA, 32 nt, Homo Sapiens
uucaaguacccuguauucuggaugcuaaaaaa

SEQ ID NO: 164377 - RNA, 32 nt, Homo Sapiens
acugggaugaugaccaaaaugauugaauuggc

SEQ ID NO: 164378 - RNA, 32 nt, Homo Sapiens
auuuuacagugguuugccauuaggguauucau

SEQ ID NO: 164379 - RNA, 32 nt, Homo Sapiens
uaagccugcacauauuuuuuuauugcccuaga

SEQ ID NO: 164380 - RNA, 32 nt, Homo Sapiens
uggccccacccuuuccucuuaauucccaaucc

SEQ ID NO: 164381 - RNA, 32 nt, Homo Sapiens
uagggcgccucccagcccgucuccccgcucca

SEQ ID NO: 164382 - RNA, 32 nt, Homo Sapiens
caauuuaaaugaauuuggaagaguagauuccc

SEQ ID NO: 164383 - RNA, 32 nt, Homo Sapiens
ugcggaggguucccgcgccgcgggcugcgccg

SEQ ID NO: 164384 - RNA, 32 nt, Homo Sapiens
aguggaggcugcggccggggcuaugggcagag

SEQ ID NO: 164385 - RNA, 32 nt, Homo Sapiens
gggggcgggcgcgcucagggaaggcgggugcg

SEQ ID NO: 164386 - RNA, 32 nt, Homo Sapiens
aagugaucaaggagaauuccacaguuaucaga

SEQ ID NO: 164387 - RNA, 32 nt, Homo Sapiens
gaugauuagcccucuuguuuuaucuuuucaaa

SEQ ID NO: 164388 - RNA, 31 nt, Homo Sapiens
ggccacuauugaguggauagcaagaacauug

SEQ ID NO: 164389 - RNA, 32 nt, Homo Sapiens
guuuuguuucuugcugugacugaaacaagaag

SEQ ID NO: 164390 - RNA, 32 nt, Homo Sapiens
ccaggaaguauuuauugugaaaaucaauaaau

SEQ ID NO: 164391 - RNA, 32 nt, Homo Sapiens
ggccuccccguccaacagcacugacgucuauu

SEQ ID NO: 164392 - RNA, 32 nt, Homo Sapiens
gccccugggacccccaggaaaccguccuuugu

SEQ ID NO: 164393 - RNA, 32 nt, Homo Sapiens
cacuacugcauuccagccugggugacauauca

SEQ ID NO: 164394 - RNA, 30 nt, Homo Sapiens
ucuggggacaggcgcgagggcagccggcuc

SEQ ID NO: 164395 - RNA, 32 nt, Homo Sapiens
caucaaaacuaaaaacuguuguuugaaaugac

SEQ ID NO: 164396 - RNA, 32 nt, Homo Sapiens
acucuguaguguuuaggcaacccuguuauaag

SEQ ID NO: 164397 - RNA, 32 nt, Homo Sapiens
acugaaggacacagugcguggagacggcccug

SEQ ID NO: 164398 - RNA, 32 nt, Homo Sapiens
aacugugaugcuccauuggaugauaaaauugg

SEQ ID NO: 164399 - RNA, 32 nt, Homo Sapiens
gugugugggggaguccuucaaggucugguguc

SEQ ID NO: 164400 - RNA, 32 nt, Homo Sapiens
uguuuugaaaaacauugugaagauaguugaaa

SEQ ID NO: 164401 - RNA, 32 nt, Homo Sapiens
ucaggcaauccuguauuuuaauuuuagaugua

SEQ ID NO: 164402 - RNA, 32 nt, Homo Sapiens
acuccaucuugguaguucugugccucccccca

SEQ ID NO: 164403 - RNA, 32 nt, Homo Sapiens
agucuggagggagagugcagacacacaccggg

SEQ ID NO: 164404 - RNA, 32 nt, Homo Sapiens
acuccugcauuccuccuccccuccugagggaa

SEQ ID NO: 164405 - RNA, 32 nt, Homo Sapiens
uguuuuguuuuaaaugugucugguauuaagca

SEQ ID NO: 164406 - RNA, 32 nt, Homo Sapiens
gugugcagccaucucauucugugaaugugcca

SEQ ID NO: 164407 - RNA, 31 nt, Homo Sapiens
cuuucugggugggagaaccagguggugccug

SEQ ID NO: 164408 - RNA, 31 nt, Homo Sapiens
acccuucaagagguuugugcuagcccgaugc

SEQ ID NO: 164409 - RNA, 32 nt, Homo Sapiens
agucaaggugcacaacucuuuuugugcguggu

SEQ ID NO: 164410 - RNA, 32 nt, Homo Sapiens
guuaaaauauaaaagugcaauuguguuacaug

SEQ ID NO: 164411 - RNA, 32 nt, Homo Sapiens
uguuguuauuuccucuguauuauuuucuucau

SEQ ID NO: 164412 - RNA, 32 nt, Homo Sapiens
caucccuuacacaagaaauagccacuuuccuu

SEQ ID NO: 164413 - RNA, 32 nt, Homo Sapiens
gcucuuggcaggcagacuuuccaggaagaggc

SEQ ID NO: 164414 - RNA, 32 nt, Homo Sapiens
guucagcuguaagggccauuugaaaguuugga

SEQ ID NO: 164415 - RNA, 32 nt, Homo Sapiens
cacaaauauuauuagacaaauuagaugacaaa

SEQ ID NO: 164416 - RNA, 32 nt, Homo Sapiens
gcugauccugucauucuggucaccaaacagga

SEQ ID NO: 164417 - RNA, 32 nt, Homo Sapiens
cuguuugaacaacauacaagauaauaugagac

SEQ ID NO: 164418 - RNA, 32 nt, Homo Sapiens
ucucuuagauguuuaaguugaguuaguuccca

SEQ ID NO: 164419 - RNA, 32 nt, Homo Sapiens
ggccugaauuuagaagcagaaguaaaaugaaa

SEQ ID NO: 164420 - RNA, 32 nt, Homo Sapiens
agcucacuccgaaagccucugcucagaccugc

SEQ ID NO: 164421 - RNA, 32 nt, Homo Sapiens
caggggaggagguggaacccgcggccggagac

SEQ ID NO: 164422 - RNA, 32 nt, Homo Sapiens
agugggagccucaggaaggucagaggcaaccu

SEQ ID NO: 164423 - RNA, 32 nt, Homo Sapiens
gcuuuuucuuugaguucucuggaguagauauu

SEQ ID NO: 164424 - RNA, 32 nt, Homo Sapiens
auguuaaagcaucuuaauucauuugaguuuuc

SEQ ID NO: 164425 - RNA, 32 nt, Homo Sapiens
gucaugccaaacuuguagcccacaaaugccca

SEQ ID NO: 164426 - RNA, 32 nt, Homo Sapiens
gcuucuguggaaugaagugcuagacugaagga

SEQ ID NO: 164427 - RNA, 32 nt, Homo Sapiens
uaacaagcuucauugaggaagaaacagaguua

SEQ ID NO: 164428 - RNA, 32 nt, Homo Sapiens
uucccacagaguugcauaggauguguggaggu

SEQ ID NO: 164429 - RNA, 32 nt, Homo Sapiens
agggcuagggccacucaccggaggagggcggg

SEQ ID NO: 164430 - RNA, 32 nt, Homo Sapiens
cggaggcaaggccagcagcugcaggaccucaa

SEQ ID NO: 164431 - RNA, 32 nt, Homo Sapiens
ucaccuccaagcccaaguauauggcccugcug

SEQ ID NO: 164432 - RNA, 32 nt, Homo Sapiens
ggccccaagcucagccagcaggacacccaguu

SEQ ID NO: 164433 - RNA, 32 nt, Homo Sapiens
gcugccucuucacuuucuuuuagcaugguaac

SEQ ID NO: 164434 - RNA, 32 nt, Homo Sapiens
uccuccucuaaagagagagaugagaugaaugc

SEQ ID NO: 164435 - RNA, 32 nt, Homo Sapiens
ggauaaugacaaaaagcauaaguaaaaauauu

SEQ ID NO: 164436 - RNA, 32 nt, Homo Sapiens
uuccagcaauucuccugccucggcuucccaag

SEQ ID NO: 164437 - RNA, 32 nt, Homo Sapiens
aauaccuuaucugauccucucuuaaguuacuu

SEQ ID NO: 164438 - RNA, 32 nt, Homo Sapiens
acucaguuguacaaaggaaauaaaacuguagu

SEQ ID NO: 164439 - RNA, 32 nt, Homo Sapiens
ugcaccucccuuccccgcaaccugggaugaaa

SEQ ID NO: 164440 - RNA, 32 nt, Homo Sapiens
ugggauggcugcuucccaacuccaccuccaga

SEQ ID NO: 164441 - RNA, 32 nt, Homo Sapiens
uuacagugaagguacgccccgcgcucugcucu

SEQ ID NO: 164442 - RNA, 32 nt, Homo Sapiens
cagcuggaagcucuuucuccaaugagcaaagu

SEQ ID NO: 164443 - RNA, 32 nt, Homo Sapiens
uuuuaaauauauauuuuguacuuuguggagag

SEQ ID NO: 164444 - RNA, 32 nt, Homo Sapiens
gacagccagcgacuggcagagcccccaggcac

SEQ ID NO: 164445 - RNA, 32 nt, Homo Sapiens
gugggguuauggguaguuuuuauuuucuuccu

SEQ ID NO: 164446 - RNA, 32 nt, Homo Sapiens
guacauuugccucacuuaugguugccuuaaag

SEQ ID NO: 164447 - RNA, 31 nt, Homo Sapiens
gauugucuugguagcuuguaguguggucagg

SEQ ID NO: 164448 - RNA, 32 nt, Homo Sapiens
uuuuuaaguggcguggaggccuuugcuuccac

SEQ ID NO: 164449 - RNA, 32 nt, Homo Sapiens
uacaggcccgucuccugccucacaaccuccuu

SEQ ID NO: 164450 - RNA, 32 nt, Homo Sapiens
ccucccccaucacauggucacacugggacagg

SEQ ID NO: 164451 - RNA, 32 nt, Homo Sapiens
gggcggccagaaguggacccccggggccagga

SEQ ID NO: 164452 - RNA, 32 nt, Homo Sapiens
guugaauagaugauaugggaaauacuaauaac

SEQ ID NO: 164453 - RNA, 32 nt, Homo Sapiens
guucucuuccgauucagcccaccaccccagug

SEQ ID NO: 164454 - RNA, 32 nt, Homo Sapiens
uaggguggaaagggcuacccuggggcuucuga

SEQ ID NO: 164455 - RNA, 28 nt, Homo Sapiens
aaguuucuguugcauauguguuugugaa

SEQ ID NO: 164456 - RNA, 32 nt, Homo Sapiens
ugaugguuuuuuuuuucuuuuuugccaaauug

SEQ ID NO: 164457 - RNA, 32 nt, Homo Sapiens
ggcguuaacugaucuuuccauaaaaauagauu

SEQ ID NO: 164458 - RNA, 32 nt, Homo Sapiens
gcauggugcugcugcuucugcugcuucuccag

SEQ ID NO: 164459 - RNA, 32 nt, Homo Sapiens
uguuuuaggaccugaagaaucuuuaugacucu

SEQ ID NO: 164460 - RNA, 30 nt, Homo Sapiens
aguuggcuccuaaugggggugggaguguua

SEQ ID NO: 164461 - RNA, 32 nt, Homo Sapiens
gcuucagucccgcgaccgaagcagggcgcgca

SEQ ID NO: 164462 - RNA, 32 nt, Homo Sapiens
cgccgggcacugccgccucccucggucgcccg

SEQ ID NO: 164463 - RNA, 32 nt, Homo Sapiens
gcggaggggcauugcacuuccgggaaguccac

SEQ ID NO: 164464 - RNA, 32 nt, Homo Sapiens
cggagcgggcugggcugggcccgggauggcgg

SEQ ID NO: 164465 - RNA, 32 nt, Homo Sapiens
gaguauuaauccuauggauacauauuaaaaca

SEQ ID NO: 164466 - RNA, 32 nt, Homo Sapiens
cacaaguguuuugacgauauacuccugagcuu

SEQ ID NO: 164467 - RNA, 32 nt, Homo Sapiens
cacgcagggcagaggagagcagcugucaagaa

SEQ ID NO: 164468 - RNA, 32 nt, Homo Sapiens
augcuaaagaacuccugucuugguggaguggc

SEQ ID NO: 164469 - RNA, 32 nt, Homo Sapiens
uggcacaaaagccuugugguauggaaaaacaa

SEQ ID NO: 164470 - RNA, 30 nt, Homo Sapiens
caagugcaucgugcugcaggugcuccgggg

SEQ ID NO: 164471 - RNA, 32 nt, Homo Sapiens
ugacuuuuuuuugguaauuaugcgcuuuuuuu

SEQ ID NO: 164472 - RNA, 32 nt, Homo Sapiens
aaccuggagagcccacggggcaaauggcggag

SEQ ID NO: 164473 - RNA, 32 nt, Homo Sapiens
gguuucuucaucucuaaguaauuauaucuguc

SEQ ID NO: 164474 - RNA, 32 nt, Homo Sapiens
cauuaaaaugugaauucccaaacuuuucuuuu

SEQ ID NO: 164475 - RNA, 32 nt, Homo Sapiens
auuacuccaaaaagacaagugcucaagcagca

SEQ ID NO: 164476 - RNA, 32 nt, Homo Sapiens
ggccagucgaggggcgcuuaggcgcugccuuu

SEQ ID NO: 164477 - RNA, 32 nt, Homo Sapiens
gauuuuguuuucccuuggucuaauggagagaa

SEQ ID NO: 164478 - RNA, 32 nt, Homo Sapiens
cugcugccccacugugcugagucccaacaccc

SEQ ID NO: 164479 - RNA, 32 nt, Homo Sapiens
caccuguaaucccagcacuuugagaggaugag

SEQ ID NO: 164480 - RNA, 32 nt, Homo Sapiens
acugaugacgccccgcucuaggacugcagccc

SEQ ID NO: 164481 - RNA, 32 nt, Homo Sapiens
uccagccuguggcggugccgccgccccacgga

SEQ ID NO: 164482 - RNA, 30 nt, Homo Sapiens
ugaaaauggggauaaacacccgggagcugu

SEQ ID NO: 164483 - RNA, 32 nt, Homo Sapiens
uacaucucuauuuggaaugaugagguaaaugu

SEQ ID NO: 164484 - RNA, 32 nt, Homo Sapiens
aacaguggugcagcugcggacucuggagcugc

SEQ ID NO: 164485 - RNA, 32 nt, Homo Sapiens
aggauguaaaagaccucuacaaggagaguuca

SEQ ID NO: 164486 - RNA, 32 nt, Homo Sapiens
gacaaagggagguggggugcugccggggaggg

SEQ ID NO: 164487 - RNA, 32 nt, Homo Sapiens
aaggaguucauuucgcauacugggcauuaaaa

SEQ ID NO: 164488 - RNA, 32 nt, Homo Sapiens
uuguauuugauagacaaaauaugugggaaaga

SEQ ID NO: 164489 - RNA, 32 nt, Homo Sapiens
aacgguagugguuuuuuuaguaguuaauguau

SEQ ID NO: 164490 - RNA, 32 nt, Homo Sapiens
agguacaagggccaccugauuggcccagguau

SEQ ID NO: 164491 - RNA, 32 nt, Homo Sapiens
ccgcgccgcccggcagccucggcagguagugu

SEQ ID NO: 164492 - RNA, 32 nt, Homo Sapiens
gacucugagcagccugcagaugggggccuggc

SEQ ID NO: 164493 - RNA, 32 nt, Homo Sapiens
ugaacuuuuuaacuuuauauguaaaauaacuu

SEQ ID NO: 164494 - RNA, 32 nt, Homo Sapiens
agccucgcguggcccugccgggccccuucuuu

SEQ ID NO: 164495 - RNA, 32 nt, Homo Sapiens
aagaguuuauuuccaaauaaaaugaggacaug

SEQ ID NO: 164496 - RNA, 32 nt, Homo Sapiens
caacgagcccuccuauuuucacaguguucuga

SEQ ID NO: 164497 - RNA, 32 nt, Homo Sapiens
ugugacauaccaauaguuuuugaaagaaucuc

SEQ ID NO: 164498 - RNA, 32 nt, Homo Sapiens
uugaugaaauuugagggugcugaagauguucc

SEQ ID NO: 164499 - RNA, 30 nt, Homo Sapiens
uuuagauucaaaaggggggaaaugggucuu

SEQ ID NO: 164500 - RNA, 32 nt, Homo Sapiens
uaaccaugggguuguucaucaagggcuuuucu

SEQ ID NO: 164501 - RNA, 32 nt, Homo Sapiens
ucgcagauucggcuuucaaacaaaagaggcgc

SEQ ID NO: 164502 - RNA, 32 nt, Homo Sapiens
aaacugggcacaucacuuucucuucuugcgug

SEQ ID NO: 164503 - RNA, 32 nt, Homo Sapiens
cuucaggcuaaagggaggggauguugggagga

SEQ ID NO: 164504 - RNA, 32 nt, Homo Sapiens
uaagcugaggucagucucccaagccuggcaug

SEQ ID NO: 164505 - RNA, 32 nt, Homo Sapiens
uaccuagaaaaacaccacaggggaacaggaca

SEQ ID NO: 164506 - RNA, 32 nt, Homo Sapiens
gcuacuuuuggaaagagggacugaugggagcu

SEQ ID NO: 164507 - RNA, 32 nt, Homo Sapiens
ugggcagcucugccccuguggcuuuguagggu

SEQ ID NO: 164508 - RNA, 32 nt, Homo Sapiens
aggugcccccuucucgccucucuucucuucuc

SEQ ID NO: 164509 - RNA, 32 nt, Homo Sapiens
agacaaaauuauuuuucuuauacuuauuuuuu

SEQ ID NO: 164510 - RNA, 32 nt, Homo Sapiens
ugauuugguccuccucccgcaccauccucccc

SEQ ID NO: 164511 - RNA, 29 nt, Homo Sapiens
aauuacuuuggggcuaauuuaacaagaac

SEQ ID NO: 164512 - RNA, 32 nt, Homo Sapiens
gaugguggugggccaggccagcagugcugugg

SEQ ID NO: 164513 - RNA, 32 nt, Homo Sapiens
gaaaugacuuuuccauucuccucuggccuccu

SEQ ID NO: 164514 - RNA, 32 nt, Homo Sapiens
cacagaagauaaagaagaagucuuucaucuuu

SEQ ID NO: 164515 - RNA, 32 nt, Homo Sapiens
augauggccucauagaaugcauuuggaagugu

SEQ ID NO: 164516 - RNA, 32 nt, Homo Sapiens
uuguuugagaaccuggaauccagcauccccua

SEQ ID NO: 164517 - RNA, 32 nt, Homo Sapiens
agcgcggacccagccgcagggcggcgaauggg

SEQ ID NO: 164518 - RNA, 32 nt, Homo Sapiens
uauuucugauaaacauuaagauauuaaaucug

SEQ ID NO: 164519 - RNA, 32 nt, Homo Sapiens
ccagcccucuuguccuuccgccauggaaucac

SEQ ID NO: 164520 - RNA, 32 nt, Homo Sapiens
uuuguuuugccauuaaaguagagcagugauac

SEQ ID NO: 164521 - RNA, 32 nt, Homo Sapiens
gggauacuuguaaaaucgauggagcacuaagg

SEQ ID NO: 164522 - RNA, 32 nt, Homo Sapiens
caacaaaauugggauuaucuaacugagugcag

SEQ ID NO: 164523 - RNA, 32 nt, Homo Sapiens
ggaccgcccccuccuuacuugugggaucaaau

SEQ ID NO: 164524 - RNA, 32 nt, Homo Sapiens
ugcccauuuucugcuguuucugaugggucagc

SEQ ID NO: 164525 - RNA, 32 nt, Homo Sapiens
uuuaauagggccaaaguaaaccccaauguuua

SEQ ID NO: 164526 - RNA, 32 nt, Homo Sapiens
gagagagauuguguucuuccucucucaggggu

SEQ ID NO: 164527 - RNA, 32 nt, Homo Sapiens
uguugugcuagccaaaguaaugcuaugaaauc

SEQ ID NO: 164528 - RNA, 32 nt, Homo Sapiens
uaaaacuguauauauugacgguacagaugguc

SEQ ID NO: 164529 - RNA, 32 nt, Homo Sapiens
agcugagggcuuugggcagcaaaaucugacuu

SEQ ID NO: 164530 - RNA, 32 nt, Homo Sapiens
uuuaaaaacuuuuuagugauuaucucagaauu

SEQ ID NO: 164531 - RNA, 32 nt, Homo Sapiens
accugcuauccagcugagccgccacccuaucu

SEQ ID NO: 164532 - RNA, 32 nt, Homo Sapiens
uuacauaguuccacaagaccuucauugcauag

SEQ ID NO: 164533 - RNA, 32 nt, Homo Sapiens
ccccacuggcaccagcagugugggugggccuc

SEQ ID NO: 164534 - RNA, 32 nt, Homo Sapiens
uguccccucuucucucuguuaagggagagaag

SEQ ID NO: 164535 - RNA, 32 nt, Homo Sapiens
caguuuauuaaacugucccccagaucgacacg

SEQ ID NO: 164536 - RNA, 31 nt, Homo Sapiens
ggagagaaauaucuacagguauauauggaaa

SEQ ID NO: 164537 - RNA, 32 nt, Homo Sapiens
guccugcucugugccugguuauauuacuggau

SEQ ID NO: 164538 - RNA, 32 nt, Homo Sapiens
auagcucaaccgaacaaguaaguugccuauac

SEQ ID NO: 164539 - RNA, 32 nt, Homo Sapiens
aaggcacuuccacaguggacugucgcuggcgg

SEQ ID NO: 164540 - RNA, 32 nt, Homo Sapiens
uuaacuagucuaauuaugguccaauuauugug

SEQ ID NO: 164541 - RNA, 32 nt, Homo Sapiens
agcgcuucugaccccucggccccgcccccgug

SEQ ID NO: 164542 - RNA, 32 nt, Homo Sapiens
uuaucaaauguuaaauugguuauauuaggaau

SEQ ID NO: 164543 - RNA, 32 nt, Homo Sapiens
gcauuuaacaaggcggugugguuuacuccaug

SEQ ID NO: 164544 - RNA, 32 nt, Homo Sapiens
cggaaucucuccucccucgcccggcccgccuu

SEQ ID NO: 164545 - RNA, 32 nt, Homo Sapiens
ugagauguucaucucuacaaaaaauaagaaag

SEQ ID NO: 164546 - RNA, 32 nt, Homo Sapiens
uaguuguccuaccucccuggcuguuccuuuca

SEQ ID NO: 164547 - RNA, 32 nt, Homo Sapiens
cagcauccugucauaguggccaccagugaguc

SEQ ID NO: 164548 - RNA, 32 nt, Homo Sapiens
uguuuaucuucuaaaaaccagacguuuccuga

SEQ ID NO: 164549 - RNA, 32 nt, Homo Sapiens
uuuccuggucuguccuaggagcuguauaaaga

SEQ ID NO: 164550 - RNA, 32 nt, Homo Sapiens
ugugcggcgcugucggggcagcagcccaggca

SEQ ID NO: 164551 - RNA, 32 nt, Homo Sapiens
cauauccgguguggcuuguucuuuucagcagu

SEQ ID NO: 164552 - RNA, 32 nt, Homo Sapiens
uccacaauuuaaauaaagaacugcugugucug

SEQ ID NO: 164553 - RNA, 32 nt, Homo Sapiens
ugagccugccccagccccagccguagcccuug

SEQ ID NO: 164554 - RNA, 32 nt, Homo Sapiens
uaccuguaaucccagcacuuugggaggccaac

SEQ ID NO: 164555 - RNA, 32 nt, Homo Sapiens
gacugauaaucucuuuaaauggcuuuaugcua

SEQ ID NO: 164556 - RNA, 30 nt, Homo Sapiens
ggagaagauggcggcggcgggggaggcagc

SEQ ID NO: 164557 - RNA, 32 nt, Homo Sapiens
uggaaauagcagaugccauugaagauaaagcu

SEQ ID NO: 164558 - RNA, 29 nt, Homo Sapiens
cccaccaggaagguggccguucagcccga

SEQ ID NO: 164559 - RNA, 32 nt, Homo Sapiens
ggcugccaccagagguccucagcccuccugcc

SEQ ID NO: 164560 - RNA, 32 nt, Homo Sapiens
ccaauuuuggauccaugagcuauacagcugca

SEQ ID NO: 164561 - RNA, 32 nt, Homo Sapiens
guuucuuccaguuucucucccuccccccgcau

SEQ ID NO: 164562 - RNA, 32 nt, Homo Sapiens
cggaugcgccaccauggaugaaaacaucccca

SEQ ID NO: 164563 - RNA, 32 nt, Homo Sapiens
ugaagaguugcuaggauucagaguaaaacuca

SEQ ID NO: 164564 - RNA, 32 nt, Homo Sapiens
gcugaucauaaaaagacauuacgacuccugua

SEQ ID NO: 164565 - RNA, 32 nt, Homo Sapiens
ccuagggaggccugggguaaccuggggggcuc

SEQ ID NO: 164566 - RNA, 32 nt, Homo Sapiens
aauucaaaacaaagacaguuuuccaaucugau

SEQ ID NO: 164567 - RNA, 32 nt, Homo Sapiens
ccgugaagagcaaguauaaacaguuuuuugaa

SEQ ID NO: 164568 - RNA, 32 nt, Homo Sapiens
ugcagaggugccguugcagcaguuggauguga

SEQ ID NO: 164569 - RNA, 32 nt, Homo Sapiens
aggaggcggagccgcgcgaaugaauggagccg

SEQ ID NO: 164570 - RNA, 32 nt, Homo Sapiens
guauuugaaaauaaauauuuucccagaauaua

SEQ ID NO: 164571 - RNA, 30 nt, Homo Sapiens
aacgcgggagguggaggauacaaugaaccc

SEQ ID NO: 164572 - RNA, 32 nt, Homo Sapiens
aucaugauuauaaucaaccacacuuauugauu

SEQ ID NO: 164573 - RNA, 32 nt, Homo Sapiens
ggcggcgccaccuccgccugcugcuccgaccc

SEQ ID NO: 164574 - RNA, 32 nt, Homo Sapiens
gaauaucccucccacacacaggccagcugcuc

SEQ ID NO: 164575 - RNA, 32 nt, Homo Sapiens
cucacccggaggaggagaggcuccgcgcgggg

SEQ ID NO: 164576 - RNA, 32 nt, Homo Sapiens
uugggggcaggaggagucuggaacacagccuu

SEQ ID NO: 164577 - RNA, 32 nt, Homo Sapiens
ccuaaccuaaaauaaaguuuucguuccaaaaa

SEQ ID NO: 164578 - RNA, 32 nt, Homo Sapiens
uagaguuagggucagggucaggccucucccaa

SEQ ID NO: 164579 - RNA, 32 nt, Homo Sapiens
aagcauuccagaaaaugagauuccauaaucuu

SEQ ID NO: 164580 - RNA, 32 nt, Homo Sapiens
guggaggaagacugugagacuguggcuggaag

SEQ ID NO: 164581 - RNA, 32 nt, Homo Sapiens
ugguguuaaugauauuagagaugaaaaacguu

SEQ ID NO: 164582 - RNA, 27 nt, Homo Sapiens
cgccgguccuucuuugaauccuucauc

SEQ ID NO: 164583 - RNA, 32 nt, Homo Sapiens
acgaccucacccaaagggcucccuggcucucc

SEQ ID NO: 164584 - RNA, 32 nt, Homo Sapiens
ucaucugcuucccccaaggccucccacaggug

SEQ ID NO: 164585 - RNA, 32 nt, Homo Sapiens
ugagucauuuugucauuuagaguauucugaua

SEQ ID NO: 164586 - RNA, 32 nt, Homo Sapiens
cuucauccacuuuaauauagcuguucugaaau

SEQ ID NO: 164587 - RNA, 32 nt, Homo Sapiens
cuuucauucccagcugucaacauccuggaagc

SEQ ID NO: 164588 - RNA, 32 nt, Homo Sapiens
ugaggaggccucccggccccagccuccugccu

SEQ ID NO: 164589 - RNA, 32 nt, Homo Sapiens
cggguggggggcgcugccggccucguggguac

SEQ ID NO: 164590 - RNA, 32 nt, Homo Sapiens
cccagccugccagugagcugcgacgggcacac

SEQ ID NO: 164591 - RNA, 32 nt, Homo Sapiens
ugauuccuuugaccaucuggcuuacggacgag

SEQ ID NO: 164592 - RNA, 32 nt, Homo Sapiens
uucuagagaagcccaagaaguacagcugcuug

SEQ ID NO: 164593 - RNA, 32 nt, Homo Sapiens
uccaaagucgcgcagcugguucgggccgagcc

SEQ ID NO: 164594 - RNA, 30 nt, Homo Sapiens
aauaacuuggacugcagacaucauggagaa

SEQ ID NO: 164595 - RNA, 32 nt, Homo Sapiens
acgaacccccaugauguaaguuuaccuaugua

SEQ ID NO: 164596 - RNA, 30 nt, Homo Sapiens
guggagggcaggcgccugggcugggggcgg

SEQ ID NO: 164597 - RNA, 32 nt, Homo Sapiens
ucugccaucuaccaccuguggagccuuagaua

SEQ ID NO: 164598 - RNA, 32 nt, Homo Sapiens
cucgucccgcgcccccggggcucgcggagcca

SEQ ID NO: 164599 - RNA, 32 nt, Homo Sapiens
uuucccugccaccccaggagccaggcuucccc

SEQ ID NO: 164600 - RNA, 32 nt, Homo Sapiens
ccucagaugauuaaaacauaaaccuaacccca

SEQ ID NO: 164601 - RNA, 32 nt, Homo Sapiens
guaauaauccgaugaaguacagauguugaaga

SEQ ID NO: 164602 - RNA, 32 nt, Homo Sapiens
ccuuagaaggcacaaaagccuuaauguauuau

SEQ ID NO: 164603 - RNA, 32 nt, Homo Sapiens
aagugccuuaagaaacaaagcccuguccuaau

SEQ ID NO: 164604 - RNA, 31 nt, Homo Sapiens
uuucaauaaaaugucuuguuuuugcauugug

SEQ ID NO: 164605 - RNA, 32 nt, Homo Sapiens
cacaggcuuggcagaggcgccagguugucaau

SEQ ID NO: 164606 - RNA, 32 nt, Homo Sapiens
cuucacauugcaaugacgauugcaguuuuauu

SEQ ID NO: 164607 - RNA, 32 nt, Homo Sapiens
guauauguauaaauauuuuaaaugguguuuua

SEQ ID NO: 164608 - RNA, 32 nt, Homo Sapiens
ggcaugaugcgggccagugcuccagccacaga

SEQ ID NO: 164609 - RNA, 32 nt, Homo Sapiens
uucauugaguuuuuuucuuccuugccuuuggg

SEQ ID NO: 164610 - RNA, 32 nt, Homo Sapiens
uggacucuccaaguaagcacaggcuucugucc

SEQ ID NO: 164611 - RNA, 32 nt, Homo Sapiens
uuuugaaaaugaaagcuguagguaggugaagu

SEQ ID NO: 164612 - RNA, 32 nt, Homo Sapiens
uaggauggggacgcacccaggucugcugaacu

SEQ ID NO: 164613 - RNA, 32 nt, Homo Sapiens
ccugguggacauuuuguacagugcucuccggu

SEQ ID NO: 164614 - RNA, 32 nt, Homo Sapiens
caccaacuuuaacuugaaauuuuuauaguuua

SEQ ID NO: 164615 - RNA, 32 nt, Homo Sapiens
aucucccagccuuuuccaaauugaaaaaugcc

SEQ ID NO: 164616 - RNA, 32 nt, Homo Sapiens
aaacugacauuccaaggaucuaauccaggaag

SEQ ID NO: 164617 - RNA, 32 nt, Homo Sapiens
gugcaggcccugcaggccuuccgcguggcugc

SEQ ID NO: 164618 - RNA, 32 nt, Homo Sapiens
aaaacugaaaagaauaaaaauaagcagcugag

SEQ ID NO: 164619 - RNA, 32 nt, Homo Sapiens
gaaagguguugcuguuugaauugaugagaaau

SEQ ID NO: 164620 - RNA, 32 nt, Homo Sapiens
acuacaccaaaauaacucuuagugcuuaaaaa

SEQ ID NO: 164621 - RNA, 32 nt, Homo Sapiens
cugcagccugacguggcuagccaucccaguac

SEQ ID NO: 164622 - RNA, 32 nt, Homo Sapiens
cauuauguaugauaagaaaguaaguauuccaa

SEQ ID NO: 164623 - RNA, 32 nt, Homo Sapiens
aauucagacaggcuucuguuuucagaguacua

SEQ ID NO: 164624 - RNA, 32 nt, Homo Sapiens
guaauugcuuuuauaaauuugauccuuugcau

SEQ ID NO: 164625 - RNA, 32 nt, Homo Sapiens
gcuuuuuuccuccuuucucuguauauugggcu

SEQ ID NO: 164626 - RNA, 32 nt, Homo Sapiens
augccauccaacauaaucccaggucaguuagc

SEQ ID NO: 164627 - RNA, 27 nt, Homo Sapiens
cuuaggugcuucuucacuucaguugcu

SEQ ID NO: 164628 - RNA, 32 nt, Homo Sapiens
ucacugugccagcaggguggcugugcccagca

SEQ ID NO: 164629 - RNA, 32 nt, Homo Sapiens
cugggacgguagaccgguaggcguggggccag

SEQ ID NO: 164630 - RNA, 32 nt, Homo Sapiens
gcuggccgucuucagcagugauugucagccac

SEQ ID NO: 164631 - RNA, 32 nt, Homo Sapiens
acaaaaugcaacaaagaccuaaguguaagagc

SEQ ID NO: 164632 - RNA, 32 nt, Homo Sapiens
cugguuguuagcagcaaagaauucucacaaau

SEQ ID NO: 164633 - RNA, 32 nt, Homo Sapiens
aggcgggaugaucaccugaggucaggaguuca

SEQ ID NO: 164634 - RNA, 32 nt, Homo Sapiens
ccgcaccauggacuuuggccucaacgugcgag

SEQ ID NO: 164635 - RNA, 32 nt, Homo Sapiens
caugcuaaauauauuuuucaaaaaagcaauaa

SEQ ID NO: 164636 - RNA, 32 nt, Homo Sapiens
ggcugcagugcaguggcaugaucauggcucgc

SEQ ID NO: 164637 - RNA, 32 nt, Homo Sapiens
gaugaauaauuucauuuuccucaaguuuauga

SEQ ID NO: 164638 - RNA, 28 nt, Homo Sapiens
gguagcaguacgaacauugugaaaucca

SEQ ID NO: 164639 - RNA, 32 nt, Homo Sapiens
ccaccaaagcuacucucucugcugcuuagaac

SEQ ID NO: 164640 - RNA, 32 nt, Homo Sapiens
ccacagcucauuaagaaugggacuaaaaaggc

SEQ ID NO: 164641 - RNA, 32 nt, Homo Sapiens
gaucgaacuauauucuaagcacacaaaaagca

SEQ ID NO: 164642 - RNA, 32 nt, Homo Sapiens
gggacuuccgugcucccggcgagcgggcggag

SEQ ID NO: 164643 - RNA, 32 nt, Homo Sapiens
ccccaccuuggccccaggaacccugggagugg

SEQ ID NO: 164644 - RNA, 32 nt, Homo Sapiens
agggaggaaugggggacauaaagccuguccug

SEQ ID NO: 164645 - RNA, 32 nt, Homo Sapiens
ugugccuggagggcuggucugcgaccccugac

SEQ ID NO: 164646 - RNA, 32 nt, Homo Sapiens
uagagaagcuaccccucaaacugcacaucuac

SEQ ID NO: 164647 - RNA, 32 nt, Homo Sapiens
gccucggcgcgggcuugccccgggccguagcc

SEQ ID NO: 164648 - RNA, 32 nt, Homo Sapiens
ggaaaucauaauguggcagagguggugggaag

SEQ ID NO: 164649 - RNA, 32 nt, Homo Sapiens
gccuuuugcuggccaaaccaacccccacacaa

SEQ ID NO: 164650 - RNA, 32 nt, Homo Sapiens
uuacaggugugagccaccaugcccagcccaaa

SEQ ID NO: 164651 - RNA, 32 nt, Homo Sapiens
ggcuggucccaaacuccugaccucauguaauc

SEQ ID NO: 164652 - RNA, 32 nt, Homo Sapiens
aucucaagccugccuggcgucucugugccccu

SEQ ID NO: 164653 - RNA, 32 nt, Homo Sapiens
guuuaugcuucuagagcaaugucuagugaaac

SEQ ID NO: 164654 - RNA, 32 nt, Homo Sapiens
ucuuaaccuaaaccauaauuguaaccagugcc

SEQ ID NO: 164655 - RNA, 32 nt, Homo Sapiens
aagaguggcucgaccucgcugcugccugucgc

SEQ ID NO: 164656 - RNA, 32 nt, Homo Sapiens
aagauaaagagauaaaaccagaguuugugcag

SEQ ID NO: 164657 - RNA, 32 nt, Homo Sapiens
ugugacacaauagggacucuauggaaaacugg

SEQ ID NO: 164658 - RNA, 32 nt, Homo Sapiens
augccucacagagcuuccuguggcuucuccag

SEQ ID NO: 164659 - RNA, 32 nt, Homo Sapiens
auguaugugaauggguguacauguaggaaccu

SEQ ID NO: 164660 - RNA, 32 nt, Homo Sapiens
aguuugauucagaugggcacuuuucuuccccu

SEQ ID NO: 164661 - RNA, 32 nt, Homo Sapiens
aagugccucagaugcauccuccccuucucuuu

SEQ ID NO: 164662 - RNA, 32 nt, Homo Sapiens
ucagugucaucucuguaccgaagaccucucca

SEQ ID NO: 164663 - RNA, 32 nt, Homo Sapiens
guuagauugaaguuuugucaucuuauaaaaga

SEQ ID NO: 164664 - RNA, 30 nt, Homo Sapiens
cucuucauucuguuugcagaagcuguuuag

SEQ ID NO: 164665 - RNA, 32 nt, Homo Sapiens
caccuuccccagggaaaccccuggucacccca

SEQ ID NO: 164666 - RNA, 32 nt, Homo Sapiens
gaugugaugucuccgaggaggggagagaagac

SEQ ID NO: 164667 - RNA, 32 nt, Homo Sapiens
accauguaccuuaugaagaccuuuguuuuaag

SEQ ID NO: 164668 - RNA, 32 nt, Homo Sapiens
ugagagccggccguggaaggagggaugcgugu

SEQ ID NO: 164669 - RNA, 32 nt, Homo Sapiens
gugcucuuuguacaguuuuaaaaaguguaaua

SEQ ID NO: 164670 - RNA, 32 nt, Homo Sapiens
gaaacucuuagaaaauuugaccucaguuuuga

SEQ ID NO: 164671 - RNA, 31 nt, Homo Sapiens
auccucauagugaaaaggauaugaucaucgu

SEQ ID NO: 164672 - RNA, 32 nt, Homo Sapiens
aucuauggggaggauaugagaaaauaaauucc

SEQ ID NO: 164673 - RNA, 32 nt, Homo Sapiens
gcggccgccccggcucccggcugcaggaaucg

SEQ ID NO: 164674 - RNA, 32 nt, Homo Sapiens
agucuuccugccuuggccuccuaaguagcagg

SEQ ID NO: 164675 - RNA, 32 nt, Homo Sapiens
gcagcugcaggcgcgcgccggggccgugcuga

SEQ ID NO: 164676 - RNA, 32 nt, Homo Sapiens
ccggcgcggggccacugcgccauggacgccac

SEQ ID NO: 164677 - RNA, 32 nt, Homo Sapiens
uuuaacuuaaaaugguuuaaguguagagcuuc

SEQ ID NO: 164678 - RNA, 32 nt, Homo Sapiens
gucauuuauauuugauuuugaaauguauuuuu

SEQ ID NO: 164679 - RNA, 32 nt, Homo Sapiens
gcgcguggggucgcuccgcagcugcgaguuca

SEQ ID NO: 164680 - RNA, 32 nt, Homo Sapiens
aaaaugggaaaguuauacauguauacuuauua

SEQ ID NO: 164681 - RNA, 32 nt, Homo Sapiens
acucaucuaugaaaggaaaucuacuugaaggc

SEQ ID NO: 164682 - RNA, 32 nt, Homo Sapiens
ugauuuuuacuuugaauacuauuucacugacg

SEQ ID NO: 164683 - RNA, 32 nt, Homo Sapiens
guucuuccaucccccagugguaccucaggacc

SEQ ID NO: 164684 - RNA, 32 nt, Homo Sapiens
gaucuccugccagcccagcuggccuggccccc

SEQ ID NO: 164685 - RNA, 32 nt, Homo Sapiens
gauuauggcccuagggagagggaaauagaauc

SEQ ID NO: 164686 - RNA, 31 nt, Homo Sapiens
uuaaacaaauaaaaacuguauuaaauguugc

SEQ ID NO: 164687 - RNA, 32 nt, Homo Sapiens
cuccacuggaagaucucgcagccucaguguau

SEQ ID NO: 164688 - RNA, 32 nt, Homo Sapiens
cuccaccccuccccuacccccacaaguauuca

SEQ ID NO: 164689 - RNA, 32 nt, Homo Sapiens
aaucguguugcaugcauuguuucuacccaccu

SEQ ID NO: 164690 - RNA, 32 nt, Homo Sapiens
uuuucuuucuuacaauuuuuggccauccugag

SEQ ID NO: 164691 - RNA, 32 nt, Homo Sapiens
cagaggaggaggagggaggggagugcgugugu

SEQ ID NO: 164692 - RNA, 32 nt, Homo Sapiens
gugaucgaggcgcacugcagccuugaccuccu

SEQ ID NO: 164693 - RNA, 32 nt, Homo Sapiens
auauauaaagacugauggaaucguuagcaaau

SEQ ID NO: 164694 - RNA, 32 nt, Homo Sapiens
gcaggguugcugugcuggccacacggagaggc

SEQ ID NO: 164695 - RNA, 32 nt, Homo Sapiens
cugauuuuuuauucuccagcuuucagugccaa

SEQ ID NO: 164696 - RNA, 32 nt, Homo Sapiens
cuacaaugccccagcagccaucuccuuccugc

SEQ ID NO: 164697 - RNA, 32 nt, Homo Sapiens
aaaacaaaacaaacagaauagaggggagaugu

SEQ ID NO: 164698 - RNA, 32 nt, Homo Sapiens
auuuucccugcccaagacuuuauuuaacccug

SEQ ID NO: 164699 - RNA, 32 nt, Homo Sapiens
aggcccuggugcccggcccuuggugcugagua

SEQ ID NO: 164700 - RNA, 32 nt, Homo Sapiens
caguagcaugaccccuucugaagccauccgua

SEQ ID NO: 164701 - RNA, 32 nt, Homo Sapiens
aaaugacaugaccaucuuaacugcacagauac

SEQ ID NO: 164702 - RNA, 32 nt, Homo Sapiens
gcccuacuguaucugccuuguuugguugguuc

SEQ ID NO: 164703 - RNA, 31 nt, Homo Sapiens
auucauaauuugacuacuaaaguaagacaaa

SEQ ID NO: 164704 - RNA, 32 nt, Homo Sapiens
gcuauggugauauuccagaagaauuaaucgau

SEQ ID NO: 164705 - RNA, 32 nt, Homo Sapiens
cagaaauucuaccuuucugaugaacaugggaa

SEQ ID NO: 164706 - RNA, 32 nt, Homo Sapiens
uucuucuuuagcuauuuaauauuuucaguaug

SEQ ID NO: 164707 - RNA, 32 nt, Homo Sapiens
aaaggaaauauauaauaaaaauguuaaccaga

SEQ ID NO: 164708 - RNA, 32 nt, Homo Sapiens
acauuuuccagaaaguuguucuaaguugagau

SEQ ID NO: 164709 - RNA, 30 nt, Homo Sapiens
guucagggcacccucuuuagccagggugug

SEQ ID NO: 164710 - RNA, 32 nt, Homo Sapiens
cucagauacuugggaggcugaggugggagggu

SEQ ID NO: 164711 - RNA, 32 nt, Homo Sapiens
cucuuuacugaagagagaaaugauggacagga

SEQ ID NO: 164712 - RNA, 32 nt, Homo Sapiens
uguuuuccacccaaaggggcguggagaccuuu

SEQ ID NO: 164713 - RNA, 28 nt, Homo Sapiens
gcaucagaagauuaaaaauugggagcaa

SEQ ID NO: 164714 - RNA, 32 nt, Homo Sapiens
aagacugauaccuuauuuuccuccuccuccuu

SEQ ID NO: 164715 - RNA, 32 nt, Homo Sapiens
cacccugcuguccaguccccagccuggcccca

SEQ ID NO: 164716 - RNA, 32 nt, Homo Sapiens
auacuauuaaucaugcaguguacaauucaaaa

SEQ ID NO: 164717 - RNA, 32 nt, Homo Sapiens
gcucccucgcccccagcuccuuggcucgcuca

SEQ ID NO: 164718 - RNA, 32 nt, Homo Sapiens
gugugcacuuggcgagccuccugcccacccug

SEQ ID NO: 164719 - RNA, 32 nt, Homo Sapiens
gaaauuuucguuuuguuuuucuuuuggcucca

SEQ ID NO: 164720 - RNA, 32 nt, Homo Sapiens
cagccucugcccggacgcuagccggccuggcc

SEQ ID NO: 164721 - RNA, 32 nt, Homo Sapiens
uugaaaugccaagaauuguaucugaaacaaga

SEQ ID NO: 164722 - RNA, 32 nt, Homo Sapiens
caagguucuugcauagagggcacaggccagag

SEQ ID NO: 164723 - RNA, 32 nt, Homo Sapiens
augcaacauuuuaaggcaaugguuucacaugg

SEQ ID NO: 164724 - RNA, 32 nt, Homo Sapiens
cgcagggccccgggcacccucggaccccgugc

SEQ ID NO: 164725 - RNA, 32 nt, Homo Sapiens
auaacaaugaauuguuacccaucagcauugua

SEQ ID NO: 164726 - RNA, 32 nt, Homo Sapiens
aaggaaaguauuuugcuaaacgccaagcaaga

SEQ ID NO: 164727 - RNA, 32 nt, Homo Sapiens
gcagcccccgacgcgcccuguggggacccgga

SEQ ID NO: 164728 - RNA, 32 nt, Homo Sapiens
acuccaccaggguggggccgggcuugcucaug

SEQ ID NO: 164729 - RNA, 32 nt, Homo Sapiens
ucuucucuagaauccacgggaugucaccacag

SEQ ID NO: 164730 - RNA, 31 nt, Homo Sapiens
gugagggcaucgaugcugccccgggcuaccu

SEQ ID NO: 164731 - RNA, 32 nt, Homo Sapiens
ugccuacaugugagacuauuccagugggacag

SEQ ID NO: 164732 - RNA, 32 nt, Homo Sapiens
aauuuugauccuuuauuuucaauacgcguucc

SEQ ID NO: 164733 - RNA, 30 nt, Homo Sapiens
guggcagauaaaagaggauuuucaacucaa

SEQ ID NO: 164734 - RNA, 32 nt, Homo Sapiens
ucuccggcgcggcuaccugccccguuuucccu

SEQ ID NO: 164735 - RNA, 32 nt, Homo Sapiens
gugcagcuccugcugccccucuaggccacagc

SEQ ID NO: 164736 - RNA, 32 nt, Homo Sapiens
uuugagauguguuuuucuuuuugguuguauuu

SEQ ID NO: 164737 - RNA, 32 nt, Homo Sapiens
agcuuaucuguguuaaaacaauaaaagcauua

SEQ ID NO: 164738 - RNA, 32 nt, Homo Sapiens
ugcgcccaccgggcuagacccggcgccaucau

SEQ ID NO: 164739 - RNA, 32 nt, Homo Sapiens
gaacgccccuacugcgguacugaggaagcggc

SEQ ID NO: 164740 - RNA, 32 nt, Homo Sapiens
guuuggcauaucuaauaagauaccuuacugua

SEQ ID NO: 164741 - RNA, 32 nt, Homo Sapiens
ucucggcugccacccccucccccgguccuccg

SEQ ID NO: 164742 - RNA, 32 nt, Homo Sapiens
augcugggggccgaccugcgucgcccucgccg

SEQ ID NO: 164743 - RNA, 32 nt, Homo Sapiens
ggaucaggcaggcucucuccccggggacauga

SEQ ID NO: 164744 - RNA, 32 nt, Homo Sapiens
gcuccagacucccacacgcccacacagcaccu

SEQ ID NO: 164745 - RNA, 32 nt, Homo Sapiens
acuuccggcggcagcguccgggcuaguuccug

SEQ ID NO: 164746 - RNA, 32 nt, Homo Sapiens
ccuuuccuuucccugccuggagccuucuucaa

SEQ ID NO: 164747 - RNA, 32 nt, Homo Sapiens
ggacuucagaacuuuuaacuuguagucacauu

SEQ ID NO: 164748 - RNA, 32 nt, Homo Sapiens
agugacuuuuuaggcaggagugccaaaggaca

SEQ ID NO: 164749 - RNA, 32 nt, Homo Sapiens
uuuguuuugauuggcaaauacuauuguggaaa

SEQ ID NO: 164750 - RNA, 32 nt, Homo Sapiens
cucccuuucuucauuuucugugauuuaaccau

SEQ ID NO: 164751 - RNA, 32 nt, Homo Sapiens
uuugggacucuucucucacacccagguccugc

SEQ ID NO: 164752 - RNA, 32 nt, Homo Sapiens
uggaaaaugacauggagaauggcugucucuca

SEQ ID NO: 164753 - RNA, 32 nt, Homo Sapiens
gagcgaccaaccccgacccggguuaaaacucc

SEQ ID NO: 164754 - RNA, 32 nt, Homo Sapiens
gugcauuucuucauggcuucugcuuuuuaauc

SEQ ID NO: 164755 - RNA, 32 nt, Homo Sapiens
guguguuucagcaaaucucuagaaauuuacau

SEQ ID NO: 164756 - RNA, 32 nt, Homo Sapiens
uaguaacuauagaacaaugcaaaaacaaaaac

SEQ ID NO: 164757 - RNA, 32 nt, Homo Sapiens
agacguggcaaaucucaagugacaguggaccc

SEQ ID NO: 164758 - RNA, 32 nt, Homo Sapiens
uccuuuugccagcuaauugugagaguuuacac

SEQ ID NO: 164759 - RNA, 32 nt, Homo Sapiens
aacauaugguuguucuaagaauuaaaaggaac

SEQ ID NO: 164760 - RNA, 31 nt, Homo Sapiens
ugcccuggccugugccugccucaggugccag

SEQ ID NO: 164761 - RNA, 32 nt, Homo Sapiens
uucucuaggugguaacaucagagccaccacuu

SEQ ID NO: 164762 - RNA, 32 nt, Homo Sapiens
uauuugucuuauauuucucagauuauaauauu

SEQ ID NO: 164763 - RNA, 32 nt, Homo Sapiens
acaucucuuucugcucacugugcuugcaauaa

SEQ ID NO: 164764 - RNA, 32 nt, Homo Sapiens
auccagaaaggcuuccugaggaggugacacau

SEQ ID NO: 164765 - RNA, 32 nt, Homo Sapiens
cuaguuaugaucagagcaguuacucucagcag

SEQ ID NO: 164766 - RNA, 32 nt, Homo Sapiens
guacugggccgcgcccagaccagccugucgcg

SEQ ID NO: 164767 - RNA, 32 nt, Homo Sapiens
guggggagggagggcgggagguagauauaggc

SEQ ID NO: 164768 - RNA, 32 nt, Homo Sapiens
cuuggacuuuuuauuuuuauauggaaaaguuu

SEQ ID NO: 164769 - RNA, 32 nt, Homo Sapiens
cugcagggucugugaaggcggcguugcaggug

SEQ ID NO: 164770 - RNA, 32 nt, Homo Sapiens
auuauauuucuuucuuuuuuuuuuuuuuuucc

SEQ ID NO: 164771 - RNA, 32 nt, Homo Sapiens
acucuuauuaugauugugaaaaacagugcuuc

SEQ ID NO: 164772 - RNA, 32 nt, Homo Sapiens
cauucacgcugccuuacaggcauuaugucccu

SEQ ID NO: 164773 - RNA, 32 nt, Homo Sapiens
cccgccccacuccucccagccacagccccgcc

SEQ ID NO: 164774 - RNA, 32 nt, Homo Sapiens
ggagacagugauugcauucauugauuucaugg

SEQ ID NO: 164775 - RNA, 32 nt, Homo Sapiens
caugauggugacugggaaaaaauuacuucaag

SEQ ID NO: 164776 - RNA, 32 nt, Homo Sapiens
cugccucagacuccauuucucaucucugucua

SEQ ID NO: 164777 - RNA, 32 nt, Homo Sapiens
uaguggaagccauucacagaauguagacucau

SEQ ID NO: 164778 - RNA, 32 nt, Homo Sapiens
cuuggacacuggggcuuagugaaaauaugauc

SEQ ID NO: 164779 - RNA, 32 nt, Homo Sapiens
uucuuuuacccauaaauaacaugaaugaaaaa

SEQ ID NO: 164780 - RNA, 30 nt, Homo Sapiens
acuacaggcgugugccaccaguccuggcua

SEQ ID NO: 164781 - RNA, 32 nt, Homo Sapiens
uggggaauuuccagcccuuuuaugccugugug

SEQ ID NO: 164782 - RNA, 32 nt, Homo Sapiens
uggcgugcaccuguaaucucagcuacucggga

SEQ ID NO: 164783 - RNA, 32 nt, Homo Sapiens
uuggucgcccugggauggauuccuccuccucu

SEQ ID NO: 164784 - RNA, 32 nt, Homo Sapiens
gcugcuuuuggaaggcacaacuuccugaaugg

SEQ ID NO: 164785 - RNA, 32 nt, Homo Sapiens
uugaccucaaucaaucuucuuaucuuuucuua

SEQ ID NO: 164786 - RNA, 32 nt, Homo Sapiens
gcucccccgcggccgcagaucucccguuugcg

SEQ ID NO: 164787 - RNA, 32 nt, Homo Sapiens
uaagggucuauaaggccucaccacucuaggaa

SEQ ID NO: 164788 - RNA, 32 nt, Homo Sapiens
uuagaauauugagcuuuuuuuuccugauuuuu

SEQ ID NO: 164789 - RNA, 32 nt, Homo Sapiens
aagcaaaaggauguuauuucauuaaauuuggu

SEQ ID NO: 164790 - RNA, 32 nt, Homo Sapiens
ucagaaauaccacaauuaauauuuucaaugug

SEQ ID NO: 164791 - RNA, 32 nt, Homo Sapiens
guggguggacugagucccacucagcuucaggu

SEQ ID NO: 164792 - RNA, 32 nt, Homo Sapiens
auaaccugcacucaccaagaugaacuauuugc

SEQ ID NO: 164793 - RNA, 32 nt, Homo Sapiens
auaaaacauugucccugcccccgggggcuuca

SEQ ID NO: 164794 - RNA, 32 nt, Homo Sapiens
cgcuugcccucccgccccauggagcggccccc

SEQ ID NO: 164795 - RNA, 31 nt, Homo Sapiens
ugacacugccgcacacucagagccuggagac

SEQ ID NO: 164796 - RNA, 32 nt, Homo Sapiens
cccucugagcagcccccuccuccuucagggca

SEQ ID NO: 164797 - RNA, 32 nt, Homo Sapiens
gugaggccugacgugucaguucccaauaaaug

SEQ ID NO: 164798 - RNA, 32 nt, Homo Sapiens
ccugaaagaaaacugaaagaugcuguucacau

SEQ ID NO: 164799 - RNA, 31 nt, Homo Sapiens
gugugaaauuaaaaggagguauaucaacugu

SEQ ID NO: 164800 - RNA, 32 nt, Homo Sapiens
gagcuucccucauuuaccuuuucuccuacaaa

SEQ ID NO: 164801 - RNA, 32 nt, Homo Sapiens
ccaguuucauuuuuguuuuuuauacccgaagu

SEQ ID NO: 164802 - RNA, 32 nt, Homo Sapiens
ucuguaaagaccauuugcaaaauuguaaccua

SEQ ID NO: 164803 - RNA, 32 nt, Homo Sapiens
ccaccucgccacgaacucagcccgccacagaa

SEQ ID NO: 164804 - RNA, 32 nt, Homo Sapiens
ucaucucuucccuccaccucgccugcucggcc

SEQ ID NO: 164805 - RNA, 32 nt, Homo Sapiens
gcacagggccucuggagggacaggauggaccu

SEQ ID NO: 164806 - RNA, 32 nt, Homo Sapiens
uuuaaaagcccucuaagauacucuguguguca

SEQ ID NO: 164807 - RNA, 32 nt, Homo Sapiens
cuuacacaucaaaagaacuuugaaaaugugau

SEQ ID NO: 164808 - RNA, 32 nt, Homo Sapiens
uaacagaugcucucaugagcacucuucaaacu

SEQ ID NO: 164809 - RNA, 32 nt, Homo Sapiens
cugugccccuggaugcacuuucaauauagcag

SEQ ID NO: 164810 - RNA, 32 nt, Homo Sapiens
uggagccccugugaaauucccagucauuuauu

SEQ ID NO: 164811 - RNA, 32 nt, Homo Sapiens
cuaagaaacccagucuuaauuccacacaaugc

SEQ ID NO: 164812 - RNA, 32 nt, Homo Sapiens
cuaggaggucuuccuggccuccuugacugugg

SEQ ID NO: 164813 - RNA, 32 nt, Homo Sapiens
gauuuagucucaggauuaaccuugcuugcaca

SEQ ID NO: 164814 - RNA, 32 nt, Homo Sapiens
uaugaucacacucugcaaaugccacuuuuaaa

SEQ ID NO: 164815 - RNA, 32 nt, Homo Sapiens
aacaauaugagugauccagaacuggcccaaac

SEQ ID NO: 164816 - RNA, 32 nt, Homo Sapiens
aguguguuucaggaugauacaaagaaaaauau

SEQ ID NO: 164817 - RNA, 32 nt, Homo Sapiens
gcuccugaagguuccgugggggugcggggggu

SEQ ID NO: 164818 - RNA, 32 nt, Homo Sapiens
ccucaagaugacuguuuuaaagcuaugugggc

SEQ ID NO: 164819 - RNA, 32 nt, Homo Sapiens
gucgcggcggaggcagaggaagagggagcggg

SEQ ID NO: 164820 - RNA, 32 nt, Homo Sapiens
auccaggacugugccagcacaaagugggagcc

SEQ ID NO: 164821 - RNA, 32 nt, Homo Sapiens
uccaggaggcguuuggggguggggaaggcacc

SEQ ID NO: 164822 - RNA, 32 nt, Homo Sapiens
uggagguuggggauugauucaaacauuaauac

SEQ ID NO: 164823 - RNA, 32 nt, Homo Sapiens
uugguaagugagaaacagaaacgaaaaauaaa

SEQ ID NO: 164824 - RNA, 32 nt, Homo Sapiens
agaacauggguuugggucagguggcucugggu

SEQ ID NO: 164825 - RNA, 32 nt, Homo Sapiens
gaauuuucuaacuguccucuuucuugggucua

SEQ ID NO: 164826 - RNA, 32 nt, Homo Sapiens
gccucugggggcugcuccugcuguggaggcag

SEQ ID NO: 164827 - RNA, 32 nt, Homo Sapiens
acugagugggucugaggugaaugagugaggaa

SEQ ID NO: 164828 - RNA, 32 nt, Homo Sapiens
caucauaaaagaaaagggauagagauuaaagu

SEQ ID NO: 164829 - RNA, 32 nt, Homo Sapiens
gaguccaaggaagggagggagcagccacuccu

SEQ ID NO: 164830 - RNA, 32 nt, Homo Sapiens
gaucauugauuuccuuguguauggauaauccg

SEQ ID NO: 164831 - RNA, 32 nt, Homo Sapiens
agagaaaugcuguuacuuuuuauuuuuacacc

SEQ ID NO: 164832 - RNA, 32 nt, Homo Sapiens
ccacguggccacacgcugcugccaguccuugu

SEQ ID NO: 164833 - RNA, 32 nt, Homo Sapiens
uuuaaagcuauuuuaaauguguuuuuauuugu

SEQ ID NO: 164834 - RNA, 32 nt, Homo Sapiens
cagaucugaugaaaauacaaccucuuauugua

SEQ ID NO: 164835 - RNA, 32 nt, Homo Sapiens
uaaaucucucucugucacccaggcuggagugc

SEQ ID NO: 164836 - RNA, 32 nt, Homo Sapiens
aaaaguuagcuacuugguauacggagauguua

SEQ ID NO: 164837 - RNA, 32 nt, Homo Sapiens
gcucugcgggaacgaugggucuguggguuuug

SEQ ID NO: 164838 - RNA, 32 nt, Homo Sapiens
uuuguagacuaguguucuuccauccuucaacu

SEQ ID NO: 164839 - RNA, 31 nt, Homo Sapiens
ucagugaaauaugcauauguauaucaugaag

SEQ ID NO: 164840 - RNA, 32 nt, Homo Sapiens
aauauuucuuauacuuucucuuuuucugcaag

SEQ ID NO: 164841 - RNA, 32 nt, Homo Sapiens
uucucucuuguccaauggggcuuggagcaccg

SEQ ID NO: 164842 - RNA, 32 nt, Homo Sapiens
ggaaaaguuauaaaaugccaaaauauuuauaa

SEQ ID NO: 164843 - RNA, 32 nt, Homo Sapiens
uugagaucaggaguuugagaccagccuggcca

SEQ ID NO: 164844 - RNA, 32 nt, Homo Sapiens
aagcauuugugcuuuaaaauuguuaugcuggu

SEQ ID NO: 164845 - RNA, 32 nt, Homo Sapiens
ccccgcucuaagucagcgaacacggcuucacg

SEQ ID NO: 164846 - RNA, 32 nt, Homo Sapiens
gugaucauuucugcauuuucuggcuuuuguuu

SEQ ID NO: 164847 - RNA, 32 nt, Homo Sapiens
ccccgggaggccccgcuugccucggcuccugc

SEQ ID NO: 164848 - RNA, 32 nt, Homo Sapiens
auuuaauuuaaaaaaaaacauaaaaaugagga

SEQ ID NO: 164849 - RNA, 32 nt, Homo Sapiens
gaccuggggggaggagacccauggacuucacc

SEQ ID NO: 164850 - RNA, 32 nt, Homo Sapiens
ccucuucuaaaauacccaaccaaaagaucacu

SEQ ID NO: 164851 - RNA, 32 nt, Homo Sapiens
augcagguugaaguauauguagccucagccug

SEQ ID NO: 164852 - RNA, 32 nt, Homo Sapiens
gagacucccaugaagccuuuugaaagggauca

SEQ ID NO: 164853 - RNA, 32 nt, Homo Sapiens
cgaccugcggcccuuccugacgcagccgcagg

SEQ ID NO: 164854 - RNA, 32 nt, Homo Sapiens
aguauuacuuuuucuauuguuauuuuauacgu

SEQ ID NO: 164855 - RNA, 32 nt, Homo Sapiens
cauagugucuugagaccugaaacugaguugga

SEQ ID NO: 164856 - RNA, 32 nt, Homo Sapiens
cacagccaggcccugggcccaagccccuuguc

SEQ ID NO: 164857 - RNA, 32 nt, Homo Sapiens
aaugaaucaaugaguauggaaacuacauuaua

SEQ ID NO: 164858 - RNA, 32 nt, Homo Sapiens
ucagcuuccuuccuucugcggccagagccgag

SEQ ID NO: 164859 - RNA, 32 nt, Homo Sapiens
acagguuugacaaaaagauaucauguuucgau

SEQ ID NO: 164860 - RNA, 30 nt, Homo Sapiens
cuucugccacuugcccugccgguuucuugg

SEQ ID NO: 164861 - RNA, 32 nt, Homo Sapiens
caaaauggcaauaaaaucauaacagcaaaaaa

SEQ ID NO: 164862 - RNA, 32 nt, Homo Sapiens
aucccccgccccagccccugacacacacucgg

SEQ ID NO: 164863 - RNA, 32 nt, Homo Sapiens
guuguucuuuuuucuuuuuuuaauggcagcua

SEQ ID NO: 164864 - RNA, 32 nt, Homo Sapiens
cucuuaaaaaucaugccguaaugucauuaugc

SEQ ID NO: 164865 - RNA, 32 nt, Homo Sapiens
auaaaggaaagugugucuuuugacuucaucag

SEQ ID NO: 164866 - RNA, 32 nt, Homo Sapiens
cagaauauuaaguaucucuuuaagaauaucua

SEQ ID NO: 164867 - RNA, 32 nt, Homo Sapiens
cuuuaagaacuggcagcaaggcuugaggccuu

SEQ ID NO: 164868 - RNA, 32 nt, Homo Sapiens
cauaaaaacacuuuucugccuucuacaguaua

SEQ ID NO: 164869 - RNA, 32 nt, Homo Sapiens
caaugggggaggggcuucggaccacagcagga

SEQ ID NO: 164870 - RNA, 32 nt, Homo Sapiens
ccaaaaauuacuuggagcaaagggcaguccgg

SEQ ID NO: 164871 - RNA, 32 nt, Homo Sapiens
gcauauauuuagcggguauuugaaagauagaa

SEQ ID NO: 164872 - RNA, 32 nt, Homo Sapiens
cuuccuuguaauuauacuuaagaucuucaauu

SEQ ID NO: 164873 - RNA, 28 nt, Homo Sapiens
cggcacaggcggccgcgggguccggaac

SEQ ID NO: 164874 - RNA, 32 nt, Homo Sapiens
uuuugugaauuuucaagugcuguuuuguugga

SEQ ID NO: 164875 - RNA, 32 nt, Homo Sapiens
aggcugcauccuuuuuucagcccaacauuuag

SEQ ID NO: 164876 - RNA, 32 nt, Homo Sapiens
gaagacgucucuauguugcgaacacucuguau

SEQ ID NO: 164877 - RNA, 32 nt, Homo Sapiens
uuagaaagagaacccugaaagcugccaguuuu

SEQ ID NO: 164878 - RNA, 32 nt, Homo Sapiens
caaagaugagaaaaaauuaauuaaugaggaca

SEQ ID NO: 164879 - RNA, 32 nt, Homo Sapiens
caaacaggcaacugcuugcugcucuccuugcu

SEQ ID NO: 164880 - RNA, 32 nt, Homo Sapiens
cugcugucuuuucuguaauauucucuuucaug

SEQ ID NO: 164881 - RNA, 32 nt, Homo Sapiens
agcaugggauuuaaauauuuuacuucuaaaua

SEQ ID NO: 164882 - RNA, 32 nt, Homo Sapiens
ggccgggcgugguggcucucgccuguaaucuc

SEQ ID NO: 164883 - RNA, 32 nt, Homo Sapiens
aagaugaaaguguccaaacacauccugcuucc

SEQ ID NO: 164884 - RNA, 32 nt, Homo Sapiens
gcuccggcgaggggcagaagagcgcgagggag

SEQ ID NO: 164885 - RNA, 32 nt, Homo Sapiens
aauuagccgggcgugguggcguacgccuauag

SEQ ID NO: 164886 - RNA, 32 nt, Homo Sapiens
cacccggcagccccgcugcugccgccuugugg

SEQ ID NO: 164887 - RNA, 32 nt, Homo Sapiens
ccuacuacgcccuccccuccccagccuuuucc

SEQ ID NO: 164888 - RNA, 32 nt, Homo Sapiens
gaaugugggagcuucuuccgcucuaaguccua

SEQ ID NO: 164889 - RNA, 32 nt, Homo Sapiens
aagggauugguagaauucacauaugaacuauu

SEQ ID NO: 164890 - RNA, 32 nt, Homo Sapiens
ugauaccacaguguggauugucugucuguaag

SEQ ID NO: 164891 - RNA, 32 nt, Homo Sapiens
guguauguuuucuauuugagaguuaaaacauu

SEQ ID NO: 164892 - RNA, 31 nt, Homo Sapiens
ucugcagcccacugccugcccagagccauca

SEQ ID NO: 164893 - RNA, 32 nt, Homo Sapiens
uagucuguuuuuucuagcaugcuugauuuagg

SEQ ID NO: 164894 - RNA, 32 nt, Homo Sapiens
cuuugucaugcuucuucaguaccauggauuug

SEQ ID NO: 164895 - RNA, 32 nt, Homo Sapiens
uuuucauguacuauaaauaugaaaauaacuuu

SEQ ID NO: 164896 - RNA, 32 nt, Homo Sapiens
gguggguaguggggaggagagcuggcauuccu

SEQ ID NO: 164897 - RNA, 32 nt, Homo Sapiens
uugcuaauuuuguaguuucaugugauuaguuu

SEQ ID NO: 164898 - RNA, 32 nt, Homo Sapiens
agguacguaggucggcggcccagcucggcgcu

SEQ ID NO: 164899 - RNA, 32 nt, Homo Sapiens
gcgagcugagaacacauggacuagcugagugg

SEQ ID NO: 164900 - RNA, 32 nt, Homo Sapiens
aagggauccugccugccccuacccuggacuug

SEQ ID NO: 164901 - RNA, 32 nt, Homo Sapiens
gcugaagccaucucuccccugugaggcacagg

SEQ ID NO: 164902 - RNA, 32 nt, Homo Sapiens
ucccaauccuuugaccauuccuccccaaaagc

SEQ ID NO: 164903 - RNA, 32 nt, Homo Sapiens
augcugacagaaaauaacuuaaaccauugaaa

SEQ ID NO: 164904 - RNA, 32 nt, Homo Sapiens
agggggcggggagggccugaccgacccguggg

SEQ ID NO: 164905 - RNA, 32 nt, Homo Sapiens
cccugccccacuuucucucugaaccacuccuu

SEQ ID NO: 164906 - RNA, 32 nt, Homo Sapiens
agccccgccaggugcccgcgccaggcccucag

SEQ ID NO: 164907 - RNA, 32 nt, Homo Sapiens
aaauuuaguuuagggaaagcccucccacaggu

SEQ ID NO: 164908 - RNA, 32 nt, Homo Sapiens
gggagcaucuggggccugggauggccacagaa

SEQ ID NO: 164909 - RNA, 32 nt, Homo Sapiens
gccuucuuuuucuggacucuggacuuucucua

SEQ ID NO: 164910 - RNA, 32 nt, Homo Sapiens
gccagcuugggguaggaaguuaauaauacugu

SEQ ID NO: 164911 - RNA, 32 nt, Homo Sapiens
cuucuucuggcuuccccuuccaucuguguccc

SEQ ID NO: 164912 - RNA, 32 nt, Homo Sapiens
aagcugugaacaggcugggcugcuggaggugg

SEQ ID NO: 164913 - RNA, 32 nt, Homo Sapiens
uaauuuuuguaaauaaauuuguuuguacauug

SEQ ID NO: 164914 - RNA, 32 nt, Homo Sapiens
aacugauagacaucuaaaaacaauauagggaa

SEQ ID NO: 164915 - RNA, 32 nt, Homo Sapiens
cccugccccacggcugcccugaccccaggagg

SEQ ID NO: 164916 - RNA, 32 nt, Homo Sapiens
ugcugaggguccggcccggggucaucuggcag

SEQ ID NO: 164917 - RNA, 32 nt, Homo Sapiens
gacgcuagucccauucuugugggcuuuauucu

SEQ ID NO: 164918 - RNA, 32 nt, Homo Sapiens
cccaggcgagugcccguuagcgggucucccgg

SEQ ID NO: 164919 - RNA, 32 nt, Homo Sapiens
uacgguaaagauuuaaauagguccugagacug

SEQ ID NO: 164920 - RNA, 32 nt, Homo Sapiens
gagcccgcagcggcugccgccgcagcgucggg

SEQ ID NO: 164921 - RNA, 32 nt, Homo Sapiens
cucaucauuuuggcacuucugacuaaagggca

SEQ ID NO: 164922 - RNA, 32 nt, Homo Sapiens
uacugcaugcucaggacccauagaugaacuau

SEQ ID NO: 164923 - RNA, 32 nt, Homo Sapiens
cacgcaggggagaagggagggacgcggcgcug

SEQ ID NO: 164924 - RNA, 32 nt, Homo Sapiens
aggcccaggauacggcagguucugccugggag

SEQ ID NO: 164925 - RNA, 32 nt, Homo Sapiens
cccaucauucauucucaagaccucugaagggu

SEQ ID NO: 164926 - RNA, 32 nt, Homo Sapiens
uguggggcgaugcugcagcggcugaaaccacg

SEQ ID NO: 164927 - RNA, 32 nt, Homo Sapiens
guauuuugcauaaugcauggauccuuaguuca

SEQ ID NO: 164928 - RNA, 32 nt, Homo Sapiens
ccggucaguauaaaagauuaaacucuacagaa

SEQ ID NO: 164929 - RNA, 29 nt, Homo Sapiens
gaucaugucuugggccgcucgcccgcccu

SEQ ID NO: 164930 - RNA, 32 nt, Homo Sapiens
ccugccuacggaaccccgcgggccagcagcag

SEQ ID NO: 164931 - RNA, 32 nt, Homo Sapiens
auucacaaacgaugugaaaacauuauugagug

SEQ ID NO: 164932 - RNA, 29 nt, Homo Sapiens
cucuuuaagaaaauggccauuaaggccgg

SEQ ID NO: 164933 - RNA, 32 nt, Homo Sapiens
ugauuuuaaaauguacauguauuaaauuacau

SEQ ID NO: 164934 - RNA, 32 nt, Homo Sapiens
ugagcggcgggcgggcgcgaguguggccggcc

SEQ ID NO: 164935 - RNA, 25 nt, Homo Sapiens
aaagaucaccgcugccuccccccgc

SEQ ID NO: 164936 - RNA, 32 nt, Homo Sapiens
caccugccagggaggccaucuggggcuccuuc

SEQ ID NO: 164937 - RNA, 32 nt, Homo Sapiens
cucacuccacacuggcacguuugugagaagaa

SEQ ID NO: 164938 - RNA, 32 nt, Homo Sapiens
guuuuagaacaguuuuagguucacagcaaaaa

SEQ ID NO: 164939 - RNA, 32 nt, Homo Sapiens
cuggcugccugcguccucucggugagcugugc

SEQ ID NO: 164940 - RNA, 32 nt, Homo Sapiens
agauggggaaacugaggccuugagaaggaaaa

SEQ ID NO: 164941 - RNA, 32 nt, Homo Sapiens
gugacuguauucuugauucagccugauagcua

SEQ ID NO: 164942 - RNA, 32 nt, Homo Sapiens
aagugucuauagaacaauaaaaaucuuuuacu

SEQ ID NO: 164943 - RNA, 32 nt, Homo Sapiens
agcaaauauuaauggcagaaaaccaaaaacua

SEQ ID NO: 164944 - RNA, 32 nt, Homo Sapiens
uauaguuaugaguaauauaauuuuauguacau

SEQ ID NO: 164945 - RNA, 32 nt, Homo Sapiens
caccuggcccggagcuggcccgcuccuccccg

SEQ ID NO: 164946 - RNA, 32 nt, Homo Sapiens
auguuaacagagaagaaauauuugagucugga

SEQ ID NO: 164947 - RNA, 32 nt, Homo Sapiens
cccgccagccccagccgcuccuccacgccugu

SEQ ID NO: 164948 - RNA, 32 nt, Homo Sapiens
ucuuugcucccuccaaucuugagauuggguuu

SEQ ID NO: 164949 - RNA, 32 nt, Homo Sapiens
uguuguugauuuugaagugcuuccuaggccag

SEQ ID NO: 164950 - RNA, 32 nt, Homo Sapiens
agcaggcaggcgcaggaugcggggccacgagg

SEQ ID NO: 164951 - RNA, 32 nt, Homo Sapiens
uucagggagcagcccauuuaggucucuuuugu

SEQ ID NO: 164952 - RNA, 32 nt, Homo Sapiens
uagagugacucagacacaccacaguaacaacu

SEQ ID NO: 164953 - RNA, 32 nt, Homo Sapiens
gaauaagagaauacuaauuguuuugguaugau

SEQ ID NO: 164954 - RNA, 32 nt, Homo Sapiens
uuaaguuucccauuuuaaaaaauaccuuaaaa

SEQ ID NO: 164955 - RNA, 32 nt, Homo Sapiens
uggguucagaggucauggcugcaccggucaga

SEQ ID NO: 164956 - RNA, 32 nt, Homo Sapiens
aaaagggucccucggucuuuuauuucagggcu

SEQ ID NO: 164957 - RNA, 32 nt, Homo Sapiens
ccuucagguaggcccucgcagaugcugcuugc

SEQ ID NO: 164958 - RNA, 32 nt, Homo Sapiens
ucuauggcuggauucaugcugcaccgccagaa

SEQ ID NO: 164959 - RNA, 32 nt, Homo Sapiens
gaaggccucgcaggaagacgcaacacauggga

SEQ ID NO: 164960 - RNA, 27 nt, Homo Sapiens
caacacauucaacacugguauaccucc

SEQ ID NO: 164961 - RNA, 32 nt, Homo Sapiens
cuauauaggugcuauguauaucuuucaucugu

SEQ ID NO: 164962 - RNA, 32 nt, Homo Sapiens
gucagcucugagacugcccuccaggugggcag

SEQ ID NO: 164963 - RNA, 32 nt, Homo Sapiens
auuuaaaggcacuauuauaaauuuauccuaua

SEQ ID NO: 164964 - RNA, 32 nt, Homo Sapiens
ucagaagccagguggccugugcuccccauggg

SEQ ID NO: 164965 - RNA, 32 nt, Homo Sapiens
ugaggcaguucggcuggggccagcggcgcuuu

SEQ ID NO: 164966 - RNA, 32 nt, Homo Sapiens
uccugcucuaggauccccgacucauuaaagca

SEQ ID NO: 164967 - RNA, 32 nt, Homo Sapiens
ccugggcuugucccggccucuggacaaaagaa

SEQ ID NO: 164968 - RNA, 32 nt, Homo Sapiens
gaucaacagacucgauagguaaaauuguguga

SEQ ID NO: 164969 - RNA, 32 nt, Homo Sapiens
gacccucgcgcgcgaccagccgaaucgcuccu

SEQ ID NO: 164970 - RNA, 32 nt, Homo Sapiens
gacuuaagcugaugaagcuuggcuccuaguga

SEQ ID NO: 164971 - RNA, 32 nt, Homo Sapiens
cuaaauguauauauuuaauaaugucauguaua

SEQ ID NO: 164972 - RNA, 32 nt, Homo Sapiens
acuaagguagcuuagcucucugcuuuguucuu

SEQ ID NO: 164973 - RNA, 30 nt, Homo Sapiens
uggggcccccauuugccgccgccaugccca

SEQ ID NO: 164974 - RNA, 32 nt, Homo Sapiens
gaggacguguccagcucugcucugugggaagg

SEQ ID NO: 164975 - RNA, 31 nt, Homo Sapiens
gggaaggagccccaggagggagagggacccg

SEQ ID NO: 164976 - RNA, 32 nt, Homo Sapiens
aucggucaccagcgaggcgcacgcugaagacc

SEQ ID NO: 164977 - RNA, 32 nt, Homo Sapiens
uggauggcucaagcauguuuuccuccuucucu

SEQ ID NO: 164978 - RNA, 32 nt, Homo Sapiens
ccgggucaugcaugcugcaacucucaacauuu

SEQ ID NO: 164979 - RNA, 32 nt, Homo Sapiens
ucuuuggagugcuucuugugugucucagaaaa

SEQ ID NO: 164980 - RNA, 32 nt, Homo Sapiens
gacccacacaccuuuggccucaucgcugaccu

SEQ ID NO: 164981 - RNA, 32 nt, Homo Sapiens
acugcaggcagguggauagaagugcggccccu

SEQ ID NO: 164982 - RNA, 32 nt, Homo Sapiens
gggggaggggggacauggaaaaauauuguuug

SEQ ID NO: 164983 - RNA, 32 nt, Homo Sapiens
uguauauuauuguaaauagaaaugaccacagc

SEQ ID NO: 164984 - RNA, 32 nt, Homo Sapiens
aucaucaaagauuuucaguuaaaguagcauua

SEQ ID NO: 164985 - RNA, 32 nt, Homo Sapiens
ggcugggccucggaccccacuccggcccucca

SEQ ID NO: 164986 - RNA, 32 nt, Homo Sapiens
uagagguauuuuuaggcuauuuuuguaauaug

SEQ ID NO: 164987 - RNA, 32 nt, Homo Sapiens
caucaucccuccccaaccccagcucucucugc

SEQ ID NO: 164988 - RNA, 31 nt, Homo Sapiens
gcuggagcgggcccuggccaggcuggagagg

SEQ ID NO: 164989 - RNA, 32 nt, Homo Sapiens
cugcccugauccucugcuuccuccucacaacc

SEQ ID NO: 164990 - RNA, 32 nt, Homo Sapiens
aggcgggcgcugggggcgcugcggccgcugca

SEQ ID NO: 164991 - RNA, 32 nt, Homo Sapiens
uaaaacagggugggcaaacucucuaaacuggu

SEQ ID NO: 164992 - RNA, 32 nt, Homo Sapiens
auaguucagccggugcaggcuccucccucccu

SEQ ID NO: 164993 - RNA, 32 nt, Homo Sapiens
ugacccaauuuggagacguauuuuggaaggag

SEQ ID NO: 164994 - RNA, 32 nt, Homo Sapiens
aauauauaugugggaaauacaggggaaugagc

SEQ ID NO: 164995 - RNA, 32 nt, Homo Sapiens
gcggaggggugugcggaaacgcccgcgauggg

SEQ ID NO: 164996 - RNA, 32 nt, Homo Sapiens
gcgccgcggcgcggagucccggcugcgggaua

SEQ ID NO: 164997 - RNA, 32 nt, Homo Sapiens
auuguggcugucacgcagaaucaaagagaugg

SEQ ID NO: 164998 - RNA, 32 nt, Homo Sapiens
ggagagucuugggccuggcccgcgucuagcuu

SEQ ID NO: 164999 - RNA, 32 nt, Homo Sapiens
aauguuuugaguuuuuugaaagaccccaauuu

SEQ ID NO: 165000 - RNA, 32 nt, Homo Sapiens
ccagggugggagaggagcaucaccagcuccuc

SEQ ID NO: 165001 - RNA, 32 nt, Homo Sapiens
gacggaacaucaugucguccgcggccgagccu

SEQ ID NO: 165002 - RNA, 32 nt, Homo Sapiens
ggauuccccccucugcugcccaggaguggcca

SEQ ID NO: 165003 - RNA, 32 nt, Homo Sapiens
ccaggaucaaggguacaguaacacgaaugagc

SEQ ID NO: 165004 - RNA, 32 nt, Homo Sapiens
ccccuuuauuuucucuuuagcugugcauauuu

SEQ ID NO: 165005 - RNA, 32 nt, Homo Sapiens
caaugcauuuguguaauuuauagaaguaaaau

SEQ ID NO: 165006 - RNA, 32 nt, Homo Sapiens
uuggggaagugcggugacugggaaaugcugag

SEQ ID NO: 165007 - RNA, 32 nt, Homo Sapiens
gcccgugcugaccagcccccaaggcccucugg

SEQ ID NO: 165008 - RNA, 32 nt, Homo Sapiens
uggcaucugaucaagcuccggaagauggugga

SEQ ID NO: 165009 - RNA, 32 nt, Homo Sapiens
cgcgucccaucuccccgccgauugguccgccc

SEQ ID NO: 165010 - RNA, 32 nt, Homo Sapiens
gaaagccucagcguagcauuaagggacguagc

SEQ ID NO: 165011 - RNA, 32 nt, Homo Sapiens
auuaauacugucaaucuuucucccagccugcc

SEQ ID NO: 165012 - RNA, 32 nt, Homo Sapiens
acaagguggaagcucagagcgcuggucuccac

SEQ ID NO: 165013 - RNA, 32 nt, Homo Sapiens
cacgccuccugagaccacuuggaaacagacca

SEQ ID NO: 165014 - RNA, 32 nt, Homo Sapiens
uuggcuuagugaucuaaacuggccccuuccuc

SEQ ID NO: 165015 - RNA, 32 nt, Homo Sapiens
uggcggcggcagggcggcggcgcgggcgugag

SEQ ID NO: 165016 - RNA, 32 nt, Homo Sapiens
uaugacgacccccaauaaaggaaacaaggccu

SEQ ID NO: 165017 - RNA, 32 nt, Homo Sapiens
uuuugauuuacuauaagagcugggauuugauu

SEQ ID NO: 165018 - RNA, 32 nt, Homo Sapiens
acuaagugcgucugcuagcucucggucccaca

SEQ ID NO: 165019 - RNA, 32 nt, Homo Sapiens
cgcccuggcuccagcccucaccugccgcagcc

SEQ ID NO: 165020 - RNA, 32 nt, Homo Sapiens
aaggccaggcccccggcccaccagcuuucgga

SEQ ID NO: 165021 - RNA, 32 nt, Homo Sapiens
ggguaaagggaaaaaauuuuuaaugaaaucug

SEQ ID NO: 165022 - RNA, 32 nt, Homo Sapiens
ugagggagcccggcugcgggccggcggcggga

SEQ ID NO: 165023 - RNA, 30 nt, Homo Sapiens
auuagggagcuaauggguuaagcuuccagu

SEQ ID NO: 165024 - RNA, 32 nt, Homo Sapiens
uauaguuuaugucaagggcauuaaaagccucc

SEQ ID NO: 165025 - RNA, 32 nt, Homo Sapiens
auuugaaauauauucuucuacaaaagagauuu

SEQ ID NO: 165026 - RNA, 32 nt, Homo Sapiens
aaaagagauuuguauugcugguaaaaaaaaaa

SEQ ID NO: 165027 - RNA, 32 nt, Homo Sapiens
agcaccuguaacagcagaacuacuggacgaaa

SEQ ID NO: 165028 - RNA, 32 nt, Homo Sapiens
ccggccaggacacggucugggccgccgaaucu

SEQ ID NO: 165029 - RNA, 32 nt, Homo Sapiens
ggggggcguggccuuaccuucuccugcucgcc

SEQ ID NO: 165030 - RNA, 32 nt, Homo Sapiens
gggcuccggccggcuaagccgcggcggacaac

SEQ ID NO: 165031 - RNA, 32 nt, Homo Sapiens
ggguuuaaguugcuacuauucaacuacacuau

SEQ ID NO: 165032 - RNA, 32 nt, Homo Sapiens
uauaacugauuuauaaagguuuuuguacauuu

SEQ ID NO: 165033 - RNA, 30 nt, Homo Sapiens
cgcgagaugcccgugcugaagcagcugggc

SEQ ID NO: 165034 - RNA, 32 nt, Homo Sapiens
caaacacccugcugcuggcugccaggcaggcc

SEQ ID NO: 165035 - RNA, 32 nt, Homo Sapiens
ccggacgcgccgguccgacuuggaugccggcu

SEQ ID NO: 165036 - RNA, 32 nt, Homo Sapiens
acaugugaccgggucuugcucuagugauuggu

SEQ ID NO: 165037 - RNA, 32 nt, Homo Sapiens
uuagauaaggaaaaacagcauaaaaagauacc

SEQ ID NO: 165038 - RNA, 32 nt, Homo Sapiens
cuuguuuuuguaaagaaaaauauuuaauguug

SEQ ID NO: 165039 - RNA, 32 nt, Homo Sapiens
gccccacccggcuccgccugcggccgccauuu

SEQ ID NO: 165040 - RNA, 32 nt, Homo Sapiens
uccuguggccccacccugggcccugggcugga

SEQ ID NO: 165041 - RNA, 32 nt, Homo Sapiens
gucagauuuccucuccugccuuaaacaacugg

SEQ ID NO: 165042 - RNA, 29 nt, Homo Sapiens
uuuuauucuauccuaucuguggauguaua

SEQ ID NO: 165043 - RNA, 32 nt, Homo Sapiens
auauugaaaguaaauauaaucaauuauguacu

SEQ ID NO: 165044 - RNA, 32 nt, Homo Sapiens
cauagcccugucaagucuuguucucaaagcag

SEQ ID NO: 165045 - RNA, 32 nt, Homo Sapiens
accauuuuuguuaaaggcuuaucaagacacuc

SEQ ID NO: 165046 - RNA, 32 nt, Homo Sapiens
guggagcacaugccagcugagugaaaacgcac

SEQ ID NO: 165047 - RNA, 32 nt, Homo Sapiens
agaauguguacuuuuccuauugaaauaccaug

SEQ ID NO: 165048 - RNA, 32 nt, Homo Sapiens
ugaaaauaugauguuucacauaaaaccucauu

SEQ ID NO: 165049 - RNA, 32 nt, Homo Sapiens
cacaaacacacacacacacacacacacacaca

SEQ ID NO: 165050 - RNA, 32 nt, Homo Sapiens
cacacacacacacacacacacacacacaaaca

SEQ ID NO: 165051 - RNA, 32 nt, Homo Sapiens
augcuguuuuaaaggugacuugucaggaguug

SEQ ID NO: 165052 - RNA, 32 nt, Homo Sapiens
aaguccuguuuauugagacccuuuaaaugccu

SEQ ID NO: 165053 - RNA, 32 nt, Homo Sapiens
ugucuucgacccagcccagcccccucuguugc

SEQ ID NO: 165054 - RNA, 32 nt, Homo Sapiens
ccugcacccucccugcucccagcccaaggcca

SEQ ID NO: 165055 - RNA, 32 nt, Homo Sapiens
gcuccaugucuccucauuccuacaccuauuuu

SEQ ID NO: 165056 - RNA, 32 nt, Homo Sapiens
auuuuuguaaaaacacaaggcuaaauuaauga

SEQ ID NO: 165057 - RNA, 32 nt, Homo Sapiens
gucccggggaugcagcgcgggggucagagagc

SEQ ID NO: 165058 - RNA, 32 nt, Homo Sapiens
aauuuuaccacuuuuugucuuuauaagcauau

SEQ ID NO: 165059 - RNA, 32 nt, Homo Sapiens
uuucuucugauuuuaaagccauuugauagaga

SEQ ID NO: 165060 - RNA, 30 nt, Homo Sapiens
ccaucucuggacucccauccaucccuaucc

SEQ ID NO: 165061 - RNA, 32 nt, Homo Sapiens
aguggcccccacucacagggagcuggcaaugc

SEQ ID NO: 165062 - RNA, 32 nt, Homo Sapiens
cacagcccaagccaggacgcccgcggaaccuc

SEQ ID NO: 165063 - RNA, 32 nt, Homo Sapiens
ggccugaggagaaaugaugagaaguuuuguuu

SEQ ID NO: 165064 - RNA, 32 nt, Homo Sapiens
cuuuaugaucuggcccuugcuuaccucucagc

SEQ ID NO: 165065 - RNA, 32 nt, Homo Sapiens
cucuagacugguucauucuacguaucugcuac

SEQ ID NO: 165066 - RNA, 32 nt, Homo Sapiens
acagacccgaggaagccagugcaugcagaguu

SEQ ID NO: 165067 - RNA, 32 nt, Homo Sapiens
aucuuaaaaaauuuaggaaauucaacuuaaga

SEQ ID NO: 165068 - RNA, 32 nt, Homo Sapiens
cacagaucccaugugagaaagagagaguuuca

SEQ ID NO: 165069 - RNA, 32 nt, Homo Sapiens
ccgcugugaagguagagggaaucccaaccugg

SEQ ID NO: 165070 - RNA, 32 nt, Homo Sapiens
cucagcuaugaccagcagcagcagcagcagca

SEQ ID NO: 165071 - RNA, 32 nt, Homo Sapiens
ucuagauauggacauaguaaaaugacuugaaa

SEQ ID NO: 165072 - RNA, 32 nt, Homo Sapiens
uuauuaggauaaauuugagaaacuuacguaua

SEQ ID NO: 165073 - RNA, 32 nt, Homo Sapiens
gauuaauccaaguuuuuguguguaucaguagu

SEQ ID NO: 165074 - RNA, 32 nt, Homo Sapiens
gcagcgcucgccaccuccccccggccugggca

SEQ ID NO: 165075 - RNA, 27 nt, Homo Sapiens
aguucauccuucuucagugugaccagu

SEQ ID NO: 165076 - RNA, 32 nt, Homo Sapiens
ucaacugaaaguguuuccuucauuucugauau

SEQ ID NO: 165077 - RNA, 32 nt, Homo Sapiens
auaccauuuuuucucucuguacuuuagcuccu

SEQ ID NO: 165078 - RNA, 32 nt, Homo Sapiens
cagcagcauucucagcuggaugaggaaaacca

SEQ ID NO: 165079 - RNA, 32 nt, Homo Sapiens
auuagauccgcuaaggggcaucugaaacaucc

SEQ ID NO: 165080 - RNA, 30 nt, Homo Sapiens
ugugagcucuucucugucgcccugaagggu

SEQ ID NO: 165081 - RNA, 32 nt, Homo Sapiens
gggagaguucccuggucccccucacaggaugu

SEQ ID NO: 165082 - RNA, 32 nt, Homo Sapiens
uguaaagugucuaagucacaacgcugcagagc

SEQ ID NO: 165083 - RNA, 32 nt, Homo Sapiens
aaucaguguagcuaugugcugcugcugcucaa

SEQ ID NO: 165084 - RNA, 31 nt, Homo Sapiens
uaacuuuucagggucuaccuaacugagccua

SEQ ID NO: 165085 - RNA, 32 nt, Homo Sapiens
aucaagcuccacguuuuauuuucuucaaggca

SEQ ID NO: 165086 - RNA, 32 nt, Homo Sapiens
ggauggggggaugaaaucauguuuacagaccu

SEQ ID NO: 165087 - RNA, 32 nt, Homo Sapiens
agugccacccucaaaggacauagacuuugaaa

SEQ ID NO: 165088 - RNA, 32 nt, Homo Sapiens
uauugccuauuaugauaaaagaaauaccuucu

SEQ ID NO: 165089 - RNA, 32 nt, Homo Sapiens
ugccuggcguugugcgcagagcuggaaagcau

SEQ ID NO: 165090 - RNA, 32 nt, Homo Sapiens
ggcgucccucuuggcccuccccagaguggcuu

SEQ ID NO: 165091 - RNA, 32 nt, Homo Sapiens
aacugggaucggguagggaacaaccuaaggga

SEQ ID NO: 165092 - RNA, 32 nt, Homo Sapiens
uaagguuuaugaugaaaaucuaaguggagagg

SEQ ID NO: 165093 - RNA, 32 nt, Homo Sapiens
auggaauuucauaucuacagauagagaguugu

SEQ ID NO: 165094 - RNA, 32 nt, Homo Sapiens
agggcggaaggucaggcuccccgcccccucca

SEQ ID NO: 165095 - RNA, 32 nt, Homo Sapiens
gcaugaauaaaauuauuccuuuguauuuuuac

SEQ ID NO: 165096 - RNA, 32 nt, Homo Sapiens
uuacuacuugggccucuuucuaguuuugaauu

SEQ ID NO: 165097 - RNA, 32 nt, Homo Sapiens
uguaauaggaauuugcucuaauaaucaauaga

SEQ ID NO: 165098 - RNA, 32 nt, Homo Sapiens
uaggggccggcagucuuggggugggcccugcc

SEQ ID NO: 165099 - RNA, 32 nt, Homo Sapiens
uacucuugcagauauagugaggauuaaauaag

SEQ ID NO: 165100 - RNA, 32 nt, Homo Sapiens
agacauuaauaaagaugaaauaaacuuauuac

SEQ ID NO: 165101 - RNA, 32 nt, Homo Sapiens
ccgccgauguaccaccugaugaaguucauucc

SEQ ID NO: 165102 - RNA, 32 nt, Homo Sapiens
gagcggcuggagcggcagcggcggccgggcac

SEQ ID NO: 165103 - RNA, 32 nt, Homo Sapiens
agccgggagauggccacucagcuccuuuaacu

SEQ ID NO: 165104 - RNA, 32 nt, Homo Sapiens
aucuucauugacagggagggagcccaggacau

SEQ ID NO: 165105 - RNA, 32 nt, Homo Sapiens
cuggucaaacccagcccccagggccuaggguu

SEQ ID NO: 165106 - RNA, 29 nt, Homo Sapiens
aaaacugcuauggagagaaagcuaacaug

SEQ ID NO: 165107 - RNA, 32 nt, Homo Sapiens
ucuuuaugcacuuaguguacuuuggagggacc

SEQ ID NO: 165108 - RNA, 32 nt, Homo Sapiens
uauuuggggaauuguaaugauguuggugcugc

SEQ ID NO: 165109 - RNA, 32 nt, Homo Sapiens
uguagaccuugaugauugugcaguaugaaauc

SEQ ID NO: 165110 - RNA, 32 nt, Homo Sapiens
aagcuauguucccggauaggcaguggcagaag

SEQ ID NO: 165111 - RNA, 32 nt, Homo Sapiens
acagccauuuuuccaauuguggaacauuguuu

SEQ ID NO: 165112 - RNA, 32 nt, Homo Sapiens
cguggcugccagcgcuagcucugcaugcucuu

SEQ ID NO: 165113 - RNA, 32 nt, Homo Sapiens
agagcuguggcggggggcgccguccaggccga

SEQ ID NO: 165114 - RNA, 32 nt, Homo Sapiens
gcgggacacgggggacgggcggugucacguga

SEQ ID NO: 165115 - RNA, 32 nt, Homo Sapiens
ccuccucacauuggucuaucuacuggcagcug

SEQ ID NO: 165116 - RNA, 32 nt, Homo Sapiens
agccucgccugccugacuuacagaaagaaaag

SEQ ID NO: 165117 - RNA, 32 nt, Homo Sapiens
auuaggaaacuuuauuuaaaauuucagguagu

SEQ ID NO: 165118 - RNA, 32 nt, Homo Sapiens
cuccacaguugccugcccugggcgggggcgag

SEQ ID NO: 165119 - RNA, 32 nt, Homo Sapiens
ggggacugcugggggcggggcuugguggugac

SEQ ID NO: 165120 - RNA, 32 nt, Homo Sapiens
ucaaguuuggccaacuaacaaaucagaaucug

SEQ ID NO: 165121 - RNA, 32 nt, Homo Sapiens
accgccaucuccagagccaccaucaccaguuc

SEQ ID NO: 165122 - RNA, 32 nt, Homo Sapiens
uugguguaaacuaaaagaaauguuuuuagcug

SEQ ID NO: 165123 - RNA, 32 nt, Homo Sapiens
gccaaaugagagagaaacuaugggaaagcuga

SEQ ID NO: 165124 - RNA, 32 nt, Homo Sapiens
guccagugauauauuucucauagcauucauuc

SEQ ID NO: 165125 - RNA, 32 nt, Homo Sapiens
caacuugucuaaaaauacugcuuuacaaagca

SEQ ID NO: 165126 - RNA, 32 nt, Homo Sapiens
gguuauaucagacuggagcaccagagagaggc

SEQ ID NO: 165127 - RNA, 32 nt, Homo Sapiens
ucgccaucgccuuguuuccccaucccccgcca

SEQ ID NO: 165128 - RNA, 32 nt, Homo Sapiens
ccccuguaccucaggcuguggcgggagcagag

SEQ ID NO: 165129 - RNA, 32 nt, Homo Sapiens
ccucacucugucuccggcccgcagcaggagca

SEQ ID NO: 165130 - RNA, 32 nt, Homo Sapiens
ccggcugggcucaggguccaccagcucacccg

SEQ ID NO: 165131 - RNA, 30 nt, Homo Sapiens
acccgucgagcugcggcgccggcgcguucc

SEQ ID NO: 165132 - RNA, 32 nt, Homo Sapiens
ugccuuaggagaaauggggucugugaaucugg

SEQ ID NO: 165133 - RNA, 32 nt, Homo Sapiens
gaaauggccaacacugguacagacacggacua

SEQ ID NO: 165134 - RNA, 32 nt, Homo Sapiens
ggagguagaagcugcagugagcagggaucgua

SEQ ID NO: 165135 - RNA, 32 nt, Homo Sapiens
uuuggagaauacuuaccuuuggaggaauguau

SEQ ID NO: 165136 - RNA, 32 nt, Homo Sapiens
auugcagaauccacuuugccuguguaagugaa

SEQ ID NO: 165137 - RNA, 32 nt, Homo Sapiens
uacuuuuugccccuuccacuuugaguaccaaa

SEQ ID NO: 165138 - RNA, 32 nt, Homo Sapiens
uuaauuugcaaauuauuuuggcuuugcaauga

SEQ ID NO: 165139 - RNA, 32 nt, Homo Sapiens
cuccaugugaucugugacguugccagagucug

SEQ ID NO: 165140 - RNA, 32 nt, Homo Sapiens
auuuguaaaaauuaauaaagaugacaagucag

SEQ ID NO: 165141 - RNA, 32 nt, Homo Sapiens
uguguuccuugccugcccuuuuuugugagcac

SEQ ID NO: 165142 - RNA, 32 nt, Homo Sapiens
gucgcgagccagguuuaaccguugcgucaccg

SEQ ID NO: 165143 - RNA, 28 nt, Homo Sapiens
guuggaaaagaacugcauuugaacgaaa

SEQ ID NO: 165144 - RNA, 32 nt, Homo Sapiens
uuauccaucccaucaauaaauguuaaugguaa

SEQ ID NO: 165145 - RNA, 30 nt, Homo Sapiens
uucaaagauuucuuccgcggcagggaucua

SEQ ID NO: 165146 - RNA, 32 nt, Homo Sapiens
aaaaguaauaauaaaaauuaaaacaacuagca

SEQ ID NO: 165147 - RNA, 32 nt, Homo Sapiens
uuacccagugccuauacccccauuguaucuag

SEQ ID NO: 165148 - RNA, 32 nt, Homo Sapiens
ugucgcccaggcuggaaugcaguggugcaaac

SEQ ID NO: 165149 - RNA, 32 nt, Homo Sapiens
caaaaagccuuauuauuuuuuaucuaugugga

SEQ ID NO: 165150 - RNA, 32 nt, Homo Sapiens
gccaacccuccugcccucccccagccaccugg

SEQ ID NO: 165151 - RNA, 32 nt, Homo Sapiens
cugagaaagcccaucacgaacaauaugggaaa

SEQ ID NO: 165152 - RNA, 32 nt, Homo Sapiens
aggggggagguggaaacaaacaacaaaacugu

SEQ ID NO: 165153 - RNA, 32 nt, Homo Sapiens
cacuguacuccagccaggccacagagugagac

SEQ ID NO: 165154 - RNA, 32 nt, Homo Sapiens
cuuuuacucaaguuuaauuuugcaugaggguu

SEQ ID NO: 165155 - RNA, 32 nt, Homo Sapiens
gggauggagcccaucucuccaguuccucccuc

SEQ ID NO: 165156 - RNA, 32 nt, Homo Sapiens
ucuugugaccgcgggcggccgcugcuucuuuc

SEQ ID NO: 165157 - RNA, 32 nt, Homo Sapiens
cuguuagcuggcagcugacgcugcuaggauag

SEQ ID NO: 165158 - RNA, 32 nt, Homo Sapiens
ccuccugccucgccucuacaccuacuacccug

SEQ ID NO: 165159 - RNA, 32 nt, Homo Sapiens
cuugugagauaaaaacugauuaaaccuuugug

SEQ ID NO: 165160 - RNA, 32 nt, Homo Sapiens
gucagcugcccccaaacccccuccuuacgcuu

SEQ ID NO: 165161 - RNA, 32 nt, Homo Sapiens
ucucaaucuucaguuuuggccuucugucagca

SEQ ID NO: 165162 - RNA, 32 nt, Homo Sapiens
guuguauaauuucugcuguguuuaagaaaaau

SEQ ID NO: 165163 - RNA, 32 nt, Homo Sapiens
aaacuaauugugauuucuagucuugcaaagcu

SEQ ID NO: 165164 - RNA, 32 nt, Homo Sapiens
ccacucugaggcaaguuaaaauguaaaagaug

SEQ ID NO: 165165 - RNA, 32 nt, Homo Sapiens
ccuccgccugacgcuccucucugucucagcca

SEQ ID NO: 165166 - RNA, 32 nt, Homo Sapiens
uuucugacuuccccagcaaggaucuucccacu

SEQ ID NO: 165167 - RNA, 32 nt, Homo Sapiens
uucagaaggcaucuuaccauggcuggggaauu

SEQ ID NO: 165168 - RNA, 32 nt, Homo Sapiens
ugggcuggccccagggccccccuccucuaugu

SEQ ID NO: 165169 - RNA, 32 nt, Homo Sapiens
uggaagugggcccugcuccacccccucucccc

SEQ ID NO: 165170 - RNA, 32 nt, Homo Sapiens
caacagccagcauccugagccuccucaugccc

SEQ ID NO: 165171 - RNA, 32 nt, Homo Sapiens
uguaaagaauaaaacugugggccgggcgcggu

SEQ ID NO: 165172 - RNA, 32 nt, Homo Sapiens
uuucuauuucaaccgaaaaguaagcauuuaac

SEQ ID NO: 165173 - RNA, 32 nt, Homo Sapiens
uacgggccgacaggcgggaggguggcugcccc

SEQ ID NO: 165174 - RNA, 32 nt, Homo Sapiens
ggaggaacauucaacacccccaucucuaggac

SEQ ID NO: 165175 - RNA, 32 nt, Homo Sapiens
auggcgcuugcauuuugguggaggaagacaga

SEQ ID NO: 165176 - RNA, 32 nt, Homo Sapiens
cccaggcccgcaucucugcucuaggcccuugg

SEQ ID NO: 165177 - RNA, 32 nt, Homo Sapiens
cuaaggcuggucuguguuugcuuguuugccca

SEQ ID NO: 165178 - RNA, 32 nt, Homo Sapiens
aaaagaccccccacccaaaauguuucgaguca

SEQ ID NO: 165179 - RNA, 32 nt, Homo Sapiens
ugaagcugaaagccuggaauggcuggaaaggg

SEQ ID NO: 165180 - RNA, 32 nt, Homo Sapiens
gugcuagaacaaaaaugcaaugaaagaaacac

SEQ ID NO: 165181 - RNA, 32 nt, Homo Sapiens
ggcuuauugggaauuccuauuauaguccauug

SEQ ID NO: 165182 - RNA, 32 nt, Homo Sapiens
uuccaaagggcugcaggcugcagaagccccca

SEQ ID NO: 165183 - RNA, 32 nt, Homo Sapiens
acuuugcggggaggaggcagcagacacuggag

SEQ ID NO: 165184 - RNA, 32 nt, Homo Sapiens
agucacgucauuuguuucaaugugacugaaac

SEQ ID NO: 165185 - RNA, 32 nt, Homo Sapiens
uauuuacuggugaaagguaccacaaaagugcu

SEQ ID NO: 165186 - RNA, 32 nt, Homo Sapiens
gucucugcccccaccccaugcagcgcuuugag

SEQ ID NO: 165187 - RNA, 32 nt, Homo Sapiens
gggacauucacucccaccuaaaacagaacaaa

SEQ ID NO: 165188 - RNA, 32 nt, Homo Sapiens
gcaaguucugugugugguggguuggggcgggu

SEQ ID NO: 165189 - RNA, 30 nt, Homo Sapiens
acccuggccugugcugaaguucccgggccc

SEQ ID NO: 165190 - RNA, 32 nt, Homo Sapiens
cguaucuucuaaauuugaaauauaauucuguu

SEQ ID NO: 165191 - RNA, 32 nt, Homo Sapiens
guaaguauuacuuuuccuccuccggcuaccug

SEQ ID NO: 165192 - RNA, 32 nt, Homo Sapiens
cuccccaguacaccccaccucuuccuuguaaa

SEQ ID NO: 165193 - RNA, 32 nt, Homo Sapiens
gggcagaagaucugggaucaauuaagauggag

SEQ ID NO: 165194 - RNA, 32 nt, Homo Sapiens
aacuacugcuaauguugaucagcaaauuuaag

SEQ ID NO: 165195 - RNA, 32 nt, Homo Sapiens
caugcugcaguguucgaguggauuguaggugc

SEQ ID NO: 165196 - RNA, 32 nt, Homo Sapiens
cagaagaaacgcaaucuucugagcacaauaug

SEQ ID NO: 165197 - RNA, 32 nt, Homo Sapiens
accuuuauuguuaaacaccaaguuucacauac

SEQ ID NO: 165198 - RNA, 32 nt, Homo Sapiens
gagcggcccuuaaagugccagggagaggaggg

SEQ ID NO: 165199 - RNA, 32 nt, Homo Sapiens
aagcauucaguuccauuagguuuucacaugug

SEQ ID NO: 165200 - RNA, 32 nt, Homo Sapiens
agaugugacaccuuuccaaucucuuuuugcaa

SEQ ID NO: 165201 - RNA, 32 nt, Homo Sapiens
ucgcacgugcguccgagcccaagccccucccc

SEQ ID NO: 165202 - RNA, 32 nt, Homo Sapiens
cgcacaaaguggugcuggccuccugcagcccc

SEQ ID NO: 165203 - RNA, 32 nt, Homo Sapiens
gaggcccagagcucaguaugcaagcuguguac

SEQ ID NO: 165204 - RNA, 32 nt, Homo Sapiens
uggggcaagaacucugggcuuggguaaugagc

SEQ ID NO: 165205 - RNA, 32 nt, Homo Sapiens
ugacuuuuacuuuauuuauaagcaaguguuag

SEQ ID NO: 165206 - RNA, 32 nt, Homo Sapiens
ccgcgcuccccucccccgcgccugugucccca

SEQ ID NO: 165207 - RNA, 32 nt, Homo Sapiens
gugcuucguguggccugggacucccgcgccug

SEQ ID NO: 165208 - RNA, 32 nt, Homo Sapiens
ugcuguugaaugacuccuauuuuuguaaaaau

SEQ ID NO: 165209 - RNA, 28 nt, Homo Sapiens
gauauggcugccgcugugccccgcgccg

SEQ ID NO: 165210 - RNA, 32 nt, Homo Sapiens
agugccaaacuugggccgcugcaccgcggcgc

SEQ ID NO: 165211 - RNA, 32 nt, Homo Sapiens
ugcuuuuuaaaacuggaaguacaggauuuucu

SEQ ID NO: 165212 - RNA, 32 nt, Homo Sapiens
augcguagugggcuucucgggcgguggggugg

SEQ ID NO: 165213 - RNA, 32 nt, Homo Sapiens
agguggguggaucacccgaggucaggaauuca

SEQ ID NO: 165214 - RNA, 32 nt, Homo Sapiens
auguguagaaguucuacgugugaucuuugauu

SEQ ID NO: 165215 - RNA, 32 nt, Homo Sapiens
ggcggguugggcggggggcgcugccgcccaag

SEQ ID NO: 165216 - RNA, 32 nt, Homo Sapiens
ucccuuagcauuaggaagucuuguuguuucca

SEQ ID NO: 165217 - RNA, 32 nt, Homo Sapiens
aaaaaaaccuauauuucucugucuaaaaauau

SEQ ID NO: 165218 - RNA, 32 nt, Homo Sapiens
auuagaagacgauaaacuuucucagaaaucau

SEQ ID NO: 165219 - RNA, 32 nt, Homo Sapiens
gcuggaaaauucucgaagcugcaccguguccu

SEQ ID NO: 165220 - RNA, 32 nt, Homo Sapiens
agaccucugcgggaagaccccgucggggagag

SEQ ID NO: 165221 - RNA, 32 nt, Homo Sapiens
ccugcugaccacacuaccuggaccugggagga

SEQ ID NO: 165222 - RNA, 32 nt, Homo Sapiens
gcuuccucccucaccucccccaucuuagcagg

SEQ ID NO: 165223 - RNA, 32 nt, Homo Sapiens
aacuaugcuucuuuuuucuucuguuaaccuga

SEQ ID NO: 165224 - RNA, 32 nt, Homo Sapiens
gacuguucuauuuguuuguccaaaagauaaaa

SEQ ID NO: 165225 - RNA, 32 nt, Homo Sapiens
ccccucugcccgcucccgagcccccggagccu

SEQ ID NO: 165226 - RNA, 32 nt, Homo Sapiens
uggguguugggucagauccugcccccgugccc

SEQ ID NO: 165227 - RNA, 32 nt, Homo Sapiens
auggccauguugucuuuuuuuuuuuuuuuuuu

SEQ ID NO: 165228 - RNA, 32 nt, Homo Sapiens
auuucuguccgcgcuccuggcccucguccuuc

SEQ ID NO: 165229 - RNA, 32 nt, Homo Sapiens
aguaauuuauauaaaaauaauauuacaguugc

SEQ ID NO: 165230 - RNA, 32 nt, Homo Sapiens
uggucuguaagcucugcguucccgggcgugga

SEQ ID NO: 165231 - RNA, 30 nt, Homo Sapiens
ugaugaggagguggauuauagcaaaaugga

SEQ ID NO: 165232 - RNA, 32 nt, Homo Sapiens
gcccggggagguggagaagcucgccggccgcg

SEQ ID NO: 165233 - RNA, 32 nt, Homo Sapiens
ggcaaguuuacuuuuuuuucugauguuuccua

SEQ ID NO: 165234 - RNA, 32 nt, Homo Sapiens
acccgagggaaucuccuggucugugggaugua

SEQ ID NO: 165235 - RNA, 32 nt, Homo Sapiens
gaggccccgaggcgcccaccacuucacgacac

SEQ ID NO: 165236 - RNA, 32 nt, Homo Sapiens
uaaagguuuauggaacagaaacaaagucaaaa

SEQ ID NO: 165237 - RNA, 32 nt, Homo Sapiens
caagaagaugacugaguucuaagaccccacaa

SEQ ID NO: 165238 - RNA, 32 nt, Homo Sapiens
agcugugccccucccccaggggcgugaggcug

SEQ ID NO: 165239 - RNA, 32 nt, Homo Sapiens
gacuacagccagaagcccauggagcagggaug

SEQ ID NO: 165240 - RNA, 32 nt, Homo Sapiens
acaaagaaaacaaauuaaugugauguaacuug

SEQ ID NO: 165241 - RNA, 32 nt, Homo Sapiens
gcagccaccucgcgcgcaccccgaggcgccgc

SEQ ID NO: 165242 - RNA, 32 nt, Homo Sapiens
uuucuucaauaaaguugcauaaaccaaugagu

SEQ ID NO: 165243 - RNA, 32 nt, Homo Sapiens
uccagacguaucucuguaaauucuucuauagu

SEQ ID NO: 165244 - RNA, 32 nt, Homo Sapiens
agucuuccucuuagccucuggaucuagaaggg

SEQ ID NO: 165245 - RNA, 32 nt, Homo Sapiens
gagcaccaagccuggccuccaagccccagccc

SEQ ID NO: 165246 - RNA, 32 nt, Homo Sapiens
gaacuuucaaggauaacuuccaaacaugcaaa

SEQ ID NO: 165247 - RNA, 28 nt, Homo Sapiens
agcagugccacggcaccaagcgagcugc

SEQ ID NO: 165248 - RNA, 32 nt, Homo Sapiens
ugacaaguugggugaacguugguuucaaauca

SEQ ID NO: 165249 - RNA, 32 nt, Homo Sapiens
guucaaaaugacuugguucuuuucuucuuuuu

SEQ ID NO: 165250 - RNA, 32 nt, Homo Sapiens
gagcacuuuaacaaguugagcauuccauguuu

SEQ ID NO: 165251 - RNA, 32 nt, Homo Sapiens
ugacuaaauaaucagcauuagucaguaaaucc

SEQ ID NO: 165252 - RNA, 32 nt, Homo Sapiens
accaucugagugcugcagauguuaaucauuca

SEQ ID NO: 165253 - RNA, 32 nt, Homo Sapiens
uauugguuauacuauugaaauguuuuuguacu

SEQ ID NO: 165254 - RNA, 32 nt, Homo Sapiens
uugggguaacugagucuugaaugcuuuacuag

SEQ ID NO: 165255 - RNA, 32 nt, Homo Sapiens
aagagcggggugccgagggucuggagggagaa

SEQ ID NO: 165256 - RNA, 32 nt, Homo Sapiens
uuucuaaaaggucuuucaacagaaauuacauu

SEQ ID NO: 165257 - RNA, 32 nt, Homo Sapiens
aggagguugggcaaaggccggaugcugaugcc

SEQ ID NO: 165258 - RNA, 32 nt, Homo Sapiens
ggcgcacggagcggagcgcugcagccaagccg

SEQ ID NO: 165259 - RNA, 32 nt, Homo Sapiens
cacguucuuucaucagacccuggcccaauacc

SEQ ID NO: 165260 - RNA, 32 nt, Homo Sapiens
ugcauguuuuuauuuacauauuagguuggugc

SEQ ID NO: 165261 - RNA, 32 nt, Homo Sapiens
cagguuaggggagaggugacccugagggacag

SEQ ID NO: 165262 - RNA, 32 nt, Homo Sapiens
aaccuggcucugcccaggugccacugcccaaa

SEQ ID NO: 165263 - RNA, 32 nt, Homo Sapiens
caggucuccagcuggagggaaugucaacccug

SEQ ID NO: 165264 - RNA, 32 nt, Homo Sapiens
aaaggaaauaauaaggucauaauuacaccuaa

SEQ ID NO: 165265 - RNA, 32 nt, Homo Sapiens
auauuuuuucuuucuuuuuuuuuuuuuuugug

SEQ ID NO: 165266 - RNA, 32 nt, Homo Sapiens
cucugcgaggccgggcgccgccauggaacugg

SEQ ID NO: 165267 - RNA, 32 nt, Homo Sapiens
aaggagucagauaaaaagccgguuacaucaug

SEQ ID NO: 165268 - RNA, 32 nt, Homo Sapiens
ggaaguggcuggaagcaugccuaggccccagc

SEQ ID NO: 165269 - RNA, 32 nt, Homo Sapiens
agauguggcagcaugggcgucaugcuccuuug

SEQ ID NO: 165270 - RNA, 32 nt, Homo Sapiens
uucuauucucaguaaccaagauugcuugcaac

SEQ ID NO: 165271 - RNA, 32 nt, Homo Sapiens
guuuccucaaagacucagcaaaaacuaggcuu

SEQ ID NO: 165272 - RNA, 32 nt, Homo Sapiens
agaaggaaucacgagggcuacugcacaauaca

SEQ ID NO: 165273 - RNA, 32 nt, Homo Sapiens
cauguucucccuggcauagaaccuauauuuuu

SEQ ID NO: 165274 - RNA, 32 nt, Homo Sapiens
agacuccagggccagggccaguucccuucucc

SEQ ID NO: 165275 - RNA, 32 nt, Homo Sapiens
uuucaucguaaugcaggguaacuauuauugcg

SEQ ID NO: 165276 - RNA, 32 nt, Homo Sapiens
cauagccccuggaggugcuguugcuauaguug

SEQ ID NO: 165277 - RNA, 32 nt, Homo Sapiens
ggcgcuggcaggcgcuuccgucggcagcacug

SEQ ID NO: 165278 - RNA, 32 nt, Homo Sapiens
ccggcagcggggagccgaguggaggcuaauuu

SEQ ID NO: 165279 - RNA, 32 nt, Homo Sapiens
gaaaagcaacugaggugugacuguuuggaccc

SEQ ID NO: 165280 - RNA, 32 nt, Homo Sapiens
aggaauuuauuaugaauuuccuuugcauucug

SEQ ID NO: 165281 - RNA, 32 nt, Homo Sapiens
ggcagugucccuccccuccccccacuccucuc

SEQ ID NO: 165282 - RNA, 32 nt, Homo Sapiens
uugggggaaacacugcaugucucugguuuaua

SEQ ID NO: 165283 - RNA, 32 nt, Homo Sapiens
ugguggucagaggcugcucaucugagcacaaa

SEQ ID NO: 165284 - RNA, 32 nt, Homo Sapiens
uucaguuuucaaaaucuuucuggucacuauaa

SEQ ID NO: 165285 - RNA, 32 nt, Homo Sapiens
caacacaggcaucgggaagcagaccgccuugg

SEQ ID NO: 165286 - RNA, 32 nt, Homo Sapiens
cuucucugggugcuuuauucucuucuuuuucu

SEQ ID NO: 165287 - RNA, 32 nt, Homo Sapiens
aggugccugcuucuccuuugccuuuugccaug

SEQ ID NO: 165288 - RNA, 32 nt, Homo Sapiens
gagccuguggagugggagacaccugaccuuuc

SEQ ID NO: 165289 - RNA, 32 nt, Homo Sapiens
guucacagcuguggggacccaggcaggcggca

SEQ ID NO: 165290 - RNA, 32 nt, Homo Sapiens
uccaacccaaacuagcugggaguucagaacca

SEQ ID NO: 165291 - RNA, 32 nt, Homo Sapiens
uaucacucuucuguauucacucagcaaccaug

SEQ ID NO: 165292 - RNA, 32 nt, Homo Sapiens
ggacccggggccuggggucucuguggugccug

SEQ ID NO: 165293 - RNA, 32 nt, Homo Sapiens
ggagucgccggggcuucuuccuguggugcagc

SEQ ID NO: 165294 - RNA, 32 nt, Homo Sapiens
agacaaaaugaaauauaaccuagaauaugaac

SEQ ID NO: 165295 - RNA, 32 nt, Homo Sapiens
uuaugcuguauuuuaacacuuuguauuacuua

SEQ ID NO: 165296 - RNA, 32 nt, Homo Sapiens
auauccaaagguuuaaacaagauggaaaucaa

SEQ ID NO: 165297 - RNA, 32 nt, Homo Sapiens
uguaaauguccacucccauggcuuaauugccu

SEQ ID NO: 165298 - RNA, 32 nt, Homo Sapiens
gcucggccgcagagccggggcccagcgaauca

SEQ ID NO: 165299 - RNA, 32 nt, Homo Sapiens
ccuagggaaggggcagugaugccaugcaugag

SEQ ID NO: 165300 - RNA, 32 nt, Homo Sapiens
ccuguggugaauggcuggccugugauggaugg

SEQ ID NO: 165301 - RNA, 32 nt, Homo Sapiens
guuuuuguccaagaucuuugcaccuuaauauu

SEQ ID NO: 165302 - RNA, 32 nt, Homo Sapiens
ccauggguccuucaggcucucaucuuuuuucu

SEQ ID NO: 165303 - RNA, 32 nt, Homo Sapiens
ggucaagaacguggaccacgggccaacucagg

SEQ ID NO: 165304 - RNA, 32 nt, Homo Sapiens
ggacuguggggccccaccuguugcuuaccuuu

SEQ ID NO: 165305 - RNA, 32 nt, Homo Sapiens
ucauaggcucacuggguuuucuuuucuuuucu

SEQ ID NO: 165306 - RNA, 32 nt, Homo Sapiens
aacccccuccagucucucugucucucuuuguc

SEQ ID NO: 165307 - RNA, 32 nt, Homo Sapiens
gugcccugccgcccucccugcccgcuggucaa

SEQ ID NO: 165308 - RNA, 32 nt, Homo Sapiens
agaucuuucuaccuacuuuggugaucaaaaaa

SEQ ID NO: 165309 - RNA, 32 nt, Homo Sapiens
guccuuuucuuacuuuaugaaauucuggggug

SEQ ID NO: 165310 - RNA, 32 nt, Homo Sapiens
aucucugguuccugcccuggcuccugcaccag

SEQ ID NO: 165311 - RNA, 32 nt, Homo Sapiens
uggaggggaaaggguccugcuuucuccucguu

SEQ ID NO: 165312 - RNA, 32 nt, Homo Sapiens
ugaaaaguggccauccuguugccccaggcaca

SEQ ID NO: 165313 - RNA, 32 nt, Homo Sapiens
acuuggcucugauggugccgggacccagcccc

SEQ ID NO: 165314 - RNA, 32 nt, Homo Sapiens
ggugaucccccugggauggaccaucucgggau

SEQ ID NO: 165315 - RNA, 32 nt, Homo Sapiens
gcuacgucaucgugcuccacuccagcauccau

SEQ ID NO: 165316 - RNA, 32 nt, Homo Sapiens
uugugaaaccuauagacgauguuuuaauguac

SEQ ID NO: 165317 - RNA, 32 nt, Homo Sapiens
cuuaaggggcugucuuuguucuccuuggccug

SEQ ID NO: 165318 - RNA, 32 nt, Homo Sapiens
cggcuccgacugaggggagggcccgugauaag

SEQ ID NO: 165319 - RNA, 32 nt, Homo Sapiens
cccguggcccugcugucgggccccaggccguu

SEQ ID NO: 165320 - RNA, 32 nt, Homo Sapiens
uucugcugaccacagcacuccaaccaaaagcc

SEQ ID NO: 165321 - RNA, 32 nt, Homo Sapiens
gccuggacgccacggccucucaucuuaggacc

SEQ ID NO: 165322 - RNA, 32 nt, Homo Sapiens
ggcacggagaggaggacgguggcugacgagau

SEQ ID NO: 165323 - RNA, 32 nt, Homo Sapiens
cagauugauuuuuagagcaccaucacuuucac

SEQ ID NO: 165324 - RNA, 32 nt, Homo Sapiens
acuuguuuuuauuccccacuacucuucucucu

SEQ ID NO: 165325 - RNA, 32 nt, Homo Sapiens
gaucccugucuccucguguuuacauucugugu

SEQ ID NO: 165326 - RNA, 32 nt, Homo Sapiens
ucgggauggggcgcccacccccugcccugccc

SEQ ID NO: 165327 - RNA, 32 nt, Homo Sapiens
gaagcugaccaccuuaguaccaucauggacug

SEQ ID NO: 165328 - RNA, 32 nt, Homo Sapiens
cugugcggcucaggcccucccccgggaccggc

SEQ ID NO: 165329 - RNA, 32 nt, Homo Sapiens
gcccugcagugacaccaccugcagagagguca

SEQ ID NO: 165330 - RNA, 32 nt, Homo Sapiens
ggaggcgggacuucgggugcgcguuggcggga

SEQ ID NO: 165331 - RNA, 31 nt, Homo Sapiens
acugagaaauaaacaaauaugccaauuaaaa

SEQ ID NO: 165332 - RNA, 32 nt, Homo Sapiens
ugcuuuuauuuuuauuuugucauugcggggua

SEQ ID NO: 165333 - RNA, 32 nt, Homo Sapiens
guaaauuaaguguguguauacuguaaucgugc

SEQ ID NO: 165334 - RNA, 32 nt, Homo Sapiens
cuuaacuaaaaaccuagucaaacaaggaagcu

SEQ ID NO: 165335 - RNA, 32 nt, Homo Sapiens
gucaguugccuggcuccuggggccagaguuuc

SEQ ID NO: 165336 - RNA, 32 nt, Homo Sapiens
aagccccaccucugacagagccagucaccguu

SEQ ID NO: 165337 - RNA, 29 nt, Homo Sapiens
gaauauauauguauacacauacuuacaua

SEQ ID NO: 165338 - RNA, 32 nt, Homo Sapiens
caagggccccuuugccuucucauccucaggag

SEQ ID NO: 165339 - RNA, 32 nt, Homo Sapiens
auuugacuuuucugcuaggauucucuguuaua

SEQ ID NO: 165340 - RNA, 32 nt, Homo Sapiens
aguagcucccuggcuucuggcucugaguguuc

SEQ ID NO: 165341 - RNA, 32 nt, Homo Sapiens
aagcuuaagaaauuuaaaaugcuagcugcuca

SEQ ID NO: 165342 - RNA, 32 nt, Homo Sapiens
acccaagauugugccacugcacuccacccugg

SEQ ID NO: 165343 - RNA, 32 nt, Homo Sapiens
aggucaccuucugugauccccaucccaaggca

SEQ ID NO: 165344 - RNA, 32 nt, Homo Sapiens
ugaagagauuguguuagcuccaaagcuuuucc

SEQ ID NO: 165345 - RNA, 32 nt, Homo Sapiens
acugguagcuaauugcaauuauacuugcucug

SEQ ID NO: 165346 - RNA, 32 nt, Homo Sapiens
gugcagccauuaccaccauucaucuccagaau

SEQ ID NO: 165347 - RNA, 32 nt, Homo Sapiens
ggguuuauuucguuuuccucucucuucuccac

SEQ ID NO: 165348 - RNA, 32 nt, Homo Sapiens
ucaaguuauuucuccuucucucugcuucaugc

SEQ ID NO: 165349 - RNA, 32 nt, Homo Sapiens
gaugcagguguguauaaaucugacagcagugc

SEQ ID NO: 165350 - RNA, 32 nt, Homo Sapiens
aaaggguggcuagauuuaucuugggugaugga

SEQ ID NO: 165351 - RNA, 32 nt, Homo Sapiens
aggaaccgagggggcugcucccaccuggcucu

SEQ ID NO: 165352 - RNA, 32 nt, Homo Sapiens
ggggagagggaaggcgaaggcgggcugagccc

SEQ ID NO: 165353 - RNA, 32 nt, Homo Sapiens
cugaagagcgccagucgacgugggugcgacaa

SEQ ID NO: 165354 - RNA, 32 nt, Homo Sapiens
uaaagcucacggccgcggucugcgucuucguu

SEQ ID NO: 165355 - RNA, 32 nt, Homo Sapiens
caccacacuaaaucuuuaauuuuuuggggggu

SEQ ID NO: 165356 - RNA, 32 nt, Homo Sapiens
ggaggaggguggcaccaugggcccgggcggug

SEQ ID NO: 165357 - RNA, 32 nt, Homo Sapiens
gagugggaacuggacacagaccacugaucuca

SEQ ID NO: 165358 - RNA, 32 nt, Homo Sapiens
cagugauuuagggcugcccucuggagacagcg

SEQ ID NO: 165359 - RNA, 32 nt, Homo Sapiens
ggguggcccccucuccuucuccuagcucugga

SEQ ID NO: 165360 - RNA, 32 nt, Homo Sapiens
agaguguuaauauauaucagaaaugcacacaa

SEQ ID NO: 165361 - RNA, 32 nt, Homo Sapiens
ucaucgaagggcugcucggggagguggcaggg

SEQ ID NO: 165362 - RNA, 32 nt, Homo Sapiens
ccucucuagugaauuugcuaacugugaagaac

SEQ ID NO: 165363 - RNA, 32 nt, Homo Sapiens
uaaucucuauguagaaaucucaucuuuguaau

SEQ ID NO: 165364 - RNA, 32 nt, Homo Sapiens
gguuuucacauggguguuggacacgggaagag

SEQ ID NO: 165365 - RNA, 32 nt, Homo Sapiens
acagaaggaaaauaauauaauaaagugacaac

SEQ ID NO: 165366 - RNA, 29 nt, Homo Sapiens
guugauaagaaaguggccauuucucacua

SEQ ID NO: 165367 - RNA, 32 nt, Homo Sapiens
gaagcuguaacaaccucugcuauuuaaggaga

SEQ ID NO: 165368 - RNA, 32 nt, Homo Sapiens
ccaacggucccauugggagcaacagugauugu

SEQ ID NO: 165369 - RNA, 32 nt, Homo Sapiens
aagcggacugucaucgagcagcagccugucuu

SEQ ID NO: 165370 - RNA, 32 nt, Homo Sapiens
cgcaggauuucccucgcucuccccucccugcu

SEQ ID NO: 165371 - RNA, 32 nt, Homo Sapiens
uccagggcuacgcgcgcuccgcgcagcucagg

SEQ ID NO: 165372 - RNA, 32 nt, Homo Sapiens
ucuccuagucugccuaugucuuucucugcuau

SEQ ID NO: 165373 - RNA, 32 nt, Homo Sapiens
cuguuccugcuucugcucuccucacacuguuu

SEQ ID NO: 165374 - RNA, 32 nt, Homo Sapiens
acauacuuaaaggacagaaaugucugggaaag

SEQ ID NO: 165375 - RNA, 32 nt, Homo Sapiens
aagugugugcuaaacaacuacggaauacuaaa

SEQ ID NO: 165376 - RNA, 32 nt, Homo Sapiens
ccucauuuuaguaaaaaacaaacaaaaacaaa

SEQ ID NO: 165377 - RNA, 32 nt, Homo Sapiens
auccaggcgucacccucacucuaggccaggag

SEQ ID NO: 165378 - RNA, 32 nt, Homo Sapiens
gcggugaccccacucccuccccagagcauccc

SEQ ID NO: 165379 - RNA, 32 nt, Homo Sapiens
aaagagcuguucuccuuucucuuucuuuugcc

SEQ ID NO: 165380 - RNA, 32 nt, Homo Sapiens
cauagugcagcuuuauuuaucuccaggauguu

SEQ ID NO: 165381 - RNA, 32 nt, Homo Sapiens
ugucaacaaauacaccaaaaccauuuuuuaua

SEQ ID NO: 165382 - RNA, 32 nt, Homo Sapiens
caaaaggaaggggaaacucaaucagcaggacu

SEQ ID NO: 165383 - RNA, 32 nt, Homo Sapiens
uguucagacuuguugcaacagcagucauaccc

SEQ ID NO: 165384 - RNA, 29 nt, Homo Sapiens
cugguggagcccaugggugcugcccugau

SEQ ID NO: 165385 - RNA, 32 nt, Homo Sapiens
cguugaacuucuucuuuggccucaccagugaa

SEQ ID NO: 165386 - RNA, 32 nt, Homo Sapiens
ccucgguuccucuuccugaaguucuugugccc

SEQ ID NO: 165387 - RNA, 32 nt, Homo Sapiens
uaugaccauuguuucauauuccaauuaaaaaa

SEQ ID NO: 165388 - RNA, 32 nt, Homo Sapiens
ucccagaugauuaccucugccccuuccagugc

SEQ ID NO: 165389 - RNA, 32 nt, Homo Sapiens
cagcugaaguaucaacaccagcccuugacccu

SEQ ID NO: 165390 - RNA, 32 nt, Homo Sapiens
ggccuucucccccacacccucaggccgagauc

SEQ ID NO: 165391 - RNA, 32 nt, Homo Sapiens
uuuccuuuuucauuuuaagugguguggagauu

SEQ ID NO: 165392 - RNA, 32 nt, Homo Sapiens
uuugacccauucuuauuucaauuucuccuuuu

SEQ ID NO: 165393 - RNA, 32 nt, Homo Sapiens
acuauuuuacuuuuuaaaaugacauuccuacu

SEQ ID NO: 165394 - RNA, 32 nt, Homo Sapiens
auugaagaacauuguuaugcaaugcuuugugu

SEQ ID NO: 165395 - RNA, 32 nt, Homo Sapiens
uuauagggaagaagucaagagaaggggaagcc

SEQ ID NO: 165396 - RNA, 32 nt, Homo Sapiens
uccgugaguaaucuucagguccuccguguucu

SEQ ID NO: 165397 - RNA, 29 nt, Homo Sapiens
acugugggaugauuagguuuaacgcauug

SEQ ID NO: 165398 - RNA, 32 nt, Homo Sapiens
ugcggagacccauccccucccccuucucgcac

SEQ ID NO: 165399 - RNA, 32 nt, Homo Sapiens
gugggagugaaagugagaaccacagaaaaucu

SEQ ID NO: 165400 - RNA, 32 nt, Homo Sapiens
cugcucccgcgauguggaagugucacacggca

SEQ ID NO: 165401 - RNA, 32 nt, Homo Sapiens
aaaauacaaaaauuagccgacaugguggcgca

SEQ ID NO: 165402 - RNA, 32 nt, Homo Sapiens
cacuucuuuaugccucaagacaucucauaugu

SEQ ID NO: 165403 - RNA, 32 nt, Homo Sapiens
cucguguucauuaaaaugcugcgggaaaggug

SEQ ID NO: 165404 - RNA, 32 nt, Homo Sapiens
gcaaaauaguuggggcaaauguugcugcggga

SEQ ID NO: 165405 - RNA, 32 nt, Homo Sapiens
uaaguucaaggaucccauauaguauaagaaua

SEQ ID NO: 165406 - RNA, 32 nt, Homo Sapiens
guaccacaucaaauaacuaauccaccaugauc

SEQ ID NO: 165407 - RNA, 32 nt, Homo Sapiens
uuuaaaaugauuagaaggcaaguuucuagcua

SEQ ID NO: 165408 - RNA, 32 nt, Homo Sapiens
ccgagccgccgcuugggccacagugaaagcca

SEQ ID NO: 165409 - RNA, 31 nt, Homo Sapiens
cagcagcugccgguggugaccuggguuggau

SEQ ID NO: 165410 - RNA, 32 nt, Homo Sapiens
uagguuugcuaaggauacagagccacauugaa

SEQ ID NO: 165411 - RNA, 32 nt, Homo Sapiens
acugagagagaauguuacauaacauugagaac

SEQ ID NO: 165412 - RNA, 32 nt, Homo Sapiens
uguucacauggcccaaucuugcuggcuuccca

SEQ ID NO: 165413 - RNA, 32 nt, Homo Sapiens
guaugaaaauuaacaauaucccuguugcgcac

SEQ ID NO: 165414 - RNA, 32 nt, Homo Sapiens
uauauggagaaagcacauuauauuuauugguu

SEQ ID NO: 165415 - RNA, 32 nt, Homo Sapiens
aucacaagcaguuucuaaaccaaaaaaugaca

SEQ ID NO: 165416 - RNA, 32 nt, Homo Sapiens
cucgagagccagagccugcaagcuagaacuug

SEQ ID NO: 165417 - RNA, 31 nt, Homo Sapiens
augucaucuucauauuaauaguuggacucag

SEQ ID NO: 165418 - RNA, 32 nt, Homo Sapiens
aguuuuggguaguccuuguucuuuggaaauac

SEQ ID NO: 165419 - RNA, 30 nt, Homo Sapiens
gucgcucgcgcgcagcccggcgucgcccca

SEQ ID NO: 165420 - RNA, 32 nt, Homo Sapiens
cccugucucuuucauuuuuuuauuuuuaguuu

SEQ ID NO: 165421 - RNA, 32 nt, Homo Sapiens
gagcgcccgguccgccugucugccgguggguc

SEQ ID NO: 165422 - RNA, 32 nt, Homo Sapiens
ucaacucugcccguuggcugccugagccaggg

SEQ ID NO: 165423 - RNA, 32 nt, Homo Sapiens
uuguuugaggccggguugggggugugcgauug

SEQ ID NO: 165424 - RNA, 32 nt, Homo Sapiens
uuuuaaaaugucauuuuuauauagguauuaug

SEQ ID NO: 165425 - RNA, 32 nt, Homo Sapiens
ucacgggcuccggucccggcggcagaaauagg

SEQ ID NO: 165426 - RNA, 32 nt, Homo Sapiens
guugcauuguacacugcaacuaauaagccaag

SEQ ID NO: 165427 - RNA, 32 nt, Homo Sapiens
aucuccuccuaaacguaucgcccagcagcucu

SEQ ID NO: 165428 - RNA, 32 nt, Homo Sapiens
caguggcugaugggucccggugaugggaaggg

SEQ ID NO: 165429 - RNA, 32 nt, Homo Sapiens
acauaagcuuaaaguaauauauugaaacuuua

SEQ ID NO: 165430 - RNA, 32 nt, Homo Sapiens
cauccccucccucuuccugguggccaccuccc

SEQ ID NO: 165431 - RNA, 32 nt, Homo Sapiens
cccugacuaugaauucaacguguggacccgac

SEQ ID NO: 165432 - RNA, 32 nt, Homo Sapiens
agggguccaagcaucaggagcaggcaaggaga

SEQ ID NO: 165433 - RNA, 32 nt, Homo Sapiens
cgggaugucccucuccagcugugcccuugaac

SEQ ID NO: 165434 - RNA, 32 nt, Homo Sapiens
gaaguaggaaagaaaacacagaugcugucuuu

SEQ ID NO: 165435 - RNA, 29 nt, Homo Sapiens
gaccagcuugggaaacauggcaaaacccg

SEQ ID NO: 165436 - RNA, 31 nt, Homo Sapiens
cccuggcagugcagccaaucagaaauggcuc

SEQ ID NO: 165437 - RNA, 32 nt, Homo Sapiens
ucauguucucugcucccacaccuaagccaaga

SEQ ID NO: 165438 - RNA, 32 nt, Homo Sapiens
cccccugcuuuucuccucccccaugcccaacc

SEQ ID NO: 165439 - RNA, 32 nt, Homo Sapiens
gcuugaauuacauuggcuuuuagaaccgaaau

SEQ ID NO: 165440 - RNA, 32 nt, Homo Sapiens
uacggauccugcuggaggagauggaacaagcc

SEQ ID NO: 165441 - RNA, 32 nt, Homo Sapiens
aauugcuucuaaacacuucugaauuuuaaauu

SEQ ID NO: 165442 - RNA, 32 nt, Homo Sapiens
uauuuucccaccugucuuuuucugggguuccu

SEQ ID NO: 165443 - RNA, 32 nt, Homo Sapiens
guggugcccaggaggcugcugcugggccgcug

SEQ ID NO: 165444 - RNA, 32 nt, Homo Sapiens
aaaggaggaauuucugcuggacuuuaucuggg

SEQ ID NO: 165445 - RNA, 32 nt, Homo Sapiens
aacuguuucuaaaacaacuugaaguauaguuu

SEQ ID NO: 165446 - RNA, 32 nt, Homo Sapiens
cgccggucggguccggccgccgcgcuguccag

SEQ ID NO: 165447 - RNA, 32 nt, Homo Sapiens
uccaacaagaggauuucuuuuucauucuagaa

SEQ ID NO: 165448 - RNA, 32 nt, Homo Sapiens
uugaaaugcuuuuuuuuuuuuauuuugcauuu

SEQ ID NO: 165449 - RNA, 32 nt, Homo Sapiens
ucuccugggaaaguguagaggagcacgaacug

SEQ ID NO: 165450 - RNA, 32 nt, Homo Sapiens
cccccugcugcgggcucugccuuggugucaug

SEQ ID NO: 165451 - RNA, 29 nt, Homo Sapiens
gacaaguuuauagagugaaagguaucuuc

SEQ ID NO: 165452 - RNA, 32 nt, Homo Sapiens
ucuaaaggccguauaccaaguaugcuuagaua

SEQ ID NO: 165453 - RNA, 32 nt, Homo Sapiens
ugauggggcaguaugucugaggaaguauaauu

SEQ ID NO: 165454 - RNA, 32 nt, Homo Sapiens
ugggggaaguaagaacaaaacacauaauaggu

SEQ ID NO: 165455 - RNA, 32 nt, Homo Sapiens
aacaaguugcugccgaaggcccuucccugcuc

SEQ ID NO: 165456 - RNA, 32 nt, Homo Sapiens
gauuuagaauacuuaaucaauugauguccauu

SEQ ID NO: 165457 - RNA, 32 nt, Homo Sapiens
auuugccuggccacguucccacgugacgccca

SEQ ID NO: 165458 - RNA, 32 nt, Homo Sapiens
uggcuuugaaagaagauuggagagggugggaa

SEQ ID NO: 165459 - RNA, 32 nt, Homo Sapiens
auaucacuacaucaguccacaagcaacauuaa

SEQ ID NO: 165460 - RNA, 32 nt, Homo Sapiens
agcagccuggccaccauagugagaucccuucu

SEQ ID NO: 165461 - RNA, 28 nt, Homo Sapiens
aauugcuucuaaaacaauaaagauucuu

SEQ ID NO: 165462 - RNA, 32 nt, Homo Sapiens
ggcgguucgacggcgggcccgggguucagccu

SEQ ID NO: 165463 - RNA, 32 nt, Homo Sapiens
cucagccuggaagacauuaucuguggaucucc

SEQ ID NO: 165464 - RNA, 32 nt, Homo Sapiens
aagggggcgccgggccgcucuagccgcccugg

SEQ ID NO: 165465 - RNA, 32 nt, Homo Sapiens
agaagagggaggaaacauggcuaacucccaac

SEQ ID NO: 165466 - RNA, 32 nt, Homo Sapiens
caccacagcuggcugaagauuauacuuucaau

SEQ ID NO: 165467 - RNA, 32 nt, Homo Sapiens
aaaauacaaaaauuagcccaguguggugguga

SEQ ID NO: 165468 - RNA, 30 nt, Homo Sapiens
acagauggauggcgcgaagaccucuguguc

SEQ ID NO: 165469 - RNA, 32 nt, Homo Sapiens
cagaaugcauugcaucaucaccaugguaacag

SEQ ID NO: 165470 - RNA, 32 nt, Homo Sapiens
cauuccaauaacaccuuccaaaaaccuggagu

SEQ ID NO: 165471 - RNA, 31 nt, Homo Sapiens
gacauauguaacauugcugagcucuccuaag

SEQ ID NO: 165472 - RNA, 32 nt, Homo Sapiens
gugggacccgagggguggggcuggguuuagua

SEQ ID NO: 165473 - RNA, 32 nt, Homo Sapiens
caauaucaugaaaggacucacacuggagagaa

SEQ ID NO: 165474 - RNA, 32 nt, Homo Sapiens
agcucugccuacugcgcaggccucaggcccag

SEQ ID NO: 165475 - RNA, 32 nt, Homo Sapiens
ggagcgcggcggggcggggguggaggacgaga

SEQ ID NO: 165476 - RNA, 29 nt, Homo Sapiens
agcguuuugagauacagaggcaaaggcgc

SEQ ID NO: 165477 - RNA, 32 nt, Homo Sapiens
cugacucaacagagacggcagccugaccuuug

SEQ ID NO: 165478 - RNA, 32 nt, Homo Sapiens
gcugagaagauacuucugaggacccacgucua

SEQ ID NO: 165479 - RNA, 32 nt, Homo Sapiens
auuuacucaaagacauagaugugaaauuuagg

SEQ ID NO: 165480 - RNA, 32 nt, Homo Sapiens
ccuaggccggccccggcccgacucgcccucag

SEQ ID NO: 165481 - RNA, 32 nt, Homo Sapiens
ucccccuaacugugcccucgaccacuucauuu

SEQ ID NO: 165482 - RNA, 32 nt, Homo Sapiens
ccucccucgcccagccuucguccuccuggccc

SEQ ID NO: 165483 - RNA, 32 nt, Homo Sapiens
uccacaaugucccuucugucucuuccacuuua

SEQ ID NO: 165484 - RNA, 32 nt, Homo Sapiens
aaaaaguauaauuuauacugguuaggguuuaa

SEQ ID NO: 165485 - RNA, 32 nt, Homo Sapiens
ggcauugaugaaucuaaaguaggagcaucagu

SEQ ID NO: 165486 - RNA, 30 nt, Homo Sapiens
cacaugcaugcucgcuaagcggaaggaagu

SEQ ID NO: 165487 - RNA, 31 nt, Homo Sapiens
ucgcuccaucuuugaacucaaacacgaggaa

SEQ ID NO: 165488 - RNA, 32 nt, Homo Sapiens
cuggucgggggccugggcuggugcuucauggu

SEQ ID NO: 165489 - RNA, 32 nt, Homo Sapiens
agugagaugauuacagauaauacuguauuuuc

SEQ ID NO: 165490 - RNA, 32 nt, Homo Sapiens
accccuagaucccaccaacucggggaacauca

SEQ ID NO: 165491 - RNA, 32 nt, Homo Sapiens
aggagcgggcauuugagggggcauggaguaau

SEQ ID NO: 165492 - RNA, 32 nt, Homo Sapiens
uugaagccuucuaccaguaaauaccaucuugu

SEQ ID NO: 165493 - RNA, 32 nt, Homo Sapiens
aauggggaaaauaccguuuaaauuaugacaga

SEQ ID NO: 165494 - RNA, 32 nt, Homo Sapiens
uggggcgcgggaacaugaggcuuggcuaggag

SEQ ID NO: 165495 - RNA, 32 nt, Homo Sapiens
aaggaauugccugugcauaucuguaauguaau

SEQ ID NO: 165496 - RNA, 32 nt, Homo Sapiens
aguuugcuuuuuucuuuuuuuccccuccaaac

SEQ ID NO: 165497 - RNA, 32 nt, Homo Sapiens
gggccaggggagagagaagaggaucagcagug

SEQ ID NO: 165498 - RNA, 32 nt, Homo Sapiens
gaaggcccaucccacggcgugccauacacugg

SEQ ID NO: 165499 - RNA, 32 nt, Homo Sapiens
ccucgccugcugcccgcuccccggcgccaccc

SEQ ID NO: 165500 - RNA, 32 nt, Homo Sapiens
agcuguggauagcuugcauuaauuguauauuu

SEQ ID NO: 165501 - RNA, 32 nt, Homo Sapiens
gugacucgccccaccacccccagcccuguccc

SEQ ID NO: 165502 - RNA, 32 nt, Homo Sapiens
cuuucauauugguccuaguucuagucaauuuu

SEQ ID NO: 165503 - RNA, 32 nt, Homo Sapiens
uguuuugagucuuuacaaaauagccaguuaua

SEQ ID NO: 165504 - RNA, 32 nt, Homo Sapiens
ggguauuuuuaaaggcugaaguuuggacuacc

SEQ ID NO: 165505 - RNA, 32 nt, Homo Sapiens
cuguuccaguccugagcuuggaccucaagaua

SEQ ID NO: 165506 - RNA, 32 nt, Homo Sapiens
gcaagggacagaaaaaauaucuguaacaucuu

SEQ ID NO: 165507 - RNA, 32 nt, Homo Sapiens
cuccaggaacagaggugccaugcagccccggg

SEQ ID NO: 165508 - RNA, 32 nt, Homo Sapiens
ucuaauaaguugaaauggucuuucucccuucc

SEQ ID NO: 165509 - RNA, 32 nt, Homo Sapiens
acaaauaccugggaguggaaaggcucccaggu

SEQ ID NO: 165510 - RNA, 32 nt, Homo Sapiens
gaaaugcgaguggauaaggcaagaugcauuug

SEQ ID NO: 165511 - RNA, 32 nt, Homo Sapiens
uaagucaaugagccagucauuuauuccacaaa

SEQ ID NO: 165512 - RNA, 32 nt, Homo Sapiens
aaaauuaacaauuucuaauauuuucaauuguc

SEQ ID NO: 165513 - RNA, 27 nt, Homo Sapiens
aagcaguucugcuucagccuccagaau

SEQ ID NO: 165514 - RNA, 32 nt, Homo Sapiens
gcucuaugucuguuugucauucuuauggauau

SEQ ID NO: 165515 - RNA, 32 nt, Homo Sapiens
ugcaucuccagaugguggcacgaggccuagca

SEQ ID NO: 165516 - RNA, 32 nt, Homo Sapiens
uggcgucuggggucgggauuccgcggugcccg

SEQ ID NO: 165517 - RNA, 32 nt, Homo Sapiens
gugaggacgcggcagcccguggagucggcuga

SEQ ID NO: 165518 - RNA, 32 nt, Homo Sapiens
aaucccaacacuuuucgaggccuaggcggacg

SEQ ID NO: 165519 - RNA, 32 nt, Homo Sapiens
aaggaaaaugguucuacugcauccuuuggcug

SEQ ID NO: 165520 - RNA, 32 nt, Homo Sapiens
uggaagaggcgcccgcgcugcgcugcccggag

SEQ ID NO: 165521 - RNA, 32 nt, Homo Sapiens
cggccuacagaaaaaggaaaaaaggccacaaa

SEQ ID NO: 165522 - RNA, 32 nt, Homo Sapiens
ccaaaguuguuguaaccugcugugauacgaug

SEQ ID NO: 165523 - RNA, 32 nt, Homo Sapiens
ccacaggccccaaacugauccaaauauccaca

SEQ ID NO: 165524 - RNA, 32 nt, Homo Sapiens
gcacuuaauuauguuggacuacaggauccuag

SEQ ID NO: 165525 - RNA, 31 nt, Homo Sapiens
ccgaugaucgaugaucgucucaggggaaaag

SEQ ID NO: 165526 - RNA, 32 nt, Homo Sapiens
cuguucuaccaaguuauaauagcauucauuuc

SEQ ID NO: 165527 - RNA, 32 nt, Homo Sapiens
aaguccgagcugcggcgggcguugguccgugc

SEQ ID NO: 165528 - RNA, 32 nt, Homo Sapiens
aggacgccgcccccggccgggucuccacuucu

SEQ ID NO: 165529 - RNA, 32 nt, Homo Sapiens
agcgacugccacaucauugaaguggagcccgg

SEQ ID NO: 165530 - RNA, 32 nt, Homo Sapiens
gaagaaaaugaauaauauagaucagagcggaa

SEQ ID NO: 165531 - RNA, 32 nt, Homo Sapiens
gaaaauuaaguacagaggcugcgaucuuagaa

SEQ ID NO: 165532 - RNA, 32 nt, Homo Sapiens
acuucagagucuuucaugccagcguuugagcu

SEQ ID NO: 165533 - RNA, 32 nt, Homo Sapiens
cccagcuacuugagaggcugaggugggaggau

SEQ ID NO: 165534 - RNA, 32 nt, Homo Sapiens
guuacaacaauauucuauaugaaaaugugcag

SEQ ID NO: 165535 - RNA, 32 nt, Homo Sapiens
ucaguaaauauuaaaaagaagauggaugcaag

SEQ ID NO: 165536 - RNA, 32 nt, Homo Sapiens
cccacccccuggcagucagaggcgcuggagag

SEQ ID NO: 165537 - RNA, 32 nt, Homo Sapiens
agcuucugccagcgggucgcaccgggcuagcu

SEQ ID NO: 165538 - RNA, 28 nt, Homo Sapiens
accaugcccagccugcugcugcuguuca

SEQ ID NO: 165539 - RNA, 32 nt, Homo Sapiens
agagacuacugaccuucucaccuccgacccau

SEQ ID NO: 165540 - RNA, 32 nt, Homo Sapiens
uuuuggagaauugaaauaauucauggaaggga

SEQ ID NO: 165541 - RNA, 32 nt, Homo Sapiens
uuucauugauccaauuacggcucuuugacaca

SEQ ID NO: 165542 - RNA, 32 nt, Homo Sapiens
gacauuaaaauguaagaugcaugaugaaaacc

SEQ ID NO: 165543 - RNA, 32 nt, Homo Sapiens
agacacaaagagaaugauacaguuuagaaauu

SEQ ID NO: 165544 - RNA, 32 nt, Homo Sapiens
ugucccucccccuguauugugacaagguaauu

SEQ ID NO: 165545 - RNA, 32 nt, Homo Sapiens
uuuuggaagauaauguagaaaaccacuaccua

SEQ ID NO: 165546 - RNA, 32 nt, Homo Sapiens
cgcgguuuggaaaauauuuuguucaagauaaa

SEQ ID NO: 165547 - RNA, 32 nt, Homo Sapiens
agccccgcccuucuccccacaucccacccuua

SEQ ID NO: 165548 - RNA, 32 nt, Homo Sapiens
agggacaggggcccggcccuggccggcagcgg

SEQ ID NO: 165549 - RNA, 32 nt, Homo Sapiens
aagcgcccggugccccuccccggccuccggaa

SEQ ID NO: 165550 - RNA, 32 nt, Homo Sapiens
agcugugagcuuugcagccagccccggggacg

SEQ ID NO: 165551 - RNA, 32 nt, Homo Sapiens
cugaaaguguggaugcgcuggaugcgcaggga

SEQ ID NO: 165552 - RNA, 32 nt, Homo Sapiens
gaaacaagcccugucugaccgccaaggcuuca

SEQ ID NO: 165553 - RNA, 32 nt, Homo Sapiens
uguuuccuucuacuuuuaugugucucagaaua

SEQ ID NO: 165554 - RNA, 32 nt, Homo Sapiens
gguaagaguauuuuaagauguacuaugcuauu

SEQ ID NO: 165555 - RNA, 32 nt, Homo Sapiens
ucaggggcccgaaccucugcggcggccugcag

SEQ ID NO: 165556 - RNA, 32 nt, Homo Sapiens
agaugcuuaugggaaacugcugauucccuucg

SEQ ID NO: 165557 - RNA, 32 nt, Homo Sapiens
ccgugcagaaaagaugcugguucuggcuggac

SEQ ID NO: 165558 - RNA, 32 nt, Homo Sapiens
uucauuuuagauacaacauacugcacacgcuc

SEQ ID NO: 165559 - RNA, 32 nt, Homo Sapiens
gaguucacggggccaucuccacuggcuccuug

SEQ ID NO: 165560 - RNA, 32 nt, Homo Sapiens
ccagucagggccaggcguggacgccgccggac

SEQ ID NO: 165561 - RNA, 32 nt, Homo Sapiens
accuauauaaaucaaaguacacauuauuuaaa

SEQ ID NO: 165562 - RNA, 32 nt, Homo Sapiens
uuaugauccauuuuguauggucucaaaguugg

SEQ ID NO: 165563 - RNA, 32 nt, Homo Sapiens
ucccucuccccucucuacuuuaauucauugga

SEQ ID NO: 165564 - RNA, 32 nt, Homo Sapiens
cgagugugugggugcaucuggauguacacaca

SEQ ID NO: 165565 - RNA, 32 nt, Homo Sapiens
auuauagcaugagggcugggaauagcagggug

SEQ ID NO: 165566 - RNA, 32 nt, Homo Sapiens
gcacagagggccggccaccaguccucgaugcu

SEQ ID NO: 165567 - RNA, 32 nt, Homo Sapiens
gccggggcgccgagucggaggggguggcagug

SEQ ID NO: 165568 - RNA, 32 nt, Homo Sapiens
ccggagagcgucgggccuuccggaagggucga

SEQ ID NO: 165569 - RNA, 32 nt, Homo Sapiens
gacaucaagccuguagucauauuuucaauugc

SEQ ID NO: 165570 - RNA, 32 nt, Homo Sapiens
accccaggggagaggagagcugugagagcacc

SEQ ID NO: 165571 - RNA, 32 nt, Homo Sapiens
augugguagcuacuuuuuuccuauuuugaagc

SEQ ID NO: 165572 - RNA, 32 nt, Homo Sapiens
ccacgugggggaggaggaggcaggcagcacca

SEQ ID NO: 165573 - RNA, 32 nt, Homo Sapiens
uccauuugacuucugaugucugguuuagcauu

SEQ ID NO: 165574 - RNA, 32 nt, Homo Sapiens
agaguauuggguuuggcuggccucgauuuaaa

SEQ ID NO: 165575 - RNA, 32 nt, Homo Sapiens
cccuugucucguguggauggggcgcuggccgc

SEQ ID NO: 165576 - RNA, 32 nt, Homo Sapiens
uuuucacgucagcuagguugcaaggauaauaa

SEQ ID NO: 165577 - RNA, 32 nt, Homo Sapiens
gagcaauugauaguucuacaaugcugauaaua

SEQ ID NO: 165578 - RNA, 32 nt, Homo Sapiens
gaaagagcagaagcacaagacaacaacagugg

SEQ ID NO: 165579 - RNA, 32 nt, Homo Sapiens
auaguuuccuggaagaucugugccuccaacca

SEQ ID NO: 165580 - RNA, 32 nt, Homo Sapiens
agagcggcguaguggcagcugggguuagugcu

SEQ ID NO: 165581 - RNA, 32 nt, Homo Sapiens
uugaugagcuuccaguuuuucuagauaaaccu

SEQ ID NO: 165582 - RNA, 32 nt, Homo Sapiens
ggggaagcagcuggagugcgaccgccacggca

SEQ ID NO: 165583 - RNA, 32 nt, Homo Sapiens
aauucaaucgaaugcccugguuugucacagga

SEQ ID NO: 165584 - RNA, 32 nt, Homo Sapiens
guucccaagcucgcacagaaggugauaaguua

SEQ ID NO: 165585 - RNA, 32 nt, Homo Sapiens
cccucccucccaggccgcacagguccugccaa

SEQ ID NO: 165586 - RNA, 32 nt, Homo Sapiens
ccgguccgagucuccuaccucccccaacccug

SEQ ID NO: 165587 - RNA, 32 nt, Homo Sapiens
auagaagaggccgcagagguguugaugugcgg

SEQ ID NO: 165588 - RNA, 32 nt, Homo Sapiens
ccguggacaccugugccugccgguggaccacu

SEQ ID NO: 165589 - RNA, 32 nt, Homo Sapiens
ugacacacaaaacaaaauaucuggaccuuuac

SEQ ID NO: 165590 - RNA, 32 nt, Homo Sapiens
ccagccugugcugcauacccaccacccagcuu

SEQ ID NO: 165591 - RNA, 32 nt, Homo Sapiens
gucagaggacuccaauaacagccagguuuaca

SEQ ID NO: 165592 - RNA, 31 nt, Homo Sapiens
uuuaagacaaauugagagcuggugggggugu

SEQ ID NO: 165593 - RNA, 32 nt, Homo Sapiens
cucacccguccucccugcucugagacacaccc

SEQ ID NO: 165594 - RNA, 32 nt, Homo Sapiens
ucuauuugcugggcuuuuuuuuucucuuucuc

SEQ ID NO: 165595 - RNA, 32 nt, Homo Sapiens
aucaggaccucccuggaccccugcagggcagg

SEQ ID NO: 165596 - RNA, 32 nt, Homo Sapiens
ccggauucuccacgcccuccccaucucccagu

SEQ ID NO: 165597 - RNA, 32 nt, Homo Sapiens
cuuccuugcccccauuucacccauggggagac

SEQ ID NO: 165598 - RNA, 32 nt, Homo Sapiens
uaaucccuuugaucaauauggcuuuuuuccaa

SEQ ID NO: 165599 - RNA, 32 nt, Homo Sapiens
acgcuggguccccggcgccgcgggagcuggga

SEQ ID NO: 165600 - RNA, 32 nt, Homo Sapiens
gggcacuguggcugagaucaccaccaucgagg

SEQ ID NO: 165601 - RNA, 32 nt, Homo Sapiens
cuagcugccuccaugugacuagugagcugcug

SEQ ID NO: 165602 - RNA, 32 nt, Homo Sapiens
uucucuuuuguagcucucagacuucucaguuu

SEQ ID NO: 165603 - RNA, 32 nt, Homo Sapiens
gcugccugagauccagggacccgcccauuccu

SEQ ID NO: 165604 - RNA, 31 nt, Homo Sapiens
agccaugccauugcgcugccccggccgccag

SEQ ID NO: 165605 - RNA, 32 nt, Homo Sapiens
guuuggaaacaucacucuguuguaagcugaau

SEQ ID NO: 165606 - RNA, 32 nt, Homo Sapiens
augcaauuuaaauauaacaggagacuuaaaau

SEQ ID NO: 165607 - RNA, 32 nt, Homo Sapiens
aguugcaucauuuuauauaaucuuauacuuaa

SEQ ID NO: 165608 - RNA, 32 nt, Homo Sapiens
uguguagaggccuuaaccaacgauaacggcgg

SEQ ID NO: 165609 - RNA, 32 nt, Homo Sapiens
aggaaaauuaguauuuuuuuuaauauuauaug

SEQ ID NO: 165610 - RNA, 32 nt, Homo Sapiens
cuuggauuuugaaauuuacuguaacugucagu

SEQ ID NO: 165611 - RNA, 32 nt, Homo Sapiens
uugucuccagcauccagaaaaaaaaaaaaaaa

SEQ ID NO: 165612 - RNA, 32 nt, Homo Sapiens
ggauccugcaggggcgggaagggggcucgggc

SEQ ID NO: 165613 - RNA, 32 nt, Homo Sapiens
cuuaaaugagaaguacugacaauauaacuuac

SEQ ID NO: 165614 - RNA, 29 nt, Homo Sapiens
uauuugcuugacacauggcagaggauggc

SEQ ID NO: 165615 - RNA, 32 nt, Homo Sapiens
cuugccuguagcuccugcuggaggaagaggau

SEQ ID NO: 165616 - RNA, 31 nt, Homo Sapiens
auuacgcagacguaacugggauauguuuacu

SEQ ID NO: 165617 - RNA, 32 nt, Homo Sapiens
uacaugggaacaaaaggaccugaaaauccuca

SEQ ID NO: 165618 - RNA, 32 nt, Homo Sapiens
guugaauuucuugguggcuauuagcagaagug

SEQ ID NO: 165619 - RNA, 32 nt, Homo Sapiens
auacauuauuuaaucaauaagaauuaacugua

SEQ ID NO: 165620 - RNA, 32 nt, Homo Sapiens
guuugaacacccuggugacuaggaacacagcc

SEQ ID NO: 165621 - RNA, 32 nt, Homo Sapiens
gauggcucagaauuugauugacaugagaaagu

SEQ ID NO: 165622 - RNA, 32 nt, Homo Sapiens
cuuuuuccagguggcaucuuuggaucuucugu

SEQ ID NO: 165623 - RNA, 32 nt, Homo Sapiens
gcacagccacuucccuuccccagcuuggcugc

SEQ ID NO: 165624 - RNA, 30 nt, Homo Sapiens
gcgagcggcggcggcggcgguuccagcaug

SEQ ID NO: 165625 - RNA, 32 nt, Homo Sapiens
agguuugguuuuuucucauuugucuguggcau

SEQ ID NO: 165626 - RNA, 32 nt, Homo Sapiens
auuuagggugugccuggcacugagcuaggcgc

SEQ ID NO: 165627 - RNA, 32 nt, Homo Sapiens
uuacagaacacauuuuaaucaauagaagaauu

SEQ ID NO: 165628 - RNA, 32 nt, Homo Sapiens
acugacugaaagaaaaucaugaacuuaucauu

SEQ ID NO: 165629 - RNA, 32 nt, Homo Sapiens
uuuugcaaauuagauuuaaucuuauuaaaugu

SEQ ID NO: 165630 - RNA, 32 nt, Homo Sapiens
agggaaauguuuguacuauauagaauccauau

SEQ ID NO: 165631 - RNA, 32 nt, Homo Sapiens
aucaaccagauaagugauauuuacagucacaa

SEQ ID NO: 165632 - RNA, 32 nt, Homo Sapiens
uugauggugguugugaaagugauuuagcuuug

SEQ ID NO: 165633 - RNA, 32 nt, Homo Sapiens
ggcggggcgcgcagaggagcgggccgcggcgc

SEQ ID NO: 165634 - RNA, 32 nt, Homo Sapiens
cccggaccugaggcgccggcgugucaggaagg

SEQ ID NO: 165635 - RNA, 32 nt, Homo Sapiens
cagcaggaagcaguagauaaccaacauuccaa

SEQ ID NO: 165636 - RNA, 32 nt, Homo Sapiens
ggggguagcaccugugcccgcugcugagucuc

SEQ ID NO: 165637 - RNA, 32 nt, Homo Sapiens
cacagacagacggaagcagaaaggacaguuug

SEQ ID NO: 165638 - RNA, 32 nt, Homo Sapiens
ugcccgggaaggcugcugccccugcccccugg

SEQ ID NO: 165639 - RNA, 32 nt, Homo Sapiens
aaagcagcauauaucuguaaaagaaaauauug

SEQ ID NO: 165640 - RNA, 32 nt, Homo Sapiens
caaauucuaguagaagauuuccacagugaaau

SEQ ID NO: 165641 - RNA, 32 nt, Homo Sapiens
cccagccucugugcugucuccuccucugugcg

SEQ ID NO: 165642 - RNA, 32 nt, Homo Sapiens
ucuacuauucuuguuuuccacugcuguggaaa

SEQ ID NO: 165643 - RNA, 32 nt, Homo Sapiens
uggggaccuuuaacuuuuuuuuccucuuuugu

SEQ ID NO: 165644 - RNA, 32 nt, Homo Sapiens
acggucccuaccuuccuucucgggucucuggg

SEQ ID NO: 165645 - RNA, 32 nt, Homo Sapiens
cccccuccaagccccggcccgucccguccccg

SEQ ID NO: 165646 - RNA, 32 nt, Homo Sapiens
gcaggucccgcacuccagccucucgcugccag

SEQ ID NO: 165647 - RNA, 32 nt, Homo Sapiens
uucugcaauauuugcaaccuauaucagagaau

SEQ ID NO: 165648 - RNA, 32 nt, Homo Sapiens
uauuauuuuuaaaaaacuuuucuugaacuccu

SEQ ID NO: 165649 - RNA, 32 nt, Homo Sapiens
ggaaauacacaaguaaaaccagaaaauucaga

SEQ ID NO: 165650 - RNA, 32 nt, Homo Sapiens
ugguugaccccuccgguggccgggccacucug

SEQ ID NO: 165651 - RNA, 32 nt, Homo Sapiens
aguguauguucuccugcucccuggacaaaucc

SEQ ID NO: 165652 - RNA, 32 nt, Homo Sapiens
caucaacauaagaggccaggaacuugaccccu

SEQ ID NO: 165653 - RNA, 32 nt, Homo Sapiens
cucccaagugaaccauaaguguuuuggagcuc

SEQ ID NO: 165654 - RNA, 32 nt, Homo Sapiens
aaaugaagugguguauaaaaaugucaaauaaa

SEQ ID NO: 165655 - RNA, 32 nt, Homo Sapiens
acccccaaugguuuuucacucuuuuuauuuac

SEQ ID NO: 165656 - RNA, 32 nt, Homo Sapiens
aaacauugacauuauuggaaaugagauucuua

SEQ ID NO: 165657 - RNA, 32 nt, Homo Sapiens
cgcaggguccgugggguccccgcggcgcgcag

SEQ ID NO: 165658 - RNA, 32 nt, Homo Sapiens
gccacaugagagaaauaccagagcugggauga

SEQ ID NO: 165659 - RNA, 32 nt, Homo Sapiens
ugaaguucuaaauuuaguuaugaccuauuuag

SEQ ID NO: 165660 - RNA, 27 nt, Homo Sapiens
gcagcccuccacuucugguauaauugu

SEQ ID NO: 165661 - RNA, 32 nt, Homo Sapiens
caccaguguguugaauccgaagaaugacaauu

SEQ ID NO: 165662 - RNA, 32 nt, Homo Sapiens
gccaccccauccccuccucaaagaaauucaca

SEQ ID NO: 165663 - RNA, 32 nt, Homo Sapiens
caucuccaccccaccccacccuacucuccaga

SEQ ID NO: 165664 - RNA, 32 nt, Homo Sapiens
ucgcuugagcucaggaguucaaggcugcagag

SEQ ID NO: 165665 - RNA, 32 nt, Homo Sapiens
auuagaauccucuggaugaggguuagaagaga

SEQ ID NO: 165666 - RNA, 32 nt, Homo Sapiens
cauaggagcugagcauaggagcucagaugaga

SEQ ID NO: 165667 - RNA, 31 nt, Homo Sapiens
aacugucauuugauaaaaacaauuaagauuu

SEQ ID NO: 165668 - RNA, 32 nt, Homo Sapiens
aucauaaaggcacaagugcacacacaucuaug

SEQ ID NO: 165669 - RNA, 32 nt, Homo Sapiens
uuuuuaaguauuucuuuguaucaugguuaugc

SEQ ID NO: 165670 - RNA, 32 nt, Homo Sapiens
ccucuaacaucucagguuuuuaucuugucuua

SEQ ID NO: 165671 - RNA, 32 nt, Homo Sapiens
ucccuacgucccgcgucccccgagcgcucgga

SEQ ID NO: 165672 - RNA, 32 nt, Homo Sapiens
aaugguggguaguccuggcucaccccccucau

SEQ ID NO: 165673 - RNA, 32 nt, Homo Sapiens
guaauuuuuugaucuuuuuuuugccuuaagag

SEQ ID NO: 165674 - RNA, 32 nt, Homo Sapiens
cuuacauuuccauuccauuauuacaagugaug

SEQ ID NO: 165675 - RNA, 32 nt, Homo Sapiens
gccccaagaugcugaagccagcccuggagccc

SEQ ID NO: 165676 - RNA, 32 nt, Homo Sapiens
uugcuuuuauuaaaauacaaaauuaaacaaac

SEQ ID NO: 165677 - RNA, 32 nt, Homo Sapiens
ucaaaccaaaggaaaaguguugcuagagaaaa

SEQ ID NO: 165678 - RNA, 32 nt, Homo Sapiens
uauggcauagaaagaauauaaauauccuguac

SEQ ID NO: 165679 - RNA, 32 nt, Homo Sapiens
ucacugaagaagauccuaaguguugaauagac

SEQ ID NO: 165680 - RNA, 32 nt, Homo Sapiens
gucacagcaugcuacagccuuggacuccuggg

SEQ ID NO: 165681 - RNA, 32 nt, Homo Sapiens
cuuuucuagacauuuguguugggauaacuaau

SEQ ID NO: 165682 - RNA, 32 nt, Homo Sapiens
cacugcucuucagauucauguacagcuguggu

SEQ ID NO: 165683 - RNA, 32 nt, Homo Sapiens
cuucggcagguuuuccucuccuaaacucauuc

SEQ ID NO: 165684 - RNA, 32 nt, Homo Sapiens
uuccaaggggcuuagaaaagcuaacaagggug

SEQ ID NO: 165685 - RNA, 29 nt, Homo Sapiens
ugguguuaauaaaacacaacacacaaagu

SEQ ID NO: 165686 - RNA, 32 nt, Homo Sapiens
gguggccgcgcugguuuccccggaguagcgcc

SEQ ID NO: 165687 - RNA, 32 nt, Homo Sapiens
auuucgacugguuuuauacaacaauaaaaaau

SEQ ID NO: 165688 - RNA, 32 nt, Homo Sapiens
ggccucgggcuuaaauaggagcuccgggcucu

SEQ ID NO: 165689 - RNA, 32 nt, Homo Sapiens
uccgcaugggcguacuggccuccuacucaccc

SEQ ID NO: 165690 - RNA, 32 nt, Homo Sapiens
gaauauuucauuuacuuaaccaaaaacaaaua

SEQ ID NO: 165691 - RNA, 31 nt, Homo Sapiens
ggcauccggcacugaagcccugguguuccug

SEQ ID NO: 165692 - RNA, 32 nt, Homo Sapiens
uuucucagaaaagaacauguagugacacaggg

SEQ ID NO: 165693 - RNA, 32 nt, Homo Sapiens
gaauaggaaaauuugaugcuguaauuuggguc

SEQ ID NO: 165694 - RNA, 32 nt, Homo Sapiens
uaauccuuucaaugucccacugaauccuguug

SEQ ID NO: 165695 - RNA, 32 nt, Homo Sapiens
ucguuggaaguacacgcugcugagcauguuua

SEQ ID NO: 165696 - RNA, 32 nt, Homo Sapiens
gacaacacuuucccucucuggaccucaguuuc

SEQ ID NO: 165697 - RNA, 32 nt, Homo Sapiens
uuugaaggcucgccggcccauguggggucuuu

SEQ ID NO: 165698 - RNA, 32 nt, Homo Sapiens
guucauguagcacagauaagcauugcacuugg

SEQ ID NO: 165699 - RNA, 32 nt, Homo Sapiens
gcgcaccaacagagccgguucucagggcgcuu

SEQ ID NO: 165700 - RNA, 32 nt, Homo Sapiens
cuugggauaagccccaguccagguccaggagg

SEQ ID NO: 165701 - RNA, 32 nt, Homo Sapiens
ccacggcccuuaaacuugcugggcagguuugg

SEQ ID NO: 165702 - RNA, 32 nt, Homo Sapiens
acaguggugggggcccauggccucgaggaaag

SEQ ID NO: 165703 - RNA, 32 nt, Homo Sapiens
caucuaaaagccacagaagagacagagggaaa

SEQ ID NO: 165704 - RNA, 32 nt, Homo Sapiens
uaaugauauaaaaacugaauaagguauauuaa

SEQ ID NO: 165705 - RNA, 32 nt, Homo Sapiens
aaagucucagacuauaauaaacacagcuugcc

SEQ ID NO: 165706 - RNA, 32 nt, Homo Sapiens
guuuuucgauauuuaaauuuuuuggcuuuuca

SEQ ID NO: 165707 - RNA, 32 nt, Homo Sapiens
ccacuugcuuggguuccuggggguuuucugau

SEQ ID NO: 165708 - RNA, 32 nt, Homo Sapiens
cuccaguuuggcaacauugccuugaagagaga

SEQ ID NO: 165709 - RNA, 32 nt, Homo Sapiens
uauagaacauuuccaucaacacggaaaguucu

SEQ ID NO: 165710 - RNA, 31 nt, Homo Sapiens
ccgucccugcggcaccugccccagagcccgu

SEQ ID NO: 165711 - RNA, 32 nt, Homo Sapiens
acccagaggccagggccaggccccacugggga

SEQ ID NO: 165712 - RNA, 32 nt, Homo Sapiens
aggcaggcuggggcucucugcagacguugcag

SEQ ID NO: 165713 - RNA, 32 nt, Homo Sapiens
agaacuuacaucacaaaccaaccccaaagcua

SEQ ID NO: 165714 - RNA, 32 nt, Homo Sapiens
ggcacgaggggaagauggcggcggcggccggg

SEQ ID NO: 165715 - RNA, 32 nt, Homo Sapiens
ggagcaagccagcagggaccagccgggucuag

SEQ ID NO: 165716 - RNA, 29 nt, Homo Sapiens
auuuaggucagucaauaccauaggacuau

SEQ ID NO: 165717 - RNA, 32 nt, Homo Sapiens
ucagggccuugaguggcacgcugguggggcag

SEQ ID NO: 165718 - RNA, 32 nt, Homo Sapiens
aggagcccuggccccccaacuuucuucagagu

SEQ ID NO: 165719 - RNA, 32 nt, Homo Sapiens
gaggcccggaagcggacugaggcggccuggag

SEQ ID NO: 165720 - RNA, 32 nt, Homo Sapiens
ugccacugcucaaggucuccauggcugagccu

SEQ ID NO: 165721 - RNA, 32 nt, Homo Sapiens
cuugccugcugccugcauccccuuuccuggcc

SEQ ID NO: 165722 - RNA, 32 nt, Homo Sapiens
uuaagcuauuaaaaauacacagaacuauuucc

SEQ ID NO: 165723 - RNA, 32 nt, Homo Sapiens
gcugcuacuguaaaaacgaaaugagugguccu

SEQ ID NO: 165724 - RNA, 32 nt, Homo Sapiens
gcgccggccccggucgggccuccgaaaccaug

SEQ ID NO: 165725 - RNA, 32 nt, Homo Sapiens
gugcugaggccguggaggaagccaggaggagg

SEQ ID NO: 165726 - RNA, 32 nt, Homo Sapiens
aggaagugucuguagccgcagcugcggguccg

SEQ ID NO: 165727 - RNA, 32 nt, Homo Sapiens
guggguggaguucuggggccccgcccccgcca

SEQ ID NO: 165728 - RNA, 32 nt, Homo Sapiens
agaaggcagaacucaaucauuuaaauuguguc

SEQ ID NO: 165729 - RNA, 32 nt, Homo Sapiens
gggcccagcucuuccucccggcugcgucucca

SEQ ID NO: 165730 - RNA, 32 nt, Homo Sapiens
uugaacacauacccucacuggggaaccugaaa

SEQ ID NO: 165731 - RNA, 32 nt, Homo Sapiens
acagcgcuuucugccccugggggagcaacccc

SEQ ID NO: 165732 - RNA, 32 nt, Homo Sapiens
gauauauaaaaauuaaauuacuggauuuaccu

SEQ ID NO: 165733 - RNA, 32 nt, Homo Sapiens
gacagggcuuugcugaaaaccaaacaugggcc

SEQ ID NO: 165734 - RNA, 32 nt, Homo Sapiens
gcaacaguuaauguauuuauuaacuuaauaau

SEQ ID NO: 165735 - RNA, 32 nt, Homo Sapiens
ucuucacccucccagacaagucaacucagggg

SEQ ID NO: 165736 - RNA, 32 nt, Homo Sapiens
aggaggcagacacucaggccuacccacugcca

SEQ ID NO: 165737 - RNA, 29 nt, Homo Sapiens
aaaaauucuauccuaccaaauacugguau

SEQ ID NO: 165738 - RNA, 32 nt, Homo Sapiens
aagccuguggcacugggacagaauagauuuuc

SEQ ID NO: 165739 - RNA, 32 nt, Homo Sapiens
aauuaguuaaauucuggaguugugaaacugcc

SEQ ID NO: 165740 - RNA, 31 nt, Homo Sapiens
cugcccgcaggacgccugcccccagcccccg

SEQ ID NO: 165741 - RNA, 32 nt, Homo Sapiens
agccggcgccgcgccaugcuccaccuuagcga

SEQ ID NO: 165742 - RNA, 32 nt, Homo Sapiens
uucuugccaagagaauuacgugcguauugagc

SEQ ID NO: 165743 - RNA, 32 nt, Homo Sapiens
uauaugggaaugcuagugguuuuuguauguug

SEQ ID NO: 165744 - RNA, 32 nt, Homo Sapiens
uuccacagaugagaagcagagugaccauguga

SEQ ID NO: 165745 - RNA, 32 nt, Homo Sapiens
acgcugggcuucaacaucaagacccuggagca

SEQ ID NO: 165746 - RNA, 32 nt, Homo Sapiens
gggggccuggguaguguaggaucucgcugggc

SEQ ID NO: 165747 - RNA, 32 nt, Homo Sapiens
ccuucuccaucccccauggaggaggcaucgca

SEQ ID NO: 165748 - RNA, 32 nt, Homo Sapiens
ugacucuucuaaaaaugaagaugaagagcuau

SEQ ID NO: 165749 - RNA, 32 nt, Homo Sapiens
ccacugccgauugacuaaaaaauacauuaucc

SEQ ID NO: 165750 - RNA, 32 nt, Homo Sapiens
uuauaaacagagcuuucaaacacuccucagaa

SEQ ID NO: 165751 - RNA, 32 nt, Homo Sapiens
gcagccaggcuuggcccccggcguggagcaga

SEQ ID NO: 165752 - RNA, 32 nt, Homo Sapiens
guuacacucugccuauucauugauauaugaua

SEQ ID NO: 165753 - RNA, 32 nt, Homo Sapiens
cacccacaaaaccuaaaauauuugacuggaug

SEQ ID NO: 165754 - RNA, 32 nt, Homo Sapiens
gcucuaagccccacacaaaguuggaccugggc

SEQ ID NO: 165755 - RNA, 32 nt, Homo Sapiens
aagggcauuucccucaaaaucuccaccaagga

SEQ ID NO: 165756 - RNA, 32 nt, Homo Sapiens
uggguuagggccgcggacguggcaguucucag

SEQ ID NO: 165757 - RNA, 32 nt, Homo Sapiens
aggccuggacacuuauggggacagcauaccuu

SEQ ID NO: 165758 - RNA, 32 nt, Homo Sapiens
caucguagcguaggaagaagccgccacaccuu

SEQ ID NO: 165759 - RNA, 32 nt, Homo Sapiens
agagaaguugcugauauucaucaguguguuug

SEQ ID NO: 165760 - RNA, 27 nt, Homo Sapiens
aauggucauuaauuuguguacuuagca

SEQ ID NO: 165761 - RNA, 32 nt, Homo Sapiens
ccuaauccuggacccgggaucccgugcgccug

SEQ ID NO: 165762 - RNA, 32 nt, Homo Sapiens
gcccgcguguccagcccuguugcucuccuggc

SEQ ID NO: 165763 - RNA, 32 nt, Homo Sapiens
ccgcacugcccuccccccgcagcaggggcgcc

SEQ ID NO: 165764 - RNA, 32 nt, Homo Sapiens
aagccaccugccuguguuuacccggcagcgag

SEQ ID NO: 165765 - RNA, 32 nt, Homo Sapiens
cacacagcccaggcagcauccgggccagugcc

SEQ ID NO: 165766 - RNA, 32 nt, Homo Sapiens
uaauauacuaaccauuucuuauggaaaggucc

SEQ ID NO: 165767 - RNA, 32 nt, Homo Sapiens
cgcgcgcaggaaggccgccucauugguccgcg

SEQ ID NO: 165768 - RNA, 32 nt, Homo Sapiens
ggugaggcucacguuggagggcuucgcgucug

SEQ ID NO: 165769 - RNA, 32 nt, Homo Sapiens
uccucaggccccagcgcccggcacugagccuc

SEQ ID NO: 165770 - RNA, 32 nt, Homo Sapiens
uguacuaaaaauacaagauuaccugggcaugg

SEQ ID NO: 165771 - RNA, 32 nt, Homo Sapiens
ggcaucggagugucagggcccgaggucaaggu

SEQ ID NO: 165772 - RNA, 32 nt, Homo Sapiens
agacccuggaggauucuguguuuugcugucac

SEQ ID NO: 165773 - RNA, 32 nt, Homo Sapiens
cugccggaauuccacaucugcucgugcaugcc

SEQ ID NO: 165774 - RNA, 30 nt, Homo Sapiens
ugccaccaugcucagcuaauuuuuguauuu

SEQ ID NO: 165775 - RNA, 32 nt, Homo Sapiens
ccucccagcaccagcucugcucaggccccuuc

SEQ ID NO: 165776 - RNA, 32 nt, Homo Sapiens
ggggccgggccgggcgggagugcaggggacgu

SEQ ID NO: 165777 - RNA, 32 nt, Homo Sapiens
gagaaccucaggcuuccuuggcaucacagggc

SEQ ID NO: 165778 - RNA, 32 nt, Homo Sapiens
uuccaacaagguggauccagagcuuuucuccu

SEQ ID NO: 165779 - RNA, 32 nt, Homo Sapiens
uauauuuuaaagcacaucauggcuuuaaguac

SEQ ID NO: 165780 - RNA, 32 nt, Homo Sapiens
aaaaugacuugacuaaggcucucaugaaauuc

SEQ ID NO: 165781 - RNA, 32 nt, Homo Sapiens
gaaugaguuaaaacuuugagggcuuuggggau

SEQ ID NO: 165782 - RNA, 32 nt, Homo Sapiens
uuaacaaaaauauuuucuaauggaauuacaua

SEQ ID NO: 165783 - RNA, 32 nt, Homo Sapiens
uacccuggcgauuugucuuggcccacauugcu

SEQ ID NO: 165784 - RNA, 32 nt, Homo Sapiens
gaggcagcugagaucagaagggaccagcugga

SEQ ID NO: 165785 - RNA, 32 nt, Homo Sapiens
cacuagccugccgaugagacccagacacaggc

SEQ ID NO: 165786 - RNA, 32 nt, Homo Sapiens
acagaagaaaaauuauuaaacaacucauuuua

SEQ ID NO: 165787 - RNA, 32 nt, Homo Sapiens
ccuucuuaagauacaaaugguggaggauugcu

SEQ ID NO: 165788 - RNA, 32 nt, Homo Sapiens
gcuauuuccaggugaagugcuuauggcuuaag

SEQ ID NO: 165789 - RNA, 32 nt, Homo Sapiens
cuagaucuggguuuccuuaaaacaccuugaga

SEQ ID NO: 165790 - RNA, 32 nt, Homo Sapiens
uuuuuauuuuuuauuuuuuuuauuauuuuuuu

SEQ ID NO: 165791 - RNA, 32 nt, Homo Sapiens
ggcuguguacaaagugcugcugagguuucugu

SEQ ID NO: 165792 - RNA, 32 nt, Homo Sapiens
cccuaggcagugccacccuuacccagcccagc

SEQ ID NO: 165793 - RNA, 32 nt, Homo Sapiens
ugucaguuuucaauauauauuaacacaaaagc

SEQ ID NO: 165794 - RNA, 32 nt, Homo Sapiens
acuuuacaaagcuggcaauauuacaauccuug

SEQ ID NO: 165795 - RNA, 32 nt, Homo Sapiens
caaagcugucauguuggagauugguaauggcu

SEQ ID NO: 165796 - RNA, 32 nt, Homo Sapiens
ccugccccaucccuggcucugagucucugucu

SEQ ID NO: 165797 - RNA, 32 nt, Homo Sapiens
uuaggccuguuuuaugaggaugagaugaggaa

SEQ ID NO: 165798 - RNA, 32 nt, Homo Sapiens
gcuggggcuuucuggaggauuuaaccacagag

SEQ ID NO: 165799 - RNA, 32 nt, Homo Sapiens
gggagagaacucuggaggaacgcugagcugag

SEQ ID NO: 165800 - RNA, 32 nt, Homo Sapiens
uccagcucaacccacaccaggacccccagaua

SEQ ID NO: 165801 - RNA, 32 nt, Homo Sapiens
acuucuucaaaauaacauuuggauuuagguuc

SEQ ID NO: 165802 - RNA, 32 nt, Homo Sapiens
cacuuuuuacuuuuucaauaaacgugacuccc

SEQ ID NO: 165803 - RNA, 32 nt, Homo Sapiens
gaccucgacgacccuuucaucagaggaaaagg

SEQ ID NO: 165804 - RNA, 32 nt, Homo Sapiens
ggaccagagguggaaggcgcggcgggcguagg

SEQ ID NO: 165805 - RNA, 32 nt, Homo Sapiens
aaccagauauaaaacucuuucucgucgccaug

SEQ ID NO: 165806 - RNA, 32 nt, Homo Sapiens
acuaaucaagacaaaccuuugaaagguuacac

SEQ ID NO: 165807 - RNA, 32 nt, Homo Sapiens
aguuuucacaugcuggcagaagcaauggccgg

SEQ ID NO: 165808 - RNA, 32 nt, Homo Sapiens
ccagcgagcgcgucccccggcgccgcccgaga

SEQ ID NO: 165809 - RNA, 32 nt, Homo Sapiens
guauauuuuugguguuuaauucuuccuuuguu

SEQ ID NO: 165810 - RNA, 26 nt, Homo Sapiens
cauauuaaauaaaaugaguguauguc

SEQ ID NO: 165811 - RNA, 27 nt, Homo Sapiens
gccacuucuguuuucagccccucccug

SEQ ID NO: 165812 - RNA, 32 nt, Homo Sapiens
gaccuggggcugcagggaaggcagcuuucauu

SEQ ID NO: 165813 - RNA, 32 nt, Homo Sapiens
cagugccugucuuugggugcuguaguucggua

SEQ ID NO: 165814 - RNA, 32 nt, Homo Sapiens
gaaaagguugacuauauagaggucuuguaugu

SEQ ID NO: 165815 - RNA, 32 nt, Homo Sapiens
gcugggguggagggggcggggaccuggggagc

SEQ ID NO: 165816 - RNA, 32 nt, Homo Sapiens
uccuuagagaaagucacuggggccugccaagc

SEQ ID NO: 165817 - RNA, 32 nt, Homo Sapiens
ucuggcccaugcugcuuaaauugggaaggaag

SEQ ID NO: 165818 - RNA, 32 nt, Homo Sapiens
cacaccgucgccaucuguagccaaagcaaaac

SEQ ID NO: 165819 - RNA, 32 nt, Homo Sapiens
caucccuuccccugcacccacccagcugucug

SEQ ID NO: 165820 - RNA, 32 nt, Homo Sapiens
uccagauguggugguguuugccugcgguccua

SEQ ID NO: 165821 - RNA, 32 nt, Homo Sapiens
aggcugauguguacuuaaccacuuccagauuu

SEQ ID NO: 165822 - RNA, 32 nt, Homo Sapiens
ggccagggguggaggagaauaugugggugugg

SEQ ID NO: 165823 - RNA, 32 nt, Homo Sapiens
aagaggacgcaggcuuccagaggacaaacccc

SEQ ID NO: 165824 - RNA, 32 nt, Homo Sapiens
auuuauuauuuuggauuuggaacuuggcuuug

SEQ ID NO: 165825 - RNA, 32 nt, Homo Sapiens
acagcugggcuggagaguuggugcuggcaaaa

SEQ ID NO: 165826 - RNA, 32 nt, Homo Sapiens
uuaaguaccaaucucugcuuugcaaugggcac

SEQ ID NO: 165827 - RNA, 29 nt, Homo Sapiens
ggaggcgugacuuuccccucggguccagg

SEQ ID NO: 165828 - RNA, 32 nt, Homo Sapiens
gaggaagacguggagcugugcgugccucgcug

SEQ ID NO: 165829 - RNA, 32 nt, Homo Sapiens
gcugggcagccugguccgcgcccugcacgacc

SEQ ID NO: 165830 - RNA, 32 nt, Homo Sapiens
gcuaauauauuguccuuguguacagaauauau

SEQ ID NO: 165831 - RNA, 32 nt, Homo Sapiens
gcaguuauguauauauuuucuccauugugugu

SEQ ID NO: 165832 - RNA, 32 nt, Homo Sapiens
ggggcgcugccgagggggcgccagccgcccau

SEQ ID NO: 165833 - RNA, 32 nt, Homo Sapiens
agcccugccgcguggggcgcgugggcacggag

SEQ ID NO: 165834 - RNA, 32 nt, Homo Sapiens
gagacacagagagacuuggagagagacaaagc

SEQ ID NO: 165835 - RNA, 32 nt, Homo Sapiens
accgugaacagaguaagggggcugggagagga

SEQ ID NO: 165836 - RNA, 32 nt, Homo Sapiens
aggccguugcuagucaguucucuucuuuccac

SEQ ID NO: 165837 - RNA, 32 nt, Homo Sapiens
cuucgcggggcgggaggcucgcgccgcagcca

SEQ ID NO: 165838 - RNA, 32 nt, Homo Sapiens
ggauauauacagauuauauauaggguguaacu

SEQ ID NO: 165839 - RNA, 32 nt, Homo Sapiens
uguugccaaaauuuaugaauuaaauucaaauc

SEQ ID NO: 165840 - RNA, 32 nt, Homo Sapiens
ugucgcccaggcuggaaugcaguggcgugauc

SEQ ID NO: 165841 - RNA, 32 nt, Homo Sapiens
cucagaguaguccagguguucuccuccuauuc

SEQ ID NO: 165842 - RNA, 32 nt, Homo Sapiens
agcugaggccccaggaggaaaccuuggcuuca

SEQ ID NO: 165843 - RNA, 32 nt, Homo Sapiens
ucucuuuggaccgcgccggacuuggccucagg

SEQ ID NO: 165844 - RNA, 32 nt, Homo Sapiens
cagugggcucugccagggcugccgcaccuguc

SEQ ID NO: 165845 - RNA, 32 nt, Homo Sapiens
ugcugggaggguggaggugaaggauggggccu

SEQ ID NO: 165846 - RNA, 32 nt, Homo Sapiens
uuuacagaauaauagagcagauaauauauaga

SEQ ID NO: 165847 - RNA, 30 nt, Homo Sapiens
aaccugggagguggaaguugcagugagcug

SEQ ID NO: 165848 - RNA, 32 nt, Homo Sapiens
ugcauuuuuaucgaauacauuuuuaucaacca

SEQ ID NO: 165849 - RNA, 32 nt, Homo Sapiens
acgguuuuggcagcugacuugguucugaagcc

SEQ ID NO: 165850 - RNA, 32 nt, Homo Sapiens
guugugugcauauuuauucacuuuuuguuaaa

SEQ ID NO: 165851 - RNA, 32 nt, Homo Sapiens
uuaauggcauucaguacuaauuuuauaagugc

SEQ ID NO: 165852 - RNA, 32 nt, Homo Sapiens
ucuaaaaugggguguaggaucuggccagaaac

SEQ ID NO: 165853 - RNA, 32 nt, Homo Sapiens
aggaaagaauugucgcugcuucaucaacagga

SEQ ID NO: 165854 - RNA, 32 nt, Homo Sapiens
gacuguagcaauacaaaaaucaagcuuagugc

SEQ ID NO: 165855 - RNA, 32 nt, Homo Sapiens
uucaucacagaaaagaugaaaagaggaaagaa

SEQ ID NO: 165856 - RNA, 32 nt, Homo Sapiens
uaggaguauuuauguaacuaucuuaugcuuca

SEQ ID NO: 165857 - RNA, 32 nt, Homo Sapiens
aagaauuguauuacauuuggagaguaaaaaac

SEQ ID NO: 165858 - RNA, 32 nt, Homo Sapiens
uuucuauucuaccgcaauucgauggagucuug

SEQ ID NO: 165859 - RNA, 32 nt, Homo Sapiens
augauuucugguuuugauuaauuuucaauuua

SEQ ID NO: 165860 - RNA, 32 nt, Homo Sapiens
auguauauuuucacaugaaauaccaaauguca

SEQ ID NO: 165861 - RNA, 32 nt, Homo Sapiens
gaucguccacaccacacccucuuucagggacc

SEQ ID NO: 165862 - RNA, 32 nt, Homo Sapiens
caggguacugucagcuuguuaguaagagggau

SEQ ID NO: 165863 - RNA, 32 nt, Homo Sapiens
gaggggaaucauguuauagacauaacuugaua

SEQ ID NO: 165864 - RNA, 32 nt, Homo Sapiens
uuuauuacacuggcucguggacagaacaauuu

SEQ ID NO: 165865 - RNA, 32 nt, Homo Sapiens
agaagaaauggcaaucagucgagccucugacu

SEQ ID NO: 165866 - RNA, 32 nt, Homo Sapiens
cagcgguggaccgagcacaggagcuggcuucg

SEQ ID NO: 165867 - RNA, 32 nt, Homo Sapiens
gaguuucuuccuuccgguggguucguggucuc

SEQ ID NO: 165868 - RNA, 32 nt, Homo Sapiens
ucuggggcucccagcccucccucucuaaugca

SEQ ID NO: 165869 - RNA, 29 nt, Homo Sapiens
uggugucugaagauucacacgagugccuc

SEQ ID NO: 165870 - RNA, 32 nt, Homo Sapiens
cgggauccuggacuccggggccuccccguccu

SEQ ID NO: 165871 - RNA, 32 nt, Homo Sapiens
ccagaagccugccuggaaagauggguccacug

SEQ ID NO: 165872 - RNA, 32 nt, Homo Sapiens
caccugcuuuuccugccuggaauguuuucugg

SEQ ID NO: 165873 - RNA, 32 nt, Homo Sapiens
aggggcgugaccggggccuccugguggauucu

SEQ ID NO: 165874 - RNA, 32 nt, Homo Sapiens
agaagagccuggagauguuggugcuggagacc

SEQ ID NO: 165875 - RNA, 32 nt, Homo Sapiens
gucuauaaaucacccaacuaagaucaggggug

SEQ ID NO: 165876 - RNA, 32 nt, Homo Sapiens
ugguccuugugaugguauuacuuuuuacaaag

SEQ ID NO: 165877 - RNA, 32 nt, Homo Sapiens
auuaagaagcuaggaagauggagcacggcaca

SEQ ID NO: 165878 - RNA, 32 nt, Homo Sapiens
ccuguggcggccuuccgggucucgcagccuga

SEQ ID NO: 165879 - RNA, 32 nt, Homo Sapiens
uacucuaccucuaacacaguaccuguuaacaa

SEQ ID NO: 165880 - RNA, 32 nt, Homo Sapiens
gaguuguacagcacuugauuauuuugcugcau

SEQ ID NO: 165881 - RNA, 32 nt, Homo Sapiens
cccuguuccucuccccgccaccccagggccuc

SEQ ID NO: 165882 - RNA, 32 nt, Homo Sapiens
aaccugggaaaggacugaugggcacuuaguag

SEQ ID NO: 165883 - RNA, 32 nt, Homo Sapiens
cucuggauuuuccagggcugucuuuauagccu

SEQ ID NO: 165884 - RNA, 32 nt, Homo Sapiens
ggcccuggucuucgccaccuaccugcucaagc

SEQ ID NO: 165885 - RNA, 32 nt, Homo Sapiens
augacagcuagugcuugggaucguacauguua

SEQ ID NO: 165886 - RNA, 32 nt, Homo Sapiens
gacgcgcccucgcagcuuccgccgggccccuc

SEQ ID NO: 165887 - RNA, 32 nt, Homo Sapiens
uacuucuagaaaagcaaagaaauuggguauca

SEQ ID NO: 165888 - RNA, 32 nt, Homo Sapiens
ccagggagcccacagcagcaucagacccaucc

SEQ ID NO: 165889 - RNA, 32 nt, Homo Sapiens
ucacucucuucaaucccacacccauggacauu

SEQ ID NO: 165890 - RNA, 32 nt, Homo Sapiens
gacaaucuugagggaaggaaaagccagacuuu

SEQ ID NO: 165891 - RNA, 32 nt, Homo Sapiens
ucccucagguugcacagcuguuuaggcuauag

SEQ ID NO: 165892 - RNA, 32 nt, Homo Sapiens
gcgggcgcgguguagcggcccgcgggcugacu

SEQ ID NO: 165893 - RNA, 32 nt, Homo Sapiens
gaggcagacaccuauuacagagccaggaugaa

SEQ ID NO: 165894 - RNA, 32 nt, Homo Sapiens
gagagaauucuaugauccagauacaguggagc

SEQ ID NO: 165895 - RNA, 32 nt, Homo Sapiens
gaacuugagguuuaaagcagggggaggagggc

SEQ ID NO: 165896 - RNA, 32 nt, Homo Sapiens
gaaucuuggaaaacuaguuuuauuauauucag

SEQ ID NO: 165897 - RNA, 32 nt, Homo Sapiens
ccgacccgaccgcacccggcgccugcccucgc

SEQ ID NO: 165898 - RNA, 32 nt, Homo Sapiens
gagauugaauauaaggaaaacacaauaaauuu

SEQ ID NO: 165899 - RNA, 32 nt, Homo Sapiens
uuugagaaggauuucaaggaaguguuugcuau

SEQ ID NO: 165900 - RNA, 32 nt, Homo Sapiens
uaggagaggggaggggggaaguacuuuuauuu

SEQ ID NO: 165901 - RNA, 32 nt, Homo Sapiens
ccacuguaacugccgagcugccugcugucacg

SEQ ID NO: 165902 - RNA, 32 nt, Homo Sapiens
ugguuauaucaaacuuuuacgacuuuuacauu

SEQ ID NO: 165903 - RNA, 32 nt, Homo Sapiens
caccagcuacagagcccaggcgggugccagcc

SEQ ID NO: 165904 - RNA, 32 nt, Homo Sapiens
guugugcuuuacuccacgcaucaauaaauaau

SEQ ID NO: 165905 - RNA, 29 nt, Homo Sapiens
caugauggggagguggccagcuccaggcc

SEQ ID NO: 165906 - RNA, 32 nt, Homo Sapiens
acucaguucagggauuggggcuggcuuugagu

SEQ ID NO: 165907 - RNA, 32 nt, Homo Sapiens
uggaugaacuaaaaggaauacuggggacacuu

SEQ ID NO: 165908 - RNA, 32 nt, Homo Sapiens
gacacccgcccaggugcccggcgucgaccggc

SEQ ID NO: 165909 - RNA, 32 nt, Homo Sapiens
cgugcgcggggaagagggcagcacgcagcagg

SEQ ID NO: 165910 - RNA, 32 nt, Homo Sapiens
gucccuccucuaaaccacuuugaugaggacca

SEQ ID NO: 165911 - RNA, 32 nt, Homo Sapiens
gucugugguccguuuugguugcuuuuguuuaa

SEQ ID NO: 165912 - RNA, 32 nt, Homo Sapiens
cuuagugauaaggaaguuucaagugcaagauc

SEQ ID NO: 165913 - RNA, 32 nt, Homo Sapiens
aaagacuucaauuagggcuauuagaguuauau

SEQ ID NO: 165914 - RNA, 32 nt, Homo Sapiens
caagggcugaaggaggccacuccaucucaccu

SEQ ID NO: 165915 - RNA, 32 nt, Homo Sapiens
gaguacggcgcgugcgcagaucagggaucgcg

SEQ ID NO: 165916 - RNA, 32 nt, Homo Sapiens
uagagaugaagagaaaacuuuuucuuuauucc

SEQ ID NO: 165917 - RNA, 32 nt, Homo Sapiens
ggggagagagaggccgguccuggucuggccgc

SEQ ID NO: 165918 - RNA, 32 nt, Homo Sapiens
uuuagaaaaguacauauaugcauaauacuccu

SEQ ID NO: 165919 - RNA, 32 nt, Homo Sapiens
cggcggcggcggcggcagcugaggccgaggag

SEQ ID NO: 165920 - RNA, 32 nt, Homo Sapiens
guagcugggauugcaggcgugugccaccacgc

SEQ ID NO: 165921 - RNA, 32 nt, Homo Sapiens
ggucucagcacugaugggaggcuggugcccaa

SEQ ID NO: 165922 - RNA, 32 nt, Homo Sapiens
ugcccuguaccuacccaaaagcuguagucaca

SEQ ID NO: 165923 - RNA, 32 nt, Homo Sapiens
gugaggguccuuuuccuucucugcggccaccc

SEQ ID NO: 165924 - RNA, 32 nt, Homo Sapiens
ugugcagcugccuggcaguggcugggacaagg

SEQ ID NO: 165925 - RNA, 32 nt, Homo Sapiens
cccagucuuucaugugugccaaggcugaugca

SEQ ID NO: 165926 - RNA, 32 nt, Homo Sapiens
gcucagcagcccccucccgggcggcuucaccc

SEQ ID NO: 165927 - RNA, 28 nt, Homo Sapiens
cccaaguugcucuguauguguucgucag

SEQ ID NO: 165928 - RNA, 32 nt, Homo Sapiens
ugggucuccccgcagcgccgccguccacgagg

SEQ ID NO: 165929 - RNA, 32 nt, Homo Sapiens
cuugguguuucauuuggacaggccaauuuaug

SEQ ID NO: 165930 - RNA, 28 nt, Homo Sapiens
caguaggggcggccaggcagaggcgccc

SEQ ID NO: 165931 - RNA, 31 nt, Homo Sapiens
caaaagaacauauuaaaauagagguaaauua

SEQ ID NO: 165932 - RNA, 32 nt, Homo Sapiens
guagcaagaguacacaucuggagcaugaggga

SEQ ID NO: 165933 - RNA, 32 nt, Homo Sapiens
gagaagguuguaggcauggaagagagccaggc

SEQ ID NO: 165934 - RNA, 32 nt, Homo Sapiens
ccggagcagcagcagcagcagcaggagcccgc

SEQ ID NO: 165935 - RNA, 32 nt, Homo Sapiens
ccuagagagagaaaaaaugcuuuucuuuguga

SEQ ID NO: 165936 - RNA, 32 nt, Homo Sapiens
ugauauacaaguuuauacuaaaauuucaacug

SEQ ID NO: 165937 - RNA, 32 nt, Homo Sapiens
ggcucggagcccacguccuccucggugacaca

SEQ ID NO: 165938 - RNA, 32 nt, Homo Sapiens
ggggcccuuucuuccccauucuucccagcagc

SEQ ID NO: 165939 - RNA, 32 nt, Homo Sapiens
acacuccugaggagaaagaaagagagggaggg

SEQ ID NO: 165940 - RNA, 32 nt, Homo Sapiens
ugggaagcugggugggggcugguagguggggc

SEQ ID NO: 165941 - RNA, 32 nt, Homo Sapiens
aaaauuucaaagcuaauuggaagccgcacugu

SEQ ID NO: 165942 - RNA, 32 nt, Homo Sapiens
ggcgucgaggugugggggcacuuggacagaac

SEQ ID NO: 165943 - RNA, 32 nt, Homo Sapiens
cgccgccaccgccgcgccucggccucggugca

SEQ ID NO: 165944 - RNA, 32 nt, Homo Sapiens
ccaccucuuuggauguuuucaccaauuauccu

SEQ ID NO: 165945 - RNA, 32 nt, Homo Sapiens
gaauaggaauuccaccuucagcauuuacuguu

SEQ ID NO: 165946 - RNA, 32 nt, Homo Sapiens
uucuguaaguguucgggggacaucagcaugug

SEQ ID NO: 165947 - RNA, 32 nt, Homo Sapiens
ucacugggccaugggaucuacaucuccuugca

SEQ ID NO: 165948 - RNA, 32 nt, Homo Sapiens
gagaugcuccaugccuuuccccgggcagccuu

SEQ ID NO: 165949 - RNA, 32 nt, Homo Sapiens
ucacuuuucaaucccaauucugucccaaucuu

SEQ ID NO: 165950 - RNA, 32 nt, Homo Sapiens
acacacacucccugccacuguucugcgcuuua

SEQ ID NO: 165951 - RNA, 32 nt, Homo Sapiens
uuccucuggcuaacguauggccccauagguca

SEQ ID NO: 165952 - RNA, 32 nt, Homo Sapiens
gugaguuggggguggggcaccagcacgccaag

SEQ ID NO: 165953 - RNA, 32 nt, Homo Sapiens
aaauaugauuauuucccuuucuucccauugac

SEQ ID NO: 165954 - RNA, 32 nt, Homo Sapiens
auacauauuugacuuugaguuauauaugguuu

SEQ ID NO: 165955 - RNA, 32 nt, Homo Sapiens
cagagaagccgcggcccauggagcccgccggc

SEQ ID NO: 165956 - RNA, 32 nt, Homo Sapiens
aaccugcggaaucggccgagauggggucuggc

SEQ ID NO: 165957 - RNA, 32 nt, Homo Sapiens
cccagggugugugggauagcgauugcauuuuc

SEQ ID NO: 165958 - RNA, 32 nt, Homo Sapiens
gaucaaaacaagacaguuaucuguggaagaca

SEQ ID NO: 165959 - RNA, 32 nt, Homo Sapiens
gcccaggacuccccgggccucgggcccggccu

SEQ ID NO: 165960 - RNA, 32 nt, Homo Sapiens
accuugaggcggauggcugugacccuacuucc

SEQ ID NO: 165961 - RNA, 32 nt, Homo Sapiens
agaacacuaacacuaaauaguuuuuagaaagu

SEQ ID NO: 165962 - RNA, 32 nt, Homo Sapiens
ggcagaacugcagcgccuccuuuuagugacuc

SEQ ID NO: 165963 - RNA, 32 nt, Homo Sapiens
aacagagauggugaaugcugcagcugccggga

SEQ ID NO: 165964 - RNA, 32 nt, Homo Sapiens
gcaaagguggcaggggggaggggggugaccgu

SEQ ID NO: 165965 - RNA, 32 nt, Homo Sapiens
cucuccucaguguugaugucaacaugcaauga

SEQ ID NO: 165966 - RNA, 32 nt, Homo Sapiens
gacagaaauugcuggauagcgaagugccacug

SEQ ID NO: 165967 - RNA, 32 nt, Homo Sapiens
gcuguuagagaucugucagagaaggcauuucc

SEQ ID NO: 165968 - RNA, 32 nt, Homo Sapiens
auccaacugugagaaucaauggccuaaaugcu

SEQ ID NO: 165969 - RNA, 32 nt, Homo Sapiens
aaauucugugccugggguacucucgcucugua

SEQ ID NO: 165970 - RNA, 32 nt, Homo Sapiens
uuuguaauguuaaaguuuuuguuuacauugag

SEQ ID NO: 165971 - RNA, 32 nt, Homo Sapiens
uaccucagaaauauuucuuggaccuuccacuu

SEQ ID NO: 165972 - RNA, 32 nt, Homo Sapiens
uuguugcucccucaucuucgagacccgcacgc

SEQ ID NO: 165973 - RNA, 32 nt, Homo Sapiens
gccgggagucgcgggugcgcgcgggccgugag

SEQ ID NO: 165974 - RNA, 32 nt, Homo Sapiens
auaguaauguuuaaauuaugguaaauguaauu

SEQ ID NO: 165975 - RNA, 32 nt, Homo Sapiens
aggcuggacuuccggaagagcugggaaggggg

SEQ ID NO: 165976 - RNA, 32 nt, Homo Sapiens
ugaggugagagaaaacuaauguuuacuuucug

SEQ ID NO: 165977 - RNA, 32 nt, Homo Sapiens
ugcuuccucccucucuccucccucccagacac

SEQ ID NO: 165978 - RNA, 32 nt, Homo Sapiens
cuuuguguaaguggaaauacaugguuugucgu

SEQ ID NO: 165979 - RNA, 32 nt, Homo Sapiens
cacaaaaguauuuuuugaguacuguacugacu

SEQ ID NO: 165980 - RNA, 32 nt, Homo Sapiens
caagguauuauuaguauucucauuuuauaaua

SEQ ID NO: 165981 - RNA, 32 nt, Homo Sapiens
uugaaauagaccgugcaguauuccuagcacuc

SEQ ID NO: 165982 - RNA, 32 nt, Homo Sapiens
agaaggugaaaagcagcuaacaaaaucucuaa

SEQ ID NO: 165983 - RNA, 32 nt, Homo Sapiens
cgauacaaaugccaaugaccagaugugacuua

SEQ ID NO: 165984 - RNA, 32 nt, Homo Sapiens
caagcucaaggauggaagugcaguuagggcug

SEQ ID NO: 165985 - RNA, 32 nt, Homo Sapiens
caaaguacuguaagaauaauuuauaguaauga

SEQ ID NO: 165986 - RNA, 32 nt, Homo Sapiens
uacuacagcaaccuggaagccagugaaaaaug

SEQ ID NO: 165987 - RNA, 32 nt, Homo Sapiens
ugcagugcaugaugauuauaaguccaccuguu

SEQ ID NO: 165988 - RNA, 30 nt, Homo Sapiens
cgggaggccugggagccgccggcagagguc

SEQ ID NO: 165989 - RNA, 32 nt, Homo Sapiens
cccaucuggcacggccuccgcggcgcgcagcu

SEQ ID NO: 165990 - RNA, 32 nt, Homo Sapiens
cagauagagaagaacuggggggugugggccca

SEQ ID NO: 165991 - RNA, 32 nt, Homo Sapiens
cuuugcuguauaucaaacuaauuuugacaagu

SEQ ID NO: 165992 - RNA, 32 nt, Homo Sapiens
ucuuggggcugcagcccucgcggccugccgag

SEQ ID NO: 165993 - RNA, 32 nt, Homo Sapiens
caggacacagaaagauagcagggggcaggggg

SEQ ID NO: 165994 - RNA, 31 nt, Homo Sapiens
cucgcgggcgacugccugccaggcagacgcu

SEQ ID NO: 165995 - RNA, 32 nt, Homo Sapiens
cagaugauaggggaacuccucaacacucagug

SEQ ID NO: 165996 - RNA, 32 nt, Homo Sapiens
acucacccaacauucccauccuccccugauag

SEQ ID NO: 165997 - RNA, 32 nt, Homo Sapiens
ccaucccacaguguugacaagaauugcaugcu

SEQ ID NO: 165998 - RNA, 32 nt, Homo Sapiens
ggccccaccgacauggcggcgguguugcagca

SEQ ID NO: 165999 - RNA, 30 nt, Homo Sapiens
uguccugucugugaaugaagaagaauuacc

SEQ ID NO: 166000 - RNA, 32 nt, Homo Sapiens
ccaaggccgacgccagcacgccgucauggccc

SEQ ID NO: 166001 - RNA, 32 nt, Homo Sapiens
auucccacccucagccgggcucaggcaauagu

SEQ ID NO: 166002 - RNA, 32 nt, Homo Sapiens
agcgaggggggccgcauccuccuguccuugug

SEQ ID NO: 166003 - RNA, 32 nt, Homo Sapiens
ccaauacguggcaugccuggaugucccugccc

SEQ ID NO: 166004 - RNA, 32 nt, Homo Sapiens
aggagguagcagcccuggguucuccucaguga

SEQ ID NO: 166005 - RNA, 32 nt, Homo Sapiens
aaccuggcgucuauaccaacaucugccgcuac

SEQ ID NO: 166006 - RNA, 32 nt, Homo Sapiens
ugacaucaaggaugaguucuguguucccccug

SEQ ID NO: 166007 - RNA, 32 nt, Homo Sapiens
gcccaggacucucucugccccuccucagcaaa

SEQ ID NO: 166008 - RNA, 32 nt, Homo Sapiens
guaaacaauauuaaaugauugaugaggagacu

SEQ ID NO: 166009 - RNA, 32 nt, Homo Sapiens
ccuuuggaaggggcagcuguggccacccaccu

SEQ ID NO: 166010 - RNA, 32 nt, Homo Sapiens
aaugugcccucccucucccccucauaacccca

SEQ ID NO: 166011 - RNA, 32 nt, Homo Sapiens
ccaaggucacacaacuagcaagcaguuaagcu

SEQ ID NO: 166012 - RNA, 32 nt, Homo Sapiens
uauuuaaaaaagaugcucagauauuauguguc

SEQ ID NO: 166013 - RNA, 32 nt, Homo Sapiens
cugcggcggcgggcaggaggcugcugagggau

SEQ ID NO: 166014 - RNA, 32 nt, Homo Sapiens
ucucuggguuggagcagucucuccggaagggg

SEQ ID NO: 166015 - RNA, 32 nt, Homo Sapiens
ccaauaccugagcagccacaucaaaggaacuu

SEQ ID NO: 166016 - RNA, 32 nt, Homo Sapiens
ccuaggguauaaaacuauuuuucuuuuauuau

SEQ ID NO: 166017 - RNA, 32 nt, Homo Sapiens
cuggccuggggacagcugcugcucugaugacc

SEQ ID NO: 166018 - RNA, 32 nt, Homo Sapiens
auacucuucuucaucucuguuuugcucuuaaa

SEQ ID NO: 166019 - RNA, 32 nt, Homo Sapiens
ccaaggucaggaguuugagaccagccuggcca

SEQ ID NO: 166020 - RNA, 32 nt, Homo Sapiens
uauggcauuucuaauuguaaguagagacaaaa

SEQ ID NO: 166021 - RNA, 32 nt, Homo Sapiens
auuuaagugucugagaaacaaaucuuuguucu

SEQ ID NO: 166022 - RNA, 32 nt, Homo Sapiens
guuccuggguagccuuccuuagccuccauuca

SEQ ID NO: 166023 - RNA, 30 nt, Homo Sapiens
uggaaugugcuaaugaaagagauucuagac

SEQ ID NO: 166024 - RNA, 32 nt, Homo Sapiens
auugguucugccucuggcaugcugguagacua

SEQ ID NO: 166025 - RNA, 32 nt, Homo Sapiens
caguuuuuguggaacaccuccccguccagcuc

SEQ ID NO: 166026 - RNA, 32 nt, Homo Sapiens
uagugacuccugcacacccccauugcacaaau

SEQ ID NO: 166027 - RNA, 32 nt, Homo Sapiens
uuuuaauaaaauuuauauuuauuuaaugcacu

SEQ ID NO: 166028 - RNA, 32 nt, Homo Sapiens
aaaaucuuuuggccacaggaaauaucuuccuc

SEQ ID NO: 166029 - RNA, 32 nt, Homo Sapiens
auuuuggucauuauuucuaucuucccaauaac

SEQ ID NO: 166030 - RNA, 32 nt, Homo Sapiens
cagcagcucuucucaaggcuaguugugacauc

SEQ ID NO: 166031 - RNA, 32 nt, Homo Sapiens
caggagucgguguucugcaggcauggacugga

SEQ ID NO: 166032 - RNA, 32 nt, Homo Sapiens
cgccuucuccaaguaaauuuucccuuuuauuu

SEQ ID NO: 166033 - RNA, 32 nt, Homo Sapiens
cuauagcagcugacgauggccugucagagaaa

SEQ ID NO: 166034 - RNA, 32 nt, Homo Sapiens
cucugauauguuacaggagacaauggaagaau

SEQ ID NO: 166035 - RNA, 32 nt, Homo Sapiens
aaaaauagcuuucuucauuguauuagcccugg

SEQ ID NO: 166036 - RNA, 32 nt, Homo Sapiens
guguuaaagaacauuucuuuuccauucaauuu

SEQ ID NO: 166037 - RNA, 32 nt, Homo Sapiens
cucugaccuuggcccagaccuucagaggcuca

SEQ ID NO: 166038 - RNA, 30 nt, Homo Sapiens
ugggaccuggagcugccgccgucucuucaa

SEQ ID NO: 166039 - RNA, 32 nt, Homo Sapiens
acgcauuacaugcuucucgacggaguagggua

SEQ ID NO: 166040 - RNA, 32 nt, Homo Sapiens
uauaugaugcuguuuguaaagguauuaaugua

SEQ ID NO: 166041 - RNA, 28 nt, Homo Sapiens
ggcaaggaaggagccaggauggccuggg

SEQ ID NO: 166042 - RNA, 32 nt, Homo Sapiens
caaaaggauuggccuaucaagaaguucaaccu

SEQ ID NO: 166043 - RNA, 32 nt, Homo Sapiens
ucggguuggggauggguuuaggagcuccaggu

SEQ ID NO: 166044 - RNA, 32 nt, Homo Sapiens
guguuacuucuguguucucuucccagcacugg

SEQ ID NO: 166045 - RNA, 32 nt, Homo Sapiens
uguuggcauuuuuaugguuccuuuaaaugccc

SEQ ID NO: 166046 - RNA, 32 nt, Homo Sapiens
gcuccgggauucacgcagaggugaugcucaca

SEQ ID NO: 166047 - RNA, 32 nt, Homo Sapiens
uaaaucaauauuuggauguagacagcuuuuca

SEQ ID NO: 166048 - RNA, 32 nt, Homo Sapiens
ccugugacugcuggagauagaggucccagcac

SEQ ID NO: 166049 - RNA, 32 nt, Homo Sapiens
gcaacuucuuuuucuucagagaugauguuuga

SEQ ID NO: 166050 - RNA, 32 nt, Homo Sapiens
guccggucccugugguguugccaggcaagaga

SEQ ID NO: 166051 - RNA, 32 nt, Homo Sapiens
aaacagaacuguuuaguaucgguuggacugcu

SEQ ID NO: 166052 - RNA, 32 nt, Homo Sapiens
ggugaggauggaagacccccaaggcuggaugu

SEQ ID NO: 166053 - RNA, 32 nt, Homo Sapiens
gggcgcagggucugggacgcaguugggagugc

SEQ ID NO: 166054 - RNA, 32 nt, Homo Sapiens
uuuuggugcuaagggauacuuugucauuauga

SEQ ID NO: 166055 - RNA, 32 nt, Homo Sapiens
ugcuaauuuacuaugagacauuaaggauaaag

SEQ ID NO: 166056 - RNA, 32 nt, Homo Sapiens
agguggcuaggaauuaaugaaaaaauuuucaa

SEQ ID NO: 166057 - RNA, 32 nt, Homo Sapiens
uguuuccaaaucuauuuuaucugacgucauga

SEQ ID NO: 166058 - RNA, 32 nt, Homo Sapiens
uauaagaauaaaauauguaguugugucuuaau

SEQ ID NO: 166059 - RNA, 32 nt, Homo Sapiens
gugauuaauguuugagcuucaauauauuucau

SEQ ID NO: 166060 - RNA, 32 nt, Homo Sapiens
gcacgagcaggcaguucagauuaaagaagcua

SEQ ID NO: 166061 - RNA, 31 nt, Homo Sapiens
guagagagggcggguccccggccucgggagc

SEQ ID NO: 166062 - RNA, 32 nt, Homo Sapiens
cuucucguccagccccgcccacuuccagggug

SEQ ID NO: 166063 - RNA, 32 nt, Homo Sapiens
cacagcccauucuuuuuaauuuuuacagaaau

SEQ ID NO: 166064 - RNA, 32 nt, Homo Sapiens
ugggugagcucagccccuccccuccaacucuc

SEQ ID NO: 166065 - RNA, 32 nt, Homo Sapiens
uuuuuuaucuuguaaaaacacuuuuuugguuu

SEQ ID NO: 166066 - RNA, 32 nt, Homo Sapiens
cagcaaguuggaagaaggacugguagguuccc

SEQ ID NO: 166067 - RNA, 32 nt, Homo Sapiens
ggcccauccgcuagcuggcccgugugugccuu

SEQ ID NO: 166068 - RNA, 32 nt, Homo Sapiens
uacuggaaaauuauaaagugcuauagaggaaa

SEQ ID NO: 166069 - RNA, 32 nt, Homo Sapiens
uaaccucuuccucauucucuacaggcagauca

SEQ ID NO: 166070 - RNA, 32 nt, Homo Sapiens
aaccucuuuauagaaaaccugauaaauguagu

SEQ ID NO: 166071 - RNA, 32 nt, Homo Sapiens
cccucuggagggcaccgggaaaggcuggaagc

SEQ ID NO: 166072 - RNA, 31 nt, Homo Sapiens
ccaggagaguagcugggccaggcaaggggag

SEQ ID NO: 166073 - RNA, 32 nt, Homo Sapiens
gcugcaggagggccaggagggcagaugcucca

SEQ ID NO: 166074 - RNA, 32 nt, Homo Sapiens
gggcccacgcacccggcgcgagcuagaagccu

SEQ ID NO: 166075 - RNA, 32 nt, Homo Sapiens
ggggugggguggcccaggcagcagaagguucc

SEQ ID NO: 166076 - RNA, 32 nt, Homo Sapiens
cuggcaagaaggaagcaguucuccacguucuc

SEQ ID NO: 166077 - RNA, 32 nt, Homo Sapiens
cugauaaaauauauucuuaauaaaagucuuca

SEQ ID NO: 166078 - RNA, 32 nt, Homo Sapiens
uuacccaaugccuguacccccauuguaucuag

SEQ ID NO: 166079 - RNA, 32 nt, Homo Sapiens
cuaugaugcuucgggagcacaaaugccuguga

SEQ ID NO: 166080 - RNA, 32 nt, Homo Sapiens
ugcucucugcuguccuguuggugggcacgaca

SEQ ID NO: 166081 - RNA, 32 nt, Homo Sapiens
uugaggauugauauuucuucuuaaaaggauuc

SEQ ID NO: 166082 - RNA, 29 nt, Homo Sapiens
ggguugagauuuuuaagaggcaagagcug

SEQ ID NO: 166083 - RNA, 32 nt, Homo Sapiens
ucuucuguucuucuagcauuacucguuggugg

SEQ ID NO: 166084 - RNA, 32 nt, Homo Sapiens
aaccucacauauauuuuguauaauuauuugaa

SEQ ID NO: 166085 - RNA, 32 nt, Homo Sapiens
uugaugaucccacuuccuguuuccaucugcuu

SEQ ID NO: 166086 - RNA, 31 nt, Homo Sapiens
aaaggaggcgucuagguuccaagggcaaauc

SEQ ID NO: 166087 - RNA, 32 nt, Homo Sapiens
ugaagcaacacucuggauuuugaaagacaucu

SEQ ID NO: 166088 - RNA, 32 nt, Homo Sapiens
cagaggcugcugccagggcugcugccccgcuc

SEQ ID NO: 166089 - RNA, 31 nt, Homo Sapiens
ucccuugagccccagaggcagagguuguggu

SEQ ID NO: 166090 - RNA, 32 nt, Homo Sapiens
aaucagcacaaucccggccccgcccucgcggc

SEQ ID NO: 166091 - RNA, 32 nt, Homo Sapiens
cccacuugagcaggcacuuggcugggauaugg

SEQ ID NO: 166092 - RNA, 32 nt, Homo Sapiens
gacacccaaaaugcuuccugccgagguuguug

SEQ ID NO: 166093 - RNA, 32 nt, Homo Sapiens
aacagaguguucauaugcuguuagaauuuuuu

SEQ ID NO: 166094 - RNA, 32 nt, Homo Sapiens
uuaaaagaaaacacaccucggcgacaaugucu

SEQ ID NO: 166095 - RNA, 31 nt, Homo Sapiens
caguuauccaaauaaaagcaguucugaaacu

SEQ ID NO: 166096 - RNA, 32 nt, Homo Sapiens
gaccuaaagggagaaggcgcgaucuggggccc

SEQ ID NO: 166097 - RNA, 32 nt, Homo Sapiens
guguguaugaauuuauagggaguagaaccguc

SEQ ID NO: 166098 - RNA, 32 nt, Homo Sapiens
ggugcuaggagagggccugugcuccacacagc

SEQ ID NO: 166099 - RNA, 32 nt, Homo Sapiens
ggaaaaauguauaacaaguacuauuuacauau

SEQ ID NO: 166100 - RNA, 32 nt, Homo Sapiens
uguguuuuuuguuguucauuuguuucuuguca

SEQ ID NO: 166101 - RNA, 30 nt, Homo Sapiens
gaggccccaccagugccgccgcuuccgcca

SEQ ID NO: 166102 - RNA, 32 nt, Homo Sapiens
agcugucuauguauguuauagauauguagaua

SEQ ID NO: 166103 - RNA, 32 nt, Homo Sapiens
uuuucuucccccagcccugccugauguggcuc

SEQ ID NO: 166104 - RNA, 31 nt, Homo Sapiens
agcucgggggcggugccugccuugcagccuc

SEQ ID NO: 166105 - RNA, 32 nt, Homo Sapiens
ugacuguugauggccacagaugauggucuccu

SEQ ID NO: 166106 - RNA, 32 nt, Homo Sapiens
gucuuaagauagcaguuuacuuugaaaaagug

SEQ ID NO: 166107 - RNA, 31 nt, Homo Sapiens
ugccagccgggccccggcugcagaagugcug

SEQ ID NO: 166108 - RNA, 32 nt, Homo Sapiens
cgcuaggacuccuggggagcuggggggcgagg

SEQ ID NO: 166109 - RNA, 32 nt, Homo Sapiens
uuccuagagcuaugcacaccccugccccaguu

SEQ ID NO: 166110 - RNA, 32 nt, Homo Sapiens
agggccugcuguccuggcauccgcugggaaau

SEQ ID NO: 166111 - RNA, 32 nt, Homo Sapiens
guugggagucagauugguuucuuaaaaaaaaa

SEQ ID NO: 166112 - RNA, 32 nt, Homo Sapiens
uacaaauccagugcaaaauuaaaccauuaguu

SEQ ID NO: 166113 - RNA, 31 nt, Homo Sapiens
uaagcucucacucugugccaaacacaugcuu

SEQ ID NO: 166114 - RNA, 32 nt, Homo Sapiens
gaaggggacgaggaauccaggguguggcagaa

SEQ ID NO: 166115 - RNA, 32 nt, Homo Sapiens
uagaaguacagaguccuucccaggccauauuu

SEQ ID NO: 166116 - RNA, 32 nt, Homo Sapiens
ugaagagcggcugaggccguggggaucugguu

SEQ ID NO: 166117 - RNA, 32 nt, Homo Sapiens
cagaggcccugagcagcuuucagcacuggagg

SEQ ID NO: 166118 - RNA, 32 nt, Homo Sapiens
aucuaaacuggauucacagcucugucacuuaa

SEQ ID NO: 166119 - RNA, 32 nt, Homo Sapiens
uugccaggacgcccagcccaacucgggucugc

SEQ ID NO: 166120 - RNA, 32 nt, Homo Sapiens
aguauauguucccauuuaugugaaaugugcag

SEQ ID NO: 166121 - RNA, 32 nt, Homo Sapiens
gugaagugacaaguacaauuaaagguggcucu

SEQ ID NO: 166122 - RNA, 32 nt, Homo Sapiens
uuagcuuucccaugcauacuuaacugcacuug

SEQ ID NO: 166123 - RNA, 32 nt, Homo Sapiens
uuucaaauucccuauuccaaaaauagugccgg

SEQ ID NO: 166124 - RNA, 32 nt, Homo Sapiens
ccaccucccucccccggccccugguaggcaug

SEQ ID NO: 166125 - RNA, 32 nt, Homo Sapiens
aaggauucagaauuuugcagucacagaagagu

SEQ ID NO: 166126 - RNA, 32 nt, Homo Sapiens
agauuuggaagaaagaaaauaacagacugucu

SEQ ID NO: 166127 - RNA, 32 nt, Homo Sapiens
cacugagccugguggcagcgugcggagagaug

SEQ ID NO: 166128 - RNA, 26 nt, Homo Sapiens
aaaugucuugguaauugcuagauucu

SEQ ID NO: 166129 - RNA, 32 nt, Homo Sapiens
aagauuuuuuaaaauaucuuuuugccgauuuu

SEQ ID NO: 166130 - RNA, 32 nt, Homo Sapiens
cuccaggccgguccgcugccagauucgccaaa

SEQ ID NO: 166131 - RNA, 32 nt, Homo Sapiens
aacccacaagaagaggcgaccagguccugggu

SEQ ID NO: 166132 - RNA, 32 nt, Homo Sapiens
uagucgucagaucgcccguccugguaucacag

SEQ ID NO: 166133 - RNA, 32 nt, Homo Sapiens
aauuguuacagugaauaugucuuaauacaggc

SEQ ID NO: 166134 - RNA, 32 nt, Homo Sapiens
gagagggucugguccuggcccaggcucccccu

SEQ ID NO: 166135 - RNA, 32 nt, Homo Sapiens
gagugaguuuaaaauuauuuaauuuccuuaga

SEQ ID NO: 166136 - RNA, 32 nt, Homo Sapiens
auugauaaaaaauaaacuuauaauucagcaaa

SEQ ID NO: 166137 - RNA, 32 nt, Homo Sapiens
acuuaauguuuauacacagggauuguuuacua

SEQ ID NO: 166138 - RNA, 32 nt, Homo Sapiens
cggcggcagcggcugcagcaucauucgcgggc

SEQ ID NO: 166139 - RNA, 32 nt, Homo Sapiens
gugccagggccgcccgcguccucgccagccuc

SEQ ID NO: 166140 - RNA, 32 nt, Homo Sapiens
gggggauagggucaaggccucauccaagucug

SEQ ID NO: 166141 - RNA, 27 nt, Homo Sapiens
gccugguccuucuucaggcacugaccc

SEQ ID NO: 166142 - RNA, 32 nt, Homo Sapiens
caugccgccacuugugcugccgccaugucucu

SEQ ID NO: 166143 - RNA, 32 nt, Homo Sapiens
ccucucaggucaggcccuccccuccccucccc

SEQ ID NO: 166144 - RNA, 32 nt, Homo Sapiens
uucccaagaagagagaacuuuuucgauaaacu

SEQ ID NO: 166145 - RNA, 32 nt, Homo Sapiens
caucucaugacaacagaagggagguggccggg

SEQ ID NO: 166146 - RNA, 32 nt, Homo Sapiens
ggggcugcacgggcuguguccuggacagccag

SEQ ID NO: 166147 - RNA, 32 nt, Homo Sapiens
auguugucaacuaaagacaacaaacuaucaga

SEQ ID NO: 166148 - RNA, 31 nt, Homo Sapiens
gcggugcagcgcagucucaggccgcgggaca

SEQ ID NO: 166149 - RNA, 32 nt, Homo Sapiens
ggagcaagauggaagcacuuugaauuuucuuu

SEQ ID NO: 166150 - RNA, 31 nt, Homo Sapiens
acgcugccggguagacucuccacucccccug

SEQ ID NO: 166151 - RNA, 32 nt, Homo Sapiens
ggauugacagauaugacucuuuuacauuauac

SEQ ID NO: 166152 - RNA, 32 nt, Homo Sapiens
cacagcuagagcaccagagcccuuuugcuaua

SEQ ID NO: 166153 - RNA, 29 nt, Homo Sapiens
aguaaacagagucuauauuuucuauauaa

SEQ ID NO: 166154 - RNA, 32 nt, Homo Sapiens
gauuucuccccucuccugggccaggggagggg

SEQ ID NO: 166155 - RNA, 32 nt, Homo Sapiens
gccgcccccagcgucggagccauggcgggcgc

SEQ ID NO: 166156 - RNA, 32 nt, Homo Sapiens
aaguucccugucuccauucucuagcacgugaa

SEQ ID NO: 166157 - RNA, 30 nt, Homo Sapiens
gagcuguaucaccugcagauguggggcagg

SEQ ID NO: 166158 - RNA, 32 nt, Homo Sapiens
uugugaaaugcuucauguuuuacaaaccaaaa

SEQ ID NO: 166159 - RNA, 32 nt, Homo Sapiens
gcucagggaaaggcugcccaccacccacagcc

SEQ ID NO: 166160 - RNA, 32 nt, Homo Sapiens
agguuuuucuucuuauagcuuuauagaacuau

SEQ ID NO: 166161 - RNA, 32 nt, Homo Sapiens
gccccuucccccugccagcagcugcuccuuca

SEQ ID NO: 166162 - RNA, 32 nt, Homo Sapiens
auuauguguuuguaaauuauauguaggucucu

SEQ ID NO: 166163 - RNA, 32 nt, Homo Sapiens
ugauuccccccgcaucgccucccguggaagcc

SEQ ID NO: 166164 - RNA, 32 nt, Homo Sapiens
cagcugccucucuggggagaugcuggaggucu

SEQ ID NO: 166165 - RNA, 32 nt, Homo Sapiens
acacacacagaaaccacgagguaguuuaaauc

SEQ ID NO: 166166 - RNA, 32 nt, Homo Sapiens
gcgacagagugagacuccaucuuggggggaaa

SEQ ID NO: 166167 - RNA, 32 nt, Homo Sapiens
auagcaguagccagugaaguuauccauauugc

SEQ ID NO: 166168 - RNA, 32 nt, Homo Sapiens
gcgugugcacaagcacacacaugcaaggcaua

SEQ ID NO: 166169 - RNA, 32 nt, Homo Sapiens
ccucuuggaggccccuccugcuucguuggguu

SEQ ID NO: 166170 - RNA, 30 nt, Homo Sapiens
ucauaaagagaaaaugaugaguuuuuaugg

SEQ ID NO: 166171 - RNA, 32 nt, Homo Sapiens
gauccucucaggugcucuugaggacgcgagcg

SEQ ID NO: 166172 - RNA, 32 nt, Homo Sapiens
aauuugaauuguaaacuugucagugaauuuau

SEQ ID NO: 166173 - RNA, 32 nt, Homo Sapiens
acauguuaucccugucuuucugggguacguuu

SEQ ID NO: 166174 - RNA, 32 nt, Homo Sapiens
cucaacucugacagcacccagcccuuguggau

SEQ ID NO: 166175 - RNA, 32 nt, Homo Sapiens
auuuugguacugaaagcaauaguuccucauuc

SEQ ID NO: 166176 - RNA, 32 nt, Homo Sapiens
ugccuccgaccccccuccucagcccuccccca

SEQ ID NO: 166177 - RNA, 30 nt, Homo Sapiens
ugcuggcggcuaaugggcugacucugaaaa

SEQ ID NO: 166178 - RNA, 32 nt, Homo Sapiens
agauagggggacucaaggguaaguaaagugca

SEQ ID NO: 166179 - RNA, 32 nt, Homo Sapiens
ggcggggaaugggaauccuugcugcacuguug

SEQ ID NO: 166180 - RNA, 32 nt, Homo Sapiens
aagaaauaaagucuuggcacaucuuauuuaug

SEQ ID NO: 166181 - RNA, 32 nt, Homo Sapiens
ggcggcugcgacggcgagacugagauccuggu

SEQ ID NO: 166182 - RNA, 32 nt, Homo Sapiens
aagaccgugggcucaagggugcugggggcagc

SEQ ID NO: 166183 - RNA, 32 nt, Homo Sapiens
gucgugaccccauggucacccugaagcccuua

SEQ ID NO: 166184 - RNA, 32 nt, Homo Sapiens
guugggcggggguggggccgggccccccuacg

SEQ ID NO: 166185 - RNA, 32 nt, Homo Sapiens
uguagaaaacgaacuguaaaagaccaugcaag

SEQ ID NO: 166186 - RNA, 32 nt, Homo Sapiens
gaacaugaauauaaguuuugucuugccuuggu

SEQ ID NO: 166187 - RNA, 32 nt, Homo Sapiens
ccugauaagggagagggaaauacaaggagggc

SEQ ID NO: 166188 - RNA, 32 nt, Homo Sapiens
gucugaacaucccaccuuuauccuguguucug

SEQ ID NO: 166189 - RNA, 32 nt, Homo Sapiens
uuggugauauuguauucuagaagauauaaaug

SEQ ID NO: 166190 - RNA, 32 nt, Homo Sapiens
ccuuaaaaaugaauugaccuggccgggcgcgg

SEQ ID NO: 166191 - RNA, 32 nt, Homo Sapiens
cugcggcagggcagggcggggagcuccgcgca

SEQ ID NO: 166192 - RNA, 32 nt, Homo Sapiens
auaagcucccacuuauaguagccgaggcucug

SEQ ID NO: 166193 - RNA, 32 nt, Homo Sapiens
cugccucggcuuccucaucugcagcuacgccu

SEQ ID NO: 166194 - RNA, 32 nt, Homo Sapiens
ccuccuaggacaccccuuuccccuuggggaaa

SEQ ID NO: 166195 - RNA, 32 nt, Homo Sapiens
gcucauuuuuaaaccagcuguuauuucuaaag

SEQ ID NO: 166196 - RNA, 32 nt, Homo Sapiens
ggccugggcucgccgcucauggggcucaccuu

SEQ ID NO: 166197 - RNA, 32 nt, Homo Sapiens
cauugaugaugaugacaaaacugauaaaaccc

SEQ ID NO: 166198 - RNA, 32 nt, Homo Sapiens
uugugucugaccugacauacccugcagcucuc

SEQ ID NO: 166199 - RNA, 32 nt, Homo Sapiens
gucagcuuuaagaaaaaguagagaucacuucu

SEQ ID NO: 166200 - RNA, 32 nt, Homo Sapiens
ugacacgcgggccuuuggugggugagcgggac

SEQ ID NO: 166201 - RNA, 32 nt, Homo Sapiens
aaagaaugcaauugcgugaaaaucuucauuag

SEQ ID NO: 166202 - RNA, 32 nt, Homo Sapiens
gcacaacaguugaucuuuuggcuaugacaauu

SEQ ID NO: 166203 - RNA, 32 nt, Homo Sapiens
aaaaugaggaagacaggagaaacuacuuaagg

SEQ ID NO: 166204 - RNA, 32 nt, Homo Sapiens
ccaggagguuugggguuaagagauacucaaaa

SEQ ID NO: 166205 - RNA, 28 nt, Homo Sapiens
aggguauugguacgucgacgcggccgcg

SEQ ID NO: 166206 - RNA, 32 nt, Homo Sapiens
agugcaaucuacaauuauuuuaaagugaauuu

SEQ ID NO: 166207 - RNA, 32 nt, Homo Sapiens
ggauucaagcuaaaauacuaagaccagcauuc

SEQ ID NO: 166208 - RNA, 32 nt, Homo Sapiens
cuccccuuuucuauguugcuauuguaaggucu

SEQ ID NO: 166209 - RNA, 32 nt, Homo Sapiens
cacgugguugucccgggaaaagcugccccaca

SEQ ID NO: 166210 - RNA, 32 nt, Homo Sapiens
cuguuuucaaccaaagaagucacguaccacug

SEQ ID NO: 166211 - RNA, 32 nt, Homo Sapiens
gucuacuucucgccccccgaaggguuaguguc

SEQ ID NO: 166212 - RNA, 32 nt, Homo Sapiens
ccuccacuggggauguguccuguucguuugag

SEQ ID NO: 166213 - RNA, 32 nt, Homo Sapiens
cacccuggccgcgggggcggcgcgcucgaucu

SEQ ID NO: 166214 - RNA, 32 nt, Homo Sapiens
ccagccaccccucccgcucgugcacaggcacg

SEQ ID NO: 166215 - RNA, 32 nt, Homo Sapiens
gauaguguggaagcaggagacacaacaccucc

SEQ ID NO: 166216 - RNA, 32 nt, Homo Sapiens
gcuguguucccugagaacacaaacauuuggga

SEQ ID NO: 166217 - RNA, 32 nt, Homo Sapiens
ccccaugacaaccccacuguacagcagaucgu

SEQ ID NO: 166218 - RNA, 32 nt, Homo Sapiens
gaucuguucuuucuuggaacaccacccaagaa

SEQ ID NO: 166219 - RNA, 32 nt, Homo Sapiens
uaucaucccggcaggcgauaaacuacauucag

SEQ ID NO: 166220 - RNA, 32 nt, Homo Sapiens
cuugcuagucagccccgaacaugggcuggcgc

SEQ ID NO: 166221 - RNA, 32 nt, Homo Sapiens
aacaaacaggccucucaguuucccccaguuua

SEQ ID NO: 166222 - RNA, 32 nt, Homo Sapiens
cagugauuugaaauacaauaaugaaggcaaug

SEQ ID NO: 166223 - RNA, 32 nt, Homo Sapiens
uuauuauaaacuaauauaaaaugugcucuacc

SEQ ID NO: 166224 - RNA, 32 nt, Homo Sapiens
agcuuuggaccugaccggguguguguaaaacc

SEQ ID NO: 166225 - RNA, 32 nt, Homo Sapiens
gagcggggggccugggccucugcccuuaggag

SEQ ID NO: 166226 - RNA, 32 nt, Homo Sapiens
guugcuugugcuuuauuuuucuuagucauuug

SEQ ID NO: 166227 - RNA, 28 nt, Homo Sapiens
uaaagugaaaguuaacauuuccaaucua

SEQ ID NO: 166228 - RNA, 29 nt, Homo Sapiens
ugaugagucaacauucggacaagauaauu

SEQ ID NO: 166229 - RNA, 32 nt, Homo Sapiens
ccccugucauccaccaugugcaguagaggugc

SEQ ID NO: 166230 - RNA, 30 nt, Homo Sapiens
ccaggcgcacaggggccgccgguaacaggg

SEQ ID NO: 166231 - RNA, 32 nt, Homo Sapiens
guaaggguucugggugcacgcugacccugcgc

SEQ ID NO: 166232 - RNA, 32 nt, Homo Sapiens
uugcuggauuuagggagggcauuuugcuacca

SEQ ID NO: 166233 - RNA, 32 nt, Homo Sapiens
agagcugaggggcgggggcgcugcggcacagc

SEQ ID NO: 166234 - RNA, 32 nt, Homo Sapiens
auuuuugcauguaucuguagcuccaucuuaau

SEQ ID NO: 166235 - RNA, 32 nt, Homo Sapiens
ucgcugugaacaggacuggacgguugcgcaca

SEQ ID NO: 166236 - RNA, 32 nt, Homo Sapiens
auacagcggcccuaccguggcuccuggcaagg

SEQ ID NO: 166237 - RNA, 32 nt, Homo Sapiens
cccuuuuccggggaagaccccacgauuggccu

SEQ ID NO: 166238 - RNA, 32 nt, Homo Sapiens
auuuucuauucaauugagaagaacccagcaaa

SEQ ID NO: 166239 - RNA, 32 nt, Homo Sapiens
ccucuuggaagacuugagggcguggccuguag

SEQ ID NO: 166240 - RNA, 32 nt, Homo Sapiens
gagugaggcaacacugaugccagcaugggucu

SEQ ID NO: 166241 - RNA, 32 nt, Homo Sapiens
gccagcaaucccaagggacuagagggcugcaa

SEQ ID NO: 166242 - RNA, 32 nt, Homo Sapiens
ucgacagcuucccggcggcugcgcgauggaca

SEQ ID NO: 166243 - RNA, 32 nt, Homo Sapiens
cuuuuuuaaauuuaacuuucugauggacccug

SEQ ID NO: 166244 - RNA, 32 nt, Homo Sapiens
ucuccuauuagccauaugauaauugggcuaug

SEQ ID NO: 166245 - RNA, 32 nt, Homo Sapiens
ugggguaggggaggguggcagguauaagacuu

SEQ ID NO: 166246 - RNA, 32 nt, Homo Sapiens
ggagguagaggagcuauguggagcaaaggccg

SEQ ID NO: 166247 - RNA, 32 nt, Homo Sapiens
aaagugucaauuuuuaaaguacucauugcuug

SEQ ID NO: 166248 - RNA, 32 nt, Homo Sapiens
auaugaggacaaagugggccacguuagcaucu

SEQ ID NO: 166249 - RNA, 32 nt, Homo Sapiens
cagccauuuggaagauucuucucugcgcauga

SEQ ID NO: 166250 - RNA, 32 nt, Homo Sapiens
uuucugugcccugcugacgugacugacccgag

SEQ ID NO: 166251 - RNA, 32 nt, Homo Sapiens
agccugggaccgaggagcccgugugauucccg

SEQ ID NO: 166252 - RNA, 32 nt, Homo Sapiens
cccccucccgaggccaucagcgggucacccgc

SEQ ID NO: 166253 - RNA, 32 nt, Homo Sapiens
ccuguacauaaaaaaaacuuugaaagguaaua

SEQ ID NO: 166254 - RNA, 32 nt, Homo Sapiens
agaccugcagaaccagcguguguggggugcag

SEQ ID NO: 166255 - RNA, 32 nt, Homo Sapiens
ggcuccccggcggcuccuccgcggcggugacg

SEQ ID NO: 166256 - RNA, 32 nt, Homo Sapiens
aauaaauguacaauagcaauaaauguaaagau

SEQ ID NO: 166257 - RNA, 32 nt, Homo Sapiens
cucugaaaugggacccugugucugucaccagc

SEQ ID NO: 166258 - RNA, 32 nt, Homo Sapiens
caggugggagaaugugaaggaugguuuggaag

SEQ ID NO: 166259 - RNA, 32 nt, Homo Sapiens
uccucagcugaaaaaggaaguugguuaugcca

SEQ ID NO: 166260 - RNA, 29 nt, Homo Sapiens
aggcagcggggacagggcgaggugccacc

SEQ ID NO: 166261 - RNA, 32 nt, Homo Sapiens
caccccccauccccugcgcauccuugucucau

SEQ ID NO: 166262 - RNA, 32 nt, Homo Sapiens
ggccccuuuccuccuccuugaaaauacaucac

SEQ ID NO: 166263 - RNA, 32 nt, Homo Sapiens
ucauugaaaaggaaacguuugaugucuguguc

SEQ ID NO: 166264 - RNA, 32 nt, Homo Sapiens
auccugcuagacgcgccgcgcaccgacggagg

SEQ ID NO: 166265 - RNA, 32 nt, Homo Sapiens
guuccccaagauacgcugaagugugggaaaug

SEQ ID NO: 166266 - RNA, 32 nt, Homo Sapiens
ggcugggcgcgguggcucgggccuguaauccc

SEQ ID NO: 166267 - RNA, 32 nt, Homo Sapiens
ucaucucucaaguauauagacacuacuucaug

SEQ ID NO: 166268 - RNA, 32 nt, Homo Sapiens
uugaaaucgggcuucacgcgucuugccuuguc

SEQ ID NO: 166269 - RNA, 32 nt, Homo Sapiens
gguaggcaacagggaggggauuuuaaucugcu

SEQ ID NO: 166270 - RNA, 32 nt, Homo Sapiens
uaggacuugcugcaacccagcugcuggacuga

SEQ ID NO: 166271 - RNA, 32 nt, Homo Sapiens
ucuauaggaaauguguugacaauauucagaag

SEQ ID NO: 166272 - RNA, 32 nt, Homo Sapiens
auuauuuuuuaaauacauugucauucugaaca

SEQ ID NO: 166273 - RNA, 32 nt, Homo Sapiens
ugcucagccgcccaguccugccugcaagccca

SEQ ID NO: 166274 - RNA, 32 nt, Homo Sapiens
gaaucaaaaaauaccccuaguaaugcuuuaua

SEQ ID NO: 166275 - RNA, 32 nt, Homo Sapiens
auaggagacacacgcgcacacacacacacaca

SEQ ID NO: 166276 - RNA, 32 nt, Homo Sapiens
gaaaacauguuuauuauuuucauuuuuguaaa

SEQ ID NO: 166277 - RNA, 32 nt, Homo Sapiens
aucgagcugucagucuugguagacuuacuucu

SEQ ID NO: 166278 - RNA, 28 nt, Homo Sapiens
ugacuggcggggaccaggaugcuggagg

SEQ ID NO: 166279 - RNA, 32 nt, Homo Sapiens
ggucuuccccauacccucuggguguugagagg

SEQ ID NO: 166280 - RNA, 32 nt, Homo Sapiens
acaauagugauuuuuaccaucuggauacagcc

SEQ ID NO: 166281 - RNA, 32 nt, Homo Sapiens
ucuucuguucuuccuaccuugugcuugucuga

SEQ ID NO: 166282 - RNA, 32 nt, Homo Sapiens
uccauuagacauuuggcuacaucuggcuggag

SEQ ID NO: 166283 - RNA, 32 nt, Homo Sapiens
ggugggcuagauaggauauacuguaugccggc

SEQ ID NO: 166284 - RNA, 32 nt, Homo Sapiens
ucucccagcgggcgccgcggcgcggccacgcc

SEQ ID NO: 166285 - RNA, 32 nt, Homo Sapiens
agcaaaugaaguuuaggaaaaauccagcuucg

SEQ ID NO: 166286 - RNA, 32 nt, Homo Sapiens
gcggagccuggcgggaggcagcgccgcggagc

SEQ ID NO: 166287 - RNA, 32 nt, Homo Sapiens
aaguaacaaaaauaaaaacucuuauaaauuuc

SEQ ID NO: 166288 - RNA, 32 nt, Homo Sapiens
uggaaguauccauacauuuuuaaaaagcaaca

SEQ ID NO: 166289 - RNA, 32 nt, Homo Sapiens
uuguuugcuucuucccuacggaugacuucuaa

SEQ ID NO: 166290 - RNA, 29 nt, Homo Sapiens
uccaagaugaagauguggucccugcccuu

SEQ ID NO: 166291 - RNA, 32 nt, Homo Sapiens
cuuauuuagcuugagaucuuugcagcuugguu

SEQ ID NO: 166292 - RNA, 32 nt, Homo Sapiens
ucucccaaugugauuccacgggcucacgggca

SEQ ID NO: 166293 - RNA, 32 nt, Homo Sapiens
uaaccagauccaggcagccuucugggacccac

SEQ ID NO: 166294 - RNA, 32 nt, Homo Sapiens
augguuuuuuggcuaacagccacagagggcaa

SEQ ID NO: 166295 - RNA, 32 nt, Homo Sapiens
agagaaucaacagaugauaguccaauuuuuac

SEQ ID NO: 166296 - RNA, 32 nt, Homo Sapiens
uggggaaacaacauuuauauguagccuuuacu

SEQ ID NO: 166297 - RNA, 32 nt, Homo Sapiens
ucauucaguuuugggaggaaaagggacugugc

SEQ ID NO: 166298 - RNA, 32 nt, Homo Sapiens
uauuuuagggguuggaggugggacaagcaggc

SEQ ID NO: 166299 - RNA, 32 nt, Homo Sapiens
gguugcaucagccuccucugccugcagcuccc

SEQ ID NO: 166300 - RNA, 32 nt, Homo Sapiens
auauauauuaguaauuuauauagaugucagca

SEQ ID NO: 166301 - RNA, 32 nt, Homo Sapiens
gacagacaguaaacagaggagcacuaaccaca

SEQ ID NO: 166302 - RNA, 32 nt, Homo Sapiens
gccacacacacacacacacacacacacacaca

SEQ ID NO: 166303 - RNA, 30 nt, Homo Sapiens
ugagguuaucaccaggguaggacagggugc

SEQ ID NO: 166304 - RNA, 32 nt, Homo Sapiens
ugacucuuuguacagaccugcuugcagacuca

SEQ ID NO: 166305 - RNA, 32 nt, Homo Sapiens
gaagaauggaauacagaaaaagggcaugaaag

SEQ ID NO: 166306 - RNA, 32 nt, Homo Sapiens
gguggaauauuagagggaaggaaacugacaac

SEQ ID NO: 166307 - RNA, 32 nt, Homo Sapiens
gccuccucgggcuccacgcgucuugccccgca

SEQ ID NO: 166308 - RNA, 32 nt, Homo Sapiens
cguuucccagucuuuccucgucucucagaaaa

SEQ ID NO: 166309 - RNA, 32 nt, Homo Sapiens
cuguuuuauaucucuuuuuuauaucucuuugg

SEQ ID NO: 166310 - RNA, 32 nt, Homo Sapiens
ccacucccuuggguauacaauuugcuguguag

SEQ ID NO: 166311 - RNA, 32 nt, Homo Sapiens
ucacacagcuggaagccggcguccugcucaca

SEQ ID NO: 166312 - RNA, 32 nt, Homo Sapiens
uccggccgcugcgccgccaggggugagaggga

SEQ ID NO: 166313 - RNA, 32 nt, Homo Sapiens
auuauuccccgugcugcagccauccauccccu

SEQ ID NO: 166314 - RNA, 32 nt, Homo Sapiens
gaccugguauauugaacaaacauagaucucag

SEQ ID NO: 166315 - RNA, 32 nt, Homo Sapiens
agacaaaacucaauaaaaauguguguaaucca

SEQ ID NO: 166316 - RNA, 32 nt, Homo Sapiens
agggaaggggagagggaaacgugcccucuguu

SEQ ID NO: 166317 - RNA, 32 nt, Homo Sapiens
aauuaaaguauuuuaauaugguuuucagugcu

SEQ ID NO: 166318 - RNA, 31 nt, Homo Sapiens
ucagagccuucuccccuucagaauucccgcc

SEQ ID NO: 166319 - RNA, 32 nt, Homo Sapiens
ccccucaaggaccauggccugagccuggugga

SEQ ID NO: 166320 - RNA, 32 nt, Homo Sapiens
cugagaggccaacucguggaaccauaacuggg

SEQ ID NO: 166321 - RNA, 32 nt, Homo Sapiens
ggccaaaugucugacccgaaagagaauguauu

SEQ ID NO: 166322 - RNA, 32 nt, Homo Sapiens
guggcucacccagggaucaaggcgcugcuggg

SEQ ID NO: 166323 - RNA, 32 nt, Homo Sapiens
auuuggaggucacacgaggccuggcugguggg

SEQ ID NO: 166324 - RNA, 32 nt, Homo Sapiens
gggaggcugaggugggcggaucaugagguuag

SEQ ID NO: 166325 - RNA, 32 nt, Homo Sapiens
aaauaaaaacaauggaaaguaaauauaaugua

SEQ ID NO: 166326 - RNA, 32 nt, Homo Sapiens
guauucuagaaauaguuaugucuuaggaaauu

SEQ ID NO: 166327 - RNA, 32 nt, Homo Sapiens
uuucaacuccgucuuuagggacagacaaauga

SEQ ID NO: 166328 - RNA, 28 nt, Homo Sapiens
ugacuguuggggaccaggaugcuggcag

SEQ ID NO: 166329 - RNA, 32 nt, Homo Sapiens
cuuguuggacauuuuuccaauaaagguucuug

SEQ ID NO: 166330 - RNA, 32 nt, Homo Sapiens
cuaccaacccaccuuugagauucauauauagc

SEQ ID NO: 166331 - RNA, 32 nt, Homo Sapiens
gccuaguugaaguuuaaaccccagcaaaacau

SEQ ID NO: 166332 - RNA, 32 nt, Homo Sapiens
gccuccccauccgccacucugcucuuaaccuc

SEQ ID NO: 166333 - RNA, 31 nt, Homo Sapiens
ggcucugcagggcccgcaggaagcaggaaug

SEQ ID NO: 166334 - RNA, 30 nt, Homo Sapiens
ggaagggccguucugggcucaccuggccug

SEQ ID NO: 166335 - RNA, 32 nt, Homo Sapiens
auuuuucuaaaaugacuauauaggacuuaaga

SEQ ID NO: 166336 - RNA, 32 nt, Homo Sapiens
acuacuacuguggucagcuaauuaaaguuaca

SEQ ID NO: 166337 - RNA, 32 nt, Homo Sapiens
gcggggcgguccgcacgcaccucgguaacauc

SEQ ID NO: 166338 - RNA, 32 nt, Homo Sapiens
cagcaccuauggacacuugugucgcaauggag

SEQ ID NO: 166339 - RNA, 32 nt, Homo Sapiens
gacuucacagagcuccucccaccccuagacca

SEQ ID NO: 166340 - RNA, 32 nt, Homo Sapiens
uauagagccugcagucucaacucauugugauc

SEQ ID NO: 166341 - RNA, 32 nt, Homo Sapiens
ugaaauuaaaauuguauuacuucuguuuugau

SEQ ID NO: 166342 - RNA, 32 nt, Homo Sapiens
gcucccugccuucuccuucuccugucgaaguc

SEQ ID NO: 166343 - RNA, 32 nt, Homo Sapiens
cccugucucccgcuccgcagccccgggcacgg

SEQ ID NO: 166344 - RNA, 32 nt, Homo Sapiens
aaccccaucucuacuaaaaauagaaaaauuag

SEQ ID NO: 166345 - RNA, 32 nt, Homo Sapiens
uccucccaugucagccucccaaguagcuggga

SEQ ID NO: 166346 - RNA, 32 nt, Homo Sapiens
caccaccguccucaucaugucgucuucgucau

SEQ ID NO: 166347 - RNA, 32 nt, Homo Sapiens
acgagggcgcuugaguuggucgggggcagcgg

SEQ ID NO: 166348 - RNA, 32 nt, Homo Sapiens
uccuuuggcaaaauucuuucuggugucuccua

SEQ ID NO: 166349 - RNA, 32 nt, Homo Sapiens
aguaaugaauccaacugcuuaaaguugguauu

SEQ ID NO: 166350 - RNA, 32 nt, Homo Sapiens
cgugggucguggcagcagcugcagcuguuuca

SEQ ID NO: 166351 - RNA, 32 nt, Homo Sapiens
gccgagauugugcauugcacuccagccugagc

SEQ ID NO: 166352 - RNA, 32 nt, Homo Sapiens
ggcuaagguguaacacuuaaagcaauuuucuc

SEQ ID NO: 166353 - RNA, 32 nt, Homo Sapiens
aggagccugcccugugcgccccggcccccauc

SEQ ID NO: 166354 - RNA, 32 nt, Homo Sapiens
  misc_feature (29)..(29): n is a, c, g, or u
ucaauuauuuuauauccaaccccagcaunuuu

SEQ ID NO: 166355 - RNA, 32 nt, Homo Sapiens
guugguccccucagcacccccagcaucccgga

SEQ ID NO: 166356 - RNA, 32 nt, Homo Sapiens
cagcacgcuguaaaauuauuacuguauugugu

SEQ ID NO: 166357 - RNA, 32 nt, Homo Sapiens
ugggauuggucccagugccuggcgcacauugg

SEQ ID NO: 166358 - RNA, 32 nt, Homo Sapiens
uacaaauggaaaucguauuaauuugugaggca

SEQ ID NO: 166359 - RNA, 32 nt, Homo Sapiens
guuuuccuuuucuccuucucccagaucagagc

SEQ ID NO: 166360 - RNA, 32 nt, Homo Sapiens
cacaaauaggaaauaaaacuaaaacguagauu

SEQ ID NO: 166361 - RNA, 32 nt, Homo Sapiens
ccacugguuccacugagggcgccuaacucuac

SEQ ID NO: 166362 - RNA, 32 nt, Homo Sapiens
ccuuggccucggcgggcuuuucuggggcccag

SEQ ID NO: 166363 - RNA, 32 nt, Homo Sapiens
gccggccccuaaggcccugcccggggcaggag

SEQ ID NO: 166364 - RNA, 32 nt, Homo Sapiens
cuauuccuguuuucucuuucugcccaccacau

SEQ ID NO: 166365 - RNA, 32 nt, Homo Sapiens
guuuuuuagacuauaauuugugucuuauaugc

SEQ ID NO: 166366 - RNA, 32 nt, Homo Sapiens
uuuauuuuuuauuuucuucuugaccuaccccu

SEQ ID NO: 166367 - RNA, 32 nt, Homo Sapiens
gaaaaucuggguaguaaaucuacccaauuaaa

SEQ ID NO: 166368 - RNA, 32 nt, Homo Sapiens
ucagggugcgaggugucgguucccuccugucc

SEQ ID NO: 166369 - RNA, 32 nt, Homo Sapiens
gccgcagcugccgagccaacuccggagcccgc

SEQ ID NO: 166370 - RNA, 32 nt, Homo Sapiens
accuuucaugucgugcuuuguaaaugucuuau

SEQ ID NO: 166371 - RNA, 32 nt, Homo Sapiens
ggucauucuuccucuuuuuuuuuuaauugggu

SEQ ID NO: 166372 - RNA, 32 nt, Homo Sapiens
ugcggccaacagcugugaacacugcugccucu

SEQ ID NO: 166373 - RNA, 32 nt, Homo Sapiens
guauuuuguacaaaugccuguacuguagaugu

SEQ ID NO: 166374 - RNA, 32 nt, Homo Sapiens
ugccugagcuccgcauggagccugcagccuuu

SEQ ID NO: 166375 - RNA, 32 nt, Homo Sapiens
auggaccagggcaggagaagggcagauggcac

SEQ ID NO: 166376 - RNA, 32 nt, Homo Sapiens
cuaguggagaaccucuauagaucuuaaaaaau

SEQ ID NO: 166377 - RNA, 32 nt, Homo Sapiens
cgccggcgcacaccgaagacgacaccagccau

SEQ ID NO: 166378 - RNA, 32 nt, Homo Sapiens
ccugacccacgcggccucuccuccuccuugcc

SEQ ID NO: 166379 - RNA, 32 nt, Homo Sapiens
gugacccaacuuuucuagugugccacggcccc

SEQ ID NO: 166380 - RNA, 31 nt, Homo Sapiens
ccacacaggguauaucucagagccuggagaa

SEQ ID NO: 166381 - RNA, 32 nt, Homo Sapiens
aucccuaucuagacuuaggagcucaguuuggg

SEQ ID NO: 166382 - RNA, 32 nt, Homo Sapiens
cgcugaagccccagaagcgggcccucaggcca

SEQ ID NO: 166383 - RNA, 32 nt, Homo Sapiens
agaagaacccccaccccacccaggagcugagg

SEQ ID NO: 166384 - RNA, 32 nt, Homo Sapiens
cauuuugcuguaaaucuggaaauuugauagac

SEQ ID NO: 166385 - RNA, 32 nt, Homo Sapiens
gacuccaugcuucuuagccugguggcaguggu

SEQ ID NO: 166386 - RNA, 32 nt, Homo Sapiens
uggguuccuccucuccuacucggcucugcagu

SEQ ID NO: 166387 - RNA, 32 nt, Homo Sapiens
ggcuggaugcugauaaagccaaaugaagcccc

SEQ ID NO: 166388 - RNA, 31 nt, Homo Sapiens
cagccgcagcgcagccgccgggcaggccugc

SEQ ID NO: 166389 - RNA, 32 nt, Homo Sapiens
cagcuauagugaugcagauuaccuuucugcuc

SEQ ID NO: 166390 - RNA, 32 nt, Homo Sapiens
aaacaguugcugugaacuuucaugucaccuac

SEQ ID NO: 166391 - RNA, 30 nt, Homo Sapiens
aggcuucuggacugugauugacgggaaagu

SEQ ID NO: 166392 - RNA, 32 nt, Homo Sapiens
ucccugaaguaagggaggcaaugaagccauac

SEQ ID NO: 166393 - RNA, 31 nt, Homo Sapiens
gcuuuaaaauaaaagaucaauauuaucauaa

SEQ ID NO: 166394 - RNA, 32 nt, Homo Sapiens
ggcuaucuauauauauuuauugaauugaaaug

SEQ ID NO: 166395 - RNA, 32 nt, Homo Sapiens
gggggaaaugcuucuuuuuguuugugauagcu

SEQ ID NO: 166396 - RNA, 32 nt, Homo Sapiens
agcaagauucuguucagucauucucugaaaaa

SEQ ID NO: 166397 - RNA, 32 nt, Homo Sapiens
ucccagucaguucccucuauuuucacccauuu

SEQ ID NO: 166398 - RNA, 31 nt, Homo Sapiens
uuagccccuugcugccugcuccaugugucuu

SEQ ID NO: 166399 - RNA, 32 nt, Homo Sapiens
aaagagcagaccaaaaucagcccuagagccaa

SEQ ID NO: 166400 - RNA, 32 nt, Homo Sapiens
ggaagaauucuggagggagucucuauugcagg

SEQ ID NO: 166401 - RNA, 32 nt, Homo Sapiens
agcagacauuuuccucacacccaccugcugcu

SEQ ID NO: 166402 - RNA, 32 nt, Homo Sapiens
accacacuuacugucuuccuuuaucucugugg

SEQ ID NO: 166403 - RNA, 32 nt, Homo Sapiens
gugugaugccauauuucuuuuucagguaaaug

SEQ ID NO: 166404 - RNA, 32 nt, Homo Sapiens
accuuuaguuaaauaaauuagaguagaaacaa

SEQ ID NO: 166405 - RNA, 32 nt, Homo Sapiens
ugagugcggcauaguugaccuugcuugcuaag

SEQ ID NO: 166406 - RNA, 32 nt, Homo Sapiens
acuuuaaaccagacugggcauuugagcaauuu

SEQ ID NO: 166407 - RNA, 32 nt, Homo Sapiens
uguucuuuucuuuuaauaaaguuuagguaaca

SEQ ID NO: 166408 - RNA, 32 nt, Homo Sapiens
uaggggagggccaugggcaggcuggucucgug

SEQ ID NO: 166409 - RNA, 32 nt, Homo Sapiens
uccagccugggcaacagagcaaggcugucucu

SEQ ID NO: 166410 - RNA, 32 nt, Homo Sapiens
guguuuugauaaauaaauacauaaaggggcaa

SEQ ID NO: 166411 - RNA, 32 nt, Homo Sapiens
cggggcugcgccgaggacgcccggggcucgag

SEQ ID NO: 166412 - RNA, 32 nt, Homo Sapiens
ccagucgggggaggagaaagacgcgauuaaca

SEQ ID NO: 166413 - RNA, 32 nt, Homo Sapiens
gagaguagcaaaucuagcuuuuuuguacagac

SEQ ID NO: 166414 - RNA, 32 nt, Homo Sapiens
uugugagaacagauguuucccuuaucucccuu

SEQ ID NO: 166415 - RNA, 32 nt, Homo Sapiens
gcugcuucuugacuaguauagcucggugaccc

SEQ ID NO: 166416 - RNA, 32 nt, Homo Sapiens
gacaaauagcaacacaagaaagggcaacaaaa

SEQ ID NO: 166417 - RNA, 32 nt, Homo Sapiens
cacugcacuccagucugggugacagagagaga

SEQ ID NO: 166418 - RNA, 32 nt, Homo Sapiens
aagauuuaguugaguuauuccacaaacacauu

SEQ ID NO: 166419 - RNA, 32 nt, Homo Sapiens
uucaugaucugccugccuuggccucccaaagu

SEQ ID NO: 166420 - RNA, 32 nt, Homo Sapiens
gcccauggcccccaauaaaggcagcugccucu

SEQ ID NO: 166421 - RNA, 32 nt, Homo Sapiens
cacugcacuccagccugggugacagcaagacc

SEQ ID NO: 166422 - RNA, 32 nt, Homo Sapiens
aacuggcacggcaggccaggcugagccgcccg

SEQ ID NO: 166423 - RNA, 32 nt, Homo Sapiens
auaguacauuuuacauauguaaaugguauguu

SEQ ID NO: 166424 - RNA, 32 nt, Homo Sapiens
gacagagacccagagugaccccugccccaccc

SEQ ID NO: 166425 - RNA, 32 nt, Homo Sapiens
gcccugcgcucgccauggcgguuugggcggcg

SEQ ID NO: 166426 - RNA, 32 nt, Homo Sapiens
agugacucccaggacgaaagugaggaggagga

SEQ ID NO: 166427 - RNA, 32 nt, Homo Sapiens
caauugucaacacaguugagaauaacaauggu

SEQ ID NO: 166428 - RNA, 32 nt, Homo Sapiens
uuuauuuuaaaaaacaaaguugugaaaacaug

SEQ ID NO: 166429 - RNA, 32 nt, Homo Sapiens
uggcagagguggccagucacgugaaggugggc

SEQ ID NO: 166430 - RNA, 32 nt, Homo Sapiens
gauccacuucccguggcugccggcgcucgugu

SEQ ID NO: 166431 - RNA, 32 nt, Homo Sapiens
ucuuccuuuugaugaaguuuggaaugaaagcu

SEQ ID NO: 166432 - RNA, 32 nt, Homo Sapiens
guauuuuaaugccacuggucuuaucgguccuu

SEQ ID NO: 166433 - RNA, 32 nt, Homo Sapiens
cuggggcacaagugucugugcaugucccccag

SEQ ID NO: 166434 - RNA, 32 nt, Homo Sapiens
caucuaacccccacaagucacugccucacugc

SEQ ID NO: 166435 - RNA, 32 nt, Homo Sapiens
gaugcucugucaugguuuuucuguaaauuauc

SEQ ID NO: 166436 - RNA, 32 nt, Homo Sapiens
ucugcuucugguuuccuggacaauuucucugu

SEQ ID NO: 166437 - RNA, 28 nt, Homo Sapiens
ccaauaguuacaggaacauagaaagauu

SEQ ID NO: 166438 - RNA, 32 nt, Homo Sapiens
gaccuguauguggggguggucucugguuucgg

SEQ ID NO: 166439 - RNA, 32 nt, Homo Sapiens
aguguccaauuguauucacagaaccaccauca

SEQ ID NO: 166440 - RNA, 32 nt, Homo Sapiens
uguaauacucccucuuuuaaaucaugguaaug

SEQ ID NO: 166441 - RNA, 32 nt, Homo Sapiens
auugacgcuguaagagcaucagauuugaaaca

SEQ ID NO: 166442 - RNA, 32 nt, Homo Sapiens
uuauguuguagaagcaucgaacaucaaccaau

SEQ ID NO: 166443 - RNA, 32 nt, Homo Sapiens
uggggcagccucggggacugggauggugaggg

SEQ ID NO: 166444 - RNA, 32 nt, Homo Sapiens
cucuagcugcgggcuccuggcugcuggagcug

SEQ ID NO: 166445 - RNA, 32 nt, Homo Sapiens
gaaaggggaaagggaagggugccacguccgag

SEQ ID NO: 166446 - RNA, 30 nt, Homo Sapiens
cacugaaauugaaugggggaggcccaauga

SEQ ID NO: 166447 - RNA, 32 nt, Homo Sapiens
gcugaggucgcagagcgggcagacggguuggc

SEQ ID NO: 166448 - RNA, 32 nt, Homo Sapiens
uuuuucuugagcaauugguaaaguauacuuuu

SEQ ID NO: 166449 - RNA, 32 nt, Homo Sapiens
cccccucaagagguaccucacuguacaucaca

SEQ ID NO: 166450 - RNA, 32 nt, Homo Sapiens
caagaacuauugaaauaagaaaaaagaaaaaa

SEQ ID NO: 166451 - RNA, 32 nt, Homo Sapiens
uaggucuaacaaacuguaaauguuaaaaaagc

SEQ ID NO: 166452 - RNA, 32 nt, Homo Sapiens
acucuuuaggaaaggagaaucuaagugaagca

SEQ ID NO: 166453 - RNA, 32 nt, Homo Sapiens
uguguuucuuacccccucuggaaugccaaagg

SEQ ID NO: 166454 - RNA, 32 nt, Homo Sapiens
ugccgcgucuccgcguucccagcccggguccc

SEQ ID NO: 166455 - RNA, 32 nt, Homo Sapiens
ccuucccuuugcccucccccagugggagaggg

SEQ ID NO: 166456 - RNA, 32 nt, Homo Sapiens
uaagcagucugauaaccaguuuauugaaacgu

SEQ ID NO: 166457 - RNA, 32 nt, Homo Sapiens
gcaguggaggcugcugugaaaacucugguacg

SEQ ID NO: 166458 - RNA, 32 nt, Homo Sapiens
ggacccugccaucuaugacuccaggucuucag

SEQ ID NO: 166459 - RNA, 32 nt, Homo Sapiens
ccgccgccuaaggggggcuggggccggggcca

SEQ ID NO: 166460 - RNA, 32 nt, Homo Sapiens
agugcuaggaccagccaccccuccccauggcc

SEQ ID NO: 166461 - RNA, 32 nt, Homo Sapiens
aucauuuaucccauuuauuucuucuuaguggg

SEQ ID NO: 166462 - RNA, 32 nt, Homo Sapiens
auccugugagccccacucccagccccacuccc

SEQ ID NO: 166463 - RNA, 32 nt, Homo Sapiens
cacagugugggggcacaagcucugcccuggac

SEQ ID NO: 166464 - RNA, 32 nt, Homo Sapiens
cgccgcugcgccccggguuucgccgcaaccaa

SEQ ID NO: 166465 - RNA, 32 nt, Homo Sapiens
aauauucagauaaggauguugaagauaaugac

SEQ ID NO: 166466 - RNA, 32 nt, Homo Sapiens
cgccuguaaucccagcacuuugggaggugggu

SEQ ID NO: 166467 - RNA, 32 nt, Homo Sapiens
uuuuaguagagacggggguuugccauguugcc

SEQ ID NO: 166468 - RNA, 32 nt, Homo Sapiens
ucuugauggguaauuuuuuuuaagauuauacc

SEQ ID NO: 166469 - RNA, 32 nt, Homo Sapiens
caugaaaaauaaauuugagaaauuuuguuucc

SEQ ID NO: 166470 - RNA, 32 nt, Homo Sapiens
aacuuaggccaaguagagagcaucaggguaaa

SEQ ID NO: 166471 - RNA, 32 nt, Homo Sapiens
aucaaaaauuuucacauuugauuaugaaaauc

SEQ ID NO: 166472 - RNA, 32 nt, Homo Sapiens
ucugcaugugcacuuuuguuuacugaaagaga

SEQ ID NO: 166473 - RNA, 32 nt, Homo Sapiens
ucauuuccuuauaaguuuguguaacauccucc

SEQ ID NO: 166474 - RNA, 32 nt, Homo Sapiens
ucuacuaaaaauacaaaaacuagcgggcaugg

SEQ ID NO: 166475 - RNA, 32 nt, Homo Sapiens
ucauuuugauugaaaagauguuuaccuguugg

SEQ ID NO: 166476 - RNA, 32 nt, Homo Sapiens
agccacgccagccagacaccccggccagaaug

SEQ ID NO: 166477 - RNA, 32 nt, Homo Sapiens
cccacgccgcgugcuccuguucagcccugccg

SEQ ID NO: 166478 - RNA, 32 nt, Homo Sapiens
ucuucauuuuuggcacucuuauuuaacaaugc

SEQ ID NO: 166479 - RNA, 32 nt, Homo Sapiens
cacucagccuguugcuggcccucgcuuugcgc

SEQ ID NO: 166480 - RNA, 32 nt, Homo Sapiens
ucaccugggaaccugaugguggugcagccgga

SEQ ID NO: 166481 - RNA, 32 nt, Homo Sapiens
cagugggcaggaagaaagagugaggcaaagug

SEQ ID NO: 166482 - RNA, 32 nt, Homo Sapiens
cgagcugcccccacccccggccucagccacca

SEQ ID NO: 166483 - RNA, 32 nt, Homo Sapiens
gcuggggcgacagcucgucuccccucucuuaa

SEQ ID NO: 166484 - RNA, 32 nt, Homo Sapiens
cugggucuggaacgcgguugccaccgaggagg

SEQ ID NO: 166485 - RNA, 32 nt, Homo Sapiens
guccaugguuaacugaagaaaucccuccuuca

SEQ ID NO: 166486 - RNA, 32 nt, Homo Sapiens
uaaaauugggaaauuaucuaagaucauuuucc

SEQ ID NO: 166487 - RNA, 32 nt, Homo Sapiens
uuuauaccacuuuauuguuuauucuuagucca

SEQ ID NO: 166488 - RNA, 32 nt, Homo Sapiens
ucauauaaauugguuucuuuucuaacuuuuca

SEQ ID NO: 166489 - RNA, 32 nt, Homo Sapiens
uucaagacgcugaguuauuugcacuggaucuu

SEQ ID NO: 166490 - RNA, 32 nt, Homo Sapiens
ccccgccaccgccgaccucccgcuccaccgac

SEQ ID NO: 166491 - RNA, 29 nt, Homo Sapiens
acgccagcaguccgggucuggguuugucc

SEQ ID NO: 166492 - RNA, 32 nt, Homo Sapiens
ugguuaacccucucuugauuaagggcuacuua

SEQ ID NO: 166493 - RNA, 32 nt, Homo Sapiens
uugccaugaaccgcggacaccccggccccgau

SEQ ID NO: 166494 - RNA, 32 nt, Homo Sapiens
cccgcaugguuuuuauaauauucauacaacaa

SEQ ID NO: 166495 - RNA, 32 nt, Homo Sapiens
auuaaaaaacaaacaaacaaacaaaaagccug

SEQ ID NO: 166496 - RNA, 31 nt, Homo Sapiens
uggggguuacgcagccagccagcaucuggga

SEQ ID NO: 166497 - RNA, 32 nt, Homo Sapiens
gaaggcugccccccuucccaccccuauacccu

SEQ ID NO: 166498 - RNA, 32 nt, Homo Sapiens
gucuuugaucgaaggaaaauagaucuaugaga

SEQ ID NO: 166499 - RNA, 32 nt, Homo Sapiens
caagcguuauuaugaauauaauaauaaucagc

SEQ ID NO: 166500 - RNA, 32 nt, Homo Sapiens
uaucaugaaaaagacaaggauauuuuaauaaa

SEQ ID NO: 166501 - RNA, 32 nt, Homo Sapiens
ccccacacucgccucccgggccccacggugga

SEQ ID NO: 166502 - RNA, 32 nt, Homo Sapiens
caccagucauaguggauuaaggguccacuccu

SEQ ID NO: 166503 - RNA, 32 nt, Homo Sapiens
uucagguacugaauauuuaggauuuggugaag

SEQ ID NO: 166504 - RNA, 32 nt, Homo Sapiens
gcugaacaauuagaguugaaugcugaaauuag

SEQ ID NO: 166505 - RNA, 32 nt, Homo Sapiens
ggggugagugugaaaggugcugauggcccuca

SEQ ID NO: 166506 - RNA, 32 nt, Homo Sapiens
uuccuugcauuuucuuuuuuauucuauugcug

SEQ ID NO: 166507 - RNA, 32 nt, Homo Sapiens
gagguugggcuuuggauagauagacagacucc

SEQ ID NO: 166508 - RNA, 32 nt, Homo Sapiens
cauucuggaagacaugggugagcccaagagga

SEQ ID NO: 166509 - RNA, 32 nt, Homo Sapiens
gggugugugaaugugcaagugucugagagaua

SEQ ID NO: 166510 - RNA, 32 nt, Homo Sapiens
ucucaacaggccuugcgaggcuggggugagag

SEQ ID NO: 166511 - RNA, 32 nt, Homo Sapiens
gccuggugauggagaagugcugauggucuugg

SEQ ID NO: 166512 - RNA, 32 nt, Homo Sapiens
aaaggaauauaaacaggaucucaaacuugauu

SEQ ID NO: 166513 - RNA, 32 nt, Homo Sapiens
uucuugggaaaacauacuuuucauaucucuug

SEQ ID NO: 166514 - RNA, 32 nt, Homo Sapiens
ccagguguggagguacaugccuguaaucccag

SEQ ID NO: 166515 - RNA, 29 nt, Homo Sapiens
acaaaugugaagauuguggcaaagucuuu

SEQ ID NO: 166516 - RNA, 32 nt, Homo Sapiens
gaggcuuaaaacuucucagaucaaucgugcau

SEQ ID NO: 166517 - RNA, 32 nt, Homo Sapiens
acugcuuuauguuuauuuucucucuacuucaa

SEQ ID NO: 166518 - RNA, 32 nt, Homo Sapiens
agaacgggcuagaaaaggauuucuacggcuac

SEQ ID NO: 166519 - RNA, 32 nt, Homo Sapiens
cagcuacacaaccuggaucuuaccacaguuug

SEQ ID NO: 166520 - RNA, 31 nt, Homo Sapiens
acacgaaaugcaaaacaggucuauuuuauuc

SEQ ID NO: 166521 - RNA, 32 nt, Homo Sapiens
ucccugcuggcauuccuucucuguacuaguac

SEQ ID NO: 166522 - RNA, 32 nt, Homo Sapiens
cccaggcccgucucccggcccguggcagucgg

SEQ ID NO: 166523 - RNA, 32 nt, Homo Sapiens
ccaguuggccccagcccgcagcauggcagccg

SEQ ID NO: 166524 - RNA, 32 nt, Homo Sapiens
cccacuucccucuccuuccacuuucacagcug

SEQ ID NO: 166525 - RNA, 31 nt, Homo Sapiens
uccccgagggcgggggcaacgauucacagcc

SEQ ID NO: 166526 - RNA, 29 nt, Homo Sapiens
acuuuuccaaauaaagguuuucacuccuc

SEQ ID NO: 166527 - RNA, 32 nt, Homo Sapiens
uauccucgcucccgggacucacuggcagcccc

SEQ ID NO: 166528 - RNA, 32 nt, Homo Sapiens
agcaagcuggcgccgacauggcgaaggcaagg

SEQ ID NO: 166529 - RNA, 32 nt, Homo Sapiens
gucaaauguuuccauuuucaaauuauuuagaa

SEQ ID NO: 166530 - RNA, 32 nt, Homo Sapiens
gacauggucucaaaucccguguuuccuuaccu

SEQ ID NO: 166531 - RNA, 32 nt, Homo Sapiens
aguccacugaugcaaauuggacuggcgagucc

SEQ ID NO: 166532 - RNA, 32 nt, Homo Sapiens
gcuguugccggggcucugguauccacuugcgc

SEQ ID NO: 166533 - RNA, 32 nt, Homo Sapiens
uccugcccuugcuauggugaaaacagagcaca

SEQ ID NO: 166534 - RNA, 32 nt, Homo Sapiens
aggagugucuuagacagccugacucuccacaa

SEQ ID NO: 166535 - RNA, 32 nt, Homo Sapiens
guuuuguggcacuuucacaauguagaggaaaa

SEQ ID NO: 166536 - RNA, 32 nt, Homo Sapiens
caucccgugucccuuggcccagccccacuucc

SEQ ID NO: 166537 - RNA, 32 nt, Homo Sapiens
gaccccaccucuuaaggacugguuccucagaa

SEQ ID NO: 166538 - RNA, 32 nt, Homo Sapiens
aucucuguugaaggcuuuugauccuuuugaga

SEQ ID NO: 166539 - RNA, 32 nt, Homo Sapiens
guuacucaaaacuucauucuaauugugcccug

SEQ ID NO: 166540 - RNA, 32 nt, Homo Sapiens
cuuauuuugugcuacuaccacagauagccaau

SEQ ID NO: 166541 - RNA, 32 nt, Homo Sapiens
cccagcgcccccagcccagcccacuccccgca

SEQ ID NO: 166542 - RNA, 32 nt, Homo Sapiens
cuuucauauagagaguuuaauuuuaauaaaau

SEQ ID NO: 166543 - RNA, 27 nt, Homo Sapiens
cuuacucauuaauuuagguggcuagga

SEQ ID NO: 166544 - RNA, 27 nt, Homo Sapiens
uuucucucuuucuucaguucaguagau

SEQ ID NO: 166545 - RNA, 32 nt, Homo Sapiens
uguguccuuuuucaagccuguuuagauggggg

SEQ ID NO: 166546 - RNA, 28 nt, Homo Sapiens
ucuauggcggcuaccagacggauugggu

SEQ ID NO: 166547 - RNA, 32 nt, Homo Sapiens
ccagcuggguggcagagacucugucucuaaac

SEQ ID NO: 166548 - RNA, 32 nt, Homo Sapiens
uauuccugcccccaucaugccccacacccauc

SEQ ID NO: 166549 - RNA, 32 nt, Homo Sapiens
agaaacugacuucuuuagacaaaguuuuaacc

SEQ ID NO: 166550 - RNA, 32 nt, Homo Sapiens
auuuaacuucccuuuuuuuuuaacuucaccuu

SEQ ID NO: 166551 - RNA, 32 nt, Homo Sapiens
acagcagaacagaaaguucaacugcuucguaa

SEQ ID NO: 166552 - RNA, 32 nt, Homo Sapiens
aguggaacauuuccaagaaccaauaaauuucu

SEQ ID NO: 166553 - RNA, 32 nt, Homo Sapiens
caaugaagauaaaggauaauugaucucagcag

SEQ ID NO: 166554 - RNA, 32 nt, Homo Sapiens
aagaguguuucauucaaauguuaauaaacuuu

SEQ ID NO: 166555 - RNA, 32 nt, Homo Sapiens
cgcgcggccccccagucucccgcggcugcucc

SEQ ID NO: 166556 - RNA, 32 nt, Homo Sapiens
ugaagcaucagggcgugaaaucaaacuagaug

SEQ ID NO: 166557 - RNA, 32 nt, Homo Sapiens
gacagauggagaagcuggcagaugaagggugg

SEQ ID NO: 166558 - RNA, 32 nt, Homo Sapiens
ggauacuaauaaaauauaagcauucugaaaaa

SEQ ID NO: 166559 - RNA, 32 nt, Homo Sapiens
cucugugaaacauuauuuuuggugaucuaaag

SEQ ID NO: 166560 - RNA, 32 nt, Homo Sapiens
guguaaauauuuuuucuacuuuuaagguuuua

SEQ ID NO: 166561 - RNA, 32 nt, Homo Sapiens
agcuugcuaagggcuacucuauugacaaugca

SEQ ID NO: 166562 - RNA, 32 nt, Homo Sapiens
ccaccuggaaaacaaaauggaucauuucuuga

SEQ ID NO: 166563 - RNA, 32 nt, Homo Sapiens
uuacaaauucuucaauaaagacacauucuuga

SEQ ID NO: 166564 - RNA, 32 nt, Homo Sapiens
gacauuuuacacaacccggauauguuguauau

SEQ ID NO: 166565 - RNA, 32 nt, Homo Sapiens
gccuuggccuggcacccgcgggcaggaccgag

SEQ ID NO: 166566 - RNA, 32 nt, Homo Sapiens
aacucuccuguggucagcugucugcuuuccuu

SEQ ID NO: 166567 - RNA, 32 nt, Homo Sapiens
augacaauguugcauuuaugaugcaguuuuca

SEQ ID NO: 166568 - RNA, 32 nt, Homo Sapiens
gaucccaaccccacccccgauuucugcucugc

SEQ ID NO: 166569 - RNA, 32 nt, Homo Sapiens
cuggggcccucccacucuccacacccacagca

SEQ ID NO: 166570 - RNA, 32 nt, Homo Sapiens
aucuucccauucuuuuacuuagugcauuugug

SEQ ID NO: 166571 - RNA, 32 nt, Homo Sapiens
ccaccugagagcagcucgggcugcugaguucg

SEQ ID NO: 166572 - RNA, 32 nt, Homo Sapiens
ggagcaggagcagaagcagaagcgggguccgg

SEQ ID NO: 166573 - RNA, 32 nt, Homo Sapiens
uagacaccucugcccuggccacguucacagau

SEQ ID NO: 166574 - RNA, 32 nt, Homo Sapiens
ucgucuggaggcgggagcagaaguagguccug

SEQ ID NO: 166575 - RNA, 32 nt, Homo Sapiens
gauaaaccaggucuguuuuuuacaacuuuguu

SEQ ID NO: 166576 - RNA, 32 nt, Homo Sapiens
uuuauauuuugcaacaggaaagacuggucuag

SEQ ID NO: 166577 - RNA, 32 nt, Homo Sapiens
ggaagguggggaguaugugcugauagcuguaa

SEQ ID NO: 166578 - RNA, 32 nt, Homo Sapiens
ugcuguauauauauuauuauauuuguacuuug

SEQ ID NO: 166579 - RNA, 32 nt, Homo Sapiens
caaagagcucuuuuuuagcucucuuaaaugaa

SEQ ID NO: 166580 - RNA, 32 nt, Homo Sapiens
ugccuguggucccagcacuuugggaggccaag

SEQ ID NO: 166581 - RNA, 32 nt, Homo Sapiens
ccguccaggcagccgugcugcagacagaccua

SEQ ID NO: 166582 - RNA, 32 nt, Homo Sapiens
ugggggucgcugacuauagacuguagcuggga

SEQ ID NO: 166583 - RNA, 32 nt, Homo Sapiens
uuucacaugagcagggguucuuucaugugguu

SEQ ID NO: 166584 - RNA, 32 nt, Homo Sapiens
gccccgccacguuacaauccacagauugucug

SEQ ID NO: 166585 - RNA, 32 nt, Homo Sapiens
gggagccaggacuucaguuucucuugucugug

SEQ ID NO: 166586 - RNA, 32 nt, Homo Sapiens
gucaccuggcccacacucuccuccccugaucc

SEQ ID NO: 166587 - RNA, 32 nt, Homo Sapiens
acauccuuccagccccuugaucuuugcuuaug

SEQ ID NO: 166588 - RNA, 32 nt, Homo Sapiens
cuuguagaauugugagcaugugaaugaguuaa

SEQ ID NO: 166589 - RNA, 32 nt, Homo Sapiens
gaaaaugggagcucuuguuguggagagcauag

SEQ ID NO: 166590 - RNA, 32 nt, Homo Sapiens
cagcaaggcagacuggcugcuuacuucagcac

SEQ ID NO: 166591 - RNA, 32 nt, Homo Sapiens
ggcgcaccagcccuuccaggucauccugcggu

SEQ ID NO: 166592 - RNA, 32 nt, Homo Sapiens
aagauaccuggauguuuacugccuugggacac

SEQ ID NO: 166593 - RNA, 32 nt, Homo Sapiens
cauuggacaucucaaaacuuugaaagaacuua

SEQ ID NO: 166594 - RNA, 32 nt, Homo Sapiens
uggaacccgagguggggggacccuggcggugg

SEQ ID NO: 166595 - RNA, 32 nt, Homo Sapiens
cuguagagugagguggguggcuggggcuaacc

SEQ ID NO: 166596 - RNA, 32 nt, Homo Sapiens
cuaagucugccaggucguacaaaccacaccuu

SEQ ID NO: 166597 - RNA, 32 nt, Homo Sapiens
ccuacacacucacugacauacacacacacaug

SEQ ID NO: 166598 - RNA, 32 nt, Homo Sapiens
gacagauucaugccacggauaaaugaggcaaa

SEQ ID NO: 166599 - RNA, 32 nt, Homo Sapiens
aggauaugcuccuggguggggacugggcugug

SEQ ID NO: 166600 - RNA, 31 nt, Homo Sapiens
ggucacccagccaccagccuucgaguuccuu

SEQ ID NO: 166601 - RNA, 32 nt, Homo Sapiens
augugaaaaaucaauuuauuauccuuggugcu

SEQ ID NO: 166602 - RNA, 32 nt, Homo Sapiens
ugagacuccaugagaaagucccuuucugaggc

SEQ ID NO: 166603 - RNA, 32 nt, Homo Sapiens
cuggcacccuggauggugacugcggauagggg

SEQ ID NO: 166604 - RNA, 32 nt, Homo Sapiens
cuuuuuguaugcuuauggcaaucaggaauggg

SEQ ID NO: 166605 - RNA, 32 nt, Homo Sapiens
ucucagcuccgaccuugcagcggcgcagcgcg

SEQ ID NO: 166606 - RNA, 32 nt, Homo Sapiens
cacccgcacugcagucuccagccugagccaug

SEQ ID NO: 166607 - RNA, 32 nt, Homo Sapiens
gcuccaaaaaauauguuaauuauuuuauuuug

SEQ ID NO: 166608 - RNA, 32 nt, Homo Sapiens
gaccgauuugaaagauucaagggagaaagauu

SEQ ID NO: 166609 - RNA, 32 nt, Homo Sapiens
gagagauguucccuccgggguccagggaggag

SEQ ID NO: 166610 - RNA, 32 nt, Homo Sapiens
cccucaaagguagacgugauugaggcccuaau

SEQ ID NO: 166611 - RNA, 32 nt, Homo Sapiens
uauagauccagaagaagugaccugaaguuucu

SEQ ID NO: 166612 - RNA, 32 nt, Homo Sapiens
gcaauaggccuguggcucucagcaguggcugc

SEQ ID NO: 166613 - RNA, 32 nt, Homo Sapiens
aagugaaaaaagagagagacucgugcuuuucc

SEQ ID NO: 166614 - RNA, 32 nt, Homo Sapiens
cucuccggaggcagaaguuguggaucggccgg

SEQ ID NO: 166615 - RNA, 32 nt, Homo Sapiens
cagcauuggagaagaagcugcugagcauggcu

SEQ ID NO: 166616 - RNA, 32 nt, Homo Sapiens
cugugaaccauguggaugaaaaacagacaacc

SEQ ID NO: 166617 - RNA, 32 nt, Homo Sapiens
gccucccaagcccaggcuuuggcacucagaau

SEQ ID NO: 166618 - RNA, 32 nt, Homo Sapiens
ccgcgggcgagggaucgcaggaugagcgaucg

SEQ ID NO: 166619 - RNA, 32 nt, Homo Sapiens
ucaggauaauaaauugauuuggaaaacuuaaa

SEQ ID NO: 166620 - RNA, 32 nt, Homo Sapiens
aacaacuguuugucuuuuuuuguaucuuuuuu

SEQ ID NO: 166621 - RNA, 32 nt, Homo Sapiens
cucuuguacuuacauagaucuaauuuauacag

SEQ ID NO: 166622 - RNA, 32 nt, Homo Sapiens
auagguuauaugcaagcacuaugcccuuuuau

SEQ ID NO: 166623 - RNA, 32 nt, Homo Sapiens
ugccuccucugggcccucuccuucgucuggga

SEQ ID NO: 166624 - RNA, 32 nt, Homo Sapiens
acuucgaagggcagauauuacugcacaaacug

SEQ ID NO: 166625 - RNA, 32 nt, Homo Sapiens
ccggggcgcgaccgcggauccgcaguucccgg

SEQ ID NO: 166626 - RNA, 32 nt, Homo Sapiens
ccuggcccaccugucuuggcuuucucauccuu

SEQ ID NO: 166627 - RNA, 32 nt, Homo Sapiens
cccugccccugccccauuuccuccucaucuga

SEQ ID NO: 166628 - RNA, 32 nt, Homo Sapiens
aaguuaacaacaauugacuguaagagaaugau

SEQ ID NO: 166629 - RNA, 32 nt, Homo Sapiens
aauguuuuaaaauugguugugaagguggaugc

SEQ ID NO: 166630 - RNA, 32 nt, Homo Sapiens
gcagcgcgauccugcggcgucuggccaucccg

SEQ ID NO: 166631 - RNA, 32 nt, Homo Sapiens
gacccuggcugucagagugaaauguaaaguca

SEQ ID NO: 166632 - RNA, 32 nt, Homo Sapiens
cgauuauuuuuggcaaaaauuucacaagacuu

SEQ ID NO: 166633 - RNA, 32 nt, Homo Sapiens
cgcacacacacacacacacacacacacacaca

SEQ ID NO: 166634 - RNA, 32 nt, Homo Sapiens
aaaaacuaaaagaugaaccaaacaaaaacaau

SEQ ID NO: 166635 - RNA, 32 nt, Homo Sapiens
ugucaaugccacaaaaucguguguccguggaa

SEQ ID NO: 166636 - RNA, 32 nt, Homo Sapiens
ugccauucagagaggagaaacacacacccaag

SEQ ID NO: 166637 - RNA, 32 nt, Homo Sapiens
uuagugagcgggauaaaguaaaauucacuguu

SEQ ID NO: 166638 - RNA, 32 nt, Homo Sapiens
caguaucccuucaaaacaaauaggaguucagg

SEQ ID NO: 166639 - RNA, 32 nt, Homo Sapiens
gaucuucagggugggcuucguucuuguggaaa

SEQ ID NO: 166640 - RNA, 32 nt, Homo Sapiens
ggcuucucauccauguugcuucugggaagaga

SEQ ID NO: 166641 - RNA, 32 nt, Homo Sapiens
augcagcccucccgcccgcccuucgugucugu

SEQ ID NO: 166642 - RNA, 32 nt, Homo Sapiens
agcgccccucggcuacccucggaccaggcccg

SEQ ID NO: 166643 - RNA, 32 nt, Homo Sapiens
ucgccccguggcgggugagcgagggugcgugg

SEQ ID NO: 166644 - RNA, 32 nt, Homo Sapiens
ggccagagaugagaacccuuugaaaagauugu

SEQ ID NO: 166645 - RNA, 32 nt, Homo Sapiens
uaagugugcacagauacacauacacgguauuc

SEQ ID NO: 166646 - RNA, 32 nt, Homo Sapiens
ucuuacacagaaacauacacauaccgagaaac

SEQ ID NO: 166647 - RNA, 32 nt, Homo Sapiens
gcaagcaagcucucuugccgaggagccaggca

SEQ ID NO: 166648 - RNA, 32 nt, Homo Sapiens
ucuggcacuccaguccagcuugggccugaacu

SEQ ID NO: 166649 - RNA, 32 nt, Homo Sapiens
ggcgcgggccuggccccgggauggcuauguuc

SEQ ID NO: 166650 - RNA, 32 nt, Homo Sapiens
gcuaugugaaaauuauauaaguauuauaaagg

SEQ ID NO: 166651 - RNA, 32 nt, Homo Sapiens
guguccaaggcgggaggagagaagggacagcu

SEQ ID NO: 166652 - RNA, 32 nt, Homo Sapiens
ccaggcuugaguuuuuaaaaugacuacccaga

SEQ ID NO: 166653 - RNA, 32 nt, Homo Sapiens
ucucuucugguuaucucuaugagcuagaucug

SEQ ID NO: 166654 - RNA, 32 nt, Homo Sapiens
auagcagccaucuuggauugugagugugucuc

SEQ ID NO: 166655 - RNA, 32 nt, Homo Sapiens
ucuggagagggagagggccuggguaggagcug

SEQ ID NO: 166656 - RNA, 32 nt, Homo Sapiens
acaguacguguuuggcggcugggccugggccu

SEQ ID NO: 166657 - RNA, 32 nt, Homo Sapiens
agugggaaacaaaacuaaagagaccacucugu

SEQ ID NO: 166658 - RNA, 31 nt, Homo Sapiens
uugugcuagggagucuaccaggcaagauagu

SEQ ID NO: 166659 - RNA, 32 nt, Homo Sapiens
ccuuggcguccggcccggccugggcccuuagg

SEQ ID NO: 166660 - RNA, 32 nt, Homo Sapiens
uguaauauuucauccuuuauuuuucagguaaa

SEQ ID NO: 166661 - RNA, 32 nt, Homo Sapiens
auuuaggaaugggaggccacguagacuggcuu

SEQ ID NO: 166662 - RNA, 32 nt, Homo Sapiens
auuuuccugaccaagacugagggaugggcugg

SEQ ID NO: 166663 - RNA, 32 nt, Homo Sapiens
ccuuguguauguaucacccaacucacuaauua

SEQ ID NO: 166664 - RNA, 32 nt, Homo Sapiens
acuucaccucucacggcuuucaggcagagagg

SEQ ID NO: 166665 - RNA, 32 nt, Homo Sapiens
ugcccguagaucugggaggccaggcuggcaug

SEQ ID NO: 166666 - RNA, 32 nt, Homo Sapiens
agggaagaacuacacuaauguuagagauaagg

SEQ ID NO: 166667 - RNA, 32 nt, Homo Sapiens
agcuuggcacuggccugcagguacuccuuggc

SEQ ID NO: 166668 - RNA, 32 nt, Homo Sapiens
ucacuucaaauacauacucuucaagucaagaa

SEQ ID NO: 166669 - RNA, 32 nt, Homo Sapiens
aaaucgccaguuggggaugaaaucacagagcc

SEQ ID NO: 166670 - RNA, 32 nt, Homo Sapiens
ccccaggcuccccuggucuccuccccguagcc

SEQ ID NO: 166671 - RNA, 32 nt, Homo Sapiens
uucuacaaugcuagauuuagacuauagcaauc

SEQ ID NO: 166672 - RNA, 32 nt, Homo Sapiens
gccaggaguggccuucucugcaggccagcaag

SEQ ID NO: 166673 - RNA, 32 nt, Homo Sapiens
ucuugaaagucuuuuucuuucuuuucucugga

SEQ ID NO: 166674 - RNA, 32 nt, Homo Sapiens
gaaugguucauuuacucuuaaucuuuaugccc

SEQ ID NO: 166675 - RNA, 32 nt, Homo Sapiens
guucuaaggaccagcauucugggggccauuuu

SEQ ID NO: 166676 - RNA, 32 nt, Homo Sapiens
cacgucgccggccuggaggggcgaagaggacg

SEQ ID NO: 166677 - RNA, 32 nt, Homo Sapiens
cuacccauaaaauuauuugaaaacuuucacca

SEQ ID NO: 166678 - RNA, 32 nt, Homo Sapiens
uccccaaggaucuguuacuacugcauuuccuu

SEQ ID NO: 166679 - RNA, 32 nt, Homo Sapiens
uaaaugcauaaaauaaaauccacaagaugacc

SEQ ID NO: 166680 - RNA, 32 nt, Homo Sapiens
aauauuuuucgguugauguuagacauuguaua

SEQ ID NO: 166681 - RNA, 32 nt, Homo Sapiens
cccccaggcagcuauaagaauauuuuaguuuu

SEQ ID NO: 166682 - RNA, 32 nt, Homo Sapiens
gaaugauuucuccugcuuccuucuccucacca

SEQ ID NO: 166683 - RNA, 32 nt, Homo Sapiens
uaauauuuugaggagcucuguuuugaggacca

SEQ ID NO: 166684 - RNA, 32 nt, Homo Sapiens
caaccucggagcuuauacuccucccagugacg

SEQ ID NO: 166685 - RNA, 32 nt, Homo Sapiens
caguccagcuggaggcuggagggagacacagg

SEQ ID NO: 166686 - RNA, 32 nt, Homo Sapiens
gaugccuugggguucgugcacaacacagcuuc

SEQ ID NO: 166687 - RNA, 32 nt, Homo Sapiens
gcgcaugggaugcaggcggcgugugcugcugu

SEQ ID NO: 166688 - RNA, 32 nt, Homo Sapiens
agaauaaauaaucaucuguguggcauacguua

SEQ ID NO: 166689 - RNA, 30 nt, Homo Sapiens
uggccauggagcggccggcgcccggcgagg

SEQ ID NO: 166690 - RNA, 32 nt, Homo Sapiens
cacuuaucuuuuucuuuuuucuaacuaaaauu

SEQ ID NO: 166691 - RNA, 32 nt, Homo Sapiens
cugggagcggugcggccaaggaggaagcagug

SEQ ID NO: 166692 - RNA, 32 nt, Homo Sapiens
gaauaacugugcuacagcuucuggauuaguug

SEQ ID NO: 166693 - RNA, 32 nt, Homo Sapiens
gauaggugacaguucagucagugggugcuaaa

SEQ ID NO: 166694 - RNA, 31 nt, Homo Sapiens
ccagcuaugcaagaagaggccuugaagcugg

SEQ ID NO: 166695 - RNA, 32 nt, Homo Sapiens
uuggguacaugaucuaaauguuuaaugcuaaa

SEQ ID NO: 166696 - RNA, 32 nt, Homo Sapiens
ggaggaggaagaagaaagauggugagauaucc

SEQ ID NO: 166697 - RNA, 32 nt, Homo Sapiens
aggcagggucauuugugugauguguuuggccu

SEQ ID NO: 166698 - RNA, 32 nt, Homo Sapiens
gggugggaguucgugacaucuccggcgcggag

SEQ ID NO: 166699 - RNA, 32 nt, Homo Sapiens
agagagagggcaagaacugaaaccagcagaaa

SEQ ID NO: 166700 - RNA, 32 nt, Homo Sapiens
gcuaagaacaaguggaaucagaauucaacuua

SEQ ID NO: 166701 - RNA, 32 nt, Homo Sapiens
uuagucauucuaacuuggaaaauaaugcaauu

SEQ ID NO: 166702 - RNA, 32 nt, Homo Sapiens
auucagauugcugcccucuccucucccacagc

SEQ ID NO: 166703 - RNA, 32 nt, Homo Sapiens
ucccggcucccugguccgacaucccccugcca

SEQ ID NO: 166704 - RNA, 32 nt, Homo Sapiens
gcuuucacugucagcaguuuuaaaggugaaau

SEQ ID NO: 166705 - RNA, 32 nt, Homo Sapiens
uguagaugccagcucacgccagcgggccugac

SEQ ID NO: 166706 - RNA, 32 nt, Homo Sapiens
ccacacacgcacccucgcugcaguccagcucc

SEQ ID NO: 166707 - RNA, 32 nt, Homo Sapiens
cauuccucccuccggccauacugccuuugcag

SEQ ID NO: 166708 - RNA, 32 nt, Homo Sapiens
ugaacgcugcucucgugacagugaguucacaa

SEQ ID NO: 166709 - RNA, 32 nt, Homo Sapiens
gaccccacugccugcuagggaauaccagcgcu

SEQ ID NO: 166710 - RNA, 32 nt, Homo Sapiens
ugugaugcaugauccaggauauucuuuuauua

SEQ ID NO: 166711 - RNA, 32 nt, Homo Sapiens
ggucgcugcccucgggacccagccccgagauc

SEQ ID NO: 166712 - RNA, 32 nt, Homo Sapiens
caaggaaagaaaagaguuccccugcccaccgc

SEQ ID NO: 166713 - RNA, 32 nt, Homo Sapiens
uuauugauauauuauaaauguugcuguugagc

SEQ ID NO: 166714 - RNA, 32 nt, Homo Sapiens
uagccaaagagcucuuuuuuagcucucuuaaa

SEQ ID NO: 166715 - RNA, 32 nt, Homo Sapiens
cgcagaguucccugcagcccgguccaggucca

SEQ ID NO: 166716 - RNA, 32 nt, Homo Sapiens
guaugauaauuaaagaaaauaauuuucugugu

SEQ ID NO: 166717 - RNA, 32 nt, Homo Sapiens
uuaaaucauuaaaagaggcuugcugaaggaaa

SEQ ID NO: 166718 - RNA, 32 nt, Homo Sapiens
gcugcaucacagugauggccaagcugcaucag

SEQ ID NO: 166719 - RNA, 32 nt, Homo Sapiens
agauuuccagcaucguguggaacauaugacca

SEQ ID NO: 166720 - RNA, 32 nt, Homo Sapiens
acuauuuuaaacaugggaacuagauuugccuu

SEQ ID NO: 166721 - RNA, 32 nt, Homo Sapiens
cucaggcaagguggggacugggcacaucauca

SEQ ID NO: 166722 - RNA, 32 nt, Homo Sapiens
ugaaucacaucuuugaaacugugcaguagcau

SEQ ID NO: 166723 - RNA, 30 nt, Homo Sapiens
ucugagcccugcuuggaggcgagcauuuuc

SEQ ID NO: 166724 - RNA, 32 nt, Homo Sapiens
gguuuucgguuauagccggccggcgcucacuu

SEQ ID NO: 166725 - RNA, 32 nt, Homo Sapiens
augucuauuucuguuacacaauuuguuauuuc

SEQ ID NO: 166726 - RNA, 32 nt, Homo Sapiens
agaacccagcagccuucacuaacaggacuguc

SEQ ID NO: 166727 - RNA, 32 nt, Homo Sapiens
ugcugcuuuuucucaaaaugggacuugugacg

SEQ ID NO: 166728 - RNA, 32 nt, Homo Sapiens
cugguuuuugguuuuuuuuuccccuucaguuu

SEQ ID NO: 166729 - RNA, 32 nt, Homo Sapiens
auauaggagaggaaaaguaaggugcaguugcc

SEQ ID NO: 166730 - RNA, 32 nt, Homo Sapiens
auuguuccauaauaaacuucuggugugauacu

SEQ ID NO: 166731 - RNA, 32 nt, Homo Sapiens
uauuccagggccuucuuucucaucucugucuu

SEQ ID NO: 166732 - RNA, 32 nt, Homo Sapiens
cugucacccccgcuagucuggaagcuccaugg

SEQ ID NO: 166733 - RNA, 32 nt, Homo Sapiens
cauacgcagccaugcauagaccaacagauuua

SEQ ID NO: 166734 - RNA, 32 nt, Homo Sapiens
gagucugggacacacuguaacuuuaacacauu

SEQ ID NO: 166735 - RNA, 32 nt, Homo Sapiens
cugggggcccuggccuggcccgggugcaggcu

SEQ ID NO: 166736 - RNA, 32 nt, Homo Sapiens
ucgcgcugcccccaaacagggcagacacaaaa

SEQ ID NO: 166737 - RNA, 32 nt, Homo Sapiens
gguuuucaaaaauaccuggcaagaaaucugga

SEQ ID NO: 166738 - RNA, 32 nt, Homo Sapiens
gcgcggaccgggcaguuuccgcgcucagcaca

SEQ ID NO: 166739 - RNA, 30 nt, Homo Sapiens
agggugucucaggaugcagaagccgccuga

SEQ ID NO: 166740 - RNA, 32 nt, Homo Sapiens
gaguucuggagguagauggaggugauauuugu

SEQ ID NO: 166741 - RNA, 32 nt, Homo Sapiens
uucuucuggugcuacuccaugcaggggucagu

SEQ ID NO: 166742 - RNA, 32 nt, Homo Sapiens
ccaugcagugauuccaggauuugaaauuguau

SEQ ID NO: 166743 - RNA, 31 nt, Homo Sapiens
cccauucacacucaugaauccacuccagaag

SEQ ID NO: 166744 - RNA, 32 nt, Homo Sapiens
ugugcaaauaaacugaaagauauucuuggcca

SEQ ID NO: 166745 - RNA, 32 nt, Homo Sapiens
caccaaaaauucaaauugggauuuuccggagu

SEQ ID NO: 166746 - RNA, 32 nt, Homo Sapiens
uagaggauaauuauauuuaauguauaacuaua

SEQ ID NO: 166747 - RNA, 32 nt, Homo Sapiens
agucagaagaaccuggaggacggaggaaacca

SEQ ID NO: 166748 - RNA, 32 nt, Homo Sapiens
guaagagugucugggacauccagguauauacu

SEQ ID NO: 166749 - RNA, 32 nt, Homo Sapiens
cagugccuaaaauaagaauagaacaacauaua

SEQ ID NO: 166750 - RNA, 32 nt, Homo Sapiens
uggauaaaaugaagagucuaugagugagggau

SEQ ID NO: 166751 - RNA, 32 nt, Homo Sapiens
cccuuucucuccuccuucucuaagaaacccag

SEQ ID NO: 166752 - RNA, 32 nt, Homo Sapiens
aaaaaucuauagacuccagcugcuacauuaga

SEQ ID NO: 166753 - RNA, 32 nt, Homo Sapiens
agaaaauagugggaaauagaaaagugugugca

SEQ ID NO: 166754 - RNA, 32 nt, Homo Sapiens
ggcuaggauuccacuuccugugucaugaccuc

SEQ ID NO: 166755 - RNA, 32 nt, Homo Sapiens
ugugcucugcacccccugcucccuugggcugg

SEQ ID NO: 166756 - RNA, 32 nt, Homo Sapiens
uguacauaucuaggcaucuauuuauguauaaa

SEQ ID NO: 166757 - RNA, 32 nt, Homo Sapiens
gcacaguagcucacgccuguauucccagcagu

SEQ ID NO: 166758 - RNA, 32 nt, Homo Sapiens
uaugaaauuauuaacugauauauccugggaaa

SEQ ID NO: 166759 - RNA, 32 nt, Homo Sapiens
aaccccacaugccccaggagcgaugugcuccc

SEQ ID NO: 166760 - RNA, 32 nt, Homo Sapiens
ccagcaagaaagauugugaugcaagauuucuu

SEQ ID NO: 166761 - RNA, 32 nt, Homo Sapiens
cacuuuugauaugggacugcuaacaucuucca

SEQ ID NO: 166762 - RNA, 32 nt, Homo Sapiens
cccuacgcgcgcggcccggagcucuguucccu

SEQ ID NO: 166763 - RNA, 32 nt, Homo Sapiens
aaggaagagcagccugacucauucuucuuggc

SEQ ID NO: 166764 - RNA, 31 nt, Homo Sapiens
cauugugcagagagggcaggagugaauuaag

SEQ ID NO: 166765 - RNA, 32 nt, Homo Sapiens
cauagaaugaauugcuguaccaaccaaggcua

SEQ ID NO: 166766 - RNA, 32 nt, Homo Sapiens
aaauaucaugcaccaugacccacagccaucug

SEQ ID NO: 166767 - RNA, 32 nt, Homo Sapiens
gaguuuucuguuggaaccgccggcguuggcuc

SEQ ID NO: 166768 - RNA, 32 nt, Homo Sapiens
accucuccaccgaagccguucugacuggcagg

SEQ ID NO: 166769 - RNA, 32 nt, Homo Sapiens
caugccaggaggaggaggagacaccuagagcc

SEQ ID NO: 166770 - RNA, 32 nt, Homo Sapiens
gaaaauacaaccucuuauuguauaguuugccu

SEQ ID NO: 166771 - RNA, 32 nt, Homo Sapiens
uucuguaauaauuuaauguuacuuauuaucag

SEQ ID NO: 166772 - RNA, 32 nt, Homo Sapiens
ggcacugaucuggagaucugcagaucuggagg

SEQ ID NO: 166773 - RNA, 32 nt, Homo Sapiens
guucuuaagaugugugaaauggcauugccacc

SEQ ID NO: 166774 - RNA, 32 nt, Homo Sapiens
ugcuugaagauaaaugugcuguuucuaguuuc

SEQ ID NO: 166775 - RNA, 32 nt, Homo Sapiens
acucucccucagcacaugcuacaaauguugca

SEQ ID NO: 166776 - RNA, 32 nt, Homo Sapiens
ugguuuugaaccucagagaccauccacugucu

SEQ ID NO: 166777 - RNA, 32 nt, Homo Sapiens
ccucuuugaugcggcggagacgauggucagcc

SEQ ID NO: 166778 - RNA, 32 nt, Homo Sapiens
gggagagaauaaaugaauuuugcucaagaaag

SEQ ID NO: 166779 - RNA, 32 nt, Homo Sapiens
agauguaauaauaaagugaaaauauuaacauu

SEQ ID NO: 166780 - RNA, 32 nt, Homo Sapiens
uaaaauuuuacucaacccaugauucagggaac

SEQ ID NO: 166781 - RNA, 32 nt, Homo Sapiens
agcucgcucccucucacaguagccugacaagg

SEQ ID NO: 166782 - RNA, 32 nt, Homo Sapiens
gccgggacccgcccuaggggcucggaucgccg

SEQ ID NO: 166783 - RNA, 32 nt, Homo Sapiens
cccucgcagugaguguuacaguucuuaaaggc

SEQ ID NO: 166784 - RNA, 32 nt, Homo Sapiens
gaacagggcaggcacgggcagcuccuguucug

SEQ ID NO: 166785 - RNA, 32 nt, Homo Sapiens
cgguuuguuugaaaacauuuugugaaagccug

SEQ ID NO: 166786 - RNA, 32 nt, Homo Sapiens
ggucguguccccagccuucucugcagucccuu

SEQ ID NO: 166787 - RNA, 29 nt, Homo Sapiens
cugaguaagaaggggcuggugcccagucg

SEQ ID NO: 166788 - RNA, 32 nt, Homo Sapiens
guuuuuccccuuuuuccaaauugauaaggauu

SEQ ID NO: 166789 - RNA, 32 nt, Homo Sapiens
ggccgcaggagcgcgcggagcggcgaugagca

SEQ ID NO: 166790 - RNA, 32 nt, Homo Sapiens
ggaaacugacauuccaaggaucuaauccagga

SEQ ID NO: 166791 - RNA, 32 nt, Homo Sapiens
cgcgucuccuucccucuccccaaagccuggau

SEQ ID NO: 166792 - RNA, 32 nt, Homo Sapiens
gcaacauccgccucccggguucaggugauucu

SEQ ID NO: 166793 - RNA, 32 nt, Homo Sapiens
gccauacaucaggggauccccuugacucacuu

SEQ ID NO: 166794 - RNA, 32 nt, Homo Sapiens
agguggcgggcucugcgacccugugagaugga

SEQ ID NO: 166795 - RNA, 32 nt, Homo Sapiens
aagauauuuuagccuuuuaaaaaguugagauu

SEQ ID NO: 166796 - RNA, 31 nt, Homo Sapiens
gucaccauggcaaugcgggagcugguggagg

SEQ ID NO: 166797 - RNA, 32 nt, Homo Sapiens
gauuccggccuggagcucccagggccgagcag

SEQ ID NO: 166798 - RNA, 32 nt, Homo Sapiens
ccauaggaguucggacaauuacggacauccuu

SEQ ID NO: 166799 - RNA, 32 nt, Homo Sapiens
uucuauccgguagucacaaauuccuuggcucu

SEQ ID NO: 166800 - RNA, 32 nt, Homo Sapiens
ugccuccucccgggcucugggcccagcgcgcc

SEQ ID NO: 166801 - RNA, 32 nt, Homo Sapiens
ggcgcccgcuggcgcucaagcauggcggcggc

SEQ ID NO: 166802 - RNA, 32 nt, Homo Sapiens
aucaccgccccgagcgugcgcacacagaccgg

SEQ ID NO: 166803 - RNA, 32 nt, Homo Sapiens
ccuagaucccucgcaugcacaguucauaguag

SEQ ID NO: 166804 - RNA, 32 nt, Homo Sapiens
auggcuauggaauuggaagaucugaaaucaac

SEQ ID NO: 166805 - RNA, 32 nt, Homo Sapiens
cuuauuaaacucccacuggugcagaaaccaug

SEQ ID NO: 166806 - RNA, 32 nt, Homo Sapiens
cagccacugguccucuuguuuccccugcagac

SEQ ID NO: 166807 - RNA, 32 nt, Homo Sapiens
cgccacgcccuggccucagccugcggggcucc

SEQ ID NO: 166808 - RNA, 32 nt, Homo Sapiens
cacuaaucaguucuuagauucaggggaagggc

SEQ ID NO: 166809 - RNA, 32 nt, Homo Sapiens
agauuuacuuuuuggcucacauaacuucaaau

SEQ ID NO: 166810 - RNA, 32 nt, Homo Sapiens
cuauguacaaaacacaaacuuuagagcaagaa

SEQ ID NO: 166811 - RNA, 32 nt, Homo Sapiens
aggcuggagcagccgcccaacuccuggcgcgg

SEQ ID NO: 166812 - RNA, 32 nt, Homo Sapiens
gugaagcuggaaccaucagggaacaugaguga

SEQ ID NO: 166813 - RNA, 32 nt, Homo Sapiens
gaggauuuuuauuuugcuuuuuggcauuucag

SEQ ID NO: 166814 - RNA, 32 nt, Homo Sapiens
aaaucuucggguccuccuccuuggagaguccc

SEQ ID NO: 166815 - RNA, 32 nt, Homo Sapiens
auggggguuaguugcuuggcagccugccugcc

SEQ ID NO: 166816 - RNA, 32 nt, Homo Sapiens
agaaacgugucagcaguuggcccgggagacuc

SEQ ID NO: 166817 - RNA, 32 nt, Homo Sapiens
uugcggcucccucccaucucacucaagguucu

SEQ ID NO: 166818 - RNA, 27 nt, Homo Sapiens
cucaagucacauagggaaaguaccuuc

SEQ ID NO: 166819 - RNA, 32 nt, Homo Sapiens
cucugaacuuccaagcuccaaauccaaggaaa

SEQ ID NO: 166820 - RNA, 32 nt, Homo Sapiens
cuuucaaggaguacgugacgguguaccggagg

SEQ ID NO: 166821 - RNA, 32 nt, Homo Sapiens
uccacuuaaggguaccaauucaauacaaaaga

SEQ ID NO: 166822 - RNA, 32 nt, Homo Sapiens
uuuguuacagaaaaguggaagcagauuggcug

SEQ ID NO: 166823 - RNA, 32 nt, Homo Sapiens
ugacauggauauacaacagaaaacacuuugag

SEQ ID NO: 166824 - RNA, 32 nt, Homo Sapiens
cggguccauggggguggcagcggcaccccuaa

SEQ ID NO: 166825 - RNA, 32 nt, Homo Sapiens
acccuccccucccccuucccuucuggucgggu

SEQ ID NO: 166826 - RNA, 32 nt, Homo Sapiens
cgaggggggaggggacagagggggcgucacgg

SEQ ID NO: 166827 - RNA, 32 nt, Homo Sapiens
ggccgaugcugugggggugggcguggagagaa

SEQ ID NO: 166828 - RNA, 32 nt, Homo Sapiens
ccagcuuuggccaggcugccacaggggccuga

SEQ ID NO: 166829 - RNA, 32 nt, Homo Sapiens
aauugggauggaaucaccuggauuuuucugaa

SEQ ID NO: 166830 - RNA, 32 nt, Homo Sapiens
ccaaauauaaaaagauaaaauaaaaagccggu

SEQ ID NO: 166831 - RNA, 32 nt, Homo Sapiens
cccugccccucuuggcccccagccugagcccu

SEQ ID NO: 166832 - RNA, 32 nt, Homo Sapiens
cccagugcaaagacaucaccaugaacacuagc

SEQ ID NO: 166833 - RNA, 32 nt, Homo Sapiens
cucuucccacuugugacaaugucuaguaaggu

SEQ ID NO: 166834 - RNA, 32 nt, Homo Sapiens
ggaguccugagcacacugaacacaccucagag

SEQ ID NO: 166835 - RNA, 32 nt, Homo Sapiens
agcuuuacuuuuuauaaacuugaaugauaaag

SEQ ID NO: 166836 - RNA, 32 nt, Homo Sapiens
aagacuguucccuccucccaagacccuugucu

SEQ ID NO: 166837 - RNA, 32 nt, Homo Sapiens
ugcagcaucauucgcgggcagcggcggagacc

SEQ ID NO: 166838 - RNA, 32 nt, Homo Sapiens
ggugggagagccagcucucucuacccggccca

SEQ ID NO: 166839 - RNA, 32 nt, Homo Sapiens
ugaaggaucucccucaggaaaagcagaaaacc

SEQ ID NO: 166840 - RNA, 32 nt, Homo Sapiens
acacuagccgugguccugugcagucaagcucu

SEQ ID NO: 166841 - RNA, 32 nt, Homo Sapiens
ggucggcccuucuuuuucaggcacauaagcca

SEQ ID NO: 166842 - RNA, 32 nt, Homo Sapiens
uaugaagcagagcuaucacaauuuucugaaga

SEQ ID NO: 166843 - RNA, 32 nt, Homo Sapiens
ggaggagaggagaggagaggaaccgucauggg

SEQ ID NO: 166844 - RNA, 32 nt, Homo Sapiens
cuuuagguucuuugcugcauucugccucucua

SEQ ID NO: 166845 - RNA, 32 nt, Homo Sapiens
augguuacaaggggcugcugcugcugcuggga

SEQ ID NO: 166846 - RNA, 32 nt, Homo Sapiens
aucgggggcuccuggcgcuacugcccuccaga

SEQ ID NO: 166847 - RNA, 32 nt, Homo Sapiens
cuaauucuucugucucucuccucuccucaggc

SEQ ID NO: 166848 - RNA, 32 nt, Homo Sapiens
ugguggaacgaccccaccucgaggagcuuccu

SEQ ID NO: 166849 - RNA, 32 nt, Homo Sapiens
uguuuuuaauaaagacuaacacaaacuuaaug

SEQ ID NO: 166850 - RNA, 32 nt, Homo Sapiens
cccaucacauggcuggcuggcugcugggugca

SEQ ID NO: 166851 - RNA, 32 nt, Homo Sapiens
uguguugugggaaggacccugugggaggucau

SEQ ID NO: 166852 - RNA, 32 nt, Homo Sapiens
ccguugcgcucgccgcgcucgcacugaagccc

SEQ ID NO: 166853 - RNA, 32 nt, Homo Sapiens
caaccuucccccuucgcggccgagauggaccc

SEQ ID NO: 166854 - RNA, 32 nt, Homo Sapiens
aaauugggcucaagaaccauucaucaguacgu

SEQ ID NO: 166855 - RNA, 32 nt, Homo Sapiens
cggaccuucuuauuccucuccccuaacaccau

SEQ ID NO: 166856 - RNA, 32 nt, Homo Sapiens
caugacauucaggacacacacacacacacaca

SEQ ID NO: 166857 - RNA, 32 nt, Homo Sapiens
uuuugaaaacgaagaaauaaaacauguuggau

SEQ ID NO: 166858 - RNA, 32 nt, Homo Sapiens
cgccguccgagcacagccgugccucgguccgc

SEQ ID NO: 166859 - RNA, 32 nt, Homo Sapiens
ggggguucaaggaaucuauauuauuaaacaau

SEQ ID NO: 166860 - RNA, 32 nt, Homo Sapiens
ccggagucaggagugagugggcagguugacug

SEQ ID NO: 166861 - RNA, 32 nt, Homo Sapiens
cggcgggaggggccgccuccggcucguggcac

SEQ ID NO: 166862 - RNA, 32 nt, Homo Sapiens
ccccggcgccgacggcccugugcaggggaagc

SEQ ID NO: 166863 - RNA, 32 nt, Homo Sapiens
cagcaucccuucugcccccguuccagcugaca

SEQ ID NO: 166864 - RNA, 32 nt, Homo Sapiens
uauucagucuucacuauaacucuuagaguuga

SEQ ID NO: 166865 - RNA, 32 nt, Homo Sapiens
gggauccuggaacagcucuucaggucucugca

SEQ ID NO: 166866 - RNA, 32 nt, Homo Sapiens
gaauauuuccacguucuucuugcaguucagca

SEQ ID NO: 166867 - RNA, 32 nt, Homo Sapiens
ucuacaaaaaaauuaaaaaauuagccaagcau

SEQ ID NO: 166868 - RNA, 32 nt, Homo Sapiens
cccuucuuucccuucagagaaccagugucccu

SEQ ID NO: 166869 - RNA, 32 nt, Homo Sapiens
cuggcuacggauaaaagacugaagauacauua

SEQ ID NO: 166870 - RNA, 32 nt, Homo Sapiens
gggagggagagccgagcagccccggcucuggg

SEQ ID NO: 166871 - RNA, 32 nt, Homo Sapiens
gaaauucuguuguggauaaucaacagcgaagg

SEQ ID NO: 166872 - RNA, 32 nt, Homo Sapiens
gacaccggccgggcugacguguuucaucuggc

SEQ ID NO: 166873 - RNA, 32 nt, Homo Sapiens
uuuucagauuccccuccuuacauccugagcuc

SEQ ID NO: 166874 - RNA, 32 nt, Homo Sapiens
cuugggggucccagaaggccccggccugagga

SEQ ID NO: 166875 - RNA, 32 nt, Homo Sapiens
acguggauggaucaccugaggucaggaguuug

SEQ ID NO: 166876 - RNA, 32 nt, Homo Sapiens
gacuuuugaagaaugauucgugaauccggaau

SEQ ID NO: 166877 - RNA, 32 nt, Homo Sapiens
cgcuacuucucggacgagcacccggcggcggg

SEQ ID NO: 166878 - RNA, 32 nt, Homo Sapiens
aggaagggcagguucucuggggccugcacagg

SEQ ID NO: 166879 - RNA, 32 nt, Homo Sapiens
gcgacacugugauucuuugcaccuuccuugua

SEQ ID NO: 166880 - RNA, 32 nt, Homo Sapiens
gaaaauuuuaucauauuuuaggcuuuucuaaa

SEQ ID NO: 166881 - RNA, 32 nt, Homo Sapiens
aagugcgggcucaagacuacggaagugacgua

SEQ ID NO: 166882 - RNA, 32 nt, Homo Sapiens
cuccaugagaaaccuaaacaucugaaauauaa

SEQ ID NO: 166883 - RNA, 31 nt, Homo Sapiens
cucuccaugccccucaagggccccacaugcc

SEQ ID NO: 166884 - RNA, 32 nt, Homo Sapiens
gcgcccauuuuucauucccuagauagagauac

SEQ ID NO: 166885 - RNA, 29 nt, Homo Sapiens
acagaggggggacagaaggacaauggcua

SEQ ID NO: 166886 - RNA, 32 nt, Homo Sapiens
acaauaaaagguggcguuuuuguacuuuaccu

SEQ ID NO: 166887 - RNA, 32 nt, Homo Sapiens
ucuuuuuuguuguuguuacuguaaagucuauu

SEQ ID NO: 166888 - RNA, 32 nt, Homo Sapiens
uccucggccgcggcccgggucccucgcaaagc

SEQ ID NO: 166889 - RNA, 32 nt, Homo Sapiens
gacuugccacaaagcacaaggcuggcagagau

SEQ ID NO: 166890 - RNA, 32 nt, Homo Sapiens
uggcggcggcgcugugaggagcagccaggggg

SEQ ID NO: 166891 - RNA, 32 nt, Homo Sapiens
aagaucuucuaaaaagaaauaauauuuuaguc

SEQ ID NO: 166892 - RNA, 32 nt, Homo Sapiens
aucauuguaaaaauggcuuuuagacgugaaac

SEQ ID NO: 166893 - RNA, 32 nt, Homo Sapiens
ggagccacccucggagaguccacaacagcagc

SEQ ID NO: 166894 - RNA, 32 nt, Homo Sapiens
aucgaggaaggggcaugugcuggacgcggaca

SEQ ID NO: 166895 - RNA, 32 nt, Homo Sapiens
cgcugagguccgcgcgcccccggagucugggg

SEQ ID NO: 166896 - RNA, 30 nt, Homo Sapiens
aguaaaugaagaggaaaaugcuaacaugcc

SEQ ID NO: 166897 - RNA, 32 nt, Homo Sapiens
aauuguuuacuuuaugauguuuacauacacgu

SEQ ID NO: 166898 - RNA, 32 nt, Homo Sapiens
agauggcucccacuccucccuccuuucacuuc

SEQ ID NO: 166899 - RNA, 32 nt, Homo Sapiens
ucuagccuugcccgagcuuuccuuacaaucag

SEQ ID NO: 166900 - RNA, 32 nt, Homo Sapiens
cuauagaauauuaaguggaagugggugaauuc

SEQ ID NO: 166901 - RNA, 32 nt, Homo Sapiens
ugccugcgcagcugcgacggcugcugguuuug

SEQ ID NO: 166902 - RNA, 32 nt, Homo Sapiens
gauuucuuuagcuauuuguguuuucuugcauu

SEQ ID NO: 166903 - RNA, 32 nt, Homo Sapiens
gcuaugggugacagaggcucucuccuggugcc

SEQ ID NO: 166904 - RNA, 32 nt, Homo Sapiens
gaugaguugugggacauuauggucggccaagu

SEQ ID NO: 166905 - RNA, 32 nt, Homo Sapiens
agggagagaaaagaaugaggcuuaggacccaa

SEQ ID NO: 166906 - RNA, 32 nt, Homo Sapiens
gaguaauggggauaugaaggaagaaucagcug

SEQ ID NO: 166907 - RNA, 32 nt, Homo Sapiens
uguauaacuaggcuguuaaccuaugauuguaa

SEQ ID NO: 166908 - RNA, 32 nt, Homo Sapiens
uuaacuugaccugggauaacuacuuuaaagaa

SEQ ID NO: 166909 - RNA, 32 nt, Homo Sapiens
cugaggggagacgugugcccucuccaggauuu

SEQ ID NO: 166910 - RNA, 32 nt, Homo Sapiens
gaaacuuuuuaaaauaauuuguaaauuuuacc

SEQ ID NO: 166911 - RNA, 32 nt, Homo Sapiens
uguuuaggaaauuuauacaaagaaacuuuuua

SEQ ID NO: 166912 - RNA, 32 nt, Homo Sapiens
cacuuuguuacugguaccugauguacacggau

SEQ ID NO: 166913 - RNA, 32 nt, Homo Sapiens
agcaccaguucugcaccagcagcgccuccguc

SEQ ID NO: 166914 - RNA, 32 nt, Homo Sapiens
ccaggugaccuuaaaacaccccagggccggcu

SEQ ID NO: 166915 - RNA, 32 nt, Homo Sapiens
uggggaaacaaaucucuuucugaugcuuaacg

SEQ ID NO: 166916 - RNA, 32 nt, Homo Sapiens
acuggaaagaaguacuucuccgcuacugcgua

SEQ ID NO: 166917 - RNA, 32 nt, Homo Sapiens
cauuaauauaaaagagguaggagucuguuauu

SEQ ID NO: 166918 - RNA, 32 nt, Homo Sapiens
aauuuauuuuuccgucaguuauguaaaauaaa

SEQ ID NO: 166919 - RNA, 32 nt, Homo Sapiens
aggcauuuucuuucuuuuuucucugaccaccu

SEQ ID NO: 166920 - RNA, 32 nt, Homo Sapiens
auacuuuugauacuacuuguaccuguaugucu

SEQ ID NO: 166921 - RNA, 32 nt, Homo Sapiens
cgcgcagcuagugcagcgcggcuggggcagcg

SEQ ID NO: 166922 - RNA, 32 nt, Homo Sapiens
caguggaaagggguucgggcucggggggcggg

SEQ ID NO: 166923 - RNA, 32 nt, Homo Sapiens
ucacugcagccuccaccuccccgguuccagcg

SEQ ID NO: 166924 - RNA, 32 nt, Homo Sapiens
gccugaagccgcgccgcgcgggccgagggcuc

SEQ ID NO: 166925 - RNA, 31 nt, Homo Sapiens
ugccacacaaagaacuugggguguaaggaua

SEQ ID NO: 166926 - RNA, 32 nt, Homo Sapiens
uccccuggacaggugggaucgaggggaugcca

SEQ ID NO: 166927 - RNA, 32 nt, Homo Sapiens
auaggagaacagagacccgagggcugcuuugg

SEQ ID NO: 166928 - RNA, 32 nt, Homo Sapiens
gcaccccgccucccuggccagcaagaaaccua

SEQ ID NO: 166929 - RNA, 32 nt, Homo Sapiens
guuuaaaaucaucuaagagucuauacuugugu

SEQ ID NO: 166930 - RNA, 32 nt, Homo Sapiens
gucuguauuuaaucuuuuuuuauggaaccugu

SEQ ID NO: 166931 - RNA, 32 nt, Homo Sapiens
ccguggcucuucauugcggcugcuuucugcuc

SEQ ID NO: 166932 - RNA, 32 nt, Homo Sapiens
gcauaagaacagagccaucuuugagccauggg

SEQ ID NO: 166933 - RNA, 32 nt, Homo Sapiens
uuaaugggugcagcacaccagcauggcacagg

SEQ ID NO: 166934 - RNA, 30 nt, Homo Sapiens
ccaguuugcgcgcagggcucaggcgaccgu

SEQ ID NO: 166935 - RNA, 32 nt, Homo Sapiens
ggaugauacauuuuaauauuguauuauucucu

SEQ ID NO: 166936 - RNA, 32 nt, Homo Sapiens
gcauuucucaugcuucuucucauggggugggg

SEQ ID NO: 166937 - RNA, 32 nt, Homo Sapiens
aacacuacaaauauuagauacaauuuuuuaac

SEQ ID NO: 166938 - RNA, 32 nt, Homo Sapiens
uguaccccauccgaaucagggcuucuaccacu

SEQ ID NO: 166939 - RNA, 32 nt, Homo Sapiens
uggacuuugcugucucugaacaguaugugugu

SEQ ID NO: 166940 - RNA, 32 nt, Homo Sapiens
gauuauucuguaucagaaaugaaacagacccu

SEQ ID NO: 166941 - RNA, 32 nt, Homo Sapiens
aacgccgguucccccgggcccgggcaucucgc

SEQ ID NO: 166942 - RNA, 32 nt, Homo Sapiens
agucccgcccugggcguccgugacgucgccca

SEQ ID NO: 166943 - RNA, 32 nt, Homo Sapiens
aauggaugcauaaugacugcucaauaaauguu

SEQ ID NO: 166944 - RNA, 32 nt, Homo Sapiens
cucugccgccuuuuccucuccccuggaucuga

SEQ ID NO: 166945 - RNA, 32 nt, Homo Sapiens
acaccugggaaggggcucucuaaaucccggcc

SEQ ID NO: 166946 - RNA, 32 nt, Homo Sapiens
gucgaguucagagagccuccccggucccaacc

SEQ ID NO: 166947 - RNA, 32 nt, Homo Sapiens
acugcccaccccaccccaacccaccccaugcc

SEQ ID NO: 166948 - RNA, 32 nt, Homo Sapiens
uauccaacaagcugcuggcugauuccgacgau

SEQ ID NO: 166949 - RNA, 32 nt, Homo Sapiens
ucaaagauauauuuaaaccaaccucaugcccu

SEQ ID NO: 166950 - RNA, 32 nt, Homo Sapiens
cuacucugugccuggagcaucauguccacccc

SEQ ID NO: 166951 - RNA, 32 nt, Homo Sapiens
cccucccaggucgggcaguggaggcugcugug

SEQ ID NO: 166952 - RNA, 32 nt, Homo Sapiens
caguuuuuccccagcaccaccaucaaggccuc

SEQ ID NO: 166953 - RNA, 32 nt, Homo Sapiens
gucaacucaugccagcagccucagcgucugcc

SEQ ID NO: 166954 - RNA, 32 nt, Homo Sapiens
uucucucccugaagcauaaggaucuggaagag

SEQ ID NO: 166955 - RNA, 32 nt, Homo Sapiens
aggcccucagccucagagagccugcagaaggg

SEQ ID NO: 166956 - RNA, 32 nt, Homo Sapiens
gaggaaagagcaguuaacaaacaaaggcagua

SEQ ID NO: 166957 - RNA, 32 nt, Homo Sapiens
gacaaagacaccugaggacuaugcugacucga

SEQ ID NO: 166958 - RNA, 32 nt, Homo Sapiens
gggcuggcgggccuuuuuccugcgucccagcc

SEQ ID NO: 166959 - RNA, 32 nt, Homo Sapiens
gggccucucccagccuuucuuggaccugugga

SEQ ID NO: 166960 - RNA, 32 nt, Homo Sapiens
uacucaccgagucuagucaguguagugcuuuu

SEQ ID NO: 166961 - RNA, 32 nt, Homo Sapiens
ccgaugagaaaauaaagccauauugaaugaua

SEQ ID NO: 166962 - RNA, 32 nt, Homo Sapiens
gucccacuaaggaaaccaccucacccucucca

SEQ ID NO: 166963 - RNA, 32 nt, Homo Sapiens
cucauaaugcuuuguuaaauguuuacaaguaa

SEQ ID NO: 166964 - RNA, 32 nt, Homo Sapiens
uggagaguguuccuguugaaucuugcacauau

SEQ ID NO: 166965 - RNA, 31 nt, Homo Sapiens
cuuccagcugccaccacggcugggacacgcu

SEQ ID NO: 166966 - RNA, 32 nt, Homo Sapiens
caccuucucaggaaacaaggccuuggagaaau

SEQ ID NO: 166967 - RNA, 32 nt, Homo Sapiens
ugaccucauuucguuuauuuuauuuuuguaau

SEQ ID NO: 166968 - RNA, 32 nt, Homo Sapiens
gguaggguuuggugagagacaccuggguucag

SEQ ID NO: 166969 - RNA, 32 nt, Homo Sapiens
auagaaaagaaguuuuacauaauauaguuauu

SEQ ID NO: 166970 - RNA, 32 nt, Homo Sapiens
cauuauuuuuauuaagugcuuucauuuucuuu

SEQ ID NO: 166971 - RNA, 32 nt, Homo Sapiens
aacaaaccuacuacacugccaguuguauaaaa

SEQ ID NO: 166972 - RNA, 32 nt, Homo Sapiens
gcagaaacagguaaaaaacaaacaagcaaaua

SEQ ID NO: 166973 - RNA, 32 nt, Homo Sapiens
ggguaagcacaccgcaugucagucuaugcagc

SEQ ID NO: 166974 - RNA, 32 nt, Homo Sapiens
gcuccgggaaaggcccugcuccuguuccgcgc

SEQ ID NO: 166975 - RNA, 32 nt, Homo Sapiens
uugggaaugggaagguucuuuuuuacagaagu

SEQ ID NO: 166976 - RNA, 32 nt, Homo Sapiens
agaaacccuaaaacccuuggauauaaaagaaa

SEQ ID NO: 166977 - RNA, 32 nt, Homo Sapiens
cauccuaagaaaaaaguuuuggguuccugcag

SEQ ID NO: 166978 - RNA, 32 nt, Homo Sapiens
uacaaaggaauuuggaugauaauuauaacuua

SEQ ID NO: 166979 - RNA, 32 nt, Homo Sapiens
cccaccccagccaaaaauauauaaaaaacaag

SEQ ID NO: 166980 - RNA, 32 nt, Homo Sapiens
cauuaguucugcugccgagacuaauaaagauu

SEQ ID NO: 166981 - RNA, 32 nt, Homo Sapiens
cuuuuaauauuuuucucuuggcccacucucuu

SEQ ID NO: 166982 - RNA, 32 nt, Homo Sapiens
gccgagccgcagcgcugugcaagcccccgaug

SEQ ID NO: 166983 - RNA, 32 nt, Homo Sapiens
cuugccuaauugaaauaauuucauuggauuuu

SEQ ID NO: 166984 - RNA, 32 nt, Homo Sapiens
ugaguucugaugcguuaaacggagguggcaga

SEQ ID NO: 166985 - RNA, 32 nt, Homo Sapiens
caauugcaauugcacuggguauauuauauaua

SEQ ID NO: 166986 - RNA, 32 nt, Homo Sapiens
ggggacacaucauauuucugcauuuuacuugc

SEQ ID NO: 166987 - RNA, 32 nt, Homo Sapiens
cauccaaacauguaucucuaaugaaauuguga

SEQ ID NO: 166988 - RNA, 32 nt, Homo Sapiens
ggcugcagggacccggugacagcgugagaggu

SEQ ID NO: 166989 - RNA, 32 nt, Homo Sapiens
agucugcauaggaagggaacaccuggacgugu

SEQ ID NO: 166990 - RNA, 32 nt, Homo Sapiens
uguccacacgacucaccugcuuguccaagggc

SEQ ID NO: 166991 - RNA, 32 nt, Homo Sapiens
agucucaggcccuugacuuuggcccccuuguu

SEQ ID NO: 166992 - RNA, 32 nt, Homo Sapiens
uacauacugcugucuauguggcuguaucuugu

SEQ ID NO: 166993 - RNA, 32 nt, Homo Sapiens
gaagacccaggagagacagagaugcgaaccac

SEQ ID NO: 166994 - RNA, 32 nt, Homo Sapiens
gcugaacauucuuugugcaacuccauggucuu

SEQ ID NO: 166995 - RNA, 32 nt, Homo Sapiens
aagaaacaggauaucacagagaaggcaaguuu

SEQ ID NO: 166996 - RNA, 32 nt, Homo Sapiens
cugugcuccuccucgggggcuggggaaggaag

SEQ ID NO: 166997 - RNA, 32 nt, Homo Sapiens
cacaggguaaaaauuuaaaaacaaacauacaa

SEQ ID NO: 166998 - RNA, 27 nt, Homo Sapiens
aagcgguccuucuaccucagccucugg

SEQ ID NO: 166999 - RNA, 32 nt, Homo Sapiens
aguuccccaggcgcuguagacacaacaugaau

SEQ ID NO: 167000 - RNA, 32 nt, Homo Sapiens
aaaauuagaaucacuuuuuuuuuuuuuuuuga

SEQ ID NO: 167001 - RNA, 32 nt, Homo Sapiens
ugcucuagccccagccaccagccugucccugu

SEQ ID NO: 167002 - RNA, 32 nt, Homo Sapiens
cgcaggcggcugcugggcggccucggugcgcg

SEQ ID NO: 167003 - RNA, 28 nt, Homo Sapiens
uaccugaaagauuuucccuuggaaguuu

SEQ ID NO: 167004 - RNA, 32 nt, Homo Sapiens
cguaggguucccucagaagagccacgguguuu

SEQ ID NO: 167005 - RNA, 32 nt, Homo Sapiens
aaagaggagcugggaccgcggcgagcagcacg

SEQ ID NO: 167006 - RNA, 32 nt, Homo Sapiens
aaacauuuguaucugucagauagacaugagug

SEQ ID NO: 167007 - RNA, 32 nt, Homo Sapiens
cgggccuuuugcuacauucuauccagagagca

SEQ ID NO: 167008 - RNA, 32 nt, Homo Sapiens
ccuauugaagacugugggaguuuuggcggcuu

SEQ ID NO: 167009 - RNA, 32 nt, Homo Sapiens
uacucuaaauuccacuacacuacauuaaagua

SEQ ID NO: 167010 - RNA, 32 nt, Homo Sapiens
gucuucaaggaaagggacuuuuuuccagucug

SEQ ID NO: 167011 - RNA, 32 nt, Homo Sapiens
gcccccaggaggagcaggcugguggcacucuc

SEQ ID NO: 167012 - RNA, 32 nt, Homo Sapiens
cugggucucacucuaucaccaaggcuggaauu

SEQ ID NO: 167013 - RNA, 32 nt, Homo Sapiens
caggaccccggugucccuccccgcgccccgag

SEQ ID NO: 167014 - RNA, 32 nt, Homo Sapiens
ucccauccaucccacccuccucccagaggccc

SEQ ID NO: 167015 - RNA, 32 nt, Homo Sapiens
caugagaacggccucaaggaagacuaaccauc

SEQ ID NO: 167016 - RNA, 32 nt, Homo Sapiens
uauuaggaauaccacagaggccuucaucagaa

SEQ ID NO: 167017 - RNA, 32 nt, Homo Sapiens
cuaacuucaaaauaaacugcagucccauauac

SEQ ID NO: 167018 - RNA, 32 nt, Homo Sapiens
agaaucuagguccgcccucaagcccauacuga

SEQ ID NO: 167019 - RNA, 32 nt, Homo Sapiens
gggagagcugggcgggcccaccgcuccagcgg

SEQ ID NO: 167020 - RNA, 32 nt, Homo Sapiens
gccagucuuccaaagcacuuucagagaaagag

SEQ ID NO: 167021 - RNA, 32 nt, Homo Sapiens
gaaggguuugccaaguuuuaagagaagaugug

SEQ ID NO: 167022 - RNA, 32 nt, Homo Sapiens
cugcucagcuccccucccccgccccgcgccgc

SEQ ID NO: 167023 - RNA, 32 nt, Homo Sapiens
auucaucuuucaugguaaagccuccaguugcc

SEQ ID NO: 167024 - RNA, 32 nt, Homo Sapiens
uucucucaggguggccaguauuuugacuuauu

SEQ ID NO: 167025 - RNA, 32 nt, Homo Sapiens
ugugcccucaggccggccccggccggacaccc

SEQ ID NO: 167026 - RNA, 32 nt, Homo Sapiens
aguugacuauaacuuucccagcccuugauaua

SEQ ID NO: 167027 - RNA, 32 nt, Homo Sapiens
aagacccuuagaugucuucucacgcaacccca

SEQ ID NO: 167028 - RNA, 32 nt, Homo Sapiens
ucuggauggugccaccaaauguuccuacaagu

SEQ ID NO: 167029 - RNA, 32 nt, Homo Sapiens
gugcauaaauagaguguaaauaaaauaguguu

SEQ ID NO: 167030 - RNA, 32 nt, Homo Sapiens
cagaaguaaaaugacuggaaauggcaaaggcu

SEQ ID NO: 167031 - RNA, 32 nt, Homo Sapiens
cuuuauaaggaagaauaaaauaaacguguaag

SEQ ID NO: 167032 - RNA, 32 nt, Homo Sapiens
gaaauggucuagagggaaaugauucaaauuuu

SEQ ID NO: 167033 - RNA, 32 nt, Homo Sapiens
ugcaauuaaaaauaauagggaaugugguaggu

SEQ ID NO: 167034 - RNA, 32 nt, Homo Sapiens
ucaacauguauuauuauuacuuuauccuggaa

SEQ ID NO: 167035 - RNA, 32 nt, Homo Sapiens
uggccucuuuugcuuguaauaacgcagauccc

SEQ ID NO: 167036 - RNA, 32 nt, Homo Sapiens
cggcggcgcggacugggugcgcggcgcagcgu

SEQ ID NO: 167037 - RNA, 32 nt, Homo Sapiens
gcgcucagaaaaggaccuugugagacggagga

SEQ ID NO: 167038 - RNA, 32 nt, Homo Sapiens
uuggcacaaaaauggaaacaaauauauaaaau

SEQ ID NO: 167039 - RNA, 32 nt, Homo Sapiens
gccacagccccagccccagcuccuagagccag

SEQ ID NO: 167040 - RNA, 30 nt, Homo Sapiens
gugucagagaagcuggcaagagcugaggga

SEQ ID NO: 167041 - RNA, 31 nt, Homo Sapiens
caaucccaagccaccugcacaccuggaagcc

SEQ ID NO: 167042 - RNA, 32 nt, Homo Sapiens
guucggggcgcgggucucuuccgcggaaacug

SEQ ID NO: 167043 - RNA, 32 nt, Homo Sapiens
aguauuuuucuuuguuuuaaauggccaaaaga

SEQ ID NO: 167044 - RNA, 32 nt, Homo Sapiens
cgaguuccccguguuggccuccagguccugug

SEQ ID NO: 167045 - RNA, 32 nt, Homo Sapiens
aguuuauuuuuccacuauuaaucuuucuuuug

SEQ ID NO: 167046 - RNA, 32 nt, Homo Sapiens
aaacagguaauuacagauucugaucaguuuau

SEQ ID NO: 167047 - RNA, 32 nt, Homo Sapiens
uuaaaaaguaccagcucuggcugggguccgug

SEQ ID NO: 167048 - RNA, 32 nt, Homo Sapiens
uccugcugcggcaccugcagagcuagggaccc

SEQ ID NO: 167049 - RNA, 32 nt, Homo Sapiens
ucgguucgcagcccagcuccgugagcugccuc

SEQ ID NO: 167050 - RNA, 32 nt, Homo Sapiens
uaauuuguaccuaaguuuuuuaaugaguggaa

SEQ ID NO: 167051 - RNA, 32 nt, Homo Sapiens
gcuucuugccuccacacccuccucuccaggac

SEQ ID NO: 167052 - RNA, 32 nt, Homo Sapiens
augacaacaucauuacccucagcuuuuaaagu

SEQ ID NO: 167053 - RNA, 32 nt, Homo Sapiens
uugaguguuucauuugggaguuauuuggccag

SEQ ID NO: 167054 - RNA, 30 nt, Homo Sapiens
ccaaggcggucucgcgcgggacuuuguaca

SEQ ID NO: 167055 - RNA, 32 nt, Homo Sapiens
caccacaguuuccuggggcacaagugucugug

SEQ ID NO: 167056 - RNA, 32 nt, Homo Sapiens
cuguggcaccgcgcaccugccacagccucaga

SEQ ID NO: 167057 - RNA, 32 nt, Homo Sapiens
uaaaugugguuuuguguuuugcuguauuucaa

SEQ ID NO: 167058 - RNA, 32 nt, Homo Sapiens
cccuccucagcuccagggcagugucccucccu

SEQ ID NO: 167059 - RNA, 32 nt, Homo Sapiens
ggaguccaggagaaggugcugcucuccuugcu

SEQ ID NO: 167060 - RNA, 32 nt, Homo Sapiens
ugaaagcagcauacaggggaaggcuuggacca

SEQ ID NO: 167061 - RNA, 32 nt, Homo Sapiens
uucuuguauauuauggaagauuuuaaauucac

SEQ ID NO: 167062 - RNA, 32 nt, Homo Sapiens
ugauggagcugcguuuccugugcauggacucu

SEQ ID NO: 167063 - RNA, 28 nt, Homo Sapiens
aucuuauuuugcuuaauguguuugugug

SEQ ID NO: 167064 - RNA, 32 nt, Homo Sapiens
gaugaaaaccauccuuaaccccaugauccuuc

SEQ ID NO: 167065 - RNA, 32 nt, Homo Sapiens
cccagaacaaagugggaaagggaagcuuagcc

SEQ ID NO: 167066 - RNA, 32 nt, Homo Sapiens
uguuccccgaccaccuggagcacauguucuca

SEQ ID NO: 167067 - RNA, 32 nt, Homo Sapiens
aaaugcaaaaguguaauacauaaauugucaca

SEQ ID NO: 167068 - RNA, 32 nt, Homo Sapiens
caaggcguggcugaucacggcccgcagccucu

SEQ ID NO: 167069 - RNA, 32 nt, Homo Sapiens
acacaaagaauaaaaacuguugcauugagaua

SEQ ID NO: 167070 - RNA, 32 nt, Homo Sapiens
aucauuuauuaagagaaaauugugaaaaguua

SEQ ID NO: 167071 - RNA, 32 nt, Homo Sapiens
uauaaauaaaauucuagcuuugaaaggcguua

SEQ ID NO: 167072 - RNA, 32 nt, Homo Sapiens
ucugacccucacuccuucuucugacccuuaau

SEQ ID NO: 167073 - RNA, 32 nt, Homo Sapiens
uuaaaccccuaggcgaucauggccuugagacc

SEQ ID NO: 167074 - RNA, 32 nt, Homo Sapiens
guaagacugagaaaucacguaguccuuccuga

SEQ ID NO: 167075 - RNA, 32 nt, Homo Sapiens
agggccuggugccggccugcugccccggccgc

SEQ ID NO: 167076 - RNA, 32 nt, Homo Sapiens
cccgacccugccccggccccacuuccaccuug

SEQ ID NO: 167077 - RNA, 31 nt, Homo Sapiens
ggcgccggcgacugccugccccagccccuca

SEQ ID NO: 167078 - RNA, 32 nt, Homo Sapiens
auaccccgugcgucuccacaccugugcgcucc

SEQ ID NO: 167079 - RNA, 32 nt, Homo Sapiens
cugcuccccuccccagacaccucuccacgucu

SEQ ID NO: 167080 - RNA, 32 nt, Homo Sapiens
uucuucguuuucuugcucccccauuggccuga

SEQ ID NO: 167081 - RNA, 32 nt, Homo Sapiens
cacaccuggcccgucacccaugcucuagacau

SEQ ID NO: 167082 - RNA, 32 nt, Homo Sapiens
uguugaagggaaguugcuggaaagagcaucag

SEQ ID NO: 167083 - RNA, 32 nt, Homo Sapiens
aggagaauugcggcgagacaagcauggaaaau

SEQ ID NO: 167084 - RNA, 32 nt, Homo Sapiens
guuuuuucuuucccuuuuuucugugccugcau

SEQ ID NO: 167085 - RNA, 32 nt, Homo Sapiens
cuaacucugugcuaccuacagagaucccagac

SEQ ID NO: 167086 - RNA, 32 nt, Homo Sapiens
cauguacaaaaauuaugcaauucaguguucca

SEQ ID NO: 167087 - RNA, 32 nt, Homo Sapiens
uuuuaauuggcuuugugccuccugcuuuacaa

SEQ ID NO: 167088 - RNA, 32 nt, Homo Sapiens
auaggaauucuaucacuauagguuaguuuucu

SEQ ID NO: 167089 - RNA, 32 nt, Homo Sapiens
ugguuggauuuugggguggcaguuggacuaau

SEQ ID NO: 167090 - RNA, 32 nt, Homo Sapiens
aggaagaagacuggccauuaugcauccccuuu

SEQ ID NO: 167091 - RNA, 32 nt, Homo Sapiens
caacgggcgucccuccacuccccgaguccccg

SEQ ID NO: 167092 - RNA, 32 nt, Homo Sapiens
agagaauuguggagaccaacuaccacauagca

SEQ ID NO: 167093 - RNA, 32 nt, Homo Sapiens
gaaauggagcguggguggcagcuccuccacac

SEQ ID NO: 167094 - RNA, 32 nt, Homo Sapiens
gaguugcuucugguuuuaauucugcuacuacu

SEQ ID NO: 167095 - RNA, 32 nt, Homo Sapiens
ugcuuacaccaauuggaaauacuaacaugaac

SEQ ID NO: 167096 - RNA, 32 nt, Homo Sapiens
aaggauccacugacuauuguggcuuucucugg

SEQ ID NO: 167097 - RNA, 32 nt, Homo Sapiens
cccugaaagguucaccaaguugccagggucgu

SEQ ID NO: 167098 - RNA, 32 nt, Homo Sapiens
uuguuuuauauuuuaaauuuucaguugcgaac

SEQ ID NO: 167099 - RNA, 32 nt, Homo Sapiens
cucgugccuuuuuuccucuucuaggucucuaa

SEQ ID NO: 167100 - RNA, 32 nt, Homo Sapiens
uggaucuccucagaucuuugguuuuugcuuua

SEQ ID NO: 167101 - RNA, 32 nt, Homo Sapiens
aucgccaaagauucuucugaucugacauuuug

SEQ ID NO: 167102 - RNA, 32 nt, Homo Sapiens
ccaggaccucaagauagcagguuuauacuuag

SEQ ID NO: 167103 - RNA, 29 nt, Homo Sapiens
gcacauguuucaucggaaggccucugaag

SEQ ID NO: 167104 - RNA, 32 nt, Homo Sapiens
acugcuguucuucacuuucaucuugucugcua

SEQ ID NO: 167105 - RNA, 32 nt, Homo Sapiens
gccacucugggcggccagccagcccuggggcc

SEQ ID NO: 167106 - RNA, 32 nt, Homo Sapiens
gccgcgcucuccccgcuucuucgcagucuucg

SEQ ID NO: 167107 - RNA, 32 nt, Homo Sapiens
acacaauaaaauguuauuaaagauggaaaguc

SEQ ID NO: 167108 - RNA, 32 nt, Homo Sapiens
gaauuuucuacacacauuaggcaaauguaugc

SEQ ID NO: 167109 - RNA, 32 nt, Homo Sapiens
gauacaagaaugcuugggugcauauggaaaga

SEQ ID NO: 167110 - RNA, 32 nt, Homo Sapiens
cgcuggagaagcuguucgcccggggcgggccc

SEQ ID NO: 167111 - RNA, 32 nt, Homo Sapiens
ucuuccacugagguauggucuuucaauguguc

SEQ ID NO: 167112 - RNA, 32 nt, Homo Sapiens
gcuaaauacucuacguagauuauuuuguuuaa

SEQ ID NO: 167113 - RNA, 32 nt, Homo Sapiens
cacuuaaaaguucugcuuuacacauaacggca

SEQ ID NO: 167114 - RNA, 32 nt, Homo Sapiens
ggcggcgguggcuccauggcccgggcgcgcug

SEQ ID NO: 167115 - RNA, 32 nt, Homo Sapiens
agcugccauagugaacagcaucagggaagcua

SEQ ID NO: 167116 - RNA, 32 nt, Homo Sapiens
ggcugggucggcgggggcaggggcggggaggu

SEQ ID NO: 167117 - RNA, 32 nt, Homo Sapiens
ugacuccuuguagcugauacuuggcaaaagug

SEQ ID NO: 167118 - RNA, 32 nt, Homo Sapiens
uuugaaaauauguuuuccugcgaugaugggac

SEQ ID NO: 167119 - RNA, 32 nt, Homo Sapiens
ggaucuuccccugucuccgaggcuggaauacg

SEQ ID NO: 167120 - RNA, 32 nt, Homo Sapiens
cuuugggaggcugaggcggguggaucaugagg

SEQ ID NO: 167121 - RNA, 32 nt, Homo Sapiens
guguccaugccagggaugccacagggggcccc

SEQ ID NO: 167122 - RNA, 32 nt, Homo Sapiens
uuuauauguaucuauuuuuguguacuguuuuc

SEQ ID NO: 167123 - RNA, 32 nt, Homo Sapiens
uguaucacacugucaaguuuuauuuugucuuu

SEQ ID NO: 167124 - RNA, 32 nt, Homo Sapiens
uaaaaaaccuggguuaggguguguguucaccu

SEQ ID NO: 167125 - RNA, 32 nt, Homo Sapiens
aaguacaguauuuucauguauuugaauaaugc

SEQ ID NO: 167126 - RNA, 32 nt, Homo Sapiens
gcagaggagaagggcugcuauaaggggcucca

SEQ ID NO: 167127 - RNA, 32 nt, Homo Sapiens
ccaccccugccugccaccugggcccucacagc

SEQ ID NO: 167128 - RNA, 32 nt, Homo Sapiens
aacacuaccgccagccagcgggcucauucacc

SEQ ID NO: 167129 - RNA, 31 nt, Homo Sapiens
gguugggcgggccccaucugggagggguuug

SEQ ID NO: 167130 - RNA, 32 nt, Homo Sapiens
ccuagaggagcccaagccccagcuccauccuc

SEQ ID NO: 167131 - RNA, 32 nt, Homo Sapiens
gacaccgugcgggcucaggagcuccccagaug

SEQ ID NO: 167132 - RNA, 32 nt, Homo Sapiens
aaaacggcggguggguggaggaugcggugcgc

SEQ ID NO: 167133 - RNA, 32 nt, Homo Sapiens
aguauuagucuuuaugucaucauuguucaaaa

SEQ ID NO: 167134 - RNA, 32 nt, Homo Sapiens
uuagagggaagcuggaggaggugggggagaca

SEQ ID NO: 167135 - RNA, 32 nt, Homo Sapiens
ccugcagaaauauaacuguaaaaccacuucca

SEQ ID NO: 167136 - RNA, 32 nt, Homo Sapiens
aauuagccaggcgugguggugcaugccuguag

SEQ ID NO: 167137 - RNA, 32 nt, Homo Sapiens
acgagggagcagcuccucuuccaucuccaggg

SEQ ID NO: 167138 - RNA, 32 nt, Homo Sapiens
aggaacuuuugauaagaccuucuagaagcaaa

SEQ ID NO: 167139 - RNA, 32 nt, Homo Sapiens
uaugaaaauguaaauaccuuugaaaaaacuaa

SEQ ID NO: 167140 - RNA, 32 nt, Homo Sapiens
ucuccauuuuuggcaguuaauuugcagaagua

SEQ ID NO: 167141 - RNA, 32 nt, Homo Sapiens
cuacaaagaacacugaaaggugaugugugugg

SEQ ID NO: 167142 - RNA, 32 nt, Homo Sapiens
ggcgggggucugcggcgacccaccggccucuu

SEQ ID NO: 167143 - RNA, 32 nt, Homo Sapiens
aggcggcccagcgccccuccccacccagcgcc

SEQ ID NO: 167144 - RNA, 32 nt, Homo Sapiens
uaggaacccagaccgaaaaguugcugaaaggg

SEQ ID NO: 167145 - RNA, 32 nt, Homo Sapiens
ggcggauugggucucucugcuguggcguucuc

SEQ ID NO: 167146 - RNA, 30 nt, Homo Sapiens
uccaaaggaagaucuuacuaacucucagug

SEQ ID NO: 167147 - RNA, 32 nt, Homo Sapiens
agcgagcgcgucccccggcgccgcccgagagc

SEQ ID NO: 167148 - RNA, 32 nt, Homo Sapiens
uguuuuuaguaucagcagcauuuggcaaguuu

SEQ ID NO: 167149 - RNA, 32 nt, Homo Sapiens
uccuuuccuuuggguauuugcacuauuuuggg

SEQ ID NO: 167150 - RNA, 32 nt, Homo Sapiens
cuuucuuaauaaaucuugaggcuaugggauaa

SEQ ID NO: 167151 - RNA, 32 nt, Homo Sapiens
cugcagauauugggagauccacagcuaagacg

SEQ ID NO: 167152 - RNA, 32 nt, Homo Sapiens
guuguuuacucugaaauaaaauguaugguuuu

SEQ ID NO: 167153 - RNA, 32 nt, Homo Sapiens
aaauugucuuauauuucuuaaccucuuuuaua

SEQ ID NO: 167154 - RNA, 32 nt, Homo Sapiens
ggccccagcccgccugccccagcccggccuca

SEQ ID NO: 167155 - RNA, 32 nt, Homo Sapiens
uucuuaugccuuuuaaaauacuguuuacuaug

SEQ ID NO: 167156 - RNA, 32 nt, Homo Sapiens
ugguugcccuaccucgaacaagcaccagcuuu

SEQ ID NO: 167157 - RNA, 32 nt, Homo Sapiens
agguuuuuugguuuuuguuuuguuuuguuuug

SEQ ID NO: 167158 - RNA, 32 nt, Homo Sapiens
ucuagguugucaacagguacuauuugucacau

SEQ ID NO: 167159 - RNA, 32 nt, Homo Sapiens
uaaacaaaugucaacucuguuauaauuaauac

SEQ ID NO: 167160 - RNA, 32 nt, Homo Sapiens
cagugagauauaggauaaaauaaugcuuugag

SEQ ID NO: 167161 - RNA, 32 nt, Homo Sapiens
ucuguuaaaaacacauagaaucaucaauaaaa

SEQ ID NO: 167162 - RNA, 32 nt, Homo Sapiens
aacaugaacaagucuguaaagcucagacauuu

SEQ ID NO: 167163 - RNA, 32 nt, Homo Sapiens
cuuaaagaugagagaaccugggacuguugagc

SEQ ID NO: 167164 - RNA, 32 nt, Homo Sapiens
agucugauuacaucauuauuguuccaaauuca

SEQ ID NO: 167165 - RNA, 32 nt, Homo Sapiens
ucugcuuuuuauuuauuuugccuuuuuaucau

SEQ ID NO: 167166 - RNA, 32 nt, Homo Sapiens
acagugcugagcacggggucagggcuggaggg

SEQ ID NO: 167167 - RNA, 32 nt, Homo Sapiens
agcucauggcucucggcggucuucccaggccc

SEQ ID NO: 167168 - RNA, 32 nt, Homo Sapiens
auccagcacuggaguucauuugaaauuugaua

SEQ ID NO: 167169 - RNA, 32 nt, Homo Sapiens
cucucuauaaugguaaauguaagacaucacca

SEQ ID NO: 167170 - RNA, 32 nt, Homo Sapiens
ucucuauuuagaguauaaugucauuaaggaaa

SEQ ID NO: 167171 - RNA, 32 nt, Homo Sapiens
uugagguacucccugagcaggaccccacacuu

SEQ ID NO: 167172 - RNA, 32 nt, Homo Sapiens
ugucaagcugucuacacuucaucccauuguga

SEQ ID NO: 167173 - RNA, 32 nt, Homo Sapiens
cucacacauacucacaaacacacacacaagca

SEQ ID NO: 167174 - RNA, 32 nt, Homo Sapiens
aucucaucacagcgccagcccuguuuuuagcc

SEQ ID NO: 167175 - RNA, 32 nt, Homo Sapiens
uguggguggaggcuggggugucugcacgaagu

SEQ ID NO: 167176 - RNA, 32 nt, Homo Sapiens
gaaaaggucaucaaagggcauucaccaacuga

SEQ ID NO: 167177 - RNA, 32 nt, Homo Sapiens
acuagacccaaguagacuggacacaaagggcu

SEQ ID NO: 167178 - RNA, 32 nt, Homo Sapiens
uuaucaguauauuauuacauuuuguauaucag

SEQ ID NO: 167179 - RNA, 32 nt, Homo Sapiens
guauucuaccuaugucuuuucuguaaauuauu

SEQ ID NO: 167180 - RNA, 32 nt, Homo Sapiens
acaaaauguacaagaccacaauggaugucauc

SEQ ID NO: 167181 - RNA, 30 nt, Homo Sapiens
aaaugcagcucuucagucgcccuggccaca

SEQ ID NO: 167182 - RNA, 28 nt, Homo Sapiens
gcugggguuacaggugugagccacugcg

SEQ ID NO: 167183 - RNA, 32 nt, Homo Sapiens
aaaggcuaacugugaugaugacacuuugguac

SEQ ID NO: 167184 - RNA, 32 nt, Homo Sapiens
ggggcuuugcgguguagcggcgcgccccacuc

SEQ ID NO: 167185 - RNA, 32 nt, Homo Sapiens
gaaaggagugacugauaaaucuaagauucaaa

SEQ ID NO: 167186 - RNA, 32 nt, Homo Sapiens
cccucugcagcccucccugccgccucacccuu

SEQ ID NO: 167187 - RNA, 32 nt, Homo Sapiens
gacccugcaggacuucugugcccacuggguca

SEQ ID NO: 167188 - RNA, 32 nt, Homo Sapiens
ccgcccggggagcggcugcgcgaggaugcgcg

SEQ ID NO: 167189 - RNA, 32 nt, Homo Sapiens
gcuacgcgggccacgcugcuggcuggccugac

SEQ ID NO: 167190 - RNA, 32 nt, Homo Sapiens
aaccaagaauauuguucuuaugcuggaaauuu

SEQ ID NO: 167191 - RNA, 32 nt, Homo Sapiens
ugcgucuuugcagagggagaugauagaggcuu

SEQ ID NO: 167192 - RNA, 32 nt, Homo Sapiens
ccccgggcagggcugccuccucaccucucuuc

SEQ ID NO: 167193 - RNA, 32 nt, Homo Sapiens
guguucagaaaagugggcagugguggcacggg

SEQ ID NO: 167194 - RNA, 32 nt, Homo Sapiens
uccacaccucugcucuuuccuguuccuguagu

SEQ ID NO: 167195 - RNA, 32 nt, Homo Sapiens
gcuuggcaucugugagcccacauccugcagca

SEQ ID NO: 167196 - RNA, 32 nt, Homo Sapiens
cgagggguggcuuugauuucggcgaugagcuc

SEQ ID NO: 167197 - RNA, 32 nt, Homo Sapiens
cgucgccuucgcccgccgaccgggccagccgg

SEQ ID NO: 167198 - RNA, 32 nt, Homo Sapiens
cugcagggcuucccuggcccccucccauaccc

SEQ ID NO: 167199 - RNA, 29 nt, Homo Sapiens
acagccauagugauucuguuaaccaugaa

SEQ ID NO: 167200 - RNA, 32 nt, Homo Sapiens
ucaccucaguccagcucuggggccuccaggcc

SEQ ID NO: 167201 - RNA, 32 nt, Homo Sapiens
aaacagucaccaucuucuacccccaucacugu

SEQ ID NO: 167202 - RNA, 32 nt, Homo Sapiens
guccgggugggaacgcugugucuguuggucug

SEQ ID NO: 167203 - RNA, 32 nt, Homo Sapiens
gcaacggaauuaggaagaccaagacacagauc

SEQ ID NO: 167204 - RNA, 32 nt, Homo Sapiens
acagcccagagccccaggugccuggccuggcc

SEQ ID NO: 167205 - RNA, 32 nt, Homo Sapiens
aaaccaaaaugaauccauuucccaguuugaca

SEQ ID NO: 167206 - RNA, 32 nt, Homo Sapiens
ucacccuuucccuaccuucagacucuauucuu

SEQ ID NO: 167207 - RNA, 32 nt, Homo Sapiens
gcggggcccaggucccuuugggcccgcggagg

SEQ ID NO: 167208 - RNA, 32 nt, Homo Sapiens
gccacagcuguaagcagcucucugccagccac

SEQ ID NO: 167209 - RNA, 32 nt, Homo Sapiens
aguuuaauucugaguucucauuaaaagaaauu

SEQ ID NO: 167210 - RNA, 32 nt, Homo Sapiens
aguuccugcuaggcaaccaaauuuaagcuccu

SEQ ID NO: 167211 - RNA, 32 nt, Homo Sapiens
ugugcaagaaaagaacaaggaaaaauggaugu

SEQ ID NO: 167212 - RNA, 32 nt, Homo Sapiens
agagauccugaaaccucugucauggaaaagua

SEQ ID NO: 167213 - RNA, 30 nt, Homo Sapiens
agaaggaagucauuugcugagucugcagaa

SEQ ID NO: 167214 - RNA, 32 nt, Homo Sapiens
aaugagaaaugaauucuuuuucuggcugucca

SEQ ID NO: 167215 - RNA, 32 nt, Homo Sapiens
caggcgugguggcucaugccugcggucccagc

SEQ ID NO: 167216 - RNA, 32 nt, Homo Sapiens
ugucgcguacggcuacccaggccgccucguga

SEQ ID NO: 167217 - RNA, 32 nt, Homo Sapiens
auuuuaucuuccgcagauaaauguagaaauac

SEQ ID NO: 167218 - RNA, 32 nt, Homo Sapiens
caguggggcuuggccuggcuucuguggccugg

SEQ ID NO: 167219 - RNA, 32 nt, Homo Sapiens
agguaaaaguuccagaaaugugaggacaaaga

SEQ ID NO: 167220 - RNA, 32 nt, Homo Sapiens
auguacguuauuuccaaagucauuucauuaaa

SEQ ID NO: 167221 - RNA, 32 nt, Homo Sapiens
aagaacauguagcuuaagaaauccaggcacuu

SEQ ID NO: 167222 - RNA, 32 nt, Homo Sapiens
uuguuuaaaaauuuauaacaguuauaaagaaa

SEQ ID NO: 167223 - RNA, 32 nt, Homo Sapiens
caagaaaguuaagauagcacacaggugcacau

SEQ ID NO: 167224 - RNA, 32 nt, Homo Sapiens
ccgcucccucccccaccacacaucagugucuc

SEQ ID NO: 167225 - RNA, 32 nt, Homo Sapiens
ggcucauguucacuucccuuuucaaguugaag

SEQ ID NO: 167226 - RNA, 32 nt, Homo Sapiens
gcuugcuugcuccuccucucccccagcccuuc

SEQ ID NO: 167227 - RNA, 32 nt, Homo Sapiens
ggcuagaauuugaugauauuaaacuauguauu

SEQ ID NO: 167228 - RNA, 32 nt, Homo Sapiens
agaguuggccugagcccuccugcccacucgcc

SEQ ID NO: 167229 - RNA, 32 nt, Homo Sapiens
auguucccugucacucaguagccaauccgggg

SEQ ID NO: 167230 - RNA, 31 nt, Homo Sapiens
caagugaacauauaaaauuggcugucacauc

SEQ ID NO: 167231 - RNA, 32 nt, Homo Sapiens
gagaaggggucucacuauguugucuggagugc

SEQ ID NO: 167232 - RNA, 32 nt, Homo Sapiens
uuagugugccaagaguacgauauuagcguuuc

SEQ ID NO: 167233 - RNA, 32 nt, Homo Sapiens
gcacuguauuaaauuuaaauguuaaugugaaa

SEQ ID NO: 167234 - RNA, 32 nt, Homo Sapiens
cgccgccgcccggcauccugagcacggagaca

SEQ ID NO: 167235 - RNA, 32 nt, Homo Sapiens
ucauuauucuacucuuuuuuuuucuuuuccuu

SEQ ID NO: 167236 - RNA, 32 nt, Homo Sapiens
guauguuuaguaaaaaucaugcucguaauggc

SEQ ID NO: 167237 - RNA, 32 nt, Homo Sapiens
uggaauggacuacuccaagggaaucuguaaag

SEQ ID NO: 167238 - RNA, 32 nt, Homo Sapiens
uccaggagaccauaacuuauuuuugagggagg

SEQ ID NO: 167239 - RNA, 32 nt, Homo Sapiens
uuuauaauauaaaagcaaaguuuuugucauua

SEQ ID NO: 167240 - RNA, 30 nt, Homo Sapiens
uggccuggaggugggguugggauugggggc

SEQ ID NO: 167241 - RNA, 32 nt, Homo Sapiens
acaugguauaauguauuggaguggguuuuggu

SEQ ID NO: 167242 - RNA, 32 nt, Homo Sapiens
aauauuuuaagguauucagcucugcacaaaua

SEQ ID NO: 167243 - RNA, 32 nt, Homo Sapiens
caagcuucaaggauuuacccaggacucuauuu

SEQ ID NO: 167244 - RNA, 32 nt, Homo Sapiens
aagaaaagacacugaagcuaaaaaagacaugc

SEQ ID NO: 167245 - RNA, 32 nt, Homo Sapiens
gcgggagcggcuggaggaggaagagggcaugg

SEQ ID NO: 167246 - RNA, 32 nt, Homo Sapiens
gcccacccaagcaggaggcugggacgcucugc

SEQ ID NO: 167247 - RNA, 32 nt, Homo Sapiens
gcagcggccgcuugccggcguucuggcuccug

SEQ ID NO: 167248 - RNA, 32 nt, Homo Sapiens
acuugcggauguucagcgugcauguggaaucc

SEQ ID NO: 167249 - RNA, 32 nt, Homo Sapiens
cugucucuggggcucaucuuacuaguaucccc

SEQ ID NO: 167250 - RNA, 32 nt, Homo Sapiens
uuaaaguuuuuauuauuuuuuauacauuguaa

SEQ ID NO: 167251 - RNA, 32 nt, Homo Sapiens
cacagucagcaucgacaggggcacagcagugg

SEQ ID NO: 167252 - RNA, 32 nt, Homo Sapiens
ggccaagggcgaggaggagggcugggaguaug

SEQ ID NO: 167253 - RNA, 32 nt, Homo Sapiens
gggcacagugauuauaggcuuucgcucuaaga

SEQ ID NO: 167254 - RNA, 32 nt, Homo Sapiens
uaucauauuuuauguauguagcuuauucaaag

SEQ ID NO: 167255 - RNA, 32 nt, Homo Sapiens
cuauuuacuguaaaaauaaauuggacuuugca

SEQ ID NO: 167256 - RNA, 32 nt, Homo Sapiens
ugguggugucugucagacacacacaggucgcc

SEQ ID NO: 167257 - RNA, 32 nt, Homo Sapiens
aaaauacguuuaaugacguuuuccucaaugua

SEQ ID NO: 167258 - RNA, 32 nt, Homo Sapiens
uuuuuucuuuucuucuuuuuuauuauuuuuuu

SEQ ID NO: 167259 - RNA, 32 nt, Homo Sapiens
agcgccccaggcccugccccagcccgccaugc

SEQ ID NO: 167260 - RNA, 32 nt, Homo Sapiens
ugcaauuguuuuauuugcucaugggcacuucu

SEQ ID NO: 167261 - RNA, 32 nt, Homo Sapiens
uacugacaucgugucggacuagugccuguuua

SEQ ID NO: 167262 - RNA, 32 nt, Homo Sapiens
gagggguucuuaaauuauauuuaaaaaaguaa

SEQ ID NO: 167263 - RNA, 32 nt, Homo Sapiens
cccuuuguagaaauguuacauugggauggaua

SEQ ID NO: 167264 - RNA, 32 nt, Homo Sapiens
uguagaaugcuucccagguccacacagagaga

SEQ ID NO: 167265 - RNA, 32 nt, Homo Sapiens
uauuuggcaucuaacuaacaagagauaaaacc

SEQ ID NO: 167266 - RNA, 32 nt, Homo Sapiens
aauguguuuguguuuguagacaaaaggcaaag

SEQ ID NO: 167267 - RNA, 32 nt, Homo Sapiens
aauggaauguauuuuuaagagaauaaagucua

SEQ ID NO: 167268 - RNA, 32 nt, Homo Sapiens
agccgcaggaggaaggagguugugcagggucu

SEQ ID NO: 167269 - RNA, 32 nt, Homo Sapiens
cuucguauaaauaauguggaucuuacauguaa

SEQ ID NO: 167270 - RNA, 32 nt, Homo Sapiens
cugcuauacaguuguuaaaucuuaaauaugcu

SEQ ID NO: 167271 - RNA, 32 nt, Homo Sapiens
auguuaaaauuuuuacuuaauucauagccuuc

SEQ ID NO: 167272 - RNA, 32 nt, Homo Sapiens
uugcuagcuuuucuguguuggugucuaauauu

SEQ ID NO: 167273 - RNA, 32 nt, Homo Sapiens
gccggacagauauauauuccaacaccaaggug

SEQ ID NO: 167274 - RNA, 32 nt, Homo Sapiens
caggcagacaaugaaauugaucuuuugacugu

SEQ ID NO: 167275 - RNA, 32 nt, Homo Sapiens
gcucugugcugaaauuugaagaccagauaaug

SEQ ID NO: 167276 - RNA, 30 nt, Homo Sapiens
uccccccaugcuccugguuucugcuuagga

SEQ ID NO: 167277 - RNA, 32 nt, Homo Sapiens
agcuagagguacuguuauuaauguaucagcaa

SEQ ID NO: 167278 - RNA, 32 nt, Homo Sapiens
agaggaggggcccuaacugaaaaaaccagggc

SEQ ID NO: 167279 - RNA, 32 nt, Homo Sapiens
gugagggcaggggacaaggugcagcugaggcc

SEQ ID NO: 167280 - RNA, 32 nt, Homo Sapiens
ccagaaagggaagugaggagaaucagauccca

SEQ ID NO: 167281 - RNA, 32 nt, Homo Sapiens
cggcgcugggagagggcggagggggaggcggc

SEQ ID NO: 167282 - RNA, 32 nt, Homo Sapiens
acaagauacuaaauauuuuaggcuuugcaggc

SEQ ID NO: 167283 - RNA, 32 nt, Homo Sapiens
agacaaguuaccagaagaaaauuaaagucacc

SEQ ID NO: 167284 - RNA, 32 nt, Homo Sapiens
uuugucuacaaaucacugaacucagguacuac

SEQ ID NO: 167285 - RNA, 32 nt, Homo Sapiens
ggcugaggccgcguauucucccucucauccug

SEQ ID NO: 167286 - RNA, 32 nt, Homo Sapiens
aaggggccagugcgggcagccagggccuagug

SEQ ID NO: 167287 - RNA, 32 nt, Homo Sapiens
acucugaaacacacugaaagcucuguugcaau

SEQ ID NO: 167288 - RNA, 32 nt, Homo Sapiens
ugggaccugaagaugcucuauucauccauuug

SEQ ID NO: 167289 - RNA, 32 nt, Homo Sapiens
uuuugguuugggaggcuggaaaagcaccccaa

SEQ ID NO: 167290 - RNA, 32 nt, Homo Sapiens
auggaagguggaguuuccugcuguugcuugug

SEQ ID NO: 167291 - RNA, 32 nt, Homo Sapiens
auuuucagguuguggcagcuggugccgggugg

SEQ ID NO: 167292 - RNA, 32 nt, Homo Sapiens
ccuaggacugacucggcagugugcaguggugc

SEQ ID NO: 167293 - RNA, 32 nt, Homo Sapiens
aagggacaagaauauauaaacaauauucauuu

SEQ ID NO: 167294 - RNA, 32 nt, Homo Sapiens
uuuauuuuaucauuuuaauguuuucauggacu

SEQ ID NO: 167295 - RNA, 32 nt, Homo Sapiens
cuucuuugugguacuuguuuugugugaaaggu

SEQ ID NO: 167296 - RNA, 32 nt, Homo Sapiens
cgugacauauaagccauuaaaauaucauccug

SEQ ID NO: 167297 - RNA, 32 nt, Homo Sapiens
uuauuuuugguguuguucgauugucuuucauu

SEQ ID NO: 167298 - RNA, 32 nt, Homo Sapiens
uuuaaguauucuucagugcaaucuucaguuuu

SEQ ID NO: 167299 - RNA, 32 nt, Homo Sapiens
aucuguuuccuggauaauaccuuuaagaauaa

SEQ ID NO: 167300 - RNA, 32 nt, Homo Sapiens
auuuaccacaguguuauuuuuaucgucauaau

SEQ ID NO: 167301 - RNA, 31 nt, Homo Sapiens
ccccgccgccgccgccugcccgccggacaaa

SEQ ID NO: 167302 - RNA, 32 nt, Homo Sapiens
uaaaauuccagaaagcaaaauugauaagaugu

SEQ ID NO: 167303 - RNA, 32 nt, Homo Sapiens
aagauuuuucuuuuuacaacuagauauuaguu

SEQ ID NO: 167304 - RNA, 27 nt, Homo Sapiens
uguauuuauuaauucugucaugugcaa

SEQ ID NO: 167305 - RNA, 32 nt, Homo Sapiens
cugaguaacauuuucacgauuguuauaaaauu

SEQ ID NO: 167306 - RNA, 32 nt, Homo Sapiens
uuuuauguguucaguugccauuccuagcuuug

SEQ ID NO: 167307 - RNA, 32 nt, Homo Sapiens
uaaggccagaaaucuucuaaccuaccagagcc

SEQ ID NO: 167308 - RNA, 32 nt, Homo Sapiens
acaauacaguuaucuuuuuuauuguguugugu

SEQ ID NO: 167309 - RNA, 32 nt, Homo Sapiens
gacaaauuccuuuuccucuuaguuucuucaua

SEQ ID NO: 167310 - RNA, 32 nt, Homo Sapiens
uccagggcugugcaggaugugccuuguuaaca

SEQ ID NO: 167311 - RNA, 32 nt, Homo Sapiens
caacaagaugucucuguaaaaaugauauuggc

SEQ ID NO: 167312 - RNA, 32 nt, Homo Sapiens
uaucuauccuggauucugaacucuucaauuug

SEQ ID NO: 167313 - RNA, 32 nt, Homo Sapiens
agccuuucugucaucaucuccacagcccaccc

SEQ ID NO: 167314 - RNA, 32 nt, Homo Sapiens
aaauucaguuauauuuaaucuuuguaaucuca

SEQ ID NO: 167315 - RNA, 32 nt, Homo Sapiens
cugcccggggagaguggguauggcggcugagc

SEQ ID NO: 167316 - RNA, 32 nt, Homo Sapiens
gguguuucuagcacuggccugcacggugggcc

SEQ ID NO: 167317 - RNA, 32 nt, Homo Sapiens
gggugaagggagucugggcaagcaaagcauag

SEQ ID NO: 167318 - RNA, 32 nt, Homo Sapiens
uggcaaagaaugcucuggcugguuaccagggg

SEQ ID NO: 167319 - RNA, 32 nt, Homo Sapiens
cggggcccgcggcgaugccguuccugcacggc

SEQ ID NO: 167320 - RNA, 32 nt, Homo Sapiens
uccugagaagacacuggugucuggggacaggg

SEQ ID NO: 167321 - RNA, 31 nt, Homo Sapiens
acaagaacaaauuguggaucaugguauaugc

SEQ ID NO: 167322 - RNA, 32 nt, Homo Sapiens
caauguauucaaauuauguaacucggccgggu

SEQ ID NO: 167323 - RNA, 32 nt, Homo Sapiens
cccuuagcuggugccacuucccuccuguggca

SEQ ID NO: 167324 - RNA, 32 nt, Homo Sapiens
accauauguaugcuauuaaaauauauugagau

SEQ ID NO: 167325 - RNA, 32 nt, Homo Sapiens
uuuugccgagaccagcugggucguggagaccc

SEQ ID NO: 167326 - RNA, 32 nt, Homo Sapiens
aaaaaggauaccuuuaaguaaaacacuaccac

SEQ ID NO: 167327 - RNA, 30 nt, Homo Sapiens
ccaaaaugacgaacacaaagggaaagagga

SEQ ID NO: 167328 - RNA, 32 nt, Homo Sapiens
gaguccgcccugccccucccccggccccccau

SEQ ID NO: 167329 - RNA, 32 nt, Homo Sapiens
gcuaacggucccgucgggcgggcuuuccucgg

SEQ ID NO: 167330 - RNA, 29 nt, Homo Sapiens
uuauuugugacuuuggaguggaagcuucc

SEQ ID NO: 167331 - RNA, 32 nt, Homo Sapiens
gacacagggcgguggccucugagaagcagcuc

SEQ ID NO: 167332 - RNA, 32 nt, Homo Sapiens
gggugggaccagccugugaccucucagucaga

SEQ ID NO: 167333 - RNA, 32 nt, Homo Sapiens
gugccguauugauaaggagaugauguugaaca

SEQ ID NO: 167334 - RNA, 32 nt, Homo Sapiens
agagggcgggugcacagcgccaugagcgggca

SEQ ID NO: 167335 - RNA, 32 nt, Homo Sapiens
uccacucgcgggaagcgagagucugagucgcg

SEQ ID NO: 167336 - RNA, 32 nt, Homo Sapiens
gaaagggaaaggaaaucagcaacucuucaauc

SEQ ID NO: 167337 - RNA, 32 nt, Homo Sapiens
agaagucucucuuuccucucugugccucucug

SEQ ID NO: 167338 - RNA, 32 nt, Homo Sapiens
cuuggggccaaccccaggaccuuuggcucugu

SEQ ID NO: 167339 - RNA, 32 nt, Homo Sapiens
gcccuuggcuggaggcgugaccucaaccccac

SEQ ID NO: 167340 - RNA, 32 nt, Homo Sapiens
aauuuauaguuaaggcuaaaaaguauauuuau

SEQ ID NO: 167341 - RNA, 32 nt, Homo Sapiens
cgccugcugcugggcgugaugucgcuggaggu

SEQ ID NO: 167342 - RNA, 32 nt, Homo Sapiens
uuggcagggcuagucuggacuggccaauccag

SEQ ID NO: 167343 - RNA, 32 nt, Homo Sapiens
aggaauguauaaaguuccacauggaagcuggg

SEQ ID NO: 167344 - RNA, 31 nt, Homo Sapiens
cuccuggagcgcagccagcgcacagcguuuc

SEQ ID NO: 167345 - RNA, 32 nt, Homo Sapiens
ucugaaagaccacagcacucuaugucuacuuc

SEQ ID NO: 167346 - RNA, 32 nt, Homo Sapiens
gcugggaucucuaaaagugucugauaagcauc

SEQ ID NO: 167347 - RNA, 32 nt, Homo Sapiens
cccugcagcccuagcgauccagcccuccccug

SEQ ID NO: 167348 - RNA, 32 nt, Homo Sapiens
agaggccuggaccaccuggggcucccugagga

SEQ ID NO: 167349 - RNA, 32 nt, Homo Sapiens
uucccauuuuaaaaucuaaacuagacaucuua

SEQ ID NO: 167350 - RNA, 32 nt, Homo Sapiens
uuuguuuuuggcugucucugguccuugauuca

SEQ ID NO: 167351 - RNA, 32 nt, Homo Sapiens
cuuggaaaugugcauagguuguguguauaugu

SEQ ID NO: 167352 - RNA, 32 nt, Homo Sapiens
ugggacuugggucuguccugcugugcauccau

SEQ ID NO: 167353 - RNA, 31 nt, Homo Sapiens
uagcugggaguucagaaccaugguggaauaa

SEQ ID NO: 167354 - RNA, 32 nt, Homo Sapiens
guaucacucccucugacucaucggcccuacag

SEQ ID NO: 167355 - RNA, 32 nt, Homo Sapiens
caguugauacucccccaccucccccauuuaga

SEQ ID NO: 167356 - RNA, 32 nt, Homo Sapiens
cuucaguggaucccgcgccggggccgcgggcg

SEQ ID NO: 167357 - RNA, 32 nt, Homo Sapiens
aguauggcugaauuguuaucggguggauacag

SEQ ID NO: 167358 - RNA, 32 nt, Homo Sapiens
aggagccccccucccuggagacacacccaacu

SEQ ID NO: 167359 - RNA, 32 nt, Homo Sapiens
uccaagucccgggucucaacuuuaagauagag

SEQ ID NO: 167360 - RNA, 32 nt, Homo Sapiens
uccacacccacuuuguccauuugcaaauauau

SEQ ID NO: 167361 - RNA, 32 nt, Homo Sapiens
aucaauggcugccaaaaccauuaaguggaaag

SEQ ID NO: 167362 - RNA, 32 nt, Homo Sapiens
acuaagccccgucugaccccagcccagacagc

SEQ ID NO: 167363 - RNA, 32 nt, Homo Sapiens
cacugauguucaugugagaauuacuguuuuua

SEQ ID NO: 167364 - RNA, 32 nt, Homo Sapiens
gagaaaugucauguacauaauguauauuguug

SEQ ID NO: 167365 - RNA, 32 nt, Homo Sapiens
gcuucugguaugcaugagaaauuucacauuua

SEQ ID NO: 167366 - RNA, 32 nt, Homo Sapiens
gaggggagaguguagggaaaaggauccacugg

SEQ ID NO: 167367 - RNA, 32 nt, Homo Sapiens
gguaacccagcagcaccguaccucugcccugu

SEQ ID NO: 167368 - RNA, 32 nt, Homo Sapiens
gcgccccugugcgagugaccgccaacagcguc

SEQ ID NO: 167369 - RNA, 32 nt, Homo Sapiens
ccucgcgcaccagucccggcccggcagccgcu

SEQ ID NO: 167370 - RNA, 32 nt, Homo Sapiens
ggaaggggcggaagcagccagagccucuggag

SEQ ID NO: 167371 - RNA, 32 nt, Homo Sapiens
augcucugcucggcuucagucuccaggagaca

SEQ ID NO: 167372 - RNA, 32 nt, Homo Sapiens
gcuuuaagaaugcuuucuggguauuaaaaugu

SEQ ID NO: 167373 - RNA, 32 nt, Homo Sapiens
aaagaacaaaaauaaaaauguauaacauuugu

SEQ ID NO: 167374 - RNA, 32 nt, Homo Sapiens
cagcagaggcagauccuggacuuggaccuggg

SEQ ID NO: 167375 - RNA, 32 nt, Homo Sapiens
gacaggagugugggggcgccuuggcggacagu

SEQ ID NO: 167376 - RNA, 32 nt, Homo Sapiens
gccuugaagcaagcauccccccugcccuuuuu

SEQ ID NO: 167377 - RNA, 32 nt, Homo Sapiens
aaaagaggagcguuguuucaucuuucaaaaug

SEQ ID NO: 167378 - RNA, 32 nt, Homo Sapiens
agcgcgcguccaccggcuccccggcucgcgcc

SEQ ID NO: 167379 - RNA, 32 nt, Homo Sapiens
gggacucugcugugcugcgggcauccuguggu

SEQ ID NO: 167380 - RNA, 32 nt, Homo Sapiens
aaagguggaaaacagcaggaacaccucuccuc

SEQ ID NO: 167381 - RNA, 32 nt, Homo Sapiens
uccagugaugucacaauucuuacugagggcag

SEQ ID NO: 167382 - RNA, 31 nt, Homo Sapiens
gcauuugugcacaaggagcaggcaagcaggc

SEQ ID NO: 167383 - RNA, 32 nt, Homo Sapiens
cuucugcgaauucuguggccaagcagaccuuc

SEQ ID NO: 167384 - RNA, 32 nt, Homo Sapiens
ugugaaugaacugauauaucaaacaugcauag

SEQ ID NO: 167385 - RNA, 32 nt, Homo Sapiens
auaauguaaaauguugaauaaaaauauguaca

SEQ ID NO: 167386 - RNA, 32 nt, Homo Sapiens
gcccggccgcaccaccugggucuccgccauga

SEQ ID NO: 167387 - RNA, 32 nt, Homo Sapiens
cuggagauucuagcaagaagugccaagauugg

SEQ ID NO: 167388 - RNA, 32 nt, Homo Sapiens
cauuuaggggagggcagaggccugcaguuugg

SEQ ID NO: 167389 - RNA, 32 nt, Homo Sapiens
cucaccaggaggaagaagcaugcagggcacuc

SEQ ID NO: 167390 - RNA, 32 nt, Homo Sapiens
aguucugaaauuuauuugauucugaucugaaa

SEQ ID NO: 167391 - RNA, 32 nt, Homo Sapiens
auucagauccaauguaacuccaaauauuuacc

SEQ ID NO: 167392 - RNA, 32 nt, Homo Sapiens
gucuggcugucgcagcgccgggccgccccgac

SEQ ID NO: 167393 - RNA, 32 nt, Homo Sapiens
cggcggcggcgguagcggaggagacgguuuca

SEQ ID NO: 167394 - RNA, 32 nt, Homo Sapiens
uaggacaggcaaagagaagcuuccucaggcua

SEQ ID NO: 167395 - RNA, 32 nt, Homo Sapiens
ggcuucccgagcugacguggcuugaauuggga

SEQ ID NO: 167396 - RNA, 31 nt, Homo Sapiens
ucuacauauaagguuuuuauuugaauuguaa

SEQ ID NO: 167397 - RNA, 32 nt, Homo Sapiens
auguauagacauuucucggguuccuaccuuug

SEQ ID NO: 167398 - RNA, 32 nt, Homo Sapiens
gccaggcagggccuuccuccucuuccuccucc

SEQ ID NO: 167399 - RNA, 32 nt, Homo Sapiens
aggaggcguacuggcggcuacucuuuaaaaag

SEQ ID NO: 167400 - RNA, 30 nt, Homo Sapiens
uggaaagcacuugccuccugucuuaagaau

SEQ ID NO: 167401 - RNA, 32 nt, Homo Sapiens
gacccgagucggagcugugugucgcagccgcc

SEQ ID NO: 167402 - RNA, 32 nt, Homo Sapiens
gcguaaaaaaauuuucacauugaaaugauaga

SEQ ID NO: 167403 - RNA, 30 nt, Homo Sapiens
ugccgugucuguguagaaagagguagacgu

SEQ ID NO: 167404 - RNA, 32 nt, Homo Sapiens
uuuuuccuaaaauaaacucaaauuuauccuug

SEQ ID NO: 167405 - RNA, 32 nt, Homo Sapiens
ccuggagauaaaacuugucuccucuaccacca

SEQ ID NO: 167406 - RNA, 32 nt, Homo Sapiens
gccgcauuccaagaaguaucugucgcgggcgc

SEQ ID NO: 167407 - RNA, 32 nt, Homo Sapiens
guguuccgcccggggcuccaccagggcaggga

SEQ ID NO: 167408 - RNA, 32 nt, Homo Sapiens
agucuggagucugggcagcugucugccucucu

SEQ ID NO: 167409 - RNA, 32 nt, Homo Sapiens
cuagggguuuucuguuggauaauuagcaguuu

SEQ ID NO: 167410 - RNA, 32 nt, Homo Sapiens
cgcuuguuugcucagcuucugcucuuagacca

SEQ ID NO: 167411 - RNA, 32 nt, Homo Sapiens
cacgcaaaaaccccauccaaaggucaacaaca

SEQ ID NO: 167412 - RNA, 32 nt, Homo Sapiens
acgguuggccauugugaccccugcgacacaca

SEQ ID NO: 167413 - RNA, 32 nt, Homo Sapiens
cacuucaggguucuccucuccccucuaaggcc

SEQ ID NO: 167414 - RNA, 32 nt, Homo Sapiens
aguuaaaucaguaaucugucgcauuucaucaa

SEQ ID NO: 167415 - RNA, 32 nt, Homo Sapiens
uggaacugcaggauacacuccccuccugcuac

SEQ ID NO: 167416 - RNA, 32 nt, Homo Sapiens
gagcaggacccauggcugggcggcuggugagc

SEQ ID NO: 167417 - RNA, 32 nt, Homo Sapiens
uguggggagugcaugccuggggccucugggug

SEQ ID NO: 167418 - RNA, 32 nt, Homo Sapiens
uucuuuauuucugucucauaauugucaaaaac

SEQ ID NO: 167419 - RNA, 32 nt, Homo Sapiens
cugcagugcccaaggaauuucugcucugguua

SEQ ID NO: 167420 - RNA, 32 nt, Homo Sapiens
ugaaaaagucauugauaucuuuucacaucuua

SEQ ID NO: 167421 - RNA, 32 nt, Homo Sapiens
ccgguggcggcuggggucggcugcugggagga

SEQ ID NO: 167422 - RNA, 32 nt, Homo Sapiens
gugaggcgccuggccgggcugcuccgcagggc

SEQ ID NO: 167423 - RNA, 32 nt, Homo Sapiens
uagaggugcagggggcaguacucaacaugauc

SEQ ID NO: 167424 - RNA, 31 nt, Homo Sapiens
acagauauagcguauaaagauauaguaaaug

SEQ ID NO: 167425 - RNA, 32 nt, Homo Sapiens
ucauuuggaaagauuaaaaaaacaaguuugau

SEQ ID NO: 167426 - RNA, 32 nt, Homo Sapiens
cuggagaacugggugggggucugugggugucc

SEQ ID NO: 167427 - RNA, 32 nt, Homo Sapiens
ugaggucaagacugggucuccucccuccuccc

SEQ ID NO: 167428 - RNA, 32 nt, Homo Sapiens
caguugaggauggccggagccgagggcgccgc

SEQ ID NO: 167429 - RNA, 32 nt, Homo Sapiens
ccagcgccacccgggcgccaccccgcuguccc

SEQ ID NO: 167430 - RNA, 32 nt, Homo Sapiens
aacucuuauucccaagcuuauauccuuaauca

SEQ ID NO: 167431 - RNA, 32 nt, Homo Sapiens
agcuuccuacaucacaucugcgggaaacggaa

SEQ ID NO: 167432 - RNA, 32 nt, Homo Sapiens
aggccuuaugagugcagugacugugggaaauc

SEQ ID NO: 167433 - RNA, 32 nt, Homo Sapiens
gaagaggauucaguaacauuuggccuccaaaa

SEQ ID NO: 167434 - RNA, 32 nt, Homo Sapiens
caaaggcuuuuuuuuucuucaaccccauuuuc

SEQ ID NO: 167435 - RNA, 32 nt, Homo Sapiens
uuauaggguauauacucagaaaugguggugcu

SEQ ID NO: 167436 - RNA, 32 nt, Homo Sapiens
uauuauuaguguccaaaaugggacucccaagu

SEQ ID NO: 167437 - RNA, 32 nt, Homo Sapiens
gugcugagcguggagcugcccgggcugcuggc

SEQ ID NO: 167438 - RNA, 32 nt, Homo Sapiens
ggguuuggaggggcugaacaucgcgggguguu

SEQ ID NO: 167439 - RNA, 32 nt, Homo Sapiens
acaaaaaugaaauuauuuauuggcgguuauag

SEQ ID NO: 167440 - RNA, 32 nt, Homo Sapiens
ccauaauacccuuuuccaaccuaccucacaag

SEQ ID NO: 167441 - RNA, 32 nt, Homo Sapiens
aacccaggaucuggauagcaagcaaaaauauu

SEQ ID NO: 167442 - RNA, 32 nt, Homo Sapiens
ccuuuuuaacauguuaaauacuauugugcauu

SEQ ID NO: 167443 - RNA, 32 nt, Homo Sapiens
gccagggacaggggcgcaggugcaccaagaga

SEQ ID NO: 167444 - RNA, 32 nt, Homo Sapiens
gauuucaggacguuuacccagcccuuuagugg

SEQ ID NO: 167445 - RNA, 32 nt, Homo Sapiens
cuguuucaaccauauccuuucaaaccagauca

SEQ ID NO: 167446 - RNA, 32 nt, Homo Sapiens
uuugcaaccacagguacccacauugcuggcac

SEQ ID NO: 167447 - RNA, 32 nt, Homo Sapiens
gaaaagaauggggagggucagcaguccacggc

SEQ ID NO: 167448 - RNA, 32 nt, Homo Sapiens
aaaggccggcgcacgcugggcggugguggucc

SEQ ID NO: 167449 - RNA, 32 nt, Homo Sapiens
ggcugaggcccccacccuccccuggaacgcgc

SEQ ID NO: 167450 - RNA, 32 nt, Homo Sapiens
uucugauguuaaaaugcugaccagaacacucu

SEQ ID NO: 167451 - RNA, 32 nt, Homo Sapiens
cauguuuuguuuauaauuuauacaucuauuaa

SEQ ID NO: 167452 - RNA, 28 nt, Homo Sapiens
aauaaugaaaauaaaggcaauggcaucc

SEQ ID NO: 167453 - RNA, 32 nt, Homo Sapiens
aaagugaucaaaaugccaaaauacuaaaggaa

SEQ ID NO: 167454 - RNA, 32 nt, Homo Sapiens
gaauuuggcucuucugacauuuaucaggcacc

SEQ ID NO: 167455 - RNA, 32 nt, Homo Sapiens
acauucugaagggaggcaaggaggcggacuga

SEQ ID NO: 167456 - RNA, 32 nt, Homo Sapiens
aggggcaguugaaagcacuuuuuucggaacac

SEQ ID NO: 167457 - RNA, 32 nt, Homo Sapiens
aggcuggcccgggacgcgcccggagcccaggg

SEQ ID NO: 167458 - RNA, 32 nt, Homo Sapiens
cacgaauguucccucugggguacuuguuaaag

SEQ ID NO: 167459 - RNA, 32 nt, Homo Sapiens
aaagaggagagcgcagcagagccaggggucug

SEQ ID NO: 167460 - RNA, 32 nt, Homo Sapiens
uucagcccugaaucuuuuuuucuuuuuuaauu

SEQ ID NO: 167461 - RNA, 32 nt, Homo Sapiens
aggaguucaaagcugcaacgaccuaugacagc

SEQ ID NO: 167462 - RNA, 32 nt, Homo Sapiens
uucuuccauccuccuccuccccuuaauggauu

SEQ ID NO: 167463 - RNA, 32 nt, Homo Sapiens
gaugauggagggcgugcaguaggaguggacag

SEQ ID NO: 167464 - RNA, 32 nt, Homo Sapiens
ucauauugcucuucuucuuuuagacugguugu

SEQ ID NO: 167465 - RNA, 32 nt, Homo Sapiens
gcauuagagugccagaauuagcacuggggaaa

SEQ ID NO: 167466 - RNA, 32 nt, Homo Sapiens
cuguuuuugacacagcacauguguguuauggc

SEQ ID NO: 167467 - RNA, 32 nt, Homo Sapiens
cgcgggcgcccggcacccucgagggccggcua

SEQ ID NO: 167468 - RNA, 32 nt, Homo Sapiens
gcugaggaauccagccagggggagcugggaug

SEQ ID NO: 167469 - RNA, 32 nt, Homo Sapiens
gugcuuugguugagcagcacugagagagcccc

SEQ ID NO: 167470 - RNA, 32 nt, Homo Sapiens
ccuugccccguccacccugugcugcuucccuu

SEQ ID NO: 167471 - RNA, 32 nt, Homo Sapiens
aguuguuuguguuauugcacaauuugaaaauu

SEQ ID NO: 167472 - RNA, 32 nt, Homo Sapiens
gggucugugaacgaggccugucucuucccugg

SEQ ID NO: 167473 - RNA, 32 nt, Homo Sapiens
aacuuagaauaaaauuguaaaaauuguauaga

SEQ ID NO: 167474 - RNA, 32 nt, Homo Sapiens
aaaacaacaaaguggcgaggcccucagaguga

SEQ ID NO: 167475 - RNA, 32 nt, Homo Sapiens
accaugggucagaacauauuccuuuacucaaa

SEQ ID NO: 167476 - RNA, 32 nt, Homo Sapiens
cccagcugccuacucagcauuuccacuugggu

SEQ ID NO: 167477 - RNA, 32 nt, Homo Sapiens
augcauggccauuuuucuuugauguucuccag

SEQ ID NO: 167478 - RNA, 32 nt, Homo Sapiens
cauuaaaugaauucaccgcaacuacagugaga

SEQ ID NO: 167479 - RNA, 32 nt, Homo Sapiens
uaguaauguagauuuacauagaauuaagaguu

SEQ ID NO: 167480 - RNA, 32 nt, Homo Sapiens
aggcuccucacuggaagagacaucagcuuacu

SEQ ID NO: 167481 - RNA, 32 nt, Homo Sapiens
cuucuuguccaccucuucuccccugcccacca

SEQ ID NO: 167482 - RNA, 32 nt, Homo Sapiens
ucugguguugcuucuccucccucccauucucu

SEQ ID NO: 167483 - RNA, 32 nt, Homo Sapiens
ccgcggggucugugcugagaauaauggcccgg

SEQ ID NO: 167484 - RNA, 32 nt, Homo Sapiens
cauccacggggcgcgagugacacgcgggaggg

SEQ ID NO: 167485 - RNA, 32 nt, Homo Sapiens
cgaguguggauucaaggcaaauuccagaaacc

SEQ ID NO: 167486 - RNA, 32 nt, Homo Sapiens
aacugggugugguggcgggcgccuguaauccc

SEQ ID NO: 167487 - RNA, 32 nt, Homo Sapiens
cagagccuccaaggaaaugccuuuagaagcac

SEQ ID NO: 167488 - RNA, 32 nt, Homo Sapiens
ucucacaggcuguucagggauaaucuaaaugu

SEQ ID NO: 167489 - RNA, 32 nt, Homo Sapiens
ccucagcccuccccguucuccugcuccuaaac

SEQ ID NO: 167490 - RNA, 32 nt, Homo Sapiens
cacccuugaguccgggcacaccccaagcccuc

SEQ ID NO: 167491 - RNA, 32 nt, Homo Sapiens
ugguuagaaauauuucaguuaacuccaguuuu

SEQ ID NO: 167492 - RNA, 32 nt, Homo Sapiens
uuccuccagguguugaucuugauuccacuuag

SEQ ID NO: 167493 - RNA, 32 nt, Homo Sapiens
aaacauaaaaaggaauuuuaaauuuaacucuu

SEQ ID NO: 167494 - RNA, 32 nt, Homo Sapiens
cuacacuauauauaaauaagauauauacaaua

SEQ ID NO: 167495 - RNA, 32 nt, Homo Sapiens
gaaagcuccaaagaucccagcccgcaaggcug

SEQ ID NO: 167496 - RNA, 28 nt, Homo Sapiens
cagaugccaaaauacucuucugaaaaca

SEQ ID NO: 167497 - RNA, 32 nt, Homo Sapiens
gcuaggaaaaggaaagugaaggaauggucuaa

SEQ ID NO: 167498 - RNA, 31 nt, Homo Sapiens
uggcucugggcccuccugccccgugccuagg

SEQ ID NO: 167499 - RNA, 32 nt, Homo Sapiens
ugggcaugaaggaucuguggggugcugcaguu

SEQ ID NO: 167500 - RNA, 32 nt, Homo Sapiens
ggucucagcaaaaaacaaaaccaagcacacac

SEQ ID NO: 167501 - RNA, 32 nt, Homo Sapiens
ugagggccaaaauauuuggaaugaaggacuug

SEQ ID NO: 167502 - RNA, 32 nt, Homo Sapiens
uuauacguucuccauuuuccugucauuggguc

SEQ ID NO: 167503 - RNA, 32 nt, Homo Sapiens
ccgcccgcuccuugucggcggcguugcgggag

SEQ ID NO: 167504 - RNA, 32 nt, Homo Sapiens
cacucccagccccccauccccccguuccccag

SEQ ID NO: 167505 - RNA, 32 nt, Homo Sapiens
auuccauguacaucuguacgcaugucagagua

SEQ ID NO: 167506 - RNA, 32 nt, Homo Sapiens
aauuaaaaaauauacgaaacuuugcuuggggg

SEQ ID NO: 167507 - RNA, 32 nt, Homo Sapiens
cgagggccaaacuggaaacauaagagugacug

SEQ ID NO: 167508 - RNA, 32 nt, Homo Sapiens
uggcuguguugguaucaucaguucuugagcua

SEQ ID NO: 167509 - RNA, 32 nt, Homo Sapiens
ucagcgcaccgacugccgcgggcuccgcuggg

SEQ ID NO: 167510 - RNA, 32 nt, Homo Sapiens
cuggagagccuggaguaucuccaggccgacua

SEQ ID NO: 167511 - RNA, 32 nt, Homo Sapiens
uuagcaaaaaauuuuugcucaguggcacucuc

SEQ ID NO: 167512 - RNA, 32 nt, Homo Sapiens
acuggggagugguggggguguaggcaguaggg

SEQ ID NO: 167513 - RNA, 32 nt, Homo Sapiens
cuuuccuccgccucaguuuggggcgggucggg

SEQ ID NO: 167514 - RNA, 32 nt, Homo Sapiens
ggaagaaagaaaagcauaaaacaaagacuacu

SEQ ID NO: 167515 - RNA, 32 nt, Homo Sapiens
gauggagucuugcucugucacccagguuggag

SEQ ID NO: 167516 - RNA, 32 nt, Homo Sapiens
gauggagucucgcucugucacccaggcuggag

SEQ ID NO: 167517 - RNA, 32 nt, Homo Sapiens
gacagagucuuacucugucacccaggcuggag

SEQ ID NO: 167518 - RNA, 32 nt, Homo Sapiens
gacggagucuugcucugucacccaggcuggag

SEQ ID NO: 167519 - RNA, 32 nt, Homo Sapiens
gucucagugucuagggaagcuugggguucugc

SEQ ID NO: 167520 - RNA, 32 nt, Homo Sapiens
aaguaguugcuuaagaaauacuuguugaagga

SEQ ID NO: 167521 - RNA, 32 nt, Homo Sapiens
gccaccaucugaguggauuggucccaagugug

SEQ ID NO: 167522 - RNA, 32 nt, Homo Sapiens
gggccuggcacacugcagcugcccuguaaaug

SEQ ID NO: 167523 - RNA, 32 nt, Homo Sapiens
gcggccuggcccgggaccugcugcugcuccag

SEQ ID NO: 167524 - RNA, 32 nt, Homo Sapiens
gguguuagaauauuuuuaaguaggcuuuacug

SEQ ID NO: 167525 - RNA, 30 nt, Homo Sapiens
uacuugggagguggaggugggaggauuaua

SEQ ID NO: 167526 - RNA, 32 nt, Homo Sapiens
ccacuucagagguuuugggguucagggugcug

SEQ ID NO: 167527 - RNA, 32 nt, Homo Sapiens
cucaagcaggggugggggaggggggaggugga

SEQ ID NO: 167528 - RNA, 32 nt, Homo Sapiens
caugauagagaucuauacuccaaacuuuauuc

SEQ ID NO: 167529 - RNA, 32 nt, Homo Sapiens
gugucacuuuuguguuuuauuacuucauacuu

SEQ ID NO: 167530 - RNA, 32 nt, Homo Sapiens
cagaugcacacacacgcagacagacacaccga

SEQ ID NO: 167531 - RNA, 32 nt, Homo Sapiens
aaucgauuuuuaaauuuuuuuaucuacacaac

SEQ ID NO: 167532 - RNA, 32 nt, Homo Sapiens
acuccugacaccugggcccuugaagcuccuug

SEQ ID NO: 167533 - RNA, 32 nt, Homo Sapiens
auccagggcuccugaguugguggguuugcuug

SEQ ID NO: 167534 - RNA, 32 nt, Homo Sapiens
cuuaacagacccagcucuguuccaaggugagu

SEQ ID NO: 167535 - RNA, 31 nt, Homo Sapiens
guuagacaagccacaaaguuaaaauuaaacu

SEQ ID NO: 167536 - RNA, 32 nt, Homo Sapiens
uguuuuccugucauuuuugagagacuaaaauu

SEQ ID NO: 167537 - RNA, 32 nt, Homo Sapiens
ggcucaggaaauguucgcggauacaacggcgg

SEQ ID NO: 167538 - RNA, 32 nt, Homo Sapiens
guuucacaacggcgcccgacccugcccgcgcc

SEQ ID NO: 167539 - RNA, 32 nt, Homo Sapiens
uucauggcguccccaccuccucugugagggcg

SEQ ID NO: 167540 - RNA, 32 nt, Homo Sapiens
ggagugauggccucgucuccagugcuccucug

SEQ ID NO: 167541 - RNA, 32 nt, Homo Sapiens
uuauccauguuacagcucuucaauauuuaugg

SEQ ID NO: 167542 - RNA, 32 nt, Homo Sapiens
gaacucgccugggcacaaggugccaaaaggca

SEQ ID NO: 167543 - RNA, 32 nt, Homo Sapiens
gauagacacacacacaugcacacacacacauc

SEQ ID NO: 167544 - RNA, 32 nt, Homo Sapiens
aaaauugugggaaagagaauuuguaugggcac

SEQ ID NO: 167545 - RNA, 32 nt, Homo Sapiens
augagacagucccagaacacggcagcugcugg

SEQ ID NO: 167546 - RNA, 32 nt, Homo Sapiens
aaauuuuaauauauuucauuuuaguaagcuau

SEQ ID NO: 167547 - RNA, 32 nt, Homo Sapiens
cugaggugucuggccugaggucaauggugcaa

SEQ ID NO: 167548 - RNA, 32 nt, Homo Sapiens
uuguuuucuuuuucuuuuuuuuuuuuuuuuuu

SEQ ID NO: 167549 - RNA, 32 nt, Homo Sapiens
gggaaggaggugcagccaggaugcucuggugg

SEQ ID NO: 167550 - RNA, 32 nt, Homo Sapiens
caaauaaugaagaucucuccuucagucugcuc

SEQ ID NO: 167551 - RNA, 32 nt, Homo Sapiens
ccacugauguucagacaggagcuccaggaggg

SEQ ID NO: 167552 - RNA, 32 nt, Homo Sapiens
guagggauaaaguagaagaaaccacaaauuau

SEQ ID NO: 167553 - RNA, 32 nt, Homo Sapiens
cuuuccuccaugagcucuggaagguauaugca

SEQ ID NO: 167554 - RNA, 32 nt, Homo Sapiens
aacuaaccaaaccaaaaccaaccccagagugc

SEQ ID NO: 167555 - RNA, 32 nt, Homo Sapiens
auaaccaauuuaauaguaaauuuuauaugaac

SEQ ID NO: 167556 - RNA, 32 nt, Homo Sapiens
caaggaaagggucagguuagggcuccuguacc

SEQ ID NO: 167557 - RNA, 32 nt, Homo Sapiens
guguucccacugggcucuguccugggagaggc

SEQ ID NO: 167558 - RNA, 32 nt, Homo Sapiens
ucuacaaaaaauacaaaaauuagccaggugug

SEQ ID NO: 167559 - RNA, 32 nt, Homo Sapiens
ccggugcccucccugcgcgcagacccagggga

SEQ ID NO: 167560 - RNA, 30 nt, Homo Sapiens
uuugaaugaaaacucaaaguuuucuaguuu

SEQ ID NO: 167561 - RNA, 32 nt, Homo Sapiens
ugcucccuguaaagacaaggguggguauccag

SEQ ID NO: 167562 - RNA, 32 nt, Homo Sapiens
agucuccgugcaggaugugagcagcgucccug

SEQ ID NO: 167563 - RNA, 32 nt, Homo Sapiens
acacccccucuucugagcacagauguuccccc

SEQ ID NO: 167564 - RNA, 32 nt, Homo Sapiens
ccaagaggaguuguguaaugggaaaugcaagu

SEQ ID NO: 167565 - RNA, 32 nt, Homo Sapiens
agcccucgcccggcgcuccaguagcaggaccc

SEQ ID NO: 167566 - RNA, 32 nt, Homo Sapiens
ugccuccaggacucugagccuucugccucgua

SEQ ID NO: 167567 - RNA, 32 nt, Homo Sapiens
gagauuuuaaaaagagcucagcaccuuuaaaa

SEQ ID NO: 167568 - RNA, 32 nt, Homo Sapiens
ucucagcuggaaccccacccuuucuccuccuc

SEQ ID NO: 167569 - RNA, 32 nt, Homo Sapiens
uggcgcacaccuguagucccagcuacuccgga

SEQ ID NO: 167570 - RNA, 32 nt, Homo Sapiens
aacuauugucaaauggacuuccugucauuugu

SEQ ID NO: 167571 - RNA, 32 nt, Homo Sapiens
cagcccuuucccuuuucugaaagcuguuccug

SEQ ID NO: 167572 - RNA, 32 nt, Homo Sapiens
ucggccuggccgcgaugaaguccccgccccuc

SEQ ID NO: 167573 - RNA, 32 nt, Homo Sapiens
ugauguuguaaaaugaauuuguuguuccuuua

SEQ ID NO: 167574 - RNA, 32 nt, Homo Sapiens
cugccuuaguucuuuugucauaaaaacaauca

SEQ ID NO: 167575 - RNA, 32 nt, Homo Sapiens
aguggagacgccugcccccagccccgaggccu

SEQ ID NO: 167576 - RNA, 32 nt, Homo Sapiens
cucauaucucaaauacaguacauuuacauuac

SEQ ID NO: 167577 - RNA, 32 nt, Homo Sapiens
cuucaaaaaaauuucuaaugucacuuuuguac

SEQ ID NO: 167578 - RNA, 27 nt, Homo Sapiens
gcucugaccuucuucaaaucuuuguau

SEQ ID NO: 167579 - RNA, 32 nt, Homo Sapiens
acucucuccccaccacccggcucaggccccag

SEQ ID NO: 167580 - RNA, 27 nt, Homo Sapiens
gcacuguuuuucuucagucguuuaaau

SEQ ID NO: 167581 - RNA, 32 nt, Homo Sapiens
aaacauucuucugucaauuccacacaauccuu

SEQ ID NO: 167582 - RNA, 32 nt, Homo Sapiens
cgcggcucugcuccucccggcgcagaggggcc

SEQ ID NO: 167583 - RNA, 32 nt, Homo Sapiens
accagccuggccaacauagugaaauccuguuu

SEQ ID NO: 167584 - RNA, 32 nt, Homo Sapiens
uuaggagcucaggaaaucugucugcaccuauc

SEQ ID NO: 167585 - RNA, 32 nt, Homo Sapiens
acccagugacgcucgucggggucccgcagacg

SEQ ID NO: 167586 - RNA, 32 nt, Homo Sapiens
cguucuguuaagagcaaaucuaggagaagugc

SEQ ID NO: 167587 - RNA, 32 nt, Homo Sapiens
acaagaggucccugcccucccccagugagccc

SEQ ID NO: 167588 - RNA, 32 nt, Homo Sapiens
aaguauuaucuuccuccuuccauuggaaacca

SEQ ID NO: 167589 - RNA, 32 nt, Homo Sapiens
ggcagagguuccucagugugggacaugcagca

SEQ ID NO: 167590 - RNA, 32 nt, Homo Sapiens
cagagagcccuggccuggcucuaggcuuggga

SEQ ID NO: 167591 - RNA, 32 nt, Homo Sapiens
aucuuccugaagaucucuaccauuuaauuaag

SEQ ID NO: 167592 - RNA, 32 nt, Homo Sapiens
cccacgccuagucccaucugggcccccauucc

SEQ ID NO: 167593 - RNA, 32 nt, Homo Sapiens
ggccaaucagugccgcuucgucacgggccugc

SEQ ID NO: 167594 - RNA, 32 nt, Homo Sapiens
agcuggcuucggcggggacggcggcggcggcg

SEQ ID NO: 167595 - RNA, 32 nt, Homo Sapiens
cacauccgugcagcccucucuuggcuugcaag

SEQ ID NO: 167596 - RNA, 32 nt, Homo Sapiens
aguggauuccgucuucuacucaggaauggaau

SEQ ID NO: 167597 - RNA, 32 nt, Homo Sapiens
ucauauucuuaacuuugaucuaaugcuuuuua

SEQ ID NO: 167598 - RNA, 32 nt, Homo Sapiens
gacauuuugucaacuauggguauugggugcuu

SEQ ID NO: 167599 - RNA, 32 nt, Homo Sapiens
uguucauccacauuugaacacagagcuaaaga

SEQ ID NO: 167600 - RNA, 32 nt, Homo Sapiens
auauggggguuccaggcuccagcccucccccu

SEQ ID NO: 167601 - RNA, 32 nt, Homo Sapiens
gcugugggggucuggaggaggggacaugaggu

SEQ ID NO: 167602 - RNA, 32 nt, Homo Sapiens
cagcuuacugccuccccucccccucacgccug

SEQ ID NO: 167603 - RNA, 32 nt, Homo Sapiens
uauuuaacuuauuuaauguauuucaucucaug

SEQ ID NO: 167604 - RNA, 32 nt, Homo Sapiens
uggaugucuucagaccucgugaacugugggca

SEQ ID NO: 167605 - RNA, 32 nt, Homo Sapiens
uugggaaaucuuagaauaaagaacgagaacaa

SEQ ID NO: 167606 - RNA, 32 nt, Homo Sapiens
cuggccuuuggcauccugggguuggccugggc

SEQ ID NO: 167607 - RNA, 32 nt, Homo Sapiens
agcauuguuuuaaaggucugaauaggaaacau

SEQ ID NO: 167608 - RNA, 32 nt, Homo Sapiens
uuccuacuguccagcaucaccuccuccaggcc

SEQ ID NO: 167609 - RNA, 32 nt, Homo Sapiens
uuucuucuguuaaaauuauucuuaaugucugu

SEQ ID NO: 167610 - RNA, 32 nt, Homo Sapiens
cgcacacggacauuccaaagaccuccagagac

SEQ ID NO: 167611 - RNA, 32 nt, Homo Sapiens
uuuuaaguuuccugaggccuccccagucaugc

SEQ ID NO: 167612 - RNA, 26 nt, Homo Sapiens
cauggcggcaggcgccggggccgggu

SEQ ID NO: 167613 - RNA, 32 nt, Homo Sapiens
gugcauuggauaggggaacagcaggcagggcu

SEQ ID NO: 167614 - RNA, 32 nt, Homo Sapiens
cgacaccaagggcgggccgcgcggccuugcag

SEQ ID NO: 167615 - RNA, 32 nt, Homo Sapiens
acuuugcaauagauuuguacuaaccagaccug

SEQ ID NO: 167616 - RNA, 32 nt, Homo Sapiens
uguacuauaguaggacuuuauguaucucauac

SEQ ID NO: 167617 - RNA, 32 nt, Homo Sapiens
gaacguaggaggaggaaaaggcgaagcugacc

SEQ ID NO: 167618 - RNA, 32 nt, Homo Sapiens
aauaccuagcuacuauuuaagcauccaaaaau

SEQ ID NO: 167619 - RNA, 32 nt, Homo Sapiens
uguagcauugcacuucuguguacaguaaaacu

SEQ ID NO: 167620 - RNA, 32 nt, Homo Sapiens
gagaccuuuccaccagacacagcucgggccug

SEQ ID NO: 167621 - RNA, 32 nt, Homo Sapiens
caggaaguaucugugaaaugugaauguguagu

SEQ ID NO: 167622 - RNA, 31 nt, Homo Sapiens
gcgcugcugccggagcgcucagugccgccgc

SEQ ID NO: 167623 - RNA, 32 nt, Homo Sapiens
uagaggcccuguaugcuaguaucauuuucuuu

SEQ ID NO: 167624 - RNA, 32 nt, Homo Sapiens
aauaauauacugcagaaaucccagacagagcu

SEQ ID NO: 167625 - RNA, 32 nt, Homo Sapiens
ucuuuuaaaaauuuacccuuauuuccuuuuac

SEQ ID NO: 167626 - RNA, 32 nt, Homo Sapiens
ugcccggccccucccuuucugugcacugggga

SEQ ID NO: 167627 - RNA, 32 nt, Homo Sapiens
gagggguuguauucauuaagcaugagaauaga

SEQ ID NO: 167628 - RNA, 32 nt, Homo Sapiens
augaauuucuucauuugcucuugcaucuacau

SEQ ID NO: 167629 - RNA, 32 nt, Homo Sapiens
gugaccuccgccguccuccccaacccucgucc

SEQ ID NO: 167630 - RNA, 32 nt, Homo Sapiens
uucacaaggugucuaauucagaaucgaagauc

SEQ ID NO: 167631 - RNA, 32 nt, Homo Sapiens
ccacuccccucgcgccgcgggucccgggaaca

SEQ ID NO: 167632 - RNA, 32 nt, Homo Sapiens
ucuggggaaucuuaguuuuuuauguuuuaaga

SEQ ID NO: 167633 - RNA, 32 nt, Homo Sapiens
guaaucaugcucauauuuuuuaaauaaauaaa

SEQ ID NO: 167634 - RNA, 30 nt, Homo Sapiens
uauccucaucugugugacggcaggaagcuc

SEQ ID NO: 167635 - RNA, 32 nt, Homo Sapiens
ccagaaauguuauuaauaaaugucaauguggg

SEQ ID NO: 167636 - RNA, 32 nt, Homo Sapiens
gggauggagguagcugcaggcucagaagagac

SEQ ID NO: 167637 - RNA, 32 nt, Homo Sapiens
gacagguuuuggugacucugugcccuugcucu

SEQ ID NO: 167638 - RNA, 32 nt, Homo Sapiens
caacgccgccgccuucgccgggagccaagccc

SEQ ID NO: 167639 - RNA, 32 nt, Homo Sapiens
aguuucagagcugaggauuuagacuuagagcu

SEQ ID NO: 167640 - RNA, 32 nt, Homo Sapiens
caaugucuaaaaaaaaucaugacuuuaaacuu

SEQ ID NO: 167641 - RNA, 32 nt, Homo Sapiens
ucaccccugggaagauucucccaccuccuccc

SEQ ID NO: 167642 - RNA, 32 nt, Homo Sapiens
guauuuuacccauucuuaaagcucuaaaaaac

SEQ ID NO: 167643 - RNA, 30 nt, Homo Sapiens
cagagugugcccgugcgccgccgccgucgu

SEQ ID NO: 167644 - RNA, 32 nt, Homo Sapiens
uaauuauuguacauuuauaguuguaacuguag

SEQ ID NO: 167645 - RNA, 32 nt, Homo Sapiens
ucaaacugaauauuuuaguagaagcuuuucua

SEQ ID NO: 167646 - RNA, 32 nt, Homo Sapiens
cagcuuuguucccaggguggcgccugcucucc

SEQ ID NO: 167647 - RNA, 32 nt, Homo Sapiens
uguccuuggacucaccuuggcacauguucugu

SEQ ID NO: 167648 - RNA, 32 nt, Homo Sapiens
uagccacucggaucagcccgagggaagauucu

SEQ ID NO: 167649 - RNA, 32 nt, Homo Sapiens
cgcccagcggcuugacguccuccggagccucu

SEQ ID NO: 167650 - RNA, 32 nt, Homo Sapiens
gggugugcugcccuucccggcaccucccccgc

SEQ ID NO: 167651 - RNA, 32 nt, Homo Sapiens
aauaagucagccugaugcucuaauggaaaaau

SEQ ID NO: 167652 - RNA, 32 nt, Homo Sapiens
aaauuuuauuuuauuuuuuugaggcagggucu

SEQ ID NO: 167653 - RNA, 32 nt, Homo Sapiens
ugugacugccaagcaggcaaccccugaugauu

SEQ ID NO: 167654 - RNA, 32 nt, Homo Sapiens
cuauccaggcaccaccugagaaaguugucauu

SEQ ID NO: 167655 - RNA, 32 nt, Homo Sapiens
ugggcuggggcaggggcugggcggcgaggggg

SEQ ID NO: 167656 - RNA, 32 nt, Homo Sapiens
gcugcuugccccgaugagccggggacacuccu

SEQ ID NO: 167657 - RNA, 32 nt, Homo Sapiens
ccccuugcugucauccccucccccaaccuugg

SEQ ID NO: 167658 - RNA, 32 nt, Homo Sapiens
cagaucguagcuaguuuguauugucuugucaa

SEQ ID NO: 167659 - RNA, 32 nt, Homo Sapiens
acugcuuuuggucugugugaugaugaaaugag

SEQ ID NO: 167660 - RNA, 32 nt, Homo Sapiens
ggaccccgcucccauucugcccuugcuccugc

SEQ ID NO: 167661 - RNA, 32 nt, Homo Sapiens
gacucuugcaccuggugagugcaaggauaggu

SEQ ID NO: 167662 - RNA, 32 nt, Homo Sapiens
gguagagcggccugggcaggggcggagcugag

SEQ ID NO: 167663 - RNA, 32 nt, Homo Sapiens
uagaguuaugaauagcauaauuucuugauacc

SEQ ID NO: 167664 - RNA, 32 nt, Homo Sapiens
uggccaaggggagugggaacgacagagggaag

SEQ ID NO: 167665 - RNA, 32 nt, Homo Sapiens
gcugagccugccccaaacuacagcucccgaag

SEQ ID NO: 167666 - RNA, 32 nt, Homo Sapiens
aggcugcauuccccgcgccggacccaaaagau

SEQ ID NO: 167667 - RNA, 32 nt, Homo Sapiens
gcauuuuagggcugucuugcuauacugaauug

SEQ ID NO: 167668 - RNA, 32 nt, Homo Sapiens
acacugagaacauuuuacaaauaaaaauauga

SEQ ID NO: 167669 - RNA, 32 nt, Homo Sapiens
cugauaaacucacuucccauccccucugucca

SEQ ID NO: 167670 - RNA, 32 nt, Homo Sapiens
gccccuugcuggcuggaggugugaaaaccagc

SEQ ID NO: 167671 - RNA, 32 nt, Homo Sapiens
gcuggguguggccuucggguugacaugagaaa

SEQ ID NO: 167672 - RNA, 32 nt, Homo Sapiens
acauuaaacaaauggugguaggagggaggauu

SEQ ID NO: 167673 - RNA, 32 nt, Homo Sapiens
gcggguguccugugaggcgccgggugacggcg

SEQ ID NO: 167674 - RNA, 32 nt, Homo Sapiens
auuuuauguacaauaaaucgcauuugaaaaag

SEQ ID NO: 167675 - RNA, 32 nt, Homo Sapiens
ccuggucccgucugccugcuccucaggaccac

SEQ ID NO: 167676 - RNA, 32 nt, Homo Sapiens
ucugcuacuacgccgaagaccugcgccugaag

SEQ ID NO: 167677 - RNA, 32 nt, Homo Sapiens
cuucucuucuggacauguccaggaguggccgu

SEQ ID NO: 167678 - RNA, 32 nt, Homo Sapiens
acagggagacagcaaccaucgccugccacgcc

SEQ ID NO: 167679 - RNA, 32 nt, Homo Sapiens
gucgcuccuaccccggccaccgcucggagccg

SEQ ID NO: 167680 - RNA, 32 nt, Homo Sapiens
ggacgggcugggaggagaaggagcccccagcc

SEQ ID NO: 167681 - RNA, 32 nt, Homo Sapiens
gugugaugauaaacaccacugcuccgggcaua

SEQ ID NO: 167682 - RNA, 32 nt, Homo Sapiens
guauaaauuuaaaacagaaacaucaagguguc

SEQ ID NO: 167683 - RNA, 32 nt, Homo Sapiens
uuuuguuccaaauauaaacgaaaggcacuagu

SEQ ID NO: 167684 - RNA, 32 nt, Homo Sapiens
aaguggcagagcuuggacuggaugcauguuuu

SEQ ID NO: 167685 - RNA, 31 nt, Homo Sapiens
ccugcuuugugcuggucuccugugugggcag

SEQ ID NO: 167686 - RNA, 32 nt, Homo Sapiens
gacuagaacugcagcaucagcucuuccugguu

SEQ ID NO: 167687 - RNA, 32 nt, Homo Sapiens
gcagcggcggccuggcccuuccagagggccag

SEQ ID NO: 167688 - RNA, 32 nt, Homo Sapiens
uacucauugguaguuucaguauauguaaugug

SEQ ID NO: 167689 - RNA, 32 nt, Homo Sapiens
uguacuaaaaauacaaaaaauuaacugggcau

SEQ ID NO: 167690 - RNA, 30 nt, Homo Sapiens
aagagcagaaauuuuugucuguuuuaucuc

SEQ ID NO: 167691 - RNA, 32 nt, Homo Sapiens
ugaccuugcccuuggcagugccccacauccuc

SEQ ID NO: 167692 - RNA, 32 nt, Homo Sapiens
ggccugggagggagaaggggcuggagagggcc

SEQ ID NO: 167693 - RNA, 32 nt, Homo Sapiens
aaggaaacuaaauuuaaugucuguaucacuag

SEQ ID NO: 167694 - RNA, 32 nt, Homo Sapiens
uauuucaaacaaaaauaacuuuagauauaucu

SEQ ID NO: 167695 - RNA, 32 nt, Homo Sapiens
uuguaccguguuucuuucccccaggagaauuu

SEQ ID NO: 167696 - RNA, 31 nt, Homo Sapiens
uuaaugauggaagcaggcagagccugguggg

SEQ ID NO: 167697 - RNA, 31 nt, Homo Sapiens
ucugucuucaaugaucaaauuuugagcaaag

SEQ ID NO: 167698 - RNA, 32 nt, Homo Sapiens
aauuagccgggugugguagugcaugccuguag

SEQ ID NO: 167699 - RNA, 32 nt, Homo Sapiens
aaagccuccucgccuucagccuccucagcauu

SEQ ID NO: 167700 - RNA, 32 nt, Homo Sapiens
gaccaaaaggauuaaugauaauuaauaaagua

SEQ ID NO: 167701 - RNA, 32 nt, Homo Sapiens
guccgagcugucuggccucaguuucccuccga

SEQ ID NO: 167702 - RNA, 32 nt, Homo Sapiens
cuccauuaaaagacauuauuugugugauaaaa

SEQ ID NO: 167703 - RNA, 32 nt, Homo Sapiens
uauuuaccuucagauacuuuuuccugccucag

SEQ ID NO: 167704 - RNA, 31 nt, Homo Sapiens
uguguucuugguauucuuagucuagcucacc

SEQ ID NO: 167705 - RNA, 32 nt, Homo Sapiens
cuagcuuuuuaaaaaauaagaauuuggcauuu

SEQ ID NO: 167706 - RNA, 32 nt, Homo Sapiens
uaaugcauuuuuguuuuuaacaaauccccucc

SEQ ID NO: 167707 - RNA, 32 nt, Homo Sapiens
gagucuucagcgcaucccccaacagcagcccc

SEQ ID NO: 167708 - RNA, 32 nt, Homo Sapiens
aucaccugcagaaauauagauacaugaucccu

SEQ ID NO: 167709 - RNA, 32 nt, Homo Sapiens
uuuuuuuuguuuucuuuuuuaaagaaauggaa

SEQ ID NO: 167710 - RNA, 32 nt, Homo Sapiens
ggccugcgccccacccgcaccccaucuggacc

SEQ ID NO: 167711 - RNA, 32 nt, Homo Sapiens
aacucggcuuugcaacaggcauuacucgccau

SEQ ID NO: 167712 - RNA, 32 nt, Homo Sapiens
gaagagccagcuuuucucggagcgcaguccug

SEQ ID NO: 167713 - RNA, 32 nt, Homo Sapiens
gacgcugguuuggaaucagacaccgcaaugaa

SEQ ID NO: 167714 - RNA, 32 nt, Homo Sapiens
cgguagcggcgguggcgguggcggcgguggcg

SEQ ID NO: 167715 - RNA, 32 nt, Homo Sapiens
gaugugcaggcacaaaucuuuggagaaggcuu

SEQ ID NO: 167716 - RNA, 32 nt, Homo Sapiens
auggcuuuuuaaaguaaugcuucuauuucuuu

SEQ ID NO: 167717 - RNA, 32 nt, Homo Sapiens
ugguuacuuguaucuccucuaugugaacuuga

SEQ ID NO: 167718 - RNA, 32 nt, Homo Sapiens
gucccaauuccaaauguccaggaggcacuugg

SEQ ID NO: 167719 - RNA, 32 nt, Homo Sapiens
ugccuucucugcuucagacaagagaucugcca

SEQ ID NO: 167720 - RNA, 31 nt, Homo Sapiens
cugugccugccgguggaccacuccagggugg

SEQ ID NO: 167721 - RNA, 32 nt, Homo Sapiens
gccucgcccagaagcugauguuugugaaugua

SEQ ID NO: 167722 - RNA, 32 nt, Homo Sapiens
auuccggccucagaucucuugugcccaggagu

SEQ ID NO: 167723 - RNA, 32 nt, Homo Sapiens
cuccuccugaugacuccuccccagaaaaccac

SEQ ID NO: 167724 - RNA, 31 nt, Homo Sapiens
agacgcgcgcgcagccagcuccccacgagau

SEQ ID NO: 167725 - RNA, 32 nt, Homo Sapiens
uuuucugcugagcagagcaaccuuguguucaa

SEQ ID NO: 167726 - RNA, 32 nt, Homo Sapiens
ccuuucuugugcuucguguccuguugacgguu

SEQ ID NO: 167727 - RNA, 32 nt, Homo Sapiens
uucugggaaauauuuuaauuuagcuuuuggau

SEQ ID NO: 167728 - RNA, 32 nt, Homo Sapiens
cccgcccacuuucccaccuccucgguauaaau

SEQ ID NO: 167729 - RNA, 32 nt, Homo Sapiens
ggccccugaccuccccgcuguggggguugggg

SEQ ID NO: 167730 - RNA, 32 nt, Homo Sapiens
aagguagaggaagacagaagcccaugguguua

SEQ ID NO: 167731 - RNA, 31 nt, Homo Sapiens
cagcuccggccgcgccaaccagaaacuuugc

SEQ ID NO: 167732 - RNA, 32 nt, Homo Sapiens
cagguaggcugcagccaggagcucccuggcac

SEQ ID NO: 167733 - RNA, 29 nt, Homo Sapiens
aucaauaggggacagaggcugaugcugga

SEQ ID NO: 167734 - RNA, 32 nt, Homo Sapiens
agccuauaaaaaguggcuaaucuuaucccuuu

SEQ ID NO: 167735 - RNA, 32 nt, Homo Sapiens
acgccacccccucccgcgcaggccgggccugu

SEQ ID NO: 167736 - RNA, 32 nt, Homo Sapiens
acugcaagauggggagggagggggcgggucuu

SEQ ID NO: 167737 - RNA, 32 nt, Homo Sapiens
augguuguggcugagcugcugcugcugugcug

SEQ ID NO: 167738 - RNA, 32 nt, Homo Sapiens
cucagccaaggagggaaagaaaaggaagaacu

SEQ ID NO: 167739 - RNA, 32 nt, Homo Sapiens
gcuagugugugaggugauacauauguuaauua

SEQ ID NO: 167740 - RNA, 32 nt, Homo Sapiens
caggagaggcaagaaaauuaugcuguccauag

SEQ ID NO: 167741 - RNA, 27 nt, Homo Sapiens
uucuuaaccacuuucagccccugggau

SEQ ID NO: 167742 - RNA, 32 nt, Homo Sapiens
agccacccuggcucccucuccucccugagcac

SEQ ID NO: 167743 - RNA, 32 nt, Homo Sapiens
uucccugaggcgguggcaagguuugguuuggu

SEQ ID NO: 167744 - RNA, 28 nt, Homo Sapiens
acgugguggcggccggagucgccagagg

SEQ ID NO: 167745 - RNA, 32 nt, Homo Sapiens
gucgccacccgcguacccggcgcagccagagc

SEQ ID NO: 167746 - RNA, 32 nt, Homo Sapiens
uuuuguuuuuaaucaaauaaguuucuucucaa

SEQ ID NO: 167747 - RNA, 32 nt, Homo Sapiens
aaaguaggucacauuucaaguaggucauauuu

SEQ ID NO: 167748 - RNA, 32 nt, Homo Sapiens
auauaugagauauauauagauauauauucuag

SEQ ID NO: 167749 - RNA, 32 nt, Homo Sapiens
aauaccuccucauagaaguggugucuuuacau

SEQ ID NO: 167750 - RNA, 32 nt, Homo Sapiens
ugcgagaauucauguuuuaccagucauuguua

SEQ ID NO: 167751 - RNA, 32 nt, Homo Sapiens
ugagucggcucugagcagcugcucugggagag

SEQ ID NO: 167752 - RNA, 32 nt, Homo Sapiens
aacacauaaaaugcuuuuauuuugccauaucc

SEQ ID NO: 167753 - RNA, 32 nt, Homo Sapiens
ugucucgcugcagcgggugcugcaggucuggc

SEQ ID NO: 167754 - RNA, 32 nt, Homo Sapiens
ggaaaggaaucagagagcugcccuucagcgau

SEQ ID NO: 167755 - RNA, 32 nt, Homo Sapiens
gaguucucuaaagguuuucuguguucauacau

SEQ ID NO: 167756 - RNA, 31 nt, Homo Sapiens
ggcuucucccccucagcucucccucacaccu

SEQ ID NO: 167757 - RNA, 32 nt, Homo Sapiens
uuuguguuuccuauuugguaaucuucauugac

SEQ ID NO: 167758 - RNA, 32 nt, Homo Sapiens
ggcaaaagcuacaagaggcacguucuggcaug

SEQ ID NO: 167759 - RNA, 32 nt, Homo Sapiens
uuggucacaauaucaaguguauuuuuguacau

SEQ ID NO: 167760 - RNA, 32 nt, Homo Sapiens
cacaugaagaggcccugaaacuacguagagag

SEQ ID NO: 167761 - RNA, 32 nt, Homo Sapiens
agguaaauauauauacuuacguguauaucagu

SEQ ID NO: 167762 - RNA, 32 nt, Homo Sapiens
ccggggcuggcccaggcuacggcggcugcagg

SEQ ID NO: 167763 - RNA, 29 nt, Homo Sapiens
ggaaugggacaguugucuauaaaacucua

SEQ ID NO: 167764 - RNA, 32 nt, Homo Sapiens
gggugccaggccccagguauguguguugggag

SEQ ID NO: 167765 - RNA, 32 nt, Homo Sapiens
aaccuuuuugcauauucuuuuauuguucugac

SEQ ID NO: 167766 - RNA, 32 nt, Homo Sapiens
auguagguccacauuuuauuuaguugaccucu

SEQ ID NO: 167767 - RNA, 32 nt, Homo Sapiens
gcagggccgcaccucacaugcauguugcccac

SEQ ID NO: 167768 - RNA, 32 nt, Homo Sapiens
gaggugugguauauggugcuacccuggaucug

SEQ ID NO: 167769 - RNA, 32 nt, Homo Sapiens
caggaagcugagaaaacucaccacccaugaag

SEQ ID NO: 167770 - RNA, 32 nt, Homo Sapiens
aacgccccgggcucagccgcggcugcgcccgg

SEQ ID NO: 167771 - RNA, 32 nt, Homo Sapiens
gcucccacagcccuuccuacaagcaccuauca

SEQ ID NO: 167772 - RNA, 32 nt, Homo Sapiens
agaagauauggacuuggaaugaggccuacagg

SEQ ID NO: 167773 - RNA, 32 nt, Homo Sapiens
gcuuauuguuuuuauucuguauuaaauauuuu

SEQ ID NO: 167774 - RNA, 32 nt, Homo Sapiens
acacacauuuuucucuuguagauuuuaauuuu

SEQ ID NO: 167775 - RNA, 32 nt, Homo Sapiens
ccggccuccgcggcccagcaacggccgucaug

SEQ ID NO: 167776 - RNA, 32 nt, Homo Sapiens
cccaggcccccuaaaaaucagggccucagcaa

SEQ ID NO: 167777 - RNA, 31 nt, Homo Sapiens
ugcugagaaauagucuguggauaugucacaa

SEQ ID NO: 167778 - RNA, 32 nt, Homo Sapiens
cgccugcucccucugcugcauuucaagcugac

SEQ ID NO: 167779 - RNA, 32 nt, Homo Sapiens
ucgcucuaaaauugugccugcauggagccccu

SEQ ID NO: 167780 - RNA, 32 nt, Homo Sapiens
auaauugcugaauaauuuuugauuaagagaaa

SEQ ID NO: 167781 - RNA, 32 nt, Homo Sapiens
aguuuccccacuuuuauuuuuuaaaauuaagu

SEQ ID NO: 167782 - RNA, 32 nt, Homo Sapiens
guccaacgggugaguggcugugcggaggccug

SEQ ID NO: 167783 - RNA, 32 nt, Homo Sapiens
cuaugaccaaaauuaauuuuuugauucaguuu

SEQ ID NO: 167784 - RNA, 32 nt, Homo Sapiens
acuguccugggugcacacuccucccuucccuc

SEQ ID NO: 167785 - RNA, 32 nt, Homo Sapiens
uuuuuaaaauuuggauguaaguagagacuuuc

SEQ ID NO: 167786 - RNA, 32 nt, Homo Sapiens
cuugaaacaaaguugguauaaauucaguaugu

SEQ ID NO: 167787 - RNA, 31 nt, Homo Sapiens
ggacgcuggggccugucgacgggcccucgug

SEQ ID NO: 167788 - RNA, 32 nt, Homo Sapiens
aucaccccugagccaguauacaguaccauccu

SEQ ID NO: 167789 - RNA, 32 nt, Homo Sapiens
auguauuuggauuguuuucuaugugaagcaaa

SEQ ID NO: 167790 - RNA, 29 nt, Homo Sapiens
ccuuaugacuuccccugaaauugcuuccu

SEQ ID NO: 167791 - RNA, 32 nt, Homo Sapiens
uuguauugacuucugaaugucuaguuugagaa

SEQ ID NO: 167792 - RNA, 32 nt, Homo Sapiens
cuguggaaaaagacaaaacucauuaguagaca

SEQ ID NO: 167793 - RNA, 32 nt, Homo Sapiens
cucuggccagugccagcugugcucagcuggcu

SEQ ID NO: 167794 - RNA, 32 nt, Homo Sapiens
agucccagaggacacaucccucgggaacucug

SEQ ID NO: 167795 - RNA, 32 nt, Homo Sapiens
ggcccaugaccuucgugaggugacgggcacuc

SEQ ID NO: 167796 - RNA, 32 nt, Homo Sapiens
cuuaugaaaguagacauucagauccagccauu

SEQ ID NO: 167797 - RNA, 32 nt, Homo Sapiens
uggggcggccggggcgggagagaaagguggug

SEQ ID NO: 167798 - RNA, 31 nt, Homo Sapiens
uuugaucauuugauuuuggauccaagauuua

SEQ ID NO: 167799 - RNA, 32 nt, Homo Sapiens
gguucaagcgauucuugugccucggccucccu

SEQ ID NO: 167800 - RNA, 32 nt, Homo Sapiens
augaugccaaaauauugcuuaugucucuacau

SEQ ID NO: 167801 - RNA, 32 nt, Homo Sapiens
ggguguguguagcgugcugaucugugacuccc

SEQ ID NO: 167802 - RNA, 32 nt, Homo Sapiens
auacugaagaaaccaugagauuaugaaauaaa

SEQ ID NO: 167803 - RNA, 32 nt, Homo Sapiens
ugaauuguaaaaaaggauuucuauuuuuugca

SEQ ID NO: 167804 - RNA, 32 nt, Homo Sapiens
aucgaaaccuuuugcuuggggaugugcuugga

SEQ ID NO: 167805 - RNA, 32 nt, Homo Sapiens
auacaagaugcaugaggaaaauguagagaugc

SEQ ID NO: 167806 - RNA, 32 nt, Homo Sapiens
aagaguuuuaagaaguuguaacuuuuuguguc

SEQ ID NO: 167807 - RNA, 32 nt, Homo Sapiens
aacgccccugguccggccccacucugcgcccc

SEQ ID NO: 167808 - RNA, 32 nt, Homo Sapiens
caucuuuccucccuccucccacagccuggcua

SEQ ID NO: 167809 - RNA, 32 nt, Homo Sapiens
ggcguggaggaagaggcauugaggacuuuccu

SEQ ID NO: 167810 - RNA, 32 nt, Homo Sapiens
agagcgaacugggagcagagcacacagagccg

SEQ ID NO: 167811 - RNA, 32 nt, Homo Sapiens
ugaccuccgcggccggccccucaguggaacug

SEQ ID NO: 167812 - RNA, 32 nt, Homo Sapiens
gaucccugcacgccucuuucugaugaagugau

SEQ ID NO: 167813 - RNA, 32 nt, Homo Sapiens
cucuccucccuuucuucccuacaguugaaaaa

SEQ ID NO: 167814 - RNA, 32 nt, Homo Sapiens
accugcuuaauggcuacaguuuuuacauguga

SEQ ID NO: 167815 - RNA, 32 nt, Homo Sapiens
uagggaagggaagggagacgagcaacgcggag

SEQ ID NO: 167816 - RNA, 32 nt, Homo Sapiens
caugauuguaagucuccuggggccuccgaagc

SEQ ID NO: 167817 - RNA, 32 nt, Homo Sapiens
aauauuuguugcacuuuggcauggcacauuug

SEQ ID NO: 167818 - RNA, 32 nt, Homo Sapiens
uuuguuacaucaucucuucaucuuaauguauu

SEQ ID NO: 167819 - RNA, 32 nt, Homo Sapiens
aagcucuguccucauugcauguacuuucucag

SEQ ID NO: 167820 - RNA, 32 nt, Homo Sapiens
cuauguacuguauauuuuguaccuguuuacac

SEQ ID NO: 167821 - RNA, 32 nt, Homo Sapiens
auauggucuccauuuuacaguuaaggaauaua

SEQ ID NO: 167822 - RNA, 32 nt, Homo Sapiens
ucaaacaaucuuucagggaucacgucaauggc

SEQ ID NO: 167823 - RNA, 32 nt, Homo Sapiens
cagccucuagaaugcucugauccagagcucag

SEQ ID NO: 167824 - RNA, 32 nt, Homo Sapiens
augcucuuggacucgguucuccaggccugauu

SEQ ID NO: 167825 - RNA, 32 nt, Homo Sapiens
gauguauuucaauaauaaauagaguggugucu

SEQ ID NO: 167826 - RNA, 32 nt, Homo Sapiens
acuggcuuguugcuggccccagcgccuggugc

SEQ ID NO: 167827 - RNA, 32 nt, Homo Sapiens
cccacgcggccucuccuccuccuugccgcugu

SEQ ID NO: 167828 - RNA, 32 nt, Homo Sapiens
cgauuuccagcauguccaucagauggggggau

SEQ ID NO: 167829 - RNA, 32 nt, Homo Sapiens
acugcgccuggccuguugcuuauuuuaaaaca

SEQ ID NO: 167830 - RNA, 32 nt, Homo Sapiens
gcgguugcgacgagggcucggcugggggucgc

SEQ ID NO: 167831 - RNA, 32 nt, Homo Sapiens
auacuuuguaauuauuuucuccccaacaguau

SEQ ID NO: 167832 - RNA, 32 nt, Homo Sapiens
gcaauuggacugaagcucccuggcugaagaua

SEQ ID NO: 167833 - RNA, 32 nt, Homo Sapiens
auuggccgggcgugguggcgcgugccuguggu

SEQ ID NO: 167834 - RNA, 30 nt, Homo Sapiens
gauaaccuuagcggcggcgggggccggagg

SEQ ID NO: 167835 - RNA, 32 nt, Homo Sapiens
cccuuaaaacacacuuuuggaauaugcuacaa

SEQ ID NO: 167836 - RNA, 32 nt, Homo Sapiens
gcagagaagaauaagacauaaaauagcuccga

SEQ ID NO: 167837 - RNA, 32 nt, Homo Sapiens
gccuaggggaagaucggggagcugguuuugau

SEQ ID NO: 167838 - RNA, 32 nt, Homo Sapiens
uuuuccggggcugcucggugcugcuguuaaga

SEQ ID NO: 167839 - RNA, 32 nt, Homo Sapiens
guuuuuauuacaucauuuuaauuauucagaua

SEQ ID NO: 167840 - RNA, 32 nt, Homo Sapiens
guaggagccugcaggcccggcgcggggucgcc

SEQ ID NO: 167841 - RNA, 32 nt, Homo Sapiens
aauguuugugcaguguaaaugacuuugacuca

SEQ ID NO: 167842 - RNA, 32 nt, Homo Sapiens
gggcggagaagggaggugacuccggcggaaga

SEQ ID NO: 167843 - RNA, 32 nt, Homo Sapiens
uucauaaguauuuguauaugucuuagucaguu

SEQ ID NO: 167844 - RNA, 32 nt, Homo Sapiens
uaaaaauuguugacaagaauuaaugaaauuau

SEQ ID NO: 167845 - RNA, 32 nt, Homo Sapiens
ggauauuauguuucuuuuuucauuuuugccag

SEQ ID NO: 167846 - RNA, 32 nt, Homo Sapiens
ucugagccuggaggagugagccaggcagugag

SEQ ID NO: 167847 - RNA, 32 nt, Homo Sapiens
uucagaaaaugaacacccuugugauagaauua

SEQ ID NO: 167848 - RNA, 32 nt, Homo Sapiens
accugagccgucccagcucagcaagaaagcau

SEQ ID NO: 167849 - RNA, 32 nt, Homo Sapiens
gccuccagcccggcucgcccauuggcuaacca

SEQ ID NO: 167850 - RNA, 32 nt, Homo Sapiens
ccccagaaaucgaaaaguuauuccagucgguc

SEQ ID NO: 167851 - RNA, 32 nt, Homo Sapiens
auguugucaauacguauaccuuguaaguggau

SEQ ID NO: 167852 - RNA, 32 nt, Homo Sapiens
cucaaguggacauuucuagaaaccgcuucuua

SEQ ID NO: 167853 - RNA, 32 nt, Homo Sapiens
agagaagcugaaguuaaaguuguggaagagag

SEQ ID NO: 167854 - RNA, 32 nt, Homo Sapiens
gccacccaccuccuccuccccaggccacccag

SEQ ID NO: 167855 - RNA, 32 nt, Homo Sapiens
gugcaggaggccgggcaggggugcggagggac

SEQ ID NO: 167856 - RNA, 32 nt, Homo Sapiens
cacacacacacacacacacacacacacacauu

SEQ ID NO: 167857 - RNA, 32 nt, Homo Sapiens
cacacacacacacacucacacacacacacaua

SEQ ID NO: 167858 - RNA, 32 nt, Homo Sapiens
gcugggcauggucacuccugcuggaugucugg

SEQ ID NO: 167859 - RNA, 32 nt, Homo Sapiens
gggcuacucauuuaaccuuuuugugccucaac

SEQ ID NO: 167860 - RNA, 32 nt, Homo Sapiens
ugcaacuuauaucugcaauuuauuuugguaua

SEQ ID NO: 167861 - RNA, 32 nt, Homo Sapiens
ucccuccguccucgcucaguugugauccagca

SEQ ID NO: 167862 - RNA, 32 nt, Homo Sapiens
gccuaucuaguuuaaaaaauaaagaagcacgu

SEQ ID NO: 167863 - RNA, 32 nt, Homo Sapiens
cggcccugaaagaugcccuauccaugagaugc

SEQ ID NO: 167864 - RNA, 32 nt, Homo Sapiens
guggccuggccugcuccaggauggugcugcag

SEQ ID NO: 167865 - RNA, 32 nt, Homo Sapiens
ucucucaaaaauaaaaauaaaaauugcuuuca

SEQ ID NO: 167866 - RNA, 32 nt, Homo Sapiens
caccaccccuccccagccuccugacccuuccc

SEQ ID NO: 167867 - RNA, 32 nt, Homo Sapiens
gcggcaggagcugaggggaguuguagggaacu

SEQ ID NO: 167868 - RNA, 32 nt, Homo Sapiens
cuucuaacuugcccacggcagcuucgggguga

SEQ ID NO: 167869 - RNA, 32 nt, Homo Sapiens
auucuaugucuaucucaacucuauugauuggu

SEQ ID NO: 167870 - RNA, 32 nt, Homo Sapiens
caguacagcugugagcagaggcugguuauaaa

SEQ ID NO: 167871 - RNA, 32 nt, Homo Sapiens
cuccauccuucccuccguggcguagggagcac

SEQ ID NO: 167872 - RNA, 32 nt, Homo Sapiens
gccaggccgcugagggggagggggcugcuaag

SEQ ID NO: 167873 - RNA, 32 nt, Homo Sapiens
ugugaggcauuugguauguaucugaauuaauu

SEQ ID NO: 167874 - RNA, 32 nt, Homo Sapiens
gcagaggggcauuugaguguggaacaugagug

SEQ ID NO: 167875 - RNA, 32 nt, Homo Sapiens
cccgggcggugcccuccaugcccgggggauga

SEQ ID NO: 167876 - RNA, 32 nt, Homo Sapiens
gacagaguggugguuggcaggggcugcaggaa

SEQ ID NO: 167877 - RNA, 32 nt, Homo Sapiens
auccuccguuugcugcacaagcaucucaucac

SEQ ID NO: 167878 - RNA, 32 nt, Homo Sapiens
ugaauggaagagggaacacacugagaugacuu

SEQ ID NO: 167879 - RNA, 32 nt, Homo Sapiens
ggcgguggggacgauacuucucauuuguagcc

SEQ ID NO: 167880 - RNA, 32 nt, Homo Sapiens
auaucggaucuaagagauuaauaccauuagaa

SEQ ID NO: 167881 - RNA, 32 nt, Homo Sapiens
gaggcacccuucuccguccccaucccaaucca

SEQ ID NO: 167882 - RNA, 32 nt, Homo Sapiens
gacgcacagggauggcggcggaggcggccgau

SEQ ID NO: 167883 - RNA, 27 nt, Homo Sapiens
ugauccacccacuucagccucccaaag

SEQ ID NO: 167884 - RNA, 32 nt, Homo Sapiens
accuguauauauauugcauucgugcugacuuu

SEQ ID NO: 167885 - RNA, 32 nt, Homo Sapiens
gagaaaaggggcuggaggaagauccggagggc

SEQ ID NO: 167886 - RNA, 32 nt, Homo Sapiens
gcccuucucuggcugcagagccgucuucucag

SEQ ID NO: 167887 - RNA, 32 nt, Homo Sapiens
ccagcccccuccccacgaccccccuuccccgg

SEQ ID NO: 167888 - RNA, 32 nt, Homo Sapiens
agcaaauaagaccucuugauauuuucaaggac

SEQ ID NO: 167889 - RNA, 32 nt, Homo Sapiens
augcggauggcuaugaugucccagacccuggg

SEQ ID NO: 167890 - RNA, 32 nt, Homo Sapiens
gaucggcgcgccccgugugccugccccaggag

SEQ ID NO: 167891 - RNA, 32 nt, Homo Sapiens
uggauacccaaacuacacuucuacacaugaaa

SEQ ID NO: 167892 - RNA, 32 nt, Homo Sapiens
auugaaauuuaaaaauaaagcuacugaauuua

SEQ ID NO: 167893 - RNA, 32 nt, Homo Sapiens
cagucacccgggagccggguccaggucgucuu

SEQ ID NO: 167894 - RNA, 32 nt, Homo Sapiens
gacuucaaaaggguggaagaaccaucaagaca

SEQ ID NO: 167895 - RNA, 32 nt, Homo Sapiens
cagacgacguccaccgucccaaggcugucacu

SEQ ID NO: 167896 - RNA, 30 nt, Homo Sapiens
auccaaggcaggcccuaggucucuugguga

SEQ ID NO: 167897 - RNA, 32 nt, Homo Sapiens
ccguggccagauuaaccuuuguuuccucuuca

SEQ ID NO: 167898 - RNA, 32 nt, Homo Sapiens
uguucuuuagcaauuugcuaaaccucuccucu

SEQ ID NO: 167899 - RNA, 32 nt, Homo Sapiens
ccaggaacugcuuuuucuuuuccugcugagua

SEQ ID NO: 167900 - RNA, 32 nt, Homo Sapiens
aaagggcagugggaauguccccugccccaacc

SEQ ID NO: 167901 - RNA, 32 nt, Homo Sapiens
aucuuuucaaggcaccaacaaacaaaacugug

SEQ ID NO: 167902 - RNA, 32 nt, Homo Sapiens
acgcagucacagggcgucggagggagggcucc

SEQ ID NO: 167903 - RNA, 32 nt, Homo Sapiens
aaauaaaacaauuuuagccuuucucaguuuau

SEQ ID NO: 167904 - RNA, 32 nt, Homo Sapiens
cuguguguggaaggcagaagcuagcgguugua

SEQ ID NO: 167905 - RNA, 32 nt, Homo Sapiens
uaugcaccuuggcagccagcaggaaagcagcg

SEQ ID NO: 167906 - RNA, 32 nt, Homo Sapiens
ucaauaaauauuuuauacuaaaaaaaaaaaaa

SEQ ID NO: 167907 - RNA, 32 nt, Homo Sapiens
acaaaguaauuagcaauacaucugaaaacaua

SEQ ID NO: 167908 - RNA, 32 nt, Homo Sapiens
gcuugggacucggcccggcucccggcuccggg

SEQ ID NO: 167909 - RNA, 32 nt, Homo Sapiens
ugcugaccugugcacaccccacucccacaugg

SEQ ID NO: 167910 - RNA, 32 nt, Homo Sapiens
aggugccaguuacagcaggugauucagcuacu

SEQ ID NO: 167911 - RNA, 32 nt, Homo Sapiens
cuggggcuccugggauuucuguguguuuggaa

SEQ ID NO: 167912 - RNA, 32 nt, Homo Sapiens
uggggccuggggggauguugcuccucagcucc

SEQ ID NO: 167913 - RNA, 29 nt, Homo Sapiens
aucaaauaaaguuuauuuguagcugaaau

SEQ ID NO: 167914 - RNA, 32 nt, Homo Sapiens
gccagcguccuccccacgaggcaaauaaacac

SEQ ID NO: 167915 - RNA, 32 nt, Homo Sapiens
aaaauuacugaaucguacauuauuaaaguuau

SEQ ID NO: 167916 - RNA, 32 nt, Homo Sapiens
gaaugugucuucugcuggcuguguucucugug

SEQ ID NO: 167917 - RNA, 32 nt, Homo Sapiens
uacucuauaugcugcauagaaccuggagagga

SEQ ID NO: 167918 - RNA, 32 nt, Homo Sapiens
aggacagacccuuucuccaccacagccaaggc

SEQ ID NO: 167919 - RNA, 32 nt, Homo Sapiens
aauuucagcuacaauacucaucugaaaaucau

SEQ ID NO: 167920 - RNA, 32 nt, Homo Sapiens
ccaagccccuccccuguacccuccugcucuca

SEQ ID NO: 167921 - RNA, 32 nt, Homo Sapiens
gcuccggagguaggggcaacucuucucuuccu

SEQ ID NO: 167922 - RNA, 32 nt, Homo Sapiens
agggaauggguacuguucaaaaaggaaugccc

SEQ ID NO: 167923 - RNA, 32 nt, Homo Sapiens
gaccggggcugccaacggccucaacaaugggg

SEQ ID NO: 167924 - RNA, 32 nt, Homo Sapiens
gacagaugagaaaacagaagccugcaaaggua

SEQ ID NO: 167925 - RNA, 32 nt, Homo Sapiens
gaaaacauuugcacugcuguaaaauugcaaaa

SEQ ID NO: 167926 - RNA, 32 nt, Homo Sapiens
aagaauaaaaaauuauguauuaugcaaaaaaa

SEQ ID NO: 167927 - RNA, 32 nt, Homo Sapiens
uuuuuauuuuuccuacagcuacauugagauau

SEQ ID NO: 167928 - RNA, 32 nt, Homo Sapiens
agccccaguucccuccucccucgguuauaaag

SEQ ID NO: 167929 - RNA, 32 nt, Homo Sapiens
accuggggaaagggcuagcaagaggugaagcc

SEQ ID NO: 167930 - RNA, 32 nt, Homo Sapiens
accagcagaaaagaaagcucagggcuguggcu

SEQ ID NO: 167931 - RNA, 32 nt, Homo Sapiens
agcaucaugaguaacgugucugcucagacucu

SEQ ID NO: 167932 - RNA, 32 nt, Homo Sapiens
ugaauuauaugagguuagcauuauuaaaauau

SEQ ID NO: 167933 - RNA, 32 nt, Homo Sapiens
uuccuuuuuaucauaacgcggccucuaauucc

SEQ ID NO: 167934 - RNA, 32 nt, Homo Sapiens
uucuuaccaaaauucacuaaucuugaauguuu

SEQ ID NO: 167935 - RNA, 32 nt, Homo Sapiens
ucaguguuauuaccugcaggauauuaaaaaac

SEQ ID NO: 167936 - RNA, 32 nt, Homo Sapiens
acucgccaccgccgcuuccucagcacccaugg

SEQ ID NO: 167937 - RNA, 32 nt, Homo Sapiens
uugcuuacaccuguaaucccagcacuuuggga

SEQ ID NO: 167938 - RNA, 32 nt, Homo Sapiens
aaagccuuuauucuauauaauuuuauaaacac

SEQ ID NO: 167939 - RNA, 32 nt, Homo Sapiens
ugaaagugaucacuuuaccauuuugaaaagau

SEQ ID NO: 167940 - RNA, 32 nt, Homo Sapiens
ugggaagacagagggcaaggaggcgauagaug

SEQ ID NO: 167941 - RNA, 32 nt, Homo Sapiens
uccccgcucugcucuguccggucacaggacuu

SEQ ID NO: 167942 - RNA, 32 nt, Homo Sapiens
aagaaggaaaagaugagcucucgucuggcagg

SEQ ID NO: 167943 - RNA, 32 nt, Homo Sapiens
gcggccugaggcccggccccuccccucucccu

SEQ ID NO: 167944 - RNA, 31 nt, Homo Sapiens
auaaauuugugcuguuccaguauaugcaaua

SEQ ID NO: 167945 - RNA, 32 nt, Homo Sapiens
uucuugucaaucucuuuuuuuccuugcucaca

SEQ ID NO: 167946 - RNA, 32 nt, Homo Sapiens
aucuugucuuagacaguagugaaaauaguuaa

SEQ ID NO: 167947 - RNA, 32 nt, Homo Sapiens
cccugggagcccaaauaccacucaauuauuuu

SEQ ID NO: 167948 - RNA, 32 nt, Homo Sapiens
acugccugccagcuguccccaaaaggaccaga

SEQ ID NO: 167949 - RNA, 32 nt, Homo Sapiens
uaaacugguccuuagucauuuguauaauuaga

SEQ ID NO: 167950 - RNA, 32 nt, Homo Sapiens
ccccaccgcucccgggaccuguugggggcugg

SEQ ID NO: 167951 - RNA, 32 nt, Homo Sapiens
ggcaacaucaguuuaaacaaagggaagacccc

SEQ ID NO: 167952 - RNA, 32 nt, Homo Sapiens
gaccccaccuucaacccuccccgccaaggccu

SEQ ID NO: 167953 - RNA, 32 nt, Homo Sapiens
ccgcugggaugccgagcgcccgcgccgccgcu

SEQ ID NO: 167954 - RNA, 32 nt, Homo Sapiens
auuuugcuuuggguuccgucuucucacugcgg

SEQ ID NO: 167955 - RNA, 32 nt, Homo Sapiens
uucaaagcagaacgccuugaaugugugaauag

SEQ ID NO: 167956 - RNA, 32 nt, Homo Sapiens
uagccggcaggguggcacgugccuguaauucc

SEQ ID NO: 167957 - RNA, 32 nt, Homo Sapiens
uugugcagauauuuuuaacucuguacaucaga

SEQ ID NO: 167958 - RNA, 32 nt, Homo Sapiens
ccaggccuuacaauggagagccagaguuaaaa

SEQ ID NO: 167959 - RNA, 32 nt, Homo Sapiens
uucucugauccuccuccacucccgcugcuuca

SEQ ID NO: 167960 - RNA, 32 nt, Homo Sapiens
cugcagacaggccaccugcugcuucugugacc

SEQ ID NO: 167961 - RNA, 32 nt, Homo Sapiens
caccuggcgaaccccgucacggcggucuggag

SEQ ID NO: 167962 - RNA, 32 nt, Homo Sapiens
uccccacccuuggaauuucucaucuucugccu

SEQ ID NO: 167963 - RNA, 32 nt, Homo Sapiens
caguugcuggggaugggauccaaguccauuuc

SEQ ID NO: 167964 - RNA, 32 nt, Homo Sapiens
ugccuugagcugugaucgugccacugcauucc

SEQ ID NO: 167965 - RNA, 32 nt, Homo Sapiens
uuaugcuuucaccagccaugucuuaaauacau

SEQ ID NO: 167966 - RNA, 32 nt, Homo Sapiens
ucuggugcaccaugcacuuuccugcuagacuc

SEQ ID NO: 167967 - RNA, 32 nt, Homo Sapiens
aguugcaaagacaauuucuucacuugagcccu

SEQ ID NO: 167968 - RNA, 32 nt, Homo Sapiens
ggaaaguguacaguuggaccgagaaacuaauu

SEQ ID NO: 167969 - RNA, 32 nt, Homo Sapiens
ucccuggcugagggcccuccccuccccucugc

SEQ ID NO: 167970 - RNA, 32 nt, Homo Sapiens
aagauggauaaaaaguccuuugaaauggugcu

SEQ ID NO: 167971 - RNA, 32 nt, Homo Sapiens
uaugagaaacccccacucuacuaaaaauauaa

SEQ ID NO: 167972 - RNA, 32 nt, Homo Sapiens
auccaggcacagaucuggagccaggcgugcug

SEQ ID NO: 167973 - RNA, 32 nt, Homo Sapiens
aucaaagccaaggcuaguuccuaguuguucuu

SEQ ID NO: 167974 - RNA, 31 nt, Homo Sapiens
uuagacuuaagaaaacaacuaacugaggguu

SEQ ID NO: 167975 - RNA, 32 nt, Homo Sapiens
cgcgacucccacuuccgcccuuuuggcucucu

SEQ ID NO: 167976 - RNA, 32 nt, Homo Sapiens
acuuaaugaaauguuaaagccaauuaaaaagc

SEQ ID NO: 167977 - RNA, 30 nt, Homo Sapiens
ugacaacagaagcuucagaaguuuggcaau

SEQ ID NO: 167978 - RNA, 32 nt, Homo Sapiens
uuggauaugcaaacuaaaguauuaagagcuaa

SEQ ID NO: 167979 - RNA, 32 nt, Homo Sapiens
uguauuaggugucauuuccauuauuuauauua

SEQ ID NO: 167980 - RNA, 32 nt, Homo Sapiens
uggucuugccagcuaccaggagccacuuaaga

SEQ ID NO: 167981 - RNA, 32 nt, Homo Sapiens
auacgggagggagagggaaugauaagcugcug

SEQ ID NO: 167982 - RNA, 32 nt, Homo Sapiens
aagagaagaucggaugccugcgugccucccag

SEQ ID NO: 167983 - RNA, 32 nt, Homo Sapiens
cccgcuguacggcgacggcuacggcuuccgcc

SEQ ID NO: 167984 - RNA, 32 nt, Homo Sapiens
agagcuaccuggaccuuuuguuuucuguuuga

SEQ ID NO: 167985 - RNA, 32 nt, Homo Sapiens
agaaaagcuauugagaguaucuaguuaaucag

SEQ ID NO: 167986 - RNA, 32 nt, Homo Sapiens
cgggcagcucacgucgugcccuccgcagcaau

SEQ ID NO: 167987 - RNA, 32 nt, Homo Sapiens
uauuugauggcgauggcaggacacagcauaau

SEQ ID NO: 167988 - RNA, 32 nt, Homo Sapiens
uuagugggguggaauucagaagaaauuugaag

SEQ ID NO: 167989 - RNA, 32 nt, Homo Sapiens
ugugaggcuugugucgggcguggcugggcguu

SEQ ID NO: 167990 - RNA, 32 nt, Homo Sapiens
acaagccaacuuguaaauacaccaccucacuc

SEQ ID NO: 167991 - RNA, 32 nt, Homo Sapiens
uguggaggagugcggcugcgccugcagugcaa

SEQ ID NO: 167992 - RNA, 32 nt, Homo Sapiens
ugucaagcaaauuaugaauacaugaccaaaua

SEQ ID NO: 167993 - RNA, 32 nt, Homo Sapiens
cccggaaguccucacagugguguucaaacauc

SEQ ID NO: 167994 - RNA, 32 nt, Homo Sapiens
ucuauggcucgccccccggcgcggggcuccgg

SEQ ID NO: 167995 - RNA, 32 nt, Homo Sapiens
ugcuuucucuucuaauggaauaugcguaguuc

SEQ ID NO: 167996 - RNA, 32 nt, Homo Sapiens
cauuuuuuauuaugaggucuguuuuuaaauac

SEQ ID NO: 167997 - RNA, 32 nt, Homo Sapiens
aauuaucuuacagggcugccaaggcuguuuug

SEQ ID NO: 167998 - RNA, 32 nt, Homo Sapiens
uggcaguucuuugcggacuuuuuucuagcauu

SEQ ID NO: 167999 - RNA, 32 nt, Homo Sapiens
caauggcuaagauaccaaaaccacagugccga

SEQ ID NO: 168000 - RNA, 30 nt, Homo Sapiens
cgagaugugcacaugggggaggcugggcau

SEQ ID NO: 168001 - RNA, 32 nt, Homo Sapiens
uagcauugcugcccuccaaccuccugggauuc

SEQ ID NO: 168002 - RNA, 32 nt, Homo Sapiens
ggagcugccgcggcgcagccaggccggcgacc

SEQ ID NO: 168003 - RNA, 32 nt, Homo Sapiens
uucuuugggccuccuggacuacaggagaugcu

SEQ ID NO: 168004 - RNA, 32 nt, Homo Sapiens
uuuggcgcuauggaggagcccggggcuacccc

SEQ ID NO: 168005 - RNA, 32 nt, Homo Sapiens
gacaguggccuggccucccugaggagcagagg

SEQ ID NO: 168006 - RNA, 32 nt, Homo Sapiens
guaggucucgcuguggguuugcuggggaccaa

SEQ ID NO: 168007 - RNA, 32 nt, Homo Sapiens
aaugcacuuaggauguuucugcaucaugucua

SEQ ID NO: 168008 - RNA, 32 nt, Homo Sapiens
agugggcgcggccaucccggccucgggacagg

SEQ ID NO: 168009 - RNA, 32 nt, Homo Sapiens
gggcuccaaugcacguuugcaguuaacugggu

SEQ ID NO: 168010 - RNA, 32 nt, Homo Sapiens
ggcuccucggaguccuggcccucccccaccgc

SEQ ID NO: 168011 - RNA, 32 nt, Homo Sapiens
gcuguggcuucucccucccccauccccuacuc

SEQ ID NO: 168012 - RNA, 32 nt, Homo Sapiens
aacgcacaagauaugcaaguggaugagacacu

SEQ ID NO: 168013 - RNA, 32 nt, Homo Sapiens
gcccaggaaggggcugcguggcucacagcgcu

SEQ ID NO: 168014 - RNA, 32 nt, Homo Sapiens
gcucacccugcugagagcugcucagugggcag

SEQ ID NO: 168015 - RNA, 32 nt, Homo Sapiens
gcugugucaucuccuacccagcccacccugcc

SEQ ID NO: 168016 - RNA, 32 nt, Homo Sapiens
ugcggggaugcgggggaccagcugcgugggcg

SEQ ID NO: 168017 - RNA, 32 nt, Homo Sapiens
uccucaaauaauuugcagacuuguauuguggu

SEQ ID NO: 168018 - RNA, 32 nt, Homo Sapiens
uccgugaaagggugggccagccgggccacgag

SEQ ID NO: 168019 - RNA, 32 nt, Homo Sapiens
cggcgcgcgggaggaggacgcgggugcggucu

SEQ ID NO: 168020 - RNA, 32 nt, Homo Sapiens
cuggccguuaaggaugccaacgccgagcuguc

SEQ ID NO: 168021 - RNA, 32 nt, Homo Sapiens
gacucagggcuccgccauauaggcaugugucc

SEQ ID NO: 168022 - RNA, 32 nt, Homo Sapiens
aaaacugcgaauguaauaaaguuggaaaaaua

SEQ ID NO: 168023 - RNA, 32 nt, Homo Sapiens
ugacaagcucuuucucuauuuacugaaggaau

SEQ ID NO: 168024 - RNA, 32 nt, Homo Sapiens
agagugcccaaccaagcuuugaaucguauuaa

SEQ ID NO: 168025 - RNA, 32 nt, Homo Sapiens
uguccuccugcugggcuucaccccgcucucug

SEQ ID NO: 168026 - RNA, 32 nt, Homo Sapiens
aaaguguagggacugagaagggcugcagccuc

SEQ ID NO: 168027 - RNA, 32 nt, Homo Sapiens
agucacacugaagaaauguccacucaguggcu

SEQ ID NO: 168028 - RNA, 32 nt, Homo Sapiens
aagcuggugaagaccugccaggaggcagccac

SEQ ID NO: 168029 - RNA, 32 nt, Homo Sapiens
ggggucggccccaacugcauccuccucuuugg

SEQ ID NO: 168030 - RNA, 32 nt, Homo Sapiens
gcacgggccuguagaucagggauagcgcuguu

SEQ ID NO: 168031 - RNA, 32 nt, Homo Sapiens
ggcauucuagaauuaggucagauauguacaua

SEQ ID NO: 168032 - RNA, 32 nt, Homo Sapiens
ggcugugcuacugcugcagauaacuagcccaa

SEQ ID NO: 168033 - RNA, 32 nt, Homo Sapiens
uugcucacccagugcccucuccccucagccuc

SEQ ID NO: 168034 - RNA, 32 nt, Homo Sapiens
gaccugaguggcugagggggccccacagagcu

SEQ ID NO: 168035 - RNA, 32 nt, Homo Sapiens
ggcccggagcgguggagcgcgcggcugccugc

SEQ ID NO: 168036 - RNA, 32 nt, Homo Sapiens
aagcuaaaggacaugguaacccugccccaucc

SEQ ID NO: 168037 - RNA, 32 nt, Homo Sapiens
cugauccgcgucugcggucggucggugcgugc

SEQ ID NO: 168038 - RNA, 32 nt, Homo Sapiens
caaaggaucaguuuggcugccuuaucccaggg

SEQ ID NO: 168039 - RNA, 32 nt, Homo Sapiens
uuuaugaacccuugcagacauguuuuauguau

SEQ ID NO: 168040 - RNA, 29 nt, Homo Sapiens
agcuuuuaaaguuuguuuuuguuuuuaau

SEQ ID NO: 168041 - RNA, 32 nt, Homo Sapiens
cucccguccgcacacacccccaccgcggucca

SEQ ID NO: 168042 - RNA, 32 nt, Homo Sapiens
ucccugcuggcacuucuccccucccuggcccu

SEQ ID NO: 168043 - RNA, 32 nt, Homo Sapiens
agauucguucagaccugacugcucuuacggaa

SEQ ID NO: 168044 - RNA, 32 nt, Homo Sapiens
ccaagguguucucagggcaaguucuugguguc

SEQ ID NO: 168045 - RNA, 32 nt, Homo Sapiens
acccccgcugcaggguuacgguucugggcccc

SEQ ID NO: 168046 - RNA, 32 nt, Homo Sapiens
uaggccucuaugucaggacucccuggccuuca

SEQ ID NO: 168047 - RNA, 32 nt, Homo Sapiens
cuucuuauguuacccagauggcagaugaucag

SEQ ID NO: 168048 - RNA, 32 nt, Homo Sapiens
augccaacacaaguaggauugacuuaaacucu

SEQ ID NO: 168049 - RNA, 32 nt, Homo Sapiens
uuuuucuuuucuuuuuuuuuuacuuuuuuguu

SEQ ID NO: 168050 - RNA, 31 nt, Homo Sapiens
ucauacuuuaauaugaaaguauuguuuauag

SEQ ID NO: 168051 - RNA, 32 nt, Homo Sapiens
gccgcggagcagccaggcuccuccgacgaaaa

SEQ ID NO: 168052 - RNA, 32 nt, Homo Sapiens
cugcugcucccucuccucagccaguugggugu

SEQ ID NO: 168053 - RNA, 32 nt, Homo Sapiens
ggguccagccccacagggucgguaggucucuc

SEQ ID NO: 168054 - RNA, 32 nt, Homo Sapiens
uuuuaaaugcauaaaggggguuggggcagggg

SEQ ID NO: 168055 - RNA, 32 nt, Homo Sapiens
uaaaaauuaaaauaaaugauucuauucauauu

SEQ ID NO: 168056 - RNA, 32 nt, Homo Sapiens
augaauccaggagcugguuuuuugaaaagauc

SEQ ID NO: 168057 - RNA, 32 nt, Homo Sapiens
ccaaggccuccacggagcgcgcggcgcugcuc

SEQ ID NO: 168058 - RNA, 32 nt, Homo Sapiens
aagaggcugugcgagcccuucccggcccuccc

SEQ ID NO: 168059 - RNA, 32 nt, Homo Sapiens
gugcagggcaggggcucugugccagcccugcu

SEQ ID NO: 168060 - RNA, 32 nt, Homo Sapiens
gacucucuaggauauggacauguugauuaagg

SEQ ID NO: 168061 - RNA, 32 nt, Homo Sapiens
uggccuuuguuccccaggagggcagccgaacu

SEQ ID NO: 168062 - RNA, 32 nt, Homo Sapiens
acucucagguauauaaccaaaauacaugaaaa

SEQ ID NO: 168063 - RNA, 32 nt, Homo Sapiens
gaggaaaaacaucagaacugucugacaaugga

SEQ ID NO: 168064 - RNA, 32 nt, Homo Sapiens
aucauuuuuuaaaaucuugaauccacaaauaa

SEQ ID NO: 168065 - RNA, 32 nt, Homo Sapiens
ucauaaaggcuuugguuuuaagacuuaaguag

SEQ ID NO: 168066 - RNA, 32 nt, Homo Sapiens
gccuuuuccagaagaucugaaaucauuggacc

SEQ ID NO: 168067 - RNA, 32 nt, Homo Sapiens
ugccccugaugaugggaugcucuuuaaauaau

SEQ ID NO: 168068 - RNA, 32 nt, Homo Sapiens
uuguaaucuacauguuuguaauuuguauuugc

SEQ ID NO: 168069 - RNA, 32 nt, Homo Sapiens
ccuugcacaccauggcagccucuucuugcacc

SEQ ID NO: 168070 - RNA, 32 nt, Homo Sapiens
aaaucagcuggguguggugccgcgugccugua

SEQ ID NO: 168071 - RNA, 32 nt, Homo Sapiens
uacaacuucccacagcagcccaggcucaacgg

SEQ ID NO: 168072 - RNA, 29 nt, Homo Sapiens
auccuguguucuuuccugacugguaauau

SEQ ID NO: 168073 - RNA, 32 nt, Homo Sapiens
aggucuuugaaaaaauacguuucugucaagaa

SEQ ID NO: 168074 - RNA, 32 nt, Homo Sapiens
uuagaaucuauucuuguauuugauagacaaaa

SEQ ID NO: 168075 - RNA, 32 nt, Homo Sapiens
agacggagacauuuugucaguuuugcaacauu

SEQ ID NO: 168076 - RNA, 32 nt, Homo Sapiens
ugauuccugugggaaccccggguucagggcca

SEQ ID NO: 168077 - RNA, 32 nt, Homo Sapiens
caccuggaaggggaccgaugccugguacugga

SEQ ID NO: 168078 - RNA, 32 nt, Homo Sapiens
cagccagcugggugauugcucagcgugaagga

SEQ ID NO: 168079 - RNA, 32 nt, Homo Sapiens
acaauggcagguuuuacacgucuaugcaauug

SEQ ID NO: 168080 - RNA, 32 nt, Homo Sapiens
gcggggaacgcucgcgcgguugccagagaaag

SEQ ID NO: 168081 - RNA, 32 nt, Homo Sapiens
gggggguuuuguuuccaaaggaacuaaauaaa

SEQ ID NO: 168082 - RNA, 32 nt, Homo Sapiens
ugcgcuccagagccgcaguucucccgugagag

SEQ ID NO: 168083 - RNA, 32 nt, Homo Sapiens
cauggggcccccaagaagcggacucuccaagg

SEQ ID NO: 168084 - RNA, 32 nt, Homo Sapiens
aaucggguucagaacacuuuuuaugacaaaaa

SEQ ID NO: 168085 - RNA, 32 nt, Homo Sapiens
guggggcggaauugggauuugcugcagcugug

SEQ ID NO: 168086 - RNA, 32 nt, Homo Sapiens
uuuucuaagauguaaaucacucaaaguauaug

SEQ ID NO: 168087 - RNA, 32 nt, Homo Sapiens
acuauggcaggaaaacagagaugguuuaguaa

SEQ ID NO: 168088 - RNA, 31 nt, Homo Sapiens
cugauucuuauuuauuaauagauuaaguucu

SEQ ID NO: 168089 - RNA, 32 nt, Homo Sapiens
cugcaucuccaagccaguuaugcugaauuugu

SEQ ID NO: 168090 - RNA, 32 nt, Homo Sapiens
agcagagcccggagcuccggccugcugucaag

SEQ ID NO: 168091 - RNA, 32 nt, Homo Sapiens
ugggggcacacacaugcaggcggcguggucuc

SEQ ID NO: 168092 - RNA, 32 nt, Homo Sapiens
ggaguucugcccaggggugcugcauaucgguc

SEQ ID NO: 168093 - RNA, 32 nt, Homo Sapiens
auggguaauuauuuuaaauaugcauuuacaca

SEQ ID NO: 168094 - RNA, 32 nt, Homo Sapiens
ggcaggaccaggaaacagcagccacugacagc

SEQ ID NO: 168095 - RNA, 32 nt, Homo Sapiens
ccauauuuccaggacggaaacacacccuuucc

SEQ ID NO: 168096 - RNA, 32 nt, Homo Sapiens
gugcagugacccugcaggccagcccuccaacc

SEQ ID NO: 168097 - RNA, 32 nt, Homo Sapiens
uguguuaauuucauuuugauaauuggccuuua

SEQ ID NO: 168098 - RNA, 32 nt, Homo Sapiens
aucuuuuucuaaaaacuucaaguguuugauua

SEQ ID NO: 168099 - RNA, 32 nt, Homo Sapiens
ccugccccauccccauccccaacaaggcagcu

SEQ ID NO: 168100 - RNA, 32 nt, Homo Sapiens
cacccgaguggaugcagaccuucuugcuguca

SEQ ID NO: 168101 - RNA, 32 nt, Homo Sapiens
gaagcuuggacagguuuuccugaucccggauu

SEQ ID NO: 168102 - RNA, 32 nt, Homo Sapiens
uugcucggaaugcugcagccgcccuccucugc

SEQ ID NO: 168103 - RNA, 32 nt, Homo Sapiens
gugauguaaaaagcuuccugaagggguguuuu

SEQ ID NO: 168104 - RNA, 32 nt, Homo Sapiens
gguagggggaugugggaagcagcauuguccuc

SEQ ID NO: 168105 - RNA, 32 nt, Homo Sapiens
auucuaguucuuaagcacuuuuaacaagaaau

SEQ ID NO: 168106 - RNA, 32 nt, Homo Sapiens
uuaugccugucuugcuuguuguugggcccuag

SEQ ID NO: 168107 - RNA, 32 nt, Homo Sapiens
uccggagugucuuuuuacucaucugauacagg

SEQ ID NO: 168108 - RNA, 32 nt, Homo Sapiens
cccaggagagccagcccucccuguccuccucg

SEQ ID NO: 168109 - RNA, 32 nt, Homo Sapiens
auauauuguaagugagagguaaaggaaaaugu

SEQ ID NO: 168110 - RNA, 32 nt, Homo Sapiens
aauaguuuaagugaugacaaguuccaauagcu

SEQ ID NO: 168111 - RNA, 32 nt, Homo Sapiens
aaaauagagcaagaaggcaacuugaagaaacg

SEQ ID NO: 168112 - RNA, 32 nt, Homo Sapiens
aacaucuuauuaugagaguguuuugagaaagu

SEQ ID NO: 168113 - RNA, 32 nt, Homo Sapiens
gcugaagaaagauaaggcuuugaugggccacu

SEQ ID NO: 168114 - RNA, 32 nt, Homo Sapiens
ucucugccuaccagcccucaccagugcuucga

SEQ ID NO: 168115 - RNA, 32 nt, Homo Sapiens
uuuacccaucugcugucuugcuccaucugaga

SEQ ID NO: 168116 - RNA, 32 nt, Homo Sapiens
auucccccaccagcugcagccccuugcucuca

SEQ ID NO: 168117 - RNA, 32 nt, Homo Sapiens
uuuugaugguaacaguuaauuucuuucauuag

SEQ ID NO: 168118 - RNA, 32 nt, Homo Sapiens
gacuucaugaaauaauaauuauagcaaagaac

SEQ ID NO: 168119 - RNA, 32 nt, Homo Sapiens
auauauauuuaauuuucuuaaauucccguuaa

SEQ ID NO: 168120 - RNA, 32 nt, Homo Sapiens
guugagcuugggcauugccaccagcuguggac

SEQ ID NO: 168121 - RNA, 32 nt, Homo Sapiens
cuggagggcuggguauccccuuggccugccac

SEQ ID NO: 168122 - RNA, 32 nt, Homo Sapiens
cucauuccuccacucacccauucacgcacacc

SEQ ID NO: 168123 - RNA, 32 nt, Homo Sapiens
gaggaauguagcaugacguuaagauuucaggg

SEQ ID NO: 168124 - RNA, 32 nt, Homo Sapiens
caugcaggccaugcgcucagcugcuggcacac

SEQ ID NO: 168125 - RNA, 32 nt, Homo Sapiens
ugccucaaguuauguauaccugucccagaugu

SEQ ID NO: 168126 - RNA, 32 nt, Homo Sapiens
uuauguguugagggaaauacaguuugguaccu

SEQ ID NO: 168127 - RNA, 32 nt, Homo Sapiens
cgcgcaugcgcgcgccccugaagcgccugggg

SEQ ID NO: 168128 - RNA, 32 nt, Homo Sapiens
ucuguucuuaacaagggcucuaccacugcauu

SEQ ID NO: 168129 - RNA, 32 nt, Homo Sapiens
gcaugccucaguuuccucauuuugaucuagau

SEQ ID NO: 168130 - RNA, 31 nt, Homo Sapiens
cugcaccugccgguuauuuccaagaagcuga

SEQ ID NO: 168131 - RNA, 32 nt, Homo Sapiens
gggauccucccuccccuucaaggcagacguuc

SEQ ID NO: 168132 - RNA, 32 nt, Homo Sapiens
gcgcacccugcgcccuguggcgcuggggccug

SEQ ID NO: 168133 - RNA, 32 nt, Homo Sapiens
uggaugguggguuguggaaacccggucaggua

SEQ ID NO: 168134 - RNA, 32 nt, Homo Sapiens
ggcagugugguaguugucugauuuuguuuacc

SEQ ID NO: 168135 - RNA, 32 nt, Homo Sapiens
aaacagugucauuguguguguuccuuucuuga

SEQ ID NO: 168136 - RNA, 32 nt, Homo Sapiens
gccaugggcuccugugugugcggcuacaggag

SEQ ID NO: 168137 - RNA, 32 nt, Homo Sapiens
cugccuggccuggccugggacaccuccucucu

SEQ ID NO: 168138 - RNA, 32 nt, Homo Sapiens
uucaucccuucagcaccuccccguaccuuccu

SEQ ID NO: 168139 - RNA, 32 nt, Homo Sapiens
ugcccugccuucucaggaaaagagggaggaca

SEQ ID NO: 168140 - RNA, 32 nt, Homo Sapiens
aguaaaaaacaaaaaauuguaauguugucuag

SEQ ID NO: 168141 - RNA, 32 nt, Homo Sapiens
aaagggaagcaucuaaaaaugaaaggugagua

SEQ ID NO: 168142 - RNA, 32 nt, Homo Sapiens
auguuugcaccucgaagcucaaccuccauagc

SEQ ID NO: 168143 - RNA, 32 nt, Homo Sapiens
gccaggccugacgcauucucguauccaaccca

SEQ ID NO: 168144 - RNA, 32 nt, Homo Sapiens
aguugguggcgcagaggcgggaggcggaggcg

SEQ ID NO: 168145 - RNA, 32 nt, Homo Sapiens
auuccggagucauaaggcacccgcgcgucuag

SEQ ID NO: 168146 - RNA, 32 nt, Homo Sapiens
uuaagcugacaguugcuauuuugcagaacagu

SEQ ID NO: 168147 - RNA, 32 nt, Homo Sapiens
cugauugugggaaggguugccagggauaaaga

SEQ ID NO: 168148 - RNA, 32 nt, Homo Sapiens
caagugaucugccugccuuggugucucaaagu

SEQ ID NO: 168149 - RNA, 32 nt, Homo Sapiens
guguuaggguaucuguuuaccuuuaaaaugau

SEQ ID NO: 168150 - RNA, 32 nt, Homo Sapiens
agggaacaaaaauuccaaugaggaauugaccu

SEQ ID NO: 168151 - RNA, 32 nt, Homo Sapiens
gaccgagccacgggcccccgcggccgcagcau

SEQ ID NO: 168152 - RNA, 32 nt, Homo Sapiens
cccuggggauuguugggaccaugcugccccca

SEQ ID NO: 168153 - RNA, 32 nt, Homo Sapiens
uuuuaguaaaauguagcuuuugauaguuaaua

SEQ ID NO: 168154 - RNA, 32 nt, Homo Sapiens
cuuuuguguauagaaaauauguauaguaggua

SEQ ID NO: 168155 - RNA, 32 nt, Homo Sapiens
aaaauacaaaaauuagcuggguguggugguag

SEQ ID NO: 168156 - RNA, 32 nt, Homo Sapiens
aaaguuaugucuuacauaguggcaggcaagag

SEQ ID NO: 168157 - RNA, 32 nt, Homo Sapiens
uggcuggccccggaugcugagagcuugguuuc

SEQ ID NO: 168158 - RNA, 32 nt, Homo Sapiens
ggcagaagcgcagccuuuguauggaggcccaa

SEQ ID NO: 168159 - RNA, 32 nt, Homo Sapiens
acacacuuuccacccucaccugcccccucaua

SEQ ID NO: 168160 - RNA, 32 nt, Homo Sapiens
ugggaacuuuuugcuguacaaaucuguuuaaa

SEQ ID NO: 168161 - RNA, 32 nt, Homo Sapiens
uauuuugccgagguugaggacacacauccaug

SEQ ID NO: 168162 - RNA, 32 nt, Homo Sapiens
gaagcaggugaccauggaggcuggcauccucc

SEQ ID NO: 168163 - RNA, 32 nt, Homo Sapiens
cuugcacugauaaugcacuuugaagauggaag

SEQ ID NO: 168164 - RNA, 32 nt, Homo Sapiens
cacccuaaacugugugugccuuuaaccaguua

SEQ ID NO: 168165 - RNA, 32 nt, Homo Sapiens
caggaaggaucuuucuuauauaaaggugcuuc

SEQ ID NO: 168166 - RNA, 32 nt, Homo Sapiens
ccuuggcuuuugcuuggcagagaggaccccac

SEQ ID NO: 168167 - RNA, 32 nt, Homo Sapiens
cuuaguugaaggacuugggaaauacuaucaaa

SEQ ID NO: 168168 - RNA, 32 nt, Homo Sapiens
cuuggugccugugagcucaucucccaggaugg

SEQ ID NO: 168169 - RNA, 32 nt, Homo Sapiens
uccacaugccuugaauccaagaaugagagagg

SEQ ID NO: 168170 - RNA, 32 nt, Homo Sapiens
accuacgagcagcugguggccuuggagaacaa

SEQ ID NO: 168171 - RNA, 32 nt, Homo Sapiens
uuuagauccacuuugcagauuuagacacaugg

SEQ ID NO: 168172 - RNA, 32 nt, Homo Sapiens
uguccugugcugucggagacgcacaggaagca

SEQ ID NO: 168173 - RNA, 32 nt, Homo Sapiens
uaaaguguaaaaugugcuguuucagcaugugu

SEQ ID NO: 168174 - RNA, 32 nt, Homo Sapiens
acgcggcacuuuacaugggggcagcuugggcc

SEQ ID NO: 168175 - RNA, 32 nt, Homo Sapiens
uccuggagauuccauuccauuuucaaguguac

SEQ ID NO: 168176 - RNA, 32 nt, Homo Sapiens
guaaacaacacuuuuccccagaccuaccauaa

SEQ ID NO: 168177 - RNA, 32 nt, Homo Sapiens
aaggugccagagauggcugugccggaggugcg

SEQ ID NO: 168178 - RNA, 32 nt, Homo Sapiens
ugccgcauucccucacuggcuguguauuuauu

SEQ ID NO: 168179 - RNA, 32 nt, Homo Sapiens
gcaaaaccaucucuacuaaaaauagaaaaauu

SEQ ID NO: 168180 - RNA, 32 nt, Homo Sapiens
cccuaaaagcggaaccgccucccgcccucgcc

SEQ ID NO: 168181 - RNA, 32 nt, Homo Sapiens
aauugccgugcagcucaucauaagcuaccuau

SEQ ID NO: 168182 - RNA, 32 nt, Homo Sapiens
ggguugcgggcucgguagcggcagcuucaggg

SEQ ID NO: 168183 - RNA, 32 nt, Homo Sapiens
ccaguuccccggcagcgggacccggcgaagac

SEQ ID NO: 168184 - RNA, 32 nt, Homo Sapiens
gacauguuugcagaacccuuuaggauggucua

SEQ ID NO: 168185 - RNA, 32 nt, Homo Sapiens
uucucaaaauuugaaaugucaaguauuagaaa

SEQ ID NO: 168186 - RNA, 32 nt, Homo Sapiens
ugcugggauuaccggcaugagccacugcgccu

SEQ ID NO: 168187 - RNA, 32 nt, Homo Sapiens
aaaaaauggauacauuaggagcuucaaacaca

SEQ ID NO: 168188 - RNA, 32 nt, Homo Sapiens
guggagucgggcggggccgaagccgggccgug

SEQ ID NO: 168189 - RNA, 32 nt, Homo Sapiens
gcagcccccagcucccaccuccccuugggccc

SEQ ID NO: 168190 - RNA, 32 nt, Homo Sapiens
uagagacccagcuggccuggggucugcuuucc

SEQ ID NO: 168191 - RNA, 32 nt, Homo Sapiens
cauccagccaauggauguccuucccuguaccc

SEQ ID NO: 168192 - RNA, 32 nt, Homo Sapiens
ccagcucugcagugucccauccacccucacac

SEQ ID NO: 168193 - RNA, 32 nt, Homo Sapiens
ugaccagugauguugagcuuuuucucauguga

SEQ ID NO: 168194 - RNA, 32 nt, Homo Sapiens
cucuacccugaagaaagggauggauaggaagu

SEQ ID NO: 168195 - RNA, 32 nt, Homo Sapiens
guggggagagggugaagaagggcuuuugccug

SEQ ID NO: 168196 - RNA, 32 nt, Homo Sapiens
uguuaggaaagaucggcaaacaugcaguaacu

SEQ ID NO: 168197 - RNA, 32 nt, Homo Sapiens
agguuaugagagauaagaauaaagaguuaaca

SEQ ID NO: 168198 - RNA, 30 nt, Homo Sapiens
cucgcgcccugcucagcgcguccucccgcg

SEQ ID NO: 168199 - RNA, 32 nt, Homo Sapiens
ucacccagugauugucaccauggccagcaaga

SEQ ID NO: 168200 - RNA, 32 nt, Homo Sapiens
aauaagugauucaaaaugaaaauauuuacuuu

SEQ ID NO: 168201 - RNA, 32 nt, Homo Sapiens
aacaagcauguacagcuacugugcaugugcac

SEQ ID NO: 168202 - RNA, 26 nt, Homo Sapiens
ucagugaugugguccauuauaagaua

SEQ ID NO: 168203 - RNA, 32 nt, Homo Sapiens
aucgggguuggccucuuccucaccaucuacaa

SEQ ID NO: 168204 - RNA, 32 nt, Homo Sapiens
agccacguacaaccucacgguggaggagccca

SEQ ID NO: 168205 - RNA, 32 nt, Homo Sapiens
acauuuucaaccacaauaaagaugaaacaaaa

SEQ ID NO: 168206 - RNA, 32 nt, Homo Sapiens
cugcugcuaucuuccaagagaacgggacuccg

SEQ ID NO: 168207 - RNA, 32 nt, Homo Sapiens
cuggaagaugaccacugacuccuacucuccua

SEQ ID NO: 168208 - RNA, 32 nt, Homo Sapiens
gugugagggccugauuaaagcuuaucgaacua

SEQ ID NO: 168209 - RNA, 32 nt, Homo Sapiens
ccuccucugaagaaauuuaggauuuuucucuu

SEQ ID NO: 168210 - RNA, 32 nt, Homo Sapiens
uuaaauauauaaagaauccuuuccuagguaga

SEQ ID NO: 168211 - RNA, 32 nt, Homo Sapiens
uuucggguagccaguuagcucaguggguuaga

SEQ ID NO: 168212 - RNA, 31 nt, Homo Sapiens
aucaagcgucaauccauucagaguuucuuau

SEQ ID NO: 168213 - RNA, 29 nt, Homo Sapiens
ccugguaagaagguguuuuacccuguggu

SEQ ID NO: 168214 - RNA, 32 nt, Homo Sapiens
gucccccggccgcgagaagcacggugcuucug

SEQ ID NO: 168215 - RNA, 32 nt, Homo Sapiens
uuaggauacuaaaaggauauuaguuacccaag

SEQ ID NO: 168216 - RNA, 32 nt, Homo Sapiens
caauggggacccugggguggcuccuggccaag

SEQ ID NO: 168217 - RNA, 32 nt, Homo Sapiens
guguccccaagcccucagucucagagcuuggg

SEQ ID NO: 168218 - RNA, 32 nt, Homo Sapiens
aauuauagaugacaaggcaauauaggacaacu

SEQ ID NO: 168219 - RNA, 32 nt, Homo Sapiens
ccgagcuggcgcgggcauggccgcggcaugag

SEQ ID NO: 168220 - RNA, 32 nt, Homo Sapiens
cugcauaaaaauuuuucugaaacauggcugga

SEQ ID NO: 168221 - RNA, 32 nt, Homo Sapiens
uuagauaguuucuuuuuuuuuaaaaaaaguuu

SEQ ID NO: 168222 - RNA, 32 nt, Homo Sapiens
gccggacgaagcgaggagggaccgccgaggcu

SEQ ID NO: 168223 - RNA, 32 nt, Homo Sapiens
auggaaggcuccugccugggcccugcucacag

SEQ ID NO: 168224 - RNA, 32 nt, Homo Sapiens
cugagcagggagauccugguugguguugcaga

SEQ ID NO: 168225 - RNA, 32 nt, Homo Sapiens
gaucagcccuacuagaugcagagaacccgcag

SEQ ID NO: 168226 - RNA, 32 nt, Homo Sapiens
ugcccaagggaagaggcaagguggggccugca

SEQ ID NO: 168227 - RNA, 32 nt, Homo Sapiens
uuaaguacaaauaaacaauauauugacuauca

SEQ ID NO: 168228 - RNA, 32 nt, Homo Sapiens
aacaaguauuugaaaauauauaguaucaacug

SEQ ID NO: 168229 - RNA, 32 nt, Homo Sapiens
ucaaaggaaaucaacaguugugcuugggggcu

SEQ ID NO: 168230 - RNA, 32 nt, Homo Sapiens
aauucauuuucuacuaaauguguaccauuuuu

SEQ ID NO: 168231 - RNA, 32 nt, Homo Sapiens
acgggagaugacuuuuugcauugaaacgggac

SEQ ID NO: 168232 - RNA, 32 nt, Homo Sapiens
aaaaauuauuaauuauuuuuaauagacaggau

SEQ ID NO: 168233 - RNA, 32 nt, Homo Sapiens
aaagaacagaaauuauuuuauccugaaguaag

SEQ ID NO: 168234 - RNA, 32 nt, Homo Sapiens
agcggacgccuggcccugcaccgggcuuugga

SEQ ID NO: 168235 - RNA, 32 nt, Homo Sapiens
caggaucggcccgcgggcuggcgucgauaggc

SEQ ID NO: 168236 - RNA, 32 nt, Homo Sapiens
cccuauauuuuuggcuguauggcaggugcuug

SEQ ID NO: 168237 - RNA, 32 nt, Homo Sapiens
ugaauuaauaacaugaaaagaguauacugugu

SEQ ID NO: 168238 - RNA, 32 nt, Homo Sapiens
acucagcagacaccaaaccaacuggugcuuaa

SEQ ID NO: 168239 - RNA, 32 nt, Homo Sapiens
aagaaaaauuuauauuucagauuuauuucccc

SEQ ID NO: 168240 - RNA, 32 nt, Homo Sapiens
gaggccgcccccagagagcaucaggauggcug

SEQ ID NO: 168241 - RNA, 32 nt, Homo Sapiens
uacuaguuauuuacaacuuuugcucaagccga

SEQ ID NO: 168242 - RNA, 32 nt, Homo Sapiens
aaccaccugccagauuucagggacuguuuuuu

SEQ ID NO: 168243 - RNA, 32 nt, Homo Sapiens
guucuggcgagggcugcgggaaggaaaggggg

SEQ ID NO: 168244 - RNA, 32 nt, Homo Sapiens
gcaccuuggucccagugucuuccuuuuguucu

SEQ ID NO: 168245 - RNA, 32 nt, Homo Sapiens
cacugccacuguggggggcauggccauccucc

SEQ ID NO: 168246 - RNA, 32 nt, Homo Sapiens
guuucauacagcuagcauuagaugggugaugu

SEQ ID NO: 168247 - RNA, 32 nt, Homo Sapiens
ucuggguucaacaugacaugaaggauggcacu

SEQ ID NO: 168248 - RNA, 32 nt, Homo Sapiens
cacacaauuaacuccguuuccaaauacauucc

SEQ ID NO: 168249 - RNA, 32 nt, Homo Sapiens
guucaagacaccuucucccugccccccuggua

SEQ ID NO: 168250 - RNA, 32 nt, Homo Sapiens
gagauagguucaggauaaagauuaaauguggc

SEQ ID NO: 168251 - RNA, 32 nt, Homo Sapiens
acccacaaaacuagcauccuccuggaggagcu

SEQ ID NO: 168252 - RNA, 32 nt, Homo Sapiens
ucacuugagccuaagagaucaaggcugcagug

SEQ ID NO: 168253 - RNA, 32 nt, Homo Sapiens
cuauugguagagaacaauaacagaaguaauuu

SEQ ID NO: 168254 - RNA, 32 nt, Homo Sapiens
gaggacccgcccucgggcucauggcggccccg

SEQ ID NO: 168255 - RNA, 32 nt, Homo Sapiens
cuucuauuucuuucuuuuuauuuacauuagcu

SEQ ID NO: 168256 - RNA, 32 nt, Homo Sapiens
gggguaccccuuuuccucucagccccucccug

SEQ ID NO: 168257 - RNA, 32 nt, Homo Sapiens
ccuggggcagggcucuaccuccccugcgucac

SEQ ID NO: 168258 - RNA, 32 nt, Homo Sapiens
ugugggacaagaagaaaggguauuuauucauu

SEQ ID NO: 168259 - RNA, 32 nt, Homo Sapiens
cucuaaaaaccaucuuccaauuucauagagau

SEQ ID NO: 168260 - RNA, 32 nt, Homo Sapiens
caggacuagagaaaaccuauuuuuguaaugau

SEQ ID NO: 168261 - RNA, 32 nt, Homo Sapiens
gcuucucaucccugcauagaugcaguauucuu

SEQ ID NO: 168262 - RNA, 32 nt, Homo Sapiens
ccaucugugaguuugucuuauuggcgccuuuu

SEQ ID NO: 168263 - RNA, 32 nt, Homo Sapiens
acuuauuugugcaaaauugauuuucauuuaau

SEQ ID NO: 168264 - RNA, 32 nt, Homo Sapiens
uugguguggcuaagauggaaacagggcugauu

SEQ ID NO: 168265 - RNA, 32 nt, Homo Sapiens
auaucugcuugggaaagggcugugugacccua

SEQ ID NO: 168266 - RNA, 31 nt, Homo Sapiens
cggagcccuugccucgcuccaggugggagcu

SEQ ID NO: 168267 - RNA, 32 nt, Homo Sapiens
aaauuccauuuaaaauguguauuuauuggauu

SEQ ID NO: 168268 - RNA, 32 nt, Homo Sapiens
cucucuuuuuagaaguuuuuuuccuuuuuuuu

SEQ ID NO: 168269 - RNA, 30 nt, Homo Sapiens
guaccauggcuuugguucacaaauugcugc

SEQ ID NO: 168270 - RNA, 32 nt, Homo Sapiens
aagacuuugggcuaucuagugaaaugggcucc

SEQ ID NO: 168271 - RNA, 32 nt, Homo Sapiens
aauuaacuauugugaacaguacacuauaccau

SEQ ID NO: 168272 - RNA, 32 nt, Homo Sapiens
agaagcugggaacguguguccaggcucugggc

SEQ ID NO: 168273 - RNA, 32 nt, Homo Sapiens
agaacuguccacucaugccauuuucucucuug

SEQ ID NO: 168274 - RNA, 32 nt, Homo Sapiens
ggcacgaggggauggcagaggaggugaggagg

SEQ ID NO: 168275 - RNA, 32 nt, Homo Sapiens
acuucaaaguugauuaauaaauuuaaucuuaa

SEQ ID NO: 168276 - RNA, 32 nt, Homo Sapiens
aaagcaguuugauguaagauauuuuaaauauu

SEQ ID NO: 168277 - RNA, 32 nt, Homo Sapiens
acuacucccccugccuggcccugagagcggcu

SEQ ID NO: 168278 - RNA, 32 nt, Homo Sapiens
accucccucaugcagacagagccccggcuccc

SEQ ID NO: 168279 - RNA, 32 nt, Homo Sapiens
auggugugguggcaucagugauguacacugug

SEQ ID NO: 168280 - RNA, 32 nt, Homo Sapiens
cuaaucauaaggaaacaagacaaacccaaaau

SEQ ID NO: 168281 - RNA, 32 nt, Homo Sapiens
accugauuguauuuuuuuuuuaaauaaaagca

SEQ ID NO: 168282 - RNA, 32 nt, Homo Sapiens
guguggagcuuguuggggggaugucuaggaag

SEQ ID NO: 168283 - RNA, 32 nt, Homo Sapiens
uauugucaugucugggucaguuccuuguaucu

SEQ ID NO: 168284 - RNA, 32 nt, Homo Sapiens
aggacauugauaaacugugauuuuacaauaac

SEQ ID NO: 168285 - RNA, 32 nt, Homo Sapiens
cuaauuaagagagauccaaaccacucaguacc

SEQ ID NO: 168286 - RNA, 30 nt, Homo Sapiens
cagaggaagaagcuuaugaaacugaaaauc

SEQ ID NO: 168287 - RNA, 32 nt, Homo Sapiens
uccuguccggugccucccccaacccccacacc

SEQ ID NO: 168288 - RNA, 32 nt, Homo Sapiens
cccgcaccccgcgaccccucccgggaccccgg

SEQ ID NO: 168289 - RNA, 32 nt, Homo Sapiens
cggcccccgcccucugcccccagcugcuccuc

SEQ ID NO: 168290 - RNA, 32 nt, Homo Sapiens
ucuuauugcaggcaagucucuauauuaugucc

SEQ ID NO: 168291 - RNA, 32 nt, Homo Sapiens
augacggacaccuuuacacagcagaggaaaua

SEQ ID NO: 168292 - RNA, 32 nt, Homo Sapiens
gaagacaauuuaaugauggugaagaaauaaua

SEQ ID NO: 168293 - RNA, 32 nt, Homo Sapiens
aucucuuaucuaaauauuaaaagauaagucaa

SEQ ID NO: 168294 - RNA, 32 nt, Homo Sapiens
uucccagccccgagccaugaugaagacuuugu

SEQ ID NO: 168295 - RNA, 32 nt, Homo Sapiens
agcaucugaacucucuuuuuuauauuuugcuu

SEQ ID NO: 168296 - RNA, 32 nt, Homo Sapiens
caaaagaggaccagucucugagcuuggcuuuu

SEQ ID NO: 168297 - RNA, 32 nt, Homo Sapiens
uccuuccccagccccuggcccagggucaaagg

SEQ ID NO: 168298 - RNA, 32 nt, Homo Sapiens
gguuguccaagcccaggucccggcccugggug

SEQ ID NO: 168299 - RNA, 32 nt, Homo Sapiens
uacguguuuaaaaaaaagcauaaaaacauuuu

SEQ ID NO: 168300 - RNA, 32 nt, Homo Sapiens
gcagccuaacccuccuucucuucuucuccucu

SEQ ID NO: 168301 - RNA, 32 nt, Homo Sapiens
gaagcuuucagcugucucugguaggccugaug

SEQ ID NO: 168302 - RNA, 32 nt, Homo Sapiens
cuacacagacugcuuccuuauagcuggacuuu

SEQ ID NO: 168303 - RNA, 32 nt, Homo Sapiens
uucuaugaggacuugacacagguucugcugag

SEQ ID NO: 168304 - RNA, 32 nt, Homo Sapiens
cagccugguggccccaggacguuccggucgca

SEQ ID NO: 168305 - RNA, 32 nt, Homo Sapiens
uugcugaccuggggcuuuuuaccugguggucu

SEQ ID NO: 168306 - RNA, 32 nt, Homo Sapiens
acaguaccaagcacgguucucuacacagguga

SEQ ID NO: 168307 - RNA, 32 nt, Homo Sapiens
ugcaggcuguggcuccaggggcccgucgccuu

SEQ ID NO: 168308 - RNA, 32 nt, Homo Sapiens
uuccuccuggaaauucaaccuguuucgcaguu

SEQ ID NO: 168309 - RNA, 32 nt, Homo Sapiens
cccuuuuugauauaggcuuuggcaaauggaug

SEQ ID NO: 168310 - RNA, 32 nt, Homo Sapiens
aaggagaagucuauguggugugaggcaauaac

SEQ ID NO: 168311 - RNA, 32 nt, Homo Sapiens
caauuuuucgguuuccuucaucauucucuucu

SEQ ID NO: 168312 - RNA, 32 nt, Homo Sapiens
aggagcucuaucaccagccugaaacccgaaga

SEQ ID NO: 168313 - RNA, 32 nt, Homo Sapiens
augagguaaaauggcauuagauggcucuauau

SEQ ID NO: 168314 - RNA, 32 nt, Homo Sapiens
uuuguuccagcauguaguauacauuguaugug

SEQ ID NO: 168315 - RNA, 32 nt, Homo Sapiens
cuaaugcagcauauuuuucuuaccaaaggagu

SEQ ID NO: 168316 - RNA, 32 nt, Homo Sapiens
uuagcuggucagggaaggcuccuuggaggagg

SEQ ID NO: 168317 - RNA, 32 nt, Homo Sapiens
aaagaaaaaaauuuuguccuaauucccaauuu

SEQ ID NO: 168318 - RNA, 32 nt, Homo Sapiens
aguuauuauuccagagaguauacugguaucuu

SEQ ID NO: 168319 - RNA, 32 nt, Homo Sapiens
acuggucucaucuccauugccuuaaugccagg

SEQ ID NO: 168320 - RNA, 32 nt, Homo Sapiens
cagucacucccucugccuucaggcuucuguca

SEQ ID NO: 168321 - RNA, 32 nt, Homo Sapiens
auaagauaucauagaaaaaauauaagugguug

SEQ ID NO: 168322 - RNA, 32 nt, Homo Sapiens
ugauaagauguuaucaaugacaaugcaugccc

SEQ ID NO: 168323 - RNA, 30 nt, Homo Sapiens
gugcgguggugcgaucacgguuccaugcag

SEQ ID NO: 168324 - RNA, 32 nt, Homo Sapiens
cgaaggauccagcucuccucuaccagugggag

SEQ ID NO: 168325 - RNA, 32 nt, Homo Sapiens
gaccuuguucucugcuggauucgcagcaacca

SEQ ID NO: 168326 - RNA, 32 nt, Homo Sapiens
gcggaccugagccgagcccaccccccucccca

SEQ ID NO: 168327 - RNA, 32 nt, Homo Sapiens
ucugguuggagauccuguuauuauuaaugcaa

SEQ ID NO: 168328 - RNA, 32 nt, Homo Sapiens
gaccgagcugccgccgccaccaccgcagcagc

SEQ ID NO: 168329 - RNA, 32 nt, Homo Sapiens
ugcggaaccgggggcgcgcgggcgcagcgcag

SEQ ID NO: 168330 - RNA, 32 nt, Homo Sapiens
cgaaccggcgcuccugcccccggggugacgcg

SEQ ID NO: 168331 - RNA, 32 nt, Homo Sapiens
aagcaggccugccugccccugagaugcggaaa

SEQ ID NO: 168332 - RNA, 32 nt, Homo Sapiens
uuuggaguccuggacguuggagggauuaccca

SEQ ID NO: 168333 - RNA, 32 nt, Homo Sapiens
uuggccuggauggugacagaccaugugcucua

SEQ ID NO: 168334 - RNA, 32 nt, Homo Sapiens
uggggucaugcccuccucucccauugucccuc

SEQ ID NO: 168335 - RNA, 32 nt, Homo Sapiens
gagcugagggccugcagucugcggcuggaauc

SEQ ID NO: 168336 - RNA, 32 nt, Homo Sapiens
gccaccuuugguauuugcagcuuaccagcugg

SEQ ID NO: 168337 - RNA, 32 nt, Homo Sapiens
cgcggcccgcuggcugcccuucccgccagcgc

SEQ ID NO: 168338 - RNA, 32 nt, Homo Sapiens
uugaaagcuuugaaauaaaauaacaaugucuu

SEQ ID NO: 168339 - RNA, 32 nt, Homo Sapiens
cagggagacaguccccuggcccugccccuccc

SEQ ID NO: 168340 - RNA, 32 nt, Homo Sapiens
cuauuugaaacacacagugaccaagggaagug

SEQ ID NO: 168341 - RNA, 32 nt, Homo Sapiens
uggauaauuugcucuuuuuuuggcauauaagu

SEQ ID NO: 168342 - RNA, 32 nt, Homo Sapiens
cuuggucacaucuuauuguuuauuuuuucaua

SEQ ID NO: 168343 - RNA, 32 nt, Homo Sapiens
cuugacucauuucuccuucgccagcucuuucc

SEQ ID NO: 168344 - RNA, 32 nt, Homo Sapiens
cuccugucaagcgguggaguugauuucuccaa

SEQ ID NO: 168345 - RNA, 32 nt, Homo Sapiens
acccucuauucugcacccugugagccaccgag

SEQ ID NO: 168346 - RNA, 32 nt, Homo Sapiens
cagccccauccagccccgcgcccgccaugccg

SEQ ID NO: 168347 - RNA, 32 nt, Homo Sapiens
guaccucugguccucucuccagcccuggaguc

SEQ ID NO: 168348 - RNA, 32 nt, Homo Sapiens
uugcuaccuucacuucuccccagcucugcccu

SEQ ID NO: 168349 - RNA, 32 nt, Homo Sapiens
gcucccugccagcaccuccggccagccccgcc

SEQ ID NO: 168350 - RNA, 30 nt, Homo Sapiens
ucuagguggggcgggaaagccagugacucc

SEQ ID NO: 168351 - RNA, 32 nt, Homo Sapiens
uucuaauguuccccucaagggcugaguggcag

SEQ ID NO: 168352 - RNA, 32 nt, Homo Sapiens
cuuuucauauuguguuuauucuccaggcuauu

SEQ ID NO: 168353 - RNA, 32 nt, Homo Sapiens
aggucauuuugugaauacuauguaucaagccc

SEQ ID NO: 168354 - RNA, 32 nt, Homo Sapiens
cugagccugagcagggaggcccggggcuuccu

SEQ ID NO: 168355 - RNA, 28 nt, Homo Sapiens
gaggcaguggcuaguggggugaacagcu

SEQ ID NO: 168356 - RNA, 32 nt, Homo Sapiens
caucuuucagcauagacuuaacucccuuaagc

SEQ ID NO: 168357 - RNA, 32 nt, Homo Sapiens
agagaaaaugugauuugagucuggagacaauu

SEQ ID NO: 168358 - RNA, 32 nt, Homo Sapiens
ugcaggcucccucugcccauucccagaaccag

SEQ ID NO: 168359 - RNA, 32 nt, Homo Sapiens
gcguucagccuggcaguucauucacuuauuag

SEQ ID NO: 168360 - RNA, 32 nt, Homo Sapiens
gagucuguuuagaagaaaaagcaaagacugag

SEQ ID NO: 168361 - RNA, 32 nt, Homo Sapiens
ccagaggaaugcugagaaaucaccuggaggag

SEQ ID NO: 168362 - RNA, 32 nt, Homo Sapiens
ugggcccccagccccagaagaugcugggcccc

SEQ ID NO: 168363 - RNA, 32 nt, Homo Sapiens
ggagcgggggcucaggcggcggcggccucgac

SEQ ID NO: 168364 - RNA, 30 nt, Homo Sapiens
caagcguuacgcggcggcggcggcggcggc

SEQ ID NO: 168365 - RNA, 32 nt, Homo Sapiens
aauucacucaauuugaauaaagaugaacagua

SEQ ID NO: 168366 - RNA, 32 nt, Homo Sapiens
uggauguccuucccuguacccaauucaagcuu

SEQ ID NO: 168367 - RNA, 32 nt, Homo Sapiens
aggccaaagggaggggagcaaguggggaccug

SEQ ID NO: 168368 - RNA, 29 nt, Homo Sapiens
caguaaaauguagagugaaaguuaaaucc

SEQ ID NO: 168369 - RNA, 32 nt, Homo Sapiens
gccccacugccugccagcuguccccaaaagga

SEQ ID NO: 168370 - RNA, 32 nt, Homo Sapiens
acuuuaacuaaaaagucuuugcuauuugagau

SEQ ID NO: 168371 - RNA, 31 nt, Homo Sapiens
aauguuuaaaagaaaaacaaugaauuagaag

SEQ ID NO: 168372 - RNA, 31 nt, Homo Sapiens
cggccgagggcggagcgcgcuggcccugcag

SEQ ID NO: 168373 - RNA, 32 nt, Homo Sapiens
aacaacaaaccacaaaauuauuugaguacugu

SEQ ID NO: 168374 - RNA, 32 nt, Homo Sapiens
acaaucauauccugauucagcucuuccuccac

SEQ ID NO: 168375 - RNA, 32 nt, Homo Sapiens
cacugcuggcccggcucuccagcugcagaggc

SEQ ID NO: 168376 - RNA, 32 nt, Homo Sapiens
ccagcccagcgcccgcgcagcucggugcccuc

SEQ ID NO: 168377 - RNA, 32 nt, Homo Sapiens
caauuacaacuaaaaaauauaucuagcauuug

SEQ ID NO: 168378 - RNA, 32 nt, Homo Sapiens
aaccaaccaugcuucuggcaugauaaaaucau

SEQ ID NO: 168379 - RNA, 32 nt, Homo Sapiens
ugggccgcggccuggcgcggaagccgccugug

SEQ ID NO: 168380 - RNA, 32 nt, Homo Sapiens
ccucagaucugccugcuacucugauauuucag

SEQ ID NO: 168381 - RNA, 32 nt, Homo Sapiens
cuccagguccaccccaaccuccccugauuuau

SEQ ID NO: 168382 - RNA, 32 nt, Homo Sapiens
gugccuucugcccucccuggagccuccacugc

SEQ ID NO: 168383 - RNA, 30 nt, Homo Sapiens
gcuggggcgaugguggacgcccugaagaug

SEQ ID NO: 168384 - RNA, 32 nt, Homo Sapiens
gaggucacagggaagucacagaacaguaguac

SEQ ID NO: 168385 - RNA, 32 nt, Homo Sapiens
uucuuguugcuaauaaucugguaagauccauc

SEQ ID NO: 168386 - RNA, 32 nt, Homo Sapiens
agaaccaccucugugcagaaaagcaaccaccu

SEQ ID NO: 168387 - RNA, 32 nt, Homo Sapiens
ucccagucaauacagaguucccucugcugucu

SEQ ID NO: 168388 - RNA, 32 nt, Homo Sapiens
ucaaucuucagggcuuccuguuugaagucaag

SEQ ID NO: 168389 - RNA, 32 nt, Homo Sapiens
gggguucuacuugagauuucccucguggugcc

SEQ ID NO: 168390 - RNA, 32 nt, Homo Sapiens
ggaaagagcugagccaaggaaaaucagcugag

SEQ ID NO: 168391 - RNA, 32 nt, Homo Sapiens
ucucgucgccugcccgaggccggagcggcggg

SEQ ID NO: 168392 - RNA, 32 nt, Homo Sapiens
ccuggccccuggggauucuguggugugggugg

SEQ ID NO: 168393 - RNA, 32 nt, Homo Sapiens
auuuuucuucuagaucuagacaucucaaaaug

SEQ ID NO: 168394 - RNA, 31 nt, Homo Sapiens
guguugggggcggugugggcucuggaagugc

SEQ ID NO: 168395 - RNA, 32 nt, Homo Sapiens
cccuuaagccugccuccaccuuccuggugcau

SEQ ID NO: 168396 - RNA, 32 nt, Homo Sapiens
aaguggagauuaccugguauguaucucucugg

SEQ ID NO: 168397 - RNA, 32 nt, Homo Sapiens
uaguuggagcccagguauuaucaugcaggaga

SEQ ID NO: 168398 - RNA, 32 nt, Homo Sapiens
ugagaauuuuaaaauuuaugaaaucuauauuc

SEQ ID NO: 168399 - RNA, 32 nt, Homo Sapiens
ccuucucuuuucuccuucuuguagcacauauc

SEQ ID NO: 168400 - RNA, 32 nt, Homo Sapiens
ggugucaggaucagaaucauggguagaaggug

SEQ ID NO: 168401 - RNA, 32 nt, Homo Sapiens
accagggaacaagaagcagccaaagaaggugg

SEQ ID NO: 168402 - RNA, 32 nt, Homo Sapiens
cucucaaacuaaaagacauuuguuauuuugga

SEQ ID NO: 168403 - RNA, 32 nt, Homo Sapiens
accccuccugugcuaccaccccgccggccuca

SEQ ID NO: 168404 - RNA, 32 nt, Homo Sapiens
acuauucauuuucuccaccuuguuuauauggu

SEQ ID NO: 168405 - RNA, 32 nt, Homo Sapiens
guaaucaaccuuuacuucccaagcuguuuguu

SEQ ID NO: 168406 - RNA, 32 nt, Homo Sapiens
uauaguacuggacacaguacuggugaaacuga

SEQ ID NO: 168407 - RNA, 32 nt, Homo Sapiens
cauacugacagauuauuuuuauuuauucaaug

SEQ ID NO: 168408 - RNA, 32 nt, Homo Sapiens
uuaacauuucuuuuucaaaauucugguaacua

SEQ ID NO: 168409 - RNA, 32 nt, Homo Sapiens
cacacacccuccccugccacacuccucugcca

SEQ ID NO: 168410 - RNA, 29 nt, Homo Sapiens
auuugauaaaguuuuugcuaguuauuuac

SEQ ID NO: 168411 - RNA, 32 nt, Homo Sapiens
cucuggccuguguccuggguguguaccauacc

SEQ ID NO: 168412 - RNA, 32 nt, Homo Sapiens
ccuguaaaguaagcccaaacaucccaaauguc

SEQ ID NO: 168413 - RNA, 32 nt, Homo Sapiens
cagacuuacuagauaaaaccagaaauggaaau

SEQ ID NO: 168414 - RNA, 32 nt, Homo Sapiens
agcagccagucagcuugccgccggcggccaag

SEQ ID NO: 168415 - RNA, 32 nt, Homo Sapiens
auaguuugauaaaaagaucaauaaauguuuga

SEQ ID NO: 168416 - RNA, 32 nt, Homo Sapiens
gcccgcggugcccgcgcacgccugccgccauc

SEQ ID NO: 168417 - RNA, 32 nt, Homo Sapiens
ggaaaaaagacaugggguagggacguaagugg

SEQ ID NO: 168418 - RNA, 32 nt, Homo Sapiens
agaacagguugaauaaggcgcuucuggggugg

SEQ ID NO: 168419 - RNA, 32 nt, Homo Sapiens
ggcugccagcucgccugacucccggccucuug

SEQ ID NO: 168420 - RNA, 32 nt, Homo Sapiens
uaggacaggaggagcuucgggcccagcuucac

SEQ ID NO: 168421 - RNA, 32 nt, Homo Sapiens
cccagugcuucccucccaugggacucaggguc

SEQ ID NO: 168422 - RNA, 32 nt, Homo Sapiens
acuugaucauuuaauucucaguuucuuuucaa

SEQ ID NO: 168423 - RNA, 32 nt, Homo Sapiens
cucugggagccgagugcagagccagggcccag

SEQ ID NO: 168424 - RNA, 32 nt, Homo Sapiens
uuguaccucagguguuuuaggugugagauguu

SEQ ID NO: 168425 - RNA, 32 nt, Homo Sapiens
cccgaaacccucaccagauaaacuacaguuug

SEQ ID NO: 168426 - RNA, 32 nt, Homo Sapiens
uucuccccagaucucagcgugcaugcauauau

SEQ ID NO: 168427 - RNA, 32 nt, Homo Sapiens
gcgcccgcugcccucucaccgccccacgcagg

SEQ ID NO: 168428 - RNA, 32 nt, Homo Sapiens
ucuuuuuugguuucuucaaccaaaaaagaaag

SEQ ID NO: 168429 - RNA, 32 nt, Homo Sapiens
cagagcguauaaauauaaaguuagauacuuau

SEQ ID NO: 168430 - RNA, 32 nt, Homo Sapiens
caaagcugcccccaaaucagacauaccucugu

SEQ ID NO: 168431 - RNA, 30 nt, Homo Sapiens
ccaggaggcaggcgcgcguccaaauccaga

SEQ ID NO: 168432 - RNA, 32 nt, Homo Sapiens
gagaccacagucauaagaguaaaacaaaaauu

SEQ ID NO: 168433 - RNA, 32 nt, Homo Sapiens
uuccggaucuucaucauggaaguuucauuugu

SEQ ID NO: 168434 - RNA, 32 nt, Homo Sapiens
aguuacagccccugcuggcgcagccucucuga

SEQ ID NO: 168435 - RNA, 32 nt, Homo Sapiens
ggaucaugaagaggagccuccgccuugaccaa

SEQ ID NO: 168436 - RNA, 32 nt, Homo Sapiens
gcucucugucuccagcaguucucucgaauacu

SEQ ID NO: 168437 - RNA, 28 nt, Homo Sapiens
uccacaguguuuuguauguguuuggggc

SEQ ID NO: 168438 - RNA, 32 nt, Homo Sapiens
cgcccauacuccccggugcccgccucgugacg

SEQ ID NO: 168439 - RNA, 32 nt, Homo Sapiens
gagacaggagaauggcgugaaucggggaggca

SEQ ID NO: 168440 - RNA, 32 nt, Homo Sapiens
gauaagguagaagugaaggagauggaaaaacu

SEQ ID NO: 168441 - RNA, 32 nt, Homo Sapiens
gugcuguacaagcauuaccaaggauucaguac

SEQ ID NO: 168442 - RNA, 32 nt, Homo Sapiens
uccagaguagccaggacugaugguuuucuggu

SEQ ID NO: 168443 - RNA, 32 nt, Homo Sapiens
aaugucuuuccaaauuauuucuuaauuauuau

SEQ ID NO: 168444 - RNA, 32 nt, Homo Sapiens
gagagacagggccaaaggcaguguacccuuga

SEQ ID NO: 168445 - RNA, 32 nt, Homo Sapiens
ggacuacauuuuauaaaacguuauaguggagc

SEQ ID NO: 168446 - RNA, 32 nt, Homo Sapiens
ucagauggggaaaggcaguucuccucuagcac

SEQ ID NO: 168447 - RNA, 32 nt, Homo Sapiens
aaguaauguuaauuuuacuaagaauaaaacau

SEQ ID NO: 168448 - RNA, 32 nt, Homo Sapiens
acccagaaaauauaaugaaauaaaaacuacaa

SEQ ID NO: 168449 - RNA, 32 nt, Homo Sapiens
uaguccuugcggcaguuugaaauacacgcggg

SEQ ID NO: 168450 - RNA, 30 nt, Homo Sapiens
caaacucuggggggcggcgggagcugagcg

SEQ ID NO: 168451 - RNA, 32 nt, Homo Sapiens
cucucagaccucuguagauagucagcgcugcg

SEQ ID NO: 168452 - RNA, 32 nt, Homo Sapiens
auuuguuuuuauuugguucuguuccagauaaa

SEQ ID NO: 168453 - RNA, 32 nt, Homo Sapiens
uguuuuuuaaaauaaacuccagcacagggaug

SEQ ID NO: 168454 - RNA, 32 nt, Homo Sapiens
uuugcaucuugagagcagcauggggccuggga

SEQ ID NO: 168455 - RNA, 27 nt, Homo Sapiens
caguccuccugcuucagccccacaagu

SEQ ID NO: 168456 - RNA, 32 nt, Homo Sapiens
ccugccuaucccaacuccccagccuuguugag

SEQ ID NO: 168457 - RNA, 32 nt, Homo Sapiens
auuguaaucuaaacuggaauuuuuaggcagua

SEQ ID NO: 168458 - RNA, 32 nt, Homo Sapiens
uaugccuguuaauuuuaagagcuucccuuucu

SEQ ID NO: 168459 - RNA, 32 nt, Homo Sapiens
caagaagaugacugaguucuagagaccccaca

SEQ ID NO: 168460 - RNA, 32 nt, Homo Sapiens
cccgccagcaaccgcgcguugggauucguggu

SEQ ID NO: 168461 - RNA, 32 nt, Homo Sapiens
ugaggucagcauagcugaagugaggugucugg

SEQ ID NO: 168462 - RNA, 32 nt, Homo Sapiens
cauggagaaaagacaucucauuugagguuccc

SEQ ID NO: 168463 - RNA, 32 nt, Homo Sapiens
cgccgcgugcgcgagccgggguugcagcccag

SEQ ID NO: 168464 - RNA, 28 nt, Homo Sapiens
aaugcaguggcuauucagaggcuuaauc

SEQ ID NO: 168465 - RNA, 32 nt, Homo Sapiens
cuuacaagaugaauucccuaucacagcacaca

SEQ ID NO: 168466 - RNA, 32 nt, Homo Sapiens
uacagaaauugaaaaugaccaaaaucaggaac

SEQ ID NO: 168467 - RNA, 32 nt, Homo Sapiens
gcaccugcgcucuggugacuugggguggacgc

SEQ ID NO: 168468 - RNA, 32 nt, Homo Sapiens
aaagggggcaucuuuuaaaaauaauaauuuac

SEQ ID NO: 168469 - RNA, 32 nt, Homo Sapiens
aggggaagauaaacuuuuaaaaagcucuuauc

SEQ ID NO: 168470 - RNA, 32 nt, Homo Sapiens
uucugugucggugugugcaggcacgcauuaau

SEQ ID NO: 168471 - RNA, 32 nt, Homo Sapiens
gaggauagagaugaucuaaaaaaggaaauuca

SEQ ID NO: 168472 - RNA, 32 nt, Homo Sapiens
ggggaaaguuuggggaugaaggagagcuuaaa

SEQ ID NO: 168473 - RNA, 32 nt, Homo Sapiens
ugaacugugacagaagcaacuaccacaggggc

SEQ ID NO: 168474 - RNA, 32 nt, Homo Sapiens
uaacccagcuacagggaaaucccggcccagcu

SEQ ID NO: 168475 - RNA, 32 nt, Homo Sapiens
gauguuuaucuaggguguuacucaagcccagu

SEQ ID NO: 168476 - RNA, 32 nt, Homo Sapiens
agugagcccuggcgccgccgcggccgcggucc

SEQ ID NO: 168477 - RNA, 32 nt, Homo Sapiens
uggagggcgaggggagagagguguggugggca

SEQ ID NO: 168478 - RNA, 32 nt, Homo Sapiens
aaaauagcugggugugguggcaggcgccugua

SEQ ID NO: 168479 - RNA, 32 nt, Homo Sapiens
gcaaauaguuuaugauuugcugauuuuggagc

SEQ ID NO: 168480 - RNA, 32 nt, Homo Sapiens
cuccgcuccucugcagggcccaggcgcccuug

SEQ ID NO: 168481 - RNA, 32 nt, Homo Sapiens
ucuccauggccccgcccuccccgcgugugcgc

SEQ ID NO: 168482 - RNA, 32 nt, Homo Sapiens
uaccucgggagcgcaggccgcggccggcgggc

SEQ ID NO: 168483 - RNA, 32 nt, Homo Sapiens
uuucaccuccccacccaaacuuuauaaaaguu

SEQ ID NO: 168484 - RNA, 32 nt, Homo Sapiens
ugugacugcacuguccgccugugggauguggc

SEQ ID NO: 168485 - RNA, 32 nt, Homo Sapiens
ccucggcggcccggaaccggccucggacuguc

SEQ ID NO: 168486 - RNA, 32 nt, Homo Sapiens
gaacaaccucauccgcacgcugcggccaggca

SEQ ID NO: 168487 - RNA, 32 nt, Homo Sapiens
caguaucuucaaaaauacagaauuuauagaau

SEQ ID NO: 168488 - RNA, 32 nt, Homo Sapiens
uagcugaugaaacuuuuaaaaaaucucaucau

SEQ ID NO: 168489 - RNA, 32 nt, Homo Sapiens
guuuucauuacuuuuauuauuugaaugauuua

SEQ ID NO: 168490 - RNA, 32 nt, Homo Sapiens
gccaaagaggaagaagaaaguguuaaaaggaa

SEQ ID NO: 168491 - RNA, 32 nt, Homo Sapiens
uauggauuugcuuauguaugacaacuccaagg

SEQ ID NO: 168492 - RNA, 32 nt, Homo Sapiens
cagcuguucaacaggaaugagagguuauggaa

SEQ ID NO: 168493 - RNA, 32 nt, Homo Sapiens
uucaugguggggcaaugguuauuugguuauuu

SEQ ID NO: 168494 - RNA, 32 nt, Homo Sapiens
uuagucuugugagcguuuuuacaccggguaga

SEQ ID NO: 168495 - RNA, 32 nt, Homo Sapiens
uugagcucucccaauuauuguaauauaaggac

SEQ ID NO: 168496 - RNA, 31 nt, Homo Sapiens
aacgugaaauaaaauuacucauucaaaacuc

SEQ ID NO: 168497 - RNA, 32 nt, Homo Sapiens
uuacuuuuuauaaaguuuuuuuuccuuagucu

SEQ ID NO: 168498 - RNA, 32 nt, Homo Sapiens
aggcuucugcugugggcagcuaggggaaaauu

SEQ ID NO: 168499 - RNA, 32 nt, Homo Sapiens
uuuucuccuauuucuaaaaauguucucuucuu

SEQ ID NO: 168500 - RNA, 32 nt, Homo Sapiens
ugaauuuaaauauuuguaagaacuuugugaug

SEQ ID NO: 168501 - RNA, 32 nt, Homo Sapiens
aaucaggagaucuggaugcauccuggacaagg

SEQ ID NO: 168502 - RNA, 32 nt, Homo Sapiens
ccauacaagaucguauuguauuguaggaggca

SEQ ID NO: 168503 - RNA, 32 nt, Homo Sapiens
agaaauacagaaaauagucaaucugaaagauu

SEQ ID NO: 168504 - RNA, 32 nt, Homo Sapiens
acauugugcaguggagaagcugagagaagagg

SEQ ID NO: 168505 - RNA, 32 nt, Homo Sapiens
acacgcagccugcucuggagccugcagaugag

SEQ ID NO: 168506 - RNA, 32 nt, Homo Sapiens
ugccugguccagccccgacaaacguggucuga

SEQ ID NO: 168507 - RNA, 32 nt, Homo Sapiens
gcagcauucccuaugggaaaggugauaccagc

SEQ ID NO: 168508 - RNA, 32 nt, Homo Sapiens
uauuuauaaacuagguaaaauuuguuguuggu

SEQ ID NO: 168509 - RNA, 32 nt, Homo Sapiens
uugcggcggccgcuccuccccccgcagaacac

SEQ ID NO: 168510 - RNA, 32 nt, Homo Sapiens
aucaaaaacuaaagggauguggagaguccgga

SEQ ID NO: 168511 - RNA, 32 nt, Homo Sapiens
ccugcugggcaccccugcugcaggugcugugg

SEQ ID NO: 168512 - RNA, 32 nt, Homo Sapiens
acaaucaauuuuaaagauuaguuucggucccc

SEQ ID NO: 168513 - RNA, 32 nt, Homo Sapiens
ccuuggcaaccucauuuuguggccuuauuauu

SEQ ID NO: 168514 - RNA, 32 nt, Homo Sapiens
ucaugcaucuuacugaagguaaaauugaaagg

SEQ ID NO: 168515 - RNA, 32 nt, Homo Sapiens
agccuccgccuggccugccccucugcaguccu

SEQ ID NO: 168516 - RNA, 32 nt, Homo Sapiens
auauacauauauauuuauacacauacaauuua

SEQ ID NO: 168517 - RNA, 32 nt, Homo Sapiens
ccuuguaaagacuguagaagaaagagcaacaa

SEQ ID NO: 168518 - RNA, 32 nt, Homo Sapiens
cagagggcacggcccgccagggcugggcaggc

SEQ ID NO: 168519 - RNA, 32 nt, Homo Sapiens
ccaguuauuucuggaaaaggucucauuauaua

SEQ ID NO: 168520 - RNA, 32 nt, Homo Sapiens
aaaggcccaccacuguauuacaugacagcaaa

SEQ ID NO: 168521 - RNA, 32 nt, Homo Sapiens
uggcuuguuacccccuuuuccuccucuuugaa

SEQ ID NO: 168522 - RNA, 32 nt, Homo Sapiens
cagcuggaaugggcauggaaaucauccaaguu

SEQ ID NO: 168523 - RNA, 32 nt, Homo Sapiens
uaaaaaaaaaauuuauucaaaaaaaaaaaaaa

SEQ ID NO: 168524 - RNA, 32 nt, Homo Sapiens
cucggccgucgggcuccuugggacucuggugc

SEQ ID NO: 168525 - RNA, 32 nt, Homo Sapiens
uuguuugccgggcuucucggaggguucacugu

SEQ ID NO: 168526 - RNA, 32 nt, Homo Sapiens
gaggguuaauguuuaaauuuguuaauuaaaau

SEQ ID NO: 168527 - RNA, 29 nt, Homo Sapiens
uucgucuucuagggaaaccacaaaacuuu

SEQ ID NO: 168528 - RNA, 32 nt, Homo Sapiens
ugagauuuuaucaaacauuagacuaugacuaa

SEQ ID NO: 168529 - RNA, 32 nt, Homo Sapiens
cgcuugccaaguauaaaugacucucaucuuaa

SEQ ID NO: 168530 - RNA, 32 nt, Homo Sapiens
gcugcggaggagaggagggagccugcgugcug

SEQ ID NO: 168531 - RNA, 32 nt, Homo Sapiens
aaauuagugggaagucagaggugggggcguua

SEQ ID NO: 168532 - RNA, 32 nt, Homo Sapiens
aggaaaaaauaaucuccauacagucaagauac

SEQ ID NO: 168533 - RNA, 32 nt, Homo Sapiens
uagaccuugacaaauugguaggauuuggucag

SEQ ID NO: 168534 - RNA, 32 nt, Homo Sapiens
cuccaaggagucacaggcaucuuuauaguuca

SEQ ID NO: 168535 - RNA, 32 nt, Homo Sapiens
gagcuuuuuguuuucuucucuuuuugucucaa

SEQ ID NO: 168536 - RNA, 32 nt, Homo Sapiens
gggaugaggaagugggggccgcuggcucaggg

SEQ ID NO: 168537 - RNA, 32 nt, Homo Sapiens
cuacccaauauuuccuucucuucuuuuuacag

SEQ ID NO: 168538 - RNA, 32 nt, Homo Sapiens
cauaagcagggccaguucuuggucuucuuaaa

SEQ ID NO: 168539 - RNA, 31 nt, Homo Sapiens
ucacagagagguagugcuggauaugugucuu

SEQ ID NO: 168540 - RNA, 32 nt, Homo Sapiens
ugguagcuccccccacccacccacacuccaaa

SEQ ID NO: 168541 - RNA, 32 nt, Homo Sapiens
acuguaugaaaacaggaaaauaaaagagaaau

SEQ ID NO: 168542 - RNA, 32 nt, Homo Sapiens
uguucuggaagugauaauaaacuuuuuacaga

SEQ ID NO: 168543 - RNA, 32 nt, Homo Sapiens
uguuucaagaccagcuguuucagaucuauuaa

SEQ ID NO: 168544 - RNA, 32 nt, Homo Sapiens
aacaagaggacuuggaggaaaagagcuacuau

SEQ ID NO: 168545 - RNA, 32 nt, Homo Sapiens
uaggcucugugcccuggucugcaucagaggcu

SEQ ID NO: 168546 - RNA, 32 nt, Homo Sapiens
cagugacaccucggguccuuuccguugcuaug

SEQ ID NO: 168547 - RNA, 32 nt, Homo Sapiens
ccuccccaucguccccaucguccuccuugucc

SEQ ID NO: 168548 - RNA, 31 nt, Homo Sapiens
ugauuuuuaaaauaaauuuguuuuaugacuu

SEQ ID NO: 168549 - RNA, 32 nt, Homo Sapiens
gucuuaggcagccaacguauugguuuacaugg

SEQ ID NO: 168550 - RNA, 32 nt, Homo Sapiens
uuaguaaugaauuaucauucccaaacccgugu

SEQ ID NO: 168551 - RNA, 32 nt, Homo Sapiens
aauuuaguuuuggguuuuuuuauuauuauuau

SEQ ID NO: 168552 - RNA, 32 nt, Homo Sapiens
caucuuggcccugauucaacccuaagauaaua

SEQ ID NO: 168553 - RNA, 32 nt, Homo Sapiens
uucuuugaguucucuggaguagauauuaauuu

SEQ ID NO: 168554 - RNA, 32 nt, Homo Sapiens
acuuuaccucugugguccuccuccccagaacu

SEQ ID NO: 168555 - RNA, 32 nt, Homo Sapiens
gagaucaggcuccgaccccccgccgaggggau

SEQ ID NO: 168556 - RNA, 32 nt, Homo Sapiens
ggccaucuuuugcugacacccuuuucugguau

SEQ ID NO: 168557 - RNA, 32 nt, Homo Sapiens
ucuccaucaguuccuagaacucaagcacagcu

SEQ ID NO: 168558 - RNA, 32 nt, Homo Sapiens
ccuuuguuccuccuucaccuucugggaugauu

SEQ ID NO: 168559 - RNA, 32 nt, Homo Sapiens
agggaaggaagcagauucggagggguggagau

SEQ ID NO: 168560 - RNA, 32 nt, Homo Sapiens
agcgggcaccgcggcaguggcuccgaggggac

SEQ ID NO: 168561 - RNA, 32 nt, Homo Sapiens
aguuucaagggagaagggcaaguuuaucaaaa

SEQ ID NO: 168562 - RNA, 32 nt, Homo Sapiens
gcugugaguuugggccccagaggcugggugac

SEQ ID NO: 168563 - RNA, 32 nt, Homo Sapiens
ucccugccaaacucacaaggagacaucaaccu

SEQ ID NO: 168564 - RNA, 32 nt, Homo Sapiens
aacaagguuuccauaagcuuggugacaaaauu

SEQ ID NO: 168565 - RNA, 32 nt, Homo Sapiens
ggcccugcugcuacugcugcuggggguguuug

SEQ ID NO: 168566 - RNA, 32 nt, Homo Sapiens
uaucuacucccaauuauguuguugauacaucu

SEQ ID NO: 168567 - RNA, 32 nt, Homo Sapiens
gccgccgccucccagaaccuccucgugcccuc

SEQ ID NO: 168568 - RNA, 32 nt, Homo Sapiens
gguagaaucacuguggacugagacccaccuuu

SEQ ID NO: 168569 - RNA, 32 nt, Homo Sapiens
guccuggcugcccucacccaugucaagcuacu

SEQ ID NO: 168570 - RNA, 32 nt, Homo Sapiens
ucccucaaccucagccaggcccucuucuccug

SEQ ID NO: 168571 - RNA, 32 nt, Homo Sapiens
ugugauuucuuuucuuuuuuuuuuuuuuuuua

SEQ ID NO: 168572 - RNA, 32 nt, Homo Sapiens
cugacaggggagaguuaagcucccguucucca

SEQ ID NO: 168573 - RNA, 32 nt, Homo Sapiens
cggagcccgaggcggcggagggcccgcgguag

SEQ ID NO: 168574 - RNA, 32 nt, Homo Sapiens
uuccuuuccuaaauuucuuugcuauuuguuau

SEQ ID NO: 168575 - RNA, 32 nt, Homo Sapiens
uucuuauauauucuggauaauagucuggauaa

SEQ ID NO: 168576 - RNA, 32 nt, Homo Sapiens
ucacaggacagaggauugacagaagucaguuu

SEQ ID NO: 168577 - RNA, 32 nt, Homo Sapiens
caccacagcuggagggccaggccuccucuucc

SEQ ID NO: 168578 - RNA, 32 nt, Homo Sapiens
gcggcgcucggggcgcgcuaggcggggagccg

SEQ ID NO: 168579 - RNA, 32 nt, Homo Sapiens
ggucuggaauaauuuaaauagcauuagaauua

SEQ ID NO: 168580 - RNA, 32 nt, Homo Sapiens
gcuuuauauauugauuauauauuguugacaac

SEQ ID NO: 168581 - RNA, 32 nt, Homo Sapiens
caagggcagcauacuggcaaaguugccaaagc

SEQ ID NO: 168582 - RNA, 32 nt, Homo Sapiens
cuuagggaaccaucucuccugcucuccuuggg

SEQ ID NO: 168583 - RNA, 32 nt, Homo Sapiens
cugugcugucuccuccugaacaguccuccaag

SEQ ID NO: 168584 - RNA, 32 nt, Homo Sapiens
guccuaguagaaugaagugcugcuaguuuuua

SEQ ID NO: 168585 - RNA, 32 nt, Homo Sapiens
auaagaagagaagauuauugccgaaaagaugg

SEQ ID NO: 168586 - RNA, 32 nt, Homo Sapiens
ccgaugcucggguuucgagcgccuggugggcg

SEQ ID NO: 168587 - RNA, 32 nt, Homo Sapiens
aguuccuagaccugucucuacaugacacaguu

SEQ ID NO: 168588 - RNA, 32 nt, Homo Sapiens
cuuaaagaaauauuuuuaaagcguaucugaaa

SEQ ID NO: 168589 - RNA, 32 nt, Homo Sapiens
cggcagccgcccucgcgucgccgcccccgguu

SEQ ID NO: 168590 - RNA, 32 nt, Homo Sapiens
gcuaauguuucugaacuuuacuuacuaauuuu

SEQ ID NO: 168591 - RNA, 32 nt, Homo Sapiens
uggcggaagaggcuuggugccggggccugggg

SEQ ID NO: 168592 - RNA, 32 nt, Homo Sapiens
cgacagagugucuggaacaggugauuggagga

SEQ ID NO: 168593 - RNA, 32 nt, Homo Sapiens
uuaacauguguggucuugguauucuuaaggga

SEQ ID NO: 168594 - RNA, 32 nt, Homo Sapiens
gcaggccgcaccgccccuggggcccccugcca

SEQ ID NO: 168595 - RNA, 32 nt, Homo Sapiens
cagugggcuuagccacucgccauggacuccca

SEQ ID NO: 168596 - RNA, 32 nt, Homo Sapiens
ugugcaugccccagccuccugggccugcccuu

SEQ ID NO: 168597 - RNA, 32 nt, Homo Sapiens
gcgcguggaugcggcgggagcuggaagccuca

SEQ ID NO: 168598 - RNA, 32 nt, Homo Sapiens
ucuaggacugaugggagaagggcuugcaaacc

SEQ ID NO: 168599 - RNA, 32 nt, Homo Sapiens
ccauuccccucuucuuccuucuaucuccuucc

SEQ ID NO: 168600 - RNA, 32 nt, Homo Sapiens
aggcugaggaggagaggacgaggcuaugugau

SEQ ID NO: 168601 - RNA, 32 nt, Homo Sapiens
ugggccugccccagcuccuugcccagggagag

SEQ ID NO: 168602 - RNA, 32 nt, Homo Sapiens
ccucaccuggaaagccguguccugcuggccuc

SEQ ID NO: 168603 - RNA, 32 nt, Homo Sapiens
ggguguaaccaucaagaaaccucuacagggua

SEQ ID NO: 168604 - RNA, 32 nt, Homo Sapiens
agucggagacacaacaaagauggcggcgguga

SEQ ID NO: 168605 - RNA, 32 nt, Homo Sapiens
agguuguuucuguugagugcugaaaaauuaaa

SEQ ID NO: 168606 - RNA, 32 nt, Homo Sapiens
cccuggagggcauggugucgggggguggcacu

SEQ ID NO: 168607 - RNA, 32 nt, Homo Sapiens
cuuggcuuggcuuugcugcugcuuguaguugg

SEQ ID NO: 168608 - RNA, 32 nt, Homo Sapiens
aaaaaauauauucgugcaauuaaaguuaagug

SEQ ID NO: 168609 - RNA, 32 nt, Homo Sapiens
ccuguuuucuucauuuccaaaauuucccucua

SEQ ID NO: 168610 - RNA, 32 nt, Homo Sapiens
acccagagggccccaaccccggcggcccuuuc

SEQ ID NO: 168611 - RNA, 32 nt, Homo Sapiens
ggcaggacagcuuuaagcccaaguggaagaaa

SEQ ID NO: 168612 - RNA, 32 nt, Homo Sapiens
cacacgcacauauacacacacacacacacaca

SEQ ID NO: 168613 - RNA, 32 nt, Homo Sapiens
gucuccuggcuggcuccugaagggcuggcugc

SEQ ID NO: 168614 - RNA, 32 nt, Homo Sapiens
uuuaaaaaaugaauuaucuuucaaugguguag

SEQ ID NO: 168615 - RNA, 32 nt, Homo Sapiens
gaaaaagaacuaagcacuaaucaauaauaagg

SEQ ID NO: 168616 - RNA, 32 nt, Homo Sapiens
auacuuucucccugucuacacagucgccaucu

SEQ ID NO: 168617 - RNA, 32 nt, Homo Sapiens
cugggugugggcgcgagaucgcgcucaccuuu

SEQ ID NO: 168618 - RNA, 32 nt, Homo Sapiens
caacaaaaacauguaagaaauaaaauagaaau

SEQ ID NO: 168619 - RNA, 32 nt, Homo Sapiens
uuuagaacaaaguggaagccuguuacuaacuu

SEQ ID NO: 168620 - RNA, 32 nt, Homo Sapiens
aaaaugcaaaaaucaacaaagcuccaaaccua

SEQ ID NO: 168621 - RNA, 32 nt, Homo Sapiens
ucaugguagagcuugacccaagaacuacucca

SEQ ID NO: 168622 - RNA, 32 nt, Homo Sapiens
ggcucagggaguuaucaguuauagaauguugu

SEQ ID NO: 168623 - RNA, 32 nt, Homo Sapiens
cgcucuggggaauccggcgccacgcgccgugc

SEQ ID NO: 168624 - RNA, 32 nt, Homo Sapiens
guaaaagagaguguuugagagcagaagcuaug

SEQ ID NO: 168625 - RNA, 32 nt, Homo Sapiens
uggccggcugcacuaggacgccggcaggaagg

SEQ ID NO: 168626 - RNA, 32 nt, Homo Sapiens
cuuuaccccaacgacaccuccuccccuuucca

SEQ ID NO: 168627 - RNA, 32 nt, Homo Sapiens
uuugcaccaaaauaaacugguacgaaucuguu

SEQ ID NO: 168628 - RNA, 32 nt, Homo Sapiens
acgucccgaaguuggccucuccaggcccagcu

SEQ ID NO: 168629 - RNA, 32 nt, Homo Sapiens
cggagcccaucccaggacucccagugggagag

SEQ ID NO: 168630 - RNA, 32 nt, Homo Sapiens
cacugcugaaauauucuaaauaaaaugguuua

SEQ ID NO: 168631 - RNA, 32 nt, Homo Sapiens
ggaccugggaucaaggcccacgcgcuucccug

SEQ ID NO: 168632 - RNA, 32 nt, Homo Sapiens
uuaauuaacuuauaggaaauaagcauacuaua

SEQ ID NO: 168633 - RNA, 32 nt, Homo Sapiens
agagauauaauuuuuguuaauaagacaaaggu

SEQ ID NO: 168634 - RNA, 32 nt, Homo Sapiens
gaggggcugucaggcagagggcagaugcagcu

SEQ ID NO: 168635 - RNA, 32 nt, Homo Sapiens
uugucuucuauaccacccuuguccucaucuca

SEQ ID NO: 168636 - RNA, 32 nt, Homo Sapiens
ucccuaggugcaagcuuuuucuuguuauguuu

SEQ ID NO: 168637 - RNA, 32 nt, Homo Sapiens
auuaauguaggucuaaaggguuuaaugugguu

SEQ ID NO: 168638 - RNA, 32 nt, Homo Sapiens
gcccucaucuucucuuucucuccucaguuuac

SEQ ID NO: 168639 - RNA, 32 nt, Homo Sapiens
aggcguguuagggagcugugauuggauuuuga

SEQ ID NO: 168640 - RNA, 32 nt, Homo Sapiens
guaguuuuuaucauuuuccuguagccugcaau

SEQ ID NO: 168641 - RNA, 32 nt, Homo Sapiens
gaggaggccccggcucagagccaugccaggug

SEQ ID NO: 168642 - RNA, 32 nt, Homo Sapiens
gaacagcgcccagcgggccgggcccccaaccu

SEQ ID NO: 168643 - RNA, 32 nt, Homo Sapiens
ucagaaccaacagcuauccauuagagugccuc

SEQ ID NO: 168644 - RNA, 32 nt, Homo Sapiens
ccaucuuuccugaggggaaaaggaaacgggau

SEQ ID NO: 168645 - RNA, 32 nt, Homo Sapiens
aaugcgagggagacgagauuauguaaaugagu

SEQ ID NO: 168646 - RNA, 32 nt, Homo Sapiens
auaucuacaugaauuauagaaacuuagaagug

SEQ ID NO: 168647 - RNA, 32 nt, Homo Sapiens
gacuugguagagauggcaggaagggugugcgg

SEQ ID NO: 168648 - RNA, 32 nt, Homo Sapiens
gcccgccgaccccgguguuagcaagaauccuc

SEQ ID NO: 168649 - RNA, 32 nt, Homo Sapiens
gggccaggcugggccgggcgcuccuggugugu

SEQ ID NO: 168650 - RNA, 32 nt, Homo Sapiens
gaacuaugcaaagggcagaggcugggaguuug

SEQ ID NO: 168651 - RNA, 32 nt, Homo Sapiens
ucugcugggggcuggggugugugggguggucu

SEQ ID NO: 168652 - RNA, 32 nt, Homo Sapiens
caaggagaggccggugccugcgcugccgucuc

SEQ ID NO: 168653 - RNA, 32 nt, Homo Sapiens
gggcauguagaguauaugaggaggcaguaugg

SEQ ID NO: 168654 - RNA, 32 nt, Homo Sapiens
acaagcaaguuguagaagcauccuauacggcu

SEQ ID NO: 168655 - RNA, 32 nt, Homo Sapiens
acuauaaaauaauaaacuuguguuauuguaaa

SEQ ID NO: 168656 - RNA, 32 nt, Homo Sapiens
cugaggucaggaguuugagaccagccuaguca

SEQ ID NO: 168657 - RNA, 32 nt, Homo Sapiens
gugcacagucuccugaggcuagucaggggcuu

SEQ ID NO: 168658 - RNA, 32 nt, Homo Sapiens
aagccaaguagggcuggcaugggugagccaca

SEQ ID NO: 168659 - RNA, 32 nt, Homo Sapiens
cuacugcgccgacgcccgcggcgagcuggacc

SEQ ID NO: 168660 - RNA, 32 nt, Homo Sapiens
aggagacauccacuucccuggccccucucccc

SEQ ID NO: 168661 - RNA, 32 nt, Homo Sapiens
gcaucuaacaggcuggcaaugaagauacccag

SEQ ID NO: 168662 - RNA, 32 nt, Homo Sapiens
aaaauugcacuuuaauguuuuuuguuacuuga

SEQ ID NO: 168663 - RNA, 32 nt, Homo Sapiens
gcucgcaaacucccgcacuagcccggccaccg

SEQ ID NO: 168664 - RNA, 32 nt, Homo Sapiens
ccccauucaguuccucagcauuccaggucggc

SEQ ID NO: 168665 - RNA, 32 nt, Homo Sapiens
uuaggccaacuggaguccagguucgccuccca

SEQ ID NO: 168666 - RNA, 32 nt, Homo Sapiens
acugcucagcaauguaaaagagacaaauaagg

SEQ ID NO: 168667 - RNA, 32 nt, Homo Sapiens
auuuuguguugcuaugguguugaaauauccaa

SEQ ID NO: 168668 - RNA, 32 nt, Homo Sapiens
gcgcccugccgggagaggggcuucucgguucg

SEQ ID NO: 168669 - RNA, 32 nt, Homo Sapiens
acccaccucagcgucccgaagugcugggauua

SEQ ID NO: 168670 - RNA, 32 nt, Homo Sapiens
ugguggugugugccuguaaugccagcuacuca

SEQ ID NO: 168671 - RNA, 32 nt, Homo Sapiens
uaacaagcauuucugcucugccugcaggcccc

SEQ ID NO: 168672 - RNA, 27 nt, Homo Sapiens
uuaaaauuuuucuucagaucccguuca

SEQ ID NO: 168673 - RNA, 32 nt, Homo Sapiens
ggccuaaaucaggaagcuguuuuaucgauggu

SEQ ID NO: 168674 - RNA, 32 nt, Homo Sapiens
ugugaaaaaaagacauguuguaggaugggauc

SEQ ID NO: 168675 - RNA, 32 nt, Homo Sapiens
auggccaauuggaugacuuaaucuuuauauuu

SEQ ID NO: 168676 - RNA, 32 nt, Homo Sapiens
cuaguuaagauaaauuaggccuuugacuauua

SEQ ID NO: 168677 - RNA, 32 nt, Homo Sapiens
ucagaagagccacaucacaaaggagcaccucc

SEQ ID NO: 168678 - RNA, 32 nt, Homo Sapiens
aaucucccugaacaauuucuaugguguccaau

SEQ ID NO: 168679 - RNA, 32 nt, Homo Sapiens
cuccccccaccccucauuccugucccagucca

SEQ ID NO: 168680 - RNA, 32 nt, Homo Sapiens
auacuuuuucuuuuguaagugcuacauaaauu

SEQ ID NO: 168681 - RNA, 32 nt, Homo Sapiens
agccgagcccaccccccuccccagccccccac

SEQ ID NO: 168682 - RNA, 32 nt, Homo Sapiens
auuuaaccuuauuucuuuuuuaucuccauggu

SEQ ID NO: 168683 - RNA, 32 nt, Homo Sapiens
cucaagacacaaaacauuuucuuaauccuagu

SEQ ID NO: 168684 - RNA, 32 nt, Homo Sapiens
gcagacaggaccaggggauuuccaugauguuu

SEQ ID NO: 168685 - RNA, 25 nt, Homo Sapiens
auguguuucuucuucagucuccaag

SEQ ID NO: 168686 - RNA, 32 nt, Homo Sapiens
ggcuuaaucgaagagauggagcugguggcugg

SEQ ID NO: 168687 - RNA, 32 nt, Homo Sapiens
aaacagcaaaggcagaguguugguacagaugc

SEQ ID NO: 168688 - RNA, 32 nt, Homo Sapiens
agggagaagggagagcaggaguauuggggcug

SEQ ID NO: 168689 - RNA, 32 nt, Homo Sapiens
gaagcgaggcggaugcccuggaagcacccagc

SEQ ID NO: 168690 - RNA, 31 nt, Homo Sapiens
agccugagggcgggcagugugggcucauggc

SEQ ID NO: 168691 - RNA, 32 nt, Homo Sapiens
gcguguggggcauaaagugcugugaacuuuua

SEQ ID NO: 168692 - RNA, 32 nt, Homo Sapiens
cauaugaaccaccuacucaauacuuuauauuu

SEQ ID NO: 168693 - RNA, 32 nt, Homo Sapiens
gagcuucagagguugccccaccugagccccca

SEQ ID NO: 168694 - RNA, 32 nt, Homo Sapiens
ccuauccccucuaacaccauuccuccaccuga

SEQ ID NO: 168695 - RNA, 29 nt, Homo Sapiens
cuguuaagugucauauucuuguaaucugc

SEQ ID NO: 168696 - RNA, 31 nt, Homo Sapiens
acauugcauuugaccuuuuagguaguaauug

SEQ ID NO: 168697 - RNA, 32 nt, Homo Sapiens
auauauuuacuaaagcuaauugaaagagucau

SEQ ID NO: 168698 - RNA, 32 nt, Homo Sapiens
uuuuguucuuauaacagaguuuagaauaucag

SEQ ID NO: 168699 - RNA, 32 nt, Homo Sapiens
auaagaaaaaucaaugauaaagagaugauagc

SEQ ID NO: 168700 - RNA, 32 nt, Homo Sapiens
cccgcuccagcccggcccgacccgaccgcacc

SEQ ID NO: 168701 - RNA, 32 nt, Homo Sapiens
aucaggcucagaguuuacaugcauuuuuacuu

SEQ ID NO: 168702 - RNA, 32 nt, Homo Sapiens
ugacgaugaggaggagaugucuguuggauuca

SEQ ID NO: 168703 - RNA, 32 nt, Homo Sapiens
cgggugggcuccugggcaaugggaggcugugg

SEQ ID NO: 168704 - RNA, 32 nt, Homo Sapiens
gagucuuggggccaagaagggcccaggguggg

SEQ ID NO: 168705 - RNA, 32 nt, Homo Sapiens
gaccacacuagggcauuguuucccuggggaag

SEQ ID NO: 168706 - RNA, 32 nt, Homo Sapiens
ugagaagaacagagaccgagaccugcccccuu

SEQ ID NO: 168707 - RNA, 32 nt, Homo Sapiens
acagucagggccuggucugugcucagguacug

SEQ ID NO: 168708 - RNA, 32 nt, Homo Sapiens
gccugaaauaccaugacuguuuauggaaagua

SEQ ID NO: 168709 - RNA, 32 nt, Homo Sapiens
ucauggaaaucuaacagaaauacauuguaaua

SEQ ID NO: 168710 - RNA, 32 nt, Homo Sapiens
ccccccugccaggccuggucacggccagagca

SEQ ID NO: 168711 - RNA, 32 nt, Homo Sapiens
ucgggcuauauacagaggaagaacagggugau

SEQ ID NO: 168712 - RNA, 29 nt, Homo Sapiens
uuguauuuuauccaauuacauuuaauaca

SEQ ID NO: 168713 - RNA, 32 nt, Homo Sapiens
aacauucaggugauauuuuaaauuuucuuugu

SEQ ID NO: 168714 - RNA, 32 nt, Homo Sapiens
ggagggggcgacagagaaaaagagaggcugac

SEQ ID NO: 168715 - RNA, 32 nt, Homo Sapiens
uagccuccagggccccaccucucccagcugau

SEQ ID NO: 168716 - RNA, 32 nt, Homo Sapiens
aaaggggcugggaagaagggggaccaguuugg

SEQ ID NO: 168717 - RNA, 32 nt, Homo Sapiens
cacggugcugagcagagcugcagccacgcagg

SEQ ID NO: 168718 - RNA, 32 nt, Homo Sapiens
gcacugcaguuacuauuuacuaauguaaacgu

SEQ ID NO: 168719 - RNA, 32 nt, Homo Sapiens
ccccaccuccucgccccggcccggggauccgu

SEQ ID NO: 168720 - RNA, 32 nt, Homo Sapiens
gcccacaccuguuccuagcagggcgccuggga

SEQ ID NO: 168721 - RNA, 32 nt, Homo Sapiens
uuuuuaaaaaauuugauuuagcauucauauuu

SEQ ID NO: 168722 - RNA, 32 nt, Homo Sapiens
uguggggaucuacccugagaccaugcuuuucu

SEQ ID NO: 168723 - RNA, 32 nt, Homo Sapiens
gcgugguggccauggcggccagcggggcugug

SEQ ID NO: 168724 - RNA, 32 nt, Homo Sapiens
cuggcgccggugcggacggcggugcugguggc

SEQ ID NO: 168725 - RNA, 32 nt, Homo Sapiens
ucuuagaggaagagaagaaacauggcaagcag

SEQ ID NO: 168726 - RNA, 32 nt, Homo Sapiens
ucaauaacucugauuuugauauuuucacagau

SEQ ID NO: 168727 - RNA, 32 nt, Homo Sapiens
ugggcaucuuuugaaucuacccuucaaguauu

SEQ ID NO: 168728 - RNA, 31 nt, Homo Sapiens
ugugauuucaaugaucacugggcaguuacuu

SEQ ID NO: 168729 - RNA, 32 nt, Homo Sapiens
cuggugaccgugcccggguuaugacgacuaau

SEQ ID NO: 168730 - RNA, 29 nt, Homo Sapiens
ggagcuucugugggaguacggucaugagc

SEQ ID NO: 168731 - RNA, 32 nt, Homo Sapiens
cagcugugaacaggagggccuguucccuaauu

SEQ ID NO: 168732 - RNA, 32 nt, Homo Sapiens
ugucauagugguuuuuauuccugcuuuguuuc

SEQ ID NO: 168733 - RNA, 32 nt, Homo Sapiens
cucucuuacagaacacuccuauuuguaccuca

SEQ ID NO: 168734 - RNA, 32 nt, Homo Sapiens
ccuaaguaguuuggaagaaaaaguaggguugu

SEQ ID NO: 168735 - RNA, 32 nt, Homo Sapiens
agccaauccguuucagcgcaggucuugcucgg

SEQ ID NO: 168736 - RNA, 32 nt, Homo Sapiens
gcuuucacuuuaaaauguccaccugcguuugu

SEQ ID NO: 168737 - RNA, 32 nt, Homo Sapiens
uuuuuauuuuuagacagggucucacuguugcc

SEQ ID NO: 168738 - RNA, 32 nt, Homo Sapiens
aauauaaaaugaaauguuuauguugacauuuc

SEQ ID NO: 168739 - RNA, 32 nt, Homo Sapiens
cugguaccuuaauuuuuuuuuauaaauaauaa

SEQ ID NO: 168740 - RNA, 32 nt, Homo Sapiens
ccaaucaaaugaaaaaaacaaacaaacaaaaa

SEQ ID NO: 168741 - RNA, 32 nt, Homo Sapiens
uuguuuaugcugauuuucuuauauuucaagga

SEQ ID NO: 168742 - RNA, 32 nt, Homo Sapiens
cccauaaccccauggucaaugcuggugccauu

SEQ ID NO: 168743 - RNA, 32 nt, Homo Sapiens
uuccuucagaaaguagaggaacuaggggccca

SEQ ID NO: 168744 - RNA, 32 nt, Homo Sapiens
cgguucccaucccaguuguugaucuuaugcaa

SEQ ID NO: 168745 - RNA, 32 nt, Homo Sapiens
cccgcggguccuccccaccugcugcuccccgu

SEQ ID NO: 168746 - RNA, 29 nt, Homo Sapiens
gcuccucugaggccuuggacgaggacgug

SEQ ID NO: 168747 - RNA, 32 nt, Homo Sapiens
uuucucccuaaaacuuucaguacuagaaaggg

SEQ ID NO: 168748 - RNA, 32 nt, Homo Sapiens
agagcaggaagauaaaauaacugcacaacuua

SEQ ID NO: 168749 - RNA, 30 nt, Homo Sapiens
ccguugaucuucgcuguggcauggcggacg

SEQ ID NO: 168750 - RNA, 32 nt, Homo Sapiens
gggagugugguuucuuuuugaaucuuuaauua

SEQ ID NO: 168751 - RNA, 32 nt, Homo Sapiens
uuguggcauuuguaggauucaaacucauggaa

SEQ ID NO: 168752 - RNA, 32 nt, Homo Sapiens
acuauaagaagaagggcagauaauauaugaau

SEQ ID NO: 168753 - RNA, 32 nt, Homo Sapiens
ccuauuggguguggcuuuguugaaauaaauuu

SEQ ID NO: 168754 - RNA, 32 nt, Homo Sapiens
cuuugggccugcguugcugcugcugcuccucc

SEQ ID NO: 168755 - RNA, 32 nt, Homo Sapiens
cacagcugccucuggcagccaagccucuuuuc

SEQ ID NO: 168756 - RNA, 32 nt, Homo Sapiens
caggcccugccaggacaaggcagcuccuggaa

SEQ ID NO: 168757 - RNA, 32 nt, Homo Sapiens
uuagaagccuggcuacaauacugcacaaacuu

SEQ ID NO: 168758 - RNA, 32 nt, Homo Sapiens
ccacagcagcgcgggcugcgggcggcgaggcu

SEQ ID NO: 168759 - RNA, 32 nt, Homo Sapiens
aguuuccuuaguuucucuuucauucucaaaca

SEQ ID NO: 168760 - RNA, 32 nt, Homo Sapiens
ugauuguguugcacauagauaugguagucugc

SEQ ID NO: 168761 - RNA, 32 nt, Homo Sapiens
ggaaaauaaaaugauuaauguaccuaggcugu

SEQ ID NO: 168762 - RNA, 32 nt, Homo Sapiens
guuacauggauagauugccuaguggugaaguc

SEQ ID NO: 168763 - RNA, 32 nt, Homo Sapiens
cugaauagcugagacuacaggcgugugccacc

SEQ ID NO: 168764 - RNA, 32 nt, Homo Sapiens
uauuucuucuuauccaccuacuccauugcuuu

SEQ ID NO: 168765 - RNA, 32 nt, Homo Sapiens
gguguuaacaugguauauguauuguuauuaaa

SEQ ID NO: 168766 - RNA, 32 nt, Homo Sapiens
auaauuaaaaauuucuucugugccauuaugau

SEQ ID NO: 168767 - RNA, 32 nt, Homo Sapiens
acgggcccugucgcgcucccgccccgguccug

SEQ ID NO: 168768 - RNA, 32 nt, Homo Sapiens
ggcacacagaccccaaccacgguacucaucac

SEQ ID NO: 168769 - RNA, 32 nt, Homo Sapiens
ucugccucacuuccuugaccuuguuuuccucu

SEQ ID NO: 168770 - RNA, 32 nt, Homo Sapiens
caauuuacugcuuuuccauuuguaguuaauua

SEQ ID NO: 168771 - RNA, 31 nt, Homo Sapiens
ucauggaaauaaaauuacuuauucaauauua

SEQ ID NO: 168772 - RNA, 32 nt, Homo Sapiens
cuacuuggaauucugauguguugugacagcug

SEQ ID NO: 168773 - RNA, 32 nt, Homo Sapiens
ggauggcuggaacacuguacugaggaaugaau

SEQ ID NO: 168774 - RNA, 32 nt, Homo Sapiens
uacugcaggggaagggcuggcugggguccccg

SEQ ID NO: 168775 - RNA, 32 nt, Homo Sapiens
caagccugacacagacccccuuuagaugcuca

SEQ ID NO: 168776 - RNA, 32 nt, Homo Sapiens
uuuauuauuauuauacuucaaguucuagggua

SEQ ID NO: 168777 - RNA, 32 nt, Homo Sapiens
ugggagcggccuccucuggccucccccaucag

SEQ ID NO: 168778 - RNA, 32 nt, Homo Sapiens
acauggggacaaaaacaauaacuuguggaugu

SEQ ID NO: 168779 - RNA, 32 nt, Homo Sapiens
gaaaguuugacaaaaauacuugaaucuuggac

SEQ ID NO: 168780 - RNA, 32 nt, Homo Sapiens
cgagggccucuacaccugcuccuuccagaccc

SEQ ID NO: 168781 - RNA, 32 nt, Homo Sapiens
auauuauuccaguuagccuuggauuauuucag

SEQ ID NO: 168782 - RNA, 32 nt, Homo Sapiens
agccugcugcuucuccucccugcagacuuagc

SEQ ID NO: 168783 - RNA, 32 nt, Homo Sapiens
ggaggcgggggcgccuccggcggcgagaugca

SEQ ID NO: 168784 - RNA, 32 nt, Homo Sapiens
auagugaauuuuaaaauguagaagaaagcaaa

SEQ ID NO: 168785 - RNA, 32 nt, Homo Sapiens
ugaaauagaaaagaagcauuaaggaccaggug

SEQ ID NO: 168786 - RNA, 32 nt, Homo Sapiens
ucugcuguaagugucuuuuagaguaggaauca

SEQ ID NO: 168787 - RNA, 32 nt, Homo Sapiens
acagaauaagaaaacaaaaaacaagacuacug

SEQ ID NO: 168788 - RNA, 32 nt, Homo Sapiens
cuuugguugggucuuggccuccagguagggcc

SEQ ID NO: 168789 - RNA, 32 nt, Homo Sapiens
uacccaaagaugagucuuucuucuuucuuucc

SEQ ID NO: 168790 - RNA, 32 nt, Homo Sapiens
uaacaaaaacuaaaauaaggaauagaaaagcu

SEQ ID NO: 168791 - RNA, 32 nt, Homo Sapiens
uccccuugcgcaccguggcagcgcccggcggg

SEQ ID NO: 168792 - RNA, 32 nt, Homo Sapiens
gcagcaggggcuggggucuucuccugaagccu

SEQ ID NO: 168793 - RNA, 32 nt, Homo Sapiens
ggucauuugucaauauucagucaccaauucug

SEQ ID NO: 168794 - RNA, 29 nt, Homo Sapiens
uguguggaugggauggggacgccggggga

SEQ ID NO: 168795 - RNA, 32 nt, Homo Sapiens
agagucuagaccaagcccacuggcuggaggug

SEQ ID NO: 168796 - RNA, 32 nt, Homo Sapiens
uggucuuaaaaauuuaaagaaauauaaagcug

SEQ ID NO: 168797 - RNA, 32 nt, Homo Sapiens
cuuuuuguuuuuauuucuuuuagaaaaggcca

SEQ ID NO: 168798 - RNA, 32 nt, Homo Sapiens
gagaagcucccagcuuugaaggucuugcggug

SEQ ID NO: 168799 - RNA, 32 nt, Homo Sapiens
cuucaaaaaauaugcuauuguuuagacuuucc

SEQ ID NO: 168800 - RNA, 32 nt, Homo Sapiens
ugcaaccuccgucucccggguucaaacgauuc

SEQ ID NO: 168801 - RNA, 32 nt, Homo Sapiens
uuauggacauuguauauuuguauuuuaugacc

SEQ ID NO: 168802 - RNA, 32 nt, Homo Sapiens
aguuugugguuuuuugggagaaauguaacugg

SEQ ID NO: 168803 - RNA, 30 nt, Homo Sapiens
cagccauauccacuuauccaucuuaagauc

SEQ ID NO: 168804 - RNA, 32 nt, Homo Sapiens
gcucacagggaucauuaguucucccgguagac

SEQ ID NO: 168805 - RNA, 32 nt, Homo Sapiens
ccaucguuagguauuucuuugaugaugaaggc

SEQ ID NO: 168806 - RNA, 32 nt, Homo Sapiens
aguggaaaccccacuucugcccggcccuugag

SEQ ID NO: 168807 - RNA, 32 nt, Homo Sapiens
guugccauuuguuuuucuuaaaucuauaccca

SEQ ID NO: 168808 - RNA, 32 nt, Homo Sapiens
cccgguggcggcagggccaggcugguccgagc

SEQ ID NO: 168809 - RNA, 32 nt, Homo Sapiens
uguacuguauauauauuauaguauaugucuga

SEQ ID NO: 168810 - RNA, 32 nt, Homo Sapiens
caggcuggagugcgguggcgcaaccucggcuc

SEQ ID NO: 168811 - RNA, 32 nt, Homo Sapiens
aaacaagggagaaaugcugugguuugaagugg

SEQ ID NO: 168812 - RNA, 32 nt, Homo Sapiens
uugaaaacucaauaaaaauaacacuuauuaaa

SEQ ID NO: 168813 - RNA, 32 nt, Homo Sapiens
gggcauuucuagaacuuuuuacauuugaaagu

SEQ ID NO: 168814 - RNA, 32 nt, Homo Sapiens
gcucccaaguuuuccuucuccuaccccagccu

SEQ ID NO: 168815 - RNA, 32 nt, Homo Sapiens
agcaggaagcgcacagcccacccuccccgcac

SEQ ID NO: 168816 - RNA, 32 nt, Homo Sapiens
agaauggacucuucuauuaaaugaacguaagu

SEQ ID NO: 168817 - RNA, 32 nt, Homo Sapiens
ucuugaaacacuuuucauauucuuaaaauaau

SEQ ID NO: 168818 - RNA, 32 nt, Homo Sapiens
uucuuucagaagagaugaagauaccuuauaug

SEQ ID NO: 168819 - RNA, 32 nt, Homo Sapiens
uggagggccauguggucaccugucccacagcu

SEQ ID NO: 168820 - RNA, 32 nt, Homo Sapiens
uucuggaagcaguuaauaaaaaguauuaaaag

SEQ ID NO: 168821 - RNA, 32 nt, Homo Sapiens
gcguguaccccuccccaguuuaggggucucug

SEQ ID NO: 168822 - RNA, 32 nt, Homo Sapiens
cuaugcuccguagucuuguaauaaaaagcaug

SEQ ID NO: 168823 - RNA, 32 nt, Homo Sapiens
gcuuuaucuuggagauagaaaauauaaugaua

SEQ ID NO: 168824 - RNA, 32 nt, Homo Sapiens
cuagaacaagauaauauggcauuggaauaugg

SEQ ID NO: 168825 - RNA, 32 nt, Homo Sapiens
gcggucuccuuccccuaagccagcacugcugc

SEQ ID NO: 168826 - RNA, 32 nt, Homo Sapiens
augccaggguucaguagccguccccccggaaa

SEQ ID NO: 168827 - RNA, 32 nt, Homo Sapiens
cuuaaugcagaugcacuaaaacaaagaaaugg

SEQ ID NO: 168828 - RNA, 32 nt, Homo Sapiens
uguaaaaaauaguuguggcauuuuaaaagguc

SEQ ID NO: 168829 - RNA, 32 nt, Homo Sapiens
gcaaagagccgaggccgggcgcgcgacccucg

SEQ ID NO: 168830 - RNA, 32 nt, Homo Sapiens
ggacuucguuguaaugguuuugcuguaaaaaa

SEQ ID NO: 168831 - RNA, 32 nt, Homo Sapiens
ucagcacugugaucuuuuuuucucuccaaagg

SEQ ID NO: 168832 - RNA, 32 nt, Homo Sapiens
acccuacuguggauugguggguuucgggguga

SEQ ID NO: 168833 - RNA, 32 nt, Homo Sapiens
gggacuccuuuucaauaagaauuaggaagaug

SEQ ID NO: 168834 - RNA, 32 nt, Homo Sapiens
gccccuggucccugccccauucccagggcacu

SEQ ID NO: 168835 - RNA, 32 nt, Homo Sapiens
ugggaccccccgccccgccccccgcacuccuu

SEQ ID NO: 168836 - RNA, 32 nt, Homo Sapiens
augggauuuuuggauaucaguguauuuugguu

SEQ ID NO: 168837 - RNA, 32 nt, Homo Sapiens
auaguauggccauuuuaaugauacugauucuu

SEQ ID NO: 168838 - RNA, 32 nt, Homo Sapiens
cgcgcugcucggagagggcggcugggcggcgg

SEQ ID NO: 168839 - RNA, 32 nt, Homo Sapiens
gcuuuugugcuaaauaugaauugucucaaaau

SEQ ID NO: 168840 - RNA, 32 nt, Homo Sapiens
uugaaagaagacaaaaucguuuucaucacgaa

SEQ ID NO: 168841 - RNA, 32 nt, Homo Sapiens
aagaaauguauuaauguauguaggagcugcag

SEQ ID NO: 168842 - RNA, 32 nt, Homo Sapiens
aagccagcuggucuucugggucggguggggac

SEQ ID NO: 168843 - RNA, 32 nt, Homo Sapiens
uuaaaauucccucuccucuuggcucauagguc

SEQ ID NO: 168844 - RNA, 32 nt, Homo Sapiens
auggcuguguguuuaaagauugugggagcuuc

SEQ ID NO: 168845 - RNA, 32 nt, Homo Sapiens
ucccgcgcaccucggggccgguccaugcuccc

SEQ ID NO: 168846 - RNA, 32 nt, Homo Sapiens
gcacuguggugcccucugcucccuggagcucu

SEQ ID NO: 168847 - RNA, 32 nt, Homo Sapiens
ucauucacucuaggggaccccuacuaaagggu

SEQ ID NO: 168848 - RNA, 32 nt, Homo Sapiens
gagggcuccucccgggcgcuuccuccucgcuc

SEQ ID NO: 168849 - RNA, 32 nt, Homo Sapiens
cagaccgggugcggccucugccugcagccucg

SEQ ID NO: 168850 - RNA, 32 nt, Homo Sapiens
ccuaaagcuggaaacucuggcugcucaggaag

SEQ ID NO: 168851 - RNA, 32 nt, Homo Sapiens
ugacuaauaaagacauuuuaaaaaaccaugcc

SEQ ID NO: 168852 - RNA, 32 nt, Homo Sapiens
cccugggguuugcagggugcugcauugagggc

SEQ ID NO: 168853 - RNA, 32 nt, Homo Sapiens
gaucaggaagggggcacugaguguccgugggg

SEQ ID NO: 168854 - RNA, 32 nt, Homo Sapiens
aaggugccccagcguguuacugcaaaaccaaa

SEQ ID NO: 168855 - RNA, 32 nt, Homo Sapiens
caggcauuguuuaccugcucuugcuccccgcu

SEQ ID NO: 168856 - RNA, 32 nt, Homo Sapiens
gaggcgaaggcucccccuccccgugaucgcuc

SEQ ID NO: 168857 - RNA, 32 nt, Homo Sapiens
ccgccagcccuucgucccccagccgcccaacc

SEQ ID NO: 168858 - RNA, 32 nt, Homo Sapiens
gggagggaggcagugggaaguaguugaaucau

SEQ ID NO: 168859 - RNA, 32 nt, Homo Sapiens
gcucaagccuuugucaauuaaucuuuacugaa

SEQ ID NO: 168860 - RNA, 32 nt, Homo Sapiens
aaauuuugccagcaaguuggcuugguaucuuc

SEQ ID NO: 168861 - RNA, 32 nt, Homo Sapiens
uccuguugcugagacuuccuggauggagccgc

SEQ ID NO: 168862 - RNA, 32 nt, Homo Sapiens
cagaggccggugccggugcagguccuuggugu

SEQ ID NO: 168863 - RNA, 32 nt, Homo Sapiens
aaaaggagcuaaugcuuauucuguuaauguaa

SEQ ID NO: 168864 - RNA, 32 nt, Homo Sapiens
aaggagaaaaauuuuuuggcuuuagauuuaaa

SEQ ID NO: 168865 - RNA, 32 nt, Homo Sapiens
ucauuaugaacaaagaagucuccccaggugug

SEQ ID NO: 168866 - RNA, 32 nt, Homo Sapiens
agccacagagucaggcucugcagacccagagg

SEQ ID NO: 168867 - RNA, 32 nt, Homo Sapiens
uuggaagaaaucagucuccgccaguggguuau

SEQ ID NO: 168868 - RNA, 32 nt, Homo Sapiens
gcuggcgggucccgcgggccaggccguggagg

SEQ ID NO: 168869 - RNA, 32 nt, Homo Sapiens
caacugcgacaauuuugggggaccaugugugc

SEQ ID NO: 168870 - RNA, 32 nt, Homo Sapiens
cagcgcggcgcagcucggcgcgcacggcggga

SEQ ID NO: 168871 - RNA, 32 nt, Homo Sapiens
uauggcuuugcugugagauccuggacaagcca

SEQ ID NO: 168872 - RNA, 32 nt, Homo Sapiens
uccuccuggccccgagcgcgucgucgcgcccc

SEQ ID NO: 168873 - RNA, 32 nt, Homo Sapiens
cuguugggcagccuggucuucccacgugaggg

SEQ ID NO: 168874 - RNA, 32 nt, Homo Sapiens
caaacaaccaacccugauuuccugcuucuccu

SEQ ID NO: 168875 - RNA, 32 nt, Homo Sapiens
uguccagugcuugggccugggguggggggaag

SEQ ID NO: 168876 - RNA, 32 nt, Homo Sapiens
acauaaacugucucauuauacguaugcauuuu

SEQ ID NO: 168877 - RNA, 32 nt, Homo Sapiens
gacauuuuaauuacaguaauaauagcacuccu

SEQ ID NO: 168878 - RNA, 32 nt, Homo Sapiens
gaagggacacugggcuuggacccugauugcug

SEQ ID NO: 168879 - RNA, 32 nt, Homo Sapiens
cccuaagccaagggccucuugcggucccuucu

SEQ ID NO: 168880 - RNA, 32 nt, Homo Sapiens
cccccagcaucuccaucccccauccagucuca

SEQ ID NO: 168881 - RNA, 32 nt, Homo Sapiens
cuagagucaaccaaagaucagcauggucccug

SEQ ID NO: 168882 - RNA, 32 nt, Homo Sapiens
gguuucaacauguuggccaggcuggucuugaa

SEQ ID NO: 168883 - RNA, 32 nt, Homo Sapiens
gcugaggcccacgcgccgccgcuggcccagga

SEQ ID NO: 168884 - RNA, 32 nt, Homo Sapiens
gcauggucaccauuuucaacaucaucaccacc

SEQ ID NO: 168885 - RNA, 32 nt, Homo Sapiens
ggccucccuaguccccgcacacaaagcuaaau

SEQ ID NO: 168886 - RNA, 32 nt, Homo Sapiens
guaagcuuacccaaaauugauagaugucaacc

SEQ ID NO: 168887 - RNA, 32 nt, Homo Sapiens
aaggugaagcuggagaggugggcuugguccag

SEQ ID NO: 168888 - RNA, 32 nt, Homo Sapiens
auggugcucuuaaauuacaugucagugcauca

SEQ ID NO: 168889 - RNA, 27 nt, Homo Sapiens
gaaugcggguggcuguggcuggcugcu

SEQ ID NO: 168890 - RNA, 31 nt, Homo Sapiens
ucugggagggcggggccuggccucacacuug

SEQ ID NO: 168891 - RNA, 32 nt, Homo Sapiens
aaugagauccuaaaaguguugucaucgaagac

SEQ ID NO: 168892 - RNA, 32 nt, Homo Sapiens
uuuagguuaaaaaaaaaaaaaacaaguagagg

SEQ ID NO: 168893 - RNA, 32 nt, Homo Sapiens
cuuggagcucagaccacaaacaacaacaacaa

SEQ ID NO: 168894 - RNA, 32 nt, Homo Sapiens
agagcgggccuggccggccggccagcccuccc

SEQ ID NO: 168895 - RNA, 32 nt, Homo Sapiens
aagcuccaaaacugacagcaucugauaaucug

SEQ ID NO: 168896 - RNA, 32 nt, Homo Sapiens
uguaucagccgagguggagcugcggggcccug

SEQ ID NO: 168897 - RNA, 32 nt, Homo Sapiens
uaggcagcggaggagcccgaccgacccggacc

SEQ ID NO: 168898 - RNA, 31 nt, Homo Sapiens
ggcuggggggcgguggcgcuggauccgcggc

SEQ ID NO: 168899 - RNA, 32 nt, Homo Sapiens
uuaauuuaaaacuacauuuauaguuuuucucu

SEQ ID NO: 168900 - RNA, 32 nt, Homo Sapiens
uagucaggcgugguggugggcgccuguaaucc

SEQ ID NO: 168901 - RNA, 32 nt, Homo Sapiens
cuguuuaucacaugcauaaaauuaaauauuuu

SEQ ID NO: 168902 - RNA, 32 nt, Homo Sapiens
acuacaucuauucuuguuccuguauuucuuuu

SEQ ID NO: 168903 - RNA, 32 nt, Homo Sapiens
cauguaaucaguauuaagaguguguuuuacca

SEQ ID NO: 168904 - RNA, 32 nt, Homo Sapiens
auuuuggauuauaaucuacugauaaaauuuaa

SEQ ID NO: 168905 - RNA, 32 nt, Homo Sapiens
cccaggcuuaucuggaacuccugggcucaaga

SEQ ID NO: 168906 - RNA, 32 nt, Homo Sapiens
aaaacucaguuucaaaauauuugcaaugggac

SEQ ID NO: 168907 - RNA, 32 nt, Homo Sapiens
agccagcaucacugagcagcucucucccuccc

SEQ ID NO: 168908 - RNA, 31 nt, Homo Sapiens
agguucccacccucugauaaaacgcacacag

SEQ ID NO: 168909 - RNA, 32 nt, Homo Sapiens
cacuguggacagggugcagcucuaccaguucc

SEQ ID NO: 168910 - RNA, 32 nt, Homo Sapiens
auagcccccaggccuggcaggcaugcgcuggg

SEQ ID NO: 168911 - RNA, 32 nt, Homo Sapiens
uuaaugcuguaaaauauagucgcugaaauuaa

SEQ ID NO: 168912 - RNA, 32 nt, Homo Sapiens
uccggcccgguuucccucggcgugcuacugug

SEQ ID NO: 168913 - RNA, 32 nt, Homo Sapiens
ucuacauuaacgauaguuuguggaugccugga

SEQ ID NO: 168914 - RNA, 32 nt, Homo Sapiens
uuaugguggcacugccuaguaagggaacuaug

SEQ ID NO: 168915 - RNA, 32 nt, Homo Sapiens
acauaaaaaaaauuauugucuuuaauauucuu

SEQ ID NO: 168916 - RNA, 32 nt, Homo Sapiens
uccagaguggagccagggggacaguggagccg

SEQ ID NO: 168917 - RNA, 32 nt, Homo Sapiens
uagauacuugaggaugauagagcaacacuaaa

SEQ ID NO: 168918 - RNA, 32 nt, Homo Sapiens
acucacuugauguaacucucaaggcugguuca

SEQ ID NO: 168919 - RNA, 32 nt, Homo Sapiens
agacuagauauuugaggauauuaagguacuau

SEQ ID NO: 168920 - RNA, 32 nt, Homo Sapiens
uggugcgacccggcccguugccguagagaugg

SEQ ID NO: 168921 - RNA, 32 nt, Homo Sapiens
uauguagccaggagugguggggaccagaagcc

SEQ ID NO: 168922 - RNA, 32 nt, Homo Sapiens
guuuucauuuuccaccuucucugccuccaguc

SEQ ID NO: 168923 - RNA, 32 nt, Homo Sapiens
ggcucccgggaccugcgugcugccgagagagg

SEQ ID NO: 168924 - RNA, 32 nt, Homo Sapiens
ccggaucugcauguggaaguaccuggacgucc

SEQ ID NO: 168925 - RNA, 32 nt, Homo Sapiens
acaauggaagaagagaucauggcacuugucau

SEQ ID NO: 168926 - RNA, 32 nt, Homo Sapiens
ggccaaggccccacacaaggaggucugcagga

SEQ ID NO: 168927 - RNA, 32 nt, Homo Sapiens
uccacucuggcgaccgcccccgggguccccgc

SEQ ID NO: 168928 - RNA, 32 nt, Homo Sapiens
auaaggaagcagagaguaugggauagagaaau

SEQ ID NO: 168929 - RNA, 32 nt, Homo Sapiens
cauuguagguauauauggggcuuuagcaaguu

SEQ ID NO: 168930 - RNA, 32 nt, Homo Sapiens
uaagcaucgaguuuuuaccaucuuccacuuua

SEQ ID NO: 168931 - RNA, 32 nt, Homo Sapiens
augcccggagagccgcuugcgacuuaacuccc

SEQ ID NO: 168932 - RNA, 32 nt, Homo Sapiens
uacuuagacacacgcguuuacacacacacaca

SEQ ID NO: 168933 - RNA, 32 nt, Homo Sapiens
aucuugauuuaugcuugaguuguuaugugcca

SEQ ID NO: 168934 - RNA, 32 nt, Homo Sapiens
auggguagggguuuggggggcggccggugggg

SEQ ID NO: 168935 - RNA, 32 nt, Homo Sapiens
aaagggaacaaaaguggaaacauggcuacuuu

SEQ ID NO: 168936 - RNA, 32 nt, Homo Sapiens
ucuagggagagcccaggggcacaccacugcca

SEQ ID NO: 168937 - RNA, 32 nt, Homo Sapiens
acaucacaggguuuauacuggagaguaacuac

SEQ ID NO: 168938 - RNA, 32 nt, Homo Sapiens
ggaucgcuauggcagcggcgucgucgcgggcc

SEQ ID NO: 168939 - RNA, 32 nt, Homo Sapiens
gccucucugcccguggagugcaggagcgaagg

SEQ ID NO: 168940 - RNA, 27 nt, Homo Sapiens
ucuguccuucuuccugucacuuguaga

SEQ ID NO: 168941 - RNA, 32 nt, Homo Sapiens
acuacuggacgaaagcaaauucccauccaucg

SEQ ID NO: 168942 - RNA, 30 nt, Homo Sapiens
cagccuucuguaauggggagagacacaguc

SEQ ID NO: 168943 - RNA, 32 nt, Homo Sapiens
ucaaaaguuguaaauaaaugugaaacaucuuc

SEQ ID NO: 168944 - RNA, 32 nt, Homo Sapiens
aguuuagaacacaacuaauccauacuuuauug

SEQ ID NO: 168945 - RNA, 32 nt, Homo Sapiens
gaacaaguuccucucugcaggaucucacagca

SEQ ID NO: 168946 - RNA, 32 nt, Homo Sapiens
ggguauauguauauauuugcaggcauguguga

SEQ ID NO: 168947 - RNA, 32 nt, Homo Sapiens
acagggaagcaucuaggcugcuuguggaaguc

SEQ ID NO: 168948 - RNA, 32 nt, Homo Sapiens
uaaacaugaagaauauuuugcugagaacuucg

SEQ ID NO: 168949 - RNA, 32 nt, Homo Sapiens
cgcgaggccccggcuucuguugucccguuugu

SEQ ID NO: 168950 - RNA, 32 nt, Homo Sapiens
cggaggcuucgcgggaagacgcggcggcggcg

SEQ ID NO: 168951 - RNA, 32 nt, Homo Sapiens
uauucgcccuccccucccuggaaacuuacuuu

SEQ ID NO: 168952 - RNA, 32 nt, Homo Sapiens
ugcuggagaaguuuuuucauuuuguuagccga

SEQ ID NO: 168953 - RNA, 32 nt, Homo Sapiens
ugucccuuucccuuuugccuggauuuccaggg

SEQ ID NO: 168954 - RNA, 28 nt, Homo Sapiens
gcagccguggcuacuagccugggccguu

SEQ ID NO: 168955 - RNA, 32 nt, Homo Sapiens
auggauggauaauuacguauauuaagauguga

SEQ ID NO: 168956 - RNA, 32 nt, Homo Sapiens
cacuuuaguaucuauuucagagucauauuuaa

SEQ ID NO: 168957 - RNA, 32 nt, Homo Sapiens
caauguauaguaauauuaagcaauuucuaguu

SEQ ID NO: 168958 - RNA, 32 nt, Homo Sapiens
cgagcaugagguccgccuccugggcgagaccc

SEQ ID NO: 168959 - RNA, 32 nt, Homo Sapiens
ccggccgcaggucaaagaguaaaaugaaguac

SEQ ID NO: 168960 - RNA, 32 nt, Homo Sapiens
caggacucuucugcaccugcuuuggcacacau

SEQ ID NO: 168961 - RNA, 32 nt, Homo Sapiens
auuuaagccaucuacagagcugaggaaacagu

SEQ ID NO: 168962 - RNA, 32 nt, Homo Sapiens
ucagagucuucagagacuucguaauuaaagga

SEQ ID NO: 168963 - RNA, 32 nt, Homo Sapiens
cucaaccaacuggacaagggauggcggcagac

SEQ ID NO: 168964 - RNA, 32 nt, Homo Sapiens
uugggauuuuuccaaauuacuuaagauguuua

SEQ ID NO: 168965 - RNA, 31 nt, Homo Sapiens
cacaugcucaaugacucucuggugagcgagg

SEQ ID NO: 168966 - RNA, 32 nt, Homo Sapiens
cccgcgcggacggggaggccagaguugccccg

SEQ ID NO: 168967 - RNA, 32 nt, Homo Sapiens
agagggccuguggccugggggaaggaggacga

SEQ ID NO: 168968 - RNA, 32 nt, Homo Sapiens
uggugguguaugccuguaaucccagcuacucg

SEQ ID NO: 168969 - RNA, 32 nt, Homo Sapiens
ugguuugcgggagauuuccuccccucagucaa

SEQ ID NO: 168970 - RNA, 32 nt, Homo Sapiens
cgaggccggccgccuggucauggcgcagccgg

SEQ ID NO: 168971 - RNA, 32 nt, Homo Sapiens
acuuuuccacaaggucagcaaaaauuagaaag

SEQ ID NO: 168972 - RNA, 32 nt, Homo Sapiens
aagcauuaaaacauuacacauaaaagauaaaa

SEQ ID NO: 168973 - RNA, 32 nt, Homo Sapiens
agacugaauauuuuaaaagagcuuagaauggu

SEQ ID NO: 168974 - RNA, 32 nt, Homo Sapiens
cugacccugccagcuggcuccgagggcaacac

SEQ ID NO: 168975 - RNA, 32 nt, Homo Sapiens
auguaagcgcggaggugggcgagggggaccga

SEQ ID NO: 168976 - RNA, 32 nt, Homo Sapiens
gaucugucaaaaaucuucgauuucauaaaagg

SEQ ID NO: 168977 - RNA, 32 nt, Homo Sapiens
gcugacagaagccccaggcucagccagagcug

SEQ ID NO: 168978 - RNA, 32 nt, Homo Sapiens
uuuaagauuucauuuuaaugguggcaaaauua

SEQ ID NO: 168979 - RNA, 32 nt, Homo Sapiens
uaaaauggggacgaucgggucuuccgcagugg

SEQ ID NO: 168980 - RNA, 32 nt, Homo Sapiens
gugggcgugucuguaaauauugugacaguauu

SEQ ID NO: 168981 - RNA, 32 nt, Homo Sapiens
aauaucuuucccaagcuccaaggcacucauuu

SEQ ID NO: 168982 - RNA, 32 nt, Homo Sapiens
acugggguccuccauguaagagccagaaguuc

SEQ ID NO: 168983 - RNA, 32 nt, Homo Sapiens
gcacaaauuuaaauguagagagccccuaaguc

SEQ ID NO: 168984 - RNA, 32 nt, Homo Sapiens
agcgauuaccugcucacccagcccugauguaa

SEQ ID NO: 168985 - RNA, 32 nt, Homo Sapiens
uuuccuugcuuuucuuuuuuaaaggggucugu

SEQ ID NO: 168986 - RNA, 32 nt, Homo Sapiens
aaugcauagagcccuggccagcccuuccucuc

SEQ ID NO: 168987 - RNA, 32 nt, Homo Sapiens
cuacuguugauaguuuuaauuaucauugcuau

SEQ ID NO: 168988 - RNA, 32 nt, Homo Sapiens
acugaggagggagaguggggguccagggcugg

SEQ ID NO: 168989 - RNA, 32 nt, Homo Sapiens
uggaaagcaaagcuagguagccauuucuucug

SEQ ID NO: 168990 - RNA, 32 nt, Homo Sapiens
auacaaguuucauccagaacuaccaccugaca

SEQ ID NO: 168991 - RNA, 32 nt, Homo Sapiens
cgggagucgaagcccagcccagggcagcccag

SEQ ID NO: 168992 - RNA, 32 nt, Homo Sapiens
ucgagguagucagcccaccuccucugccucaa

SEQ ID NO: 168993 - RNA, 32 nt, Homo Sapiens
cgaccacccgcaccccaccucuagcggcuuug

SEQ ID NO: 168994 - RNA, 32 nt, Homo Sapiens
uuauuaacuacuucccaaaauaguauuucucu

SEQ ID NO: 168995 - RNA, 32 nt, Homo Sapiens
auugucuguaaagcuaggcagaugagcccaga

SEQ ID NO: 168996 - RNA, 32 nt, Homo Sapiens
uaacuucagguccgcccaagugcccuccucuc

SEQ ID NO: 168997 - RNA, 32 nt, Homo Sapiens
cuggggccaggguggggggcagucacuguggg

SEQ ID NO: 168998 - RNA, 32 nt, Homo Sapiens
acauaaguucugaaaacgcuguguacaggagu

SEQ ID NO: 168999 - RNA, 32 nt, Homo Sapiens
uuaaaaaggacuuuuaaguauucuucagugca

SEQ ID NO: 169000 - RNA, 32 nt, Homo Sapiens
acccaccagcuggcuguacccggagccguggc

SEQ ID NO: 169001 - RNA, 32 nt, Homo Sapiens
gccugccugacaaaggaagagaaucuccgaau

SEQ ID NO: 169002 - RNA, 32 nt, Homo Sapiens
ccaaagacaaggaagaugcuuaccauauguau

SEQ ID NO: 169003 - RNA, 32 nt, Homo Sapiens
cacauuuguaaauuuucaagcagcaauagaga

SEQ ID NO: 169004 - RNA, 28 nt, Homo Sapiens
uugcagguaggagacaggaugaccagag

SEQ ID NO: 169005 - RNA, 32 nt, Homo Sapiens
uguuauuuuccauuuuaaaacauuauagccac

SEQ ID NO: 169006 - RNA, 32 nt, Homo Sapiens
uuaaucaugcuucuuuugucugguaauagaca

SEQ ID NO: 169007 - RNA, 32 nt, Homo Sapiens
cuuucucuugucaucucuguacacuacuuaua

SEQ ID NO: 169008 - RNA, 32 nt, Homo Sapiens
uuccacaucuucucaccucuucuugaaacaag

SEQ ID NO: 169009 - RNA, 32 nt, Homo Sapiens
aaacauuucuaaaagaaaacaacaauguuuag

SEQ ID NO: 169010 - RNA, 32 nt, Homo Sapiens
gagcacaugugugggggaaggcgugggcacau

SEQ ID NO: 169011 - RNA, 32 nt, Homo Sapiens
acgacucggccuauaaggaagagagaagcugu

SEQ ID NO: 169012 - RNA, 32 nt, Homo Sapiens
uuaaaaucauggaauugaaauaaaauaaugua

SEQ ID NO: 169013 - RNA, 32 nt, Homo Sapiens
cucacgcugcccagaauucugauuccaugugu

SEQ ID NO: 169014 - RNA, 32 nt, Homo Sapiens
aggcagcccacccacgcccagugcgggugugg

SEQ ID NO: 169015 - RNA, 32 nt, Homo Sapiens
ucgcugccuccauggcagcagccaaggacccc

SEQ ID NO: 169016 - RNA, 32 nt, Homo Sapiens
gcuucgcccucccagcgccuagaagccugcag

SEQ ID NO: 169017 - RNA, 32 nt, Homo Sapiens
gaaaaggaaugggaggcaaaugccugcuaugu

SEQ ID NO: 169018 - RNA, 32 nt, Homo Sapiens
ccacaggaagggggcaucccccuacuuugggu

SEQ ID NO: 169019 - RNA, 32 nt, Homo Sapiens
uucagcuggauuaagauggaucugaaaugggc

SEQ ID NO: 169020 - RNA, 32 nt, Homo Sapiens
uacagcuguugcaacagcagaacuagaauucg

SEQ ID NO: 169021 - RNA, 32 nt, Homo Sapiens
uauauugcauuacuauuugcagucaaacuuug

SEQ ID NO: 169022 - RNA, 32 nt, Homo Sapiens
aagggaccugacuggagugcugauggacuugc

SEQ ID NO: 169023 - RNA, 32 nt, Homo Sapiens
cuccuuagugaugcucugaggcguggccacga

SEQ ID NO: 169024 - RNA, 31 nt, Homo Sapiens
uuggcuccccauugccugcccgaggugcaag

SEQ ID NO: 169025 - RNA, 32 nt, Homo Sapiens
ggcgcagaaaccguaaaaggcuggagcgggcg

SEQ ID NO: 169026 - RNA, 32 nt, Homo Sapiens
acaccaacccauaauuauucuuuacgaugauc

SEQ ID NO: 169027 - RNA, 32 nt, Homo Sapiens
cgacauacaucauucugugauuaaaucuccag

SEQ ID NO: 169028 - RNA, 32 nt, Homo Sapiens
agcuguggauaaauuggaauuuuuuauguugu

SEQ ID NO: 169029 - RNA, 31 nt, Homo Sapiens
agguauaggauaauuuuuaauauggugaccu

SEQ ID NO: 169030 - RNA, 32 nt, Homo Sapiens
gaagaauuccugccaugccccagccuucucca

SEQ ID NO: 169031 - RNA, 32 nt, Homo Sapiens
agcagguaguggggcaaauuccugcccucucu

SEQ ID NO: 169032 - RNA, 30 nt, Homo Sapiens
gccugcaugucugcugcagggcuuaagauc

SEQ ID NO: 169033 - RNA, 32 nt, Homo Sapiens
cgacacacaccuguagucccagcugcucagga

SEQ ID NO: 169034 - RNA, 28 nt, Homo Sapiens
uagcggacgggggucccgagguggaaac

SEQ ID NO: 169035 - RNA, 32 nt, Homo Sapiens
guaugaguuaggauggcucagcacuugcucau

SEQ ID NO: 169036 - RNA, 32 nt, Homo Sapiens
aauacaaaaaccaguuaauguuuuguagaccc

SEQ ID NO: 169037 - RNA, 32 nt, Homo Sapiens
gugccugucuucugcccucccugagcccacag

SEQ ID NO: 169038 - RNA, 32 nt, Homo Sapiens
ggagcggcggggcucaaacgggcccugcggcc

SEQ ID NO: 169039 - RNA, 32 nt, Homo Sapiens
aagugggaauaauuggaaauaaacaacaguuc

SEQ ID NO: 169040 - RNA, 32 nt, Homo Sapiens
cugccuuccuuccccacggccggccgccuccu

SEQ ID NO: 169041 - RNA, 32 nt, Homo Sapiens
ugugcccuggagaugucacagauuccugcaga

SEQ ID NO: 169042 - RNA, 32 nt, Homo Sapiens
ucuugcuauaugccaggcacuguacuaggcac

SEQ ID NO: 169043 - RNA, 32 nt, Homo Sapiens
uuguuguuuuguuuguuuuuuauguccgaccu

SEQ ID NO: 169044 - RNA, 32 nt, Homo Sapiens
acugucaauaguguugauuuuacaaugugugg

SEQ ID NO: 169045 - RNA, 32 nt, Homo Sapiens
auuagcuuauuuugccugauaccuguuacuca

SEQ ID NO: 169046 - RNA, 32 nt, Homo Sapiens
cucuacaaaaauauggaaauuagcugggcaug

SEQ ID NO: 169047 - RNA, 32 nt, Homo Sapiens
gccgcccgcccggggcuccuccacagcaccug

SEQ ID NO: 169048 - RNA, 32 nt, Homo Sapiens
caguuuuguccgcugcauuguccccaaccacg

SEQ ID NO: 169049 - RNA, 32 nt, Homo Sapiens
gaggccuggcaauuacaaacaucuucagaugu

SEQ ID NO: 169050 - RNA, 32 nt, Homo Sapiens
aacucuucuaacuuucuucuuucugugauaau

SEQ ID NO: 169051 - RNA, 32 nt, Homo Sapiens
cuaauuuaguaaagacccugaucuguugcaug

SEQ ID NO: 169052 - RNA, 32 nt, Homo Sapiens
cccauccuugcuucaucucaguucuucauggg

SEQ ID NO: 169053 - RNA, 32 nt, Homo Sapiens
aaagccaagaauuuuuugcaggcauuaagcua

SEQ ID NO: 169054 - RNA, 32 nt, Homo Sapiens
gguguaagccaccgugcccagcccuaaacauc

SEQ ID NO: 169055 - RNA, 32 nt, Homo Sapiens
agcacggagaucucgccggcuuuacguucacc

SEQ ID NO: 169056 - RNA, 32 nt, Homo Sapiens
aagcugacuuugggaaagagggaccagaacuu

SEQ ID NO: 169057 - RNA, 32 nt, Homo Sapiens
ccagaagcaaaauaaacucagcccacaaagcu

SEQ ID NO: 169058 - RNA, 32 nt, Homo Sapiens
cgccagggcacgacggcccagcccuggccccg

SEQ ID NO: 169059 - RNA, 32 nt, Homo Sapiens
uuccaggcuuugcagaagaccuugucuccuua

SEQ ID NO: 169060 - RNA, 32 nt, Homo Sapiens
acuugcaggaggagaacacacccugcaacuac

SEQ ID NO: 169061 - RNA, 32 nt, Homo Sapiens
gagccagggcgcuggaggagugagaggagcca

SEQ ID NO: 169062 - RNA, 32 nt, Homo Sapiens
aauguuucauuuuuuaaaucugacaaacuaaa

SEQ ID NO: 169063 - RNA, 32 nt, Homo Sapiens
aucaaagacaagaaacagaauuacaguauaaa

SEQ ID NO: 169064 - RNA, 32 nt, Homo Sapiens
agucagccccacucugcuggcuaguccuggcu

SEQ ID NO: 169065 - RNA, 32 nt, Homo Sapiens
auuacauuccuccuuugcacaauaauauuucu

SEQ ID NO: 169066 - RNA, 32 nt, Homo Sapiens
cccaaugaaugaugaugguauaguaugugcau

SEQ ID NO: 169067 - RNA, 32 nt, Homo Sapiens
ggagcacuuaggaggcucuugggaugcagcaa

SEQ ID NO: 169068 - RNA, 32 nt, Homo Sapiens
cucagcuggaucuggagccagcuggcuuugcu

SEQ ID NO: 169069 - RNA, 32 nt, Homo Sapiens
uuuacuuuuuuuauuucuuaauuuucuaaaga

SEQ ID NO: 169070 - RNA, 32 nt, Homo Sapiens
aggccauuacacaaauaaauaaccaauguuaa

SEQ ID NO: 169071 - RNA, 32 nt, Homo Sapiens
gaagucaaaauggacacaaucuucuuguggag

SEQ ID NO: 169072 - RNA, 32 nt, Homo Sapiens
cgccuuguccaagauggcggaccuccaccgcc

SEQ ID NO: 169073 - RNA, 32 nt, Homo Sapiens
cgaccaccuguccaaugcugcugguuucgcag

SEQ ID NO: 169074 - RNA, 32 nt, Homo Sapiens
ucauaauuugcaaaauauuuggcacucuuguu

SEQ ID NO: 169075 - RNA, 32 nt, Homo Sapiens
ggggcgcggcgugcggcacgcugcagggcuga

SEQ ID NO: 169076 - RNA, 32 nt, Homo Sapiens
uuuauuauuuuuugaaagaacuuugcugcuga

SEQ ID NO: 169077 - RNA, 32 nt, Homo Sapiens
agcucuucaaccagaggguauaggucagaggg

SEQ ID NO: 169078 - RNA, 32 nt, Homo Sapiens
gagccaggcccggcucucagagcguguucugc

SEQ ID NO: 169079 - RNA, 32 nt, Homo Sapiens
uuggaaagugaacucgacucgugaugguucuc

SEQ ID NO: 169080 - RNA, 32 nt, Homo Sapiens
gcagcccggcccgggcguccuccgccagcucc

SEQ ID NO: 169081 - RNA, 32 nt, Homo Sapiens
accacucacccucccagugugcuugagaaaca

SEQ ID NO: 169082 - RNA, 32 nt, Homo Sapiens
auauauacauauauuaauauaaaccaaugucu

SEQ ID NO: 169083 - RNA, 30 nt, Homo Sapiens
gcugagaaaaucccugcccucauggugcuc

SEQ ID NO: 169084 - RNA, 32 nt, Homo Sapiens
auagguuuauuacaaguuuuuuaggauucuuu

SEQ ID NO: 169085 - RNA, 32 nt, Homo Sapiens
uccagcgcccaguccuucuccugcccgagaga

SEQ ID NO: 169086 - RNA, 32 nt, Homo Sapiens
augugguguugcacuaguuugugcucagggua

SEQ ID NO: 169087 - RNA, 32 nt, Homo Sapiens
cugaggacacaccagcaggucgccuccagccu

SEQ ID NO: 169088 - RNA, 32 nt, Homo Sapiens
guguauguauuccaugccuucauuucgucaau

SEQ ID NO: 169089 - RNA, 32 nt, Homo Sapiens
aguucaacuuccucuguaaauauccaaguaua

SEQ ID NO: 169090 - RNA, 32 nt, Homo Sapiens
cucucggcuccuccccggcagcggcggcggcu

SEQ ID NO: 169091 - RNA, 32 nt, Homo Sapiens
cugugaaugcugugaaaagauuuauuccuuug

SEQ ID NO: 169092 - RNA, 32 nt, Homo Sapiens
gugaagucggagcgcggggccugcuggagaga

SEQ ID NO: 169093 - RNA, 32 nt, Homo Sapiens
aaggaaagguaacuuauuucucuucugcacag

SEQ ID NO: 169094 - RNA, 32 nt, Homo Sapiens
uaaaaggaucagagagagaagaauuaagugcu

SEQ ID NO: 169095 - RNA, 32 nt, Homo Sapiens
gccauuuguauaacgacacuugugcauugccu

SEQ ID NO: 169096 - RNA, 31 nt, Homo Sapiens
cgggcucuucuuaacaggcaggcaaggggug

SEQ ID NO: 169097 - RNA, 32 nt, Homo Sapiens
uguaacugcagauggaaggaccacugaggacc

SEQ ID NO: 169098 - RNA, 32 nt, Homo Sapiens
auauacugguaaauuuaggcaaagugaaacuu

SEQ ID NO: 169099 - RNA, 32 nt, Homo Sapiens
ggagcagugaggacagaagaaugaccaucuau

SEQ ID NO: 169100 - RNA, 32 nt, Homo Sapiens
uaaucugccugccuggaaagaugagaacacug

SEQ ID NO: 169101 - RNA, 32 nt, Homo Sapiens
uuuauuucuaaauucauguacuguauguccau

SEQ ID NO: 169102 - RNA, 32 nt, Homo Sapiens
accuagccugcuugcuuacugcuuauauuugc

SEQ ID NO: 169103 - RNA, 32 nt, Homo Sapiens
uugaaggagguagggcagguuaucucuguucc

SEQ ID NO: 169104 - RNA, 32 nt, Homo Sapiens
caaagauugaggaaugcaacaauauaaagaag

SEQ ID NO: 169105 - RNA, 32 nt, Homo Sapiens
caguacgagaaccaccugauggcuaauggauu

SEQ ID NO: 169106 - RNA, 32 nt, Homo Sapiens
gaugccaacauuuggauucucucuuggugcca

SEQ ID NO: 169107 - RNA, 32 nt, Homo Sapiens
aagaaggcuuugcugcaagcuaccauucccaa

SEQ ID NO: 169108 - RNA, 32 nt, Homo Sapiens
cccccagcagaauggaggcaggggacaaggga

SEQ ID NO: 169109 - RNA, 32 nt, Homo Sapiens
uuaacucagcuuggguucugugcuccuccucu

SEQ ID NO: 169110 - RNA, 32 nt, Homo Sapiens
cuuucgugcuguguuaucuuuauagcaacacu

SEQ ID NO: 169111 - RNA, 32 nt, Homo Sapiens
gcucugccuucccgagcgcgggacgcggcgcc

SEQ ID NO: 169112 - RNA, 32 nt, Homo Sapiens
cagaaaagcaacuacuuauauuucagagcaaa

SEQ ID NO: 169113 - RNA, 32 nt, Homo Sapiens
gagcuugcagugagccgagaucgcgccacggc

SEQ ID NO: 169114 - RNA, 32 nt, Homo Sapiens
uuugcuuugaccgaucacuagauacugccucc

SEQ ID NO: 169115 - RNA, 31 nt, Homo Sapiens
cauagggccugcugccugccgccccgcggga

SEQ ID NO: 169116 - RNA, 32 nt, Homo Sapiens
uccaagcuggaaccguuuaugaggaaaacuga

SEQ ID NO: 169117 - RNA, 32 nt, Homo Sapiens
uaauuuuuaugauuauacuaaugaguaauguu

SEQ ID NO: 169118 - RNA, 31 nt, Homo Sapiens
ucgccaaccccgcagaaccaggacggagaca

SEQ ID NO: 169119 - RNA, 32 nt, Homo Sapiens
gcucaucugcccgcggcugcgugaggacagca

SEQ ID NO: 169120 - RNA, 32 nt, Homo Sapiens
uguauguaguguaacuauuuuguacaauagag

SEQ ID NO: 169121 - RNA, 32 nt, Homo Sapiens
uuugggacuagaggugggugccacugcuccua

SEQ ID NO: 169122 - RNA, 28 nt, Homo Sapiens
cggagggggcggccgcggagcacugguu

SEQ ID NO: 169123 - RNA, 32 nt, Homo Sapiens
cuuuuaauuuuuacauauccaagcauucauuu

SEQ ID NO: 169124 - RNA, 32 nt, Homo Sapiens
uacaaacccugcgcggagcugcaccgcugcug

SEQ ID NO: 169125 - RNA, 32 nt, Homo Sapiens
ugucuccccuccccaccccauccuugcaaagc

SEQ ID NO: 169126 - RNA, 32 nt, Homo Sapiens
ucuaccucacaaagcaguggugagauuacaau

SEQ ID NO: 169127 - RNA, 28 nt, Homo Sapiens
agaauaaauguacauuaaaucuugguaa

SEQ ID NO: 169128 - RNA, 32 nt, Homo Sapiens
caggaccugcagagccggggaccucucugugg

SEQ ID NO: 169129 - RNA, 32 nt, Homo Sapiens
uggguuuugggucuuugaacccuugcuugcaa

SEQ ID NO: 169130 - RNA, 32 nt, Homo Sapiens
gaugauuagggccagaggaucucacuugcuua

SEQ ID NO: 169131 - RNA, 32 nt, Homo Sapiens
cccgggcuccaccgugggucucagacgcccug

SEQ ID NO: 169132 - RNA, 32 nt, Homo Sapiens
agagacugcccauguguuuagaauagaauuuu

SEQ ID NO: 169133 - RNA, 32 nt, Homo Sapiens
guuuugaugaugcacaaaauaaacagcagugg

SEQ ID NO: 169134 - RNA, 32 nt, Homo Sapiens
ugaggcucuccccuccuccccucccccaucau

SEQ ID NO: 169135 - RNA, 32 nt, Homo Sapiens
augauaggauggauucuuucuguauucugaga

SEQ ID NO: 169136 - RNA, 32 nt, Homo Sapiens
gccccuucaaccaaggccugcagcagaugaug

SEQ ID NO: 169137 - RNA, 32 nt, Homo Sapiens
ggcagggguagaggcucguagauggaacuggu

SEQ ID NO: 169138 - RNA, 32 nt, Homo Sapiens
ggcaguggcuggaagcuucgcuaugggaaguu

SEQ ID NO: 169139 - RNA, 32 nt, Homo Sapiens
aaaacagauugucuccuguguucucaaagacu

SEQ ID NO: 169140 - RNA, 32 nt, Homo Sapiens
aucagaaaauuuaaaugcuggugcuggucaga

SEQ ID NO: 169141 - RNA, 32 nt, Homo Sapiens
gacucuuggaugcuuuaugccugcgcaccagg

SEQ ID NO: 169142 - RNA, 32 nt, Homo Sapiens
ccaguaucugcaauguucuagaauagaaguug

SEQ ID NO: 169143 - RNA, 32 nt, Homo Sapiens
gaucugugugugagcugggaaaaggaaagcaa

SEQ ID NO: 169144 - RNA, 32 nt, Homo Sapiens
aaaaaucccaugcaucuagaaacuuagaucca

SEQ ID NO: 169145 - RNA, 32 nt, Homo Sapiens
agaaaauguguuuuaauaugucauaugaauuu

SEQ ID NO: 169146 - RNA, 32 nt, Homo Sapiens
gcgcguucuuaguacucuccccggugacgugc

SEQ ID NO: 169147 - RNA, 32 nt, Homo Sapiens
ugucugcccacgggcucugcgucuccgcagug

SEQ ID NO: 169148 - RNA, 32 nt, Homo Sapiens
auuugauuucaaauguuuuucuucuggaucug

SEQ ID NO: 169149 - RNA, 32 nt, Homo Sapiens
caggcucagggaccggccgcggccccguaggg

SEQ ID NO: 169150 - RNA, 32 nt, Homo Sapiens
acaauuacuuucauuuggugacuuccaaggac

SEQ ID NO: 169151 - RNA, 32 nt, Homo Sapiens
ggaugagcagcaugaagaugucagaucagcaa

SEQ ID NO: 169152 - RNA, 32 nt, Homo Sapiens
cauccuugaaaaaauggggaaaaaagaagaaa

SEQ ID NO: 169153 - RNA, 32 nt, Homo Sapiens
gaaucauugggaaauauuaaauaacacuaguc

SEQ ID NO: 169154 - RNA, 32 nt, Homo Sapiens
ucgagaagcgcggccuggccuggccugggugg

SEQ ID NO: 169155 - RNA, 32 nt, Homo Sapiens
caccagguggagagggcccggcacaggcccac

SEQ ID NO: 169156 - RNA, 32 nt, Homo Sapiens
ugugauguuucugaauacuaccaaacagccau

SEQ ID NO: 169157 - RNA, 32 nt, Homo Sapiens
aucacaucauuuguggaaauuggggugacugu

SEQ ID NO: 169158 - RNA, 32 nt, Homo Sapiens
caggccguugcuagucaguucucuucuuucca

SEQ ID NO: 169159 - RNA, 32 nt, Homo Sapiens
acaaauggaaaacauucuccccugugagaaau

SEQ ID NO: 169160 - RNA, 32 nt, Homo Sapiens
gaccuauuguauaaaaaucacuauuuugugug

SEQ ID NO: 169161 - RNA, 32 nt, Homo Sapiens
ggucucaaacuccugggcucaagcgauacucc

SEQ ID NO: 169162 - RNA, 32 nt, Homo Sapiens
ccacccguuaaggugucuucucuuuagggaug

SEQ ID NO: 169163 - RNA, 32 nt, Homo Sapiens
gauggcugugcacaccuggcccgggacuuguu

SEQ ID NO: 169164 - RNA, 32 nt, Homo Sapiens
uacaggcucccucuuuccucccaauccuaagc

SEQ ID NO: 169165 - RNA, 32 nt, Homo Sapiens
gggcugggcagcguacucaucaucaacccuaa

SEQ ID NO: 169166 - RNA, 32 nt, Homo Sapiens
agcagcccagucugcuguggcgugcgugcuug

SEQ ID NO: 169167 - RNA, 32 nt, Homo Sapiens
guaccugcagaauaauaaagucaucaauaccu

SEQ ID NO: 169168 - RNA, 32 nt, Homo Sapiens
ccccuuggaaauguacucuuucaucaggguug

SEQ ID NO: 169169 - RNA, 29 nt, Homo Sapiens
ggccaugggcgaccgcggcagcucccggc

SEQ ID NO: 169170 - RNA, 32 nt, Homo Sapiens
ggucaccugaauuguuuucauaaaagucaccu

SEQ ID NO: 169171 - RNA, 32 nt, Homo Sapiens
cagccuggccaacaugugaaaccccgucucca

SEQ ID NO: 169172 - RNA, 32 nt, Homo Sapiens
cgacagucugccugggccacagcccucucacc

SEQ ID NO: 169173 - RNA, 32 nt, Homo Sapiens
guugagaccgauuuauacugccaccagcaauu

SEQ ID NO: 169174 - RNA, 31 nt, Homo Sapiens
cauuucuuaugggguucacagaauuauuugg

SEQ ID NO: 169175 - RNA, 32 nt, Homo Sapiens
ugguggagaugcaguagaaaaaucaguucuag

SEQ ID NO: 169176 - RNA, 32 nt, Homo Sapiens
uauaaaauagauguuucuuuuauauggauuuc

SEQ ID NO: 169177 - RNA, 32 nt, Homo Sapiens
cgccggagagggaggcccgagcgcaggagccu

SEQ ID NO: 169178 - RNA, 32 nt, Homo Sapiens
ucacuggaccucaggcccugugcaggagugcg

SEQ ID NO: 169179 - RNA, 32 nt, Homo Sapiens
gaaauuuaaauuuuaaugaaaaugacuuuaac

SEQ ID NO: 169180 - RNA, 32 nt, Homo Sapiens
agucauuguaauggaagcaaaauacaugaagg

SEQ ID NO: 169181 - RNA, 32 nt, Homo Sapiens
gugagaacaaagugagagugaaagaagugaga

SEQ ID NO: 169182 - RNA, 32 nt, Homo Sapiens
agagagcuggaguuggcucagaugaaaaccuc

SEQ ID NO: 169183 - RNA, 32 nt, Homo Sapiens
gaugacccagccugggucuuccaggagaugcu

SEQ ID NO: 169184 - RNA, 32 nt, Homo Sapiens
uagauggaaaaauuaugggguuuaaauguuuu

SEQ ID NO: 169185 - RNA, 32 nt, Homo Sapiens
aagccgucccugcagcaacaagagggcuggaa

SEQ ID NO: 169186 - RNA, 32 nt, Homo Sapiens
cuuuagacaaggagagucaagaaacuacuugu

SEQ ID NO: 169187 - RNA, 32 nt, Homo Sapiens
gccugccauucccagaccccagcccuuugugc

SEQ ID NO: 169188 - RNA, 32 nt, Homo Sapiens
auaguguuuuaucuuccacacaaaucaucucu

SEQ ID NO: 169189 - RNA, 32 nt, Homo Sapiens
uugggggcaguguugugcccugucccagccca

SEQ ID NO: 169190 - RNA, 32 nt, Homo Sapiens
uccaccauagcuugcuggguugaucuagaugu

SEQ ID NO: 169191 - RNA, 29 nt, Homo Sapiens
gaaugucuguguuucauugucuaguccaa

SEQ ID NO: 169192 - RNA, 32 nt, Homo Sapiens
cugguuuuucuuuuugauccaaaugugugauc

SEQ ID NO: 169193 - RNA, 32 nt, Homo Sapiens
aaaagaccaccauuuuaagcauuugagaauuc

SEQ ID NO: 169194 - RNA, 32 nt, Homo Sapiens
auggagcacugguuuuacauucugccucugcu

SEQ ID NO: 169195 - RNA, 32 nt, Homo Sapiens
ccaggugcuucuuuucaugugaugaggcccug

SEQ ID NO: 169196 - RNA, 32 nt, Homo Sapiens
uaagcucuacgggugacagaucuuguuucuga

SEQ ID NO: 169197 - RNA, 32 nt, Homo Sapiens
acagccugcucuugccuauuaccauaccagug

SEQ ID NO: 169198 - RNA, 32 nt, Homo Sapiens
ccauuuucauuuguuuguuuuccuuuuauuuc

SEQ ID NO: 169199 - RNA, 32 nt, Homo Sapiens
uaaucccaggacuuugggaagcugagguggac

SEQ ID NO: 169200 - RNA, 32 nt, Homo Sapiens
aggugaucaagaucuguuccacagggcuaaug

SEQ ID NO: 169201 - RNA, 32 nt, Homo Sapiens
acuugucaagugaguucuuugcauguucaaaa

SEQ ID NO: 169202 - RNA, 32 nt, Homo Sapiens
aaaaaacauaaaacuacucucuaccucuggcu

SEQ ID NO: 169203 - RNA, 32 nt, Homo Sapiens
gccccaggcuggagauaacagccucuugcccg

SEQ ID NO: 169204 - RNA, 32 nt, Homo Sapiens
cuggugcaggaugccuuguucuuucucacagu

SEQ ID NO: 169205 - RNA, 32 nt, Homo Sapiens
gaggucuuguuuuuuguuuaaaaaaguuugug

SEQ ID NO: 169206 - RNA, 32 nt, Homo Sapiens
ggguuucugccuccuccccacccaggucaggg

SEQ ID NO: 169207 - RNA, 32 nt, Homo Sapiens
cugcagccuugacuccgugagcucagggacuc

SEQ ID NO: 169208 - RNA, 32 nt, Homo Sapiens
gcaugggcugaugaucccuuuaugugaugaua

SEQ ID NO: 169209 - RNA, 32 nt, Homo Sapiens
ugcggcuggaaagcggccgagcacauggacga

SEQ ID NO: 169210 - RNA, 32 nt, Homo Sapiens
gucugacucccuccccacccaagagaggaagg

SEQ ID NO: 169211 - RNA, 32 nt, Homo Sapiens
acgccagaucccugagagucuuucuggcuggu

SEQ ID NO: 169212 - RNA, 32 nt, Homo Sapiens
gaaaaugaggcucacacagaccaagaguaucu

SEQ ID NO: 169213 - RNA, 32 nt, Homo Sapiens
gagaggguggugcccaugaguggagaugccag

SEQ ID NO: 169214 - RNA, 32 nt, Homo Sapiens
gacgugagaucaauaagaagaaccuagucuag

SEQ ID NO: 169215 - RNA, 32 nt, Homo Sapiens
ggguaugggcuuucuuuuuuauuucaucacuu

SEQ ID NO: 169216 - RNA, 32 nt, Homo Sapiens
ucaaauguucuuucuuuuuuguucuaaagguu

SEQ ID NO: 169217 - RNA, 31 nt, Homo Sapiens
guggaucuugguauaaagucauuggaacaua

SEQ ID NO: 169218 - RNA, 32 nt, Homo Sapiens
ccgggaggaagcggccgcgcggcagcugcggg

SEQ ID NO: 169219 - RNA, 32 nt, Homo Sapiens
aaguggcugacaaggacugaaagggaacaugu

SEQ ID NO: 169220 - RNA, 32 nt, Homo Sapiens
cacauuaaauggugugaagcguuguuuggcaa

SEQ ID NO: 169221 - RNA, 32 nt, Homo Sapiens
aggcccaagcccagccccuugggcucgcugcc

SEQ ID NO: 169222 - RNA, 32 nt, Homo Sapiens
cgggacgugucugcgcggcaguccuggccugu

SEQ ID NO: 169223 - RNA, 28 nt, Homo Sapiens
ccuccaguuacagaaucacagacccucc

SEQ ID NO: 169224 - RNA, 32 nt, Homo Sapiens
aagcuguuuuucugcuccuuuguggaaggcag

SEQ ID NO: 169225 - RNA, 32 nt, Homo Sapiens
gaguuuucuuuagaagugacucccauuagccu

SEQ ID NO: 169226 - RNA, 32 nt, Homo Sapiens
gauguuccagguuuggucuggcacucugccuu

SEQ ID NO: 169227 - RNA, 32 nt, Homo Sapiens
gugccuucaaaacccacccccaccccuacccu

SEQ ID NO: 169228 - RNA, 32 nt, Homo Sapiens
caccucacucugggcagcucuaggcucagcag

SEQ ID NO: 169229 - RNA, 32 nt, Homo Sapiens
cuuacaagagauuguagaaggcaugaaacaaa

SEQ ID NO: 169230 - RNA, 32 nt, Homo Sapiens
uucacuuuuaagucagccuuaaacacaugccu

SEQ ID NO: 169231 - RNA, 32 nt, Homo Sapiens
ggaacagguucagaacuuggcugguggacagc

SEQ ID NO: 169232 - RNA, 30 nt, Homo Sapiens
uugcgggggaguuuccugccggcgcggcug

SEQ ID NO: 169233 - RNA, 32 nt, Homo Sapiens
cuuagcagggacaggagaaaaauuauucccau

SEQ ID NO: 169234 - RNA, 32 nt, Homo Sapiens
cugugcucuguaugcugcuguccccaagggcu

SEQ ID NO: 169235 - RNA, 32 nt, Homo Sapiens
ucuucgcggugcccgcgcgcaccacucuccag

SEQ ID NO: 169236 - RNA, 32 nt, Homo Sapiens
uuccccggucccagccccucccaguuccccca

SEQ ID NO: 169237 - RNA, 32 nt, Homo Sapiens
agcaacaaaaauaccacgaagacaaaagaucu

SEQ ID NO: 169238 - RNA, 29 nt, Homo Sapiens
gagcagccugggcaacauggcaaaacccc

SEQ ID NO: 169239 - RNA, 32 nt, Homo Sapiens
ccgcccggccccgcuccgcacugcaccccgac

SEQ ID NO: 169240 - RNA, 32 nt, Homo Sapiens
cuucaaccccuauggcgaccagagccagcccg

SEQ ID NO: 169241 - RNA, 32 nt, Homo Sapiens
gcugaggggcugaggcggcugaggcggcugag

SEQ ID NO: 169242 - RNA, 32 nt, Homo Sapiens
aucguaugcugcuagacuacuucuuuucuuau

SEQ ID NO: 169243 - RNA, 32 nt, Homo Sapiens
auguguaagaacaguaaaaugugguguuuuuu

SEQ ID NO: 169244 - RNA, 32 nt, Homo Sapiens
caacacagcuccugaaaugcugauuaagcauu

SEQ ID NO: 169245 - RNA, 32 nt, Homo Sapiens
acagauccacaaguccacagucgacagaugcu

SEQ ID NO: 169246 - RNA, 32 nt, Homo Sapiens
uuaaauuuaaugaaacaaaaaauuccuaagaa

SEQ ID NO: 169247 - RNA, 32 nt, Homo Sapiens
ugguuuucuguuucuaauuugcugcugauaau

SEQ ID NO: 169248 - RNA, 32 nt, Homo Sapiens
ugaaucugaugaugaugaagaugaagaugaug

SEQ ID NO: 169249 - RNA, 29 nt, Homo Sapiens
cggcgcucuggacagaguacgcuucaugu

SEQ ID NO: 169250 - RNA, 32 nt, Homo Sapiens
gcaauagagcugcuugguuggaggaagugaag

SEQ ID NO: 169251 - RNA, 32 nt, Homo Sapiens
uuugcaaauauguucuaaauugaaaacaauuu

SEQ ID NO: 169252 - RNA, 32 nt, Homo Sapiens
auuuaugauagaugaaguucuuauucugagua

SEQ ID NO: 169253 - RNA, 30 nt, Homo Sapiens
ccucugccaaaggccacccauuuacaagaa

SEQ ID NO: 169254 - RNA, 32 nt, Homo Sapiens
cagggcugcuccaggcaggucagagcagugca

SEQ ID NO: 169255 - RNA, 32 nt, Homo Sapiens
cucgaggaggccuggggucugugaggcagcgg

SEQ ID NO: 169256 - RNA, 32 nt, Homo Sapiens
uuucuauauucacaauaucuuaaaaggcauag

SEQ ID NO: 169257 - RNA, 32 nt, Homo Sapiens
ggaaggcuaugaaaagaacuugaaauugucgg

SEQ ID NO: 169258 - RNA, 32 nt, Homo Sapiens
ccccauggcuucuggcagcuggacaucagccc

SEQ ID NO: 169259 - RNA, 32 nt, Homo Sapiens
aagauguuuucuucugcauuccaauugaagaa

SEQ ID NO: 169260 - RNA, 32 nt, Homo Sapiens
uaacaugcagcuuuuuccucucauagcauuuu

SEQ ID NO: 169261 - RNA, 32 nt, Homo Sapiens
ugaaaucccucauuuauuuucuucucaaaaug

SEQ ID NO: 169262 - RNA, 32 nt, Homo Sapiens
ucugggauaguuuuaaaguguacaucuccagg

SEQ ID NO: 169263 - RNA, 32 nt, Homo Sapiens
acucggcagggccaccacgcauccccucacug

SEQ ID NO: 169264 - RNA, 32 nt, Homo Sapiens
uacccaaccuucccuucucccuugagugcuug

SEQ ID NO: 169265 - RNA, 32 nt, Homo Sapiens
augaagaggaagagaugaggaguggggguccu

SEQ ID NO: 169266 - RNA, 32 nt, Homo Sapiens
ggggauaaauaucaccuagaaaaguagccuca

SEQ ID NO: 169267 - RNA, 32 nt, Homo Sapiens
cuccccuccgcggggaaaucggcggcuacccg

SEQ ID NO: 169268 - RNA, 32 nt, Homo Sapiens
uuucuauuuuuuucuuuuuuuccaaaaaaaga

SEQ ID NO: 169269 - RNA, 32 nt, Homo Sapiens
cacuucaaaacacugaugugaaguguccagau

SEQ ID NO: 169270 - RNA, 32 nt, Homo Sapiens
gucacuuaguauucuuuuuuuucucauucugg

SEQ ID NO: 169271 - RNA, 32 nt, Homo Sapiens
ggucucaagcagccuccagucccgggcucaac

SEQ ID NO: 169272 - RNA, 32 nt, Homo Sapiens
acagacgcauauaaauggaaggugguauuaua

SEQ ID NO: 169273 - RNA, 32 nt, Homo Sapiens
agcaugagcucauugcaaacuggacuggaaga

SEQ ID NO: 169274 - RNA, 32 nt, Homo Sapiens
cacucccagggagucccuuccuccccaccugc

SEQ ID NO: 169275 - RNA, 32 nt, Homo Sapiens
acauuuuauaaauuauuguagaucauguuuug

SEQ ID NO: 169276 - RNA, 30 nt, Homo Sapiens
uucccgagccugaagccgccggcucggcgc

SEQ ID NO: 169277 - RNA, 32 nt, Homo Sapiens
gaggggggagcggggaggagcggccgggccug

SEQ ID NO: 169278 - RNA, 32 nt, Homo Sapiens
cuauuucuguuuccacaauuccaaauauuuau

SEQ ID NO: 169279 - RNA, 29 nt, Homo Sapiens
cuuuuuuucuguuucagaguaguucacaa

SEQ ID NO: 169280 - RNA, 32 nt, Homo Sapiens
gggccagccuggaggcggcucugguccaggcc

SEQ ID NO: 169281 - RNA, 32 nt, Homo Sapiens
cccuggcgcccgagcgccggcugcuggggcug

SEQ ID NO: 169282 - RNA, 32 nt, Homo Sapiens
cuucaccaguguuuuucuucaugugcaaagug

SEQ ID NO: 169283 - RNA, 32 nt, Homo Sapiens
cggagugcgagguccugcugguccuggaggca

SEQ ID NO: 169284 - RNA, 32 nt, Homo Sapiens
accuccgccucccggguucaagugauucuucu

SEQ ID NO: 169285 - RNA, 32 nt, Homo Sapiens
ugcugauacgaauggacaggaaagggagccag

SEQ ID NO: 169286 - RNA, 31 nt, Homo Sapiens
cagagucuugguaaugauucaaagggaggau

SEQ ID NO: 169287 - RNA, 32 nt, Homo Sapiens
uaggaguaugguuuuuaaacuugggcuucauu

SEQ ID NO: 169288 - RNA, 32 nt, Homo Sapiens
gagcagaaacaaaacauuguguaacauguuuu

SEQ ID NO: 169289 - RNA, 32 nt, Homo Sapiens
uuuaacugcauaagcaauaagaucuuaauaaa

SEQ ID NO: 169290 - RNA, 32 nt, Homo Sapiens
gaugauacuggaaauucuuuuacuucaaaugc

SEQ ID NO: 169291 - RNA, 32 nt, Homo Sapiens
aaaagaacgauaaaugaagccaacaugauuuu

SEQ ID NO: 169292 - RNA, 32 nt, Homo Sapiens
aaacuugugugguaaaaguacaugccaugugu

SEQ ID NO: 169293 - RNA, 32 nt, Homo Sapiens
ucuucucccuucccucgcccaagggagugggg

SEQ ID NO: 169294 - RNA, 32 nt, Homo Sapiens
cccagaagacuucagauuaauaaagaagcuuu

SEQ ID NO: 169295 - RNA, 32 nt, Homo Sapiens
aacccgaugaccccagaaaaccgugugagauu

SEQ ID NO: 169296 - RNA, 32 nt, Homo Sapiens
uuuuaaaguuacuuuuauacaaaccaagaaua

SEQ ID NO: 169297 - RNA, 32 nt, Homo Sapiens
cuugggaugcuguugcaagaugguucugugac

SEQ ID NO: 169298 - RNA, 32 nt, Homo Sapiens
uugggggaugggcucuucgccaugggggucuu

SEQ ID NO: 169299 - RNA, 32 nt, Homo Sapiens
accucgggugauccgcgccccgcggccuccgg

SEQ ID NO: 169300 - RNA, 32 nt, Homo Sapiens
ccuuucuuguauuccucauauagaaucaauaa

SEQ ID NO: 169301 - RNA, 32 nt, Homo Sapiens
cgggacgguuccacacagccccggccuuucgc

SEQ ID NO: 169302 - RNA, 32 nt, Homo Sapiens
ccaacuccaccaaccucuggcucuuacauaac

SEQ ID NO: 169303 - RNA, 32 nt, Homo Sapiens
gacaugucugagauaaccaaggugauucagga

SEQ ID NO: 169304 - RNA, 32 nt, Homo Sapiens
ugagcugcaacaugugugcgugugugugcgug

SEQ ID NO: 169305 - RNA, 32 nt, Homo Sapiens
acuggaaguauuuucaggacguagaccuggug

SEQ ID NO: 169306 - RNA, 32 nt, Homo Sapiens
uagcccgccccgcuccuccuuccgaagagaga

SEQ ID NO: 169307 - RNA, 32 nt, Homo Sapiens
uguggcuaugagaggccuccugcugcagaaac

SEQ ID NO: 169308 - RNA, 32 nt, Homo Sapiens
uuguguuuuuaaaauaguuaguagaucacuau

SEQ ID NO: 169309 - RNA, 32 nt, Homo Sapiens
ucacccaauuggauguuuuugcuuauagcaaa

SEQ ID NO: 169310 - RNA, 31 nt, Homo Sapiens
agaauguaguccucagguauaugauaaaaaa

SEQ ID NO: 169311 - RNA, 32 nt, Homo Sapiens
cauagcccauuaugaaaaauauaauacaaaac

SEQ ID NO: 169312 - RNA, 32 nt, Homo Sapiens
ccccuaaccuuggcccaagaccccuuugauuc

SEQ ID NO: 169313 - RNA, 32 nt, Homo Sapiens
agcauauaauagucauuaagcaugacauaucc

SEQ ID NO: 169314 - RNA, 32 nt, Homo Sapiens
gaaggcgggccggcccgggagccgcucacuuu

SEQ ID NO: 169315 - RNA, 32 nt, Homo Sapiens
uaauuucaagcaauuguuguauuuucaugacu

SEQ ID NO: 169316 - RNA, 32 nt, Homo Sapiens
ccuuuggcuuugcauggcuuuucuucagguac

SEQ ID NO: 169317 - RNA, 32 nt, Homo Sapiens
uuaugacuccauuagugagcugugguaugggu

SEQ ID NO: 169318 - RNA, 32 nt, Homo Sapiens
aacuccauauaaggcuggguccuccuuuggcc

SEQ ID NO: 169319 - RNA, 32 nt, Homo Sapiens
aggcuggagugcaaugacaugaucuccguuca

SEQ ID NO: 169320 - RNA, 32 nt, Homo Sapiens
uaaauuuuuaguuuucuuucuguaggaaaagu

SEQ ID NO: 169321 - RNA, 32 nt, Homo Sapiens
auuugaagugauuucaaauauuucaaauucau

SEQ ID NO: 169322 - RNA, 32 nt, Homo Sapiens
aggccccuuuuggaggcagcugaggaaggaug

SEQ ID NO: 169323 - RNA, 32 nt, Homo Sapiens
uuuuuuaauugcaacaaugcaaaagccaagaa

SEQ ID NO: 169324 - RNA, 32 nt, Homo Sapiens
aacaaaaaccaucaaaaucucauauaugaaau

SEQ ID NO: 169325 - RNA, 32 nt, Homo Sapiens
uggagacuccuggccuggccaccugcaagagg

SEQ ID NO: 169326 - RNA, 32 nt, Homo Sapiens
aagcacuugggguugcccuaaguuuagauggc

SEQ ID NO: 169327 - RNA, 32 nt, Homo Sapiens
gccuaccaggggccuuccuguguggccugccu

SEQ ID NO: 169328 - RNA, 32 nt, Homo Sapiens
cccaaggccaagugagagagcccaggccacag

SEQ ID NO: 169329 - RNA, 32 nt, Homo Sapiens
aaaggaguauuauaauaaaaagcuaaguuugc

SEQ ID NO: 169330 - RNA, 32 nt, Homo Sapiens
gaccaaacagguuguuucucugcaguuuccaa

SEQ ID NO: 169331 - RNA, 32 nt, Homo Sapiens
gccaaaacaugagcuucaacuccaccuccagc

SEQ ID NO: 169332 - RNA, 32 nt, Homo Sapiens
uuugccuuuaauuucuuuuuuauauauacucu

SEQ ID NO: 169333 - RNA, 32 nt, Homo Sapiens
ccuaucuguucugucucccaauguaccacuua

SEQ ID NO: 169334 - RNA, 32 nt, Homo Sapiens
gccgcugcacuccagccugggcgacagaguga

SEQ ID NO: 169335 - RNA, 32 nt, Homo Sapiens
cagccuguugagcugguucuccagggcugcag

SEQ ID NO: 169336 - RNA, 32 nt, Homo Sapiens
auuaucucucauguacaguaauuauauguaaa

SEQ ID NO: 169337 - RNA, 32 nt, Homo Sapiens
augacagcuggcgccccgacaacagcagaccu

SEQ ID NO: 169338 - RNA, 32 nt, Homo Sapiens
gaucaggaaagagggacaccauuuccucagau

SEQ ID NO: 169339 - RNA, 32 nt, Homo Sapiens
ucuuuaaaaaauaccaaagcuuguuuauuucu

SEQ ID NO: 169340 - RNA, 32 nt, Homo Sapiens
aguucgagccccacuucaaacaacuucauaau

SEQ ID NO: 169341 - RNA, 32 nt, Homo Sapiens
aaaggaggaaaacauuaauucuuucugccuuu

SEQ ID NO: 169342 - RNA, 32 nt, Homo Sapiens
aguccgcgagaagccucccuggcgggugcucu

SEQ ID NO: 169343 - RNA, 32 nt, Homo Sapiens
uuuuaugguauaugugcuuguuuucugaauau

SEQ ID NO: 169344 - RNA, 32 nt, Homo Sapiens
uauuugccaaacugaauaaaacugucaugguu

SEQ ID NO: 169345 - RNA, 32 nt, Homo Sapiens
gaggccgcgggccggcacuccccggaugcacc

SEQ ID NO: 169346 - RNA, 32 nt, Homo Sapiens
acaaggaaaucacuguuaagaaugggaauuug

SEQ ID NO: 169347 - RNA, 32 nt, Homo Sapiens
cagugagaguggaaccaccgucuguuccccug

SEQ ID NO: 169348 - RNA, 32 nt, Homo Sapiens
uccaacacaguuucccaaagaaaaaugggcac

SEQ ID NO: 169349 - RNA, 32 nt, Homo Sapiens
agaugcacauucagaagcucacagguuuuuuc

SEQ ID NO: 169350 - RNA, 32 nt, Homo Sapiens
aggccccugcgguuucgcccgucguuggcuuc

SEQ ID NO: 169351 - RNA, 32 nt, Homo Sapiens
uguuuguucuugauuuccugggggaaugggac

SEQ ID NO: 169352 - RNA, 28 nt, Homo Sapiens
ugaggaguggcuacuggagccguguguu

SEQ ID NO: 169353 - RNA, 32 nt, Homo Sapiens
uccucuuuaaaauggaagggagagcugggcau

SEQ ID NO: 169354 - RNA, 32 nt, Homo Sapiens
uugaauuuuaaagguaucaacuuuaucagucu

SEQ ID NO: 169355 - RNA, 32 nt, Homo Sapiens
cucuauccacauccccucccccaccugccaaa

SEQ ID NO: 169356 - RNA, 32 nt, Homo Sapiens
ugcugugccauucuggaagcuccagcugcugc

SEQ ID NO: 169357 - RNA, 32 nt, Homo Sapiens
uuggaaccaagguuugucugcagcuugucggu

SEQ ID NO: 169358 - RNA, 32 nt, Homo Sapiens
ugcuuccccgguuucccuccuccuuuuaacuu

SEQ ID NO: 169359 - RNA, 32 nt, Homo Sapiens
gguaguucuucagacacaauguaacuuagguu

SEQ ID NO: 169360 - RNA, 32 nt, Homo Sapiens
aguuaaauauaaauuaacauuuuuuagaugac

SEQ ID NO: 169361 - RNA, 32 nt, Homo Sapiens
gguaacuaggugucucagggcuggguuggggu

SEQ ID NO: 169362 - RNA, 32 nt, Homo Sapiens
cucgcucgggaccuuccaccucuccaacauug

SEQ ID NO: 169363 - RNA, 32 nt, Homo Sapiens
augcugacuucuaaugaacugaagaugugccc

SEQ ID NO: 169364 - RNA, 32 nt, Homo Sapiens
ggggagcccagcugucgguccccagcccugcc

SEQ ID NO: 169365 - RNA, 32 nt, Homo Sapiens
agaggcuggcgcaaacagaagugcagcggugg

SEQ ID NO: 169366 - RNA, 32 nt, Homo Sapiens
uuaguuucuaauauuaaucuccagguguaaga

SEQ ID NO: 169367 - RNA, 32 nt, Homo Sapiens
aauagagcacauauuacucuuuuuacgaaccu

SEQ ID NO: 169368 - RNA, 32 nt, Homo Sapiens
gaacuuauguugcuguuuuuuauauuucaagg

SEQ ID NO: 169369 - RNA, 32 nt, Homo Sapiens
gcacccagaggaggagagagccggcaguuccc

SEQ ID NO: 169370 - RNA, 32 nt, Homo Sapiens
cauuaguucuuacagguuuugggauaggcagu

SEQ ID NO: 169371 - RNA, 32 nt, Homo Sapiens
agauaacauuuuaguuucaaguuuguauggua

SEQ ID NO: 169372 - RNA, 32 nt, Homo Sapiens
gcgcccuaaugccuuccaacccuuagauguca

SEQ ID NO: 169373 - RNA, 32 nt, Homo Sapiens
acuggagaguguggggaaugggaagaagcagu

SEQ ID NO: 169374 - RNA, 32 nt, Homo Sapiens
cuuugaggaacaugcauaagaaauguagcuga

SEQ ID NO: 169375 - RNA, 32 nt, Homo Sapiens
gcggcacggaggagcgcaugcgugccuuaucu

SEQ ID NO: 169376 - RNA, 32 nt, Homo Sapiens
aacugaaguaaaucauuucagcuuauaguucu

SEQ ID NO: 169377 - RNA, 32 nt, Homo Sapiens
auucuguggguugcuuugauaauucuuacuaa

SEQ ID NO: 169378 - RNA, 32 nt, Homo Sapiens
ggcuggccaggaugaaguaucuccggcaccgg

SEQ ID NO: 169379 - RNA, 32 nt, Homo Sapiens
gaaagcaucagaagauaaaauauuuuuauauu

SEQ ID NO: 169380 - RNA, 28 nt, Homo Sapiens
caggcgcggcggccgaugcgagugugua

SEQ ID NO: 169381 - RNA, 32 nt, Homo Sapiens
cacucugccaggugcuggcuguggagcaaagg

SEQ ID NO: 169382 - RNA, 32 nt, Homo Sapiens
gagauauuagauauuucuuaauguuuucauag

SEQ ID NO: 169383 - RNA, 30 nt, Homo Sapiens
acgaggcgcgcgcucggggucccggucgcg

SEQ ID NO: 169384 - RNA, 32 nt, Homo Sapiens
ugcguuuacagugcaucagauacauuuuauau

SEQ ID NO: 169385 - RNA, 32 nt, Homo Sapiens
cguaacgauauggugucuuuuacauacuuuuu

SEQ ID NO: 169386 - RNA, 32 nt, Homo Sapiens
guggccuuuugccccacccccagcauacaaug

SEQ ID NO: 169387 - RNA, 32 nt, Homo Sapiens
uggcaaagcugauguugagugcagaacuagcu

SEQ ID NO: 169388 - RNA, 32 nt, Homo Sapiens
ucaccgcccucgccgccgcaccauggacgccc

SEQ ID NO: 169389 - RNA, 32 nt, Homo Sapiens
cuaagcugacugaguugcaaggacccuuuccg

SEQ ID NO: 169390 - RNA, 32 nt, Homo Sapiens
aguucucaccgacaaugccccuggauaauuuu

SEQ ID NO: 169391 - RNA, 32 nt, Homo Sapiens
cuuggguccuucugcccguguuuucaccaaag

SEQ ID NO: 169392 - RNA, 32 nt, Homo Sapiens
cgcgaagccggagucagcaucuccaggcgcgg

SEQ ID NO: 169393 - RNA, 32 nt, Homo Sapiens
cuucagagaaaagccaaaggacuuaaaauggc

SEQ ID NO: 169394 - RNA, 30 nt, Homo Sapiens
gcggagcgcgcgcucccagcgaaagcagca

SEQ ID NO: 169395 - RNA, 32 nt, Homo Sapiens
gagcccggguggcacugccaggugguggccug

SEQ ID NO: 169396 - RNA, 32 nt, Homo Sapiens
uauaaacagacaaaucacgucuuaccacaucc

SEQ ID NO: 169397 - RNA, 32 nt, Homo Sapiens
agccagggcugagacucccggugcugagccca

SEQ ID NO: 169398 - RNA, 32 nt, Homo Sapiens
cauucugccugccugggaacgggguggacgag

SEQ ID NO: 169399 - RNA, 32 nt, Homo Sapiens
auggaaaggcauguaacauaguguggcaagga

SEQ ID NO: 169400 - RNA, 32 nt, Homo Sapiens
cugugcuucuauuucuuggaauacguucuccu

SEQ ID NO: 169401 - RNA, 32 nt, Homo Sapiens
auuuaaguuauuuuaaugugguuuaggggcaa

SEQ ID NO: 169402 - RNA, 32 nt, Homo Sapiens
aagugauuugaaaaauacucauucugaacaua

SEQ ID NO: 169403 - RNA, 32 nt, Homo Sapiens
gaagccacucugggcggccagccagcccuggg

SEQ ID NO: 169404 - RNA, 32 nt, Homo Sapiens
uuaacacaucuuuuuuaaaaaagcagggcuua

SEQ ID NO: 169405 - RNA, 32 nt, Homo Sapiens
uaccucauagucccucucuccccuccuuuaaa

SEQ ID NO: 169406 - RNA, 32 nt, Homo Sapiens
cacacugaagccagaagcugugggcugugggg

SEQ ID NO: 169407 - RNA, 32 nt, Homo Sapiens
uauagguauauuacaacaaaacacaaauagcu

SEQ ID NO: 169408 - RNA, 32 nt, Homo Sapiens
guuaauuuguuguuugcacauagguuccacuu

SEQ ID NO: 169409 - RNA, 32 nt, Homo Sapiens
gagagggcuaaauggguccaucucuaggggcc

SEQ ID NO: 169410 - RNA, 32 nt, Homo Sapiens
ggaguccgcgcccugcgccgccgaccaguucg

SEQ ID NO: 169411 - RNA, 32 nt, Homo Sapiens
ucagcccucuggugccgcucugcccgaugcac

SEQ ID NO: 169412 - RNA, 32 nt, Homo Sapiens
uuaguagugucugugaagucucaauaauugau

SEQ ID NO: 169413 - RNA, 28 nt, Homo Sapiens
gcugcaguggcuaccucuaugccuccug

SEQ ID NO: 169414 - RNA, 32 nt, Homo Sapiens
agcugcaguguggggagggaauggguggcacu

SEQ ID NO: 169415 - RNA, 32 nt, Homo Sapiens
guagcagcauucagcacaggugccaaaauaug

SEQ ID NO: 169416 - RNA, 32 nt, Homo Sapiens
uauacuuguaaauaaaauagcugcaaaccuca

SEQ ID NO: 169417 - RNA, 32 nt, Homo Sapiens
ucacccuucccggcccccggccaaggacccag

SEQ ID NO: 169418 - RNA, 32 nt, Homo Sapiens
uccuuguucauuuauaucgcuggccagcauua

SEQ ID NO: 169419 - RNA, 31 nt, Homo Sapiens
accacaugccacugccugcaccuuucggcag

SEQ ID NO: 169420 - RNA, 32 nt, Homo Sapiens
gagggccuguggaacgagggcuccguuccccc

SEQ ID NO: 169421 - RNA, 31 nt, Homo Sapiens
aaguagaaauaaauaucaagaauucacaggu

SEQ ID NO: 169422 - RNA, 32 nt, Homo Sapiens
uccaggaggaguuagccaaacaacaacaaaaa

SEQ ID NO: 169423 - RNA, 32 nt, Homo Sapiens
cucgggcucugcucaccucuggugacccucca

SEQ ID NO: 169424 - RNA, 32 nt, Homo Sapiens
ggugugagggcagaucugggggugcccagaug

SEQ ID NO: 169425 - RNA, 32 nt, Homo Sapiens
uccucacugucauggugccaccagugucugau

SEQ ID NO: 169426 - RNA, 28 nt, Homo Sapiens
uggaugcucgauuuccucugccucucuc

SEQ ID NO: 169427 - RNA, 30 nt, Homo Sapiens
agguggcuggugcugccgccgcugcagcau

SEQ ID NO: 169428 - RNA, 32 nt, Homo Sapiens
ucugcagcacauaguccaauuauuuucauguu

SEQ ID NO: 169429 - RNA, 32 nt, Homo Sapiens
cucggccgggaggcuccuggggccggggcucc

SEQ ID NO: 169430 - RNA, 32 nt, Homo Sapiens
gucuauacauguuucgacuguuuaaugaguaa

SEQ ID NO: 169431 - RNA, 27 nt, Homo Sapiens
ccaugugggcugcggcgggcgggcugu

SEQ ID NO: 169432 - RNA, 30 nt, Homo Sapiens
cccuucaugccagauggggaaacugaggcu

SEQ ID NO: 169433 - RNA, 32 nt, Homo Sapiens
cuuuugcuuuugucuuuuuugaugagggcuca

SEQ ID NO: 169434 - RNA, 32 nt, Homo Sapiens
uacugaugcugucauguggaaacuauuuaaag

SEQ ID NO: 169435 - RNA, 32 nt, Homo Sapiens
gcacacccuaccuucaucuccuccauguccug

SEQ ID NO: 169436 - RNA, 32 nt, Homo Sapiens
ccccagagaagaugacuagagaaggguaccaa

SEQ ID NO: 169437 - RNA, 32 nt, Homo Sapiens
cauggcccaagccccccaccuccucccuuccc

SEQ ID NO: 169438 - RNA, 32 nt, Homo Sapiens
uggccucuguaugcaguacuaaaauuaaugca

SEQ ID NO: 169439 - RNA, 32 nt, Homo Sapiens
cagaaaacugucagcucugcuuucuaaggaac

SEQ ID NO: 169440 - RNA, 32 nt, Homo Sapiens
aagacuauuuaguaaucucuuucuuaagcaga

SEQ ID NO: 169441 - RNA, 32 nt, Homo Sapiens
aauuuaauucugaaauuauucaguuacggauu

SEQ ID NO: 169442 - RNA, 32 nt, Homo Sapiens
ccuaauuuaagauuuuuaaaaagcagaaugua

SEQ ID NO: 169443 - RNA, 32 nt, Homo Sapiens
aucuugcagcagcagcagcauagucaaacacc

SEQ ID NO: 169444 - RNA, 32 nt, Homo Sapiens
uuucgcuuuccacaguuuguuaccugcaguca

SEQ ID NO: 169445 - RNA, 32 nt, Homo Sapiens
uucaguucacuguugguucucaucuuugaaag

SEQ ID NO: 169446 - RNA, 32 nt, Homo Sapiens
gcuuugcuggcaaaagcaguuuuugcacuaga

SEQ ID NO: 169447 - RNA, 32 nt, Homo Sapiens
acgcgcgcagccagcccuucccccuccggcuc

SEQ ID NO: 169448 - RNA, 32 nt, Homo Sapiens
ccaccucucccagcugauggugagcugacagu

SEQ ID NO: 169449 - RNA, 32 nt, Homo Sapiens
cagccucaccugcacaccccagcccugcacgg

SEQ ID NO: 169450 - RNA, 32 nt, Homo Sapiens
ccuggaauugcagcuguacugaggaugauguu

SEQ ID NO: 169451 - RNA, 32 nt, Homo Sapiens
ccuucuguuugcagaacguucauuucaggagc

SEQ ID NO: 169452 - RNA, 32 nt, Homo Sapiens
ugucacuuuucucuuguucuugaaacauugca

SEQ ID NO: 169453 - RNA, 32 nt, Homo Sapiens
aauccugcucuggucucuggccccacagaggu

SEQ ID NO: 169454 - RNA, 32 nt, Homo Sapiens
uauuuauucaucuauuuaugguauguauguau

SEQ ID NO: 169455 - RNA, 32 nt, Homo Sapiens
uccaagacuucaauaaauuugucaguuacagu

SEQ ID NO: 169456 - RNA, 32 nt, Homo Sapiens
aguccccaccccugcccccagccccgggguga

SEQ ID NO: 169457 - RNA, 32 nt, Homo Sapiens
uacagagcaggaagaggcgcccugugaacccu

SEQ ID NO: 169458 - RNA, 32 nt, Homo Sapiens
uaaaccaauuuaauuguauguuuucaggcugu

SEQ ID NO: 169459 - RNA, 32 nt, Homo Sapiens
cucagaggggagaggggcuggccuggcaugac

SEQ ID NO: 169460 - RNA, 32 nt, Homo Sapiens
auugagcugcaccugccccuguaccuguuggu

SEQ ID NO: 169461 - RNA, 32 nt, Homo Sapiens
cuguuuuacacagaauuaucauuuucccuggc

SEQ ID NO: 169462 - RNA, 32 nt, Homo Sapiens
aguucccuggggaugggagaucgggugggugc

SEQ ID NO: 169463 - RNA, 32 nt, Homo Sapiens
acuuguuuuggauggcuugucuauacuccuuc

SEQ ID NO: 169464 - RNA, 32 nt, Homo Sapiens
guccuucuauaauagaguuuccagucauuguu

SEQ ID NO: 169465 - RNA, 32 nt, Homo Sapiens
caccuaaggacugccugcuuucuggucacaug

SEQ ID NO: 169466 - RNA, 32 nt, Homo Sapiens
aguaaauuuaauuuacagaaaucaaugguagc

SEQ ID NO: 169467 - RNA, 32 nt, Homo Sapiens
auuuaugcuuuugucuuuuuuaugaaauauuu

SEQ ID NO: 169468 - RNA, 31 nt, Homo Sapiens
agaguuuuuaacaugaaucguuguuaaauug

SEQ ID NO: 169469 - RNA, 32 nt, Homo Sapiens
ccguacuuuucucugaaaggaaucuugucuug

SEQ ID NO: 169470 - RNA, 32 nt, Homo Sapiens
gacaggcaggugaucugcugcagagcaguaag

SEQ ID NO: 169471 - RNA, 32 nt, Homo Sapiens
uugagggaaggggagaugugugcaacaccuuc

SEQ ID NO: 169472 - RNA, 32 nt, Homo Sapiens
ccgucgcgcuggacagcuuaccuagucuugua

SEQ ID NO: 169473 - RNA, 32 nt, Homo Sapiens
ucgcuacauucugauggccuagcuguguggag

SEQ ID NO: 169474 - RNA, 32 nt, Homo Sapiens
gggggccggggccuaggcgcgcggaccugcga

SEQ ID NO: 169475 - RNA, 32 nt, Homo Sapiens
uguggaggguuuguguaugaugagaagcccug

SEQ ID NO: 169476 - RNA, 32 nt, Homo Sapiens
aaccugcaagguggaagugaccuguucaaaua

SEQ ID NO: 169477 - RNA, 32 nt, Homo Sapiens
ucuguugagggccgacugcugcucugccuucc

SEQ ID NO: 169478 - RNA, 31 nt, Homo Sapiens
cauguaccguggccugguauaugauagagau

SEQ ID NO: 169479 - RNA, 32 nt, Homo Sapiens
acaaggucaggagauugagaccauccuggcua

SEQ ID NO: 169480 - RNA, 32 nt, Homo Sapiens
agcagacuauaaaacaauguggcuguucugaa

SEQ ID NO: 169481 - RNA, 32 nt, Homo Sapiens
aaacaacaacaaaaacaaaaaaugugcuguuc

SEQ ID NO: 169482 - RNA, 32 nt, Homo Sapiens
augucgaugguugagauauuuauuuuccauau

SEQ ID NO: 169483 - RNA, 32 nt, Homo Sapiens
gugcuuaaauuaccucuuaccugguucauccc

SEQ ID NO: 169484 - RNA, 32 nt, Homo Sapiens
gcaccauaggcuccgcggggccccacgugguu

SEQ ID NO: 169485 - RNA, 32 nt, Homo Sapiens
ugauuucuuguccaaugauccuugcguggccg

SEQ ID NO: 169486 - RNA, 32 nt, Homo Sapiens
cgccaguguuugcggucaaggauuaaaggcgc

SEQ ID NO: 169487 - RNA, 32 nt, Homo Sapiens
aagaccuguaccugggguugcaggggcuccug

SEQ ID NO: 169488 - RNA, 32 nt, Homo Sapiens
guguguggagguggcgggaggggucagugacu

SEQ ID NO: 169489 - RNA, 32 nt, Homo Sapiens
auggcuucugccauugguucucuucccccagc

SEQ ID NO: 169490 - RNA, 32 nt, Homo Sapiens
auauucucacacauuucuuuuuucucuacaga

SEQ ID NO: 169491 - RNA, 32 nt, Homo Sapiens
cgcaauaaaaagauuacaucuaagugagagaa

SEQ ID NO: 169492 - RNA, 32 nt, Homo Sapiens
uaauuuuucucaccacccugaccuaucuccug

SEQ ID NO: 169493 - RNA, 32 nt, Homo Sapiens
guggaaagagccuuacuaauaaaauugauuuu

SEQ ID NO: 169494 - RNA, 32 nt, Homo Sapiens
gaguguuaaucuuuucugugacuaaauagcaa

SEQ ID NO: 169495 - RNA, 32 nt, Homo Sapiens
ccagccccccaggcugcccagagcugcugguc

SEQ ID NO: 169496 - RNA, 32 nt, Homo Sapiens
ccacaucaucuuuuuucuuaauauuucauguu

SEQ ID NO: 169497 - RNA, 32 nt, Homo Sapiens
ugaccugccaccucugcuuccacaccggagcc

SEQ ID NO: 169498 - RNA, 32 nt, Homo Sapiens
agaagaauuuuuguuuuaaaucuuauuuuucc

SEQ ID NO: 169499 - RNA, 32 nt, Homo Sapiens
ggcccugugggcaagggcugggcucuuggagg

SEQ ID NO: 169500 - RNA, 32 nt, Homo Sapiens
gugcuccugcuccucagcucuccaccccaggu

SEQ ID NO: 169501 - RNA, 32 nt, Homo Sapiens
ucaacugcccguuuccucucccucagaauuug

SEQ ID NO: 169502 - RNA, 32 nt, Homo Sapiens
agaaucaaacuccacaaugacaaccuauuugg

SEQ ID NO: 169503 - RNA, 32 nt, Homo Sapiens
uauguguucauuuaguucauucauuauaacug

SEQ ID NO: 169504 - RNA, 32 nt, Homo Sapiens
auuuuuauuuuuauuuuuuuuauuauuaaaug

SEQ ID NO: 169505 - RNA, 32 nt, Homo Sapiens
uuccugcaccucccaggaccgccccucccuga

SEQ ID NO: 169506 - RNA, 32 nt, Homo Sapiens
ugguucugcuucaaggcuuccacugcaaaaca

SEQ ID NO: 169507 - RNA, 32 nt, Homo Sapiens
gaccaagcgagguggaccccgaaacggacggc

SEQ ID NO: 169508 - RNA, 32 nt, Homo Sapiens
gggccuuccgccucccuuggauggggucaaga

SEQ ID NO: 169509 - RNA, 32 nt, Homo Sapiens
gcgggacgggacggagcgaugucgggccgagg

SEQ ID NO: 169510 - RNA, 32 nt, Homo Sapiens
ugcugugguguuggguggcuccuaucuauucc

SEQ ID NO: 169511 - RNA, 32 nt, Homo Sapiens
ggaugcuauuugcauguguccccaggugaugu

SEQ ID NO: 169512 - RNA, 32 nt, Homo Sapiens
agagccacgggaagagccuccugagcaauguc

SEQ ID NO: 169513 - RNA, 32 nt, Homo Sapiens
ugucgcugaugaugaugaugagaagcucuucu

SEQ ID NO: 169514 - RNA, 32 nt, Homo Sapiens
aagagggcugagagggucugguccuggcccag

SEQ ID NO: 169515 - RNA, 32 nt, Homo Sapiens
ugcagaguccccaagaaccaacuuuuacugag

SEQ ID NO: 169516 - RNA, 32 nt, Homo Sapiens
uccccacuguucuggagggaaggggaaggagg

SEQ ID NO: 169517 - RNA, 32 nt, Homo Sapiens
uuuccugaauuggacauguguuugcaaacacu

SEQ ID NO: 169518 - RNA, 32 nt, Homo Sapiens
gaugccucuggcaaccuguccaggcccagcuc

SEQ ID NO: 169519 - RNA, 32 nt, Homo Sapiens
gugucucgugagguccaggagcuccccaagau

SEQ ID NO: 169520 - RNA, 28 nt, Homo Sapiens
ugcugagagaggcccaggaugguggagg

SEQ ID NO: 169521 - RNA, 32 nt, Homo Sapiens
gcagguuccccuacaucuuuggcacccaacac

SEQ ID NO: 169522 - RNA, 32 nt, Homo Sapiens
guuccagaaugaauuuaguuuaauugcuuugc

SEQ ID NO: 169523 - RNA, 31 nt, Homo Sapiens
uggcguuucaggggagccugaguugaaggca

SEQ ID NO: 169524 - RNA, 31 nt, Homo Sapiens
ggcuucauguccacaaucacauucaaagaca

SEQ ID NO: 169525 - RNA, 32 nt, Homo Sapiens
cuuuccuuucaagucagucuuuuuauuuuaaa

SEQ ID NO: 169526 - RNA, 32 nt, Homo Sapiens
caguucucucuaucucaggaaugaaagaguug

SEQ ID NO: 169527 - RNA, 32 nt, Homo Sapiens
uuggguuuccgcucugggcucuggcaaguuga

SEQ ID NO: 169528 - RNA, 32 nt, Homo Sapiens
agcaugcggaggaggcccugccggccccgcgg

SEQ ID NO: 169529 - RNA, 32 nt, Homo Sapiens
uuucuucauuuucugugauuuaaccauguucu

SEQ ID NO: 169530 - RNA, 32 nt, Homo Sapiens
agaacaagaaugccucgacuaagugaaauuga

SEQ ID NO: 169531 - RNA, 32 nt, Homo Sapiens
uguucaucaaggauauugaccugaaguuuccu

SEQ ID NO: 169532 - RNA, 32 nt, Homo Sapiens
cuugaaauaauaaccuaugaaacaucaagagc

SEQ ID NO: 169533 - RNA, 32 nt, Homo Sapiens
uuuucacuuccacuguuccugcccuguccagg

SEQ ID NO: 169534 - RNA, 32 nt, Homo Sapiens
ugaccucaggguggucugacccuucccucggu

SEQ ID NO: 169535 - RNA, 32 nt, Homo Sapiens
gguuuccccuucuccuucccgcucccagcccu

SEQ ID NO: 169536 - RNA, 32 nt, Homo Sapiens
gcauaauauagaauauaaaguuaaguuaacau

SEQ ID NO: 169537 - RNA, 32 nt, Homo Sapiens
ugccgccgcccggcugcugaucgccgcaccac

SEQ ID NO: 169538 - RNA, 32 nt, Homo Sapiens
cuuuuccguggcgccucggaggcguucagcug

SEQ ID NO: 169539 - RNA, 32 nt, Homo Sapiens
auuugucagaauuaagugacucaaagugcuau

SEQ ID NO: 169540 - RNA, 32 nt, Homo Sapiens
acaacugcaauaauacucugaauucaucuuuc

SEQ ID NO: 169541 - RNA, 32 nt, Homo Sapiens
ggcuugaacuucagcaccacccugcccccaug

SEQ ID NO: 169542 - RNA, 32 nt, Homo Sapiens
gagcuucucuucuuggcaucugaaacaggcac

SEQ ID NO: 169543 - RNA, 32 nt, Homo Sapiens
gcgugcagggccucugcagauaaaugugcagg

SEQ ID NO: 169544 - RNA, 32 nt, Homo Sapiens
cuggaaacacugggacuuaaccauggaaaccc

SEQ ID NO: 169545 - RNA, 32 nt, Homo Sapiens
gcggugagggugggcgggaggccucaggggau

SEQ ID NO: 169546 - RNA, 32 nt, Homo Sapiens
agucuccuggaaauaggucuguccacuccugg

SEQ ID NO: 169547 - RNA, 32 nt, Homo Sapiens
agagaaacuaaaucuugcuguugaacaauuau

SEQ ID NO: 169548 - RNA, 32 nt, Homo Sapiens
acgcccggcuccuccgcacccccucccccggg

SEQ ID NO: 169549 - RNA, 32 nt, Homo Sapiens
uuugaggcugggugcaguggcucacgcuuaua

SEQ ID NO: 169550 - RNA, 32 nt, Homo Sapiens
aacaacugacuucauaccccugccucacgaaa

SEQ ID NO: 169551 - RNA, 32 nt, Homo Sapiens
ucucaggagaaugugacauggggacucuuacc

SEQ ID NO: 169552 - RNA, 32 nt, Homo Sapiens
aauuguuccagcauuccaauggucuugugcau

SEQ ID NO: 169553 - RNA, 32 nt, Homo Sapiens
ucauguugaagaagauguaagaaugugucaag

SEQ ID NO: 169554 - RNA, 32 nt, Homo Sapiens
ccucagccugcgccugagcugcaugcgccacc

SEQ ID NO: 169555 - RNA, 32 nt, Homo Sapiens
augcccauaaagaaggaaugggcuuggugagc

SEQ ID NO: 169556 - RNA, 32 nt, Homo Sapiens
acugugauucagaaaauguucuguuugcugug

SEQ ID NO: 169557 - RNA, 32 nt, Homo Sapiens
cggaucuccagaugugccagucucgagucuau

SEQ ID NO: 169558 - RNA, 31 nt, Homo Sapiens
auaacuuauugagcacuuuuaguagugauaa

SEQ ID NO: 169559 - RNA, 32 nt, Homo Sapiens
ccagggacccccagcccccucccguugcccug

SEQ ID NO: 169560 - RNA, 32 nt, Homo Sapiens
cccagcuuacagaugcagaaagcgagacguuc

SEQ ID NO: 169561 - RNA, 32 nt, Homo Sapiens
cuugugcugagacucugggacccaggcagcug

SEQ ID NO: 169562 - RNA, 32 nt, Homo Sapiens
agaacaaaauuaacaggaaacgucacuuucac

SEQ ID NO: 169563 - RNA, 32 nt, Homo Sapiens
cuggcaggcucguuuuaccugauucuagaaua

SEQ ID NO: 169564 - RNA, 32 nt, Homo Sapiens
caaaguuugugauuuuaagaaauucugcugug

SEQ ID NO: 169565 - RNA, 32 nt, Homo Sapiens
ggcacgaggcgcgagugaaggaagacgaagug

SEQ ID NO: 169566 - RNA, 32 nt, Homo Sapiens
agauggagaaagugagaaauuaucaaagcuau

SEQ ID NO: 169567 - RNA, 32 nt, Homo Sapiens
gcggacccgcggccccucgggaaagcgcaguc

SEQ ID NO: 169568 - RNA, 32 nt, Homo Sapiens
gaagggcgacucucaccucucaugugcuucug

SEQ ID NO: 169569 - RNA, 32 nt, Homo Sapiens
gaaaacauccauauuaaaaugucuaaacaggg

SEQ ID NO: 169570 - RNA, 32 nt, Homo Sapiens
gagauggaucacauauuuuauuaagaacucaa

SEQ ID NO: 169571 - RNA, 32 nt, Homo Sapiens
cacugcacuccagccuggguggcagagcaaca

SEQ ID NO: 169572 - RNA, 32 nt, Homo Sapiens
augcucgugcgcgcagcgcgccccacugcauc

SEQ ID NO: 169573 - RNA, 32 nt, Homo Sapiens
ggacagaggaagaccugauggggucuccuauu

SEQ ID NO: 169574 - RNA, 32 nt, Homo Sapiens
cuggcuccgggcccuuuguccuggauacacug

SEQ ID NO: 169575 - RNA, 32 nt, Homo Sapiens
caguaaaaggauuuaaguugcacugacaaaaa

SEQ ID NO: 169576 - RNA, 32 nt, Homo Sapiens
ugaauguuaccuuuucuuucugacagauuuua

SEQ ID NO: 169577 - RNA, 32 nt, Homo Sapiens
ccucuaguucccucauuccccgcgcccuuccc

SEQ ID NO: 169578 - RNA, 32 nt, Homo Sapiens
agacaccuugcagcugccgccgccgccaccga

SEQ ID NO: 169579 - RNA, 31 nt, Homo Sapiens
uuaaugaaauaaaaaacaugauacagaauau

SEQ ID NO: 169580 - RNA, 32 nt, Homo Sapiens
uuccggguagugcuccacgggcacgagccgcg

SEQ ID NO: 169581 - RNA, 32 nt, Homo Sapiens
ugcgacugggagcgggacccaggcgugcagca

SEQ ID NO: 169582 - RNA, 32 nt, Homo Sapiens
gccuuggcuucaggaaaggagcauucagacgc

SEQ ID NO: 169583 - RNA, 32 nt, Homo Sapiens
uaaguuccaguuugcuaagaaaaugaacaguu

SEQ ID NO: 169584 - RNA, 32 nt, Homo Sapiens
uuccugagcccccacauucucuaggagaaacu

SEQ ID NO: 169585 - RNA, 32 nt, Homo Sapiens
acagccucaauccugguccucuggaugcucca

SEQ ID NO: 169586 - RNA, 32 nt, Homo Sapiens
ccucccgcaggcucugcccccgggcuccggug

SEQ ID NO: 169587 - RNA, 32 nt, Homo Sapiens
uuuguuuguuuuuauuguuuuugcuaaaccug

SEQ ID NO: 169588 - RNA, 32 nt, Homo Sapiens
acagauagugggcaaagaaaaauuccacuguu

SEQ ID NO: 169589 - RNA, 32 nt, Homo Sapiens
ccgcuguuccgcggcagcggcgagacaugagg

SEQ ID NO: 169590 - RNA, 32 nt, Homo Sapiens
gaauuagauuuuacugcuugucauuuuguuau

SEQ ID NO: 169591 - RNA, 32 nt, Homo Sapiens
auugcaacaaaguggcaaaagcuaaaaguaag

SEQ ID NO: 169592 - RNA, 32 nt, Homo Sapiens
gaugggcaccugauacucugucuaaauacguu

SEQ ID NO: 169593 - RNA, 32 nt, Homo Sapiens
ggcagcuugggcccgagcccaagcauuuggcu

SEQ ID NO: 169594 - RNA, 28 nt, Homo Sapiens
gcagggcgccggccgccgagccgucuca

SEQ ID NO: 169595 - RNA, 32 nt, Homo Sapiens
acuuuuugauucauacagggauuucuuauguc

SEQ ID NO: 169596 - RNA, 32 nt, Homo Sapiens
uaauuccaguguuuugggagacuaaggcaaga

SEQ ID NO: 169597 - RNA, 32 nt, Homo Sapiens
ggugauuugugauugcgccaccacugcacucc

SEQ ID NO: 169598 - RNA, 32 nt, Homo Sapiens
uuuucauggucuuuuuaauguuuucuguuguu

SEQ ID NO: 169599 - RNA, 32 nt, Homo Sapiens
gacggggcagagcugagucggcugggcagggc

SEQ ID NO: 169600 - RNA, 32 nt, Homo Sapiens
aguuuaaaagggaaccaacaaaacacuauaac

SEQ ID NO: 169601 - RNA, 32 nt, Homo Sapiens
ugcucaagacggugaaaauugugugcugcuua

SEQ ID NO: 169602 - RNA, 32 nt, Homo Sapiens
gccuggcacccggcugggcgccucaagaccgu

SEQ ID NO: 169603 - RNA, 32 nt, Homo Sapiens
cuucuacauuuauauuuuuaaucuucuguuaa

SEQ ID NO: 169604 - RNA, 32 nt, Homo Sapiens
agcuggacaugguggcacgugccuguaauccc

SEQ ID NO: 169605 - RNA, 32 nt, Homo Sapiens
aagccgggagcuggggcgccggaguccacgca

SEQ ID NO: 169606 - RNA, 32 nt, Homo Sapiens
ggugggaaagcugcaggcccaggccuugcuuc

SEQ ID NO: 169607 - RNA, 32 nt, Homo Sapiens
ggaggauccacucccaggaugacgugcuccgu

SEQ ID NO: 169608 - RNA, 32 nt, Homo Sapiens
gagaagcccccucucccugguccucuccuacc

SEQ ID NO: 169609 - RNA, 32 nt, Homo Sapiens
aauuguguaugaccauuaauguaugucauaaa

SEQ ID NO: 169610 - RNA, 32 nt, Homo Sapiens
aaaugagaaagaugaagaaacuuaugagaccu

SEQ ID NO: 169611 - RNA, 32 nt, Homo Sapiens
ggcguugagcugggcgggaagggugagccccu

SEQ ID NO: 169612 - RNA, 32 nt, Homo Sapiens
ggagcccuagguuuccucuccagccaacgggg

SEQ ID NO: 169613 - RNA, 32 nt, Homo Sapiens
ugugcccaacccugcgacuagcaaggcucgca

SEQ ID NO: 169614 - RNA, 32 nt, Homo Sapiens
aaaaacaacaaauggaguugugcuauguugua

SEQ ID NO: 169615 - RNA, 32 nt, Homo Sapiens
ggcaggaggcuggggaugggggugggauauga

SEQ ID NO: 169616 - RNA, 32 nt, Homo Sapiens
uccugucuuucuuuccucucccaccacgcuac

SEQ ID NO: 169617 - RNA, 32 nt, Homo Sapiens
guaugguauccaucuaucucuguucuauugaa

SEQ ID NO: 169618 - RNA, 32 nt, Homo Sapiens
aagacagggcagcccggcgccacccgcucggc

SEQ ID NO: 169619 - RNA, 32 nt, Homo Sapiens
gcccuuuccuuccuggaagccagaagccucaa

SEQ ID NO: 169620 - RNA, 26 nt, Homo Sapiens
aaugccguuugcugaagacaagaccu

SEQ ID NO: 169621 - RNA, 32 nt, Homo Sapiens
uuuggcugguggccaaggagcagcgaguggcc

SEQ ID NO: 169622 - RNA, 32 nt, Homo Sapiens
cucaggggacucuggaacaccauggacccugg

SEQ ID NO: 169623 - RNA, 32 nt, Homo Sapiens
uaaacuauggaaaaguuuuucauagcauuuuu

SEQ ID NO: 169624 - RNA, 32 nt, Homo Sapiens
ugagagaagauaaaaacauuuugguugcauau

SEQ ID NO: 169625 - RNA, 32 nt, Homo Sapiens
aaaauguacauacuauguucaugauaguguga

SEQ ID NO: 169626 - RNA, 32 nt, Homo Sapiens
uguacuuguucuauacaauaaaacagauacuu

SEQ ID NO: 169627 - RNA, 32 nt, Homo Sapiens
acaggagcugucuggagcuccaccuuugcaaa

SEQ ID NO: 169628 - RNA, 32 nt, Homo Sapiens
ugcacuacugaaguuuaaaucuguggcacaau

SEQ ID NO: 169629 - RNA, 32 nt, Homo Sapiens
augacccuuucuguauauucaaacccaagcua

SEQ ID NO: 169630 - RNA, 32 nt, Homo Sapiens
uauauauucuaccacuagcccuggucauagga

SEQ ID NO: 169631 - RNA, 32 nt, Homo Sapiens
gagugggggaggagcaguccgaggggaacgug

SEQ ID NO: 169632 - RNA, 32 nt, Homo Sapiens
aauuucucagaauaaugacaaguuuucguauu

SEQ ID NO: 169633 - RNA, 32 nt, Homo Sapiens
aaaccgauggaccgucaagcuccccaggagcc

SEQ ID NO: 169634 - RNA, 32 nt, Homo Sapiens
ugccugcaugacccuccggcggcgcggggaga

SEQ ID NO: 169635 - RNA, 32 nt, Homo Sapiens
gucuuugucucccuguauccaaacgaggcauu

SEQ ID NO: 169636 - RNA, 32 nt, Homo Sapiens
ccaaccccagcccuggguagccugcagcaugg

SEQ ID NO: 169637 - RNA, 32 nt, Homo Sapiens
gcauuccaggcggaagaucaagcaaaggcaga

SEQ ID NO: 169638 - RNA, 32 nt, Homo Sapiens
agaagaauuaggaaaacugaaaguuuguuuau

SEQ ID NO: 169639 - RNA, 32 nt, Homo Sapiens
auccaggguccuggcuucagcuucucgggugu

SEQ ID NO: 169640 - RNA, 32 nt, Homo Sapiens
gaugacauuucaacaugagauuugugggggac

SEQ ID NO: 169641 - RNA, 32 nt, Homo Sapiens
ccccagggcgccgaggucugccugcagcgccu

SEQ ID NO: 169642 - RNA, 32 nt, Homo Sapiens
uggaccagugagaggagagggcuggggcgcuc

SEQ ID NO: 169643 - RNA, 32 nt, Homo Sapiens
guuuggucaacuuaauucuuguccuccgacca

SEQ ID NO: 169644 - RNA, 32 nt, Homo Sapiens
agcaucgccccucugcgcgccccuccccgucu

SEQ ID NO: 169645 - RNA, 32 nt, Homo Sapiens
uuguaaguuuccugaggccuccccaguccugc

SEQ ID NO: 169646 - RNA, 32 nt, Homo Sapiens
gcagaaaggggagaggacacaggagccugggg

SEQ ID NO: 169647 - RNA, 32 nt, Homo Sapiens
gagcauccagccgcuggagcugcgagggaccc

SEQ ID NO: 169648 - RNA, 32 nt, Homo Sapiens
aagauuuugaaaguacauaauauuuuauacuu

SEQ ID NO: 169649 - RNA, 32 nt, Homo Sapiens
uacaguuaacugaagaagaauuuuaaagacga

SEQ ID NO: 169650 - RNA, 32 nt, Homo Sapiens
uguaaauguagaugaaguucuuucauacuggc

SEQ ID NO: 169651 - RNA, 32 nt, Homo Sapiens
uuuggcuacaauuuauauugaguuauaucugu

SEQ ID NO: 169652 - RNA, 32 nt, Homo Sapiens
acaaacaggucuuuuucucuuuucucugaugu

SEQ ID NO: 169653 - RNA, 32 nt, Homo Sapiens
ggacaagcuccucccccuguaauaccuccucc

SEQ ID NO: 169654 - RNA, 32 nt, Homo Sapiens
gagcagacccucgcccagcaguuaccgccguc

SEQ ID NO: 169655 - RNA, 32 nt, Homo Sapiens
guuauuauaaaacuuaccuagcuccugaauuc

SEQ ID NO: 169656 - RNA, 29 nt, Homo Sapiens
cgcuaugugacuugcgcuuaauccaauau

SEQ ID NO: 169657 - RNA, 32 nt, Homo Sapiens
auagccacauauaauauuauuccaaagucaug

SEQ ID NO: 169658 - RNA, 32 nt, Homo Sapiens
ggaagcugagagauccucugcaggaggggauu

SEQ ID NO: 169659 - RNA, 32 nt, Homo Sapiens
gccaugcccccucuccugcaccucccuggccc

SEQ ID NO: 169660 - RNA, 32 nt, Homo Sapiens
ccaggagagcaggaacagaacagagaaaugcc

SEQ ID NO: 169661 - RNA, 32 nt, Homo Sapiens
auggugcaggcaggcgcugagaaggacgcgca

SEQ ID NO: 169662 - RNA, 32 nt, Homo Sapiens
ugccucgugucuaucauccuguaccgugccau

SEQ ID NO: 169663 - RNA, 32 nt, Homo Sapiens
ggcggaggugagccggccgcccgcccgcagac

SEQ ID NO: 169664 - RNA, 32 nt, Homo Sapiens
gggaaugcaaaggcuuugggggugauggaaaa

SEQ ID NO: 169665 - RNA, 32 nt, Homo Sapiens
cugcucagcguuggugguggcgguggcagcau

SEQ ID NO: 169666 - RNA, 32 nt, Homo Sapiens
agucauacuggggugcgagagaggugggcagc

SEQ ID NO: 169667 - RNA, 32 nt, Homo Sapiens
gggaauuacauccuuuuuccucuccuacaaaa

SEQ ID NO: 169668 - RNA, 32 nt, Homo Sapiens
ccguguguggugauccauggggugcugcaggc

SEQ ID NO: 169669 - RNA, 32 nt, Homo Sapiens
agaguuaacaaggauguauuuugugaguuucu

SEQ ID NO: 169670 - RNA, 32 nt, Homo Sapiens
gugcuuugugggggaaaauaugcaucuguaaa

SEQ ID NO: 169671 - RNA, 32 nt, Homo Sapiens
gccugacccuagcugcugcugcugcucacuuu

SEQ ID NO: 169672 - RNA, 32 nt, Homo Sapiens
cuagagguucaaaguuagaauaugccacuaac

SEQ ID NO: 169673 - RNA, 32 nt, Homo Sapiens
cugggugaguggcauccaggugagugauauca

SEQ ID NO: 169674 - RNA, 32 nt, Homo Sapiens
uuguuuguuucauuugccuuggagccaaaguu

SEQ ID NO: 169675 - RNA, 32 nt, Homo Sapiens
caggguuguuguuguuuuuuuaguuucuccuu

SEQ ID NO: 169676 - RNA, 32 nt, Homo Sapiens
cacaaaauuuucugcuaaaugacuccacacuc

SEQ ID NO: 169677 - RNA, 31 nt, Homo Sapiens
ccauggacuuagggggaccaggcaagaacuc

SEQ ID NO: 169678 - RNA, 32 nt, Homo Sapiens
uggaagagcaagaaaagagaaaauauuaaaac

SEQ ID NO: 169679 - RNA, 32 nt, Homo Sapiens
ggggagccucagaggggacaaaaccucugccu

SEQ ID NO: 169680 - RNA, 32 nt, Homo Sapiens
uguacccgauaagcugcagguuaucccuugcu

SEQ ID NO: 169681 - RNA, 32 nt, Homo Sapiens
gggcuucaugcauuauggaucccgacccccac

SEQ ID NO: 169682 - RNA, 32 nt, Homo Sapiens
ugaguguuucaggaagaagagagcagguagaa

SEQ ID NO: 169683 - RNA, 32 nt, Homo Sapiens
ucaagucauccccucuucuccucaggaacugc

SEQ ID NO: 169684 - RNA, 32 nt, Homo Sapiens
acaguggcccugcagcccccagcccuccccac

SEQ ID NO: 169685 - RNA, 32 nt, Homo Sapiens
ugcacugcucacacccccaccugcauuuugaa

SEQ ID NO: 169686 - RNA, 30 nt, Homo Sapiens
uguucacugcuaauaggguaauacagaggu

SEQ ID NO: 169687 - RNA, 32 nt, Homo Sapiens
caacuaauauaaaauaccauuguuaaagaaug

SEQ ID NO: 169688 - RNA, 32 nt, Homo Sapiens
augggucaaauuuguaaaucuguacaauggaa

SEQ ID NO: 169689 - RNA, 32 nt, Homo Sapiens
ccugggcggcucuggaggcccagggcaggggu

SEQ ID NO: 169690 - RNA, 32 nt, Homo Sapiens
uauauugggucgucugcuucccuuguauuuuu

SEQ ID NO: 169691 - RNA, 32 nt, Homo Sapiens
guggaaaaaauauuuuaaacuacugauugaau

SEQ ID NO: 169692 - RNA, 32 nt, Homo Sapiens
caugggaugaugucuguaacaucagauauugu

SEQ ID NO: 169693 - RNA, 32 nt, Homo Sapiens
uacauguaugccgguccuacucacgcgacacc

SEQ ID NO: 169694 - RNA, 32 nt, Homo Sapiens
uagggagagcaggcagcuggguccugggcugg

SEQ ID NO: 169695 - RNA, 32 nt, Homo Sapiens
accagggaccccacaagagagcuuggggaggg

SEQ ID NO: 169696 - RNA, 32 nt, Homo Sapiens
cugucagccccucaucuccccccacaccuccu

SEQ ID NO: 169697 - RNA, 32 nt, Homo Sapiens
auagauauuaaacuauaauuuugaagauaaaa

SEQ ID NO: 169698 - RNA, 32 nt, Homo Sapiens
cgccccuccgcgagcagggcucuggcgcccgc

SEQ ID NO: 169699 - RNA, 32 nt, Homo Sapiens
ggccccugcauaauugcguaauucuugccgcu

SEQ ID NO: 169700 - RNA, 32 nt, Homo Sapiens
ccgacggaaggggucugugucuuguauugauc

SEQ ID NO: 169701 - RNA, 32 nt, Homo Sapiens
uaggaaaacgaagcuuccacgacauaaaaguu

SEQ ID NO: 169702 - RNA, 32 nt, Homo Sapiens
uagccuggucugacuuuaggcauagcuuccag

SEQ ID NO: 169703 - RNA, 32 nt, Homo Sapiens
gcagugugucgcuucugcacaaucagagacug

SEQ ID NO: 169704 - RNA, 32 nt, Homo Sapiens
gagcggagccgcggcucgacggcggugcgcug

SEQ ID NO: 169705 - RNA, 32 nt, Homo Sapiens
uaaacuuuaugcacggacaaagggugaccuag

SEQ ID NO: 169706 - RNA, 32 nt, Homo Sapiens
ccaagacaguaucgaaaaugcauauuaaguca

SEQ ID NO: 169707 - RNA, 32 nt, Homo Sapiens
caaaguauugcuggcaaguggcgugggccuga

SEQ ID NO: 169708 - RNA, 32 nt, Homo Sapiens
ggcggggagugucccgcguggaaggcgcuggg

SEQ ID NO: 169709 - RNA, 32 nt, Homo Sapiens
auccccccaccucggccucccaaaguucuggg

SEQ ID NO: 169710 - RNA, 32 nt, Homo Sapiens
guaggguaauuaguaacauguguuaaguauuu

SEQ ID NO: 169711 - RNA, 32 nt, Homo Sapiens
ugagcugugauccgccauuacacuccagccug

SEQ ID NO: 169712 - RNA, 32 nt, Homo Sapiens
accuguaaucccaacaguucgggaggcagagu

SEQ ID NO: 169713 - RNA, 31 nt, Homo Sapiens
ugauuuuugugcuuagcaguuuaagguauau

SEQ ID NO: 169714 - RNA, 32 nt, Homo Sapiens
ccccggcaucgcgacccccgaggaccuccucu

SEQ ID NO: 169715 - RNA, 32 nt, Homo Sapiens
agaaacaaccucagugaacauuaauuaagaaa

SEQ ID NO: 169716 - RNA, 32 nt, Homo Sapiens
uuucacuauguauaaauuuuacuucaaaauaa

SEQ ID NO: 169717 - RNA, 32 nt, Homo Sapiens
aguggggcaggagggugccugauuucggggag

SEQ ID NO: 169718 - RNA, 32 nt, Homo Sapiens
augcagcucugacaccaguuuuugcuauugua

SEQ ID NO: 169719 - RNA, 32 nt, Homo Sapiens
gcccauuaccuauaaauuucucuuccacucug

SEQ ID NO: 169720 - RNA, 32 nt, Homo Sapiens
uugagagaauaaaaugucacuaccucucaucu

SEQ ID NO: 169721 - RNA, 32 nt, Homo Sapiens
gagccgggcgucuacagaccgcggccaccuuc

SEQ ID NO: 169722 - RNA, 30 nt, Homo Sapiens
auaggauggaagacaaugaaccaacucagu

SEQ ID NO: 169723 - RNA, 32 nt, Homo Sapiens
agccugggccccagcucgcgggacccgacccc

SEQ ID NO: 169724 - RNA, 32 nt, Homo Sapiens
gguuucucuugauuucugaggaucucagaagu

SEQ ID NO: 169725 - RNA, 32 nt, Homo Sapiens
ucuauaccccaauaaacucaguuuggggcuuc

SEQ ID NO: 169726 - RNA, 32 nt, Homo Sapiens
aacaaucuuauucucuuaauucuuuuggcaac

SEQ ID NO: 169727 - RNA, 32 nt, Homo Sapiens
uaggacuaagacuuaaaaugugguuggaaucu

SEQ ID NO: 169728 - RNA, 32 nt, Homo Sapiens
aggagguagucacugagcuggaccuuaaacac

SEQ ID NO: 169729 - RNA, 32 nt, Homo Sapiens
auuuuuaccaacucuugcucaugagccucaaa

SEQ ID NO: 169730 - RNA, 32 nt, Homo Sapiens
cacugugguuuuaauuucaaaauauuugucau

SEQ ID NO: 169731 - RNA, 32 nt, Homo Sapiens
agccugccuuucggauccugcgggaaaagccc

SEQ ID NO: 169732 - RNA, 32 nt, Homo Sapiens
acuuccugagcgugcuuaggugucacagcugg

SEQ ID NO: 169733 - RNA, 32 nt, Homo Sapiens
gguaauucucaaaauauuuaaaacuuuuucau

SEQ ID NO: 169734 - RNA, 32 nt, Homo Sapiens
agaggagcccucuggaaagaaaaggacagacc

SEQ ID NO: 169735 - RNA, 32 nt, Homo Sapiens
ggacggggaucgccggcgggcggcaagcggag

SEQ ID NO: 169736 - RNA, 32 nt, Homo Sapiens
auauuuuucugaggcaauuaaauuuauaccac

SEQ ID NO: 169737 - RNA, 32 nt, Homo Sapiens
caaaaaggguaacaguaucugaaauuucacag

SEQ ID NO: 169738 - RNA, 32 nt, Homo Sapiens
uggcuuggccagcagaaccagccccaagccag

SEQ ID NO: 169739 - RNA, 32 nt, Homo Sapiens
ccagaaaggcuaccauuuaucaucauuauauu

SEQ ID NO: 169740 - RNA, 32 nt, Homo Sapiens
aagcugauaaaaucugcaacacuccugcuguu

SEQ ID NO: 169741 - RNA, 32 nt, Homo Sapiens
gacacauaacuauaguugaaagaauaagcaaa

SEQ ID NO: 169742 - RNA, 32 nt, Homo Sapiens
cucacaguguaaacaaagccgccuggaaguuc

SEQ ID NO: 169743 - RNA, 32 nt, Homo Sapiens
agcacucugcugguucuguuugaaauauguuc

SEQ ID NO: 169744 - RNA, 32 nt, Homo Sapiens
ucaugugagccucgugucaucuccgggguggc

SEQ ID NO: 169745 - RNA, 32 nt, Homo Sapiens
auuacauuucacaugagauuugggcagagaca

SEQ ID NO: 169746 - RNA, 30 nt, Homo Sapiens
gggaauggcuggcucacagaagcuagcugc

SEQ ID NO: 169747 - RNA, 32 nt, Homo Sapiens
gacacucagagccuggaaauggcugcucccuc

SEQ ID NO: 169748 - RNA, 32 nt, Homo Sapiens
agaacagaaaccgggaggagacuuggagucuc

SEQ ID NO: 169749 - RNA, 32 nt, Homo Sapiens
aggacauggacacccccagcccggucagaguc

SEQ ID NO: 169750 - RNA, 32 nt, Homo Sapiens
ccagcccgccucacggcccuggcggccucgcu

SEQ ID NO: 169751 - RNA, 32 nt, Homo Sapiens
aaaaccagcagugcugcuaucagauaaguaga

SEQ ID NO: 169752 - RNA, 32 nt, Homo Sapiens
gcaagugggcugcugcagcugcaugggugccu

SEQ ID NO: 169753 - RNA, 32 nt, Homo Sapiens
cagagauggggccaccccuuccuuccaggcac

SEQ ID NO: 169754 - RNA, 32 nt, Homo Sapiens
auuugugacccagaaggaaaucucugaccuca

SEQ ID NO: 169755 - RNA, 32 nt, Homo Sapiens
uuaauuauucaaaauaaacaaacaaauaaaau

SEQ ID NO: 169756 - RNA, 27 nt, Homo Sapiens
uuccuucuccucuucagcuuuuuaaaa

SEQ ID NO: 169757 - RNA, 32 nt, Homo Sapiens
acaugggagagaaacccuaugaguguaugcca

SEQ ID NO: 169758 - RNA, 32 nt, Homo Sapiens
cggacuguacagagcccugcugcggcguguua

SEQ ID NO: 169759 - RNA, 32 nt, Homo Sapiens
ucggcucggcucggcccggcccgggaggcgug

SEQ ID NO: 169760 - RNA, 32 nt, Homo Sapiens
ggcccauauuccacaagaagacaaauggagau

SEQ ID NO: 169761 - RNA, 32 nt, Homo Sapiens
cuugacaaauugagauuugcugauggaagcau

SEQ ID NO: 169762 - RNA, 32 nt, Homo Sapiens
auaagcagagaccuuccaccgggggcaggauu

SEQ ID NO: 169763 - RNA, 32 nt, Homo Sapiens
acugagcuuccacuuggguuuuaucuuguuuu

SEQ ID NO: 169764 - RNA, 32 nt, Homo Sapiens
acggacugaucagugcuuuguaaaauggacca

SEQ ID NO: 169765 - RNA, 32 nt, Homo Sapiens
ucgcuaaccuguggcugauccuugacuccucu

SEQ ID NO: 169766 - RNA, 32 nt, Homo Sapiens
gacuucuuaauggguaaggggcugcuuacuuc

SEQ ID NO: 169767 - RNA, 32 nt, Homo Sapiens
guuuccccucuauuguaauacauuauuaagug

SEQ ID NO: 169768 - RNA, 32 nt, Homo Sapiens
cgcuugagaaggaaaauucuggaucuguuauc

SEQ ID NO: 169769 - RNA, 32 nt, Homo Sapiens
gcccugggaggagccaggauccuuguuggucu

SEQ ID NO: 169770 - RNA, 32 nt, Homo Sapiens
agaggagcauauaauggagaagaggacagagg

SEQ ID NO: 169771 - RNA, 32 nt, Homo Sapiens
uauaguuuaaacaacaaaaagucuauuuaaaa

SEQ ID NO: 169772 - RNA, 32 nt, Homo Sapiens
aaacauuaaauuauaaaccuuguguauuuauc

SEQ ID NO: 169773 - RNA, 32 nt, Homo Sapiens
ggggaaauauuccaccugauaauagcccagau

SEQ ID NO: 169774 - RNA, 32 nt, Homo Sapiens
caaacucugcguggugaggcccggggaaagcc

SEQ ID NO: 169775 - RNA, 32 nt, Homo Sapiens
gagaccccauagaaccccacaaacaugauugg

SEQ ID NO: 169776 - RNA, 32 nt, Homo Sapiens
ucaugauaauuucugucccacugugucucauu

SEQ ID NO: 169777 - RNA, 32 nt, Homo Sapiens
cacaauguuuuuccuuuaaacaauucacacau

SEQ ID NO: 169778 - RNA, 32 nt, Homo Sapiens
auucauguuuuaaagguguuuauacugauuug

SEQ ID NO: 169779 - RNA, 32 nt, Homo Sapiens
aaccugcccccucuccuuucccaccaggcgug

SEQ ID NO: 169780 - RNA, 32 nt, Homo Sapiens
cuuggagauaaaaucuguaugugcaauucacc

SEQ ID NO: 169781 - RNA, 28 nt, Homo Sapiens
cggagagggcggccgugguggaggccuc

SEQ ID NO: 169782 - RNA, 32 nt, Homo Sapiens
uacagacaagguggcaucucaaccucacccaa

SEQ ID NO: 169783 - RNA, 32 nt, Homo Sapiens
aauaaguccuuguguuuccuuaauuuauuuug

SEQ ID NO: 169784 - RNA, 32 nt, Homo Sapiens
uaaaacagcugagaguuuuguuuucuucagcg

SEQ ID NO: 169785 - RNA, 32 nt, Homo Sapiens
ugcguccgcugcgccgacggugcggggcgcug

SEQ ID NO: 169786 - RNA, 32 nt, Homo Sapiens
cacccgcacucuugcgaccuucgagagcaggu

SEQ ID NO: 169787 - RNA, 32 nt, Homo Sapiens
acccagcggcgcgacccuggcccuccgggacc

SEQ ID NO: 169788 - RNA, 32 nt, Homo Sapiens
gcgguccgcuccugggacgcggucucgggggc

SEQ ID NO: 169789 - RNA, 32 nt, Homo Sapiens
ggucuaaaauuccaugauuuuguauuuaauuc

SEQ ID NO: 169790 - RNA, 29 nt, Homo Sapiens
ggagggcggacagacaggacgccugggau

SEQ ID NO: 169791 - RNA, 32 nt, Homo Sapiens
ugugagaaagcccuuucccagcccuccaccac

SEQ ID NO: 169792 - RNA, 32 nt, Homo Sapiens
uauuuuuccaaauugaaaguaaauauucaaga

SEQ ID NO: 169793 - RNA, 32 nt, Homo Sapiens
uaccccuucucaccgaggaagagcgggagaaa

SEQ ID NO: 169794 - RNA, 32 nt, Homo Sapiens
aggcagugacugcgacgcaaacaucaaaccag

SEQ ID NO: 169795 - RNA, 32 nt, Homo Sapiens
agcggcggccccacaagaagcacgccuacaag

SEQ ID NO: 169796 - RNA, 27 nt, Homo Sapiens
aagucucauuaauucuggaaaaccauc

SEQ ID NO: 169797 - RNA, 32 nt, Homo Sapiens
ucucuaucuucagguuauuaucacuuaaaaac

SEQ ID NO: 169798 - RNA, 32 nt, Homo Sapiens
cagggcaggcccggcgucugggcucugggaac

SEQ ID NO: 169799 - RNA, 32 nt, Homo Sapiens
cuguggagccccagcucugggucccuagcccg

SEQ ID NO: 169800 - RNA, 32 nt, Homo Sapiens
ucccuaagaggaucuuuaggccugaguuguga

SEQ ID NO: 169801 - RNA, 32 nt, Homo Sapiens
cagagaucaggaccagugcuucccaccaggcu

SEQ ID NO: 169802 - RNA, 32 nt, Homo Sapiens
ugccaauacuuuauuguagaaacuuuagauuu

SEQ ID NO: 169803 - RNA, 32 nt, Homo Sapiens
acccacauauuuuaaccuuuugcuccuauccc

SEQ ID NO: 169804 - RNA, 32 nt, Homo Sapiens
ugaaauuucuucauuuuucuuucuucgguuuc

SEQ ID NO: 169805 - RNA, 32 nt, Homo Sapiens
gcccaugcuguaaauggauuaucccacuugaa

SEQ ID NO: 169806 - RNA, 32 nt, Homo Sapiens
ccacagaaaauauuuccaaggcugucugugaa

SEQ ID NO: 169807 - RNA, 32 nt, Homo Sapiens
gguuucaccauguugguuaggcuggucucgaa

SEQ ID NO: 169808 - RNA, 32 nt, Homo Sapiens
gacgcucggcgcccaaaucucaucaguuuuau

SEQ ID NO: 169809 - RNA, 32 nt, Homo Sapiens
gggacggaaggcgggcccgcagcagauccugg

SEQ ID NO: 169810 - RNA, 32 nt, Homo Sapiens
cggcaaaaauacacgggaggccgucgccgaaa

SEQ ID NO: 169811 - RNA, 32 nt, Homo Sapiens
uacaguuuaguaauuuauauucaccagucacu

SEQ ID NO: 169812 - RNA, 32 nt, Homo Sapiens
accgaaaauaaauggacaagaaagaaaaagau

SEQ ID NO: 169813 - RNA, 32 nt, Homo Sapiens
ggucagugcaugugcuuuaugguguggugcau

SEQ ID NO: 169814 - RNA, 32 nt, Homo Sapiens
uaguaucugaaaauaaaaaauaaaugaaguau

SEQ ID NO: 169815 - RNA, 32 nt, Homo Sapiens
cggcuggcucugccacaccaccgcgcgccccc

SEQ ID NO: 169816 - RNA, 32 nt, Homo Sapiens
gaaguagguucauguguuuucuuagguaaagu

SEQ ID NO: 169817 - RNA, 32 nt, Homo Sapiens
ccugguccuggccacaugucuuugcuguggga

SEQ ID NO: 169818 - RNA, 32 nt, Homo Sapiens
uuaccuggaucuuuauauaguuuuguaaaaau

SEQ ID NO: 169819 - RNA, 32 nt, Homo Sapiens
cgcugccugugcugcggcgauggcccagugug

SEQ ID NO: 169820 - RNA, 32 nt, Homo Sapiens
gggcaugcgcacccuguuccagcgggggccuu

SEQ ID NO: 169821 - RNA, 32 nt, Homo Sapiens
caagauaaaacuguuuuaagauauacguguau

SEQ ID NO: 169822 - RNA, 32 nt, Homo Sapiens
uugagaccaucuaggccaacguggugaaaccc

SEQ ID NO: 169823 - RNA, 32 nt, Homo Sapiens
aagucgcagggccaguugcaggccgcugauug

SEQ ID NO: 169824 - RNA, 32 nt, Homo Sapiens
ugugggcagcacccucccccgcagcgggguag

SEQ ID NO: 169825 - RNA, 32 nt, Homo Sapiens
uuugaccuuuuggcuauaguuacauauuacag

SEQ ID NO: 169826 - RNA, 29 nt, Homo Sapiens
cagccugggcgacagagggagacuccguc

SEQ ID NO: 169827 - RNA, 29 nt, Homo Sapiens
cagccugggugacagagggagacucuguc

SEQ ID NO: 169828 - RNA, 32 nt, Homo Sapiens
uugguucuugggaaacaagaccucauucuuaa

SEQ ID NO: 169829 - RNA, 29 nt, Homo Sapiens
cagccugggggacagagcgagacuccguc

SEQ ID NO: 169830 - RNA, 32 nt, Homo Sapiens
uagauggauggaggagguggagcccagagccc

SEQ ID NO: 169831 - RNA, 32 nt, Homo Sapiens
cgagacggccccagcagcguccaccgcugucc

SEQ ID NO: 169832 - RNA, 32 nt, Homo Sapiens
uucuaggacgcacuauaugugacugugacuuu

SEQ ID NO: 169833 - RNA, 32 nt, Homo Sapiens
acauuggggaauguaucucaaauuuuuaaaua

SEQ ID NO: 169834 - RNA, 32 nt, Homo Sapiens
ggagagggaaauguggaggagggacuuacuuu

SEQ ID NO: 169835 - RNA, 32 nt, Homo Sapiens
guguaaucagcaccccauccaacuggcccgaa

SEQ ID NO: 169836 - RNA, 32 nt, Homo Sapiens
ugucugaaagagaauggccugagaaauauuuu

SEQ ID NO: 169837 - RNA, 30 nt, Homo Sapiens
cucaucugcaaaaugggggcaauaugucau

SEQ ID NO: 169838 - RNA, 32 nt, Homo Sapiens
aaaaggaggaagagaaaaaauauuuuccugcc

SEQ ID NO: 169839 - RNA, 32 nt, Homo Sapiens
aaguguauguaacuauuuuuuagaaaugccau

SEQ ID NO: 169840 - RNA, 32 nt, Homo Sapiens
uauugcccuaaaauguucacagguuccaggau

SEQ ID NO: 169841 - RNA, 32 nt, Homo Sapiens
cugcaguuagacaccauuauuuuuucuuaccu

SEQ ID NO: 169842 - RNA, 32 nt, Homo Sapiens
caggaaugugcgccagugggaagggcucucuu

SEQ ID NO: 169843 - RNA, 32 nt, Homo Sapiens
cuccugacagagcucccugccucuggcuucuc

SEQ ID NO: 169844 - RNA, 32 nt, Homo Sapiens
cagccccuggaccaugacugccaggcacggag

SEQ ID NO: 169845 - RNA, 32 nt, Homo Sapiens
uuuuggcuuccacaguuucuauguuuuauccc

SEQ ID NO: 169846 - RNA, 32 nt, Homo Sapiens
cauacgugcugcucggcuccccccgcccaccc

SEQ ID NO: 169847 - RNA, 32 nt, Homo Sapiens
aaaaauagcggagggacaaugugaacauuugu

SEQ ID NO: 169848 - RNA, 32 nt, Homo Sapiens
cggggagugagcgcggggcgcccagggcgcgu

SEQ ID NO: 169849 - RNA, 32 nt, Homo Sapiens
guuaacucagcacccaggccaagcccccgccu

SEQ ID NO: 169850 - RNA, 32 nt, Homo Sapiens
uuuaugcacuguacuguauuuuuauauugcug

SEQ ID NO: 169851 - RNA, 32 nt, Homo Sapiens
ucaggucuuuugcaacugugccucccucuguc

SEQ ID NO: 169852 - RNA, 32 nt, Homo Sapiens
aggaugggcaacuacagcugcagaccaguaca

SEQ ID NO: 169853 - RNA, 32 nt, Homo Sapiens
uaaagaaguggaaggagagauacguuguaguu

SEQ ID NO: 169854 - RNA, 32 nt, Homo Sapiens
uaguguuguguuguuuuuuuuaagcaaauuac

SEQ ID NO: 169855 - RNA, 32 nt, Homo Sapiens
caugaggaugaccuuugacaaaagaugacacu

SEQ ID NO: 169856 - RNA, 32 nt, Homo Sapiens
uggcugccacggccuccuggcuccagaggcag

SEQ ID NO: 169857 - RNA, 32 nt, Homo Sapiens
ggcggggccagacgucugggcgcgggcagccu

SEQ ID NO: 169858 - RNA, 32 nt, Homo Sapiens
cgagccugcuggccaaugguguguacgcggcu

SEQ ID NO: 169859 - RNA, 27 nt, Homo Sapiens
ugccguaauaaggucugguaugggugg

SEQ ID NO: 169860 - RNA, 32 nt, Homo Sapiens
gcaggcgugugaguggacgccauccgaagaca

SEQ ID NO: 169861 - RNA, 32 nt, Homo Sapiens
uccugcuuaccuuaacugggaauuuuaaaaag

SEQ ID NO: 169862 - RNA, 32 nt, Homo Sapiens
aauccuaagcucuggaaauauuucaugacacu

SEQ ID NO: 169863 - RNA, 32 nt, Homo Sapiens
gguaucaugucucaauuaaggcccuguaauuc

SEQ ID NO: 169864 - RNA, 32 nt, Homo Sapiens
caaagagaagagcauuggggcuggaguguucc

SEQ ID NO: 169865 - RNA, 32 nt, Homo Sapiens
ggcuucuucucgcaggucagcuccuuagagag

SEQ ID NO: 169866 - RNA, 32 nt, Homo Sapiens
aauaguaauauugcuauuuacauggaaacaaa

SEQ ID NO: 169867 - RNA, 32 nt, Homo Sapiens
uuaagcuuugaaaacaccuguuauuaaugaaa

SEQ ID NO: 169868 - RNA, 32 nt, Homo Sapiens
ggcaucccuguggccauggagcuccuggguga

SEQ ID NO: 169869 - RNA, 32 nt, Homo Sapiens
aauggcacaaaauuauuaucaaccuaacuaaa

SEQ ID NO: 169870 - RNA, 32 nt, Homo Sapiens
gggguugcuggacuuggugcguggguggucug

SEQ ID NO: 169871 - RNA, 32 nt, Homo Sapiens
aauacucugaugcuauucuccucucuuccucc

SEQ ID NO: 169872 - RNA, 32 nt, Homo Sapiens
ggaugaaccuggccauccuagcaaggagcuuu

SEQ ID NO: 169873 - RNA, 31 nt, Homo Sapiens
uuauacuucugaaaacagguaauuacagauu

SEQ ID NO: 169874 - RNA, 32 nt, Homo Sapiens
caguccgcaguccggccugggcgacagagcga

SEQ ID NO: 169875 - RNA, 32 nt, Homo Sapiens
gccuuuaauugguccucaauucuuacuaaaca

SEQ ID NO: 169876 - RNA, 32 nt, Homo Sapiens
ucaagguaggcucauaaaguugugaaaagggu

SEQ ID NO: 169877 - RNA, 32 nt, Homo Sapiens
cagaaguugcuguccacagaagugcuuucuau

SEQ ID NO: 169878 - RNA, 32 nt, Homo Sapiens
ccuccccauccgcuccuacucuggacuccaau

SEQ ID NO: 169879 - RNA, 32 nt, Homo Sapiens
ugugggagcucccuucgcuguugugcagcaga

SEQ ID NO: 169880 - RNA, 32 nt, Homo Sapiens
cgcgggcuccgcgggcgguaucggagugucgu

SEQ ID NO: 169881 - RNA, 32 nt, Homo Sapiens
uuaaggacucggcauuuguccacagucagacu

SEQ ID NO: 169882 - RNA, 32 nt, Homo Sapiens
uagaaaaggaggagaagaggaaaguguucaug

SEQ ID NO: 169883 - RNA, 32 nt, Homo Sapiens
ucuaaccugugcuaaaaugagaagguaugcua

SEQ ID NO: 169884 - RNA, 32 nt, Homo Sapiens
uugaaaguguuuuucuuuaaucaaaaguccuu

SEQ ID NO: 169885 - RNA, 32 nt, Homo Sapiens
ccaucuccgacgacugggcaagagggcgccag

SEQ ID NO: 169886 - RNA, 32 nt, Homo Sapiens
ugaacccgcaucugccugccgccccgcuaugc

SEQ ID NO: 169887 - RNA, 32 nt, Homo Sapiens
ucuccaucucacuaaggguuaaaggcgugcaa

SEQ ID NO: 169888 - RNA, 30 nt, Homo Sapiens
ugaggccucucugccacccgucuuccuggu

SEQ ID NO: 169889 - RNA, 32 nt, Homo Sapiens
acucaccaguuuaguauuuucuuaguguauuu

SEQ ID NO: 169890 - RNA, 32 nt, Homo Sapiens
uguuuggagacucuguuugggagcacgggaug

SEQ ID NO: 169891 - RNA, 32 nt, Homo Sapiens
auaaauuuggaccaggggauuuuuuaguuauu

SEQ ID NO: 169892 - RNA, 32 nt, Homo Sapiens
cccagccgcgcgcgagucagacucgggugggg

SEQ ID NO: 169893 - RNA, 32 nt, Homo Sapiens
ccgggcaggggccgcuucgccaugugcugugc

SEQ ID NO: 169894 - RNA, 32 nt, Homo Sapiens
gcucugcgggcugggaggcccgggccagacgc

SEQ ID NO: 169895 - RNA, 32 nt, Homo Sapiens
uuuugcugagaaagcuuccugcccuggaagau

SEQ ID NO: 169896 - RNA, 32 nt, Homo Sapiens
ccagaagcugccagugcuuucagaugcauuga

SEQ ID NO: 169897 - RNA, 32 nt, Homo Sapiens
cugacaaaugcaggcuggauucuuauuauaua

SEQ ID NO: 169898 - RNA, 32 nt, Homo Sapiens
gcucacgguuggacuuggugucagugggaaag

SEQ ID NO: 169899 - RNA, 32 nt, Homo Sapiens
uauuaggcaacuaugauuugagugguuauuca

SEQ ID NO: 169900 - RNA, 32 nt, Homo Sapiens
cacauccuuuaauuaaaaauuguuaucuacac

SEQ ID NO: 169901 - RNA, 32 nt, Homo Sapiens
uccccucggcuggcagaagggggugacgcugg

SEQ ID NO: 169902 - RNA, 32 nt, Homo Sapiens
ucuaggcaccucaacugaggaggggaagaaag

SEQ ID NO: 169903 - RNA, 32 nt, Homo Sapiens
ggugucugugcagcugguguccccgauucugg

SEQ ID NO: 169904 - RNA, 32 nt, Homo Sapiens
ggggacaagaaggucaucgcaacgaagguuuu

SEQ ID NO: 169905 - RNA, 32 nt, Homo Sapiens
agucugggcaacagagcgauccuguuucagag

SEQ ID NO: 169906 - RNA, 32 nt, Homo Sapiens
gccggcggcgccgccuggcagcuccuccucuu

SEQ ID NO: 169907 - RNA, 32 nt, Homo Sapiens
ugcagaagcugcugcgcggaagucggccaugg

SEQ ID NO: 169908 - RNA, 32 nt, Homo Sapiens
agccaaaugcaaaggagccacuucagaaaugu

SEQ ID NO: 169909 - RNA, 32 nt, Homo Sapiens
cugcugcuccccgugcaauaccugcugggccu

SEQ ID NO: 169910 - RNA, 32 nt, Homo Sapiens
ggcccggcauggagaagcgcgcggccgcgggg

SEQ ID NO: 169911 - RNA, 32 nt, Homo Sapiens
uaacuuauuuuccagcacaugaagccaccagu

SEQ ID NO: 169912 - RNA, 32 nt, Homo Sapiens
gacgugccuucauggucugguuaugcuucaug

SEQ ID NO: 169913 - RNA, 32 nt, Homo Sapiens
cacuggggccgccuuccccaccccgcuucugg

SEQ ID NO: 169914 - RNA, 32 nt, Homo Sapiens
uccagcauucacacuugauacugcacaucagg

SEQ ID NO: 169915 - RNA, 32 nt, Homo Sapiens
aggaguggccuguuguccugcuuuagucgaca

SEQ ID NO: 169916 - RNA, 32 nt, Homo Sapiens
uugugcugaagggaagaaggaauagaaucugg

SEQ ID NO: 169917 - RNA, 32 nt, Homo Sapiens
aaaauucaaguguuuauuaaaacuaugcaaca

SEQ ID NO: 169918 - RNA, 32 nt, Homo Sapiens
agugcaucugcaugcauagcacaaguaaucca

SEQ ID NO: 169919 - RNA, 32 nt, Homo Sapiens
uuguggcagcaaagccaccucccuuccguguu

SEQ ID NO: 169920 - RNA, 32 nt, Homo Sapiens
ucuaaaaacaaauguuugugaucauguguaag

SEQ ID NO: 169921 - RNA, 32 nt, Homo Sapiens
cgaauaaaggucggccugcggguaggccggua

SEQ ID NO: 169922 - RNA, 32 nt, Homo Sapiens
ugcugaagcugagacugacuacugugcauuag

SEQ ID NO: 169923 - RNA, 32 nt, Homo Sapiens
gaacucagaguugugugugcaaugcacaccca

SEQ ID NO: 169924 - RNA, 32 nt, Homo Sapiens
ccuggccuccuuauccuucagaauauuuauuu

SEQ ID NO: 169925 - RNA, 32 nt, Homo Sapiens
acaagggaggauuuuacaacauacuugcuuua

SEQ ID NO: 169926 - RNA, 30 nt, Homo Sapiens
agaagcggcaggcggaggcgcgguccgggc

SEQ ID NO: 169927 - RNA, 32 nt, Homo Sapiens
uggcagaauauuaagaaggggguuguguggaa

SEQ ID NO: 169928 - RNA, 32 nt, Homo Sapiens
agcucucagaucucccuuagagaaagaacuuu

SEQ ID NO: 169929 - RNA, 32 nt, Homo Sapiens
caugaacacacaggcaaugauuuuaugacaac

SEQ ID NO: 169930 - RNA, 32 nt, Homo Sapiens
caugaacucaaucccugcccagguguuuucug

SEQ ID NO: 169931 - RNA, 32 nt, Homo Sapiens
ccaagucuaaaauacaccuggaucugucuagu

SEQ ID NO: 169932 - RNA, 32 nt, Homo Sapiens
uuguuucaaacacaaaugcagggauugcugcc

SEQ ID NO: 169933 - RNA, 32 nt, Homo Sapiens
gaucugagagaauggggaggccugagugggag

SEQ ID NO: 169934 - RNA, 32 nt, Homo Sapiens
acuuauuucagggucuccaauugagaaacaug

SEQ ID NO: 169935 - RNA, 32 nt, Homo Sapiens
ugacugcuccccagcccuggcucugcaauggg

SEQ ID NO: 169936 - RNA, 32 nt, Homo Sapiens
ucccucacccauccuagaggccaggcaggagc

SEQ ID NO: 169937 - RNA, 32 nt, Homo Sapiens
ugggcccuuccauuucauucucuuccugauug

SEQ ID NO: 169938 - RNA, 32 nt, Homo Sapiens
augagcggccccagucgcggcgccgggggcgc

SEQ ID NO: 169939 - RNA, 32 nt, Homo Sapiens
ggauagagaagaaaccaauuaaaaacaaaaca

SEQ ID NO: 169940 - RNA, 32 nt, Homo Sapiens
auguguucggggugggggcgucaggugagaac

SEQ ID NO: 169941 - RNA, 32 nt, Homo Sapiens
cucuaugaacuuaugaaaaccuucaguuacag

SEQ ID NO: 169942 - RNA, 32 nt, Homo Sapiens
cucucccgcgcgcucacaccccucuugcccug

SEQ ID NO: 169943 - RNA, 32 nt, Homo Sapiens
ccucgaaaugcagaacgacgccggcgaguucg

SEQ ID NO: 169944 - RNA, 32 nt, Homo Sapiens
gugcggagcgggaggaggcggcggcggccgag

SEQ ID NO: 169945 - RNA, 32 nt, Homo Sapiens
aggcuggguuccgaggcccaagcccuuggcag

SEQ ID NO: 169946 - RNA, 31 nt, Homo Sapiens
gccucguguaacaugaggcccauucuucacu

SEQ ID NO: 169947 - RNA, 32 nt, Homo Sapiens
cgccucgggggcccugucuggcgccucagcgc

SEQ ID NO: 169948 - RNA, 32 nt, Homo Sapiens
gaagccccuucucuccuuccuuuaucguggcc

SEQ ID NO: 169949 - RNA, 32 nt, Homo Sapiens
agaguccggccgcgacaggacgaacuccccca

SEQ ID NO: 169950 - RNA, 32 nt, Homo Sapiens
ucugucucaaaauaaauaaauaaauaaaaggu

SEQ ID NO: 169951 - RNA, 32 nt, Homo Sapiens
agcacaucuagugucugucaguuucuaauugg

SEQ ID NO: 169952 - RNA, 32 nt, Homo Sapiens
ggaugggauuguagcggcggcgcggacucggc

SEQ ID NO: 169953 - RNA, 32 nt, Homo Sapiens
ccuccguccauccucugccccucccccuggcu

SEQ ID NO: 169954 - RNA, 32 nt, Homo Sapiens
ugcacauguuuccucuaguucuuuguucauag

SEQ ID NO: 169955 - RNA, 32 nt, Homo Sapiens
uuuaauuagaagaaauuuggccgaaaauacaa

SEQ ID NO: 169956 - RNA, 30 nt, Homo Sapiens
aggcacagcugugcugcggcagccacgaag

SEQ ID NO: 169957 - RNA, 32 nt, Homo Sapiens
guuccuauacuuuucuuaauucuucagacuuc

SEQ ID NO: 169958 - RNA, 32 nt, Homo Sapiens
caguuaaguauuuugaucacugcauuuuguuu

SEQ ID NO: 169959 - RNA, 32 nt, Homo Sapiens
cuuugggcucugccaucugggguguggugugg

SEQ ID NO: 169960 - RNA, 32 nt, Homo Sapiens
ccaccuguccgcuggcaaccacugaucuccuu

SEQ ID NO: 169961 - RNA, 32 nt, Homo Sapiens
ugggauccggcgggcggugcuagcuccgcgcu

SEQ ID NO: 169962 - RNA, 32 nt, Homo Sapiens
uuaaguacaugcuuaaugauauauuuucaaaa

SEQ ID NO: 169963 - RNA, 32 nt, Homo Sapiens
uacugcauauauauguauagacucugacacau

SEQ ID NO: 169964 - RNA, 32 nt, Homo Sapiens
aaaggugugaacaagacugaaaaggagguccg

SEQ ID NO: 169965 - RNA, 32 nt, Homo Sapiens
auggagucccguuuggagggagcccgccuugg

SEQ ID NO: 169966 - RNA, 32 nt, Homo Sapiens
gcaacaccuacuacaucauggugcuggccugg

SEQ ID NO: 169967 - RNA, 32 nt, Homo Sapiens
agcccgguuuccuccgccccagguuaggacca

SEQ ID NO: 169968 - RNA, 32 nt, Homo Sapiens
cgggccgcaagccccaccgcuccccuccccgg

SEQ ID NO: 169969 - RNA, 32 nt, Homo Sapiens
cagaugcuggggagaaugaagagcuaaaauag

SEQ ID NO: 169970 - RNA, 32 nt, Homo Sapiens
aagaagcugcgugaggccuuugaaaaugauac

SEQ ID NO: 169971 - RNA, 32 nt, Homo Sapiens
guuaaggccagggccucuccaaccacugugcc

SEQ ID NO: 169972 - RNA, 32 nt, Homo Sapiens
accaagcacucucagccuccccgccuucagcu

SEQ ID NO: 169973 - RNA, 32 nt, Homo Sapiens
aguauagagccaacuggaggaauuaugucaaa

SEQ ID NO: 169974 - RNA, 32 nt, Homo Sapiens
accucagaaaccgaaagaaaaccaccacccuc

SEQ ID NO: 169975 - RNA, 28 nt, Homo Sapiens
ccgcuggggcggccggggcgggagagaa

SEQ ID NO: 169976 - RNA, 32 nt, Homo Sapiens
ugcgucccaggcuccgcaccccugaugcugcg

SEQ ID NO: 169977 - RNA, 32 nt, Homo Sapiens
gaggcccccagcugccuuggacuguguuuuuc

SEQ ID NO: 169978 - RNA, 32 nt, Homo Sapiens
aacugcggcggcgccgccgcaagccccggugc

SEQ ID NO: 169979 - RNA, 32 nt, Homo Sapiens
gugucuuugugauuugaguaaagcuccuauuc

SEQ ID NO: 169980 - RNA, 32 nt, Homo Sapiens
auugcugccacuuuuuaacuauuaagaggcag

SEQ ID NO: 169981 - RNA, 32 nt, Homo Sapiens
cgcugcuccgcgggggauggagaagccccgcc

SEQ ID NO: 169982 - RNA, 32 nt, Homo Sapiens
gugguggucaggagggucgcugcuguggaagg

SEQ ID NO: 169983 - RNA, 32 nt, Homo Sapiens
guaucaugaugauacuuguugugccacuguua

SEQ ID NO: 169984 - RNA, 32 nt, Homo Sapiens
cagcucccggcgggugcucugaggccucacua

SEQ ID NO: 169985 - RNA, 32 nt, Homo Sapiens
uuggaaaaaccaaaaacugcauugaaauguuu

SEQ ID NO: 169986 - RNA, 32 nt, Homo Sapiens
uauggagacaccuuugacuagcuagcaagaaa

SEQ ID NO: 169987 - RNA, 32 nt, Homo Sapiens
agcacucccagcugugugacuuuaucguugga

SEQ ID NO: 169988 - RNA, 32 nt, Homo Sapiens
ugaagaccacgcucccucccccugccuccucc

SEQ ID NO: 169989 - RNA, 32 nt, Homo Sapiens
cuucguacuuuuuaugagaaacguacggccac

SEQ ID NO: 169990 - RNA, 31 nt, Homo Sapiens
cggcugcugggguccgcaggaagccgcgcca

SEQ ID NO: 169991 - RNA, 32 nt, Homo Sapiens
acgcccgccccagggcuccccuggagcuucca

SEQ ID NO: 169992 - RNA, 32 nt, Homo Sapiens
uuaggaccgccugcccggggcaaccccgaacc

SEQ ID NO: 169993 - RNA, 32 nt, Homo Sapiens
cuggguugaaacccgggcgccgccaagaugcu

SEQ ID NO: 169994 - RNA, 32 nt, Homo Sapiens
uuaaacaugucaacauugauaauacaaugaag

SEQ ID NO: 169995 - RNA, 32 nt, Homo Sapiens
ccuauaagcacacuggauuaagggcagccaca

SEQ ID NO: 169996 - RNA, 32 nt, Homo Sapiens
ggccccagcugccccaggacccccggaagccc

SEQ ID NO: 169997 - RNA, 28 nt, Homo Sapiens
cuuuguauggcgaauuuaauaaauuaua

SEQ ID NO: 169998 - RNA, 32 nt, Homo Sapiens
uguaaaugggcgugaggugcugauguccuugc

SEQ ID NO: 169999 - RNA, 32 nt, Homo Sapiens
uuuacuaauuuguuauucccccgacuaggaug

SEQ ID NO: 170000 - RNA, 32 nt, Homo Sapiens
cuuuuaagaaggaagcaaaaagaaauucaguu

SEQ ID NO: 170001 - RNA, 32 nt, Homo Sapiens
gauugccugagcucaggaguucaagaccagcc

SEQ ID NO: 170002 - RNA, 32 nt, Homo Sapiens
cccguggcuguuccgagacgauuggugggggc

SEQ ID NO: 170003 - RNA, 30 nt, Homo Sapiens
cagguggagaagcuugacuuuucuauccuu

SEQ ID NO: 170004 - RNA, 32 nt, Homo Sapiens
cagcuccucugaaaagguuaugucuaggauuc

SEQ ID NO: 170005 - RNA, 32 nt, Homo Sapiens
aauaugaagauaauuuucagcuaauuaucugg

SEQ ID NO: 170006 - RNA, 32 nt, Homo Sapiens
uugcucugccagcagcugucggugccgcgcuc

SEQ ID NO: 170007 - RNA, 32 nt, Homo Sapiens
uucuguaagcuuacauugcuauuuguaaaguu

SEQ ID NO: 170008 - RNA, 32 nt, Homo Sapiens
cuuuuucucuuccucccugggcagaauguagc

SEQ ID NO: 170009 - RNA, 32 nt, Homo Sapiens
aaauuagcuggguguuguggugcgcaccugua

SEQ ID NO: 170010 - RNA, 32 nt, Homo Sapiens
uccagcacagagcuguucaaauuuuuaguuca

SEQ ID NO: 170011 - RNA, 32 nt, Homo Sapiens
cugcuaaugcaaauuaaaacauauuucauuuu

SEQ ID NO: 170012 - RNA, 32 nt, Homo Sapiens
cuucugggcggccaccugaggagugacuccaa

SEQ ID NO: 170013 - RNA, 32 nt, Homo Sapiens
ggcagagcggcuggcgccgccggagcgcggag

SEQ ID NO: 170014 - RNA, 32 nt, Homo Sapiens
ggugaagcaaaguggugugaaguugaagaagg

SEQ ID NO: 170015 - RNA, 32 nt, Homo Sapiens
augaagucuccacccuggcccagggucuugaa

SEQ ID NO: 170016 - RNA, 32 nt, Homo Sapiens
gucuucauguggagcccucaccacaaucccug

SEQ ID NO: 170017 - RNA, 32 nt, Homo Sapiens
uguaaagaaaaaagcaccaaagggaaggcuuc

SEQ ID NO: 170018 - RNA, 32 nt, Homo Sapiens
gucauuuuaaccucagguggcacccagggcga

SEQ ID NO: 170019 - RNA, 32 nt, Homo Sapiens
cuucauccaaaauggaggagccaggcccccgc

SEQ ID NO: 170020 - RNA, 32 nt, Homo Sapiens
gccccaagccagcaccuuugguaaauaaagca

SEQ ID NO: 170021 - RNA, 32 nt, Homo Sapiens
ucugugccaccaucggucacccauugaucggc

SEQ ID NO: 170022 - RNA, 32 nt, Homo Sapiens
ccucucccugaacucucucuugcucgggaccu

SEQ ID NO: 170023 - RNA, 30 nt, Homo Sapiens
uaugggaaagucccugccuuccacaccucu

SEQ ID NO: 170024 - RNA, 32 nt, Homo Sapiens
cagaacccacagccuccacccguggcuggcgu

SEQ ID NO: 170025 - RNA, 32 nt, Homo Sapiens
gggaaugaaaauaaagaaacauauuucuuggc

SEQ ID NO: 170026 - RNA, 32 nt, Homo Sapiens
uagagccccagcugcuggcggcugcuggaaua

SEQ ID NO: 170027 - RNA, 32 nt, Homo Sapiens
ccagccccaggaccgcagcagcagccaggugc

SEQ ID NO: 170028 - RNA, 32 nt, Homo Sapiens
cauuuauguaacauuggugaaauaauguaauu

SEQ ID NO: 170029 - RNA, 32 nt, Homo Sapiens
ucauauguuugugauagggauguugggagcac

SEQ ID NO: 170030 - RNA, 32 nt, Homo Sapiens
gauagguuugugcgcgggucccucgugcgggc

SEQ ID NO: 170031 - RNA, 32 nt, Homo Sapiens
uuuaaauagaaauuauuucaacaauuaaagua

SEQ ID NO: 170032 - RNA, 32 nt, Homo Sapiens
ggcugcacuggcggggguugugggggcugucu

SEQ ID NO: 170033 - RNA, 32 nt, Homo Sapiens
ucuauuauuaaacuacaggcuguagauuucuu

SEQ ID NO: 170034 - RNA, 32 nt, Homo Sapiens
cacauauguuuguccagagggugugcucugug

SEQ ID NO: 170035 - RNA, 32 nt, Homo Sapiens
gacagccugugcuauugagggacucagugaug

SEQ ID NO: 170036 - RNA, 32 nt, Homo Sapiens
gaucuauggcccuuggcccagccccaccuccu

SEQ ID NO: 170037 - RNA, 32 nt, Homo Sapiens
accacauugggauacauguuuugaaggagagg

SEQ ID NO: 170038 - RNA, 32 nt, Homo Sapiens
uuagcuuggugugguggcgcgcgccugugauc

SEQ ID NO: 170039 - RNA, 31 nt, Homo Sapiens
uuguauggacugcucgcuccaagggcaggca

SEQ ID NO: 170040 - RNA, 32 nt, Homo Sapiens
uuuaaggauagaaccagaggccuugaagggag

SEQ ID NO: 170041 - RNA, 32 nt, Homo Sapiens
gccuccagccccagcaguguggcccagagcag

SEQ ID NO: 170042 - RNA, 32 nt, Homo Sapiens
cuucaguuccggugcuggaaaauauguacaac

SEQ ID NO: 170043 - RNA, 32 nt, Homo Sapiens
uggcucucccccaacccuccccaccguccccc

SEQ ID NO: 170044 - RNA, 32 nt, Homo Sapiens
ucucuuuucaaaccccaaaaaacuaugccuac

SEQ ID NO: 170045 - RNA, 32 nt, Homo Sapiens
uugucugcagaagaagcaaggagugaccugcu

SEQ ID NO: 170046 - RNA, 32 nt, Homo Sapiens
aaacucaucuccuuccugaggagccgggaggc

SEQ ID NO: 170047 - RNA, 32 nt, Homo Sapiens
ggcaauagcauuaagcacaucugcgaauuauc

SEQ ID NO: 170048 - RNA, 32 nt, Homo Sapiens
gcacuuugacuucugacagcucuaccucaagc

SEQ ID NO: 170049 - RNA, 32 nt, Homo Sapiens
auuuaauucugaaauuauucaguuacggauuc

SEQ ID NO: 170050 - RNA, 32 nt, Homo Sapiens
aaaguagccaaggggacugaugguggacacuc

SEQ ID NO: 170051 - RNA, 29 nt, Homo Sapiens
gcugacguggcuuuccugaucggagggcu

SEQ ID NO: 170052 - RNA, 32 nt, Homo Sapiens
aaacuaaaacaaaaauccagugucacaugggc

SEQ ID NO: 170053 - RNA, 32 nt, Homo Sapiens
cagggauuacagaaaugagauacauuuugaag

SEQ ID NO: 170054 - RNA, 32 nt, Homo Sapiens
aucuucagagaaaaaauaaagcaagaaauacu

SEQ ID NO: 170055 - RNA, 32 nt, Homo Sapiens
aaguauuguuauaaguuuuuuaaaaacaacug

SEQ ID NO: 170056 - RNA, 32 nt, Homo Sapiens
cugugcagcugaggcgccgccguggagccgcc

SEQ ID NO: 170057 - RNA, 32 nt, Homo Sapiens
cugcugcggacccgcccucccuccgcuccugc

SEQ ID NO: 170058 - RNA, 32 nt, Homo Sapiens
ucugguagaaaguugcugcaaaaacauuugaa

SEQ ID NO: 170059 - RNA, 32 nt, Homo Sapiens
cggaagugcugggcgagcuggugcuggauggg

SEQ ID NO: 170060 - RNA, 32 nt, Homo Sapiens
cccgucguugccaucucguccucaguggcuuc

SEQ ID NO: 170061 - RNA, 32 nt, Homo Sapiens
cuguagggcgggggcgggcagggagguauuua

SEQ ID NO: 170062 - RNA, 32 nt, Homo Sapiens
uaccagaacaagaugaugaacuguauaaucca

SEQ ID NO: 170063 - RNA, 32 nt, Homo Sapiens
cacccgcaccccacccccagaccucacccugc

SEQ ID NO: 170064 - RNA, 32 nt, Homo Sapiens
ccuaauaaaaucuauuuuguuuauggucacau

SEQ ID NO: 170065 - RNA, 32 nt, Homo Sapiens
agaacacuugagaggcacuuuguaaagauuug

SEQ ID NO: 170066 - RNA, 32 nt, Homo Sapiens
ucuucagauauauuauuuuaaaggcaccacac

SEQ ID NO: 170067 - RNA, 32 nt, Homo Sapiens
gaauuggaagggggcggggcucccuggcuggg

SEQ ID NO: 170068 - RNA, 32 nt, Homo Sapiens
ccugugggaucucugguccaaggaaacaucug

SEQ ID NO: 170069 - RNA, 32 nt, Homo Sapiens
aaauaugauuaauaaaaaugugcauggcuuuc

SEQ ID NO: 170070 - RNA, 32 nt, Homo Sapiens
uuugugaaaggauaaaauauuucuguaaugau

SEQ ID NO: 170071 - RNA, 32 nt, Homo Sapiens
guuuaauauucuuuuuauuuuuuuuucuuuuc

SEQ ID NO: 170072 - RNA, 32 nt, Homo Sapiens
gugcucuggguuggcauuuaggugauaugagc

SEQ ID NO: 170073 - RNA, 32 nt, Homo Sapiens
ugauuuuaaguacauuuuuauaugucaguugc

SEQ ID NO: 170074 - RNA, 32 nt, Homo Sapiens
ucuugugccauucuugaccuuggaccugcuug

SEQ ID NO: 170075 - RNA, 32 nt, Homo Sapiens
agagagaaugaggagaucuugaucaucuuagu

SEQ ID NO: 170076 - RNA, 32 nt, Homo Sapiens
gagcgggggugcugcgcggcggccgugauggc

SEQ ID NO: 170077 - RNA, 32 nt, Homo Sapiens
uucgucgaacgugcaagucaugcugaagagaa

SEQ ID NO: 170078 - RNA, 32 nt, Homo Sapiens
ggcgcguccccgcuccucagcuccaagcugac

SEQ ID NO: 170079 - RNA, 32 nt, Homo Sapiens
aagagucucacgggagucucuuuagaugcugc

SEQ ID NO: 170080 - RNA, 32 nt, Homo Sapiens
gacuucagaccaauucuuuguauuacacuugg

SEQ ID NO: 170081 - RNA, 32 nt, Homo Sapiens
ccuucccgcuugugccagcagcugcuuuccug

SEQ ID NO: 170082 - RNA, 32 nt, Homo Sapiens
agacccggagagcccugugcggauccugaacc

SEQ ID NO: 170083 - RNA, 32 nt, Homo Sapiens
cuucgcacccuggcgcucuccucccaggucag

SEQ ID NO: 170084 - RNA, 32 nt, Homo Sapiens
gaaugaauaaaacucuccuaagaaucuccuga

SEQ ID NO: 170085 - RNA, 32 nt, Homo Sapiens
ccugauguccaugucuauauguuuacaagcaa

SEQ ID NO: 170086 - RNA, 32 nt, Homo Sapiens
gcaaggccucccucccaccgcggccccugccu

SEQ ID NO: 170087 - RNA, 32 nt, Homo Sapiens
uugggagcuuuuagaugagacaucuuuccagg

SEQ ID NO: 170088 - RNA, 32 nt, Homo Sapiens
cacacucuccagcucaauaaaccaucaguccc

SEQ ID NO: 170089 - RNA, 32 nt, Homo Sapiens
gcuugagaggggcuuugcugaggcuuccccuu

SEQ ID NO: 170090 - RNA, 32 nt, Homo Sapiens
cccucggugcugccuccgacagcgccgcgcuc

SEQ ID NO: 170091 - RNA, 32 nt, Homo Sapiens
uccugcuucaugggugguggcacgggaauaga

SEQ ID NO: 170092 - RNA, 32 nt, Homo Sapiens
gggugagcagcugcaagaagucuuuacaccuc

SEQ ID NO: 170093 - RNA, 32 nt, Homo Sapiens
aaaauuauagugaugaaauaacaaagaaaaaa

SEQ ID NO: 170094 - RNA, 32 nt, Homo Sapiens
uuuauuauuucuucuuuuccuuuuguuuucau

SEQ ID NO: 170095 - RNA, 32 nt, Homo Sapiens
ugaucauagcauauguguaguugcuccuggcc

SEQ ID NO: 170096 - RNA, 32 nt, Homo Sapiens
cugccuccguaguuaggaacugagagcggcga

SEQ ID NO: 170097 - RNA, 32 nt, Homo Sapiens
auuucuuaaaagacauuuuaauguaugguuag

SEQ ID NO: 170098 - RNA, 32 nt, Homo Sapiens
cuuaacguauguuuuacuuucauuuaauaaug

SEQ ID NO: 170099 - RNA, 32 nt, Homo Sapiens
uuaauucaacuuugaucugauauaucacuuaa

SEQ ID NO: 170100 - RNA, 32 nt, Homo Sapiens
gugaccuggaugaggagaaggggccucagcag

SEQ ID NO: 170101 - RNA, 32 nt, Homo Sapiens
ucagcucauugucaaggccacccccaccccag

SEQ ID NO: 170102 - RNA, 32 nt, Homo Sapiens
ugaaugugaaaccacagauauuucauuaaaac

SEQ ID NO: 170103 - RNA, 32 nt, Homo Sapiens
ggacggcuccagcucaggacugucugagcccc

SEQ ID NO: 170104 - RNA, 32 nt, Homo Sapiens
caaagcagugagaaaguugaggugauaaacaa

SEQ ID NO: 170105 - RNA, 32 nt, Homo Sapiens
ccugagaguccccugcaguuucuggguaacag

SEQ ID NO: 170106 - RNA, 32 nt, Homo Sapiens
caccauccagcugugcccaagaagccacccug

SEQ ID NO: 170107 - RNA, 32 nt, Homo Sapiens
cccuuggccucuaggaggaaacaguuuuuuag

SEQ ID NO: 170108 - RNA, 32 nt, Homo Sapiens
cugggaguuacuggcguuggacaggcuucagu

SEQ ID NO: 170109 - RNA, 32 nt, Homo Sapiens
aaacauuuauuacaacaauuguuuuaaaauag

SEQ ID NO: 170110 - RNA, 32 nt, Homo Sapiens
aagucuaguuuaugaggaauuguccaaguugg

SEQ ID NO: 170111 - RNA, 32 nt, Homo Sapiens
aaaaaaaagucgugccaauuauaagugcuuaa

SEQ ID NO: 170112 - RNA, 32 nt, Homo Sapiens
cucugcgcgaagcccuggccccgggggccggg

SEQ ID NO: 170113 - RNA, 32 nt, Homo Sapiens
agcuuguccgccaggcuuggaggaguuugccc

SEQ ID NO: 170114 - RNA, 32 nt, Homo Sapiens
uuguuuuuugagucuuuuuuuuuuaagugaaa

SEQ ID NO: 170115 - RNA, 32 nt, Homo Sapiens
ugaaauagaauguuaucagugaaacagaacug

SEQ ID NO: 170116 - RNA, 32 nt, Homo Sapiens
ugggucccaagcaaccucagccagugagucca

SEQ ID NO: 170117 - RNA, 32 nt, Homo Sapiens
caccaccaccgccgccgccuccaucuuacagu

SEQ ID NO: 170118 - RNA, 32 nt, Homo Sapiens
agcugcgccugccugcucggcccccagcccac

SEQ ID NO: 170119 - RNA, 32 nt, Homo Sapiens
gucugcuuugggggcucgaguccagccauggg

SEQ ID NO: 170120 - RNA, 32 nt, Homo Sapiens
ugcuuucaucccaucgcaggcaucuguccuuu

SEQ ID NO: 170121 - RNA, 32 nt, Homo Sapiens
gugccggggaggggcgggcaggucacaaaggc

SEQ ID NO: 170122 - RNA, 32 nt, Homo Sapiens
agaugccuuuugggagaggcuguagcucaggg

SEQ ID NO: 170123 - RNA, 32 nt, Homo Sapiens
ccuccuacccucaccuucuaaagagagcgugc

SEQ ID NO: 170124 - RNA, 32 nt, Homo Sapiens
aaaaacacaaacauuagcaacuaguuggcuag

SEQ ID NO: 170125 - RNA, 32 nt, Homo Sapiens
ccugcuguccucgcccucgccccggcgagcug

SEQ ID NO: 170126 - RNA, 32 nt, Homo Sapiens
agagagcagcggggugaugaucucuagcagcu

SEQ ID NO: 170127 - RNA, 32 nt, Homo Sapiens
ugagaauugggaaaacaaaauuacucccagaa

SEQ ID NO: 170128 - RNA, 32 nt, Homo Sapiens
gcccccaugcauccccacccccgccccuccgg

SEQ ID NO: 170129 - RNA, 32 nt, Homo Sapiens
ccauggagaaagggcuccagcugacacucuga

SEQ ID NO: 170130 - RNA, 32 nt, Homo Sapiens
uucucaauuuugcuguuagauaccacuaaacu

SEQ ID NO: 170131 - RNA, 32 nt, Homo Sapiens
aaguguaaccuaaauauuucuauauuaaagcu

SEQ ID NO: 170132 - RNA, 32 nt, Homo Sapiens
acuguuuugccuggcgcugcugccccacugca

SEQ ID NO: 170133 - RNA, 32 nt, Homo Sapiens
gcccugaccccgcuccuccugugccaagcgcu

SEQ ID NO: 170134 - RNA, 32 nt, Homo Sapiens
ccuccuaugcagcggcgaagggacgcccgcug

SEQ ID NO: 170135 - RNA, 32 nt, Homo Sapiens
cgcgccucaauccgggggacuuccacagugcu

SEQ ID NO: 170136 - RNA, 32 nt, Homo Sapiens
gucuguuuccacaacuaagaaagcagaggccg

SEQ ID NO: 170137 - RNA, 32 nt, Homo Sapiens
agaugccagucagcuccugggguugcgccagg

SEQ ID NO: 170138 - RNA, 32 nt, Homo Sapiens
agccgggugagacccccacaguucucaaucca

SEQ ID NO: 170139 - RNA, 32 nt, Homo Sapiens
ugucuuguuuggaaaaguggauuucauucauu

SEQ ID NO: 170140 - RNA, 32 nt, Homo Sapiens
uaaaugugaaggaaucaagucuucagacucag

SEQ ID NO: 170141 - RNA, 32 nt, Homo Sapiens
aguaagcagcaaacagaggugaccagagaugc

SEQ ID NO: 170142 - RNA, 32 nt, Homo Sapiens
uugaagaauuuauguaauuaaaauuucacuaa

SEQ ID NO: 170143 - RNA, 32 nt, Homo Sapiens
ucaaacaguacaaagaaagugguuccauauuu

SEQ ID NO: 170144 - RNA, 32 nt, Homo Sapiens
cagguuguggagguggccaugacagugguggc

SEQ ID NO: 170145 - RNA, 32 nt, Homo Sapiens
ugauggagcauuacuggcuacugcaucuuaug

SEQ ID NO: 170146 - RNA, 32 nt, Homo Sapiens
cgcaacgugcgcgcuccuugguugcagccgcu

SEQ ID NO: 170147 - RNA, 32 nt, Homo Sapiens
uauuuccuuccccacaccauugcuacucaaac

SEQ ID NO: 170148 - RNA, 31 nt, Homo Sapiens
agaagcggugcauaccucagagccuggauaa

SEQ ID NO: 170149 - RNA, 32 nt, Homo Sapiens
guucauauauccuccuuaaccacagagccuga

SEQ ID NO: 170150 - RNA, 32 nt, Homo Sapiens
agauuugcuuugauuucucuuagaaguggagc

SEQ ID NO: 170151 - RNA, 32 nt, Homo Sapiens
ccgauucuggucuccagaggaccuugguguuu

SEQ ID NO: 170152 - RNA, 32 nt, Homo Sapiens
auguauuuucuuuuauguucagaaauuuacag

SEQ ID NO: 170153 - RNA, 29 nt, Homo Sapiens
uggcggcggcgccggaggacgcggaggac

SEQ ID NO: 170154 - RNA, 32 nt, Homo Sapiens
cgcucggaacccagcagcggcgcuccuccgcg

SEQ ID NO: 170155 - RNA, 32 nt, Homo Sapiens
aucuugcucuuaaauuuuggccccaacuccag

SEQ ID NO: 170156 - RNA, 32 nt, Homo Sapiens
cugagccacgcagccccgccucuggggccgcc

SEQ ID NO: 170157 - RNA, 32 nt, Homo Sapiens
uugcuugccucccacaccucgugacaaaugcu

SEQ ID NO: 170158 - RNA, 32 nt, Homo Sapiens
auuuuagaaugugaaacuuaugcugugugccc

SEQ ID NO: 170159 - RNA, 32 nt, Homo Sapiens
cuuauauuuuuccuuacuaaucauuuuggauu

SEQ ID NO: 170160 - RNA, 32 nt, Homo Sapiens
guuguauuuuguaguuucuucuguaaauaugu

SEQ ID NO: 170161 - RNA, 32 nt, Homo Sapiens
cuacauugaggaggggggaggggggagggagg

SEQ ID NO: 170162 - RNA, 32 nt, Homo Sapiens
gcacaggcgauccucccgccucagccuccaga

SEQ ID NO: 170163 - RNA, 32 nt, Homo Sapiens
gcugaggagugacuugguuagauccguaguuu

SEQ ID NO: 170164 - RNA, 32 nt, Homo Sapiens
agaauccaguuuguggugaaccucuuuggaag

SEQ ID NO: 170165 - RNA, 32 nt, Homo Sapiens
auacauuuucuuaaaaacuucucuaaguugca

SEQ ID NO: 170166 - RNA, 32 nt, Homo Sapiens
auucaccccacuuuuguaaacugcucugcaua

SEQ ID NO: 170167 - RNA, 32 nt, Homo Sapiens
ggguccccaucaccugcuucacggccaucccu

SEQ ID NO: 170168 - RNA, 32 nt, Homo Sapiens
ccucugcuuccacucccuuucccauucaggcu

SEQ ID NO: 170169 - RNA, 32 nt, Homo Sapiens
cuuacguguagaucuuuuuuuuuuuuucaaau

SEQ ID NO: 170170 - RNA, 32 nt, Homo Sapiens
ugcacagaugaggaaauugaaacucuaagaga

SEQ ID NO: 170171 - RNA, 32 nt, Homo Sapiens
agggcgcguccucgucuuuccccucccaucuc

SEQ ID NO: 170172 - RNA, 29 nt, Homo Sapiens
uuggcugaaaguuuagccuuuuuagauug

SEQ ID NO: 170173 - RNA, 32 nt, Homo Sapiens
ucaguucaauaauuauuuucaaugaugaauca

SEQ ID NO: 170174 - RNA, 32 nt, Homo Sapiens
ucgcccucccgugccucgcccgcggacacccu

SEQ ID NO: 170175 - RNA, 32 nt, Homo Sapiens
aaaaaugcacuuuauuuguacucuguguggcu

SEQ ID NO: 170176 - RNA, 32 nt, Homo Sapiens
ggauauguuguccagcccaacaccacaggacc

SEQ ID NO: 170177 - RNA, 32 nt, Homo Sapiens
auacgcucugaccuucggcaaguuacuuaugu

SEQ ID NO: 170178 - RNA, 32 nt, Homo Sapiens
uacagcucaccaccccccacuccgccaaccca

SEQ ID NO: 170179 - RNA, 32 nt, Homo Sapiens
cugaugcuuccaucuuccuguuuaggccaugu

SEQ ID NO: 170180 - RNA, 32 nt, Homo Sapiens
cagggagcuccagcccgagagccuauuauuag

SEQ ID NO: 170181 - RNA, 32 nt, Homo Sapiens
uccaugcccucauaguguaauggcaccagcag

SEQ ID NO: 170182 - RNA, 32 nt, Homo Sapiens
ccuggacacuucuguggcuguauaucaguaaa

SEQ ID NO: 170183 - RNA, 32 nt, Homo Sapiens
ucggccgggcugcugcugcugcugcuccaggu

SEQ ID NO: 170184 - RNA, 32 nt, Homo Sapiens
cuuccccuguuucuaacacauuucaauaaacu

SEQ ID NO: 170185 - RNA, 32 nt, Homo Sapiens
uugcaguuugugcggcagauugcucugccaag

SEQ ID NO: 170186 - RNA, 32 nt, Homo Sapiens
gcaguuugauguuaugucugcuaaaguaaauu

SEQ ID NO: 170187 - RNA, 32 nt, Homo Sapiens
aguggcuugugccuguaaucccagaacuuugg

SEQ ID NO: 170188 - RNA, 32 nt, Homo Sapiens
agaugaauguggcacucccuccuuccauuccu

SEQ ID NO: 170189 - RNA, 32 nt, Homo Sapiens
caugaaaaacaucuagggcaauuuagcauguu

SEQ ID NO: 170190 - RNA, 32 nt, Homo Sapiens
ucagcauuuuuccuaagaggucuagaaaugcu

SEQ ID NO: 170191 - RNA, 32 nt, Homo Sapiens
agaaaaguagccagaagaauuugcaacgugcc

SEQ ID NO: 170192 - RNA, 32 nt, Homo Sapiens
uaaaugaaugaaauugugauuuccugagaauc

SEQ ID NO: 170193 - RNA, 32 nt, Homo Sapiens
uauuguacaguuuuuauugcuuguuggauuuu

SEQ ID NO: 170194 - RNA, 32 nt, Homo Sapiens
ccaagaacccaccaauuccggacacacaaccg

SEQ ID NO: 170195 - RNA, 32 nt, Homo Sapiens
uaaauagguauuuuaaaacauuguuuaaaaca

SEQ ID NO: 170196 - RNA, 32 nt, Homo Sapiens
aaaaugcaguauauuuuuuaaauuucagauua

SEQ ID NO: 170197 - RNA, 32 nt, Homo Sapiens
cccaccuggugaggggaggcucugccccaggc

SEQ ID NO: 170198 - RNA, 32 nt, Homo Sapiens
uauucuuagcucaugggcuaugcaaagccuua

SEQ ID NO: 170199 - RNA, 32 nt, Homo Sapiens
uuuguguaguucaguuuuucuacauuuuagua

SEQ ID NO: 170200 - RNA, 32 nt, Homo Sapiens
aucaaucaaauauauagagauguacauuuguu

SEQ ID NO: 170201 - RNA, 32 nt, Homo Sapiens
aaaaggugcgcgccagcugugggacaacuuug

SEQ ID NO: 170202 - RNA, 32 nt, Homo Sapiens
acagcggcgaguuuucugaagagaugagugcu

SEQ ID NO: 170203 - RNA, 32 nt, Homo Sapiens
gcacuccucugagacuccgaacagagaaaaaa

SEQ ID NO: 170204 - RNA, 32 nt, Homo Sapiens
gaacucaaucccagguacuaaugaccuugcuu

SEQ ID NO: 170205 - RNA, 32 nt, Homo Sapiens
cuccgggccuccccggccacgcucagcccugg

SEQ ID NO: 170206 - RNA, 32 nt, Homo Sapiens
gaaccaggaaaugaaaagugcagccggccaua

SEQ ID NO: 170207 - RNA, 32 nt, Homo Sapiens
gacaguuauuuauagucauuuauuuuaaaaaa

SEQ ID NO: 170208 - RNA, 32 nt, Homo Sapiens
auggugaaacccuguuucuacugaaaauacaa

SEQ ID NO: 170209 - RNA, 32 nt, Homo Sapiens
cuaauaauaccuuguuccaaauacugcuuagc

SEQ ID NO: 170210 - RNA, 32 nt, Homo Sapiens
gccccgcucccgggcgcguugccgcccagucc

SEQ ID NO: 170211 - RNA, 32 nt, Homo Sapiens
ugcucugccuugugucccacuucuacccuucu

SEQ ID NO: 170212 - RNA, 32 nt, Homo Sapiens
acaagagugcagcuugcugaaugucagcugcc

SEQ ID NO: 170213 - RNA, 32 nt, Homo Sapiens
guauuagcagcacuaaagcaaauaucacucag

SEQ ID NO: 170214 - RNA, 32 nt, Homo Sapiens
aauacggaaggggagaugaaugcacuagaaag

SEQ ID NO: 170215 - RNA, 32 nt, Homo Sapiens
agcagauuagucacauguacaagcauugggca

SEQ ID NO: 170216 - RNA, 32 nt, Homo Sapiens
ugccggagccccaagacucugcucuccucggg

SEQ ID NO: 170217 - RNA, 31 nt, Homo Sapiens
ccaggcuggcacugccacucacacucggccc

SEQ ID NO: 170218 - RNA, 32 nt, Homo Sapiens
uacauucggcccggccauggcagcggcgcccc

SEQ ID NO: 170219 - RNA, 32 nt, Homo Sapiens
uauauaaucuccuccuuuacaagagcuuuccu

SEQ ID NO: 170220 - RNA, 32 nt, Homo Sapiens
ccgccuagauggaggaagcgcugcugggcgcc

SEQ ID NO: 170221 - RNA, 32 nt, Homo Sapiens
gcuggagcaaggaaaagagcccuggaaucuga

SEQ ID NO: 170222 - RNA, 32 nt, Homo Sapiens
ucacggccagcaaguggccgcuccaucagggg

SEQ ID NO: 170223 - RNA, 32 nt, Homo Sapiens
uuucuaauggaaaaucagguguuuacaggaaa

SEQ ID NO: 170224 - RNA, 32 nt, Homo Sapiens
gugugcacaaaguuuuaaaaaauacaugugca

SEQ ID NO: 170225 - RNA, 32 nt, Homo Sapiens
auauauuauuucuugcagaaacauucauuauu

SEQ ID NO: 170226 - RNA, 32 nt, Homo Sapiens
gcagcagggaucccuccuccuccaggggaucu

SEQ ID NO: 170227 - RNA, 32 nt, Homo Sapiens
gcggagcccgucugccucugagacugcgguag

SEQ ID NO: 170228 - RNA, 32 nt, Homo Sapiens
acccugcccuccaccgccggcuccacacugcc

SEQ ID NO: 170229 - RNA, 32 nt, Homo Sapiens
acugauugcauuccagccugggugacagagcu

SEQ ID NO: 170230 - RNA, 32 nt, Homo Sapiens
gagacaaauuauuugcaaaaugugcuaaaguc

SEQ ID NO: 170231 - RNA, 32 nt, Homo Sapiens
uaggagauucuuuuuucuuuuuguucuacuuu

SEQ ID NO: 170232 - RNA, 32 nt, Homo Sapiens
ucccagggccccggcaccccggucggcagccu

SEQ ID NO: 170233 - RNA, 31 nt, Homo Sapiens
ccaucugcaagguucacugagcacugagugg

SEQ ID NO: 170234 - RNA, 32 nt, Homo Sapiens
ggggucaggggucagccgcggggcccucagga

SEQ ID NO: 170235 - RNA, 32 nt, Homo Sapiens
cuauuuaguggaagccuuuuccccucaaauaa

SEQ ID NO: 170236 - RNA, 32 nt, Homo Sapiens
uuaauuucagaauuuaaaaaggggaaagaaaa

SEQ ID NO: 170237 - RNA, 32 nt, Homo Sapiens
aauaaucaggaauauuucuauaguaaauggag

SEQ ID NO: 170238 - RNA, 32 nt, Homo Sapiens
cgugagccgcaggaggaugcguugccugcagu

SEQ ID NO: 170239 - RNA, 32 nt, Homo Sapiens
guagccuguuuugcauuuuucuuagguuguau

SEQ ID NO: 170240 - RNA, 32 nt, Homo Sapiens
uuaaguuauggaggaaacauuuuuguaaaagu

SEQ ID NO: 170241 - RNA, 29 nt, Homo Sapiens
ugacauggagaguaaccugucuggccugg

SEQ ID NO: 170242 - RNA, 32 nt, Homo Sapiens
cugacucuggucugccgagauccauuuccaac

SEQ ID NO: 170243 - RNA, 32 nt, Homo Sapiens
ccaccauggugagugcucugugccuccugcuc

SEQ ID NO: 170244 - RNA, 32 nt, Homo Sapiens
gaaaugccccugauaugucuccaggagcaagu

SEQ ID NO: 170245 - RNA, 32 nt, Homo Sapiens
gccgggcaugggggcgcgcaccuguaguucca

SEQ ID NO: 170246 - RNA, 30 nt, Homo Sapiens
aagcaccaacuugccagccauguaagggag

SEQ ID NO: 170247 - RNA, 32 nt, Homo Sapiens
cuccauuucccacuuccacccccguuagcuuc

SEQ ID NO: 170248 - RNA, 32 nt, Homo Sapiens
augucaauauuuuucauuugauucccuauuag

SEQ ID NO: 170249 - RNA, 31 nt, Homo Sapiens
aaaaaagaaaagaaaaagauauugcuuagaa

SEQ ID NO: 170250 - RNA, 32 nt, Homo Sapiens
aaugcccucugcugggguggggaagggagggg

SEQ ID NO: 170251 - RNA, 32 nt, Homo Sapiens
caaagaagcgaucagaauaauaaaaggaggcc

SEQ ID NO: 170252 - RNA, 32 nt, Homo Sapiens
uacguagacagaccccacccucacccaggcca

SEQ ID NO: 170253 - RNA, 32 nt, Homo Sapiens
auguuauuuuugguggauguugacuuaguuca

SEQ ID NO: 170254 - RNA, 32 nt, Homo Sapiens
agcggaggggagacugaccggagcgcggaucg

SEQ ID NO: 170255 - RNA, 32 nt, Homo Sapiens
aaaaaaguaauagaagaaaaacaucaguugaa

SEQ ID NO: 170256 - RNA, 32 nt, Homo Sapiens
uuuccgcuuugcacuccaccccgguagcagcu

SEQ ID NO: 170257 - RNA, 32 nt, Homo Sapiens
caaaggggagcacuccuugcccccuguuccug

SEQ ID NO: 170258 - RNA, 32 nt, Homo Sapiens
uuaaugagugguauggaaaccaauugauuuuu

SEQ ID NO: 170259 - RNA, 32 nt, Homo Sapiens
uaauuuuaauaaaugcuaaaagcuuuauacaa

SEQ ID NO: 170260 - RNA, 32 nt, Homo Sapiens
cugggucugugccucuccagaaucuugucuua

SEQ ID NO: 170261 - RNA, 32 nt, Homo Sapiens
agagccacuugggucuccugcauggaagccgu

SEQ ID NO: 170262 - RNA, 32 nt, Homo Sapiens
uucuuuaaacaaaacacacaacauguaagcau

SEQ ID NO: 170263 - RNA, 32 nt, Homo Sapiens
acaaauaaagaaacacaaaacccucagugcug

SEQ ID NO: 170264 - RNA, 31 nt, Homo Sapiens
aguuuuauaaagaaaagaagucugauaucuu

SEQ ID NO: 170265 - RNA, 32 nt, Homo Sapiens
gaauucccggcgccggccccagcuccucugcc

SEQ ID NO: 170266 - RNA, 32 nt, Homo Sapiens
agauuuaaagcacaugccuucugugccggcuu

SEQ ID NO: 170267 - RNA, 32 nt, Homo Sapiens
ucacacguagccugugccggcuccucggguga

SEQ ID NO: 170268 - RNA, 31 nt, Homo Sapiens
agcugcggcggggcauggccccgcgcuagcc

SEQ ID NO: 170269 - RNA, 27 nt, Homo Sapiens
aggagcccugguuucagcccccucagu

SEQ ID NO: 170270 - RNA, 32 nt, Homo Sapiens
uccccauuugcuacauuacaaacuuuggacga

SEQ ID NO: 170271 - RNA, 32 nt, Homo Sapiens
ggcugacaaaagccuuuuuuuuugguuuugau

SEQ ID NO: 170272 - RNA, 32 nt, Homo Sapiens
gugguguagcuauuaaagauucaugcaguccc

SEQ ID NO: 170273 - RNA, 32 nt, Homo Sapiens
cuaaguuucacuuuuccauuaaacggaaagcc

SEQ ID NO: 170274 - RNA, 32 nt, Homo Sapiens
aauuaucuucuacauaguaaaaucacaauugu

SEQ ID NO: 170275 - RNA, 32 nt, Homo Sapiens
cauaguaauuauguuauauguguuauauacac

SEQ ID NO: 170276 - RNA, 32 nt, Homo Sapiens
ugcggccuggcugcgccccgcuucuccuucaa

SEQ ID NO: 170277 - RNA, 32 nt, Homo Sapiens
ccucuuaggaguuaaugacucccucuccccag

SEQ ID NO: 170278 - RNA, 32 nt, Homo Sapiens
cugcgcccaucccgcagaggccccuguccacc

SEQ ID NO: 170279 - RNA, 32 nt, Homo Sapiens
aaaauugcccuggggggugcugggugugcugu

SEQ ID NO: 170280 - RNA, 32 nt, Homo Sapiens
ccugugcacgcgcgcgugcacacacacacaca

SEQ ID NO: 170281 - RNA, 32 nt, Homo Sapiens
auacuauacauccuguagguuugcaucacagu

SEQ ID NO: 170282 - RNA, 32 nt, Homo Sapiens
uuugugggaaagggguuuugugguucaauaac

SEQ ID NO: 170283 - RNA, 32 nt, Homo Sapiens
ugggagguggagguugcaguaagcugagaucg

SEQ ID NO: 170284 - RNA, 32 nt, Homo Sapiens
ggaauggggaaagaagcaaguugggcaggaua

SEQ ID NO: 170285 - RNA, 32 nt, Homo Sapiens
acucucucuuccagucacccagcccuuuggaa

SEQ ID NO: 170286 - RNA, 32 nt, Homo Sapiens
caagccugcggugcuggcggccccgucuggcc

SEQ ID NO: 170287 - RNA, 32 nt, Homo Sapiens
cgggccggcacccccuucugaccuccagugcc

SEQ ID NO: 170288 - RNA, 32 nt, Homo Sapiens
gaaugaucaaggacucuacacacuggguggcu

SEQ ID NO: 170289 - RNA, 32 nt, Homo Sapiens
ccuuaagaaaaauaaaguugaaguucaggucu

SEQ ID NO: 170290 - RNA, 32 nt, Homo Sapiens
ugcucucuguuguacauugcaacucgcauagg

SEQ ID NO: 170291 - RNA, 32 nt, Homo Sapiens
ggguaaccugccgcccucuccucuccccacag

SEQ ID NO: 170292 - RNA, 32 nt, Homo Sapiens
cuuaugaucugggcaucccuccccuugagcug

SEQ ID NO: 170293 - RNA, 28 nt, Homo Sapiens
ugacagguggcucccaggauggguagug

SEQ ID NO: 170294 - RNA, 32 nt, Homo Sapiens
acuccccacccgcucccucccugccgccgccg

SEQ ID NO: 170295 - RNA, 32 nt, Homo Sapiens
acacacaugcaaacaugugaauggugguuuau

SEQ ID NO: 170296 - RNA, 32 nt, Homo Sapiens
auuuacugcauauuguuuaucugcucugccag

SEQ ID NO: 170297 - RNA, 32 nt, Homo Sapiens
ccagcacgcgcccuccgcccucccggccucgc

SEQ ID NO: 170298 - RNA, 32 nt, Homo Sapiens
gcagagggggucuggggugcagcccugccagc

SEQ ID NO: 170299 - RNA, 32 nt, Homo Sapiens
cgccccuccaguguugccuccucccauccagc

SEQ ID NO: 170300 - RNA, 32 nt, Homo Sapiens
gggaggggguggccggaggaaccuggcauccc

SEQ ID NO: 170301 - RNA, 32 nt, Homo Sapiens
cccacuccucccuuccccccagccccugguaa

SEQ ID NO: 170302 - RNA, 32 nt, Homo Sapiens
caguccgagcgcggacccggcgcccgcagccc

SEQ ID NO: 170303 - RNA, 32 nt, Homo Sapiens
uguuuuggaauccagcagcaucauaagauaac

SEQ ID NO: 170304 - RNA, 32 nt, Homo Sapiens
cuaaaugguugauuaaaauuuauuauaaggca

SEQ ID NO: 170305 - RNA, 32 nt, Homo Sapiens
gaacagaagcagccuuccuguuaguagauggg

SEQ ID NO: 170306 - RNA, 32 nt, Homo Sapiens
ggugugggacaguuaagaaaccaucuuucucc

SEQ ID NO: 170307 - RNA, 32 nt, Homo Sapiens
uaaggcacaauuuuguuuugaaauguauaaag

SEQ ID NO: 170308 - RNA, 32 nt, Homo Sapiens
ggaggaacaggcagaagcucuccggaggaucc

SEQ ID NO: 170309 - RNA, 32 nt, Homo Sapiens
cggcgaaaaaugaaauccaaccaagagcggag

SEQ ID NO: 170310 - RNA, 32 nt, Homo Sapiens
ggacuugaccgaggucccacuucuguuucgag

SEQ ID NO: 170311 - RNA, 32 nt, Homo Sapiens
cuggucauacagauagaauauuugauauuucu

SEQ ID NO: 170312 - RNA, 32 nt, Homo Sapiens
caccgcgcgcuggccugugcccgagcccugcg

SEQ ID NO: 170313 - RNA, 32 nt, Homo Sapiens
cugugggggcuuugggccaggggucuccggac

SEQ ID NO: 170314 - RNA, 32 nt, Homo Sapiens
cggaauuggggaugcagagcagcggcagcggg

SEQ ID NO: 170315 - RNA, 32 nt, Homo Sapiens
gugagguacuuugggccaguagaguauacuac

SEQ ID NO: 170316 - RNA, 32 nt, Homo Sapiens
caaggagaugaaugagaugucucauggccucu

SEQ ID NO: 170317 - RNA, 28 nt, Homo Sapiens
gcgaugccugacgagcugacggagcccg

SEQ ID NO: 170318 - RNA, 32 nt, Homo Sapiens
gaagcucugaagauggaucauggccgugacug

SEQ ID NO: 170319 - RNA, 32 nt, Homo Sapiens
uguccugagagccccagguuccacuuugaccu

SEQ ID NO: 170320 - RNA, 32 nt, Homo Sapiens
aggauuaaaugguguuucauguaaggaucuuu

SEQ ID NO: 170321 - RNA, 27 nt, Homo Sapiens
cagguguccagccucagccccgauccu

SEQ ID NO: 170322 - RNA, 32 nt, Homo Sapiens
ccccggcggcagagccggagccccgucucgaa

SEQ ID NO: 170323 - RNA, 32 nt, Homo Sapiens
gagaacugaaguuuccgcccccgccccacagg

SEQ ID NO: 170324 - RNA, 32 nt, Homo Sapiens
cugauaaacaauuucagagauguuucagaaua

SEQ ID NO: 170325 - RNA, 32 nt, Homo Sapiens
ccucuccugcuucagucgagagcccuguaguc

SEQ ID NO: 170326 - RNA, 32 nt, Homo Sapiens
agguauuguaaauaguaggguuauaucgauau

SEQ ID NO: 170327 - RNA, 29 nt, Homo Sapiens
gaggcucggguccggguccagcuccgagc

SEQ ID NO: 170328 - RNA, 32 nt, Homo Sapiens
uugugcaauuaacaaagcuacugcaagaaaaa

SEQ ID NO: 170329 - RNA, 30 nt, Homo Sapiens
uuggaggauaaaauggguaucaaugcuaau

SEQ ID NO: 170330 - RNA, 32 nt, Homo Sapiens
ccccgaggcgcgggcucuggcggccucgaccg

SEQ ID NO: 170331 - RNA, 31 nt, Homo Sapiens
cguagccgcgccgcccugccccgccaugggc

SEQ ID NO: 170332 - RNA, 32 nt, Homo Sapiens
acugacccaucccgcugcaccucuuguuuccc

SEQ ID NO: 170333 - RNA, 32 nt, Homo Sapiens
aguucuaaaugguucugaauagcuuuaaaaga

SEQ ID NO: 170334 - RNA, 32 nt, Homo Sapiens
ggcucugucaauccaagagcaugccaguuauu

SEQ ID NO: 170335 - RNA, 32 nt, Homo Sapiens
uucaaugauugauuauacuaagaauaaauggu

SEQ ID NO: 170336 - RNA, 32 nt, Homo Sapiens
accauagaucuggagaucuucgccaguaacaa

SEQ ID NO: 170337 - RNA, 32 nt, Homo Sapiens
ggagcagagagcuuagccuggagcaccuuucc

SEQ ID NO: 170338 - RNA, 32 nt, Homo Sapiens
cagccccagcccagcccagcugcucugcccag

SEQ ID NO: 170339 - RNA, 27 nt, Homo Sapiens
caguugucccacuucagccucccaaau

SEQ ID NO: 170340 - RNA, 32 nt, Homo Sapiens
aagaucaagaucaaagauucuccccaucucac

SEQ ID NO: 170341 - RNA, 32 nt, Homo Sapiens
uggauucuauuuauuaugcuuuauuggaaaaa

SEQ ID NO: 170342 - RNA, 32 nt, Homo Sapiens
aaaaacaaguuugaaaugcauuuugggguaau

SEQ ID NO: 170343 - RNA, 32 nt, Homo Sapiens
gagcauaagaagaaaaaguaucaacuaaggau

SEQ ID NO: 170344 - RNA, 32 nt, Homo Sapiens
cgucagcaagguggcucugacccucccaggug

SEQ ID NO: 170345 - RNA, 32 nt, Homo Sapiens
guggaggccaccagcccucucgccugcuauuu

SEQ ID NO: 170346 - RNA, 32 nt, Homo Sapiens
ucagaagucuaccccaccaccuccucaggaaa

SEQ ID NO: 170347 - RNA, 32 nt, Homo Sapiens
uccagccuggcguccagggccacagccauggc

SEQ ID NO: 170348 - RNA, 32 nt, Homo Sapiens
augggcugguggugcucgcugcugcugcugag

SEQ ID NO: 170349 - RNA, 32 nt, Homo Sapiens
agagaccugaucggaccggcccugcccccggc

SEQ ID NO: 170350 - RNA, 32 nt, Homo Sapiens
uuguucaaguuuggggacuuuaccaaagaaaa

SEQ ID NO: 170351 - RNA, 32 nt, Homo Sapiens
acugugaagccccagggaauggcugcacuuca

SEQ ID NO: 170352 - RNA, 32 nt, Homo Sapiens
ccuuuaguuugaaaaguuguauaauacuuaac

SEQ ID NO: 170353 - RNA, 32 nt, Homo Sapiens
uuccuccaugucuuccucucugccacccugag

SEQ ID NO: 170354 - RNA, 32 nt, Homo Sapiens
uccugcccccacccuuuccccgggccugcugu

SEQ ID NO: 170355 - RNA, 32 nt, Homo Sapiens
guacuuggcuauuugcaguguuuucaaaacca

SEQ ID NO: 170356 - RNA, 32 nt, Homo Sapiens
aaugcuuucuuugccacucuaaguaaaauuua

SEQ ID NO: 170357 - RNA, 32 nt, Homo Sapiens
ccugggcugcaggaagugacuccguuccacuc

SEQ ID NO: 170358 - RNA, 32 nt, Homo Sapiens
gagaucaagccccacgaugacugcacaguaga

SEQ ID NO: 170359 - RNA, 32 nt, Homo Sapiens
agcuucacagucgccucaucuccuagcacucc

SEQ ID NO: 170360 - RNA, 32 nt, Homo Sapiens
cuaaaugugaauguaugagcugggggagucaa

SEQ ID NO: 170361 - RNA, 32 nt, Homo Sapiens
ccggccugucuccugagcccccgcgcauccua

SEQ ID NO: 170362 - RNA, 32 nt, Homo Sapiens
gggacagcuggcgccgguucugcggucuccgg

SEQ ID NO: 170363 - RNA, 32 nt, Homo Sapiens
ccacaugugggaaguaggggaguaaggagaau

SEQ ID NO: 170364 - RNA, 30 nt, Homo Sapiens
cugagaucuuuugccaccugcauuuuagaa

SEQ ID NO: 170365 - RNA, 32 nt, Homo Sapiens
uauuuuugucuuacuuuuuuuuucuuuuggau

SEQ ID NO: 170366 - RNA, 32 nt, Homo Sapiens
augaggaagggguauacgcagugugacccuca

SEQ ID NO: 170367 - RNA, 32 nt, Homo Sapiens
auaaaagaaagugaggaaaaggaagugcuucu

SEQ ID NO: 170368 - RNA, 32 nt, Homo Sapiens
acaaaaauaaaaugguagagagugaaccucca

SEQ ID NO: 170369 - RNA, 32 nt, Homo Sapiens
cgggccgucuggcacuggagacaggcuucuau

SEQ ID NO: 170370 - RNA, 32 nt, Homo Sapiens
agcagcgccugcccaacccccggaacgcgcac

SEQ ID NO: 170371 - RNA, 32 nt, Homo Sapiens
cuuccuggccucggcuagaccuggacaagccu

SEQ ID NO: 170372 - RNA, 32 nt, Homo Sapiens
aaacaaaaaacaaacaaacaaacaaaaauaga

SEQ ID NO: 170373 - RNA, 32 nt, Homo Sapiens
gcagcaccgcccagcccuuccuugccuacugu

SEQ ID NO: 170374 - RNA, 32 nt, Homo Sapiens
ucccgcgcgcacgcuccgcgccugauggcagc

SEQ ID NO: 170375 - RNA, 30 nt, Homo Sapiens
cuauuuuauaugaugggggaaaaaaaguaa

SEQ ID NO: 170376 - RNA, 32 nt, Homo Sapiens
acaguuucugccucauuccucuccaugaugcc

SEQ ID NO: 170377 - RNA, 32 nt, Homo Sapiens
uguccccugagccccagagcuggcagcuguug

SEQ ID NO: 170378 - RNA, 32 nt, Homo Sapiens
cagguaaucaguauuuucuuccacguaugugc

SEQ ID NO: 170379 - RNA, 32 nt, Homo Sapiens
ucacugcauaaugacuuucuauuuguuuggua

SEQ ID NO: 170380 - RNA, 32 nt, Homo Sapiens
gcucuugggaugcaggcucagcccgcuggagc

SEQ ID NO: 170381 - RNA, 32 nt, Homo Sapiens
auauuuuuauauauuuuauacaguuucuauca

SEQ ID NO: 170382 - RNA, 32 nt, Homo Sapiens
gcguggcucuguguccagggccccagggucug

SEQ ID NO: 170383 - RNA, 32 nt, Homo Sapiens
ugcagcugcugccgccgccggaggaaccuuga

SEQ ID NO: 170384 - RNA, 32 nt, Homo Sapiens
ucuacaucacaguucuuaauuuguuuagaguu

SEQ ID NO: 170385 - RNA, 32 nt, Homo Sapiens
cugaggagaauaauccacuugauguccacuca

SEQ ID NO: 170386 - RNA, 32 nt, Homo Sapiens
gaccuggagggaugaggccuggaggccgacag

SEQ ID NO: 170387 - RNA, 32 nt, Homo Sapiens
caaagauguaagucacguuggugacuacuuuc

SEQ ID NO: 170388 - RNA, 32 nt, Homo Sapiens
gaggugcucgcgccgcucugcugcugcugcug

SEQ ID NO: 170389 - RNA, 29 nt, Homo Sapiens
uuuagauccauccaauaugcgaaaaaagg

SEQ ID NO: 170390 - RNA, 32 nt, Homo Sapiens
cgaccgcgccuucuccuccgccggucccauac

SEQ ID NO: 170391 - RNA, 32 nt, Homo Sapiens
guucggggcccgggacgccgccgggaggaggg

SEQ ID NO: 170392 - RNA, 32 nt, Homo Sapiens
uggccaagccccacacccgcagacccuccuuc

SEQ ID NO: 170393 - RNA, 32 nt, Homo Sapiens
uuggcaggcgacuccccgccccugccccgccc

SEQ ID NO: 170394 - RNA, 32 nt, Homo Sapiens
aaagaaccaauucaaauggaugcugaacauag

SEQ ID NO: 170395 - RNA, 32 nt, Homo Sapiens
cuguugucucuuacuauuuguaaagugaagac

SEQ ID NO: 170396 - RNA, 32 nt, Homo Sapiens
uauccaacuuggauuguaauuuaucuauuuuc

SEQ ID NO: 170397 - RNA, 32 nt, Homo Sapiens
agacugacuucuuaacaauccaaaaaagaaac

SEQ ID NO: 170398 - RNA, 32 nt, Homo Sapiens
cuguauucuugcagcguguuguuuccuuugug

SEQ ID NO: 170399 - RNA, 32 nt, Homo Sapiens
ugauguccauucucauuccugcucugggccau

SEQ ID NO: 170400 - RNA, 32 nt, Homo Sapiens
cgcauccuguccagcgauucgccccgcccgcc

SEQ ID NO: 170401 - RNA, 32 nt, Homo Sapiens
uguguauggcuuaugaaguuauuuuugauagu

SEQ ID NO: 170402 - RNA, 32 nt, Homo Sapiens
ucuagggcgggugggcggguagcagugcuggg

SEQ ID NO: 170403 - RNA, 32 nt, Homo Sapiens
gucgggaggagcagcccggggaggaacugggu

SEQ ID NO: 170404 - RNA, 32 nt, Homo Sapiens
gcggguaugaucucaaccucuucgccagcccu

SEQ ID NO: 170405 - RNA, 32 nt, Homo Sapiens
uggagaggccccagggaaggaccccucaucag

SEQ ID NO: 170406 - RNA, 32 nt, Homo Sapiens
guauaugcacaaaacuacuuuucuaaaaucua

SEQ ID NO: 170407 - RNA, 32 nt, Homo Sapiens
gcacucccagguugcaccugcugcuggcggug

SEQ ID NO: 170408 - RNA, 32 nt, Homo Sapiens
uggaaucuggacaaggcuauguuucuccuaga

SEQ ID NO: 170409 - RNA, 32 nt, Homo Sapiens
gugcagacgugcacggcccaucagacaggguc

SEQ ID NO: 170410 - RNA, 32 nt, Homo Sapiens
cugguuugcugccuccucuccccucuaaaaaa

SEQ ID NO: 170411 - RNA, 32 nt, Homo Sapiens
uccucccggcgugcuccgcggcucuuggcuca

SEQ ID NO: 170412 - RNA, 32 nt, Homo Sapiens
guaauaauacaagaacuguuucccccucaaaa

SEQ ID NO: 170413 - RNA, 32 nt, Homo Sapiens
aagugauuguucagaaucugucuuaaugacaa

SEQ ID NO: 170414 - RNA, 32 nt, Homo Sapiens
cugaagccaagagccgaccuucugagcccuca

SEQ ID NO: 170415 - RNA, 32 nt, Homo Sapiens
auuuguuucuucaauauuucuuucauuuguag

SEQ ID NO: 170416 - RNA, 32 nt, Homo Sapiens
ucuccaaaacaaaccccaccgggcaauuuggu

SEQ ID NO: 170417 - RNA, 32 nt, Homo Sapiens
uggucuguggagcuguauucugauggaaggag

SEQ ID NO: 170418 - RNA, 32 nt, Homo Sapiens
aaaugugugggaaaaagaaaacaaaaacuuuc

SEQ ID NO: 170419 - RNA, 32 nt, Homo Sapiens
ucagccggacucccuggugccugauccugcug

SEQ ID NO: 170420 - RNA, 30 nt, Homo Sapiens
uggcgggacaggcgcgugaggccacaacac

SEQ ID NO: 170421 - RNA, 32 nt, Homo Sapiens
aggccagucugcuucuacuuaggagggaucac

SEQ ID NO: 170422 - RNA, 32 nt, Homo Sapiens
agucccagugguccuagugccgcaucagaucc

SEQ ID NO: 170423 - RNA, 32 nt, Homo Sapiens
acuggggauuaccauucagcaugagauuuggg

SEQ ID NO: 170424 - RNA, 32 nt, Homo Sapiens
cuuuccucugguuuccuuguccuacuguucuu

SEQ ID NO: 170425 - RNA, 32 nt, Homo Sapiens
uuuuaacagcauuuuaaccgcucuaaaaauua

SEQ ID NO: 170426 - RNA, 32 nt, Homo Sapiens
guggaugggaugcauaaugccagcaaguuuug

SEQ ID NO: 170427 - RNA, 32 nt, Homo Sapiens
ccaccacugacuauaccaacugggccucugau

SEQ ID NO: 170428 - RNA, 32 nt, Homo Sapiens
auuauugauaguucaucuggauuaccaaaauc

SEQ ID NO: 170429 - RNA, 32 nt, Homo Sapiens
cauuuugaauuugaaccaagaaaauggaacaa

SEQ ID NO: 170430 - RNA, 30 nt, Homo Sapiens
ggaggccaugggcgcgcgcggggcgcugcu

SEQ ID NO: 170431 - RNA, 32 nt, Homo Sapiens
agguuguuugagcuguuuuagagcagugagcc

SEQ ID NO: 170432 - RNA, 32 nt, Homo Sapiens
ucauuugcauuaucagccuguuugggaugucu

SEQ ID NO: 170433 - RNA, 32 nt, Homo Sapiens
ucccauuuaacccucaaaauuauccuaugaua

SEQ ID NO: 170434 - RNA, 32 nt, Homo Sapiens
gccagguccucaccuguguguacaccagcagg

SEQ ID NO: 170435 - RNA, 32 nt, Homo Sapiens
agaaguugaaguggcugaaauuuugucuauug

SEQ ID NO: 170436 - RNA, 32 nt, Homo Sapiens
uuacaggugugagccacuauacccgaccagau

SEQ ID NO: 170437 - RNA, 28 nt, Homo Sapiens
gccucaguugcuuccaggaugcgggacc

SEQ ID NO: 170438 - RNA, 32 nt, Homo Sapiens
cgcggcucguguauguacauagacguuacggc

SEQ ID NO: 170439 - RNA, 32 nt, Homo Sapiens
uuuucuuuuuaaggaagugcuguuuuuuuuug

SEQ ID NO: 170440 - RNA, 32 nt, Homo Sapiens
ugucgaaccccaaagcacuguaauuggggggg

SEQ ID NO: 170441 - RNA, 32 nt, Homo Sapiens
uuuauuccuaaaacgugucuuauuuuuaugca

SEQ ID NO: 170442 - RNA, 30 nt, Homo Sapiens
auuuuaucacuugccgugucauccgaaagu

SEQ ID NO: 170443 - RNA, 32 nt, Homo Sapiens
agagcguuuuaacuucaauguaccauuuuacu

SEQ ID NO: 170444 - RNA, 32 nt, Homo Sapiens
cuccuuauauccucccacacuaagguuccccu

SEQ ID NO: 170445 - RNA, 32 nt, Homo Sapiens
caccacgcccggccaagaacuuuacuuuuauu

SEQ ID NO: 170446 - RNA, 32 nt, Homo Sapiens
cauugcugguggcuuacaaauacugucagcua

SEQ ID NO: 170447 - RNA, 32 nt, Homo Sapiens
gcuuggaucucauuaaacuucaugucucuauu

SEQ ID NO: 170448 - RNA, 32 nt, Homo Sapiens
uuggaggccacuggagggaggggugagcaugg

SEQ ID NO: 170449 - RNA, 32 nt, Homo Sapiens
uguccucgaauggcagaaaaagggguggcugu

SEQ ID NO: 170450 - RNA, 32 nt, Homo Sapiens
cgaauccuguaugcccaguccaagcccaucag

SEQ ID NO: 170451 - RNA, 32 nt, Homo Sapiens
caaagaacauucaacguugggauuauuaaauc

SEQ ID NO: 170452 - RNA, 32 nt, Homo Sapiens
aaagcaccacacacucaggaagccuugucuac

SEQ ID NO: 170453 - RNA, 32 nt, Homo Sapiens
cucccuugccuucucccacuuggaccugcuca

SEQ ID NO: 170454 - RNA, 32 nt, Homo Sapiens
aacgaugcaagugugacugcuggcgucuucau

SEQ ID NO: 170455 - RNA, 32 nt, Homo Sapiens
ugauacaaucaucacaauuggcauuaaauuau

SEQ ID NO: 170456 - RNA, 32 nt, Homo Sapiens
auugguuccuggcacucgggccccaccuccuc

SEQ ID NO: 170457 - RNA, 32 nt, Homo Sapiens
uccuggccgggacacucugugcuuugcgggga

SEQ ID NO: 170458 - RNA, 32 nt, Homo Sapiens
guagacuaaagguaauaaaaaucauugucuua

SEQ ID NO: 170459 - RNA, 27 nt, Homo Sapiens
ccuggcuccuucuucacuaccucagau

SEQ ID NO: 170460 - RNA, 32 nt, Homo Sapiens
aaggauacauuuuuaauauauuugagugauug

SEQ ID NO: 170461 - RNA, 32 nt, Homo Sapiens
cucaacaugaaauuugaaugggacauccaaac

SEQ ID NO: 170462 - RNA, 32 nt, Homo Sapiens
ccuaacuggcugggucguuucuuccauccgac

SEQ ID NO: 170463 - RNA, 32 nt, Homo Sapiens
cugccauccaaaacggcaagcacaagaaugac

SEQ ID NO: 170464 - RNA, 32 nt, Homo Sapiens
ucuggcagguggcugugcugggcuugugcauu

SEQ ID NO: 170465 - RNA, 32 nt, Homo Sapiens
guguccuuuuaaaaaauauuuacuguagucca

SEQ ID NO: 170466 - RNA, 32 nt, Homo Sapiens
uuccugguucccucacagguuucuccagaaag

SEQ ID NO: 170467 - RNA, 32 nt, Homo Sapiens
gaguacccagggacacgauacacugcggaagg

SEQ ID NO: 170468 - RNA, 31 nt, Homo Sapiens
gaacagauauuuaaacaggugcuguauuagu

SEQ ID NO: 170469 - RNA, 32 nt, Homo Sapiens
ugccgggggcagagcccgcuccccuccgcgcg

SEQ ID NO: 170470 - RNA, 32 nt, Homo Sapiens
aaccaaugccuucugcuucucaucauuauucc

SEQ ID NO: 170471 - RNA, 32 nt, Homo Sapiens
cugcauuauuggaauauaauuguuuuaucuga

SEQ ID NO: 170472 - RNA, 32 nt, Homo Sapiens
uuugcugagaaugaugguuugcagcuucaucc

SEQ ID NO: 170473 - RNA, 32 nt, Homo Sapiens
cacucuccuuugauuccuuguuaugggucuuu

SEQ ID NO: 170474 - RNA, 32 nt, Homo Sapiens
ggacauuuuaggaagcuuaaguaaauuucuga

SEQ ID NO: 170475 - RNA, 32 nt, Homo Sapiens
gcucaagauucuuguguacacacacacacaca

SEQ ID NO: 170476 - RNA, 32 nt, Homo Sapiens
ugugaaguauauuguaaagauaggacauggua

SEQ ID NO: 170477 - RNA, 32 nt, Homo Sapiens
uuacaggcgugagccaccacgcccggccuggc

SEQ ID NO: 170478 - RNA, 32 nt, Homo Sapiens
gccggugcaggcuguggcugcccgcgcugcgc

SEQ ID NO: 170479 - RNA, 32 nt, Homo Sapiens
aggcaagaugaccccaccgggacugcagagcc

SEQ ID NO: 170480 - RNA, 30 nt, Homo Sapiens
gggcggcgggcgggcgcggguuugauuucu

SEQ ID NO: 170481 - RNA, 32 nt, Homo Sapiens
cacugagggcugccauuaaguucuaugugcag

SEQ ID NO: 170482 - RNA, 31 nt, Homo Sapiens
uguucauuagagaguaaguccacucuucccu

SEQ ID NO: 170483 - RNA, 32 nt, Homo Sapiens
ggccgggcaccgggcgcaaaggcagggggaug

SEQ ID NO: 170484 - RNA, 32 nt, Homo Sapiens
ccuaggguaggggcacugcugcaacuucugcu

SEQ ID NO: 170485 - RNA, 32 nt, Homo Sapiens
cuggcuuccgcaacacauuuccgggugugccc

SEQ ID NO: 170486 - RNA, 32 nt, Homo Sapiens
caggguggacuucaguguguguauuuguguaa

SEQ ID NO: 170487 - RNA, 32 nt, Homo Sapiens
gugaauuuggggguaccauuggugguauuuca

SEQ ID NO: 170488 - RNA, 32 nt, Homo Sapiens
acgaaccaucgacugccguguuccuuuuccuc

SEQ ID NO: 170489 - RNA, 32 nt, Homo Sapiens
uuuuuaaaauguugcuuuguguguguuugacu

SEQ ID NO: 170490 - RNA, 32 nt, Homo Sapiens
gcaggucggagcucggagcugcugcuucuggu

SEQ ID NO: 170491 - RNA, 32 nt, Homo Sapiens
agcuggcugucauggcaacaggaggcugugcu

SEQ ID NO: 170492 - RNA, 32 nt, Homo Sapiens
aacugcccuucucuccucccucucaucccaga

SEQ ID NO: 170493 - RNA, 32 nt, Homo Sapiens
ucuggcuaugaggguggcaucuggccacuuga

SEQ ID NO: 170494 - RNA, 32 nt, Homo Sapiens
cuuacacaaaccaggaaaaaccacugggaugg

SEQ ID NO: 170495 - RNA, 32 nt, Homo Sapiens
gaucuccgucccgcccccagggagacacagca

SEQ ID NO: 170496 - RNA, 32 nt, Homo Sapiens
cuccgccgcccgagcaggugccacuaugcacg

SEQ ID NO: 170497 - RNA, 32 nt, Homo Sapiens
gaccgcgcugaccuucuccccccgccguccgu

SEQ ID NO: 170498 - RNA, 32 nt, Homo Sapiens
uuaccuguucugcggcgccgcgcaccgcuggc

SEQ ID NO: 170499 - RNA, 32 nt, Homo Sapiens
gauuaggcugagugaagauuaagggagggugu

SEQ ID NO: 170500 - RNA, 32 nt, Homo Sapiens
cuucauugcuccaucaguagauauacaagaac

SEQ ID NO: 170501 - RNA, 32 nt, Homo Sapiens
caggagaaagaugaaacugaaagcauaugaau

SEQ ID NO: 170502 - RNA, 28 nt, Homo Sapiens
gucccaacgucuaauagauguuucaguc

SEQ ID NO: 170503 - RNA, 32 nt, Homo Sapiens
ugcacgcgcgucugugugcacgugcgugucuc

SEQ ID NO: 170504 - RNA, 29 nt, Homo Sapiens
acaugaucguguuucguaaggagccagag

SEQ ID NO: 170505 - RNA, 32 nt, Homo Sapiens
auagacucagccuauguccugauuccagcugg

SEQ ID NO: 170506 - RNA, 32 nt, Homo Sapiens
aaaauacaaaaauuagccagauaugauggcag

SEQ ID NO: 170507 - RNA, 32 nt, Homo Sapiens
uggaagaaaaacuacaugguuggaguguuuuu

SEQ ID NO: 170508 - RNA, 32 nt, Homo Sapiens
ucacaugcguccuaccugugaacucugggaag

SEQ ID NO: 170509 - RNA, 32 nt, Homo Sapiens
cagcgcuggcggugcaacugcggccgcgcggu

SEQ ID NO: 170510 - RNA, 32 nt, Homo Sapiens
gggugguaagagcagcagcacccucagggcau

SEQ ID NO: 170511 - RNA, 32 nt, Homo Sapiens
aauaaguacucuauuuacuggguauauacaca

SEQ ID NO: 170512 - RNA, 32 nt, Homo Sapiens
agauagauagauagauguguauuuucaaggau

SEQ ID NO: 170513 - RNA, 32 nt, Homo Sapiens
augcaucaaagucugaaauuuauaaguauaaa

SEQ ID NO: 170514 - RNA, 32 nt, Homo Sapiens
ugcaacacauuagaaacuuauauuuaaaaaca

SEQ ID NO: 170515 - RNA, 32 nt, Homo Sapiens
cuucuaaguuuaggcuauaaacacacucagac

SEQ ID NO: 170516 - RNA, 32 nt, Homo Sapiens
acuguaaaaaauuucacaggucauuuguguag

SEQ ID NO: 170517 - RNA, 32 nt, Homo Sapiens
ccagucucuuucugccuagcugucucuucuca

SEQ ID NO: 170518 - RNA, 32 nt, Homo Sapiens
gacccaggcccaccucucacccccugucccaa

SEQ ID NO: 170519 - RNA, 32 nt, Homo Sapiens
cuucccaauauuugugaacauguucuuuaaca

SEQ ID NO: 170520 - RNA, 28 nt, Homo Sapiens
ucuauaguuacagaaaucagguaagugg

SEQ ID NO: 170521 - RNA, 32 nt, Homo Sapiens
gaauacauuguaaaaaugucaggaaaaguaug

SEQ ID NO: 170522 - RNA, 32 nt, Homo Sapiens
cuuuucuaccaccuuuguaauuuuauguaucc

SEQ ID NO: 170523 - RNA, 32 nt, Homo Sapiens
gugggaagaaaagagggagcagcuagggcgcg

SEQ ID NO: 170524 - RNA, 32 nt, Homo Sapiens
aguuguuuguaucuggaaugagugaaaaugca

SEQ ID NO: 170525 - RNA, 32 nt, Homo Sapiens
uuucccuguacuuuucccauuuguaauuugua

SEQ ID NO: 170526 - RNA, 32 nt, Homo Sapiens
guacaugagauguacuaaaauaaguaauauag

SEQ ID NO: 170527 - RNA, 32 nt, Homo Sapiens
cccccagcauggccagcgucuuggagcagcug

SEQ ID NO: 170528 - RNA, 32 nt, Homo Sapiens
cuccugcagaagauccggggccuggaacagca

SEQ ID NO: 170529 - RNA, 32 nt, Homo Sapiens
auucggagugaggagcacuuucagaguuacug

SEQ ID NO: 170530 - RNA, 32 nt, Homo Sapiens
uccagcaacuaguuuuucuacuuucacucuuu

SEQ ID NO: 170531 - RNA, 32 nt, Homo Sapiens
ccucugccgcuggaaggguccggagcgcacca

SEQ ID NO: 170532 - RNA, 32 nt, Homo Sapiens
gcccacuuugaccacuaacaacaucagaauua

SEQ ID NO: 170533 - RNA, 32 nt, Homo Sapiens
aggcccaccuggcuccagacccgcccccaacc

SEQ ID NO: 170534 - RNA, 32 nt, Homo Sapiens
guuuacaaauuaaaugcuugauuuuuaaugua

SEQ ID NO: 170535 - RNA, 32 nt, Homo Sapiens
gggcaggcggggucccuggagcccuggugugg

SEQ ID NO: 170536 - RNA, 32 nt, Homo Sapiens
cgggcgcgggcgcgucccuguggccagucacc

SEQ ID NO: 170537 - RNA, 32 nt, Homo Sapiens
augcuguuuuuggcugggcgcgguggcucaug

SEQ ID NO: 170538 - RNA, 32 nt, Homo Sapiens
auccccgccgcgucccggggaccucccuccgg

SEQ ID NO: 170539 - RNA, 32 nt, Homo Sapiens
uuauauacauguuuuucuuuuacaugcauaua

SEQ ID NO: 170540 - RNA, 30 nt, Homo Sapiens
ggucccgggaguggccagggucccgugugu

SEQ ID NO: 170541 - RNA, 32 nt, Homo Sapiens
aggaugugcgcaagauccuguagugcccccag

SEQ ID NO: 170542 - RNA, 32 nt, Homo Sapiens
ccacgcucuccggcgcgccgcccgcggagcca

SEQ ID NO: 170543 - RNA, 32 nt, Homo Sapiens
gggccgaggggagagggugaccauggggaaug

SEQ ID NO: 170544 - RNA, 32 nt, Homo Sapiens
cugcccgcgauggccauccucccguugcuccu

SEQ ID NO: 170545 - RNA, 32 nt, Homo Sapiens
cuuuugcagcuucccagcacgaccauugaaaa

SEQ ID NO: 170546 - RNA, 32 nt, Homo Sapiens
uaguagaaguuuaguggauaaaacuuuaaguc

SEQ ID NO: 170547 - RNA, 32 nt, Homo Sapiens
uggaagaggagggauaacuuuuucuguuauuu

SEQ ID NO: 170548 - RNA, 32 nt, Homo Sapiens
ugugccuugucuugaaggggguugcuccccuu

SEQ ID NO: 170549 - RNA, 32 nt, Homo Sapiens
uauggaugguuucagugaaaugucugugucug

SEQ ID NO: 170550 - RNA, 32 nt, Homo Sapiens
cccacguuuccucccccuuuuuucuugggaaa

SEQ ID NO: 170551 - RNA, 32 nt, Homo Sapiens
ucagcagcaaucaucaaccaaccaaccaaugg

SEQ ID NO: 170552 - RNA, 32 nt, Homo Sapiens
gcuucucguugugccccgcccgcaagcgcccu

SEQ ID NO: 170553 - RNA, 32 nt, Homo Sapiens
cguagagcuggugcgugcggguagcggggcuc

SEQ ID NO: 170554 - RNA, 32 nt, Homo Sapiens
aacugggaaggggccuugaggaccugugucca

SEQ ID NO: 170555 - RNA, 32 nt, Homo Sapiens
agugauggcaacacugaaggaacaguuacccu

SEQ ID NO: 170556 - RNA, 32 nt, Homo Sapiens
cuacuuuaaauauuauuuuaaauauuuuggaa

SEQ ID NO: 170557 - RNA, 32 nt, Homo Sapiens
aaaacacauaguacuuucuagauggaauuuuu

SEQ ID NO: 170558 - RNA, 32 nt, Homo Sapiens
ggacugcgaugcggcgugaggcugggacugcg

SEQ ID NO: 170559 - RNA, 32 nt, Homo Sapiens
ccccggcagacaccccacccccaucuuguucc

SEQ ID NO: 170560 - RNA, 32 nt, Homo Sapiens
accaggccccuccuuugcggcugcugugggga

SEQ ID NO: 170561 - RNA, 32 nt, Homo Sapiens
acagaguauguaggaacagaauaguaagucuu

SEQ ID NO: 170562 - RNA, 32 nt, Homo Sapiens
ggcgugcagacacuucccuaaccuuggaggcc

SEQ ID NO: 170563 - RNA, 32 nt, Homo Sapiens
ggucagaacgaucucauuauuaugacucugau

SEQ ID NO: 170564 - RNA, 32 nt, Homo Sapiens
agaccccgagggucugggagaggggccggccc

SEQ ID NO: 170565 - RNA, 32 nt, Homo Sapiens
aacuaucuucaacuuuucagacuucacagggu

SEQ ID NO: 170566 - RNA, 32 nt, Homo Sapiens
cacagcaucugugccaugcaauggggcuuugg

SEQ ID NO: 170567 - RNA, 32 nt, Homo Sapiens
aaggcaacaguggacucagacuucugaggaau

SEQ ID NO: 170568 - RNA, 32 nt, Homo Sapiens
aaaggacaacaaaguuuacauuucauacuuuu

SEQ ID NO: 170569 - RNA, 32 nt, Homo Sapiens
cccugcaauuuaaaugguauggucuggaugau

SEQ ID NO: 170570 - RNA, 32 nt, Homo Sapiens
ugccugugaucgcagcacuuugggaggccgag

SEQ ID NO: 170571 - RNA, 32 nt, Homo Sapiens
gccuuggauguuuucagcaauuaaacuuuuuu

SEQ ID NO: 170572 - RNA, 32 nt, Homo Sapiens
ucacucaugcauuuuuauuuccaauuaaagca

SEQ ID NO: 170573 - RNA, 32 nt, Homo Sapiens
gugagugugacgcagggaagagucgcacggac

SEQ ID NO: 170574 - RNA, 32 nt, Homo Sapiens
ucuagggcucuccuuuccugccuccggccccc

SEQ ID NO: 170575 - RNA, 32 nt, Homo Sapiens
gccugccuuggccacugaaggcuucccuuggc

SEQ ID NO: 170576 - RNA, 31 nt, Homo Sapiens
ucaaaggagccccgcugccugcccacccacc

SEQ ID NO: 170577 - RNA, 32 nt, Homo Sapiens
ugcacaauuccuacagaagaggcaagacacag

SEQ ID NO: 170578 - RNA, 32 nt, Homo Sapiens
auccuaacagccucccucuccuccuccuuccc

SEQ ID NO: 170579 - RNA, 32 nt, Homo Sapiens
ucauaguaaaguucguuuuuuauauguuucca

SEQ ID NO: 170580 - RNA, 32 nt, Homo Sapiens
ucacauuuaggaauaaacuuugaaaaaaauac

SEQ ID NO: 170581 - RNA, 32 nt, Homo Sapiens
auuuugagagugucuuuuuuauuucauucaug

SEQ ID NO: 170582 - RNA, 32 nt, Homo Sapiens
aucucaaaaacaaacaaacaaaaaagauuaga

SEQ ID NO: 170583 - RNA, 32 nt, Homo Sapiens
agcuacuuuuaaaauuugagggucuggaccaa

SEQ ID NO: 170584 - RNA, 32 nt, Homo Sapiens
uggguaaaucaucaaaacgggagaagaagaag

SEQ ID NO: 170585 - RNA, 32 nt, Homo Sapiens
uuucugcuucauuuuucuuucuuuucuuuucu

SEQ ID NO: 170586 - RNA, 32 nt, Homo Sapiens
ucaauaucccaacauucugcaauggcagcauu

SEQ ID NO: 170587 - RNA, 32 nt, Homo Sapiens
gcaugguagggagagacacaaaagaugggaaa

SEQ ID NO: 170588 - RNA, 32 nt, Homo Sapiens
ggccuguugggguuugagucacugggaucuuc

SEQ ID NO: 170589 - RNA, 32 nt, Homo Sapiens
ugccccugcguccuccuguacccaggcaagag

SEQ ID NO: 170590 - RNA, 32 nt, Homo Sapiens
ucgucaggacaaagaugcucaggcugcucuug

SEQ ID NO: 170591 - RNA, 32 nt, Homo Sapiens
aaggauucaaaugaauugaugaagaugggcca

SEQ ID NO: 170592 - RNA, 32 nt, Homo Sapiens
auuugcuauaguuugucauuuuugcuuacaaa

SEQ ID NO: 170593 - RNA, 32 nt, Homo Sapiens
gucacuacagcuuuuuagaaaacauagcccua

SEQ ID NO: 170594 - RNA, 32 nt, Homo Sapiens
uacucgcaugugaaauuguucuccuugauuug

SEQ ID NO: 170595 - RNA, 32 nt, Homo Sapiens
gaaacaacccucacgcaggugacgcaagacgc

SEQ ID NO: 170596 - RNA, 32 nt, Homo Sapiens
agcggccgauccccggcuccggcgcgagggac

SEQ ID NO: 170597 - RNA, 32 nt, Homo Sapiens
ggaaugcuuccgagacaccacaaggcagccug

SEQ ID NO: 170598 - RNA, 32 nt, Homo Sapiens
gcaucccggcgaggagcgccgccaggccccgg

SEQ ID NO: 170599 - RNA, 32 nt, Homo Sapiens
uccuuuccaaagauuucuuuuuccauuuuucu

SEQ ID NO: 170600 - RNA, 32 nt, Homo Sapiens
aucaggaacuuucgguuuuaaaaaagaaacau

SEQ ID NO: 170601 - RNA, 32 nt, Homo Sapiens
ccaaaaaagcugaaggggaaccccaagaagag

SEQ ID NO: 170602 - RNA, 32 nt, Homo Sapiens
ccauuuaagggauagcaguuccuuguauaaaa

SEQ ID NO: 170603 - RNA, 31 nt, Homo Sapiens
gagaggcucagcugccugcuucucgccugcc

SEQ ID NO: 170604 - RNA, 32 nt, Homo Sapiens
accucucucccucccccauccacacagaagac

SEQ ID NO: 170605 - RNA, 32 nt, Homo Sapiens
ucuucccaauacuuucaggccugcucuacaaa

SEQ ID NO: 170606 - RNA, 32 nt, Homo Sapiens
cugccugucucggccucccaaagaacugggau

SEQ ID NO: 170607 - RNA, 32 nt, Homo Sapiens
gaccccuuguggauguuuuugcaucuaccuga

SEQ ID NO: 170608 - RNA, 32 nt, Homo Sapiens
cugggccaugcagcugcacuccccucccagga

SEQ ID NO: 170609 - RNA, 32 nt, Homo Sapiens
agugggguggaauucagaagaaauuugaagac

SEQ ID NO: 170610 - RNA, 32 nt, Homo Sapiens
aagucuugaguacaugcuaaucaauaaucucc

SEQ ID NO: 170611 - RNA, 32 nt, Homo Sapiens
ccuagacuaugcaacagguuagagaacccaga

SEQ ID NO: 170612 - RNA, 29 nt, Homo Sapiens
ggcuaugcuguggagcggcugccggcguu

SEQ ID NO: 170613 - RNA, 32 nt, Homo Sapiens
caguggcuccagcccagucauucauuuuacuc

SEQ ID NO: 170614 - RNA, 32 nt, Homo Sapiens
auugcaaaaaucaguauuauuuuaagagaugu

SEQ ID NO: 170615 - RNA, 32 nt, Homo Sapiens
cacugcgcacagaccacccgcagacgcccggc

SEQ ID NO: 170616 - RNA, 32 nt, Homo Sapiens
augccaccacacgcuucagagaaagaaaggau

SEQ ID NO: 170617 - RNA, 32 nt, Homo Sapiens
augggagaaugagcuuuuuuauugacugccag

SEQ ID NO: 170618 - RNA, 32 nt, Homo Sapiens
aggagaacaugccugccgccggaccgccuuug

SEQ ID NO: 170619 - RNA, 32 nt, Homo Sapiens
uauuuacuauuuugauucaucuccauggaaga

SEQ ID NO: 170620 - RNA, 32 nt, Homo Sapiens
cgaagacggcagaggugcagguccuggugcuu

SEQ ID NO: 170621 - RNA, 32 nt, Homo Sapiens
aauauccugagauuguaagaaaagcauuuuuu

SEQ ID NO: 170622 - RNA, 32 nt, Homo Sapiens
uuuccccucaaggggacugacccugucuuuaa

SEQ ID NO: 170623 - RNA, 32 nt, Homo Sapiens
cagugacuuuugcugggcauuuucccagaugu

SEQ ID NO: 170624 - RNA, 32 nt, Homo Sapiens
agagccggccuucggcggccugacaagagccu

SEQ ID NO: 170625 - RNA, 32 nt, Homo Sapiens
cuaaucgcgauggcugccccugacgggagggu

SEQ ID NO: 170626 - RNA, 32 nt, Homo Sapiens
gagccugggacccagugagacggagucacgug

SEQ ID NO: 170627 - RNA, 32 nt, Homo Sapiens
aaaacuggcaaaggaauggaagaauauuuuag

SEQ ID NO: 170628 - RNA, 32 nt, Homo Sapiens
cugaaggucgcauuagagcgagucacauggag

SEQ ID NO: 170629 - RNA, 32 nt, Homo Sapiens
uaaaauugaucuagcuguuuuauuuuuaugua

SEQ ID NO: 170630 - RNA, 32 nt, Homo Sapiens
acggaaggccguggcgccggcuucucgggucc

SEQ ID NO: 170631 - RNA, 28 nt, Homo Sapiens
gacaguugcugcuggaggaugaccaggg

SEQ ID NO: 170632 - RNA, 32 nt, Homo Sapiens
ugagauucgagccccaguguggcagguguugg

SEQ ID NO: 170633 - RNA, 32 nt, Homo Sapiens
cgugggcuugccccgcgcgugucuguggaggg

SEQ ID NO: 170634 - RNA, 32 nt, Homo Sapiens
ggcugggcgcgguggcucacgcuuguaauccc

SEQ ID NO: 170635 - RNA, 32 nt, Homo Sapiens
ugcgggucccagagcagcacaaagccgucuca

SEQ ID NO: 170636 - RNA, 32 nt, Homo Sapiens
acaaguuugaucaacagcaaaauagaguucug

SEQ ID NO: 170637 - RNA, 32 nt, Homo Sapiens
gcaaccaccaugucauuugaaaacaguuucau

SEQ ID NO: 170638 - RNA, 32 nt, Homo Sapiens
cugcuccagagacuggcucaaaaaagaaagaa

SEQ ID NO: 170639 - RNA, 32 nt, Homo Sapiens
auauguuuaaguggaacucuccaauuccaacu

SEQ ID NO: 170640 - RNA, 32 nt, Homo Sapiens
uuauuuuugauaguuuaagagaauuauaaauc

SEQ ID NO: 170641 - RNA, 32 nt, Homo Sapiens
aggcugcuggcaggauuugucagauaaucaag

SEQ ID NO: 170642 - RNA, 32 nt, Homo Sapiens
acgcuaccuugaugaaagggaccuucgugcaa

SEQ ID NO: 170643 - RNA, 32 nt, Homo Sapiens
guugcaggcggcuuggagaaagggcaguggga

SEQ ID NO: 170644 - RNA, 32 nt, Homo Sapiens
uguucccagagcucagcacagugucaggcaca

SEQ ID NO: 170645 - RNA, 32 nt, Homo Sapiens
accguccggccgcggcgcuggcuuaagccaug

SEQ ID NO: 170646 - RNA, 32 nt, Homo Sapiens
uccuccuccuuauccgaaccccagucagaccg

SEQ ID NO: 170647 - RNA, 29 nt, Homo Sapiens
augaaguaaaguuuggccuuuguguaugg

SEQ ID NO: 170648 - RNA, 32 nt, Homo Sapiens
cuuuugggaaagggcuaaacaugugaggccug

SEQ ID NO: 170649 - RNA, 32 nt, Homo Sapiens
ugugcccuggacucgccgcccgcggcucggaa

SEQ ID NO: 170650 - RNA, 32 nt, Homo Sapiens
accacauaaaauguuugguguauaguaagugu

SEQ ID NO: 170651 - RNA, 30 nt, Homo Sapiens
gcccggacucgucugccgccgccgucgucg

SEQ ID NO: 170652 - RNA, 32 nt, Homo Sapiens
auuacuuguaauggaaaaguauauggagacaa

SEQ ID NO: 170653 - RNA, 32 nt, Homo Sapiens
acaaucggucucggggacuugacaggugaaca

SEQ ID NO: 170654 - RNA, 32 nt, Homo Sapiens
guguuggaucagguacugugucugcucauaag

SEQ ID NO: 170655 - RNA, 32 nt, Homo Sapiens
uuaaauauuuaggaagcuuuuaaaagacacua

SEQ ID NO: 170656 - RNA, 32 nt, Homo Sapiens
ccuuccccacggccggccgccuccucgcccgc

SEQ ID NO: 170657 - RNA, 32 nt, Homo Sapiens
ucacuuugucguacuuucuguuucacacauuu

SEQ ID NO: 170658 - RNA, 32 nt, Homo Sapiens
aauccuucagaauucuaagaugaauuuaccag

SEQ ID NO: 170659 - RNA, 32 nt, Homo Sapiens
gacaccaaccaaucauacuggacaaggcccuu

SEQ ID NO: 170660 - RNA, 32 nt, Homo Sapiens
ugggucugucuuggcucuggggugugcuggga

SEQ ID NO: 170661 - RNA, 32 nt, Homo Sapiens
auugauggggguggagguggggauagaacauc

SEQ ID NO: 170662 - RNA, 32 nt, Homo Sapiens
cacagcucgggauccgcgcgcgcugggccucc

SEQ ID NO: 170663 - RNA, 32 nt, Homo Sapiens
cuaccuguuguacuuuugaauuuucugauuga

SEQ ID NO: 170664 - RNA, 32 nt, Homo Sapiens
cggaaggaggcgcccccgccccgccccagagc

SEQ ID NO: 170665 - RNA, 32 nt, Homo Sapiens
cauuuuaauguuuguuuuuacuaaauuacagc

SEQ ID NO: 170666 - RNA, 32 nt, Homo Sapiens
accccccacccaccccucuccugccucggcag

SEQ ID NO: 170667 - RNA, 32 nt, Homo Sapiens
aagugagagaccuugggaccagcaaacauuuu

SEQ ID NO: 170668 - RNA, 32 nt, Homo Sapiens
ccaggacaaggggacaggcauuugugggccua

SEQ ID NO: 170669 - RNA, 28 nt, Homo Sapiens
gggcuggaguggccgccgaguuggaggc

SEQ ID NO: 170670 - RNA, 32 nt, Homo Sapiens
gccgauauuuuuauuucuuuaaugauuuugau

SEQ ID NO: 170671 - RNA, 32 nt, Homo Sapiens
gucgcugggacagccccuccccgcugcucggc

SEQ ID NO: 170672 - RNA, 32 nt, Homo Sapiens
auuuauuagagcauuugaauauugguaccuuu

SEQ ID NO: 170673 - RNA, 32 nt, Homo Sapiens
gcaacauguagaucaauuugaugaaagcacua

SEQ ID NO: 170674 - RNA, 32 nt, Homo Sapiens
uuugguauaauauauauacuucuccauacaca

SEQ ID NO: 170675 - RNA, 28 nt, Homo Sapiens
gccauggagcagcuucgcgccgccgccc

SEQ ID NO: 170676 - RNA, 32 nt, Homo Sapiens
ggguuucauauuuauaacggcaucaugagcuc

SEQ ID NO: 170677 - RNA, 32 nt, Homo Sapiens
ccaucaacccgucaucuauauuagguauuuuu

SEQ ID NO: 170678 - RNA, 32 nt, Homo Sapiens
cagacccacgggggcucacgagcucccagcaa

SEQ ID NO: 170679 - RNA, 32 nt, Homo Sapiens
ccuuacccaagcaagucauccauggauaaaaa

SEQ ID NO: 170680 - RNA, 32 nt, Homo Sapiens
aagaccauggagagaauuaugccaaguaucag

SEQ ID NO: 170681 - RNA, 32 nt, Homo Sapiens
ucaucuugacagagccugccccagcgcugacg

SEQ ID NO: 170682 - RNA, 30 nt, Homo Sapiens
guuaaaguuaugguuccagaagcuuccaaa

SEQ ID NO: 170683 - RNA, 32 nt, Homo Sapiens
aucugucagguggcaauucucacauucuuccu

SEQ ID NO: 170684 - RNA, 32 nt, Homo Sapiens
auuaaggaguuccauaccacuggacugccugg

SEQ ID NO: 170685 - RNA, 32 nt, Homo Sapiens
ucagggggaaauggaaugccccugccccagga

SEQ ID NO: 170686 - RNA, 32 nt, Homo Sapiens
ccugccgcggugccuggccuccccucccagac

SEQ ID NO: 170687 - RNA, 32 nt, Homo Sapiens
uuuuccacugucaggcaucacuggggcuaguc

SEQ ID NO: 170688 - RNA, 32 nt, Homo Sapiens
caggcugcgcgcacgcggucccggugugcagc

SEQ ID NO: 170689 - RNA, 32 nt, Homo Sapiens
gugugcccucugguucagcugaaacaguccug

SEQ ID NO: 170690 - RNA, 32 nt, Homo Sapiens
gcgcguccguaguggcggcuggcgcuagggaa

SEQ ID NO: 170691 - RNA, 32 nt, Homo Sapiens
acaugaggcagagggaagacauugaagaaaac

SEQ ID NO: 170692 - RNA, 32 nt, Homo Sapiens
ggaggguguccccgugcgucaucgguggagug

SEQ ID NO: 170693 - RNA, 32 nt, Homo Sapiens
ccugcuaaagucggggcggggcggcgguccuc

SEQ ID NO: 170694 - RNA, 32 nt, Homo Sapiens
gagggccacauccgccuccccccuucccagga

SEQ ID NO: 170695 - RNA, 32 nt, Homo Sapiens
gcaccgccucucaacagggaugacucagcagg

SEQ ID NO: 170696 - RNA, 32 nt, Homo Sapiens
uuuaauuguaaaaguagucuuaugugguguuu

SEQ ID NO: 170697 - RNA, 32 nt, Homo Sapiens
aaauuagagguggaugucuuguuuugugucau

SEQ ID NO: 170698 - RNA, 32 nt, Homo Sapiens
ggaaugggccucucuggacaagagccacccuu

SEQ ID NO: 170699 - RNA, 32 nt, Homo Sapiens
cccagaaagcucagaaggcuaaauaauauuau

SEQ ID NO: 170700 - RNA, 32 nt, Homo Sapiens
guucaagcaauucuccuuccuuagccuccuga

SEQ ID NO: 170701 - RNA, 32 nt, Homo Sapiens
cggagcacguacccagggaccgcagcccugac

SEQ ID NO: 170702 - RNA, 32 nt, Homo Sapiens
ugaggcgagaagggcugcuucccugaagcucc

SEQ ID NO: 170703 - RNA, 32 nt, Homo Sapiens
gggugggaggguggaggggcuucuccuuugug

SEQ ID NO: 170704 - RNA, 32 nt, Homo Sapiens
aguuuggggaaagagaagagaauuuccugugg

SEQ ID NO: 170705 - RNA, 32 nt, Homo Sapiens
ucacccgucuccucccucuccuucccugggcu

SEQ ID NO: 170706 - RNA, 32 nt, Homo Sapiens
aaaaauaaugccauuuuuugaaugaugaacua

SEQ ID NO: 170707 - RNA, 32 nt, Homo Sapiens
uauucucugcuguccucuguugucuuugucuu

SEQ ID NO: 170708 - RNA, 32 nt, Homo Sapiens
cgaacauucacagaugccaaaguaggcacucg

SEQ ID NO: 170709 - RNA, 32 nt, Homo Sapiens
caaaguaauuuuuaauuuaauucaucauuuca

SEQ ID NO: 170710 - RNA, 32 nt, Homo Sapiens
ggcagguguagccucugugccucguugucccc

SEQ ID NO: 170711 - RNA, 32 nt, Homo Sapiens
ucggaagccccccaccugcguuuuccgccgug

SEQ ID NO: 170712 - RNA, 32 nt, Homo Sapiens
gcaucccuccaaggccugacucccuuucacua

SEQ ID NO: 170713 - RNA, 32 nt, Homo Sapiens
cuagugaagggagaacagaaggggaguccucu

SEQ ID NO: 170714 - RNA, 32 nt, Homo Sapiens
aagcccuccuccgggagggacugccgucgagg

SEQ ID NO: 170715 - RNA, 32 nt, Homo Sapiens
ugugauuccagaaaaguagauccuauuuuugu

SEQ ID NO: 170716 - RNA, 32 nt, Homo Sapiens
gacgucgcagccgagggaacaagccccaaccg

SEQ ID NO: 170717 - RNA, 32 nt, Homo Sapiens
uaggcuccaaccccagacacucuuauuucauu

SEQ ID NO: 170718 - RNA, 32 nt, Homo Sapiens
uaaacacagcugccuccaaggaccgcugccug

SEQ ID NO: 170719 - RNA, 32 nt, Homo Sapiens
uucaccuucauuuuccaaaaugaauaucuuaa

SEQ ID NO: 170720 - RNA, 32 nt, Homo Sapiens
cacucucgcgcccuccgcgggccucccaauuu

SEQ ID NO: 170721 - RNA, 32 nt, Homo Sapiens
ugcgcaggcagguuuuaggaacaucaugggug

SEQ ID NO: 170722 - RNA, 32 nt, Homo Sapiens
aagagcccccugcugccccccgcggcggcuug

SEQ ID NO: 170723 - RNA, 32 nt, Homo Sapiens
gguggggcaaagggcuggaccccugccagguc

SEQ ID NO: 170724 - RNA, 32 nt, Homo Sapiens
agccauauauucaaauauguaauuuuccucau

SEQ ID NO: 170725 - RNA, 32 nt, Homo Sapiens
cucauauucgucacgucauuucaucuucaccc

SEQ ID NO: 170726 - RNA, 32 nt, Homo Sapiens
cguuugcuggaacacauuaugcagggugaauu

SEQ ID NO: 170727 - RNA, 32 nt, Homo Sapiens
uggaggucaaggcuguggacagaucagaagac

SEQ ID NO: 170728 - RNA, 31 nt, Homo Sapiens
ucuggaugcaugagaaagucuaccuucagag

SEQ ID NO: 170729 - RNA, 32 nt, Homo Sapiens
uauuuuuaaaguuaaaauauauuuuuacgugc

SEQ ID NO: 170730 - RNA, 32 nt, Homo Sapiens
caugucugucuccgcagagacacugccaggag

SEQ ID NO: 170731 - RNA, 32 nt, Homo Sapiens
uuuuuccuggacuuguucugcagagcgcucag

SEQ ID NO: 170732 - RNA, 32 nt, Homo Sapiens
gggguagcgggcaggggccggaggggccaccc

SEQ ID NO: 170733 - RNA, 32 nt, Homo Sapiens
gaugucccgagcugcuauccccggcucggccc

SEQ ID NO: 170734 - RNA, 32 nt, Homo Sapiens
uggagguuuggggcgaauguccugaggcagag

SEQ ID NO: 170735 - RNA, 32 nt, Homo Sapiens
ccucucugccagcacccuguccaugucaucug

SEQ ID NO: 170736 - RNA, 32 nt, Homo Sapiens
gccgcuccgaggugaaggcgcgcgccccuccc

SEQ ID NO: 170737 - RNA, 32 nt, Homo Sapiens
ugcucugccugccuggggcccuggcuagccug

SEQ ID NO: 170738 - RNA, 32 nt, Homo Sapiens
aaucuggucugagcugggccugugggaggggc

SEQ ID NO: 170739 - RNA, 32 nt, Homo Sapiens
ucuuccaggagaagauacaaauccacaagaaa

SEQ ID NO: 170740 - RNA, 32 nt, Homo Sapiens
auuaaguccuggcuuccauuuuccuggugcag

SEQ ID NO: 170741 - RNA, 32 nt, Homo Sapiens
aaaccagaaugcuucugaaacucccaccuguu

SEQ ID NO: 170742 - RNA, 32 nt, Homo Sapiens
ggagauggagaccauccuggcuaacaugguga

SEQ ID NO: 170743 - RNA, 32 nt, Homo Sapiens
uccaguauaucuaauaaguauuucauauuauu

SEQ ID NO: 170744 - RNA, 32 nt, Homo Sapiens
cagcagcaauugaagaugugucuggagacacu

SEQ ID NO: 170745 - RNA, 32 nt, Homo Sapiens
ugcccaccagguuuccucucuuguccccuagu

SEQ ID NO: 170746 - RNA, 32 nt, Homo Sapiens
guggcauugggaggcccggccugggggaggag

SEQ ID NO: 170747 - RNA, 32 nt, Homo Sapiens
uugcaggugugagccaccacgcccagccuaga

SEQ ID NO: 170748 - RNA, 32 nt, Homo Sapiens
gaggccgcggcggggaaaauggcggacgggaa

SEQ ID NO: 170749 - RNA, 32 nt, Homo Sapiens
cccuuuguccuggccuccggagcgcucccugc

SEQ ID NO: 170750 - RNA, 32 nt, Homo Sapiens
ugccuugaugucagguguagcguguuggguuc

SEQ ID NO: 170751 - RNA, 31 nt, Homo Sapiens
cuaaagaacauauugcagcagauccaggaaa

SEQ ID NO: 170752 - RNA, 32 nt, Homo Sapiens
ucagguagcugagacuacaggcgugcaccauc

SEQ ID NO: 170753 - RNA, 32 nt, Homo Sapiens
agugguaagggagaggggacaccuggccaggg

SEQ ID NO: 170754 - RNA, 32 nt, Homo Sapiens
uaaacuauuucuuuauaauggcaaauuacuuu

SEQ ID NO: 170755 - RNA, 32 nt, Homo Sapiens
acaaagauuagagaggacuacacaucagggcu

SEQ ID NO: 170756 - RNA, 32 nt, Homo Sapiens
gacacacacacacacaaacacacacacacacc

SEQ ID NO: 170757 - RNA, 30 nt, Homo Sapiens
uuaaaaggagguggaugcauccaaagcacg

SEQ ID NO: 170758 - RNA, 32 nt, Homo Sapiens
ugaaaaccaaaggaggagcagcagaagccaua

SEQ ID NO: 170759 - RNA, 32 nt, Homo Sapiens
uauuauuuuuauacugaauauaaaaacauuug

SEQ ID NO: 170760 - RNA, 32 nt, Homo Sapiens
uaaucacgaauguaguaauauuucaugauugu

SEQ ID NO: 170761 - RNA, 32 nt, Homo Sapiens
gcacuaugcugagcuuacacuaauuggucaga

SEQ ID NO: 170762 - RNA, 32 nt, Homo Sapiens
ugcuuguuaguugcucuuucuggcucugccuc

SEQ ID NO: 170763 - RNA, 32 nt, Homo Sapiens
uuucccuugguugucuuaauuuuuuuuuuuuu

SEQ ID NO: 170764 - RNA, 32 nt, Homo Sapiens
uauuaucuuguucugaauaaaauguauuuacu

SEQ ID NO: 170765 - RNA, 32 nt, Homo Sapiens
acuuuaggaaguauuaaaaauauuuuuaagau

SEQ ID NO: 170766 - RNA, 32 nt, Homo Sapiens
uccacuccagcauccaugaagcuggcccagcg

SEQ ID NO: 170767 - RNA, 32 nt, Homo Sapiens
cggagccggcgggacaugcccggagcgcgcgc

SEQ ID NO: 170768 - RNA, 32 nt, Homo Sapiens
uauucugggguagaaggaaggcugggaguggu

SEQ ID NO: 170769 - RNA, 32 nt, Homo Sapiens
cuaucuagacauuacgggaggcccgagauggg

SEQ ID NO: 170770 - RNA, 32 nt, Homo Sapiens
cuuaacugucuccuacauguguguuuucaaau

SEQ ID NO: 170771 - RNA, 32 nt, Homo Sapiens
cacacccgccccagccaacuucaugggucacu

SEQ ID NO: 170772 - RNA, 32 nt, Homo Sapiens
agaagcaaccaucagaggcagggugguuuguc

SEQ ID NO: 170773 - RNA, 32 nt, Homo Sapiens
cugggggaaugggaaaggcuuggugcuuccuc

SEQ ID NO: 170774 - RNA, 32 nt, Homo Sapiens
augccaaaaggggucuuaauugaaaugaaaau

SEQ ID NO: 170775 - RNA, 32 nt, Homo Sapiens
ggaagagcuuggguguuaggccucagaggcug

SEQ ID NO: 170776 - RNA, 32 nt, Homo Sapiens
ccuggcccacacccugcagcccgccccauggu

SEQ ID NO: 170777 - RNA, 32 nt, Homo Sapiens
ggaggccaaucccucccuccccuccccagucc

SEQ ID NO: 170778 - RNA, 32 nt, Homo Sapiens
guucccuguuuucucucugccgggugguggca

SEQ ID NO: 170779 - RNA, 32 nt, Homo Sapiens
ugaaauacuauuuuuuaucaaguuuuauaaag

SEQ ID NO: 170780 - RNA, 28 nt, Homo Sapiens
gugaugggagaugcccugggguccgugg

SEQ ID NO: 170781 - RNA, 32 nt, Homo Sapiens
aggccugugucugugccacaccugccacggug

SEQ ID NO: 170782 - RNA, 32 nt, Homo Sapiens
cgccgagcacugggcccuggcagacgccccaa

SEQ ID NO: 170783 - RNA, 32 nt, Homo Sapiens
agagcccuucuucccuucuccaccuagugaag

SEQ ID NO: 170784 - RNA, 32 nt, Homo Sapiens
uugaacucaggaguuugagagcagccagggca

SEQ ID NO: 170785 - RNA, 32 nt, Homo Sapiens
ccuuuuguugccaaaaagguaguucucgcgcu

SEQ ID NO: 170786 - RNA, 32 nt, Homo Sapiens
guaaaaugagaaccgauuuucaguuuagugua

SEQ ID NO: 170787 - RNA, 31 nt, Homo Sapiens
gagaaaaaagggcccuucugaguuaaggagc

SEQ ID NO: 170788 - RNA, 29 nt, Homo Sapiens
guuguuucuauccccauuacaacuuguuu

SEQ ID NO: 170789 - RNA, 32 nt, Homo Sapiens
ccaagggcgaguauagagagugagagucaggu

SEQ ID NO: 170790 - RNA, 32 nt, Homo Sapiens
auuuugacuuuugagauugaauguaaaauauu

SEQ ID NO: 170791 - RNA, 32 nt, Homo Sapiens
ccauguuagaaaacagaauccagucaucagcu

SEQ ID NO: 170792 - RNA, 32 nt, Homo Sapiens
agggaaccuuaagucagaauuccuacaagaau

SEQ ID NO: 170793 - RNA, 32 nt, Homo Sapiens
cagaaguuaaaauggacagcauuucuagaauu

SEQ ID NO: 170794 - RNA, 32 nt, Homo Sapiens
gaacagaagaaauaaacugaguuuaaggggga

SEQ ID NO: 170795 - RNA, 32 nt, Homo Sapiens
uacaauauuacgaagaucugcauuguauuuug

SEQ ID NO: 170796 - RNA, 32 nt, Homo Sapiens
gcgggaccggcguccccggcgcgaagaggcug

SEQ ID NO: 170797 - RNA, 32 nt, Homo Sapiens
aguagcugcuuccuggacgugcgcgcccaggc

SEQ ID NO: 170798 - RNA, 32 nt, Homo Sapiens
gcauauuuaugaacauauuucuuaauaagaaa

SEQ ID NO: 170799 - RNA, 32 nt, Homo Sapiens
acucuggcuaaagucuuggaggcuacugccuu

SEQ ID NO: 170800 - RNA, 32 nt, Homo Sapiens
acaacaugcaagaugggagaguugagaagguu

SEQ ID NO: 170801 - RNA, 32 nt, Homo Sapiens
gaguaaccucacuucaagcauucuucauuuaa

SEQ ID NO: 170802 - RNA, 32 nt, Homo Sapiens
ucacgcauccugugacucuccccugucccccg

SEQ ID NO: 170803 - RNA, 32 nt, Homo Sapiens
cguccuuccuccuuccucuccgggcugccagg

SEQ ID NO: 170804 - RNA, 32 nt, Homo Sapiens
uuucaaaacaauuauguaaucuucuucacuuu

SEQ ID NO: 170805 - RNA, 32 nt, Homo Sapiens
ccccucucaggagagugugcaacuggccagcc

SEQ ID NO: 170806 - RNA, 32 nt, Homo Sapiens
uggggaccaauaugccaggcaugggcuuuuau

SEQ ID NO: 170807 - RNA, 32 nt, Homo Sapiens
uauggauauuuaaauuguuaaaacuuuaugaa

SEQ ID NO: 170808 - RNA, 32 nt, Homo Sapiens
aggugcaggcccggcgccgccacugccgcagc

SEQ ID NO: 170809 - RNA, 32 nt, Homo Sapiens
cugugggcugagcgcucuuaaucuccccucua

SEQ ID NO: 170810 - RNA, 32 nt, Homo Sapiens
gagccccaggcgccagccacaggacucugcug

SEQ ID NO: 170811 - RNA, 32 nt, Homo Sapiens
agcuucaacagccuggagacacugccggccug

SEQ ID NO: 170812 - RNA, 32 nt, Homo Sapiens
ucuggaaaaaaauuauauuuaaguuucagcag

SEQ ID NO: 170813 - RNA, 32 nt, Homo Sapiens
uacagaaagagauuaguacugaagagcagcua

SEQ ID NO: 170814 - RNA, 32 nt, Homo Sapiens
ugcccuggagaaaauaaagagaaggcuggaga

SEQ ID NO: 170815 - RNA, 32 nt, Homo Sapiens
cccgugcgcccucggcgcguacccgccgcgcu

SEQ ID NO: 170816 - RNA, 32 nt, Homo Sapiens
augccccagcuauugggcaaauuccucugacu

SEQ ID NO: 170817 - RNA, 32 nt, Homo Sapiens
cuggaaaugacaaaguucuccuauuacuaaau

SEQ ID NO: 170818 - RNA, 32 nt, Homo Sapiens
agaagaacauucaaauccaaaguucucgccca

SEQ ID NO: 170819 - RNA, 32 nt, Homo Sapiens
agaguaguccagguguucuccuccuauucagu

SEQ ID NO: 170820 - RNA, 32 nt, Homo Sapiens
ccgcugcugcgagaccccggcccgcgucgguc

SEQ ID NO: 170821 - RNA, 32 nt, Homo Sapiens
agaucugcucaucgucacugucuguacaguau

SEQ ID NO: 170822 - RNA, 32 nt, Homo Sapiens
cggagccuucccuccaggugcccaguguaggu

SEQ ID NO: 170823 - RNA, 32 nt, Homo Sapiens
aaauuugcucuaauaaaacauaccaaauccug

SEQ ID NO: 170824 - RNA, 32 nt, Homo Sapiens
uugauucuuucucauggcaaccccgcaggaaa

SEQ ID NO: 170825 - RNA, 32 nt, Homo Sapiens
uuccuccacccuuuccucucccucaguuugca

SEQ ID NO: 170826 - RNA, 32 nt, Homo Sapiens
caccugcccuccccagccagcuccugucugua

SEQ ID NO: 170827 - RNA, 32 nt, Homo Sapiens
gugauaaaauucaaauaagauuuuauuucuuu

SEQ ID NO: 170828 - RNA, 32 nt, Homo Sapiens
ugcggcuccacacccgcgggacccgagccucu

SEQ ID NO: 170829 - RNA, 32 nt, Homo Sapiens
cagcagcagcagcagcagcaucggagguaccc

SEQ ID NO: 170830 - RNA, 32 nt, Homo Sapiens
ucuacaaaacuuguuuguacaauauaaaacac

SEQ ID NO: 170831 - RNA, 32 nt, Homo Sapiens
aacaagcggaagcuaccagcagcugacccuca

SEQ ID NO: 170832 - RNA, 32 nt, Homo Sapiens
gcuguggagcggcugucgccccggggcacagu

SEQ ID NO: 170833 - RNA, 32 nt, Homo Sapiens
auacucuacuuuuuuauucaauuuaauaugau

SEQ ID NO: 170834 - RNA, 32 nt, Homo Sapiens
ccggagaugucuuuuuauuuuugugcuguaaa

SEQ ID NO: 170835 - RNA, 32 nt, Homo Sapiens
guagccugcugugggguauacagcauugacuc

SEQ ID NO: 170836 - RNA, 32 nt, Homo Sapiens
ggcggggcggggggaggugggugugaagaacg

SEQ ID NO: 170837 - RNA, 32 nt, Homo Sapiens
uccggucuacaagagcucucaaggcugggucu

SEQ ID NO: 170838 - RNA, 32 nt, Homo Sapiens
gaacauugguuuccaauuuaguuuaacugaaa

SEQ ID NO: 170839 - RNA, 32 nt, Homo Sapiens
gcuagacuuuauucauuauauugcuaugacaa

SEQ ID NO: 170840 - RNA, 32 nt, Homo Sapiens
guucuguuauuuaauguuguuaucucaagcuc

SEQ ID NO: 170841 - RNA, 32 nt, Homo Sapiens
ggaaggcagucgugcgccccccgcccccgggc

SEQ ID NO: 170842 - RNA, 32 nt, Homo Sapiens
ucugccugacccuagcugcugcugcugcucac

SEQ ID NO: 170843 - RNA, 32 nt, Homo Sapiens
ggcucgcucgccucagccccagcgccccucgg

SEQ ID NO: 170844 - RNA, 32 nt, Homo Sapiens
uacauauaaaacaaacaaaaagacuccgagcg

SEQ ID NO: 170845 - RNA, 32 nt, Homo Sapiens
gcagccgaggugcaggaugcaagaaggcgccc

SEQ ID NO: 170846 - RNA, 30 nt, Homo Sapiens
ugcuuggagaagcugugaguugagcugaag

SEQ ID NO: 170847 - RNA, 32 nt, Homo Sapiens
caggacuuggccggcgugaucucagcucugca

SEQ ID NO: 170848 - RNA, 32 nt, Homo Sapiens
cagacacggcccuggugaugggcguugcaaag

SEQ ID NO: 170849 - RNA, 32 nt, Homo Sapiens
cacccagugggaagagugugggggaggcgcac

SEQ ID NO: 170850 - RNA, 32 nt, Homo Sapiens
guggccgccugccagcuaugggcccccacacc

SEQ ID NO: 170851 - RNA, 32 nt, Homo Sapiens
gaaguggacccugggugggcccggcccugucu

SEQ ID NO: 170852 - RNA, 32 nt, Homo Sapiens
ucuucuguuaauuuuuaaguuuugguuagugc

SEQ ID NO: 170853 - RNA, 32 nt, Homo Sapiens
acucuuaagcuuugagaaauuuucacauugau

SEQ ID NO: 170854 - RNA, 32 nt, Homo Sapiens
ggcugacccuccccgaggugccacaccccucc

SEQ ID NO: 170855 - RNA, 32 nt, Homo Sapiens
gaggugggaagggugagggucugggggaaugc

SEQ ID NO: 170856 - RNA, 32 nt, Homo Sapiens
uuuuuauauaaugucuaacaaaaaauacagcu

SEQ ID NO: 170857 - RNA, 32 nt, Homo Sapiens
cggaggaggagguggugaaacaggaagcaaca

SEQ ID NO: 170858 - RNA, 32 nt, Homo Sapiens
cacccuggaugguauacgcagcugcacacgug

SEQ ID NO: 170859 - RNA, 32 nt, Homo Sapiens
ugucauguuuuaaagcuugcucacaucuuggc

SEQ ID NO: 170860 - RNA, 32 nt, Homo Sapiens
ccucauuuuuuuucuuuuuuuauagagaugag

SEQ ID NO: 170861 - RNA, 32 nt, Homo Sapiens
gaaagcagguuaacagcugucuauguauguua

SEQ ID NO: 170862 - RNA, 31 nt, Homo Sapiens
gccaccaugacgcuccuccccggccuccugu

SEQ ID NO: 170863 - RNA, 32 nt, Homo Sapiens
ugaagagauggauaagaaagaucaaguguauc

SEQ ID NO: 170864 - RNA, 32 nt, Homo Sapiens
agccagggcagggcgagcugcaggaaucaccc

SEQ ID NO: 170865 - RNA, 32 nt, Homo Sapiens
uuuacguugcgcgaagcccgccggcagcggcu

SEQ ID NO: 170866 - RNA, 32 nt, Homo Sapiens
uccucccgcggcggcccgcgggacggcgugac

SEQ ID NO: 170867 - RNA, 32 nt, Homo Sapiens
ugguggagagcgggggcggggauucagcgcgu

SEQ ID NO: 170868 - RNA, 32 nt, Homo Sapiens
gucacauaauuaucuuugauaaagguagaggc

SEQ ID NO: 170869 - RNA, 32 nt, Homo Sapiens
aaugagugggguugggggcggggugggcaggg

SEQ ID NO: 170870 - RNA, 32 nt, Homo Sapiens
cuaguugacaacauugcuugaaugcugguggu

SEQ ID NO: 170871 - RNA, 32 nt, Homo Sapiens
gcaguucugagccuggcuuuggcacucccagc

SEQ ID NO: 170872 - RNA, 32 nt, Homo Sapiens
cggcuggcacggcgucacugggugggcugggg

SEQ ID NO: 170873 - RNA, 29 nt, Homo Sapiens
gauucuuugaagauugggaaggcucagaa

SEQ ID NO: 170874 - RNA, 32 nt, Homo Sapiens
ccucacccccucccacccccagccccgacucc

SEQ ID NO: 170875 - RNA, 32 nt, Homo Sapiens
cggccgcucaauccccacucccucaugcuuug

SEQ ID NO: 170876 - RNA, 32 nt, Homo Sapiens
gacuuucagcgaagagcugugcucuuuucuga

SEQ ID NO: 170877 - RNA, 32 nt, Homo Sapiens
cauaaaguuaauuauagcuuugaaagauaaaa

SEQ ID NO: 170878 - RNA, 32 nt, Homo Sapiens
uggagaaagcaggacgcagagaagaacaaaug

SEQ ID NO: 170879 - RNA, 32 nt, Homo Sapiens
uaucuuguauauauuuuacccaaucaauaugu

SEQ ID NO: 170880 - RNA, 32 nt, Homo Sapiens
gcaggcggaucacagggucgggaguucgagac

SEQ ID NO: 170881 - RNA, 32 nt, Homo Sapiens
gcagugaggcggauugagaaggagcucccagg

SEQ ID NO: 170882 - RNA, 32 nt, Homo Sapiens
aaucucugccagcagaacugguuuuguucuga

SEQ ID NO: 170883 - RNA, 32 nt, Homo Sapiens
aacuaaggcacugacacuuuagacauuacacu

SEQ ID NO: 170884 - RNA, 32 nt, Homo Sapiens
ucccccggcuauucugacccgccccgguuccg

SEQ ID NO: 170885 - RNA, 32 nt, Homo Sapiens
uggggacugugucgaggggguccccaaggugc

SEQ ID NO: 170886 - RNA, 32 nt, Homo Sapiens
uugaccuaaaagacaucuauagaacuuuccac

SEQ ID NO: 170887 - RNA, 32 nt, Homo Sapiens
uaaacuagacaucuuaauuggugaaaguuguu

SEQ ID NO: 170888 - RNA, 32 nt, Homo Sapiens
aggaucuggggguggggguggaaaagcaacug

SEQ ID NO: 170889 - RNA, 32 nt, Homo Sapiens
uaccacucucuuuccccuuccaccaucauugg

SEQ ID NO: 170890 - RNA, 32 nt, Homo Sapiens
gucauaauaguaaaacucuacuccucuacucc

SEQ ID NO: 170891 - RNA, 32 nt, Homo Sapiens
gugaucacugccccuuugaacuucugggcuca

SEQ ID NO: 170892 - RNA, 32 nt, Homo Sapiens
ucacccccaagcccugccugccucccauugcc

SEQ ID NO: 170893 - RNA, 32 nt, Homo Sapiens
acacagagauaaauguuuuccugcuuugguua

SEQ ID NO: 170894 - RNA, 32 nt, Homo Sapiens
caggugugauuacuuuuuugcucguagauauu

SEQ ID NO: 170895 - RNA, 32 nt, Homo Sapiens
gcgcucgccauggccgacgaaaagcccaagga

SEQ ID NO: 170896 - RNA, 32 nt, Homo Sapiens
acugaacuuuugcuauaccaugcuuuccacaa

SEQ ID NO: 170897 - RNA, 31 nt, Homo Sapiens
auaugagauauuaaaauaagcacagaaaauc

SEQ ID NO: 170898 - RNA, 32 nt, Homo Sapiens
gacuugauaauuauguuucugaaugaaucagc

SEQ ID NO: 170899 - RNA, 32 nt, Homo Sapiens
auauauuuccuauauuguuuucaguguacaug

SEQ ID NO: 170900 - RNA, 32 nt, Homo Sapiens
aagaugaguaaaugcagugcuucuuaaagugg

SEQ ID NO: 170901 - RNA, 32 nt, Homo Sapiens
uucagaagcugauggcauaguuaugagagggg

SEQ ID NO: 170902 - RNA, 32 nt, Homo Sapiens
ccagcagcacccccuggccccuggaguggugg

SEQ ID NO: 170903 - RNA, 32 nt, Homo Sapiens
ccucauugacauucugguccggcugaaucaga

SEQ ID NO: 170904 - RNA, 32 nt, Homo Sapiens
uauuauaaaggauaucacaaaggacacagaug

SEQ ID NO: 170905 - RNA, 32 nt, Homo Sapiens
gcccaggggaccagcuguguucucccaccccc

SEQ ID NO: 170906 - RNA, 32 nt, Homo Sapiens
cucccuucagccgccucgucgucagcguucuu

SEQ ID NO: 170907 - RNA, 32 nt, Homo Sapiens
gucugcgacgugugucgcucuccugagggcga

SEQ ID NO: 170908 - RNA, 32 nt, Homo Sapiens
cagcacucgccaggugcagguuuugugcugac

SEQ ID NO: 170909 - RNA, 32 nt, Homo Sapiens
guggccgugugagcgugaggagcugccgccac

SEQ ID NO: 170910 - RNA, 32 nt, Homo Sapiens
aaauuuugcagaagcuauguuuuuaaagugua

SEQ ID NO: 170911 - RNA, 32 nt, Homo Sapiens
gccagcugcugaggcggcggcuggggcugggg

SEQ ID NO: 170912 - RNA, 32 nt, Homo Sapiens
gucucaaaaacaaacaaacaaacaaacaaaca

SEQ ID NO: 170913 - RNA, 32 nt, Homo Sapiens
uucugccagaacuuaacccaaauacacacaga

SEQ ID NO: 170914 - RNA, 32 nt, Homo Sapiens
uagcauauuucugagaaauuauauucagguga

SEQ ID NO: 170915 - RNA, 32 nt, Homo Sapiens
gguugccgcugcggagcgcggcggguccaugu

SEQ ID NO: 170916 - RNA, 28 nt, Homo Sapiens
cacuuugaaagauaacauuuuauuauga

SEQ ID NO: 170917 - RNA, 32 nt, Homo Sapiens
aggcgggugagccccaggcuggcagcuagcaa

SEQ ID NO: 170918 - RNA, 32 nt, Homo Sapiens
cuacggggccgcggccacuagcgcggcgccgc

SEQ ID NO: 170919 - RNA, 32 nt, Homo Sapiens
cugcaaaugcuguuuagggccaucgccucuuc

SEQ ID NO: 170920 - RNA, 32 nt, Homo Sapiens
auuuuaacaggauaauuugguuauuacucacu

SEQ ID NO: 170921 - RNA, 32 nt, Homo Sapiens
gcgcagguguuggggcacaguccccaagggcu

SEQ ID NO: 170922 - RNA, 32 nt, Homo Sapiens
ucgggauucaagugauucuacugccucagccu

SEQ ID NO: 170923 - RNA, 32 nt, Homo Sapiens
ugagucugaccuucuuuucuuguccaccuccc

SEQ ID NO: 170924 - RNA, 32 nt, Homo Sapiens
ccagagaagagccaggcagagaaaaccugcau

SEQ ID NO: 170925 - RNA, 32 nt, Homo Sapiens
gcaaauagucucuauuuguaauugaacuuauc

SEQ ID NO: 170926 - RNA, 32 nt, Homo Sapiens
uuauauuugugcuuuuugucaguguguaagcu

SEQ ID NO: 170927 - RNA, 32 nt, Homo Sapiens
auggcuuuaugaauuggaauuucauaggcuua

SEQ ID NO: 170928 - RNA, 32 nt, Homo Sapiens
ccaaaaaugcaaacacccugaggauucagaga

SEQ ID NO: 170929 - RNA, 32 nt, Homo Sapiens
auccuuugccuuaucuaacaaacauuuuucca

SEQ ID NO: 170930 - RNA, 32 nt, Homo Sapiens
uuuuuuauacucuacuuuuuuauucaauuuaa

SEQ ID NO: 170931 - RNA, 32 nt, Homo Sapiens
accaaguggacuuuuugcgggguguggcggcc

SEQ ID NO: 170932 - RNA, 32 nt, Homo Sapiens
gaagcaugaacaggacgcuguuccuaagucau

SEQ ID NO: 170933 - RNA, 32 nt, Homo Sapiens
ccuagcccaucccaguuuauccuguaucauuu

SEQ ID NO: 170934 - RNA, 32 nt, Homo Sapiens
guauauccuauggucuucuccauccucacacc

SEQ ID NO: 170935 - RNA, 32 nt, Homo Sapiens
agcugccugcaccugcccuucagggagauggg

SEQ ID NO: 170936 - RNA, 32 nt, Homo Sapiens
uacaguggccagcaguguccuccagcacuucc

SEQ ID NO: 170937 - RNA, 32 nt, Homo Sapiens
caaauguuuuccuuaugacacugguuucgaca

SEQ ID NO: 170938 - RNA, 32 nt, Homo Sapiens
uaaagaaaaaauaaaguggaaacuuuuagagu

SEQ ID NO: 170939 - RNA, 32 nt, Homo Sapiens
cagcaagaaaccgaauaaaauacuaacauuuc

SEQ ID NO: 170940 - RNA, 32 nt, Homo Sapiens
guugaauacuauuuauccaagguaucaaggaa

SEQ ID NO: 170941 - RNA, 32 nt, Homo Sapiens
uccugaggauguucaagugcugaaaucaagac

SEQ ID NO: 170942 - RNA, 32 nt, Homo Sapiens
uggagcaugggaccauagccccugcccaggag

SEQ ID NO: 170943 - RNA, 32 nt, Homo Sapiens
aagaaguccugguguggguuguuugacaccuu

SEQ ID NO: 170944 - RNA, 32 nt, Homo Sapiens
gccggcguccccagcccuaucaccucaucucc

SEQ ID NO: 170945 - RNA, 32 nt, Homo Sapiens
gucaccaucuucuacccccaucacuguauagu

SEQ ID NO: 170946 - RNA, 32 nt, Homo Sapiens
ggugggaggugauuggaucauaggagcggauu

SEQ ID NO: 170947 - RNA, 32 nt, Homo Sapiens
ggcucagaaaacgugacucugugcagauacag

SEQ ID NO: 170948 - RNA, 32 nt, Homo Sapiens
aaauaaccaauauguggaaauggacacaggga

SEQ ID NO: 170949 - RNA, 32 nt, Homo Sapiens
gaaguagauuauucuuuuuagaacugaagcau

SEQ ID NO: 170950 - RNA, 32 nt, Homo Sapiens
uugauuguguaauugauaaugcacuuucucaa

SEQ ID NO: 170951 - RNA, 32 nt, Homo Sapiens
caacuacuuccucauuuuaagguauggcaguu

SEQ ID NO: 170952 - RNA, 32 nt, Homo Sapiens
guacauguauaaauauaaaaauuaagugauca

SEQ ID NO: 170953 - RNA, 32 nt, Homo Sapiens
gcuuccagaaacaaaauuauguaucuguggcc

SEQ ID NO: 170954 - RNA, 32 nt, Homo Sapiens
cuaugaacgauccauggacgcccuaggaaaac

SEQ ID NO: 170955 - RNA, 32 nt, Homo Sapiens
ccauuucuaccuuguaugccucaauuugcugg

SEQ ID NO: 170956 - RNA, 32 nt, Homo Sapiens
ugccucacaccuguaauuccagcacuuuggga

SEQ ID NO: 170957 - RNA, 32 nt, Homo Sapiens
ccgcgucuuauuccuucuaaucucuccccugc

SEQ ID NO: 170958 - RNA, 32 nt, Homo Sapiens
ggaguugggggccccuguggggcucugaaguc

SEQ ID NO: 170959 - RNA, 29 nt, Homo Sapiens
uugcacuuguuacuguaccauagugcgga

SEQ ID NO: 170960 - RNA, 32 nt, Homo Sapiens
ggaucuugauuuccuuguuguacauuuuccug

SEQ ID NO: 170961 - RNA, 32 nt, Homo Sapiens
gggagggcagcccaggcccaagugacagcaag

SEQ ID NO: 170962 - RNA, 32 nt, Homo Sapiens
guagcugaccagcagaccuaccugcaguggga

SEQ ID NO: 170963 - RNA, 32 nt, Homo Sapiens
gggaucgugucccuuccagcaccuugcuuucg

SEQ ID NO: 170964 - RNA, 32 nt, Homo Sapiens
uuuuauauuuggauauaagagaggaacuucuu

SEQ ID NO: 170965 - RNA, 29 nt, Homo Sapiens
gaaauugucugccaauaccaaggauauuc

SEQ ID NO: 170966 - RNA, 32 nt, Homo Sapiens
gauaguggacagagaccuuuguaaccaaugga

SEQ ID NO: 170967 - RNA, 32 nt, Homo Sapiens
uucuugaaaauuauauauaccuggcuuugcuu

SEQ ID NO: 170968 - RNA, 32 nt, Homo Sapiens
ucuucggcggcggcggcggcggcggcccaugc

SEQ ID NO: 170969 - RNA, 32 nt, Homo Sapiens
cacgaagacuuacaagugagcguagcagcgac

SEQ ID NO: 170970 - RNA, 32 nt, Homo Sapiens
ggauuuucacauuucaucaucucuaaaauugu

SEQ ID NO: 170971 - RNA, 32 nt, Homo Sapiens
uacaugagcagacauuuccucauauuuaaagu

SEQ ID NO: 170972 - RNA, 31 nt, Homo Sapiens
acucaaggggaccagaaccagggagaugaga

SEQ ID NO: 170973 - RNA, 32 nt, Homo Sapiens
aggccgcuuccaggaagccccgggccaggccc

SEQ ID NO: 170974 - RNA, 32 nt, Homo Sapiens
caauaaagauuugaaccuguaaaugugugugc

SEQ ID NO: 170975 - RNA, 32 nt, Homo Sapiens
ugcuaacauuaauaaacuuauauuugugcuuu

SEQ ID NO: 170976 - RNA, 32 nt, Homo Sapiens
cucaugcuucuuugcagccucuccaggcccag

SEQ ID NO: 170977 - RNA, 32 nt, Homo Sapiens
gauggagcuacagggggagaucgaggcucgcu

SEQ ID NO: 170978 - RNA, 32 nt, Homo Sapiens
cagcaucuuccggugcuauccuccccucccac

SEQ ID NO: 170979 - RNA, 32 nt, Homo Sapiens
ugccucuuaggacuuaagacuacccuacagga

SEQ ID NO: 170980 - RNA, 32 nt, Homo Sapiens
uaauuaaaaaacaguggaauggaaaaacagug

SEQ ID NO: 170981 - RNA, 32 nt, Homo Sapiens
agcuggcgucaucggagucuguuguucuguug

SEQ ID NO: 170982 - RNA, 32 nt, Homo Sapiens
ucacccucuucccccacccccaucaccgagaa

SEQ ID NO: 170983 - RNA, 32 nt, Homo Sapiens
ggacagaccucggcaugccuucuguuucuccu

SEQ ID NO: 170984 - RNA, 32 nt, Homo Sapiens
cuaauuguuuaguuauuguuucuauuucucau

SEQ ID NO: 170985 - RNA, 32 nt, Homo Sapiens
aaagcugcuucugccacgugcugcugggucuc

SEQ ID NO: 170986 - RNA, 32 nt, Homo Sapiens
uacauauaauuuuucuucuuuagucauggaga

SEQ ID NO: 170987 - RNA, 32 nt, Homo Sapiens
ggccaggcgcgguggcucaugccuguaauccc

SEQ ID NO: 170988 - RNA, 32 nt, Homo Sapiens
cagcuaggcgcgugagaccggccgcccgcagg

SEQ ID NO: 170989 - RNA, 32 nt, Homo Sapiens
ggcugggcgugguggcucacaccugcaauccc

SEQ ID NO: 170990 - RNA, 32 nt, Homo Sapiens
gcuccgaagaacuuagaggagcugggcaagua

SEQ ID NO: 170991 - RNA, 32 nt, Homo Sapiens
gaagaggaaugggagccacgcgcguacagauc

SEQ ID NO: 170992 - RNA, 32 nt, Homo Sapiens
caccaaggccuuuauccccagcccaggagaag

SEQ ID NO: 170993 - RNA, 32 nt, Homo Sapiens
gaggacccgggcgggggcagggucuggcgggc

SEQ ID NO: 170994 - RNA, 32 nt, Homo Sapiens
gcucguggagccgcacacacgucucccaccag

SEQ ID NO: 170995 - RNA, 32 nt, Homo Sapiens
aucauguuuucugcaggaaagaaaguaacaua

SEQ ID NO: 170996 - RNA, 32 nt, Homo Sapiens
ugaguguuaccauuuacccaucgguugccauc

SEQ ID NO: 170997 - RNA, 32 nt, Homo Sapiens
cuaaccugucaauuucauaguuuccacuuucu

SEQ ID NO: 170998 - RNA, 32 nt, Homo Sapiens
ucccugcggcccagagccauggagcucuccga

SEQ ID NO: 170999 - RNA, 32 nt, Homo Sapiens
uaccagcuuaccuauuugauucaguugcuguu

SEQ ID NO: 171000 - RNA, 32 nt, Homo Sapiens
ugagguguccggacccgccgccgagcgggccg

SEQ ID NO: 171001 - RNA, 32 nt, Homo Sapiens
gauggcaccaggucacuuuaugcugggugaua

SEQ ID NO: 171002 - RNA, 32 nt, Homo Sapiens
ugcccgcggaauucaccuccuccggggaccag

SEQ ID NO: 171003 - RNA, 32 nt, Homo Sapiens
ucugcguuuccucgucugggguggcucugcag

SEQ ID NO: 171004 - RNA, 32 nt, Homo Sapiens
cacgucagauacugaguagcuugcugacuccu

SEQ ID NO: 171005 - RNA, 32 nt, Homo Sapiens
accuguccucccgcccggggccccaugggccg

SEQ ID NO: 171006 - RNA, 32 nt, Homo Sapiens
cuggagagggagaucaaggcgcuccugacccc

SEQ ID NO: 171007 - RNA, 31 nt, Homo Sapiens
accagugacaauuuacugugaguuaauguca

SEQ ID NO: 171008 - RNA, 32 nt, Homo Sapiens
agcacugcccugggcucuggcugguuccgucu

SEQ ID NO: 171009 - RNA, 32 nt, Homo Sapiens
ugucuguggcuucuaaccuuguaccucagacg

SEQ ID NO: 171010 - RNA, 32 nt, Homo Sapiens
uuggacacagaaagacacaaacaaggagaaca

SEQ ID NO: 171011 - RNA, 32 nt, Homo Sapiens
acuaaucacagcaucucacauuuacuaaaaac

SEQ ID NO: 171012 - RNA, 32 nt, Homo Sapiens
ccccucccccggcucccuggaacuucccugca

SEQ ID NO: 171013 - RNA, 32 nt, Homo Sapiens
auauaugaaaccuugaugccaauacguccaac

SEQ ID NO: 171014 - RNA, 32 nt, Homo Sapiens
agacuuugucuccugauuaguacucuuuucac

SEQ ID NO: 171015 - RNA, 32 nt, Homo Sapiens
accuggagacccaucucccccaucucacaacu

SEQ ID NO: 171016 - RNA, 32 nt, Homo Sapiens
aaucgggagggagagacagagacagagccgau

SEQ ID NO: 171017 - RNA, 32 nt, Homo Sapiens
augaauaauaauaccaaucuccuagacuucau

SEQ ID NO: 171018 - RNA, 32 nt, Homo Sapiens
uuuuuguauaggaaaugucauaaaaauagucc

SEQ ID NO: 171019 - RNA, 32 nt, Homo Sapiens
acggccggugggcaggcggggagagcagcuuu

SEQ ID NO: 171020 - RNA, 32 nt, Homo Sapiens
auaacccaauacuuucuucuuuccccacaguc

SEQ ID NO: 171021 - RNA, 32 nt, Homo Sapiens
auaggagguugugagucagcucuguccaugug

SEQ ID NO: 171022 - RNA, 32 nt, Homo Sapiens
gcauccucaccuccccgacuggguccuggcag

SEQ ID NO: 171023 - RNA, 32 nt, Homo Sapiens
ugcgggcgaggucugauggagcugcguuuccu

SEQ ID NO: 171024 - RNA, 32 nt, Homo Sapiens
guuuaaacacuggccuuggcggcugagggagg

SEQ ID NO: 171025 - RNA, 32 nt, Homo Sapiens
auucucaggcccuuauacuaaaaccagagagg

SEQ ID NO: 171026 - RNA, 32 nt, Homo Sapiens
gugcccaccaggauuuccugugagggcccagg

SEQ ID NO: 171027 - RNA, 32 nt, Homo Sapiens
ugaagagaucauagauacaggauuauauaacg

SEQ ID NO: 171028 - RNA, 32 nt, Homo Sapiens
aaaaauggauugggcuggcagcucgaaggcca

SEQ ID NO: 171029 - RNA, 32 nt, Homo Sapiens
augaaagaaaaaacugggaaagauacuugguu

SEQ ID NO: 171030 - RNA, 32 nt, Homo Sapiens
caacucccuaaaaugccuuaggauuuuuccac

SEQ ID NO: 171031 - RNA, 32 nt, Homo Sapiens
guccgccugguugaggaggacccacgagugcu

SEQ ID NO: 171032 - RNA, 26 nt, Homo Sapiens
gauggggucuggcgcgcgcuuucccu

SEQ ID NO: 171033 - RNA, 32 nt, Homo Sapiens
accgcguugcgcgggggcugguuccagcggaa

SEQ ID NO: 171034 - RNA, 32 nt, Homo Sapiens
agaaaguagaaagugcccaaacagccaucagu

SEQ ID NO: 171035 - RNA, 32 nt, Homo Sapiens
acauuucaccuccauguagcagauuuugggcc

SEQ ID NO: 171036 - RNA, 32 nt, Homo Sapiens
uuaacauucugccagcuuucugauguugaagu

SEQ ID NO: 171037 - RNA, 32 nt, Homo Sapiens
uuaauucuauagaauuaaugaucagagcaagu

SEQ ID NO: 171038 - RNA, 32 nt, Homo Sapiens
auuaaucauuggccucauuguugaacauauua

SEQ ID NO: 171039 - RNA, 32 nt, Homo Sapiens
cugaaugcggauccuagaggccaggcagaagc

SEQ ID NO: 171040 - RNA, 32 nt, Homo Sapiens
aggucaccaaccuuggaagugucuaguucagc

SEQ ID NO: 171041 - RNA, 32 nt, Homo Sapiens
guuaaaacugguuuagcacaauuuauauuuuc

SEQ ID NO: 171042 - RNA, 32 nt, Homo Sapiens
ggacuagugcaucucccuguauaucuugaagc

SEQ ID NO: 171043 - RNA, 32 nt, Homo Sapiens
cgcggcucgcgcgcucgcucugagcccccgcg

SEQ ID NO: 171044 - RNA, 32 nt, Homo Sapiens
uaacuuaucccagcuuuacaaaaacucuucau

SEQ ID NO: 171045 - RNA, 32 nt, Homo Sapiens
cuggggucugguacugcccccaggacuagugg

SEQ ID NO: 171046 - RNA, 32 nt, Homo Sapiens
aagucuuuucacauaucauuuaaacuuuuguu

SEQ ID NO: 171047 - RNA, 32 nt, Homo Sapiens
ucuuucuugaagcccaaaacuuccucaaauca

SEQ ID NO: 171048 - RNA, 32 nt, Homo Sapiens
caaagcacuauauugguaauucuuacaauggc

SEQ ID NO: 171049 - RNA, 32 nt, Homo Sapiens
gacggcggccaguuccucgaggaggcccggcg

SEQ ID NO: 171050 - RNA, 32 nt, Homo Sapiens
aacacccacuuucuccucccucugccccuaua

SEQ ID NO: 171051 - RNA, 32 nt, Homo Sapiens
gaggcgugagaauggcgucccgcggccggcgu

SEQ ID NO: 171052 - RNA, 32 nt, Homo Sapiens
aaguuguucacagaugcaaagauucaguuaaa

SEQ ID NO: 171053 - RNA, 28 nt, Homo Sapiens
gagaugcccagcugcggugcuuguacuu

SEQ ID NO: 171054 - RNA, 32 nt, Homo Sapiens
cuggucuccgcggcacccacuggggcugcauc

SEQ ID NO: 171055 - RNA, 32 nt, Homo Sapiens
cagccacguacaaccucacgguggaggagccc

SEQ ID NO: 171056 - RNA, 32 nt, Homo Sapiens
gccucagagucuuuuccauucaguaagaaaga

SEQ ID NO: 171057 - RNA, 32 nt, Homo Sapiens
aagacagggucucacuacauuacccagcuggu

SEQ ID NO: 171058 - RNA, 27 nt, Homo Sapiens
acaugucggucccaagcgcucucauga

SEQ ID NO: 171059 - RNA, 32 nt, Homo Sapiens
gcugcgcagcugaguucuggaagcugcgucaa

SEQ ID NO: 171060 - RNA, 32 nt, Homo Sapiens
uaagaaaagcuacagucauuuuuucuuugcac

SEQ ID NO: 171061 - RNA, 32 nt, Homo Sapiens
aauuauuuuuuaauuuugauaauuuaauauuc

SEQ ID NO: 171062 - RNA, 30 nt, Homo Sapiens
gggggcagucaccacugcugggcguggcau

SEQ ID NO: 171063 - RNA, 32 nt, Homo Sapiens
acggcugcggcggcgccaccgugcgccacgcu

SEQ ID NO: 171064 - RNA, 32 nt, Homo Sapiens
ccgggcgagucucccgccuccucaggcccuag

SEQ ID NO: 171065 - RNA, 32 nt, Homo Sapiens
ccccucuccuuccccggcucgcaggagagcag

SEQ ID NO: 171066 - RNA, 32 nt, Homo Sapiens
gagcggccggcuggcguccgccgcgcccagga

SEQ ID NO: 171067 - RNA, 28 nt, Homo Sapiens
gcuuccaggguaugucauuugaauacag

SEQ ID NO: 171068 - RNA, 32 nt, Homo Sapiens
ucugaaaauggcaauuacucggcaggucagca

SEQ ID NO: 171069 - RNA, 32 nt, Homo Sapiens
gaaguuaugccacaugagacaucagcacuggc

SEQ ID NO: 171070 - RNA, 32 nt, Homo Sapiens
agugauugauucuggggugcggagaggaugag

SEQ ID NO: 171071 - RNA, 32 nt, Homo Sapiens
ucacagaaauauauuucagaaagaggucaaac

SEQ ID NO: 171072 - RNA, 32 nt, Homo Sapiens
caucugaauucuaaauuuuucuuuuuggauau

SEQ ID NO: 171073 - RNA, 32 nt, Homo Sapiens
ggucucuguguccucagcucaagaauccugua

SEQ ID NO: 171074 - RNA, 32 nt, Homo Sapiens
agaugauguucucuauaaauccauucuccucu

SEQ ID NO: 171075 - RNA, 32 nt, Homo Sapiens
uccgauggcagcccggcccuguccaggaaugu

SEQ ID NO: 171076 - RNA, 32 nt, Homo Sapiens
ggccagagcuggaggcagcugcugccgcagga

SEQ ID NO: 171077 - RNA, 32 nt, Homo Sapiens
ggaggaagacuuguguugggccugcuguuccu

SEQ ID NO: 171078 - RNA, 32 nt, Homo Sapiens
cuaaaacaucccugaguucaccaccuuggcca

SEQ ID NO: 171079 - RNA, 32 nt, Homo Sapiens
ggauccuaauaaagcgggaggguuauagggcg

SEQ ID NO: 171080 - RNA, 30 nt, Homo Sapiens
aagggccgggagcgcgcggcgcgggagauu

SEQ ID NO: 171081 - RNA, 32 nt, Homo Sapiens
cgagggacuggguacaugcauauuuuaaaagg

SEQ ID NO: 171082 - RNA, 32 nt, Homo Sapiens
augagauacaucacacuuaccugugggccagu

SEQ ID NO: 171083 - RNA, 32 nt, Homo Sapiens
gcgcugccaaccgugggcgagcucugggugug

SEQ ID NO: 171084 - RNA, 32 nt, Homo Sapiens
cuucaacuuugcccaugaugugcuggaugugu

SEQ ID NO: 171085 - RNA, 32 nt, Homo Sapiens
uccuguuggggauggggugaaaacguucaacu

SEQ ID NO: 171086 - RNA, 32 nt, Homo Sapiens
uuacuguguuugcauggaugucuguaauauac

SEQ ID NO: 171087 - RNA, 32 nt, Homo Sapiens
ugagcagcuggguaugguaugacccuguguac

SEQ ID NO: 171088 - RNA, 32 nt, Homo Sapiens
cggaaguggcaggugacgggggugugugccag

SEQ ID NO: 171089 - RNA, 32 nt, Homo Sapiens
aaugggaugacggaagaccuggggagcagugg

SEQ ID NO: 171090 - RNA, 32 nt, Homo Sapiens
cgcuggcuccgucugccagggaugacggcgac

SEQ ID NO: 171091 - RNA, 32 nt, Homo Sapiens
uaugcauauaaaagugauggaauuaaugugaa

SEQ ID NO: 171092 - RNA, 30 nt, Homo Sapiens
gccugccucugugcugccgcaggagggcag

SEQ ID NO: 171093 - RNA, 32 nt, Homo Sapiens
aacugcacgucuuuaaaguguacaguuggagg

SEQ ID NO: 171094 - RNA, 32 nt, Homo Sapiens
cacgugggaccucagcguguggagccaccuga

SEQ ID NO: 171095 - RNA, 32 nt, Homo Sapiens
cuguuuccaucccagccuucuauaacccagua

SEQ ID NO: 171096 - RNA, 32 nt, Homo Sapiens
cgcggaggaaaagaagguggugagcgaggcac

SEQ ID NO: 171097 - RNA, 32 nt, Homo Sapiens
augcaguaaucucuuagugccuauggugggga

SEQ ID NO: 171098 - RNA, 32 nt, Homo Sapiens
gggucuuuuaaaccuacuccugguagggaaau

SEQ ID NO: 171099 - RNA, 32 nt, Homo Sapiens
uuagaauuugaaaguaguauucauuggaaaga

SEQ ID NO: 171100 - RNA, 32 nt, Homo Sapiens
uuccugcucuuguucaaauguaaaacgcuggc

SEQ ID NO: 171101 - RNA, 32 nt, Homo Sapiens
uguuguucuucaaggaaacaagaggguccacu

SEQ ID NO: 171102 - RNA, 32 nt, Homo Sapiens
acuuuuccuggggcccucuccuugaccccgua

SEQ ID NO: 171103 - RNA, 32 nt, Homo Sapiens
agcaugaggaggaggagacccuggccacaguu

SEQ ID NO: 171104 - RNA, 32 nt, Homo Sapiens
ugggaugguggugcagacgacacacacggccu

SEQ ID NO: 171105 - RNA, 32 nt, Homo Sapiens
auugagccaauauacaaauaccucaucuguuc

SEQ ID NO: 171106 - RNA, 32 nt, Homo Sapiens
acacauauuuccauccuuuuauguuuaaucug

SEQ ID NO: 171107 - RNA, 32 nt, Homo Sapiens
cagauuuaauauguaugcaaaaugguauagau

SEQ ID NO: 171108 - RNA, 32 nt, Homo Sapiens
uuggagagagcagagguucgccuggaagggau

SEQ ID NO: 171109 - RNA, 32 nt, Homo Sapiens
caucucuuuuaccaaccagagagugugaaacu

SEQ ID NO: 171110 - RNA, 32 nt, Homo Sapiens
cuaauguggcagugacuguaaaacuggcacau

SEQ ID NO: 171111 - RNA, 32 nt, Homo Sapiens
acgggaccgggcgguugggagcggguucugga

SEQ ID NO: 171112 - RNA, 32 nt, Homo Sapiens
cuggaugaugaggcccuugccuucagcugcuu

SEQ ID NO: 171113 - RNA, 32 nt, Homo Sapiens
aaauuagcuggguguggugaugcaugccugug

SEQ ID NO: 171114 - RNA, 32 nt, Homo Sapiens
ggccagcacacacacguggcaucuuaggccau

SEQ ID NO: 171115 - RNA, 32 nt, Homo Sapiens
cuuuguccagcugcacucuccucuccugggac

SEQ ID NO: 171116 - RNA, 32 nt, Homo Sapiens
acucaacuaugaagagucaagauucaaaucca

SEQ ID NO: 171117 - RNA, 32 nt, Homo Sapiens
uuggguggucugaccugauauuuucgcauagu

SEQ ID NO: 171118 - RNA, 32 nt, Homo Sapiens
ucuccuguuucauuugagccuccaaacuacau

SEQ ID NO: 171119 - RNA, 32 nt, Homo Sapiens
aagugaauguccauucaaaauauuuuacuauu

SEQ ID NO: 171120 - RNA, 32 nt, Homo Sapiens
ugcaauaccacugugcugaacgucucuggcac

SEQ ID NO: 171121 - RNA, 32 nt, Homo Sapiens
ccagccccgccagcauggccggccggacugua

SEQ ID NO: 171122 - RNA, 32 nt, Homo Sapiens
ggccucaagcgauccuccggccucggccuccc

SEQ ID NO: 171123 - RNA, 32 nt, Homo Sapiens
uggagcgggcgcucgaggcgcgcacggcgcgg

SEQ ID NO: 171124 - RNA, 32 nt, Homo Sapiens
gauagggagauucugacaaacuucuacucuug

SEQ ID NO: 171125 - RNA, 32 nt, Homo Sapiens
acucuuaagaucuauuuuagauaauuucaacu

SEQ ID NO: 171126 - RNA, 32 nt, Homo Sapiens
ccuaccggggacccucccccagagggaccggc

SEQ ID NO: 171127 - RNA, 32 nt, Homo Sapiens
cuggacugggccgggggcggacuccgggaccc

SEQ ID NO: 171128 - RNA, 32 nt, Homo Sapiens
ccuucguuugcacuuuaguaaauuggguggga

SEQ ID NO: 171129 - RNA, 32 nt, Homo Sapiens
ugucucccuaaaacaaguuuccuuaaaagcua

SEQ ID NO: 171130 - RNA, 32 nt, Homo Sapiens
ugauuuucaaggauuacuuuuuuguauuauca

SEQ ID NO: 171131 - RNA, 32 nt, Homo Sapiens
uagcucauuuagcuuuuucugcuguucuuggc

SEQ ID NO: 171132 - RNA, 32 nt, Homo Sapiens
cagggccccacgacucccugcugcgggacaag

SEQ ID NO: 171133 - RNA, 32 nt, Homo Sapiens
cucccucucugcuccuucucucuuccacaggu

SEQ ID NO: 171134 - RNA, 32 nt, Homo Sapiens
cgcauuucagaauuauaaaaauucggaggcaa

SEQ ID NO: 171135 - RNA, 32 nt, Homo Sapiens
aaggggccguccuuuccacacaggccagaaga

SEQ ID NO: 171136 - RNA, 27 nt, Homo Sapiens
ugcaacuggaucuucagccuccugugg

SEQ ID NO: 171137 - RNA, 32 nt, Homo Sapiens
ugccuguaaucccagcacuuugggaagcagag

SEQ ID NO: 171138 - RNA, 32 nt, Homo Sapiens
aaaauacaaaaauuagccgggugugguggcgu

SEQ ID NO: 171139 - RNA, 32 nt, Homo Sapiens
ggcagugcaugcauguugggguuuccuuuacc

SEQ ID NO: 171140 - RNA, 32 nt, Homo Sapiens
aaaauacaaaaauuggccgggugugguggcau

SEQ ID NO: 171141 - RNA, 30 nt, Homo Sapiens
gucaaggauaaaacaagcacgcgcacaauc

SEQ ID NO: 171142 - RNA, 32 nt, Homo Sapiens
gccccucggcuggccugggcaugugauggcuc

SEQ ID NO: 171143 - RNA, 32 nt, Homo Sapiens
uaacuggacucucgcuccugcuggcuggacau

SEQ ID NO: 171144 - RNA, 32 nt, Homo Sapiens
uuuuccaggcccagccccugucccaucugggg

SEQ ID NO: 171145 - RNA, 32 nt, Homo Sapiens
acuuaauaauucauuucuuuuggacuauggag

SEQ ID NO: 171146 - RNA, 32 nt, Homo Sapiens
gaguucauuuguugaagugcuagugaaaaauu

SEQ ID NO: 171147 - RNA, 32 nt, Homo Sapiens
uauagcauagggcaguggguuuuuuaguuaau

SEQ ID NO: 171148 - RNA, 30 nt, Homo Sapiens
gcgaaguggggcggccgggugggcuacgag

SEQ ID NO: 171149 - RNA, 32 nt, Homo Sapiens
gcauguuuccaccguuuucugaguacugcggc

SEQ ID NO: 171150 - RNA, 32 nt, Homo Sapiens
guuuaagagacgggacucaggucaucaaaaug

SEQ ID NO: 171151 - RNA, 32 nt, Homo Sapiens
ugaaacccugucauuagccccggccugguuaa

SEQ ID NO: 171152 - RNA, 32 nt, Homo Sapiens
ggaaguugcauuccuuugucuucaaacuguga

SEQ ID NO: 171153 - RNA, 32 nt, Homo Sapiens
cugggcccaucccaggccucaaggcccuccag

SEQ ID NO: 171154 - RNA, 32 nt, Homo Sapiens
ggaaguaucauuuuaagcuauuagaguauuua

SEQ ID NO: 171155 - RNA, 32 nt, Homo Sapiens
cugcgcgcggccuggggcaacccgggccacag

SEQ ID NO: 171156 - RNA, 32 nt, Homo Sapiens
gccgagucgagccgggcgcccgggcugccugg

SEQ ID NO: 171157 - RNA, 32 nt, Homo Sapiens
uuuuuguauuauauauuuuucuuaaauauguu

SEQ ID NO: 171158 - RNA, 32 nt, Homo Sapiens
uucuuuuccugcccuuugagaguuuaauaaaa

SEQ ID NO: 171159 - RNA, 32 nt, Homo Sapiens
uuauaauagaaagccagccacugcuuagcuau

SEQ ID NO: 171160 - RNA, 32 nt, Homo Sapiens
aaauaguaaaaugccaaguauuguggcagauu

SEQ ID NO: 171161 - RNA, 32 nt, Homo Sapiens
caaggacaaaaaugugaauaaagcaauauuuu

SEQ ID NO: 171162 - RNA, 32 nt, Homo Sapiens
cacucaggggcaccuuccauggagccagaccg

SEQ ID NO: 171163 - RNA, 32 nt, Homo Sapiens
cagggcagguaugggaaggccgagggagccug

SEQ ID NO: 171164 - RNA, 32 nt, Homo Sapiens
uaucagcaggucuacagauuugucauugguuu

SEQ ID NO: 171165 - RNA, 32 nt, Homo Sapiens
cauuagagucagccuucccccucccagggcca

SEQ ID NO: 171166 - RNA, 32 nt, Homo Sapiens
gaagaugcaaauaaguuuuugagaauaaaacu

SEQ ID NO: 171167 - RNA, 32 nt, Homo Sapiens
cagaaagccaggauugaagcggugcucagcca

SEQ ID NO: 171168 - RNA, 32 nt, Homo Sapiens
auuuuaauuaggaaacaaagcuuagcaggaga

SEQ ID NO: 171169 - RNA, 32 nt, Homo Sapiens
uaucacuaagggcaggcgacaagugggggaca

SEQ ID NO: 171170 - RNA, 32 nt, Homo Sapiens
ccuggaauggcccagaccccagccuccccucc

SEQ ID NO: 171171 - RNA, 30 nt, Homo Sapiens
gaauuugucuaccacuacaaagucaucaua

SEQ ID NO: 171172 - RNA, 32 nt, Homo Sapiens
gcccgggccgccgcggacgaucggcgcugagg

SEQ ID NO: 171173 - RNA, 32 nt, Homo Sapiens
gacacacacaucugcaccucaaccacagacua

SEQ ID NO: 171174 - RNA, 32 nt, Homo Sapiens
aaauagccaauacauaccaaucaucaccaaag

SEQ ID NO: 171175 - RNA, 32 nt, Homo Sapiens
ggaaacauuuagagaacaaacaauaucuuuua

SEQ ID NO: 171176 - RNA, 32 nt, Homo Sapiens
guuugugaauggaaacaaacuuguuuaaacac

SEQ ID NO: 171177 - RNA, 32 nt, Homo Sapiens
acugaggcaacacuaacagcuaaugacccaga

SEQ ID NO: 171178 - RNA, 32 nt, Homo Sapiens
gcuguuaaacacauugagacacagaagauucu

SEQ ID NO: 171179 - RNA, 32 nt, Homo Sapiens
aauguuuuaagugggugcguaauucagagagc

SEQ ID NO: 171180 - RNA, 32 nt, Homo Sapiens
gcgggccccggagaagcaggcagcgcagugac

SEQ ID NO: 171181 - RNA, 32 nt, Homo Sapiens
cugcugccgcccaggaagccagcccucugcuc

SEQ ID NO: 171182 - RNA, 32 nt, Homo Sapiens
cacagaggauuucagcagcugcaacugcgcac

SEQ ID NO: 171183 - RNA, 32 nt, Homo Sapiens
cauuaaauggugcugaguaaaggaaauaggca

SEQ ID NO: 171184 - RNA, 32 nt, Homo Sapiens
ugagguuggauggaucaaccacagcaacuguc

SEQ ID NO: 171185 - RNA, 32 nt, Homo Sapiens
ccucucaagcagcgggaacuacaggugugcac

SEQ ID NO: 171186 - RNA, 30 nt, Homo Sapiens
gugggguggggcggugugacaggguagagg

SEQ ID NO: 171187 - RNA, 32 nt, Homo Sapiens
auauuuauaauuacuaugugucuguauuauua

SEQ ID NO: 171188 - RNA, 32 nt, Homo Sapiens
auugaccuacgcaucuccuccuccuuggacau

SEQ ID NO: 171189 - RNA, 31 nt, Homo Sapiens
ccaaaugccaaauaaacuuguguuccgggag

SEQ ID NO: 171190 - RNA, 32 nt, Homo Sapiens
uguaaugucauugcuuuugauuugcuuuguga

SEQ ID NO: 171191 - RNA, 32 nt, Homo Sapiens
cucaaggugcccucgcuaccuaguagauggua

SEQ ID NO: 171192 - RNA, 32 nt, Homo Sapiens
aaacacaauauuuuguggcuuucuuucuuuug

SEQ ID NO: 171193 - RNA, 32 nt, Homo Sapiens
agugaaugugguauauuucuaaaugauaugga

SEQ ID NO: 171194 - RNA, 32 nt, Homo Sapiens
ccucacccugcuuuggcuugcgcacggugcgc

SEQ ID NO: 171195 - RNA, 32 nt, Homo Sapiens
ggccggcagccgcuccacggaguccccggcag

SEQ ID NO: 171196 - RNA, 32 nt, Homo Sapiens
auauguaaauaggcauauaugaagauauauau

SEQ ID NO: 171197 - RNA, 32 nt, Homo Sapiens
uuugucuugaaugaauuuuaaaaggaaauaua

SEQ ID NO: 171198 - RNA, 32 nt, Homo Sapiens
caccuaaaaugaacuuauggcaggucuaauca

SEQ ID NO: 171199 - RNA, 32 nt, Homo Sapiens
gaggcaugagcgaggcgggcgaguggggacgg

SEQ ID NO: 171200 - RNA, 32 nt, Homo Sapiens
ggauuaaugcugccacaggggggcaaucuuua

SEQ ID NO: 171201 - RNA, 32 nt, Homo Sapiens
aaacugaagauguuaauaaaauuuaaggaauu

SEQ ID NO: 171202 - RNA, 32 nt, Homo Sapiens
uugaauuauuuuuauaucuugucuggcacaau

SEQ ID NO: 171203 - RNA, 32 nt, Homo Sapiens
uugagacuuggguuuucuuaaugccaguguga

SEQ ID NO: 171204 - RNA, 32 nt, Homo Sapiens
guacagaggcaaggaggaugccggcaaggccu

SEQ ID NO: 171205 - RNA, 32 nt, Homo Sapiens
caguguuaacucccuacagauuacacucuaau

SEQ ID NO: 171206 - RNA, 32 nt, Homo Sapiens
uuggggaccccucugcgugcaccccuguaguu

SEQ ID NO: 171207 - RNA, 32 nt, Homo Sapiens
ggggcugauguccgcaaauaugcagaauuacc

SEQ ID NO: 171208 - RNA, 32 nt, Homo Sapiens
ggugucugugaagggugccgcgagccaggcug

SEQ ID NO: 171209 - RNA, 32 nt, Homo Sapiens
ugcugagccucuaucagcuguguggaguaagc

SEQ ID NO: 171210 - RNA, 32 nt, Homo Sapiens
uaagugaacaauuuauauuuuauccucuacau

SEQ ID NO: 171211 - RNA, 32 nt, Homo Sapiens
uguaauacuuauaaauugaaaacuauaaaaca

SEQ ID NO: 171212 - RNA, 32 nt, Homo Sapiens
uugcugcuaauauauacauauauuguauaaaa

SEQ ID NO: 171213 - RNA, 32 nt, Homo Sapiens
cuuuuaccaaaaugcaaauuuuaugaagugcc

SEQ ID NO: 171214 - RNA, 32 nt, Homo Sapiens
aauucaccaagcauguaguucuagcgcacuag

SEQ ID NO: 171215 - RNA, 32 nt, Homo Sapiens
cagcuagaauaaaccaggcaggagaagaugga

SEQ ID NO: 171216 - RNA, 32 nt, Homo Sapiens
acccacuuauaaacagaagacugugacaagaa

SEQ ID NO: 171217 - RNA, 32 nt, Homo Sapiens
ccauauuauugguggagggcuguuuuaacauc

SEQ ID NO: 171218 - RNA, 32 nt, Homo Sapiens
cuguuccaaguguaagacccacugcuuagcaa

SEQ ID NO: 171219 - RNA, 32 nt, Homo Sapiens
gaacaagacuuugaacagaagcaaaugccuga

SEQ ID NO: 171220 - RNA, 32 nt, Homo Sapiens
uuuauuacaaaauuauauucacguaaaugcca

SEQ ID NO: 171221 - RNA, 32 nt, Homo Sapiens
uauaguaugucuuuuuuuuuugucuggcuucu

SEQ ID NO: 171222 - RNA, 32 nt, Homo Sapiens
cuguuuccuggugagugauuccugcuacuuug

SEQ ID NO: 171223 - RNA, 32 nt, Homo Sapiens
agucuguguaacauuuuaauauuguuuguaau

SEQ ID NO: 171224 - RNA, 32 nt, Homo Sapiens
uggucuccugucuuuaugucuuucuccucuuc

SEQ ID NO: 171225 - RNA, 27 nt, Homo Sapiens
ggggcguccuucuuugugacccgaaau

SEQ ID NO: 171226 - RNA, 32 nt, Homo Sapiens
gaaaugggagcacaguaaugggaaaugggagc

SEQ ID NO: 171227 - RNA, 32 nt, Homo Sapiens
guguucagaauccaaaauaaacaucaccugau

SEQ ID NO: 171228 - RNA, 32 nt, Homo Sapiens
uccgcagccaugcugggaugcugcuggcgggg

SEQ ID NO: 171229 - RNA, 32 nt, Homo Sapiens
gugacaccuuggacaaguuuugugacccgagu

SEQ ID NO: 171230 - RNA, 32 nt, Homo Sapiens
ccaaaauagauauauuaucugaaugaagaguu

SEQ ID NO: 171231 - RNA, 32 nt, Homo Sapiens
uaaaaaugcauuaccauuuguuuaauaauuau

SEQ ID NO: 171232 - RNA, 32 nt, Homo Sapiens
guauacauuuuucucuucuccaguaauaaaca

SEQ ID NO: 171233 - RNA, 32 nt, Homo Sapiens
gacuaguacacuggcaucaucuuagguuucua

SEQ ID NO: 171234 - RNA, 32 nt, Homo Sapiens
aaaacuucaaccauaaaaacaaagggcucuga

SEQ ID NO: 171235 - RNA, 32 nt, Homo Sapiens
ggcaugcgcaggugcuggagcuuggcagccgc

SEQ ID NO: 171236 - RNA, 32 nt, Homo Sapiens
uuaaugccacuuuaacacuaaugcacugacag

SEQ ID NO: 171237 - RNA, 32 nt, Homo Sapiens
gagauggccuccagcgucagugccaagacuga

SEQ ID NO: 171238 - RNA, 32 nt, Homo Sapiens
ucuguagacauuuuuacccaaaccuguuggua

SEQ ID NO: 171239 - RNA, 32 nt, Homo Sapiens
auaaugggacuuuuuucuuaacuuuuuauuag

SEQ ID NO: 171240 - RNA, 32 nt, Homo Sapiens
caagucugggccucugcagagagaccuccaug

SEQ ID NO: 171241 - RNA, 32 nt, Homo Sapiens
gcauggaaaaauuuaucagucagaauugcugu

SEQ ID NO: 171242 - RNA, 32 nt, Homo Sapiens
ucgucuuuguggcagcaaaaccaggaugccug

SEQ ID NO: 171243 - RNA, 32 nt, Homo Sapiens
ucuggaggggagagaaggauucuaggggugug

SEQ ID NO: 171244 - RNA, 32 nt, Homo Sapiens
gaagcaaacccaggcucugugcuccuuccagc

SEQ ID NO: 171245 - RNA, 32 nt, Homo Sapiens
caugcacauuucaaaacaagaugugucaugaa

SEQ ID NO: 171246 - RNA, 32 nt, Homo Sapiens
gguccacagccugagagguguccccaaagaaa

SEQ ID NO: 171247 - RNA, 32 nt, Homo Sapiens
aguugcgcucucuacggggccgcggccacuag

SEQ ID NO: 171248 - RNA, 32 nt, Homo Sapiens
uaagcagaugccaucugcagaagugcugguag

SEQ ID NO: 171249 - RNA, 32 nt, Homo Sapiens
uucccugaauguuuaaagaucaugacauauga

SEQ ID NO: 171250 - RNA, 32 nt, Homo Sapiens
acccagggcugagacagguuaaggggugaauc

SEQ ID NO: 171251 - RNA, 32 nt, Homo Sapiens
ucuuuucgauagcucacgaugguguaugagug

SEQ ID NO: 171252 - RNA, 32 nt, Homo Sapiens
uaguaaauauauuauuguuucaugaugacucu

SEQ ID NO: 171253 - RNA, 32 nt, Homo Sapiens
ggggcugcagcgcagaguaggcagauggccuu

SEQ ID NO: 171254 - RNA, 32 nt, Homo Sapiens
uacaaguccaugaauguuaaaauguacaggug

SEQ ID NO: 171255 - RNA, 32 nt, Homo Sapiens
uuggaggccagcuggaggaagaagggucuaaa

SEQ ID NO: 171256 - RNA, 32 nt, Homo Sapiens
ccugcccucagcccggcccuggccccuucccg

SEQ ID NO: 171257 - RNA, 32 nt, Homo Sapiens
ccguacucaucccacucaucugucuacccuag

SEQ ID NO: 171258 - RNA, 32 nt, Homo Sapiens
cuccacuccacggcugcccagggcaguggcau

SEQ ID NO: 171259 - RNA, 32 nt, Homo Sapiens
caggacccccaccccaccuggcccgcaguuga

SEQ ID NO: 171260 - RNA, 32 nt, Homo Sapiens
gcguguuuucuuugggaugcauaauacacaaa

SEQ ID NO: 171261 - RNA, 32 nt, Homo Sapiens
cggugccugugcuucccggugccaggguguca

SEQ ID NO: 171262 - RNA, 30 nt, Homo Sapiens
cggggcggggcuuacuucgcagcgacuacu

SEQ ID NO: 171263 - RNA, 32 nt, Homo Sapiens
caauuaaaagcacuaaagauuauuauauuaau

SEQ ID NO: 171264 - RNA, 32 nt, Homo Sapiens
ucgaaagcucuagaaucugcaauucaaaaguu

SEQ ID NO: 171265 - RNA, 32 nt, Homo Sapiens
cuaccugggguaggcacauuguguguuaaagc

SEQ ID NO: 171266 - RNA, 32 nt, Homo Sapiens
cgggacgugcgcgcuuggugcacgauccugaa

SEQ ID NO: 171267 - RNA, 32 nt, Homo Sapiens
agccgugcccgccccggggcuucgcagaccuu

SEQ ID NO: 171268 - RNA, 32 nt, Homo Sapiens
uucuccccacuuuauuaguuaauuuaaauugg

SEQ ID NO: 171269 - RNA, 32 nt, Homo Sapiens
gacacaguaugaugaugaagaucccauggggc

SEQ ID NO: 171270 - RNA, 32 nt, Homo Sapiens
augaccuugaguuaacaggacaguugauggag

SEQ ID NO: 171271 - RNA, 32 nt, Homo Sapiens
aaacauauauauauuuaauauauauguaaagc

SEQ ID NO: 171272 - RNA, 32 nt, Homo Sapiens
aggggaggaaaagaauggagaugaggauugcc

SEQ ID NO: 171273 - RNA, 32 nt, Homo Sapiens
gggaugcugguggcucuucagaggagcaucag

SEQ ID NO: 171274 - RNA, 32 nt, Homo Sapiens
ucugaacuaaggaccagaggcugccagauguu

SEQ ID NO: 171275 - RNA, 32 nt, Homo Sapiens
ugaguuggaugguugcaaauauauugacauua

SEQ ID NO: 171276 - RNA, 32 nt, Homo Sapiens
auaugagagcugggggcggaugguggcccagg

SEQ ID NO: 171277 - RNA, 32 nt, Homo Sapiens
aggaagugagucucuccaugggcuggacccac

SEQ ID NO: 171278 - RNA, 32 nt, Homo Sapiens
acguaucuccauucacaggguguggucaguac

SEQ ID NO: 171279 - RNA, 29 nt, Homo Sapiens
uguacauaggcuuuccugcugaaaacagg

SEQ ID NO: 171280 - RNA, 32 nt, Homo Sapiens
cucuucucguaaaggggauggaggcggagaaa

SEQ ID NO: 171281 - RNA, 32 nt, Homo Sapiens
gaagaugaacaaaaacaaaaccaaauaggagu

SEQ ID NO: 171282 - RNA, 32 nt, Homo Sapiens
cuuuuuauuuuaaaaagcuuugaaauacauuu

SEQ ID NO: 171283 - RNA, 32 nt, Homo Sapiens
uccucgcugccagcugagucgugggcaccuga

SEQ ID NO: 171284 - RNA, 32 nt, Homo Sapiens
gaucuuagagccccccucccccugccacccac

SEQ ID NO: 171285 - RNA, 32 nt, Homo Sapiens
cguaaguguagccuagaagagagcaagaccca

SEQ ID NO: 171286 - RNA, 32 nt, Homo Sapiens
gagccaaacgguguacgagcucccucucugcc

SEQ ID NO: 171287 - RNA, 31 nt, Homo Sapiens
cagccugggcgacagagccagacuccgucuc

SEQ ID NO: 171288 - RNA, 32 nt, Homo Sapiens
accccagccccgagcauggggacggcgcugcu

SEQ ID NO: 171289 - RNA, 32 nt, Homo Sapiens
ggccgccccuccccagcgucccagggcucugg

SEQ ID NO: 171290 - RNA, 32 nt, Homo Sapiens
cuaugucuccaccucccugugaacaugugaac

SEQ ID NO: 171291 - RNA, 32 nt, Homo Sapiens
ccagccauucagaaaacuucuuauagcuaccu

SEQ ID NO: 171292 - RNA, 32 nt, Homo Sapiens
gcuuugucugcagggaaguucuccugguaauu

SEQ ID NO: 171293 - RNA, 32 nt, Homo Sapiens
ggccaucucccuccccagaaacagugugcaug

SEQ ID NO: 171294 - RNA, 32 nt, Homo Sapiens
uugauaagcuuuugcaagacugccggggaaac

SEQ ID NO: 171295 - RNA, 32 nt, Homo Sapiens
agguaggacagugaccucggugacgcgaagga

SEQ ID NO: 171296 - RNA, 32 nt, Homo Sapiens
guacauuucugcagcagugguugcgcugcuuu

SEQ ID NO: 171297 - RNA, 32 nt, Homo Sapiens
ggucaggagaucgagacgauccuggccaacac

SEQ ID NO: 171298 - RNA, 32 nt, Homo Sapiens
uuucccagcucauuuuaaagaccuccaaggaa

SEQ ID NO: 171299 - RNA, 32 nt, Homo Sapiens
aaauaacacauccucuuugcaugacacauuuu

SEQ ID NO: 171300 - RNA, 32 nt, Homo Sapiens
cagauccuuaagccagaggugcaugcuucuuu

SEQ ID NO: 171301 - RNA, 32 nt, Homo Sapiens
cuuccagccaggccuggcagccagaggugcuc

SEQ ID NO: 171302 - RNA, 32 nt, Homo Sapiens
ggggacgggaggaggggcacggguuuaaggga

SEQ ID NO: 171303 - RNA, 32 nt, Homo Sapiens
uggggagggcgaggcggaggcggcaaaacggg

SEQ ID NO: 171304 - RNA, 32 nt, Homo Sapiens
ugcccucacccccaggccccagaacuuauuau

SEQ ID NO: 171305 - RNA, 32 nt, Homo Sapiens
cgcggcgggagcggaggcugcugcuggcaggu

SEQ ID NO: 171306 - RNA, 32 nt, Homo Sapiens
ucuugccuccccaccccggaagcugaaccuga

SEQ ID NO: 171307 - RNA, 32 nt, Homo Sapiens
caauuuuauaugccucacugguuguuauucuu

SEQ ID NO: 171308 - RNA, 32 nt, Homo Sapiens
ggcaagcauggcuuuugacaguaaaucccgga

SEQ ID NO: 171309 - RNA, 32 nt, Homo Sapiens
ccccccccucuuuucuuuuucuuuauuuuuau

SEQ ID NO: 171310 - RNA, 32 nt, Homo Sapiens
gauacuaaaaacaaugaaauugugauuuggaa

SEQ ID NO: 171311 - RNA, 32 nt, Homo Sapiens
cuucccuuuaauccugccacugucauaugcua

SEQ ID NO: 171312 - RNA, 32 nt, Homo Sapiens
auguauaaauauaaaaauuaagugaucauggu

SEQ ID NO: 171313 - RNA, 32 nt, Homo Sapiens
uaacuaauacucaaaauauggacuuuucaugu

SEQ ID NO: 171314 - RNA, 29 nt, Homo Sapiens
gcacauggcgcugaccggggccucagacc

SEQ ID NO: 171315 - RNA, 32 nt, Homo Sapiens
ugaaucacuccagguucacagagguguccucu

SEQ ID NO: 171316 - RNA, 32 nt, Homo Sapiens
ucuaaauguacaaaauguaaaauguauaaguc

SEQ ID NO: 171317 - RNA, 32 nt, Homo Sapiens
uaaaucagaaauauuuuauaaaacuucugguu

SEQ ID NO: 171318 - RNA, 27 nt, Homo Sapiens
ugucaccauuaauuucugauguaguca

SEQ ID NO: 171319 - RNA, 32 nt, Homo Sapiens
auucuuugcccagagagcugcccuaacagaac

SEQ ID NO: 171320 - RNA, 32 nt, Homo Sapiens
aaaguuguuuuaaaaagcuguggcaucccauu

SEQ ID NO: 171321 - RNA, 31 nt, Homo Sapiens
ugccacuguagaccaaagguauaucagcuua

SEQ ID NO: 171322 - RNA, 32 nt, Homo Sapiens
cccaagaauaaaagaauaaccacaaagugugc

SEQ ID NO: 171323 - RNA, 32 nt, Homo Sapiens
caagccccagugcaaacggccuugaaggaggu

SEQ ID NO: 171324 - RNA, 32 nt, Homo Sapiens
ccuggcugccccaccauccucucugaucugug

SEQ ID NO: 171325 - RNA, 31 nt, Homo Sapiens
cugccgccugccugccugccacugaggguuc

SEQ ID NO: 171326 - RNA, 32 nt, Homo Sapiens
cucacaacagagcuaccuuccuguuguguaaa

SEQ ID NO: 171327 - RNA, 32 nt, Homo Sapiens
aaagucacauauauacauauguaucuuauaau

SEQ ID NO: 171328 - RNA, 32 nt, Homo Sapiens
uuuuguacuuuuuaaaguagagacgggcuuug

SEQ ID NO: 171329 - RNA, 32 nt, Homo Sapiens
ccuggaaacacguaucuugccuagauuguuua

SEQ ID NO: 171330 - RNA, 32 nt, Homo Sapiens
gguggggaugugggccugcugcugccugggaa

SEQ ID NO: 171331 - RNA, 32 nt, Homo Sapiens
agcaucuccuucccgcccuguguccacccacc

SEQ ID NO: 171332 - RNA, 32 nt, Homo Sapiens
auauuuuuccucaaagauucugcauuuuaagg

SEQ ID NO: 171333 - RNA, 32 nt, Homo Sapiens
auuaauuauuuuuucuuugauggauuacagug

SEQ ID NO: 171334 - RNA, 32 nt, Homo Sapiens
aaauugcgauguauauuuucauguaauuugau

SEQ ID NO: 171335 - RNA, 32 nt, Homo Sapiens
cugccucuccccuugcagagaccuccaggugg

SEQ ID NO: 171336 - RNA, 32 nt, Homo Sapiens
cuccuuccguugcgccccagcggcggguccca

SEQ ID NO: 171337 - RNA, 30 nt, Homo Sapiens
uucuucccccaagauacccaucuugaaaaa

SEQ ID NO: 171338 - RNA, 32 nt, Homo Sapiens
ggugcccggcggccuuccucugacuggguuug

SEQ ID NO: 171339 - RNA, 32 nt, Homo Sapiens
ucacuggaaaauuggaucuauaacugaugggu

SEQ ID NO: 171340 - RNA, 32 nt, Homo Sapiens
cccuagucacucugcuggucgagggucggaac

SEQ ID NO: 171341 - RNA, 32 nt, Homo Sapiens
ucuucauuuuaaaaaauaagaugggcugggca

SEQ ID NO: 171342 - RNA, 32 nt, Homo Sapiens
aaucuggccaguagacauuugguuucgguccu

SEQ ID NO: 171343 - RNA, 32 nt, Homo Sapiens
agcuugagaagcugugcagcugccgcugggug

SEQ ID NO: 171344 - RNA, 32 nt, Homo Sapiens
gaggaggggccgcccgcggcccccggcucacu

SEQ ID NO: 171345 - RNA, 32 nt, Homo Sapiens
caaagaaguuaaauuuauuucagggcaucaaa

SEQ ID NO: 171346 - RNA, 32 nt, Homo Sapiens
acggugcggagagcgucgcauaugcgcgggaa

SEQ ID NO: 171347 - RNA, 32 nt, Homo Sapiens
uaauaacuuuuguauaaucuucauugcuauua

SEQ ID NO: 171348 - RNA, 32 nt, Homo Sapiens
cccuagcccuccccuccccgggauguagaacg

SEQ ID NO: 171349 - RNA, 32 nt, Homo Sapiens
uauugaauguacauuauacagaucauucauau

SEQ ID NO: 171350 - RNA, 32 nt, Homo Sapiens
gcuccauugugcuccccacgggccuucaggag

SEQ ID NO: 171351 - RNA, 32 nt, Homo Sapiens
caaggcucacugcagccuggaccuccugguuc

SEQ ID NO: 171352 - RNA, 32 nt, Homo Sapiens
cuugcuauccuguggucuuguugccugaaauu

SEQ ID NO: 171353 - RNA, 32 nt, Homo Sapiens
cauguggccuaacaaaaggaaaaaauguuuuu

SEQ ID NO: 171354 - RNA, 32 nt, Homo Sapiens
cuggaccucagucuaucucaauaaaagauauu

SEQ ID NO: 171355 - RNA, 32 nt, Homo Sapiens
accgaccugauccucauuggggccccccauua

SEQ ID NO: 171356 - RNA, 32 nt, Homo Sapiens
aagucaggagaagccuugauucuuauaaacug

SEQ ID NO: 171357 - RNA, 32 nt, Homo Sapiens
uggggaguugcaacuucaguguggaauuuccu

SEQ ID NO: 171358 - RNA, 32 nt, Homo Sapiens
gacaggggcgagggcugcuuccucgcggcagc

SEQ ID NO: 171359 - RNA, 32 nt, Homo Sapiens
gcggcugcgaagucuguaaaccugguggccaa

SEQ ID NO: 171360 - RNA, 32 nt, Homo Sapiens
aguauuuuuuaaauguauucauuccuacaaau

SEQ ID NO: 171361 - RNA, 32 nt, Homo Sapiens
uccccccuuuugcucggcacuucucucuugcc

SEQ ID NO: 171362 - RNA, 32 nt, Homo Sapiens
gaauagcucccucuucugguccuggcucaggg

SEQ ID NO: 171363 - RNA, 32 nt, Homo Sapiens
gugccuauuucacagcucucuuggucacaaaa

SEQ ID NO: 171364 - RNA, 32 nt, Homo Sapiens
gggggagaaugggaggcuuggccuucuuugug

SEQ ID NO: 171365 - RNA, 32 nt, Homo Sapiens
augcaaagaguugugggucuucaucacacauu

SEQ ID NO: 171366 - RNA, 32 nt, Homo Sapiens
cuguccacggcgggccucccgcucccaguccu

SEQ ID NO: 171367 - RNA, 32 nt, Homo Sapiens
guggagaacacuuuaaaaauacagagaauuuc

SEQ ID NO: 171368 - RNA, 32 nt, Homo Sapiens
ugaacacuuggaggaauaaaguucuguuuuua

SEQ ID NO: 171369 - RNA, 32 nt, Homo Sapiens
caguuguugggguuggugcuguuggcauggcc

SEQ ID NO: 171370 - RNA, 32 nt, Homo Sapiens
cuuucuuugugucuuguguguuucuuuuauau

SEQ ID NO: 171371 - RNA, 32 nt, Homo Sapiens
cccugucugcagaugaggaaaagcagacaggu

SEQ ID NO: 171372 - RNA, 32 nt, Homo Sapiens
cggcccauccagcggcugcugcccggcuccuc

SEQ ID NO: 171373 - RNA, 32 nt, Homo Sapiens
gccguagguuggaggcugugggggguggccgg

SEQ ID NO: 171374 - RNA, 32 nt, Homo Sapiens
ccaaaaggucauuguuucucacuagaccccag

SEQ ID NO: 171375 - RNA, 32 nt, Homo Sapiens
uauagagaccauaauuauaugguccuuagaaa

SEQ ID NO: 171376 - RNA, 32 nt, Homo Sapiens
ccaacuccucuuccucugccaaaagcuauuug

SEQ ID NO: 171377 - RNA, 32 nt, Homo Sapiens
augugauagaauauuuauaacuuuuuauuaga

SEQ ID NO: 171378 - RNA, 32 nt, Homo Sapiens
ggaccaugcagcggagccucccugcccuucgc

SEQ ID NO: 171379 - RNA, 32 nt, Homo Sapiens
caccacuguucuuaucucuauagugaugaaac

SEQ ID NO: 171380 - RNA, 32 nt, Homo Sapiens
ugaggaucugggucugguuuucugauguugcc

SEQ ID NO: 171381 - RNA, 32 nt, Homo Sapiens
uccccccuuuuuccuuuuucugauuagcuuug

SEQ ID NO: 171382 - RNA, 32 nt, Homo Sapiens
ucuccuugccagccugcagggcggcgaccccc

SEQ ID NO: 171383 - RNA, 32 nt, Homo Sapiens
auuccagacauuaugcccuuugguugucacua

SEQ ID NO: 171384 - RNA, 30 nt, Homo Sapiens
ccaugugaaggugcugcaggagaugcugag

SEQ ID NO: 171385 - RNA, 32 nt, Homo Sapiens
gagccccagcauaugggggccuggauucauuu

SEQ ID NO: 171386 - RNA, 32 nt, Homo Sapiens
gacucucccuggggggcccaccucuugccccc

SEQ ID NO: 171387 - RNA, 32 nt, Homo Sapiens
acgggagccacuuuucccagccuguauguucu

SEQ ID NO: 171388 - RNA, 32 nt, Homo Sapiens
guacagagccaggaacccuacugcaguaaacu

SEQ ID NO: 171389 - RNA, 32 nt, Homo Sapiens
cacgggucagaccuaaagaaugugaacacuuu

SEQ ID NO: 171390 - RNA, 32 nt, Homo Sapiens
ggucaggcugugccccaccuccagccucacca

SEQ ID NO: 171391 - RNA, 31 nt, Homo Sapiens
aaugaugcauggccaaguucaguguuuacag

SEQ ID NO: 171392 - RNA, 32 nt, Homo Sapiens
acccccacccccagugcagggcuggucuuggg

SEQ ID NO: 171393 - RNA, 32 nt, Homo Sapiens
cggcaggcucgcgggcgccgggcuucguuaca

SEQ ID NO: 171394 - RNA, 32 nt, Homo Sapiens
ccgcugucccuuauuucaacccguuagcaaca

SEQ ID NO: 171395 - RNA, 32 nt, Homo Sapiens
ugggaccugcgcgacgcugcuguagccugccg

SEQ ID NO: 171396 - RNA, 32 nt, Homo Sapiens
acccgcuccggcgacccuccccgcuccucugu

SEQ ID NO: 171397 - RNA, 32 nt, Homo Sapiens
gggaggagucggagaggcaggggcuugcuuug

SEQ ID NO: 171398 - RNA, 32 nt, Homo Sapiens
acccaccgccccacacgagaaauuugugcgcu

SEQ ID NO: 171399 - RNA, 32 nt, Homo Sapiens
caccggggagacgcugguuuucugcucgcugu

SEQ ID NO: 171400 - RNA, 32 nt, Homo Sapiens
caucugcaggguggagggggccaccauccagu

SEQ ID NO: 171401 - RNA, 30 nt, Homo Sapiens
auguuuacaaaauaaagauuauuucaaacc

SEQ ID NO: 171402 - RNA, 32 nt, Homo Sapiens
auuuaaacuuaagcaagcaagcguguauuuuc

SEQ ID NO: 171403 - RNA, 32 nt, Homo Sapiens
guuguagaguuuuauuacuaagaaaauaaaug

SEQ ID NO: 171404 - RNA, 32 nt, Homo Sapiens
guaacccugccaaauacaucagcuuguaggag

SEQ ID NO: 171405 - RNA, 32 nt, Homo Sapiens
acuucuaaaaauuuagcaauauuagaauagga

SEQ ID NO: 171406 - RNA, 32 nt, Homo Sapiens
gugccugucagcuggguguacuggccuguuca

SEQ ID NO: 171407 - RNA, 32 nt, Homo Sapiens
uggguagccaugguuaaaucuguacagggguu

SEQ ID NO: 171408 - RNA, 32 nt, Homo Sapiens
gacucauuccuuaauuuugcuuacuuuuucau

SEQ ID NO: 171409 - RNA, 32 nt, Homo Sapiens
ccaaagugagggaauauguccaauuaauuagu

SEQ ID NO: 171410 - RNA, 32 nt, Homo Sapiens
agacagggaacaggcucuccuccagagccucc

SEQ ID NO: 171411 - RNA, 32 nt, Homo Sapiens
ggcggcgguggcagcggcggcuccaccaccau

SEQ ID NO: 171412 - RNA, 32 nt, Homo Sapiens
uuuccaguuaguuuccaaguccagucaauuuu

SEQ ID NO: 171413 - RNA, 28 nt, Homo Sapiens
guaacaguggcuacccaugaggcaauau

SEQ ID NO: 171414 - RNA, 32 nt, Homo Sapiens
gcgggagcugcaucguccacuccggucggcgg

SEQ ID NO: 171415 - RNA, 32 nt, Homo Sapiens
agggcaggggcugagggagugagugaagcgga

SEQ ID NO: 171416 - RNA, 32 nt, Homo Sapiens
ucgggucagaagcucacucccgugcccucguc

SEQ ID NO: 171417 - RNA, 32 nt, Homo Sapiens
uauagucaaaauuuaagauacaauuccaauga

SEQ ID NO: 171418 - RNA, 29 nt, Homo Sapiens
ugagauuuuauccaaugaacacucuguac

SEQ ID NO: 171419 - RNA, 32 nt, Homo Sapiens
ugugccccucauaaguuuuuccagggaggggu

SEQ ID NO: 171420 - RNA, 32 nt, Homo Sapiens
ugaacaaucauggauuuuucugaucaauugug

SEQ ID NO: 171421 - RNA, 32 nt, Homo Sapiens
uaugaauaaccaagauggagccgggugcaguu

SEQ ID NO: 171422 - RNA, 32 nt, Homo Sapiens
cuuagaucaugaguugaacaaacauguaaaag

SEQ ID NO: 171423 - RNA, 32 nt, Homo Sapiens
ccggaccugcagcccuggacagauggggaaca

SEQ ID NO: 171424 - RNA, 32 nt, Homo Sapiens
cucggccuaagguuuccuggaacuuccagauu

SEQ ID NO: 171425 - RNA, 32 nt, Homo Sapiens
gaccaggguggagaggaauaagagacuaagua

SEQ ID NO: 171426 - RNA, 32 nt, Homo Sapiens
uuaaugcagcggcagcggcgacagccuucccu

SEQ ID NO: 171427 - RNA, 32 nt, Homo Sapiens
gaaugccgcgccagcaaugggaugcaggaaga

SEQ ID NO: 171428 - RNA, 32 nt, Homo Sapiens
uaacugucuauuucucacuucaauucuguuag

SEQ ID NO: 171429 - RNA, 32 nt, Homo Sapiens
gaaggggugaacagaaugggcggcugugcugg

SEQ ID NO: 171430 - RNA, 32 nt, Homo Sapiens
ggccguaucgcgagcaggucccggcggccccc

SEQ ID NO: 171431 - RNA, 32 nt, Homo Sapiens
cauuauuugucugucacagaagagagcugcuu

SEQ ID NO: 171432 - RNA, 32 nt, Homo Sapiens
gcugccucagcuccaagacaagaaugaaccug

SEQ ID NO: 171433 - RNA, 32 nt, Homo Sapiens
uucagaucuuaggcacaaaaccaccgaugaau

SEQ ID NO: 171434 - RNA, 32 nt, Homo Sapiens
agaaaccuucacuugcagaaaacuugagucag

SEQ ID NO: 171435 - RNA, 32 nt, Homo Sapiens
aggagaccgagauugcugaugaguggcucagg

SEQ ID NO: 171436 - RNA, 32 nt, Homo Sapiens
aagguuaaagaauggaaacuggggauaaaaau

SEQ ID NO: 171437 - RNA, 32 nt, Homo Sapiens
ggccaggccauugccuucccacuaugcagcca

SEQ ID NO: 171438 - RNA, 32 nt, Homo Sapiens
ccuugccucccucuuccauucucuuaggcaca

SEQ ID NO: 171439 - RNA, 32 nt, Homo Sapiens
acguuucuggccuggguuuuguggucaucuau

SEQ ID NO: 171440 - RNA, 28 nt, Homo Sapiens
gucgccaggcggccgucauggcgguguc

SEQ ID NO: 171441 - RNA, 32 nt, Homo Sapiens
agaacccugugcuuauguggugggcagggcca

SEQ ID NO: 171442 - RNA, 32 nt, Homo Sapiens
uaauuguuaaagagggcaaggcugcuuuuauu

SEQ ID NO: 171443 - RNA, 32 nt, Homo Sapiens
ggaggugggaggagggagugacgagucaagga

SEQ ID NO: 171444 - RNA, 32 nt, Homo Sapiens
cacaagcaagugguuuucauuaacucacaaag

SEQ ID NO: 171445 - RNA, 32 nt, Homo Sapiens
uuaucucaguuauguuauguguuaaauguuua

SEQ ID NO: 171446 - RNA, 32 nt, Homo Sapiens
ucugggaggagcuauuucaucuuccagcucag

SEQ ID NO: 171447 - RNA, 32 nt, Homo Sapiens
uauauaagacugccacaucuuacuggagaaug

SEQ ID NO: 171448 - RNA, 30 nt, Homo Sapiens
uuucauccuccaguggcgccggcgcggucc

SEQ ID NO: 171449 - RNA, 32 nt, Homo Sapiens
uuuuuguuguuuaucaggaaauccauauuuau

SEQ ID NO: 171450 - RNA, 32 nt, Homo Sapiens
aagcacacccucaggccgagggugcagacuga

SEQ ID NO: 171451 - RNA, 32 nt, Homo Sapiens
caguaugauuguuuucucacccuaacuuagcu

SEQ ID NO: 171452 - RNA, 32 nt, Homo Sapiens
cgggaagauggcggccggcggcggcggaggca

SEQ ID NO: 171453 - RNA, 32 nt, Homo Sapiens
uuauauagauacuaguauuaagaucaaaagcu

SEQ ID NO: 171454 - RNA, 32 nt, Homo Sapiens
caugagccacgauaaaaaaugccaguuuggca

SEQ ID NO: 171455 - RNA, 32 nt, Homo Sapiens
gcuguccuggcuugcaucaacaucuccagcau

SEQ ID NO: 171456 - RNA, 32 nt, Homo Sapiens
aggggcgccgacgccgcguucucggggccccg

SEQ ID NO: 171457 - RNA, 32 nt, Homo Sapiens
uugcuuuccuuuccuuuuuuucccuuuucuuu

SEQ ID NO: 171458 - RNA, 32 nt, Homo Sapiens
aaauguuccccagggugauaugcugauuuuca

SEQ ID NO: 171459 - RNA, 32 nt, Homo Sapiens
gagccggccugcccacacccccggccaucgcu

SEQ ID NO: 171460 - RNA, 32 nt, Homo Sapiens
ugacugggcuccuucccuugacuuccagggag

SEQ ID NO: 171461 - RNA, 32 nt, Homo Sapiens
acuccuugauaaaaaauuuauuauguccauua

SEQ ID NO: 171462 - RNA, 31 nt, Homo Sapiens
aaaauggaauaaaaauaauauccuuugcuag

SEQ ID NO: 171463 - RNA, 32 nt, Homo Sapiens
gucuaggaccaggauucuuaugcuauggucac

SEQ ID NO: 171464 - RNA, 32 nt, Homo Sapiens
uuaagaauuucaaaagugauuuuuucacccau

SEQ ID NO: 171465 - RNA, 32 nt, Homo Sapiens
ccggggaugggcccgcggcugcgaggggaucu

SEQ ID NO: 171466 - RNA, 32 nt, Homo Sapiens
uaggauccacggauaugagaccauuuuuguca

SEQ ID NO: 171467 - RNA, 32 nt, Homo Sapiens
cagagcucugauguggaaagacaggaggugug

SEQ ID NO: 171468 - RNA, 32 nt, Homo Sapiens
gcugcaguggccgcucccugggccguaggaaa

SEQ ID NO: 171469 - RNA, 32 nt, Homo Sapiens
ugauaagggacuugauguuugugcaguaacuu

SEQ ID NO: 171470 - RNA, 32 nt, Homo Sapiens
gccuuucucugccugcccugcccuuggggcca

SEQ ID NO: 171471 - RNA, 27 nt, Homo Sapiens
gaauucuuucuucagcccauguaaaca

SEQ ID NO: 171472 - RNA, 32 nt, Homo Sapiens
cucuucccuuugcccuucuccuccaauacaua

SEQ ID NO: 171473 - RNA, 32 nt, Homo Sapiens
ggccacacugucagugaguguucuuuaggugg

SEQ ID NO: 171474 - RNA, 32 nt, Homo Sapiens
uccaagcugagcugagggcccgcggcggccgc

SEQ ID NO: 171475 - RNA, 32 nt, Homo Sapiens
gggcacgggcgcugcgcuggaggcuccccucg

SEQ ID NO: 171476 - RNA, 32 nt, Homo Sapiens
aaggcucuccccucucgccccaucccugcuug

SEQ ID NO: 171477 - RNA, 32 nt, Homo Sapiens
agcccccaggcaggcaccaaggugaugggacu

SEQ ID NO: 171478 - RNA, 32 nt, Homo Sapiens
gcagaggaccauaaccugggggucaggggaag

SEQ ID NO: 171479 - RNA, 32 nt, Homo Sapiens
gccccacaggcacgaucuguuccuccugggaa

SEQ ID NO: 171480 - RNA, 32 nt, Homo Sapiens
ucuaauugcacucccucaugcaugucacuuuc

SEQ ID NO: 171481 - RNA, 32 nt, Homo Sapiens
ggccaguguacuuuccuucuuccucuccauca

SEQ ID NO: 171482 - RNA, 32 nt, Homo Sapiens
ucccugcgcacccgguugcccggagcccucuc

SEQ ID NO: 171483 - RNA, 32 nt, Homo Sapiens
ccucuccgggagaugauuugggaaauuuuaua

SEQ ID NO: 171484 - RNA, 32 nt, Homo Sapiens
ugcccccgcgcgcgucccucacgugacugugu

SEQ ID NO: 171485 - RNA, 32 nt, Homo Sapiens
gaugccguggcgugcucgcuuuggccauccau

SEQ ID NO: 171486 - RNA, 32 nt, Homo Sapiens
gugacaacccacccagacugcaguucccuccc

SEQ ID NO: 171487 - RNA, 32 nt, Homo Sapiens
uuaaaugaaacacaguaaagaaaguugggcug

SEQ ID NO: 171488 - RNA, 28 nt, Homo Sapiens
cuacagaguuuagcacauuugaacguug

SEQ ID NO: 171489 - RNA, 32 nt, Homo Sapiens
cuucuccacccaccccaccccucacucagguc

SEQ ID NO: 171490 - RNA, 32 nt, Homo Sapiens
accaguuccgccucuagugucuggggcuuaga

SEQ ID NO: 171491 - RNA, 30 nt, Homo Sapiens
auucugcucugugcuuccucaguucacccu

SEQ ID NO: 171492 - RNA, 32 nt, Homo Sapiens
gcagaaaagcugacccagagcaguacucccug

SEQ ID NO: 171493 - RNA, 32 nt, Homo Sapiens
ggguuccaggguauaucucagagccuggagaa

SEQ ID NO: 171494 - RNA, 32 nt, Homo Sapiens
gcgauccuguuuaggcuucucuccuggauccu

SEQ ID NO: 171495 - RNA, 32 nt, Homo Sapiens
uacauauguauuauacacuugaacauguguuu

SEQ ID NO: 171496 - RNA, 32 nt, Homo Sapiens
uguuuuucauagacccacuuggcccaaaaccu

SEQ ID NO: 171497 - RNA, 32 nt, Homo Sapiens
aacaaaaguauuugugugcauguguauauaau

SEQ ID NO: 171498 - RNA, 32 nt, Homo Sapiens
gaacccagaauuagaaguuugugguuacagca

SEQ ID NO: 171499 - RNA, 32 nt, Homo Sapiens
auggaccuuuggggcuggggagccggggcugc

SEQ ID NO: 171500 - RNA, 32 nt, Homo Sapiens
cgccaagucccgagacgggcgaggcgaagcgc

SEQ ID NO: 171501 - RNA, 32 nt, Homo Sapiens
uaugggcucccuggccucccaggccaccaagg

SEQ ID NO: 171502 - RNA, 32 nt, Homo Sapiens
uuauuuuauacaaaauuaaaaacaaguuuuua

SEQ ID NO: 171503 - RNA, 32 nt, Homo Sapiens
auccaacuccccaccacccccaacuguccccc

SEQ ID NO: 171504 - RNA, 32 nt, Homo Sapiens
guccgccgcgcgccggccguuaauaggcuugc

SEQ ID NO: 171505 - RNA, 32 nt, Homo Sapiens
gagagaggccccagcuggcagggacccagaag

SEQ ID NO: 171506 - RNA, 32 nt, Homo Sapiens
ugagacauucucggggaaggcuuuccugaugc

SEQ ID NO: 171507 - RNA, 32 nt, Homo Sapiens
guccaggcucugcagagcgcagcagggcuuuu

SEQ ID NO: 171508 - RNA, 32 nt, Homo Sapiens
gcccuuuggcccggccucugcucugacuccuu

SEQ ID NO: 171509 - RNA, 32 nt, Homo Sapiens
aguauuuccuucccuccuccaagcacuuguag

SEQ ID NO: 171510 - RNA, 32 nt, Homo Sapiens
aacauaauuuaaaauuuucuaauagguacauu

SEQ ID NO: 171511 - RNA, 32 nt, Homo Sapiens
augcaauauucaccaaauaaauguagacugug

SEQ ID NO: 171512 - RNA, 32 nt, Homo Sapiens
cauggcgggauuuuugucauguuuuucagauu

SEQ ID NO: 171513 - RNA, 32 nt, Homo Sapiens
augcuguuucaauguauugcugauugggcuuu

SEQ ID NO: 171514 - RNA, 32 nt, Homo Sapiens
gguccgcccgucugcgccccucacaggaagcc

SEQ ID NO: 171515 - RNA, 32 nt, Homo Sapiens
cagcagcucucucccugggaaccaucagagaa

SEQ ID NO: 171516 - RNA, 32 nt, Homo Sapiens
ugccccccaaccccgaacccccaguugaggag

SEQ ID NO: 171517 - RNA, 32 nt, Homo Sapiens
uaauuacuaguucuaauaauucuuaucggauu

SEQ ID NO: 171518 - RNA, 32 nt, Homo Sapiens
cccuccuggagcucagugucaggaaagggggu

SEQ ID NO: 171519 - RNA, 32 nt, Homo Sapiens
ugcuggguuaccuggugacuacauuucccaga

SEQ ID NO: 171520 - RNA, 32 nt, Homo Sapiens
auggugaaaccaaacaaauacaaaauccuucu

SEQ ID NO: 171521 - RNA, 32 nt, Homo Sapiens
ggcgccccaacuccaacaccacguccugccgc

SEQ ID NO: 171522 - RNA, 32 nt, Homo Sapiens
aaagcaguacccuacccugauuguagggucuc

SEQ ID NO: 171523 - RNA, 32 nt, Homo Sapiens
gaugaggaaaggaaaaucagguagauggugcu

SEQ ID NO: 171524 - RNA, 32 nt, Homo Sapiens
gaauuaacaucuaaauucugguaacuauuaaa

SEQ ID NO: 171525 - RNA, 32 nt, Homo Sapiens
auaaauugggcaugugcugacugugggauauu

SEQ ID NO: 171526 - RNA, 32 nt, Homo Sapiens
ccuggccuucugcccgacccaggcagccauuc

SEQ ID NO: 171527 - RNA, 32 nt, Homo Sapiens
ggucaggcaccccaggccuccuugggaccugc

SEQ ID NO: 171528 - RNA, 32 nt, Homo Sapiens
gaacuaacauauauauaauuuuugauuaguug

SEQ ID NO: 171529 - RNA, 32 nt, Homo Sapiens
cuuuuuauuucccccaaaaucuuguauuuuuu

SEQ ID NO: 171530 - RNA, 32 nt, Homo Sapiens
gagucuggaacaauaauacccuaugauuagaa

SEQ ID NO: 171531 - RNA, 32 nt, Homo Sapiens
uagcgcgcgggccccggcgccccgcaccugua

SEQ ID NO: 171532 - RNA, 32 nt, Homo Sapiens
caaacuagagcguaucacccccugcucagagc

SEQ ID NO: 171533 - RNA, 32 nt, Homo Sapiens
uuuuaaaaaguaccacauuccaugacgcagga

SEQ ID NO: 171534 - RNA, 32 nt, Homo Sapiens
uccucccagaucacccuucucuucccagcgcc

SEQ ID NO: 171535 - RNA, 32 nt, Homo Sapiens
gggcuuguugguaauguuuugaaucuuuguaa

SEQ ID NO: 171536 - RNA, 32 nt, Homo Sapiens
uggaaagggacacacccagcugucugcucgca

SEQ ID NO: 171537 - RNA, 32 nt, Homo Sapiens
cuggcuuccuuccuccacccaguggagacccc

SEQ ID NO: 171538 - RNA, 32 nt, Homo Sapiens
agccacaaauuuaugaaacauuagagaauucu

SEQ ID NO: 171539 - RNA, 32 nt, Homo Sapiens
ggcucccacuugagagcagccucuaccugacc

SEQ ID NO: 171540 - RNA, 32 nt, Homo Sapiens
uaauuuuuguauuuuuaguggagaugcgguuu

SEQ ID NO: 171541 - RNA, 32 nt, Homo Sapiens
ccgacauggugucgccuccucccggggcggcg

SEQ ID NO: 171542 - RNA, 32 nt, Homo Sapiens
auugugugcugggccugggcugagugguuuac

SEQ ID NO: 171543 - RNA, 32 nt, Homo Sapiens
aucccaggacaccacacccagccucaguccuc

SEQ ID NO: 171544 - RNA, 32 nt, Homo Sapiens
acaagcuaaauauauauaggaaaucacaaaua

SEQ ID NO: 171545 - RNA, 32 nt, Homo Sapiens
uccauucuggggaauuuauauuugaauugagg

SEQ ID NO: 171546 - RNA, 32 nt, Homo Sapiens
ccuaacacacucccggcagcucugucuuugga

SEQ ID NO: 171547 - RNA, 32 nt, Homo Sapiens
uuacaacuggaugugugacuagugcugacgug

SEQ ID NO: 171548 - RNA, 32 nt, Homo Sapiens
uggaggaggguggggguggggggaaggcaagu

SEQ ID NO: 171549 - RNA, 32 nt, Homo Sapiens
gcgggacagcgcagggccauggccgaggcggu

SEQ ID NO: 171550 - RNA, 32 nt, Homo Sapiens
uauuaucuucauuuuuaagaguuucuuuaaga

SEQ ID NO: 171551 - RNA, 29 nt, Homo Sapiens
agggcacaguuuguauauuuuuaaaugaa

SEQ ID NO: 171552 - RNA, 32 nt, Homo Sapiens
uauuucuagcacgaguuuuucuucuuuagauu

SEQ ID NO: 171553 - RNA, 32 nt, Homo Sapiens
aagaaugagauaaauuuguacuuuuuagauca

SEQ ID NO: 171554 - RNA, 32 nt, Homo Sapiens
gacacccccuccccgccuuuaccucacuucca

SEQ ID NO: 171555 - RNA, 32 nt, Homo Sapiens
gacuguguuugucucacaaucaccacaaaaua

SEQ ID NO: 171556 - RNA, 32 nt, Homo Sapiens
uaauuucauucuuguuuuuucaucucauuauc

SEQ ID NO: 171557 - RNA, 32 nt, Homo Sapiens
uaacccaccuucugccccacucuauuccuuau

SEQ ID NO: 171558 - RNA, 32 nt, Homo Sapiens
cauucccuuaaauucugaguacuguacauaua

SEQ ID NO: 171559 - RNA, 32 nt, Homo Sapiens
cauuuguucacauguuuuccugcugacucucu

SEQ ID NO: 171560 - RNA, 32 nt, Homo Sapiens
ucugcccgagaccucucaaggcccugaccuca

SEQ ID NO: 171561 - RNA, 32 nt, Homo Sapiens
uccaggguaaaaaugguuuuuuaaaaagucaa

SEQ ID NO: 171562 - RNA, 32 nt, Homo Sapiens
ugacaucagcaucaccuagaaacuuguuagaa

SEQ ID NO: 171563 - RNA, 32 nt, Homo Sapiens
ugggaccucucucccucccccauccacacaga

SEQ ID NO: 171564 - RNA, 32 nt, Homo Sapiens
ccugaauaccuaugcguacacacacacauauu

SEQ ID NO: 171565 - RNA, 32 nt, Homo Sapiens
cucccggagucccagcagcaagacggcaacca

SEQ ID NO: 171566 - RNA, 32 nt, Homo Sapiens
gcuggcagugggccgccucgaucccucugcag

SEQ ID NO: 171567 - RNA, 32 nt, Homo Sapiens
gugggagggagugaugcaggcagacgcugcgc

SEQ ID NO: 171568 - RNA, 32 nt, Homo Sapiens
ucuuguuucuaaaaugaggcuucuaaaauuuu

SEQ ID NO: 171569 - RNA, 32 nt, Homo Sapiens
ccucauaauguuuguagaucagaaaagggaga

SEQ ID NO: 171570 - RNA, 32 nt, Homo Sapiens
uuuugaaaauugcacaaagcaggccaggcacg

SEQ ID NO: 171571 - RNA, 32 nt, Homo Sapiens
aucggccugcagaggggacggcuggggucccg

SEQ ID NO: 171572 - RNA, 32 nt, Homo Sapiens
aucagucccgacgcuuccugugaggugcacgc

SEQ ID NO: 171573 - RNA, 32 nt, Homo Sapiens
ugauaugaauaugccuuauaugcugauaugaa

SEQ ID NO: 171574 - RNA, 32 nt, Homo Sapiens
ccggccuucuuuguaggccuggcaccguagag

SEQ ID NO: 171575 - RNA, 32 nt, Homo Sapiens
cgggcccauggcggcgucggcggcucugucug

SEQ ID NO: 171576 - RNA, 32 nt, Homo Sapiens
aggaggggacgccagaagcaggaaucucgccu

SEQ ID NO: 171577 - RNA, 32 nt, Homo Sapiens
acugccggugccaggaucugggcuugucaaaa

SEQ ID NO: 171578 - RNA, 32 nt, Homo Sapiens
gccggggaggucgggacgggcaggggcugagg

SEQ ID NO: 171579 - RNA, 31 nt, Homo Sapiens
acgccgaggcacugcgcccccagccccgcgc

SEQ ID NO: 171580 - RNA, 32 nt, Homo Sapiens
guaaccacaaguucaagggucaaagggacccu

SEQ ID NO: 171581 - RNA, 32 nt, Homo Sapiens
uggggagcugggugugugaucuggccaguugu

SEQ ID NO: 171582 - RNA, 32 nt, Homo Sapiens
ccuuuuauaaagcgaaacuauuuuuauagaga

SEQ ID NO: 171583 - RNA, 32 nt, Homo Sapiens
gccacugacuguuauaaaguauaacaacacac

SEQ ID NO: 171584 - RNA, 32 nt, Homo Sapiens
guggucagacugcucgcugguggccucgcuuu

SEQ ID NO: 171585 - RNA, 27 nt, Homo Sapiens
gacagugccuucuucucuggcuuccuc

SEQ ID NO: 171586 - RNA, 32 nt, Homo Sapiens
gaaauucagcugaguuccaccaauuauaaauu

SEQ ID NO: 171587 - RNA, 32 nt, Homo Sapiens
ugauugugguggauaagcuuuuugaugugcug

SEQ ID NO: 171588 - RNA, 32 nt, Homo Sapiens
acugaccaccuccccggcauccccucaggcgu

SEQ ID NO: 171589 - RNA, 32 nt, Homo Sapiens
uuagugagcauucugaccucauuuuuacuuua

SEQ ID NO: 171590 - RNA, 32 nt, Homo Sapiens
caaucuuuauaaaagaggcagucuagagaacu

SEQ ID NO: 171591 - RNA, 32 nt, Homo Sapiens
ccccgccagguggucagcccuuccucggaguc

SEQ ID NO: 171592 - RNA, 32 nt, Homo Sapiens
ucccaugccguucuucuguguaauauuaagaa

SEQ ID NO: 171593 - RNA, 32 nt, Homo Sapiens
gggaccaaggaccucaaguccugggcagucuc

SEQ ID NO: 171594 - RNA, 32 nt, Homo Sapiens
uccugugaacacauaaauauauuuuuauagaa

SEQ ID NO: 171595 - RNA, 32 nt, Homo Sapiens
gguguuugccucuuucuaaguuuggacuagcu

SEQ ID NO: 171596 - RNA, 32 nt, Homo Sapiens
uugucagccuuggccugggguuuugaccuugc

SEQ ID NO: 171597 - RNA, 32 nt, Homo Sapiens
uauauacacauauauauguauauauacacaua

SEQ ID NO: 171598 - RNA, 32 nt, Homo Sapiens
acauucucagagggagaaaugaaacauuacua

SEQ ID NO: 171599 - RNA, 32 nt, Homo Sapiens
augugagccaucuggagcagaggggcacuaac

SEQ ID NO: 171600 - RNA, 28 nt, Homo Sapiens
gcuccggggcggcagcagagcuggcaca

SEQ ID NO: 171601 - RNA, 32 nt, Homo Sapiens
cagugguaguuuacugugaugugagcauugua

SEQ ID NO: 171602 - RNA, 32 nt, Homo Sapiens
ucaaugauuuauucucuuccaggauuuguguu

SEQ ID NO: 171603 - RNA, 32 nt, Homo Sapiens
gccucaaggccucuucaguauaaggaaauacc

SEQ ID NO: 171604 - RNA, 32 nt, Homo Sapiens
gagucaaacucuucuuucuguaugacauauac

SEQ ID NO: 171605 - RNA, 32 nt, Homo Sapiens
ugccuucccuucccuucccauccgccauauuu

SEQ ID NO: 171606 - RNA, 32 nt, Homo Sapiens
aaauauuuaaaacuuuuucaugauuucugugu

SEQ ID NO: 171607 - RNA, 32 nt, Homo Sapiens
uuguauaauaauuuauaauuguaaugcauuuu

SEQ ID NO: 171608 - RNA, 32 nt, Homo Sapiens
aucccagcacgcugggaggccaaggcaggugg

SEQ ID NO: 171609 - RNA, 32 nt, Homo Sapiens
acggaggaggugucauaggagcucagccucaa

SEQ ID NO: 171610 - RNA, 32 nt, Homo Sapiens
cggcggcggcgccggacggcaguuguagagaa

SEQ ID NO: 171611 - RNA, 32 nt, Homo Sapiens
ccgccuucuccguggcucuccagccgcugggg

SEQ ID NO: 171612 - RNA, 32 nt, Homo Sapiens
ucucucauuuaggaggguuugcagguccagag

SEQ ID NO: 171613 - RNA, 32 nt, Homo Sapiens
gccuggauaacuuuuuuuuuuauuucuauuag

SEQ ID NO: 171614 - RNA, 32 nt, Homo Sapiens
ugacaaucuugacaccaauuuuaagaauagcu

SEQ ID NO: 171615 - RNA, 32 nt, Homo Sapiens
uggguccgcacgaaaugcuugauuaugucagc

SEQ ID NO: 171616 - RNA, 32 nt, Homo Sapiens
aaucccagcacuuugggaggccaggcaggagg

SEQ ID NO: 171617 - RNA, 29 nt, Homo Sapiens
cccgcaccgguccgaguugcggccgcgug

SEQ ID NO: 171618 - RNA, 32 nt, Homo Sapiens
cauggcaguugcugacaccucugcgaaggccg

SEQ ID NO: 171619 - RNA, 32 nt, Homo Sapiens
uagugcuauauaucagguaugugaccauuuau

SEQ ID NO: 171620 - RNA, 32 nt, Homo Sapiens
ugcauaggaguuuggaggaaguuggaguuuug

SEQ ID NO: 171621 - RNA, 32 nt, Homo Sapiens
gugugccaugugaggacagagcaagaaggggc

SEQ ID NO: 171622 - RNA, 32 nt, Homo Sapiens
caucuucucgccaccugcuuuuucccuccagu

SEQ ID NO: 171623 - RNA, 32 nt, Homo Sapiens
gcaaaugugggaaagacuauaggcaauaggaa

SEQ ID NO: 171624 - RNA, 32 nt, Homo Sapiens
aagaaacacgugcaggaugugggugcuccgaa

SEQ ID NO: 171625 - RNA, 32 nt, Homo Sapiens
uucagugcuguccuuccacauuuaauugcauu

SEQ ID NO: 171626 - RNA, 32 nt, Homo Sapiens
uuauuacaugcaaaaauagaaaauuauuuguu

SEQ ID NO: 171627 - RNA, 32 nt, Homo Sapiens
cuuauuuuucuuuucuauaaaauaggagccaa

SEQ ID NO: 171628 - RNA, 32 nt, Homo Sapiens
uuccuccacaguggauaugaauguuugcaacu

SEQ ID NO: 171629 - RNA, 32 nt, Homo Sapiens
auaguuguauauauuuuuaaaguagaauaaau

SEQ ID NO: 171630 - RNA, 32 nt, Homo Sapiens
acuuuauauaaaaugugugagacaaaaacuua

SEQ ID NO: 171631 - RNA, 32 nt, Homo Sapiens
cccaugcccuccccagccucucccagcacaag

SEQ ID NO: 171632 - RNA, 32 nt, Homo Sapiens
cggcggaccgcguccugcgccggagcaggggc

SEQ ID NO: 171633 - RNA, 32 nt, Homo Sapiens
uguuuacuuugguugucccuucuggcauggug

SEQ ID NO: 171634 - RNA, 32 nt, Homo Sapiens
ugucauauaaucauuccauacuucugagacug

SEQ ID NO: 171635 - RNA, 32 nt, Homo Sapiens
accaaauauuccagagacugggacuaagugua

SEQ ID NO: 171636 - RNA, 32 nt, Homo Sapiens
gaaggucuggggccgagggucugggaauuuuu

SEQ ID NO: 171637 - RNA, 32 nt, Homo Sapiens
cucaguauauauauuuuuuuccuuccugucuu

SEQ ID NO: 171638 - RNA, 32 nt, Homo Sapiens
aaaaaguacuuugauccauuuaggaaauuccu

SEQ ID NO: 171639 - RNA, 32 nt, Homo Sapiens
uacacgugccuacuguauacucaacaguccuc

SEQ ID NO: 171640 - RNA, 32 nt, Homo Sapiens
augccuccugucuacgugguuuuagauuuacg

SEQ ID NO: 171641 - RNA, 32 nt, Homo Sapiens
ugagccaaaagagcuuguuugcugggaggugg

SEQ ID NO: 171642 - RNA, 32 nt, Homo Sapiens
gucguggcgugaggggcgccgagcgaggggag

SEQ ID NO: 171643 - RNA, 32 nt, Homo Sapiens
aagaguuaacagcagccagauuuuaaggauuu

SEQ ID NO: 171644 - RNA, 31 nt, Homo Sapiens
cagaaaacaaauuaaaaugaaauguuguugu

SEQ ID NO: 171645 - RNA, 32 nt, Homo Sapiens
auaaaaagacaaaacuaacauaaaaauuucag

SEQ ID NO: 171646 - RNA, 32 nt, Homo Sapiens
auaaaaauguuccaaaaaguuaucuccagaga

SEQ ID NO: 171647 - RNA, 32 nt, Homo Sapiens
gauccauggccgccagcucucuccaggcucau

SEQ ID NO: 171648 - RNA, 32 nt, Homo Sapiens
cccacccccucgcuggcacugacuuugccuug

SEQ ID NO: 171649 - RNA, 32 nt, Homo Sapiens
uggcgguggaggggguucgcaccgugcugggc

SEQ ID NO: 171650 - RNA, 32 nt, Homo Sapiens
agagacggcuggggcgggggcaggaggagggg

SEQ ID NO: 171651 - RNA, 32 nt, Homo Sapiens
cugaucccucccuccgcaguggaacccaggcu

SEQ ID NO: 171652 - RNA, 32 nt, Homo Sapiens
uugccugugaaugagaggagaaaggaugagag

SEQ ID NO: 171653 - RNA, 32 nt, Homo Sapiens
agugaggaaugggagaggcccagagcucagua

SEQ ID NO: 171654 - RNA, 32 nt, Homo Sapiens
caggcugucuucacugccaaguauucagagga

SEQ ID NO: 171655 - RNA, 30 nt, Homo Sapiens
gcugggcgugguggcaugcaccuguagucc

SEQ ID NO: 171656 - RNA, 32 nt, Homo Sapiens
cucuaaugucaggccuuggaaccaucugaggu

SEQ ID NO: 171657 - RNA, 32 nt, Homo Sapiens
uuacugagagugcaaauuguacaagguauuua

SEQ ID NO: 171658 - RNA, 32 nt, Homo Sapiens
guaggguagugucaaacuguuuuaagaggaau

SEQ ID NO: 171659 - RNA, 32 nt, Homo Sapiens
cacguaguccagaugccugggaaggaacaucu

SEQ ID NO: 171660 - RNA, 32 nt, Homo Sapiens
auauuuugaaagaguagauacuuaauuuauaa

SEQ ID NO: 171661 - RNA, 32 nt, Homo Sapiens
uaaccugguaauauaacugaaaaaauaaaagu

SEQ ID NO: 171662 - RNA, 32 nt, Homo Sapiens
cauuauucaaaguugccuaaauccauuuggaa

SEQ ID NO: 171663 - RNA, 30 nt, Homo Sapiens
ucgccaugucgggcgagcucagcaacaggu

SEQ ID NO: 171664 - RNA, 32 nt, Homo Sapiens
cuguagacaagauguuuccaaaacuuuaagug

SEQ ID NO: 171665 - RNA, 32 nt, Homo Sapiens
aguaucaggaggacauggggccacgggcgucc

SEQ ID NO: 171666 - RNA, 32 nt, Homo Sapiens
ggcugcgcuggggccucggcccgggaggaggc

SEQ ID NO: 171667 - RNA, 32 nt, Homo Sapiens
gcacuggguucgccgcgccgaacugcagccau

SEQ ID NO: 171668 - RNA, 28 nt, Homo Sapiens
aucagaguuacaguugucagugaaacua

SEQ ID NO: 171669 - RNA, 32 nt, Homo Sapiens
ccuucucuacuaaaauacaaaaaauuagcugg

SEQ ID NO: 171670 - RNA, 32 nt, Homo Sapiens
guauuauuuauguugagaaaccacuuaaaugu

SEQ ID NO: 171671 - RNA, 32 nt, Homo Sapiens
cugcuuaggccacucgagcaucagagcuucca

SEQ ID NO: 171672 - RNA, 32 nt, Homo Sapiens
ccagagagauaaaauuuuugcucaaaaccaga

SEQ ID NO: 171673 - RNA, 32 nt, Homo Sapiens
gccagaggcguggcugccccagcguuagcagc

SEQ ID NO: 171674 - RNA, 32 nt, Homo Sapiens
aaagaaugagagaagcaagggcaaacacauuc

SEQ ID NO: 171675 - RNA, 32 nt, Homo Sapiens
cagagccagcagagcaggcugacgaccugcaa

SEQ ID NO: 171676 - RNA, 32 nt, Homo Sapiens
gcccuaggaauuuuuacugccuugacgaggcc

SEQ ID NO: 171677 - RNA, 32 nt, Homo Sapiens
ccugcgggcgccggggugugggacaggcugag

SEQ ID NO: 171678 - RNA, 32 nt, Homo Sapiens
cccauuuguaaaugagaaaaaugcccauuugu

SEQ ID NO: 171679 - RNA, 32 nt, Homo Sapiens
aaauguuucuucauuucuauaccuucuuuuau

SEQ ID NO: 171680 - RNA, 32 nt, Homo Sapiens
augucucacagcacauauguacuuuacaguag

SEQ ID NO: 171681 - RNA, 32 nt, Homo Sapiens
guuugaaaaaauuuuggcuauuaaagauaugu

SEQ ID NO: 171682 - RNA, 32 nt, Homo Sapiens
uccuaaguaauaaaaacuguaaaaugcaaaua

SEQ ID NO: 171683 - RNA, 31 nt, Homo Sapiens
gucauagggcaguuggaaacggccuccuagg

SEQ ID NO: 171684 - RNA, 32 nt, Homo Sapiens
gugguuucaucuccaggaaauuccuagacuua

SEQ ID NO: 171685 - RNA, 32 nt, Homo Sapiens
cccguuuccucccuccucccugucccuagcaa

SEQ ID NO: 171686 - RNA, 32 nt, Homo Sapiens
auucgaacaccgcugggaucuggccagggugc

SEQ ID NO: 171687 - RNA, 32 nt, Homo Sapiens
uacagccugaagauccaggaggacuucuugga

SEQ ID NO: 171688 - RNA, 32 nt, Homo Sapiens
aaaggugaauaaaauugggauauaaaaugcaa

SEQ ID NO: 171689 - RNA, 32 nt, Homo Sapiens
uucaagaccaauuuaaugguccugucauguua

SEQ ID NO: 171690 - RNA, 32 nt, Homo Sapiens
uauagcuccccucccaguggagcaggugucug

SEQ ID NO: 171691 - RNA, 32 nt, Homo Sapiens
cgcacagagaucccucgccgcgcggaggagga

SEQ ID NO: 171692 - RNA, 32 nt, Homo Sapiens
uauauggcuauuucuuaguugccuuuuuguug

SEQ ID NO: 171693 - RNA, 32 nt, Homo Sapiens
cgcggaggcggaugggcgcggcucccuccccc

SEQ ID NO: 171694 - RNA, 32 nt, Homo Sapiens
agguuacugauuuuccucuucccucuuaguuu

SEQ ID NO: 171695 - RNA, 32 nt, Homo Sapiens
augagucugcaccugguaccuauguuguucag

SEQ ID NO: 171696 - RNA, 29 nt, Homo Sapiens
ucaaguauggauuucagaggugcucuuag

SEQ ID NO: 171697 - RNA, 32 nt, Homo Sapiens
cucuauaaaauugcccauuuggaccaaaucua

SEQ ID NO: 171698 - RNA, 32 nt, Homo Sapiens
gaguuucgcucuuguugcccaggcuggaguac

SEQ ID NO: 171699 - RNA, 32 nt, Homo Sapiens
ccagcuuccuuccccuccauggcaccaguugu

SEQ ID NO: 171700 - RNA, 32 nt, Homo Sapiens
gaaauaauauuuuaccuuuuacuuugugcuuu

SEQ ID NO: 171701 - RNA, 32 nt, Homo Sapiens
gguccugacaacauggggcagugaguauaccu

SEQ ID NO: 171702 - RNA, 32 nt, Homo Sapiens
aucugagaacuaaaugugcuuccaugagacug

SEQ ID NO: 171703 - RNA, 32 nt, Homo Sapiens
caaauauaacuuaaauaaacauccuuugaagc

SEQ ID NO: 171704 - RNA, 32 nt, Homo Sapiens
ucauuucuucccuaaauaaaaaucaccuuuua

SEQ ID NO: 171705 - RNA, 32 nt, Homo Sapiens
uaaagcauuggugaaaucacauauuuuauauu

SEQ ID NO: 171706 - RNA, 32 nt, Homo Sapiens
augugagcugagaccucuguccugggaagacc

SEQ ID NO: 171707 - RNA, 32 nt, Homo Sapiens
ggauggucaaacaaaauaauaucauaccugga

SEQ ID NO: 171708 - RNA, 32 nt, Homo Sapiens
uguuguuuuuauguucauuugcuggagcgcaa

SEQ ID NO: 171709 - RNA, 32 nt, Homo Sapiens
uuugauugaaggagcucuuuuguccguaccua

SEQ ID NO: 171710 - RNA, 32 nt, Homo Sapiens
agcgccuccggggcuggugcguggccggcagc

SEQ ID NO: 171711 - RNA, 32 nt, Homo Sapiens
uugaaggaacucucaccuccgugggccugaaa

SEQ ID NO: 171712 - RNA, 32 nt, Homo Sapiens
ugcagaucgcagugaauuuuccuuggggaaca

SEQ ID NO: 171713 - RNA, 32 nt, Homo Sapiens
uucaagaagaagcaguauuaacaucaauugau

SEQ ID NO: 171714 - RNA, 32 nt, Homo Sapiens
ccauaugccguuucugguaccaagugagggga

SEQ ID NO: 171715 - RNA, 32 nt, Homo Sapiens
cauuccuacugauugauuuuuaucuugcuaua

SEQ ID NO: 171716 - RNA, 32 nt, Homo Sapiens
augcuucauguuuuacaaaccaaaaagucggg

SEQ ID NO: 171717 - RNA, 32 nt, Homo Sapiens
cccccaauuccugccugaaaucucuggccuca

SEQ ID NO: 171718 - RNA, 32 nt, Homo Sapiens
uggagauuguaucuggugccggagaggacugg

SEQ ID NO: 171719 - RNA, 32 nt, Homo Sapiens
guauggaugagaaguuccuucucauggacgag

SEQ ID NO: 171720 - RNA, 32 nt, Homo Sapiens
cccccuggccuccuuucuccgauuuacccuca

SEQ ID NO: 171721 - RNA, 32 nt, Homo Sapiens
cugggcauugcaccccaggcuaugcagucuuu

SEQ ID NO: 171722 - RNA, 32 nt, Homo Sapiens
cuucgucccugacaucgucaccaugggcaagu

SEQ ID NO: 171723 - RNA, 32 nt, Homo Sapiens
aagagucuacuucuaaccccauaucaucagcu

SEQ ID NO: 171724 - RNA, 32 nt, Homo Sapiens
gcauuauuuaugaaggaaaaaauacauaaaua

SEQ ID NO: 171725 - RNA, 32 nt, Homo Sapiens
cucugccuccaagucuacccuucccuucccgg

SEQ ID NO: 171726 - RNA, 32 nt, Homo Sapiens
cauaaugggauuaacauauuuuagacauucau

SEQ ID NO: 171727 - RNA, 32 nt, Homo Sapiens
uugcuacgcggcccgcgccuccuucacaagag

SEQ ID NO: 171728 - RNA, 32 nt, Homo Sapiens
agguugaggcuauagugagcugugauugcacg

SEQ ID NO: 171729 - RNA, 32 nt, Homo Sapiens
aggcaggcagaucaccugaggucgggaguugg

SEQ ID NO: 171730 - RNA, 32 nt, Homo Sapiens
uuccuccugccuuucucaacugucccaaggag

SEQ ID NO: 171731 - RNA, 32 nt, Homo Sapiens
aaaccucaaauuauauaauguaucuuauguau

SEQ ID NO: 171732 - RNA, 32 nt, Homo Sapiens
caacuaccaaagaaacaaauacuccucaguuu

SEQ ID NO: 171733 - RNA, 32 nt, Homo Sapiens
ggaacuucaagcugugauucuaucucggcuca

SEQ ID NO: 171734 - RNA, 32 nt, Homo Sapiens
aacuuuauagagauguaaaaacaaaacuauaa

SEQ ID NO: 171735 - RNA, 32 nt, Homo Sapiens
auaccuuuaaucuuguuuuucaugaucaucau

SEQ ID NO: 171736 - RNA, 32 nt, Homo Sapiens
cgccgcgcacccgcgcgccggacgccagugac

SEQ ID NO: 171737 - RNA, 32 nt, Homo Sapiens
uuaauaaaauuugcuuguuuuaaaaacauugu

SEQ ID NO: 171738 - RNA, 32 nt, Homo Sapiens
uuucuaaguauuuuuguauuguguacauucug

SEQ ID NO: 171739 - RNA, 32 nt, Homo Sapiens
gggcgucuccagguggucccagcccuccagau

SEQ ID NO: 171740 - RNA, 32 nt, Homo Sapiens
caguuuuucucuuauaguaccaucacuauaau

SEQ ID NO: 171741 - RNA, 32 nt, Homo Sapiens
ccacagugugugucaaccaaagguggcagugg

SEQ ID NO: 171742 - RNA, 32 nt, Homo Sapiens
ccgagccgcgcgcgccuucuccgccaggcccg

SEQ ID NO: 171743 - RNA, 32 nt, Homo Sapiens
guaugcacaguaaaaauggaaacuauauugac

SEQ ID NO: 171744 - RNA, 32 nt, Homo Sapiens
auauaguaucuauauucauacauauuauacuc

SEQ ID NO: 171745 - RNA, 32 nt, Homo Sapiens
cccugccagggccaaguccuucucccgaaccc

SEQ ID NO: 171746 - RNA, 32 nt, Homo Sapiens
guguccgaccucagccccagucagugcggguc

SEQ ID NO: 171747 - RNA, 32 nt, Homo Sapiens
gcuauuguucuuccuuagagaacguggccagu

SEQ ID NO: 171748 - RNA, 32 nt, Homo Sapiens
uuucuuauuguaaaaaucuguuuaaauccauu

SEQ ID NO: 171749 - RNA, 32 nt, Homo Sapiens
cgcucacucgaccgcgcggcucacgggugccc

SEQ ID NO: 171750 - RNA, 32 nt, Homo Sapiens
ccgggagaugcauguugcagugagcugagauu

SEQ ID NO: 171751 - RNA, 32 nt, Homo Sapiens
gggcgggccggggcagccacuccagccccagc

SEQ ID NO: 171752 - RNA, 32 nt, Homo Sapiens
auaaaaauuaggaugccuuuaugaagcacuga

SEQ ID NO: 171753 - RNA, 32 nt, Homo Sapiens
augcuguaaaaugcaaacuaaguuauuauauu

SEQ ID NO: 171754 - RNA, 32 nt, Homo Sapiens
gaguugacaacaucucacucacguguaucaag

SEQ ID NO: 171755 - RNA, 32 nt, Homo Sapiens
uccugacccacagaaacugucagauaauagcu

SEQ ID NO: 171756 - RNA, 32 nt, Homo Sapiens
gcugcgcaguuuuguucugcuccagcuguucg

SEQ ID NO: 171757 - RNA, 32 nt, Homo Sapiens
gauguccuguauuuuucuuggccuuuuucuua

SEQ ID NO: 171758 - RNA, 30 nt, Homo Sapiens
ccccacgucaugcgcgcgggcguccgcggc

SEQ ID NO: 171759 - RNA, 32 nt, Homo Sapiens
ucagugcaguugcauaagcagugcugucagaa

SEQ ID NO: 171760 - RNA, 32 nt, Homo Sapiens
ccaguuuguuuuuauuguguuuucuaaccaua

SEQ ID NO: 171761 - RNA, 32 nt, Homo Sapiens
gggcuggcccccacggccccaaagccccccag

SEQ ID NO: 171762 - RNA, 32 nt, Homo Sapiens
gagggugagagaaaaugaauucuaauuuaccu

SEQ ID NO: 171763 - RNA, 32 nt, Homo Sapiens
gcagaggcgggcggcagacggugcccggcgga

SEQ ID NO: 171764 - RNA, 32 nt, Homo Sapiens
ccgagacgcuccugggcugcgcgcgcuuuugg

SEQ ID NO: 171765 - RNA, 32 nt, Homo Sapiens
auuuuuaaugaaaaccuauugcuguuauuuuc

SEQ ID NO: 171766 - RNA, 32 nt, Homo Sapiens
gaacucggcugcggcuccauggucugaguugu

SEQ ID NO: 171767 - RNA, 32 nt, Homo Sapiens
cgggcacccgcgcgcgcacacucgcacaccgc

SEQ ID NO: 171768 - RNA, 32 nt, Homo Sapiens
guggccugcucugugcgccgcaagaagccagg

SEQ ID NO: 171769 - RNA, 32 nt, Homo Sapiens
gggauggagcgaggguggagggcgcgucagcc

SEQ ID NO: 171770 - RNA, 32 nt, Homo Sapiens
auucccuagugucaaaauuaaaucaauaaaac

SEQ ID NO: 171771 - RNA, 32 nt, Homo Sapiens
ucccccuggguucuccuccuagcuaguccugu

SEQ ID NO: 171772 - RNA, 32 nt, Homo Sapiens
acuuuuaaauaacucuuauaaaacagguuggc

SEQ ID NO: 171773 - RNA, 32 nt, Homo Sapiens
agguuaacauuuucaggcgucuuagccggugg

SEQ ID NO: 171774 - RNA, 32 nt, Homo Sapiens
cucuccuaggugccggccgggagggcggccgc

SEQ ID NO: 171775 - RNA, 32 nt, Homo Sapiens
uuugagcccuggauucugcauuuauauacugg

SEQ ID NO: 171776 - RNA, 32 nt, Homo Sapiens
ggcaggaggaucacuuuaggccugguguguuc

SEQ ID NO: 171777 - RNA, 32 nt, Homo Sapiens
uuuuugccuggcuuauaagguggccuuaaaac

SEQ ID NO: 171778 - RNA, 32 nt, Homo Sapiens
uuccuuuaauuauuuuuuuuuaacacuuaaau

SEQ ID NO: 171779 - RNA, 32 nt, Homo Sapiens
agauguguggguuuuucuguauuuuucuuuuc

SEQ ID NO: 171780 - RNA, 32 nt, Homo Sapiens
auucucgucaaggcacaaaaccaguucaugcu

SEQ ID NO: 171781 - RNA, 32 nt, Homo Sapiens
gccugccucccucccccugcuagaaguaguuu

SEQ ID NO: 171782 - RNA, 32 nt, Homo Sapiens
ccuccugcgggaagaggaagcggcggcauagg

SEQ ID NO: 171783 - RNA, 32 nt, Homo Sapiens
aaugcaguuuguacuuuuuuuauuuuguaaca

SEQ ID NO: 171784 - RNA, 32 nt, Homo Sapiens
cugaccucaagcucagcuaccuggaagaggcc

SEQ ID NO: 171785 - RNA, 32 nt, Homo Sapiens
ccgcgaauucgcggccgcgucgaccgaagacg

SEQ ID NO: 171786 - RNA, 32 nt, Homo Sapiens
ccaacugcuuccgucucagaguaucuugaaau

SEQ ID NO: 171787 - RNA, 32 nt, Homo Sapiens
cagcugaccccggcugcccuccugccagcuua

SEQ ID NO: 171788 - RNA, 32 nt, Homo Sapiens
aagcuguguacuuuauagacauuuucagacau

SEQ ID NO: 171789 - RNA, 32 nt, Homo Sapiens
ggcacaugaagauaagccacaaaugaagagaa

SEQ ID NO: 171790 - RNA, 32 nt, Homo Sapiens
ucuuucagaauucaaggcagccacggugucuc

SEQ ID NO: 171791 - RNA, 32 nt, Homo Sapiens
uuauuaauaaaauuauguuuuuacuuucucuu

SEQ ID NO: 171792 - RNA, 32 nt, Homo Sapiens
auauaucaaacaugcauagacucacaugaugu

SEQ ID NO: 171793 - RNA, 32 nt, Homo Sapiens
uuccucucauucuccauagucuguuuccugga

SEQ ID NO: 171794 - RNA, 32 nt, Homo Sapiens
caaacaaacaaaugugugcaaugucuuuucau

SEQ ID NO: 171795 - RNA, 32 nt, Homo Sapiens
gaguaggcgcccagcccuggcucuuccaugcu

SEQ ID NO: 171796 - RNA, 32 nt, Homo Sapiens
gucacuuuuauuuuuaauuauuuuacauaugc

SEQ ID NO: 171797 - RNA, 32 nt, Homo Sapiens
auggcuacuuuuuucuaugcuggaguauuuuc

SEQ ID NO: 171798 - RNA, 32 nt, Homo Sapiens
uugucuaagaaaccaugugugucuggaacacg

SEQ ID NO: 171799 - RNA, 32 nt, Homo Sapiens
aaaugaauauauuucugucuuagauuggggaa

SEQ ID NO: 171800 - RNA, 29 nt, Homo Sapiens
ucuguacucacccuguaccacaaacacau

SEQ ID NO: 171801 - RNA, 32 nt, Homo Sapiens
agggaagggggaggaaggagucggggacggcc

SEQ ID NO: 171802 - RNA, 32 nt, Homo Sapiens
aaaacccacuguuuccucuuucugcuucuuuc

SEQ ID NO: 171803 - RNA, 32 nt, Homo Sapiens
uacugaagucugauucuuucccgggaagcggg

SEQ ID NO: 171804 - RNA, 29 nt, Homo Sapiens
agacuuuggggacagggcaggggcaggga

SEQ ID NO: 171805 - RNA, 32 nt, Homo Sapiens
aggaucagagugaaagcagaggcgugaggaga

SEQ ID NO: 171806 - RNA, 32 nt, Homo Sapiens
ccaagugccuucuaggaaguuaggagguugag

SEQ ID NO: 171807 - RNA, 32 nt, Homo Sapiens
ccgguggggggccguuugggacgcgcggagag

SEQ ID NO: 171808 - RNA, 32 nt, Homo Sapiens
gcagugcuggaccgcgcgcauccgcgcaguug

SEQ ID NO: 171809 - RNA, 32 nt, Homo Sapiens
gcagccuuuacuauuuuuucugguugagucau

SEQ ID NO: 171810 - RNA, 32 nt, Homo Sapiens
auuguuucugaaaaggcaauagacuuguaagu

SEQ ID NO: 171811 - RNA, 32 nt, Homo Sapiens
ugugggggacuggcugggcugcugcaggccgu

SEQ ID NO: 171812 - RNA, 32 nt, Homo Sapiens
cgggggaggagaagcucccagauccuuguguc

SEQ ID NO: 171813 - RNA, 32 nt, Homo Sapiens
cgaucccggcgccccaacccccacgcccgccu

SEQ ID NO: 171814 - RNA, 30 nt, Homo Sapiens
cuuagagagaagcggugggucugcaccugg

SEQ ID NO: 171815 - RNA, 32 nt, Homo Sapiens
ucucucuguauaugaugaauacauuuuuacac

SEQ ID NO: 171816 - RNA, 32 nt, Homo Sapiens
aauaggguuuggagcggagaugugccugggga

SEQ ID NO: 171817 - RNA, 32 nt, Homo Sapiens
uucuuccccggguugguggccauggagggucu

SEQ ID NO: 171818 - RNA, 32 nt, Homo Sapiens
caacaugauauuuggguagcugaugucauaau

SEQ ID NO: 171819 - RNA, 32 nt, Homo Sapiens
ugauccaaaaauucauccaugcucagauucga

SEQ ID NO: 171820 - RNA, 32 nt, Homo Sapiens
aaaugugcugggcaagucaaaacuauagaaga

SEQ ID NO: 171821 - RNA, 32 nt, Homo Sapiens
cugcagaaauugagagauccacagcuaagacu

SEQ ID NO: 171822 - RNA, 32 nt, Homo Sapiens
cucaaaucgaauuauuuucuuuuuaaauuuug

SEQ ID NO: 171823 - RNA, 32 nt, Homo Sapiens
agauaacacacacacacacacacacacacaca

SEQ ID NO: 171824 - RNA, 32 nt, Homo Sapiens
accgcgccccucugcgccccagcgacgcggcc

SEQ ID NO: 171825 - RNA, 32 nt, Homo Sapiens
gcaggaugauugguucugaucuuaccggcuag

SEQ ID NO: 171826 - RNA, 32 nt, Homo Sapiens
cgcccuccacagagcaggcuugcaucugacug

SEQ ID NO: 171827 - RNA, 28 nt, Homo Sapiens
ccacuacuaggauagagagguaaaaaau

SEQ ID NO: 171828 - RNA, 32 nt, Homo Sapiens
gggcaggccuggggcggggccugcggugagcu

SEQ ID NO: 171829 - RNA, 32 nt, Homo Sapiens
cgggcugccgugggguguguguaggcuucaga

SEQ ID NO: 171830 - RNA, 32 nt, Homo Sapiens
cccccacccuuccacacccuggacucuggcuc

SEQ ID NO: 171831 - RNA, 32 nt, Homo Sapiens
aaaugucuaaacuguauuuugcacuuuuccac

SEQ ID NO: 171832 - RNA, 32 nt, Homo Sapiens
cuuuuaagguaacaguucuaucucguuucgau

SEQ ID NO: 171833 - RNA, 32 nt, Homo Sapiens
uccuuguccucccacaccacagcccaccugug

SEQ ID NO: 171834 - RNA, 32 nt, Homo Sapiens
uauacauaagauaaacaaaaaccuuaccacca

SEQ ID NO: 171835 - RNA, 32 nt, Homo Sapiens
caacacuuuaagcuguuuuucuaaaugcaggu

SEQ ID NO: 171836 - RNA, 30 nt, Homo Sapiens
uuuccccaugcucugcauuucuaggauauu

SEQ ID NO: 171837 - RNA, 32 nt, Homo Sapiens
ugccacuucccucucuccccuggcccgcaaag

SEQ ID NO: 171838 - RNA, 32 nt, Homo Sapiens
ggaucucaccgccgcucaggguuuuuagaacu

SEQ ID NO: 171839 - RNA, 32 nt, Homo Sapiens
aauccugggacacagacguccuggacucgugc

SEQ ID NO: 171840 - RNA, 32 nt, Homo Sapiens
gcauuuacuuggaaggagaacuugggaucuuu

SEQ ID NO: 171841 - RNA, 32 nt, Homo Sapiens
cagugacgaugggaagacauggaaaacaagga

SEQ ID NO: 171842 - RNA, 32 nt, Homo Sapiens
agcauaugaaacagacguugucccucaggaag

SEQ ID NO: 171843 - RNA, 32 nt, Homo Sapiens
auguggauaaacaaaaucagacaauacuguag

SEQ ID NO: 171844 - RNA, 32 nt, Homo Sapiens
aaaucauaggaguaacaaaacaauuauuuccc

SEQ ID NO: 171845 - RNA, 32 nt, Homo Sapiens
caaaucuagagguaguggaacaguugagaucu

SEQ ID NO: 171846 - RNA, 32 nt, Homo Sapiens
acuuugcucccucucaccucugggaagugcaa

SEQ ID NO: 171847 - RNA, 32 nt, Homo Sapiens
ucaagugcuuuaaugacuauuuaugcguugac

SEQ ID NO: 171848 - RNA, 32 nt, Homo Sapiens
ccccccaccccuccccagcuaguagcaugacc

SEQ ID NO: 171849 - RNA, 32 nt, Homo Sapiens
ccaagacagggccuccugaggaccacagccug

SEQ ID NO: 171850 - RNA, 32 nt, Homo Sapiens
aagacaugucuacacuuccauguucauuguag

SEQ ID NO: 171851 - RNA, 32 nt, Homo Sapiens
uuuacaauuaguacauauuacaauuagugaua

SEQ ID NO: 171852 - RNA, 32 nt, Homo Sapiens
cagaaagugucugcugauauuuguggaaaaaa

SEQ ID NO: 171853 - RNA, 32 nt, Homo Sapiens
aagacugcgcuucuaacaagucucccaguugc

SEQ ID NO: 171854 - RNA, 32 nt, Homo Sapiens
ugaccuggaggaagaacacauacuaagauuua

SEQ ID NO: 171855 - RNA, 32 nt, Homo Sapiens
uauucccuaugaauacauggcaucauaggugu

SEQ ID NO: 171856 - RNA, 32 nt, Homo Sapiens
ccuauauaauuauaagcagcucucacaguagg

SEQ ID NO: 171857 - RNA, 32 nt, Homo Sapiens
ugcugugaugcuaguguugauuuugcucucag

SEQ ID NO: 171858 - RNA, 32 nt, Homo Sapiens
cccccggggaaugcaggugcugccggccccag

SEQ ID NO: 171859 - RNA, 32 nt, Homo Sapiens
agggagagaaagagaaagaagguauccuagga

SEQ ID NO: 171860 - RNA, 32 nt, Homo Sapiens
aaguggcgacugcacagaauggcugcuugaag

SEQ ID NO: 171861 - RNA, 32 nt, Homo Sapiens
auucucugccugaugauucaaaggcaugggaa

SEQ ID NO: 171862 - RNA, 28 nt, Homo Sapiens
agauuagaaaauuaacauaggauacuuu

SEQ ID NO: 171863 - RNA, 32 nt, Homo Sapiens
ggaaaugacugcagccaggugugugugauugg

SEQ ID NO: 171864 - RNA, 32 nt, Homo Sapiens
ccuguggagacggugaucuugucuuuaaaaca

SEQ ID NO: 171865 - RNA, 32 nt, Homo Sapiens
cggcggcugcggggacuggggcggcggugcug

SEQ ID NO: 171866 - RNA, 32 nt, Homo Sapiens
gggcugcgcccuauacaccuguuuguaaaggg

SEQ ID NO: 171867 - RNA, 32 nt, Homo Sapiens
aggcaaugcauggccuuccaauaaaaaauauu

SEQ ID NO: 171868 - RNA, 32 nt, Homo Sapiens
ggggugccgaggggccucuggagggggcgggu

SEQ ID NO: 171869 - RNA, 32 nt, Homo Sapiens
caguaacugccagcugaggaaggagcacacgc

SEQ ID NO: 171870 - RNA, 32 nt, Homo Sapiens
cucguccguuugcuguucuggauaaugagguu

SEQ ID NO: 171871 - RNA, 32 nt, Homo Sapiens
agagggagggagagggagugaagagccugccc

SEQ ID NO: 171872 - RNA, 32 nt, Homo Sapiens
uguacuucccaaaauuucuccuccuccugugc

SEQ ID NO: 171873 - RNA, 32 nt, Homo Sapiens
cagacuuucuaaaacauucugcuuaaaaacca

SEQ ID NO: 171874 - RNA, 29 nt, Homo Sapiens
caagauguccgccagagcugcggccgcca

SEQ ID NO: 171875 - RNA, 32 nt, Homo Sapiens
agaauauguaauuauuugauaaccaaggaagu

SEQ ID NO: 171876 - RNA, 32 nt, Homo Sapiens
acaggaccagggcagcagcauugagccacccc

SEQ ID NO: 171877 - RNA, 32 nt, Homo Sapiens
auaaauguacuucuuuaaucuugugauuacag

SEQ ID NO: 171878 - RNA, 32 nt, Homo Sapiens
uuucccuguuguaccuuuugccugcagggcag

SEQ ID NO: 171879 - RNA, 32 nt, Homo Sapiens
aacggugugcauuguucaugauuguuguguuu

SEQ ID NO: 171880 - RNA, 32 nt, Homo Sapiens
ugcuguauuccuaaguaaaggcaauuugcagg

SEQ ID NO: 171881 - RNA, 32 nt, Homo Sapiens
gagguggagccggccgggugcucgagggaagg

SEQ ID NO: 171882 - RNA, 32 nt, Homo Sapiens
ucuuuuauguaaaauaaaucuauugugaauug

SEQ ID NO: 171883 - RNA, 29 nt, Homo Sapiens
cgccauggcccggcuguggggcgcgcuga

SEQ ID NO: 171884 - RNA, 32 nt, Homo Sapiens
aagccuggcuuugcucuauuaagauuggaaau

SEQ ID NO: 171885 - RNA, 32 nt, Homo Sapiens
uaaaacucagccuucuccuccucccccuccuu

SEQ ID NO: 171886 - RNA, 32 nt, Homo Sapiens
gaaccucuuuuaugcucaugucuugcauuuau

SEQ ID NO: 171887 - RNA, 32 nt, Homo Sapiens
uauccccggcucggcccgggcagccgccuucu

SEQ ID NO: 171888 - RNA, 32 nt, Homo Sapiens
aucauauaucaccaaacagucuacuucagucc

SEQ ID NO: 171889 - RNA, 32 nt, Homo Sapiens
caaguaaagugauguuuguguguuuuguacac

SEQ ID NO: 171890 - RNA, 32 nt, Homo Sapiens
cagcacugaacuuuugagauaugacgguguac

SEQ ID NO: 171891 - RNA, 32 nt, Homo Sapiens
gaauguguuaauauuuuaaauaaaauaucugg

SEQ ID NO: 171892 - RNA, 32 nt, Homo Sapiens
agauacugcuaaccucuuuguuauuugagcag

SEQ ID NO: 171893 - RNA, 32 nt, Homo Sapiens
cccggucuguccccgcccacucggugcugcca

SEQ ID NO: 171894 - RNA, 32 nt, Homo Sapiens
gaguaagacagagaagaaaucauuaaacacca

SEQ ID NO: 171895 - RNA, 32 nt, Homo Sapiens
aucuccagauguuccgugacaagcauuucaug

SEQ ID NO: 171896 - RNA, 32 nt, Homo Sapiens
uuugaugucauaugugaguaucuuauaauuua

SEQ ID NO: 171897 - RNA, 32 nt, Homo Sapiens
ucuugaacuguaaaguggagaugauguaaacc

SEQ ID NO: 171898 - RNA, 32 nt, Homo Sapiens
gaagacgcccuugacccccagcccauucgacc

SEQ ID NO: 171899 - RNA, 32 nt, Homo Sapiens
acuucaggguuucuguuuuucuuacuaggaua

SEQ ID NO: 171900 - RNA, 32 nt, Homo Sapiens
gauuuuaauaauauaaaaguauagcuaauugu

SEQ ID NO: 171901 - RNA, 32 nt, Homo Sapiens
cgggcagcaagcugguggacuacgcgcgcagc

SEQ ID NO: 171902 - RNA, 30 nt, Homo Sapiens
cuuucaccacuuggucagaauuuuaaaagc

SEQ ID NO: 171903 - RNA, 32 nt, Homo Sapiens
acaccacuuugagcacagaaacaaaggucccu

SEQ ID NO: 171904 - RNA, 31 nt, Homo Sapiens
uuucaccugaagaaaaaugauagacaaaaau

SEQ ID NO: 171905 - RNA, 32 nt, Homo Sapiens
ggaacagccagagcuuccaugugccauggcca

SEQ ID NO: 171906 - RNA, 32 nt, Homo Sapiens
guugcuucuccucccucccauucucucugcaa

SEQ ID NO: 171907 - RNA, 32 nt, Homo Sapiens
agagcugggcugccagaagccuuuuucacucu

SEQ ID NO: 171908 - RNA, 32 nt, Homo Sapiens
acuccugcacuggcauuuggauguguguuaau

SEQ ID NO: 171909 - RNA, 28 nt, Homo Sapiens
acccagcuggcuaccagagaugcgaagg

SEQ ID NO: 171910 - RNA, 32 nt, Homo Sapiens
agaauguggcagucuuuaaaucuuccucaguc

SEQ ID NO: 171911 - RNA, 32 nt, Homo Sapiens
cauggaagcuggggagccacuccaguuaggag

SEQ ID NO: 171912 - RNA, 32 nt, Homo Sapiens
uugggaaaaucagccgggucuacccagagcuu

SEQ ID NO: 171913 - RNA, 32 nt, Homo Sapiens
uauuugaauuugucuuuuuuauuuauuggucu

SEQ ID NO: 171914 - RNA, 32 nt, Homo Sapiens
aggaggagccccaggggugcuagucuggacug

SEQ ID NO: 171915 - RNA, 32 nt, Homo Sapiens
uggaaggggaggggcgccaggugaggcggcgg

SEQ ID NO: 171916 - RNA, 32 nt, Homo Sapiens
cgccgcaggacacauaggacguguaggacguc

SEQ ID NO: 171917 - RNA, 32 nt, Homo Sapiens
acuguuugcccauuuucauucuuguauuauaa

SEQ ID NO: 171918 - RNA, 32 nt, Homo Sapiens
aagccaauuacauuauguucuuugcauguucu

SEQ ID NO: 171919 - RNA, 32 nt, Homo Sapiens
aguggccauuuuuucuucugucaguggcaauu

SEQ ID NO: 171920 - RNA, 32 nt, Homo Sapiens
gcucgugucguaggccacaggcacgaagggga

SEQ ID NO: 171921 - RNA, 32 nt, Homo Sapiens
uuuuguacuuuuuuaaauaaaguauguuuaac

SEQ ID NO: 171922 - RNA, 32 nt, Homo Sapiens
aaacaacucaauauuucucuuuaaaauggcau

SEQ ID NO: 171923 - RNA, 32 nt, Homo Sapiens
uacccccucuucaacugaacccuaaagacacu

SEQ ID NO: 171924 - RNA, 32 nt, Homo Sapiens
acaggaacucccagcccuccccuccccacaac

SEQ ID NO: 171925 - RNA, 32 nt, Homo Sapiens
aaaagaucugcugcaaggaacugauagcuuau

SEQ ID NO: 171926 - RNA, 32 nt, Homo Sapiens
cucuuaucaguucuuacguacgcucaccucua

SEQ ID NO: 171927 - RNA, 32 nt, Homo Sapiens
acgagcaguucuuaacacauggagcggcacac

SEQ ID NO: 171928 - RNA, 32 nt, Homo Sapiens
ugaaagccacuacuuugaaaccauucuaaggc

SEQ ID NO: 171929 - RNA, 32 nt, Homo Sapiens
aauauaaaaaucagccgggcaugguggcaugu

SEQ ID NO: 171930 - RNA, 32 nt, Homo Sapiens
agacgagugucugcgaugucuucccgcacucu

SEQ ID NO: 171931 - RNA, 32 nt, Homo Sapiens
gagaaaaaacaagauauauagauggaaaaauu

SEQ ID NO: 171932 - RNA, 32 nt, Homo Sapiens
ggcauuaccuccguguuucucccuuucgagcc

SEQ ID NO: 171933 - RNA, 32 nt, Homo Sapiens
gauggauccaacagauuuuguaaacucuagug

SEQ ID NO: 171934 - RNA, 32 nt, Homo Sapiens
acuauauauauucauauuuguggauuuccuaa

SEQ ID NO: 171935 - RNA, 32 nt, Homo Sapiens
gccaccacccaccugaugugggagcauuuccc

SEQ ID NO: 171936 - RNA, 32 nt, Homo Sapiens
uguggugauccauggggugcugcaggcaacag

SEQ ID NO: 171937 - RNA, 32 nt, Homo Sapiens
agaaagaguguguucaaacaucauaaaugggg

SEQ ID NO: 171938 - RNA, 32 nt, Homo Sapiens
ugcacuccuaccaaauaaacaggauuuuagua

SEQ ID NO: 171939 - RNA, 32 nt, Homo Sapiens
gggaucgccgggggcgcagggcccggaggaac

SEQ ID NO: 171940 - RNA, 32 nt, Homo Sapiens
ccaacgcaugcaccagccugcgugguccccca

SEQ ID NO: 171941 - RNA, 32 nt, Homo Sapiens
ggacagauauggggcuuuuuagccaugugguc

SEQ ID NO: 171942 - RNA, 32 nt, Homo Sapiens
acuguauugggacgcugguaacuguuaaccca

SEQ ID NO: 171943 - RNA, 32 nt, Homo Sapiens
aggaacacggugucuuccuucgucuccggguu

SEQ ID NO: 171944 - RNA, 32 nt, Homo Sapiens
caaccugggccucagcaugcugcugcagugau

SEQ ID NO: 171945 - RNA, 32 nt, Homo Sapiens
uguuauaucuuuuuuucuuuucauuacaucag

SEQ ID NO: 171946 - RNA, 32 nt, Homo Sapiens
ccaaugaagaaccuucagaaccuguagcacac

SEQ ID NO: 171947 - RNA, 32 nt, Homo Sapiens
ggguaagggggcgccugcuugccugauacagg

SEQ ID NO: 171948 - RNA, 32 nt, Homo Sapiens
aaaaaaacaaacaaacaaaacaaaacaaaaaa

SEQ ID NO: 171949 - RNA, 32 nt, Homo Sapiens
aaaguucugaagaugaugcggccucagagagc

SEQ ID NO: 171950 - RNA, 32 nt, Homo Sapiens
aucuggaaguaccaccuggacucacagaggag

SEQ ID NO: 171951 - RNA, 32 nt, Homo Sapiens
gcauccuuauagaaauacaaguaagacuuagg

SEQ ID NO: 171952 - RNA, 32 nt, Homo Sapiens
ugauuaauggcauguguuuguaaaauggauag

SEQ ID NO: 171953 - RNA, 32 nt, Homo Sapiens
uuucuagcagugccaucuccaaaauguguuuu

SEQ ID NO: 171954 - RNA, 32 nt, Homo Sapiens
caugguccgguguccuuuucacuacaccaugu

SEQ ID NO: 171955 - RNA, 32 nt, Homo Sapiens
ccacuuuuucuuuuuaauuuaagaugagcuau

SEQ ID NO: 171956 - RNA, 32 nt, Homo Sapiens
gcgcgcgccgucugcugaggucccucgggaag

SEQ ID NO: 171957 - RNA, 32 nt, Homo Sapiens
ggacuuccccaaaguugucaaccggccccgcc

SEQ ID NO: 171958 - RNA, 32 nt, Homo Sapiens
ugaugccagaaucuaagccuugaccaaauaug

SEQ ID NO: 171959 - RNA, 32 nt, Homo Sapiens
acaguggcaacucugucuucccugcccaguag

SEQ ID NO: 171960 - RNA, 32 nt, Homo Sapiens
auauuguugucguggcggcuguuuuuaaaggg

SEQ ID NO: 171961 - RNA, 32 nt, Homo Sapiens
ggaauccaggggcccccgauccugcauccagg

SEQ ID NO: 171962 - RNA, 32 nt, Homo Sapiens
ugucuccaaugccagcacauuugugacuugua

SEQ ID NO: 171963 - RNA, 32 nt, Homo Sapiens
guccuccucguggguggggccgagggcccucu

SEQ ID NO: 171964 - RNA, 32 nt, Homo Sapiens
uuauuuucuaauucuuuuuuuuccuuuuuuga

SEQ ID NO: 171965 - RNA, 32 nt, Homo Sapiens
ucccugcuuccagcugaggugguacuggcugu

SEQ ID NO: 171966 - RNA, 32 nt, Homo Sapiens
aaacugccauuaccaaacgauuccgccacaca

SEQ ID NO: 171967 - RNA, 32 nt, Homo Sapiens
uauuuuaugguuauguuuuucugugugucagu

SEQ ID NO: 171968 - RNA, 29 nt, Homo Sapiens
caggaugcgcuaugccugcagcuccucag

SEQ ID NO: 171969 - RNA, 32 nt, Homo Sapiens
ggagggggcuggcucugagagccccaggacug

SEQ ID NO: 171970 - RNA, 32 nt, Homo Sapiens
gaagggccaagccccauguagccccagucauc

SEQ ID NO: 171971 - RNA, 32 nt, Homo Sapiens
auuaaauugggaaaacuccaucaauaaauguu

SEQ ID NO: 171972 - RNA, 32 nt, Homo Sapiens
aaugcuuuugggcaacaugagaggaaccuuuu

SEQ ID NO: 171973 - RNA, 32 nt, Homo Sapiens
ugaggaacacuuacuuguuuuuaaguaucuug

SEQ ID NO: 171974 - RNA, 32 nt, Homo Sapiens
agccuucccacacagccaacccugcugcucuc

SEQ ID NO: 171975 - RNA, 32 nt, Homo Sapiens
gggaaagugucugaugaugaccaauuuacaau

SEQ ID NO: 171976 - RNA, 32 nt, Homo Sapiens
gcggugagcugugaucacaccaccacacucca

SEQ ID NO: 171977 - RNA, 32 nt, Homo Sapiens
gcagugagcuaugaucacaccaccacacucca

SEQ ID NO: 171978 - RNA, 32 nt, Homo Sapiens
ccccccggccccaagccccugugucuccuugu

SEQ ID NO: 171979 - RNA, 32 nt, Homo Sapiens
ucgccggagagcugggugcuaccgcuguuucc

SEQ ID NO: 171980 - RNA, 32 nt, Homo Sapiens
uucagccaagcccagagaagugugggcagaag

SEQ ID NO: 171981 - RNA, 32 nt, Homo Sapiens
uggguaaauuauacuacauuuauuuacaaaug

SEQ ID NO: 171982 - RNA, 32 nt, Homo Sapiens
cgugcggccacucgcagcggcgcuggccgggc

SEQ ID NO: 171983 - RNA, 32 nt, Homo Sapiens
gcugccgugaggaggccgggugcggagccgcc

SEQ ID NO: 171984 - RNA, 32 nt, Homo Sapiens
uaucuugccuuaauuaacauucccugugaccu

SEQ ID NO: 171985 - RNA, 32 nt, Homo Sapiens
augacugcaauccuaauucucacauguuuugg

SEQ ID NO: 171986 - RNA, 32 nt, Homo Sapiens
gaaaggggcgccagcauauguagaucacaugg

SEQ ID NO: 171987 - RNA, 24 nt, Homo Sapiens
uuucagaaauaaaaguaugaaucu

SEQ ID NO: 171988 - RNA, 26 nt, Homo Sapiens
caugagcagcggggcggcguccggga

SEQ ID NO: 171989 - RNA, 32 nt, Homo Sapiens
cccccauccuccccgccccaucgguuguuguc

SEQ ID NO: 171990 - RNA, 32 nt, Homo Sapiens
uaagguauuauuauuuuuucaugucuuugaag

SEQ ID NO: 171991 - RNA, 32 nt, Homo Sapiens
uaccuucccuugaacuuaauuaugacauagau

SEQ ID NO: 171992 - RNA, 32 nt, Homo Sapiens
gcagguggagugaagguugcuaaucagccgac

SEQ ID NO: 171993 - RNA, 32 nt, Homo Sapiens
uugccugcguccagugcggcagcccucuuguc

SEQ ID NO: 171994 - RNA, 32 nt, Homo Sapiens
agcagagguggccgaacccagcccucugcgcg

SEQ ID NO: 171995 - RNA, 32 nt, Homo Sapiens
gcucccuuuccugcaccucccaggaccgcccc

SEQ ID NO: 171996 - RNA, 31 nt, Homo Sapiens
uuugagagggcggggauugcgacucucacac

SEQ ID NO: 171997 - RNA, 32 nt, Homo Sapiens
ccuccagccccugcccguuucucuccaugagu

SEQ ID NO: 171998 - RNA, 32 nt, Homo Sapiens
ggagcggggagcuuccuggaggcuucccaggg

SEQ ID NO: 171999 - RNA, 32 nt, Homo Sapiens
uuguaaugcuaggcauaagcacucuauaauac

SEQ ID NO: 172000 - RNA, 32 nt, Homo Sapiens
aaggaucuuggcugcuuuuuacuagaagguug

SEQ ID NO: 172001 - RNA, 32 nt, Homo Sapiens
cagugcucucaaugggcaagugccacauuuuc

SEQ ID NO: 172002 - RNA, 32 nt, Homo Sapiens
aaaaucuacguaccaucagaaacuaugucucu

SEQ ID NO: 172003 - RNA, 32 nt, Homo Sapiens
aaaauaucaaggaaggaaaaacagauagcagg

SEQ ID NO: 172004 - RNA, 32 nt, Homo Sapiens
gcuuccucaggccccaggcaucucauggagag

SEQ ID NO: 172005 - RNA, 32 nt, Homo Sapiens
cguccggccucccucgggcccgagcgcagacc

SEQ ID NO: 172006 - RNA, 32 nt, Homo Sapiens
aauggugaaugccuauggaacuaguggaucca

SEQ ID NO: 172007 - RNA, 32 nt, Homo Sapiens
cccaucuuccccaaaaaucaccuccuaagggc

SEQ ID NO: 172008 - RNA, 32 nt, Homo Sapiens
gccugcgaggccaggcgggcgggcagcagcug

SEQ ID NO: 172009 - RNA, 32 nt, Homo Sapiens
cagcucggccccagccuauuucccgccuccau

SEQ ID NO: 172010 - RNA, 32 nt, Homo Sapiens
uuucuuuuuaauuuuuugauuggauuucuuua

SEQ ID NO: 172011 - RNA, 31 nt, Homo Sapiens
ucggcacugggccaccugccccugcuggagg

SEQ ID NO: 172012 - RNA, 32 nt, Homo Sapiens
uucuuuaucaagagaacaaaaugccagaaugu

SEQ ID NO: 172013 - RNA, 32 nt, Homo Sapiens
aggggaagauaaaagacuuugauucaugaaga

SEQ ID NO: 172014 - RNA, 32 nt, Homo Sapiens
ccggguggauggaguuggaggggcggggugcu

SEQ ID NO: 172015 - RNA, 32 nt, Homo Sapiens
ggguucacucccugucaugacguccgcccuca

SEQ ID NO: 172016 - RNA, 32 nt, Homo Sapiens
uagugccuggggaugaccuaugcaaucacacc

SEQ ID NO: 172017 - RNA, 32 nt, Homo Sapiens
gcgaggacgaggggcucuaugcggucagugcu

SEQ ID NO: 172018 - RNA, 32 nt, Homo Sapiens
ggguacuagggucagggcuuauagcaggaugu

SEQ ID NO: 172019 - RNA, 32 nt, Homo Sapiens
ggggcaagcagugccuuggagggaguggggua

SEQ ID NO: 172020 - RNA, 32 nt, Homo Sapiens
cuagcuguuacuccagaggauuauguuucuuu

SEQ ID NO: 172021 - RNA, 32 nt, Homo Sapiens
ucuuggaaucccugucuucuuaauuuuauuua

SEQ ID NO: 172022 - RNA, 32 nt, Homo Sapiens
aagcaagguuguccagguuguacuggacacuu

SEQ ID NO: 172023 - RNA, 32 nt, Homo Sapiens
cuuacucagcauauucaaggaaggucuuacuu

SEQ ID NO: 172024 - RNA, 32 nt, Homo Sapiens
gcagcguguccagggcggcuguggagguguuc

SEQ ID NO: 172025 - RNA, 32 nt, Homo Sapiens
uugagaccauccuggcuaacguggugaaaccc

SEQ ID NO: 172026 - RNA, 32 nt, Homo Sapiens
uauguaaagggaguggcaggacaagauucaga

SEQ ID NO: 172027 - RNA, 32 nt, Homo Sapiens
uugacucuuuauggaaaccaaaugguaucuaa

SEQ ID NO: 172028 - RNA, 32 nt, Homo Sapiens
agaaaugccuggcauguguucagacauauccu

SEQ ID NO: 172029 - RNA, 31 nt, Homo Sapiens
uucucuuacacaugaaaguccuuccaacauu

SEQ ID NO: 172030 - RNA, 30 nt, Homo Sapiens
aguucacuaaaauaaauguuauagaaauau

SEQ ID NO: 172031 - RNA, 32 nt, Homo Sapiens
cucucuuuuuggacucagccugccugcaccca

SEQ ID NO: 172032 - RNA, 32 nt, Homo Sapiens
auugcagcugucucacagccugagcuguggua

SEQ ID NO: 172033 - RNA, 32 nt, Homo Sapiens
uuuaaaaaaaauuuuuuuuuuaaucuauaaaa

SEQ ID NO: 172034 - RNA, 32 nt, Homo Sapiens
agguuuuggccauuuucucuuuacacuucgua

SEQ ID NO: 172035 - RNA, 32 nt, Homo Sapiens
aagcagagggaucccaggggacugcugaggcu

SEQ ID NO: 172036 - RNA, 32 nt, Homo Sapiens
uuucaugugaaugucaagacauggaggguguu

SEQ ID NO: 172037 - RNA, 32 nt, Homo Sapiens
uccauaacaguuuucgugcuuccuccugacag

SEQ ID NO: 172038 - RNA, 32 nt, Homo Sapiens
auucuagaauuguucuuuuuuauuuuuauuuu

SEQ ID NO: 172039 - RNA, 32 nt, Homo Sapiens
acccuguaggauuuuacuucuugacgcaucug

SEQ ID NO: 172040 - RNA, 32 nt, Homo Sapiens
cugaaucuucaccaucuuucugauuccgcacc

SEQ ID NO: 172041 - RNA, 32 nt, Homo Sapiens
auuucuuuuucuuuuucuuuggcuuaagaauc

SEQ ID NO: 172042 - RNA, 32 nt, Homo Sapiens
agccaacacuggggcuuuuguuugggguccuu

SEQ ID NO: 172043 - RNA, 32 nt, Homo Sapiens
ccuucaccuccaucgugcccucucucucggcc

SEQ ID NO: 172044 - RNA, 32 nt, Homo Sapiens
ugggaaucuauuguggaaacccaggguguuuc

SEQ ID NO: 172045 - RNA, 31 nt, Homo Sapiens
ccgcucggccuggccaggccccgcgcuaugg

SEQ ID NO: 172046 - RNA, 32 nt, Homo Sapiens
aauacuacugucacguagcuguguacaaagag

SEQ ID NO: 172047 - RNA, 32 nt, Homo Sapiens
caccccauucuacuccauggccucucugcucc

SEQ ID NO: 172048 - RNA, 32 nt, Homo Sapiens
cagcccucccugucucccccacuuccuggcca

SEQ ID NO: 172049 - RNA, 32 nt, Homo Sapiens
uaauucacugguuuuccuuuucugucauuuuu

SEQ ID NO: 172050 - RNA, 32 nt, Homo Sapiens
cuuucgcuuccggcugccgcaggcgcuucgcu

SEQ ID NO: 172051 - RNA, 32 nt, Homo Sapiens
gugaaggaaaauguuuucaaagguugagaacc

SEQ ID NO: 172052 - RNA, 32 nt, Homo Sapiens
aaauuuuugagccacuaucuauuguugaauau

SEQ ID NO: 172053 - RNA, 32 nt, Homo Sapiens
uuucaagggcaauaccguguugguuuugacug

SEQ ID NO: 172054 - RNA, 32 nt, Homo Sapiens
uggguacagcagccuugguuccucuggggguu

SEQ ID NO: 172055 - RNA, 32 nt, Homo Sapiens
ugaacacugaacaaauguguuaaugguaucuu

SEQ ID NO: 172056 - RNA, 32 nt, Homo Sapiens
augcugaggacccauucucaccucugagggac

SEQ ID NO: 172057 - RNA, 32 nt, Homo Sapiens
acagcgaucucagaucuaggccucagguagaa

SEQ ID NO: 172058 - RNA, 32 nt, Homo Sapiens
uggggcccagccccaaacugggggcucuguau

SEQ ID NO: 172059 - RNA, 32 nt, Homo Sapiens
aaaauacaaaaauuagccgggugugguggugg

SEQ ID NO: 172060 - RNA, 32 nt, Homo Sapiens
uucaggaucgucacgaucaaagaggaaaccuu

SEQ ID NO: 172061 - RNA, 32 nt, Homo Sapiens
cuucccagcaacgcagccaggccugagaauuc

SEQ ID NO: 172062 - RNA, 32 nt, Homo Sapiens
gggucuggaagcauccugugcugugcacaccu

SEQ ID NO: 172063 - RNA, 32 nt, Homo Sapiens
aaaugcaggagucuuggugcacuucucacucu

SEQ ID NO: 172064 - RNA, 32 nt, Homo Sapiens
ccgggcccgcggcaaccucgggcgcuguucug

SEQ ID NO: 172065 - RNA, 32 nt, Homo Sapiens
ugucauggcccauuuagaccgucuggcuacac

SEQ ID NO: 172066 - RNA, 32 nt, Homo Sapiens
uaagccaggagggugccucuccccucagugga

SEQ ID NO: 172067 - RNA, 32 nt, Homo Sapiens
gggggagggaggagggagcaggcaggucccaa

SEQ ID NO: 172068 - RNA, 32 nt, Homo Sapiens
ugugcaccugguugugagcauuuuaaagggug

SEQ ID NO: 172069 - RNA, 32 nt, Homo Sapiens
acgguguaucguaauguuuuugaaaugauugc

SEQ ID NO: 172070 - RNA, 32 nt, Homo Sapiens
cgcgcugucuuucaggguguguguacauucga

SEQ ID NO: 172071 - RNA, 32 nt, Homo Sapiens
auauugcaagcgauguggaacucuguggaauu

SEQ ID NO: 172072 - RNA, 32 nt, Homo Sapiens
gugcacguauaaggucaucuucgucguccccg

SEQ ID NO: 172073 - RNA, 32 nt, Homo Sapiens
aaagaaggcuggaagcacaggcuuuuucuuuc

SEQ ID NO: 172074 - RNA, 32 nt, Homo Sapiens
cgagucccuccgaugcuuucacuguauuaaaa

SEQ ID NO: 172075 - RNA, 32 nt, Homo Sapiens
uaggugggagguguaggcucuccuguuggggg

SEQ ID NO: 172076 - RNA, 32 nt, Homo Sapiens
cgugaggcagugcgaggcgcgcggggcacgga

SEQ ID NO: 172077 - RNA, 32 nt, Homo Sapiens
uucaucuccugcuaguacugugccgcuucccc

SEQ ID NO: 172078 - RNA, 32 nt, Homo Sapiens
ccccuguacgaucgccgcucgccccgcgggcg

SEQ ID NO: 172079 - RNA, 32 nt, Homo Sapiens
cagccuccuccccacauccccagcugccuggc

SEQ ID NO: 172080 - RNA, 32 nt, Homo Sapiens
cgagcguccccuccccccacccgucgggcucc

SEQ ID NO: 172081 - RNA, 32 nt, Homo Sapiens
uuguacuauauuuuguuauuccaauuaugagc

SEQ ID NO: 172082 - RNA, 32 nt, Homo Sapiens
aggguggggcaacaguggcaucaggugcgggg

SEQ ID NO: 172083 - RNA, 32 nt, Homo Sapiens
cacccacccaagacuccugcaaugcaaaaaug

SEQ ID NO: 172084 - RNA, 32 nt, Homo Sapiens
ggcagcaagacaacuucuuuuacagcagcaaa

SEQ ID NO: 172085 - RNA, 32 nt, Homo Sapiens
ggugucagaaccuagggcugggcucucggggc

SEQ ID NO: 172086 - RNA, 32 nt, Homo Sapiens
cagcugguucccuccaaaccccaguggcaacc

SEQ ID NO: 172087 - RNA, 32 nt, Homo Sapiens
gaccucugcauaaaucucacaccucagaaagg

SEQ ID NO: 172088 - RNA, 32 nt, Homo Sapiens
guauaaaugcuguagcucaggauuauauguac

SEQ ID NO: 172089 - RNA, 32 nt, Homo Sapiens
gugaaauguauauaguugauguucaguauuuc

SEQ ID NO: 172090 - RNA, 32 nt, Homo Sapiens
uguugcguaacuagaacaaaaauguacauugu

SEQ ID NO: 172091 - RNA, 32 nt, Homo Sapiens
cgguggaagagcucaagggacaaggacacgcg

SEQ ID NO: 172092 - RNA, 31 nt, Homo Sapiens
guguccggcggagccaaguccacucuggggg

SEQ ID NO: 172093 - RNA, 32 nt, Homo Sapiens
ugccuguucucccugucugaagagggagauga

SEQ ID NO: 172094 - RNA, 32 nt, Homo Sapiens
guugucccccacccucacgggcauccugggcc

SEQ ID NO: 172095 - RNA, 32 nt, Homo Sapiens
acaccaguggaaaagagucuccaguucugcuc

SEQ ID NO: 172096 - RNA, 32 nt, Homo Sapiens
agggguuugguuuucuugcugcuguaggcagc

SEQ ID NO: 172097 - RNA, 32 nt, Homo Sapiens
caggguagugguggcugcuucaacccaaauau

SEQ ID NO: 172098 - RNA, 32 nt, Homo Sapiens
ccugcauccuuccuggggacgaauuccacucg

SEQ ID NO: 172099 - RNA, 32 nt, Homo Sapiens
aguggagcucaccucucccuccccucuccucu

SEQ ID NO: 172100 - RNA, 32 nt, Homo Sapiens
agcuugcccuccccucuccgccuaagccugcc

SEQ ID NO: 172101 - RNA, 32 nt, Homo Sapiens
ucucuguuuucgauugacacaaacacuucucc

SEQ ID NO: 172102 - RNA, 32 nt, Homo Sapiens
cugcaucacagaagcuggaaguucugauguuc

SEQ ID NO: 172103 - RNA, 32 nt, Homo Sapiens
aucaguugccucuuuuuaaaagaaauuuuuau

SEQ ID NO: 172104 - RNA, 32 nt, Homo Sapiens
cccccggcacgcugagcucgggaugcggacgc

SEQ ID NO: 172105 - RNA, 31 nt, Homo Sapiens
uggguuaguggggcucucagaacuuaagaga

SEQ ID NO: 172106 - RNA, 32 nt, Homo Sapiens
aucgccgcaguugcccucuggcgccaugucgc

SEQ ID NO: 172107 - RNA, 32 nt, Homo Sapiens
aguccggggcagggcagggcgagggagggaag

SEQ ID NO: 172108 - RNA, 32 nt, Homo Sapiens
aagcucagggugcucccuccucagucuuuggg

SEQ ID NO: 172109 - RNA, 32 nt, Homo Sapiens
gggguuccagagcuugccggaccucggccccc

SEQ ID NO: 172110 - RNA, 32 nt, Homo Sapiens
guuuggccacugaauuaauacuguauagcaag

SEQ ID NO: 172111 - RNA, 32 nt, Homo Sapiens
gaaagguuuauggcagcacuuccaucaaaaga

SEQ ID NO: 172112 - RNA, 32 nt, Homo Sapiens
uccucuucucucugggaggcagaugggagcca

SEQ ID NO: 172113 - RNA, 32 nt, Homo Sapiens
aacaagaaaauuaagacauacuggccuggugc

SEQ ID NO: 172114 - RNA, 32 nt, Homo Sapiens
ugagaauguacuuugugagauccauccccugc

SEQ ID NO: 172115 - RNA, 32 nt, Homo Sapiens
cgggacggacgaggccggggccccggguggca

SEQ ID NO: 172116 - RNA, 32 nt, Homo Sapiens
gaaugaggccccaggugcugauuuuuaugccc

SEQ ID NO: 172117 - RNA, 32 nt, Homo Sapiens
aaaaucugugaccugucagaauaaaaaugugg

SEQ ID NO: 172118 - RNA, 32 nt, Homo Sapiens
ugcacgcugacgccgcgcagucucguccccug

SEQ ID NO: 172119 - RNA, 32 nt, Homo Sapiens
ggaauuauuuccccucaaguuuucuaagugau

SEQ ID NO: 172120 - RNA, 32 nt, Homo Sapiens
auuaaaggggggagggggaggggguuacaaac

SEQ ID NO: 172121 - RNA, 32 nt, Homo Sapiens
uccugcucucugaucuuauugcuuauaaacuu

SEQ ID NO: 172122 - RNA, 32 nt, Homo Sapiens
uggggcaggaaggcgcccacuccgggacugcc

SEQ ID NO: 172123 - RNA, 32 nt, Homo Sapiens
ccuccuacuggguguucaaaagaaauuuaaau

SEQ ID NO: 172124 - RNA, 32 nt, Homo Sapiens
gucgcccugcggugcaagcugcugcuccagag

SEQ ID NO: 172125 - RNA, 32 nt, Homo Sapiens
uccaucuucaucuacgcagccaucgccuucuc

SEQ ID NO: 172126 - RNA, 32 nt, Homo Sapiens
aggggcuugcaguuuucccagcccuucucgcu

SEQ ID NO: 172127 - RNA, 32 nt, Homo Sapiens
auguuuuguauauacaguuauuuuggauauau

SEQ ID NO: 172128 - RNA, 32 nt, Homo Sapiens
uuuaguuuaaaaucuugcauggcauuaauugu

SEQ ID NO: 172129 - RNA, 32 nt, Homo Sapiens
auguaggggcagcgccacugcugcuugugcgg

SEQ ID NO: 172130 - RNA, 32 nt, Homo Sapiens
cccccagcuggguugugcuccacugugacggu

SEQ ID NO: 172131 - RNA, 32 nt, Homo Sapiens
aaguuucauuugcuguaugccauccucgagag

SEQ ID NO: 172132 - RNA, 32 nt, Homo Sapiens
uuuuccaugcacccucauacacagaaaccaau

SEQ ID NO: 172133 - RNA, 30 nt, Homo Sapiens
ugaucagugaauaaaaaugucagaacugug

SEQ ID NO: 172134 - RNA, 32 nt, Homo Sapiens
uuuuuacugagcucaggagagcaagaugaagg

SEQ ID NO: 172135 - RNA, 32 nt, Homo Sapiens
cgcggaucgaacguuggcggcgcggaucgcac

SEQ ID NO: 172136 - RNA, 32 nt, Homo Sapiens
uguauauccagauggacugugagcacagccug

SEQ ID NO: 172137 - RNA, 32 nt, Homo Sapiens
cugauggagccaguuaaaaugcuucauuauuu

SEQ ID NO: 172138 - RNA, 32 nt, Homo Sapiens
auacaaauugguuuggggggagauccuuuccu

SEQ ID NO: 172139 - RNA, 32 nt, Homo Sapiens
aaaguccuguuagguauccagaguucuauuua

SEQ ID NO: 172140 - RNA, 32 nt, Homo Sapiens
acgcgccggaaucugaggugugaguagagccu

SEQ ID NO: 172141 - RNA, 32 nt, Homo Sapiens
ucuuucaccaugccuggaucacuuccuuugaa

SEQ ID NO: 172142 - RNA, 32 nt, Homo Sapiens
aucaugaugaauugccuggggucuguaagaau

SEQ ID NO: 172143 - RNA, 32 nt, Homo Sapiens
ggagauuucuguuuuucuuuuuggcuguuaau

SEQ ID NO: 172144 - RNA, 32 nt, Homo Sapiens
ccgcugcgccccagcagcguccccggucgcca

SEQ ID NO: 172145 - RNA, 32 nt, Homo Sapiens
caagaggccggggcccaggcaggagcugacag

SEQ ID NO: 172146 - RNA, 32 nt, Homo Sapiens
acucagaauauuuauuaguuuuuaucaauaaa

SEQ ID NO: 172147 - RNA, 32 nt, Homo Sapiens
gucaaagagccgcuccggccccggcccugagg

SEQ ID NO: 172148 - RNA, 32 nt, Homo Sapiens
uugaucagggacuaacaccaucgccucccacc

SEQ ID NO: 172149 - RNA, 32 nt, Homo Sapiens
agcaguuuguuguuuauuaauaauuagcuuuu

SEQ ID NO: 172150 - RNA, 32 nt, Homo Sapiens
uuuauauauugucuguaaaaaauguaugcuau

SEQ ID NO: 172151 - RNA, 32 nt, Homo Sapiens
ggauauuuaaugacuacuuguuuuuuaaauaa

SEQ ID NO: 172152 - RNA, 32 nt, Homo Sapiens
ggauauggaaaaggucauggggaagcagaggu

SEQ ID NO: 172153 - RNA, 29 nt, Homo Sapiens
uaguuuuaucucauuuaccacaauguuuu

SEQ ID NO: 172154 - RNA, 32 nt, Homo Sapiens
auuugccuucagcuggcaaggcuggcaauaua

SEQ ID NO: 172155 - RNA, 30 nt, Homo Sapiens
cacuagagggucaugggggaaauccugccu

SEQ ID NO: 172156 - RNA, 32 nt, Homo Sapiens
guauauuucucugucauucaggaggcacgaau

SEQ ID NO: 172157 - RNA, 32 nt, Homo Sapiens
caguuugauucuuuuccacguguaagucucca

SEQ ID NO: 172158 - RNA, 32 nt, Homo Sapiens
acaagccuugaacaucguccugcuucccagug

SEQ ID NO: 172159 - RNA, 32 nt, Homo Sapiens
gccuagagugagaaguuaaagguccaauuaag

SEQ ID NO: 172160 - RNA, 32 nt, Homo Sapiens
aagucaacugaaagaagaagugaugucacuua

SEQ ID NO: 172161 - RNA, 32 nt, Homo Sapiens
aguguauaauuucugucuacagcuagaagcug

SEQ ID NO: 172162 - RNA, 32 nt, Homo Sapiens
gcaacugagaauaaauauuuuuugucacuuca

SEQ ID NO: 172163 - RNA, 32 nt, Homo Sapiens
ggugcgcaggggcgggcggaggcgcuguccgg

SEQ ID NO: 172164 - RNA, 32 nt, Homo Sapiens
gauacaaugcugugcccuaaaguguauuuuuu

SEQ ID NO: 172165 - RNA, 32 nt, Homo Sapiens
uguguuucaaggaaacacaaucgcugaaccaa

SEQ ID NO: 172166 - RNA, 32 nt, Homo Sapiens
ugcuucuaugugguguuugacucuguacaaau

SEQ ID NO: 172167 - RNA, 32 nt, Homo Sapiens
cacacacacacacacacagacacacacaaaac

SEQ ID NO: 172168 - RNA, 32 nt, Homo Sapiens
cggaaaucagugcgauguggacgucacgcucc

SEQ ID NO: 172169 - RNA, 31 nt, Homo Sapiens
ccuagcggcgccacccugccccagccugagg

SEQ ID NO: 172170 - RNA, 32 nt, Homo Sapiens
uuaacaucuauuauaaaaccauguugauuccc

SEQ ID NO: 172171 - RNA, 32 nt, Homo Sapiens
acugguauuuauuucugauaauuaaaaauuac

SEQ ID NO: 172172 - RNA, 32 nt, Homo Sapiens
gccugucuuuugccugguacaaggcuugauga

SEQ ID NO: 172173 - RNA, 32 nt, Homo Sapiens
uguuaagcauaguggggggcaggguuagaggg

SEQ ID NO: 172174 - RNA, 32 nt, Homo Sapiens
aaaaauuguauauaaagaacuguauaguuuac

SEQ ID NO: 172175 - RNA, 32 nt, Homo Sapiens
uuaucaaucuucauuuuaaaguuguuuuuguu

SEQ ID NO: 172176 - RNA, 32 nt, Homo Sapiens
gagccagagcuucuuguacuacacagaauugc

SEQ ID NO: 172177 - RNA, 32 nt, Homo Sapiens
ccaaauuagugccucuuagaugaugugauguu

SEQ ID NO: 172178 - RNA, 32 nt, Homo Sapiens
gacgaggagaggcaaugguggucuuggcaaca

SEQ ID NO: 172179 - RNA, 32 nt, Homo Sapiens
aggugggucgccggcccggaggccugcuccuc

SEQ ID NO: 172180 - RNA, 32 nt, Homo Sapiens
uuucuccgcagcucggcucgcggccgcgcccg

SEQ ID NO: 172181 - RNA, 32 nt, Homo Sapiens
acccaggagguagaagcugcagugagcaggga

SEQ ID NO: 172182 - RNA, 32 nt, Homo Sapiens
cagcggcggcgguugccaggagcccgcguugc

SEQ ID NO: 172183 - RNA, 32 nt, Homo Sapiens
augagcauagcuuccucaaauuccugggcucg

SEQ ID NO: 172184 - RNA, 32 nt, Homo Sapiens
aggccgccgggcgaggcgguguuugccccggu

SEQ ID NO: 172185 - RNA, 32 nt, Homo Sapiens
ugagccccuccucuccucguccggccugcagc

SEQ ID NO: 172186 - RNA, 32 nt, Homo Sapiens
gaugaggggggaggauauuuagcacuggggcc

SEQ ID NO: 172187 - RNA, 32 nt, Homo Sapiens
cugccucggaagcuccuugggugugggugaag

SEQ ID NO: 172188 - RNA, 32 nt, Homo Sapiens
uauucuucuaauaauuuaaacaguccaauaau

SEQ ID NO: 172189 - RNA, 32 nt, Homo Sapiens
uuacaguaaccuaaaucagggauuaguuaaca

SEQ ID NO: 172190 - RNA, 32 nt, Homo Sapiens
uuggauguacuaugggcauuacaacuauggac

SEQ ID NO: 172191 - RNA, 32 nt, Homo Sapiens
cggaaccaacuuuucucuguguguccagcagg

SEQ ID NO: 172192 - RNA, 32 nt, Homo Sapiens
ccucugccaguacaacuagacccggcgucugg

SEQ ID NO: 172193 - RNA, 32 nt, Homo Sapiens
caggaugcggacgccuguggggccugaggagg

SEQ ID NO: 172194 - RNA, 32 nt, Homo Sapiens
cggcggcggccgcgcggcaggaccaugguuga

SEQ ID NO: 172195 - RNA, 32 nt, Homo Sapiens
guauuuuguaaauguucaagggaacuguuugg

SEQ ID NO: 172196 - RNA, 32 nt, Homo Sapiens
gcauuauaggauguuuagcaacaucccuggcc

SEQ ID NO: 172197 - RNA, 32 nt, Homo Sapiens
gagggccugaccccucaccuccccuucccucu

SEQ ID NO: 172198 - RNA, 32 nt, Homo Sapiens
uucuuuccuaaauauaaaugaaaaucuauccu

SEQ ID NO: 172199 - RNA, 32 nt, Homo Sapiens
auugucuggugguggggggcaggggacagagg

SEQ ID NO: 172200 - RNA, 32 nt, Homo Sapiens
cguauugauaaggagaugauguugaacacacu

SEQ ID NO: 172201 - RNA, 32 nt, Homo Sapiens
ggcgccgggaacuggcgugugggacuccagac

SEQ ID NO: 172202 - RNA, 32 nt, Homo Sapiens
ccucaauuauugcaaaaauguaacaauaaagu

SEQ ID NO: 172203 - RNA, 32 nt, Homo Sapiens
aauuuguuccacaaaaauuaugcugaaaugga

SEQ ID NO: 172204 - RNA, 32 nt, Homo Sapiens
uuuguuacuuuacuuuugcuguuuauacuuga

SEQ ID NO: 172205 - RNA, 32 nt, Homo Sapiens
gagaaagacauuccgggaaaccaggaggugag

SEQ ID NO: 172206 - RNA, 32 nt, Homo Sapiens
cuucaguuugggagcugggucuguggcuuuga

SEQ ID NO: 172207 - RNA, 32 nt, Homo Sapiens
gucccuguaagcaucacauugcuggaggaaaa

SEQ ID NO: 172208 - RNA, 32 nt, Homo Sapiens
agugcugcucauguccuccccuccacccgcac

SEQ ID NO: 172209 - RNA, 30 nt, Homo Sapiens
gguuucgggauucccauccguccuggcgau

SEQ ID NO: 172210 - RNA, 32 nt, Homo Sapiens
agacauugcauguggaggucuccagcucagga

SEQ ID NO: 172211 - RNA, 32 nt, Homo Sapiens
caaaucuguaauacuacacugcucuuaagacc

SEQ ID NO: 172212 - RNA, 32 nt, Homo Sapiens
gggucugugcauuucugguugcaccgcggcgc

SEQ ID NO: 172213 - RNA, 32 nt, Homo Sapiens
cagagugaagaugggugacuaaugauaugugu

SEQ ID NO: 172214 - RNA, 32 nt, Homo Sapiens
cacaaaaagcuuaugaagauguuccuugggau

SEQ ID NO: 172215 - RNA, 32 nt, Homo Sapiens
cuccuacauagauccuaaaaacaaacaaaaaa

SEQ ID NO: 172216 - RNA, 32 nt, Homo Sapiens
ccucuucaugcaaucuggugagcaguggugca

SEQ ID NO: 172217 - RNA, 32 nt, Homo Sapiens
aaaaaaaauaacaaaaucagaccuuggucugg

SEQ ID NO: 172218 - RNA, 32 nt, Homo Sapiens
guaccugugaaugcauggggacgugcugaacc

SEQ ID NO: 172219 - RNA, 32 nt, Homo Sapiens
aggaccuacuacugccuaucaaacgcccacca

SEQ ID NO: 172220 - RNA, 29 nt, Homo Sapiens
aauguggacgcuuuccugcccagccaggg

SEQ ID NO: 172221 - RNA, 32 nt, Homo Sapiens
cuuguauauuaaauaaaugcauuuuuguccuu

SEQ ID NO: 172222 - RNA, 32 nt, Homo Sapiens
ggcgccuccccgccccgccgccccacaccucu

SEQ ID NO: 172223 - RNA, 32 nt, Homo Sapiens
gcaaauagacauuuuucuuauuucuuaaaaaa

SEQ ID NO: 172224 - RNA, 32 nt, Homo Sapiens
cuuuauugacauuuugcaaaugaaguuacuua

SEQ ID NO: 172225 - RNA, 32 nt, Homo Sapiens
agucuuugugcugcuucuggggugguggggca

SEQ ID NO: 172226 - RNA, 32 nt, Homo Sapiens
ucuuuccucccucucucugggcuuuguccuga

SEQ ID NO: 172227 - RNA, 32 nt, Homo Sapiens
accgccaccuucccugccccagccccagcagc

SEQ ID NO: 172228 - RNA, 32 nt, Homo Sapiens
gccccguccgccccgccgcucugcgggagugu

SEQ ID NO: 172229 - RNA, 32 nt, Homo Sapiens
agaagcuguauauacauuucauucauauaacc

SEQ ID NO: 172230 - RNA, 32 nt, Homo Sapiens
augugucaucuaacagaaaugacuccuuugaa

SEQ ID NO: 172231 - RNA, 32 nt, Homo Sapiens
gcguccccgcgcgugcccuccucccgccacac

SEQ ID NO: 172232 - RNA, 32 nt, Homo Sapiens
ucugauucauaaaaguuauaaaauauuaggua

SEQ ID NO: 172233 - RNA, 32 nt, Homo Sapiens
ggcaugugaggucaccagcaucacaggucuaa

SEQ ID NO: 172234 - RNA, 32 nt, Homo Sapiens
gccaagagccuccagaugugccugcagccuag

SEQ ID NO: 172235 - RNA, 32 nt, Homo Sapiens
agcaaggagacggggaagagcagcuccaggag

SEQ ID NO: 172236 - RNA, 32 nt, Homo Sapiens
acacgcgugagcaugcauguguguguacacgu

SEQ ID NO: 172237 - RNA, 30 nt, Homo Sapiens
uuccuugcaauaaaucucaauauauccccu

SEQ ID NO: 172238 - RNA, 32 nt, Homo Sapiens
ccacuaccauugcuguuugacuugcuuuguau

SEQ ID NO: 172239 - RNA, 32 nt, Homo Sapiens
uuuacuacauauauugauuuuuaaauaaaguu

SEQ ID NO: 172240 - RNA, 32 nt, Homo Sapiens
aaaacaaggugauuuguuuuaauggguuaaug

SEQ ID NO: 172241 - RNA, 31 nt, Homo Sapiens
ugacuaugaaacacucuggugaacacugggu

SEQ ID NO: 172242 - RNA, 32 nt, Homo Sapiens
cuuuuauucuaccucaaacacuaaucuccagg

SEQ ID NO: 172243 - RNA, 32 nt, Homo Sapiens
uccucgaguucugugggccugcaccggcuggu

SEQ ID NO: 172244 - RNA, 32 nt, Homo Sapiens
gaaggcaagguucagcugggacuguccacaga

SEQ ID NO: 172245 - RNA, 31 nt, Homo Sapiens
ccaagcuugucugcugccugaguuccagaga

SEQ ID NO: 172246 - RNA, 32 nt, Homo Sapiens
agcuuugucaggcuucacauuguagcagcugg

SEQ ID NO: 172247 - RNA, 32 nt, Homo Sapiens
ucccuucucaucguagagagccugcaugcuga

SEQ ID NO: 172248 - RNA, 32 nt, Homo Sapiens
gcacgguccuaaacuugucugcacuuuagaaa

SEQ ID NO: 172249 - RNA, 32 nt, Homo Sapiens
ggcuucagucuuuggguccagcugucuccucc

SEQ ID NO: 172250 - RNA, 32 nt, Homo Sapiens
cgugaccugugcugagggcugugagaauguga

SEQ ID NO: 172251 - RNA, 32 nt, Homo Sapiens
cugagacauguggcagcccaguccuuaccuca

SEQ ID NO: 172252 - RNA, 32 nt, Homo Sapiens
cgaggaggccgcgggcccggcgcucggacgcu

SEQ ID NO: 172253 - RNA, 32 nt, Homo Sapiens
auucagauauguuuauuuuaacauuguuuggu

SEQ ID NO: 172254 - RNA, 32 nt, Homo Sapiens
cuccggcaggccgggguagugcucucacggau

SEQ ID NO: 172255 - RNA, 32 nt, Homo Sapiens
uccgccgcuccggcccgggccgccaugucgcu

SEQ ID NO: 172256 - RNA, 32 nt, Homo Sapiens
ggagauuaugugguuggccaauaaagauagau

SEQ ID NO: 172257 - RNA, 32 nt, Homo Sapiens
caugcaccagugccgccugugcccacgugugc

SEQ ID NO: 172258 - RNA, 32 nt, Homo Sapiens
ucucuguaaaauuuauacacacaaaaauuaac

SEQ ID NO: 172259 - RNA, 32 nt, Homo Sapiens
uacagccaacuuuucuagaccuguuuugcuuu

SEQ ID NO: 172260 - RNA, 32 nt, Homo Sapiens
auaauuggguucucuuuuuugcucucuuguag

SEQ ID NO: 172261 - RNA, 32 nt, Homo Sapiens
aguggcuauuaacagcacuaguugguuuuguu

SEQ ID NO: 172262 - RNA, 32 nt, Homo Sapiens
aaugugugaauggaaaugaacuuuaagaugua

SEQ ID NO: 172263 - RNA, 32 nt, Homo Sapiens
cuuuaaagucauuguauauaguucuaauaaac

SEQ ID NO: 172264 - RNA, 32 nt, Homo Sapiens
caguggacccccagccccugcccccacucacc

SEQ ID NO: 172265 - RNA, 32 nt, Homo Sapiens
auuuuggccaaguuuuggagucugauaauuuc

SEQ ID NO: 172266 - RNA, 32 nt, Homo Sapiens
caccggugacucagcccucacagcucucuccu

SEQ ID NO: 172267 - RNA, 32 nt, Homo Sapiens
uucacaccgugggauaaaucuguaucaagaug

SEQ ID NO: 172268 - RNA, 32 nt, Homo Sapiens
gcgcugcggacgggguugcgggcucgguagcg

SEQ ID NO: 172269 - RNA, 32 nt, Homo Sapiens
uguagagagguuaaauaucaugugucauugau

SEQ ID NO: 172270 - RNA, 32 nt, Homo Sapiens
ccuggccaucugccuccugucuucccaguacc

SEQ ID NO: 172271 - RNA, 32 nt, Homo Sapiens
uuacaggugugagccaccacacccagccaaca

SEQ ID NO: 172272 - RNA, 32 nt, Homo Sapiens
cgaaaccccuggcucacccccagccgcaggaa

SEQ ID NO: 172273 - RNA, 29 nt, Homo Sapiens
uguucuguauguuucagggaaaaaugucu

SEQ ID NO: 172274 - RNA, 32 nt, Homo Sapiens
gugaugauauuguauaugcucauggucuuaac

SEQ ID NO: 172275 - RNA, 32 nt, Homo Sapiens
ccagaggaaaauuuuuaucaacuauuuuguaa

SEQ ID NO: 172276 - RNA, 32 nt, Homo Sapiens
cccgcgccgcaaccuccuccucggcgaagucu

SEQ ID NO: 172277 - RNA, 32 nt, Homo Sapiens
uauuggaggucuuuaggaggagagaagcgugg

SEQ ID NO: 172278 - RNA, 32 nt, Homo Sapiens
ggugagaggaggagaguggcauuaucccuccu

SEQ ID NO: 172279 - RNA, 32 nt, Homo Sapiens
cuuaucuauaaaaugggauuauaaaauguauc

SEQ ID NO: 172280 - RNA, 32 nt, Homo Sapiens
uuuagaauucaaggagaugagaaggaaacagg

SEQ ID NO: 172281 - RNA, 32 nt, Homo Sapiens
cagcgaguacgcccggccgggcgggcugggag

SEQ ID NO: 172282 - RNA, 32 nt, Homo Sapiens
agacccauuggaggugggugggaaauaaggua

SEQ ID NO: 172283 - RNA, 32 nt, Homo Sapiens
gagccugugggauauaccaaggcagaggagcc

SEQ ID NO: 172284 - RNA, 30 nt, Homo Sapiens
aacccaaauaaauguguaaauguggacaca

SEQ ID NO: 172285 - RNA, 32 nt, Homo Sapiens
uccgggcucgaacccggcaccuuccggaaaau

SEQ ID NO: 172286 - RNA, 32 nt, Homo Sapiens
uugcuuuugugauuucuuucuguuucuuccca

SEQ ID NO: 172287 - RNA, 32 nt, Homo Sapiens
agccgcgccggggcugcgggaccgugggacag

SEQ ID NO: 172288 - RNA, 32 nt, Homo Sapiens
cacucucagguuuguuuguuucccacuuuuuu

SEQ ID NO: 172289 - RNA, 32 nt, Homo Sapiens
aucaaggacuggaccgggugcgugccugcucu

SEQ ID NO: 172290 - RNA, 32 nt, Homo Sapiens
caguuggagaccgaggccccgcgcauccucgu

SEQ ID NO: 172291 - RNA, 32 nt, Homo Sapiens
caugcacucggagggaaaaugccaagugacaa

SEQ ID NO: 172292 - RNA, 32 nt, Homo Sapiens
agaagagcacuuauuucucaccauggcugauc

SEQ ID NO: 172293 - RNA, 32 nt, Homo Sapiens
ucccguccccaccccuaaauuccuguggauga

SEQ ID NO: 172294 - RNA, 32 nt, Homo Sapiens
cacguuuguaugcauggaaauaaacuuauaaa

SEQ ID NO: 172295 - RNA, 32 nt, Homo Sapiens
cccaccucugugcugccccauccaccuacagc

SEQ ID NO: 172296 - RNA, 32 nt, Homo Sapiens
cagggaaagaaggugauuuguauuugucuccc

SEQ ID NO: 172297 - RNA, 32 nt, Homo Sapiens
cagggcuggucucuguuccccagcccaccugg

SEQ ID NO: 172298 - RNA, 32 nt, Homo Sapiens
gggaaauuauugguuuguguaacuagugguag

SEQ ID NO: 172299 - RNA, 32 nt, Homo Sapiens
ucugaaaauuuaucauguuuuauaauuugaau

SEQ ID NO: 172300 - RNA, 30 nt, Homo Sapiens
ccuccucgcccgcucccgccggcgagcaag

SEQ ID NO: 172301 - RNA, 32 nt, Homo Sapiens
uguccagaccacuuaaaacuacagcugcuuuu

SEQ ID NO: 172302 - RNA, 32 nt, Homo Sapiens
aagcugucagugagaaggaacucugcgccuua

SEQ ID NO: 172303 - RNA, 32 nt, Homo Sapiens
agacucuggaaauccuuuugcauuaaaaggac

SEQ ID NO: 172304 - RNA, 32 nt, Homo Sapiens
ucugcucuaauuuuaaaauguaaaugagcaag

SEQ ID NO: 172305 - RNA, 32 nt, Homo Sapiens
gcagggggcucggaggacucaggccgcagccc

SEQ ID NO: 172306 - RNA, 32 nt, Homo Sapiens
gcucuaauccuccauuaagcgagcauaccuca

SEQ ID NO: 172307 - RNA, 32 nt, Homo Sapiens
auuauuagacucucuaguuuuaucuuaaacug

SEQ ID NO: 172308 - RNA, 32 nt, Homo Sapiens
uggggguggcggugcccaucgcguggcuggaa

SEQ ID NO: 172309 - RNA, 32 nt, Homo Sapiens
gaaugcaugaaccuaaagauuuacagagccug

SEQ ID NO: 172310 - RNA, 32 nt, Homo Sapiens
gggcgguggcgcuggauccgcggcugcccgau

SEQ ID NO: 172311 - RNA, 32 nt, Homo Sapiens
uaaucugaagaucacuugaaaacugacuguug

SEQ ID NO: 172312 - RNA, 30 nt, Homo Sapiens
gcaacguggggcgaaggcggcggcgaaggc

SEQ ID NO: 172313 - RNA, 32 nt, Homo Sapiens
ugagaaguuguaauagacaacuccagauugac

SEQ ID NO: 172314 - RNA, 32 nt, Homo Sapiens
uaaucucaucccuuuaaaaugucuauuuuuua

SEQ ID NO: 172315 - RNA, 32 nt, Homo Sapiens
uggaaacuuuuuaguucucacuacaauguuca

SEQ ID NO: 172316 - RNA, 32 nt, Homo Sapiens
cuuaaacuauaccuaugcuuauuguuauuuuu

SEQ ID NO: 172317 - RNA, 32 nt, Homo Sapiens
aaaagagucugcucuaucauaguguugagagc

SEQ ID NO: 172318 - RNA, 32 nt, Homo Sapiens
uucaguaggucccagcuuuuacuuuuuccauu

SEQ ID NO: 172319 - RNA, 32 nt, Homo Sapiens
acugggccaagccccaaccugccucccagcca

SEQ ID NO: 172320 - RNA, 32 nt, Homo Sapiens
uggccuugguuggccuggcaccuggcccaggg

SEQ ID NO: 172321 - RNA, 32 nt, Homo Sapiens
aggcugagguugcaggaucgcuugagcccagg

SEQ ID NO: 172322 - RNA, 32 nt, Homo Sapiens
cauagcagcuuuauuuuuuuuauucuguagua

SEQ ID NO: 172323 - RNA, 32 nt, Homo Sapiens
ugagggcgcggcagauccugacggagccagaa

SEQ ID NO: 172324 - RNA, 32 nt, Homo Sapiens
ggaugugugugagcaggcccaauccuuugcag

SEQ ID NO: 172325 - RNA, 32 nt, Homo Sapiens
cgcugcccucacgcgccgcagacgggacccuc

SEQ ID NO: 172326 - RNA, 32 nt, Homo Sapiens
cggcccugccccuggcccugcgcacggucagc

SEQ ID NO: 172327 - RNA, 32 nt, Homo Sapiens
ucuuuccauuacauguucuguauuuuaauaca

SEQ ID NO: 172328 - RNA, 32 nt, Homo Sapiens
uaucuuuagguaauauuuuauaucauagauua

SEQ ID NO: 172329 - RNA, 32 nt, Homo Sapiens
agggcuggagacuuugcgcccgggggcaccgg

SEQ ID NO: 172330 - RNA, 32 nt, Homo Sapiens
guaaguuacuaauuaggucauuauuuccuauu

SEQ ID NO: 172331 - RNA, 32 nt, Homo Sapiens
aacgaaggccgcgacugccucucccaucuguc

SEQ ID NO: 172332 - RNA, 32 nt, Homo Sapiens
gugcagccaggacucuugggguggccccagga

SEQ ID NO: 172333 - RNA, 32 nt, Homo Sapiens
ucacuugccugccuucucuggacugcacugua

SEQ ID NO: 172334 - RNA, 32 nt, Homo Sapiens
auuugcuccaugaacccaucucagaugccccu

SEQ ID NO: 172335 - RNA, 32 nt, Homo Sapiens
gucuacaaacuuauuacauccuuuuuaaaaau

SEQ ID NO: 172336 - RNA, 32 nt, Homo Sapiens
cuuuggagaguaagaaaaucaaucuuggcugg

SEQ ID NO: 172337 - RNA, 32 nt, Homo Sapiens
cagaagaaaaagaagcugaggaagcuguuggg

SEQ ID NO: 172338 - RNA, 31 nt, Homo Sapiens
gugcugucaaugguaugucuaacuguauguc

SEQ ID NO: 172339 - RNA, 27 nt, Homo Sapiens
cacuucccccucuucagcaucccccgu

SEQ ID NO: 172340 - RNA, 32 nt, Homo Sapiens
ggcuuuuuacuuuggguacaugggcguauaau

SEQ ID NO: 172341 - RNA, 32 nt, Homo Sapiens
gcccuccccgcaucccucuccucccucgcgcc

SEQ ID NO: 172342 - RNA, 32 nt, Homo Sapiens
ucaugucuucuacuguaaaauucauaugcuuu

SEQ ID NO: 172343 - RNA, 32 nt, Homo Sapiens
gcggagugcagggaugugcagaugagugggcu

SEQ ID NO: 172344 - RNA, 32 nt, Homo Sapiens
uucugccugauagagggaagaggaagaggagg

SEQ ID NO: 172345 - RNA, 32 nt, Homo Sapiens
gcuccgugacguccccagggccccagaacgag

SEQ ID NO: 172346 - RNA, 32 nt, Homo Sapiens
caaauuacuucuuuguuuuucuuaaugauggc

SEQ ID NO: 172347 - RNA, 32 nt, Homo Sapiens
acucaaggggguuuggucuucccaggaagagg

SEQ ID NO: 172348 - RNA, 32 nt, Homo Sapiens
ccauacaauuuuuuuuuuuuuaaucacaaagg

SEQ ID NO: 172349 - RNA, 32 nt, Homo Sapiens
gucauuuugaccaaggcuaugcaggauugcac

SEQ ID NO: 172350 - RNA, 32 nt, Homo Sapiens
gcccagcugccagcagcguggccagcgucuau

SEQ ID NO: 172351 - RNA, 32 nt, Homo Sapiens
gcuuucauuuuucugaccuaauaauuacggga

SEQ ID NO: 172352 - RNA, 32 nt, Homo Sapiens
uuugaacuuguaucuuuuuuuauacuagcaac

SEQ ID NO: 172353 - RNA, 32 nt, Homo Sapiens
guuuuuacaauaccuauaguaguuaucuaggg

SEQ ID NO: 172354 - RNA, 32 nt, Homo Sapiens
uuugggagggaagaagguacagaagaaagauu

SEQ ID NO: 172355 - RNA, 32 nt, Homo Sapiens
ggugggaggagcucgugugcuccuuggccgcu

SEQ ID NO: 172356 - RNA, 32 nt, Homo Sapiens
ucuggaacucuggggucuggucagggagugug

SEQ ID NO: 172357 - RNA, 32 nt, Homo Sapiens
ugucuaccaggccccaggugaaauccccaggc

SEQ ID NO: 172358 - RNA, 32 nt, Homo Sapiens
cuguccaaccccuggaaggaccucugaggugu

SEQ ID NO: 172359 - RNA, 32 nt, Homo Sapiens
gucuuucauaaaaauagaugcuaaugaauguu

SEQ ID NO: 172360 - RNA, 32 nt, Homo Sapiens
cuugaauagacuaauaauauaugcucauauca

SEQ ID NO: 172361 - RNA, 32 nt, Homo Sapiens
aagaauucccuugcguauucucucucuaaaac

SEQ ID NO: 172362 - RNA, 32 nt, Homo Sapiens
ccggagcccgcccuucgccucccagccccuca

SEQ ID NO: 172363 - RNA, 32 nt, Homo Sapiens
cucuuuuaaauauuugauaaaacuacucaccc

SEQ ID NO: 172364 - RNA, 32 nt, Homo Sapiens
caucagcgccgccgccgccgcgcggcgcccaa

SEQ ID NO: 172365 - RNA, 32 nt, Homo Sapiens
acauuccauuuucuucugaucauacuuccuca

SEQ ID NO: 172366 - RNA, 32 nt, Homo Sapiens
gcggcgaggcgaggguggcggucgccugagca

SEQ ID NO: 172367 - RNA, 32 nt, Homo Sapiens
cugcacccccguuuccuccccuguaagguggg

SEQ ID NO: 172368 - RNA, 32 nt, Homo Sapiens
uaguuaagagcuaagagcaguacucugaagga

SEQ ID NO: 172369 - RNA, 32 nt, Homo Sapiens
cuggaaacaauaucaaguaacaauaugauuau

SEQ ID NO: 172370 - RNA, 32 nt, Homo Sapiens
uucguuuagucuuuauuaaaauuuauaauugg

SEQ ID NO: 172371 - RNA, 32 nt, Homo Sapiens
acugaccagggugucaucguccugcugcccgu

SEQ ID NO: 172372 - RNA, 32 nt, Homo Sapiens
uuucauuuuaucacuguuauccugcuauucaa

SEQ ID NO: 172373 - RNA, 32 nt, Homo Sapiens
uuucaguagagaccggguuuugccauguuggc

SEQ ID NO: 172374 - RNA, 32 nt, Homo Sapiens
gcuuucuuuggugugaacaggaucucccucug

SEQ ID NO: 172375 - RNA, 32 nt, Homo Sapiens
ccgaagacggagaggagggaaauggggcccuu

SEQ ID NO: 172376 - RNA, 32 nt, Homo Sapiens
uaacggcgcgccccacgagaccccggcuuccu

SEQ ID NO: 172377 - RNA, 32 nt, Homo Sapiens
gaggaggcugaccuggcccccaucccaaguua

SEQ ID NO: 172378 - RNA, 32 nt, Homo Sapiens
uuuccuaguucuuuuauuauuauucuuauauu

SEQ ID NO: 172379 - RNA, 32 nt, Homo Sapiens
cauggcuucucccggggcuggcacugaagcug

SEQ ID NO: 172380 - RNA, 32 nt, Homo Sapiens
cugaagaaaaagauuucaaaaucuaccagcag

SEQ ID NO: 172381 - RNA, 32 nt, Homo Sapiens
auucuuccuucgggaaggugggucuaguuggu

SEQ ID NO: 172382 - RNA, 32 nt, Homo Sapiens
cuucgggcugugugacagcugcaccugcguua

SEQ ID NO: 172383 - RNA, 32 nt, Homo Sapiens
agaccuccucccaagcacuucaaaggaacugg

SEQ ID NO: 172384 - RNA, 32 nt, Homo Sapiens
ccaaaauaaacuagugcuagucuguuauaaca

SEQ ID NO: 172385 - RNA, 32 nt, Homo Sapiens
cgcuccucucgcgagcggcccgggcagggacc

SEQ ID NO: 172386 - RNA, 32 nt, Homo Sapiens
uagugccgccccaugcuagguuauuugacauu

SEQ ID NO: 172387 - RNA, 32 nt, Homo Sapiens
ccguguggccucuggacugaggagggcuggac

SEQ ID NO: 172388 - RNA, 32 nt, Homo Sapiens
gaugccggguggcagggagccgguggcggucg

SEQ ID NO: 172389 - RNA, 32 nt, Homo Sapiens
guaggagguucccuccucaauuuuguauuuuu

SEQ ID NO: 172390 - RNA, 32 nt, Homo Sapiens
ugcuuuuguauaauacaaauuuucauuaagcc

SEQ ID NO: 172391 - RNA, 32 nt, Homo Sapiens
ggcgguggccccagacccuccccuguccaaac

SEQ ID NO: 172392 - RNA, 32 nt, Homo Sapiens
cucaacaugagcauacuucugaccuaaccuuc

SEQ ID NO: 172393 - RNA, 32 nt, Homo Sapiens
gauuugucaccauccuucuauucucuggucuu

SEQ ID NO: 172394 - RNA, 32 nt, Homo Sapiens
cagcaugcagcuucccuggccuugaagcccaa

SEQ ID NO: 172395 - RNA, 32 nt, Homo Sapiens
gcugccccgcggcccauccaaggggccacucc

SEQ ID NO: 172396 - RNA, 32 nt, Homo Sapiens
gccgcgcuggccccaaacacugcguccuugaa

SEQ ID NO: 172397 - RNA, 31 nt, Homo Sapiens
ggcacgagggcggagacugcggggcgggcca

SEQ ID NO: 172398 - RNA, 32 nt, Homo Sapiens
cuguuccuuuuggagauuagacuauuuggauu

SEQ ID NO: 172399 - RNA, 32 nt, Homo Sapiens
cccacccgucuucaaucucuguucugcuccca

SEQ ID NO: 172400 - RNA, 32 nt, Homo Sapiens
gauaguuuggggcauuuuuucuuuacauuauu

SEQ ID NO: 172401 - RNA, 32 nt, Homo Sapiens
ugccccugccugggcccucccugucgucccaa

SEQ ID NO: 172402 - RNA, 32 nt, Homo Sapiens
uugcuuauauuuuuaacaucucuuuuucaaaa

SEQ ID NO: 172403 - RNA, 32 nt, Homo Sapiens
cgucugccuggucaaccaucacuuccuuagag

SEQ ID NO: 172404 - RNA, 32 nt, Homo Sapiens
uguguauauaauaaacauguauggaaauaaaa

SEQ ID NO: 172405 - RNA, 32 nt, Homo Sapiens
cgugguucuucauugcagcugcuuucugcucc

SEQ ID NO: 172406 - RNA, 32 nt, Homo Sapiens
aaauuacaaaaauuauuuucaguuuuccaaaa

SEQ ID NO: 172407 - RNA, 32 nt, Homo Sapiens
gaguugauuaaauauguuauuuuuuagacucu

SEQ ID NO: 172408 - RNA, 32 nt, Homo Sapiens
cauuucccacguuuucccuucagugcaguuaa

SEQ ID NO: 172409 - RNA, 32 nt, Homo Sapiens
uuuugagauuuauuuacauaguagcauguauc

SEQ ID NO: 172410 - RNA, 32 nt, Homo Sapiens
cacucgcuguguccccucuccuccccugugcc

SEQ ID NO: 172411 - RNA, 32 nt, Homo Sapiens
cuccagguuccucuccugaaggccggacgccg

SEQ ID NO: 172412 - RNA, 32 nt, Homo Sapiens
cgcagcuccccuuccuggcccucccccaaccc

SEQ ID NO: 172413 - RNA, 32 nt, Homo Sapiens
cagauccagaaagauggcugccaaugcaagaa

SEQ ID NO: 172414 - RNA, 32 nt, Homo Sapiens
cuccuguuccugggcuccccagccugucagac

SEQ ID NO: 172415 - RNA, 32 nt, Homo Sapiens
auacauagaaauaaauauucucuuaguuaucc

SEQ ID NO: 172416 - RNA, 32 nt, Homo Sapiens
guuuuccauccuccgaagacaucaccuuugcu

SEQ ID NO: 172417 - RNA, 32 nt, Homo Sapiens
augagcauuucccucaucacagcucugacaac

SEQ ID NO: 172418 - RNA, 32 nt, Homo Sapiens
gaaggcuuuaaaaauaauuaagaucaucaaaa

SEQ ID NO: 172419 - RNA, 32 nt, Homo Sapiens
ugugggauuuuuuuuucuuuuuuucuuuuuuu

SEQ ID NO: 172420 - RNA, 32 nt, Homo Sapiens
aggaguacaucauuuuuauccucuaauugccg

SEQ ID NO: 172421 - RNA, 32 nt, Homo Sapiens
gugccagaggccagcucucccccuccaucuug

SEQ ID NO: 172422 - RNA, 32 nt, Homo Sapiens
uaucucugcaauccaguaugcauuccaaauga

SEQ ID NO: 172423 - RNA, 32 nt, Homo Sapiens
uugaaaagcgugcaucaccucccgcuucauuc

SEQ ID NO: 172424 - RNA, 32 nt, Homo Sapiens
caucuacauuuuuuaaaacugaaucuuaaucg

SEQ ID NO: 172425 - RNA, 30 nt, Homo Sapiens
acccuggccaccccauguggcucuaacagc

SEQ ID NO: 172426 - RNA, 32 nt, Homo Sapiens
cacaccuccacuuguuauauaaccuguuugug

SEQ ID NO: 172427 - RNA, 32 nt, Homo Sapiens
caaacucauggugugugucagaggagcaagga

SEQ ID NO: 172428 - RNA, 32 nt, Homo Sapiens
agaggggccuugucuggcauguucaccgaggc

SEQ ID NO: 172429 - RNA, 32 nt, Homo Sapiens
ucucgagccgauggcagcucacguucugccuu

SEQ ID NO: 172430 - RNA, 31 nt, Homo Sapiens
aaacaaaaugguaauuacagaauuagcugug

SEQ ID NO: 172431 - RNA, 32 nt, Homo Sapiens
guauaaucagguuaaugauuuauuuuuugacu

SEQ ID NO: 172432 - RNA, 32 nt, Homo Sapiens
cagagcagaccucagccagggccacagagguc

SEQ ID NO: 172433 - RNA, 32 nt, Homo Sapiens
ggaaauguguuuuuuguuguucauuuguuucu

SEQ ID NO: 172434 - RNA, 32 nt, Homo Sapiens
aaaaaucaaggaguuuuaauauuuucagaagu

SEQ ID NO: 172435 - RNA, 31 nt, Homo Sapiens
agagcuuugugcuugucauuccagagugcug

SEQ ID NO: 172436 - RNA, 32 nt, Homo Sapiens
aaaacuaaugaguaaagucugcugaaugaaua

SEQ ID NO: 172437 - RNA, 32 nt, Homo Sapiens
aucuaauguuucuuguaauauugaugauccua

SEQ ID NO: 172438 - RNA, 32 nt, Homo Sapiens
ggugggaacuuugucuccgagucggagcagca

SEQ ID NO: 172439 - RNA, 32 nt, Homo Sapiens
acgagagugcggcccuugcugcuggagaucug

SEQ ID NO: 172440 - RNA, 32 nt, Homo Sapiens
aauaucuacuucauuugauguuuggauauaaa

SEQ ID NO: 172441 - RNA, 32 nt, Homo Sapiens
gugacuuuaugaaaauauauuuaugacaguca

SEQ ID NO: 172442 - RNA, 32 nt, Homo Sapiens
cuggcccgccccagcucucagaggccggccau

SEQ ID NO: 172443 - RNA, 32 nt, Homo Sapiens
ucggcgccgggaagaggcgguggcgcugcccg

SEQ ID NO: 172444 - RNA, 32 nt, Homo Sapiens
ggagaaagggaagcucaaagaggaggggacac

SEQ ID NO: 172445 - RNA, 32 nt, Homo Sapiens
aaacacaaucccauaugacagaugggugaaag

SEQ ID NO: 172446 - RNA, 32 nt, Homo Sapiens
gguggagacucgcagcagcugcuacccacagc

SEQ ID NO: 172447 - RNA, 32 nt, Homo Sapiens
ccggcgcucccuccccgacuccuaaguccuuc

SEQ ID NO: 172448 - RNA, 32 nt, Homo Sapiens
agaugacuggauuaauuaagugcuaaguuacu

SEQ ID NO: 172449 - RNA, 32 nt, Homo Sapiens
cuggcuucaccaucaauccugauuccucucua

SEQ ID NO: 172450 - RNA, 32 nt, Homo Sapiens
gggucccgaggugccauacccccgucggggcc

SEQ ID NO: 172451 - RNA, 32 nt, Homo Sapiens
aaaauuuuaaauuuuuuuuuuauacauugcac

SEQ ID NO: 172452 - RNA, 32 nt, Homo Sapiens
ggacguaggacacguguggaccgccaggcccu

SEQ ID NO: 172453 - RNA, 32 nt, Homo Sapiens
ggugcuaagcgggcccgggucccacacggcca

SEQ ID NO: 172454 - RNA, 32 nt, Homo Sapiens
gccgggaggaggaccggaccccgagcggcugg

SEQ ID NO: 172455 - RNA, 32 nt, Homo Sapiens
gcagccuucccucucuuucugggauguuuggg

SEQ ID NO: 172456 - RNA, 32 nt, Homo Sapiens
augucccacugucccugcuccucggugugacu

SEQ ID NO: 172457 - RNA, 32 nt, Homo Sapiens
uaugggcccuggggagugucagaugggaagug

SEQ ID NO: 172458 - RNA, 32 nt, Homo Sapiens
accacaguaaugggaagaaagacaaauggauu

SEQ ID NO: 172459 - RNA, 32 nt, Homo Sapiens
aucccugucgggcuccuccgacuccucgggcu

SEQ ID NO: 172460 - RNA, 32 nt, Homo Sapiens
ucuacuaaaaauacaaaaacuagccuggcaag

SEQ ID NO: 172461 - RNA, 32 nt, Homo Sapiens
cuagagccagcuuguuuggcuugcaggagcca

SEQ ID NO: 172462 - RNA, 32 nt, Homo Sapiens
ccggaggcggccccuuugugacgugagcaacc

SEQ ID NO: 172463 - RNA, 32 nt, Homo Sapiens
gaauuuaaugaaauagaauucagugugccagg

SEQ ID NO: 172464 - RNA, 32 nt, Homo Sapiens
uaccucuaccugcauggccugaagaugcaggg

SEQ ID NO: 172465 - RNA, 32 nt, Homo Sapiens
ugaccaucaggagaaggaguuugagacugugu

SEQ ID NO: 172466 - RNA, 32 nt, Homo Sapiens
uacuguagccucagcaucuugcuaggaggcau

SEQ ID NO: 172467 - RNA, 32 nt, Homo Sapiens
caccucuucuccccugcccaccagcugcucag

SEQ ID NO: 172468 - RNA, 32 nt, Homo Sapiens
uuucugaaacaaaagaggcauuuuucaauaaa

SEQ ID NO: 172469 - RNA, 32 nt, Homo Sapiens
aaacauggaguuguucuuuggccacguauaug

SEQ ID NO: 172470 - RNA, 32 nt, Homo Sapiens
agcuugauuuuguguugauccaaauuugcaua

SEQ ID NO: 172471 - RNA, 32 nt, Homo Sapiens
cccccagagagcucagcccgcuggacuuguaa

SEQ ID NO: 172472 - RNA, 32 nt, Homo Sapiens
ugcugggccuagggaggcgcgcggcagcccuc

SEQ ID NO: 172473 - RNA, 32 nt, Homo Sapiens
aaguaaguuaauaauguauuguaaucuuucau

SEQ ID NO: 172474 - RNA, 32 nt, Homo Sapiens
gacagugggucuauucuucauuagcucaguga

SEQ ID NO: 172475 - RNA, 32 nt, Homo Sapiens
uuucucgucggcggcgcccugcaccgcgccuc

SEQ ID NO: 172476 - RNA, 32 nt, Homo Sapiens
gccaguuccagcuucaucuacccuugagucau

SEQ ID NO: 172477 - RNA, 32 nt, Homo Sapiens
cuggacacaaggaaaauaaucucuaaacuauu

SEQ ID NO: 172478 - RNA, 32 nt, Homo Sapiens
uacacaguuuuuuaaaaagagacuguauacac

SEQ ID NO: 172479 - RNA, 32 nt, Homo Sapiens
aguucuccucaauauuccccauuuguaaauga

SEQ ID NO: 172480 - RNA, 32 nt, Homo Sapiens
aaugaaaccagagcuucuagguguguggccug

SEQ ID NO: 172481 - RNA, 32 nt, Homo Sapiens
gcuuauguacaaaacuuuuuaaauuuuauauu

SEQ ID NO: 172482 - RNA, 32 nt, Homo Sapiens
cuaaaaacagagccugaguucagggacccaag

SEQ ID NO: 172483 - RNA, 32 nt, Homo Sapiens
uugcauugaagauacauugccagguuguguuu

SEQ ID NO: 172484 - RNA, 32 nt, Homo Sapiens
agaagggaugcgccaguauggagagugccugc

SEQ ID NO: 172485 - RNA, 32 nt, Homo Sapiens
auacagcugucacaagagucuagaucaguuag

SEQ ID NO: 172486 - RNA, 32 nt, Homo Sapiens
guuccucaucccugggguggaguugggaugug

SEQ ID NO: 172487 - RNA, 30 nt, Homo Sapiens
cacggcgccccccgcgcgggucucgucgac

SEQ ID NO: 172488 - RNA, 32 nt, Homo Sapiens
cuaggugugguucuuuuuguguuuauccugcu

SEQ ID NO: 172489 - RNA, 32 nt, Homo Sapiens
aggaugcauuccaggaaaguucuauaaaaaua

SEQ ID NO: 172490 - RNA, 32 nt, Homo Sapiens
auaccuagcuaauuuuuccucuuuuuaguaga

SEQ ID NO: 172491 - RNA, 32 nt, Homo Sapiens
uacuuuuuauuaugaguuaauauaguuuagca

SEQ ID NO: 172492 - RNA, 32 nt, Homo Sapiens
cucccaucucaaacuauacguaaaucagugug

SEQ ID NO: 172493 - RNA, 32 nt, Homo Sapiens
ccacagggaauuauaaucaugguaauuacuau

SEQ ID NO: 172494 - RNA, 32 nt, Homo Sapiens
uuuuaaguaaaauggacccaguaagaaaauua

SEQ ID NO: 172495 - RNA, 32 nt, Homo Sapiens
cgcgccgcccgcgccggccucccaauagccgc

SEQ ID NO: 172496 - RNA, 32 nt, Homo Sapiens
agagcagcugccgugagcgucuggccacaugg

SEQ ID NO: 172497 - RNA, 32 nt, Homo Sapiens
cucuccugcuccaggaccuccggguagaccuc

SEQ ID NO: 172498 - RNA, 32 nt, Homo Sapiens
ccaaaaucaacaacuucuuccucugcuuuuuc

SEQ ID NO: 172499 - RNA, 30 nt, Homo Sapiens
gccccgccggccaugaggcgcgcgccuucc

SEQ ID NO: 172500 - RNA, 32 nt, Homo Sapiens
acauggccuuuucucucuccccuuccacuuuu

SEQ ID NO: 172501 - RNA, 32 nt, Homo Sapiens
caacagccaacuuuucuuaauaccauauaccu

SEQ ID NO: 172502 - RNA, 32 nt, Homo Sapiens
cuugacccgggcggccccgcggcaggcaggcg

SEQ ID NO: 172503 - RNA, 32 nt, Homo Sapiens
guuuuuaaugaaauuuugcaacuuuuuaauau

SEQ ID NO: 172504 - RNA, 32 nt, Homo Sapiens
ucuggaaucugugcccaccuggggccugggga

SEQ ID NO: 172505 - RNA, 32 nt, Homo Sapiens
ccugccagggacccggcgcguccucgguuucu

SEQ ID NO: 172506 - RNA, 32 nt, Homo Sapiens
cgguuaggagaaugugccuuuuuuguaccuuu

SEQ ID NO: 172507 - RNA, 32 nt, Homo Sapiens
guuaauaauauaaacaaaccuuugaaauuagc

SEQ ID NO: 172508 - RNA, 32 nt, Homo Sapiens
auauaauaaaguuaauauauaaaccauguaug

SEQ ID NO: 172509 - RNA, 32 nt, Homo Sapiens
cucuguaucauguguauuuucuuauucuggua

SEQ ID NO: 172510 - RNA, 32 nt, Homo Sapiens
gcuauaaaugauuauuuagaugaugacugaaa

SEQ ID NO: 172511 - RNA, 32 nt, Homo Sapiens
ugucuucuccgaaagaccuuggaagauaggcc

SEQ ID NO: 172512 - RNA, 32 nt, Homo Sapiens
cuguugcccaggcuggaguacauuggugugau

SEQ ID NO: 172513 - RNA, 32 nt, Homo Sapiens
ccaaccuacacccaccucuggacguggggcua

SEQ ID NO: 172514 - RNA, 32 nt, Homo Sapiens
aauuagccgggcgugguggcgggcgccuguag

SEQ ID NO: 172515 - RNA, 32 nt, Homo Sapiens
gcccccucuuuaaaaucgaucuacacacaucc

SEQ ID NO: 172516 - RNA, 29 nt, Homo Sapiens
uccaauggauacugagggguuuggugagc

SEQ ID NO: 172517 - RNA, 32 nt, Homo Sapiens
guuguugaauagaccuaggcagccuuguaucc

SEQ ID NO: 172518 - RNA, 32 nt, Homo Sapiens
caggagcuaccccaccaaacugaagaguaaac

SEQ ID NO: 172519 - RNA, 32 nt, Homo Sapiens
uguaggucucuuaacaaugauggugggccucu

SEQ ID NO: 172520 - RNA, 32 nt, Homo Sapiens
uauggugaagucuuaacccccauccccgugaa

SEQ ID NO: 172521 - RNA, 32 nt, Homo Sapiens
cccugcaccgacgcgccggagacauccgccca

SEQ ID NO: 172522 - RNA, 31 nt, Homo Sapiens
uuuagccuugguaauuuugaauuuggccaua

SEQ ID NO: 172523 - RNA, 32 nt, Homo Sapiens
ucagcacugggcauucuuggagggauccugug

SEQ ID NO: 172524 - RNA, 32 nt, Homo Sapiens
gcaucugggaaaugacagcagaugaccaccag

SEQ ID NO: 172525 - RNA, 32 nt, Homo Sapiens
cuuucucuucugaaagauccauuuuaggucuu

SEQ ID NO: 172526 - RNA, 32 nt, Homo Sapiens
uuauaucaccaugggcagcaucagugauuaca

SEQ ID NO: 172527 - RNA, 32 nt, Homo Sapiens
cagaaaucucaaacuguacuguauuguauaaa

SEQ ID NO: 172528 - RNA, 32 nt, Homo Sapiens
ggaccagaccccuugggaccacauggcacaau

SEQ ID NO: 172529 - RNA, 32 nt, Homo Sapiens
guucgacuggacugugcugagugcgggcacug

SEQ ID NO: 172530 - RNA, 31 nt, Homo Sapiens
uggagggacccuacgaaccaggagucaggcg

SEQ ID NO: 172531 - RNA, 32 nt, Homo Sapiens
cagcuucugaaauggagacaagagagaaugac

SEQ ID NO: 172532 - RNA, 32 nt, Homo Sapiens
uagcuucugacccacagcacccgcgccucaga

SEQ ID NO: 172533 - RNA, 32 nt, Homo Sapiens
gaguccuggggccagcuggccucgauguacgu

SEQ ID NO: 172534 - RNA, 32 nt, Homo Sapiens
ggugcuuauuuuuccugcuguauaugggggug

SEQ ID NO: 172535 - RNA, 32 nt, Homo Sapiens
ggacaggggcuuugguuccaaaacuuggacaa

SEQ ID NO: 172536 - RNA, 32 nt, Homo Sapiens
uucacccugacaagggguaggcacaugccugu

SEQ ID NO: 172537 - RNA, 30 nt, Homo Sapiens
acaacggcgcccgacccugcccgcgccucg

SEQ ID NO: 172538 - RNA, 32 nt, Homo Sapiens
guuuuguuuuuggucuuaauuuuucuccccgu

SEQ ID NO: 172539 - RNA, 32 nt, Homo Sapiens
cagguccugccagcugggaagugccagcauga

SEQ ID NO: 172540 - RNA, 32 nt, Homo Sapiens
uauuuuguauugcauugaaccacuugucuaca

SEQ ID NO: 172541 - RNA, 32 nt, Homo Sapiens
aagaaacagguuuuuuguuuuuuguuuuuuaa

SEQ ID NO: 172542 - RNA, 32 nt, Homo Sapiens
cauaugugaugagcacauacagacacaccuca

SEQ ID NO: 172543 - RNA, 32 nt, Homo Sapiens
accugagauggaggagucgggagcacagcugc

SEQ ID NO: 172544 - RNA, 32 nt, Homo Sapiens
gaccuaguucccugcccugccccgggcccagg

SEQ ID NO: 172545 - RNA, 32 nt, Homo Sapiens
gaggcgguggcggcggaggcggcaccgauugc

SEQ ID NO: 172546 - RNA, 32 nt, Homo Sapiens
aaguuuaaauuaaauauuuaggcacgucagaa

SEQ ID NO: 172547 - RNA, 32 nt, Homo Sapiens
aucgcgccagagagggcgacgggggcucggga

SEQ ID NO: 172548 - RNA, 32 nt, Homo Sapiens
auauuauuauaauaaacuuauuacugcuugua

SEQ ID NO: 172549 - RNA, 32 nt, Homo Sapiens
gcccgccccucggagcucccccugccuccucc

SEQ ID NO: 172550 - RNA, 32 nt, Homo Sapiens
uguugauaauuucugcauuuaauggucugugc

SEQ ID NO: 172551 - RNA, 32 nt, Homo Sapiens
ugccuugggagucuauguuuaugugagcuuaa

SEQ ID NO: 172552 - RNA, 32 nt, Homo Sapiens
gugcugggggcuucgguguccaggcgcccagg

SEQ ID NO: 172553 - RNA, 32 nt, Homo Sapiens
gaaugcagacugcacauucggacagaugcauc

SEQ ID NO: 172554 - RNA, 32 nt, Homo Sapiens
cuguugucuuaguucaggaaauuauuuaauaa

SEQ ID NO: 172555 - RNA, 32 nt, Homo Sapiens
acaagggaagccagucuuaauaugauggaaac

SEQ ID NO: 172556 - RNA, 32 nt, Homo Sapiens
uggcagaugcugucaauaaucucaccauugau

SEQ ID NO: 172557 - RNA, 27 nt, Homo Sapiens
ccucagcuguucuucagcccucuauac

SEQ ID NO: 172558 - RNA, 32 nt, Homo Sapiens
ugggggagggucucggccuccagguucccgcc

SEQ ID NO: 172559 - RNA, 32 nt, Homo Sapiens
acaaagggaagaacuuuuuaugaacuccacag

SEQ ID NO: 172560 - RNA, 32 nt, Homo Sapiens
aguccuugaagaauggguucuguguguaaucc

SEQ ID NO: 172561 - RNA, 32 nt, Homo Sapiens
guugaugagucgucgucaccacagcaagggac

SEQ ID NO: 172562 - RNA, 32 nt, Homo Sapiens
aguccgagaucccggacaagaccgccacccuu

SEQ ID NO: 172563 - RNA, 31 nt, Homo Sapiens
cugcucccacccuccccaaacucaaauugca

SEQ ID NO: 172564 - RNA, 32 nt, Homo Sapiens
uuugauuuuuuuuuuucuugauagauacuaau

SEQ ID NO: 172565 - RNA, 32 nt, Homo Sapiens
acacuucaacauuaacacuuugaaagucaugg

SEQ ID NO: 172566 - RNA, 32 nt, Homo Sapiens
ugaggcuguuccagcccuugcuuaggauccac

SEQ ID NO: 172567 - RNA, 32 nt, Homo Sapiens
ugccgcgccccccuaggaccgcccccucccca

SEQ ID NO: 172568 - RNA, 32 nt, Homo Sapiens
caccucacucccucagccaagccuccaggccc

SEQ ID NO: 172569 - RNA, 32 nt, Homo Sapiens
guguguuugagucugugucugugagagagcca

SEQ ID NO: 172570 - RNA, 32 nt, Homo Sapiens
ccuguugccugccagcccuuucuggauuacug

SEQ ID NO: 172571 - RNA, 32 nt, Homo Sapiens
uggcggcugcaaccccggggcccgcgccgcug

SEQ ID NO: 172572 - RNA, 32 nt, Homo Sapiens
caaccgagaugccuuugacauuuugggcugaa

SEQ ID NO: 172573 - RNA, 32 nt, Homo Sapiens
aguccuuucuccgcuaguuuugaaaggaucaa

SEQ ID NO: 172574 - RNA, 32 nt, Homo Sapiens
agcgggccgggcgggggaucggggguuagggg

SEQ ID NO: 172575 - RNA, 32 nt, Homo Sapiens
aguggccccacuuuccuuuuucuuccuccucc

SEQ ID NO: 172576 - RNA, 32 nt, Homo Sapiens
ucaggagguccucauucugcgacucccaacca

SEQ ID NO: 172577 - RNA, 32 nt, Homo Sapiens
gaauugggagcacaguacugggaaaugggagu

SEQ ID NO: 172578 - RNA, 32 nt, Homo Sapiens
aaccugccgcaugcugcacacaucuaccuacg

SEQ ID NO: 172579 - RNA, 32 nt, Homo Sapiens
agcuacccaguuuacuggucgauuucggaucc

SEQ ID NO: 172580 - RNA, 32 nt, Homo Sapiens
ggaggaugccccgcccucucgggaggccacgc

SEQ ID NO: 172581 - RNA, 32 nt, Homo Sapiens
cauauggaauaaaauaaguauugaagaauuuu

SEQ ID NO: 172582 - RNA, 32 nt, Homo Sapiens
cauuuuugauaaauaaauguaucuuuaauguu

SEQ ID NO: 172583 - RNA, 32 nt, Homo Sapiens
gcuugcgcccguucuucaguuagcgaucuuuu

SEQ ID NO: 172584 - RNA, 32 nt, Homo Sapiens
ucauauuaauauauuuccauuaaaaaaucagu

SEQ ID NO: 172585 - RNA, 32 nt, Homo Sapiens
uuaucaaaauccugugguauuuauaugguccc

SEQ ID NO: 172586 - RNA, 32 nt, Homo Sapiens
aacugguaaauaggaaagagauaauaucuucu

SEQ ID NO: 172587 - RNA, 32 nt, Homo Sapiens
uggggguuuucuaugacagauaccaaaauaaa

SEQ ID NO: 172588 - RNA, 32 nt, Homo Sapiens
cuccacugcauaaucauguauaacuagcaaca

SEQ ID NO: 172589 - RNA, 32 nt, Homo Sapiens
gguagcuuuuauaugcaaauggucauuucaga

SEQ ID NO: 172590 - RNA, 32 nt, Homo Sapiens
ucaucucugaagaguugcuguuucuuacugac

SEQ ID NO: 172591 - RNA, 32 nt, Homo Sapiens
gaugucccuggccccagguccugcagcaccuu

SEQ ID NO: 172592 - RNA, 32 nt, Homo Sapiens
cggggcugcgccuguugaauguaagaggacug

SEQ ID NO: 172593 - RNA, 32 nt, Homo Sapiens
caacauuggcuugaugugaucaucaucucaua

SEQ ID NO: 172594 - RNA, 32 nt, Homo Sapiens
uaucacaggcccagcucuucaccagaagcuuu

SEQ ID NO: 172595 - RNA, 32 nt, Homo Sapiens
gcuguggccgggggcccggcuccauguguccc

SEQ ID NO: 172596 - RNA, 32 nt, Homo Sapiens
aucaguaaaguaccuuuauguuaugaggauau

SEQ ID NO: 172597 - RNA, 32 nt, Homo Sapiens
gguggugcacaccaguauucccagcuacucug

SEQ ID NO: 172598 - RNA, 32 nt, Homo Sapiens
gauggcaguccgaggucuggcuccgcgcagua

SEQ ID NO: 172599 - RNA, 32 nt, Homo Sapiens
aacauauauauacuauuaaaaagguuuacaga

SEQ ID NO: 172600 - RNA, 32 nt, Homo Sapiens
accucgaccggcucgucugugcugccaaucga

SEQ ID NO: 172601 - RNA, 32 nt, Homo Sapiens
ucucucucucucucuuuuuuuuccgcccuagc

SEQ ID NO: 172602 - RNA, 32 nt, Homo Sapiens
gcagccccgcccuuccucucccagugggcccu

SEQ ID NO: 172603 - RNA, 32 nt, Homo Sapiens
ggccagugcacuccaaugaugggacaggccua

SEQ ID NO: 172604 - RNA, 32 nt, Homo Sapiens
ccaucuccagcauguaacuggccuuacgaugg

SEQ ID NO: 172605 - RNA, 32 nt, Homo Sapiens
auucagcaacaaagaggccuaguagggagagg

SEQ ID NO: 172606 - RNA, 32 nt, Homo Sapiens
ggagacugcuccaucauucucagcacauaggg

SEQ ID NO: 172607 - RNA, 32 nt, Homo Sapiens
aacacugaguuaucuagaugaucccugagauu

SEQ ID NO: 172608 - RNA, 32 nt, Homo Sapiens
uguaaaaugaagaaaaauuaaaaaauagcucu

SEQ ID NO: 172609 - RNA, 32 nt, Homo Sapiens
agcugaggcauccaagaaauguuccauugggg

SEQ ID NO: 172610 - RNA, 30 nt, Homo Sapiens
acgaauguuggcccugccuagauguuguga

SEQ ID NO: 172611 - RNA, 32 nt, Homo Sapiens
cccccagggacaccccaucauuucacccucac

SEQ ID NO: 172612 - RNA, 32 nt, Homo Sapiens
caucugcccuccccaaacaucucccucccuac

SEQ ID NO: 172613 - RNA, 32 nt, Homo Sapiens
cccagccccugggccugguacauggcaaugcu

SEQ ID NO: 172614 - RNA, 32 nt, Homo Sapiens
gcacucugggggcagcugugccugcugcccuc

SEQ ID NO: 172615 - RNA, 32 nt, Homo Sapiens
gggagggacgcugcucagcugcugcucugcuc

SEQ ID NO: 172616 - RNA, 32 nt, Homo Sapiens
cacaauaacuucuagaaaaugugugugccgua

SEQ ID NO: 172617 - RNA, 32 nt, Homo Sapiens
ucuccgcgacgcggcccgccucggucaccgcg

SEQ ID NO: 172618 - RNA, 32 nt, Homo Sapiens
cacauucccucauaguagaaaguacuagaaaa

SEQ ID NO: 172619 - RNA, 32 nt, Homo Sapiens
ugcuuuugcuggcauucuuuguaaaaaagauc

SEQ ID NO: 172620 - RNA, 32 nt, Homo Sapiens
ugguucaauguugacacugugaggauaacaac

SEQ ID NO: 172621 - RNA, 32 nt, Homo Sapiens
ucuuggggaaauagcuucaggauacuguaguu

SEQ ID NO: 172622 - RNA, 32 nt, Homo Sapiens
cuuccuguucuucacucccuucagccacacgc

SEQ ID NO: 172623 - RNA, 32 nt, Homo Sapiens
cugacaagccccaggugagaagaccugagcuc

SEQ ID NO: 172624 - RNA, 32 nt, Homo Sapiens
uagagaggcagacaauguugaugagcuuggua

SEQ ID NO: 172625 - RNA, 32 nt, Homo Sapiens
ugaugccaguggccauggucuaaaugaagcag

SEQ ID NO: 172626 - RNA, 32 nt, Homo Sapiens
gauuaacaggacuucuguuuacaauggaaauc

SEQ ID NO: 172627 - RNA, 32 nt, Homo Sapiens
uuuauaauugauugguuacuuauuuaagaagc

SEQ ID NO: 172628 - RNA, 32 nt, Homo Sapiens
cgcgguucugcugugcccggcccgcgaggucu

SEQ ID NO: 172629 - RNA, 32 nt, Homo Sapiens
ggcggagcggagagggcggccgugguggaggc

SEQ ID NO: 172630 - RNA, 32 nt, Homo Sapiens
uauguaauuggcaaaaaugaaaaaauaaacua

SEQ ID NO: 172631 - RNA, 32 nt, Homo Sapiens
gcagcuccaagcaugggaccaaggaggccaga

SEQ ID NO: 172632 - RNA, 32 nt, Homo Sapiens
uuuccccugccgcuccugccggcagcuccaac

SEQ ID NO: 172633 - RNA, 32 nt, Homo Sapiens
uguuucauuuuccgcuuuaggaaauuauuuau

SEQ ID NO: 172634 - RNA, 32 nt, Homo Sapiens
uauuauagcauuaaauauguauacagauaucu

SEQ ID NO: 172635 - RNA, 32 nt, Homo Sapiens
uuugccuauccaccucccccaagccccuuuac

SEQ ID NO: 172636 - RNA, 32 nt, Homo Sapiens
agaucucgcugggaaacguagccuauuuuuuc

SEQ ID NO: 172637 - RNA, 31 nt, Homo Sapiens
aggauggagccccaggaaaccagguccuggc

SEQ ID NO: 172638 - RNA, 29 nt, Homo Sapiens
uaacaugcggccguccugccgagaggggc

SEQ ID NO: 172639 - RNA, 32 nt, Homo Sapiens
auuuugggggugguuggaggcgguggcggcgg

SEQ ID NO: 172640 - RNA, 32 nt, Homo Sapiens
cacauuuggaagcaguugugauugggcguggc

SEQ ID NO: 172641 - RNA, 32 nt, Homo Sapiens
ggaagcccccgcugcgcccaguccgugcggac

SEQ ID NO: 172642 - RNA, 32 nt, Homo Sapiens
auucugcucacagacaugaggaagcaggcugu

SEQ ID NO: 172643 - RNA, 32 nt, Homo Sapiens
uuccuauagucccagcacuuugggaggcugag

SEQ ID NO: 172644 - RNA, 32 nt, Homo Sapiens
ucagcaaagggaggaggugcacagcacacguu

SEQ ID NO: 172645 - RNA, 32 nt, Homo Sapiens
uugugucuguugcaugaggacauggacaauaa

SEQ ID NO: 172646 - RNA, 30 nt, Homo Sapiens
uuuucccgggccagcaugcaaaaugaagag

SEQ ID NO: 172647 - RNA, 32 nt, Homo Sapiens
aaagauuuguuuguguuuaugaaacagccauu

SEQ ID NO: 172648 - RNA, 32 nt, Homo Sapiens
cugucagaugagaacaaagcuguuaaacuguu

SEQ ID NO: 172649 - RNA, 32 nt, Homo Sapiens
auuucuucugcagcggccccagugcccuugac

SEQ ID NO: 172650 - RNA, 32 nt, Homo Sapiens
ggguggguuuuuucuuuuuuuaauauauaagu

SEQ ID NO: 172651 - RNA, 32 nt, Homo Sapiens
uaagagaagcaaaaacaaaaguaaacuccuuu

SEQ ID NO: 172652 - RNA, 32 nt, Homo Sapiens
ggaaggggcccugcacgccgggacgccaccuc

SEQ ID NO: 172653 - RNA, 32 nt, Homo Sapiens
uaugacaaaaaguuuaaaaaugcauaaaaaau

SEQ ID NO: 172654 - RNA, 32 nt, Homo Sapiens
acacucugcacccccucaccccgguccuccuc

SEQ ID NO: 172655 - RNA, 32 nt, Homo Sapiens
ugggggccaaccccuggccugcugcugugcuu

SEQ ID NO: 172656 - RNA, 32 nt, Homo Sapiens
ucacagaccccaucuggucgagccuacggcug

SEQ ID NO: 172657 - RNA, 32 nt, Homo Sapiens
aagaaccacacccagcagcaaugucagcggaa

SEQ ID NO: 172658 - RNA, 32 nt, Homo Sapiens
aacaaaagccccagcccugccgaggccugggc

SEQ ID NO: 172659 - RNA, 32 nt, Homo Sapiens
aaaccagguuuagaagacagucacagaacagc

SEQ ID NO: 172660 - RNA, 32 nt, Homo Sapiens
uucccccauuuucugcucugcuccccccugag

SEQ ID NO: 172661 - RNA, 32 nt, Homo Sapiens
uggugguguaggggugugggacagggagagac

SEQ ID NO: 172662 - RNA, 32 nt, Homo Sapiens
ucacaauuuuugguaguagguauuucgugaga

SEQ ID NO: 172663 - RNA, 32 nt, Homo Sapiens
ggccacugggagaggggccagaggagcggcua

SEQ ID NO: 172664 - RNA, 32 nt, Homo Sapiens
cacccgcccuccccacggggccucgggaccuc

SEQ ID NO: 172665 - RNA, 32 nt, Homo Sapiens
acucaaaaccugucuauaaccaaagaauucau

SEQ ID NO: 172666 - RNA, 32 nt, Homo Sapiens
uggccaucugugauccacugcacuauaccaca

SEQ ID NO: 172667 - RNA, 32 nt, Homo Sapiens
aaggugcggucucaacaagauaccaggugaau

SEQ ID NO: 172668 - RNA, 32 nt, Homo Sapiens
cuggcucgccuggcaccaccacacggccacag

SEQ ID NO: 172669 - RNA, 32 nt, Homo Sapiens
guuuuugggucuuuuuauauauguucuguguc

SEQ ID NO: 172670 - RNA, 29 nt, Homo Sapiens
augcuucaaaauaaaaggaguuaucaauu

SEQ ID NO: 172671 - RNA, 32 nt, Homo Sapiens
cucauuccuggugaagcaacugcuacuuguuc

SEQ ID NO: 172672 - RNA, 32 nt, Homo Sapiens
aaaagagaaaaaacauaacaaguaaauuuuaa

SEQ ID NO: 172673 - RNA, 32 nt, Homo Sapiens
ucuuucagguccugcguagcaaugaaacugag

SEQ ID NO: 172674 - RNA, 32 nt, Homo Sapiens
acaggguuguacaaugagaacccaaugccaag

SEQ ID NO: 172675 - RNA, 32 nt, Homo Sapiens
caccagacccaccuggccccagagccucaugc

SEQ ID NO: 172676 - RNA, 27 nt, Homo Sapiens
agagcccuuccucucagcccccauguu

SEQ ID NO: 172677 - RNA, 32 nt, Homo Sapiens
uuucucucucuuuuuucuuucuuuuuuuuuua

SEQ ID NO: 172678 - RNA, 32 nt, Homo Sapiens
uuucagcgacaugucauugaguuuuuauuugg

SEQ ID NO: 172679 - RNA, 27 nt, Homo Sapiens
agaguuuccuucuuuaccccgcugaga

SEQ ID NO: 172680 - RNA, 32 nt, Homo Sapiens
gagcugacccgcaggacugccgggccaguagg

SEQ ID NO: 172681 - RNA, 32 nt, Homo Sapiens
gcucuuggauguggucagcucuccaggagcaa

SEQ ID NO: 172682 - RNA, 30 nt, Homo Sapiens
gacuggggaggugguuuuguugaaagaaca

SEQ ID NO: 172683 - RNA, 32 nt, Homo Sapiens
gggugauuuuuggccgugggcuuugaauaaau

SEQ ID NO: 172684 - RNA, 32 nt, Homo Sapiens
aagaccacgcagguaacagaggugauuccuga

SEQ ID NO: 172685 - RNA, 32 nt, Homo Sapiens
uucuacagccaccagcagcacuucaacugacc

SEQ ID NO: 172686 - RNA, 32 nt, Homo Sapiens
cucuucccaucccacaacaggccccagugugu

SEQ ID NO: 172687 - RNA, 32 nt, Homo Sapiens
gaaguccuggggaggauuuacacacagaccgg

SEQ ID NO: 172688 - RNA, 32 nt, Homo Sapiens
acguaacagugcgcauuuaucacgcacaacac

SEQ ID NO: 172689 - RNA, 32 nt, Homo Sapiens
agcggaugaagauauggaauucaaagcucuaa

SEQ ID NO: 172690 - RNA, 32 nt, Homo Sapiens
ccccagcuggaacagcugaagucacaagccuc

SEQ ID NO: 172691 - RNA, 32 nt, Homo Sapiens
auuugcguauacauuaucauauguaaaauuug

SEQ ID NO: 172692 - RNA, 32 nt, Homo Sapiens
cuucuuauuuauguaacuggcuuucauuuaga

SEQ ID NO: 172693 - RNA, 32 nt, Homo Sapiens
ccagcggcgaagcccccuccccggggaggcgg

SEQ ID NO: 172694 - RNA, 32 nt, Homo Sapiens
gaaaugccccacucccuuacugcagucucuac

SEQ ID NO: 172695 - RNA, 32 nt, Homo Sapiens
uccaggcggcuagaggcccacugcuucccaac

SEQ ID NO: 172696 - RNA, 32 nt, Homo Sapiens
agccugguucccagccccguggcccauuccug

SEQ ID NO: 172697 - RNA, 32 nt, Homo Sapiens
aagcagucaauaaugccacuuuagacaaaaau

SEQ ID NO: 172698 - RNA, 32 nt, Homo Sapiens
uuuaacuugacaaauuaaacuuuguucuuauu

SEQ ID NO: 172699 - RNA, 32 nt, Homo Sapiens
aucaucagagaugaacuguucuuaccagaaac

SEQ ID NO: 172700 - RNA, 32 nt, Homo Sapiens
gauuguauguuucaagccuuguccuguguucc

SEQ ID NO: 172701 - RNA, 32 nt, Homo Sapiens
gcccggggccuggccccaggccugaaugcauu

SEQ ID NO: 172702 - RNA, 32 nt, Homo Sapiens
ggcugggugugguggcucaguaaauacauuuu

SEQ ID NO: 172703 - RNA, 32 nt, Homo Sapiens
auggcuuagggccucccccaccccucuggagc

SEQ ID NO: 172704 - RNA, 32 nt, Homo Sapiens
aggugcuguaaugaggcugcggucggccauca

SEQ ID NO: 172705 - RNA, 32 nt, Homo Sapiens
uagucauaccuggaaugugucaaauuauaaga

SEQ ID NO: 172706 - RNA, 32 nt, Homo Sapiens
ugcuggacaacgcuagcaccucagacagucag

SEQ ID NO: 172707 - RNA, 32 nt, Homo Sapiens
caucccuauccuguccuuucccccuucccaga

SEQ ID NO: 172708 - RNA, 32 nt, Homo Sapiens
auggauccacuuuaaaguauuacaacucaaag

SEQ ID NO: 172709 - RNA, 32 nt, Homo Sapiens
gugcugugcagguugguaggacuugcccccac

SEQ ID NO: 172710 - RNA, 32 nt, Homo Sapiens
ugggcguguuguauguccugcugccgaugccu

SEQ ID NO: 172711 - RNA, 32 nt, Homo Sapiens
cauacccaucacuuaaauucugccacagucug

SEQ ID NO: 172712 - RNA, 32 nt, Homo Sapiens
uggcugcccauccucagcuccccuccuugcuu

SEQ ID NO: 172713 - RNA, 32 nt, Homo Sapiens
cugcguuauuccagcgggaggugguggggacu

SEQ ID NO: 172714 - RNA, 32 nt, Homo Sapiens
ucuggaaaaguaccuuauugauaguggaauua

SEQ ID NO: 172715 - RNA, 32 nt, Homo Sapiens
cauucuaccagagggugucagauucuuaucag

SEQ ID NO: 172716 - RNA, 32 nt, Homo Sapiens
auuuugaagguuggaugaaaagagauggguca

SEQ ID NO: 172717 - RNA, 32 nt, Homo Sapiens
uucuccuucuauuuguagauaugauagacucc

SEQ ID NO: 172718 - RNA, 32 nt, Homo Sapiens
uugaucauugccuuuggugacaaaagggacau

SEQ ID NO: 172719 - RNA, 32 nt, Homo Sapiens
cagaggaagaucuggcgucacauggcucccag

SEQ ID NO: 172720 - RNA, 32 nt, Homo Sapiens
uuucaucaugacuguuaagaaaagguaacugg

SEQ ID NO: 172721 - RNA, 32 nt, Homo Sapiens
aggggaaaugagaggguccugcaggcagagcu

SEQ ID NO: 172722 - RNA, 31 nt, Homo Sapiens
gaggauaaaguuuguguuggauaugugguuc

SEQ ID NO: 172723 - RNA, 32 nt, Homo Sapiens
gcaagacauuuucacagcaccauucgcaacgg

SEQ ID NO: 172724 - RNA, 32 nt, Homo Sapiens
uccagacacuuauuaacaaacuuuuauuacua

SEQ ID NO: 172725 - RNA, 32 nt, Homo Sapiens
ccugccuccucugcaccuggacaacucaacuc

SEQ ID NO: 172726 - RNA, 32 nt, Homo Sapiens
aggcggagcgcggcggcucucggccgucgucc

SEQ ID NO: 172727 - RNA, 32 nt, Homo Sapiens
cauuaaaaacaucgugaaugaaauuaaaaguc

SEQ ID NO: 172728 - RNA, 32 nt, Homo Sapiens
cugaucguuuuuucacugacccggugaggcgg

SEQ ID NO: 172729 - RNA, 30 nt, Homo Sapiens
uuuaaauuaugccacuacaggauguaucau

SEQ ID NO: 172730 - RNA, 32 nt, Homo Sapiens
gccucucuguggugguguguugguaaguuaag

SEQ ID NO: 172731 - RNA, 32 nt, Homo Sapiens
auaacuuuuucugcauauagaacuaaauaauu

SEQ ID NO: 172732 - RNA, 32 nt, Homo Sapiens
gagagagcgcgugcagagacuugguggugcau

SEQ ID NO: 172733 - RNA, 32 nt, Homo Sapiens
ugcucaguuagaaaacaaaaauauucaacaga

SEQ ID NO: 172734 - RNA, 32 nt, Homo Sapiens
agaaggagaaaguugaggaccgcugacagccc

SEQ ID NO: 172735 - RNA, 32 nt, Homo Sapiens
cggaggccgggcugcgccugcugcacuuccug

SEQ ID NO: 172736 - RNA, 32 nt, Homo Sapiens
gccgagcgccgcgcgucccgagcauggcaggc

SEQ ID NO: 172737 - RNA, 32 nt, Homo Sapiens
uuuuggacacuucuaacaagccugaguuuuag

SEQ ID NO: 172738 - RNA, 32 nt, Homo Sapiens
gcuuuaucuauuucuagaauguuuucuuagcu

SEQ ID NO: 172739 - RNA, 32 nt, Homo Sapiens
cccaguuuagaacugcaggagcucccugcugc

SEQ ID NO: 172740 - RNA, 32 nt, Homo Sapiens
cgauuuaucccugcccaccccauccccacaac

SEQ ID NO: 172741 - RNA, 32 nt, Homo Sapiens
uagaauucuuauaacaugaauaacaaaaugua

SEQ ID NO: 172742 - RNA, 32 nt, Homo Sapiens
agaugcugcauaaaugauuuuugaugucaaag

SEQ ID NO: 172743 - RNA, 32 nt, Homo Sapiens
cacagucuguagccaucugauauccuaggggg

SEQ ID NO: 172744 - RNA, 32 nt, Homo Sapiens
cugcgaggaaauguggagcaguuuucucuggu

SEQ ID NO: 172745 - RNA, 32 nt, Homo Sapiens
ccuauuaagcucaucccaccucauggauuuaa

SEQ ID NO: 172746 - RNA, 32 nt, Homo Sapiens
ccuucagcccaccucaggauccgggcuugagg

SEQ ID NO: 172747 - RNA, 32 nt, Homo Sapiens
gguggguccagcacuauggugcucucuguaau

SEQ ID NO: 172748 - RNA, 32 nt, Homo Sapiens
cagagugacagguagagaagggaagagcgugu

SEQ ID NO: 172749 - RNA, 32 nt, Homo Sapiens
cuaugaagacuacuacuaaaccaauagucuca

SEQ ID NO: 172750 - RNA, 30 nt, Homo Sapiens
ucccaggcgcuccaggagccggcgcccugg

SEQ ID NO: 172751 - RNA, 32 nt, Homo Sapiens
agauguauccccucacccuccuccccucccac

SEQ ID NO: 172752 - RNA, 32 nt, Homo Sapiens
uacuucccaucccacacaaacccaauuguaaa

SEQ ID NO: 172753 - RNA, 32 nt, Homo Sapiens
ggcacccugaggcuccuggcccggggcauggu

SEQ ID NO: 172754 - RNA, 32 nt, Homo Sapiens
uuucccgagccuacuguaccgaaacaggacag

SEQ ID NO: 172755 - RNA, 32 nt, Homo Sapiens
aaaguauucuucuuuucuuaguuucagaagua

SEQ ID NO: 172756 - RNA, 31 nt, Homo Sapiens
uuccuagcuuccuugcuucagaauugaaaug

SEQ ID NO: 172757 - RNA, 32 nt, Homo Sapiens
auuaguucacuugaaagcugguuguugggaac

SEQ ID NO: 172758 - RNA, 32 nt, Homo Sapiens
ugaaaugucacacuuaaagucuucagcccagc

SEQ ID NO: 172759 - RNA, 32 nt, Homo Sapiens
agauugagauaaacuuuugaaaucccaaaaaa

SEQ ID NO: 172760 - RNA, 32 nt, Homo Sapiens
uacuagaccuuucaggaccuugguucuuccau

SEQ ID NO: 172761 - RNA, 32 nt, Homo Sapiens
gaguuagguuauucaaaaauuaguaugggaca

SEQ ID NO: 172762 - RNA, 32 nt, Homo Sapiens
ugagggguucggggguucugggcaggcacaau

SEQ ID NO: 172763 - RNA, 32 nt, Homo Sapiens
guacuagagugccgcgcguagggcuccagguc

SEQ ID NO: 172764 - RNA, 32 nt, Homo Sapiens
ccagggagcaccagcugcagcugauccaauac

SEQ ID NO: 172765 - RNA, 32 nt, Homo Sapiens
ccuacguaagaauggcugagcuaacaauacac

SEQ ID NO: 172766 - RNA, 32 nt, Homo Sapiens
cccuagccaggagagcaaucuggcucaaaaga

SEQ ID NO: 172767 - RNA, 32 nt, Homo Sapiens
ucacguaugucgcagcagcauuucaccccuga

SEQ ID NO: 172768 - RNA, 32 nt, Homo Sapiens
ggcagcacacuuagauauuccuggacauccag

SEQ ID NO: 172769 - RNA, 32 nt, Homo Sapiens
ggcuggcuccuggccucgacggagcuucucag

SEQ ID NO: 172770 - RNA, 32 nt, Homo Sapiens
caucaaggauauacaauguagauucuuuuauu

SEQ ID NO: 172771 - RNA, 32 nt, Homo Sapiens
ggagggcuggcccauaggugcugcuggcuccc

SEQ ID NO: 172772 - RNA, 32 nt, Homo Sapiens
cacgugucugccuccccuggggugcccuccuu

SEQ ID NO: 172773 - RNA, 32 nt, Homo Sapiens
gcccagcuaauuuuuguauuuuuacaaaaaau

SEQ ID NO: 172774 - RNA, 32 nt, Homo Sapiens
accucugccuccccgguucaagugauucuccu

SEQ ID NO: 172775 - RNA, 32 nt, Homo Sapiens
aauuauuguuuuucuuuuuuuuuuuuuaauaa

SEQ ID NO: 172776 - RNA, 32 nt, Homo Sapiens
gcuucucaugguuguagauauuacuucaguuc

SEQ ID NO: 172777 - RNA, 32 nt, Homo Sapiens
ccuucuccugccccagccccagccccacccac

SEQ ID NO: 172778 - RNA, 31 nt, Homo Sapiens
gacaugaaauaaauuuaauaagucuagauca

SEQ ID NO: 172779 - RNA, 32 nt, Homo Sapiens
gccagucuguuguuguucuuaaugggcuccuc

SEQ ID NO: 172780 - RNA, 32 nt, Homo Sapiens
cugcauuccugcccuuuccacucauucuguaa

SEQ ID NO: 172781 - RNA, 32 nt, Homo Sapiens
ccuggcauccucggggccgcaggaaggaagag

SEQ ID NO: 172782 - RNA, 32 nt, Homo Sapiens
ccauguuuauuacaguauaauuaacauguuaa

SEQ ID NO: 172783 - RNA, 32 nt, Homo Sapiens
uagagaauuucuguuauaccaagcauaaagua

SEQ ID NO: 172784 - RNA, 32 nt, Homo Sapiens
caccgugugcuggaaugguuaucacaagaagg

SEQ ID NO: 172785 - RNA, 32 nt, Homo Sapiens
gcaugaauaugcggcagagaaaacagcaauag

SEQ ID NO: 172786 - RNA, 32 nt, Homo Sapiens
ccauggcccggcaccugcuccucccccuugug

SEQ ID NO: 172787 - RNA, 32 nt, Homo Sapiens
uauugaauuggacacuuugaaauggugaauuu

SEQ ID NO: 172788 - RNA, 32 nt, Homo Sapiens
aauuucugcaccacugguuuuguagcuguuuc

SEQ ID NO: 172789 - RNA, 32 nt, Homo Sapiens
cucaguuucuaaaauuaaaaauaauuuauacu

SEQ ID NO: 172790 - RNA, 32 nt, Homo Sapiens
cuccccaccagcucagccuguggaggccuccc

SEQ ID NO: 172791 - RNA, 32 nt, Homo Sapiens
uccgcgccggugccuggucuucgucgucaaca

SEQ ID NO: 172792 - RNA, 32 nt, Homo Sapiens
cccgggggcgagggcugcccccuccuccccuc

SEQ ID NO: 172793 - RNA, 32 nt, Homo Sapiens
ucgggaccaauauauaguggguacaucaaguc

SEQ ID NO: 172794 - RNA, 32 nt, Homo Sapiens
ggagagggggcgcugagcuguuggguaugaag

SEQ ID NO: 172795 - RNA, 32 nt, Homo Sapiens
cuauacucuuguuuccucugcuucuuccugag

SEQ ID NO: 172796 - RNA, 32 nt, Homo Sapiens
uugcuccacaggagaagcuggugccucuaggc

SEQ ID NO: 172797 - RNA, 32 nt, Homo Sapiens
cggucucgaccucuccucucagcccuucugca

SEQ ID NO: 172798 - RNA, 32 nt, Homo Sapiens
ucguacauucuuauuaaauauuucauacacuu

SEQ ID NO: 172799 - RNA, 32 nt, Homo Sapiens
auucuuacagcuuuuuuauuaguuagucuugg

SEQ ID NO: 172800 - RNA, 32 nt, Homo Sapiens
cugagguggggguggggcugacucugcaaaau

SEQ ID NO: 172801 - RNA, 32 nt, Homo Sapiens
ggaucuuucaugucucuguacauccugagaag

SEQ ID NO: 172802 - RNA, 32 nt, Homo Sapiens
cccugcacuccagcagcaucuuccagccuugg

SEQ ID NO: 172803 - RNA, 32 nt, Homo Sapiens
accuauuuauauauuucuuuauagaaaaaagu

SEQ ID NO: 172804 - RNA, 32 nt, Homo Sapiens
auucuuucuggcuucacagugaaacaaguuua

SEQ ID NO: 172805 - RNA, 32 nt, Homo Sapiens
ggaauguguuuccauuuguuuuugucaucuau

SEQ ID NO: 172806 - RNA, 32 nt, Homo Sapiens
augcuaaaacgaauauaguaguuguuccuuag

SEQ ID NO: 172807 - RNA, 32 nt, Homo Sapiens
agucugaauauuuguaguugauucuuaacugu

SEQ ID NO: 172808 - RNA, 32 nt, Homo Sapiens
cccuggacgcgcgggcgcgcgcggaagguagc

SEQ ID NO: 172809 - RNA, 32 nt, Homo Sapiens
ucccgcuggcauccagcucccugcuccauggc

SEQ ID NO: 172810 - RNA, 32 nt, Homo Sapiens
ugcggagugcgcugcgccgcccagcccugucg

SEQ ID NO: 172811 - RNA, 32 nt, Homo Sapiens
agagcgggcaaagagggaaggagacugggacc

SEQ ID NO: 172812 - RNA, 32 nt, Homo Sapiens
ccgcucccuagagcaggagaucuugaguggga

SEQ ID NO: 172813 - RNA, 32 nt, Homo Sapiens
ggcaacuugggguacacaggauacugggggug

SEQ ID NO: 172814 - RNA, 32 nt, Homo Sapiens
cauaguaagggucagaggcaucugcaggaagg

SEQ ID NO: 172815 - RNA, 32 nt, Homo Sapiens
cugcugugcugggacagaaugggaugccagga

SEQ ID NO: 172816 - RNA, 32 nt, Homo Sapiens
cucagaaaguacaaaguuuaaaaaauagaaua

SEQ ID NO: 172817 - RNA, 32 nt, Homo Sapiens
gaacuucccggccaucgccauccaccggggca

SEQ ID NO: 172818 - RNA, 32 nt, Homo Sapiens
aguccucacacacuaacagaucuccaccauug

SEQ ID NO: 172819 - RNA, 32 nt, Homo Sapiens
aaacuuuggcuuucauauucucuuugugagga

SEQ ID NO: 172820 - RNA, 32 nt, Homo Sapiens
aggcccuggaggaggguggggcuggccgggga

SEQ ID NO: 172821 - RNA, 32 nt, Homo Sapiens
aaaugcauauaauucauagauacaauacuuua

SEQ ID NO: 172822 - RNA, 32 nt, Homo Sapiens
aaaggaaugcuguucuuaaagcauuauuuaca

SEQ ID NO: 172823 - RNA, 32 nt, Homo Sapiens
cgcgcccggacgcggcggccaggcuugcgcgu

SEQ ID NO: 172824 - RNA, 32 nt, Homo Sapiens
gcggcgcagcccagcccagcccaguccgagcg

SEQ ID NO: 172825 - RNA, 32 nt, Homo Sapiens
agagaccgugcagguccugcagaugaagguaa

SEQ ID NO: 172826 - RNA, 32 nt, Homo Sapiens
ccuccuuucuuugcuguuugcaaucacacgug

SEQ ID NO: 172827 - RNA, 32 nt, Homo Sapiens
gcugcgcccuccccagacccgggcaccgcgga

SEQ ID NO: 172828 - RNA, 32 nt, Homo Sapiens
aucucaggccccaccuccugcuuauugauuca

SEQ ID NO: 172829 - RNA, 32 nt, Homo Sapiens
ggcgcccccuccccgggaccggccgucaccac

SEQ ID NO: 172830 - RNA, 32 nt, Homo Sapiens
ccauggaguagauuguccaaaauacacaucug

SEQ ID NO: 172831 - RNA, 32 nt, Homo Sapiens
cuguuucagcgugauuccaaacacgaaugggg

SEQ ID NO: 172832 - RNA, 32 nt, Homo Sapiens
cccuucuccccuccccgccuggccagggcagg

SEQ ID NO: 172833 - RNA, 32 nt, Homo Sapiens
agcucagaacagaggcucagcaguggcccggc

SEQ ID NO: 172834 - RNA, 32 nt, Homo Sapiens
ggcacgagggaucggcggagcucccaccuccg

SEQ ID NO: 172835 - RNA, 32 nt, Homo Sapiens
uugaagaugcaccucucggagccucgguuggc

SEQ ID NO: 172836 - RNA, 32 nt, Homo Sapiens
ucuucucucccaggcucuggcucaugcacaug

SEQ ID NO: 172837 - RNA, 30 nt, Homo Sapiens
gagagaccaggagaccaccaucuuagauac

SEQ ID NO: 172838 - RNA, 32 nt, Homo Sapiens
ugccccccuccuccccgcgccccagucaauuc

SEQ ID NO: 172839 - RNA, 32 nt, Homo Sapiens
uuucccacugguguguagccugcuacaaggag

SEQ ID NO: 172840 - RNA, 32 nt, Homo Sapiens
ggggguggggacggggguaacauuugccuauc

SEQ ID NO: 172841 - RNA, 32 nt, Homo Sapiens
cucacccuccaaguccuaaccccuccauccuc

SEQ ID NO: 172842 - RNA, 30 nt, Homo Sapiens
uuugguugcagcggcggcggaggccagaug

SEQ ID NO: 172843 - RNA, 32 nt, Homo Sapiens
ccucaaauaguuuuagaagagaaaaaaaaaua

SEQ ID NO: 172844 - RNA, 32 nt, Homo Sapiens
aggucuugucuucaaccuccccgucccguugu

SEQ ID NO: 172845 - RNA, 32 nt, Homo Sapiens
aagcuaacuagcucuuuuuuauggguccaugc

SEQ ID NO: 172846 - RNA, 32 nt, Homo Sapiens
uagcugauggagaggggcuacgcagcugcccc

SEQ ID NO: 172847 - RNA, 32 nt, Homo Sapiens
agauauuuacuuuuugucugauaucaguacau

SEQ ID NO: 172848 - RNA, 32 nt, Homo Sapiens
aggccaccuggccccaccugcuccucagggca

SEQ ID NO: 172849 - RNA, 32 nt, Homo Sapiens
uugagagauccagaccccgguacagucgaggg

SEQ ID NO: 172850 - RNA, 32 nt, Homo Sapiens
aaggaaccauucuccauccuuccuuaucaugc

SEQ ID NO: 172851 - RNA, 32 nt, Homo Sapiens
aguuagacggagaggccugaagacccggcugc

SEQ ID NO: 172852 - RNA, 32 nt, Homo Sapiens
gacgcuuuuauagugacaugcauguuuaaugu

SEQ ID NO: 172853 - RNA, 32 nt, Homo Sapiens
uucucccauuuucuuugauuacuguggacaaa

SEQ ID NO: 172854 - RNA, 32 nt, Homo Sapiens
caaacaacacggccgggaggcggccgcugccu

SEQ ID NO: 172855 - RNA, 32 nt, Homo Sapiens
augguaguuuaagucugucaguuucuuaauug

SEQ ID NO: 172856 - RNA, 32 nt, Homo Sapiens
uggucgggcuccugaccagcaaccaggcccug

SEQ ID NO: 172857 - RNA, 32 nt, Homo Sapiens
aaaauacaaaaauuagccagguguaguggugu

SEQ ID NO: 172858 - RNA, 32 nt, Homo Sapiens
ccuuuuccccucuggauuuuaauaaauauuua

SEQ ID NO: 172859 - RNA, 32 nt, Homo Sapiens
acauaucaaggcagaagguacugcacgagaga

SEQ ID NO: 172860 - RNA, 32 nt, Homo Sapiens
ccuuucccaagcaucuguggcauggacauguc

SEQ ID NO: 172861 - RNA, 32 nt, Homo Sapiens
acauacgugucuguguguauauauauuuuuuc

SEQ ID NO: 172862 - RNA, 32 nt, Homo Sapiens
caaaacaugagcgaauucacacaggggaaaaa

SEQ ID NO: 172863 - RNA, 32 nt, Homo Sapiens
ggccccagugcacaugcagaucccaccguguc

SEQ ID NO: 172864 - RNA, 32 nt, Homo Sapiens
uaguuaaaucuuccuuucucugucuuucucuu

SEQ ID NO: 172865 - RNA, 32 nt, Homo Sapiens
guggaugauacauuuuaaccuucuagaaacuc

SEQ ID NO: 172866 - RNA, 32 nt, Homo Sapiens
guucucuuaguagauuaagagagaguaauauu

SEQ ID NO: 172867 - RNA, 32 nt, Homo Sapiens
cuuugaguucccugcaucugccaccguaguuu

SEQ ID NO: 172868 - RNA, 32 nt, Homo Sapiens
ucuaguuucuuuucuuuuucuuuuuucuuuuu

SEQ ID NO: 172869 - RNA, 32 nt, Homo Sapiens
gaugauuuaaaaacauuugacuuuuuaauaau

SEQ ID NO: 172870 - RNA, 32 nt, Homo Sapiens
ggaaacugaaggaaacaaacuuuugaaauuga

SEQ ID NO: 172871 - RNA, 32 nt, Homo Sapiens
agcacaccacuguccccucauccaccucggcc

SEQ ID NO: 172872 - RNA, 32 nt, Homo Sapiens
ugguccuauaauuuauacugaaaaaaaaaaaa

SEQ ID NO: 172873 - RNA, 32 nt, Homo Sapiens
acauugguucugaucugagaccaucaggugga

SEQ ID NO: 172874 - RNA, 32 nt, Homo Sapiens
ugcuaccuuuugggauauuuauuuuaaauuuu

SEQ ID NO: 172875 - RNA, 32 nt, Homo Sapiens
gaggccuggggguaggagcagagccugcgcau

SEQ ID NO: 172876 - RNA, 32 nt, Homo Sapiens
gcccgcucaggcugaccacuuuauuucuuuuu

SEQ ID NO: 172877 - RNA, 32 nt, Homo Sapiens
gaaugucccuuuggacgccgcugcugggggcu

SEQ ID NO: 172878 - RNA, 32 nt, Homo Sapiens
guuuguacggaaugauaaacuuuuauuuauuc

SEQ ID NO: 172879 - RNA, 32 nt, Homo Sapiens
cuagauagaguacaggggauccacaucccugu

SEQ ID NO: 172880 - RNA, 32 nt, Homo Sapiens
cauggggugccccagacgcgggccuccaagaa

SEQ ID NO: 172881 - RNA, 32 nt, Homo Sapiens
acuguugacaucccugucuuucugccuuuuau

SEQ ID NO: 172882 - RNA, 32 nt, Homo Sapiens
uauauaaaaauauauaagagggacuuuauggg

SEQ ID NO: 172883 - RNA, 32 nt, Homo Sapiens
gaacccaggagguggagguuguggugagccaa

SEQ ID NO: 172884 - RNA, 32 nt, Homo Sapiens
gaaaagaaucagguguuaauauaauacuaagg

SEQ ID NO: 172885 - RNA, 32 nt, Homo Sapiens
gaacccgggagguggagguugcggugagcuga

SEQ ID NO: 172886 - RNA, 32 nt, Homo Sapiens
uugccuaaaaauuuuuauuguguuaucuugga

SEQ ID NO: 172887 - RNA, 32 nt, Homo Sapiens
gaaccugggagguggagguugcggugagccga

SEQ ID NO: 172888 - RNA, 32 nt, Homo Sapiens
uacuggaggaaagggaauuaaaaaagaacucu

SEQ ID NO: 172889 - RNA, 32 nt, Homo Sapiens
uuauuugaacagaguuauguccuaacuauuuu

SEQ ID NO: 172890 - RNA, 32 nt, Homo Sapiens
cuccugcccucaccccaccgcccucuuaaguu

SEQ ID NO: 172891 - RNA, 32 nt, Homo Sapiens
ccaugcgccuggaaggccccagacaucaaggc

SEQ ID NO: 172892 - RNA, 32 nt, Homo Sapiens
ugcugcacugggccucagccagcccuccggau

SEQ ID NO: 172893 - RNA, 32 nt, Homo Sapiens
gagccccaggacugagauauuuuuacuauacc

SEQ ID NO: 172894 - RNA, 32 nt, Homo Sapiens
ccaucagaaccuacuauuauuaugacauaaau

SEQ ID NO: 172895 - RNA, 32 nt, Homo Sapiens
gucucuaaauaaaauuuuuaaauguuaaaaaa

SEQ ID NO: 172896 - RNA, 32 nt, Homo Sapiens
cccuccucccguccucccucgccccgcaugua

SEQ ID NO: 172897 - RNA, 32 nt, Homo Sapiens
uuuuucuugcugauuuuuuuuaacuucccuau

SEQ ID NO: 172898 - RNA, 32 nt, Homo Sapiens
guaggguugcucuccagcaucaauuuucuuau

SEQ ID NO: 172899 - RNA, 32 nt, Homo Sapiens
gagacaggcagacacagccuaaaacagaccug

SEQ ID NO: 172900 - RNA, 32 nt, Homo Sapiens
uuuccucuauaaauugggcaugugcugacugu

SEQ ID NO: 172901 - RNA, 32 nt, Homo Sapiens
acauuugucuguuuuucuuucauguaccauua

SEQ ID NO: 172902 - RNA, 32 nt, Homo Sapiens
aagguuuuuguuaauguaauauuuuaauagca

SEQ ID NO: 172903 - RNA, 29 nt, Homo Sapiens
cacgaucugguccgggaggucugggaucu

SEQ ID NO: 172904 - RNA, 32 nt, Homo Sapiens
uaguaaccuuuuuuuucuuuacuucuaaaaca

SEQ ID NO: 172905 - RNA, 32 nt, Homo Sapiens
gugcauauuauaaaaauauauuuuaugagcuc

SEQ ID NO: 172906 - RNA, 32 nt, Homo Sapiens
gagguguagacaccccgagccccgugggcacu

SEQ ID NO: 172907 - RNA, 32 nt, Homo Sapiens
uuauacacuguaagcuuuguucugggaguugc

SEQ ID NO: 172908 - RNA, 32 nt, Homo Sapiens
auagcaagauaaacaaaaugauuuguugggua

SEQ ID NO: 172909 - RNA, 32 nt, Homo Sapiens
gugagauggauuaacaugagaagugcuucucu

SEQ ID NO: 172910 - RNA, 32 nt, Homo Sapiens
aaaacagccucaccccacucuccucucucuuc

SEQ ID NO: 172911 - RNA, 32 nt, Homo Sapiens
gcugugggcuaccgggccgccggcgccucagc

SEQ ID NO: 172912 - RNA, 32 nt, Homo Sapiens
augcagucacuaagagaauguacacugugguu

SEQ ID NO: 172913 - RNA, 32 nt, Homo Sapiens
cauugcaaggaccugcggcaguccuguuggaa

SEQ ID NO: 172914 - RNA, 31 nt, Homo Sapiens
cuucaggcauaaagaaaacgauacuaauggc

SEQ ID NO: 172915 - RNA, 32 nt, Homo Sapiens
aauaacaauuauuuugucuaaauaaugcuaag

SEQ ID NO: 172916 - RNA, 32 nt, Homo Sapiens
uguaaccuuggauguguugcaacaucugcaag

SEQ ID NO: 172917 - RNA, 32 nt, Homo Sapiens
ccgcagggcugcuggcguugcugcuguugaga

SEQ ID NO: 172918 - RNA, 32 nt, Homo Sapiens
gggccaacuauuucuagcccuuuaguucuuuu

SEQ ID NO: 172919 - RNA, 32 nt, Homo Sapiens
aggccaagaagcugcuguggcugaugcggauu

SEQ ID NO: 172920 - RNA, 32 nt, Homo Sapiens
cagggaggcuggggcgggaggugccgggggug

SEQ ID NO: 172921 - RNA, 32 nt, Homo Sapiens
guggaaugcguggucaacugucagcucucagg

SEQ ID NO: 172922 - RNA, 32 nt, Homo Sapiens
cacucugugugacucuacacacacuucaggug

SEQ ID NO: 172923 - RNA, 32 nt, Homo Sapiens
cugccagguggggucaugucacuccaucuugc

SEQ ID NO: 172924 - RNA, 32 nt, Homo Sapiens
uccacagguuugcauccuggacuuuaucuaaa

SEQ ID NO: 172925 - RNA, 32 nt, Homo Sapiens
agugugugcugggggguucgggugcugcagac

SEQ ID NO: 172926 - RNA, 32 nt, Homo Sapiens
uaccucacagaaauguuaaacugagacaauaa

SEQ ID NO: 172927 - RNA, 32 nt, Homo Sapiens
auuauuagauguuagauaaaaaacaguuaauu

SEQ ID NO: 172928 - RNA, 32 nt, Homo Sapiens
gugaaacugggcacuugggguccagaggcagg

SEQ ID NO: 172929 - RNA, 32 nt, Homo Sapiens
caaggccugcccguccgccagugaguccuugg

SEQ ID NO: 172930 - RNA, 32 nt, Homo Sapiens
cccguccgcccggcuuccccgcucccggguac

SEQ ID NO: 172931 - RNA, 32 nt, Homo Sapiens
ucgggggaauacucaaggaugagcagaugggg

SEQ ID NO: 172932 - RNA, 32 nt, Homo Sapiens
aaacaauggcuauauuugcuugucaucagggg

SEQ ID NO: 172933 - RNA, 32 nt, Homo Sapiens
uagguucaucccuguuugaaaauggcagaauu

SEQ ID NO: 172934 - RNA, 32 nt, Homo Sapiens
uuaucuuuacucccucuuucucauggcaaccc

SEQ ID NO: 172935 - RNA, 32 nt, Homo Sapiens
aacaggaugaggaggaagaauuggcaggcuaa

SEQ ID NO: 172936 - RNA, 32 nt, Homo Sapiens
cagcgcccgcgcccgcgccccccgauccgcuu

SEQ ID NO: 172937 - RNA, 32 nt, Homo Sapiens
cccggccgcucccacggccuccccuccgcccu

SEQ ID NO: 172938 - RNA, 32 nt, Homo Sapiens
accuauugacauuguucaaaauggaucaugug

SEQ ID NO: 172939 - RNA, 32 nt, Homo Sapiens
uuccuccuggggauguuaacucaucugcacuu

SEQ ID NO: 172940 - RNA, 32 nt, Homo Sapiens
acugcaucugacaaagaucuaauccagaaucu

SEQ ID NO: 172941 - RNA, 32 nt, Homo Sapiens
uccccuuccuuccucacucucuccagcuggau

SEQ ID NO: 172942 - RNA, 32 nt, Homo Sapiens
uuugugauaaaacugcuuagauuuuguugaug

SEQ ID NO: 172943 - RNA, 32 nt, Homo Sapiens
uggaggcucaggcugucugcaagaaaacaguu

SEQ ID NO: 172944 - RNA, 32 nt, Homo Sapiens
aaugcauauaaaacuaucagaaguuaguaaau

SEQ ID NO: 172945 - RNA, 32 nt, Homo Sapiens
auugucuugggguuuacggaaauuaacuauua

SEQ ID NO: 172946 - RNA, 32 nt, Homo Sapiens
uagaacccaaggaaugccuuccugucauauuu

SEQ ID NO: 172947 - RNA, 32 nt, Homo Sapiens
ugugagauacaaauacaucuauuguguauguu

SEQ ID NO: 172948 - RNA, 32 nt, Homo Sapiens
auucuucccugacuucucaaaaagcacugcac

SEQ ID NO: 172949 - RNA, 32 nt, Homo Sapiens
acauuugggagaguaccuggggacauaccaag

SEQ ID NO: 172950 - RNA, 32 nt, Homo Sapiens
auuucccaggacauacaagauggggagugaga

SEQ ID NO: 172951 - RNA, 32 nt, Homo Sapiens
gaagucuuuuucuuuguaagcauuguaaaugc

SEQ ID NO: 172952 - RNA, 32 nt, Homo Sapiens
uuuauagcauuugguaauucugcuauaacaca

SEQ ID NO: 172953 - RNA, 32 nt, Homo Sapiens
aguuaacuggccacugcugaucugcgccuaga

SEQ ID NO: 172954 - RNA, 32 nt, Homo Sapiens
auaaccaguuuagagaagaacauaaaugaccu

SEQ ID NO: 172955 - RNA, 32 nt, Homo Sapiens
ucccgccuucacagcccucgccaggggucugc

SEQ ID NO: 172956 - RNA, 32 nt, Homo Sapiens
acagaccaugccccggcccuacacguuccagg

SEQ ID NO: 172957 - RNA, 32 nt, Homo Sapiens
ggcaaggcggcacuccuggcgcugcgggcguc

SEQ ID NO: 172958 - RNA, 32 nt, Homo Sapiens
gagugagcgcaccgcgcgggaggagccgccgc

SEQ ID NO: 172959 - RNA, 32 nt, Homo Sapiens
acggaacaggaagagggugaggcuguccaggg

SEQ ID NO: 172960 - RNA, 32 nt, Homo Sapiens
cucggccucuccccggcacguucucagcugcu

SEQ ID NO: 172961 - RNA, 32 nt, Homo Sapiens
ccauuacuauacauugaauuaugcuguguaaa

SEQ ID NO: 172962 - RNA, 32 nt, Homo Sapiens
gggccagguguugggagcucccacgugggaca

SEQ ID NO: 172963 - RNA, 32 nt, Homo Sapiens
gggccugcgggaagcgauggagcccgggaaga

SEQ ID NO: 172964 - RNA, 32 nt, Homo Sapiens
cacaacaaauguuaaaugaauccuguuaaaua

SEQ ID NO: 172965 - RNA, 32 nt, Homo Sapiens
guuaaaauaaaacuuuugugguucuucugaau

SEQ ID NO: 172966 - RNA, 32 nt, Homo Sapiens
gaaauaccaauuaaucaguuaauuucugaaga

SEQ ID NO: 172967 - RNA, 32 nt, Homo Sapiens
ugcugguucaggagcacacuuugaauuucaag

SEQ ID NO: 172968 - RNA, 32 nt, Homo Sapiens
ggccggcggcaguggugguggcggcggcgcaa

SEQ ID NO: 172969 - RNA, 32 nt, Homo Sapiens
cuccgaaaaugaaacugcucagacagaaugac

SEQ ID NO: 172970 - RNA, 32 nt, Homo Sapiens
caaaaagauuguguguauguauguuuaauaua

SEQ ID NO: 172971 - RNA, 32 nt, Homo Sapiens
ggccgcgucgaccuggacuucucuggaccaca

SEQ ID NO: 172972 - RNA, 32 nt, Homo Sapiens
gacaccuggcgcaaggacucgguggucaugcu

SEQ ID NO: 172973 - RNA, 32 nt, Homo Sapiens
uucuauucucugucugaacucuauucaaaagu

SEQ ID NO: 172974 - RNA, 32 nt, Homo Sapiens
aaaugcauguuauuaaaaccagaugaguaaaa

SEQ ID NO: 172975 - RNA, 32 nt, Homo Sapiens
aguuaaccuaggaugcggaaugccuccuuuac

SEQ ID NO: 172976 - RNA, 32 nt, Homo Sapiens
uugguccucugaugaaugacuguccccagcag

SEQ ID NO: 172977 - RNA, 32 nt, Homo Sapiens
guguuuccuaaaacaaagacuccaucauaagc

SEQ ID NO: 172978 - RNA, 32 nt, Homo Sapiens
cucaaaagccccacaccacccuccugccaacc

SEQ ID NO: 172979 - RNA, 32 nt, Homo Sapiens
cucacuuaugaaagauggauuuccaagguuaa

SEQ ID NO: 172980 - RNA, 32 nt, Homo Sapiens
uggguauuugguuuuaugaagaauaaugcuga

SEQ ID NO: 172981 - RNA, 32 nt, Homo Sapiens
ugcuccggagcuggggagcccgggcgccgucc

SEQ ID NO: 172982 - RNA, 32 nt, Homo Sapiens
gcuucuuagugccgccauucuggaacgcaguc

SEQ ID NO: 172983 - RNA, 32 nt, Homo Sapiens
gauuccaaaaauacaaacacuaguuguuccag

SEQ ID NO: 172984 - RNA, 32 nt, Homo Sapiens
agugaaaagcagugucuuugaucugcaacagc

SEQ ID NO: 172985 - RNA, 32 nt, Homo Sapiens
guauuucacagaaaacaaaaccucccaauaaa

SEQ ID NO: 172986 - RNA, 32 nt, Homo Sapiens
acuccagccugggugacagagcaagaaaauaa

SEQ ID NO: 172987 - RNA, 32 nt, Homo Sapiens
cagugcccaucccagcccguuucugcccacca

SEQ ID NO: 172988 - RNA, 31 nt, Homo Sapiens
agaaagacaaagaaaauaguguauuaucuua

SEQ ID NO: 172989 - RNA, 32 nt, Homo Sapiens
ggggaugucugcuuguuuuugcaaaagaagau

SEQ ID NO: 172990 - RNA, 32 nt, Homo Sapiens
ccggugcagccucggcggcggguuucgccgcc

SEQ ID NO: 172991 - RNA, 32 nt, Homo Sapiens
gccggcuggcgguggcuguugcuagaggggca

SEQ ID NO: 172992 - RNA, 32 nt, Homo Sapiens
uauuguuguuauugcuguuauuauuacugcuu

SEQ ID NO: 172993 - RNA, 32 nt, Homo Sapiens
cccuggggacuguuggcugcucucccaagugg

SEQ ID NO: 172994 - RNA, 32 nt, Homo Sapiens
cccucacauuugcaugaaaaccuuggaauacu

SEQ ID NO: 172995 - RNA, 32 nt, Homo Sapiens
cagaggacacugggcagguggugggggguagg

SEQ ID NO: 172996 - RNA, 32 nt, Homo Sapiens
uccauuuuacuucaaggcagcaagaauugcua

SEQ ID NO: 172997 - RNA, 32 nt, Homo Sapiens
cagcggcggcgccagcaguuccaguccguugc

SEQ ID NO: 172998 - RNA, 32 nt, Homo Sapiens
ccaucucucuauaaagagaugaggcuggaccu

SEQ ID NO: 172999 - RNA, 32 nt, Homo Sapiens
uuaacugggccuuuauacuuaacuaaauaaaa

SEQ ID NO: 173000 - RNA, 32 nt, Homo Sapiens
uugguccuugauuuuucccuuagcuuguugcc

SEQ ID NO: 173001 - RNA, 32 nt, Homo Sapiens
gucaucauaucauuacauaauuguguuguaac

SEQ ID NO: 173002 - RNA, 32 nt, Homo Sapiens
uucauuuuuccacacuucaaagacccauguuc

SEQ ID NO: 173003 - RNA, 32 nt, Homo Sapiens
ccagaggccguucgcccgccucaggccggucg

SEQ ID NO: 173004 - RNA, 32 nt, Homo Sapiens
gggagccgagugaccccucccggcgcccgccc

SEQ ID NO: 173005 - RNA, 32 nt, Homo Sapiens
gggcagggggguggcuggggcugggccaucac

SEQ ID NO: 173006 - RNA, 32 nt, Homo Sapiens
cuggaaauaggggcauugugacuuuauagccu

SEQ ID NO: 173007 - RNA, 32 nt, Homo Sapiens
uuuuauuugaccaagaaaaaacugucuagaau

SEQ ID NO: 173008 - RNA, 32 nt, Homo Sapiens
cgcacccugcagcggccccuccccuccccucc

SEQ ID NO: 173009 - RNA, 32 nt, Homo Sapiens
uuaggguaaacaggccagguguccuuugaaga

SEQ ID NO: 173010 - RNA, 32 nt, Homo Sapiens
gaauguguaucucaacuugaugaugaacagca

SEQ ID NO: 173011 - RNA, 32 nt, Homo Sapiens
aaugucccuuguccuuguucucauuaauucag

SEQ ID NO: 173012 - RNA, 32 nt, Homo Sapiens
uucaguugcuccccgaucccagauggggaaaa

SEQ ID NO: 173013 - RNA, 32 nt, Homo Sapiens
acuuuacuaaauguaaugucuaugagauaugu

SEQ ID NO: 173014 - RNA, 32 nt, Homo Sapiens
agaaggcuccugggguauuagacccagcuggg

SEQ ID NO: 173015 - RNA, 32 nt, Homo Sapiens
aauaaaaacgagccacaucguguuuuaagcuu

SEQ ID NO: 173016 - RNA, 32 nt, Homo Sapiens
caagcgacagaugccucauuuugugaaaacuu

SEQ ID NO: 173017 - RNA, 31 nt, Homo Sapiens
accacuccugcccuccugccccgugcuggau

SEQ ID NO: 173018 - RNA, 32 nt, Homo Sapiens
ucccagcacuuugggaggccaagcuuggugga

SEQ ID NO: 173019 - RNA, 32 nt, Homo Sapiens
agggccuggcauggcagaggccaggcagccgu

SEQ ID NO: 173020 - RNA, 32 nt, Homo Sapiens
aaauaauacagauauaucuaaaacacuuaucu

SEQ ID NO: 173021 - RNA, 32 nt, Homo Sapiens
ugauccgcaccccauuccuccccucccauggc

SEQ ID NO: 173022 - RNA, 32 nt, Homo Sapiens
aucugcuauuguuauuucuccucuuuauugga

SEQ ID NO: 173023 - RNA, 32 nt, Homo Sapiens
gcgccugggggcgacgggagggggcugcgucu

SEQ ID NO: 173024 - RNA, 30 nt, Homo Sapiens
gcagcaauuguggcagcagaagcuuccucu

SEQ ID NO: 173025 - RNA, 32 nt, Homo Sapiens
aucaggccaugaucuauaggaccuccuaauga

SEQ ID NO: 173026 - RNA, 32 nt, Homo Sapiens
ugcuuuaaaacacaacuccagagccccucccc

SEQ ID NO: 173027 - RNA, 32 nt, Homo Sapiens
gaccgccccccuccucgcgaaggcaauggcuu

SEQ ID NO: 173028 - RNA, 32 nt, Homo Sapiens
uaucaugguguuggguaaauuagcgaaaucaa

SEQ ID NO: 173029 - RNA, 32 nt, Homo Sapiens
cguuuucacaugccuaccagaggagcaaagag

SEQ ID NO: 173030 - RNA, 32 nt, Homo Sapiens
acguguaacaagaaaguggucuguggaucagc

SEQ ID NO: 173031 - RNA, 32 nt, Homo Sapiens
uacauuacauaaaugaaauucccaguauccaa

SEQ ID NO: 173032 - RNA, 32 nt, Homo Sapiens
ugguugaacauugauucuuuuauacuuaaaaa

SEQ ID NO: 173033 - RNA, 32 nt, Homo Sapiens
ccaggggagggaagggcugggaugcugggacc

SEQ ID NO: 173034 - RNA, 32 nt, Homo Sapiens
uuucuccccccucugcgcacgaaggaugugcu

SEQ ID NO: 173035 - RNA, 32 nt, Homo Sapiens
gguucugggucagcuucuuuuaccucaauuuu

SEQ ID NO: 173036 - RNA, 32 nt, Homo Sapiens
ucaucucugaccaugguccacugaccaggccc

SEQ ID NO: 173037 - RNA, 32 nt, Homo Sapiens
cccugagagccgaugauagacacaaguccaga

SEQ ID NO: 173038 - RNA, 31 nt, Homo Sapiens
ccugauaugauccagcagccucgggccccgc

SEQ ID NO: 173039 - RNA, 32 nt, Homo Sapiens
uuugcaaauggugguuguuucuuccaagacuc

SEQ ID NO: 173040 - RNA, 32 nt, Homo Sapiens
cacagguuaccauauugguuuguaauaugggu

SEQ ID NO: 173041 - RNA, 32 nt, Homo Sapiens
aucaaacaggagugugcgcuauggaaaaccag

SEQ ID NO: 173042 - RNA, 32 nt, Homo Sapiens
agcagugcuucucaaaccuugaugugccugug

SEQ ID NO: 173043 - RNA, 32 nt, Homo Sapiens
ggauggucucgaacuccugaccucaagugauc

SEQ ID NO: 173044 - RNA, 32 nt, Homo Sapiens
uuuuuuccuuuuuuuccaaaacacuuuauacu

SEQ ID NO: 173045 - RNA, 32 nt, Homo Sapiens
ccugcuucaaggauguggaaauuccuaauuuc

SEQ ID NO: 173046 - RNA, 30 nt, Homo Sapiens
ugcauguacucugcugcagaccauccuccc

SEQ ID NO: 173047 - RNA, 32 nt, Homo Sapiens
uauacaaaaguacugauucuagguaagaagga

SEQ ID NO: 173048 - RNA, 32 nt, Homo Sapiens
aucaugugaugaagggagaaacuggaaugagu

SEQ ID NO: 173049 - RNA, 32 nt, Homo Sapiens
caucgugcaucacucucccuucugccuccuuc

SEQ ID NO: 173050 - RNA, 32 nt, Homo Sapiens
gcuuauuuucccuuuucuaugaggacuugaca

SEQ ID NO: 173051 - RNA, 32 nt, Homo Sapiens
gacgguacucaccagaauggcuccauagacuu

SEQ ID NO: 173052 - RNA, 32 nt, Homo Sapiens
gccugcccagucuccuuccuucccugcuuggu

SEQ ID NO: 173053 - RNA, 32 nt, Homo Sapiens
gcaucgacucccauccugagaggaccggcccu

SEQ ID NO: 173054 - RNA, 32 nt, Homo Sapiens
cccaucugcacugcugaccauguugaggaccg

SEQ ID NO: 173055 - RNA, 32 nt, Homo Sapiens
uaaagccaccauuauuuuuuuaucaaacaucu

SEQ ID NO: 173056 - RNA, 32 nt, Homo Sapiens
ggaaaacaaaaauuugaaugauuacaacauua

SEQ ID NO: 173057 - RNA, 32 nt, Homo Sapiens
cucaucugacaguggagucacuacauccucag

SEQ ID NO: 173058 - RNA, 32 nt, Homo Sapiens
ucuggggaagcagcaauaugccacuguacaaa

SEQ ID NO: 173059 - RNA, 32 nt, Homo Sapiens
cugugcagccuggaaaccaucgcugaggagcc

SEQ ID NO: 173060 - RNA, 32 nt, Homo Sapiens
cauuugcucuuggauuguuugcuggggacaac

SEQ ID NO: 173061 - RNA, 32 nt, Homo Sapiens
acccgugccccgagugcggccgccgcuucagc

SEQ ID NO: 173062 - RNA, 32 nt, Homo Sapiens
uaagguaaaagcuuauaguuuucugaucugug

SEQ ID NO: 173063 - RNA, 32 nt, Homo Sapiens
cauccacuaaaauuauucuuccuaaaaaauau

SEQ ID NO: 173064 - RNA, 32 nt, Homo Sapiens
gcacuuauuuaaugccgauauacucuagauga

SEQ ID NO: 173065 - RNA, 32 nt, Homo Sapiens
cauggacauguguuucaggccuugaaguaaau

SEQ ID NO: 173066 - RNA, 32 nt, Homo Sapiens
aacauaaagcuacuaaacugcuuuguauucua

SEQ ID NO: 173067 - RNA, 32 nt, Homo Sapiens
ggaauuguauaauucaauucgauaauugaucu

SEQ ID NO: 173068 - RNA, 32 nt, Homo Sapiens
uuggauucuuuuucuuuuuuuuuugagaugga

SEQ ID NO: 173069 - RNA, 32 nt, Homo Sapiens
acaccacggacaaagagauugagguucucuau

SEQ ID NO: 173070 - RNA, 32 nt, Homo Sapiens
acccccucaagcggggccccagcccccugagc

SEQ ID NO: 173071 - RNA, 32 nt, Homo Sapiens
aagcggggccccagcccccugagcacccccuc

SEQ ID NO: 173072 - RNA, 32 nt, Homo Sapiens
ucguaucuccaagucccucucacaggacaugc

SEQ ID NO: 173073 - RNA, 32 nt, Homo Sapiens
cuucuccuuuucuuacucuauaguggcaacau

SEQ ID NO: 173074 - RNA, 32 nt, Homo Sapiens
acaaaacaaaacaaaacugugggccauuuauu

SEQ ID NO: 173075 - RNA, 31 nt, Homo Sapiens
cacucggagccccggcccaaugagcgcaacu

SEQ ID NO: 173076 - RNA, 32 nt, Homo Sapiens
agcauugcacuguaccucucguaacacagcaa

SEQ ID NO: 173077 - RNA, 32 nt, Homo Sapiens
uguggggaugaguguccccaccccagggccac

SEQ ID NO: 173078 - RNA, 30 nt, Homo Sapiens
cuucuccaugcucuugauuuggaggcagga

SEQ ID NO: 173079 - RNA, 32 nt, Homo Sapiens
uagagcuagggccccagggauugcugugguca

SEQ ID NO: 173080 - RNA, 32 nt, Homo Sapiens
uaguaguuaugaacagugagaugaacuucugc

SEQ ID NO: 173081 - RNA, 32 nt, Homo Sapiens
uggagcuuuuauucugagaauauguguuuguc

SEQ ID NO: 173082 - RNA, 32 nt, Homo Sapiens
gucgcugagccauugggaucgcgacgcagucg

SEQ ID NO: 173083 - RNA, 32 nt, Homo Sapiens
ucuccacaguccucuucugggcaaauucuugu

SEQ ID NO: 173084 - RNA, 32 nt, Homo Sapiens
acacauuggcuuaugccuauaauccuagcacu

SEQ ID NO: 173085 - RNA, 32 nt, Homo Sapiens
cguaaaagauaaaaaauauauuguuucaucau

SEQ ID NO: 173086 - RNA, 31 nt, Homo Sapiens
gccgguuccuccagucugccccgcgcgcgga

SEQ ID NO: 173087 - RNA, 32 nt, Homo Sapiens
cuuggccgcgcgcggcaaugcugaggcugcug

SEQ ID NO: 173088 - RNA, 32 nt, Homo Sapiens
ccugucaccagagcuucucugggcugaaugua

SEQ ID NO: 173089 - RNA, 32 nt, Homo Sapiens
auuuaaagagagaaacagaaaauauauagaga

SEQ ID NO: 173090 - RNA, 32 nt, Homo Sapiens
cugccuccuccuccccgcacagugcuggggga

SEQ ID NO: 173091 - RNA, 32 nt, Homo Sapiens
ucagcuuccugacuagcugggacuacuggugu

SEQ ID NO: 173092 - RNA, 32 nt, Homo Sapiens
acgggaagaacaagggaaauugugaaaguggu

SEQ ID NO: 173093 - RNA, 32 nt, Homo Sapiens
cucauccucaagcuggaagauaccucucuggc

SEQ ID NO: 173094 - RNA, 30 nt, Homo Sapiens
ugguaaggcaggcacgaagaguccaaaaaa

SEQ ID NO: 173095 - RNA, 32 nt, Homo Sapiens
ugaggaccucaccagcagcugcugucucucca

SEQ ID NO: 173096 - RNA, 32 nt, Homo Sapiens
cgggaaccucaucugccuggggccucaccugc

SEQ ID NO: 173097 - RNA, 32 nt, Homo Sapiens
uuccuggucuuugaauaaagucugagugggcg

SEQ ID NO: 173098 - RNA, 32 nt, Homo Sapiens
cagcugucuucagaauaaugucacccggccuc

SEQ ID NO: 173099 - RNA, 32 nt, Homo Sapiens
cccuuuaugccccugcaaccaagcccugcugc

SEQ ID NO: 173100 - RNA, 32 nt, Homo Sapiens
aagaauaggcugccuccuccccacagccuggg

SEQ ID NO: 173101 - RNA, 32 nt, Homo Sapiens
gcauaaagcauaaguauacaguucaauaaacu

SEQ ID NO: 173102 - RNA, 32 nt, Homo Sapiens
aagcugccuggcaaggccccaggccagccagg

SEQ ID NO: 173103 - RNA, 32 nt, Homo Sapiens
cggcgggaucgauacccccaccccuccacugg

SEQ ID NO: 173104 - RNA, 32 nt, Homo Sapiens
ucuugagcguuuugauuuuuuacuuuuagcuu

SEQ ID NO: 173105 - RNA, 32 nt, Homo Sapiens
cagguccccucgccccuaugauuguggugccu

SEQ ID NO: 173106 - RNA, 32 nt, Homo Sapiens
gggagcgccgcaccggccggcauggaggagcg

SEQ ID NO: 173107 - RNA, 32 nt, Homo Sapiens
caacuacuaauagaauaaaggcaguuuucuaa

SEQ ID NO: 173108 - RNA, 32 nt, Homo Sapiens
guacauaugaauagaggaaaauacugagugcu

SEQ ID NO: 173109 - RNA, 32 nt, Homo Sapiens
gucuaggggaugaauuuuaaguuacaauaaaa

SEQ ID NO: 173110 - RNA, 32 nt, Homo Sapiens
uuuggaaauaaauggcagugcuuuguucacuu

SEQ ID NO: 173111 - RNA, 32 nt, Homo Sapiens
augagugauaucacauucaauuuuaugucuac

SEQ ID NO: 173112 - RNA, 32 nt, Homo Sapiens
ugucuguuggacaccucacauggcaccucaca

SEQ ID NO: 173113 - RNA, 32 nt, Homo Sapiens
aucacuuucuucuuuuguuuucuuuuaaauua

SEQ ID NO: 173114 - RNA, 32 nt, Homo Sapiens
ccuggcgcugcucucgggccacuaccucuacu

SEQ ID NO: 173115 - RNA, 32 nt, Homo Sapiens
uauuucuguguuguucuugaucuuaaaguccu

SEQ ID NO: 173116 - RNA, 32 nt, Homo Sapiens
ugaauauaccugggguauccuaucuuguacaa

SEQ ID NO: 173117 - RNA, 32 nt, Homo Sapiens
aacaaucuggaagaaaaaaaccacacaaagac

SEQ ID NO: 173118 - RNA, 32 nt, Homo Sapiens
ugcaguccagcuuguuuauauuugcuuuuguu

SEQ ID NO: 173119 - RNA, 29 nt, Homo Sapiens
aucauauuaaaucauuucuuguagucuua

SEQ ID NO: 173120 - RNA, 32 nt, Homo Sapiens
ugugucucugcuggggacccuggccacccccc

SEQ ID NO: 173121 - RNA, 32 nt, Homo Sapiens
cuucaaaaacaaaaacaaauguguuauccgac

SEQ ID NO: 173122 - RNA, 32 nt, Homo Sapiens
agcaauuuaaagucagcgagcagguucucauu

SEQ ID NO: 173123 - RNA, 31 nt, Homo Sapiens
aucacaguauugugauuuucaguguauuaca

SEQ ID NO: 173124 - RNA, 32 nt, Homo Sapiens
uccuauuacugaugaguuuacaucuucaaaua

SEQ ID NO: 173125 - RNA, 32 nt, Homo Sapiens
acugucccggggugcccacaccuacugucugc

SEQ ID NO: 173126 - RNA, 32 nt, Homo Sapiens
aaaguauuaucuuccucauuuauuuccaucau

SEQ ID NO: 173127 - RNA, 32 nt, Homo Sapiens
aaaauggaagcgguuggacugauggugucuga

SEQ ID NO: 173128 - RNA, 32 nt, Homo Sapiens
uacuugcuuuauucaccucccuguuuuguguu

SEQ ID NO: 173129 - RNA, 32 nt, Homo Sapiens
agccgagaucacaccacugugcucuagccugg

SEQ ID NO: 173130 - RNA, 32 nt, Homo Sapiens
cccuugguuggcacccucuccuccgguucccu

SEQ ID NO: 173131 - RNA, 30 nt, Homo Sapiens
gcggaauugccggugccgccgccaccgcug

SEQ ID NO: 173132 - RNA, 32 nt, Homo Sapiens
ccugaguaguagcagcugggaccacagacguc

SEQ ID NO: 173133 - RNA, 32 nt, Homo Sapiens
ccacugggcagagacuccuuuugggagucacu

SEQ ID NO: 173134 - RNA, 32 nt, Homo Sapiens
gucuggucuugaauuccugaccucaagugauc

SEQ ID NO: 173135 - RNA, 32 nt, Homo Sapiens
cugacagcgaggggggagggguugguguaacc

SEQ ID NO: 173136 - RNA, 30 nt, Homo Sapiens
uagaggaucaguggcggcggcacccgcggc

SEQ ID NO: 173137 - RNA, 30 nt, Homo Sapiens
uuuguuuauacugugggggaaaaccaccua

SEQ ID NO: 173138 - RNA, 32 nt, Homo Sapiens
aguauuauuuuugugcacaggaggaaaauugu

SEQ ID NO: 173139 - RNA, 32 nt, Homo Sapiens
cccuccucugggggcucugccaguugugagcu

SEQ ID NO: 173140 - RNA, 32 nt, Homo Sapiens
uacauaagggaagagaggaggauguggcuuuc

SEQ ID NO: 173141 - RNA, 32 nt, Homo Sapiens
uaaguaagccccacagaccuuacugcuacugc

SEQ ID NO: 173142 - RNA, 32 nt, Homo Sapiens
auggguuugucaacggugcugucucccuuucu

SEQ ID NO: 173143 - RNA, 32 nt, Homo Sapiens
ccgggcauucgggucccugcgagaaggagggg

SEQ ID NO: 173144 - RNA, 32 nt, Homo Sapiens
ucuucuuccugguugggucuccaggcccgauu

SEQ ID NO: 173145 - RNA, 32 nt, Homo Sapiens
cuuuuuaaaacauuuuuuuuuacccaaagaaa

SEQ ID NO: 173146 - RNA, 32 nt, Homo Sapiens
cugucuuccuccaguucucaacacgguguugc

SEQ ID NO: 173147 - RNA, 32 nt, Homo Sapiens
cucugguggaccgcccccaucggccacacuug

SEQ ID NO: 173148 - RNA, 32 nt, Homo Sapiens
cgagugcccauggcuacaagggugcugagcau

SEQ ID NO: 173149 - RNA, 32 nt, Homo Sapiens
uuuauuuuuacagcuucugguuucacaugaaa

SEQ ID NO: 173150 - RNA, 32 nt, Homo Sapiens
uagucaaauuuauugagaugauaauuuaauuu

SEQ ID NO: 173151 - RNA, 32 nt, Homo Sapiens
gcuugaggccccgauggacuccugaccauaau

SEQ ID NO: 173152 - RNA, 32 nt, Homo Sapiens
gaggcuuucagaagcucuucuaaaaaaugaua

SEQ ID NO: 173153 - RNA, 32 nt, Homo Sapiens
aucccgcucaaggcugccccagccuggggucu

SEQ ID NO: 173154 - RNA, 32 nt, Homo Sapiens
acacugucaggguuuggcgugugugucaugug

SEQ ID NO: 173155 - RNA, 32 nt, Homo Sapiens
uuuguucuuuguguaacaauguaaccaaaaua

SEQ ID NO: 173156 - RNA, 27 nt, Homo Sapiens
cugguguccgaccucagccccagucag

SEQ ID NO: 173157 - RNA, 32 nt, Homo Sapiens
gaucagccucguuuccuccacccuacuuugau

SEQ ID NO: 173158 - RNA, 32 nt, Homo Sapiens
ugaagcacugugugguuguggcgugggcccgu

SEQ ID NO: 173159 - RNA, 32 nt, Homo Sapiens
ggcaaaggggcaucagcccaccccaccggaua

SEQ ID NO: 173160 - RNA, 32 nt, Homo Sapiens
gauggguuuacaaugucuucuaaacaauguaa

SEQ ID NO: 173161 - RNA, 32 nt, Homo Sapiens
ucagagguccugaaauagucaccaugggggaa

SEQ ID NO: 173162 - RNA, 32 nt, Homo Sapiens
guucuccccagccccagcccuguccgucuguc

SEQ ID NO: 173163 - RNA, 32 nt, Homo Sapiens
gcagagaggagaagugacuugauggacuauuu

SEQ ID NO: 173164 - RNA, 32 nt, Homo Sapiens
cauaucugucauuugagcagggcucagcgggg

SEQ ID NO: 173165 - RNA, 32 nt, Homo Sapiens
aacgcgcgugacuagggucuucuguuuugcgc

SEQ ID NO: 173166 - RNA, 32 nt, Homo Sapiens
cuguugaaaaagauaaagagugcaggugcagu

SEQ ID NO: 173167 - RNA, 32 nt, Homo Sapiens
guaacauggcuacuuuucguuggauccauguc

SEQ ID NO: 173168 - RNA, 32 nt, Homo Sapiens
aagauucuuucauucgucuccuccuagccugg

SEQ ID NO: 173169 - RNA, 32 nt, Homo Sapiens
ggcucaacugggaaagcagccggcgcccgugg

SEQ ID NO: 173170 - RNA, 32 nt, Homo Sapiens
gagaggcucuguuuccagccaguuauuuucuc

SEQ ID NO: 173171 - RNA, 32 nt, Homo Sapiens
guuauaugucauuuuuuauuacucaucagcaa

SEQ ID NO: 173172 - RNA, 29 nt, Homo Sapiens
gaggauucgguccggggacgucuccugau

SEQ ID NO: 173173 - RNA, 32 nt, Homo Sapiens
agaugaggaaacugaggcacagaguaguuaag

SEQ ID NO: 173174 - RNA, 32 nt, Homo Sapiens
acaccuguugaggagugggguggcuuugaaug

SEQ ID NO: 173175 - RNA, 32 nt, Homo Sapiens
ugggcucaggagggggcggggcaggagcuggu

SEQ ID NO: 173176 - RNA, 32 nt, Homo Sapiens
cccaccccacccaggagcugaggcugauggag

SEQ ID NO: 173177 - RNA, 32 nt, Homo Sapiens
auuuuauuuuucuguggguuuuguguugucuu

SEQ ID NO: 173178 - RNA, 32 nt, Homo Sapiens
ucugacuuaggguuugucacuccaccucauug

SEQ ID NO: 173179 - RNA, 32 nt, Homo Sapiens
uuagcacaaaaauagccauuguaaaguguuaa

SEQ ID NO: 173180 - RNA, 32 nt, Homo Sapiens
agaaaaaacuggggggaaaaagaccaggucua

SEQ ID NO: 173181 - RNA, 32 nt, Homo Sapiens
ugcaagauucugaaacauugcuuugaccacuc

SEQ ID NO: 173182 - RNA, 32 nt, Homo Sapiens
aaguaaauauuucgauuuuuuauuuauuuaag

SEQ ID NO: 173183 - RNA, 32 nt, Homo Sapiens
caaggacuaugaauacuaaauguuaaguucua

SEQ ID NO: 173184 - RNA, 32 nt, Homo Sapiens
augucccauaccagggaauuuuuuuaacacac

SEQ ID NO: 173185 - RNA, 32 nt, Homo Sapiens
ccuucagcacuugaccgaaauaccaaaaaugu

SEQ ID NO: 173186 - RNA, 32 nt, Homo Sapiens
ugauacaacuaucauaccuggacccaaagagg

SEQ ID NO: 173187 - RNA, 32 nt, Homo Sapiens
gggaguuugcaccucucccugcccgggugcuc

SEQ ID NO: 173188 - RNA, 32 nt, Homo Sapiens
uuagguaagacacuuuuuuacugcuuuuaugu

SEQ ID NO: 173189 - RNA, 32 nt, Homo Sapiens
cccgccugcggccccucacgccgcuagugcuc

SEQ ID NO: 173190 - RNA, 32 nt, Homo Sapiens
aaaggcaaacucccuccuugcaaggaaaggag

SEQ ID NO: 173191 - RNA, 32 nt, Homo Sapiens
gacaucugaacugacuccaugaagccugaaga

SEQ ID NO: 173192 - RNA, 32 nt, Homo Sapiens
guucaaaauuuauauuaaaaucuacuuaggag

SEQ ID NO: 173193 - RNA, 32 nt, Homo Sapiens
cggacacccgccccggccucagucucccaucc

SEQ ID NO: 173194 - RNA, 32 nt, Homo Sapiens
ugcauugugcuucuuucuuugggaauauuuga

SEQ ID NO: 173195 - RNA, 32 nt, Homo Sapiens
agcaccccuuucgcacugccaagccccaguac

SEQ ID NO: 173196 - RNA, 32 nt, Homo Sapiens
ugaaaaacguugggaaucuugguuucaguuuu

SEQ ID NO: 173197 - RNA, 32 nt, Homo Sapiens
ucugucaacugggagggggagaggggggugau

SEQ ID NO: 173198 - RNA, 32 nt, Homo Sapiens
agauuuagcuguucuucagugaacaagugugc

SEQ ID NO: 173199 - RNA, 32 nt, Homo Sapiens
ccuggcacagagcuccuaaaguccuuggaaug

SEQ ID NO: 173200 - RNA, 32 nt, Homo Sapiens
ugggaaggauguucuuuuuacguaccaauucu

SEQ ID NO: 173201 - RNA, 32 nt, Homo Sapiens
ggaauaauucccuccgcaugaagcagguguau

SEQ ID NO: 173202 - RNA, 32 nt, Homo Sapiens
ugaaucuggacgugaaucugguaaaaauauca

SEQ ID NO: 173203 - RNA, 32 nt, Homo Sapiens
ccauggugcccggcccugccucauagcaggcu

SEQ ID NO: 173204 - RNA, 32 nt, Homo Sapiens
cauacauuuaggacugcaauuuuuugguauuu

SEQ ID NO: 173205 - RNA, 32 nt, Homo Sapiens
uagaaaggguacaguaaaaauaugguauaaaa

SEQ ID NO: 173206 - RNA, 32 nt, Homo Sapiens
accuaaaugugauuuuugcugguuacuaaaau

SEQ ID NO: 173207 - RNA, 32 nt, Homo Sapiens
uuugcuggacauuuuuauuaaucuccuuuauu

SEQ ID NO: 173208 - RNA, 30 nt, Homo Sapiens
accgccgcccucugcccgccggcccgucug

SEQ ID NO: 173209 - RNA, 32 nt, Homo Sapiens
gauucagggguuuuuaaucuacuuuccauaaa

SEQ ID NO: 173210 - RNA, 32 nt, Homo Sapiens
auaggcuuuuaaaauuuuuccagccuugggaa

SEQ ID NO: 173211 - RNA, 32 nt, Homo Sapiens
ccgagauugugccacugcacuccagcugggug

SEQ ID NO: 173212 - RNA, 32 nt, Homo Sapiens
cggucauuccaggucagcagcccagcuauggg

SEQ ID NO: 173213 - RNA, 32 nt, Homo Sapiens
cagagcccggugaagacccccauccccauguc

SEQ ID NO: 173214 - RNA, 32 nt, Homo Sapiens
agacagugaggcugcacccacccaggagugug

SEQ ID NO: 173215 - RNA, 32 nt, Homo Sapiens
ggccaggcgcgguggcucacgccaggaauccc

SEQ ID NO: 173216 - RNA, 32 nt, Homo Sapiens
gcugagaugggaaauaaaaguaguuaaauaac

SEQ ID NO: 173217 - RNA, 32 nt, Homo Sapiens
cuacuuggaagagacuccagggcucugcagag

SEQ ID NO: 173218 - RNA, 32 nt, Homo Sapiens
ccugccgccgucaugaggcugcgggugcggcu

SEQ ID NO: 173219 - RNA, 32 nt, Homo Sapiens
auuguuuucuaaaaggagacucccucggcaag

SEQ ID NO: 173220 - RNA, 32 nt, Homo Sapiens
aggauguaugaugacccccuccccucccaucc

SEQ ID NO: 173221 - RNA, 32 nt, Homo Sapiens
gcaauaaaaucaaaguuuuuauuaauuauuuu

SEQ ID NO: 173222 - RNA, 32 nt, Homo Sapiens
aguuuccauuaagagaaaauguaucuguuaag

SEQ ID NO: 173223 - RNA, 32 nt, Homo Sapiens
augcagguccuccuuggugccucgcaggcaga

SEQ ID NO: 173224 - RNA, 32 nt, Homo Sapiens
agagggaacugggaagagaaggaggggaacuu

SEQ ID NO: 173225 - RNA, 32 nt, Homo Sapiens
cgcuuuuauuuuuucucccgucuucaaugacc

SEQ ID NO: 173226 - RNA, 32 nt, Homo Sapiens
ccacacauggcuaauuuuuuuauuuuuaauag

SEQ ID NO: 173227 - RNA, 32 nt, Homo Sapiens
aacccgggccgcgaucgccgccuccccgccuc

SEQ ID NO: 173228 - RNA, 32 nt, Homo Sapiens
ccugcagcaagugcuuccgucuccggaauccu

SEQ ID NO: 173229 - RNA, 32 nt, Homo Sapiens
guuuguuuuuugcaugauucuuugugaccaag

SEQ ID NO: 173230 - RNA, 32 nt, Homo Sapiens
gguguuguauagauccaguugcacuaaauucc

SEQ ID NO: 173231 - RNA, 32 nt, Homo Sapiens
gcgacagguaggggcggaggggagcugagucu

SEQ ID NO: 173232 - RNA, 32 nt, Homo Sapiens
ccaggcggcgacggaaucaguccccaaugccu

SEQ ID NO: 173233 - RNA, 32 nt, Homo Sapiens
aagaaauggcaggacucauauuauucaguugu

SEQ ID NO: 173234 - RNA, 32 nt, Homo Sapiens
uguuacagaaaaguggaagcagauuggcuggg

SEQ ID NO: 173235 - RNA, 32 nt, Homo Sapiens
gcaugagcacgcgguccggcuccaggagauuc

SEQ ID NO: 173236 - RNA, 32 nt, Homo Sapiens
cugucugcucuguaccagagaagugcuaggcu

SEQ ID NO: 173237 - RNA, 32 nt, Homo Sapiens
aggggcauggagccgccgcgggccugcugagc

SEQ ID NO: 173238 - RNA, 32 nt, Homo Sapiens
uacuuaaaacaauguacuguggugaugagucc

SEQ ID NO: 173239 - RNA, 32 nt, Homo Sapiens
augggaaugcccugaaacuacuguaucugaug

SEQ ID NO: 173240 - RNA, 32 nt, Homo Sapiens
gaugcuucacccaagucaccgaccacagagac

SEQ ID NO: 173241 - RNA, 32 nt, Homo Sapiens
gggucggcacggggagucgggcggucuugugc

SEQ ID NO: 173242 - RNA, 32 nt, Homo Sapiens
uuuaauggggguauugggugggacagacgggg

SEQ ID NO: 173243 - RNA, 32 nt, Homo Sapiens
ccuuccccugucagcuuucucccccaggguuc

SEQ ID NO: 173244 - RNA, 32 nt, Homo Sapiens
auagugaucuucaaaaaacccuugcuuuuagg

SEQ ID NO: 173245 - RNA, 32 nt, Homo Sapiens
gaccgcccagaccgccggucccggggcccccu

SEQ ID NO: 173246 - RNA, 32 nt, Homo Sapiens
caauaaaacugggaucccauuaccaagagaga

SEQ ID NO: 173247 - RNA, 32 nt, Homo Sapiens
ccagugacugcgggcuguggcuccuccuccag

SEQ ID NO: 173248 - RNA, 32 nt, Homo Sapiens
ccucuccuacaauaaacucuagcucugaaggg

SEQ ID NO: 173249 - RNA, 32 nt, Homo Sapiens
ucggugcaggcagcggccgccgccgccgagac

SEQ ID NO: 173250 - RNA, 32 nt, Homo Sapiens
ucugcuuuucuuuucccuuccacaggcugguu

SEQ ID NO: 173251 - RNA, 32 nt, Homo Sapiens
aauccugaagaauggaacagcuguagaaagcc

SEQ ID NO: 173252 - RNA, 32 nt, Homo Sapiens
cucuuuucucaguuaucucccuccucaacaga

SEQ ID NO: 173253 - RNA, 32 nt, Homo Sapiens
cuggugaauuugagagguauguagccacauuu

SEQ ID NO: 173254 - RNA, 32 nt, Homo Sapiens
cagcuuuugcauuuaagcaggaguaaggaaga

SEQ ID NO: 173255 - RNA, 32 nt, Homo Sapiens
aguucugaguuuagaaaguaauccaaaacuaa

SEQ ID NO: 173256 - RNA, 32 nt, Homo Sapiens
cauuuuacccauuugcagugauccuguguaaa

SEQ ID NO: 173257 - RNA, 32 nt, Homo Sapiens
aagaccccuagcccugcccccauccccccaag

SEQ ID NO: 173258 - RNA, 32 nt, Homo Sapiens
augacuggaaaguuggggggcaucuaugguag

SEQ ID NO: 173259 - RNA, 32 nt, Homo Sapiens
uggcugggccucuggauggaaggucuggucuu

SEQ ID NO: 173260 - RNA, 32 nt, Homo Sapiens
gccagaaagggaggggcuccuugggggagggg

SEQ ID NO: 173261 - RNA, 30 nt, Homo Sapiens
aggcuuucaccccagccgccgguccugauu

SEQ ID NO: 173262 - RNA, 32 nt, Homo Sapiens
ugcagauauggacagccuuuacaaaaauaauu

SEQ ID NO: 173263 - RNA, 32 nt, Homo Sapiens
guuucuuuauggaugaagaaauugagagaagu

SEQ ID NO: 173264 - RNA, 32 nt, Homo Sapiens
acuccacaaugucaauugcaguuuacacacau

SEQ ID NO: 173265 - RNA, 32 nt, Homo Sapiens
uuucauaguauuauauuugauaugagugucua

SEQ ID NO: 173266 - RNA, 32 nt, Homo Sapiens
aaaagcuguuacuggugauuauagaugaguau

SEQ ID NO: 173267 - RNA, 32 nt, Homo Sapiens
ggacgagugacagcggccgccgcgcucggucc

SEQ ID NO: 173268 - RNA, 32 nt, Homo Sapiens
gggcuggagcggagaccccagggccucucagg

SEQ ID NO: 173269 - RNA, 32 nt, Homo Sapiens
cggcugccgccuccgccuccgcgccuuaaccu

SEQ ID NO: 173270 - RNA, 31 nt, Homo Sapiens
gcucuuuuguguuucgcuccaaaggguuguc

SEQ ID NO: 173271 - RNA, 32 nt, Homo Sapiens
acccaaugacuucugcuuccaucucacuaacc

SEQ ID NO: 173272 - RNA, 32 nt, Homo Sapiens
cuccauugaaucuacuauucuuguuuuccacu

SEQ ID NO: 173273 - RNA, 32 nt, Homo Sapiens
ggcccgcgcgcucgccaugucccggccaccgc

SEQ ID NO: 173274 - RNA, 32 nt, Homo Sapiens
uaaaauucaagaucuguuuuuauuuuuguaca

SEQ ID NO: 173275 - RNA, 32 nt, Homo Sapiens
gucacagaagaaaaaacaaauaaaaacuaaua

SEQ ID NO: 173276 - RNA, 32 nt, Homo Sapiens
guaagaauuuugucuuucuugauuccaguugu

SEQ ID NO: 173277 - RNA, 32 nt, Homo Sapiens
aaugcaucuaaagauugauuagaaaguuugug

SEQ ID NO: 173278 - RNA, 32 nt, Homo Sapiens
acaggcggcuccagcccugggcagcggcuuca

SEQ ID NO: 173279 - RNA, 32 nt, Homo Sapiens
cuccugaugucuggcuccauggggcacaugag

SEQ ID NO: 173280 - RNA, 32 nt, Homo Sapiens
cugagcaggccaucacuauugcuggcauccca

SEQ ID NO: 173281 - RNA, 32 nt, Homo Sapiens
gccccggcccucacucuccuauagagauugug

SEQ ID NO: 173282 - RNA, 32 nt, Homo Sapiens
cuacugauaguuccucuuucucauuuugcaaa

SEQ ID NO: 173283 - RNA, 29 nt, Homo Sapiens
uuucguccuuguuucagagggugggucag

SEQ ID NO: 173284 - RNA, 32 nt, Homo Sapiens
ggaaacaucuucuuccugagaccucguugaaa

SEQ ID NO: 173285 - RNA, 32 nt, Homo Sapiens
gaguaguacuuuguguuaaaugagcuaauuaa

SEQ ID NO: 173286 - RNA, 32 nt, Homo Sapiens
uuuucuucccccuccauguagaagagggagaa

SEQ ID NO: 173287 - RNA, 32 nt, Homo Sapiens
aagcuuucuuuuggugguuuuguuuauuauac

SEQ ID NO: 173288 - RNA, 32 nt, Homo Sapiens
uuguuuugagggcggggagaugacaggaggga

SEQ ID NO: 173289 - RNA, 32 nt, Homo Sapiens
acauuccucucagaagcccgugucucagugca

SEQ ID NO: 173290 - RNA, 32 nt, Homo Sapiens
uuuaaaaaaaauuuuguaauaaaauuauguau

SEQ ID NO: 173291 - RNA, 32 nt, Homo Sapiens
cgcgccccggccugccccggcgcaccacgugu

SEQ ID NO: 173292 - RNA, 32 nt, Homo Sapiens
caucagagugugccccgcgcucauggaugaga

SEQ ID NO: 173293 - RNA, 32 nt, Homo Sapiens
ccaaaccuggggagagagcuagacucuugucu

SEQ ID NO: 173294 - RNA, 32 nt, Homo Sapiens
aauuuuaauguuugaacuucuguuuuuucuaa

SEQ ID NO: 173295 - RNA, 32 nt, Homo Sapiens
uguauccaaacacagagacccaugggaacaaa

SEQ ID NO: 173296 - RNA, 32 nt, Homo Sapiens
uaggaaaaauuccucaaaguauuugucauuuc

SEQ ID NO: 173297 - RNA, 32 nt, Homo Sapiens
aacuaaguaacuguguaaaucugugcaaaggu

SEQ ID NO: 173298 - RNA, 32 nt, Homo Sapiens
ggugagcagcucgcugguacagcccucccugu

SEQ ID NO: 173299 - RNA, 32 nt, Homo Sapiens
uucacccugaccccucugcaggaggcagaagc

SEQ ID NO: 173300 - RNA, 32 nt, Homo Sapiens
cccgcagggcuuuaggcccuaccugacuuggg

SEQ ID NO: 173301 - RNA, 32 nt, Homo Sapiens
ccgggauugcgccagugcacuccagcugggcg

SEQ ID NO: 173302 - RNA, 32 nt, Homo Sapiens
guuggagggcaagggcuggggcugggauggga

SEQ ID NO: 173303 - RNA, 32 nt, Homo Sapiens
gcugccuuugaagccaacgaaugccauuugcu

SEQ ID NO: 173304 - RNA, 32 nt, Homo Sapiens
cacagcagugauugucagcugccaauagcaaa

SEQ ID NO: 173305 - RNA, 32 nt, Homo Sapiens
acuuguugggaggaggaggaaagggaaggcug

SEQ ID NO: 173306 - RNA, 32 nt, Homo Sapiens
aaagugucagauuccuugggaguauggaaaac

SEQ ID NO: 173307 - RNA, 32 nt, Homo Sapiens
ugagcccucccucuucaucccccaaggccuca

SEQ ID NO: 173308 - RNA, 32 nt, Homo Sapiens
gccucuagagggcuggugauugaggggcccgg

SEQ ID NO: 173309 - RNA, 31 nt, Homo Sapiens
aaccuuuaaaauaaauagaucauuaaaucuu

SEQ ID NO: 173310 - RNA, 32 nt, Homo Sapiens
agcaguacaggcagaagcuggcggcucauggc

SEQ ID NO: 173311 - RNA, 32 nt, Homo Sapiens
guguaucaaaacuaccugugagcaugggaaua

SEQ ID NO: 173312 - RNA, 32 nt, Homo Sapiens
guauaaaugugcccaaaagcguuacaacagga

SEQ ID NO: 173313 - RNA, 32 nt, Homo Sapiens
auagaaauguucaguaaugaaaaaauauaucc

SEQ ID NO: 173314 - RNA, 32 nt, Homo Sapiens
agcuauuuacacaagucaaacaugguccaauc

SEQ ID NO: 173315 - RNA, 32 nt, Homo Sapiens
ugaaacagauuuucugaagaaagcagaagcuc

SEQ ID NO: 173316 - RNA, 32 nt, Homo Sapiens
acuucaucuauuuucaguccuuucuuucuguc

SEQ ID NO: 173317 - RNA, 32 nt, Homo Sapiens
agagaaaagaaaugcagcugcuauucccgccg

SEQ ID NO: 173318 - RNA, 32 nt, Homo Sapiens
auucagugacuucuggcuuaugcucagaagcc

SEQ ID NO: 173319 - RNA, 32 nt, Homo Sapiens
ccucacugcccuuccuccccagcccagccugg

SEQ ID NO: 173320 - RNA, 32 nt, Homo Sapiens
gucuccagggaguucccgcagagccugggggg

SEQ ID NO: 173321 - RNA, 32 nt, Homo Sapiens
cuuuugagaaauuuauauuuuguagguugaag

SEQ ID NO: 173322 - RNA, 32 nt, Homo Sapiens
augaaccauuuucuuuccucuucuauuaagug

SEQ ID NO: 173323 - RNA, 32 nt, Homo Sapiens
uguuccugaauaagucagaagaaguuccaggu

SEQ ID NO: 173324 - RNA, 32 nt, Homo Sapiens
ggcgcagcgggaggagcuagagaagcacaaga

SEQ ID NO: 173325 - RNA, 32 nt, Homo Sapiens
cugugugacacccacaccuucuacucacaaac

SEQ ID NO: 173326 - RNA, 32 nt, Homo Sapiens
ucauuggugauguuuggaaaguagaagacauc

SEQ ID NO: 173327 - RNA, 32 nt, Homo Sapiens
ggaguuugagaccgacaugggcaacaugacaa

SEQ ID NO: 173328 - RNA, 32 nt, Homo Sapiens
agaaaagguaacaagauugaaguggagaccac

SEQ ID NO: 173329 - RNA, 32 nt, Homo Sapiens
ugauuauuucccuuucuucccauugacaguca

SEQ ID NO: 173330 - RNA, 32 nt, Homo Sapiens
ggaguaaccagucuucaagaccccgcucccaa

SEQ ID NO: 173331 - RNA, 32 nt, Homo Sapiens
uugucagcagccaugggaccaguguguagcug

SEQ ID NO: 173332 - RNA, 32 nt, Homo Sapiens
cacccucagccagaagcaguaggggacuccca

SEQ ID NO: 173333 - RNA, 32 nt, Homo Sapiens
uccuuauaaggacauuuccauguauguccuua

SEQ ID NO: 173334 - RNA, 32 nt, Homo Sapiens
gguccaaguucugcccucccccuucacucucc

SEQ ID NO: 173335 - RNA, 29 nt, Homo Sapiens
gcauccauuuaaaagaaugauuugaauuu

SEQ ID NO: 173336 - RNA, 32 nt, Homo Sapiens
ugauucccagcaugcuuagaauauggucacag

SEQ ID NO: 173337 - RNA, 32 nt, Homo Sapiens
ugaugccgcagggcgcgccgcggagcgccccg

SEQ ID NO: 173338 - RNA, 32 nt, Homo Sapiens
aauacagaugcauuauccagaacugaaguugc

SEQ ID NO: 173339 - RNA, 32 nt, Homo Sapiens
uuggaugcaagauaagauuaaguuucuggagu

SEQ ID NO: 173340 - RNA, 32 nt, Homo Sapiens
cuguuuacuucucuggguccccggggacucuu

SEQ ID NO: 173341 - RNA, 32 nt, Homo Sapiens
uuggaggaagguccuugccgacacccgccucu

SEQ ID NO: 173342 - RNA, 32 nt, Homo Sapiens
gaggaggaggucguggaugacacgcguggcca

SEQ ID NO: 173343 - RNA, 32 nt, Homo Sapiens
agguaucccucaugggcuuccuguuccuuuug

SEQ ID NO: 173344 - RNA, 32 nt, Homo Sapiens
uacaccuguaacccuggcauuuugggaggcca

SEQ ID NO: 173345 - RNA, 32 nt, Homo Sapiens
uugugcaggacagaaaguuguguagguaugac

SEQ ID NO: 173346 - RNA, 32 nt, Homo Sapiens
gcgagcggcggguggcucuuaccagcgggaac

SEQ ID NO: 173347 - RNA, 32 nt, Homo Sapiens
acguuuuacucgugcacaccccggaugaaccg

SEQ ID NO: 173348 - RNA, 32 nt, Homo Sapiens
cacugccccguccaaggccgccagcugugaug

SEQ ID NO: 173349 - RNA, 32 nt, Homo Sapiens
gccacccgccccagccagccaccugcuccuga

SEQ ID NO: 173350 - RNA, 32 nt, Homo Sapiens
ucccaccgcgcgccucgccgcccucgcaaccg

SEQ ID NO: 173351 - RNA, 32 nt, Homo Sapiens
uccacccucccccuagccagccaggcagcuuc

SEQ ID NO: 173352 - RNA, 32 nt, Homo Sapiens
ccucaggcucccccggcccacccugcucagug

SEQ ID NO: 173353 - RNA, 32 nt, Homo Sapiens
acuccacacgaagccgacacuggccauaauca

SEQ ID NO: 173354 - RNA, 32 nt, Homo Sapiens
auauucuaagacuuacucuaagaucuuagauu

SEQ ID NO: 173355 - RNA, 32 nt, Homo Sapiens
ugacucuuaggaucuuucagguaaaugaugcu

SEQ ID NO: 173356 - RNA, 32 nt, Homo Sapiens
aacagcgcuuccauucugaacucugcucugca

SEQ ID NO: 173357 - RNA, 30 nt, Homo Sapiens
ucaacaaucuguuguggggaaaccaccucc

SEQ ID NO: 173358 - RNA, 32 nt, Homo Sapiens
cacauacacacacauagacgccuuucccuaua

SEQ ID NO: 173359 - RNA, 32 nt, Homo Sapiens
ucaacuuuuucugcacacacgagguauuuuau

SEQ ID NO: 173360 - RNA, 32 nt, Homo Sapiens
ggccccgguggguuugucugcacuuggugcuc

SEQ ID NO: 173361 - RNA, 32 nt, Homo Sapiens
aacaacuucuugucuuuuuuuucucccacugu

SEQ ID NO: 173362 - RNA, 32 nt, Homo Sapiens
acuccuggcaggugggggcagcaggagggcag

SEQ ID NO: 173363 - RNA, 32 nt, Homo Sapiens
guuauuuagguauuuuucuuuaccaaacaaua

SEQ ID NO: 173364 - RNA, 32 nt, Homo Sapiens
ugagaaaaggauugagaaggauaaacuggaau

SEQ ID NO: 173365 - RNA, 32 nt, Homo Sapiens
acuucgaggaggaggaggaggccgggguggag

SEQ ID NO: 173366 - RNA, 32 nt, Homo Sapiens
acaaugauucucagcaucaccuagggagcuua

SEQ ID NO: 173367 - RNA, 32 nt, Homo Sapiens
acuuguccggguccugcgcccggcgcccgggg

SEQ ID NO: 173368 - RNA, 32 nt, Homo Sapiens
ggggcugacgucgcgcugggaaugcccuggcc

SEQ ID NO: 173369 - RNA, 32 nt, Homo Sapiens
ggucccugcccuccccugcucccagguugagg

SEQ ID NO: 173370 - RNA, 32 nt, Homo Sapiens
ugcuucuuuggucauccuuguuuucuaacuuu

SEQ ID NO: 173371 - RNA, 32 nt, Homo Sapiens
agggggcgcgcggcccggggacucgcauuccc

SEQ ID NO: 173372 - RNA, 32 nt, Homo Sapiens
ccagaagcgacaggaggccagcuccugggguu

SEQ ID NO: 173373 - RNA, 32 nt, Homo Sapiens
ucccgccccucgcgagggcgucccgcuauggg

SEQ ID NO: 173374 - RNA, 32 nt, Homo Sapiens
uucugaggucagacgagugucugcgaugucuu

SEQ ID NO: 173375 - RNA, 32 nt, Homo Sapiens
ggcucuccuaagcuccuucuuucauucugcca

SEQ ID NO: 173376 - RNA, 32 nt, Homo Sapiens
aggcaauugggauggcgcuaggcauacaagua

SEQ ID NO: 173377 - RNA, 32 nt, Homo Sapiens
auuuuauaaaaauuauucaucgggaguuuaac

SEQ ID NO: 173378 - RNA, 32 nt, Homo Sapiens
agcaaagaggggcaauggcugcuuucagcuuu

SEQ ID NO: 173379 - RNA, 32 nt, Homo Sapiens
acaaaagaaucugaacagcagcccuugagucu

SEQ ID NO: 173380 - RNA, 32 nt, Homo Sapiens
gacugggaauaaagucagauguaaugugaccc

SEQ ID NO: 173381 - RNA, 32 nt, Homo Sapiens
uuauuaaauauguuuucucaauuguaacgacu

SEQ ID NO: 173382 - RNA, 32 nt, Homo Sapiens
acaguaggauguggaaccuguuuaauguuaug

SEQ ID NO: 173383 - RNA, 32 nt, Homo Sapiens
aauuuucaucuuccuucuuuggaucuauuugg

SEQ ID NO: 173384 - RNA, 32 nt, Homo Sapiens
cggcgcggucuggcugccccaugggccugcgc

SEQ ID NO: 173385 - RNA, 32 nt, Homo Sapiens
uaagggcuuacuuuuuaccaacuugugugugu

SEQ ID NO: 173386 - RNA, 32 nt, Homo Sapiens
aauuuagauagaacuuuuuuuuggauacagca

SEQ ID NO: 173387 - RNA, 32 nt, Homo Sapiens
cacaauggcccugcuccuuccuccucuaggcc

SEQ ID NO: 173388 - RNA, 32 nt, Homo Sapiens
uuggcaucucugccugugggccccaggccaga

SEQ ID NO: 173389 - RNA, 32 nt, Homo Sapiens
uagcagcccucccugcugcuggugcacagcca

SEQ ID NO: 173390 - RNA, 32 nt, Homo Sapiens
gcuaaugcaaauucccaaaaaaggagcacaua

SEQ ID NO: 173391 - RNA, 32 nt, Homo Sapiens
cccggggcccugccuccaucguccuagggguu

SEQ ID NO: 173392 - RNA, 32 nt, Homo Sapiens
cugcccucaagccccagagagccccucauccu

SEQ ID NO: 173393 - RNA, 32 nt, Homo Sapiens
cugcauuuuuaaaacauuuuacuguaauucug

SEQ ID NO: 173394 - RNA, 32 nt, Homo Sapiens
gugaauuuucuuuuccuccaauucauuuguua

SEQ ID NO: 173395 - RNA, 32 nt, Homo Sapiens
cccccagaccucuggaggagacaauggaugca

SEQ ID NO: 173396 - RNA, 32 nt, Homo Sapiens
auaauuuccagaaauuguacuuuugagguauc

SEQ ID NO: 173397 - RNA, 32 nt, Homo Sapiens
cagaggcuauaaaaccccaggaccccugcugu

SEQ ID NO: 173398 - RNA, 32 nt, Homo Sapiens
auacuggagaaugugacauagauuugcuggca

SEQ ID NO: 173399 - RNA, 30 nt, Homo Sapiens
gaaccauugcccgugccccuggucacugac

SEQ ID NO: 173400 - RNA, 32 nt, Homo Sapiens
gccauuuuugaaaaauuuaacaauccagguuc

SEQ ID NO: 173401 - RNA, 32 nt, Homo Sapiens
uuuggaugggauuauguggaaacuacccugcg

SEQ ID NO: 173402 - RNA, 32 nt, Homo Sapiens
uucucugcagugggagcagcucuccugccaca

SEQ ID NO: 173403 - RNA, 32 nt, Homo Sapiens
aggacucaggcuggaggcaauuccuuggugcc

SEQ ID NO: 173404 - RNA, 32 nt, Homo Sapiens
gaugaaggacaguuuuuuccuucuuaguuauu

SEQ ID NO: 173405 - RNA, 32 nt, Homo Sapiens
ggagcuccuugccugccacuucuuccagggga

SEQ ID NO: 173406 - RNA, 32 nt, Homo Sapiens
agaugucaaaauaaguuuauuucaaauggcac

SEQ ID NO: 173407 - RNA, 32 nt, Homo Sapiens
uuuuagaugaauugcgugccuuaaaaugguga

SEQ ID NO: 173408 - RNA, 32 nt, Homo Sapiens
aguacuccccucggggauacgacauaugccca

SEQ ID NO: 173409 - RNA, 32 nt, Homo Sapiens
acccugaugguuuggaaguugugcaguuucuu

SEQ ID NO: 173410 - RNA, 32 nt, Homo Sapiens
acaugcauaaaccaucuuuaauuagaaaauuu

SEQ ID NO: 173411 - RNA, 32 nt, Homo Sapiens
ugaagggcaguccuccuucucuagguuacaug

SEQ ID NO: 173412 - RNA, 32 nt, Homo Sapiens
aagaaucaggcuggcaaagaaaucacaggucu

SEQ ID NO: 173413 - RNA, 32 nt, Homo Sapiens
ggccuucacagugucacccacauucaccucuu

SEQ ID NO: 173414 - RNA, 32 nt, Homo Sapiens
caaaccuggugccugugcuccuggccccccua

SEQ ID NO: 173415 - RNA, 32 nt, Homo Sapiens
uucauacuuuccaauuaugagauggacugugg

SEQ ID NO: 173416 - RNA, 32 nt, Homo Sapiens
ggcccuagauuuuuggggggucaccagccacu

SEQ ID NO: 173417 - RNA, 32 nt, Homo Sapiens
caggucugucuucgccccuguuagugcacaua

SEQ ID NO: 173418 - RNA, 32 nt, Homo Sapiens
ccaaaaaaggaaguggaauggaauaaaauccc

SEQ ID NO: 173419 - RNA, 32 nt, Homo Sapiens
cuuauugccugccucuauaccaauaagucagu

SEQ ID NO: 173420 - RNA, 29 nt, Homo Sapiens
uucugggugaagauuucaauguggaagau

SEQ ID NO: 173421 - RNA, 32 nt, Homo Sapiens
gugaagugauuucaaaaaguauucaaaauuug

SEQ ID NO: 173422 - RNA, 32 nt, Homo Sapiens
acugccgcgcgcggccgcucugggccugguuc

SEQ ID NO: 173423 - RNA, 32 nt, Homo Sapiens
cuugggggagaaacaggacuuuuuacauaaaa

SEQ ID NO: 173424 - RNA, 32 nt, Homo Sapiens
uuagucaguguuuuaacuguguucaagcuuua

SEQ ID NO: 173425 - RNA, 32 nt, Homo Sapiens
ggccgauccugcugugcccccgagcugcuccc

SEQ ID NO: 173426 - RNA, 32 nt, Homo Sapiens
cugagggccuggccuggcagcucugcuguuag

SEQ ID NO: 173427 - RNA, 32 nt, Homo Sapiens
cuugguguagcaugcaaggaagcagaagaccu

SEQ ID NO: 173428 - RNA, 32 nt, Homo Sapiens
gggcggcgcgggggcgcuggggcuggaggggc

SEQ ID NO: 173429 - RNA, 32 nt, Homo Sapiens
cuugcuaugcugccagaagggauuucugguau

SEQ ID NO: 173430 - RNA, 32 nt, Homo Sapiens
aaaacucauacacaugggaggaaaaccuuaua

SEQ ID NO: 173431 - RNA, 32 nt, Homo Sapiens
agucgcuuuuucugcccacaaugauaaauuaa

SEQ ID NO: 173432 - RNA, 30 nt, Homo Sapiens
uugggguugugagugggggaaggauuuggg

SEQ ID NO: 173433 - RNA, 32 nt, Homo Sapiens
ugaguucaucucuacugagaccaucucuuccu

SEQ ID NO: 173434 - RNA, 32 nt, Homo Sapiens
cuaguaguuuauauuucacugguaguuuaaau

SEQ ID NO: 173435 - RNA, 32 nt, Homo Sapiens
guccgggcucccagcccgccccuccucccggc

SEQ ID NO: 173436 - RNA, 32 nt, Homo Sapiens
uuuuuauguauguauuuuaaagaaauuucauc

SEQ ID NO: 173437 - RNA, 32 nt, Homo Sapiens
ugauuuccucugaagcagcugcacugauacau

SEQ ID NO: 173438 - RNA, 32 nt, Homo Sapiens
cuccuaacccucaucaguuaagguuaggaaga

SEQ ID NO: 173439 - RNA, 32 nt, Homo Sapiens
cugcuuccuucuguggccucugccgggcucca

SEQ ID NO: 173440 - RNA, 32 nt, Homo Sapiens
cuguggaccaaggggucauuccuggucacaca

SEQ ID NO: 173441 - RNA, 32 nt, Homo Sapiens
uggccuauagaugaaaauauauucuuaaaaau

SEQ ID NO: 173442 - RNA, 32 nt, Homo Sapiens
agccuuuuaaaaauguucuuugaaagauaaaa

SEQ ID NO: 173443 - RNA, 32 nt, Homo Sapiens
gaggaaucuucagaagcucguucucucccaca

SEQ ID NO: 173444 - RNA, 32 nt, Homo Sapiens
ggaaagggccucugcuggcugcaggugaucau

SEQ ID NO: 173445 - RNA, 32 nt, Homo Sapiens
cacaauaguaagauuaugcucaauauucucag

SEQ ID NO: 173446 - RNA, 32 nt, Homo Sapiens
aagggaugcaugggcuuuuuggccaguguuuc

SEQ ID NO: 173447 - RNA, 32 nt, Homo Sapiens
cgcagcaucugcgggcggcgggguuucgagcu

SEQ ID NO: 173448 - RNA, 32 nt, Homo Sapiens
uuuucuuguguuaauguacaaagcuuuucuuu

SEQ ID NO: 173449 - RNA, 32 nt, Homo Sapiens
caaacccaaacacuccuacaagaaggacaguc

SEQ ID NO: 173450 - RNA, 32 nt, Homo Sapiens
ugucugaagacacuuaaauucugacccauaaa

SEQ ID NO: 173451 - RNA, 32 nt, Homo Sapiens
cagggaagccccagugaguagcugcauuccua

SEQ ID NO: 173452 - RNA, 32 nt, Homo Sapiens
ccacggaaagguaugauauauuugauccaaga

SEQ ID NO: 173453 - RNA, 32 nt, Homo Sapiens
ugguaggugguggcaagggggcggcggcggau

SEQ ID NO: 173454 - RNA, 32 nt, Homo Sapiens
auuuucaagugcuguuuuguuggaagacagug

SEQ ID NO: 173455 - RNA, 32 nt, Homo Sapiens
cuguggcugcucagguuccccuccucaugccc

SEQ ID NO: 173456 - RNA, 32 nt, Homo Sapiens
guggcggcugcggcggccgccgcggaugcaga

SEQ ID NO: 173457 - RNA, 32 nt, Homo Sapiens
ccaccgaggagcugucaccggccugaccgcca

SEQ ID NO: 173458 - RNA, 32 nt, Homo Sapiens
gcggccgcagugggguggagggggcagggcgu

SEQ ID NO: 173459 - RNA, 32 nt, Homo Sapiens
caaaggguccgcggcguggagcgcucggaccu

SEQ ID NO: 173460 - RNA, 32 nt, Homo Sapiens
cagggacugcagcuaugggauuuuaaaaggaa

SEQ ID NO: 173461 - RNA, 32 nt, Homo Sapiens
ugcucuuccagacuggcugugccugccugugc

SEQ ID NO: 173462 - RNA, 32 nt, Homo Sapiens
ugugugucgaagaguuuguuuuguuugucaug

SEQ ID NO: 173463 - RNA, 28 nt, Homo Sapiens
cccaagguauuucugaugacuccgcccc

SEQ ID NO: 173464 - RNA, 32 nt, Homo Sapiens
auccuaugguuaucuguauguauuauuuucua

SEQ ID NO: 173465 - RNA, 32 nt, Homo Sapiens
aaagaagaaaaaacugaagguacuuuacuccc

SEQ ID NO: 173466 - RNA, 32 nt, Homo Sapiens
uauggcuuuucauucuucaauucaugacgagu

SEQ ID NO: 173467 - RNA, 32 nt, Homo Sapiens
acgcuccuaccuuguuagccaccagugcaagc

SEQ ID NO: 173468 - RNA, 32 nt, Homo Sapiens
cacccuggaagaaaaaggagcgcagggugggc

SEQ ID NO: 173469 - RNA, 32 nt, Homo Sapiens
agcuugcuccgucucagcuugggcacugcugu

SEQ ID NO: 173470 - RNA, 32 nt, Homo Sapiens
uuucaauaucuuguugaaauaaaaugugucaa

SEQ ID NO: 173471 - RNA, 32 nt, Homo Sapiens
ggugccccgggcggcccgcuuccggcgcaguu

SEQ ID NO: 173472 - RNA, 32 nt, Homo Sapiens
aagcgcccacccaggcugaggucuccugggaa

SEQ ID NO: 173473 - RNA, 32 nt, Homo Sapiens
agcgagacgggagaggcacaaggggaaacuug

SEQ ID NO: 173474 - RNA, 32 nt, Homo Sapiens
aagguuucaugugcaaugcagaugaaauuugu

SEQ ID NO: 173475 - RNA, 32 nt, Homo Sapiens
aggacuugaaagauguuacuaauaauguccac

SEQ ID NO: 173476 - RNA, 32 nt, Homo Sapiens
uuuuuaaaaaauugaaacuugcauuuuaagug

SEQ ID NO: 173477 - RNA, 30 nt, Homo Sapiens
uguuccugcauguugggggaaagccagccu

SEQ ID NO: 173478 - RNA, 32 nt, Homo Sapiens
cauacaaauguagguuuguaacaaggcuuuug

SEQ ID NO: 173479 - RNA, 32 nt, Homo Sapiens
uauacauauauauacgcacacacacacacaca

SEQ ID NO: 173480 - RNA, 32 nt, Homo Sapiens
agguacaaggaccuuugcuuccauagagaaaa

SEQ ID NO: 173481 - RNA, 32 nt, Homo Sapiens
uaugggcuuuuggaagcacugauuguuuaaag

SEQ ID NO: 173482 - RNA, 32 nt, Homo Sapiens
aggauaaucggcgcccggggccgaacagcggg

SEQ ID NO: 173483 - RNA, 32 nt, Homo Sapiens
ugucguaaauuaauuuuaauuguguaucaagu

SEQ ID NO: 173484 - RNA, 32 nt, Homo Sapiens
ugucuggggguugggggcagccaggcacagcc

SEQ ID NO: 173485 - RNA, 32 nt, Homo Sapiens
gcagagaggagcugcccucucugcugagagcu

SEQ ID NO: 173486 - RNA, 27 nt, Homo Sapiens
gcuggcuguuaguucugguaaaugugu

SEQ ID NO: 173487 - RNA, 32 nt, Homo Sapiens
uuacuguucuguuuuucuauuaaucuuuuguc

SEQ ID NO: 173488 - RNA, 32 nt, Homo Sapiens
ucauacuuucugacacuuuugaggaugcaugu

SEQ ID NO: 173489 - RNA, 32 nt, Homo Sapiens
aaauguucaaaagcaaucugauaauaugaaga

SEQ ID NO: 173490 - RNA, 32 nt, Homo Sapiens
aguccuaggcugccuccgggagcacuugaggu

SEQ ID NO: 173491 - RNA, 32 nt, Homo Sapiens
ccauucuaauaacagaaacaaacaaguuauuu

SEQ ID NO: 173492 - RNA, 32 nt, Homo Sapiens
guccuauaacgguuaaaaaacacacacacaca

SEQ ID NO: 173493 - RNA, 30 nt, Homo Sapiens
ucugcggccguucggguccucacagucccc

SEQ ID NO: 173494 - RNA, 32 nt, Homo Sapiens
auguagguuguggucugaggaccacuacaugg

SEQ ID NO: 173495 - RNA, 32 nt, Homo Sapiens
cuccccacguaccccucgcgggcccagccgag

SEQ ID NO: 173496 - RNA, 32 nt, Homo Sapiens
ucaccccccuggauuucugcagggcuuggagg

SEQ ID NO: 173497 - RNA, 32 nt, Homo Sapiens
gugguugggugugauagaaauacuguuuaaug

SEQ ID NO: 173498 - RNA, 32 nt, Homo Sapiens
guuuguccuugauguaugauacuguuauuaua

SEQ ID NO: 173499 - RNA, 32 nt, Homo Sapiens
cuccccacccccaggggaggccaggcagaagc

SEQ ID NO: 173500 - RNA, 32 nt, Homo Sapiens
uuccuguucuaccuccucauucagacuguagg

SEQ ID NO: 173501 - RNA, 32 nt, Homo Sapiens
cugggucugcgaugcagcggcgugaggccugg

SEQ ID NO: 173502 - RNA, 32 nt, Homo Sapiens
aaucaggagacggcuccaggcacucagggucg

SEQ ID NO: 173503 - RNA, 32 nt, Homo Sapiens
auaaauauuuuuccuuucaaaucagaugauga

SEQ ID NO: 173504 - RNA, 32 nt, Homo Sapiens
gcaugaguauuaccaagaaaaaucuuaaaagu

SEQ ID NO: 173505 - RNA, 32 nt, Homo Sapiens
ucacacgcugcccuucgcccgcggcgucagcg

SEQ ID NO: 173506 - RNA, 32 nt, Homo Sapiens
gcggagcugggcagguggaugcggcuggaaga

SEQ ID NO: 173507 - RNA, 32 nt, Homo Sapiens
aagacacaaccugaagucugcagucugccaca

SEQ ID NO: 173508 - RNA, 32 nt, Homo Sapiens
cagcauugccagcagccugcccccagcccggg

SEQ ID NO: 173509 - RNA, 32 nt, Homo Sapiens
caguguuuuaucauguguauuucagcaggucu

SEQ ID NO: 173510 - RNA, 32 nt, Homo Sapiens
uuaccaucugaagucccuuccauuguuuucua

SEQ ID NO: 173511 - RNA, 32 nt, Homo Sapiens
aauaaguuccaagaguccaggacauaugguaa

SEQ ID NO: 173512 - RNA, 32 nt, Homo Sapiens
uuaagcuguauaugaaauauuuaugcgacucu

SEQ ID NO: 173513 - RNA, 32 nt, Homo Sapiens
uccugcagagauuuaaaacauggcaucucaau

SEQ ID NO: 173514 - RNA, 32 nt, Homo Sapiens
acaagcgucugucccuucagccggcagagcga

SEQ ID NO: 173515 - RNA, 32 nt, Homo Sapiens
agaaggagaaaguugaaggacucagcuaaagg

SEQ ID NO: 173516 - RNA, 32 nt, Homo Sapiens
accucaccuuccagcccugccgccccugcugc

SEQ ID NO: 173517 - RNA, 32 nt, Homo Sapiens
aaacaaacuccauggggaugcagucagcaaaa

SEQ ID NO: 173518 - RNA, 32 nt, Homo Sapiens
cagaacuuacgcugcgggaccccgggcacugu

SEQ ID NO: 173519 - RNA, 32 nt, Homo Sapiens
ccccgcgggcugcagcgagccaggcaugcuca

SEQ ID NO: 173520 - RNA, 32 nt, Homo Sapiens
cagacuggcaggcgggcgggcggccgcagcca

SEQ ID NO: 173521 - RNA, 32 nt, Homo Sapiens
aagccacacuuugaagguaauaaauacacagc

SEQ ID NO: 173522 - RNA, 32 nt, Homo Sapiens
uagcugagacaccaagaggugguuaagccaua

SEQ ID NO: 173523 - RNA, 32 nt, Homo Sapiens
uugacaaguccuugaccucuauaaacuucaga

SEQ ID NO: 173524 - RNA, 32 nt, Homo Sapiens
cccucagccaucuuugagcaguaaauugcugg

SEQ ID NO: 173525 - RNA, 32 nt, Homo Sapiens
augagcagccuggaguuuccggcugugccugc

SEQ ID NO: 173526 - RNA, 32 nt, Homo Sapiens
auccaggcaggaguuugcugcaggggcagggc

SEQ ID NO: 173527 - RNA, 32 nt, Homo Sapiens
aaguaaauaaaauuauauuuauagauggaccu

SEQ ID NO: 173528 - RNA, 32 nt, Homo Sapiens
aggagcuggguguggggugcguugggcuggug

SEQ ID NO: 173529 - RNA, 32 nt, Homo Sapiens
ccgccccggcgccgccucgaguucaugauucu

SEQ ID NO: 173530 - RNA, 32 nt, Homo Sapiens
gagccggcgcggucgcagucuccacggcgcag

SEQ ID NO: 173531 - RNA, 32 nt, Homo Sapiens
cgcccaccugagccgcgccggggcugcgggac

SEQ ID NO: 173532 - RNA, 32 nt, Homo Sapiens
acgaagucaaauaugagaagagugcugagcug

SEQ ID NO: 173533 - RNA, 32 nt, Homo Sapiens
uguuuuuauaugcuuguagcaaauugauguuc

SEQ ID NO: 173534 - RNA, 32 nt, Homo Sapiens
ucaauguaccuagggaaaaaauuuaaggaggu

SEQ ID NO: 173535 - RNA, 32 nt, Homo Sapiens
cagggcugccucagaagcuggcuggggacucu

SEQ ID NO: 173536 - RNA, 30 nt, Homo Sapiens
agcuuuuccuacugcaucugccggaaguag

SEQ ID NO: 173537 - RNA, 32 nt, Homo Sapiens
ggauuccaaaaucuagcaaggaucugagcugg

SEQ ID NO: 173538 - RNA, 32 nt, Homo Sapiens
ugugcaguuacacaguuuccuguaucauaaau

SEQ ID NO: 173539 - RNA, 32 nt, Homo Sapiens
gcccggccucgugcgccgcgcuuugagccucu

SEQ ID NO: 173540 - RNA, 28 nt, Homo Sapiens
uggccggggcggcagccugagagccaug

SEQ ID NO: 173541 - RNA, 32 nt, Homo Sapiens
cacucaacucauguuuggcauuuuaaaguaaa

SEQ ID NO: 173542 - RNA, 32 nt, Homo Sapiens
auuccccuuucugcaccucggaaaaauaccaa

SEQ ID NO: 173543 - RNA, 32 nt, Homo Sapiens
uacuuguuuguaaagcacuuugagauccuugg

SEQ ID NO: 173544 - RNA, 32 nt, Homo Sapiens
ugcguggagaguccaccuccaguguagagaca

SEQ ID NO: 173545 - RNA, 32 nt, Homo Sapiens
ugagcacugauauaaauuacggucuucuuuga

SEQ ID NO: 173546 - RNA, 32 nt, Homo Sapiens
uguuaaagguguuuuguuuucuuaauugauac

SEQ ID NO: 173547 - RNA, 32 nt, Homo Sapiens
gcccauucccccagcccuggcugaccuggccu

SEQ ID NO: 173548 - RNA, 32 nt, Homo Sapiens
acaaaucgugauuuugacuggugagacuucua

SEQ ID NO: 173549 - RNA, 32 nt, Homo Sapiens
aaccacgaugaccccuagcuuuguggccugaa

SEQ ID NO: 173550 - RNA, 32 nt, Homo Sapiens
gaaagauacucauucuuaauuccuauuuauca

SEQ ID NO: 173551 - RNA, 32 nt, Homo Sapiens
uagugaauuuaaaaguaucaucaaggguuuaa

SEQ ID NO: 173552 - RNA, 32 nt, Homo Sapiens
ccugcagcgcuccagcucuguuguguauggga

SEQ ID NO: 173553 - RNA, 32 nt, Homo Sapiens
ugaucucauucuuggacucuuggaccucucug

SEQ ID NO: 173554 - RNA, 32 nt, Homo Sapiens
ucaagagguucagcuauauuguauuugugcag

SEQ ID NO: 173555 - RNA, 32 nt, Homo Sapiens
caauggaguaacaauuuguuaaccuuacguuu

SEQ ID NO: 173556 - RNA, 32 nt, Homo Sapiens
uuucuuuuucuuucuuuuuuuuuuuuuuugag

SEQ ID NO: 173557 - RNA, 32 nt, Homo Sapiens
agaaggugaauauaaucaaugccaauguaaug

SEQ ID NO: 173558 - RNA, 32 nt, Homo Sapiens
cuccacccuggccgccuccucccaacuuucau

SEQ ID NO: 173559 - RNA, 32 nt, Homo Sapiens
agaggagggaggaggcgcgccgcgccauggug

SEQ ID NO: 173560 - RNA, 32 nt, Homo Sapiens
uggcccuuguguaacauugcaaaccuguggcu

SEQ ID NO: 173561 - RNA, 32 nt, Homo Sapiens
ucuggucugcaccguaccagcgcaugagggga

SEQ ID NO: 173562 - RNA, 32 nt, Homo Sapiens
gcagaucucgcgugcgcucgccgcccggcgca

SEQ ID NO: 173563 - RNA, 32 nt, Homo Sapiens
ccuggaugacauugcugagcugcugaguuaac

SEQ ID NO: 173564 - RNA, 32 nt, Homo Sapiens
auuggcugcaagggucucggcuuggccgcgga

SEQ ID NO: 173565 - RNA, 32 nt, Homo Sapiens
uauauuugacauuuauaaguuagaagauccau

SEQ ID NO: 173566 - RNA, 32 nt, Homo Sapiens
uaccuaacucuagcuuucuauacucaacagca

SEQ ID NO: 173567 - RNA, 32 nt, Homo Sapiens
ugccgggcccuucccuugcccgaggccggcug

SEQ ID NO: 173568 - RNA, 32 nt, Homo Sapiens
cccacagcagugcccuugucuuccuccaaaac

SEQ ID NO: 173569 - RNA, 32 nt, Homo Sapiens
ucccacacagaaagcaucuaaaauaaacacac

SEQ ID NO: 173570 - RNA, 32 nt, Homo Sapiens
uccuuugccuuuacccuauaccucucugcacg

SEQ ID NO: 173571 - RNA, 32 nt, Homo Sapiens
gauaagauuggcuugucucagggugggaagug

SEQ ID NO: 173572 - RNA, 32 nt, Homo Sapiens
auauguauuucuauguucuguaaaguauuuga

SEQ ID NO: 173573 - RNA, 32 nt, Homo Sapiens
acccccggucccagacccuccucccgccccca

SEQ ID NO: 173574 - RNA, 32 nt, Homo Sapiens
uggaucuuuucugcuuuuuuuaaguaacugag

SEQ ID NO: 173575 - RNA, 32 nt, Homo Sapiens
uugaugagggucuuggucuauaaacaggcaua

SEQ ID NO: 173576 - RNA, 32 nt, Homo Sapiens
uggccaacccaccuccagauuccccagugcuu

SEQ ID NO: 173577 - RNA, 32 nt, Homo Sapiens
ccucacaagcaucucuucuacugcauucuguu

SEQ ID NO: 173578 - RNA, 32 nt, Homo Sapiens
aguugccuuggcccggcguuugcuccacagcc

SEQ ID NO: 173579 - RNA, 32 nt, Homo Sapiens
uaaaaaagacugccauuucacugggcuaaguu

SEQ ID NO: 173580 - RNA, 32 nt, Homo Sapiens
ugugauccccaggagaagccacaggggaccau

SEQ ID NO: 173581 - RNA, 32 nt, Homo Sapiens
aagcucuuuccacagccacaucagucagggca

SEQ ID NO: 173582 - RNA, 32 nt, Homo Sapiens
uuuuuaaaguucccagaugauuauaauaugca

SEQ ID NO: 173583 - RNA, 32 nt, Homo Sapiens
agggugaguguagggcccgagguccaagccuc

SEQ ID NO: 173584 - RNA, 31 nt, Homo Sapiens
agaaaagcgggccagugugggaaugcggcaa

SEQ ID NO: 173585 - RNA, 32 nt, Homo Sapiens
ggggugaccuucuuggggacucgggggcuggu

SEQ ID NO: 173586 - RNA, 32 nt, Homo Sapiens
uguacaaagugcaaugugaauuuagggagaag

SEQ ID NO: 173587 - RNA, 32 nt, Homo Sapiens
ugccccccauuucccuucuccuagaccucguc

SEQ ID NO: 173588 - RNA, 32 nt, Homo Sapiens
auucuuaauucuucauugaguuugucaauagg

SEQ ID NO: 173589 - RNA, 32 nt, Homo Sapiens
gcgguguuuuuuuuuuuuuuuaagacaacaac

SEQ ID NO: 173590 - RNA, 32 nt, Homo Sapiens
gcgggaggggagagcggguguggauuugucuu

SEQ ID NO: 173591 - RNA, 32 nt, Homo Sapiens
ccaaggcagcgggugcuguuucccaggcgggg

SEQ ID NO: 173592 - RNA, 32 nt, Homo Sapiens
gaggugcagcuccagcagcaauggcagugacg

SEQ ID NO: 173593 - RNA, 32 nt, Homo Sapiens
auguaaaaucauacuauguauuuuugacauua

SEQ ID NO: 173594 - RNA, 32 nt, Homo Sapiens
ucagcucugccaagcugagccuggccaagcua

SEQ ID NO: 173595 - RNA, 32 nt, Homo Sapiens
ggugccugccccagccucucagguacuuggcc

SEQ ID NO: 173596 - RNA, 32 nt, Homo Sapiens
uuuagucgaagcuucucucuuaaacuucauca

SEQ ID NO: 173597 - RNA, 32 nt, Homo Sapiens
cuuguuaucugagcucuccuauauuaucauac

SEQ ID NO: 173598 - RNA, 32 nt, Homo Sapiens
aagcgcugcccagguccuggggugguggcagc

SEQ ID NO: 173599 - RNA, 32 nt, Homo Sapiens
uuggcccaggguaaucugcugagccuuugcuc

SEQ ID NO: 173600 - RNA, 32 nt, Homo Sapiens
guuuugccuuguuuaaaugaaaugcauguuua

SEQ ID NO: 173601 - RNA, 32 nt, Homo Sapiens
gcuaguuuaaaauuauuaaaaauuauagacuc

SEQ ID NO: 173602 - RNA, 32 nt, Homo Sapiens
acgaggaggacaggggcggggggcgggaggcu

SEQ ID NO: 173603 - RNA, 32 nt, Homo Sapiens
cugcuucccagcuguguggccucagggcagcu

SEQ ID NO: 173604 - RNA, 32 nt, Homo Sapiens
cuaguggccagaagcuucucuggugaaguuuu

SEQ ID NO: 173605 - RNA, 32 nt, Homo Sapiens
agcaauucaaagcagggacucacacagauauu

SEQ ID NO: 173606 - RNA, 32 nt, Homo Sapiens
gggaggccgaaacaggcgaaucacuugagccc

SEQ ID NO: 173607 - RNA, 32 nt, Homo Sapiens
uuuggcauucagugagacgcccugcacacaca

SEQ ID NO: 173608 - RNA, 32 nt, Homo Sapiens
gucaguuaaaacuguuagaucucuuuaguaaa

SEQ ID NO: 173609 - RNA, 32 nt, Homo Sapiens
ugagcuccccgucacccgccauggagccggcu

SEQ ID NO: 173610 - RNA, 32 nt, Homo Sapiens
acuauucccacuuugagcauuaaccccuuuga

SEQ ID NO: 173611 - RNA, 32 nt, Homo Sapiens
gccggccgcgcgcuggaugcugugauccaggu

SEQ ID NO: 173612 - RNA, 32 nt, Homo Sapiens
agacuuauuguaggaaguaauuuuaaaucuau

SEQ ID NO: 173613 - RNA, 32 nt, Homo Sapiens
ccacgaggagagaaaauuuaaaaaauaaaaau

SEQ ID NO: 173614 - RNA, 32 nt, Homo Sapiens
gcugccgugggaagagagcacuguggugaggu

SEQ ID NO: 173615 - RNA, 32 nt, Homo Sapiens
cugagcugggaggcuuccugcgcucagaccua

SEQ ID NO: 173616 - RNA, 32 nt, Homo Sapiens
gaaagcugccaaggcaccaucuccaggaacuc

SEQ ID NO: 173617 - RNA, 32 nt, Homo Sapiens
acccacuguguuucuuuuuauuuuauucacca

SEQ ID NO: 173618 - RNA, 32 nt, Homo Sapiens
agaaacucuguaauaccuggaaccucagauaa

SEQ ID NO: 173619 - RNA, 32 nt, Homo Sapiens
ugaaucugcaccucugccccagccccagcccu

SEQ ID NO: 173620 - RNA, 32 nt, Homo Sapiens
uuuauuaauaaucauguauuuuuacugaucac

SEQ ID NO: 173621 - RNA, 32 nt, Homo Sapiens
ccaucacccuccccagggcucugcaguuuucu

SEQ ID NO: 173622 - RNA, 31 nt, Homo Sapiens
uacagcagcucaugugacggauaugguggaa

SEQ ID NO: 173623 - RNA, 32 nt, Homo Sapiens
cauuccugccagcagguggcagcaggccucca

SEQ ID NO: 173624 - RNA, 32 nt, Homo Sapiens
ucauuugguuuaguuaaaugucuuacucuacu

SEQ ID NO: 173625 - RNA, 32 nt, Homo Sapiens
gaugguacugcuggcccaacacugcucucuuu

SEQ ID NO: 173626 - RNA, 32 nt, Homo Sapiens
uuaguuuacucugccuggauagaaaguugacc

SEQ ID NO: 173627 - RNA, 32 nt, Homo Sapiens
uccgcucgccugcccccacgccgcccgccacc

SEQ ID NO: 173628 - RNA, 32 nt, Homo Sapiens
cagaggacacgcugcaugggccccgcuugcgg

SEQ ID NO: 173629 - RNA, 32 nt, Homo Sapiens
cuaauaacauguuccuuggaacagaggaagaa

SEQ ID NO: 173630 - RNA, 32 nt, Homo Sapiens
auuggcccauauuuuuauguaaccuguuacaa

SEQ ID NO: 173631 - RNA, 32 nt, Homo Sapiens
uaugcucccaaaucauucuacugaugugcuug

SEQ ID NO: 173632 - RNA, 32 nt, Homo Sapiens
cccugcucuucccaaagcugcccccaaaucag

SEQ ID NO: 173633 - RNA, 32 nt, Homo Sapiens
guggcaauaaaguggaaguugccgucaaacag

SEQ ID NO: 173634 - RNA, 32 nt, Homo Sapiens
caucucaaucucauuuaauuugaaagagauaa

SEQ ID NO: 173635 - RNA, 32 nt, Homo Sapiens
uuuccgcggccgccgggggcgcggcggcagag

SEQ ID NO: 173636 - RNA, 32 nt, Homo Sapiens
ccccaccugcucuagauggaucuuugggccuu

SEQ ID NO: 173637 - RNA, 32 nt, Homo Sapiens
caccuuggaugggaaaagcaaccuggcuggug

SEQ ID NO: 173638 - RNA, 32 nt, Homo Sapiens
ggaggcaaaguuauuuccccucccaggcagcg

SEQ ID NO: 173639 - RNA, 32 nt, Homo Sapiens
ucagaguucaggcccagcagguccuggcaagu

SEQ ID NO: 173640 - RNA, 32 nt, Homo Sapiens
cuuaaccuauuuauuucuuuguuaaauuuuuc

SEQ ID NO: 173641 - RNA, 32 nt, Homo Sapiens
gcccacuugaaugcaaaggaaaacacuugcac

SEQ ID NO: 173642 - RNA, 32 nt, Homo Sapiens
ugcuacuuauauaaaaauuuuuaucaacacua

SEQ ID NO: 173643 - RNA, 32 nt, Homo Sapiens
agucaucuggggaucuuuuaaaaacccagcug

SEQ ID NO: 173644 - RNA, 32 nt, Homo Sapiens
guuguagucugacucuaucacccaggcuggag

SEQ ID NO: 173645 - RNA, 31 nt, Homo Sapiens
gaagauaaaaaugcuugaagagccugagagu

SEQ ID NO: 173646 - RNA, 32 nt, Homo Sapiens
ugagauuuuccggggggcgcucggcggcuucc

SEQ ID NO: 173647 - RNA, 32 nt, Homo Sapiens
uuuuuaaguaacuuuauaucagaaaugauacu

SEQ ID NO: 173648 - RNA, 32 nt, Homo Sapiens
ugaucaaagaauuuauagguguuuucaaaaca

SEQ ID NO: 173649 - RNA, 32 nt, Homo Sapiens
uucuaauuuuuccauaguuaaucuauaauuaa

SEQ ID NO: 173650 - RNA, 32 nt, Homo Sapiens
cugacuccggggccgaggcggcggcggcggca

SEQ ID NO: 173651 - RNA, 32 nt, Homo Sapiens
ucgucagacaguauagauguaaaauuuuggca

SEQ ID NO: 173652 - RNA, 32 nt, Homo Sapiens
uacuauugguuuuuuucuuaagcuucgagagu

SEQ ID NO: 173653 - RNA, 32 nt, Homo Sapiens
cuucuccauccugccauguccauccuccacag

SEQ ID NO: 173654 - RNA, 32 nt, Homo Sapiens
cggcggcggcgguggcagcggcggaaaccgaa

SEQ ID NO: 173655 - RNA, 32 nt, Homo Sapiens
uacugagccacagauaauacaagagcgucccc

SEQ ID NO: 173656 - RNA, 32 nt, Homo Sapiens
gugucuuaaggucuguuggaucuuucaaauuu

SEQ ID NO: 173657 - RNA, 32 nt, Homo Sapiens
cacccuccagcauguucucacccaacaaugac

SEQ ID NO: 173658 - RNA, 32 nt, Homo Sapiens
gaacuuguuaaaaauacauuuuaauuuaugau

SEQ ID NO: 173659 - RNA, 32 nt, Homo Sapiens
ucagcuuuccccagccccuccggccugggcug

SEQ ID NO: 173660 - RNA, 32 nt, Homo Sapiens
ccggggaggguggaaggccaggcguggggccc

SEQ ID NO: 173661 - RNA, 32 nt, Homo Sapiens
uuuaagccacuacuuuguuuaaacuuuuuuaa

SEQ ID NO: 173662 - RNA, 32 nt, Homo Sapiens
guuuacuacuccauguucugacauugggucua

SEQ ID NO: 173663 - RNA, 32 nt, Homo Sapiens
aaguuauccauaugucugcuaguuagauucaa

SEQ ID NO: 173664 - RNA, 32 nt, Homo Sapiens
gucgccugacaguuaaagcagaggacuacacu

SEQ ID NO: 173665 - RNA, 32 nt, Homo Sapiens
ggcaggguccagcccgccuggaucgguggugu

SEQ ID NO: 173666 - RNA, 29 nt, Homo Sapiens
ccucagcagaggauucggacacagaggac

SEQ ID NO: 173667 - RNA, 32 nt, Homo Sapiens
uccuugggaaaggccugcauucugauccuucc

SEQ ID NO: 173668 - RNA, 32 nt, Homo Sapiens
uuugucucagaugagacuuuggacuuggacuu

SEQ ID NO: 173669 - RNA, 32 nt, Homo Sapiens
cccagccccagccagggcucuaucucgggggg

SEQ ID NO: 173670 - RNA, 32 nt, Homo Sapiens
uucccggaggucggccgccguuacccgcucac

SEQ ID NO: 173671 - RNA, 32 nt, Homo Sapiens
uuuuugcuuuaaaaugcauaucuuuaauuggg

SEQ ID NO: 173672 - RNA, 32 nt, Homo Sapiens
auuuuguugucacagcacuacagugaaauaca

SEQ ID NO: 173673 - RNA, 32 nt, Homo Sapiens
ccucgucacccuucuccuuuuggggugagaga

SEQ ID NO: 173674 - RNA, 32 nt, Homo Sapiens
uuugagaaaagcaucugcaaaauacuaaagag

SEQ ID NO: 173675 - RNA, 32 nt, Homo Sapiens
acuauucugccaaugaaguacauccuggucac

SEQ ID NO: 173676 - RNA, 32 nt, Homo Sapiens
aaguauugaaaagaagagagauuagaacuguu

SEQ ID NO: 173677 - RNA, 32 nt, Homo Sapiens
cccaucccaagacuugaaaugucuguugcuca

SEQ ID NO: 173678 - RNA, 32 nt, Homo Sapiens
guuaaggaauaauuuggaggaaaagcguaaag

SEQ ID NO: 173679 - RNA, 32 nt, Homo Sapiens
aaucaccccagggagcuuguugccagagagug

SEQ ID NO: 173680 - RNA, 32 nt, Homo Sapiens
agagggaaucccaagcucuuaaugggcggggg

SEQ ID NO: 173681 - RNA, 32 nt, Homo Sapiens
gcucaucugggguuugcugggcuuacacccaa

SEQ ID NO: 173682 - RNA, 30 nt, Homo Sapiens
gagcgaugcugcugcuggcugccgccuucc

SEQ ID NO: 173683 - RNA, 32 nt, Homo Sapiens
cucuauauuuaugggaggaaaagugaagauua

SEQ ID NO: 173684 - RNA, 32 nt, Homo Sapiens
uaccugugacuacucccuggaccaauccugag

SEQ ID NO: 173685 - RNA, 32 nt, Homo Sapiens
cuucaggaaaggaaaccuaccauuggagagcu

SEQ ID NO: 173686 - RNA, 32 nt, Homo Sapiens
gggcguggcggcgcugugcgcgugcacaaaag

SEQ ID NO: 173687 - RNA, 32 nt, Homo Sapiens
uggagggagggagagccaauauacacuauggg

SEQ ID NO: 173688 - RNA, 32 nt, Homo Sapiens
gcuaagagauggaggaaccucagaaaagcuau

SEQ ID NO: 173689 - RNA, 32 nt, Homo Sapiens
ucauuauuccagcaaacacuuacugacaaauc

SEQ ID NO: 173690 - RNA, 32 nt, Homo Sapiens
uguaaaucugguuuuguuuuguuguuuuggau

SEQ ID NO: 173691 - RNA, 32 nt, Homo Sapiens
ccgccucccacccacugagggcaggagggcuu

SEQ ID NO: 173692 - RNA, 32 nt, Homo Sapiens
gaccguccuuguugaagcaguuaccuaguucc

SEQ ID NO: 173693 - RNA, 32 nt, Homo Sapiens
uugacaaaucauaauuauacacuuaugggggu

SEQ ID NO: 173694 - RNA, 31 nt, Homo Sapiens
uguaagaaaaauaaaguugucauucauucga

SEQ ID NO: 173695 - RNA, 32 nt, Homo Sapiens
aauagagucaucucauggugacagcagagccu

SEQ ID NO: 173696 - RNA, 32 nt, Homo Sapiens
aaauguuuucacucagaugaacaauuugacuu

SEQ ID NO: 173697 - RNA, 31 nt, Homo Sapiens
ggcccggggccccagacccuggcggcggcug

SEQ ID NO: 173698 - RNA, 32 nt, Homo Sapiens
ccaucuaccuuaaaucuguaccucugacaccc

SEQ ID NO: 173699 - RNA, 32 nt, Homo Sapiens
gagaaagaaaaaauagaugccucuucuucaag

SEQ ID NO: 173700 - RNA, 30 nt, Homo Sapiens
uuuauggggagguuugaugagcauuugccu

SEQ ID NO: 173701 - RNA, 32 nt, Homo Sapiens
gcuauucaaaacuugaaagagauacucgguau

SEQ ID NO: 173702 - RNA, 32 nt, Homo Sapiens
cugcgagggugcacggccggcccugggcaggc

SEQ ID NO: 173703 - RNA, 32 nt, Homo Sapiens
ucugcagccagcuugaauuucuccucaggaaa

SEQ ID NO: 173704 - RNA, 32 nt, Homo Sapiens
ccuuaguuauaauucuguguccccucugcaug

SEQ ID NO: 173705 - RNA, 32 nt, Homo Sapiens
gccacucccguccccacccccaccccagugug

SEQ ID NO: 173706 - RNA, 32 nt, Homo Sapiens
acucgcaagccucggcggcccggaaccggccu

SEQ ID NO: 173707 - RNA, 32 nt, Homo Sapiens
gggaggcacauggauuugaaccagagaccgcu

SEQ ID NO: 173708 - RNA, 32 nt, Homo Sapiens
agaauguuauuuagaccaaguuuagcuuuuag

SEQ ID NO: 173709 - RNA, 32 nt, Homo Sapiens
gacuuaccugaauaauuacuacauuagggaag

SEQ ID NO: 173710 - RNA, 32 nt, Homo Sapiens
uaaugcaucauucugcagagaagaguauuccu

SEQ ID NO: 173711 - RNA, 32 nt, Homo Sapiens
cagagccaaacacgagaggcucugugaggaug

SEQ ID NO: 173712 - RNA, 32 nt, Homo Sapiens
gccgggagaaugccacggggcgaacguucgug

SEQ ID NO: 173713 - RNA, 32 nt, Homo Sapiens
ccauguggauccacucuagugcuggagccagc

SEQ ID NO: 173714 - RNA, 32 nt, Homo Sapiens
aacugaguacccugaggccuuuuuggacagua

SEQ ID NO: 173715 - RNA, 32 nt, Homo Sapiens
cauauguucaccugcuuuccuguccguuggug

SEQ ID NO: 173716 - RNA, 32 nt, Homo Sapiens
cguggcugcucccagggcugcaccugccagga

SEQ ID NO: 173717 - RNA, 31 nt, Homo Sapiens
aacagggaacgagaaggagcugcuggaugac

SEQ ID NO: 173718 - RNA, 32 nt, Homo Sapiens
auucagcugaagauuuucuuuuaauagauggu

SEQ ID NO: 173719 - RNA, 32 nt, Homo Sapiens
uuaugagcccucacuagaaggcugaguuugac

SEQ ID NO: 173720 - RNA, 32 nt, Homo Sapiens
cgccuucguaauuauucuauuguuauuuauga

SEQ ID NO: 173721 - RNA, 32 nt, Homo Sapiens
gcccauuagggggcaguguuucccgccuguug

SEQ ID NO: 173722 - RNA, 29 nt, Homo Sapiens
aacaaggcggggcuggggacgccggucag

SEQ ID NO: 173723 - RNA, 32 nt, Homo Sapiens
aaaccuaucugguaucucuccucccuuuuccu

SEQ ID NO: 173724 - RNA, 32 nt, Homo Sapiens
uucuguaucucacuuuugauugcuguacauua

SEQ ID NO: 173725 - RNA, 32 nt, Homo Sapiens
cgaggagcagcagcgcucggcccggagcagca

SEQ ID NO: 173726 - RNA, 32 nt, Homo Sapiens
uggcacaagaucauggcuaaagacagagcaau

SEQ ID NO: 173727 - RNA, 27 nt, Homo Sapiens
ugucggggcuuucucagccccacccca

SEQ ID NO: 173728 - RNA, 32 nt, Homo Sapiens
auuguguaaaauguauuauuacauaaaaugug

SEQ ID NO: 173729 - RNA, 32 nt, Homo Sapiens
uaagaugaagcacaaagugcugggauuacagg
